United States Patent Application Publication US 2007/0042381 A1 - sequence listing, part 51

SEQ ID NO: 2295546 - RNA, 16 nt, Human
aguauuuuccuguaaa

SEQ ID NO: 2295547 - RNA, 17 nt, Human
aguauuuugguucuuag

SEQ ID NO: 2295548 - RNA, 18 nt, Human
aguauuuugguucuuagu

SEQ ID NO: 2295549 - RNA, 23 nt, Human
aguauuuugguucuuaguucuca

SEQ ID NO: 2295550 - RNA, 19 nt, Human
aguauuuucccugcuaggg

SEQ ID NO: 2295551 - RNA, 12 nt, Human
aguauuuuccug

SEQ ID NO: 2295552 - RNA, 14 nt, Human
aguauuuuccugua

SEQ ID NO: 2295553 - RNA, 17 nt, Human
aguauuuugcuggaaua

SEQ ID NO: 2295554 - RNA, 15 nt, Human
aguauuuauuuaaug

SEQ ID NO: 2295555 - RNA, 20 nt, Human
aguauuuauuuaauguuaug

SEQ ID NO: 2295556 - RNA, 23 nt, Human
aguauuuauauauuuauaacuca

SEQ ID NO: 2295557 - RNA, 20 nt, Human
aguauuuauauauuuauaac

SEQ ID NO: 2295558 - RNA, 19 nt, Human
aguauuuauauauuuauaa

SEQ ID NO: 2295559 - RNA, 17 nt, Human
aguauuuauauauuuau

SEQ ID NO: 2295560 - RNA, 14 nt, Human
aguauuugugggga

SEQ ID NO: 2295561 - RNA, 16 nt, Human
aguauuucaaauugga

SEQ ID NO: 2295562 - RNA, 16 nt, Human
aguauuuauauauuua

SEQ ID NO: 2295563 - RNA, 15 nt, Human
aguauuuauauauuu

SEQ ID NO: 2295564 - RNA, 14 nt, Human
aguauuuauauauu

SEQ ID NO: 2295565 - RNA, 13 nt, Human
aguauuuauauau

SEQ ID NO: 2295566 - RNA, 12 nt, Human
aguauuuauaua

SEQ ID NO: 2295567 - RNA, 19 nt, Human
aguauucuuauuuaaugaa

SEQ ID NO: 2295568 - RNA, 22 nt, Human
uguccaaacugccuaagcccuc

SEQ ID NO: 2295569 - RNA, 15 nt, Human
uguccaaacugccua

SEQ ID NO: 2295570 - RNA, 17 nt, Human
uguccaaacugccuaag

SEQ ID NO: 2295571 - RNA, 16 nt, Human
uguccaaaacugccuc

SEQ ID NO: 2295572 - RNA, 23 nt, Human
uguccaaaccaaccgcacaugca

SEQ ID NO: 2295573 - RNA, 15 nt, Human
uguccaaaacugccu

SEQ ID NO: 2295574 - RNA, 13 nt, Human
ugucagcaggaag

SEQ ID NO: 2295575 - RNA, 12 nt, Human
uguccaaagcag

SEQ ID NO: 2295576 - RNA, 17 nt, Human
uguccaaagcagggucu

SEQ ID NO: 2295577 - RNA, 18 nt, Human
uguccaaagcagggucug

SEQ ID NO: 2295578 - RNA, 19 nt, Human
uguccaaaggaggcuggca

SEQ ID NO: 2295579 - RNA, 18 nt, Human
uguccaacccgaggcccg

SEQ ID NO: 2295580 - RNA, 22 nt, Human
uguccaaccuaaccccuuuccu

SEQ ID NO: 2295581 - RNA, 15 nt, Human
uguccaaccuaaccc

SEQ ID NO: 2295582 - RNA, 19 nt, Human
uguccaaagcagggucugg

SEQ ID NO: 2295583 - RNA, 21 nt, Human
uguccaaccuaaccccuuucc

SEQ ID NO: 2295584 - RNA, 14 nt, Human
uguccaagaagccc

SEQ ID NO: 2295585 - RNA, 15 nt, Human
uguccaagaagccca

SEQ ID NO: 2295586 - RNA, 13 nt, Human
ugucagcaaaaag

SEQ ID NO: 2295587 - RNA, 14 nt, Human
ugucagcaaaaagc

SEQ ID NO: 2295588 - RNA, 18 nt, Human
ugucagcaaaaagcaaaa

SEQ ID NO: 2295589 - RNA, 19 nt, Human
ugucagcaaaaagcaaaau

SEQ ID NO: 2295590 - RNA, 22 nt, Human
ugucagcaaaaagcaaaaucau

SEQ ID NO: 2295591 - RNA, 23 nt, Human
ugucagcaaaaagcaaaaucauu

SEQ ID NO: 2295592 - RNA, 17 nt, Human
ugucagguggggcagcu

SEQ ID NO: 2295593 - RNA, 18 nt, Human
ugucagguggggcagcuu

SEQ ID NO: 2295594 - RNA, 20 nt, Human
ugucagguggggcagcuuga

SEQ ID NO: 2295595 - RNA, 20 nt, Human
ugucauuugagcagggcuca

SEQ ID NO: 2295596 - RNA, 21 nt, Human
ugucauuugagcagggcucag

SEQ ID NO: 2295597 - RNA, 22 nt, Human
ugucauuugagcagggcucagc

SEQ ID NO: 2295598 - RNA, 17 nt, Human
uguccaagugugugugc

SEQ ID NO: 2295599 - RNA, 14 nt, Human
uguccaaggaaacu

SEQ ID NO: 2295600 - RNA, 18 nt, Human
uguccaagugugugugcg

SEQ ID NO: 2295601 - RNA, 16 nt, Human
uguccaauucucuuua

SEQ ID NO: 2295602 - RNA, 14 nt, Human
uguccaauccuaug

SEQ ID NO: 2295603 - RNA, 12 nt, Human
uguccagacagc

SEQ ID NO: 2295604 - RNA, 23 nt, Human
uguccaauuguugacaguucuga

SEQ ID NO: 2295605 - RNA, 15 nt, Human
uguccacacccagcu

SEQ ID NO: 2295606 - RNA, 13 nt, Human
uguccagacagcc

SEQ ID NO: 2295607 - RNA, 14 nt, Human
uguccagacagccu

SEQ ID NO: 2295608 - RNA, 15 nt, Human
uguccagacagccug

SEQ ID NO: 2295609 - RNA, 23 nt, Human
uguccagagagagaagugccccu

SEQ ID NO: 2295610 - RNA, 21 nt, Human
uguccagagagcaacucugag

SEQ ID NO: 2295611 - RNA, 11 nt, Human
uguccagagag

SEQ ID NO: 2295612 - RNA, 16 nt, Human
uguccagacagccugu

SEQ ID NO: 2295613 - RNA, 17 nt, Human
uguccagacagccugua

SEQ ID NO: 2295614 - RNA, 12 nt, Human
uguccagccugg

SEQ ID NO: 2295615 - RNA, 16 nt, Human
uguccaagaagcccag

SEQ ID NO: 2295616 - RNA, 17 nt, Human
uguccaagaagcccagg

SEQ ID NO: 2295617 - RNA, 18 nt, Human
uguccaagaagcccagga

SEQ ID NO: 2295618 - RNA, 22 nt, Human
uguccaagaagcccaggaaagg

SEQ ID NO: 2295619 - RNA, 23 nt, Human
uguccagccugggcagccaggcu

SEQ ID NO: 2295620 - RNA, 22 nt, Human
uguccagccugggcagccaggc

SEQ ID NO: 2295621 - RNA, 19 nt, Human
uguccagccugggcagcca

SEQ ID NO: 2295622 - RNA, 14 nt, Human
uguccagccugggc

SEQ ID NO: 2295623 - RNA, 14 nt, Human
uguccagcgccuag

SEQ ID NO: 2295624 - RNA, 21 nt, Human
uguccccuccucacucccuuc

SEQ ID NO: 2295625 - RNA, 11 nt, Human
uguccccucuu

SEQ ID NO: 2295626 - RNA, 14 nt, Human
uguccccucuugac

SEQ ID NO: 2295627 - RNA, 14 nt, Human
uguccccucuugcc

SEQ ID NO: 2295628 - RNA, 15 nt, Human
uguccccucuugccc

SEQ ID NO: 2295629 - RNA, 11 nt, Human
uguccccuucu

SEQ ID NO: 2295630 - RNA, 14 nt, Human
uguccccuucucuc

SEQ ID NO: 2295631 - RNA, 16 nt, Human
uguccccuucucucau

SEQ ID NO: 2295632 - RNA, 20 nt, Human
uguccccuucucucaucucu

SEQ ID NO: 2295633 - RNA, 17 nt, Human
uguccccucuugcccca

SEQ ID NO: 2295634 - RNA, 21 nt, Human
uguccccucuugccccaaccc

SEQ ID NO: 2295635 - RNA, 19 nt, Human
ugucccgggguccuguggc

SEQ ID NO: 2295636 - RNA, 20 nt, Human
ugucccgggguccuguggca

SEQ ID NO: 2295637 - RNA, 21 nt, Human
ugucccgggguccuguggcag

SEQ ID NO: 2295638 - RNA, 16 nt, Human
ugucccgggguccugu

SEQ ID NO: 2295639 - RNA, 22 nt, Human
uguccccuucucucaucucuua

SEQ ID NO: 2295640 - RNA, 20 nt, Human
ugucccugcacuugcagacu

SEQ ID NO: 2295641 - RNA, 22 nt, Human
ugucccugcacuugcagacucu

SEQ ID NO: 2295642 - RNA, 23 nt, Human
ugucccugcacuugcagacucua

SEQ ID NO: 2295643 - RNA, 13 nt, Human
aguaaucugugua

SEQ ID NO: 2295644 - RNA, 19 nt, Human
aguaaucuguguacaaaga

SEQ ID NO: 2295645 - RNA, 19 nt, Human
aguaaucuaauauggccac

SEQ ID NO: 2295646 - RNA, 17 nt, Human
aguaaucgcuuaaagau

SEQ ID NO: 2295647 - RNA, 22 nt, Human
aguaaugaauuuuuaugauauu

SEQ ID NO: 2295648 - RNA, 21 nt, Human
aguaaugaauuuuuaugauau

SEQ ID NO: 2295649 - RNA, 12 nt, Human
aguaaugaauuu

SEQ ID NO: 2295650 - RNA, 13 nt, Human
aguaaugauaacu

SEQ ID NO: 2295651 - RNA, 20 nt, Human
aguaauugacaugugccagg

SEQ ID NO: 2295652 - RNA, 18 nt, Human
aguaauugacaugugcca

SEQ ID NO: 2295653 - RNA, 21 nt, Human
aguaaucuguguacaaagaaa

SEQ ID NO: 2295654 - RNA, 14 nt, Human
aguaauucucaggc

SEQ ID NO: 2295655 - RNA, 17 nt, Human
aguaauucugcugucuc

SEQ ID NO: 2295656 - RNA, 19 nt, Human
aguaauucaagaaaacaac

SEQ ID NO: 2295657 - RNA, 12 nt, Human
aguaauuggaaa

SEQ ID NO: 2295658 - RNA, 13 nt, Human
aguaauuggaaag

SEQ ID NO: 2295659 - RNA, 18 nt, Human
aguacaggcagcacagag

SEQ ID NO: 2295660 - RNA, 17 nt, Human
aguacaggcagcacaga

SEQ ID NO: 2295661 - RNA, 14 nt, Human
aguacaggcagcac

SEQ ID NO: 2295662 - RNA, 19 nt, Human
aguacauuuggagacacaa

SEQ ID NO: 2295663 - RNA, 22 nt, Human
aguaauuuauuguuuuuccuug

SEQ ID NO: 2295664 - RNA, 23 nt, Human
aguaauuuauuguuuuuccuugu

SEQ ID NO: 2295665 - RNA, 23 nt, Human
aguacacuguuucaaacuuuacu

SEQ ID NO: 2295666 - RNA, 13 nt, Human
aguaauuuauugu

SEQ ID NO: 2295667 - RNA, 19 nt, Human
aguaauuguugguuaucuu

SEQ ID NO: 2295668 - RNA, 21 nt, Human
aguacacuguuucaaacuuua

SEQ ID NO: 2295669 - RNA, 12 nt, Human
aguaauugugaa

SEQ ID NO: 2295670 - RNA, 22 nt, Human
aguaauugguccgaucuuugac

SEQ ID NO: 2295671 - RNA, 15 nt, Human
aguaauugugaaaaa

SEQ ID NO: 2295672 - RNA, 13 nt, Human
aguaauugugaaa

SEQ ID NO: 2295673 - RNA, 16 nt, Human
aguaauugugaaaaag

SEQ ID NO: 2295674 - RNA, 19 nt, Human
aguaaaaaacaacuucuuu

SEQ ID NO: 2295675 - RNA, 19 nt, Human
agguuuuuuuccuucugaa

SEQ ID NO: 2295676 - RNA, 23 nt, Human
aguaaaaacaaagaaauuaugug

SEQ ID NO: 2295677 - RNA, 22 nt, Human
agguuuuuuuguauaguaaagu

SEQ ID NO: 2295678 - RNA, 21 nt, Human
agguuuuuuuguauaguaaag

SEQ ID NO: 2295679 - RNA, 16 nt, Human
aguaaaaacaaagaaa

SEQ ID NO: 2295680 - RNA, 21 nt, Human
uguacauggaauaacauguaa

SEQ ID NO: 2295681 - RNA, 16 nt, Human
uguacaugagaaggaa

SEQ ID NO: 2295682 - RNA, 14 nt, Human
uguacaugcauuca

SEQ ID NO: 2295683 - RNA, 22 nt, Human
uguacaugaagaagcuaaaucc

SEQ ID NO: 2295684 - RNA, 17 nt, Human
uguacauggcagaguuu

SEQ ID NO: 2295685 - RNA, 19 nt, Human
uguacauggcagaguuugu

SEQ ID NO: 2295686 - RNA, 11 nt, Human
uguacaugugu

SEQ ID NO: 2295687 - RNA, 15 nt, Human
uguacauguguagcc

SEQ ID NO: 2295688 - RNA, 16 nt, Human
agguuuuuuuccuucu

SEQ ID NO: 2295689 - RNA, 18 nt, Human
agguuuuuuuccuucuga

SEQ ID NO: 2295690 - RNA, 17 nt, Human
aguaauaaacuguguuu

SEQ ID NO: 2295691 - RNA, 13 nt, Human
aguaauagagcaa

SEQ ID NO: 2295692 - RNA, 16 nt, Human
aguaauaaacuguguu

SEQ ID NO: 2295693 - RNA, 16 nt, Human
aguaagugccuuccau

SEQ ID NO: 2295694 - RNA, 13 nt, Human
aguaagugccuuc

SEQ ID NO: 2295695 - RNA, 15 nt, Human
aguaagugccuucca

SEQ ID NO: 2295696 - RNA, 23 nt, Human
aguaagugggguugcaaccacug

SEQ ID NO: 2295697 - RNA, 20 nt, Human
aguaaguaccacucaggcca

SEQ ID NO: 2295698 - RNA, 20 nt, Human
aguaaaaccacagcaguuga

SEQ ID NO: 2295699 - RNA, 19 nt, Human
aguaaaaccacagcaguug

SEQ ID NO: 2295700 - RNA, 17 nt, Human
aguaaaaccacagcagu

SEQ ID NO: 2295701 - RNA, 16 nt, Human
aguaaaaccacagcag

SEQ ID NO: 2295702 - RNA, 16 nt, Human
aguaccaaucauuuua

SEQ ID NO: 2295703 - RNA, 15 nt, Human
aguaccaaucauuuu

SEQ ID NO: 2295704 - RNA, 14 nt, Human
aguaccaaaugcuu

SEQ ID NO: 2295705 - RNA, 19 nt, Human
aguacaggcagcacagaga

SEQ ID NO: 2295706 - RNA, 23 nt, Human
aguaccauaguaccauuuauaca

SEQ ID NO: 2295707 - RNA, 21 nt, Human
aguaccauaguaccauuuaua

SEQ ID NO: 2295708 - RNA, 15 nt, Human
aguaccacucaggcc

SEQ ID NO: 2295709 - RNA, 19 nt, Human
aguaccauaguaccauuua

SEQ ID NO: 2295710 - RNA, 20 nt, Human
aguagcaguagaugcaugua

SEQ ID NO: 2295711 - RNA, 18 nt, Human
aguagcacccuggauuga

SEQ ID NO: 2295712 - RNA, 12 nt, Human
uguagggcugga

SEQ ID NO: 2295713 - RNA, 22 nt, Human
uguagggagggcggcaggggcc

SEQ ID NO: 2295714 - RNA, 19 nt, Human
aguagcauguugagccagg

SEQ ID NO: 2295715 - RNA, 23 nt, Human
aguagcaugagagaauuguauca

SEQ ID NO: 2295716 - RNA, 14 nt, Human
aguagcaugagaga

SEQ ID NO: 2295717 - RNA, 23 nt, Human
aguagauuuucuuuaaaagaaug

SEQ ID NO: 2295718 - RNA, 16 nt, Human
aguagcaaguucuaga

SEQ ID NO: 2295719 - RNA, 20 nt, Human
aguagcaaguucuagagaag

SEQ ID NO: 2295720 - RNA, 22 nt, Human
aguagcaaguucuagagaagag

SEQ ID NO: 2295721 - RNA, 15 nt, Human
aguagauuuuccaaa

SEQ ID NO: 2295722 - RNA, 13 nt, Human
aguagauuuucuu

SEQ ID NO: 2295723 - RNA, 16 nt, Human
aguagauuuucuuuaa

SEQ ID NO: 2295724 - RNA, 17 nt, Human
aguagauuuucuuuaaa

SEQ ID NO: 2295725 - RNA, 18 nt, Human
aguagauuuucuuuaaaa

SEQ ID NO: 2295726 - RNA, 20 nt, Human
aguagauuuucuuuaaaaga

SEQ ID NO: 2295727 - RNA, 21 nt, Human
aguagauuuucuuuaaaagaa

SEQ ID NO: 2295728 - RNA, 15 nt, Human
uguagguaucauuuu

SEQ ID NO: 2295729 - RNA, 15 nt, Human
uguagucccagccac

SEQ ID NO: 2295730 - RNA, 17 nt, Human
uguaggguuauaauaau

SEQ ID NO: 2295731 - RNA, 18 nt, Human
uguaggguaaggugccuu

SEQ ID NO: 2295732 - RNA, 19 nt, Human
uguaggggacgagaaagau

SEQ ID NO: 2295733 - RNA, 15 nt, Human
uguagggcuggaccu

SEQ ID NO: 2295734 - RNA, 16 nt, Human
uguagggcuggaccua

SEQ ID NO: 2295735 - RNA, 16 nt, Human
uguaggguuauaauaa

SEQ ID NO: 2295736 - RNA, 22 nt, Human
uguagugaaucacguaaagcua

SEQ ID NO: 2295737 - RNA, 14 nt, Human
uguagucucaggac

SEQ ID NO: 2295738 - RNA, 21 nt, Human
uguaguccucauaaaaagcaa

SEQ ID NO: 2295739 - RNA, 21 nt, Human
uguagugagauagcauuguga

SEQ ID NO: 2295740 - RNA, 17 nt, Human
uguagucccagcuacuc

SEQ ID NO: 2295741 - RNA, 14 nt, Human
uguagucccagcua

SEQ ID NO: 2295742 - RNA, 20 nt, Human
uguaguccgugcugacagcu

SEQ ID NO: 2295743 - RNA, 23 nt, Human
uguaguccuagccacucaggagg

SEQ ID NO: 2295744 - RNA, 17 nt, Human
uguaguccucauaaaaa

SEQ ID NO: 2295745 - RNA, 22 nt, Human
uguaguccgugcugacagcugc

SEQ ID NO: 2295746 - RNA, 16 nt, Human
uguaguguuggagaag

SEQ ID NO: 2295747 - RNA, 17 nt, Human
uguauauacaauaacau

SEQ ID NO: 2295748 - RNA, 18 nt, Human
uguauaguugcuugccug

SEQ ID NO: 2295749 - RNA, 22 nt, Human
uguauauacauuuaugaauuaa

SEQ ID NO: 2295750 - RNA, 18 nt, Human
uguauauacaauaacaua

SEQ ID NO: 2295751 - RNA, 16 nt, Human
uguauauacaauaaca

SEQ ID NO: 2295752 - RNA, 15 nt, Human
uguauauacaauaac

SEQ ID NO: 2295753 - RNA, 21 nt, Human
uguauaguuguggacauuuaa

SEQ ID NO: 2295754 - RNA, 19 nt, Human
uguauauaaaauauuuuca

SEQ ID NO: 2295755 - RNA, 20 nt, Human
uguauaguuaggauagcauu

SEQ ID NO: 2295756 - RNA, 13 nt, Human
uguauaguugcuu

SEQ ID NO: 2295757 - RNA, 14 nt, Human
uguauaguucacgu

SEQ ID NO: 2295758 - RNA, 14 nt, Human
uguauaguugcuug

SEQ ID NO: 2295759 - RNA, 16 nt, Human
uguauaguugcuugcc

SEQ ID NO: 2295760 - RNA, 22 nt, Human
uguauaguugcuugccugauau

SEQ ID NO: 2295761 - RNA, 17 nt, Human
uguagugagauagcauu

SEQ ID NO: 2295762 - RNA, 15 nt, Human
uguauaguguaaaau

SEQ ID NO: 2295763 - RNA, 16 nt, Human
uguauaguguaaaaua

SEQ ID NO: 2295764 - RNA, 24 nt, Human
uguauaguguaaaauaagaaugau

SEQ ID NO: 2295765 - RNA, 17 nt, Human
uguaguguuggagaaga

SEQ ID NO: 2295766 - RNA, 18 nt, Human
uguaguguuggagaagaa

SEQ ID NO: 2295767 - RNA, 22 nt, Human
uguauauauuuccuauauuguu

SEQ ID NO: 2295768 - RNA, 15 nt, Human
uguauauaugugugu

SEQ ID NO: 2295769 - RNA, 18 nt, Human
uguauauauguguguuua

SEQ ID NO: 2295770 - RNA, 19 nt, Human
uguauauauguguguuuaa

SEQ ID NO: 2295771 - RNA, 20 nt, Human
uguauauauguguguuuaaa

SEQ ID NO: 2295772 - RNA, 18 nt, Human
uguauauccuuucuaaca

SEQ ID NO: 2295773 - RNA, 13 nt, Human
uguauaucagaaa

SEQ ID NO: 2295774 - RNA, 14 nt, Human
uguauaucagaaaa

SEQ ID NO: 2295775 - RNA, 18 nt, Human
uguauaucagaaaaggga

SEQ ID NO: 2295776 - RNA, 17 nt, Human
uguauauauauuaagag

SEQ ID NO: 2295777 - RNA, 13 nt, Human
uguauauacuuuu

SEQ ID NO: 2295778 - RNA, 12 nt, Human
uguauauacuuu

SEQ ID NO: 2295779 - RNA, 17 nt, Human
uguauauacgcaucuau

SEQ ID NO: 2295780 - RNA, 21 nt, Human
uguauauacgcaucuauaaau

SEQ ID NO: 2295781 - RNA, 18 nt, Human
uguauauauuuccuauau

SEQ ID NO: 2295782 - RNA, 17 nt, Human
uguauauaucugcuuca

SEQ ID NO: 2295783 - RNA, 12 nt, Human
uguauauaugug

SEQ ID NO: 2295784 - RNA, 14 nt, Human
uguauauaugugug

SEQ ID NO: 2295785 - RNA, 13 nt, Human
uguauauaugugu

SEQ ID NO: 2295786 - RNA, 23 nt, Human
agguugaagccaaguggggugcu

SEQ ID NO: 2295787 - RNA, 12 nt, Human
agguugaagagg

SEQ ID NO: 2295788 - RNA, 12 nt, Human
agguugaagcca

SEQ ID NO: 2295789 - RNA, 13 nt, Human
agguugaagccaa

SEQ ID NO: 2295790 - RNA, 15 nt, Human
agguugaagccaagu

SEQ ID NO: 2295791 - RNA, 17 nt, Human
agguugcugguugcugu

SEQ ID NO: 2295792 - RNA, 24 nt, Human
agguugcugguugcugugugguuu

SEQ ID NO: 2295793 - RNA, 17 nt, Human
agguugcagugagcuga

SEQ ID NO: 2295794 - RNA, 18 nt, Human
agguugcagugagccaag

SEQ ID NO: 2295795 - RNA, 19 nt, Human
agguugcagugagccaaga

SEQ ID NO: 2295796 - RNA, 14 nt, Human
agguugcagugagc

SEQ ID NO: 2295797 - RNA, 14 nt, Human
agguugaagcacca

SEQ ID NO: 2295798 - RNA, 16 nt, Human
agguucuucuuccuga

SEQ ID NO: 2295799 - RNA, 23 nt, Human
agguucuucccuuuuacauacug

SEQ ID NO: 2295800 - RNA, 23 nt, Human
agguucuucuuccugaagcugag

SEQ ID NO: 2295801 - RNA, 19 nt, Human
agguucuucuuccugaagc

SEQ ID NO: 2295802 - RNA, 21 nt, Human
agguucuucuuccugaagcug

SEQ ID NO: 2295803 - RNA, 12 nt, Human
agguugaaagac

SEQ ID NO: 2295804 - RNA, 19 nt, Human
agguucuucccuuuuacau

SEQ ID NO: 2295805 - RNA, 14 nt, Human
aggugugcaagaga

SEQ ID NO: 2295806 - RNA, 12 nt, Human
aggugugcucug

SEQ ID NO: 2295807 - RNA, 20 nt, Human
aggugggcugagcccuggca

SEQ ID NO: 2295808 - RNA, 22 nt, Human
aggugggcgggcagcacagcaa

SEQ ID NO: 2295809 - RNA, 19 nt, Human
aggugggcugagcccuggc

SEQ ID NO: 2295810 - RNA, 18 nt, Human
aggugggcugagcccugg

SEQ ID NO: 2295811 - RNA, 15 nt, Human
aggugggcuucccag

SEQ ID NO: 2295812 - RNA, 21 nt, Human
aggugggcuucccaguggcug

SEQ ID NO: 2295813 - RNA, 18 nt, Human
agguggggagacugggcu

SEQ ID NO: 2295814 - RNA, 13 nt, Human
agguggggacagg

SEQ ID NO: 2295815 - RNA, 14 nt, Human
agguggggacaggg

SEQ ID NO: 2295816 - RNA, 17 nt, Human
aggugucauuuccauua

SEQ ID NO: 2295817 - RNA, 15 nt, Human
aggugucauuuccau

SEQ ID NO: 2295818 - RNA, 21 nt, Human
aggugucauacagauuugcaa

SEQ ID NO: 2295819 - RNA, 15 nt, Human
aggugucauacagau

SEQ ID NO: 2295820 - RNA, 20 nt, Human
agguguauggagagaaaaca

SEQ ID NO: 2295821 - RNA, 17 nt, Human
agguggggacagggaug

SEQ ID NO: 2295822 - RNA, 17 nt, Human
aggugucaggcugcugg

SEQ ID NO: 2295823 - RNA, 18 nt, Human
aggugucaggcugcuggc

SEQ ID NO: 2295824 - RNA, 19 nt, Human
aggugucaggcugcuggcg

SEQ ID NO: 2295825 - RNA, 16 nt, Human
aggugucccugcacuu

SEQ ID NO: 2295826 - RNA, 20 nt, Human
aggugucccugcacuugcag

SEQ ID NO: 2295827 - RNA, 21 nt, Human
aggugugagucaccaagccca

SEQ ID NO: 2295828 - RNA, 22 nt, Human
aggugugagucaccaagcccag

SEQ ID NO: 2295829 - RNA, 22 nt, Human
aggugggcguggucacugcugu

SEQ ID NO: 2295830 - RNA, 15 nt, Human
aggugggcugagccc

SEQ ID NO: 2295831 - RNA, 17 nt, Human
aggugggcugagcccug

SEQ ID NO: 2295832 - RNA, 16 nt, Human
aggugggcugagcccu

SEQ ID NO: 2295833 - RNA, 22 nt, Human
aggugggccuugcuaccucaag

SEQ ID NO: 2295834 - RNA, 21 nt, Human
aggugggccuugcuaccucaa

SEQ ID NO: 2295835 - RNA, 19 nt, Human
aggugggccuugcuaccuc

SEQ ID NO: 2295836 - RNA, 15 nt, Human
aggugggccuugcua

SEQ ID NO: 2295837 - RNA, 16 nt, Human
aggugggcgggcagca

SEQ ID NO: 2295838 - RNA, 18 nt, Human
aggugggcgggcagcaca

SEQ ID NO: 2295839 - RNA, 19 nt, Human
aggugggcgggcagcacag

SEQ ID NO: 2295840 - RNA, 20 nt, Human
aggugggcgggcagcacagc

SEQ ID NO: 2295841 - RNA, 13 nt, Human
aggugggagcuug

SEQ ID NO: 2295842 - RNA, 20 nt, Human
aggugggagcaggagauuga

SEQ ID NO: 2295843 - RNA, 12 nt, Human
aggugggaggau

SEQ ID NO: 2295844 - RNA, 23 nt, Human
aggugcuaaauggucgcccagga

SEQ ID NO: 2295845 - RNA, 23 nt, Human
aggugccuuggagggucccaagc

SEQ ID NO: 2295846 - RNA, 22 nt, Human
aggugccuucuuauucucacuc

SEQ ID NO: 2295847 - RNA, 10 nt, Human
aggugccuug

SEQ ID NO: 2295848 - RNA, 13 nt, Human
aggugccuucuua

SEQ ID NO: 2295849 - RNA, 21 nt, Human
aggugccugugaggcaggggc

SEQ ID NO: 2295850 - RNA, 16 nt, Human
aggugcuacaaaaaca

SEQ ID NO: 2295851 - RNA, 23 nt, Human
agguggcugacccagucccuggg

SEQ ID NO: 2295852 - RNA, 14 nt, Human
agguggcugagccc

SEQ ID NO: 2295853 - RNA, 17 nt, Human
agguggcugagccccug

SEQ ID NO: 2295854 - RNA, 15 nt, Human
agguggcugagcccc

SEQ ID NO: 2295855 - RNA, 21 nt, Human
aggugccuuggagggucccaa

SEQ ID NO: 2295856 - RNA, 23 nt, Human
aggugggaaaugguaugagcuga

SEQ ID NO: 2295857 - RNA, 19 nt, Human
agguggcugagccccuguc

SEQ ID NO: 2295858 - RNA, 13 nt, Human
aggugggagcagg

SEQ ID NO: 2295859 - RNA, 14 nt, Human
aggugggagcagga

SEQ ID NO: 2295860 - RNA, 15 nt, Human
aggugggagcaggag

SEQ ID NO: 2295861 - RNA, 16 nt, Human
aggugggagcaggaga

SEQ ID NO: 2295862 - RNA, 17 nt, Human
aggugggagcaggagau

SEQ ID NO: 2295863 - RNA, 16 nt, Human
ugggcugccaugugaa

SEQ ID NO: 2295864 - RNA, 21 nt, Human
ugggcugcagcagaggcacug

SEQ ID NO: 2295865 - RNA, 21 nt, Human
ugggcugcacucugugcccau

SEQ ID NO: 2295866 - RNA, 22 nt, Human
ugggcugcacucugugcccaug

SEQ ID NO: 2295867 - RNA, 17 nt, Human
ugggcugcacucugugc

SEQ ID NO: 2295868 - RNA, 18 nt, Human
ugggcugcacucugugcc

SEQ ID NO: 2295869 - RNA, 19 nt, Human
ugggcugcacucugugccc

SEQ ID NO: 2295870 - RNA, 20 nt, Human
ugggcugcacucugugccca

SEQ ID NO: 2295871 - RNA, 13 nt, Human
ugggcugcccugg

SEQ ID NO: 2295872 - RNA, 14 nt, Human
ugggcugcccuggu

SEQ ID NO: 2295873 - RNA, 23 nt, Human
aggugccuucuuauucucacucc

SEQ ID NO: 2295874 - RNA, 22 nt, Human
aggugccugugaggcaggggcg

SEQ ID NO: 2295875 - RNA, 20 nt, Human
aggugccugugaggcagggg

SEQ ID NO: 2295876 - RNA, 19 nt, Human
aggugccugugaggcaggg

SEQ ID NO: 2295877 - RNA, 15 nt, Human
ugggcugcccuggug

SEQ ID NO: 2295878 - RNA, 18 nt, Human
aggugccugugaggcagg

SEQ ID NO: 2295879 - RNA, 19 nt, Human
ugggcucugccccagcucu

SEQ ID NO: 2295880 - RNA, 17 nt, Human
ugggcucugccccagcu

SEQ ID NO: 2295881 - RNA, 15 nt, Human
ugggcucugccccag

SEQ ID NO: 2295882 - RNA, 12 nt, Human
ugggcucugccc

SEQ ID NO: 2295883 - RNA, 20 nt, Human
ugggcucugcaauuccccuc

SEQ ID NO: 2295884 - RNA, 22 nt, Human
ugggcucugcaauuccccucug

SEQ ID NO: 2295885 - RNA, 13 nt, Human
ugggcucugccac

SEQ ID NO: 2295886 - RNA, 15 nt, Human
ugggcucugccaccc

SEQ ID NO: 2295887 - RNA, 18 nt, Human
ugggcucugccacccuac

SEQ ID NO: 2295888 - RNA, 21 nt, Human
ugggcucugccccagcucugg

SEQ ID NO: 2295889 - RNA, 20 nt, Human
ugggcucugccccagcucug

SEQ ID NO: 2295890 - RNA, 23 nt, Human
ugggcucugccccagcucuggcu

SEQ ID NO: 2295891 - RNA, 14 nt, Human
ugggcucugggagc

SEQ ID NO: 2295892 - RNA, 11 nt, Human
ugggcugaggg

SEQ ID NO: 2295893 - RNA, 15 nt, Human
ugggcucugggagca

SEQ ID NO: 2295894 - RNA, 16 nt, Human
ugggcugagggagccu

SEQ ID NO: 2295895 - RNA, 12 nt, Human
ugggcugaggga

SEQ ID NO: 2295896 - RNA, 15 nt, Human
agguuucugaaaauu

SEQ ID NO: 2295897 - RNA, 23 nt, Human
agguuucugaaaauuaacacugc

SEQ ID NO: 2295898 - RNA, 21 nt, Human
agguuucugaguuccugcaug

SEQ ID NO: 2295899 - RNA, 19 nt, Human
agguuucugaguuccugca

SEQ ID NO: 2295900 - RNA, 18 nt, Human
agguuucuggucucuagg

SEQ ID NO: 2295901 - RNA, 18 nt, Human
uguaagggaaacugccag

SEQ ID NO: 2295902 - RNA, 13 nt, Human
uguaagggaaacu

SEQ ID NO: 2295903 - RNA, 14 nt, Human
agguuucugaaaau

SEQ ID NO: 2295904 - RNA, 17 nt, Human
agguuucguuucuguau

SEQ ID NO: 2295905 - RNA, 12 nt, Human
agguuucauacu

SEQ ID NO: 2295906 - RNA, 21 nt, Human
agguuucauacucuagauuuu

SEQ ID NO: 2295907 - RNA, 20 nt, Human
agguuggcaaaaaggcagga

SEQ ID NO: 2295908 - RNA, 18 nt, Human
agguuggaagcuagcucc

SEQ ID NO: 2295909 - RNA, 19 nt, Human
agguuggaagcuagcuccc

SEQ ID NO: 2295910 - RNA, 18 nt, Human
uguaauuaaguacuaugu

SEQ ID NO: 2295911 - RNA, 19 nt, Human
uguaagggaaacugccagc

SEQ ID NO: 2295912 - RNA, 21 nt, Human
uguaauuaaguacuauguauc

SEQ ID NO: 2295913 - RNA, 19 nt, Human
uguaauuaaguacuaugua

SEQ ID NO: 2295914 - RNA, 15 nt, Human
uguaauugaauaaag

SEQ ID NO: 2295915 - RNA, 15 nt, Human
uguaauucuaaauga

SEQ ID NO: 2295916 - RNA, 16 nt, Human
uguaauucuaaaugaa

SEQ ID NO: 2295917 - RNA, 14 nt, Human
uguaauugcuuaca

SEQ ID NO: 2295918 - RNA, 15 nt, Human
uguaauugcuuacau

SEQ ID NO: 2295919 - RNA, 16 nt, Human
uguaauugcuuacauu

SEQ ID NO: 2295920 - RNA, 17 nt, Human
uguaauugcuuacauuu

SEQ ID NO: 2295921 - RNA, 18 nt, Human
uguaauugcuuacauuuu

SEQ ID NO: 2295922 - RNA, 23 nt, Human
uguaauugcuuacauuuuuacaa

SEQ ID NO: 2295923 - RNA, 13 nt, Human
uguaauucuaaau

SEQ ID NO: 2295924 - RNA, 14 nt, Human
uguaauucuaaaug

SEQ ID NO: 2295925 - RNA, 15 nt, Human
uguaauuccuaccuc

SEQ ID NO: 2295926 - RNA, 21 nt, Human
uguaauuccuaccucccugca

SEQ ID NO: 2295927 - RNA, 12 nt, Human
uguacaguuuuu

SEQ ID NO: 2295928 - RNA, 15 nt, Human
uguacauaacugaaa

SEQ ID NO: 2295929 - RNA, 14 nt, Human
uguacauaacugaa

SEQ ID NO: 2295930 - RNA, 13 nt, Human
uguacauaacuga

SEQ ID NO: 2295931 - RNA, 17 nt, Human
uguacaaaauaaacaaa

SEQ ID NO: 2295932 - RNA, 20 nt, Human
uguacauaaugcgugcauac

SEQ ID NO: 2295933 - RNA, 19 nt, Human
uguacauaaugcgugcaua

SEQ ID NO: 2295934 - RNA, 13 nt, Human
uguacaaaauaaa

SEQ ID NO: 2295935 - RNA, 20 nt, Human
uguaauuuuuuuaucgucac

SEQ ID NO: 2295936 - RNA, 16 nt, Human
uguaauuguuguuugu

SEQ ID NO: 2295937 - RNA, 23 nt, Human
uguaauuuuguucuaguuuucag

SEQ ID NO: 2295938 - RNA, 19 nt, Human
uguacauaacugaaaaugu

SEQ ID NO: 2295939 - RNA, 18 nt, Human
uguacauaacugaaaaug

SEQ ID NO: 2295940 - RNA, 17 nt, Human
uguacauaacugaaaau

SEQ ID NO: 2295941 - RNA, 21 nt, Human
uguacauacccuggccgcccc

SEQ ID NO: 2295942 - RNA, 18 nt, Human
uguacauaguuauuuauu

SEQ ID NO: 2295943 - RNA, 23 nt, Human
uguacauagccuauauuuacagu

SEQ ID NO: 2295944 - RNA, 11 nt, Human
uguacauagcc

SEQ ID NO: 2295945 - RNA, 15 nt, Human
uguacauagccuaua

SEQ ID NO: 2295946 - RNA, 16 nt, Human
uguacauagccuauau

SEQ ID NO: 2295947 - RNA, 22 nt, Human
uguacauagccuauauuuacag

SEQ ID NO: 2295948 - RNA, 14 nt, Human
uguacaucuggccu

SEQ ID NO: 2295949 - RNA, 23 nt, Human
uguacaucuauuuuggauuguau

SEQ ID NO: 2295950 - RNA, 16 nt, Human
uguacaugaaaacaca

SEQ ID NO: 2295951 - RNA, 14 nt, Human
uguacaugaaaaca

SEQ ID NO: 2295952 - RNA, 21 nt, Human
uguacaucuauuuuggauugu

SEQ ID NO: 2295953 - RNA, 20 nt, Human
uguacaucuauuuuggauug

SEQ ID NO: 2295954 - RNA, 19 nt, Human
uguacaucuauuuuggauu

SEQ ID NO: 2295955 - RNA, 18 nt, Human
uguacaucuauuuuggau

SEQ ID NO: 2295956 - RNA, 19 nt, Human
ugggcaaugauggcaauuu

SEQ ID NO: 2295957 - RNA, 16 nt, Human
ugggcacacgccuccc

SEQ ID NO: 2295958 - RNA, 21 nt, Human
ugggcacacgccucccacugg

SEQ ID NO: 2295959 - RNA, 13 nt, Human
ugggcagaaggaa

SEQ ID NO: 2295960 - RNA, 16 nt, Human
ugggcaauauagcaag

SEQ ID NO: 2295961 - RNA, 15 nt, Human
ugggcaauauagcaa

SEQ ID NO: 2295962 - RNA, 15 nt, Human
ugggcaagugauuga

SEQ ID NO: 2295963 - RNA, 23 nt, Human
ugggcagaaggaagacuucaucc

SEQ ID NO: 2295964 - RNA, 16 nt, Human
ugggcagaaggaagac

SEQ ID NO: 2295965 - RNA, 20 nt, Human
ugggcagaaggaagacuuca

SEQ ID NO: 2295966 - RNA, 12 nt, Human
ugggagggccca

SEQ ID NO: 2295967 - RNA, 11 nt, Human
ugggaggggca

SEQ ID NO: 2295968 - RNA, 12 nt, Human
ugggaggggcag

SEQ ID NO: 2295969 - RNA, 14 nt, Human
ugggaggggcaggc

SEQ ID NO: 2295970 - RNA, 15 nt, Human
ugggaggggcaggcu

SEQ ID NO: 2295971 - RNA, 16 nt, Human
ugggaggggcaggcug

SEQ ID NO: 2295972 - RNA, 17 nt, Human
ugggaggggcaggcuga

SEQ ID NO: 2295973 - RNA, 18 nt, Human
ugggaggggcaggcugac

SEQ ID NO: 2295974 - RNA, 19 nt, Human
ugggagggcagcagggcua

SEQ ID NO: 2295975 - RNA, 18 nt, Human
ugggagggcagcagggcu

SEQ ID NO: 2295976 - RNA, 17 nt, Human
ugggagggcagcagggc

SEQ ID NO: 2295977 - RNA, 14 nt, Human
ugggagggcagcag

SEQ ID NO: 2295978 - RNA, 16 nt, Human
ugggauuuggucaaca

SEQ ID NO: 2295979 - RNA, 20 nt, Human
ugggaggggcgcccaccucc

SEQ ID NO: 2295980 - RNA, 15 nt, Human
ugggcaaaaaacucg

SEQ ID NO: 2295981 - RNA, 16 nt, Human
ugggcaaaaaacucga

SEQ ID NO: 2295982 - RNA, 23 nt, Human
ugggagggggcuugaagccaaag

SEQ ID NO: 2295983 - RNA, 19 nt, Human
ugggaggggcaggcugaca

SEQ ID NO: 2295984 - RNA, 19 nt, Human
ugggaggggcgcccaccuc

SEQ ID NO: 2295985 - RNA, 23 nt, Human
ugggaggggcgcccaccucccca

SEQ ID NO: 2295986 - RNA, 14 nt, Human
ugggcaacagagca

SEQ ID NO: 2295987 - RNA, 12 nt, Human
ugggcaacagag

SEQ ID NO: 2295988 - RNA, 21 nt, Human
ugggcaaagccuagugaaggc

SEQ ID NO: 2295989 - RNA, 15 nt, Human
ugggcaaagccuagu

SEQ ID NO: 2295990 - RNA, 16 nt, Human
ugggcaaacaggcagu

SEQ ID NO: 2295991 - RNA, 15 nt, Human
ugggcaaacaggcag

SEQ ID NO: 2295992 - RNA, 14 nt, Human
ugggcaaacaggca

SEQ ID NO: 2295993 - RNA, 22 nt, Human
ugggcaaaacugaauuauaaga

SEQ ID NO: 2295994 - RNA, 16 nt, Human
ugggcaacagagcaag

SEQ ID NO: 2295995 - RNA, 15 nt, Human
ugggcaaagagugua

SEQ ID NO: 2295996 - RNA, 16 nt, Human
ugggcaacauugcugg

SEQ ID NO: 2295997 - RNA, 14 nt, Human
ugggcaaggaggcc

SEQ ID NO: 2295998 - RNA, 21 nt, Human
ugggcaacccccagccugcua

SEQ ID NO: 2295999 - RNA, 22 nt, Human
ugggaggcucacccccuucucc

SEQ ID NO: 2296000 - RNA, 20 nt, Human
ugggaggcucacccccuucu

SEQ ID NO: 2296001 - RNA, 14 nt, Human
ugggaggcucugga

SEQ ID NO: 2296002 - RNA, 17 nt, Human
ugggaggcucuggagcc

SEQ ID NO: 2296003 - RNA, 23 nt, Human
ugggaggcucuggagcccacugu

SEQ ID NO: 2296004 - RNA, 18 nt, Human
ugggagggauagaggggg

SEQ ID NO: 2296005 - RNA, 22 nt, Human
ugggagggaggcucaggucccu

SEQ ID NO: 2296006 - RNA, 17 nt, Human
ugggagggaggcucagg

SEQ ID NO: 2296007 - RNA, 16 nt, Human
ugggagggaggcucag

SEQ ID NO: 2296008 - RNA, 14 nt, Human
ugggaggcuucccc

SEQ ID NO: 2296009 - RNA, 17 nt, Human
ugggagggagcagacag

SEQ ID NO: 2296010 - RNA, 18 nt, Human
ugggagggagcagacagg

SEQ ID NO: 2296011 - RNA, 19 nt, Human
ugggagggagcagacagga

SEQ ID NO: 2296012 - RNA, 15 nt, Human
ugggaggcugaggcg

SEQ ID NO: 2296013 - RNA, 14 nt, Human
ugggaggcugaggc

SEQ ID NO: 2296014 - RNA, 13 nt, Human
ugggaggcugagg

SEQ ID NO: 2296015 - RNA, 11 nt, Human
ugggaggcuga

SEQ ID NO: 2296016 - RNA, 19 nt, Human
ugggaggcugagaugggag

SEQ ID NO: 2296017 - RNA, 21 nt, Human
ugggaggauugcuugagcuca

SEQ ID NO: 2296018 - RNA, 18 nt, Human
ugggaggauugcuugagc

SEQ ID NO: 2296019 - RNA, 20 nt, Human
ugggaggauucuaugaggca

SEQ ID NO: 2296020 - RNA, 14 nt, Human
ugggaggcgcgagc

SEQ ID NO: 2296021 - RNA, 13 nt, Human
ugggaggcucacc

SEQ ID NO: 2296022 - RNA, 22 nt, Human
ugggaggcggagaguacaguga

SEQ ID NO: 2296023 - RNA, 17 nt, Human
ugggaggcgggagugga

SEQ ID NO: 2296024 - RNA, 22 nt, Human
ugggaggauugcuugagcucag

SEQ ID NO: 2296025 - RNA, 16 nt, Human
ugggagaaaugaaaaa

SEQ ID NO: 2296026 - RNA, 18 nt, Human
ugggagaaauugacagau

SEQ ID NO: 2296027 - RNA, 19 nt, Human
ugggagaaauugacagauc

SEQ ID NO: 2296028 - RNA, 18 nt, Human
ugggacuucuuuucacau

SEQ ID NO: 2296029 - RNA, 20 nt, Human
ugggacuucuuuucacauuc

SEQ ID NO: 2296030 - RNA, 21 nt, Human
ugggacuucuuuucacauucu

SEQ ID NO: 2296031 - RNA, 22 nt, Human
ugggacuucuuuucacauucuu

SEQ ID NO: 2296032 - RNA, 21 nt, Human
ugggagaaccaaaaagaggcu

SEQ ID NO: 2296033 - RNA, 22 nt, Human
agggagcggccggccagccccu

SEQ ID NO: 2296034 - RNA, 21 nt, Human
agggagcggccggccagcccc

SEQ ID NO: 2296035 - RNA, 18 nt, Human
ugggacuacaggcaccca

SEQ ID NO: 2296036 - RNA, 16 nt, Human
agggagcgagggagaa

SEQ ID NO: 2296037 - RNA, 14 nt, Human
agggagcggaaagc

SEQ ID NO: 2296038 - RNA, 22 nt, Human
agggagccuccugcccaguccc

SEQ ID NO: 2296039 - RNA, 18 nt, Human
agggagcggaaagcagcu

SEQ ID NO: 2296040 - RNA, 17 nt, Human
agggagcggaaagcagc

SEQ ID NO: 2296041 - RNA, 19 nt, Human
agggagcggccggccagcc

SEQ ID NO: 2296042 - RNA, 18 nt, Human
agggagccuuugguucug

SEQ ID NO: 2296043 - RNA, 14 nt, Human
agggagccuggccc

SEQ ID NO: 2296044 - RNA, 14 nt, Human
agggagccuccugc

SEQ ID NO: 2296045 - RNA, 15 nt, Human
agggagccuccugcc

SEQ ID NO: 2296046 - RNA, 16 nt, Human
agggagccuccugccc

SEQ ID NO: 2296047 - RNA, 17 nt, Human
agggagccuccugccca

SEQ ID NO: 2296048 - RNA, 15 nt, Human
agggagcauuuuccu

SEQ ID NO: 2296049 - RNA, 17 nt, Human
agggagcauuuuccucc

SEQ ID NO: 2296050 - RNA, 14 nt, Human
agggagcauggcug

SEQ ID NO: 2296051 - RNA, 20 nt, Human
agggagcauagaaggcaggu

SEQ ID NO: 2296052 - RNA, 21 nt, Human
agggagcauagaaggcaggug

SEQ ID NO: 2296053 - RNA, 17 nt, Human
agggagcauagaaggca

SEQ ID NO: 2296054 - RNA, 19 nt, Human
agggagcauagaaggcagg

SEQ ID NO: 2296055 - RNA, 18 nt, Human
agggagcaucagugcccu

SEQ ID NO: 2296056 - RNA, 17 nt, Human
agggagccccuuugaug

SEQ ID NO: 2296057 - RNA, 11 nt, Human
agggagccucc

SEQ ID NO: 2296058 - RNA, 13 nt, Human
agggagccuccug

SEQ ID NO: 2296059 - RNA, 16 nt, Human
ugggacuacaggugug

SEQ ID NO: 2296060 - RNA, 18 nt, Human
ugggacucaaugcacuga

SEQ ID NO: 2296061 - RNA, 13 nt, Human
ugggacuggccuc

SEQ ID NO: 2296062 - RNA, 18 nt, Human
ugggacugggagggccca

SEQ ID NO: 2296063 - RNA, 16 nt, Human
ugggacugggagggcc

SEQ ID NO: 2296064 - RNA, 15 nt, Human
ugggacugggagggc

SEQ ID NO: 2296065 - RNA, 13 nt, Human
ugggacugggagg

SEQ ID NO: 2296066 - RNA, 12 nt, Human
ugggacugggag

SEQ ID NO: 2296067 - RNA, 16 nt, Human
ugggacuggccucugc

SEQ ID NO: 2296068 - RNA, 14 nt, Human
ugggacuggccucu

SEQ ID NO: 2296069 - RNA, 15 nt, Human
ugggagaaaugaaaa

SEQ ID NO: 2296070 - RNA, 14 nt, Human
ugggacuuaacucc

SEQ ID NO: 2296071 - RNA, 17 nt, Human
ugggacuuccuugcucu

SEQ ID NO: 2296072 - RNA, 19 nt, Human
ugggacuggguuuggaccc

SEQ ID NO: 2296073 - RNA, 19 nt, Human
ugggacuuccuugcucucc

SEQ ID NO: 2296074 - RNA, 20 nt, Human
ugggacuuccuugcucuccc

SEQ ID NO: 2296075 - RNA, 13 nt, Human
ugggacuucuuuu

SEQ ID NO: 2296076 - RNA, 15 nt, Human
ugggacuucuuuuca

SEQ ID NO: 2296077 - RNA, 16 nt, Human
agggagagaccucauc

SEQ ID NO: 2296078 - RNA, 23 nt, Human
agggagagaccucaucaggauga

SEQ ID NO: 2296079 - RNA, 19 nt, Human
agggagcaggcggugggca

SEQ ID NO: 2296080 - RNA, 13 nt, Human
agggagagagaga

SEQ ID NO: 2296081 - RNA, 11 nt, Human
agggagagaga

SEQ ID NO: 2296082 - RNA, 14 nt, Human
agggagagaagaua

SEQ ID NO: 2296083 - RNA, 13 nt, Human
agggagagaagau

SEQ ID NO: 2296084 - RNA, 21 nt, Human
agggagaagacuauauuguac

SEQ ID NO: 2296085 - RNA, 13 nt, Human
agggagaagcucc

SEQ ID NO: 2296086 - RNA, 15 nt, Human
agggagaagaaguca

SEQ ID NO: 2296087 - RNA, 15 nt, Human
agggagaaggaucua

SEQ ID NO: 2296088 - RNA, 16 nt, Human
agggagaaggaucuag

SEQ ID NO: 2296089 - RNA, 22 nt, Human
agggagaaggaucuagaaugug

SEQ ID NO: 2296090 - RNA, 19 nt, Human
agggagacccguccauuug

SEQ ID NO: 2296091 - RNA, 12 nt, Human
agggagacagag

SEQ ID NO: 2296092 - RNA, 18 nt, Human
agggagaagggauggagg

SEQ ID NO: 2296093 - RNA, 20 nt, Human
agggagacacuggccccuca

SEQ ID NO: 2296094 - RNA, 20 nt, Human
agggacuuggaagcuccgcu

SEQ ID NO: 2296095 - RNA, 16 nt, Human
agggaaaugaucaguu

SEQ ID NO: 2296096 - RNA, 23 nt, Human
agggaaauagaaaaacccugccc

SEQ ID NO: 2296097 - RNA, 14 nt, Human
agggacuugaaguu

SEQ ID NO: 2296098 - RNA, 15 nt, Human
agggacuugaaguug

SEQ ID NO: 2296099 - RNA, 16 nt, Human
agggacuugaaguugu

SEQ ID NO: 2296100 - RNA, 13 nt, Human
agggagaaauguu

SEQ ID NO: 2296101 - RNA, 16 nt, Human
agggagaagaaaggug

SEQ ID NO: 2296102 - RNA, 18 nt, Human
agggacuuggaagcuccg

SEQ ID NO: 2296103 - RNA, 19 nt, Human
agggacuuggaagcuccgc

SEQ ID NO: 2296104 - RNA, 15 nt, Human
agggacuuggaagcu

SEQ ID NO: 2296105 - RNA, 23 nt, Human
agggacuucugucuucacaacag

SEQ ID NO: 2296106 - RNA, 14 nt, Human
agggaaaugaaaga

SEQ ID NO: 2296107 - RNA, 15 nt, Human
agggaaauaucauuu

SEQ ID NO: 2296108 - RNA, 19 nt, Human
agggaaaggggugcuuuua

SEQ ID NO: 2296109 - RNA, 15 nt, Human
agggaaauagaaaaa

SEQ ID NO: 2296110 - RNA, 22 nt, Human
agggaaauagaaaaacccugcc

SEQ ID NO: 2296111 - RNA, 22 nt, Human
agggaaaggcucugaaagccag

SEQ ID NO: 2296112 - RNA, 15 nt, Human
agggaaaggggugcu

SEQ ID NO: 2296113 - RNA, 18 nt, Human
agggaaaggggugcuuuu

SEQ ID NO: 2296114 - RNA, 18 nt, Human
agggaaaggauauuuucu

SEQ ID NO: 2296115 - RNA, 23 nt, Human
agggaaagaaaguugcacggcug

SEQ ID NO: 2296116 - RNA, 12 nt, Human
agggaaagaaaa

SEQ ID NO: 2296117 - RNA, 15 nt, Human
agggaaacuucccgu

SEQ ID NO: 2296118 - RNA, 19 nt, Human
agggaaagaaaaggaaggc

SEQ ID NO: 2296119 - RNA, 20 nt, Human
agggcugucaucugugcacu

SEQ ID NO: 2296120 - RNA, 19 nt, Human
agggcugucaucugugcac

SEQ ID NO: 2296121 - RNA, 18 nt, Human
agggcugucaucugugca

SEQ ID NO: 2296122 - RNA, 22 nt, Human
agggcuguuauaaucuuucaca

SEQ ID NO: 2296123 - RNA, 16 nt, Human
agggcuggucucugcu

SEQ ID NO: 2296124 - RNA, 23 nt, Human
agggcuggcccagcccugcuggc

SEQ ID NO: 2296125 - RNA, 22 nt, Human
agggcuggaccuauguccuaag

SEQ ID NO: 2296126 - RNA, 13 nt, Human
agggcuggcccag

SEQ ID NO: 2296127 - RNA, 14 nt, Human
agggcuggcccagc

SEQ ID NO: 2296128 - RNA, 15 nt, Human
agggcuggcccagcc

SEQ ID NO: 2296129 - RNA, 16 nt, Human
agggcuggcccagccc

SEQ ID NO: 2296130 - RNA, 17 nt, Human
agggcuggcccagcccu

SEQ ID NO: 2296131 - RNA, 18 nt, Human
agggcuggcccagcccug

SEQ ID NO: 2296132 - RNA, 19 nt, Human
agggcuggcccagcccugc

SEQ ID NO: 2296133 - RNA, 20 nt, Human
agggcuggcccagcccugcu

SEQ ID NO: 2296134 - RNA, 22 nt, Human
agggcuggcccagcccugcugg

SEQ ID NO: 2296135 - RNA, 20 nt, Human
ugggcucuccaccucagccu

SEQ ID NO: 2296136 - RNA, 19 nt, Human
ugggcucuccaccucagcc

SEQ ID NO: 2296137 - RNA, 18 nt, Human
ugggcucuccaccucagc

SEQ ID NO: 2296138 - RNA, 17 nt, Human
ugggcucuccaccucag

SEQ ID NO: 2296139 - RNA, 16 nt, Human
ugggcucuccaccuca

SEQ ID NO: 2296140 - RNA, 15 nt, Human
ugggcucuccaccuc

SEQ ID NO: 2296141 - RNA, 14 nt, Human
ugggcucuccaccu

SEQ ID NO: 2296142 - RNA, 17 nt, Human
ugggcucgucuuugcag

SEQ ID NO: 2296143 - RNA, 21 nt, Human
ugggcucuccaccucagccuu

SEQ ID NO: 2296144 - RNA, 19 nt, Human
ugggcucugacagaaagca

SEQ ID NO: 2296145 - RNA, 23 nt, Human
ugggcucuccaccucagccuugg

SEQ ID NO: 2296146 - RNA, 15 nt, Human
ugggcuccuccaggg

SEQ ID NO: 2296147 - RNA, 13 nt, Human
ugggcuccuccag

SEQ ID NO: 2296148 - RNA, 23 nt, Human
ugggcuccuccagggugugugcu

SEQ ID NO: 2296149 - RNA, 14 nt, Human
ugggcucgcccacc

SEQ ID NO: 2296150 - RNA, 17 nt, Human
ugggcucggaggcugcc

SEQ ID NO: 2296151 - RNA, 15 nt, Human
ugggcucgucuuugc

SEQ ID NO: 2296152 - RNA, 16 nt, Human
ugggcucgucuuugca

SEQ ID NO: 2296153 - RNA, 16 nt, Human
ugggcucaagcagucu

SEQ ID NO: 2296154 - RNA, 11 nt, Human
ugggcucccug

SEQ ID NO: 2296155 - RNA, 14 nt, Human
ugggcucccuuccc

SEQ ID NO: 2296156 - RNA, 17 nt, Human
ugggcucccuugugcgu

SEQ ID NO: 2296157 - RNA, 21 nt, Human
ugggcucccuucccaccucuc

SEQ ID NO: 2296158 - RNA, 15 nt, Human
ugggcucccuuccca

SEQ ID NO: 2296159 - RNA, 19 nt, Human
ugggcucccugacugggag

SEQ ID NO: 2296160 - RNA, 15 nt, Human
ugggcucccugacug

SEQ ID NO: 2296161 - RNA, 15 nt, Human
agggcucccugcccu

SEQ ID NO: 2296162 - RNA, 11 nt, Human
agggcucccca

SEQ ID NO: 2296163 - RNA, 20 nt, Human
agggcuccccacugccuacu

SEQ ID NO: 2296164 - RNA, 11 nt, Human
agggcuccugc

SEQ ID NO: 2296165 - RNA, 12 nt, Human
agggcuccugcc

SEQ ID NO: 2296166 - RNA, 14 nt, Human
agggcuccugccuu

SEQ ID NO: 2296167 - RNA, 21 nt, Human
agggcugacacguccacccca

SEQ ID NO: 2296168 - RNA, 12 nt, Human
agggcuccuggg

SEQ ID NO: 2296169 - RNA, 15 nt, Human
agggcuccugccuuc

SEQ ID NO: 2296170 - RNA, 22 nt, Human
agggcuccugccuucuguccug

SEQ ID NO: 2296171 - RNA, 17 nt, Human
agggcugagcucucugu

SEQ ID NO: 2296172 - RNA, 16 nt, Human
agggcugagcugggga

SEQ ID NO: 2296173 - RNA, 13 nt, Human
agggcugccacca

SEQ ID NO: 2296174 - RNA, 17 nt, Human
agggcugcuagacggag

SEQ ID NO: 2296175 - RNA, 13 nt, Human
agggcugcuguga

SEQ ID NO: 2296176 - RNA, 14 nt, Human
agggcuggacugag

SEQ ID NO: 2296177 - RNA, 15 nt, Human
agggcuggacugagg

SEQ ID NO: 2296178 - RNA, 22 nt, Human
agggcuggaaucuggagagcua

SEQ ID NO: 2296179 - RNA, 12 nt, Human
agggcuggaccu

SEQ ID NO: 2296180 - RNA, 13 nt, Human
agggcuggaccua

SEQ ID NO: 2296181 - RNA, 16 nt, Human
agggcuggacugaggc

SEQ ID NO: 2296182 - RNA, 17 nt, Human
agggcuggacugaggcc

SEQ ID NO: 2296183 - RNA, 18 nt, Human
agggcuggacugaggccu

SEQ ID NO: 2296184 - RNA, 20 nt, Human
agggcuggacugaggccuga

SEQ ID NO: 2296185 - RNA, 17 nt, Human
agggcccaggcaggcca

SEQ ID NO: 2296186 - RNA, 12 nt, Human
agggccccagca

SEQ ID NO: 2296187 - RNA, 18 nt, Human
agggccccagaaggcagg

SEQ ID NO: 2296188 - RNA, 18 nt, Human
agggccccagcacuaaag

SEQ ID NO: 2296189 - RNA, 14 nt, Human
agggccccagcacu

SEQ ID NO: 2296190 - RNA, 19 nt, Human
agggccccucacccugccu

SEQ ID NO: 2296191 - RNA, 20 nt, Human
agggcuccagacacaugucc

SEQ ID NO: 2296192 - RNA, 11 nt, Human
agggccccucu

SEQ ID NO: 2296193 - RNA, 15 nt, Human
agggcccaggcaggc

SEQ ID NO: 2296194 - RNA, 14 nt, Human
agggcccaggcagg

SEQ ID NO: 2296195 - RNA, 21 nt, Human
agggcccagagcccagcucca

SEQ ID NO: 2296196 - RNA, 20 nt, Human
agggcccagagcccagcucc

SEQ ID NO: 2296197 - RNA, 19 nt, Human
agggcccagagcccagcuc

SEQ ID NO: 2296198 - RNA, 18 nt, Human
agggcccagagcccagcu

SEQ ID NO: 2296199 - RNA, 17 nt, Human
agggcccagagcccagc

SEQ ID NO: 2296200 - RNA, 16 nt, Human
agggccaagacuuggc

SEQ ID NO: 2296201 - RNA, 18 nt, Human
agggccacacuauuacca

SEQ ID NO: 2296202 - RNA, 24 nt, Human
agggccacacuauuaccaugagaa

SEQ ID NO: 2296203 - RNA, 14 nt, Human
agggcccagagagg

SEQ ID NO: 2296204 - RNA, 21 nt, Human
agggaguuaucuaaaagaaau

SEQ ID NO: 2296205 - RNA, 14 nt, Human
agggauacacugaa

SEQ ID NO: 2296206 - RNA, 16 nt, Human
agggauacaugcucuu

SEQ ID NO: 2296207 - RNA, 15 nt, Human
agggauaagguaccu

SEQ ID NO: 2296208 - RNA, 17 nt, Human
agggcacugguggcccg

SEQ ID NO: 2296209 - RNA, 15 nt, Human
agggcagagccggga

SEQ ID NO: 2296210 - RNA, 22 nt, Human
agggcagaacacuaaccugacc

SEQ ID NO: 2296211 - RNA, 15 nt, Human
agggcagaacacuaa

SEQ ID NO: 2296212 - RNA, 17 nt, Human
agggcagaacacuaacc

SEQ ID NO: 2296213 - RNA, 16 nt, Human
agggcacuucacagag

SEQ ID NO: 2296214 - RNA, 17 nt, Human
agggcacuucacagagu

SEQ ID NO: 2296215 - RNA, 23 nt, Human
agggcacuucacagagugugcug

SEQ ID NO: 2296216 - RNA, 19 nt, Human
agggcagaaagguucugcc

SEQ ID NO: 2296217 - RNA, 20 nt, Human
agggcagaaagguucugccc

SEQ ID NO: 2296218 - RNA, 15 nt, Human
agggcagaggcugga

SEQ ID NO: 2296219 - RNA, 14 nt, Human
agggcagaggcugg

SEQ ID NO: 2296220 - RNA, 22 nt, Human
agggcagaggcuggaggcaggg

SEQ ID NO: 2296221 - RNA, 17 nt, Human
agggcagagucacacgg

SEQ ID NO: 2296222 - RNA, 20 nt, Human
agggcagaggcuggaggcag

SEQ ID NO: 2296223 - RNA, 17 nt, Human
agggcagaggcuggagg

SEQ ID NO: 2296224 - RNA, 20 nt, Human
agggcagucgauagagcugu

SEQ ID NO: 2296225 - RNA, 12 nt, Human
agggcagaguga

SEQ ID NO: 2296226 - RNA, 13 nt, Human
agggcaguguuuc

SEQ ID NO: 2296227 - RNA, 15 nt, Human
agggcaguguuuccu

SEQ ID NO: 2296228 - RNA, 16 nt, Human
agggcaguguuuccuu

SEQ ID NO: 2296229 - RNA, 17 nt, Human
agggcaguguuuccuuu

SEQ ID NO: 2296230 - RNA, 18 nt, Human
agggcaguguuuccuuuu

SEQ ID NO: 2296231 - RNA, 17 nt, Human
agggccaacccuucucc

SEQ ID NO: 2296232 - RNA, 21 nt, Human
agggccaacccuucuccucuu

SEQ ID NO: 2296233 - RNA, 21 nt, Human
agggccaagcccagcacugcu

SEQ ID NO: 2296234 - RNA, 23 nt, Human
agggccaacuugagggcccagag

SEQ ID NO: 2296235 - RNA, 15 nt, Human
agggccaacccuucu

SEQ ID NO: 2296236 - RNA, 16 nt, Human
agggccaacccuucuc

SEQ ID NO: 2296237 - RNA, 12 nt, Human
agggcccagaga

SEQ ID NO: 2296238 - RNA, 13 nt, Human
agggcccagagag

SEQ ID NO: 2296239 - RNA, 17 nt, Human
agggcaucaugcaucuu

SEQ ID NO: 2296240 - RNA, 22 nt, Human
agggcauaaugaugaugggaau

SEQ ID NO: 2296241 - RNA, 18 nt, Human
agggcauccuucugccuu

SEQ ID NO: 2296242 - RNA, 13 nt, Human
agggcaucuccag

SEQ ID NO: 2296243 - RNA, 14 nt, Human
agggcaucuccagg

SEQ ID NO: 2296244 - RNA, 15 nt, Human
agggcaucuccagga

SEQ ID NO: 2296245 - RNA, 15 nt, Human
agggcauaaugauga

SEQ ID NO: 2296246 - RNA, 19 nt, Human
agggcauaaugaugauggg

SEQ ID NO: 2296247 - RNA, 16 nt, Human
agggcaucuccaggaa

SEQ ID NO: 2296248 - RNA, 19 nt, Human
agggcaucuccaggaaggc

SEQ ID NO: 2296249 - RNA, 17 nt, Human
agggcauggccaggugg

SEQ ID NO: 2296250 - RNA, 19 nt, Human
agggcauuugagaaaugca

SEQ ID NO: 2296251 - RNA, 22 nt, Human
agggcauuugagaaaugcauau

SEQ ID NO: 2296252 - RNA, 22 nt, Human
agggcaucuccaggaaggcggg

SEQ ID NO: 2296253 - RNA, 13 nt, Human
agggcauuggcca

SEQ ID NO: 2296254 - RNA, 15 nt, Human
ugggcauuugugagg

SEQ ID NO: 2296255 - RNA, 20 nt, Human
ugggcauugcuuuccacuga

SEQ ID NO: 2296256 - RNA, 15 nt, Human
ugggcauugcuuucc

SEQ ID NO: 2296257 - RNA, 14 nt, Human
ugggcauugcuuuc

SEQ ID NO: 2296258 - RNA, 16 nt, Human
ugggcauuugugaggc

SEQ ID NO: 2296259 - RNA, 23 nt, Human
ugggccaacaaagaacacuaacu

SEQ ID NO: 2296260 - RNA, 13 nt, Human
ugggcauugcuuu

SEQ ID NO: 2296261 - RNA, 12 nt, Human
ugggcauugcuu

SEQ ID NO: 2296262 - RNA, 23 nt, Human
ugggcauugauggggaaggaggc

SEQ ID NO: 2296263 - RNA, 18 nt, Human
ugggcauugauggggaag

SEQ ID NO: 2296264 - RNA, 17 nt, Human
ugggcauugauggggaa

SEQ ID NO: 2296265 - RNA, 20 nt, Human
ugggccaagucaaagacauu

SEQ ID NO: 2296266 - RNA, 16 nt, Human
ugggccaacucaccug

SEQ ID NO: 2296267 - RNA, 17 nt, Human
agggagggagggcucca

SEQ ID NO: 2296268 - RNA, 15 nt, Human
agggagggccugggc

SEQ ID NO: 2296269 - RNA, 13 nt, Human
agggagggccugg

SEQ ID NO: 2296270 - RNA, 12 nt, Human
agggagggcucc

SEQ ID NO: 2296271 - RNA, 17 nt, Human
agggagggcuccagaca

SEQ ID NO: 2296272 - RNA, 19 nt, Human
agggagggcuccagacaca

SEQ ID NO: 2296273 - RNA, 20 nt, Human
agggaguccgaaagggacuu

SEQ ID NO: 2296274 - RNA, 20 nt, Human
agggagguguuuaaagagag

SEQ ID NO: 2296275 - RNA, 22 nt, Human
agggagguguuuaaagagaggu

SEQ ID NO: 2296276 - RNA, 23 nt, Human
agggagguguuuaaagagagguu

SEQ ID NO: 2296277 - RNA, 15 nt, Human
agggagggcugucau

SEQ ID NO: 2296278 - RNA, 22 nt, Human
agggagggcuccagacacaugu

SEQ ID NO: 2296279 - RNA, 23 nt, Human
agggaguccgaaagggacuugga

SEQ ID NO: 2296280 - RNA, 14 nt, Human
agggaguccccucc

SEQ ID NO: 2296281 - RNA, 22 nt, Human
agggaguccccuccccggcccu

SEQ ID NO: 2296282 - RNA, 15 nt, Human
agggaguccccuccc

SEQ ID NO: 2296283 - RNA, 16 nt, Human
agggaguccccucccc

SEQ ID NO: 2296284 - RNA, 20 nt, Human
agggagugacagaggcagcc

SEQ ID NO: 2296285 - RNA, 20 nt, Human
agggagugaguugauagcac

SEQ ID NO: 2296286 - RNA, 18 nt, Human
aggcugggcguaguggcu

SEQ ID NO: 2296287 - RNA, 14 nt, Human
aggcugggcuucag

SEQ ID NO: 2296288 - RNA, 21 nt, Human
aggcugggcucccuucccacc

SEQ ID NO: 2296289 - RNA, 23 nt, Human
aggcugggcucccuucccaccuc

SEQ ID NO: 2296290 - RNA, 13 nt, Human
aggcugggcuccc

SEQ ID NO: 2296291 - RNA, 14 nt, Human
aggcugggcucccu

SEQ ID NO: 2296292 - RNA, 18 nt, Human
aggcugggcucccuuccc

SEQ ID NO: 2296293 - RNA, 19 nt, Human
aggcugggagagccuucca

SEQ ID NO: 2296294 - RNA, 16 nt, Human
aggcugggagagccuu

SEQ ID NO: 2296295 - RNA, 20 nt, Human
ugggaaccccuucauccucu

SEQ ID NO: 2296296 - RNA, 22 nt, Human
ugggaaccccuucauccucuga

SEQ ID NO: 2296297 - RNA, 22 nt, Human
ugggaaaugguaugagcugagg

SEQ ID NO: 2296298 - RNA, 23 nt, Human
ugggaaaugguaugagcugaggg

SEQ ID NO: 2296299 - RNA, 20 nt, Human
ugggaacccaaguccaagca

SEQ ID NO: 2296300 - RNA, 22 nt, Human
aggcugggagagccuuccaggg

SEQ ID NO: 2296301 - RNA, 21 nt, Human
ugggaaccccccucccaccca

SEQ ID NO: 2296302 - RNA, 13 nt, Human
aggcugggcaagg

SEQ ID NO: 2296303 - RNA, 20 nt, Human
aggcugggagagccuuccag

SEQ ID NO: 2296304 - RNA, 21 nt, Human
aggcugggagagccuuccagg

SEQ ID NO: 2296305 - RNA, 22 nt, Human
aggcugggggaagaagcucucu

SEQ ID NO: 2296306 - RNA, 10 nt, Human
aggcuggguc

SEQ ID NO: 2296307 - RNA, 15 nt, Human
aggcugggucgcccu

SEQ ID NO: 2296308 - RNA, 18 nt, Human
aggcugggucgcccugga

SEQ ID NO: 2296309 - RNA, 20 nt, Human
aggcugggucgcccuggacu

SEQ ID NO: 2296310 - RNA, 21 nt, Human
aggcugggucgcccuggacug

SEQ ID NO: 2296311 - RNA, 14 nt, Human
aggcuggguucuga

SEQ ID NO: 2296312 - RNA, 17 nt, Human
aggcuggguucugaucc

SEQ ID NO: 2296313 - RNA, 18 nt, Human
aggcugggcuucaguggc

SEQ ID NO: 2296314 - RNA, 19 nt, Human
aggcugggcuucaguggca

SEQ ID NO: 2296315 - RNA, 20 nt, Human
aggcugggcuucaguggcag

SEQ ID NO: 2296316 - RNA, 21 nt, Human
aggcugggcuucaguggcagc

SEQ ID NO: 2296317 - RNA, 17 nt, Human
aggcugggggaagaagc

SEQ ID NO: 2296318 - RNA, 16 nt, Human
aggcuggggaaguccu

SEQ ID NO: 2296319 - RNA, 18 nt, Human
aggcuggggaaguccucu

SEQ ID NO: 2296320 - RNA, 21 nt, Human
aggcuggggaaguccucuggg

SEQ ID NO: 2296321 - RNA, 22 nt, Human
aggcuggggaaguccucugggu

SEQ ID NO: 2296322 - RNA, 12 nt, Human
aggcuggggcug

SEQ ID NO: 2296323 - RNA, 22 nt, Human
aggcugggcuucaguggcagcu

SEQ ID NO: 2296324 - RNA, 23 nt, Human
aggcugggcuucaguggcagcug

SEQ ID NO: 2296325 - RNA, 16 nt, Human
agggaaaagcagcucu

SEQ ID NO: 2296326 - RNA, 16 nt, Human
agggaaacuauugucc

SEQ ID NO: 2296327 - RNA, 22 nt, Human
agggaaaaugcagcagggaugc

SEQ ID NO: 2296328 - RNA, 17 nt, Human
agggaaaaugcagcagg

SEQ ID NO: 2296329 - RNA, 18 nt, Human
agggaaaauuauuugcau

SEQ ID NO: 2296330 - RNA, 15 nt, Human
agggaaacugccagc

SEQ ID NO: 2296331 - RNA, 14 nt, Human
agggaaacugccag

SEQ ID NO: 2296332 - RNA, 23 nt, Human
agggaaacugccagcaacgcagg

SEQ ID NO: 2296333 - RNA, 21 nt, Human
agggaaacugccagcaacgca

SEQ ID NO: 2296334 - RNA, 19 nt, Human
agggaaacugccagcaacg

SEQ ID NO: 2296335 - RNA, 16 nt, Human
agggaaacugccagca

SEQ ID NO: 2296336 - RNA, 20 nt, Human
aggcuugucagagcugggag

SEQ ID NO: 2296337 - RNA, 17 nt, Human
aggcuugucagagcugg

SEQ ID NO: 2296338 - RNA, 16 nt, Human
aggcuugucagagcug

SEQ ID NO: 2296339 - RNA, 18 nt, Human
aggcuugucagagcuggg

SEQ ID NO: 2296340 - RNA, 15 nt, Human
aggcuuucacuauuu

SEQ ID NO: 2296341 - RNA, 20 nt, Human
aggcuuucacuauuuccuuu

SEQ ID NO: 2296342 - RNA, 19 nt, Human
aggcuuucacuauuuccuu

SEQ ID NO: 2296343 - RNA, 15 nt, Human
aggcuuuuuuaucau

SEQ ID NO: 2296344 - RNA, 19 nt, Human
aggcuuuggauuugacauu

SEQ ID NO: 2296345 - RNA, 18 nt, Human
agggaaaacauuccaucc

SEQ ID NO: 2296346 - RNA, 16 nt, Human
agggaaaacauuccau

SEQ ID NO: 2296347 - RNA, 15 nt, Human
agggaaaacauucca

SEQ ID NO: 2296348 - RNA, 18 nt, Human
aggcuuuuuuaucaugug

SEQ ID NO: 2296349 - RNA, 21 nt, Human
aggcuuuuuuaucaugugaaa

SEQ ID NO: 2296350 - RNA, 17 nt, Human
aggcuugccugcaggca

SEQ ID NO: 2296351 - RNA, 14 nt, Human
aggcuugcugagag

SEQ ID NO: 2296352 - RNA, 19 nt, Human
aggcuugcugagaggggcu

SEQ ID NO: 2296353 - RNA, 20 nt, Human
aggcuugcugagaggggcug

SEQ ID NO: 2296354 - RNA, 15 nt, Human
aggcuugucagagcu

SEQ ID NO: 2296355 - RNA, 22 nt, Human
aggcuugggaccgccagauggg

SEQ ID NO: 2296356 - RNA, 15 nt, Human
aggcuugccugcagg

SEQ ID NO: 2296357 - RNA, 16 nt, Human
aggcuugccugcaggc

SEQ ID NO: 2296358 - RNA, 18 nt, Human
aggcuugcauaauaagcu

SEQ ID NO: 2296359 - RNA, 23 nt, Human
aggcuucuucagaucagugcuug

SEQ ID NO: 2296360 - RNA, 22 nt, Human
aggcuucuucagaucagugcuu

SEQ ID NO: 2296361 - RNA, 16 nt, Human
aggcuucuucagauca

SEQ ID NO: 2296362 - RNA, 13 nt, Human
aggcuuccuuggc

SEQ ID NO: 2296363 - RNA, 21 nt, Human
aggcuuccuucauuuccuccg

SEQ ID NO: 2296364 - RNA, 22 nt, Human
aggcuuccugcguccuccucac

SEQ ID NO: 2296365 - RNA, 22 nt, Human
aggcuucuccaauucugcccaa

SEQ ID NO: 2296366 - RNA, 14 nt, Human
aggcuucuccgcca

SEQ ID NO: 2296367 - RNA, 15 nt, Human
aggcuucuccgccag

SEQ ID NO: 2296368 - RNA, 16 nt, Human
aggcuucuccgccagc

SEQ ID NO: 2296369 - RNA, 17 nt, Human
aggcuucuccgccagcc

SEQ ID NO: 2296370 - RNA, 18 nt, Human
aggcuucuccgccagccu

SEQ ID NO: 2296371 - RNA, 19 nt, Human
aggcuucuccgccagccuc

SEQ ID NO: 2296372 - RNA, 20 nt, Human
aggcuucuccgccagccucc

SEQ ID NO: 2296373 - RNA, 21 nt, Human
aggcuucuccgccagccuccu

SEQ ID NO: 2296374 - RNA, 22 nt, Human
aggcuucuccgccagccuccuc

SEQ ID NO: 2296375 - RNA, 23 nt, Human
aggcuucuccgccagccuccucu

SEQ ID NO: 2296376 - RNA, 23 nt, Human
aggcuucugguugaugccuguga

SEQ ID NO: 2296377 - RNA, 16 nt, Human
aggcuucucucugugg

SEQ ID NO: 2296378 - RNA, 18 nt, Human
aggcuucucucucaccag

SEQ ID NO: 2296379 - RNA, 12 nt, Human
aggcuucucucu

SEQ ID NO: 2296380 - RNA, 13 nt, Human
aggcuucucucuc

SEQ ID NO: 2296381 - RNA, 14 nt, Human
aggcuucucucuca

SEQ ID NO: 2296382 - RNA, 16 nt, Human
aggcuucucucucacc

SEQ ID NO: 2296383 - RNA, 16 nt, Human
aggcuggggcugaccu

SEQ ID NO: 2296384 - RNA, 21 nt, Human
aggcuggggcugaccuuccuc

SEQ ID NO: 2296385 - RNA, 21 nt, Human
aggcuuagucacugagacagc

SEQ ID NO: 2296386 - RNA, 22 nt, Human
aggcuuagucacugagacagcc

SEQ ID NO: 2296387 - RNA, 23 nt, Human
aggcuuagucacugagacagccc

SEQ ID NO: 2296388 - RNA, 14 nt, Human
aggcuuaguuugug

SEQ ID NO: 2296389 - RNA, 13 nt, Human
aggcuuccagaga

SEQ ID NO: 2296390 - RNA, 14 nt, Human
aggcuuccagagag

SEQ ID NO: 2296391 - RNA, 23 nt, Human
aggcuuccagagaguccucugga

SEQ ID NO: 2296392 - RNA, 10 nt, Human
aggcuuccug

SEQ ID NO: 2296393 - RNA, 20 nt, Human
aggcuuccugcguccuccuc

SEQ ID NO: 2296394 - RNA, 21 nt, Human
aggcuuccugcguccuccuca

SEQ ID NO: 2296395 - RNA, 19 nt, Human
aggcuuccuucauuuccuc

SEQ ID NO: 2296396 - RNA, 18 nt, Human
aggcuuccuucauuuccu

SEQ ID NO: 2296397 - RNA, 16 nt, Human
aggcuuccuucauuuc

SEQ ID NO: 2296398 - RNA, 14 nt, Human
aggcuuccuucauu

SEQ ID NO: 2296399 - RNA, 12 nt, Human
aggcuucacccu

SEQ ID NO: 2296400 - RNA, 20 nt, Human
aggcuucagcauauuuauag

SEQ ID NO: 2296401 - RNA, 15 nt, Human
aggcuuaguuugugu

SEQ ID NO: 2296402 - RNA, 15 nt, Human
ugggaaacagaggcu

SEQ ID NO: 2296403 - RNA, 16 nt, Human
ugggaaaacacugcca

SEQ ID NO: 2296404 - RNA, 18 nt, Human
ugggaaacuuggcucgaa

SEQ ID NO: 2296405 - RNA, 23 nt, Human
ugggaaaauaccccaucauucau

SEQ ID NO: 2296406 - RNA, 21 nt, Human
ugggaaagaaggcaaaguccc

SEQ ID NO: 2296407 - RNA, 23 nt, Human
ugggaaagacauccauaaagaag

SEQ ID NO: 2296408 - RNA, 16 nt, Human
ugggaaagcauuguaa

SEQ ID NO: 2296409 - RNA, 14 nt, Human
ugggaaagcauugu

SEQ ID NO: 2296410 - RNA, 15 nt, Human
ugggaaauggcuuga

SEQ ID NO: 2296411 - RNA, 20 nt, Human
ugggaaaugagaaggcagcc

SEQ ID NO: 2296412 - RNA, 20 nt, Human
ugggaacaccauaggucacc

SEQ ID NO: 2296413 - RNA, 19 nt, Human
ugggaaauauuuagcaaau

SEQ ID NO: 2296414 - RNA, 20 nt, Human
ugggaaauauuuagcaaaua

SEQ ID NO: 2296415 - RNA, 19 nt, Human
ugggaaaugagaaggcagc

SEQ ID NO: 2296416 - RNA, 21 nt, Human
ugggaaagcauuguaaaugug

SEQ ID NO: 2296417 - RNA, 18 nt, Human
ugggaaagcauuguaaau

SEQ ID NO: 2296418 - RNA, 17 nt, Human
ugggaaagcauuguaaa

SEQ ID NO: 2296419 - RNA, 20 nt, Human
uggcuucacggaagagccuu

SEQ ID NO: 2296420 - RNA, 17 nt, Human
uggcuucacggaagagc

SEQ ID NO: 2296421 - RNA, 16 nt, Human
uggcuuuugugcauua

SEQ ID NO: 2296422 - RNA, 15 nt, Human
uggcuuuugugcauu

SEQ ID NO: 2296423 - RNA, 19 nt, Human
uggcuuuuuuccuccugug

SEQ ID NO: 2296424 - RNA, 23 nt, Human
ugggaaaaaugcccuuaaaucau

SEQ ID NO: 2296425 - RNA, 17 nt, Human
uggcuucaaaauagaga

SEQ ID NO: 2296426 - RNA, 21 nt, Human
uggcuuuugugcauuaucuag

SEQ ID NO: 2296427 - RNA, 18 nt, Human
ugggaaacaaaaggauaa

SEQ ID NO: 2296428 - RNA, 22 nt, Human
uggcugugccucugccugucuc

SEQ ID NO: 2296429 - RNA, 16 nt, Human
uggcuguggagugugg

SEQ ID NO: 2296430 - RNA, 18 nt, Human
uggcugugccucugccug

SEQ ID NO: 2296431 - RNA, 19 nt, Human
uggcugugccucugccugu

SEQ ID NO: 2296432 - RNA, 14 nt, Human
uggcugugucuaaa

SEQ ID NO: 2296433 - RNA, 15 nt, Human
uggcugugucuaaac

SEQ ID NO: 2296434 - RNA, 17 nt, Human
uggcugugucuaaacug

SEQ ID NO: 2296435 - RNA, 17 nt, Human
uggcugaggaggccucc

SEQ ID NO: 2296436 - RNA, 16 nt, Human
uggcuguuggcugggg

SEQ ID NO: 2296437 - RNA, 18 nt, Human
uggcuguuggcugggggc

SEQ ID NO: 2296438 - RNA, 14 nt, Human
uggcuucacggaag

SEQ ID NO: 2296439 - RNA, 23 nt, Human
uggcuguuggcugggggccucag

SEQ ID NO: 2296440 - RNA, 23 nt, Human
uggcugcaaaggguaucaggugc

SEQ ID NO: 2296441 - RNA, 17 nt, Human
uggcugagccccugucu

SEQ ID NO: 2296442 - RNA, 13 nt, Human
uggcugagccccu

SEQ ID NO: 2296443 - RNA, 13 nt, Human
uggcugagcccug

SEQ ID NO: 2296444 - RNA, 16 nt, Human
uggcugagccuggcug

SEQ ID NO: 2296445 - RNA, 19 nt, Human
uggcugagauaugaacaua

SEQ ID NO: 2296446 - RNA, 20 nt, Human
uggcugagagaguggcauug

SEQ ID NO: 2296447 - RNA, 22 nt, Human
uggcugcagagcagugggccug

SEQ ID NO: 2296448 - RNA, 19 nt, Human
uggcugagccuggcuggca

SEQ ID NO: 2296449 - RNA, 19 nt, Human
uggcugagcggaugcaucu

SEQ ID NO: 2296450 - RNA, 12 nt, Human
uggcugcagcag

SEQ ID NO: 2296451 - RNA, 13 nt, Human
uggcugcagcagc

SEQ ID NO: 2296452 - RNA, 18 nt, Human
uggcugcagagcaguggg

SEQ ID NO: 2296453 - RNA, 15 nt, Human
uggcugcagagcagu

SEQ ID NO: 2296454 - RNA, 14 nt, Human
uggcugugccucug

SEQ ID NO: 2296455 - RNA, 15 nt, Human
uggcugugccucugc

SEQ ID NO: 2296456 - RNA, 16 nt, Human
uggcugugccucugcc

SEQ ID NO: 2296457 - RNA, 17 nt, Human
uggcugugccucugccu

SEQ ID NO: 2296458 - RNA, 23 nt, Human
uggcuguccagugcccauuccuc

SEQ ID NO: 2296459 - RNA, 12 nt, Human
uggcugugagga

SEQ ID NO: 2296460 - RNA, 15 nt, Human
uggcugugaggcccc

SEQ ID NO: 2296461 - RNA, 21 nt, Human
uggcugcagcagcgguggccu

SEQ ID NO: 2296462 - RNA, 23 nt, Human
uggcugcagcagcgguggccucu

SEQ ID NO: 2296463 - RNA, 16 nt, Human
uggcucacaccuguaa

SEQ ID NO: 2296464 - RNA, 16 nt, Human
uggcucaauccucuaa

SEQ ID NO: 2296465 - RNA, 19 nt, Human
uggcucacaccuguaaucc

SEQ ID NO: 2296466 - RNA, 12 nt, Human
uggcucacacug

SEQ ID NO: 2296467 - RNA, 13 nt, Human
uggcucacacuga

SEQ ID NO: 2296468 - RNA, 14 nt, Human
uggcucacacugag

SEQ ID NO: 2296469 - RNA, 15 nt, Human
uggcucacacugaga

SEQ ID NO: 2296470 - RNA, 16 nt, Human
uggcucacacugagaa

SEQ ID NO: 2296471 - RNA, 21 nt, Human
uggcuauauggcaagaaagcu

SEQ ID NO: 2296472 - RNA, 23 nt, Human
uggcuauaggugcuacaaaaaca

SEQ ID NO: 2296473 - RNA, 21 nt, Human
uggcucacugcaacuucugcc

SEQ ID NO: 2296474 - RNA, 21 nt, Human
uggcucacuauggugccaaug

SEQ ID NO: 2296475 - RNA, 16 nt, Human
uggcucacguguguga

SEQ ID NO: 2296476 - RNA, 16 nt, Human
uggcucacgccuguaa

SEQ ID NO: 2296477 - RNA, 20 nt, Human
uggcucacuaugaaucuauu

SEQ ID NO: 2296478 - RNA, 18 nt, Human
uggcucacuauggugcca

SEQ ID NO: 2296479 - RNA, 19 nt, Human
uggcucacgccuguaaucc

SEQ ID NO: 2296480 - RNA, 17 nt, Human
uggcucacgccuguaau

SEQ ID NO: 2296481 - RNA, 15 nt, Human
uggcucacccaagca

SEQ ID NO: 2296482 - RNA, 13 nt, Human
uggcucacgccug

SEQ ID NO: 2296483 - RNA, 16 nt, Human
uggcugacuuugcucu

SEQ ID NO: 2296484 - RNA, 21 nt, Human
uggcugacccagucccugggg

SEQ ID NO: 2296485 - RNA, 20 nt, Human
uggcugaccccaaagagccu

SEQ ID NO: 2296486 - RNA, 21 nt, Human
uggcugaccccaaagagccug

SEQ ID NO: 2296487 - RNA, 22 nt, Human
uggcugaccccaaagagccugg

SEQ ID NO: 2296488 - RNA, 20 nt, Human
uggcugacccagucccuggg

SEQ ID NO: 2296489 - RNA, 19 nt, Human
uggcugacccagucccugg

SEQ ID NO: 2296490 - RNA, 17 nt, Human
uggcugacccagucccu

SEQ ID NO: 2296491 - RNA, 16 nt, Human
uggcugacccaguccc

SEQ ID NO: 2296492 - RNA, 15 nt, Human
uggcugacccagucc

SEQ ID NO: 2296493 - RNA, 16 nt, Human
uggcugaaggacugug

SEQ ID NO: 2296494 - RNA, 21 nt, Human
uggcugaaauucuccuggagg

SEQ ID NO: 2296495 - RNA, 22 nt, Human
uggcugaaauucuccuggaggu

SEQ ID NO: 2296496 - RNA, 15 nt, Human
uggcugaacccugug

SEQ ID NO: 2296497 - RNA, 16 nt, Human
uggcugaacccugugc

SEQ ID NO: 2296498 - RNA, 18 nt, Human
uggcugaacccugugcug

SEQ ID NO: 2296499 - RNA, 20 nt, Human
uggcugaacccugugcuggu

SEQ ID NO: 2296500 - RNA, 13 nt, Human
uggcugaacucau

SEQ ID NO: 2296501 - RNA, 23 nt, Human
uggcugaacccugugcugguguc

SEQ ID NO: 2296502 - RNA, 11 nt, Human
uggcugaagga

SEQ ID NO: 2296503 - RNA, 12 nt, Human
uggcugaaggac

SEQ ID NO: 2296504 - RNA, 13 nt, Human
uggcugaaggacu

SEQ ID NO: 2296505 - RNA, 14 nt, Human
uggcugaaggacug

SEQ ID NO: 2296506 - RNA, 15 nt, Human
uggcugaaggacugu

SEQ ID NO: 2296507 - RNA, 23 nt, Human
uggcucuugauaccccccucugu

SEQ ID NO: 2296508 - RNA, 19 nt, Human
uggcucuuuggagaucaag

SEQ ID NO: 2296509 - RNA, 16 nt, Human
uggcugaaauucuccu

SEQ ID NO: 2296510 - RNA, 18 nt, Human
uggcugaaauucuccugg

SEQ ID NO: 2296511 - RNA, 19 nt, Human
uggcugaaauucuccugga

SEQ ID NO: 2296512 - RNA, 20 nt, Human
uggcugaaauucuccuggag

SEQ ID NO: 2296513 - RNA, 16 nt, Human
uggcucagccagcacu

SEQ ID NO: 2296514 - RNA, 13 nt, Human
uggcucagccagc

SEQ ID NO: 2296515 - RNA, 18 nt, Human
uggcucagacauguuuuc

SEQ ID NO: 2296516 - RNA, 12 nt, Human
uggcucagccag

SEQ ID NO: 2296517 - RNA, 19 nt, Human
uggcucuugauaccccccu

SEQ ID NO: 2296518 - RNA, 20 nt, Human
uggcucuugauaccccccuc

SEQ ID NO: 2296519 - RNA, 21 nt, Human
uggcucuugauaccccccucu

SEQ ID NO: 2296520 - RNA, 22 nt, Human
uggcuagaggccagccccaccc

SEQ ID NO: 2296521 - RNA, 21 nt, Human
uggcuagaggccagccccacc

SEQ ID NO: 2296522 - RNA, 23 nt, Human
uggcuagaggccagccccaccca

SEQ ID NO: 2296523 - RNA, 20 nt, Human
uggcuagaauauccuacuuc

SEQ ID NO: 2296524 - RNA, 19 nt, Human
uggcuagaggccagcccca

SEQ ID NO: 2296525 - RNA, 19 nt, Human
uggcuauaggugcuacaaa

SEQ ID NO: 2296526 - RNA, 15 nt, Human
uggcuauaggugcua

SEQ ID NO: 2296527 - RNA, 15 nt, Human
uggcuaagagugucc

SEQ ID NO: 2296528 - RNA, 15 nt, Human
uggcuaauucccaga

SEQ ID NO: 2296529 - RNA, 19 nt, Human
uggcuaauguacugcauau

SEQ ID NO: 2296530 - RNA, 17 nt, Human
uggcuaauguacugcau

SEQ ID NO: 2296531 - RNA, 14 nt, Human
aggcuccauuagga

SEQ ID NO: 2296532 - RNA, 12 nt, Human
aggcucauuuua

SEQ ID NO: 2296533 - RNA, 16 nt, Human
aggcuccagagggcac

SEQ ID NO: 2296534 - RNA, 15 nt, Human
aggcuccagagggca

SEQ ID NO: 2296535 - RNA, 18 nt, Human
uggcuaagcaaaauguga

SEQ ID NO: 2296536 - RNA, 14 nt, Human
uggcuaaauucaug

SEQ ID NO: 2296537 - RNA, 21 nt, Human
uggcuaacuauauuugcuuuu

SEQ ID NO: 2296538 - RNA, 17 nt, Human
aggcuccaggagcagcc

SEQ ID NO: 2296539 - RNA, 18 nt, Human
aggcuccaggagcagcca

SEQ ID NO: 2296540 - RNA, 19 nt, Human
aggcuccaggagcagccac

SEQ ID NO: 2296541 - RNA, 23 nt, Human
aggcuccaggagcagccacauuc

SEQ ID NO: 2296542 - RNA, 22 nt, Human
aggcuccaccccauccaguuca

SEQ ID NO: 2296543 - RNA, 14 nt, Human
aggcuccagagggc

SEQ ID NO: 2296544 - RNA, 13 nt, Human
aggcuccagaggg

SEQ ID NO: 2296545 - RNA, 13 nt, Human
aggcuccaggagc

SEQ ID NO: 2296546 - RNA, 14 nt, Human
aggcuccaggagca

SEQ ID NO: 2296547 - RNA, 16 nt, Human
aggcuccaggagcagc

SEQ ID NO: 2296548 - RNA, 22 nt, Human
aggcuccacuuggucugugaga

SEQ ID NO: 2296549 - RNA, 21 nt, Human
aggcuccacuuggucugugag

SEQ ID NO: 2296550 - RNA, 17 nt, Human
aggcuccacuuggucug

SEQ ID NO: 2296551 - RNA, 11 nt, Human
aggcuccacuu

SEQ ID NO: 2296552 - RNA, 10 nt, Human
aggcucaggu

SEQ ID NO: 2296553 - RNA, 21 nt, Human
aggcucagagaugugcaccca

SEQ ID NO: 2296554 - RNA, 24 nt, Human
aggcucagagaugugcacccaugg

SEQ ID NO: 2296555 - RNA, 23 nt, Human
aggcucagucucaggagcauggg

SEQ ID NO: 2296556 - RNA, 19 nt, Human
aggcucagucucaggagca

SEQ ID NO: 2296557 - RNA, 22 nt, Human
aggcucauagggaagaccugcu

SEQ ID NO: 2296558 - RNA, 21 nt, Human
aggcucauagggaagaccugc

SEQ ID NO: 2296559 - RNA, 20 nt, Human
aggcucauagggaagaccug

SEQ ID NO: 2296560 - RNA, 18 nt, Human
aggcucagucucaggagc

SEQ ID NO: 2296561 - RNA, 17 nt, Human
aggcucagucucaggag

SEQ ID NO: 2296562 - RNA, 16 nt, Human
aggcucagucucagga

SEQ ID NO: 2296563 - RNA, 16 nt, Human
aggcucaggucccugg

SEQ ID NO: 2296564 - RNA, 23 nt, Human
aggcucacccccuucuccaucca

SEQ ID NO: 2296565 - RNA, 21 nt, Human
aggcucacccccuucuccauc

SEQ ID NO: 2296566 - RNA, 12 nt, Human
aggcucacugcc

SEQ ID NO: 2296567 - RNA, 13 nt, Human
aggcucacugcca

SEQ ID NO: 2296568 - RNA, 14 nt, Human
aggcucacugccag

SEQ ID NO: 2296569 - RNA, 15 nt, Human
aggcucacugccagg

SEQ ID NO: 2296570 - RNA, 19 nt, Human
aggcucacccccuucucca

SEQ ID NO: 2296571 - RNA, 16 nt, Human
aggcucacccccuucu

SEQ ID NO: 2296572 - RNA, 15 nt, Human
aggcucaacuaggga

SEQ ID NO: 2296573 - RNA, 16 nt, Human
aggcucaacuagggag

SEQ ID NO: 2296574 - RNA, 11 nt, Human
aggcucagaga

SEQ ID NO: 2296575 - RNA, 13 nt, Human
aggcucagagaug

SEQ ID NO: 2296576 - RNA, 14 nt, Human
aggcucagagaugu

SEQ ID NO: 2296577 - RNA, 16 nt, Human
aggcucacugccaggc

SEQ ID NO: 2296578 - RNA, 17 nt, Human
aggcucacugccaggcc

SEQ ID NO: 2296579 - RNA, 19 nt, Human
aggcucacugccaggccag

SEQ ID NO: 2296580 - RNA, 20 nt, Human
aggcucacugccaggccagc

SEQ ID NO: 2296581 - RNA, 21 nt, Human
aggcucacugccaggccagcc

SEQ ID NO: 2296582 - RNA, 22 nt, Human
aggcucacugccaggccagccu

SEQ ID NO: 2296583 - RNA, 23 nt, Human
aggcucacugccaggccagccuc

SEQ ID NO: 2296584 - RNA, 24 nt, Human
aggcucacugccaggccagccucc

SEQ ID NO: 2296585 - RNA, 21 nt, Human
aggccuuuagauauuauucau

SEQ ID NO: 2296586 - RNA, 15 nt, Human
aggccuuuaaaauuu

SEQ ID NO: 2296587 - RNA, 14 nt, Human
aggccuuuaaaauu

SEQ ID NO: 2296588 - RNA, 14 nt, Human
aggccuugucccag

SEQ ID NO: 2296589 - RNA, 14 nt, Human
aggcgagugccagg

SEQ ID NO: 2296590 - RNA, 15 nt, Human
aggcgagugccagga

SEQ ID NO: 2296591 - RNA, 17 nt, Human
aggcgagugccaggacu

SEQ ID NO: 2296592 - RNA, 18 nt, Human
aggcgagugccaggacuc

SEQ ID NO: 2296593 - RNA, 16 nt, Human
aggccuuuuggaaugu

SEQ ID NO: 2296594 - RNA, 17 nt, Human
aggccuucucugaagga

SEQ ID NO: 2296595 - RNA, 18 nt, Human
aggccuucucugaaggac

SEQ ID NO: 2296596 - RNA, 9 nt, Human
aggccuugc

SEQ ID NO: 2296597 - RNA, 13 nt, Human
uggccuguucugu

SEQ ID NO: 2296598 - RNA, 16 nt, Human
uggccugugucccaug

SEQ ID NO: 2296599 - RNA, 20 nt, Human
uggccugugucccaugaccc

SEQ ID NO: 2296600 - RNA, 22 nt, Human
uggccugugucccaugacccac

SEQ ID NO: 2296601 - RNA, 11 nt, Human
aggccuugcuc

SEQ ID NO: 2296602 - RNA, 21 nt, Human
uggccugugucccaugaccca

SEQ ID NO: 2296603 - RNA, 15 nt, Human
aggccuugcgcuguu

SEQ ID NO: 2296604 - RNA, 21 nt, Human
aggcuauuguccccuaaacca

SEQ ID NO: 2296605 - RNA, 19 nt, Human
aggcuauuauuuucacugu

SEQ ID NO: 2296606 - RNA, 18 nt, Human
aggcuauuauuuucacug

SEQ ID NO: 2296607 - RNA, 16 nt, Human
aggcuauuauuuucac

SEQ ID NO: 2296608 - RNA, 12 nt, Human
aggcggccccuc

SEQ ID NO: 2296609 - RNA, 15 nt, Human
aggcggacguuccag

SEQ ID NO: 2296610 - RNA, 17 nt, Human
aggcggacguuccagcc

SEQ ID NO: 2296611 - RNA, 18 nt, Human
aggcggacguuccagccg

SEQ ID NO: 2296612 - RNA, 15 nt, Human
aggcggagaguacag

SEQ ID NO: 2296613 - RNA, 20 nt, Human
aggcggagaguacagugagc

SEQ ID NO: 2296614 - RNA, 24 nt, Human
aggcggagaguacagugagccaag

SEQ ID NO: 2296615 - RNA, 14 nt, Human
aggcggccccuccc

SEQ ID NO: 2296616 - RNA, 23 nt, Human
aggcgauccaccugucucagccu

SEQ ID NO: 2296617 - RNA, 21 nt, Human
aggcgaucacaacgugcauug

SEQ ID NO: 2296618 - RNA, 19 nt, Human
aggcgaucacaacgugcau

SEQ ID NO: 2296619 - RNA, 20 nt, Human
aggcgaucacaacgugcauu

SEQ ID NO: 2296620 - RNA, 24 nt, Human
aggcgagugccaggacuccccagg

SEQ ID NO: 2296621 - RNA, 21 nt, Human
aggcgcacugugacccccagc

SEQ ID NO: 2296622 - RNA, 21 nt, Human
aggcgcacuuuccuccuggca

SEQ ID NO: 2296623 - RNA, 22 nt, Human
aggcgcacugugacccccagcu

SEQ ID NO: 2296624 - RNA, 21 nt, Human
aggcgcagugcuucucuacag

SEQ ID NO: 2296625 - RNA, 22 nt, Human
aggcgcacuuuccuccuggcag

SEQ ID NO: 2296626 - RNA, 23 nt, Human
aggcgcacuuuccuccuggcaga

SEQ ID NO: 2296627 - RNA, 14 nt, Human
aggcgccccuuccc

SEQ ID NO: 2296628 - RNA, 14 nt, Human
aggcgccggcgggc

SEQ ID NO: 2296629 - RNA, 22 nt, Human
uggccugcugggcucuccaccu

SEQ ID NO: 2296630 - RNA, 11 nt, Human
uggccugcugu

SEQ ID NO: 2296631 - RNA, 21 nt, Human
uggccugcugggcucuccacc

SEQ ID NO: 2296632 - RNA, 24 nt, Human
uggccugcacggugggccuugcug

SEQ ID NO: 2296633 - RNA, 18 nt, Human
uggccugccuugaagcca

SEQ ID NO: 2296634 - RNA, 20 nt, Human
uggccugcugggcucuccac

SEQ ID NO: 2296635 - RNA, 16 nt, Human
uggccugcacuaauuu

SEQ ID NO: 2296636 - RNA, 14 nt, Human
uggccugcacuaau

SEQ ID NO: 2296637 - RNA, 21 nt, Human
uggccugcacggugggccuug

SEQ ID NO: 2296638 - RNA, 23 nt, Human
uggccugcacggugggccuugcu

SEQ ID NO: 2296639 - RNA, 23 nt, Human
uggccucuguggagccccagcau

SEQ ID NO: 2296640 - RNA, 16 nt, Human
uggccucuggcucuca

SEQ ID NO: 2296641 - RNA, 18 nt, Human
uggccugagcugggauga

SEQ ID NO: 2296642 - RNA, 22 nt, Human
uggccugaucagaccacggcuc

SEQ ID NO: 2296643 - RNA, 11 nt, Human
uggccugggca

SEQ ID NO: 2296644 - RNA, 17 nt, Human
uggccugggagagcugg

SEQ ID NO: 2296645 - RNA, 13 nt, Human
uggccuggacugu

SEQ ID NO: 2296646 - RNA, 12 nt, Human
uggccugcugug

SEQ ID NO: 2296647 - RNA, 12 nt, Human
uggccugucuca

SEQ ID NO: 2296648 - RNA, 14 nt, Human
uggccugggccucc

SEQ ID NO: 2296649 - RNA, 17 nt, Human
uggccugggccuccuca

SEQ ID NO: 2296650 - RNA, 20 nt, Human
uggccugucucauccccagg

SEQ ID NO: 2296651 - RNA, 18 nt, Human
uggccugucucaucccca

SEQ ID NO: 2296652 - RNA, 16 nt, Human
uggccugucucauccc

SEQ ID NO: 2296653 - RNA, 14 nt, Human
uggccugucucauc

SEQ ID NO: 2296654 - RNA, 24 nt, Human
uggccugucucauccccagggguc

SEQ ID NO: 2296655 - RNA, 14 nt, Human
uggccuguguccca

SEQ ID NO: 2296656 - RNA, 15 nt, Human
uggccuguggccugu

SEQ ID NO: 2296657 - RNA, 20 nt, Human
uggccgaggguccuggcucc

SEQ ID NO: 2296658 - RNA, 19 nt, Human
uggccgaggguccuggcuc

SEQ ID NO: 2296659 - RNA, 18 nt, Human
uggccucugcacuccccu

SEQ ID NO: 2296660 - RNA, 19 nt, Human
uggccucugcacuccccug

SEQ ID NO: 2296661 - RNA, 21 nt, Human
uggccucugcugauccuccca

SEQ ID NO: 2296662 - RNA, 15 nt, Human
uggccgaguccaagc

SEQ ID NO: 2296663 - RNA, 20 nt, Human
uggccucugcacuccccugc

SEQ ID NO: 2296664 - RNA, 22 nt, Human
uggcccuugcaguucagcacca

SEQ ID NO: 2296665 - RNA, 23 nt, Human
uggcccuugcaguucagcaccac

SEQ ID NO: 2296666 - RNA, 18 nt, Human
uggccgaggguccuggcu

SEQ ID NO: 2296667 - RNA, 13 nt, Human
uggcccugcccug

SEQ ID NO: 2296668 - RNA, 17 nt, Human
uggcccugucccuccca

SEQ ID NO: 2296669 - RNA, 19 nt, Human
uggcccugucccucccacc

SEQ ID NO: 2296670 - RNA, 20 nt, Human
uggcccugucccucccaccu

SEQ ID NO: 2296671 - RNA, 19 nt, Human
uggcccuucccacuggagg

SEQ ID NO: 2296672 - RNA, 21 nt, Human
uggcccugucccucccaccuc

SEQ ID NO: 2296673 - RNA, 22 nt, Human
uggcccugucccucccaccucu

SEQ ID NO: 2296674 - RNA, 23 nt, Human
uggcccugucccucccaccucug

SEQ ID NO: 2296675 - RNA, 22 nt, Human
uggcccagccaaacccugucug

SEQ ID NO: 2296676 - RNA, 18 nt, Human
uggcauuauguccacugu

SEQ ID NO: 2296677 - RNA, 10 nt, Human
uggcccagcc

SEQ ID NO: 2296678 - RNA, 12 nt, Human
uggcccagcccu

SEQ ID NO: 2296679 - RNA, 13 nt, Human
uggcccagcccug

SEQ ID NO: 2296680 - RNA, 14 nt, Human
uggcccagcccugc

SEQ ID NO: 2296681 - RNA, 15 nt, Human
uggcccagcccugcu

SEQ ID NO: 2296682 - RNA, 17 nt, Human
uggcccagcccugcugg

SEQ ID NO: 2296683 - RNA, 19 nt, Human
uggcccagcccugcuggcc

SEQ ID NO: 2296684 - RNA, 20 nt, Human
uggcccagcccugcuggccg

SEQ ID NO: 2296685 - RNA, 11 nt, Human
uggcccagccg

SEQ ID NO: 2296686 - RNA, 13 nt, Human
uggcccagccggc

SEQ ID NO: 2296687 - RNA, 15 nt, Human
uggcccagccggccu

SEQ ID NO: 2296688 - RNA, 17 nt, Human
uggcccagccggccucu

SEQ ID NO: 2296689 - RNA, 18 nt, Human
uggcccagccggccucuc

SEQ ID NO: 2296690 - RNA, 22 nt, Human
uggcccagccggccucucuggc

SEQ ID NO: 2296691 - RNA, 23 nt, Human
uggcccagccggccucucuggcc

SEQ ID NO: 2296692 - RNA, 14 nt, Human
uggcccagcggccc

SEQ ID NO: 2296693 - RNA, 16 nt, Human
uggcccagcggccccu

SEQ ID NO: 2296694 - RNA, 17 nt, Human
uggcccagcggccccuc

SEQ ID NO: 2296695 - RNA, 19 nt, Human
uggcccagcggccccuccc

SEQ ID NO: 2296696 - RNA, 20 nt, Human
uggcccagcggccccuccca

SEQ ID NO: 2296697 - RNA, 21 nt, Human
uggcccagcggccccucccac

SEQ ID NO: 2296698 - RNA, 12 nt, Human
uggcccagcucc

SEQ ID NO: 2296699 - RNA, 13 nt, Human
uggcccagcuccc

SEQ ID NO: 2296700 - RNA, 14 nt, Human
uggcccagcucccc

SEQ ID NO: 2296701 - RNA, 15 nt, Human
uggcccagcucccca

SEQ ID NO: 2296702 - RNA, 22 nt, Human
uggcccagcucccccgggaggg

SEQ ID NO: 2296703 - RNA, 14 nt, Human
uggcccucaguuuc

SEQ ID NO: 2296704 - RNA, 20 nt, Human
uggcccucaccccugcccug

SEQ ID NO: 2296705 - RNA, 21 nt, Human
uggcccucccaguaccuccug

SEQ ID NO: 2296706 - RNA, 14 nt, Human
uggcccucuacccc

SEQ ID NO: 2296707 - RNA, 18 nt, Human
uggcccucaccccugccc

SEQ ID NO: 2296708 - RNA, 16 nt, Human
uggcccucaccccugc

SEQ ID NO: 2296709 - RNA, 23 nt, Human
uggcccucaaggccucccacagu

SEQ ID NO: 2296710 - RNA, 17 nt, Human
uggcccaggaccaucau

SEQ ID NO: 2296711 - RNA, 16 nt, Human
uggcccugaggugugg

SEQ ID NO: 2296712 - RNA, 18 nt, Human
uggcccugaggugugggg

SEQ ID NO: 2296713 - RNA, 23 nt, Human
uggcccugaggugugggggcugc

SEQ ID NO: 2296714 - RNA, 15 nt, Human
uggcccucuguguug

SEQ ID NO: 2296715 - RNA, 12 nt, Human
uggcccugcccu

SEQ ID NO: 2296716 - RNA, 15 nt, Human
uggcccugcaaaagg

SEQ ID NO: 2296717 - RNA, 19 nt, Human
uggcccugccaucuuccca

SEQ ID NO: 2296718 - RNA, 21 nt, Human
uggcccugccaucuucccagc

SEQ ID NO: 2296719 - RNA, 14 nt, Human
uggcccacugcauc

SEQ ID NO: 2296720 - RNA, 13 nt, Human
uggcccacugcau

SEQ ID NO: 2296721 - RNA, 20 nt, Human
uggcccacgccuguaauccc

SEQ ID NO: 2296722 - RNA, 23 nt, Human
uggcauuauguccacuguguaua

SEQ ID NO: 2296723 - RNA, 13 nt, Human
uggcauuggcagc

SEQ ID NO: 2296724 - RNA, 19 nt, Human
uggcccacgcacuucggga

SEQ ID NO: 2296725 - RNA, 14 nt, Human
uggcauguggccug

SEQ ID NO: 2296726 - RNA, 15 nt, Human
uggcauguggccugu

SEQ ID NO: 2296727 - RNA, 16 nt, Human
uggcauguggccugug

SEQ ID NO: 2296728 - RNA, 12 nt, Human
uggcauguguuu

SEQ ID NO: 2296729 - RNA, 17 nt, Human
uggcauguggccugugg

SEQ ID NO: 2296730 - RNA, 18 nt, Human
uggcauguggccuguggc

SEQ ID NO: 2296731 - RNA, 13 nt, Human
uggcauuaugucc

SEQ ID NO: 2296732 - RNA, 17 nt, Human
uggcauuagaauuauuu

SEQ ID NO: 2296733 - RNA, 19 nt, Human
uggcauuacagcuggagaa

SEQ ID NO: 2296734 - RNA, 19 nt, Human
uggcaucccaguggccuca

SEQ ID NO: 2296735 - RNA, 15 nt, Human
uggcaucccaguggc

SEQ ID NO: 2296736 - RNA, 22 nt, Human
uggcaugggaaugaaugucagu

SEQ ID NO: 2296737 - RNA, 22 nt, Human
uggcagauuuagugaaagcuag

SEQ ID NO: 2296738 - RNA, 18 nt, Human
uggcagcaccugucuccu

SEQ ID NO: 2296739 - RNA, 13 nt, Human
uggcagcaggugc

SEQ ID NO: 2296740 - RNA, 20 nt, Human
uggcagcagaguguggccuu

SEQ ID NO: 2296741 - RNA, 14 nt, Human
uggcagcagagugu

SEQ ID NO: 2296742 - RNA, 11 nt, Human
uggcagcagau

SEQ ID NO: 2296743 - RNA, 15 nt, Human
uggcagcaggugcug

SEQ ID NO: 2296744 - RNA, 16 nt, Human
uggcagcaggugcugc

SEQ ID NO: 2296745 - RNA, 17 nt, Human
uggcagcaggugcugcu

SEQ ID NO: 2296746 - RNA, 17 nt, Human
uggcagccgugccuuca

SEQ ID NO: 2296747 - RNA, 20 nt, Human
uggcagcaggugcugcuacc

SEQ ID NO: 2296748 - RNA, 21 nt, Human
uggcagcaggugcugcuaccc

SEQ ID NO: 2296749 - RNA, 13 nt, Human
uggcagcauaaag

SEQ ID NO: 2296750 - RNA, 14 nt, Human
uggcagcauaaagg

SEQ ID NO: 2296751 - RNA, 17 nt, Human
uggcaccagcagccugg

SEQ ID NO: 2296752 - RNA, 16 nt, Human
uggcaccagcagccug

SEQ ID NO: 2296753 - RNA, 23 nt, Human
uggcaccagaggcugcagaaggc

SEQ ID NO: 2296754 - RNA, 19 nt, Human
uggcaccagaggcugcaga

SEQ ID NO: 2296755 - RNA, 20 nt, Human
uggcaccagaggcugcagaa

SEQ ID NO: 2296756 - RNA, 17 nt, Human
uggcaccagacacccag

SEQ ID NO: 2296757 - RNA, 14 nt, Human
uggcaccagaggcu

SEQ ID NO: 2296758 - RNA, 23 nt, Human
uggcaccagacacccaggacuua

SEQ ID NO: 2296759 - RNA, 20 nt, Human
uggcacagcccaaagaagga

SEQ ID NO: 2296760 - RNA, 22 nt, Human
uggcacagaaaccucuacuaaa

SEQ ID NO: 2296761 - RNA, 18 nt, Human
uggcacagcccaaagaag

SEQ ID NO: 2296762 - RNA, 14 nt, Human
uggcacaggacaug

SEQ ID NO: 2296763 - RNA, 21 nt, Human
uggcaccagacacccaggacu

SEQ ID NO: 2296764 - RNA, 20 nt, Human
uggcaccagacacccaggac

SEQ ID NO: 2296765 - RNA, 15 nt, Human
uggcacagggcagug

SEQ ID NO: 2296766 - RNA, 16 nt, Human
uggcacaggcccccuu

SEQ ID NO: 2296767 - RNA, 20 nt, Human
aggcauccuuccucacacca

SEQ ID NO: 2296768 - RNA, 14 nt, Human
uggcacagaaacac

SEQ ID NO: 2296769 - RNA, 23 nt, Human
aggcaucccaggggaccacaccu

SEQ ID NO: 2296770 - RNA, 22 nt, Human
uggcacacaccuguagucccag

SEQ ID NO: 2296771 - RNA, 18 nt, Human
aggcauccuuccucacac

SEQ ID NO: 2296772 - RNA, 18 nt, Human
aggcaucccaggggacca

SEQ ID NO: 2296773 - RNA, 17 nt, Human
aggcaucccaggggacc

SEQ ID NO: 2296774 - RNA, 16 nt, Human
aggcaucccaggggac

SEQ ID NO: 2296775 - RNA, 13 nt, Human
aggcaucccaggg

SEQ ID NO: 2296776 - RNA, 19 nt, Human
aggcauaggccugggugcu

SEQ ID NO: 2296777 - RNA, 18 nt, Human
aggcauaggccugggugc

SEQ ID NO: 2296778 - RNA, 17 nt, Human
aggcauaggccugggug

SEQ ID NO: 2296779 - RNA, 16 nt, Human
aggcauaggccugggu

SEQ ID NO: 2296780 - RNA, 20 nt, Human
aggcauaggccugggugcug

SEQ ID NO: 2296781 - RNA, 20 nt, Human
aggcauaucagucucugagg

SEQ ID NO: 2296782 - RNA, 20 nt, Human
aggcauauugcuuuuucuaa

SEQ ID NO: 2296783 - RNA, 22 nt, Human
aggcauauugcuuuuucuaaug

SEQ ID NO: 2296784 - RNA, 14 nt, Human
aggcaucacagcua

SEQ ID NO: 2296785 - RNA, 19 nt, Human
aggcaucagucccuaugua

SEQ ID NO: 2296786 - RNA, 20 nt, Human
aggcaucagucccuauguau

SEQ ID NO: 2296787 - RNA, 16 nt, Human
aggcaucaugcagagu

SEQ ID NO: 2296788 - RNA, 18 nt, Human
uggcagccgugccuucag

SEQ ID NO: 2296789 - RNA, 19 nt, Human
uggcagccgugccuucagc

SEQ ID NO: 2296790 - RNA, 20 nt, Human
uggcagccgugccuucagcu

SEQ ID NO: 2296791 - RNA, 21 nt, Human
uggcagccgugccuucagcuc

SEQ ID NO: 2296792 - RNA, 14 nt, Human
uggcagcucagaga

SEQ ID NO: 2296793 - RNA, 15 nt, Human
uggcagcucagagag

SEQ ID NO: 2296794 - RNA, 16 nt, Human
uggcagcucagagagg

SEQ ID NO: 2296795 - RNA, 18 nt, Human
uggcagcucagagagggu

SEQ ID NO: 2296796 - RNA, 13 nt, Human
aggccagagacac

SEQ ID NO: 2296797 - RNA, 18 nt, Human
aggccagagacacaagcc

SEQ ID NO: 2296798 - RNA, 18 nt, Human
aggccaugggccuccugu

SEQ ID NO: 2296799 - RNA, 18 nt, Human
aggccagaggcccccagc

SEQ ID NO: 2296800 - RNA, 20 nt, Human
aggccauguuccaauaaaca

SEQ ID NO: 2296801 - RNA, 21 nt, Human
aggccauguuccaauaaacag

SEQ ID NO: 2296802 - RNA, 20 nt, Human
uggcagcauaaaggccuuuu

SEQ ID NO: 2296803 - RNA, 23 nt, Human
aggccagagacacaagccuucgg

SEQ ID NO: 2296804 - RNA, 20 nt, Human
aggccauuccccgucucugg

SEQ ID NO: 2296805 - RNA, 13 nt, Human
aggccauuauugu

SEQ ID NO: 2296806 - RNA, 23 nt, Human
aggccauguuccaauaaacagga

SEQ ID NO: 2296807 - RNA, 15 nt, Human
aggcccagagggccu

SEQ ID NO: 2296808 - RNA, 16 nt, Human
aggcccagagggccug

SEQ ID NO: 2296809 - RNA, 21 nt, Human
aggccccugucucagggugag

SEQ ID NO: 2296810 - RNA, 17 nt, Human
aggccccuggacaagca

SEQ ID NO: 2296811 - RNA, 14 nt, Human
aggccccuggccca

SEQ ID NO: 2296812 - RNA, 15 nt, Human
aggccccuggcccag

SEQ ID NO: 2296813 - RNA, 14 nt, Human
aggcccggcuccag

SEQ ID NO: 2296814 - RNA, 15 nt, Human
aggcccggcuccagg

SEQ ID NO: 2296815 - RNA, 16 nt, Human
aggcccggcuccaggc

SEQ ID NO: 2296816 - RNA, 12 nt, Human
aggccguggcug

SEQ ID NO: 2296817 - RNA, 22 nt, Human
aggccguccucccgggcccucc

SEQ ID NO: 2296818 - RNA, 20 nt, Human
aggccgggugcucagggcug

SEQ ID NO: 2296819 - RNA, 15 nt, Human
aggccggggccgggu

SEQ ID NO: 2296820 - RNA, 19 nt, Human
aggccggggccggguacug

SEQ ID NO: 2296821 - RNA, 13 nt, Human
aggccguccuccc

SEQ ID NO: 2296822 - RNA, 16 nt, Human
aggccguccucccggg

SEQ ID NO: 2296823 - RNA, 17 nt, Human
aggccguccucccgggc

SEQ ID NO: 2296824 - RNA, 21 nt, Human
aggccguccucccgggcccuc

SEQ ID NO: 2296825 - RNA, 16 nt, Human
aggccccuggcccagc

SEQ ID NO: 2296826 - RNA, 20 nt, Human
aggccccuggcccagcggcc

SEQ ID NO: 2296827 - RNA, 21 nt, Human
aggccgggccgaauccccucc

SEQ ID NO: 2296828 - RNA, 13 nt, Human
aggccccugccac

SEQ ID NO: 2296829 - RNA, 15 nt, Human
aggccccugccaccc

SEQ ID NO: 2296830 - RNA, 19 nt, Human
aggcccagagggccugcaa

SEQ ID NO: 2296831 - RNA, 20 nt, Human
aggcccagagggccugcaag

SEQ ID NO: 2296832 - RNA, 17 nt, Human
aggccccugccacccug

SEQ ID NO: 2296833 - RNA, 18 nt, Human
aggccccugccacccugg

SEQ ID NO: 2296834 - RNA, 21 nt, Human
aggccccugccacccugggga

SEQ ID NO: 2296835 - RNA, 12 nt, Human
aggccccuggcc

SEQ ID NO: 2296836 - RNA, 20 nt, Human
aggccguggcugcccacaca

SEQ ID NO: 2296837 - RNA, 22 nt, Human
aggccuacaugcuuugugaaca

SEQ ID NO: 2296838 - RNA, 17 nt, Human
aggccuaaaaguaaaca

SEQ ID NO: 2296839 - RNA, 23 nt, Human
aggccuacaugcuuugugaacaa

SEQ ID NO: 2296840 - RNA, 16 nt, Human
aggccuaccccgcaga

SEQ ID NO: 2296841 - RNA, 19 nt, Human
aggccuaccccgcagacac

SEQ ID NO: 2296842 - RNA, 22 nt, Human
aggccuaccccgcagacaccuu

SEQ ID NO: 2296843 - RNA, 16 nt, Human
aggccuaaaaguaaac

SEQ ID NO: 2296844 - RNA, 16 nt, Human
aggccuauaaccccag

SEQ ID NO: 2296845 - RNA, 14 nt, Human
aggccucugugucc

SEQ ID NO: 2296846 - RNA, 15 nt, Human
aggccucuguguccu

SEQ ID NO: 2296847 - RNA, 16 nt, Human
aggccucuguguccuu

SEQ ID NO: 2296848 - RNA, 20 nt, Human
aggccucuguguccuucccu

SEQ ID NO: 2296849 - RNA, 18 nt, Human
aggccugaaaggagcccu

SEQ ID NO: 2296850 - RNA, 23 nt, Human
aggccugaaagaggcugaggccu

SEQ ID NO: 2296851 - RNA, 17 nt, Human
aggccugaaagaggcug

SEQ ID NO: 2296852 - RNA, 21 nt, Human
aggccugaaagaggcugaggc

SEQ ID NO: 2296853 - RNA, 22 nt, Human
aggccucuguguccuucccugc

SEQ ID NO: 2296854 - RNA, 23 nt, Human
aggccucuguguccuucccugca

SEQ ID NO: 2296855 - RNA, 18 nt, Human
aggccucuuggaccucug

SEQ ID NO: 2296856 - RNA, 21 nt, Human
aggccucuuggaccucugcuc

SEQ ID NO: 2296857 - RNA, 22 nt, Human
aggccucuuggaccucugcucu

SEQ ID NO: 2296858 - RNA, 23 nt, Human
aggccucuuggaccucugcucug

SEQ ID NO: 2296859 - RNA, 24 nt, Human
aggccucuuggaccucugcucuga

SEQ ID NO: 2296860 - RNA, 23 nt, Human
uggcaucaccuuaggcagggaag

SEQ ID NO: 2296861 - RNA, 14 nt, Human
uggcaucagcuggc

SEQ ID NO: 2296862 - RNA, 20 nt, Human
uggcaucacagggcagagcc

SEQ ID NO: 2296863 - RNA, 18 nt, Human
uggcaucacagggcagag

SEQ ID NO: 2296864 - RNA, 15 nt, Human
uggcaucacagggca

SEQ ID NO: 2296865 - RNA, 13 nt, Human
aggccuggccaga

SEQ ID NO: 2296866 - RNA, 15 nt, Human
uggcaucagcuggcg

SEQ ID NO: 2296867 - RNA, 18 nt, Human
uggcaucagcuggcguca

SEQ ID NO: 2296868 - RNA, 11 nt, Human
aggccuggcca

SEQ ID NO: 2296869 - RNA, 23 nt, Human
aggccuggcacagugucugggcu

SEQ ID NO: 2296870 - RNA, 16 nt, Human
aggccuggcacagugu

SEQ ID NO: 2296871 - RNA, 18 nt, Human
aggccuggcacagugucu

SEQ ID NO: 2296872 - RNA, 17 nt, Human
aggccuggacuuuccug

SEQ ID NO: 2296873 - RNA, 13 nt, Human
aggccuggcacag

SEQ ID NO: 2296874 - RNA, 14 nt, Human
aggccuggcacagu

SEQ ID NO: 2296875 - RNA, 15 nt, Human
aggccuggcacagug

SEQ ID NO: 2296876 - RNA, 12 nt, Human
aggccuggccag

SEQ ID NO: 2296877 - RNA, 18 nt, Human
aggccuggacuuuccugc

SEQ ID NO: 2296878 - RNA, 19 nt, Human
aggccuggacuuuccugca

SEQ ID NO: 2296879 - RNA, 22 nt, Human
aggccuggacuuuccugcaacu

SEQ ID NO: 2296880 - RNA, 16 nt, Human
aggccugacucucagc

SEQ ID NO: 2296881 - RNA, 16 nt, Human
uggaagcuguguccuu

SEQ ID NO: 2296882 - RNA, 17 nt, Human
uggaaguccaauguggc

SEQ ID NO: 2296883 - RNA, 20 nt, Human
uggaaguacuauaauuuacc

SEQ ID NO: 2296884 - RNA, 22 nt, Human
uggaagcuagcuccccuccucu

SEQ ID NO: 2296885 - RNA, 18 nt, Human
uggaagcuagcuccccuc

SEQ ID NO: 2296886 - RNA, 20 nt, Human
uggaagcuagcuccccuccu

SEQ ID NO: 2296887 - RNA, 18 nt, Human
uggaagcugcccugccca

SEQ ID NO: 2296888 - RNA, 17 nt, Human
uggaagcugcccugccc

SEQ ID NO: 2296889 - RNA, 13 nt, Human
uggaagcuccgcu

SEQ ID NO: 2296890 - RNA, 18 nt, Human
uggaagcuaauuugcauu

SEQ ID NO: 2296891 - RNA, 12 nt, Human
uggaagcuagcu

SEQ ID NO: 2296892 - RNA, 14 nt, Human
uggaagcuagcucc

SEQ ID NO: 2296893 - RNA, 14 nt, Human
uggaacacucugag

SEQ ID NO: 2296894 - RNA, 17 nt, Human
uggaagcuaauuugcau

SEQ ID NO: 2296895 - RNA, 16 nt, Human
uggaagcuaauuugca

SEQ ID NO: 2296896 - RNA, 12 nt, Human
uggaacacucug

SEQ ID NO: 2296897 - RNA, 14 nt, Human
ugcugcccuaggcu

SEQ ID NO: 2296898 - RNA, 17 nt, Human
ugcugcccgcucugcag

SEQ ID NO: 2296899 - RNA, 22 nt, Human
ugcugcccgucuucagccuagc

SEQ ID NO: 2296900 - RNA, 13 nt, Human
ugcugcccuccau

SEQ ID NO: 2296901 - RNA, 12 nt, Human
ugcugcccugcc

SEQ ID NO: 2296902 - RNA, 15 nt, Human
uggaacacggccaca

SEQ ID NO: 2296903 - RNA, 22 nt, Human
uggaacaccuaccaaaaaauaa

SEQ ID NO: 2296904 - RNA, 21 nt, Human
uggaacaaucuaaaaguuuaa

SEQ ID NO: 2296905 - RNA, 17 nt, Human
uggaacacggccacauc

SEQ ID NO: 2296906 - RNA, 14 nt, Human
ugcugcccccaccc

SEQ ID NO: 2296907 - RNA, 15 nt, Human
ugcugcccccacccc

SEQ ID NO: 2296908 - RNA, 22 nt, Human
ugcugcccccaccccggggacc

SEQ ID NO: 2296909 - RNA, 20 nt, Human
ugcugcccccaccccgggga

SEQ ID NO: 2296910 - RNA, 21 nt, Human
ugcugccccaucagugcuccc

SEQ ID NO: 2296911 - RNA, 19 nt, Human
ugcugccccaucagugcuc

SEQ ID NO: 2296912 - RNA, 18 nt, Human
ugcugccccaucagugcu

SEQ ID NO: 2296913 - RNA, 21 nt, Human
ugcugcccaugccaccgcuuc

SEQ ID NO: 2296914 - RNA, 21 nt, Human
ugcugcccgucuucagccuag

SEQ ID NO: 2296915 - RNA, 20 nt, Human
ugcugcccgucuucagccua

SEQ ID NO: 2296916 - RNA, 17 nt, Human
ugcugcccgucuucagc

SEQ ID NO: 2296917 - RNA, 10 nt, Human
ugcugcccug

SEQ ID NO: 2296918 - RNA, 21 nt, Human
uggaagugagggucagagagg

SEQ ID NO: 2296919 - RNA, 19 nt, Human
uggaagugagggucagaga

SEQ ID NO: 2296920 - RNA, 18 nt, Human
uggaagugagggucagag

SEQ ID NO: 2296921 - RNA, 16 nt, Human
uggaagugaggcauug

SEQ ID NO: 2296922 - RNA, 15 nt, Human
uggaagcuguguccu

SEQ ID NO: 2296923 - RNA, 14 nt, Human
uggaagugaggcau

SEQ ID NO: 2296924 - RNA, 23 nt, Human
uggaagugacuuuggcugcaugc

SEQ ID NO: 2296925 - RNA, 17 nt, Human
uggaagugacuuuggcu

SEQ ID NO: 2296926 - RNA, 15 nt, Human
uggaagugacuuugg

SEQ ID NO: 2296927 - RNA, 14 nt, Human
uggaagugcuaauu

SEQ ID NO: 2296928 - RNA, 14 nt, Human
uggaaguguggguc

SEQ ID NO: 2296929 - RNA, 13 nt, Human
uggaagugugggu

SEQ ID NO: 2296930 - RNA, 15 nt, Human
aggaggccagccuug

SEQ ID NO: 2296931 - RNA, 22 nt, Human
aggaggccaggccggcgagccc

SEQ ID NO: 2296932 - RNA, 16 nt, Human
aggaggccaggcucag

SEQ ID NO: 2296933 - RNA, 12 nt, Human
aggaggccccug

SEQ ID NO: 2296934 - RNA, 13 nt, Human
aggaggccaggcc

SEQ ID NO: 2296935 - RNA, 14 nt, Human
aggaggccacguga

SEQ ID NO: 2296936 - RNA, 19 nt, Human
aggaggccacgugaugugg

SEQ ID NO: 2296937 - RNA, 14 nt, Human
aggaggccaccucu

SEQ ID NO: 2296938 - RNA, 20 nt, Human
uggaagugugggucugugug

SEQ ID NO: 2296939 - RNA, 15 nt, Human
aggaggccaccucuc

SEQ ID NO: 2296940 - RNA, 16 nt, Human
aggaggccaccucucc

SEQ ID NO: 2296941 - RNA, 17 nt, Human
aggaggccaccucucca

SEQ ID NO: 2296942 - RNA, 18 nt, Human
aggaggccaccucuccaa

SEQ ID NO: 2296943 - RNA, 19 nt, Human
aggaggccaccucuccaag

SEQ ID NO: 2296944 - RNA, 20 nt, Human
aggaggccaccucuccaagg

SEQ ID NO: 2296945 - RNA, 22 nt, Human
aggaggccaccucuccaagggc

SEQ ID NO: 2296946 - RNA, 23 nt, Human
aggaggccaccucuccaagggcu

SEQ ID NO: 2296947 - RNA, 20 nt, Human
aggaguuugaggcugcagcg

SEQ ID NO: 2296948 - RNA, 19 nt, Human
aggaguuugaggcugcagc

SEQ ID NO: 2296949 - RNA, 19 nt, Human
aggaguuugagaccagccu

SEQ ID NO: 2296950 - RNA, 16 nt, Human
aggaguuugagaccag

SEQ ID NO: 2296951 - RNA, 21 nt, Human
aggaguuugagaccaaccugg

SEQ ID NO: 2296952 - RNA, 15 nt, Human
aggaggccuccaucu

SEQ ID NO: 2296953 - RNA, 17 nt, Human
aggaggccuccaucuca

SEQ ID NO: 2296954 - RNA, 17 nt, Human
aggaggccccuggccca

SEQ ID NO: 2296955 - RNA, 18 nt, Human
aggaggccccuggcccag

SEQ ID NO: 2296956 - RNA, 16 nt, Human
aggaggccggggccgg

SEQ ID NO: 2296957 - RNA, 12 nt, Human
aggaggccucca

SEQ ID NO: 2296958 - RNA, 19 nt, Human
aggaguuucguuuucaaaa

SEQ ID NO: 2296959 - RNA, 22 nt, Human
aggaucacuggagcccaggagu

SEQ ID NO: 2296960 - RNA, 20 nt, Human
aggaucacuggagcccagga

SEQ ID NO: 2296961 - RNA, 19 nt, Human
aggaucacuggagcccagg

SEQ ID NO: 2296962 - RNA, 18 nt, Human
aggaucacuggagcccag

SEQ ID NO: 2296963 - RNA, 16 nt, Human
aggaucacuggagccc

SEQ ID NO: 2296964 - RNA, 15 nt, Human
aggaucacuggagcc

SEQ ID NO: 2296965 - RNA, 14 nt, Human
aggaucacuggagc

SEQ ID NO: 2296966 - RNA, 24 nt, Human
aggaguuugaggcugcagcgagcu

SEQ ID NO: 2296967 - RNA, 15 nt, Human
aggaucaagaaagug

SEQ ID NO: 2296968 - RNA, 23 nt, Human
aggauauguucacaccuagcguc

SEQ ID NO: 2296969 - RNA, 21 nt, Human
aggauauguucacaccuagcg

SEQ ID NO: 2296970 - RNA, 12 nt, Human
aggcaagagaau

SEQ ID NO: 2296971 - RNA, 16 nt, Human
aggauuuuaugcuuua

SEQ ID NO: 2296972 - RNA, 16 nt, Human
aggcaacuugggaacu

SEQ ID NO: 2296973 - RNA, 19 nt, Human
aggcaacugcauuggcuuu

SEQ ID NO: 2296974 - RNA, 14 nt, Human
aggcaagcaccucc

SEQ ID NO: 2296975 - RNA, 24 nt, Human
aggcaagagggguggagacugcuu

SEQ ID NO: 2296976 - RNA, 17 nt, Human
aggcaagagggggugga

SEQ ID NO: 2296977 - RNA, 21 nt, Human
aggcaagaggggguggagggg

SEQ ID NO: 2296978 - RNA, 13 nt, Human
aggcaagaggggu

SEQ ID NO: 2296979 - RNA, 14 nt, Human
uggaauuugaaaca

SEQ ID NO: 2296980 - RNA, 22 nt, Human
uggaauuugcaagucauggcug

SEQ ID NO: 2296981 - RNA, 16 nt, Human
uggaauuuguaaccuc

SEQ ID NO: 2296982 - RNA, 17 nt, Human
uggaauuuguaaccuca

SEQ ID NO: 2296983 - RNA, 18 nt, Human
uggaauuuguaaccucag

SEQ ID NO: 2296984 - RNA, 19 nt, Human
uggaauuuguaaccucagc

SEQ ID NO: 2296985 - RNA, 14 nt, Human
uggaauuuguaagu

SEQ ID NO: 2296986 - RNA, 16 nt, Human
uggaauuuguaaguuu

SEQ ID NO: 2296987 - RNA, 12 nt, Human
uggaauuuuuca

SEQ ID NO: 2296988 - RNA, 23 nt, Human
uggaauuuuucauugauaugaaa

SEQ ID NO: 2296989 - RNA, 21 nt, Human
uggacaccaggagucccuggu

SEQ ID NO: 2296990 - RNA, 22 nt, Human
uggacaagcagagguggccaga

SEQ ID NO: 2296991 - RNA, 20 nt, Human
uggacaccccuuauccagga

SEQ ID NO: 2296992 - RNA, 20 nt, Human
uggacaccaggagucccugg

SEQ ID NO: 2296993 - RNA, 15 nt, Human
uggacaccggaaaca

SEQ ID NO: 2296994 - RNA, 21 nt, Human
uggacaccccuuauccaggac

SEQ ID NO: 2296995 - RNA, 22 nt, Human
uggacaccccuuauccaggacu

SEQ ID NO: 2296996 - RNA, 14 nt, Human
aggaucucucagga

SEQ ID NO: 2296997 - RNA, 15 nt, Human
aggaucucucaggag

SEQ ID NO: 2296998 - RNA, 19 nt, Human
aggaucucucaggagcaca

SEQ ID NO: 2296999 - RNA, 20 nt, Human
aggaucucucaggagcacag

SEQ ID NO: 2297000 - RNA, 22 nt, Human
aggaugcuaacaucuaaaaaua

SEQ ID NO: 2297001 - RNA, 21 nt, Human
aggaucucucaggagcacagg

SEQ ID NO: 2297002 - RNA, 22 nt, Human
aggaucucucaggagcacaggc

SEQ ID NO: 2297003 - RNA, 23 nt, Human
aggaugcuaacaucuaaaaauag

SEQ ID NO: 2297004 - RNA, 16 nt, Human
aggaugcuuguacaua

SEQ ID NO: 2297005 - RNA, 15 nt, Human
aggaugcuuguacau

SEQ ID NO: 2297006 - RNA, 12 nt, Human
aggaucagucug

SEQ ID NO: 2297007 - RNA, 21 nt, Human
aggauccugagccagauuuca

SEQ ID NO: 2297008 - RNA, 16 nt, Human
aggaucagauugcaug

SEQ ID NO: 2297009 - RNA, 18 nt, Human
aggaucacagugcugaga

SEQ ID NO: 2297010 - RNA, 14 nt, Human
aggaucuagagggg

SEQ ID NO: 2297011 - RNA, 16 nt, Human
aggaucuagaaugugu

SEQ ID NO: 2297012 - RNA, 22 nt, Human
aggaucuagaauguguuuucug

SEQ ID NO: 2297013 - RNA, 13 nt, Human
aggaucucucagg

SEQ ID NO: 2297014 - RNA, 16 nt, Human
aggauugugauauuuu

SEQ ID NO: 2297015 - RNA, 19 nt, Human
aggauuguaaaaaaaaaug

SEQ ID NO: 2297016 - RNA, 23 nt, Human
aggauuguaaaaaaaaaugccuu

SEQ ID NO: 2297017 - RNA, 12 nt, Human
aggauuuaacag

SEQ ID NO: 2297018 - RNA, 16 nt, Human
aggauuuaacagucau

SEQ ID NO: 2297019 - RNA, 16 nt, Human
aggauuucaagccugc

SEQ ID NO: 2297020 - RNA, 15 nt, Human
aggauuucaagccug

SEQ ID NO: 2297021 - RNA, 14 nt, Human
aggauuucaagccu

SEQ ID NO: 2297022 - RNA, 21 nt, Human
aggauuuaacagucauuuaaa

SEQ ID NO: 2297023 - RNA, 12 nt, Human
aggauuucaagc

SEQ ID NO: 2297024 - RNA, 18 nt, Human
aggauuuaacagucauuu

SEQ ID NO: 2297025 - RNA, 20 nt, Human
aggauuuaacagucauuuaa

SEQ ID NO: 2297026 - RNA, 19 nt, Human
aggauuucaugauuucauu

SEQ ID NO: 2297027 - RNA, 20 nt, Human
aggauuucaugauuucauuu

SEQ ID NO: 2297028 - RNA, 13 nt, Human
aggauuucguggg

SEQ ID NO: 2297029 - RNA, 19 nt, Human
aggauuuuaacaaaagcaa

SEQ ID NO: 2297030 - RNA, 15 nt, Human
aggauuuuaugcuuu

SEQ ID NO: 2297031 - RNA, 14 nt, Human
aggauuuuaugcuu

SEQ ID NO: 2297032 - RNA, 11 nt, Human
aggauuuuaug

SEQ ID NO: 2297033 - RNA, 23 nt, Human
aggauuuuaacaaaagcaagacu

SEQ ID NO: 2297034 - RNA, 20 nt, Human
aggauugcuugagcccagga

SEQ ID NO: 2297035 - RNA, 19 nt, Human
aggauugcuugagcccagg

SEQ ID NO: 2297036 - RNA, 18 nt, Human
aggauugcuugagcccag

SEQ ID NO: 2297037 - RNA, 17 nt, Human
aggauugcuugagccca

SEQ ID NO: 2297038 - RNA, 22 nt, Human
aggauugcuugagcccaggagu

SEQ ID NO: 2297039 - RNA, 21 nt, Human
aggauugcuugagcccaggag

SEQ ID NO: 2297040 - RNA, 13 nt, Human
aggauuguaaaaa

SEQ ID NO: 2297041 - RNA, 22 nt, Human
aggauugcuacuguccuaccca

SEQ ID NO: 2297042 - RNA, 18 nt, Human
aggaugcuuguacauaau

SEQ ID NO: 2297043 - RNA, 21 nt, Human
aggcaggucuugaacuccugg

SEQ ID NO: 2297044 - RNA, 16 nt, Human
aggcagguagccaggg

SEQ ID NO: 2297045 - RNA, 19 nt, Human
aggcaguaauaaaaagauu

SEQ ID NO: 2297046 - RNA, 16 nt, Human
aggcagguccccagac

SEQ ID NO: 2297047 - RNA, 15 nt, Human
aggcagguccccaga

SEQ ID NO: 2297048 - RNA, 14 nt, Human
aggcagguccccag

SEQ ID NO: 2297049 - RNA, 13 nt, Human
aggcaggucccca

SEQ ID NO: 2297050 - RNA, 12 nt, Human
aggcaggucccc

SEQ ID NO: 2297051 - RNA, 16 nt, Human
aggcagugggucccac

SEQ ID NO: 2297052 - RNA, 18 nt, Human
aggcagugggucccacuu

SEQ ID NO: 2297053 - RNA, 19 nt, Human
aggcagugggucccacuuc

SEQ ID NO: 2297054 - RNA, 19 nt, Human
aggcagugaugcuggaugc

SEQ ID NO: 2297055 - RNA, 22 nt, Human
aggcagugcaagagacucuggc

SEQ ID NO: 2297056 - RNA, 23 nt, Human
aggcagucgggggcuggccuagg

SEQ ID NO: 2297057 - RNA, 18 nt, Human
aggcagucgggggcuggc

SEQ ID NO: 2297058 - RNA, 19 nt, Human
aggcagucgggggcuggcc

SEQ ID NO: 2297059 - RNA, 20 nt, Human
aggcagucgggggcuggccu

SEQ ID NO: 2297060 - RNA, 21 nt, Human
aggcagucgggggcuggccua

SEQ ID NO: 2297061 - RNA, 22 nt, Human
aggcagucgggggcuggccuag

SEQ ID NO: 2297062 - RNA, 20 nt, Human
aggcagggccuugcccagag

SEQ ID NO: 2297063 - RNA, 14 nt, Human
aggcagggugcagu

SEQ ID NO: 2297064 - RNA, 19 nt, Human
aggcagggccuugcccaga

SEQ ID NO: 2297065 - RNA, 22 nt, Human
aggcagggucucacucugucgc

SEQ ID NO: 2297066 - RNA, 14 nt, Human
aggcagguagccag

SEQ ID NO: 2297067 - RNA, 15 nt, Human
aggcagguagccagg

SEQ ID NO: 2297068 - RNA, 11 nt, Human
aggcagguccc

SEQ ID NO: 2297069 - RNA, 14 nt, Human
aggcagguccaggg

SEQ ID NO: 2297070 - RNA, 19 nt, Human
aggcagggucucacucugu

SEQ ID NO: 2297071 - RNA, 18 nt, Human
aggcagggucucacucug

SEQ ID NO: 2297072 - RNA, 20 nt, Human
aggcagggucucacucuguc

SEQ ID NO: 2297073 - RNA, 21 nt, Human
aggcagggucucacucugucg

SEQ ID NO: 2297074 - RNA, 12 nt, Human
aggcaggauggc

SEQ ID NO: 2297075 - RNA, 20 nt, Human
aggcaggaguuucguuuuca

SEQ ID NO: 2297076 - RNA, 23 nt, Human
aggcaggaccuucgggcugugcc

SEQ ID NO: 2297077 - RNA, 22 nt, Human
aggcaggaccuucgggcugugc

SEQ ID NO: 2297078 - RNA, 21 nt, Human
aggcaggaccuucgggcugug

SEQ ID NO: 2297079 - RNA, 14 nt, Human
aggcagcgccaagc

SEQ ID NO: 2297080 - RNA, 19 nt, Human
aggcagcgccaagcaaccu

SEQ ID NO: 2297081 - RNA, 20 nt, Human
aggcagcgccaagcaaccug

SEQ ID NO: 2297082 - RNA, 16 nt, Human
aggcagggaggggacu

SEQ ID NO: 2297083 - RNA, 14 nt, Human
aggcagggagggga

SEQ ID NO: 2297084 - RNA, 13 nt, Human
aggcagggagggg

SEQ ID NO: 2297085 - RNA, 12 nt, Human
aggcagggaggg

SEQ ID NO: 2297086 - RNA, 16 nt, Human
aggcagggagggccug

SEQ ID NO: 2297087 - RNA, 14 nt, Human
aggcagggauuuga

SEQ ID NO: 2297088 - RNA, 15 nt, Human
aggcagggauuugag

SEQ ID NO: 2297089 - RNA, 16 nt, Human
aggcagggauuugagg

SEQ ID NO: 2297090 - RNA, 23 nt, Human
aggcagggaaguccccaggcccc

SEQ ID NO: 2297091 - RNA, 19 nt, Human
aggcagggaaguccccagg

SEQ ID NO: 2297092 - RNA, 13 nt, Human
aggcagggaaguc

SEQ ID NO: 2297093 - RNA, 21 nt, Human
aggcagggaaguguaagaaac

SEQ ID NO: 2297094 - RNA, 12 nt, Human
aggcagggaagu

SEQ ID NO: 2297095 - RNA, 17 nt, Human
aggcaggagaaucacuu

SEQ ID NO: 2297096 - RNA, 23 nt, Human
aggcaggacaugcugaagccaaa

SEQ ID NO: 2297097 - RNA, 15 nt, Human
aggcacccaccauca

SEQ ID NO: 2297098 - RNA, 19 nt, Human
aggcagccccauucugccu

SEQ ID NO: 2297099 - RNA, 20 nt, Human
aggcagccccauucugccug

SEQ ID NO: 2297100 - RNA, 21 nt, Human
aggcagccccauucugccugc

SEQ ID NO: 2297101 - RNA, 20 nt, Human
aggcagcccugucugaagga

SEQ ID NO: 2297102 - RNA, 22 nt, Human
aggcagccccauucugccugcc

SEQ ID NO: 2297103 - RNA, 20 nt, Human
aggcagccuggacauagaga

SEQ ID NO: 2297104 - RNA, 22 nt, Human
aggcagccuggacauagagagg

SEQ ID NO: 2297105 - RNA, 20 nt, Human
aggcagcucuaaaugucaau

SEQ ID NO: 2297106 - RNA, 14 nt, Human
uggacuuuguucac

SEQ ID NO: 2297107 - RNA, 24 nt, Human
uggacuuuguuaguuucuccaagc

SEQ ID NO: 2297108 - RNA, 12 nt, Human
uggagaagagag

SEQ ID NO: 2297109 - RNA, 17 nt, Human
uggagaagacccucccc

SEQ ID NO: 2297110 - RNA, 20 nt, Human
uggagaagagagaggaaagg

SEQ ID NO: 2297111 - RNA, 14 nt, Human
uggagaagagagga

SEQ ID NO: 2297112 - RNA, 19 nt, Human
uggagaagagaggagagga

SEQ ID NO: 2297113 - RNA, 16 nt, Human
uggagaagaacugaaa

SEQ ID NO: 2297114 - RNA, 13 nt, Human
uggagaagcagug

SEQ ID NO: 2297115 - RNA, 16 nt, Human
uggagaagagaggaga

SEQ ID NO: 2297116 - RNA, 18 nt, Human
uggagaagccacaggccu

SEQ ID NO: 2297117 - RNA, 19 nt, Human
uggagaagccacaggccug

SEQ ID NO: 2297118 - RNA, 20 nt, Human
uggagaagccacaggccuga

SEQ ID NO: 2297119 - RNA, 16 nt, Human
uggagcccacuguacu

SEQ ID NO: 2297120 - RNA, 19 nt, Human
uggagcccacuguacuugc

SEQ ID NO: 2297121 - RNA, 23 nt, Human
uggagcccacuguacuugcucuu

SEQ ID NO: 2297122 - RNA, 21 nt, Human
uggaccccaucugugaauaag

SEQ ID NO: 2297123 - RNA, 20 nt, Human
uggaccccaucugugaauaa

SEQ ID NO: 2297124 - RNA, 18 nt, Human
uggaccccaucugugaau

SEQ ID NO: 2297125 - RNA, 16 nt, Human
uggaccccaucuguga

SEQ ID NO: 2297126 - RNA, 14 nt, Human
uggacccccagcuu

SEQ ID NO: 2297127 - RNA, 23 nt, Human
uggaccccagcugggaggcaaga

SEQ ID NO: 2297128 - RNA, 13 nt, Human
uggacccccagcu

SEQ ID NO: 2297129 - RNA, 13 nt, Human
uggaccccagcug

SEQ ID NO: 2297130 - RNA, 14 nt, Human
uggaccccagcugg

SEQ ID NO: 2297131 - RNA, 15 nt, Human
uggaccccagcuggg

SEQ ID NO: 2297132 - RNA, 16 nt, Human
uggaccccagcuggga

SEQ ID NO: 2297133 - RNA, 18 nt, Human
uggaccccagcugggagg

SEQ ID NO: 2297134 - RNA, 19 nt, Human
uggaccccagcugggaggc

SEQ ID NO: 2297135 - RNA, 20 nt, Human
uggaccccagcugggaggca

SEQ ID NO: 2297136 - RNA, 23 nt, Human
uggacaccccuuauccaggacuc

SEQ ID NO: 2297137 - RNA, 22 nt, Human
uggacuuuguuaguuucuccaa

SEQ ID NO: 2297138 - RNA, 11 nt, Human
uggacuuuguu

SEQ ID NO: 2297139 - RNA, 14 nt, Human
uggacccgcucugg

SEQ ID NO: 2297140 - RNA, 19 nt, Human
uggacccgcucuggaccaa

SEQ ID NO: 2297141 - RNA, 15 nt, Human
uggacccgcucugga

SEQ ID NO: 2297142 - RNA, 16 nt, Human
uggacccgcucuggac

SEQ ID NO: 2297143 - RNA, 11 nt, Human
uggagaagcca

SEQ ID NO: 2297144 - RNA, 21 nt, Human
uggagaagccacaggccugag

SEQ ID NO: 2297145 - RNA, 15 nt, Human
uggagcccagaggag

SEQ ID NO: 2297146 - RNA, 19 nt, Human
uggagcccagaggagggca

SEQ ID NO: 2297147 - RNA, 13 nt, Human
uggagcccaggcg

SEQ ID NO: 2297148 - RNA, 12 nt, Human
uggagccgaggc

SEQ ID NO: 2297149 - RNA, 20 nt, Human
uggagcccagaggagggcag

SEQ ID NO: 2297150 - RNA, 23 nt, Human
uggagcccagaggagggcagcag

SEQ ID NO: 2297151 - RNA, 22 nt, Human
uggagccuagagugagggccug

SEQ ID NO: 2297152 - RNA, 22 nt, Human
uggagccggacuuucggaguug

SEQ ID NO: 2297153 - RNA, 23 nt, Human
uggagccggacuuucggaguugg

SEQ ID NO: 2297154 - RNA, 17 nt, Human
uggagccgaggccuacc

SEQ ID NO: 2297155 - RNA, 16 nt, Human
uggagcccaggcggga

SEQ ID NO: 2297156 - RNA, 20 nt, Human
uggagccggacuuucggagu

SEQ ID NO: 2297157 - RNA, 11 nt, Human
uggagccugca

SEQ ID NO: 2297158 - RNA, 18 nt, Human
uggagcuggcgucugucu

SEQ ID NO: 2297159 - RNA, 21 nt, Human
uggagcuucauggcagaaggc

SEQ ID NO: 2297160 - RNA, 13 nt, Human
uggagcugccuga

SEQ ID NO: 2297161 - RNA, 15 nt, Human
uggagcugccugaua

SEQ ID NO: 2297162 - RNA, 17 nt, Human
uggagcugagccucuca

SEQ ID NO: 2297163 - RNA, 14 nt, Human
uggagccuguguaa

SEQ ID NO: 2297164 - RNA, 15 nt, Human
uggagcugagccucu

SEQ ID NO: 2297165 - RNA, 13 nt, Human
uggagcugagccu

SEQ ID NO: 2297166 - RNA, 14 nt, Human
uggagccuggugcc

SEQ ID NO: 2297167 - RNA, 12 nt, Human
uggagccugugu

SEQ ID NO: 2297168 - RNA, 13 nt, Human
uggagccugcagg

SEQ ID NO: 2297169 - RNA, 16 nt, Human
uggagccugcagagcu

SEQ ID NO: 2297170 - RNA, 23 nt, Human
uggagccugcaggguggugcugg

SEQ ID NO: 2297171 - RNA, 15 nt, Human
uggagccugcagggu

SEQ ID NO: 2297172 - RNA, 13 nt, Human
uggagccuggugc

SEQ ID NO: 2297173 - RNA, 16 nt, Human
uggagccuguguaaca

SEQ ID NO: 2297174 - RNA, 15 nt, Human
aggcaaugcuggcug

SEQ ID NO: 2297175 - RNA, 21 nt, Human
uggaggaaaaccaagccgugg

SEQ ID NO: 2297176 - RNA, 23 nt, Human
uggaggaaaaccaagccguggcu

SEQ ID NO: 2297177 - RNA, 19 nt, Human
aggcaaugucaggaacaga

SEQ ID NO: 2297178 - RNA, 17 nt, Human
aggcaaugucaggaaca

SEQ ID NO: 2297179 - RNA, 14 nt, Human
uggagcuuuuuucc

SEQ ID NO: 2297180 - RNA, 16 nt, Human
uggagcuuuuuucuuu

SEQ ID NO: 2297181 - RNA, 21 nt, Human
uggagcuuuuuucuuuaagau

SEQ ID NO: 2297182 - RNA, 13 nt, Human
uggaggaaagcaa

SEQ ID NO: 2297183 - RNA, 16 nt, Human
aggcaaugcuggcugu

SEQ ID NO: 2297184 - RNA, 17 nt, Human
aggcacauggaggagcu

SEQ ID NO: 2297185 - RNA, 14 nt, Human
aggcacauggagga

SEQ ID NO: 2297186 - RNA, 13 nt, Human
aggcacauggagg

SEQ ID NO: 2297187 - RNA, 17 nt, Human
aggcacagugaaggcug

SEQ ID NO: 2297188 - RNA, 23 nt, Human
aggcaaugucaggaacagaagga

SEQ ID NO: 2297189 - RNA, 22 nt, Human
aggcaaugucaggaacagaagg

SEQ ID NO: 2297190 - RNA, 17 nt, Human
aggcacaaaaugaugga

SEQ ID NO: 2297191 - RNA, 13 nt, Human
aggcacaaaauga

SEQ ID NO: 2297192 - RNA, 16 nt, Human
aggaaaauaguaaugu

SEQ ID NO: 2297193 - RNA, 19 nt, Human
aggaaaaguacauuuaaua

SEQ ID NO: 2297194 - RNA, 22 nt, Human
aggaaaaguacauuuaauacag

SEQ ID NO: 2297195 - RNA, 15 nt, Human
aggaaacccagcucu

SEQ ID NO: 2297196 - RNA, 16 nt, Human
aggaaacccagcucug

SEQ ID NO: 2297197 - RNA, 17 nt, Human
aggaaacccagcucugg

SEQ ID NO: 2297198 - RNA, 14 nt, Human
aggaaaauccucug

SEQ ID NO: 2297199 - RNA, 23 nt, Human
aggaaaccaguuaggucucaaua

SEQ ID NO: 2297200 - RNA, 21 nt, Human
aggaaacccagcucuggucca

SEQ ID NO: 2297201 - RNA, 18 nt, Human
aggaaacccagcucuggu

SEQ ID NO: 2297202 - RNA, 20 nt, Human
aggaaacccagcucuggucc

SEQ ID NO: 2297203 - RNA, 19 nt, Human
agcuuugaaggccgaaggc

SEQ ID NO: 2297204 - RNA, 22 nt, Human
agcuuugaaggccgaaggcagu

SEQ ID NO: 2297205 - RNA, 18 nt, Human
aggaaaaggugauaucca

SEQ ID NO: 2297206 - RNA, 21 nt, Human
aggaaaaggugauauccauuc

SEQ ID NO: 2297207 - RNA, 16 nt, Human
aggaaaaguacauuua

SEQ ID NO: 2297208 - RNA, 19 nt, Human
agcuuugaaaauucagugg

SEQ ID NO: 2297209 - RNA, 18 nt, Human
agcuuugaaaauucagug

SEQ ID NO: 2297210 - RNA, 16 nt, Human
agcuuugaaaauucag

SEQ ID NO: 2297211 - RNA, 12 nt, Human
agcuuugaaaau

SEQ ID NO: 2297212 - RNA, 22 nt, Human
aggaaagauuuuuguuguuauu

SEQ ID NO: 2297213 - RNA, 14 nt, Human
ugcuauagccuggg

SEQ ID NO: 2297214 - RNA, 13 nt, Human
ugcuauacugcau

SEQ ID NO: 2297215 - RNA, 21 nt, Human
ugcuauaacuauguugauaaa

SEQ ID NO: 2297216 - RNA, 16 nt, Human
ugcuagucuuaagaac

SEQ ID NO: 2297217 - RNA, 20 nt, Human
aggaaagaaugaaagaguaa

SEQ ID NO: 2297218 - RNA, 16 nt, Human
ugcuaguaauuggaaa

SEQ ID NO: 2297219 - RNA, 16 nt, Human
aggaaagaggcucugg

SEQ ID NO: 2297220 - RNA, 17 nt, Human
aggaaagcaaaggagau

SEQ ID NO: 2297221 - RNA, 14 nt, Human
aggaaaaugaauaa

SEQ ID NO: 2297222 - RNA, 19 nt, Human
aggaaagcaaaggagauug

SEQ ID NO: 2297223 - RNA, 14 nt, Human
ugcuaguaauugga

SEQ ID NO: 2297224 - RNA, 17 nt, Human
aggaaagaaagaaggaa

SEQ ID NO: 2297225 - RNA, 18 nt, Human
aggaaacucuuaucucag

SEQ ID NO: 2297226 - RNA, 22 nt, Human
aggaaacucuuaucucagucau

SEQ ID NO: 2297227 - RNA, 19 nt, Human
aggaaacuggguuccugca

SEQ ID NO: 2297228 - RNA, 12 nt, Human
aggaaacucuua

SEQ ID NO: 2297229 - RNA, 13 nt, Human
aggaaacucuuau

SEQ ID NO: 2297230 - RNA, 17 nt, Human
aggaaacucuuaucuca

SEQ ID NO: 2297231 - RNA, 23 nt, Human
aggaaacucaccugcuggccccu

SEQ ID NO: 2297232 - RNA, 22 nt, Human
aggaaacucaccugcuggcccc

SEQ ID NO: 2297233 - RNA, 21 nt, Human
aggaaacucaccugcuggccc

SEQ ID NO: 2297234 - RNA, 20 nt, Human
aggaaacucaccugcuggcc

SEQ ID NO: 2297235 - RNA, 17 nt, Human
aggaaacucaccugcug

SEQ ID NO: 2297236 - RNA, 16 nt, Human
aggaaacucaccugcu

SEQ ID NO: 2297237 - RNA, 21 nt, Human
aggaaacucugcauucuagua

SEQ ID NO: 2297238 - RNA, 22 nt, Human
aggaaacuccacaucugccuua

SEQ ID NO: 2297239 - RNA, 20 nt, Human
aggaaacuccugacagucuu

SEQ ID NO: 2297240 - RNA, 16 nt, Human
aggaaacuccacaucu

SEQ ID NO: 2297241 - RNA, 19 nt, Human
aggaaacuccacaucugcc

SEQ ID NO: 2297242 - RNA, 20 nt, Human
aggaaacuccacaucugccu

SEQ ID NO: 2297243 - RNA, 21 nt, Human
aggaaacuccacaucugccuu

SEQ ID NO: 2297244 - RNA, 12 nt, Human
aggaaagaggcu

SEQ ID NO: 2297245 - RNA, 13 nt, Human
aggaaagaggcuc

SEQ ID NO: 2297246 - RNA, 13 nt, Human
aggaaagagaacu

SEQ ID NO: 2297247 - RNA, 19 nt, Human
aggaaagagaacuuccaga

SEQ ID NO: 2297248 - RNA, 22 nt, Human
agcuuucuguccuuuuggcacu

SEQ ID NO: 2297249 - RNA, 20 nt, Human
agcuuucuguccuuuuggca

SEQ ID NO: 2297250 - RNA, 16 nt, Human
agcuugggacaaauca

SEQ ID NO: 2297251 - RNA, 19 nt, Human
agcuuguaaauagcucagg

SEQ ID NO: 2297252 - RNA, 23 nt, Human
agcuuggcuguagaaggagacag

SEQ ID NO: 2297253 - RNA, 16 nt, Human
agcuuggcuguagaag

SEQ ID NO: 2297254 - RNA, 14 nt, Human
agcuugggaaugga

SEQ ID NO: 2297255 - RNA, 12 nt, Human
agcuugggaaug

SEQ ID NO: 2297256 - RNA, 20 nt, Human
agcuuguaaauagcucaggu

SEQ ID NO: 2297257 - RNA, 21 nt, Human
agcuuguaaauagcucaggug

SEQ ID NO: 2297258 - RNA, 23 nt, Human
agcuuggaaacuggaugagguca

SEQ ID NO: 2297259 - RNA, 17 nt, Human
agcuuggaaaggaccag

SEQ ID NO: 2297260 - RNA, 16 nt, Human
agcuuggaagagccug

SEQ ID NO: 2297261 - RNA, 17 nt, Human
agcuuggaagagccugc

SEQ ID NO: 2297262 - RNA, 18 nt, Human
agcuuggaagagccugca

SEQ ID NO: 2297263 - RNA, 14 nt, Human
agcuuggccagaag

SEQ ID NO: 2297264 - RNA, 21 nt, Human
agcuuggcagccgagcucgug

SEQ ID NO: 2297265 - RNA, 17 nt, Human
agcuuggcagccgagcu

SEQ ID NO: 2297266 - RNA, 20 nt, Human
agcuuggcagccgagcucgu

SEQ ID NO: 2297267 - RNA, 12 nt, Human
agcuuggcagcc

SEQ ID NO: 2297268 - RNA, 13 nt, Human
agcuuggcagccg

SEQ ID NO: 2297269 - RNA, 14 nt, Human
agcuuggcagccga

SEQ ID NO: 2297270 - RNA, 15 nt, Human
agcuuggcagccgag

SEQ ID NO: 2297271 - RNA, 20 nt, Human
agcuugcugcccuaggcucc

SEQ ID NO: 2297272 - RNA, 22 nt, Human
agcuuauucaucuguuuuucuu

SEQ ID NO: 2297273 - RNA, 21 nt, Human
agcuuauugucuagugaaacu

SEQ ID NO: 2297274 - RNA, 19 nt, Human
agcuuaucaugcugucuuu

SEQ ID NO: 2297275 - RNA, 15 nt, Human
agcuuauuaaaacuc

SEQ ID NO: 2297276 - RNA, 20 nt, Human
agcuuauuaaaacucauuuu

SEQ ID NO: 2297277 - RNA, 15 nt, Human
agcuuaucucagggg

SEQ ID NO: 2297278 - RNA, 14 nt, Human
agcuuaucucaggg

SEQ ID NO: 2297279 - RNA, 15 nt, Human
agcuuaucaugcugu

SEQ ID NO: 2297280 - RNA, 13 nt, Human
agcuuaggcaggg

SEQ ID NO: 2297281 - RNA, 12 nt, Human
agcuuaucucag

SEQ ID NO: 2297282 - RNA, 18 nt, Human
agcuguuuucccugaccu

SEQ ID NO: 2297283 - RNA, 14 nt, Human
agcuguuuucuucu

SEQ ID NO: 2297284 - RNA, 17 nt, Human
agcuuagccaauguggg

SEQ ID NO: 2297285 - RNA, 16 nt, Human
agcuuagcaggagagg

SEQ ID NO: 2297286 - RNA, 22 nt, Human
agcuuagcaggagaggagagcc

SEQ ID NO: 2297287 - RNA, 14 nt, Human
agcuuagcaggaga

SEQ ID NO: 2297288 - RNA, 20 nt, Human
agcuuaaaggggcuagagug

SEQ ID NO: 2297289 - RNA, 19 nt, Human
ugcuaccuggguccuuuuc

SEQ ID NO: 2297290 - RNA, 21 nt, Human
ugcuacccucccugcuguccc

SEQ ID NO: 2297291 - RNA, 13 nt, Human
ugcuaccucaguc

SEQ ID NO: 2297292 - RNA, 16 nt, Human
ugcuaccucagucagu

SEQ ID NO: 2297293 - RNA, 22 nt, Human
ugcuaccuggguccuuuucaga

SEQ ID NO: 2297294 - RNA, 23 nt, Human
ugcuaccuggguccuuuucagaa

SEQ ID NO: 2297295 - RNA, 20 nt, Human
ugcuacgccugcauguaaac

SEQ ID NO: 2297296 - RNA, 19 nt, Human
ugcuacguacaugugaggc

SEQ ID NO: 2297297 - RNA, 16 nt, Human
ugcuacgccugcaugu

SEQ ID NO: 2297298 - RNA, 13 nt, Human
ugcuacgccugca

SEQ ID NO: 2297299 - RNA, 15 nt, Human
agcuguuuucccuga

SEQ ID NO: 2297300 - RNA, 18 nt, Human
agcuguuuuaguuaaauu

SEQ ID NO: 2297301 - RNA, 20 nt, Human
agcuguuuuaguuaaauuuc

SEQ ID NO: 2297302 - RNA, 13 nt, Human
agcuguuugucau

SEQ ID NO: 2297303 - RNA, 14 nt, Human
agcuguuuccauag

SEQ ID NO: 2297304 - RNA, 13 nt, Human
ugcuacgugugau

SEQ ID NO: 2297305 - RNA, 14 nt, Human
ugcuacgugugauu

SEQ ID NO: 2297306 - RNA, 15 nt, Human
ugcuacgugugauuu

SEQ ID NO: 2297307 - RNA, 16 nt, Human
ugcuacgugugauuuu

SEQ ID NO: 2297308 - RNA, 22 nt, Human
ugcuaccucacugggguccugg

SEQ ID NO: 2297309 - RNA, 16 nt, Human
ugcuaccucacugggg

SEQ ID NO: 2297310 - RNA, 15 nt, Human
ugcuaccucacuggg

SEQ ID NO: 2297311 - RNA, 14 nt, Human
ugcuaccucacugg

SEQ ID NO: 2297312 - RNA, 14 nt, Human
ugcgaguauguguu

SEQ ID NO: 2297313 - RNA, 15 nt, Human
ugcgaguauguguuu

SEQ ID NO: 2297314 - RNA, 17 nt, Human
ugcuacccucccugcug

SEQ ID NO: 2297315 - RNA, 18 nt, Human
ugcuacccucccugcugu

SEQ ID NO: 2297316 - RNA, 19 nt, Human
ugcuacccucccugcuguc

SEQ ID NO: 2297317 - RNA, 20 nt, Human
ugcuacccucccugcugucc

SEQ ID NO: 2297318 - RNA, 23 nt, Human
ugcuacccucccugcuguccccu

SEQ ID NO: 2297319 - RNA, 20 nt, Human
ugcggacagccacggccagg

SEQ ID NO: 2297320 - RNA, 21 nt, Human
ugcggacagccacggccaggc

SEQ ID NO: 2297321 - RNA, 19 nt, Human
ugcucugugcccacccucc

SEQ ID NO: 2297322 - RNA, 22 nt, Human
ugcucuguaaucucguuucaaa

SEQ ID NO: 2297323 - RNA, 22 nt, Human
ugcucugucuucuuugcccaca

SEQ ID NO: 2297324 - RNA, 17 nt, Human
ugcugacuguuuucucu

SEQ ID NO: 2297325 - RNA, 20 nt, Human
ugcucugcaggcaccuuagu

SEQ ID NO: 2297326 - RNA, 17 nt, Human
ugcucuggacaggcaug

SEQ ID NO: 2297327 - RNA, 18 nt, Human
ugcucugcauguuacaua

SEQ ID NO: 2297328 - RNA, 15 nt, Human
ugcucugcauguuac

SEQ ID NO: 2297329 - RNA, 19 nt, Human
ugcuauccagcuauuuuua

SEQ ID NO: 2297330 - RNA, 22 nt, Human
ugcuauauuuucaugacuuuuc

SEQ ID NO: 2297331 - RNA, 16 nt, Human
ugcuauauuuucauga

SEQ ID NO: 2297332 - RNA, 18 nt, Human
ugcuauauuuucaugacu

SEQ ID NO: 2297333 - RNA, 23 nt, Human
ugcuauaggcuggagaagcucac

SEQ ID NO: 2297334 - RNA, 19 nt, Human
ugcuauaggcuggagaagc

SEQ ID NO: 2297335 - RNA, 20 nt, Human
ugcuauaggcuggagaagcu

SEQ ID NO: 2297336 - RNA, 19 nt, Human
ugcucugaucauccacugu

SEQ ID NO: 2297337 - RNA, 20 nt, Human
ugcuauccugccaaaaucau

SEQ ID NO: 2297338 - RNA, 22 nt, Human
ugcuauccauuucucauguuuu

SEQ ID NO: 2297339 - RNA, 15 nt, Human
ugcuauccauuucuc

SEQ ID NO: 2297340 - RNA, 14 nt, Human
ugcuaucacacagu

SEQ ID NO: 2297341 - RNA, 22 nt, Human
ugcucugaucauccacugugcc

SEQ ID NO: 2297342 - RNA, 19 nt, Human
ugcucugaucccucuacag

SEQ ID NO: 2297343 - RNA, 16 nt, Human
ugcucugaucccucua

SEQ ID NO: 2297344 - RNA, 14 nt, Human
ugcucugaucccuc

SEQ ID NO: 2297345 - RNA, 13 nt, Human
ugcucugaucccu

SEQ ID NO: 2297346 - RNA, 15 nt, Human
ugcucugcaggcacc

SEQ ID NO: 2297347 - RNA, 16 nt, Human
ugcucugcaggcaccu

SEQ ID NO: 2297348 - RNA, 19 nt, Human
ugcucugcaggcaccuuag

SEQ ID NO: 2297349 - RNA, 19 nt, Human
ugcucugaugaagaggagu

SEQ ID NO: 2297350 - RNA, 18 nt, Human
ugcucugaugaagaggag

SEQ ID NO: 2297351 - RNA, 20 nt, Human
aggaaagccccagcacuaac

SEQ ID NO: 2297352 - RNA, 19 nt, Human
aggaaagccccagcacuaa

SEQ ID NO: 2297353 - RNA, 22 nt, Human
aggaaaggccagcuggcagcag

SEQ ID NO: 2297354 - RNA, 16 nt, Human
aggaaaggccagcugg

SEQ ID NO: 2297355 - RNA, 15 nt, Human
aggaaaggccagcug

SEQ ID NO: 2297356 - RNA, 14 nt, Human
aggaaaggccagcu

SEQ ID NO: 2297357 - RNA, 13 nt, Human
aggaaaggccagc

SEQ ID NO: 2297358 - RNA, 18 nt, Human
aggaaaggcuccaggagc

SEQ ID NO: 2297359 - RNA, 20 nt, Human
aggaaaggcuccaggagcag

SEQ ID NO: 2297360 - RNA, 22 nt, Human
aggaaaggcuccaggagcagcc

SEQ ID NO: 2297361 - RNA, 14 nt, Human
aggaaauauuuauu

SEQ ID NO: 2297362 - RNA, 18 nt, Human
aggaaauauuuauuuuaa

SEQ ID NO: 2297363 - RNA, 16 nt, Human
ugcugagggaccagcc

SEQ ID NO: 2297364 - RNA, 14 nt, Human
ugcugagggaccag

SEQ ID NO: 2297365 - RNA, 12 nt, Human
ugcucuuagcug

SEQ ID NO: 2297366 - RNA, 15 nt, Human
ugcucuuagcugucu

SEQ ID NO: 2297367 - RNA, 20 nt, Human
ugcugagggaccagccaaga

SEQ ID NO: 2297368 - RNA, 19 nt, Human
ugcugagggaccagccaag

SEQ ID NO: 2297369 - RNA, 17 nt, Human
ugcugagggaccagcca

SEQ ID NO: 2297370 - RNA, 21 nt, Human
ugcugaguauguuaagcucuu

SEQ ID NO: 2297371 - RNA, 24 nt, Human
ugcugacuguuuucucuugagagg

SEQ ID NO: 2297372 - RNA, 21 nt, Human
ugcugacuguuuucucuugag

SEQ ID NO: 2297373 - RNA, 16 nt, Human
aggaaagcaauaaaug

SEQ ID NO: 2297374 - RNA, 19 nt, Human
aggaaagcaauaaaugaau

SEQ ID NO: 2297375 - RNA, 18 nt, Human
aggaaagcaauaaaugaa

SEQ ID NO: 2297376 - RNA, 22 nt, Human
aggaaagcaauaaaugaauggg

SEQ ID NO: 2297377 - RNA, 15 nt, Human
ugcugagucucccaa

SEQ ID NO: 2297378 - RNA, 16 nt, Human
ugcugagucucccaag

SEQ ID NO: 2297379 - RNA, 17 nt, Human
ugcugagucucccaagg

SEQ ID NO: 2297380 - RNA, 22 nt, Human
ugcugagucccaggcugagccu

SEQ ID NO: 2297381 - RNA, 18 nt, Human
ugcugagucccaggcuga

SEQ ID NO: 2297382 - RNA, 15 nt, Human
ugcugagucccaggc

SEQ ID NO: 2297383 - RNA, 16 nt, Human
aggaauuuucuuugug

SEQ ID NO: 2297384 - RNA, 14 nt, Human
aggaauuuucuuug

SEQ ID NO: 2297385 - RNA, 22 nt, Human
aggaauuuuauuuuuuucugaa

SEQ ID NO: 2297386 - RNA, 18 nt, Human
aggacaaaaaugaacuga

SEQ ID NO: 2297387 - RNA, 16 nt, Human
aggacaaacagcucag

SEQ ID NO: 2297388 - RNA, 19 nt, Human
aggacaaaaaugaacugaa

SEQ ID NO: 2297389 - RNA, 14 nt, Human
aggacaaccauucc

SEQ ID NO: 2297390 - RNA, 11 nt, Human
ugcugccaucc

SEQ ID NO: 2297391 - RNA, 22 nt, Human
ugcugccacacuucaggcucuu

SEQ ID NO: 2297392 - RNA, 14 nt, Human
ugcugccacuuuuu

SEQ ID NO: 2297393 - RNA, 15 nt, Human
ugcugccacacuuca

SEQ ID NO: 2297394 - RNA, 16 nt, Human
ugcugccacacuucag

SEQ ID NO: 2297395 - RNA, 19 nt, Human
ugcugccacacuucaggcu

SEQ ID NO: 2297396 - RNA, 21 nt, Human
ugcugccauccagguucagcu

SEQ ID NO: 2297397 - RNA, 22 nt, Human
ugcugccauccagguucagcuu

SEQ ID NO: 2297398 - RNA, 14 nt, Human
ugcugcccagccuc

SEQ ID NO: 2297399 - RNA, 16 nt, Human
ugcugcccagccucca

SEQ ID NO: 2297400 - RNA, 16 nt, Human
ugcugcccaggcccag

SEQ ID NO: 2297401 - RNA, 14 nt, Human
ugcugcccaugcca

SEQ ID NO: 2297402 - RNA, 16 nt, Human
ugcugcccaugccacc

SEQ ID NO: 2297403 - RNA, 12 nt, Human
ugcugccaucca

SEQ ID NO: 2297404 - RNA, 13 nt, Human
ugcugccauccag

SEQ ID NO: 2297405 - RNA, 14 nt, Human
ugcugccauccagg

SEQ ID NO: 2297406 - RNA, 15 nt, Human
ugcugccauccaggu

SEQ ID NO: 2297407 - RNA, 18 nt, Human
aggaaaggccagcuggca

SEQ ID NO: 2297408 - RNA, 17 nt, Human
aggaaaggccagcuggc

SEQ ID NO: 2297409 - RNA, 21 nt, Human
aggaaaggccagcuggcagca

SEQ ID NO: 2297410 - RNA, 19 nt, Human
aggaaaucaaauaugcaaa

SEQ ID NO: 2297411 - RNA, 15 nt, Human
aggaagacuuuggaa

SEQ ID NO: 2297412 - RNA, 14 nt, Human
aggaagagaaacca

SEQ ID NO: 2297413 - RNA, 14 nt, Human
aggaagagaaaaaa

SEQ ID NO: 2297414 - RNA, 20 nt, Human
aggaagagcaggcacaugga

SEQ ID NO: 2297415 - RNA, 17 nt, Human
aggaagagcaggcacau

SEQ ID NO: 2297416 - RNA, 12 nt, Human
aggaagagcagg

SEQ ID NO: 2297417 - RNA, 14 nt, Human
aggaagagagcaug

SEQ ID NO: 2297418 - RNA, 17 nt, Human
aggaagcucagggccug

SEQ ID NO: 2297419 - RNA, 18 nt, Human
aggaagcucagggccugg

SEQ ID NO: 2297420 - RNA, 22 nt, Human
aggaagcucagggccuggcuca

SEQ ID NO: 2297421 - RNA, 23 nt, Human
aggaaugaaauccugcuucagug

SEQ ID NO: 2297422 - RNA, 19 nt, Human
aggaauugacccacaagaa

SEQ ID NO: 2297423 - RNA, 20 nt, Human
aggaaucgaggaaccagagc

SEQ ID NO: 2297424 - RNA, 19 nt, Human
aggaaucgaggaaccagag

SEQ ID NO: 2297425 - RNA, 15 nt, Human
aggaagcuccacugu

SEQ ID NO: 2297426 - RNA, 16 nt, Human
aggaagcucucuuucc

SEQ ID NO: 2297427 - RNA, 23 nt, Human
aggaagagcaggcacauggagga

SEQ ID NO: 2297428 - RNA, 23 nt, Human
aggaauccagacccggcugcgug

SEQ ID NO: 2297429 - RNA, 16 nt, Human
ugcccuugucccacuc

SEQ ID NO: 2297430 - RNA, 19 nt, Human
ugcccuuggaggccagcca

SEQ ID NO: 2297431 - RNA, 17 nt, Human
ugcccuugucccacuca

SEQ ID NO: 2297432 - RNA, 13 nt, Human
ugcccuugucuga

SEQ ID NO: 2297433 - RNA, 14 nt, Human
ugcccuugucugag

SEQ ID NO: 2297434 - RNA, 15 nt, Human
ugcccuugucugaga

SEQ ID NO: 2297435 - RNA, 17 nt, Human
ugcccuuggaggccagc

SEQ ID NO: 2297436 - RNA, 19 nt, Human
ugcccuugcccugaccucc

SEQ ID NO: 2297437 - RNA, 17 nt, Human
ugcccuugcccugaccu

SEQ ID NO: 2297438 - RNA, 18 nt, Human
ugcccuugcccugaccuc

SEQ ID NO: 2297439 - RNA, 14 nt, Human
agcugccagagaag

SEQ ID NO: 2297440 - RNA, 13 nt, Human
ugcccuugcccug

SEQ ID NO: 2297441 - RNA, 14 nt, Human
ugcccuugcccuga

SEQ ID NO: 2297442 - RNA, 15 nt, Human
ugcccuugcccugac

SEQ ID NO: 2297443 - RNA, 13 nt, Human
agcugccagagaa

SEQ ID NO: 2297444 - RNA, 12 nt, Human
agcugccagaga

SEQ ID NO: 2297445 - RNA, 14 nt, Human
agcugccagccgag

SEQ ID NO: 2297446 - RNA, 13 nt, Human
agcugccaccugc

SEQ ID NO: 2297447 - RNA, 16 nt, Human
agcugauuuuaacaau

SEQ ID NO: 2297448 - RNA, 15 nt, Human
agcugauuuuaacaa

SEQ ID NO: 2297449 - RNA, 20 nt, Human
agcugauguuggaagagaaa

SEQ ID NO: 2297450 - RNA, 21 nt, Human
agcugauguuggaagagaaag

SEQ ID NO: 2297451 - RNA, 16 nt, Human
agcugcaccugccagc

SEQ ID NO: 2297452 - RNA, 19 nt, Human
agcugauuuuaacaauaac

SEQ ID NO: 2297453 - RNA, 18 nt, Human
agcugcauacaguuugca

SEQ ID NO: 2297454 - RNA, 22 nt, Human
agcugcauccuccaagaaucua

SEQ ID NO: 2297455 - RNA, 18 nt, Human
agcugcauccuccaagaa

SEQ ID NO: 2297456 - RNA, 19 nt, Human
agcugcauccuccaagaau

SEQ ID NO: 2297457 - RNA, 21 nt, Human
agcugcauccuccaagaaucu

SEQ ID NO: 2297458 - RNA, 21 nt, Human
agcugcaccugccagccuggc

SEQ ID NO: 2297459 - RNA, 18 nt, Human
agcugcaccugccagccu

SEQ ID NO: 2297460 - RNA, 22 nt, Human
agcugcaccugccagccuggcu

SEQ ID NO: 2297461 - RNA, 21 nt, Human
ugccgcgucgcccucccaggc

SEQ ID NO: 2297462 - RNA, 16 nt, Human
ugccgcgucgcccucc

SEQ ID NO: 2297463 - RNA, 24 nt, Human
ugccgccuccccacggccgcucca

SEQ ID NO: 2297464 - RNA, 18 nt, Human
ugccgccucccagccugg

SEQ ID NO: 2297465 - RNA, 10 nt, Human
ugccgccugc

SEQ ID NO: 2297466 - RNA, 17 nt, Human
ugccgccucccagccug

SEQ ID NO: 2297467 - RNA, 19 nt, Human
ugccgaaugugcagguuug

SEQ ID NO: 2297468 - RNA, 16 nt, Human
ugccgccucccagccu

SEQ ID NO: 2297469 - RNA, 13 nt, Human
ugccgaaccagga

SEQ ID NO: 2297470 - RNA, 15 nt, Human
ugcccuuucugggca

SEQ ID NO: 2297471 - RNA, 20 nt, Human
ugccgcgucgcccucccagg

SEQ ID NO: 2297472 - RNA, 12 nt, Human
ugccgccugccc

SEQ ID NO: 2297473 - RNA, 14 nt, Human
ugccggaugugcuu

SEQ ID NO: 2297474 - RNA, 20 nt, Human
ugccggcucuuuccuugcuc

SEQ ID NO: 2297475 - RNA, 15 nt, Human
ugccggcccuggggc

SEQ ID NO: 2297476 - RNA, 16 nt, Human
ugccggccggggcuga

SEQ ID NO: 2297477 - RNA, 14 nt, Human
ugccggcccugggg

SEQ ID NO: 2297478 - RNA, 20 nt, Human
ugccucaucuauaacaugca

SEQ ID NO: 2297479 - RNA, 19 nt, Human
ugccucaguguauuuguau

SEQ ID NO: 2297480 - RNA, 22 nt, Human
ugccucauuuagagaggaaaag

SEQ ID NO: 2297481 - RNA, 21 nt, Human
ugccucauuuuagaaccacca

SEQ ID NO: 2297482 - RNA, 19 nt, Human
ugccggguucuagucuccu

SEQ ID NO: 2297483 - RNA, 18 nt, Human
ugccucaguaaaaugaac

SEQ ID NO: 2297484 - RNA, 15 nt, Human
ugccucaguguauuu

SEQ ID NO: 2297485 - RNA, 12 nt, Human
ugccuccaccac

SEQ ID NO: 2297486 - RNA, 14 nt, Human
ugccuccaccacca

SEQ ID NO: 2297487 - RNA, 15 nt, Human
ugccuccaccaccac

SEQ ID NO: 2297488 - RNA, 16 nt, Human
ugccuccaccaccacu

SEQ ID NO: 2297489 - RNA, 17 nt, Human
ugccuccaccaccacug

SEQ ID NO: 2297490 - RNA, 19 nt, Human
ugccuccaccaccacuggc

SEQ ID NO: 2297491 - RNA, 17 nt, Human
ugccuccaggugugcac

SEQ ID NO: 2297492 - RNA, 16 nt, Human
ugccucucucaggcca

SEQ ID NO: 2297493 - RNA, 15 nt, Human
ugccucucucaggcc

SEQ ID NO: 2297494 - RNA, 16 nt, Human
ugccucucugcagguc

SEQ ID NO: 2297495 - RNA, 18 nt, Human
ugccucucugcagguccc

SEQ ID NO: 2297496 - RNA, 20 nt, Human
ugccucugacacacagcucu

SEQ ID NO: 2297497 - RNA, 21 nt, Human
ugccucugacacacagcucug

SEQ ID NO: 2297498 - RNA, 19 nt, Human
ugccucucugcaggucccu

SEQ ID NO: 2297499 - RNA, 20 nt, Human
ugccucucugcaggucccua

SEQ ID NO: 2297500 - RNA, 18 nt, Human
ugccuccaccgcugccua

SEQ ID NO: 2297501 - RNA, 17 nt, Human
ugccuccaccgcugccu

SEQ ID NO: 2297502 - RNA, 16 nt, Human
ugccuccaccgcugcc

SEQ ID NO: 2297503 - RNA, 13 nt, Human
ugccuccaccgcu

SEQ ID NO: 2297504 - RNA, 11 nt, Human
ugccuccaccg

SEQ ID NO: 2297505 - RNA, 17 nt, Human
ugccuccacccucugag

SEQ ID NO: 2297506 - RNA, 15 nt, Human
ugccuccacccucug

SEQ ID NO: 2297507 - RNA, 16 nt, Human
ugccuccacccucuga

SEQ ID NO: 2297508 - RNA, 18 nt, Human
ugccuccaccccccagaa

SEQ ID NO: 2297509 - RNA, 12 nt, Human
ugccuccacccu

SEQ ID NO: 2297510 - RNA, 13 nt, Human
ugccuccacccuc

SEQ ID NO: 2297511 - RNA, 14 nt, Human
ugccuccacccucu

SEQ ID NO: 2297512 - RNA, 20 nt, Human
ugccuccaccaccacuggcc

SEQ ID NO: 2297513 - RNA, 21 nt, Human
ugccuccaccaccacuggcca

SEQ ID NO: 2297514 - RNA, 22 nt, Human
ugccuccaccaccacuggccac

SEQ ID NO: 2297515 - RNA, 23 nt, Human
ugccuccaccaccacuggccacc

SEQ ID NO: 2297516 - RNA, 20 nt, Human
ugccuccaccgcugccuaag

SEQ ID NO: 2297517 - RNA, 13 nt, Human
ugccuccaggugu

SEQ ID NO: 2297518 - RNA, 15 nt, Human
ugccuccaggugugc

SEQ ID NO: 2297519 - RNA, 13 nt, Human
ugccucccaucac

SEQ ID NO: 2297520 - RNA, 14 nt, Human
ugccucccaucacc

SEQ ID NO: 2297521 - RNA, 19 nt, Human
ugccucccaucacccgcua

SEQ ID NO: 2297522 - RNA, 13 nt, Human
ugccucucucagg

SEQ ID NO: 2297523 - RNA, 14 nt, Human
ugccucucucaggc

SEQ ID NO: 2297524 - RNA, 20 nt, Human
agcugaugaacuuauucugu

SEQ ID NO: 2297525 - RNA, 22 nt, Human
agcugaugaacuuauucuguag

SEQ ID NO: 2297526 - RNA, 19 nt, Human
agcugauccagagcacaga

SEQ ID NO: 2297527 - RNA, 19 nt, Human
agcucuugaagacacugaa

SEQ ID NO: 2297528 - RNA, 18 nt, Human
agcucuucuuaaaguauu

SEQ ID NO: 2297529 - RNA, 12 nt, Human
agcucuugcccu

SEQ ID NO: 2297530 - RNA, 14 nt, Human
agcucuugcccuuc

SEQ ID NO: 2297531 - RNA, 15 nt, Human
agcucuugcccuucc

SEQ ID NO: 2297532 - RNA, 16 nt, Human
agcucuugcccuuccc

SEQ ID NO: 2297533 - RNA, 23 nt, Human
agcucuucugccggcccuggggc

SEQ ID NO: 2297534 - RNA, 22 nt, Human
agcucuucugccggcccugggg

SEQ ID NO: 2297535 - RNA, 21 nt, Human
agcucuucugccggcccuggg

SEQ ID NO: 2297536 - RNA, 20 nt, Human
agcucuucugccggcccugg

SEQ ID NO: 2297537 - RNA, 16 nt, Human
agcucuucuccccagg

SEQ ID NO: 2297538 - RNA, 17 nt, Human
agcucuucuccccaggu

SEQ ID NO: 2297539 - RNA, 20 nt, Human
agcucuucuccccaggugug

SEQ ID NO: 2297540 - RNA, 18 nt, Human
agcucuucuccaggcugu

SEQ ID NO: 2297541 - RNA, 20 nt, Human
agcucuggugacaccagccu

SEQ ID NO: 2297542 - RNA, 19 nt, Human
agcucuggugacaccagcc

SEQ ID NO: 2297543 - RNA, 17 nt, Human
agcucuggugacaccag

SEQ ID NO: 2297544 - RNA, 21 nt, Human
agcucuggugacaccagccuu

SEQ ID NO: 2297545 - RNA, 23 nt, Human
agcucuggugagucuuggcggca

SEQ ID NO: 2297546 - RNA, 12 nt, Human
agcucuguauca

SEQ ID NO: 2297547 - RNA, 23 nt, Human
agcucuguaucaggacccagagg

SEQ ID NO: 2297548 - RNA, 22 nt, Human
agcucuguaucaggacccagag

SEQ ID NO: 2297549 - RNA, 17 nt, Human
agcucuucuccaggcug

SEQ ID NO: 2297550 - RNA, 12 nt, Human
agcucuguccug

SEQ ID NO: 2297551 - RNA, 17 nt, Human
agcugauguuggaagag

SEQ ID NO: 2297552 - RNA, 14 nt, Human
agcugauuuuaaca

SEQ ID NO: 2297553 - RNA, 17 nt, Human
agcugcacccucaggca

SEQ ID NO: 2297554 - RNA, 13 nt, Human
agcugcacccuca

SEQ ID NO: 2297555 - RNA, 22 nt, Human
agcugcacccucaggcaggugg

SEQ ID NO: 2297556 - RNA, 20 nt, Human
agcugcacccucaggcaggu

SEQ ID NO: 2297557 - RNA, 19 nt, Human
agcugcacccucaggcagg

SEQ ID NO: 2297558 - RNA, 18 nt, Human
agcugcacccucaggcag

SEQ ID NO: 2297559 - RNA, 15 nt, Human
agcucuccccucaga

SEQ ID NO: 2297560 - RNA, 16 nt, Human
agcucuccagcuccaa

SEQ ID NO: 2297561 - RNA, 17 nt, Human
agcucuccagcuccaag

SEQ ID NO: 2297562 - RNA, 13 nt, Human
agcucuccagcuc

SEQ ID NO: 2297563 - RNA, 14 nt, Human
agcucuccagcucc

SEQ ID NO: 2297564 - RNA, 13 nt, Human
agcucucagccaa

SEQ ID NO: 2297565 - RNA, 12 nt, Human
agcucucagcca

SEQ ID NO: 2297566 - RNA, 19 nt, Human
ugcccuccagcucuuuccu

SEQ ID NO: 2297567 - RNA, 18 nt, Human
ugcccuccagcucuuucc

SEQ ID NO: 2297568 - RNA, 17 nt, Human
agcucuaucaccaagga

SEQ ID NO: 2297569 - RNA, 22 nt, Human
agcucuaucaccaaggagccaa

SEQ ID NO: 2297570 - RNA, 22 nt, Human
agcucuauguuuacaaauggac

SEQ ID NO: 2297571 - RNA, 20 nt, Human
agcucuauuaagauuuccaa

SEQ ID NO: 2297572 - RNA, 22 nt, Human
agcucuauuaagauuuccaagu

SEQ ID NO: 2297573 - RNA, 21 nt, Human
ugcccuccacagccgcagccu

SEQ ID NO: 2297574 - RNA, 18 nt, Human
ugcccuccacagccgcag

SEQ ID NO: 2297575 - RNA, 18 nt, Human
ugcccucauuuuauguca

SEQ ID NO: 2297576 - RNA, 21 nt, Human
ugcccucauggccccucugac

SEQ ID NO: 2297577 - RNA, 22 nt, Human
ugcccuccaagaccuucuccuu

SEQ ID NO: 2297578 - RNA, 19 nt, Human
ugcccuccaagaccuucuc

SEQ ID NO: 2297579 - RNA, 20 nt, Human
ugcccuccaagaccuucucc

SEQ ID NO: 2297580 - RNA, 18 nt, Human
agcucucccucuggcccu

SEQ ID NO: 2297581 - RNA, 17 nt, Human
agcucucccucuggccc

SEQ ID NO: 2297582 - RNA, 16 nt, Human
agcucucccucuggcc

SEQ ID NO: 2297583 - RNA, 15 nt, Human
agcucucccucuggc

SEQ ID NO: 2297584 - RNA, 14 nt, Human
agcucucccucugg

SEQ ID NO: 2297585 - RNA, 13 nt, Human
agcucucccucug

SEQ ID NO: 2297586 - RNA, 11 nt, Human
agcucucccuc

SEQ ID NO: 2297587 - RNA, 19 nt, Human
agcucuccagucaggaggc

SEQ ID NO: 2297588 - RNA, 23 nt, Human
agcucucccucuggcccugccuu

SEQ ID NO: 2297589 - RNA, 22 nt, Human
agcucucccucuggcccugccu

SEQ ID NO: 2297590 - RNA, 20 nt, Human
agcucucccucuggcccugc

SEQ ID NO: 2297591 - RNA, 19 nt, Human
agcucucccucuggcccug

SEQ ID NO: 2297592 - RNA, 18 nt, Human
agcucuccggucucucuc

SEQ ID NO: 2297593 - RNA, 16 nt, Human
agcucucuccucccuu

SEQ ID NO: 2297594 - RNA, 23 nt, Human
agcucucggaacugcaugcugcu

SEQ ID NO: 2297595 - RNA, 22 nt, Human
agcucucggaacugcaugcugc

SEQ ID NO: 2297596 - RNA, 20 nt, Human
agcucucggaacugcaugcu

SEQ ID NO: 2297597 - RNA, 18 nt, Human
agcucucggaacugcaug

SEQ ID NO: 2297598 - RNA, 17 nt, Human
agcucucggaacugcau

SEQ ID NO: 2297599 - RNA, 22 nt, Human
agcucugcuccucuccccagca

SEQ ID NO: 2297600 - RNA, 20 nt, Human
agcucugguccauagagagc

SEQ ID NO: 2297601 - RNA, 12 nt, Human
agcucugcuccu

SEQ ID NO: 2297602 - RNA, 14 nt, Human
ugcgaccccaucug

SEQ ID NO: 2297603 - RNA, 15 nt, Human
ugcgaccccaucugc

SEQ ID NO: 2297604 - RNA, 18 nt, Human
ugcgaccccaucugccca

SEQ ID NO: 2297605 - RNA, 19 nt, Human
ugcgaccccaucugcccag

SEQ ID NO: 2297606 - RNA, 20 nt, Human
ugcgaccccaucugcccagg

SEQ ID NO: 2297607 - RNA, 22 nt, Human
ugcgaaugguuccauucucucu

SEQ ID NO: 2297608 - RNA, 18 nt, Human
ugcgaaggggcccugguc

SEQ ID NO: 2297609 - RNA, 21 nt, Human
ugcgaaggggcccugguccuu

SEQ ID NO: 2297610 - RNA, 16 nt, Human
ugcgaaggggcccugg

SEQ ID NO: 2297611 - RNA, 14 nt, Human
ugccuuuuuugauc

SEQ ID NO: 2297612 - RNA, 21 nt, Human
ugccuuuuuucacggaaguuu

SEQ ID NO: 2297613 - RNA, 19 nt, Human
ugcgaaaggaugaaaguga

SEQ ID NO: 2297614 - RNA, 15 nt, Human
ugcgacuuucugccu

SEQ ID NO: 2297615 - RNA, 16 nt, Human
ugcgacuuucugccug

SEQ ID NO: 2297616 - RNA, 17 nt, Human
ugcgacuuucugccugg

SEQ ID NO: 2297617 - RNA, 18 nt, Human
ugcgacuuucugccugga

SEQ ID NO: 2297618 - RNA, 21 nt, Human
ugcgacuuucugccuggagug

SEQ ID NO: 2297619 - RNA, 18 nt, Human
ugcggacagccacggcca

SEQ ID NO: 2297620 - RNA, 22 nt, Human
ugcgaguauguguuugugugug

SEQ ID NO: 2297621 - RNA, 17 nt, Human
ugcggacagccacggcc

SEQ ID NO: 2297622 - RNA, 19 nt, Human
ugccuuuaaaucugugaug

SEQ ID NO: 2297623 - RNA, 15 nt, Human
ugccuuuaaaucugu

SEQ ID NO: 2297624 - RNA, 18 nt, Human
ugccuuuaaaucugugau

SEQ ID NO: 2297625 - RNA, 14 nt, Human
ugccuuuauugugu

SEQ ID NO: 2297626 - RNA, 16 nt, Human
ugccuuuaaaguauga

SEQ ID NO: 2297627 - RNA, 17 nt, Human
ugccuuuaaaguaugaa

SEQ ID NO: 2297628 - RNA, 18 nt, Human
ugccuuuaaaguaugaau

SEQ ID NO: 2297629 - RNA, 14 nt, Human
ugccuuuaaaucug

SEQ ID NO: 2297630 - RNA, 20 nt, Human
ugccuuuauuguguuuguca

SEQ ID NO: 2297631 - RNA, 21 nt, Human
ugccuuuauuguguuugucau

SEQ ID NO: 2297632 - RNA, 13 nt, Human
ugcgaaaggauga

SEQ ID NO: 2297633 - RNA, 20 nt, Human
ugccuuuuuucacggaaguu

SEQ ID NO: 2297634 - RNA, 18 nt, Human
agcugugagccuuggcug

SEQ ID NO: 2297635 - RNA, 21 nt, Human
agcugugagacagugggaaau

SEQ ID NO: 2297636 - RNA, 15 nt, Human
agcugugagccuugg

SEQ ID NO: 2297637 - RNA, 16 nt, Human
agcugugagccuuggc

SEQ ID NO: 2297638 - RNA, 17 nt, Human
agcugugagccuuggcu

SEQ ID NO: 2297639 - RNA, 18 nt, Human
agcugugcagguggggag

SEQ ID NO: 2297640 - RNA, 12 nt, Human
agcugugcaggu

SEQ ID NO: 2297641 - RNA, 10 nt, Human
agcugugcag

SEQ ID NO: 2297642 - RNA, 17 nt, Human
agcugugaccucucccc

SEQ ID NO: 2297643 - RNA, 17 nt, Human
agcugugaacauggacu

SEQ ID NO: 2297644 - RNA, 18 nt, Human
agcugugacuucuccagg

SEQ ID NO: 2297645 - RNA, 18 nt, Human
agcugugagacaguggga

SEQ ID NO: 2297646 - RNA, 19 nt, Human
agcugugagacagugggaa

SEQ ID NO: 2297647 - RNA, 18 nt, Human
agcugggggccaugagcu

SEQ ID NO: 2297648 - RNA, 17 nt, Human
agcuggggcugagggau

SEQ ID NO: 2297649 - RNA, 16 nt, Human
agcugggggccaugag

SEQ ID NO: 2297650 - RNA, 20 nt, Human
agcugggggccaugagcucc

SEQ ID NO: 2297651 - RNA, 17 nt, Human
agcugggggugggccag

SEQ ID NO: 2297652 - RNA, 19 nt, Human
agcugggggugggccaggc

SEQ ID NO: 2297653 - RNA, 18 nt, Human
agcugggggugggccagg

SEQ ID NO: 2297654 - RNA, 21 nt, Human
agcugggggugggccaggcug

SEQ ID NO: 2297655 - RNA, 20 nt, Human
agcugggggugggccaggcu

SEQ ID NO: 2297656 - RNA, 20 nt, Human
agcuggggaagcuucuuaaa

SEQ ID NO: 2297657 - RNA, 16 nt, Human
agcuggggcgugggga

SEQ ID NO: 2297658 - RNA, 18 nt, Human
agcuggggcguggggagg

SEQ ID NO: 2297659 - RNA, 20 nt, Human
agcuggggcguggggagggc

SEQ ID NO: 2297660 - RNA, 15 nt, Human
agcuggggaugucuc

SEQ ID NO: 2297661 - RNA, 20 nt, Human
agcuggggccaggcuggguc

SEQ ID NO: 2297662 - RNA, 23 nt, Human
ugccuuaccuccugcccaggaga

SEQ ID NO: 2297663 - RNA, 15 nt, Human
ugccuuagagccagg

SEQ ID NO: 2297664 - RNA, 19 nt, Human
ugccuuguguacaguuauu

SEQ ID NO: 2297665 - RNA, 19 nt, Human
ugccuugugaaggaauuau

SEQ ID NO: 2297666 - RNA, 21 nt, Human
ugccuuagaaccuuucuuaca

SEQ ID NO: 2297667 - RNA, 19 nt, Human
ugccuuacucuucuugaaa

SEQ ID NO: 2297668 - RNA, 18 nt, Human
ugccuuacucuucuugaa

SEQ ID NO: 2297669 - RNA, 15 nt, Human
ugccuuacucuucuu

SEQ ID NO: 2297670 - RNA, 14 nt, Human
ugccuuagaaccuu

SEQ ID NO: 2297671 - RNA, 17 nt, Human
ugccuuagaaccuuucu

SEQ ID NO: 2297672 - RNA, 21 nt, Human
ugccugugugacaucaguggc

SEQ ID NO: 2297673 - RNA, 14 nt, Human
ugccugugucuucu

SEQ ID NO: 2297674 - RNA, 18 nt, Human
ugccuguuauaacucugc

SEQ ID NO: 2297675 - RNA, 19 nt, Human
ugccuguuauaacucugca

SEQ ID NO: 2297676 - RNA, 20 nt, Human
ugccuguuauaacucugcac

SEQ ID NO: 2297677 - RNA, 11 nt, Human
ugccuguucag

SEQ ID NO: 2297678 - RNA, 15 nt, Human
ugccuguucagcucc

SEQ ID NO: 2297679 - RNA, 16 nt, Human
ugccuguucagcucca

SEQ ID NO: 2297680 - RNA, 21 nt, Human
ugccuuaccuccugcccagga

SEQ ID NO: 2297681 - RNA, 20 nt, Human
ugccuuaccuccugcccagg

SEQ ID NO: 2297682 - RNA, 19 nt, Human
ugccuuaccuccugcccag

SEQ ID NO: 2297683 - RNA, 18 nt, Human
ugccuuaccuccugccca

SEQ ID NO: 2297684 - RNA, 17 nt, Human
ugccuguucagcuccag

SEQ ID NO: 2297685 - RNA, 17 nt, Human
agcugggauguuucugu

SEQ ID NO: 2297686 - RNA, 16 nt, Human
agcugggcagaaggcc

SEQ ID NO: 2297687 - RNA, 18 nt, Human
agcugggcagaaggccaa

SEQ ID NO: 2297688 - RNA, 12 nt, Human
agcugggcccaa

SEQ ID NO: 2297689 - RNA, 15 nt, Human
agcugggcccaaccc

SEQ ID NO: 2297690 - RNA, 20 nt, Human
agcugggcccaacccugucu

SEQ ID NO: 2297691 - RNA, 21 nt, Human
agcugggcccaacccugucug

SEQ ID NO: 2297692 - RNA, 13 nt, Human
agcugggccccag

SEQ ID NO: 2297693 - RNA, 14 nt, Human
agcugggccccagc

SEQ ID NO: 2297694 - RNA, 15 nt, Human
agcugggccccagcc

SEQ ID NO: 2297695 - RNA, 16 nt, Human
agcugggccccagccc

SEQ ID NO: 2297696 - RNA, 14 nt, Human
agcugggcagguug

SEQ ID NO: 2297697 - RNA, 23 nt, Human
agcugggauuacaggcuccugcc

SEQ ID NO: 2297698 - RNA, 22 nt, Human
agcugggauuacaggcuccugc

SEQ ID NO: 2297699 - RNA, 17 nt, Human
agcuggggccaggcugg

SEQ ID NO: 2297700 - RNA, 22 nt, Human
agcuggggaucccuccccccca

SEQ ID NO: 2297701 - RNA, 15 nt, Human
agcuggggaucccuc

SEQ ID NO: 2297702 - RNA, 14 nt, Human
agcuggggaccugg

SEQ ID NO: 2297703 - RNA, 15 nt, Human
agcugggcucugcca

SEQ ID NO: 2297704 - RNA, 11 nt, Human
agcugggcugu

SEQ ID NO: 2297705 - RNA, 20 nt, Human
agcugggccccagcccaccc

SEQ ID NO: 2297706 - RNA, 17 nt, Human
agcugggccccagccca

SEQ ID NO: 2297707 - RNA, 18 nt, Human
agcugggccccagcccac

SEQ ID NO: 2297708 - RNA, 22 nt, Human
agcugggccccagcccacccuc

SEQ ID NO: 2297709 - RNA, 15 nt, Human
agcugggcucugcaa

SEQ ID NO: 2297710 - RNA, 14 nt, Human
agcugggcucugcc

SEQ ID NO: 2297711 - RNA, 22 nt, Human
agcugggcucugccacccuacc

SEQ ID NO: 2297712 - RNA, 21 nt, Human
agcugggaggcauggcccugg

SEQ ID NO: 2297713 - RNA, 22 nt, Human
agcugggaggcauggcccuggg

SEQ ID NO: 2297714 - RNA, 22 nt, Human
agcugggaucacauguggacuu

SEQ ID NO: 2297715 - RNA, 16 nt, Human
agcugggaggcaagag

SEQ ID NO: 2297716 - RNA, 17 nt, Human
agcugggaggcaagagg

SEQ ID NO: 2297717 - RNA, 19 nt, Human
agcugggaggcaagagggg

SEQ ID NO: 2297718 - RNA, 23 nt, Human
agcugggaggcaagaggggugga

SEQ ID NO: 2297719 - RNA, 14 nt, Human
agcugggaggcaug

SEQ ID NO: 2297720 - RNA, 16 nt, Human
agcugggaggcauggc

SEQ ID NO: 2297721 - RNA, 19 nt, Human
agcugggaggcauggcccu

SEQ ID NO: 2297722 - RNA, 20 nt, Human
agcugggaggcauggcccug

SEQ ID NO: 2297723 - RNA, 21 nt, Human
agcugggauuacaggcuccug

SEQ ID NO: 2297724 - RNA, 18 nt, Human
agcugggauuacaggcuc

SEQ ID NO: 2297725 - RNA, 23 nt, Human
agcugggaugauuggagggggga

SEQ ID NO: 2297726 - RNA, 17 nt, Human
agcugggacuacaggug

SEQ ID NO: 2297727 - RNA, 19 nt, Human
agcugggacuacaggugug

SEQ ID NO: 2297728 - RNA, 18 nt, Human
agcugggaggaaaagaaa

SEQ ID NO: 2297729 - RNA, 13 nt, Human
agcugggaggcaa

SEQ ID NO: 2297730 - RNA, 15 nt, Human
agcugggaggaaaag

SEQ ID NO: 2297731 - RNA, 14 nt, Human
agcugggaggaaaa

SEQ ID NO: 2297732 - RNA, 13 nt, Human
agcugggaggaaa

SEQ ID NO: 2297733 - RNA, 12 nt, Human
agcugggaggaa

SEQ ID NO: 2297734 - RNA, 15 nt, Human
agcuggagaagaccc

SEQ ID NO: 2297735 - RNA, 17 nt, Human
agcuggagaaauauggu

SEQ ID NO: 2297736 - RNA, 15 nt, Human
agcuggacuacccac

SEQ ID NO: 2297737 - RNA, 16 nt, Human
agcuggacuacccacg

SEQ ID NO: 2297738 - RNA, 12 nt, Human
agcuggaagcac

SEQ ID NO: 2297739 - RNA, 13 nt, Human
agcuggaaaagua

SEQ ID NO: 2297740 - RNA, 15 nt, Human
agcugccugguauau

SEQ ID NO: 2297741 - RNA, 21 nt, Human
agcugccugggaucccucauc

SEQ ID NO: 2297742 - RNA, 13 nt, Human
agcugccugggau

SEQ ID NO: 2297743 - RNA, 19 nt, Human
agcugccugggaucccuca

SEQ ID NO: 2297744 - RNA, 22 nt, Human
ugccucugacacacagcucugu

SEQ ID NO: 2297745 - RNA, 20 nt, Human
agcugccucucgguggccag

SEQ ID NO: 2297746 - RNA, 23 nt, Human
agcugccuccccucuccuuccug

SEQ ID NO: 2297747 - RNA, 12 nt, Human
agcugccugcuu

SEQ ID NO: 2297748 - RNA, 23 nt, Human
agcugccugcuuuucacugcugc

SEQ ID NO: 2297749 - RNA, 16 nt, Human
agcugccucuucugug

SEQ ID NO: 2297750 - RNA, 14 nt, Human
agcugccucuucug

SEQ ID NO: 2297751 - RNA, 20 nt, Human
agcugccuccccucuccuuc

SEQ ID NO: 2297752 - RNA, 23 nt, Human
agcuauugauauaaauaaaacau

SEQ ID NO: 2297753 - RNA, 17 nt, Human
agcuauugauauaaaua

SEQ ID NO: 2297754 - RNA, 13 nt, Human
agcuauuucaucu

SEQ ID NO: 2297755 - RNA, 21 nt, Human
agcuauuucaucuauuuuugg

SEQ ID NO: 2297756 - RNA, 20 nt, Human
agcuauggugagaugcagcu

SEQ ID NO: 2297757 - RNA, 18 nt, Human
agcuauuuccauuccaga

SEQ ID NO: 2297758 - RNA, 17 nt, Human
agcuauuucaucuauuu

SEQ ID NO: 2297759 - RNA, 14 nt, Human
agcuauuucaucua

SEQ ID NO: 2297760 - RNA, 19 nt, Human
agcuauggugucauaggcu

SEQ ID NO: 2297761 - RNA, 18 nt, Human
agcuauagacccgaggaa

SEQ ID NO: 2297762 - RNA, 17 nt, Human
agcuauagacccgagga

SEQ ID NO: 2297763 - RNA, 17 nt, Human
agcuauaccugugccuc

SEQ ID NO: 2297764 - RNA, 19 nt, Human
agcuauagacccgaggaaa

SEQ ID NO: 2297765 - RNA, 15 nt, Human
agcuauauccaugua

SEQ ID NO: 2297766 - RNA, 14 nt, Human
agcuauauccaugu

SEQ ID NO: 2297767 - RNA, 24 nt, Human
agcuaucuggucaaccuccuggac

SEQ ID NO: 2297768 - RNA, 17 nt, Human
agcuaugggagccccag

SEQ ID NO: 2297769 - RNA, 23 nt, Human
agcuaugcugguaggcuccugcc

SEQ ID NO: 2297770 - RNA, 19 nt, Human
agcuaugggagccccaggg

SEQ ID NO: 2297771 - RNA, 18 nt, Human
agcuaugggagccccagg

SEQ ID NO: 2297772 - RNA, 22 nt, Human
agcuaugggagccccagggucu

SEQ ID NO: 2297773 - RNA, 17 nt, Human
agcuauggugagaugca

SEQ ID NO: 2297774 - RNA, 20 nt, Human
agcuacugauuuccuuugga

SEQ ID NO: 2297775 - RNA, 23 nt, Human
agcuacugauuuccuuuggagcu

SEQ ID NO: 2297776 - RNA, 18 nt, Human
agcuacucaggaggcuga

SEQ ID NO: 2297777 - RNA, 17 nt, Human
agcuacucaggaggcug

SEQ ID NO: 2297778 - RNA, 15 nt, Human
agcuacucaggaggc

SEQ ID NO: 2297779 - RNA, 13 nt, Human
agcuacucaggag

SEQ ID NO: 2297780 - RNA, 22 nt, Human
agcuacucaagaggcugaggca

SEQ ID NO: 2297781 - RNA, 21 nt, Human
agcuacucagaagccugaggc

SEQ ID NO: 2297782 - RNA, 20 nt, Human
agcuacugugugugugaaug

SEQ ID NO: 2297783 - RNA, 19 nt, Human
agcuacugugugugugaau

SEQ ID NO: 2297784 - RNA, 15 nt, Human
agcuacugugugugu

SEQ ID NO: 2297785 - RNA, 19 nt, Human
agcuacugcggaaaaggaa

SEQ ID NO: 2297786 - RNA, 18 nt, Human
agcuacugcggaaaagga

SEQ ID NO: 2297787 - RNA, 16 nt, Human
agcuacugauuuuugu

SEQ ID NO: 2297788 - RNA, 14 nt, Human
agcuacuugggagg

SEQ ID NO: 2297789 - RNA, 21 nt, Human
agcuacuuccuccuccccacu

SEQ ID NO: 2297790 - RNA, 22 nt, Human
agcuacuugggaagcugaggcg

SEQ ID NO: 2297791 - RNA, 23 nt, Human
agcuacugugugugugaaugaac

SEQ ID NO: 2297792 - RNA, 15 nt, Human
agcuacuuccuccuc

SEQ ID NO: 2297793 - RNA, 16 nt, Human
agcuacuuccuccucc

SEQ ID NO: 2297794 - RNA, 23 nt, Human
agcuauaaauuccucuuugcuuu

SEQ ID NO: 2297795 - RNA, 16 nt, Human
agcuauaccugugccu

SEQ ID NO: 2297796 - RNA, 15 nt, Human
agcuauaccugugcc

SEQ ID NO: 2297797 - RNA, 12 nt, Human
agcuaguuuucu

SEQ ID NO: 2297798 - RNA, 18 nt, Human
agcuauaaaaugaauaca

SEQ ID NO: 2297799 - RNA, 22 nt, Human
agcuauuuuuauuuguuugugc

SEQ ID NO: 2297800 - RNA, 16 nt, Human
agcuauuuuuacuaga

SEQ ID NO: 2297801 - RNA, 10 nt, Human
agcuauuuuu

SEQ ID NO: 2297802 - RNA, 20 nt, Human
agcuauuuccauuccagaau

SEQ ID NO: 2297803 - RNA, 15 nt, Human
agcucagggccuggc

SEQ ID NO: 2297804 - RNA, 16 nt, Human
agcucagggccuggcu

SEQ ID NO: 2297805 - RNA, 17 nt, Human
ugccauguuggccaggc

SEQ ID NO: 2297806 - RNA, 17 nt, Human
agcucagggccuggcuc

SEQ ID NO: 2297807 - RNA, 18 nt, Human
ugccauguuggccaggcu

SEQ ID NO: 2297808 - RNA, 19 nt, Human
ugccauguuggccaggcug

SEQ ID NO: 2297809 - RNA, 18 nt, Human
ugcccaaccugcucuccu

SEQ ID NO: 2297810 - RNA, 22 nt, Human
ugcccaaccugcucuccucuug

SEQ ID NO: 2297811 - RNA, 22 nt, Human
ugcccaacccuucccucaccuu

SEQ ID NO: 2297812 - RNA, 20 nt, Human
ugcccaacccuucccucacc

SEQ ID NO: 2297813 - RNA, 18 nt, Human
ugccauucccugccuggg

SEQ ID NO: 2297814 - RNA, 23 nt, Human
ugccauuaucccugaaucccccu

SEQ ID NO: 2297815 - RNA, 23 nt, Human
ugcccaagccagaggcuggguuc

SEQ ID NO: 2297816 - RNA, 23 nt, Human
ugcccaaccugcucuccucuugc

SEQ ID NO: 2297817 - RNA, 24 nt, Human
ugcccaaccugcucuccucuugcc

SEQ ID NO: 2297818 - RNA, 21 nt, Human
agcuauuuuuacuagaacaca

SEQ ID NO: 2297819 - RNA, 18 nt, Human
agcucagggccuggcuca

SEQ ID NO: 2297820 - RNA, 16 nt, Human
ugccauuaucccugaa

SEQ ID NO: 2297821 - RNA, 16 nt, Human
ugccauucacuucaua

SEQ ID NO: 2297822 - RNA, 20 nt, Human
ugccauguuggccaggcugg

SEQ ID NO: 2297823 - RNA, 21 nt, Human
ugccauguuggccaggcuggu

SEQ ID NO: 2297824 - RNA, 16 nt, Human
ugcccacacaccccaa

SEQ ID NO: 2297825 - RNA, 15 nt, Human
ugcccaauuggagga

SEQ ID NO: 2297826 - RNA, 20 nt, Human
ugcccaauaugcaguucugc

SEQ ID NO: 2297827 - RNA, 14 nt, Human
ugcccaacuguuau

SEQ ID NO: 2297828 - RNA, 22 nt, Human
ugcccaaguuguggugcugaca

SEQ ID NO: 2297829 - RNA, 22 nt, Human
ugcccaauaugcaguucugcag

SEQ ID NO: 2297830 - RNA, 14 nt, Human
ugcccaagggaaag

SEQ ID NO: 2297831 - RNA, 22 nt, Human
ugcccaagccagaggcuggguu

SEQ ID NO: 2297832 - RNA, 14 nt, Human
ugcccacaggauca

SEQ ID NO: 2297833 - RNA, 15 nt, Human
ugcccaggcaggucu

SEQ ID NO: 2297834 - RNA, 16 nt, Human
ugcccaggcaggucuu

SEQ ID NO: 2297835 - RNA, 17 nt, Human
ugcccaggcaggucuug

SEQ ID NO: 2297836 - RNA, 20 nt, Human
ugcccaggcaggucuugaac

SEQ ID NO: 2297837 - RNA, 11 nt, Human
ugcccaggccc

SEQ ID NO: 2297838 - RNA, 14 nt, Human
ugcccaggcccaga

SEQ ID NO: 2297839 - RNA, 15 nt, Human
ugcccaggccugccu

SEQ ID NO: 2297840 - RNA, 17 nt, Human
ugcccaggccugccugu

SEQ ID NO: 2297841 - RNA, 15 nt, Human
ugcccaggcccagac

SEQ ID NO: 2297842 - RNA, 22 nt, Human
ugcccccaccccggggacccug

SEQ ID NO: 2297843 - RNA, 17 nt, Human
ugcccccacugaccaga

SEQ ID NO: 2297844 - RNA, 23 nt, Human
ugcccccaccccggggacccugu

SEQ ID NO: 2297845 - RNA, 11 nt, Human
ugcccccagga

SEQ ID NO: 2297846 - RNA, 13 nt, Human
ugcccccagcugg

SEQ ID NO: 2297847 - RNA, 14 nt, Human
ugcccccagcuggc

SEQ ID NO: 2297848 - RNA, 14 nt, Human
ugcccccagccccg

SEQ ID NO: 2297849 - RNA, 16 nt, Human
ugcccccagccccggg

SEQ ID NO: 2297850 - RNA, 20 nt, Human
ugcccccagccccgggguga

SEQ ID NO: 2297851 - RNA, 12 nt, Human
ugcccaggcccc

SEQ ID NO: 2297852 - RNA, 14 nt, Human
ugcccaggccccug

SEQ ID NO: 2297853 - RNA, 16 nt, Human
ugcccaauuggaggaa

SEQ ID NO: 2297854 - RNA, 21 nt, Human
ugcccaauuggaggaaagcaa

SEQ ID NO: 2297855 - RNA, 20 nt, Human
ugcccaggccccugccaccc

SEQ ID NO: 2297856 - RNA, 22 nt, Human
ugcccaggccccugccacccug

SEQ ID NO: 2297857 - RNA, 21 nt, Human
ugcccccugguggacaguccu

SEQ ID NO: 2297858 - RNA, 13 nt, Human
ugcccccuggugg

SEQ ID NO: 2297859 - RNA, 12 nt, Human
ugcccccuggug

SEQ ID NO: 2297860 - RNA, 16 nt, Human
ugcccccugcuggcuc

SEQ ID NO: 2297861 - RNA, 22 nt, Human
ugcccccugcuggcucuucugc

SEQ ID NO: 2297862 - RNA, 13 nt, Human
ugcccccugcugg

SEQ ID NO: 2297863 - RNA, 14 nt, Human
ugcccccugcuggc

SEQ ID NO: 2297864 - RNA, 20 nt, Human
ugccccccaccccagccuaa

SEQ ID NO: 2297865 - RNA, 18 nt, Human
ugccccccaccccagccu

SEQ ID NO: 2297866 - RNA, 14 nt, Human
ugccccccagccuc

SEQ ID NO: 2297867 - RNA, 15 nt, Human
ugccccccagccucu

SEQ ID NO: 2297868 - RNA, 19 nt, Human
ugccccccagccucuggca

SEQ ID NO: 2297869 - RNA, 12 nt, Human
ugccccccaucc

SEQ ID NO: 2297870 - RNA, 20 nt, Human
ugccccccagccucuggcau

SEQ ID NO: 2297871 - RNA, 16 nt, Human
ugccccccauccuggc

SEQ ID NO: 2297872 - RNA, 13 nt, Human
ugccccccauccu

SEQ ID NO: 2297873 - RNA, 14 nt, Human
ugccccccauccug

SEQ ID NO: 2297874 - RNA, 13 nt, Human
ugccccccacccc

SEQ ID NO: 2297875 - RNA, 12 nt, Human
ugccccccaccc

SEQ ID NO: 2297876 - RNA, 15 nt, Human
ugcccccagggcacu

SEQ ID NO: 2297877 - RNA, 17 nt, Human
ugccccccaccccagcc

SEQ ID NO: 2297878 - RNA, 16 nt, Human
ugccccccaccccagc

SEQ ID NO: 2297879 - RNA, 15 nt, Human
ugccccccaccccag

SEQ ID NO: 2297880 - RNA, 14 nt, Human
ugccccccacccca

SEQ ID NO: 2297881 - RNA, 12 nt, Human
ugccccccagcc

SEQ ID NO: 2297882 - RNA, 12 nt, Human
ugcccccaggac

SEQ ID NO: 2297883 - RNA, 13 nt, Human
ugcccccaggacu

SEQ ID NO: 2297884 - RNA, 14 nt, Human
ugcccccaggacug

SEQ ID NO: 2297885 - RNA, 15 nt, Human
ugcccccaggacugg

SEQ ID NO: 2297886 - RNA, 16 nt, Human
ugcccccaggacuggg

SEQ ID NO: 2297887 - RNA, 17 nt, Human
ugcccccaggacugggc

SEQ ID NO: 2297888 - RNA, 19 nt, Human
ugcccccaggacugggcca

SEQ ID NO: 2297889 - RNA, 16 nt, Human
ugcccccagcuggccc

SEQ ID NO: 2297890 - RNA, 14 nt, Human
ugcccccagggcac

SEQ ID NO: 2297891 - RNA, 18 nt, Human
ugcccuaggcuccgucag

SEQ ID NO: 2297892 - RNA, 16 nt, Human
ugcccucaaucccagc

SEQ ID NO: 2297893 - RNA, 12 nt, Human
ugcccucagggg

SEQ ID NO: 2297894 - RNA, 12 nt, Human
ugcccucaggga

SEQ ID NO: 2297895 - RNA, 17 nt, Human
ugcccucauggccccuc

SEQ ID NO: 2297896 - RNA, 19 nt, Human
ugcccucauggccccucug

SEQ ID NO: 2297897 - RNA, 23 nt, Human
ugcccucauggccccucugaccu

SEQ ID NO: 2297898 - RNA, 14 nt, Human
ugcccuaggcuccg

SEQ ID NO: 2297899 - RNA, 14 nt, Human
ugcccuagcuccac

SEQ ID NO: 2297900 - RNA, 13 nt, Human
ugcccuagcucca

SEQ ID NO: 2297901 - RNA, 23 nt, Human
ugcccuagagcacacuguagcau

SEQ ID NO: 2297902 - RNA, 21 nt, Human
ugccccgugcagacuggaggg

SEQ ID NO: 2297903 - RNA, 23 nt, Human
ugccccuagcuuagagccucccu

SEQ ID NO: 2297904 - RNA, 17 nt, Human
ugcccuagagcacacug

SEQ ID NO: 2297905 - RNA, 16 nt, Human
ugccccuagcuuagag

SEQ ID NO: 2297906 - RNA, 19 nt, Human
ugccccgucaccaucucag

SEQ ID NO: 2297907 - RNA, 18 nt, Human
ugccccgucaccaucuca

SEQ ID NO: 2297908 - RNA, 17 nt, Human
ugccccgucaccaucuc

SEQ ID NO: 2297909 - RNA, 22 nt, Human
ugcccccuucucccacacugcu

SEQ ID NO: 2297910 - RNA, 20 nt, Human
ugcccccuucucccacacug

SEQ ID NO: 2297911 - RNA, 19 nt, Human
ugcccccuucucccacacu

SEQ ID NO: 2297912 - RNA, 18 nt, Human
ugcccccuucucccacac

SEQ ID NO: 2297913 - RNA, 17 nt, Human
ugcccccuucucccaca

SEQ ID NO: 2297914 - RNA, 16 nt, Human
ugcccccuucucccac

SEQ ID NO: 2297915 - RNA, 15 nt, Human
ugcccccuucuccca

SEQ ID NO: 2297916 - RNA, 13 nt, Human
ugcccccuucucc

SEQ ID NO: 2297917 - RNA, 12 nt, Human
ugcccccuucuc

SEQ ID NO: 2297918 - RNA, 22 nt, Human
ugcccccugguggacaguccug

SEQ ID NO: 2297919 - RNA, 21 nt, Human
ugccccgucaccaucucaggc

SEQ ID NO: 2297920 - RNA, 20 nt, Human
ugccccgucaccaucucagg

SEQ ID NO: 2297921 - RNA, 22 nt, Human
ugccccguccacggcucuaggu

SEQ ID NO: 2297922 - RNA, 18 nt, Human
ugccccgugcagacugga

SEQ ID NO: 2297923 - RNA, 16 nt, Human
ugccccgugcagacug

SEQ ID NO: 2297924 - RNA, 18 nt, Human
ugccccgucccccucugg

SEQ ID NO: 2297925 - RNA, 16 nt, Human
ugccccgucccccucu

SEQ ID NO: 2297926 - RNA, 19 nt, Human
agcggcugagucaugaucu

SEQ ID NO: 2297927 - RNA, 16 nt, Human
agcggcugagucauga

SEQ ID NO: 2297928 - RNA, 22 nt, Human
agcggccggccagccccuggcc

SEQ ID NO: 2297929 - RNA, 20 nt, Human
agcggccccuugacucuggg

SEQ ID NO: 2297930 - RNA, 23 nt, Human
agcggccccuugacucuggggac

SEQ ID NO: 2297931 - RNA, 18 nt, Human
agcggccggccagccccu

SEQ ID NO: 2297932 - RNA, 11 nt, Human
agcggccggcc

SEQ ID NO: 2297933 - RNA, 19 nt, Human
agcgcugccgcaccccaga

SEQ ID NO: 2297934 - RNA, 18 nt, Human
agcgcugccgcaccccag

SEQ ID NO: 2297935 - RNA, 17 nt, Human
agcgcugccgcacccca

SEQ ID NO: 2297936 - RNA, 22 nt, Human
agcgcuccugccgcagagcugg

SEQ ID NO: 2297937 - RNA, 12 nt, Human
agcggccccucc

SEQ ID NO: 2297938 - RNA, 13 nt, Human
agcggccccuccc

SEQ ID NO: 2297939 - RNA, 14 nt, Human
agcggccccuccca

SEQ ID NO: 2297940 - RNA, 18 nt, Human
agcggccccucccacaca

SEQ ID NO: 2297941 - RNA, 17 nt, Human
agcgcuccugccgcaga

SEQ ID NO: 2297942 - RNA, 20 nt, Human
agcgcuccugccgcagagcu

SEQ ID NO: 2297943 - RNA, 21 nt, Human
agcgcuccugccgcagagcug

SEQ ID NO: 2297944 - RNA, 20 nt, Human
agcgcgccacucgcuucccc

SEQ ID NO: 2297945 - RNA, 19 nt, Human
agcgcgccacucgcuuccc

SEQ ID NO: 2297946 - RNA, 12 nt, Human
agcgcgccacuc

SEQ ID NO: 2297947 - RNA, 22 nt, Human
agcgcgccacucgcuuccccca

SEQ ID NO: 2297948 - RNA, 14 nt, Human
agccugccuggcag

SEQ ID NO: 2297949 - RNA, 15 nt, Human
agccugccuggagcg

SEQ ID NO: 2297950 - RNA, 14 nt, Human
agccugccuggagc

SEQ ID NO: 2297951 - RNA, 21 nt, Human
agccugcgccaccgcccagag

SEQ ID NO: 2297952 - RNA, 13 nt, Human
agccugccuggag

SEQ ID NO: 2297953 - RNA, 17 nt, Human
agccugcccuugucuga

SEQ ID NO: 2297954 - RNA, 23 nt, Human
agccugcccuugucugagaugcu

SEQ ID NO: 2297955 - RNA, 13 nt, Human
agccugcccuugu

SEQ ID NO: 2297956 - RNA, 14 nt, Human
agccugcccuuguc

SEQ ID NO: 2297957 - RNA, 18 nt, Human
agccugcggccugcugga

SEQ ID NO: 2297958 - RNA, 18 nt, Human
agcgccagccugucccau

SEQ ID NO: 2297959 - RNA, 20 nt, Human
agcgcccacuagacccacug

SEQ ID NO: 2297960 - RNA, 21 nt, Human
agcgccaggcugaccacagca

SEQ ID NO: 2297961 - RNA, 12 nt, Human
agcgccaggcug

SEQ ID NO: 2297962 - RNA, 14 nt, Human
agcgcccaguuggg

SEQ ID NO: 2297963 - RNA, 22 nt, Human
agcgcccaguuggguggaugcc

SEQ ID NO: 2297964 - RNA, 13 nt, Human
ugcauuugagguc

SEQ ID NO: 2297965 - RNA, 15 nt, Human
ugccaauauguauug

SEQ ID NO: 2297966 - RNA, 16 nt, Human
ugccacacgucugacc

SEQ ID NO: 2297967 - RNA, 14 nt, Human
ugccacacccuccc

SEQ ID NO: 2297968 - RNA, 22 nt, Human
ugccacacccucccccgccacu

SEQ ID NO: 2297969 - RNA, 13 nt, Human
ugccacacccucc

SEQ ID NO: 2297970 - RNA, 20 nt, Human
ugccacaccaagcugugcca

SEQ ID NO: 2297971 - RNA, 21 nt, Human
ugccacaccaagcugugccac

SEQ ID NO: 2297972 - RNA, 22 nt, Human
ugccacaccaagcugugccacc

SEQ ID NO: 2297973 - RNA, 23 nt, Human
ugccacaccaagcugugccaccc

SEQ ID NO: 2297974 - RNA, 23 nt, Human
ugccacacagaguggucuuucug

SEQ ID NO: 2297975 - RNA, 19 nt, Human
ugccacaccaagcugugcc

SEQ ID NO: 2297976 - RNA, 20 nt, Human
ugccacacagaguggucuuu

SEQ ID NO: 2297977 - RNA, 13 nt, Human
ugccacacagagu

SEQ ID NO: 2297978 - RNA, 22 nt, Human
ugccacacaaggauagaugcug

SEQ ID NO: 2297979 - RNA, 14 nt, Human
ugccacacaaacgu

SEQ ID NO: 2297980 - RNA, 19 nt, Human
ugccacaaggacuuccugu

SEQ ID NO: 2297981 - RNA, 18 nt, Human
ugccaauauuaaaucugc

SEQ ID NO: 2297982 - RNA, 16 nt, Human
ugccaauauguauugu

SEQ ID NO: 2297983 - RNA, 19 nt, Human
ugccaauauguauuguaaa

SEQ ID NO: 2297984 - RNA, 21 nt, Human
agcggcugagucaugaucucc

SEQ ID NO: 2297985 - RNA, 20 nt, Human
ugcauucuugguuggcuggc

SEQ ID NO: 2297986 - RNA, 16 nt, Human
ugcauucuuucuguau

SEQ ID NO: 2297987 - RNA, 17 nt, Human
agcggcuggacuuggag

SEQ ID NO: 2297988 - RNA, 20 nt, Human
agcggcuggaauuggguggg

SEQ ID NO: 2297989 - RNA, 18 nt, Human
ugcauugaacacaaacug

SEQ ID NO: 2297990 - RNA, 17 nt, Human
ugcauugaacacaaacu

SEQ ID NO: 2297991 - RNA, 15 nt, Human
ugcauugaacacaaa

SEQ ID NO: 2297992 - RNA, 14 nt, Human
ugcauugaacacaa

SEQ ID NO: 2297993 - RNA, 13 nt, Human
ugcauugaacaca

SEQ ID NO: 2297994 - RNA, 22 nt, Human
ugcauucuuuuaaaagacaaga

SEQ ID NO: 2297995 - RNA, 16 nt, Human
ugcauucuuuuaaaag

SEQ ID NO: 2297996 - RNA, 21 nt, Human
ugcauucuuuuaaaagacaag

SEQ ID NO: 2297997 - RNA, 13 nt, Human
ugcauuuccugac

SEQ ID NO: 2297998 - RNA, 21 nt, Human
ugcauugaacacaaacuguaa

SEQ ID NO: 2297999 - RNA, 19 nt, Human
ugcauugaacacaaacugu

SEQ ID NO: 2298000 - RNA, 14 nt, Human
ugcauuuccugaca

SEQ ID NO: 2298001 - RNA, 22 nt, Human
ugcauugaacacaaacuguaaa

SEQ ID NO: 2298002 - RNA, 14 nt, Human
ugcauuucucuggg

SEQ ID NO: 2298003 - RNA, 23 nt, Human
ugcauuugaaaauuuugauguuu

SEQ ID NO: 2298004 - RNA, 19 nt, Human
ugcauuugaaaauuuugau

SEQ ID NO: 2298005 - RNA, 13 nt, Human
agcgugagccacu

SEQ ID NO: 2298006 - RNA, 13 nt, Human
agcgggcgccugu

SEQ ID NO: 2298007 - RNA, 20 nt, Human
ugccauauugcacaugucuu

SEQ ID NO: 2298008 - RNA, 15 nt, Human
agcgugagccacugc

SEQ ID NO: 2298009 - RNA, 16 nt, Human
agcggggacagcuccu

SEQ ID NO: 2298010 - RNA, 17 nt, Human
agcggggacagcuccuu

SEQ ID NO: 2298011 - RNA, 15 nt, Human
agcggggacagcucc

SEQ ID NO: 2298012 - RNA, 15 nt, Human
ugccauauugcacau

SEQ ID NO: 2298013 - RNA, 16 nt, Human
ugccauauugcacaug

SEQ ID NO: 2298014 - RNA, 19 nt, Human
ugccauauugcacaugucu

SEQ ID NO: 2298015 - RNA, 20 nt, Human
ugccauauucuguuggccag

SEQ ID NO: 2298016 - RNA, 21 nt, Human
ugccauauucuguuggccagu

SEQ ID NO: 2298017 - RNA, 16 nt, Human
agcgugagccacugca

SEQ ID NO: 2298018 - RNA, 17 nt, Human
agcgugagccacugcac

SEQ ID NO: 2298019 - RNA, 20 nt, Human
agcgugguggacaugcacag

SEQ ID NO: 2298020 - RNA, 17 nt, Human
agcgugcuuuaaaaaau

SEQ ID NO: 2298021 - RNA, 19 nt, Human
agcgugcuccagccuggcu

SEQ ID NO: 2298022 - RNA, 20 nt, Human
agcgugcuccagccuggcuc

SEQ ID NO: 2298023 - RNA, 15 nt, Human
agcguggacaggugu

SEQ ID NO: 2298024 - RNA, 20 nt, Human
agcuacucagaagccugagg

SEQ ID NO: 2298025 - RNA, 19 nt, Human
agcuacucagaagccugag

SEQ ID NO: 2298026 - RNA, 18 nt, Human
agcuacucagaagccuga

SEQ ID NO: 2298027 - RNA, 15 nt, Human
agcuacucagaagcc

SEQ ID NO: 2298028 - RNA, 14 nt, Human
agcuacucagaagc

SEQ ID NO: 2298029 - RNA, 21 nt, Human
agcuacucaagaggcugaggc

SEQ ID NO: 2298030 - RNA, 23 nt, Human
agcgugucuguauuuauguguga

SEQ ID NO: 2298031 - RNA, 23 nt, Human
agcgugguggacaugcacagcua

SEQ ID NO: 2298032 - RNA, 23 nt, Human
ugccacugccucuuccucccuca

SEQ ID NO: 2298033 - RNA, 12 nt, Human
ugccacacuuca

SEQ ID NO: 2298034 - RNA, 22 nt, Human
ugccacugccuucgcuucuugc

SEQ ID NO: 2298035 - RNA, 19 nt, Human
ugccacugccuucgcuucu

SEQ ID NO: 2298036 - RNA, 21 nt, Human
ugccacugccuucgcuucuug

SEQ ID NO: 2298037 - RNA, 16 nt, Human
ugccacuucccaggua

SEQ ID NO: 2298038 - RNA, 15 nt, Human
ugccagucaccccgg

SEQ ID NO: 2298039 - RNA, 16 nt, Human
ugccagucaccccggc

SEQ ID NO: 2298040 - RNA, 18 nt, Human
ugccagucaccccggcca

SEQ ID NO: 2298041 - RNA, 20 nt, Human
ugccagucaccccggccacc

SEQ ID NO: 2298042 - RNA, 19 nt, Human
ugccagucccccugcccca

SEQ ID NO: 2298043 - RNA, 20 nt, Human
ugccacuucacuccagccug

SEQ ID NO: 2298044 - RNA, 17 nt, Human
ugccagucccccugccc

SEQ ID NO: 2298045 - RNA, 22 nt, Human
ugccagucaccccggccaccug

SEQ ID NO: 2298046 - RNA, 23 nt, Human
ugccagucaccccggccaccugc

SEQ ID NO: 2298047 - RNA, 16 nt, Human
ugccauauucuguugg

SEQ ID NO: 2298048 - RNA, 17 nt, Human
ugccauauucuguuggc

SEQ ID NO: 2298049 - RNA, 15 nt, Human
ugccauauucuguug

SEQ ID NO: 2298050 - RNA, 18 nt, Human
ugccauagucacauggcc

SEQ ID NO: 2298051 - RNA, 19 nt, Human
ugccauagucacauggccu

SEQ ID NO: 2298052 - RNA, 18 nt, Human
agccuauauuuacaguga

SEQ ID NO: 2298053 - RNA, 22 nt, Human
agccuaguucauccaauccuca

SEQ ID NO: 2298054 - RNA, 14 nt, Human
agccuauauuuaca

SEQ ID NO: 2298055 - RNA, 17 nt, Human
agccuaucaaagaccuu

SEQ ID NO: 2298056 - RNA, 15 nt, Human
agccucaaccuccug

SEQ ID NO: 2298057 - RNA, 23 nt, Human
agccuaggggucagggaccaagg

SEQ ID NO: 2298058 - RNA, 20 nt, Human
agccuaggggucagggacca

SEQ ID NO: 2298059 - RNA, 14 nt, Human
agccuagugaaggc

SEQ ID NO: 2298060 - RNA, 23 nt, Human
agccuagugaaggcuucucucug

SEQ ID NO: 2298061 - RNA, 23 nt, Human
agccuaguucauccaauccucac

SEQ ID NO: 2298062 - RNA, 20 nt, Human
agccuaguucauccaauccu

SEQ ID NO: 2298063 - RNA, 17 nt, Human
agccuaguucauccaau

SEQ ID NO: 2298064 - RNA, 15 nt, Human
agccuaguucaucca

SEQ ID NO: 2298065 - RNA, 14 nt, Human
agccuaguucaucc

SEQ ID NO: 2298066 - RNA, 20 nt, Human
agccuagugaaggcuucucu

SEQ ID NO: 2298067 - RNA, 15 nt, Human
agccuaggugacaga

SEQ ID NO: 2298068 - RNA, 17 nt, Human
agccuaggugacagagu

SEQ ID NO: 2298069 - RNA, 23 nt, Human
agccuaaucccugggcauugcuu

SEQ ID NO: 2298070 - RNA, 14 nt, Human
agccuaggggucag

SEQ ID NO: 2298071 - RNA, 22 nt, Human
agccuaccggcaauuuccggcc

SEQ ID NO: 2298072 - RNA, 22 nt, Human
agccuaaucccugggcauugcu

SEQ ID NO: 2298073 - RNA, 15 nt, Human
agccuaaucccuggg

SEQ ID NO: 2298074 - RNA, 18 nt, Human
agccuaagaugaagagga

SEQ ID NO: 2298075 - RNA, 15 nt, Human
agccuaauacaacau

SEQ ID NO: 2298076 - RNA, 17 nt, Human
agcccuugagcucccca

SEQ ID NO: 2298077 - RNA, 16 nt, Human
agcccuugaagauauc

SEQ ID NO: 2298078 - RNA, 20 nt, Human
agcccuugagcuccccaaaa

SEQ ID NO: 2298079 - RNA, 19 nt, Human
agccguuuguuccccaaga

SEQ ID NO: 2298080 - RNA, 23 nt, Human
agccguuuguuccccaagacauu

SEQ ID NO: 2298081 - RNA, 18 nt, Human
agcccuucuuuccacaga

SEQ ID NO: 2298082 - RNA, 19 nt, Human
agcccuucuuuccacagaa

SEQ ID NO: 2298083 - RNA, 24 nt, Human
ugcagagacagagaggacgugggc

SEQ ID NO: 2298084 - RNA, 20 nt, Human
ugcagagacaggaccugacu

SEQ ID NO: 2298085 - RNA, 17 nt, Human
ugcagagacaggaccug

SEQ ID NO: 2298086 - RNA, 13 nt, Human
ugcagagagaagc

SEQ ID NO: 2298087 - RNA, 14 nt, Human
ugcagagagaagcc

SEQ ID NO: 2298088 - RNA, 15 nt, Human
ugcagagagaagccu

SEQ ID NO: 2298089 - RNA, 15 nt, Human
ugcagagagccauuu

SEQ ID NO: 2298090 - RNA, 16 nt, Human
ugcagagagccauuuu

SEQ ID NO: 2298091 - RNA, 17 nt, Human
ugcagagagccauuuug

SEQ ID NO: 2298092 - RNA, 18 nt, Human
ugcagagagccauuuugu

SEQ ID NO: 2298093 - RNA, 16 nt, Human
ugcagacuggagggga

SEQ ID NO: 2298094 - RNA, 14 nt, Human
ugcagacuggaggg

SEQ ID NO: 2298095 - RNA, 17 nt, Human
ugcagacuggaggggac

SEQ ID NO: 2298096 - RNA, 13 nt, Human
ugcagacuggagg

SEQ ID NO: 2298097 - RNA, 22 nt, Human
ugcagacugcugcuagagccag

SEQ ID NO: 2298098 - RNA, 22 nt, Human
ugcagacucuacagaggccaug

SEQ ID NO: 2298099 - RNA, 19 nt, Human
agcccuuccaugucgccuc

SEQ ID NO: 2298100 - RNA, 22 nt, Human
agcccuuccaugucgccucugc

SEQ ID NO: 2298101 - RNA, 23 nt, Human
agcccuuccaugucgccucugca

SEQ ID NO: 2298102 - RNA, 23 nt, Human
ugcagagagccauuuugugaaug

SEQ ID NO: 2298103 - RNA, 21 nt, Human
ugcagagagccauuuugugaa

SEQ ID NO: 2298104 - RNA, 22 nt, Human
ugcagagagccauuuugugaau

SEQ ID NO: 2298105 - RNA, 13 nt, Human
agcccuucauuug

SEQ ID NO: 2298106 - RNA, 14 nt, Human
agcccuucauuugg

SEQ ID NO: 2298107 - RNA, 20 nt, Human
ugcagaaaagcaccugccga

SEQ ID NO: 2298108 - RNA, 19 nt, Human
ugcagaaaagcaccugccg

SEQ ID NO: 2298109 - RNA, 18 nt, Human
ugcagaaaagcaccugcc

SEQ ID NO: 2298110 - RNA, 17 nt, Human
ugcagaaaagcaccugc

SEQ ID NO: 2298111 - RNA, 22 nt, Human
ugcagaaaagcaccugccgacc

SEQ ID NO: 2298112 - RNA, 21 nt, Human
ugcagaaaagcaccugccgac

SEQ ID NO: 2298113 - RNA, 16 nt, Human
ugcagaaaagcaccug

SEQ ID NO: 2298114 - RNA, 16 nt, Human
ugcagaaaacauuguu

SEQ ID NO: 2298115 - RNA, 14 nt, Human
ugcagaaaacauug

SEQ ID NO: 2298116 - RNA, 15 nt, Human
ugcagaaaacauugu

SEQ ID NO: 2298117 - RNA, 12 nt, Human
ugcagaaaacau

SEQ ID NO: 2298118 - RNA, 13 nt, Human
ugcagaaaacauu

SEQ ID NO: 2298119 - RNA, 15 nt, Human
ugcacuccccugcug

SEQ ID NO: 2298120 - RNA, 19 nt, Human
ugcagacucuacagaggcc

SEQ ID NO: 2298121 - RNA, 20 nt, Human
ugcagacucuacagaggcca

SEQ ID NO: 2298122 - RNA, 18 nt, Human
ugcagacucuacagaggc

SEQ ID NO: 2298123 - RNA, 15 nt, Human
ugcacgucaugggag

SEQ ID NO: 2298124 - RNA, 22 nt, Human
ugcacguaguagggucaggcca

SEQ ID NO: 2298125 - RNA, 12 nt, Human
ugcacguggaga

SEQ ID NO: 2298126 - RNA, 20 nt, Human
ugcacguggagagcuggugc

SEQ ID NO: 2298127 - RNA, 18 nt, Human
ugcacguggagagcuggu

SEQ ID NO: 2298128 - RNA, 17 nt, Human
ugcacguggagagcugg

SEQ ID NO: 2298129 - RNA, 16 nt, Human
ugcacguggagagcug

SEQ ID NO: 2298130 - RNA, 19 nt, Human
ugcacguaguagggucagg

SEQ ID NO: 2298131 - RNA, 19 nt, Human
ugcaccaccaagccaaggg

SEQ ID NO: 2298132 - RNA, 16 nt, Human
ugcaccaccaagccaa

SEQ ID NO: 2298133 - RNA, 18 nt, Human
ugcaccaccaagccaagg

SEQ ID NO: 2298134 - RNA, 19 nt, Human
ugcacguacacacacauac

SEQ ID NO: 2298135 - RNA, 14 nt, Human
ugcaccacugcacu

SEQ ID NO: 2298136 - RNA, 22 nt, Human
ugcaccaagcaggaaaugaaaa

SEQ ID NO: 2298137 - RNA, 12 nt, Human
ugcaccaccaag

SEQ ID NO: 2298138 - RNA, 14 nt, Human
ugcaccaccaagcc

SEQ ID NO: 2298139 - RNA, 15 nt, Human
ugcaccaccaagcca

SEQ ID NO: 2298140 - RNA, 19 nt, Human
ugcacaugucuuguacaug

SEQ ID NO: 2298141 - RNA, 20 nt, Human
ugcaccaacccagccgcugc

SEQ ID NO: 2298142 - RNA, 14 nt, Human
ugcaccaagcagga

SEQ ID NO: 2298143 - RNA, 22 nt, Human
ugcaccaacccagccgcugccc

SEQ ID NO: 2298144 - RNA, 23 nt, Human
ugcaccaacccagccgcugcccg

SEQ ID NO: 2298145 - RNA, 15 nt, Human
ugcacaugucuugua

SEQ ID NO: 2298146 - RNA, 16 nt, Human
ugcacaugucuuaaug

SEQ ID NO: 2298147 - RNA, 14 nt, Human
ugcacaugucuuaa

SEQ ID NO: 2298148 - RNA, 15 nt, Human
ugcacaugucuuaau

SEQ ID NO: 2298149 - RNA, 21 nt, Human
ugcacguggagagcuggugcc

SEQ ID NO: 2298150 - RNA, 16 nt, Human
ugcacguggcaugugg

SEQ ID NO: 2298151 - RNA, 23 nt, Human
ugcacguggcauguggccugugg

SEQ ID NO: 2298152 - RNA, 14 nt, Human
ugcacguggccucu

SEQ ID NO: 2298153 - RNA, 15 nt, Human
ugcacguggccucuu

SEQ ID NO: 2298154 - RNA, 16 nt, Human
ugcacguggccucuug

SEQ ID NO: 2298155 - RNA, 17 nt, Human
ugcacguggccucuuga

SEQ ID NO: 2298156 - RNA, 20 nt, Human
ugcacguuaugguguuucuc

SEQ ID NO: 2298157 - RNA, 18 nt, Human
ugcacuaaaguauguaaa

SEQ ID NO: 2298158 - RNA, 15 nt, Human
ugcacuacuccucug

SEQ ID NO: 2298159 - RNA, 16 nt, Human
ugcacuacuccucugc

SEQ ID NO: 2298160 - RNA, 18 nt, Human
ugcacuacuccucugcag

SEQ ID NO: 2298161 - RNA, 14 nt, Human
ugcacuacugacau

SEQ ID NO: 2298162 - RNA, 19 nt, Human
ugcacuacuccucugcagu

SEQ ID NO: 2298163 - RNA, 23 nt, Human
ugcacuacuccucugcagugccu

SEQ ID NO: 2298164 - RNA, 15 nt, Human
ugcacuaaggggccc

SEQ ID NO: 2298165 - RNA, 23 nt, Human
ugcacuaaggggcccggccagcc

SEQ ID NO: 2298166 - RNA, 22 nt, Human
ugcacuaaggggcccggccagc

SEQ ID NO: 2298167 - RNA, 17 nt, Human
ugcacuaaggggcccgg

SEQ ID NO: 2298168 - RNA, 19 nt, Human
ugcacuccagccugggcga

SEQ ID NO: 2298169 - RNA, 18 nt, Human
ugcacuacugacaugugg

SEQ ID NO: 2298170 - RNA, 22 nt, Human
ugcacuauagccuaggugacag

SEQ ID NO: 2298171 - RNA, 15 nt, Human
ugcacuacugacaug

SEQ ID NO: 2298172 - RNA, 16 nt, Human
ugcacuacugacaugu

SEQ ID NO: 2298173 - RNA, 12 nt, Human
ugcacuccccug

SEQ ID NO: 2298174 - RNA, 13 nt, Human
ugcacuccccugc

SEQ ID NO: 2298175 - RNA, 14 nt, Human
ugcacaagcugcac

SEQ ID NO: 2298176 - RNA, 21 nt, Human
ugcacaauaaaaauguuuaac

SEQ ID NO: 2298177 - RNA, 20 nt, Human
ugcacaauaaaaauguuuaa

SEQ ID NO: 2298178 - RNA, 15 nt, Human
ugcacaauaaaaaug

SEQ ID NO: 2298179 - RNA, 15 nt, Human
ugcacacaccagagc

SEQ ID NO: 2298180 - RNA, 17 nt, Human
ugcacaauauugaacuu

SEQ ID NO: 2298181 - RNA, 19 nt, Human
ugcacaauauugaacuuuu

SEQ ID NO: 2298182 - RNA, 21 nt, Human
ugcacaugacucggggguggg

SEQ ID NO: 2298183 - RNA, 12 nt, Human
ugcacaugucuu

SEQ ID NO: 2298184 - RNA, 23 nt, Human
ugcacaugaaucccacccacaug

SEQ ID NO: 2298185 - RNA, 18 nt, Human
agcagcaccguucugugc

SEQ ID NO: 2298186 - RNA, 21 nt, Human
ugcacaaccaucugucccugc

SEQ ID NO: 2298187 - RNA, 15 nt, Human
ugcacaagcuccaag

SEQ ID NO: 2298188 - RNA, 16 nt, Human
ugcacaagcuccaagc

SEQ ID NO: 2298189 - RNA, 18 nt, Human
ugcacaagcuccaagcuc

SEQ ID NO: 2298190 - RNA, 20 nt, Human
ugcacaagcuccaagcuccc

SEQ ID NO: 2298191 - RNA, 22 nt, Human
ugcacaagcuccaagcucccag

SEQ ID NO: 2298192 - RNA, 23 nt, Human
ugcacaagcuccaagcucccagg

SEQ ID NO: 2298193 - RNA, 9 nt, Human
ugcauacac

SEQ ID NO: 2298194 - RNA, 21 nt, Human
ugcauaccacuuuuguucuug

SEQ ID NO: 2298195 - RNA, 11 nt, Human
ugcauacacac

SEQ ID NO: 2298196 - RNA, 10 nt, Human
ugcauacaca

SEQ ID NO: 2298197 - RNA, 22 nt, Human
ugcauaccacuuuuguucuugg

SEQ ID NO: 2298198 - RNA, 12 nt, Human
ugcauacacaca

SEQ ID NO: 2298199 - RNA, 19 nt, Human
ugcaucuggguagcuguaa

SEQ ID NO: 2298200 - RNA, 18 nt, Human
ugcaucuggguagcugua

SEQ ID NO: 2298201 - RNA, 19 nt, Human
ugcaucugggauucccacc

SEQ ID NO: 2298202 - RNA, 20 nt, Human
ugcaucugggauucccacca

SEQ ID NO: 2298203 - RNA, 23 nt, Human
ugcaucugggauucccaccaagg

SEQ ID NO: 2298204 - RNA, 21 nt, Human
ugcaucugaccagcagcgccu

SEQ ID NO: 2298205 - RNA, 18 nt, Human
ugcaucugaccagcagcg

SEQ ID NO: 2298206 - RNA, 22 nt, Human
ugcaucugaccagcagcgccuu

SEQ ID NO: 2298207 - RNA, 17 nt, Human
ugcaucugaccagcagc

SEQ ID NO: 2298208 - RNA, 15 nt, Human
ugcaucugaccagca

SEQ ID NO: 2298209 - RNA, 18 nt, Human
ugcaucucccagauaaug

SEQ ID NO: 2298210 - RNA, 13 nt, Human
ugcaucucccaga

SEQ ID NO: 2298211 - RNA, 14 nt, Human
ugcaucuccaccug

SEQ ID NO: 2298212 - RNA, 13 nt, Human
ugcauacacacac

SEQ ID NO: 2298213 - RNA, 13 nt, Human
ugcaucuccaccu

SEQ ID NO: 2298214 - RNA, 15 nt, Human
ugcaucucagcccac

SEQ ID NO: 2298215 - RNA, 22 nt, Human
ugcaugagcuacgccugccucc

SEQ ID NO: 2298216 - RNA, 15 nt, Human
ugcaugagcuuuuau

SEQ ID NO: 2298217 - RNA, 19 nt, Human
ugcaugaauaaaauuauuc

SEQ ID NO: 2298218 - RNA, 23 nt, Human
ugcaucuguauaaguaagaaaau

SEQ ID NO: 2298219 - RNA, 21 nt, Human
ugcaugagcuacgccugccuc

SEQ ID NO: 2298220 - RNA, 13 nt, Human
ugcaugcuguccc

SEQ ID NO: 2298221 - RNA, 14 nt, Human
ugcaugcugucccu

SEQ ID NO: 2298222 - RNA, 15 nt, Human
ugcaugcugucccuu

SEQ ID NO: 2298223 - RNA, 21 nt, Human
ugcaucuggguagcuguaagg

SEQ ID NO: 2298224 - RNA, 20 nt, Human
ugcaucuggguagcuguaag

SEQ ID NO: 2298225 - RNA, 11 nt, Human
ugcaucuguau

SEQ ID NO: 2298226 - RNA, 20 nt, Human
ugcaucuguauaaguaagaa

SEQ ID NO: 2298227 - RNA, 21 nt, Human
ugcaucuguauaaguaagaaa

SEQ ID NO: 2298228 - RNA, 22 nt, Human
ugcaucuguauaaguaagaaaa

SEQ ID NO: 2298229 - RNA, 20 nt, Human
ugcaugaaguaauaugcaca

SEQ ID NO: 2298230 - RNA, 22 nt, Human
ugcaugaaguaauaugcacaca

SEQ ID NO: 2298231 - RNA, 21 nt, Human
ugcaugaggcuaguguggugu

SEQ ID NO: 2298232 - RNA, 19 nt, Human
agccugccucuucucuacu

SEQ ID NO: 2298233 - RNA, 16 nt, Human
agccugccucuucucu

SEQ ID NO: 2298234 - RNA, 12 nt, Human
agccugcccucc

SEQ ID NO: 2298235 - RNA, 18 nt, Human
agccugccacucaggccc

SEQ ID NO: 2298236 - RNA, 23 nt, Human
agccugcaguuauuaacacuaac

SEQ ID NO: 2298237 - RNA, 22 nt, Human
agccugcaggguggugcuggga

SEQ ID NO: 2298238 - RNA, 23 nt, Human
agccugcaggguggugcugggac

SEQ ID NO: 2298239 - RNA, 15 nt, Human
agccugcaggugcug

SEQ ID NO: 2298240 - RNA, 17 nt, Human
agccugcaggugcugcu

SEQ ID NO: 2298241 - RNA, 18 nt, Human
agccugcaggugcugcug

SEQ ID NO: 2298242 - RNA, 19 nt, Human
agccugcaggugcugcugc

SEQ ID NO: 2298243 - RNA, 20 nt, Human
agccugcaggugcugcugcg

SEQ ID NO: 2298244 - RNA, 22 nt, Human
agccugcaggugcugcugcgug

SEQ ID NO: 2298245 - RNA, 12 nt, Human
agccugcagggu

SEQ ID NO: 2298246 - RNA, 18 nt, Human
agccugcaggguggugcu

SEQ ID NO: 2298247 - RNA, 19 nt, Human
agccugcaggguggugcug

SEQ ID NO: 2298248 - RNA, 21 nt, Human
agccugcaggguggugcuggg

SEQ ID NO: 2298249 - RNA, 19 nt, Human
agccugaucaccugcccug

SEQ ID NO: 2298250 - RNA, 19 nt, Human
agccugcaauuucauaugc

SEQ ID NO: 2298251 - RNA, 17 nt, Human
agccugcaaacucacug

SEQ ID NO: 2298252 - RNA, 18 nt, Human
agccugaucaccugcccu

SEQ ID NO: 2298253 - RNA, 14 nt, Human
ugcaugauguauuu

SEQ ID NO: 2298254 - RNA, 16 nt, Human
agccugagucuccugu

SEQ ID NO: 2298255 - RNA, 17 nt, Human
agccugagucuccugug

SEQ ID NO: 2298256 - RNA, 18 nt, Human
agccugagucuccugugc

SEQ ID NO: 2298257 - RNA, 16 nt, Human
ugcaugcugucccuua

SEQ ID NO: 2298258 - RNA, 21 nt, Human
agccugcaacucaucuuucau

SEQ ID NO: 2298259 - RNA, 18 nt, Human
agccugcaaacucacugc

SEQ ID NO: 2298260 - RNA, 19 nt, Human
agccugcaaacucacugcu

SEQ ID NO: 2298261 - RNA, 21 nt, Human
agccugcaauuucauaugcug

SEQ ID NO: 2298262 - RNA, 15 nt, Human
agccugcagagcugc

SEQ ID NO: 2298263 - RNA, 14 nt, Human
agccugcagagcug

SEQ ID NO: 2298264 - RNA, 13 nt, Human
agccugcagagcu

SEQ ID NO: 2298265 - RNA, 12 nt, Human
agccugcagagc

SEQ ID NO: 2298266 - RNA, 13 nt, Human
ugcagugaauugu

SEQ ID NO: 2298267 - RNA, 19 nt, Human
ugcagugacgugcaccugu

SEQ ID NO: 2298268 - RNA, 18 nt, Human
ugcagugacgugcaccug

SEQ ID NO: 2298269 - RNA, 21 nt, Human
ugcaggucccuaauaaagcug

SEQ ID NO: 2298270 - RNA, 17 nt, Human
ugcaggucccuaauaaa

SEQ ID NO: 2298271 - RNA, 14 nt, Human
ugcagugagccgag

SEQ ID NO: 2298272 - RNA, 18 nt, Human
ugcaggucccuaauaaag

SEQ ID NO: 2298273 - RNA, 16 nt, Human
ugcagcuucuguccug

SEQ ID NO: 2298274 - RNA, 19 nt, Human
ugcaggucccuaauaaagc

SEQ ID NO: 2298275 - RNA, 20 nt, Human
ugcaggucccuaauaaagcu

SEQ ID NO: 2298276 - RNA, 22 nt, Human
ugcauaauaagcuaaagaggcu

SEQ ID NO: 2298277 - RNA, 19 nt, Human
ugcauaauaagcuaaagag

SEQ ID NO: 2298278 - RNA, 18 nt, Human
ugcauaacaauuccucua

SEQ ID NO: 2298279 - RNA, 17 nt, Human
ugcauaacaauuccucu

SEQ ID NO: 2298280 - RNA, 14 nt, Human
ugcauaaauaugca

SEQ ID NO: 2298281 - RNA, 15 nt, Human
ugcauaaauaugcag

SEQ ID NO: 2298282 - RNA, 19 nt, Human
ugcauaaauaugcagugau

SEQ ID NO: 2298283 - RNA, 24 nt, Human
ugcauaauaagcuaaagaggcuga

SEQ ID NO: 2298284 - RNA, 23 nt, Human
ugcauaauaagcuaaagaggcug

SEQ ID NO: 2298285 - RNA, 15 nt, Human
ugcauaauggucaga

SEQ ID NO: 2298286 - RNA, 12 nt, Human
ugcaguuuuccu

SEQ ID NO: 2298287 - RNA, 19 nt, Human
ugcagugagccgagauugu

SEQ ID NO: 2298288 - RNA, 17 nt, Human
ugcauaaagucagugcc

SEQ ID NO: 2298289 - RNA, 12 nt, Human
ugcauaaauaug

SEQ ID NO: 2298290 - RNA, 13 nt, Human
ugcauaaauaugc

SEQ ID NO: 2298291 - RNA, 11 nt, Human
ugcauaaaaug

SEQ ID NO: 2298292 - RNA, 22 nt, Human
ugcagugacgugcaccuguacu

SEQ ID NO: 2298293 - RNA, 15 nt, Human
ugcagugagccaaga

SEQ ID NO: 2298294 - RNA, 14 nt, Human
ugcaguuuuucaga

SEQ ID NO: 2298295 - RNA, 15 nt, Human
ugcaguuuuucagag

SEQ ID NO: 2298296 - RNA, 16 nt, Human
ugcaguuuuucagagu

SEQ ID NO: 2298297 - RNA, 17 nt, Human
agccucaaccuccuggg

SEQ ID NO: 2298298 - RNA, 18 nt, Human
agccucaaccuccugggc

SEQ ID NO: 2298299 - RNA, 13 nt, Human
agccucagcaucc

SEQ ID NO: 2298300 - RNA, 14 nt, Human
agccucagcauccu

SEQ ID NO: 2298301 - RNA, 15 nt, Human
agccucagcauccug

SEQ ID NO: 2298302 - RNA, 21 nt, Human
agccugagcaacucuugauua

SEQ ID NO: 2298303 - RNA, 16 nt, Human
agccugagcaacucuu

SEQ ID NO: 2298304 - RNA, 18 nt, Human
agccugagcgacagugag

SEQ ID NO: 2298305 - RNA, 15 nt, Human
ugcagcuucuguccu

SEQ ID NO: 2298306 - RNA, 22 nt, Human
ugcagcugauuuuaacaauaac

SEQ ID NO: 2298307 - RNA, 20 nt, Human
ugcagcugauuuuaacaaua

SEQ ID NO: 2298308 - RNA, 19 nt, Human
ugcagcuggaaaagggucu

SEQ ID NO: 2298309 - RNA, 19 nt, Human
ugcagcugauuuuaacaau

SEQ ID NO: 2298310 - RNA, 18 nt, Human
ugcagcugauuuuaacaa

SEQ ID NO: 2298311 - RNA, 16 nt, Human
ugcagcugauuuuaac

SEQ ID NO: 2298312 - RNA, 15 nt, Human
ugcagcugauuuuaa

SEQ ID NO: 2298313 - RNA, 14 nt, Human
ugcagcugauuuua

SEQ ID NO: 2298314 - RNA, 16 nt, Human
ugcagcugauguugga

SEQ ID NO: 2298315 - RNA, 19 nt, Human
ugcagcugagagaaaauaa

SEQ ID NO: 2298316 - RNA, 18 nt, Human
ugcagccggcacaggguc

SEQ ID NO: 2298317 - RNA, 19 nt, Human
ugcagccggcacagggucu

SEQ ID NO: 2298318 - RNA, 18 nt, Human
ugcagccucaaccuccug

SEQ ID NO: 2298319 - RNA, 19 nt, Human
ugcagccucaaccuccugg

SEQ ID NO: 2298320 - RNA, 14 nt, Human
ugcagccgcugagc

SEQ ID NO: 2298321 - RNA, 17 nt, Human
ugcagccggcacagggu

SEQ ID NO: 2298322 - RNA, 19 nt, Human
agccugagcgacagugaga

SEQ ID NO: 2298323 - RNA, 17 nt, Human
acuuugggaggccaagg

SEQ ID NO: 2298324 - RNA, 16 nt, Human
acuuugggaggccaag

SEQ ID NO: 2298325 - RNA, 19 nt, Human
acuuugggaggccaaggug

SEQ ID NO: 2298326 - RNA, 17 nt, Human
acuuugggaggcugagg

SEQ ID NO: 2298327 - RNA, 20 nt, Human
acuuugggaggccaaggugg

SEQ ID NO: 2298328 - RNA, 14 nt, Human
acuuugggaggcca

SEQ ID NO: 2298329 - RNA, 15 nt, Human
acuuugggaggccaa

SEQ ID NO: 2298330 - RNA, 12 nt, Human
acuuugggaggc

SEQ ID NO: 2298331 - RNA, 17 nt, Human
acuuuggaaagacuuuu

SEQ ID NO: 2298332 - RNA, 13 nt, Human
acuuuggcugcau

SEQ ID NO: 2298333 - RNA, 17 nt, Human
acuuuggcugcaugcga

SEQ ID NO: 2298334 - RNA, 14 nt, Human
acuuuggcugcaug

SEQ ID NO: 2298335 - RNA, 21 nt, Human
acuuugacuuuuugcauuuaa

SEQ ID NO: 2298336 - RNA, 13 nt, Human
acuuuggaaagac

SEQ ID NO: 2298337 - RNA, 14 nt, Human
acuuuggaaagacu

SEQ ID NO: 2298338 - RNA, 17 nt, Human
acuuguuuuaugcucag

SEQ ID NO: 2298339 - RNA, 20 nt, Human
acuuugacuuuuugcauuua

SEQ ID NO: 2298340 - RNA, 15 nt, Human
acuuugacuuuuugc

SEQ ID NO: 2298341 - RNA, 23 nt, Human
acuuugaccucugcagcaauaaa

SEQ ID NO: 2298342 - RNA, 19 nt, Human
acuuugaccucugcagcaa

SEQ ID NO: 2298343 - RNA, 13 nt, Human
acuuguuuccaau

SEQ ID NO: 2298344 - RNA, 23 nt, Human
acuuuaccuuuuuuauacauaaa

SEQ ID NO: 2298345 - RNA, 22 nt, Human
acuuuaccuuuuuuauacauaa

SEQ ID NO: 2298346 - RNA, 19 nt, Human
acuuuaccuuuuuuauaca

SEQ ID NO: 2298347 - RNA, 21 nt, Human
acuuguuguuuuacuaaagaa

SEQ ID NO: 2298348 - RNA, 18 nt, Human
acuuuaccuuuuuuauac

SEQ ID NO: 2298349 - RNA, 15 nt, Human
acuuuuucuuuaugu

SEQ ID NO: 2298350 - RNA, 13 nt, Human
acuuuuugcauuu

SEQ ID NO: 2298351 - RNA, 18 nt, Human
acuuuuugguuugcagau

SEQ ID NO: 2298352 - RNA, 13 nt, Human
acuuuuuuccaca

SEQ ID NO: 2298353 - RNA, 23 nt, Human
acuuuuuugcuauccagcuauuu

SEQ ID NO: 2298354 - RNA, 21 nt, Human
acuuuuuuggggauaugcuua

SEQ ID NO: 2298355 - RNA, 22 nt, Human
acuuuuuugaguggaugauguu

SEQ ID NO: 2298356 - RNA, 21 nt, Human
acuuuuuugaaauaauaaauc

SEQ ID NO: 2298357 - RNA, 22 nt, Human
acuuuuuuggggauaugcuuag

SEQ ID NO: 2298358 - RNA, 23 nt, Human
acuuuuuuggggauaugcuuagu

SEQ ID NO: 2298359 - RNA, 15 nt, Human
acuuuuuuuuaaguu

SEQ ID NO: 2298360 - RNA, 22 nt, Human
acuuuuuuuuuuuaagaguaaa

SEQ ID NO: 2298361 - RNA, 19 nt, Human
acuuugggauucuuuccau

SEQ ID NO: 2298362 - RNA, 19 nt, Human
acuuugggaggcugaggcg

SEQ ID NO: 2298363 - RNA, 19 nt, Human
acuuugguacauggccagu

SEQ ID NO: 2298364 - RNA, 20 nt, Human
acuuugggauaggaaaaaug

SEQ ID NO: 2298365 - RNA, 14 nt, Human
acuuuuggcauuuu

SEQ ID NO: 2298366 - RNA, 22 nt, Human
acuuuugguuaagucuguuuua

SEQ ID NO: 2298367 - RNA, 20 nt, Human
acuuuugguuaagucuguuu

SEQ ID NO: 2298368 - RNA, 16 nt, Human
acuuuugguuaagucu

SEQ ID NO: 2298369 - RNA, 11 nt, Human
acuuuuuccag

SEQ ID NO: 2298370 - RNA, 18 nt, Human
acuuuuucauuugccuau

SEQ ID NO: 2298371 - RNA, 13 nt, Human
acuuuuucauuug

SEQ ID NO: 2298372 - RNA, 22 nt, Human
acuuuuuauggcacuaguauuu

SEQ ID NO: 2298373 - RNA, 12 nt, Human
acuuuuguaaga

SEQ ID NO: 2298374 - RNA, 17 nt, Human
acuuuuguaagacaaag

SEQ ID NO: 2298375 - RNA, 12 nt, Human
ucucccaggggc

SEQ ID NO: 2298376 - RNA, 18 nt, Human
ucucccaggggcuggcuu

SEQ ID NO: 2298377 - RNA, 23 nt, Human
ucucccaggggcuggcuucagga

SEQ ID NO: 2298378 - RNA, 23 nt, Human
ucucccaggccaggcuccuuccu

SEQ ID NO: 2298379 - RNA, 18 nt, Human
ucucccaggccaggcucc

SEQ ID NO: 2298380 - RNA, 14 nt, Human
ucucccaggccagg

SEQ ID NO: 2298381 - RNA, 13 nt, Human
ucucccaggccag

SEQ ID NO: 2298382 - RNA, 12 nt, Human
ucucccacacug

SEQ ID NO: 2298383 - RNA, 19 nt, Human
ucucccaaggcugcgucug

SEQ ID NO: 2298384 - RNA, 13 nt, Human
ucucccaggaagc

SEQ ID NO: 2298385 - RNA, 12 nt, Human
ucucccaaggcu

SEQ ID NO: 2298386 - RNA, 18 nt, Human
ucucccaaagugcuggga

SEQ ID NO: 2298387 - RNA, 11 nt, Human
ucucccuugga

SEQ ID NO: 2298388 - RNA, 18 nt, Human
ucucccuuggauuguccc

SEQ ID NO: 2298389 - RNA, 15 nt, Human
ucucccagucauuua

SEQ ID NO: 2298390 - RNA, 19 nt, Human
ucucccagucuacccagag

SEQ ID NO: 2298391 - RNA, 20 nt, Human
ucucccagucuacccagaga

SEQ ID NO: 2298392 - RNA, 17 nt, Human
ucucccagguaccagcu

SEQ ID NO: 2298393 - RNA, 18 nt, Human
ucucccagguaccagcug

SEQ ID NO: 2298394 - RNA, 19 nt, Human
ucucccagguaccagcugc

SEQ ID NO: 2298395 - RNA, 18 nt, Human
ucucccagucuacccaga

SEQ ID NO: 2298396 - RNA, 21 nt, Human
acuguaguuuuucuucaacau

SEQ ID NO: 2298397 - RNA, 12 nt, Human
acuguauaaaua

SEQ ID NO: 2298398 - RNA, 13 nt, Human
acuguauaaauag

SEQ ID NO: 2298399 - RNA, 14 nt, Human
acuguauaaauagg

SEQ ID NO: 2298400 - RNA, 15 nt, Human
acuguauaaauagga

SEQ ID NO: 2298401 - RNA, 17 nt, Human
acuguauaaauaggaga

SEQ ID NO: 2298402 - RNA, 20 nt, Human
acuguauaaauaggagagga

SEQ ID NO: 2298403 - RNA, 21 nt, Human
acuguauaaauaggagaggau

SEQ ID NO: 2298404 - RNA, 22 nt, Human
acuguauaaauaggagaggaug

SEQ ID NO: 2298405 - RNA, 23 nt, Human
acuguauaaauaggagaggauga

SEQ ID NO: 2298406 - RNA, 13 nt, Human
acuguauauaaag

SEQ ID NO: 2298407 - RNA, 18 nt, Human
acuguauauaaaggaaaa

SEQ ID NO: 2298408 - RNA, 20 nt, Human
acuguaguuuuucuucaaca

SEQ ID NO: 2298409 - RNA, 18 nt, Human
acuguaguuuuucuucaa

SEQ ID NO: 2298410 - RNA, 16 nt, Human
acuguagucucaggac

SEQ ID NO: 2298411 - RNA, 15 nt, Human
acuguagucucagga

SEQ ID NO: 2298412 - RNA, 13 nt, Human
acuguagucucag

SEQ ID NO: 2298413 - RNA, 20 nt, Human
acuguaggaagaguagcauu

SEQ ID NO: 2298414 - RNA, 22 nt, Human
acuguagccucgccgucuguga

SEQ ID NO: 2298415 - RNA, 17 nt, Human
acuguagccuggauauu

SEQ ID NO: 2298416 - RNA, 19 nt, Human
acuguaggaagaguagcau

SEQ ID NO: 2298417 - RNA, 15 nt, Human
acuguaggcacacuu

SEQ ID NO: 2298418 - RNA, 13 nt, Human
acuguagggaggg

SEQ ID NO: 2298419 - RNA, 12 nt, Human
ucuccucugcug

SEQ ID NO: 2298420 - RNA, 16 nt, Human
ucuccguuagcuccug

SEQ ID NO: 2298421 - RNA, 17 nt, Human
ucuccguuagcuccugu

SEQ ID NO: 2298422 - RNA, 18 nt, Human
ucuccguuagcuccugug

SEQ ID NO: 2298423 - RNA, 19 nt, Human
ucuccguuagcuccugugg

SEQ ID NO: 2298424 - RNA, 18 nt, Human
ucucccuucucccaugag

SEQ ID NO: 2298425 - RNA, 17 nt, Human
ucuccgacugcuaggga

SEQ ID NO: 2298426 - RNA, 13 nt, Human
ucuccgccagccu

SEQ ID NO: 2298427 - RNA, 14 nt, Human
ucuccgccagccuc

SEQ ID NO: 2298428 - RNA, 15 nt, Human
ucuccgccagccucc

SEQ ID NO: 2298429 - RNA, 18 nt, Human
ucuccgccagccuccucu

SEQ ID NO: 2298430 - RNA, 20 nt, Human
ucuccgccagccuccucugg

SEQ ID NO: 2298431 - RNA, 21 nt, Human
ucuccgccagccuccucugga

SEQ ID NO: 2298432 - RNA, 19 nt, Human
ucucccuuggauugucccc

SEQ ID NO: 2298433 - RNA, 21 nt, Human
ucucccuuggauuguccccga

SEQ ID NO: 2298434 - RNA, 23 nt, Human
acuugugugugggcugugagugu

SEQ ID NO: 2298435 - RNA, 17 nt, Human
acuuguuccagcucuuu

SEQ ID NO: 2298436 - RNA, 22 nt, Human
acuugugugugggcugugagug

SEQ ID NO: 2298437 - RNA, 21 nt, Human
acuugugugugggcugugagu

SEQ ID NO: 2298438 - RNA, 20 nt, Human
acuugugugugggcugugag

SEQ ID NO: 2298439 - RNA, 22 nt, Human
acuugugucucugugcuuuuaa

SEQ ID NO: 2298440 - RNA, 14 nt, Human
acuugugucucugu

SEQ ID NO: 2298441 - RNA, 21 nt, Human
acuugugucucugugcuuuua

SEQ ID NO: 2298442 - RNA, 16 nt, Human
acuugugucucugugc

SEQ ID NO: 2298443 - RNA, 21 nt, Human
acuuguugauuaauggaaaug

SEQ ID NO: 2298444 - RNA, 19 nt, Human
acuuguugauuaauggaaa

SEQ ID NO: 2298445 - RNA, 13 nt, Human
ucuccucugcugc

SEQ ID NO: 2298446 - RNA, 14 nt, Human
ucuccucugcugcu

SEQ ID NO: 2298447 - RNA, 23 nt, Human
acuugugucccaugaucccugug

SEQ ID NO: 2298448 - RNA, 22 nt, Human
ucucugcucugcgugucaccug

SEQ ID NO: 2298449 - RNA, 21 nt, Human
ucucugcucugcgugucaccu

SEQ ID NO: 2298450 - RNA, 18 nt, Human
ucucugcucugcguguca

SEQ ID NO: 2298451 - RNA, 14 nt, Human
ucucuucugcucca

SEQ ID NO: 2298452 - RNA, 13 nt, Human
ucucuucugcucc

SEQ ID NO: 2298453 - RNA, 22 nt, Human
ucucuucugagcuauuucaucu

SEQ ID NO: 2298454 - RNA, 21 nt, Human
ucucuucugagcuauuucauc

SEQ ID NO: 2298455 - RNA, 17 nt, Human
ucucuucugcuccaccc

SEQ ID NO: 2298456 - RNA, 16 nt, Human
ucucuucugcuccacc

SEQ ID NO: 2298457 - RNA, 18 nt, Human
ucucuucuggguuccuuc

SEQ ID NO: 2298458 - RNA, 20 nt, Human
ucucuucuggguuccuuccu

SEQ ID NO: 2298459 - RNA, 19 nt, Human
ucucuucuggguuccuucc

SEQ ID NO: 2298460 - RNA, 14 nt, Human
ucucuugagagggu

SEQ ID NO: 2298461 - RNA, 13 nt, Human
ucucuucuuuaaa

SEQ ID NO: 2298462 - RNA, 19 nt, Human
ucucuucugcuccacccuu

SEQ ID NO: 2298463 - RNA, 21 nt, Human
ucucuucuggguuccuuccuc

SEQ ID NO: 2298464 - RNA, 12 nt, Human
ucucuucuuuaa

SEQ ID NO: 2298465 - RNA, 19 nt, Human
ucucugcuccaccacaucc

SEQ ID NO: 2298466 - RNA, 17 nt, Human
ucucugcuccaccacau

SEQ ID NO: 2298467 - RNA, 15 nt, Human
ucucugcuccaccac

SEQ ID NO: 2298468 - RNA, 14 nt, Human
ucucugcuccacca

SEQ ID NO: 2298469 - RNA, 13 nt, Human
ucucuggccuucg

SEQ ID NO: 2298470 - RNA, 17 nt, Human
ucucuggccuucggccu

SEQ ID NO: 2298471 - RNA, 16 nt, Human
ucucuggccuucggcc

SEQ ID NO: 2298472 - RNA, 13 nt, Human
ucucugcuccacc

SEQ ID NO: 2298473 - RNA, 12 nt, Human
ucucugcuccac

SEQ ID NO: 2298474 - RNA, 11 nt, Human
ucucugcucca

SEQ ID NO: 2298475 - RNA, 21 nt, Human
ucucugccucccucacccuga

SEQ ID NO: 2298476 - RNA, 23 nt, Human
ucucugccucccucacccugagc

SEQ ID NO: 2298477 - RNA, 15 nt, Human
ucucugccggcucuu

SEQ ID NO: 2298478 - RNA, 19 nt, Human
ucucugccggcucuuuccu

SEQ ID NO: 2298479 - RNA, 21 nt, Human
ucucugccggcucuuuccuug

SEQ ID NO: 2298480 - RNA, 11 nt, Human
ucucugcccua

SEQ ID NO: 2298481 - RNA, 22 nt, Human
ucucugcccuaaugcgcaggcu

SEQ ID NO: 2298482 - RNA, 17 nt, Human
acuuuuuuuuguauguu

SEQ ID NO: 2298483 - RNA, 15 nt, Human
acuuuuuuuugagaa

SEQ ID NO: 2298484 - RNA, 20 nt, Human
agaaaaaaaaaaacuuacac

SEQ ID NO: 2298485 - RNA, 16 nt, Human
agaaaaaaaaagaaaa

SEQ ID NO: 2298486 - RNA, 22 nt, Human
acuuuuuuuuuccaaaaaaaua

SEQ ID NO: 2298487 - RNA, 15 nt, Human
agaaaaaaaaagaaa

SEQ ID NO: 2298488 - RNA, 14 nt, Human
agaaaaaaaaagaa

SEQ ID NO: 2298489 - RNA, 16 nt, Human
acuuuuuuuugagaau

SEQ ID NO: 2298490 - RNA, 20 nt, Human
ucuccuucaccuuugucccc

SEQ ID NO: 2298491 - RNA, 18 nt, Human
ucuccuucaccuuugucc

SEQ ID NO: 2298492 - RNA, 15 nt, Human
ucuccuucagcccuc

SEQ ID NO: 2298493 - RNA, 19 nt, Human
ucuccuucagcccucaccc

SEQ ID NO: 2298494 - RNA, 20 nt, Human
ucuccuucagcccucacccc

SEQ ID NO: 2298495 - RNA, 13 nt, Human
ucuccuuccugug

SEQ ID NO: 2298496 - RNA, 19 nt, Human
ucuccuuccccuuucccca

SEQ ID NO: 2298497 - RNA, 14 nt, Human
ucuccuuccugugu

SEQ ID NO: 2298498 - RNA, 13 nt, Human
ucucuccagcccc

SEQ ID NO: 2298499 - RNA, 14 nt, Human
ucucuccagccccu

SEQ ID NO: 2298500 - RNA, 21 nt, Human
ucucugccagugacagacagg

SEQ ID NO: 2298501 - RNA, 13 nt, Human
ucucugcccaacc

SEQ ID NO: 2298502 - RNA, 12 nt, Human
ucucugcccaac

SEQ ID NO: 2298503 - RNA, 14 nt, Human
ucucugccagugac

SEQ ID NO: 2298504 - RNA, 15 nt, Human
ucucugccagugaca

SEQ ID NO: 2298505 - RNA, 15 nt, Human
ucucugcaucugacc

SEQ ID NO: 2298506 - RNA, 16 nt, Human
ucucugcaucugacca

SEQ ID NO: 2298507 - RNA, 17 nt, Human
ucucugcaucugaccac

SEQ ID NO: 2298508 - RNA, 14 nt, Human
ucucuccuguacuu

SEQ ID NO: 2298509 - RNA, 13 nt, Human
ucucuccugucca

SEQ ID NO: 2298510 - RNA, 14 nt, Human
ucucuccuguccaa

SEQ ID NO: 2298511 - RNA, 15 nt, Human
ucucuccuuguucug

SEQ ID NO: 2298512 - RNA, 19 nt, Human
ucucuccuuguucugauaa

SEQ ID NO: 2298513 - RNA, 14 nt, Human
ucucuccuuucuuu

SEQ ID NO: 2298514 - RNA, 22 nt, Human
ucucuccuuucuuuuucuucuu

SEQ ID NO: 2298515 - RNA, 14 nt, Human
ucucuccuuugcug

SEQ ID NO: 2298516 - RNA, 19 nt, Human
ucucugcaucuacucccaa

SEQ ID NO: 2298517 - RNA, 21 nt, Human
ucucugcaucuacucccaagu

SEQ ID NO: 2298518 - RNA, 13 nt, Human
ucucugcaucuga

SEQ ID NO: 2298519 - RNA, 22 nt, Human
ucucuccuguaccucuugagcc

SEQ ID NO: 2298520 - RNA, 20 nt, Human
ucucuccuguaccucuugag

SEQ ID NO: 2298521 - RNA, 15 nt, Human
ucucuccagccccug

SEQ ID NO: 2298522 - RNA, 16 nt, Human
ucucuccagauguuuc

SEQ ID NO: 2298523 - RNA, 13 nt, Human
ucucuccagaugu

SEQ ID NO: 2298524 - RNA, 15 nt, Human
ucucuuucaugaguu

SEQ ID NO: 2298525 - RNA, 16 nt, Human
ucucuuuccuucuugc

SEQ ID NO: 2298526 - RNA, 23 nt, Human
ucucuuucuccuuagucuucuca

SEQ ID NO: 2298527 - RNA, 12 nt, Human
ucucuuuccuug

SEQ ID NO: 2298528 - RNA, 18 nt, Human
ucucuuuccuucuugccu

SEQ ID NO: 2298529 - RNA, 19 nt, Human
ucucuuuccuucuugccuu

SEQ ID NO: 2298530 - RNA, 14 nt, Human
ucucuuucucuccu

SEQ ID NO: 2298531 - RNA, 18 nt, Human
ucucuucuuuuggcuucc

SEQ ID NO: 2298532 - RNA, 16 nt, Human
ucucuucuuuuggcuu

SEQ ID NO: 2298533 - RNA, 22 nt, Human
ucucuuuaaugucacaggcagg

SEQ ID NO: 2298534 - RNA, 15 nt, Human
ucucuugagccuggg

SEQ ID NO: 2298535 - RNA, 13 nt, Human
ucucuucuugaac

SEQ ID NO: 2298536 - RNA, 14 nt, Human
ucucuugagccugg

SEQ ID NO: 2298537 - RNA, 13 nt, Human
ucucuugagccug

SEQ ID NO: 2298538 - RNA, 19 nt, Human
ucucuuucuucucugcugc

SEQ ID NO: 2298539 - RNA, 18 nt, Human
agaaaaaggaugcacaga

SEQ ID NO: 2298540 - RNA, 19 nt, Human
agaaaaauaugaccacacu

SEQ ID NO: 2298541 - RNA, 15 nt, Human
agaaaaauaacccuu

SEQ ID NO: 2298542 - RNA, 17 nt, Human
agaaaaaugagccuggc

SEQ ID NO: 2298543 - RNA, 14 nt, Human
agaaaaaucauguu

SEQ ID NO: 2298544 - RNA, 17 nt, Human
agaaaacacuuguaagu

SEQ ID NO: 2298545 - RNA, 16 nt, Human
agaaaacagaaaacaa

SEQ ID NO: 2298546 - RNA, 12 nt, Human
agaaaacagaaa

SEQ ID NO: 2298547 - RNA, 15 nt, Human
agaaaacaucacuga

SEQ ID NO: 2298548 - RNA, 23 nt, Human
agaaaacauaaucuucugccuuc

SEQ ID NO: 2298549 - RNA, 21 nt, Human
agaaaaaucauguuugcucuc

SEQ ID NO: 2298550 - RNA, 19 nt, Human
agaaaacaaggaugaauua

SEQ ID NO: 2298551 - RNA, 15 nt, Human
agaaagaagaugaau

SEQ ID NO: 2298552 - RNA, 12 nt, Human
agaaagaagaga

SEQ ID NO: 2298553 - RNA, 14 nt, Human
agaaagaaggaagu

SEQ ID NO: 2298554 - RNA, 13 nt, Human
agaaagaaggaag

SEQ ID NO: 2298555 - RNA, 12 nt, Human
agaaagaaggaa

SEQ ID NO: 2298556 - RNA, 12 nt, Human
agaaagaagccc

SEQ ID NO: 2298557 - RNA, 22 nt, Human
agaaagaaacccgacagaggga

SEQ ID NO: 2298558 - RNA, 20 nt, Human
agaaagaaacccgacagagg

SEQ ID NO: 2298559 - RNA, 16 nt, Human
agaaagaaaaugaaga

SEQ ID NO: 2298560 - RNA, 16 nt, Human
agaaacugagaccaaa

SEQ ID NO: 2298561 - RNA, 15 nt, Human
agaaacugcagggaa

SEQ ID NO: 2298562 - RNA, 18 nt, Human
agaaacugaggaauuuuc

SEQ ID NO: 2298563 - RNA, 14 nt, Human
agaaacccugucuc

SEQ ID NO: 2298564 - RNA, 21 nt, Human
agaaacccgacagagggaaga

SEQ ID NO: 2298565 - RNA, 16 nt, Human
agaaacugaggaauuu

SEQ ID NO: 2298566 - RNA, 13 nt, Human
agaaacugaggaa

SEQ ID NO: 2298567 - RNA, 15 nt, Human
agaaacuggaacucu

SEQ ID NO: 2298568 - RNA, 13 nt, Human
agaaacuggaacu

SEQ ID NO: 2298569 - RNA, 20 nt, Human
agaaaacgguuaaaacuguc

SEQ ID NO: 2298570 - RNA, 21 nt, Human
agaaaacuccuuuagcaggug

SEQ ID NO: 2298571 - RNA, 15 nt, Human
agaaaacugaaaauc

SEQ ID NO: 2298572 - RNA, 16 nt, Human
agaaaacugaaaaucu

SEQ ID NO: 2298573 - RNA, 16 nt, Human
agaaaacccuuuucua

SEQ ID NO: 2298574 - RNA, 13 nt, Human
agaaaacccaccc

SEQ ID NO: 2298575 - RNA, 14 nt, Human
agaaaacccacccc

SEQ ID NO: 2298576 - RNA, 15 nt, Human
agaaaacauuguucc

SEQ ID NO: 2298577 - RNA, 12 nt, Human
agaaaacauugu

SEQ ID NO: 2298578 - RNA, 13 nt, Human
agaaaacauuguu

SEQ ID NO: 2298579 - RNA, 19 nt, Human
agaaaacauuguuccagau

SEQ ID NO: 2298580 - RNA, 12 nt, Human
agaaaacaucua

SEQ ID NO: 2298581 - RNA, 15 nt, Human
agaaaacaugccucu

SEQ ID NO: 2298582 - RNA, 11 nt, Human
agaaaacauug

SEQ ID NO: 2298583 - RNA, 13 nt, Human
agaaaacauguuu

SEQ ID NO: 2298584 - RNA, 14 nt, Human
agaaaacuucuuuu

SEQ ID NO: 2298585 - RNA, 18 nt, Human
agaaacccgacagaggga

SEQ ID NO: 2298586 - RNA, 16 nt, Human
agaaacccgacagagg

SEQ ID NO: 2298587 - RNA, 15 nt, Human
agaaacccagacuga

SEQ ID NO: 2298588 - RNA, 13 nt, Human
agaaacccugucu

SEQ ID NO: 2298589 - RNA, 21 nt, Human
agaaaccaguuaugugaauga

SEQ ID NO: 2298590 - RNA, 18 nt, Human
agaagaaacgucuaugug

SEQ ID NO: 2298591 - RNA, 16 nt, Human
agaagaaaauugcugu

SEQ ID NO: 2298592 - RNA, 19 nt, Human
agaagaaaauugcugugcc

SEQ ID NO: 2298593 - RNA, 13 nt, Human
agaagaaacuagg

SEQ ID NO: 2298594 - RNA, 21 nt, Human
agaagaacugaaaucauacuu

SEQ ID NO: 2298595 - RNA, 21 nt, Human
agaagaacuugcauggagcag

SEQ ID NO: 2298596 - RNA, 13 nt, Human
agaagaaggcagc

SEQ ID NO: 2298597 - RNA, 14 nt, Human
agaagaaggcagca

SEQ ID NO: 2298598 - RNA, 21 nt, Human
agaagaacuguguuucaaguu

SEQ ID NO: 2298599 - RNA, 20 nt, Human
agaagaacuguguuucaagu

SEQ ID NO: 2298600 - RNA, 21 nt, Human
agaagaaggcagcagguggca

SEQ ID NO: 2298601 - RNA, 16 nt, Human
agaagaagucagagag

SEQ ID NO: 2298602 - RNA, 17 nt, Human
agaagaagucagagagg

SEQ ID NO: 2298603 - RNA, 14 nt, Human
ucugccccuccccc

SEQ ID NO: 2298604 - RNA, 13 nt, Human
ucugccccucccc

SEQ ID NO: 2298605 - RNA, 22 nt, Human
ucugccccucccccaaccccca

SEQ ID NO: 2298606 - RNA, 18 nt, Human
ucugccccucccccaacc

SEQ ID NO: 2298607 - RNA, 16 nt, Human
ucugccccucccccaa

SEQ ID NO: 2298608 - RNA, 15 nt, Human
ucugccccuccccca

SEQ ID NO: 2298609 - RNA, 12 nt, Human
ucugccccuccc

SEQ ID NO: 2298610 - RNA, 13 nt, Human
ucugccccucccu

SEQ ID NO: 2298611 - RNA, 15 nt, Human
ucugccccucccugc

SEQ ID NO: 2298612 - RNA, 18 nt, Human
ucugccccucccugcuuc

SEQ ID NO: 2298613 - RNA, 22 nt, Human
ucugccccucuccaggcgccgg

SEQ ID NO: 2298614 - RNA, 20 nt, Human
ucugccuuuauuguguuugu

SEQ ID NO: 2298615 - RNA, 23 nt, Human
ucugccuuuauuguguuugucau

SEQ ID NO: 2298616 - RNA, 16 nt, Human
ucugccuuuauugugu

SEQ ID NO: 2298617 - RNA, 18 nt, Human
ucugccuuuauuguguuu

SEQ ID NO: 2298618 - RNA, 11 nt, Human
ucugccuuuau

SEQ ID NO: 2298619 - RNA, 20 nt, Human
ucugccuucucaugauccaa

SEQ ID NO: 2298620 - RNA, 14 nt, Human
ucugccuuccuugc

SEQ ID NO: 2298621 - RNA, 15 nt, Human
ucugccuuccuugcu

SEQ ID NO: 2298622 - RNA, 16 nt, Human
ucugccggcccugggg

SEQ ID NO: 2298623 - RNA, 15 nt, Human
ucugccggcccuggg

SEQ ID NO: 2298624 - RNA, 10 nt, Human
ucugcccggg

SEQ ID NO: 2298625 - RNA, 23 nt, Human
ucugcccgggaaggucaccagca

SEQ ID NO: 2298626 - RNA, 17 nt, Human
ucugccggcccuggggc

SEQ ID NO: 2298627 - RNA, 13 nt, Human
ucugccggcucuu

SEQ ID NO: 2298628 - RNA, 23 nt, Human
ucugccggcucuuuccuugcuca

SEQ ID NO: 2298629 - RNA, 14 nt, Human
ucugcccuccaaga

SEQ ID NO: 2298630 - RNA, 23 nt, Human
ucugccgcagcccugcagagggc

SEQ ID NO: 2298631 - RNA, 18 nt, Human
ucugcucagcuucuccug

SEQ ID NO: 2298632 - RNA, 15 nt, Human
ucugcucagcuucuc

SEQ ID NO: 2298633 - RNA, 14 nt, Human
ucugcucagcuucu

SEQ ID NO: 2298634 - RNA, 12 nt, Human
ucugcucaucau

SEQ ID NO: 2298635 - RNA, 22 nt, Human
ucugcucaguaauuugaggaca

SEQ ID NO: 2298636 - RNA, 16 nt, Human
ucugcucagcucuggg

SEQ ID NO: 2298637 - RNA, 14 nt, Human
ucugcucagcucug

SEQ ID NO: 2298638 - RNA, 16 nt, Human
ucugcucagcccugga

SEQ ID NO: 2298639 - RNA, 17 nt, Human
ucugcucagcccuggag

SEQ ID NO: 2298640 - RNA, 18 nt, Human
ucugcucagcccuggagg

SEQ ID NO: 2298641 - RNA, 19 nt, Human
ucugcucagcccuggaggu

SEQ ID NO: 2298642 - RNA, 16 nt, Human
ucugcuaugugacuug

SEQ ID NO: 2298643 - RNA, 16 nt, Human
ucugcucagcagcuau

SEQ ID NO: 2298644 - RNA, 17 nt, Human
ucugcuauauuuucaug

SEQ ID NO: 2298645 - RNA, 13 nt, Human
ucugcucagcccu

SEQ ID NO: 2298646 - RNA, 14 nt, Human
ucugcucagcccug

SEQ ID NO: 2298647 - RNA, 15 nt, Human
ucugcucagcccugg

SEQ ID NO: 2298648 - RNA, 21 nt, Human
ucugcuacguuccuauuguca

SEQ ID NO: 2298649 - RNA, 14 nt, Human
ucugcuaauaaaac

SEQ ID NO: 2298650 - RNA, 19 nt, Human
ucugcuacguuccuauugu

SEQ ID NO: 2298651 - RNA, 14 nt, Human
ucugcuaccucacu

SEQ ID NO: 2298652 - RNA, 17 nt, Human
ucugcuaccucacuggg

SEQ ID NO: 2298653 - RNA, 16 nt, Human
ucugcucacauaucug

SEQ ID NO: 2298654 - RNA, 22 nt, Human
ucugcuaagcucaaggcgugag

SEQ ID NO: 2298655 - RNA, 22 nt, Human
ucugcuaacuuggagccccagu

SEQ ID NO: 2298656 - RNA, 17 nt, Human
ucugcggaccccagcug

SEQ ID NO: 2298657 - RNA, 22 nt, Human
ucugcggaccccagcugugagc

SEQ ID NO: 2298658 - RNA, 14 nt, Human
ucugcggaccccag

SEQ ID NO: 2298659 - RNA, 15 nt, Human
ucugcggaccccagc

SEQ ID NO: 2298660 - RNA, 16 nt, Human
ucugcggaccccagcu

SEQ ID NO: 2298661 - RNA, 16 nt, Human
ucugccuuccuugcua

SEQ ID NO: 2298662 - RNA, 22 nt, Human
ucugccuuuggggacuuuucuu

SEQ ID NO: 2298663 - RNA, 13 nt, Human
ucugccuuuuuua

SEQ ID NO: 2298664 - RNA, 17 nt, Human
ucugcuuacaauucccu

SEQ ID NO: 2298665 - RNA, 19 nt, Human
ucugcuuacaauucccugc

SEQ ID NO: 2298666 - RNA, 20 nt, Human
ucugcuuacaauucccugcu

SEQ ID NO: 2298667 - RNA, 15 nt, Human
ucugcugucucagcc

SEQ ID NO: 2298668 - RNA, 16 nt, Human
ucugcugucucagccu

SEQ ID NO: 2298669 - RNA, 21 nt, Human
ucugcuguccagacagccugu

SEQ ID NO: 2298670 - RNA, 19 nt, Human
ucugcuguccagacagccu

SEQ ID NO: 2298671 - RNA, 14 nt, Human
ucugcuguccagac

SEQ ID NO: 2298672 - RNA, 15 nt, Human
ucugcuguccagaca

SEQ ID NO: 2298673 - RNA, 17 nt, Human
ucugcuguccagacagc

SEQ ID NO: 2298674 - RNA, 18 nt, Human
ucugcuguccagacagcc

SEQ ID NO: 2298675 - RNA, 22 nt, Human
ucugcucaucauucucugucuc

SEQ ID NO: 2298676 - RNA, 18 nt, Human
ucugcucaucauucucug

SEQ ID NO: 2298677 - RNA, 15 nt, Human
ucugcucaucauucu

SEQ ID NO: 2298678 - RNA, 14 nt, Human
ucugcucaucauuc

SEQ ID NO: 2298679 - RNA, 21 nt, Human
ucugcuuaugcaguuuuucag

SEQ ID NO: 2298680 - RNA, 16 nt, Human
ucugcuuaggagagac

SEQ ID NO: 2298681 - RNA, 17 nt, Human
ucugcuuaggagagacc

SEQ ID NO: 2298682 - RNA, 14 nt, Human
ucugcuucucugac

SEQ ID NO: 2298683 - RNA, 21 nt, Human
ucugcuuacaauucccugcug

SEQ ID NO: 2298684 - RNA, 22 nt, Human
ucugcuuacaauucccugcugu

SEQ ID NO: 2298685 - RNA, 23 nt, Human
ucugcuuacaauucccugcuguc

SEQ ID NO: 2298686 - RNA, 19 nt, Human
ucugcuugacaacaucuga

SEQ ID NO: 2298687 - RNA, 18 nt, Human
ucugcuugacaacaucug

SEQ ID NO: 2298688 - RNA, 22 nt, Human
ucugcuucucugacuucugccu

SEQ ID NO: 2298689 - RNA, 16 nt, Human
ucugcuucucugacuu

SEQ ID NO: 2298690 - RNA, 19 nt, Human
ucugcuucucugacuucug

SEQ ID NO: 2298691 - RNA, 14 nt, Human
ucugcuugagucag

SEQ ID NO: 2298692 - RNA, 12 nt, Human
ucugcuugaguc

SEQ ID NO: 2298693 - RNA, 18 nt, Human
ucugcuugauuuuugccu

SEQ ID NO: 2298694 - RNA, 13 nt, Human
ucuggaaaagagg

SEQ ID NO: 2298695 - RNA, 19 nt, Human
ucuggaaaggggggagcug

SEQ ID NO: 2298696 - RNA, 14 nt, Human
ucuggaacccagac

SEQ ID NO: 2298697 - RNA, 13 nt, Human
ucuggaacccaga

SEQ ID NO: 2298698 - RNA, 18 nt, Human
ucuggaacccagacucag

SEQ ID NO: 2298699 - RNA, 17 nt, Human
ucuggaacccagacuca

SEQ ID NO: 2298700 - RNA, 16 nt, Human
ucuggaacccagacuc

SEQ ID NO: 2298701 - RNA, 15 nt, Human
ucuggaacccagacu

SEQ ID NO: 2298702 - RNA, 18 nt, Human
ucuggaaaaugugaccca

SEQ ID NO: 2298703 - RNA, 20 nt, Human
ucugcuugagucagguuuga

SEQ ID NO: 2298704 - RNA, 23 nt, Human
ucugcuuuuuaaagaaugcucuu

SEQ ID NO: 2298705 - RNA, 18 nt, Human
ucuggagguacgaaaaga

SEQ ID NO: 2298706 - RNA, 17 nt, Human
ucuggaguauucuauaa

SEQ ID NO: 2298707 - RNA, 17 nt, Human
ucuggagguugauaacu

SEQ ID NO: 2298708 - RNA, 19 nt, Human
ucuggagguugauaacuuu

SEQ ID NO: 2298709 - RNA, 16 nt, Human
ucuggaaccucagccu

SEQ ID NO: 2298710 - RNA, 15 nt, Human
ucuggaaccucagcc

SEQ ID NO: 2298711 - RNA, 23 nt, Human
ucuggaacccagacucagacauu

SEQ ID NO: 2298712 - RNA, 22 nt, Human
ucuggaacccagacucagacau

SEQ ID NO: 2298713 - RNA, 21 nt, Human
ucuggaguugaucuggaaccc

SEQ ID NO: 2298714 - RNA, 22 nt, Human
ucuggaguuuuuguuuggagag

SEQ ID NO: 2298715 - RNA, 24 nt, Human
ucuggaguuuuuguuuggagagca

SEQ ID NO: 2298716 - RNA, 17 nt, Human
ucuggaguugaucugga

SEQ ID NO: 2298717 - RNA, 16 nt, Human
ucuggaguugaucugg

SEQ ID NO: 2298718 - RNA, 19 nt, Human
ucuggaguggccacuaagc

SEQ ID NO: 2298719 - RNA, 15 nt, Human
ucuggaguggccacu

SEQ ID NO: 2298720 - RNA, 14 nt, Human
ucuggaguggccac

SEQ ID NO: 2298721 - RNA, 21 nt, Human
ucuggagucucacuugucuca

SEQ ID NO: 2298722 - RNA, 20 nt, Human
ucuggagguugauaacuuug

SEQ ID NO: 2298723 - RNA, 19 nt, Human
ucuggagucuccagugguu

SEQ ID NO: 2298724 - RNA, 14 nt, Human
ucuggauaggagcc

SEQ ID NO: 2298725 - RNA, 16 nt, Human
ucuggauaggagccug

SEQ ID NO: 2298726 - RNA, 20 nt, Human
ucuggauaggagccugcugg

SEQ ID NO: 2298727 - RNA, 21 nt, Human
ucuggauaggagccugcuggu

SEQ ID NO: 2298728 - RNA, 14 nt, Human
ucuggaucugggac

SEQ ID NO: 2298729 - RNA, 17 nt, Human
ucuggaugcauuucucu

SEQ ID NO: 2298730 - RNA, 18 nt, Human
ucuggaugcauuucucug

SEQ ID NO: 2298731 - RNA, 22 nt, Human
ucuggaugccugauugccaagc

SEQ ID NO: 2298732 - RNA, 18 nt, Human
ucuggauggcaccagagg

SEQ ID NO: 2298733 - RNA, 19 nt, Human
ucuggauggcaccagaggc

SEQ ID NO: 2298734 - RNA, 12 nt, Human
ucuggauuauau

SEQ ID NO: 2298735 - RNA, 18 nt, Human
ucuggauuauauuaugaa

SEQ ID NO: 2298736 - RNA, 14 nt, Human
ucuggcagcucaga

SEQ ID NO: 2298737 - RNA, 15 nt, Human
ucuggcagcucagag

SEQ ID NO: 2298738 - RNA, 16 nt, Human
ucuggcagccucccau

SEQ ID NO: 2298739 - RNA, 20 nt, Human
agaagcuauaaauuccucuu

SEQ ID NO: 2298740 - RNA, 21 nt, Human
agaagcuauaaauuccucuuu

SEQ ID NO: 2298741 - RNA, 14 nt, Human
agaagcgagcacug

SEQ ID NO: 2298742 - RNA, 19 nt, Human
agaagccuuugggaagggg

SEQ ID NO: 2298743 - RNA, 23 nt, Human
agaagcgggacgagacccuacag

SEQ ID NO: 2298744 - RNA, 19 nt, Human
agaagcgugagacgccacc

SEQ ID NO: 2298745 - RNA, 18 nt, Human
agaagcuaaaaccugagc

SEQ ID NO: 2298746 - RNA, 16 nt, Human
agaagcggcuggcagc

SEQ ID NO: 2298747 - RNA, 15 nt, Human
agaagcggcuggcag

SEQ ID NO: 2298748 - RNA, 20 nt, Human
agaagcugagcaccagggga

SEQ ID NO: 2298749 - RNA, 15 nt, Human
agaagcugagcacca

SEQ ID NO: 2298750 - RNA, 14 nt, Human
agaagcuccaggua

SEQ ID NO: 2298751 - RNA, 17 nt, Human
agaagcugcucuggaau

SEQ ID NO: 2298752 - RNA, 13 nt, Human
agaagcuggagga

SEQ ID NO: 2298753 - RNA, 16 nt, Human
agaagcuggaggacua

SEQ ID NO: 2298754 - RNA, 13 nt, Human
agaagcuguagua

SEQ ID NO: 2298755 - RNA, 14 nt, Human
agaagcuguuguac

SEQ ID NO: 2298756 - RNA, 16 nt, Human
agaagcuguuguacau

SEQ ID NO: 2298757 - RNA, 18 nt, Human
agaagcuguuguacauuu

SEQ ID NO: 2298758 - RNA, 19 nt, Human
agaagcuguuguacauuua

SEQ ID NO: 2298759 - RNA, 20 nt, Human
agaagcuguuguacauuuau

SEQ ID NO: 2298760 - RNA, 21 nt, Human
agaagcuguuguacauuuaug

SEQ ID NO: 2298761 - RNA, 22 nt, Human
agaagcuguuguacauuuauga

SEQ ID NO: 2298762 - RNA, 16 nt, Human
ucuggcccugccuucu

SEQ ID NO: 2298763 - RNA, 15 nt, Human
ucuggcccugccuuc

SEQ ID NO: 2298764 - RNA, 14 nt, Human
ucuggcccugccuu

SEQ ID NO: 2298765 - RNA, 21 nt, Human
agaagccugaugcugacauuc

SEQ ID NO: 2298766 - RNA, 16 nt, Human
agaagccuguuuuguu

SEQ ID NO: 2298767 - RNA, 13 nt, Human
ucuggcccugccu

SEQ ID NO: 2298768 - RNA, 21 nt, Human
ucuggcccucuaccccugauc

SEQ ID NO: 2298769 - RNA, 23 nt, Human
ucuggcccucaccccugcccugg

SEQ ID NO: 2298770 - RNA, 19 nt, Human
ucuggcccucaccccugcc

SEQ ID NO: 2298771 - RNA, 11 nt, Human
ucuggcccuau

SEQ ID NO: 2298772 - RNA, 19 nt, Human
ucuggccaggauggagggg

SEQ ID NO: 2298773 - RNA, 18 nt, Human
ucuggcauuagaauuauu

SEQ ID NO: 2298774 - RNA, 11 nt, Human
ucuggccaggc

SEQ ID NO: 2298775 - RNA, 16 nt, Human
ucuggcagcucagaga

SEQ ID NO: 2298776 - RNA, 21 nt, Human
ucuggcagccucccauccagg

SEQ ID NO: 2298777 - RNA, 18 nt, Human
ucuggcaguucuggaaug

SEQ ID NO: 2298778 - RNA, 13 nt, Human
ucugaccccuccu

SEQ ID NO: 2298779 - RNA, 15 nt, Human
ucugaccccuccuca

SEQ ID NO: 2298780 - RNA, 18 nt, Human
agaaagaaggaagugaag

SEQ ID NO: 2298781 - RNA, 13 nt, Human
agaaagaagagac

SEQ ID NO: 2298782 - RNA, 19 nt, Human
ucugacccugcuucaaaua

SEQ ID NO: 2298783 - RNA, 21 nt, Human
ucugaccgaaacagcgcuggg

SEQ ID NO: 2298784 - RNA, 23 nt, Human
ucugacccuuacagccucugacu

SEQ ID NO: 2298785 - RNA, 14 nt, Human
ucugacccucucca

SEQ ID NO: 2298786 - RNA, 16 nt, Human
ucugacccucucccca

SEQ ID NO: 2298787 - RNA, 18 nt, Human
ucugaccccuccucacug

SEQ ID NO: 2298788 - RNA, 16 nt, Human
ucugaccccuccucac

SEQ ID NO: 2298789 - RNA, 17 nt, Human
ucugaccccuccucacu

SEQ ID NO: 2298790 - RNA, 12 nt, Human
ucugaccugcag

SEQ ID NO: 2298791 - RNA, 18 nt, Human
ucugaccugcacugggga

SEQ ID NO: 2298792 - RNA, 16 nt, Human
ucugaccucuuggcca

SEQ ID NO: 2298793 - RNA, 14 nt, Human
ucugaccuccauga

SEQ ID NO: 2298794 - RNA, 23 nt, Human
agaaagacuauucaaacagucuc

SEQ ID NO: 2298795 - RNA, 20 nt, Human
agaaagacuauucaaacagu

SEQ ID NO: 2298796 - RNA, 18 nt, Human
agaaagacuauucaaaca

SEQ ID NO: 2298797 - RNA, 19 nt, Human
agaaagacuauucaaacag

SEQ ID NO: 2298798 - RNA, 15 nt, Human
ucugaccugcaggcc

SEQ ID NO: 2298799 - RNA, 18 nt, Human
ucugaccucuuggccaca

SEQ ID NO: 2298800 - RNA, 14 nt, Human
ucugaccugcaggc

SEQ ID NO: 2298801 - RNA, 12 nt, Human
ucugacuucugc

SEQ ID NO: 2298802 - RNA, 20 nt, Human
ucugacuuaagcugccucaa

SEQ ID NO: 2298803 - RNA, 21 nt, Human
ucugacuguuuccaucaaggg

SEQ ID NO: 2298804 - RNA, 19 nt, Human
ucugacuucugccuggaga

SEQ ID NO: 2298805 - RNA, 20 nt, Human
ucugacuucugccuggagac

SEQ ID NO: 2298806 - RNA, 14 nt, Human
ucugacuucugccu

SEQ ID NO: 2298807 - RNA, 15 nt, Human
ucugacuucugccug

SEQ ID NO: 2298808 - RNA, 16 nt, Human
ucugacuucugccugg

SEQ ID NO: 2298809 - RNA, 17 nt, Human
ucugacuucugccugga

SEQ ID NO: 2298810 - RNA, 20 nt, Human
ucugagaaagacuauucaaa

SEQ ID NO: 2298811 - RNA, 19 nt, Human
ucugagaaagacuauucaa

SEQ ID NO: 2298812 - RNA, 15 nt, Human
ucugagaaagacuau

SEQ ID NO: 2298813 - RNA, 14 nt, Human
ucugagaaagacua

SEQ ID NO: 2298814 - RNA, 13 nt, Human
ucugagaacucau

SEQ ID NO: 2298815 - RNA, 11 nt, Human
ucugaggcugu

SEQ ID NO: 2298816 - RNA, 12 nt, Human
ucugaggcugua

SEQ ID NO: 2298817 - RNA, 22 nt, Human
ucugagaaaagcuuugaacccu

SEQ ID NO: 2298818 - RNA, 23 nt, Human
ucugagaaagacuauucaaacag

SEQ ID NO: 2298819 - RNA, 22 nt, Human
ucugagaaagacuauucaaaca

SEQ ID NO: 2298820 - RNA, 21 nt, Human
ucugagaaagacuauucaaac

SEQ ID NO: 2298821 - RNA, 18 nt, Human
ucugagggcuuccuuugg

SEQ ID NO: 2298822 - RNA, 23 nt, Human
ucugagggaggaggccaccucuc

SEQ ID NO: 2298823 - RNA, 15 nt, Human
ucugagggcuuccuu

SEQ ID NO: 2298824 - RNA, 18 nt, Human
ucugagggaggaggccac

SEQ ID NO: 2298825 - RNA, 20 nt, Human
ucugagggaggaggccaccu

SEQ ID NO: 2298826 - RNA, 21 nt, Human
ucugagggaggaggccaccuc

SEQ ID NO: 2298827 - RNA, 22 nt, Human
ucugagggaggaggccaccucu

SEQ ID NO: 2298828 - RNA, 14 nt, Human
ucugaggcuuccag

SEQ ID NO: 2298829 - RNA, 15 nt, Human
ucugaggcuuccaga

SEQ ID NO: 2298830 - RNA, 16 nt, Human
ucugaggcuuccagag

SEQ ID NO: 2298831 - RNA, 19 nt, Human
ucugaggcuuccagagagu

SEQ ID NO: 2298832 - RNA, 13 nt, Human
ucugagggaggag

SEQ ID NO: 2298833 - RNA, 17 nt, Human
ucugagggaggaggcca

SEQ ID NO: 2298834 - RNA, 19 nt, Human
ucugaggggcaacugaguc

SEQ ID NO: 2298835 - RNA, 20 nt, Human
ucugauauuccaugaaugua

SEQ ID NO: 2298836 - RNA, 19 nt, Human
ucugauauuccaugaaugu

SEQ ID NO: 2298837 - RNA, 17 nt, Human
ucugauauuccaugaau

SEQ ID NO: 2298838 - RNA, 15 nt, Human
ucugauaggccaagu

SEQ ID NO: 2298839 - RNA, 23 nt, Human
ucugauaggaaugugaaagcacg

SEQ ID NO: 2298840 - RNA, 14 nt, Human
ucugauacccagag

SEQ ID NO: 2298841 - RNA, 16 nt, Human
ucugauacccagagca

SEQ ID NO: 2298842 - RNA, 19 nt, Human
ucugauucccaagcucugc

SEQ ID NO: 2298843 - RNA, 20 nt, Human
ucugauucccaagcucugcu

SEQ ID NO: 2298844 - RNA, 21 nt, Human
ucugauucccaagcucugcuc

SEQ ID NO: 2298845 - RNA, 22 nt, Human
ucugauauuccaugaauguauc

SEQ ID NO: 2298846 - RNA, 21 nt, Human
ucugcacucuaacccuaggca

SEQ ID NO: 2298847 - RNA, 22 nt, Human
ucugcacuccccugcugggugu

SEQ ID NO: 2298848 - RNA, 15 nt, Human
agaagaaaacaucua

SEQ ID NO: 2298849 - RNA, 23 nt, Human
agaagaaaacaucuauucucucc

SEQ ID NO: 2298850 - RNA, 20 nt, Human
agaacucugggcugcuaccc

SEQ ID NO: 2298851 - RNA, 20 nt, Human
agaacucugggcugccaugu

SEQ ID NO: 2298852 - RNA, 14 nt, Human
agaacucuuucaaa

SEQ ID NO: 2298853 - RNA, 21 nt, Human
agaacugaaccggcuuuacca

SEQ ID NO: 2298854 - RNA, 23 nt, Human
agaacugaaccggcuuuaccaaa

SEQ ID NO: 2298855 - RNA, 14 nt, Human
agaacucccuuuca

SEQ ID NO: 2298856 - RNA, 23 nt, Human
agaacucuccaucuuauuuucau

SEQ ID NO: 2298857 - RNA, 14 nt, Human
agaacucugggcug

SEQ ID NO: 2298858 - RNA, 21 nt, Human
agaacucaugacggaagaguu

SEQ ID NO: 2298859 - RNA, 23 nt, Human
agaacucaucccuaaugcugcag

SEQ ID NO: 2298860 - RNA, 17 nt, Human
agaacucaguuuuaacu

SEQ ID NO: 2298861 - RNA, 19 nt, Human
agaacucacuggggccuac

SEQ ID NO: 2298862 - RNA, 22 nt, Human
agaacuacaaacaaaauuucua

SEQ ID NO: 2298863 - RNA, 23 nt, Human
agaacuacaaacaaaauuucuau

SEQ ID NO: 2298864 - RNA, 12 nt, Human
agaacuaaacuc

SEQ ID NO: 2298865 - RNA, 19 nt, Human
agaacguggcucugcuggc

SEQ ID NO: 2298866 - RNA, 18 nt, Human
agaacuaaacucauuuau

SEQ ID NO: 2298867 - RNA, 16 nt, Human
agaacuaaacucauuu

SEQ ID NO: 2298868 - RNA, 22 nt, Human
agaacuaacacuauuuuaugca

SEQ ID NO: 2298869 - RNA, 18 nt, Human
agaacuacaaacaaaauu

SEQ ID NO: 2298870 - RNA, 21 nt, Human
agaaccucaggcuuccuuggc

SEQ ID NO: 2298871 - RNA, 19 nt, Human
agaaccucaggcuuccuug

SEQ ID NO: 2298872 - RNA, 12 nt, Human
agaaccucaggc

SEQ ID NO: 2298873 - RNA, 21 nt, Human
agaaccucacgcaccucccau

SEQ ID NO: 2298874 - RNA, 18 nt, Human
agaaccucacgcaccucc

SEQ ID NO: 2298875 - RNA, 14 nt, Human
agaaccucuucccc

SEQ ID NO: 2298876 - RNA, 13 nt, Human
agaaccucuuccc

SEQ ID NO: 2298877 - RNA, 22 nt, Human
agaacguauugguccagcuugc

SEQ ID NO: 2298878 - RNA, 17 nt, Human
agaacguggcucugcug

SEQ ID NO: 2298879 - RNA, 18 nt, Human
agaacguggcucugcugg

SEQ ID NO: 2298880 - RNA, 20 nt, Human
agaacggggcucuucucauu

SEQ ID NO: 2298881 - RNA, 21 nt, Human
agaacggggcucuucucauuu

SEQ ID NO: 2298882 - RNA, 22 nt, Human
agaaccucacgcaccucccauc

SEQ ID NO: 2298883 - RNA, 15 nt, Human
agaaccucuucccca

SEQ ID NO: 2298884 - RNA, 17 nt, Human
agaacggggcucuucuc

SEQ ID NO: 2298885 - RNA, 19 nt, Human
agaacggggcucuucucau

SEQ ID NO: 2298886 - RNA, 15 nt, Human
ucugcagaaacagaa

SEQ ID NO: 2298887 - RNA, 10 nt, Human
ucugcagaag

SEQ ID NO: 2298888 - RNA, 15 nt, Human
ucugcacugagcaga

SEQ ID NO: 2298889 - RNA, 22 nt, Human
ucugcacugagcagagucuugc

SEQ ID NO: 2298890 - RNA, 23 nt, Human
ucugcagaaggaaaaauguguaa

SEQ ID NO: 2298891 - RNA, 13 nt, Human
ucugcagaaggaa

SEQ ID NO: 2298892 - RNA, 15 nt, Human
ucugcagaaggaaaa

SEQ ID NO: 2298893 - RNA, 21 nt, Human
ucugcagaaggaaaaaugugu

SEQ ID NO: 2298894 - RNA, 22 nt, Human
ucugcagaaggaaaaaugugua

SEQ ID NO: 2298895 - RNA, 16 nt, Human
agaaauguacagcaag

SEQ ID NO: 2298896 - RNA, 17 nt, Human
agaaauguacagcaagg

SEQ ID NO: 2298897 - RNA, 12 nt, Human
ucugcagagcag

SEQ ID NO: 2298898 - RNA, 11 nt, Human
agaaauguguu

SEQ ID NO: 2298899 - RNA, 16 nt, Human
agaaauguuguucauu

SEQ ID NO: 2298900 - RNA, 20 nt, Human
agaaaugucuaaaugcugaa

SEQ ID NO: 2298901 - RNA, 14 nt, Human
agaaauuggcugga

SEQ ID NO: 2298902 - RNA, 19 nt, Human
agaaauuggaacagaaugu

SEQ ID NO: 2298903 - RNA, 15 nt, Human
agaaauuggcuggau

SEQ ID NO: 2298904 - RNA, 22 nt, Human
agaaauuggaacagaauguuuu

SEQ ID NO: 2298905 - RNA, 23 nt, Human
agaaauuuuucagaugcuucugg

SEQ ID NO: 2298906 - RNA, 10 nt, Human
agaacaaaaa

SEQ ID NO: 2298907 - RNA, 19 nt, Human
agaacaaaaaaaucugcag

SEQ ID NO: 2298908 - RNA, 20 nt, Human
agaacaaaaaaaucugcaga

SEQ ID NO: 2298909 - RNA, 22 nt, Human
agaaauuuuucagaugcuucug

SEQ ID NO: 2298910 - RNA, 21 nt, Human
agaaauuuuucagaugcuucu

SEQ ID NO: 2298911 - RNA, 18 nt, Human
agaaauuuuucagaugcu

SEQ ID NO: 2298912 - RNA, 17 nt, Human
agaaauuuuucagaugc

SEQ ID NO: 2298913 - RNA, 23 nt, Human
agaacaaaaaaaucugcagaagg

SEQ ID NO: 2298914 - RNA, 21 nt, Human
agaacaaaaaaaucugcagaa

SEQ ID NO: 2298915 - RNA, 14 nt, Human
agaacaaaggacag

SEQ ID NO: 2298916 - RNA, 21 nt, Human
agaacaaaggacagaguauga

SEQ ID NO: 2298917 - RNA, 22 nt, Human
agaacaaaggacagaguaugaa

SEQ ID NO: 2298918 - RNA, 16 nt, Human
agaacaaagugagaca

SEQ ID NO: 2298919 - RNA, 18 nt, Human
agaaccgagcaaagauca

SEQ ID NO: 2298920 - RNA, 22 nt, Human
agaaccgagcaaagaucaaaau

SEQ ID NO: 2298921 - RNA, 20 nt, Human
agaaccgagcaaagaucaaa

SEQ ID NO: 2298922 - RNA, 21 nt, Human
agaaccgagcaaagaucaaaa

SEQ ID NO: 2298923 - RNA, 16 nt, Human
agaaccuagaagggcu

SEQ ID NO: 2298924 - RNA, 22 nt, Human
agaaauuuaauucauguuucuu

SEQ ID NO: 2298925 - RNA, 21 nt, Human
agaaauuuaauucauguuucu

SEQ ID NO: 2298926 - RNA, 17 nt, Human
agaaauuuaauucaugu

SEQ ID NO: 2298927 - RNA, 20 nt, Human
agaaauuugauuucuauuca

SEQ ID NO: 2298928 - RNA, 13 nt, Human
agaaauuuuuauu

SEQ ID NO: 2298929 - RNA, 22 nt, Human
agaaauuuuuauuuuucuaagg

SEQ ID NO: 2298930 - RNA, 18 nt, Human
agaaauuuaaaagacacu

SEQ ID NO: 2298931 - RNA, 16 nt, Human
agaaggaaaaggcagg

SEQ ID NO: 2298932 - RNA, 16 nt, Human
agaaggaaaaaugugu

SEQ ID NO: 2298933 - RNA, 17 nt, Human
agaaggaaaaaugugua

SEQ ID NO: 2298934 - RNA, 22 nt, Human
agaagcuuuugaauaaaaacuu

SEQ ID NO: 2298935 - RNA, 17 nt, Human
agaagcuucagaaguuu

SEQ ID NO: 2298936 - RNA, 17 nt, Human
agaagcuuaggcagggc

SEQ ID NO: 2298937 - RNA, 16 nt, Human
agaagcuucagaaguu

SEQ ID NO: 2298938 - RNA, 18 nt, Human
agaagcuuccauuccaag

SEQ ID NO: 2298939 - RNA, 23 nt, Human
agaagcuguuguacauuuaugau

SEQ ID NO: 2298940 - RNA, 13 nt, Human
agaagcuuaggca

SEQ ID NO: 2298941 - RNA, 15 nt, Human
agaagcuuaggcagg

SEQ ID NO: 2298942 - RNA, 16 nt, Human
agaagcuuaggcaggg

SEQ ID NO: 2298943 - RNA, 17 nt, Human
agaaggaaauugagauu

SEQ ID NO: 2298944 - RNA, 9 nt, Human
agaaggaag

SEQ ID NO: 2298945 - RNA, 18 nt, Human
agaaggaaaaauguguaa

SEQ ID NO: 2298946 - RNA, 19 nt, Human
agaaggaaaaugaucugag

SEQ ID NO: 2298947 - RNA, 22 nt, Human
agaaggaaggagacucaccucu

SEQ ID NO: 2298948 - RNA, 15 nt, Human
ucuggggcaggguua

SEQ ID NO: 2298949 - RNA, 13 nt, Human
ucuggggccccuu

SEQ ID NO: 2298950 - RNA, 15 nt, Human
ucuggggcucuggga

SEQ ID NO: 2298951 - RNA, 17 nt, Human
agaaggaagugaagagg

SEQ ID NO: 2298952 - RNA, 13 nt, Human
agaaggaagggca

SEQ ID NO: 2298953 - RNA, 14 nt, Human
ucuggucccuugca

SEQ ID NO: 2298954 - RNA, 13 nt, Human
ucuggucccuugc

SEQ ID NO: 2298955 - RNA, 17 nt, Human
ucuggucaaccuccugg

SEQ ID NO: 2298956 - RNA, 21 nt, Human
ucuggucaaccuccuggacau

SEQ ID NO: 2298957 - RNA, 13 nt, Human
ucugguccuaccc

SEQ ID NO: 2298958 - RNA, 18 nt, Human
ucugguccggacacuccu

SEQ ID NO: 2298959 - RNA, 14 nt, Human
ucugguccuaccca

SEQ ID NO: 2298960 - RNA, 15 nt, Human
ucuggucgcuccugc

SEQ ID NO: 2298961 - RNA, 17 nt, Human
ucuggucgcuccugccc

SEQ ID NO: 2298962 - RNA, 13 nt, Human
ucuggguggccuc

SEQ ID NO: 2298963 - RNA, 16 nt, Human
ucuggguuccuuccuc

SEQ ID NO: 2298964 - RNA, 18 nt, Human
ucugguccauagagagca

SEQ ID NO: 2298965 - RNA, 16 nt, Human
ucuggggcucugggau

SEQ ID NO: 2298966 - RNA, 16 nt, Human
ucuggggccacacaga

SEQ ID NO: 2298967 - RNA, 15 nt, Human
ucugggggaguggaa

SEQ ID NO: 2298968 - RNA, 18 nt, Human
ucugggugcucccuacca

SEQ ID NO: 2298969 - RNA, 11 nt, Human
ucuggggcugu

SEQ ID NO: 2298970 - RNA, 14 nt, Human
ucuggguucacugc

SEQ ID NO: 2298971 - RNA, 16 nt, Human
ucuggguucacugcaa

SEQ ID NO: 2298972 - RNA, 20 nt, Human
ucugucauuugagcagggcu

SEQ ID NO: 2298973 - RNA, 23 nt, Human
ucugucauuugagcagggcucag

SEQ ID NO: 2298974 - RNA, 17 nt, Human
ucuguccaaaggaggcu

SEQ ID NO: 2298975 - RNA, 16 nt, Human
ucuguccaaaggaggc

SEQ ID NO: 2298976 - RNA, 15 nt, Human
ucuguccaaaggagg

SEQ ID NO: 2298977 - RNA, 22 nt, Human
ucugucaugaacauguuccuga

SEQ ID NO: 2298978 - RNA, 22 nt, Human
ucuguccaaaggaggcuggcag

SEQ ID NO: 2298979 - RNA, 19 nt, Human
ucuguccaaaggaggcugg

SEQ ID NO: 2298980 - RNA, 23 nt, Human
ucuguccaaaggaggcuggcagg

SEQ ID NO: 2298981 - RNA, 15 nt, Human
ucugucauuugagca

SEQ ID NO: 2298982 - RNA, 19 nt, Human
ucugucagucacagccacc

SEQ ID NO: 2298983 - RNA, 17 nt, Human
ucugucagucacagcca

SEQ ID NO: 2298984 - RNA, 13 nt, Human
ucugucagucaca

SEQ ID NO: 2298985 - RNA, 16 nt, Human
ucugucaggagagcag

SEQ ID NO: 2298986 - RNA, 17 nt, Human
ucugucaggagagcagc

SEQ ID NO: 2298987 - RNA, 21 nt, Human
ucugucagcgcagguuuaguu

SEQ ID NO: 2298988 - RNA, 22 nt, Human
ucuguauauaaaauauuuucau

SEQ ID NO: 2298989 - RNA, 14 nt, Human
ucuguauauaaaau

SEQ ID NO: 2298990 - RNA, 15 nt, Human
ucuguauauaaaaua

SEQ ID NO: 2298991 - RNA, 14 nt, Human
ucuguagugagaua

SEQ ID NO: 2298992 - RNA, 17 nt, Human
ucuguagugagauagca

SEQ ID NO: 2298993 - RNA, 21 nt, Human
ucuguaguuuuaucacaugua

SEQ ID NO: 2298994 - RNA, 22 nt, Human
ucuguaguuuuaucacauguau

SEQ ID NO: 2298995 - RNA, 23 nt, Human
ucuguaguuuuaucacauguaug

SEQ ID NO: 2298996 - RNA, 17 nt, Human
ucuguagggcuggaccu

SEQ ID NO: 2298997 - RNA, 14 nt, Human
ucuguauacugugg

SEQ ID NO: 2298998 - RNA, 21 nt, Human
ucuguauaaguaagaaaauau

SEQ ID NO: 2298999 - RNA, 15 nt, Human
ucuguauacaacccu

SEQ ID NO: 2299000 - RNA, 23 nt, Human
ucuguauaaagccuguauucuca

SEQ ID NO: 2299001 - RNA, 16 nt, Human
ucuguauaaguaagaa

SEQ ID NO: 2299002 - RNA, 17 nt, Human
ucuguauaaguaagaaa

SEQ ID NO: 2299003 - RNA, 18 nt, Human
ucuguauaaguaagaaaa

SEQ ID NO: 2299004 - RNA, 22 nt, Human
ucuguauaaguaagaaaauauu

SEQ ID NO: 2299005 - RNA, 14 nt, Human
ucuguagcuccuca

SEQ ID NO: 2299006 - RNA, 13 nt, Human
ucuguagcuccuc

SEQ ID NO: 2299007 - RNA, 19 nt, Human
ucuguagggaacucugggg

SEQ ID NO: 2299008 - RNA, 16 nt, Human
ucuguagauucugugg

SEQ ID NO: 2299009 - RNA, 19 nt, Human
ucuguagauucuguggaac

SEQ ID NO: 2299010 - RNA, 23 nt, Human
ucuguagauucuguggaacaagc

SEQ ID NO: 2299011 - RNA, 23 nt, Human
ucuguagcuccucaacucaccua

SEQ ID NO: 2299012 - RNA, 14 nt, Human
ucuguagggcugga

SEQ ID NO: 2299013 - RNA, 22 nt, Human
ucuguagggauuuuuggcuaca

SEQ ID NO: 2299014 - RNA, 20 nt, Human
ucuguaggguaauuaguaac

SEQ ID NO: 2299015 - RNA, 15 nt, Human
ucuguagggcuggac

SEQ ID NO: 2299016 - RNA, 16 nt, Human
ucuguagggcuggacc

SEQ ID NO: 2299017 - RNA, 16 nt, Human
ucuguagagggcccug

SEQ ID NO: 2299018 - RNA, 22 nt, Human
ucuguagaaaugguuguauuag

SEQ ID NO: 2299019 - RNA, 17 nt, Human
ucuguagagggcccugg

SEQ ID NO: 2299020 - RNA, 18 nt, Human
ucuguagagggcccuggu

SEQ ID NO: 2299021 - RNA, 19 nt, Human
ucuguagagggcccuggug

SEQ ID NO: 2299022 - RNA, 20 nt, Human
ucuguagagggcccuggugu

SEQ ID NO: 2299023 - RNA, 17 nt, Human
ucuggucuccucagccu

SEQ ID NO: 2299024 - RNA, 18 nt, Human
ucuggucuccucagccuc

SEQ ID NO: 2299025 - RNA, 22 nt, Human
agaauugcugauucuugaguuu

SEQ ID NO: 2299026 - RNA, 18 nt, Human
ucuguuuuagguuaaaaa

SEQ ID NO: 2299027 - RNA, 21 nt, Human
agaauuggagaguaaaaacug

SEQ ID NO: 2299028 - RNA, 20 nt, Human
agaauugucuuucugucucu

SEQ ID NO: 2299029 - RNA, 18 nt, Human
agaauuggcugaacucau

SEQ ID NO: 2299030 - RNA, 21 nt, Human
agaauuggcugaacucaugag

SEQ ID NO: 2299031 - RNA, 22 nt, Human
agaauuggcugaacucaugaga

SEQ ID NO: 2299032 - RNA, 15 nt, Human
agaauuguaucauuu

SEQ ID NO: 2299033 - RNA, 15 nt, Human
agaauugugucugca

SEQ ID NO: 2299034 - RNA, 16 nt, Human
agaauugugucugcag

SEQ ID NO: 2299035 - RNA, 17 nt, Human
agaauugugucugcagg

SEQ ID NO: 2299036 - RNA, 18 nt, Human
agaauugugucugcagga

SEQ ID NO: 2299037 - RNA, 20 nt, Human
ucuguuuuauaauuuuguga

SEQ ID NO: 2299038 - RNA, 18 nt, Human
ucuguuuuauaauuuugu

SEQ ID NO: 2299039 - RNA, 16 nt, Human
ucuguuucucuuuccu

SEQ ID NO: 2299040 - RNA, 14 nt, Human
ucuguuugacaaac

SEQ ID NO: 2299041 - RNA, 18 nt, Human
ucuguuucucuuuccuug

SEQ ID NO: 2299042 - RNA, 13 nt, Human
ucuguuuccuuuu

SEQ ID NO: 2299043 - RNA, 21 nt, Human
agaauuuaucacacuucugug

SEQ ID NO: 2299044 - RNA, 15 nt, Human
agaauuuagguuuuu

SEQ ID NO: 2299045 - RNA, 13 nt, Human
agaauuuauucaa

SEQ ID NO: 2299046 - RNA, 14 nt, Human
agaauuuauucaau

SEQ ID NO: 2299047 - RNA, 14 nt, Human
agaauuuagggaga

SEQ ID NO: 2299048 - RNA, 19 nt, Human
agaauuuagggagaaaugu

SEQ ID NO: 2299049 - RNA, 22 nt, Human
agaauuuagggagaaauguugu

SEQ ID NO: 2299050 - RNA, 17 nt, Human
agaauuucccaaagcag

SEQ ID NO: 2299051 - RNA, 18 nt, Human
agaauuucccaaagcagu

SEQ ID NO: 2299052 - RNA, 22 nt, Human
agaauuucuugguaagaagccg

SEQ ID NO: 2299053 - RNA, 21 nt, Human
agaauuucuugguaagaagcc

SEQ ID NO: 2299054 - RNA, 13 nt, Human
agaauuucuuggu

SEQ ID NO: 2299055 - RNA, 21 nt, Human
agaauuucuaccauuucagag

SEQ ID NO: 2299056 - RNA, 21 nt, Human
agaauuuauucaauuccucug

SEQ ID NO: 2299057 - RNA, 20 nt, Human
agaauuucuaccauuucaga

SEQ ID NO: 2299058 - RNA, 16 nt, Human
agaauuucuaccauuu

SEQ ID NO: 2299059 - RNA, 23 nt, Human
agaauuucccaaagcagugcaug

SEQ ID NO: 2299060 - RNA, 22 nt, Human
ucugugccccaugccuguccag

SEQ ID NO: 2299061 - RNA, 17 nt, Human
ucugugccugaauauuu

SEQ ID NO: 2299062 - RNA, 15 nt, Human
ucugugccugaauau

SEQ ID NO: 2299063 - RNA, 13 nt, Human
ucuguccaaggaa

SEQ ID NO: 2299064 - RNA, 16 nt, Human
ucugugccuucgucuu

SEQ ID NO: 2299065 - RNA, 22 nt, Human
ucugugccuucuuuugauuaug

SEQ ID NO: 2299066 - RNA, 18 nt, Human
ucugugccuucuuuugau

SEQ ID NO: 2299067 - RNA, 22 nt, Human
ucugugcgugaaacacaccagg

SEQ ID NO: 2299068 - RNA, 16 nt, Human
ucugugcgugaaacac

SEQ ID NO: 2299069 - RNA, 21 nt, Human
ucugugcuagggaaacuuccc

SEQ ID NO: 2299070 - RNA, 22 nt, Human
ucugugcuagggaaacuucccg

SEQ ID NO: 2299071 - RNA, 24 nt, Human
ucuguccaggcacugcugcccagc

SEQ ID NO: 2299072 - RNA, 12 nt, Human
ucuguccaagga

SEQ ID NO: 2299073 - RNA, 15 nt, Human
ucugugaaaggaaag

SEQ ID NO: 2299074 - RNA, 21 nt, Human
ucugugaaaggaaagagggag

SEQ ID NO: 2299075 - RNA, 18 nt, Human
ucuguucauuuccucaaa

SEQ ID NO: 2299076 - RNA, 13 nt, Human
ucuguucccccuu

SEQ ID NO: 2299077 - RNA, 20 nt, Human
ucuguuccccauggccacuu

SEQ ID NO: 2299078 - RNA, 13 nt, Human
ucugugcucagga

SEQ ID NO: 2299079 - RNA, 14 nt, Human
ucugugcuccuccu

SEQ ID NO: 2299080 - RNA, 19 nt, Human
ucugugcugacccuccugu

SEQ ID NO: 2299081 - RNA, 23 nt, Human
ucugugcugacccuccuguugca

SEQ ID NO: 2299082 - RNA, 19 nt, Human
ucugugcuggagauguuuu

SEQ ID NO: 2299083 - RNA, 21 nt, Human
ucugugcuggagauguuuuag

SEQ ID NO: 2299084 - RNA, 17 nt, Human
ucuguucaguguaaaua

SEQ ID NO: 2299085 - RNA, 16 nt, Human
ucuguucaguguaaau

SEQ ID NO: 2299086 - RNA, 15 nt, Human
ucuguuccuucacau

SEQ ID NO: 2299087 - RNA, 20 nt, Human
ucuguucuacauagaugcuu

SEQ ID NO: 2299088 - RNA, 13 nt, Human
ucuguuccuucac

SEQ ID NO: 2299089 - RNA, 20 nt, Human
ucuguucccccuucacaaag

SEQ ID NO: 2299090 - RNA, 18 nt, Human
ucuguucccccuucacaa

SEQ ID NO: 2299091 - RNA, 18 nt, Human
ucuguuggccagugugac

SEQ ID NO: 2299092 - RNA, 19 nt, Human
ucuguuggccagugugaca

SEQ ID NO: 2299093 - RNA, 20 nt, Human
ucuguuggccagugugacaa

SEQ ID NO: 2299094 - RNA, 16 nt, Human
ucuuaauauuaaauau

SEQ ID NO: 2299095 - RNA, 14 nt, Human
ucuuaauuaaaaga

SEQ ID NO: 2299096 - RNA, 21 nt, Human
ucuuaauuaaaagaauauuuu

SEQ ID NO: 2299097 - RNA, 18 nt, Human
ucuuaauuaaaagaauau

SEQ ID NO: 2299098 - RNA, 23 nt, Human
ucuuagacuugaaauacuacuua

SEQ ID NO: 2299099 - RNA, 18 nt, Human
ucuuagacuugaaauacu

SEQ ID NO: 2299100 - RNA, 18 nt, Human
ucuuagacuucugcuuuc

SEQ ID NO: 2299101 - RNA, 20 nt, Human
ucuuagacuucugcuuucca

SEQ ID NO: 2299102 - RNA, 21 nt, Human
ucuuagaaguggaccaggaca

SEQ ID NO: 2299103 - RNA, 14 nt, Human
ucuuagacuacauu

SEQ ID NO: 2299104 - RNA, 20 nt, Human
ucuuagacuacauuuagaga

SEQ ID NO: 2299105 - RNA, 15 nt, Human
ucuuagacuucugcu

SEQ ID NO: 2299106 - RNA, 19 nt, Human
ucuuagaaguggaccagga

SEQ ID NO: 2299107 - RNA, 15 nt, Human
ucuuagaaaugaagg

SEQ ID NO: 2299108 - RNA, 12 nt, Human
ucuuagaaauuu

SEQ ID NO: 2299109 - RNA, 15 nt, Human
ucuuagaaauuuauu

SEQ ID NO: 2299110 - RNA, 17 nt, Human
ucuuaaucuuuucacaa

SEQ ID NO: 2299111 - RNA, 18 nt, Human
ucuuaaucuuuucacaaa

SEQ ID NO: 2299112 - RNA, 11 nt, Human
ucuuagaaauu

SEQ ID NO: 2299113 - RNA, 20 nt, Human
ucuuaauuauuauuuguguu

SEQ ID NO: 2299114 - RNA, 14 nt, Human
ucuuagaaaugaag

SEQ ID NO: 2299115 - RNA, 12 nt, Human
ucuuaauuauua

SEQ ID NO: 2299116 - RNA, 18 nt, Human
ucuuaugggcuggguucu

SEQ ID NO: 2299117 - RNA, 14 nt, Human
ucuuauugcccacg

SEQ ID NO: 2299118 - RNA, 18 nt, Human
ucuuauugcccacgcugg

SEQ ID NO: 2299119 - RNA, 22 nt, Human
ucuuauugcccacgcuggagug

SEQ ID NO: 2299120 - RNA, 15 nt, Human
ucuuaugggcugggu

SEQ ID NO: 2299121 - RNA, 16 nt, Human
ucuuaugggcuggguu

SEQ ID NO: 2299122 - RNA, 14 nt, Human
ucuuaugggcuggg

SEQ ID NO: 2299123 - RNA, 22 nt, Human
ucuuagaugcaguucugaagaa

SEQ ID NO: 2299124 - RNA, 14 nt, Human
ucuuauuuaacuua

SEQ ID NO: 2299125 - RNA, 17 nt, Human
ucuucaaaaugagcccu

SEQ ID NO: 2299126 - RNA, 20 nt, Human
ucuucaaauuagaagacauu

SEQ ID NO: 2299127 - RNA, 19 nt, Human
ucuucaaauuagaagacau

SEQ ID NO: 2299128 - RNA, 20 nt, Human
ucuucaacaucaauguucau

SEQ ID NO: 2299129 - RNA, 19 nt, Human
ucuucaacaucaauguuca

SEQ ID NO: 2299130 - RNA, 11 nt, Human
ucuucaacaga

SEQ ID NO: 2299131 - RNA, 18 nt, Human
ucuucaacaggagaauuu

SEQ ID NO: 2299132 - RNA, 16 nt, Human
ucuucaaauuagaaga

SEQ ID NO: 2299133 - RNA, 18 nt, Human
ucuucacagcucuguguu

SEQ ID NO: 2299134 - RNA, 23 nt, Human
ucuucaacaucaauguucauugu

SEQ ID NO: 2299135 - RNA, 21 nt, Human
ucuucaacaucaauguucauu

SEQ ID NO: 2299136 - RNA, 24 nt, Human
ucuucaacaucaauguucauugua

SEQ ID NO: 2299137 - RNA, 17 nt, Human
ucuucaccauuuggcaa

SEQ ID NO: 2299138 - RNA, 19 nt, Human
ucuucacccagcuaaucug

SEQ ID NO: 2299139 - RNA, 20 nt, Human
ucuucacccagcuaaucugu

SEQ ID NO: 2299140 - RNA, 14 nt, Human
ucuucacucgcccc

SEQ ID NO: 2299141 - RNA, 20 nt, Human
ucuucagaaagugugcuuua

SEQ ID NO: 2299142 - RNA, 18 nt, Human
ucuucacucucugaagau

SEQ ID NO: 2299143 - RNA, 18 nt, Human
ucuucagaagacacugca

SEQ ID NO: 2299144 - RNA, 13 nt, Human
ucuucagaagaca

SEQ ID NO: 2299145 - RNA, 23 nt, Human
ucuucagaaagugugcuuuaugc

SEQ ID NO: 2299146 - RNA, 21 nt, Human
ucuucaccugauucaacuaaa

SEQ ID NO: 2299147 - RNA, 14 nt, Human
ucuucacggcagga

SEQ ID NO: 2299148 - RNA, 23 nt, Human
ucuucaccugauucaacuaaaaa

SEQ ID NO: 2299149 - RNA, 16 nt, Human
ucuuccauaauguaua

SEQ ID NO: 2299150 - RNA, 19 nt, Human
ucuuccauaugaccucaug

SEQ ID NO: 2299151 - RNA, 12 nt, Human
ucuuccauaaug

SEQ ID NO: 2299152 - RNA, 13 nt, Human
ucuuccaucaugg

SEQ ID NO: 2299153 - RNA, 18 nt, Human
ucuuccaucauggauuca

SEQ ID NO: 2299154 - RNA, 16 nt, Human
ucuuccaucauguccc

SEQ ID NO: 2299155 - RNA, 19 nt, Human
ucuuccagguggggugagg

SEQ ID NO: 2299156 - RNA, 21 nt, Human
ucuuccagucuuccugacacu

SEQ ID NO: 2299157 - RNA, 18 nt, Human
ucuuccagucuuccugac

SEQ ID NO: 2299158 - RNA, 22 nt, Human
ucuuccaggcugggagagccuu

SEQ ID NO: 2299159 - RNA, 18 nt, Human
ucuuccaggugcccagcu

SEQ ID NO: 2299160 - RNA, 13 nt, Human
ucuuccagguggg

SEQ ID NO: 2299161 - RNA, 15 nt, Human
ucuuccaggugccca

SEQ ID NO: 2299162 - RNA, 16 nt, Human
ucuuccggagauguag

SEQ ID NO: 2299163 - RNA, 15 nt, Human
ucuuccggagaugua

SEQ ID NO: 2299164 - RNA, 21 nt, Human
ucuuccgaaaaauccucuucc

SEQ ID NO: 2299165 - RNA, 22 nt, Human
ucuucccuuuuacauacugcug

SEQ ID NO: 2299166 - RNA, 21 nt, Human
ucuucccuuuuacauacugcu

SEQ ID NO: 2299167 - RNA, 19 nt, Human
ucuucccuuuuacauacug

SEQ ID NO: 2299168 - RNA, 21 nt, Human
ucuucccuaccucaggcagga

SEQ ID NO: 2299169 - RNA, 14 nt, Human
ucuucccuaccuca

SEQ ID NO: 2299170 - RNA, 13 nt, Human
ucuucccuaccuc

SEQ ID NO: 2299171 - RNA, 15 nt, Human
ucuuccaucccagga

SEQ ID NO: 2299172 - RNA, 20 nt, Human
ucuucccuagaggguuccug

SEQ ID NO: 2299173 - RNA, 19 nt, Human
ucuuccaucauguccccaa

SEQ ID NO: 2299174 - RNA, 10 nt, Human
ucuucccucc

SEQ ID NO: 2299175 - RNA, 21 nt, Human
agacacugaaauauacacaca

SEQ ID NO: 2299176 - RNA, 20 nt, Human
agacacugaaauauacacac

SEQ ID NO: 2299177 - RNA, 22 nt, Human
agacacugaaauauacacacag

SEQ ID NO: 2299178 - RNA, 22 nt, Human
agacagaaucucgcucugucgc

SEQ ID NO: 2299179 - RNA, 18 nt, Human
agacagaaucucgcucug

SEQ ID NO: 2299180 - RNA, 13 nt, Human
agacacugaaaua

SEQ ID NO: 2299181 - RNA, 18 nt, Human
agacacugaaaaaucuaa

SEQ ID NO: 2299182 - RNA, 17 nt, Human
agacacucugcucugcc

SEQ ID NO: 2299183 - RNA, 18 nt, Human
agacacucugcucugccc

SEQ ID NO: 2299184 - RNA, 13 nt, Human
agacacucuggcu

SEQ ID NO: 2299185 - RNA, 16 nt, Human
agacacucuggcuggu

SEQ ID NO: 2299186 - RNA, 23 nt, Human
agacacuccccgaagucuuuugu

SEQ ID NO: 2299187 - RNA, 22 nt, Human
agacacuccccgaagucuuuug

SEQ ID NO: 2299188 - RNA, 12 nt, Human
agacacucugcu

SEQ ID NO: 2299189 - RNA, 14 nt, Human
agacacucugcucu

SEQ ID NO: 2299190 - RNA, 15 nt, Human
agacacucugcucug

SEQ ID NO: 2299191 - RNA, 16 nt, Human
agacacucugcucugc

SEQ ID NO: 2299192 - RNA, 22 nt, Human
agacagcuucucauccugcagg

SEQ ID NO: 2299193 - RNA, 23 nt, Human
agacagcuucucauccugcaggc

SEQ ID NO: 2299194 - RNA, 21 nt, Human
agacaggaaaauccucuggcu

SEQ ID NO: 2299195 - RNA, 20 nt, Human
agacaggaaaauccucuggc

SEQ ID NO: 2299196 - RNA, 19 nt, Human
agacaggaaaauccucugg

SEQ ID NO: 2299197 - RNA, 18 nt, Human
agacaggaaaauccucug

SEQ ID NO: 2299198 - RNA, 22 nt, Human
agacagagacccucugccacca

SEQ ID NO: 2299199 - RNA, 14 nt, Human
agacagacacacac

SEQ ID NO: 2299200 - RNA, 15 nt, Human
agacagacacacaca

SEQ ID NO: 2299201 - RNA, 16 nt, Human
agacagacacacacac

SEQ ID NO: 2299202 - RNA, 12 nt, Human
agacagaaucuc

SEQ ID NO: 2299203 - RNA, 19 nt, Human
agacagagacccucugcca

SEQ ID NO: 2299204 - RNA, 21 nt, Human
agacaccaucuuuugugagau

SEQ ID NO: 2299205 - RNA, 19 nt, Human
agacacccucaaccucuuc

SEQ ID NO: 2299206 - RNA, 16 nt, Human
agacacccaggacuua

SEQ ID NO: 2299207 - RNA, 15 nt, Human
agacacccaggacuu

SEQ ID NO: 2299208 - RNA, 14 nt, Human
agacacccaggacu

SEQ ID NO: 2299209 - RNA, 13 nt, Human
agacacccaggac

SEQ ID NO: 2299210 - RNA, 12 nt, Human
agacacccagga

SEQ ID NO: 2299211 - RNA, 20 nt, Human
agacaccagagcagaugcag

SEQ ID NO: 2299212 - RNA, 22 nt, Human
agacacuaacgacuucagggca

SEQ ID NO: 2299213 - RNA, 15 nt, Human
agacacuaaguuaua

SEQ ID NO: 2299214 - RNA, 20 nt, Human
agacacuccccgaagucuuu

SEQ ID NO: 2299215 - RNA, 15 nt, Human
agacacggaucugag

SEQ ID NO: 2299216 - RNA, 18 nt, Human
agacacggaucugagaau

SEQ ID NO: 2299217 - RNA, 20 nt, Human
agacacggaucugagaaucu

SEQ ID NO: 2299218 - RNA, 21 nt, Human
agacacggaucugagaaucuu

SEQ ID NO: 2299219 - RNA, 22 nt, Human
agacaccgccacauggcuuccu

SEQ ID NO: 2299220 - RNA, 21 nt, Human
agacacccucaaccucuucug

SEQ ID NO: 2299221 - RNA, 17 nt, Human
agaauuugagugcucug

SEQ ID NO: 2299222 - RNA, 18 nt, Human
agaauuugagugcucuga

SEQ ID NO: 2299223 - RNA, 13 nt, Human
agacaccagagca

SEQ ID NO: 2299224 - RNA, 15 nt, Human
agacaccagagcaga

SEQ ID NO: 2299225 - RNA, 19 nt, Human
agacaggguuucaccaugu

SEQ ID NO: 2299226 - RNA, 23 nt, Human
agacaggcccaagagaugaagag

SEQ ID NO: 2299227 - RNA, 20 nt, Human
agacaggcucuuagcagcuu

SEQ ID NO: 2299228 - RNA, 22 nt, Human
agacaggcccaagagaugaaga

SEQ ID NO: 2299229 - RNA, 18 nt, Human
agacaggcccaagagaug

SEQ ID NO: 2299230 - RNA, 15 nt, Human
agacaggcucuuagc

SEQ ID NO: 2299231 - RNA, 21 nt, Human
agacaggguuuugccauguug

SEQ ID NO: 2299232 - RNA, 23 nt, Human
agacaggguuucaccauguugcc

SEQ ID NO: 2299233 - RNA, 16 nt, Human
agacaggguuuggcug

SEQ ID NO: 2299234 - RNA, 23 nt, Human
agacaggguuuggcugugucuaa

SEQ ID NO: 2299235 - RNA, 21 nt, Human
agacaggguuuggcugugucu

SEQ ID NO: 2299236 - RNA, 22 nt, Human
agacaggguuuggcugugucua

SEQ ID NO: 2299237 - RNA, 23 nt, Human
agacaggcaagcaccuccugccu

SEQ ID NO: 2299238 - RNA, 21 nt, Human
agacaggacagugcuucagcc

SEQ ID NO: 2299239 - RNA, 18 nt, Human
agacaggaaagggaaggc

SEQ ID NO: 2299240 - RNA, 16 nt, Human
agacaggcccaagaga

SEQ ID NO: 2299241 - RNA, 15 nt, Human
agacaggcccaagag

SEQ ID NO: 2299242 - RNA, 14 nt, Human
agacaggaaaggga

SEQ ID NO: 2299243 - RNA, 15 nt, Human
agacaggaccaggga

SEQ ID NO: 2299244 - RNA, 18 nt, Human
ucuuaauauaacugccuu

SEQ ID NO: 2299245 - RNA, 19 nt, Human
ucuuaauauaacugccuua

SEQ ID NO: 2299246 - RNA, 15 nt, Human
ucuuaauauaacugc

SEQ ID NO: 2299247 - RNA, 18 nt, Human
ucuuaaguuucucagcuc

SEQ ID NO: 2299248 - RNA, 23 nt, Human
ucuuaaggauugugauauuuuua

SEQ ID NO: 2299249 - RNA, 18 nt, Human
agacaguauauuuauagu

SEQ ID NO: 2299250 - RNA, 17 nt, Human
agacaguauauuuauag

SEQ ID NO: 2299251 - RNA, 16 nt, Human
ucuuaaggggcagcuu

SEQ ID NO: 2299252 - RNA, 15 nt, Human
ucuuaaguuucucag

SEQ ID NO: 2299253 - RNA, 17 nt, Human
ucuuaaguuucucagcu

SEQ ID NO: 2299254 - RNA, 12 nt, Human
agacaguaugag

SEQ ID NO: 2299255 - RNA, 14 nt, Human
agacaguauacagu

SEQ ID NO: 2299256 - RNA, 15 nt, Human
agacaguauauuuau

SEQ ID NO: 2299257 - RNA, 17 nt, Human
agacaguauacaguccu

SEQ ID NO: 2299258 - RNA, 21 nt, Human
agacaguauacaguccugugg

SEQ ID NO: 2299259 - RNA, 15 nt, Human
agacagucccugcca

SEQ ID NO: 2299260 - RNA, 16 nt, Human
agacagucccugccaa

SEQ ID NO: 2299261 - RNA, 17 nt, Human
agacagucccugccaau

SEQ ID NO: 2299262 - RNA, 14 nt, Human
agacuuaucaacau

SEQ ID NO: 2299263 - RNA, 11 nt, Human
agacuguuggg

SEQ ID NO: 2299264 - RNA, 23 nt, Human
agacuguugggguggguauaaaa

SEQ ID NO: 2299265 - RNA, 17 nt, Human
agacuguuaaaugaaac

SEQ ID NO: 2299266 - RNA, 18 nt, Human
agacuguuaaaugaaacc

SEQ ID NO: 2299267 - RNA, 14 nt, Human
agacuguugcucaa

SEQ ID NO: 2299268 - RNA, 15 nt, Human
agacuguugcucaaa

SEQ ID NO: 2299269 - RNA, 20 nt, Human
agacuguggcugcuagcacu

SEQ ID NO: 2299270 - RNA, 14 nt, Human
agacuguggcugcu

SEQ ID NO: 2299271 - RNA, 11 nt, Human
agacuguggcu

SEQ ID NO: 2299272 - RNA, 11 nt, Human
agacuguguau

SEQ ID NO: 2299273 - RNA, 18 nt, Human
agacuggcacaguuuucu

SEQ ID NO: 2299274 - RNA, 14 nt, Human
agacugucucaaga

SEQ ID NO: 2299275 - RNA, 15 nt, Human
agacuggcacaguuu

SEQ ID NO: 2299276 - RNA, 14 nt, Human
agacuggcacaguu

SEQ ID NO: 2299277 - RNA, 15 nt, Human
agacuucacacugca

SEQ ID NO: 2299278 - RNA, 21 nt, Human
agacuucacacugcaagagcc

SEQ ID NO: 2299279 - RNA, 23 nt, Human
agacuguugcucaaaucuauuca

SEQ ID NO: 2299280 - RNA, 14 nt, Human
agacuucaucccuc

SEQ ID NO: 2299281 - RNA, 18 nt, Human
agacuucugcuuuccaca

SEQ ID NO: 2299282 - RNA, 22 nt, Human
agacuucaguauguugucaaag

SEQ ID NO: 2299283 - RNA, 12 nt, Human
agacuucugcuu

SEQ ID NO: 2299284 - RNA, 13 nt, Human
agacuucaguaug

SEQ ID NO: 2299285 - RNA, 19 nt, Human
agacuucaguauguuguca

SEQ ID NO: 2299286 - RNA, 21 nt, Human
agacuucaguauguugucaaa

SEQ ID NO: 2299287 - RNA, 17 nt, Human
agacuucaucccucugg

SEQ ID NO: 2299288 - RNA, 13 nt, Human
agacuugcucucu

SEQ ID NO: 2299289 - RNA, 19 nt, Human
agacuuggcaacagaagca

SEQ ID NO: 2299290 - RNA, 15 nt, Human
agacuugggacauug

SEQ ID NO: 2299291 - RNA, 17 nt, Human
agacuuggcaacagaag

SEQ ID NO: 2299292 - RNA, 18 nt, Human
agacuuggcaacagaagc

SEQ ID NO: 2299293 - RNA, 14 nt, Human
agacuugaaauacu

SEQ ID NO: 2299294 - RNA, 18 nt, Human
agagaaugaaagggccca

SEQ ID NO: 2299295 - RNA, 14 nt, Human
agacuuuggaaaga

SEQ ID NO: 2299296 - RNA, 23 nt, Human
agacuuuggaaaaugcauuguau

SEQ ID NO: 2299297 - RNA, 22 nt, Human
agacuuuggaaaaugcauugua

SEQ ID NO: 2299298 - RNA, 21 nt, Human
agacuuuggaaaaugcauugu

SEQ ID NO: 2299299 - RNA, 14 nt, Human
agacuuuggaaaau

SEQ ID NO: 2299300 - RNA, 12 nt, Human
agacuuuggaaa

SEQ ID NO: 2299301 - RNA, 15 nt, Human
agagaauggaaaaca

SEQ ID NO: 2299302 - RNA, 23 nt, Human
agagaaucccuagucuucaagca

SEQ ID NO: 2299303 - RNA, 17 nt, Human
agagacacacugaagaa

SEQ ID NO: 2299304 - RNA, 22 nt, Human
agagaaugaaauugcugaaaga

SEQ ID NO: 2299305 - RNA, 15 nt, Human
agagaaucauacuua

SEQ ID NO: 2299306 - RNA, 20 nt, Human
agagaaucaacauuucucaa

SEQ ID NO: 2299307 - RNA, 15 nt, Human
agagaaugagagaca

SEQ ID NO: 2299308 - RNA, 15 nt, Human
agagaccaucccuga

SEQ ID NO: 2299309 - RNA, 19 nt, Human
agagaccaggcaaagcaag

SEQ ID NO: 2299310 - RNA, 20 nt, Human
ucuuugggccagacaugcca

SEQ ID NO: 2299311 - RNA, 21 nt, Human
ucuuuggggucagccagggcc

SEQ ID NO: 2299312 - RNA, 18 nt, Human
ucuuuggggucagccagg

SEQ ID NO: 2299313 - RNA, 19 nt, Human
ucuuuggguaccuauuuuc

SEQ ID NO: 2299314 - RNA, 20 nt, Human
ucuuuggguaccuauuuuca

SEQ ID NO: 2299315 - RNA, 16 nt, Human
ucuuugggccagacau

SEQ ID NO: 2299316 - RNA, 15 nt, Human
ucuuugggccagaca

SEQ ID NO: 2299317 - RNA, 14 nt, Human
ucuuugggaauguu

SEQ ID NO: 2299318 - RNA, 18 nt, Human
ucuuugggaauguuuguc

SEQ ID NO: 2299319 - RNA, 13 nt, Human
agagaccaucccu

SEQ ID NO: 2299320 - RNA, 14 nt, Human
agagaccaucccug

SEQ ID NO: 2299321 - RNA, 18 nt, Human
agagacacacugaagaag

SEQ ID NO: 2299322 - RNA, 20 nt, Human
agagacacacugaagaagca

SEQ ID NO: 2299323 - RNA, 19 nt, Human
agacucuacagaggccaug

SEQ ID NO: 2299324 - RNA, 17 nt, Human
agacucuacagaggcca

SEQ ID NO: 2299325 - RNA, 21 nt, Human
agacucgcgacaaugcaaacc

SEQ ID NO: 2299326 - RNA, 18 nt, Human
agacuccugcaggcagcc

SEQ ID NO: 2299327 - RNA, 19 nt, Human
agacuccugcaggcagcca

SEQ ID NO: 2299328 - RNA, 20 nt, Human
agacuccugcaggcagccag

SEQ ID NO: 2299329 - RNA, 23 nt, Human
agacuccugcaggcagccaggcc

SEQ ID NO: 2299330 - RNA, 13 nt, Human
ucuuuccugaggc

SEQ ID NO: 2299331 - RNA, 14 nt, Human
ucuuuccugaggcu

SEQ ID NO: 2299332 - RNA, 15 nt, Human
ucuuuccugaggcug

SEQ ID NO: 2299333 - RNA, 16 nt, Human
ucuuuccugaggcugg

SEQ ID NO: 2299334 - RNA, 23 nt, Human
ucuuuaggauugugaugguucgu

SEQ ID NO: 2299335 - RNA, 14 nt, Human
agacuccugcaggc

SEQ ID NO: 2299336 - RNA, 15 nt, Human
agacuccugcaggca

SEQ ID NO: 2299337 - RNA, 16 nt, Human
agacuccugcaggcag

SEQ ID NO: 2299338 - RNA, 17 nt, Human
agacuccugcaggcagc

SEQ ID NO: 2299339 - RNA, 18 nt, Human
ucuuuaaagucaggucca

SEQ ID NO: 2299340 - RNA, 21 nt, Human
ucuuuaaagggauggcaagau

SEQ ID NO: 2299341 - RNA, 21 nt, Human
ucuuuaaaauuuaaguaucuu

SEQ ID NO: 2299342 - RNA, 17 nt, Human
ucuuuaaaauacacacu

SEQ ID NO: 2299343 - RNA, 21 nt, Human
ucuuggagcugagccucucac

SEQ ID NO: 2299344 - RNA, 14 nt, Human
ucuuggagucuucc

SEQ ID NO: 2299345 - RNA, 21 nt, Human
ucuuggcacauuuaagagaca

SEQ ID NO: 2299346 - RNA, 22 nt, Human
ucuuggcacauuuaagagacag

SEQ ID NO: 2299347 - RNA, 19 nt, Human
ucuuggagccugcagagcu

SEQ ID NO: 2299348 - RNA, 16 nt, Human
ucuuggagcugagccu

SEQ ID NO: 2299349 - RNA, 18 nt, Human
ucuuggagccugcagagc

SEQ ID NO: 2299350 - RNA, 15 nt, Human
ucuuggagccugcag

SEQ ID NO: 2299351 - RNA, 15 nt, Human
ucuuuacuucaugga

SEQ ID NO: 2299352 - RNA, 13 nt, Human
ucuuuaccugaga

SEQ ID NO: 2299353 - RNA, 12 nt, Human
ucuuuacuuuua

SEQ ID NO: 2299354 - RNA, 18 nt, Human
ucuuuaccugagaccagu

SEQ ID NO: 2299355 - RNA, 16 nt, Human
ucuuuaccugagacca

SEQ ID NO: 2299356 - RNA, 12 nt, Human
ucuuuagaguua

SEQ ID NO: 2299357 - RNA, 13 nt, Human
ucuuuagagcauu

SEQ ID NO: 2299358 - RNA, 14 nt, Human
ucuuuagagcauug

SEQ ID NO: 2299359 - RNA, 19 nt, Human
ucuuuagaguuagacuguu

SEQ ID NO: 2299360 - RNA, 19 nt, Human
ucuuuagagcauugccauu

SEQ ID NO: 2299361 - RNA, 17 nt, Human
ucuuuaggauugugaug

SEQ ID NO: 2299362 - RNA, 14 nt, Human
ucuuuagaguuaga

SEQ ID NO: 2299363 - RNA, 16 nt, Human
ucuuuagaguuagacu

SEQ ID NO: 2299364 - RNA, 17 nt, Human
ucuuuagaguuagacug

SEQ ID NO: 2299365 - RNA, 18 nt, Human
ucuuuagaguuagacugu

SEQ ID NO: 2299366 - RNA, 23 nt, Human
agaccugauccuggaggcccagu

SEQ ID NO: 2299367 - RNA, 14 nt, Human
ucuugaucugcuca

SEQ ID NO: 2299368 - RNA, 17 nt, Human
ucuugaucugcucagcc

SEQ ID NO: 2299369 - RNA, 19 nt, Human
ucuugaucugcucagcccu

SEQ ID NO: 2299370 - RNA, 20 nt, Human
ucuugaucugcucagcccug

SEQ ID NO: 2299371 - RNA, 21 nt, Human
ucuugaucugcucagcccugg

SEQ ID NO: 2299372 - RNA, 22 nt, Human
ucuugaucugcucagcccugga

SEQ ID NO: 2299373 - RNA, 19 nt, Human
agacuccaaagaaauguaa

SEQ ID NO: 2299374 - RNA, 16 nt, Human
agacuccaaagaaaug

SEQ ID NO: 2299375 - RNA, 12 nt, Human
ucuugaugacca

SEQ ID NO: 2299376 - RNA, 23 nt, Human
ucuugaucugcucagcccuggag

SEQ ID NO: 2299377 - RNA, 15 nt, Human
ucuugaucuguucug

SEQ ID NO: 2299378 - RNA, 14 nt, Human
ucuugaugccuggc

SEQ ID NO: 2299379 - RNA, 21 nt, Human
ucuugaugcaugcacuguucc

SEQ ID NO: 2299380 - RNA, 13 nt, Human
ucuugaugcaugc

SEQ ID NO: 2299381 - RNA, 20 nt, Human
ucuugaugccuggcggggug

SEQ ID NO: 2299382 - RNA, 16 nt, Human
ucuuggaaagaaacaa

SEQ ID NO: 2299383 - RNA, 16 nt, Human
ucuuggaaaaagugau

SEQ ID NO: 2299384 - RNA, 15 nt, Human
ucuuggaaaaaguga

SEQ ID NO: 2299385 - RNA, 17 nt, Human
ucuugcaauggcagccu

SEQ ID NO: 2299386 - RNA, 13 nt, Human
ucuugcaauggca

SEQ ID NO: 2299387 - RNA, 16 nt, Human
ucuugcaauggcagcc

SEQ ID NO: 2299388 - RNA, 12 nt, Human
ucuuggagccug

SEQ ID NO: 2299389 - RNA, 23 nt, Human
ucuuggaccucugcucugaggcu

SEQ ID NO: 2299390 - RNA, 14 nt, Human
ucuuggagccugca

SEQ ID NO: 2299391 - RNA, 13 nt, Human
ucuuggagccugc

SEQ ID NO: 2299392 - RNA, 16 nt, Human
ucuuggacacuguaca

SEQ ID NO: 2299393 - RNA, 17 nt, Human
ucuuggacacuguacaa

SEQ ID NO: 2299394 - RNA, 14 nt, Human
ucuuggaccucugc

SEQ ID NO: 2299395 - RNA, 16 nt, Human
ucuuggaccucugcuc

SEQ ID NO: 2299396 - RNA, 18 nt, Human
ucuuggaccucugcucug

SEQ ID NO: 2299397 - RNA, 21 nt, Human
ucuuggaccucugcucugagg

SEQ ID NO: 2299398 - RNA, 19 nt, Human
agaccugacaccuuucaua

SEQ ID NO: 2299399 - RNA, 19 nt, Human
agaccugacaagcacugcu

SEQ ID NO: 2299400 - RNA, 17 nt, Human
agaccugacaagcacug

SEQ ID NO: 2299401 - RNA, 16 nt, Human
agaccugagcucccca

SEQ ID NO: 2299402 - RNA, 14 nt, Human
agaccugauccugg

SEQ ID NO: 2299403 - RNA, 16 nt, Human
agaccugauccuggag

SEQ ID NO: 2299404 - RNA, 15 nt, Human
agaccugauccugga

SEQ ID NO: 2299405 - RNA, 15 nt, Human
agacuaucuaaaugu

SEQ ID NO: 2299406 - RNA, 22 nt, Human
agaccugauccuggaggcccag

SEQ ID NO: 2299407 - RNA, 21 nt, Human
agaccugauccuggaggccca

SEQ ID NO: 2299408 - RNA, 19 nt, Human
agaccugauccuggaggcc

SEQ ID NO: 2299409 - RNA, 18 nt, Human
agaccugauccuggaggc

SEQ ID NO: 2299410 - RNA, 18 nt, Human
agacuaucuaaauguuga

SEQ ID NO: 2299411 - RNA, 17 nt, Human
agacuaucuaaauguug

SEQ ID NO: 2299412 - RNA, 19 nt, Human
agacuaucuaaauguugaa

SEQ ID NO: 2299413 - RNA, 12 nt, Human
agaccugccccu

SEQ ID NO: 2299414 - RNA, 17 nt, Human
agacucauucuucugua

SEQ ID NO: 2299415 - RNA, 21 nt, Human
agacuauucaaacagucucag

SEQ ID NO: 2299416 - RNA, 20 nt, Human
agacuauucaaacagucuca

SEQ ID NO: 2299417 - RNA, 18 nt, Human
agacuauucaaacagucu

SEQ ID NO: 2299418 - RNA, 18 nt, Human
agacucauucuucuguac

SEQ ID NO: 2299419 - RNA, 12 nt, Human
agacuccaaaga

SEQ ID NO: 2299420 - RNA, 14 nt, Human
agacuccaaagaaa

SEQ ID NO: 2299421 - RNA, 13 nt, Human
agacuccaaagaa

SEQ ID NO: 2299422 - RNA, 19 nt, Human
agaccuaacgagaaauaga

SEQ ID NO: 2299423 - RNA, 15 nt, Human
agaccuaaugcuccu

SEQ ID NO: 2299424 - RNA, 18 nt, Human
agaccuaaugcuccuugu

SEQ ID NO: 2299425 - RNA, 14 nt, Human
agaccuaccucagg

SEQ ID NO: 2299426 - RNA, 15 nt, Human
agaccuaccucaggu

SEQ ID NO: 2299427 - RNA, 16 nt, Human
agaccuaccucagguu

SEQ ID NO: 2299428 - RNA, 19 nt, Human
agaccuaccucagguugcu

SEQ ID NO: 2299429 - RNA, 23 nt, Human
agaccuaccucagguugcugguu

SEQ ID NO: 2299430 - RNA, 19 nt, Human
agacccuuguggucccacc

SEQ ID NO: 2299431 - RNA, 20 nt, Human
agacccuuguggucccaccc

SEQ ID NO: 2299432 - RNA, 22 nt, Human
agacccuuguggucccacccca

SEQ ID NO: 2299433 - RNA, 23 nt, Human
agacccuuguggucccaccccac

SEQ ID NO: 2299434 - RNA, 13 nt, Human
agacccugucucu

SEQ ID NO: 2299435 - RNA, 22 nt, Human
agacccugggugggcucugugc

SEQ ID NO: 2299436 - RNA, 17 nt, Human
agacccuuauuacacgg

SEQ ID NO: 2299437 - RNA, 18 nt, Human
agacccuugacaccugcu

SEQ ID NO: 2299438 - RNA, 20 nt, Human
agacccucugccaccagaga

SEQ ID NO: 2299439 - RNA, 21 nt, Human
agacccucugccaccagagac

SEQ ID NO: 2299440 - RNA, 17 nt, Human
agacccugggugggcuc

SEQ ID NO: 2299441 - RNA, 19 nt, Human
agacccugggugggcucug

SEQ ID NO: 2299442 - RNA, 20 nt, Human
agacccugggugggcucugu

SEQ ID NO: 2299443 - RNA, 13 nt, Human
agacccuuguggu

SEQ ID NO: 2299444 - RNA, 15 nt, Human
agacccuuguggucc

SEQ ID NO: 2299445 - RNA, 16 nt, Human
agacccugcccugugg

SEQ ID NO: 2299446 - RNA, 19 nt, Human
agacccugcccugugggcc

SEQ ID NO: 2299447 - RNA, 21 nt, Human
agacccugcccugugggcccc

SEQ ID NO: 2299448 - RNA, 23 nt, Human
agacccugcccugugggccccca

SEQ ID NO: 2299449 - RNA, 14 nt, Human
agacccucguggcc

SEQ ID NO: 2299450 - RNA, 15 nt, Human
agacccucugccacc

SEQ ID NO: 2299451 - RNA, 16 nt, Human
agacccucugccacca

SEQ ID NO: 2299452 - RNA, 17 nt, Human
agacccucugccaccag

SEQ ID NO: 2299453 - RNA, 12 nt, Human
agacccugcccu

SEQ ID NO: 2299454 - RNA, 13 nt, Human
agacccugcccug

SEQ ID NO: 2299455 - RNA, 14 nt, Human
agacccugcccugu

SEQ ID NO: 2299456 - RNA, 19 nt, Human
agacauguuuuagacaaau

SEQ ID NO: 2299457 - RNA, 23 nt, Human
agacauguuuuagacaaauacuc

SEQ ID NO: 2299458 - RNA, 22 nt, Human
agacauguagguguuuguucau

SEQ ID NO: 2299459 - RNA, 15 nt, Human
agacauguuuuagac

SEQ ID NO: 2299460 - RNA, 17 nt, Human
agacauguuuuagacaa

SEQ ID NO: 2299461 - RNA, 12 nt, Human
agacccucucaa

SEQ ID NO: 2299462 - RNA, 19 nt, Human
ucuuccggagauguagcaa

SEQ ID NO: 2299463 - RNA, 18 nt, Human
ucuuccggagauguagca

SEQ ID NO: 2299464 - RNA, 21 nt, Human
ucuuccggagauguagcaaaa

SEQ ID NO: 2299465 - RNA, 19 nt, Human
ucuuccuaguuuucuccuc

SEQ ID NO: 2299466 - RNA, 23 nt, Human
ucuuccuaguuuucuccucccag

SEQ ID NO: 2299467 - RNA, 21 nt, Human
ucuuccuaguuuucuccuccc

SEQ ID NO: 2299468 - RNA, 21 nt, Human
ucuuccuauuugccaugggcu

SEQ ID NO: 2299469 - RNA, 17 nt, Human
agacauguggugggaca

SEQ ID NO: 2299470 - RNA, 17 nt, Human
agacaugugacauuuau

SEQ ID NO: 2299471 - RNA, 15 nt, Human
agacaugugacauuu

SEQ ID NO: 2299472 - RNA, 16 nt, Human
agacaugugacauuua

SEQ ID NO: 2299473 - RNA, 20 nt, Human
agacaugucuguucuacaua

SEQ ID NO: 2299474 - RNA, 12 nt, Human
agacaugugaca

SEQ ID NO: 2299475 - RNA, 13 nt, Human
agacaugugacau

SEQ ID NO: 2299476 - RNA, 14 nt, Human
agacaugugacauu

SEQ ID NO: 2299477 - RNA, 19 nt, Human
agacauggggaggaaggac

SEQ ID NO: 2299478 - RNA, 18 nt, Human
agacauggggaggaagga

SEQ ID NO: 2299479 - RNA, 16 nt, Human
agacauggggaggaag

SEQ ID NO: 2299480 - RNA, 18 nt, Human
agacaugucuguucuaca

SEQ ID NO: 2299481 - RNA, 16 nt, Human
agacauguagguguuu

SEQ ID NO: 2299482 - RNA, 19 nt, Human
agacauguagguguuuguu

SEQ ID NO: 2299483 - RNA, 21 nt, Human
agcagagaaugaaagggccca

SEQ ID NO: 2299484 - RNA, 13 nt, Human
agcagacauuguc

SEQ ID NO: 2299485 - RNA, 17 nt, Human
agcagacauugucagca

SEQ ID NO: 2299486 - RNA, 22 nt, Human
agcagaccaccccgccugcccu

SEQ ID NO: 2299487 - RNA, 23 nt, Human
agcagacauugucagcaaauuaa

SEQ ID NO: 2299488 - RNA, 19 nt, Human
agcagaauagcaaggugcu

SEQ ID NO: 2299489 - RNA, 14 nt, Human
agcagaauaaagca

SEQ ID NO: 2299490 - RNA, 15 nt, Human
agcagaauaaagcaa

SEQ ID NO: 2299491 - RNA, 16 nt, Human
agcagaauaaagcaau

SEQ ID NO: 2299492 - RNA, 17 nt, Human
agcagaauaaagcaauu

SEQ ID NO: 2299493 - RNA, 18 nt, Human
agcagaauaaagcaauuu

SEQ ID NO: 2299494 - RNA, 21 nt, Human
agcagaauaaagcaauuuucc

SEQ ID NO: 2299495 - RNA, 22 nt, Human
agcagaauaaagcaauuuuccu

SEQ ID NO: 2299496 - RNA, 23 nt, Human
agcagaauaaagcaauuuuccuu

SEQ ID NO: 2299497 - RNA, 12 nt, Human
agcagacaggcc

SEQ ID NO: 2299498 - RNA, 21 nt, Human
agcagacaguguuuucuggga

SEQ ID NO: 2299499 - RNA, 12 nt, Human
agcagacauugu

SEQ ID NO: 2299500 - RNA, 10 nt, Human
ugagccuggc

SEQ ID NO: 2299501 - RNA, 19 nt, Human
agcagacuggugagcagac

SEQ ID NO: 2299502 - RNA, 14 nt, Human
agcagacuggugag

SEQ ID NO: 2299503 - RNA, 15 nt, Human
agcagagacacuaac

SEQ ID NO: 2299504 - RNA, 15 nt, Human
agcagagaccauccc

SEQ ID NO: 2299505 - RNA, 16 nt, Human
agcagagaccaucccu

SEQ ID NO: 2299506 - RNA, 21 nt, Human
agcagagaauucucuuaucca

SEQ ID NO: 2299507 - RNA, 14 nt, Human
agcagagaauucuc

SEQ ID NO: 2299508 - RNA, 22 nt, Human
agcagagaaugaaagggcccag

SEQ ID NO: 2299509 - RNA, 23 nt, Human
agcagagaaugaaagggcccaga

SEQ ID NO: 2299510 - RNA, 14 nt, Human
ugagccuucagucu

SEQ ID NO: 2299511 - RNA, 13 nt, Human
ugagccuggcugg

SEQ ID NO: 2299512 - RNA, 17 nt, Human
ugagccuggcuggcaca

SEQ ID NO: 2299513 - RNA, 13 nt, Human
ugagccuucaguc

SEQ ID NO: 2299514 - RNA, 14 nt, Human
ugagccuugaacuu

SEQ ID NO: 2299515 - RNA, 22 nt, Human
ugagccugggaggucaaggcug

SEQ ID NO: 2299516 - RNA, 19 nt, Human
ugagccugggaggucaagg

SEQ ID NO: 2299517 - RNA, 16 nt, Human
ugagccuggcaagaau

SEQ ID NO: 2299518 - RNA, 11 nt, Human
ugagccuggca

SEQ ID NO: 2299519 - RNA, 14 nt, Human
ugagccugggaggu

SEQ ID NO: 2299520 - RNA, 16 nt, Human
ugagccuggccagccu

SEQ ID NO: 2299521 - RNA, 13 nt, Human
ugagccuggcucu

SEQ ID NO: 2299522 - RNA, 18 nt, Human
ugagccuggcucuugugc

SEQ ID NO: 2299523 - RNA, 12 nt, Human
ugagccuggcca

SEQ ID NO: 2299524 - RNA, 11 nt, Human
ugagccuggcc

SEQ ID NO: 2299525 - RNA, 19 nt, Human
ugagccuugaacuuugacc

SEQ ID NO: 2299526 - RNA, 18 nt, Human
ugagccuugaacuuugac

SEQ ID NO: 2299527 - RNA, 17 nt, Human
ugagccuugaacuuuga

SEQ ID NO: 2299528 - RNA, 15 nt, Human
ugagccuugaacuuu

SEQ ID NO: 2299529 - RNA, 20 nt, Human
ugagcgacagugagacucug

SEQ ID NO: 2299530 - RNA, 16 nt, Human
ugagcgacagugagac

SEQ ID NO: 2299531 - RNA, 14 nt, Human
ugagcgacagugag

SEQ ID NO: 2299532 - RNA, 13 nt, Human
ugagcgacaguga

SEQ ID NO: 2299533 - RNA, 13 nt, Human
agcagaaaauaca

SEQ ID NO: 2299534 - RNA, 19 nt, Human
agcagaaaauacagcugga

SEQ ID NO: 2299535 - RNA, 22 nt, Human
agcacuuugggaggcugaggcg

SEQ ID NO: 2299536 - RNA, 21 nt, Human
agcacuuugggaggcugaggc

SEQ ID NO: 2299537 - RNA, 20 nt, Human
agcacuuugggaggccaagg

SEQ ID NO: 2299538 - RNA, 21 nt, Human
agcacuuugggaggccaaggu

SEQ ID NO: 2299539 - RNA, 16 nt, Human
agcacuuugggaggcu

SEQ ID NO: 2299540 - RNA, 23 nt, Human
agcacuuugggaggccaaggugg

SEQ ID NO: 2299541 - RNA, 22 nt, Human
agcacuuucuacaaugugaacu

SEQ ID NO: 2299542 - RNA, 16 nt, Human
agcacuuguccagcug

SEQ ID NO: 2299543 - RNA, 13 nt, Human
agcacuuguauau

SEQ ID NO: 2299544 - RNA, 21 nt, Human
agcacuuguggguuuuuguuu

SEQ ID NO: 2299545 - RNA, 12 nt, Human
agcacuuuggga

SEQ ID NO: 2299546 - RNA, 15 nt, Human
agcacuuugggaggc

SEQ ID NO: 2299547 - RNA, 19 nt, Human
agcacuuugggaggccaag

SEQ ID NO: 2299548 - RNA, 14 nt, Human
agcacuuugggagg

SEQ ID NO: 2299549 - RNA, 22 nt, Human
agcacuuugggaggccaaggug

SEQ ID NO: 2299550 - RNA, 14 nt, Human
agcagaacugaacc

SEQ ID NO: 2299551 - RNA, 21 nt, Human
agcagaacggagccccaggcc

SEQ ID NO: 2299552 - RNA, 14 nt, Human
agcagaacagugau

SEQ ID NO: 2299553 - RNA, 12 nt, Human
agcagaaggggg

SEQ ID NO: 2299554 - RNA, 16 nt, Human
agcagaaggggguggu

SEQ ID NO: 2299555 - RNA, 22 nt, Human
agcagaaggggguggugucucc

SEQ ID NO: 2299556 - RNA, 23 nt, Human
agcagaaggggguggugucucca

SEQ ID NO: 2299557 - RNA, 16 nt, Human
agcagaaguggagcug

SEQ ID NO: 2299558 - RNA, 11 nt, Human
agcagaauaaa

SEQ ID NO: 2299559 - RNA, 12 nt, Human
agcagaauaaag

SEQ ID NO: 2299560 - RNA, 13 nt, Human
agcagaauaaagc

SEQ ID NO: 2299561 - RNA, 15 nt, Human
agcagaaaucuagaa

SEQ ID NO: 2299562 - RNA, 13 nt, Human
agcagaaauacau

SEQ ID NO: 2299563 - RNA, 19 nt, Human
agcagaaaugccuuacccu

SEQ ID NO: 2299564 - RNA, 13 nt, Human
agcagaaaugccu

SEQ ID NO: 2299565 - RNA, 12 nt, Human
agcagaaaugcc

SEQ ID NO: 2299566 - RNA, 23 nt, Human
agcaccaggcacgaacccaccug

SEQ ID NO: 2299567 - RNA, 15 nt, Human
agcaccagggacuau

SEQ ID NO: 2299568 - RNA, 17 nt, Human
agcaccagggcucacgu

SEQ ID NO: 2299569 - RNA, 13 nt, Human
agcaccagggaag

SEQ ID NO: 2299570 - RNA, 12 nt, Human
agcaccagggaa

SEQ ID NO: 2299571 - RNA, 10 nt, Human
agcaccaggg

SEQ ID NO: 2299572 - RNA, 14 nt, Human
agcaccaggcacga

SEQ ID NO: 2299573 - RNA, 21 nt, Human
agcaccagcuucuccaggcuc

SEQ ID NO: 2299574 - RNA, 19 nt, Human
agcaccagcuucuccaggc

SEQ ID NO: 2299575 - RNA, 20 nt, Human
agcaccagcuucuccaggcu

SEQ ID NO: 2299576 - RNA, 18 nt, Human
agcaccagcuucuccagg

SEQ ID NO: 2299577 - RNA, 17 nt, Human
agcaccagcuucuccag

SEQ ID NO: 2299578 - RNA, 23 nt, Human
agcaccacccuagucccuucccc

SEQ ID NO: 2299579 - RNA, 17 nt, Human
agcaccaagcucaaagc

SEQ ID NO: 2299580 - RNA, 18 nt, Human
agcaccaagcucaaagcg

SEQ ID NO: 2299581 - RNA, 19 nt, Human
agcaccuuagacagucccu

SEQ ID NO: 2299582 - RNA, 20 nt, Human
agcaccuuagacagucccug

SEQ ID NO: 2299583 - RNA, 21 nt, Human
agcaccuuagacagucccugc

SEQ ID NO: 2299584 - RNA, 22 nt, Human
agcaccuuagacagucccugcc

SEQ ID NO: 2299585 - RNA, 23 nt, Human
agcacuuggagccaaggguucag

SEQ ID NO: 2299586 - RNA, 18 nt, Human
agcacgaaauguuauuuu

SEQ ID NO: 2299587 - RNA, 12 nt, Human
agcacuuguaua

SEQ ID NO: 2299588 - RNA, 16 nt, Human
agcacgauuucuguuu

SEQ ID NO: 2299589 - RNA, 15 nt, Human
agcacgauuucuguu

SEQ ID NO: 2299590 - RNA, 14 nt, Human
agcacgauuucugu

SEQ ID NO: 2299591 - RNA, 13 nt, Human
agcacgauuucug

SEQ ID NO: 2299592 - RNA, 17 nt, Human
agcacgaaauguuauuu

SEQ ID NO: 2299593 - RNA, 18 nt, Human
agcaccuuccucacuucc

SEQ ID NO: 2299594 - RNA, 19 nt, Human
agcaccuuccucacuucca

SEQ ID NO: 2299595 - RNA, 20 nt, Human
agcaccuuccucacuuccau

SEQ ID NO: 2299596 - RNA, 23 nt, Human
agcaccuuagacagucccugcca

SEQ ID NO: 2299597 - RNA, 22 nt, Human
agcaccugucuccuuucacccc

SEQ ID NO: 2299598 - RNA, 15 nt, Human
agcaccuuccucacu

SEQ ID NO: 2299599 - RNA, 16 nt, Human
agcaccuuccucacuu

SEQ ID NO: 2299600 - RNA, 20 nt, Human
agcaccugcuucaugcucag

SEQ ID NO: 2299601 - RNA, 21 nt, Human
agcaccugcuucaugcucagc

SEQ ID NO: 2299602 - RNA, 16 nt, Human
ugagcaaugucugugc

SEQ ID NO: 2299603 - RNA, 17 nt, Human
ugagcaacuuucuuaca

SEQ ID NO: 2299604 - RNA, 22 nt, Human
ugagcacaacuuuaagaggaca

SEQ ID NO: 2299605 - RNA, 21 nt, Human
ugagcacaacuuuaagaggac

SEQ ID NO: 2299606 - RNA, 20 nt, Human
ugagcacacuuuaguggccg

SEQ ID NO: 2299607 - RNA, 17 nt, Human
ugagcaaugucugugcu

SEQ ID NO: 2299608 - RNA, 18 nt, Human
ugagcaaugucugugcua

SEQ ID NO: 2299609 - RNA, 20 nt, Human
ugagcaaugucugugcuagg

SEQ ID NO: 2299610 - RNA, 14 nt, Human
ugagcaauucuccu

SEQ ID NO: 2299611 - RNA, 14 nt, Human
ugagcaccagggga

SEQ ID NO: 2299612 - RNA, 13 nt, Human
ugagcaccagggg

SEQ ID NO: 2299613 - RNA, 17 nt, Human
ugagcaccgucauggcu

SEQ ID NO: 2299614 - RNA, 17 nt, Human
ugagcacagccuagggc

SEQ ID NO: 2299615 - RNA, 13 nt, Human
ugagcacacuuua

SEQ ID NO: 2299616 - RNA, 13 nt, Human
ugagcacauucug

SEQ ID NO: 2299617 - RNA, 16 nt, Human
ugagcaccaggggaug

SEQ ID NO: 2299618 - RNA, 19 nt, Human
ugagcaccgucauggcuua

SEQ ID NO: 2299619 - RNA, 21 nt, Human
ugagcaccugcuucaugcuca

SEQ ID NO: 2299620 - RNA, 20 nt, Human
ugagcacggccaacaaagcu

SEQ ID NO: 2299621 - RNA, 12 nt, Human
ugagcaccugcu

SEQ ID NO: 2299622 - RNA, 20 nt, Human
ugagcacuaaggugugcucu

SEQ ID NO: 2299623 - RNA, 21 nt, Human
ugagcacuaaggugugcucug

SEQ ID NO: 2299624 - RNA, 22 nt, Human
ugagcacuaaggugugcucuga

SEQ ID NO: 2299625 - RNA, 23 nt, Human
ugagcacuaaggugugcucugau

SEQ ID NO: 2299626 - RNA, 15 nt, Human
ugagcaaauguggcu

SEQ ID NO: 2299627 - RNA, 18 nt, Human
ugagcaacucuugauuau

SEQ ID NO: 2299628 - RNA, 16 nt, Human
ugagcaacucuugauu

SEQ ID NO: 2299629 - RNA, 15 nt, Human
ugagcaauccugcaa

SEQ ID NO: 2299630 - RNA, 16 nt, Human
ugagcaaauguggcuc

SEQ ID NO: 2299631 - RNA, 18 nt, Human
ugagcaaauguggcuccu

SEQ ID NO: 2299632 - RNA, 19 nt, Human
ugagcaaauguggcuccug

SEQ ID NO: 2299633 - RNA, 22 nt, Human
agcaacccuccuaucaccuccc

SEQ ID NO: 2299634 - RNA, 18 nt, Human
agcaaccgguggauccuc

SEQ ID NO: 2299635 - RNA, 15 nt, Human
agcaaccugggucca

SEQ ID NO: 2299636 - RNA, 22 nt, Human
agcaaccuggguccaaauaaaa

SEQ ID NO: 2299637 - RNA, 18 nt, Human
agcaaccuggguccaaau

SEQ ID NO: 2299638 - RNA, 19 nt, Human
agcaaccuggguccaaaua

SEQ ID NO: 2299639 - RNA, 20 nt, Human
agcaaccuggguccaaauaa

SEQ ID NO: 2299640 - RNA, 21 nt, Human
agcaaccuggguccaaauaaa

SEQ ID NO: 2299641 - RNA, 14 nt, Human
agcaacgcaggccc

SEQ ID NO: 2299642 - RNA, 16 nt, Human
ugagcagacuggugag

SEQ ID NO: 2299643 - RNA, 21 nt, Human
ugagcaucaggccaggcccuc

SEQ ID NO: 2299644 - RNA, 13 nt, Human
ugagcacuguagg

SEQ ID NO: 2299645 - RNA, 15 nt, Human
ugagcacucccaagu

SEQ ID NO: 2299646 - RNA, 17 nt, Human
ugagcacucccaagucu

SEQ ID NO: 2299647 - RNA, 18 nt, Human
ugagcacucccaagucua

SEQ ID NO: 2299648 - RNA, 23 nt, Human
ugagcacucccaagucuacagag

SEQ ID NO: 2299649 - RNA, 19 nt, Human
ugagcagacuggugagcag

SEQ ID NO: 2299650 - RNA, 17 nt, Human
ugagcagacuggugagc

SEQ ID NO: 2299651 - RNA, 14 nt, Human
ugagccaccgugcc

SEQ ID NO: 2299652 - RNA, 15 nt, Human
ugagccaccacgccc

SEQ ID NO: 2299653 - RNA, 22 nt, Human
ugagcaucaggccaggcccucu

SEQ ID NO: 2299654 - RNA, 24 nt, Human
ugagcaucaggccaggcccucugc

SEQ ID NO: 2299655 - RNA, 21 nt, Human
ugagccacugcaccgggccac

SEQ ID NO: 2299656 - RNA, 18 nt, Human
ugagccacugcaccgggc

SEQ ID NO: 2299657 - RNA, 21 nt, Human
ugagccaccgugccuggccac

SEQ ID NO: 2299658 - RNA, 20 nt, Human
ugagccaccgugccuggcca

SEQ ID NO: 2299659 - RNA, 19 nt, Human
ugagccaccgugccuggcc

SEQ ID NO: 2299660 - RNA, 18 nt, Human
ugagccaccgugccuggc

SEQ ID NO: 2299661 - RNA, 23 nt, Human
ugagccacugcaccgggccacag

SEQ ID NO: 2299662 - RNA, 13 nt, Human
ugagccagauuuc

SEQ ID NO: 2299663 - RNA, 14 nt, Human
ugagccagauuuca

SEQ ID NO: 2299664 - RNA, 16 nt, Human
ugagccagauuucacu

SEQ ID NO: 2299665 - RNA, 12 nt, Human
agcaccacccua

SEQ ID NO: 2299666 - RNA, 16 nt, Human
agcaccaaucaugaau

SEQ ID NO: 2299667 - RNA, 23 nt, Human
agcacaucugcauuuucacccca

SEQ ID NO: 2299668 - RNA, 23 nt, Human
agcacaugaaaccuuauuuuuuc

SEQ ID NO: 2299669 - RNA, 17 nt, Human
agcaccaaaauaagaaa

SEQ ID NO: 2299670 - RNA, 16 nt, Human
agcaccaaaauaagaa

SEQ ID NO: 2299671 - RNA, 21 nt, Human
agcaccaaaauaagaaaagau

SEQ ID NO: 2299672 - RNA, 20 nt, Human
agcaccaaaauaagaaaaga

SEQ ID NO: 2299673 - RNA, 19 nt, Human
agcaccaaaauaagaaaag

SEQ ID NO: 2299674 - RNA, 18 nt, Human
agcaccaaaauaagaaaa

SEQ ID NO: 2299675 - RNA, 22 nt, Human
agcaccaaaagcuuaccaaggg

SEQ ID NO: 2299676 - RNA, 14 nt, Human
agcacaugccucuc

SEQ ID NO: 2299677 - RNA, 16 nt, Human
agcacaucugcauuuu

SEQ ID NO: 2299678 - RNA, 15 nt, Human
agcacaucugcauuu

SEQ ID NO: 2299679 - RNA, 13 nt, Human
agcacaugccucu

SEQ ID NO: 2299680 - RNA, 15 nt, Human
agcacagugccugca

SEQ ID NO: 2299681 - RNA, 15 nt, Human
agcacagugguggca

SEQ ID NO: 2299682 - RNA, 14 nt, Human
agcacagugccugc

SEQ ID NO: 2299683 - RNA, 19 nt, Human
agcacagucugaugacaca

SEQ ID NO: 2299684 - RNA, 21 nt, Human
agcacaggugggcuucccagu

SEQ ID NO: 2299685 - RNA, 19 nt, Human
agcacaggugggcuuccca

SEQ ID NO: 2299686 - RNA, 17 nt, Human
agcacaguuugaacaaa

SEQ ID NO: 2299687 - RNA, 19 nt, Human
agcacaguguuaaaugaaa

SEQ ID NO: 2299688 - RNA, 22 nt, Human
agcacaguguuaaaugaaauug

SEQ ID NO: 2299689 - RNA, 12 nt, Human
agcacaguuuga

SEQ ID NO: 2299690 - RNA, 14 nt, Human
agcacaguuugaac

SEQ ID NO: 2299691 - RNA, 16 nt, Human
agcacagugguggcag

SEQ ID NO: 2299692 - RNA, 17 nt, Human
agcacagugguggcagg

SEQ ID NO: 2299693 - RNA, 18 nt, Human
agcacagugguggcaggg

SEQ ID NO: 2299694 - RNA, 19 nt, Human
agcacagugguggcagggc

SEQ ID NO: 2299695 - RNA, 20 nt, Human
agcacagugguggcagggcc

SEQ ID NO: 2299696 - RNA, 23 nt, Human
agcacagugguggcagggccuag

SEQ ID NO: 2299697 - RNA, 16 nt, Human
agcacaguguuaaaug

SEQ ID NO: 2299698 - RNA, 18 nt, Human
agcacaguguuaaaugaa

SEQ ID NO: 2299699 - RNA, 16 nt, Human
agcacagcuucauuuc

SEQ ID NO: 2299700 - RNA, 12 nt, Human
agcacagccuag

SEQ ID NO: 2299701 - RNA, 22 nt, Human
agcacagccucuuagaugcagu

SEQ ID NO: 2299702 - RNA, 10 nt, Human
agcacagccc

SEQ ID NO: 2299703 - RNA, 12 nt, Human
agcacagcccuc

SEQ ID NO: 2299704 - RNA, 13 nt, Human
agcacagcccucc

SEQ ID NO: 2299705 - RNA, 14 nt, Human
agcacagcccuccc

SEQ ID NO: 2299706 - RNA, 15 nt, Human
agcacagcccucccg

SEQ ID NO: 2299707 - RNA, 16 nt, Human
agcacagcccucccgc

SEQ ID NO: 2299708 - RNA, 21 nt, Human
agcacagcccucccgccccuu

SEQ ID NO: 2299709 - RNA, 22 nt, Human
agcacagcccucccgccccuuc

SEQ ID NO: 2299710 - RNA, 21 nt, Human
agcacagcagccccugcacaa

SEQ ID NO: 2299711 - RNA, 15 nt, Human
agcacagcagccugg

SEQ ID NO: 2299712 - RNA, 13 nt, Human
agcacagcagccu

SEQ ID NO: 2299713 - RNA, 23 nt, Human
agcacagccaacacgcaccugcc

SEQ ID NO: 2299714 - RNA, 13 nt, Human
agcacagccaaca

SEQ ID NO: 2299715 - RNA, 12 nt, Human
agcacagccaac

SEQ ID NO: 2299716 - RNA, 23 nt, Human
agcacagcagccuggggcuggcc

SEQ ID NO: 2299717 - RNA, 12 nt, Human
agcacagcagcc

SEQ ID NO: 2299718 - RNA, 10 nt, Human
agcacagcag

SEQ ID NO: 2299719 - RNA, 19 nt, Human
agcacagcaaggaggcugg

SEQ ID NO: 2299720 - RNA, 22 nt, Human
agcacagcaaggaggcuggcug

SEQ ID NO: 2299721 - RNA, 23 nt, Human
agcacagcaaggaggcuggcugg

SEQ ID NO: 2299722 - RNA, 24 nt, Human
agcacagcaaggaggcuggcuggg

SEQ ID NO: 2299723 - RNA, 17 nt, Human
agcaaguucuagagaag

SEQ ID NO: 2299724 - RNA, 20 nt, Human
agcaaguucuagagaagagg

SEQ ID NO: 2299725 - RNA, 21 nt, Human
agcaaguucuagagaagaggc

SEQ ID NO: 2299726 - RNA, 23 nt, Human
agcaaguucuagagaagaggcug

SEQ ID NO: 2299727 - RNA, 14 nt, Human
agcaauaaagaaga

SEQ ID NO: 2299728 - RNA, 16 nt, Human
agcaauaaagaagagu

SEQ ID NO: 2299729 - RNA, 22 nt, Human
agcaagugagagcuggguguca

SEQ ID NO: 2299730 - RNA, 16 nt, Human
agcaaguuacagugau

SEQ ID NO: 2299731 - RNA, 21 nt, Human
agcaagugauugggacagagg

SEQ ID NO: 2299732 - RNA, 18 nt, Human
agcaagugagagcugggu

SEQ ID NO: 2299733 - RNA, 14 nt, Human
agcaagugagagcu

SEQ ID NO: 2299734 - RNA, 20 nt, Human
ugagccagacaaauggagga

SEQ ID NO: 2299735 - RNA, 14 nt, Human
ugagccagacaaau

SEQ ID NO: 2299736 - RNA, 12 nt, Human
ugagccaccacg

SEQ ID NO: 2299737 - RNA, 13 nt, Human
ugagccagcagac

SEQ ID NO: 2299738 - RNA, 16 nt, Human
ugagccagcagacauu

SEQ ID NO: 2299739 - RNA, 14 nt, Human
ugagccaggccugg

SEQ ID NO: 2299740 - RNA, 23 nt, Human
ugagccagcagacauugucagca

SEQ ID NO: 2299741 - RNA, 17 nt, Human
ugagccagcagacauug

SEQ ID NO: 2299742 - RNA, 18 nt, Human
ugagccagcagacauugu

SEQ ID NO: 2299743 - RNA, 18 nt, Human
ugagccaggccugggucu

SEQ ID NO: 2299744 - RNA, 20 nt, Human
ugagccagguaaugagggac

SEQ ID NO: 2299745 - RNA, 17 nt, Human
ugagccagauuucacuc

SEQ ID NO: 2299746 - RNA, 22 nt, Human
ugagccagauuucacucuccuu

SEQ ID NO: 2299747 - RNA, 20 nt, Human
agcaagugagacccugucuc

SEQ ID NO: 2299748 - RNA, 21 nt, Human
ugagccagguaaugagggacu

SEQ ID NO: 2299749 - RNA, 13 nt, Human
ugagccaguccca

SEQ ID NO: 2299750 - RNA, 14 nt, Human
ugagccagucccag

SEQ ID NO: 2299751 - RNA, 16 nt, Human
ugagccagucccaggg

SEQ ID NO: 2299752 - RNA, 17 nt, Human
ugagccagucccagggg

SEQ ID NO: 2299753 - RNA, 19 nt, Human
ugagccagucccaggggca

SEQ ID NO: 2299754 - RNA, 13 nt, Human
agcaagugagagc

SEQ ID NO: 2299755 - RNA, 18 nt, Human
ugagccagucccaggggc

SEQ ID NO: 2299756 - RNA, 22 nt, Human
ugagccaguucaguaccuggag

SEQ ID NO: 2299757 - RNA, 15 nt, Human
ugagcccacaaagcc

SEQ ID NO: 2299758 - RNA, 23 nt, Human
ugagccaguucaguaccuggagg

SEQ ID NO: 2299759 - RNA, 17 nt, Human
agcaagugagagagaug

SEQ ID NO: 2299760 - RNA, 18 nt, Human
agcaagugagagagaugg

SEQ ID NO: 2299761 - RNA, 24 nt, Human
agcaagugagagagaugggagcuc

SEQ ID NO: 2299762 - RNA, 21 nt, Human
ugagcggugcuguccucaggu

SEQ ID NO: 2299763 - RNA, 18 nt, Human
ugagcuacgccugccucc

SEQ ID NO: 2299764 - RNA, 20 nt, Human
ugagcggugcuguccucagg

SEQ ID NO: 2299765 - RNA, 19 nt, Human
ugagcuagaagcuggagga

SEQ ID NO: 2299766 - RNA, 22 nt, Human
ugagcuagaagcuggaggacua

SEQ ID NO: 2299767 - RNA, 16 nt, Human
ugagcuacaaaugcau

SEQ ID NO: 2299768 - RNA, 22 nt, Human
ugagcuuuauguaauaauguga

SEQ ID NO: 2299769 - RNA, 18 nt, Human
ugagcuuuccauguugcu

SEQ ID NO: 2299770 - RNA, 21 nt, Human
ugagcuuggccagaagggggc

SEQ ID NO: 2299771 - RNA, 12 nt, Human
ugagcuuuaaaa

SEQ ID NO: 2299772 - RNA, 19 nt, Human
ugagcuuggccagaagggg

SEQ ID NO: 2299773 - RNA, 14 nt, Human
ugagcuaggaauug

SEQ ID NO: 2299774 - RNA, 19 nt, Human
ugagcuuuccauguugcug

SEQ ID NO: 2299775 - RNA, 20 nt, Human
ugagcuuuccauguugcugc

SEQ ID NO: 2299776 - RNA, 21 nt, Human
ugagcuuuccauguugcugcc

SEQ ID NO: 2299777 - RNA, 22 nt, Human
ugagcuuuccauguugcugcca

SEQ ID NO: 2299778 - RNA, 22 nt, Human
ugagcuuugcauguuccacuaa

SEQ ID NO: 2299779 - RNA, 23 nt, Human
ugagcuuugcauguuccacuaac

SEQ ID NO: 2299780 - RNA, 14 nt, Human
ugagcuuugcugcu

SEQ ID NO: 2299781 - RNA, 16 nt, Human
ugagcgacaaagauga

SEQ ID NO: 2299782 - RNA, 17 nt, Human
ugagcgacaaagaugau

SEQ ID NO: 2299783 - RNA, 13 nt, Human
ugagccuuguaau

SEQ ID NO: 2299784 - RNA, 16 nt, Human
ugagccuuuucccucu

SEQ ID NO: 2299785 - RNA, 23 nt, Human
ugagcgaggagaugcuccuuggg

SEQ ID NO: 2299786 - RNA, 22 nt, Human
ugagcgaggagaugcuccuugg

SEQ ID NO: 2299787 - RNA, 17 nt, Human
ugagcgaggacauucuc

SEQ ID NO: 2299788 - RNA, 23 nt, Human
ugagcgauuauuaucuaaagugu

SEQ ID NO: 2299789 - RNA, 12 nt, Human
ugagcgccagga

SEQ ID NO: 2299790 - RNA, 18 nt, Human
ugagcgccuccauccaag

SEQ ID NO: 2299791 - RNA, 23 nt, Human
ugagcgccuccauccaaggccag

SEQ ID NO: 2299792 - RNA, 14 nt, Human
ugagcgcuccugcc

SEQ ID NO: 2299793 - RNA, 20 nt, Human
ugagcgccuccauccaaggc

SEQ ID NO: 2299794 - RNA, 18 nt, Human
ugagcgcuccugccgcag

SEQ ID NO: 2299795 - RNA, 22 nt, Human
ugagcgcuccugccgcagagcu

SEQ ID NO: 2299796 - RNA, 14 nt, Human
ugagcuacaaaugc

SEQ ID NO: 2299797 - RNA, 13 nt, Human
ugagcuacaaaug

SEQ ID NO: 2299798 - RNA, 16 nt, Human
ugaggaaacaacagcu

SEQ ID NO: 2299799 - RNA, 23 nt, Human
ugaggaaaaaaaucguccaggga

SEQ ID NO: 2299800 - RNA, 12 nt, Human
ugagcuuuucua

SEQ ID NO: 2299801 - RNA, 15 nt, Human
ugagcuuugcugcua

SEQ ID NO: 2299802 - RNA, 16 nt, Human
ugagcuuugcugcuac

SEQ ID NO: 2299803 - RNA, 17 nt, Human
ugagcuuugcugcuaca

SEQ ID NO: 2299804 - RNA, 13 nt, Human
ugagcuuuucuag

SEQ ID NO: 2299805 - RNA, 18 nt, Human
ugaggaaaggccagcugg

SEQ ID NO: 2299806 - RNA, 16 nt, Human
ugaggaaaggccagcu

SEQ ID NO: 2299807 - RNA, 15 nt, Human
ugaggaaaggccagc

SEQ ID NO: 2299808 - RNA, 19 nt, Human
ugaggaaagcauguauuca

SEQ ID NO: 2299809 - RNA, 15 nt, Human
ugaggaaagucauug

SEQ ID NO: 2299810 - RNA, 17 nt, Human
ugaggaaagucauuggc

SEQ ID NO: 2299811 - RNA, 18 nt, Human
ugaggaaagucauuggcu

SEQ ID NO: 2299812 - RNA, 19 nt, Human
ugaggaaagucauuggcuu

SEQ ID NO: 2299813 - RNA, 19 nt, Human
ugaggaaaggccagcuggc

SEQ ID NO: 2299814 - RNA, 21 nt, Human
ugaggaaagucauuggcuuua

SEQ ID NO: 2299815 - RNA, 22 nt, Human
ugaggaaagucauuggcuuuau

SEQ ID NO: 2299816 - RNA, 15 nt, Human
ugaggaagcaaaagc

SEQ ID NO: 2299817 - RNA, 17 nt, Human
ugaggaagaacggggcu

SEQ ID NO: 2299818 - RNA, 19 nt, Human
ugaggaagaacggggcucu

SEQ ID NO: 2299819 - RNA, 23 nt, Human
ugaggaagaacggggcucuucuc

SEQ ID NO: 2299820 - RNA, 24 nt, Human
ugaggaagaacggggcucuucuca

SEQ ID NO: 2299821 - RNA, 22 nt, Human
ugaggaagcgugaaggccgaga

SEQ ID NO: 2299822 - RNA, 19 nt, Human
ugaggaaggcaggaagaga

SEQ ID NO: 2299823 - RNA, 20 nt, Human
ugaggaaggcaggaagagag

SEQ ID NO: 2299824 - RNA, 17 nt, Human
ugaggaauaauuauuua

SEQ ID NO: 2299825 - RNA, 19 nt, Human
ugaggaauaauuauuuauu

SEQ ID NO: 2299826 - RNA, 19 nt, Human
ugaggaauaguugagcccc

SEQ ID NO: 2299827 - RNA, 17 nt, Human
ugaggaagcgugaaggc

SEQ ID NO: 2299828 - RNA, 23 nt, Human
ugaggaagccagguccacggucu

SEQ ID NO: 2299829 - RNA, 23 nt, Human
ugaggaagaugggggcaagaaga

SEQ ID NO: 2299830 - RNA, 17 nt, Human
ugaggaagagggacugu

SEQ ID NO: 2299831 - RNA, 19 nt, Human
ugaggaagccgcuggggcc

SEQ ID NO: 2299832 - RNA, 21 nt, Human
ugaggaagccgcuggggccag

SEQ ID NO: 2299833 - RNA, 22 nt, Human
ugaggaagcaaaagcaucuaug

SEQ ID NO: 2299834 - RNA, 14 nt, Human
ugaggaagccgcug

SEQ ID NO: 2299835 - RNA, 17 nt, Human
ugaggaagccgcugggg

SEQ ID NO: 2299836 - RNA, 18 nt, Human
ugaggaagccgcuggggc

SEQ ID NO: 2299837 - RNA, 23 nt, Human
ugaggcccagggagaggccauga

SEQ ID NO: 2299838 - RNA, 20 nt, Human
ugaggcccagggagaggcca

SEQ ID NO: 2299839 - RNA, 17 nt, Human
ugaggcccagggagagg

SEQ ID NO: 2299840 - RNA, 14 nt, Human
ugaggcccagggag

SEQ ID NO: 2299841 - RNA, 13 nt, Human
ugaggcccaggga

SEQ ID NO: 2299842 - RNA, 23 nt, Human
ugaggcccagagggccugcaagg

SEQ ID NO: 2299843 - RNA, 21 nt, Human
ugaggcccagagggccugcaa

SEQ ID NO: 2299844 - RNA, 22 nt, Human
ugaggcccagagggccugcaag

SEQ ID NO: 2299845 - RNA, 15 nt, Human
ugaggcccagagggc

SEQ ID NO: 2299846 - RNA, 17 nt, Human
ugaggcccagagggccu

SEQ ID NO: 2299847 - RNA, 18 nt, Human
ugaggcccagagggccug

SEQ ID NO: 2299848 - RNA, 20 nt, Human
ugaggcccagagggccugca

SEQ ID NO: 2299849 - RNA, 13 nt, Human
ugaggccaggagu

SEQ ID NO: 2299850 - RNA, 12 nt, Human
ugaggccaggag

SEQ ID NO: 2299851 - RNA, 16 nt, Human
ugaggccagggcagag

SEQ ID NO: 2299852 - RNA, 15 nt, Human
ugaggccagggcaga

SEQ ID NO: 2299853 - RNA, 14 nt, Human
ugaggccagggcag

SEQ ID NO: 2299854 - RNA, 13 nt, Human
ugaggccagggca

SEQ ID NO: 2299855 - RNA, 12 nt, Human
ugaggcccagag

SEQ ID NO: 2299856 - RNA, 13 nt, Human
ugaggcccagagg

SEQ ID NO: 2299857 - RNA, 20 nt, Human
ugaggccagagacacaagcc

SEQ ID NO: 2299858 - RNA, 14 nt, Human
ugaggccagagaca

SEQ ID NO: 2299859 - RNA, 16 nt, Human
ugaggccagagacaca

SEQ ID NO: 2299860 - RNA, 22 nt, Human
ugaggccaaacguuuugaacua

SEQ ID NO: 2299861 - RNA, 12 nt, Human
ugaggccacacu

SEQ ID NO: 2299862 - RNA, 19 nt, Human
ugaggccacacucagcaca

SEQ ID NO: 2299863 - RNA, 13 nt, Human
ugaggccacacuc

SEQ ID NO: 2299864 - RNA, 18 nt, Human
ugaggacagcuguccucu

SEQ ID NO: 2299865 - RNA, 16 nt, Human
ugaggacagcuguccu

SEQ ID NO: 2299866 - RNA, 17 nt, Human
ugaggacagcuguccuc

SEQ ID NO: 2299867 - RNA, 12 nt, Human
ugaggccagaga

SEQ ID NO: 2299868 - RNA, 23 nt, Human
ugaggccacacucagcacaaggc

SEQ ID NO: 2299869 - RNA, 20 nt, Human
ugaggccacacucagcacaa

SEQ ID NO: 2299870 - RNA, 22 nt, Human
ugaggccacugcugcuucucca

SEQ ID NO: 2299871 - RNA, 21 nt, Human
ugaggacacuaaccacgcugg

SEQ ID NO: 2299872 - RNA, 15 nt, Human
ugaggacacugauau

SEQ ID NO: 2299873 - RNA, 13 nt, Human
ugaggacagcugu

SEQ ID NO: 2299874 - RNA, 14 nt, Human
ugaggacagcuguc

SEQ ID NO: 2299875 - RNA, 15 nt, Human
ugaggacagcugucc

SEQ ID NO: 2299876 - RNA, 21 nt, Human
ugaggaauccagacccggcug

SEQ ID NO: 2299877 - RNA, 22 nt, Human
ugaggaauccagacccggcugc

SEQ ID NO: 2299878 - RNA, 20 nt, Human
ugaggaauaguugagcccca

SEQ ID NO: 2299879 - RNA, 16 nt, Human
ugaggaaugaugaagc

SEQ ID NO: 2299880 - RNA, 20 nt, Human
ugaggacaaccauuccagac

SEQ ID NO: 2299881 - RNA, 19 nt, Human
ugaggacaaccauuccaga

SEQ ID NO: 2299882 - RNA, 18 nt, Human
ugaggaauuuucuuugug

SEQ ID NO: 2299883 - RNA, 14 nt, Human
ugaggaauuuucuu

SEQ ID NO: 2299884 - RNA, 13 nt, Human
ugaggaauuuucu

SEQ ID NO: 2299885 - RNA, 22 nt, Human
ugaggaauuucaccuguaaacc

SEQ ID NO: 2299886 - RNA, 21 nt, Human
ugaggaauuucaccuguaaac

SEQ ID NO: 2299887 - RNA, 15 nt, Human
ugaggaauuucaccu

SEQ ID NO: 2299888 - RNA, 17 nt, Human
ugaggaauguauauguu

SEQ ID NO: 2299889 - RNA, 19 nt, Human
ugaggaauguauauguuuu

SEQ ID NO: 2299890 - RNA, 20 nt, Human
ugaggggucuccaggaggag

SEQ ID NO: 2299891 - RNA, 14 nt, Human
ugaggggucccuga

SEQ ID NO: 2299892 - RNA, 18 nt, Human
ugagggguaaaagcugau

SEQ ID NO: 2299893 - RNA, 15 nt, Human
ugaggggcuccugga

SEQ ID NO: 2299894 - RNA, 14 nt, Human
ugaggggcuggccu

SEQ ID NO: 2299895 - RNA, 22 nt, Human
ugaggggcuggccuuccugccc

SEQ ID NO: 2299896 - RNA, 22 nt, Human
ugagggggaauagucuagaugg

SEQ ID NO: 2299897 - RNA, 20 nt, Human
ugaggggggccgugcccagg

SEQ ID NO: 2299898 - RNA, 22 nt, Human
ugaggggggccgugcccagggg

SEQ ID NO: 2299899 - RNA, 14 nt, Human
ugaggggcuccugg

SEQ ID NO: 2299900 - RNA, 13 nt, Human
ugaggggccucuu

SEQ ID NO: 2299901 - RNA, 22 nt, Human
ugagggucagagaggagucaga

SEQ ID NO: 2299902 - RNA, 18 nt, Human
ugaggguaucaaauaaaa

SEQ ID NO: 2299903 - RNA, 15 nt, Human
ugaggguccccaccu

SEQ ID NO: 2299904 - RNA, 19 nt, Human
ugaggguccccaccuggga

SEQ ID NO: 2299905 - RNA, 18 nt, Human
ugaggguaauaaacuuag

SEQ ID NO: 2299906 - RNA, 21 nt, Human
ugaggguaauaaacuuagaau

SEQ ID NO: 2299907 - RNA, 22 nt, Human
ugaggguaauaaacuuagaaua

SEQ ID NO: 2299908 - RNA, 23 nt, Human
ugaggguaaccccaaaccuccaa

SEQ ID NO: 2299909 - RNA, 17 nt, Human
ugaggggcaucugcccc

SEQ ID NO: 2299910 - RNA, 21 nt, Human
ugaggggaggaaacucaccug

SEQ ID NO: 2299911 - RNA, 15 nt, Human
ugaggggaggggggc

SEQ ID NO: 2299912 - RNA, 22 nt, Human
ugaggggcaucugccccucccc

SEQ ID NO: 2299913 - RNA, 16 nt, Human
ugaggggcccgagcag

SEQ ID NO: 2299914 - RNA, 12 nt, Human
ugaggggccucu

SEQ ID NO: 2299915 - RNA, 22 nt, Human
ugaggggaggaucacuggagcc

SEQ ID NO: 2299916 - RNA, 21 nt, Human
ugaggggaggaucacuggagc

SEQ ID NO: 2299917 - RNA, 17 nt, Human
ugagggcgaggggaggg

SEQ ID NO: 2299918 - RNA, 21 nt, Human
ugagggccccucugcccagcu

SEQ ID NO: 2299919 - RNA, 17 nt, Human
ugagggccccucugccc

SEQ ID NO: 2299920 - RNA, 19 nt, Human
ugagggccccucugcccag

SEQ ID NO: 2299921 - RNA, 17 nt, Human
ugagggcccagagcagg

SEQ ID NO: 2299922 - RNA, 18 nt, Human
ugagggcccagagcagga

SEQ ID NO: 2299923 - RNA, 19 nt, Human
ugagggcccagagcaggaa

SEQ ID NO: 2299924 - RNA, 20 nt, Human
ugagggcccagagcaggaag

SEQ ID NO: 2299925 - RNA, 21 nt, Human
ugagggcccagagcaggaagc

SEQ ID NO: 2299926 - RNA, 14 nt, Human
ugagggccccucug

SEQ ID NO: 2299927 - RNA, 15 nt, Human
ugagggccccucugc

SEQ ID NO: 2299928 - RNA, 16 nt, Human
ugagggccccucugcc

SEQ ID NO: 2299929 - RNA, 18 nt, Human
ugagggccaagaaagagu

SEQ ID NO: 2299930 - RNA, 12 nt, Human
ugagggcccaga

SEQ ID NO: 2299931 - RNA, 21 nt, Human
ugagggcaucuugguccagga

SEQ ID NO: 2299932 - RNA, 13 nt, Human
ugagggcccagag

SEQ ID NO: 2299933 - RNA, 14 nt, Human
ugagggcccagagc

SEQ ID NO: 2299934 - RNA, 15 nt, Human
ugagggcccagagca

SEQ ID NO: 2299935 - RNA, 16 nt, Human
ugagggcccagagcag

SEQ ID NO: 2299936 - RNA, 11 nt, Human
ugagggcaguc

SEQ ID NO: 2299937 - RNA, 18 nt, Human
ugagggaucacagggccc

SEQ ID NO: 2299938 - RNA, 17 nt, Human
ugagggaucacagggcc

SEQ ID NO: 2299939 - RNA, 23 nt, Human
ugagggaggaggccaccucucca

SEQ ID NO: 2299940 - RNA, 19 nt, Human
ugagggaggaggccaccuc

SEQ ID NO: 2299941 - RNA, 20 nt, Human
ugagggaggaggccaccucu

SEQ ID NO: 2299942 - RNA, 19 nt, Human
ugagggauacccaucccau

SEQ ID NO: 2299943 - RNA, 15 nt, Human
ugagggauuaucuuu

SEQ ID NO: 2299944 - RNA, 19 nt, Human
ugaggccucaguggacuuu

SEQ ID NO: 2299945 - RNA, 22 nt, Human
ugaggccuccagcuucaggcag

SEQ ID NO: 2299946 - RNA, 15 nt, Human
ugaggccucagugga

SEQ ID NO: 2299947 - RNA, 23 nt, Human
ugaggccucuuggaccucugcuc

SEQ ID NO: 2299948 - RNA, 14 nt, Human
ugaggccucuugga

SEQ ID NO: 2299949 - RNA, 15 nt, Human
ugaggccucuuggac

SEQ ID NO: 2299950 - RNA, 21 nt, Human
ugaggccucuuggaccucugc

SEQ ID NO: 2299951 - RNA, 17 nt, Human
ugaggccugcccucagg

SEQ ID NO: 2299952 - RNA, 18 nt, Human
ugaggccugcccucaggg

SEQ ID NO: 2299953 - RNA, 19 nt, Human
ugaggccugcccucaggga

SEQ ID NO: 2299954 - RNA, 14 nt, Human
ugagggaggaggcc

SEQ ID NO: 2299955 - RNA, 18 nt, Human
ugagggaggaggccaccu

SEQ ID NO: 2299956 - RNA, 19 nt, Human
ugaggccuaaaaguaaaca

SEQ ID NO: 2299957 - RNA, 23 nt, Human
ugaggccgcuagaggccugagga

SEQ ID NO: 2299958 - RNA, 16 nt, Human
ugaggccgcuagaggc

SEQ ID NO: 2299959 - RNA, 17 nt, Human
ugaggccgcuagaggcc

SEQ ID NO: 2299960 - RNA, 18 nt, Human
ugaggccgcuagaggccu

SEQ ID NO: 2299961 - RNA, 19 nt, Human
ugaggccgcuagaggccug

SEQ ID NO: 2299962 - RNA, 20 nt, Human
ugaggccgcuagaggccuga

SEQ ID NO: 2299963 - RNA, 22 nt, Human
ugaggccgcuagaggccugagg

SEQ ID NO: 2299964 - RNA, 16 nt, Human
ugaggcccuucucucc

SEQ ID NO: 2299965 - RNA, 21 nt, Human
ugaggccccuucuagguggca

SEQ ID NO: 2299966 - RNA, 18 nt, Human
ugaggcccuucucuccag

SEQ ID NO: 2299967 - RNA, 19 nt, Human
ugaggcccuucucuccagc

SEQ ID NO: 2299968 - RNA, 20 nt, Human
ugaggcccuucucuccagcc

SEQ ID NO: 2299969 - RNA, 22 nt, Human
ugaggcccuucucuccagcccc

SEQ ID NO: 2299970 - RNA, 23 nt, Human
ugaggcccuucucuccagccccu

SEQ ID NO: 2299971 - RNA, 24 nt, Human
ugaggcccuucucuccagccccug

SEQ ID NO: 2299972 - RNA, 19 nt, Human
agcagaugcaaugacucag

SEQ ID NO: 2299973 - RNA, 21 nt, Human
agcagaugcaaagaggcaaga

SEQ ID NO: 2299974 - RNA, 12 nt, Human
agcagaugcaga

SEQ ID NO: 2299975 - RNA, 13 nt, Human
agcagaugcagag

SEQ ID NO: 2299976 - RNA, 16 nt, Human
agcagaugcagagagc

SEQ ID NO: 2299977 - RNA, 17 nt, Human
agcagaugcagagagcc

SEQ ID NO: 2299978 - RNA, 18 nt, Human
agcagaugcagagagcca

SEQ ID NO: 2299979 - RNA, 19 nt, Human
agcagauggagaccccuug

SEQ ID NO: 2299980 - RNA, 21 nt, Human
agcagauggaaugcuguguua

SEQ ID NO: 2299981 - RNA, 20 nt, Human
agcagauuggagaaacccuu

SEQ ID NO: 2299982 - RNA, 21 nt, Human
agcagaugcagagagccauuu

SEQ ID NO: 2299983 - RNA, 13 nt, Human
agcagaugcuggu

SEQ ID NO: 2299984 - RNA, 18 nt, Human
agcagauuuaacaauucc

SEQ ID NO: 2299985 - RNA, 14 nt, Human
agcagaugcugguc

SEQ ID NO: 2299986 - RNA, 13 nt, Human
agcagauuuuaau

SEQ ID NO: 2299987 - RNA, 21 nt, Human
agcagauuuuaauuuugaaua

SEQ ID NO: 2299988 - RNA, 22 nt, Human
agcagauuuuaauuuugaauaa

SEQ ID NO: 2299989 - RNA, 20 nt, Human
agcagauuuuaggaaaugaa

SEQ ID NO: 2299990 - RNA, 17 nt, Human
agcagauuuuaggaaau

SEQ ID NO: 2299991 - RNA, 13 nt, Human
agcagaggcacug

SEQ ID NO: 2299992 - RNA, 21 nt, Human
agcagaggaggggccgcugcc

SEQ ID NO: 2299993 - RNA, 19 nt, Human
agcagaggaggggccgcug

SEQ ID NO: 2299994 - RNA, 22 nt, Human
agcagaggaggggccgcugcca

SEQ ID NO: 2299995 - RNA, 14 nt, Human
agcagaggcacugg

SEQ ID NO: 2299996 - RNA, 15 nt, Human
agcagaggcacuggg

SEQ ID NO: 2299997 - RNA, 17 nt, Human
agcagaggcacuggggg

SEQ ID NO: 2299998 - RNA, 15 nt, Human
agcagaggaggggcc

SEQ ID NO: 2299999 - RNA, 12 nt, Human
agcagaggaggg

SEQ ID NO: 2300000 - RNA, 16 nt, Human
agcagagcuuccucag

SEQ ID NO: 2300001 - RNA, 17 nt, Human
agcagaggaaggagagg

SEQ ID NO: 2300002 - RNA, 15 nt, Human
agcagagcucugccg

SEQ ID NO: 2300003 - RNA, 17 nt, Human
agcagaugaccccuccc

SEQ ID NO: 2300004 - RNA, 14 nt, Human
agcagaugcaaaga

SEQ ID NO: 2300005 - RNA, 13 nt, Human
agcagaugcaaag

SEQ ID NO: 2300006 - RNA, 20 nt, Human
agcagaugcaaagaggcaag

SEQ ID NO: 2300007 - RNA, 19 nt, Human
agcagaugcaaagaggcaa

SEQ ID NO: 2300008 - RNA, 18 nt, Human
agcagaugcaaagaggca

SEQ ID NO: 2300009 - RNA, 17 nt, Human
agcagaugcaaagaggc

SEQ ID NO: 2300010 - RNA, 16 nt, Human
agcagaucccagcuca

SEQ ID NO: 2300011 - RNA, 19 nt, Human
agcagauaccucacccugc

SEQ ID NO: 2300012 - RNA, 20 nt, Human
agcagauacauaugagugug

SEQ ID NO: 2300013 - RNA, 22 nt, Human
agcagauacauaugagugugga

SEQ ID NO: 2300014 - RNA, 18 nt, Human
agcagauaccucacccug

SEQ ID NO: 2300015 - RNA, 18 nt, Human
agcagagggacuuuguau

SEQ ID NO: 2300016 - RNA, 13 nt, Human
agcagaggcagcg

SEQ ID NO: 2300017 - RNA, 23 nt, Human
agcagagguggccagagcuggga

SEQ ID NO: 2300018 - RNA, 14 nt, Human
agcagaggggcuga

SEQ ID NO: 2300019 - RNA, 15 nt, Human
agcagagcaggggca

SEQ ID NO: 2300020 - RNA, 14 nt, Human
agcagagcaggggc

SEQ ID NO: 2300021 - RNA, 17 nt, Human
agcagagcaagucugca

SEQ ID NO: 2300022 - RNA, 18 nt, Human
agcagagcaagucugcag

SEQ ID NO: 2300023 - RNA, 19 nt, Human
agcagagcaagucugcagg

SEQ ID NO: 2300024 - RNA, 20 nt, Human
agcagagcaagucugcaggu

SEQ ID NO: 2300025 - RNA, 20 nt, Human
agcagagcaccuuagacagu

SEQ ID NO: 2300026 - RNA, 20 nt, Human
ugaggucaaguaagaagaca

SEQ ID NO: 2300027 - RNA, 19 nt, Human
ugagguacaaccuguucug

SEQ ID NO: 2300028 - RNA, 20 nt, Human
agcagagaccaucccugaag

SEQ ID NO: 2300029 - RNA, 17 nt, Human
ugaggucagagccugca

SEQ ID NO: 2300030 - RNA, 17 nt, Human
agcagagaccaucccug

SEQ ID NO: 2300031 - RNA, 18 nt, Human
agcagagaccaucccuga

SEQ ID NO: 2300032 - RNA, 19 nt, Human
agcagagaccaucccugaa

SEQ ID NO: 2300033 - RNA, 14 nt, Human
ugaggucagagccu

SEQ ID NO: 2300034 - RNA, 16 nt, Human
ugaggucagagccugc

SEQ ID NO: 2300035 - RNA, 13 nt, Human
ugaggucagagcc

SEQ ID NO: 2300036 - RNA, 22 nt, Human
ugagguacugagagugaacaaa

SEQ ID NO: 2300037 - RNA, 21 nt, Human
ugagggugcuuguucccucuc

SEQ ID NO: 2300038 - RNA, 18 nt, Human
ugaggguuucagagagcc

SEQ ID NO: 2300039 - RNA, 14 nt, Human
ugaggguggagacu

SEQ ID NO: 2300040 - RNA, 19 nt, Human
ugaggguuucugagcugcu

SEQ ID NO: 2300041 - RNA, 17 nt, Human
ugagguacugagaguga

SEQ ID NO: 2300042 - RNA, 19 nt, Human
ugagggucuucuuacaugc

SEQ ID NO: 2300043 - RNA, 12 nt, Human
ugagggucuucu

SEQ ID NO: 2300044 - RNA, 22 nt, Human
ugagggugacuauggagcugag

SEQ ID NO: 2300045 - RNA, 20 nt, Human
ugaggguugggcugguguca

SEQ ID NO: 2300046 - RNA, 22 nt, Human
ugaagcucuggugacaccagcc

SEQ ID NO: 2300047 - RNA, 14 nt, Human
ugaagccucuggga

SEQ ID NO: 2300048 - RNA, 13 nt, Human
ugaagccucuggg

SEQ ID NO: 2300049 - RNA, 13 nt, Human
ugaagccugcccu

SEQ ID NO: 2300050 - RNA, 22 nt, Human
ugaagcccuccaaaagcacuua

SEQ ID NO: 2300051 - RNA, 15 nt, Human
ugaagccuuagccag

SEQ ID NO: 2300052 - RNA, 15 nt, Human
ugaagcugccugcuu

SEQ ID NO: 2300053 - RNA, 16 nt, Human
ugaagcugccugcuuu

SEQ ID NO: 2300054 - RNA, 20 nt, Human
ugaagccacugaagcuggga

SEQ ID NO: 2300055 - RNA, 19 nt, Human
ugaagcauguuucauguuu

SEQ ID NO: 2300056 - RNA, 12 nt, Human
ugaagccagccu

SEQ ID NO: 2300057 - RNA, 13 nt, Human
ugaagccagccuu

SEQ ID NO: 2300058 - RNA, 14 nt, Human
ugaagccagccuuc

SEQ ID NO: 2300059 - RNA, 21 nt, Human
ugaagccagccuucuuccauc

SEQ ID NO: 2300060 - RNA, 15 nt, Human
ugaagcccaauaaac

SEQ ID NO: 2300061 - RNA, 16 nt, Human
ugaagcccuccaaaag

SEQ ID NO: 2300062 - RNA, 19 nt, Human
ugaagcccaauaaaccucu

SEQ ID NO: 2300063 - RNA, 16 nt, Human
ugaagcccaagugaaa

SEQ ID NO: 2300064 - RNA, 16 nt, Human
ugaagccagccuucuu

SEQ ID NO: 2300065 - RNA, 14 nt, Human
ugaagcauguuuca

SEQ ID NO: 2300066 - RNA, 16 nt, Human
ugaagcauguuucaug

SEQ ID NO: 2300067 - RNA, 19 nt, Human
ugaagccacugaagcuggg

SEQ ID NO: 2300068 - RNA, 20 nt, Human
ugaagcauguuucauguuuu

SEQ ID NO: 2300069 - RNA, 20 nt, Human
ugaagcagguucccaagcuc

SEQ ID NO: 2300070 - RNA, 14 nt, Human
ugaagcaguugugu

SEQ ID NO: 2300071 - RNA, 17 nt, Human
ugaagcaguugugucag

SEQ ID NO: 2300072 - RNA, 19 nt, Human
ugaagcagguucccaagcu

SEQ ID NO: 2300073 - RNA, 19 nt, Human
ugaagcaggagaaucacuu

SEQ ID NO: 2300074 - RNA, 23 nt, Human
ugaagcagaugcaaagaggcaag

SEQ ID NO: 2300075 - RNA, 22 nt, Human
ugaagcagaugcaaagaggcaa

SEQ ID NO: 2300076 - RNA, 19 nt, Human
ugaagcagaugcaaagagg

SEQ ID NO: 2300077 - RNA, 19 nt, Human
ugaagauucuccugugcua

SEQ ID NO: 2300078 - RNA, 16 nt, Human
ugaagauucuuuccca

SEQ ID NO: 2300079 - RNA, 13 nt, Human
ugaagcagccucu

SEQ ID NO: 2300080 - RNA, 15 nt, Human
ugaagcagccucucc

SEQ ID NO: 2300081 - RNA, 20 nt, Human
ugaagcagccucuccccagg

SEQ ID NO: 2300082 - RNA, 17 nt, Human
ugaagcagcuuuaaaca

SEQ ID NO: 2300083 - RNA, 19 nt, Human
ugaagcagcuuuaaacaaa

SEQ ID NO: 2300084 - RNA, 16 nt, Human
ugaagaugucuaauag

SEQ ID NO: 2300085 - RNA, 15 nt, Human
ugaagauucuccugu

SEQ ID NO: 2300086 - RNA, 18 nt, Human
ugaagauucuccugugcu

SEQ ID NO: 2300087 - RNA, 18 nt, Human
ugaagauguagaggagaa

SEQ ID NO: 2300088 - RNA, 12 nt, Human
agaggugccagc

SEQ ID NO: 2300089 - RNA, 14 nt, Human
agaggugccagcaa

SEQ ID NO: 2300090 - RNA, 16 nt, Human
agaggugccagcaacu

SEQ ID NO: 2300091 - RNA, 18 nt, Human
agaggugccagcaacuga

SEQ ID NO: 2300092 - RNA, 19 nt, Human
agaggugccagcaacugaa

SEQ ID NO: 2300093 - RNA, 20 nt, Human
agaggugccagcaacugaau

SEQ ID NO: 2300094 - RNA, 21 nt, Human
agaggugccagcaacugaaua

SEQ ID NO: 2300095 - RNA, 12 nt, Human
agaggugggcag

SEQ ID NO: 2300096 - RNA, 18 nt, Human
agagguggccagagcugg

SEQ ID NO: 2300097 - RNA, 13 nt, Human
agagguggccaga

SEQ ID NO: 2300098 - RNA, 22 nt, Human
agaggugccagcaacugaauaa

SEQ ID NO: 2300099 - RNA, 17 nt, Human
ugaagauguagaggaga

SEQ ID NO: 2300100 - RNA, 13 nt, Human
agaggugggccag

SEQ ID NO: 2300101 - RNA, 21 nt, Human
agaggugggccagucugugga

SEQ ID NO: 2300102 - RNA, 13 nt, Human
agaggugggcagg

SEQ ID NO: 2300103 - RNA, 14 nt, Human
agaggugggcaggu

SEQ ID NO: 2300104 - RNA, 17 nt, Human
agaggugggcagguggu

SEQ ID NO: 2300105 - RNA, 19 nt, Human
agaggugggcagguggugg

SEQ ID NO: 2300106 - RNA, 19 nt, Human
agagggaccucucccaggg

SEQ ID NO: 2300107 - RNA, 16 nt, Human
agagggaccucuccca

SEQ ID NO: 2300108 - RNA, 15 nt, Human
agagggaccucuccc

SEQ ID NO: 2300109 - RNA, 17 nt, Human
agagggaagagugcauu

SEQ ID NO: 2300110 - RNA, 12 nt, Human
agagggacagau

SEQ ID NO: 2300111 - RNA, 21 nt, Human
agagggagggagggcuccaga

SEQ ID NO: 2300112 - RNA, 20 nt, Human
agagggagggagggcuccag

SEQ ID NO: 2300113 - RNA, 19 nt, Human
agaggucuuuuuuaaaagg

SEQ ID NO: 2300114 - RNA, 20 nt, Human
agagggaggggccuaggccu

SEQ ID NO: 2300115 - RNA, 18 nt, Human
agagggaggggccuaggc

SEQ ID NO: 2300116 - RNA, 16 nt, Human
agagggaggggccuag

SEQ ID NO: 2300117 - RNA, 14 nt, Human
agaggugagggaag

SEQ ID NO: 2300118 - RNA, 22 nt, Human
agagggagggagggcuccagac

SEQ ID NO: 2300119 - RNA, 14 nt, Human
agagggaggggccu

SEQ ID NO: 2300120 - RNA, 13 nt, Human
agagggaggggcc

SEQ ID NO: 2300121 - RNA, 15 nt, Human
agagggacgccuggg

SEQ ID NO: 2300122 - RNA, 21 nt, Human
agagggacgccugggggugcc

SEQ ID NO: 2300123 - RNA, 13 nt, Human
agaggcagagaaa

SEQ ID NO: 2300124 - RNA, 14 nt, Human
agaggcagagaaag

SEQ ID NO: 2300125 - RNA, 17 nt, Human
agaggcagagaaagaag

SEQ ID NO: 2300126 - RNA, 18 nt, Human
agaggcagagaaagaaga

SEQ ID NO: 2300127 - RNA, 20 nt, Human
agaggcagagaaagaagaga

SEQ ID NO: 2300128 - RNA, 21 nt, Human
agaggcagagaaagaagagac

SEQ ID NO: 2300129 - RNA, 21 nt, Human
agaggcgcaugaauuugugaa

SEQ ID NO: 2300130 - RNA, 24 nt, Human
agaggcaccacuaaaagaucgcag

SEQ ID NO: 2300131 - RNA, 19 nt, Human
agaggaaauauugcugggg

SEQ ID NO: 2300132 - RNA, 20 nt, Human
agaggaaauauugcuggggu

SEQ ID NO: 2300133 - RNA, 21 nt, Human
agaggauuuuuuucugagcga

SEQ ID NO: 2300134 - RNA, 20 nt, Human
agaggcagaaaauugcacaa

SEQ ID NO: 2300135 - RNA, 18 nt, Human
agaggcagaaaauugcac

SEQ ID NO: 2300136 - RNA, 18 nt, Human
agaggcaccugucccaga

SEQ ID NO: 2300137 - RNA, 19 nt, Human
agaggccuuuuggaaugug

SEQ ID NO: 2300138 - RNA, 13 nt, Human
agaggcgggccag

SEQ ID NO: 2300139 - RNA, 14 nt, Human
agaggcgggccagc

SEQ ID NO: 2300140 - RNA, 15 nt, Human
agaggcgggccagcc

SEQ ID NO: 2300141 - RNA, 16 nt, Human
agaggcgggccagcca

SEQ ID NO: 2300142 - RNA, 16 nt, Human
agaggcgucuguauau

SEQ ID NO: 2300143 - RNA, 17 nt, Human
agaggcgggccagccag

SEQ ID NO: 2300144 - RNA, 18 nt, Human
agaggcgggccagccagg

SEQ ID NO: 2300145 - RNA, 19 nt, Human
agaggcgggccagccaggc

SEQ ID NO: 2300146 - RNA, 20 nt, Human
agaggcgggccagccaggcg

SEQ ID NO: 2300147 - RNA, 23 nt, Human
agagggaagaaaagagcuuucuu

SEQ ID NO: 2300148 - RNA, 15 nt, Human
agagggaagaaaaga

SEQ ID NO: 2300149 - RNA, 14 nt, Human
agagggaagaaaag

SEQ ID NO: 2300150 - RNA, 19 nt, Human
agaggcuagcuucugcuuu

SEQ ID NO: 2300151 - RNA, 21 nt, Human
agaggcuaaauuacucaggaa

SEQ ID NO: 2300152 - RNA, 17 nt, Human
agaggcuagcuucugcu

SEQ ID NO: 2300153 - RNA, 19 nt, Human
agaggcuaaauuacucagg

SEQ ID NO: 2300154 - RNA, 16 nt, Human
agaggcuagcuucugc

SEQ ID NO: 2300155 - RNA, 21 nt, Human
agaggcuucuucagaucagug

SEQ ID NO: 2300156 - RNA, 11 nt, Human
ugaagaagaga

SEQ ID NO: 2300157 - RNA, 23 nt, Human
ugaagaacugcaggcccuggccu

SEQ ID NO: 2300158 - RNA, 22 nt, Human
ugaagaagcaccaaucaugaau

SEQ ID NO: 2300159 - RNA, 11 nt, Human
ugaagacaaug

SEQ ID NO: 2300160 - RNA, 17 nt, Human
ugaagacaaugacuuac

SEQ ID NO: 2300161 - RNA, 13 nt, Human
ugaagacaaugac

SEQ ID NO: 2300162 - RNA, 23 nt, Human
ucuuuguaaucguuaugugugua

SEQ ID NO: 2300163 - RNA, 11 nt, Human
ugaacuuucuc

SEQ ID NO: 2300164 - RNA, 22 nt, Human
ugaacuuucucuucauacuuuu

SEQ ID NO: 2300165 - RNA, 17 nt, Human
ugaacuuugaccucugc

SEQ ID NO: 2300166 - RNA, 16 nt, Human
ugaacuuugaccucug

SEQ ID NO: 2300167 - RNA, 14 nt, Human
ugaagaagauggua

SEQ ID NO: 2300168 - RNA, 20 nt, Human
ugaagaagcaccaaucauga

SEQ ID NO: 2300169 - RNA, 23 nt, Human
ucuuuguaagaguguagaagcau

SEQ ID NO: 2300170 - RNA, 24 nt, Human
ucuuuguaagaguguagaagcauu

SEQ ID NO: 2300171 - RNA, 19 nt, Human
ucuuuguaagaguguagaa

SEQ ID NO: 2300172 - RNA, 21 nt, Human
ucuuuguaagaguguagaagc

SEQ ID NO: 2300173 - RNA, 22 nt, Human
ucuuuguaagaguguagaagca

SEQ ID NO: 2300174 - RNA, 12 nt, Human
ucuuuguaauga

SEQ ID NO: 2300175 - RNA, 14 nt, Human
ucuuuggucuacac

SEQ ID NO: 2300176 - RNA, 21 nt, Human
ucuuuggucuacacugugcug

SEQ ID NO: 2300177 - RNA, 13 nt, Human
ucuuuguaaugaa

SEQ ID NO: 2300178 - RNA, 15 nt, Human
ucuuuguaaugaaaa

SEQ ID NO: 2300179 - RNA, 11 nt, Human
ugaacuuugac

SEQ ID NO: 2300180 - RNA, 18 nt, Human
agaggcaacugcauuggc

SEQ ID NO: 2300181 - RNA, 14 nt, Human
agaggaaauaagaa

SEQ ID NO: 2300182 - RNA, 22 nt, Human
agaggaaauaagaaaaaucaug

SEQ ID NO: 2300183 - RNA, 23 nt, Human
agaggaaauaagaaaaaucaugu

SEQ ID NO: 2300184 - RNA, 21 nt, Human
agaggaaaucaccgaaaacgu

SEQ ID NO: 2300185 - RNA, 11 nt, Human
agaggaaauca

SEQ ID NO: 2300186 - RNA, 12 nt, Human
agaggaaaucac

SEQ ID NO: 2300187 - RNA, 12 nt, Human
agaggaaagcaa

SEQ ID NO: 2300188 - RNA, 16 nt, Human
agaggaaagcaaagga

SEQ ID NO: 2300189 - RNA, 18 nt, Human
agaggaaagcaaaggaga

SEQ ID NO: 2300190 - RNA, 19 nt, Human
agaggaaagcaaaggagau

SEQ ID NO: 2300191 - RNA, 13 nt, Human
agagcuggcucug

SEQ ID NO: 2300192 - RNA, 21 nt, Human
ugaagacaaugacuuacugua

SEQ ID NO: 2300193 - RNA, 15 nt, Human
agagcuggcucugag

SEQ ID NO: 2300194 - RNA, 16 nt, Human
agagcuggcucugagc

SEQ ID NO: 2300195 - RNA, 21 nt, Human
ugaacuuucucuucauacuuu

SEQ ID NO: 2300196 - RNA, 12 nt, Human
agagcugggagg

SEQ ID NO: 2300197 - RNA, 22 nt, Human
agagcugggaggcauggcccug

SEQ ID NO: 2300198 - RNA, 23 nt, Human
agagcugggaggcauggcccugg

SEQ ID NO: 2300199 - RNA, 21 nt, Human
agagcuggggcugagggaugg

SEQ ID NO: 2300200 - RNA, 13 nt, Human
agagcugggaggg

SEQ ID NO: 2300201 - RNA, 18 nt, Human
agagcuggggcugaggga

SEQ ID NO: 2300202 - RNA, 23 nt, Human
agagcugguaguuaguagcaugu

SEQ ID NO: 2300203 - RNA, 21 nt, Human
agagcugguaguuaguagcau

SEQ ID NO: 2300204 - RNA, 13 nt, Human
agagcuggugccc

SEQ ID NO: 2300205 - RNA, 19 nt, Human
agagcugggugucaagagg

SEQ ID NO: 2300206 - RNA, 15 nt, Human
agagcuggugcccgg

SEQ ID NO: 2300207 - RNA, 16 nt, Human
agagcuggugcccgga

SEQ ID NO: 2300208 - RNA, 12 nt, Human
agagcuucccug

SEQ ID NO: 2300209 - RNA, 16 nt, Human
agagcuucccugacuc

SEQ ID NO: 2300210 - RNA, 13 nt, Human
agagcuucccuga

SEQ ID NO: 2300211 - RNA, 15 nt, Human
agagcuucuggcacu

SEQ ID NO: 2300212 - RNA, 20 nt, Human
agagcuucccugacucauuc

SEQ ID NO: 2300213 - RNA, 17 nt, Human
agagcuucccugacuca

SEQ ID NO: 2300214 - RNA, 21 nt, Human
agagcuucuguugcugccuca

SEQ ID NO: 2300215 - RNA, 16 nt, Human
agaggaaaaugaauaa

SEQ ID NO: 2300216 - RNA, 17 nt, Human
agaggaaaaugaauaau

SEQ ID NO: 2300217 - RNA, 20 nt, Human
agaggaaaaugaauaauaca

SEQ ID NO: 2300218 - RNA, 20 nt, Human
agagcuucuguugcugccuc

SEQ ID NO: 2300219 - RNA, 19 nt, Human
agagcuucuguugcugccu

SEQ ID NO: 2300220 - RNA, 13 nt, Human
agaguccucugaa

SEQ ID NO: 2300221 - RNA, 12 nt, Human
agaguccucuga

SEQ ID NO: 2300222 - RNA, 23 nt, Human
ugaauguauuuauuugggagacc

SEQ ID NO: 2300223 - RNA, 19 nt, Human
ugaauguauuuauuuggga

SEQ ID NO: 2300224 - RNA, 14 nt, Human
agaguccucugaau

SEQ ID NO: 2300225 - RNA, 14 nt, Human
agaguccucuggau

SEQ ID NO: 2300226 - RNA, 14 nt, Human
agaguccugcacag

SEQ ID NO: 2300227 - RNA, 21 nt, Human
agaguccugcacaguuuucug

SEQ ID NO: 2300228 - RNA, 22 nt, Human
agagucggaacggagaaaggug

SEQ ID NO: 2300229 - RNA, 14 nt, Human
ugaaugucagugug

SEQ ID NO: 2300230 - RNA, 17 nt, Human
ugaauguauuuauuugg

SEQ ID NO: 2300231 - RNA, 15 nt, Human
ugaaugucaguguga

SEQ ID NO: 2300232 - RNA, 18 nt, Human
ugaaugucagugugacug

SEQ ID NO: 2300233 - RNA, 15 nt, Human
agagugagacucugu

SEQ ID NO: 2300234 - RNA, 16 nt, Human
agagugagacucuguc

SEQ ID NO: 2300235 - RNA, 22 nt, Human
agagugaacaaauuuacagaga

SEQ ID NO: 2300236 - RNA, 20 nt, Human
agagucucacuguugcccag

SEQ ID NO: 2300237 - RNA, 22 nt, Human
agagucucacuguugcccaggc

SEQ ID NO: 2300238 - RNA, 14 nt, Human
agagugaacaaauu

SEQ ID NO: 2300239 - RNA, 12 nt, Human
ugaagcuuccuu

SEQ ID NO: 2300240 - RNA, 13 nt, Human
ugaagcuugugua

SEQ ID NO: 2300241 - RNA, 14 nt, Human
ugaagcuuguguau

SEQ ID NO: 2300242 - RNA, 12 nt, Human
ugaagcuuuaua

SEQ ID NO: 2300243 - RNA, 15 nt, Human
ugaagcuuguguauc

SEQ ID NO: 2300244 - RNA, 23 nt, Human
ugaagcuuguguauccauuauca

SEQ ID NO: 2300245 - RNA, 14 nt, Human
ugaagcuuuauacg

SEQ ID NO: 2300246 - RNA, 23 nt, Human
ugaagcuuuauacguguagcuau

SEQ ID NO: 2300247 - RNA, 15 nt, Human
ugaaggugcugacgg

SEQ ID NO: 2300248 - RNA, 15 nt, Human
ugaaggugucagaau

SEQ ID NO: 2300249 - RNA, 15 nt, Human
ugaagguuaggauuu

SEQ ID NO: 2300250 - RNA, 14 nt, Human
ugaaggugucagaa

SEQ ID NO: 2300251 - RNA, 20 nt, Human
ugaaggugcugacggccagg

SEQ ID NO: 2300252 - RNA, 19 nt, Human
ugaaggugcugacggccag

SEQ ID NO: 2300253 - RNA, 18 nt, Human
ugaagguggaaauaaacu

SEQ ID NO: 2300254 - RNA, 13 nt, Human
ugaagguuucuga

SEQ ID NO: 2300255 - RNA, 16 nt, Human
ugaagguuucugaaaa

SEQ ID NO: 2300256 - RNA, 15 nt, Human
ugaauauaaacacua

SEQ ID NO: 2300257 - RNA, 14 nt, Human
ugaauauaaacacu

SEQ ID NO: 2300258 - RNA, 14 nt, Human
ugaagguugaagag

SEQ ID NO: 2300259 - RNA, 16 nt, Human
ugaagguuaggauuua

SEQ ID NO: 2300260 - RNA, 20 nt, Human
ugaagguuaggauuuaacag

SEQ ID NO: 2300261 - RNA, 14 nt, Human
ugaagguuuacaau

SEQ ID NO: 2300262 - RNA, 21 nt, Human
ugaagguuuacaauuuacaaa

SEQ ID NO: 2300263 - RNA, 22 nt, Human
ugaagguuuacaauuuacaaag

SEQ ID NO: 2300264 - RNA, 21 nt, Human
ugaauauaauauauuugugua

SEQ ID NO: 2300265 - RNA, 22 nt, Human
ugaauauaauauauuuguguau

SEQ ID NO: 2300266 - RNA, 16 nt, Human
ugaauauaaacacuau

SEQ ID NO: 2300267 - RNA, 22 nt, Human
ugaauauaccccuuaguguuug

SEQ ID NO: 2300268 - RNA, 21 nt, Human
ugaauauacagcaggugcuca

SEQ ID NO: 2300269 - RNA, 18 nt, Human
ugaauauauuauaaucuu

SEQ ID NO: 2300270 - RNA, 23 nt, Human
ugaagguuuacaauuuacaaagu

SEQ ID NO: 2300271 - RNA, 13 nt, Human
ugaauauccccuc

SEQ ID NO: 2300272 - RNA, 14 nt, Human
ugaauauccccucc

SEQ ID NO: 2300273 - RNA, 16 nt, Human
ugaauauccccuccca

SEQ ID NO: 2300274 - RNA, 18 nt, Human
ugaauauccccucccagu

SEQ ID NO: 2300275 - RNA, 15 nt, Human
ugaaugcauaaaaug

SEQ ID NO: 2300276 - RNA, 16 nt, Human
ugaaugcauaaaaugu

SEQ ID NO: 2300277 - RNA, 22 nt, Human
ugaaugcauuuuguuugguauu

SEQ ID NO: 2300278 - RNA, 15 nt, Human
ugaaugccacugccu

SEQ ID NO: 2300279 - RNA, 15 nt, Human
ugaaugcauuuuguu

SEQ ID NO: 2300280 - RNA, 21 nt, Human
ugaaugcauuuuguuugguau

SEQ ID NO: 2300281 - RNA, 12 nt, Human
ugaaugcauuuu

SEQ ID NO: 2300282 - RNA, 13 nt, Human
ugaaugcauuuug

SEQ ID NO: 2300283 - RNA, 14 nt, Human
ugaaugcauuuugu

SEQ ID NO: 2300284 - RNA, 21 nt, Human
ugaauggccugccuugaagcc

SEQ ID NO: 2300285 - RNA, 17 nt, Human
ugaauggccugccuuga

SEQ ID NO: 2300286 - RNA, 15 nt, Human
ugaauggccugccuu

SEQ ID NO: 2300287 - RNA, 12 nt, Human
ugaauggccugc

SEQ ID NO: 2300288 - RNA, 14 nt, Human
ugaauggauuggau

SEQ ID NO: 2300289 - RNA, 15 nt, Human
ugaauggauuggauu

SEQ ID NO: 2300290 - RNA, 17 nt, Human
ugaauggauuggauuau

SEQ ID NO: 2300291 - RNA, 20 nt, Human
ugaauggauuggauuauuua

SEQ ID NO: 2300292 - RNA, 21 nt, Human
ugaauggauuggauuauuuaa

SEQ ID NO: 2300293 - RNA, 22 nt, Human
ugaauggauuggauuauuuaau

SEQ ID NO: 2300294 - RNA, 23 nt, Human
ugaauggauuggauuauuuaaua

SEQ ID NO: 2300295 - RNA, 23 nt, Human
ugaaugcccacaggcaaaugcau

SEQ ID NO: 2300296 - RNA, 21 nt, Human
ugaaugcuuauagguggccuc

SEQ ID NO: 2300297 - RNA, 21 nt, Human
ugaaugccacugccuucgcuu

SEQ ID NO: 2300298 - RNA, 22 nt, Human
ugaaugccacugccuucgcuuc

SEQ ID NO: 2300299 - RNA, 23 nt, Human
ugaaugcuuuuugaauguuauuu

SEQ ID NO: 2300300 - RNA, 18 nt, Human
ugaaugcuuuuugaaugu

SEQ ID NO: 2300301 - RNA, 19 nt, Human
ugaaugcuuuuugaauguu

SEQ ID NO: 2300302 - RNA, 12 nt, Human
ugaaugcuuuuu

SEQ ID NO: 2300303 - RNA, 18 nt, Human
agaucacguuccuucccc

SEQ ID NO: 2300304 - RNA, 21 nt, Human
agaucacgcuccccgccuguu

SEQ ID NO: 2300305 - RNA, 22 nt, Human
agaucacgcuccccgccuguuc

SEQ ID NO: 2300306 - RNA, 23 nt, Human
agaucacgcuccccgccuguucc

SEQ ID NO: 2300307 - RNA, 14 nt, Human
agaucacuacugca

SEQ ID NO: 2300308 - RNA, 15 nt, Human
agaucacuacugcag

SEQ ID NO: 2300309 - RNA, 11 nt, Human
agaucacuuuc

SEQ ID NO: 2300310 - RNA, 21 nt, Human
agaucaaccccuucgcuccug

SEQ ID NO: 2300311 - RNA, 13 nt, Human
agauauuuuuucu

SEQ ID NO: 2300312 - RNA, 22 nt, Human
agauauuuuuucagaaauaugu

SEQ ID NO: 2300313 - RNA, 21 nt, Human
agauauuuuuucagaaauaug

SEQ ID NO: 2300314 - RNA, 19 nt, Human
agauauuuuuucagaaaua

SEQ ID NO: 2300315 - RNA, 15 nt, Human
agaucaagagaucaa

SEQ ID NO: 2300316 - RNA, 18 nt, Human
agauauuuuuucagaaau

SEQ ID NO: 2300317 - RNA, 16 nt, Human
agauacgacuuuauuu

SEQ ID NO: 2300318 - RNA, 19 nt, Human
agauauuuuuccauuuuuu

SEQ ID NO: 2300319 - RNA, 16 nt, Human
agauauuuuucaugau

SEQ ID NO: 2300320 - RNA, 19 nt, Human
agauauuuuucaugauuuu

SEQ ID NO: 2300321 - RNA, 12 nt, Human
agauauuuuuca

SEQ ID NO: 2300322 - RNA, 13 nt, Human
agauauuuuucau

SEQ ID NO: 2300323 - RNA, 21 nt, Human
agauauuuuuaucuuuauaug

SEQ ID NO: 2300324 - RNA, 20 nt, Human
agauauuuuuaucuuuauau

SEQ ID NO: 2300325 - RNA, 14 nt, Human
agaucaaccccuuc

SEQ ID NO: 2300326 - RNA, 19 nt, Human
agaucaaccccuucgcucc

SEQ ID NO: 2300327 - RNA, 14 nt, Human
agauacgacuuuau

SEQ ID NO: 2300328 - RNA, 19 nt, Human
agauauuuuuaucuuuaua

SEQ ID NO: 2300329 - RNA, 17 nt, Human
agauauuuuuaucuuua

SEQ ID NO: 2300330 - RNA, 22 nt, Human
agauauuuugcuuugugauuuu

SEQ ID NO: 2300331 - RNA, 19 nt, Human
agauaccagguugaaagac

SEQ ID NO: 2300332 - RNA, 18 nt, Human
agauaccagguugaaaga

SEQ ID NO: 2300333 - RNA, 19 nt, Human
agauaccuaaaagagauuu

SEQ ID NO: 2300334 - RNA, 22 nt, Human
agauaccuaaaagagauuucaa

SEQ ID NO: 2300335 - RNA, 13 nt, Human
agauaccucaccc

SEQ ID NO: 2300336 - RNA, 14 nt, Human
agauaccucacccu

SEQ ID NO: 2300337 - RNA, 17 nt, Human
agauaccucacccugcu

SEQ ID NO: 2300338 - RNA, 19 nt, Human
agauacaggaaaagcugcu

SEQ ID NO: 2300339 - RNA, 18 nt, Human
agauacagaacucuuuca

SEQ ID NO: 2300340 - RNA, 15 nt, Human
agauacaauguauuu

SEQ ID NO: 2300341 - RNA, 16 nt, Human
agauacaauguauuua

SEQ ID NO: 2300342 - RNA, 13 nt, Human
agauacaauguau

SEQ ID NO: 2300343 - RNA, 20 nt, Human
agauacagaacucuuucaaa

SEQ ID NO: 2300344 - RNA, 21 nt, Human
agauacaugguugugaccuga

SEQ ID NO: 2300345 - RNA, 23 nt, Human
agauacaauguauuuauuuaaaa

SEQ ID NO: 2300346 - RNA, 23 nt, Human
agauaccagcgaggaggcuccag

SEQ ID NO: 2300347 - RNA, 21 nt, Human
agauaccagcgaggaggcucc

SEQ ID NO: 2300348 - RNA, 19 nt, Human
agauaccagcgaggaggcu

SEQ ID NO: 2300349 - RNA, 14 nt, Human
agauaccagcgagg

SEQ ID NO: 2300350 - RNA, 17 nt, Human
agauaaagauuucuuga

SEQ ID NO: 2300351 - RNA, 14 nt, Human
agauaaagauuucu

SEQ ID NO: 2300352 - RNA, 17 nt, Human
agauaaggguaucuggu

SEQ ID NO: 2300353 - RNA, 19 nt, Human
agauaaggguaucugguga

SEQ ID NO: 2300354 - RNA, 13 nt, Human
agauaaacucaga

SEQ ID NO: 2300355 - RNA, 21 nt, Human
agauaaaauuauagaugggaa

SEQ ID NO: 2300356 - RNA, 22 nt, Human
agauaaaauuauagaugggaau

SEQ ID NO: 2300357 - RNA, 19 nt, Human
agauaaacucagaaauuua

SEQ ID NO: 2300358 - RNA, 11 nt, Human
agauaaagaug

SEQ ID NO: 2300359 - RNA, 16 nt, Human
agauaaagaugaucua

SEQ ID NO: 2300360 - RNA, 13 nt, Human
agauaaagaugau

SEQ ID NO: 2300361 - RNA, 15 nt, Human
agauaaagaugaucu

SEQ ID NO: 2300362 - RNA, 14 nt, Human
agagugagagggca

SEQ ID NO: 2300363 - RNA, 18 nt, Human
agagugagacucagucuu

SEQ ID NO: 2300364 - RNA, 15 nt, Human
agagugagacccugu

SEQ ID NO: 2300365 - RNA, 19 nt, Human
agagugagacucugucuca

SEQ ID NO: 2300366 - RNA, 21 nt, Human
agagugagagggcaugcgcac

SEQ ID NO: 2300367 - RNA, 18 nt, Human
agagugagggccugaggu

SEQ ID NO: 2300368 - RNA, 21 nt, Human
agaguuuuggaugcagugcuc

SEQ ID NO: 2300369 - RNA, 13 nt, Human
agaguuuugucuu

SEQ ID NO: 2300370 - RNA, 14 nt, Human
agaguuuugucuug

SEQ ID NO: 2300371 - RNA, 16 nt, Human
agaguuuugucuugaa

SEQ ID NO: 2300372 - RNA, 19 nt, Human
agaguuuugucuugaaugu

SEQ ID NO: 2300373 - RNA, 17 nt, Human
agauaaucagccucuua

SEQ ID NO: 2300374 - RNA, 16 nt, Human
agauaaucagccucuu

SEQ ID NO: 2300375 - RNA, 19 nt, Human
agauaaucagugugucuaa

SEQ ID NO: 2300376 - RNA, 15 nt, Human
agauaaucagccucu

SEQ ID NO: 2300377 - RNA, 16 nt, Human
agauaauaauauaugu

SEQ ID NO: 2300378 - RNA, 17 nt, Human
agauaauaauauauguu

SEQ ID NO: 2300379 - RNA, 14 nt, Human
agauaauaauauau

SEQ ID NO: 2300380 - RNA, 20 nt, Human
agauaaguguauuuuucaau

SEQ ID NO: 2300381 - RNA, 18 nt, Human
agauaaguguauuuuuca

SEQ ID NO: 2300382 - RNA, 16 nt, Human
agauaaguguauuuuu

SEQ ID NO: 2300383 - RNA, 16 nt, Human
agauaaucuagaacac

SEQ ID NO: 2300384 - RNA, 23 nt, Human
agauaaucuagaacacaggcaaa

SEQ ID NO: 2300385 - RNA, 15 nt, Human
agauaaucucucagc

SEQ ID NO: 2300386 - RNA, 12 nt, Human
agauaaugugaa

SEQ ID NO: 2300387 - RNA, 18 nt, Human
agauaaugugaaaauggu

SEQ ID NO: 2300388 - RNA, 13 nt, Human
agauaaugugaaa

SEQ ID NO: 2300389 - RNA, 18 nt, Human
agauaauucuagcuuuga

SEQ ID NO: 2300390 - RNA, 12 nt, Human
agauaauuauaa

SEQ ID NO: 2300391 - RNA, 19 nt, Human
agauaaugugauauuauac

SEQ ID NO: 2300392 - RNA, 21 nt, Human
agauaauguuagagguuuuaa

SEQ ID NO: 2300393 - RNA, 15 nt, Human
agauccuuccuuuug

SEQ ID NO: 2300394 - RNA, 14 nt, Human
agauccuuguuuca

SEQ ID NO: 2300395 - RNA, 15 nt, Human
agauccuuguuucaa

SEQ ID NO: 2300396 - RNA, 21 nt, Human
agauccugucuuuaaggaaaa

SEQ ID NO: 2300397 - RNA, 12 nt, Human
agauccaggacu

SEQ ID NO: 2300398 - RNA, 14 nt, Human
agauccagccuggg

SEQ ID NO: 2300399 - RNA, 13 nt, Human
agauccagccugg

SEQ ID NO: 2300400 - RNA, 15 nt, Human
agaucgcgccacugc

SEQ ID NO: 2300401 - RNA, 20 nt, Human
agaucgcgccacugcacucc

SEQ ID NO: 2300402 - RNA, 15 nt, Human
agaucgcaguuugcc

SEQ ID NO: 2300403 - RNA, 16 nt, Human
agaucgcaucauugca

SEQ ID NO: 2300404 - RNA, 15 nt, Human
agaucgcccccaccu

SEQ ID NO: 2300405 - RNA, 14 nt, Human
agaucgcaguuugc

SEQ ID NO: 2300406 - RNA, 20 nt, Human
agauccuuuaaauccuucca

SEQ ID NO: 2300407 - RNA, 18 nt, Human
agauccuuguuucaaaca

SEQ ID NO: 2300408 - RNA, 20 nt, Human
agauccuuguuucaaacaca

SEQ ID NO: 2300409 - RNA, 19 nt, Human
agaugaugaugaucuuuaa

SEQ ID NO: 2300410 - RNA, 21 nt, Human
agaucgugccguuacucucca

SEQ ID NO: 2300411 - RNA, 16 nt, Human
agaugauggaugccaa

SEQ ID NO: 2300412 - RNA, 19 nt, Human
agaugauggaugccaauau

SEQ ID NO: 2300413 - RNA, 17 nt, Human
agaugaugggggagggg

SEQ ID NO: 2300414 - RNA, 19 nt, Human
agaugauuuaaaagggaag

SEQ ID NO: 2300415 - RNA, 18 nt, Human
agauccacacacagagga

SEQ ID NO: 2300416 - RNA, 17 nt, Human
agauccacacacagagg

SEQ ID NO: 2300417 - RNA, 16 nt, Human
agauccacacacagag

SEQ ID NO: 2300418 - RNA, 15 nt, Human
agauccacacacaga

SEQ ID NO: 2300419 - RNA, 14 nt, Human
agauccacacacag

SEQ ID NO: 2300420 - RNA, 21 nt, Human
agauccaaaagaagcccccag

SEQ ID NO: 2300421 - RNA, 23 nt, Human
ugaccacacuuccuguccagaga

SEQ ID NO: 2300422 - RNA, 18 nt, Human
agauccaaaagaagcccc

SEQ ID NO: 2300423 - RNA, 23 nt, Human
agauccaaaagaagcccccagcu

SEQ ID NO: 2300424 - RNA, 20 nt, Human
ugaccacacuuccuguccag

SEQ ID NO: 2300425 - RNA, 18 nt, Human
ugaccacacuuccugucc

SEQ ID NO: 2300426 - RNA, 15 nt, Human
ugaccacacuuccug

SEQ ID NO: 2300427 - RNA, 21 nt, Human
agaucauugugaaauuauuca

SEQ ID NO: 2300428 - RNA, 20 nt, Human
ugaccaacauggagaaaccc

SEQ ID NO: 2300429 - RNA, 18 nt, Human
ugaccaacauggagaaac

SEQ ID NO: 2300430 - RNA, 15 nt, Human
ugaccaaugucuuga

SEQ ID NO: 2300431 - RNA, 17 nt, Human
ugaccaacauggagaaa

SEQ ID NO: 2300432 - RNA, 16 nt, Human
ugaccaacauggagaa

SEQ ID NO: 2300433 - RNA, 17 nt, Human
ugaccaacaguuccuuc

SEQ ID NO: 2300434 - RNA, 20 nt, Human
ugaccacacuccagcuggga

SEQ ID NO: 2300435 - RNA, 19 nt, Human
ugaccacacuccagcuggg

SEQ ID NO: 2300436 - RNA, 17 nt, Human
ugaccacacuccagcug

SEQ ID NO: 2300437 - RNA, 12 nt, Human
ugaccacacucc

SEQ ID NO: 2300438 - RNA, 18 nt, Human
ugaccaaaauccccuucu

SEQ ID NO: 2300439 - RNA, 16 nt, Human
ugaccaaaauccccuu

SEQ ID NO: 2300440 - RNA, 16 nt, Human
ugaccaaaguccuuuu

SEQ ID NO: 2300441 - RNA, 14 nt, Human
ugaccaaaguccuu

SEQ ID NO: 2300442 - RNA, 14 nt, Human
ugacauuuugccaa

SEQ ID NO: 2300443 - RNA, 18 nt, Human
ugacauuguagagcuucu

SEQ ID NO: 2300444 - RNA, 16 nt, Human
ugacauugcuaagaug

SEQ ID NO: 2300445 - RNA, 18 nt, Human
ugacauugcuaagaugcu

SEQ ID NO: 2300446 - RNA, 19 nt, Human
ugacauugcuaagaugcuc

SEQ ID NO: 2300447 - RNA, 13 nt, Human
ugacauugcuuua

SEQ ID NO: 2300448 - RNA, 15 nt, Human
ugacauugcuuuacu

SEQ ID NO: 2300449 - RNA, 21 nt, Human
ugacaguaguaccaaaugcuu

SEQ ID NO: 2300450 - RNA, 15 nt, Human
ugacaguccucucca

SEQ ID NO: 2300451 - RNA, 16 nt, Human
ugacaguccucuccac

SEQ ID NO: 2300452 - RNA, 17 nt, Human
ugacaguccucuccacc

SEQ ID NO: 2300453 - RNA, 14 nt, Human
ugacagugccuggg

SEQ ID NO: 2300454 - RNA, 18 nt, Human
ugacaguccucuccaccu

SEQ ID NO: 2300455 - RNA, 15 nt, Human
ugacagucuugugcu

SEQ ID NO: 2300456 - RNA, 17 nt, Human
ugacagugccugggaau

SEQ ID NO: 2300457 - RNA, 23 nt, Human
ugacagucuugugcuuuuccuau

SEQ ID NO: 2300458 - RNA, 20 nt, Human
ugacagugccugggaaugua

SEQ ID NO: 2300459 - RNA, 19 nt, Human
ugacauugcguuugaccuu

SEQ ID NO: 2300460 - RNA, 15 nt, Human
ugacauugcguuuga

SEQ ID NO: 2300461 - RNA, 17 nt, Human
ugacagguuugggaccc

SEQ ID NO: 2300462 - RNA, 14 nt, Human
ugacaguaguacca

SEQ ID NO: 2300463 - RNA, 15 nt, Human
ugaauuuauuauugu

SEQ ID NO: 2300464 - RNA, 18 nt, Human
ugaauuuauuauuguucu

SEQ ID NO: 2300465 - RNA, 20 nt, Human
ugaauuuaaauauaauucug

SEQ ID NO: 2300466 - RNA, 15 nt, Human
ugaauuuaaauauaa

SEQ ID NO: 2300467 - RNA, 16 nt, Human
ugaauuuaaauauaau

SEQ ID NO: 2300468 - RNA, 19 nt, Human
ugaauuuaaauauaauucu

SEQ ID NO: 2300469 - RNA, 19 nt, Human
ugaauuuaauaaucuguag

SEQ ID NO: 2300470 - RNA, 23 nt, Human
agaucacuuucucaguuuucaua

SEQ ID NO: 2300471 - RNA, 19 nt, Human
agaucacuuucucaguuuu

SEQ ID NO: 2300472 - RNA, 18 nt, Human
agaucacuuucucaguuu

SEQ ID NO: 2300473 - RNA, 20 nt, Human
agaucagcaaaccggggccu

SEQ ID NO: 2300474 - RNA, 17 nt, Human
agaucagagcagcagug

SEQ ID NO: 2300475 - RNA, 16 nt, Human
agaugugucuauggcu

SEQ ID NO: 2300476 - RNA, 15 nt, Human
agauguguucacaau

SEQ ID NO: 2300477 - RNA, 18 nt, Human
agauguguucacaaugga

SEQ ID NO: 2300478 - RNA, 13 nt, Human
ugacccaggcugg

SEQ ID NO: 2300479 - RNA, 12 nt, Human
ugacccaggcug

SEQ ID NO: 2300480 - RNA, 14 nt, Human
ugacccaggcuggg

SEQ ID NO: 2300481 - RNA, 15 nt, Human
ugacccaggcugggc

SEQ ID NO: 2300482 - RNA, 17 nt, Human
ugacccaggcugggcaa

SEQ ID NO: 2300483 - RNA, 19 nt, Human
ugacccaggcugggcaagg

SEQ ID NO: 2300484 - RNA, 19 nt, Human
agauguguugcuauccuga

SEQ ID NO: 2300485 - RNA, 16 nt, Human
ugacccaggccgcagc

SEQ ID NO: 2300486 - RNA, 19 nt, Human
ugacccaggccgcagcucu

SEQ ID NO: 2300487 - RNA, 21 nt, Human
ugacccaggccgcagcucuug

SEQ ID NO: 2300488 - RNA, 22 nt, Human
ugacccaggccgcagcucuugc

SEQ ID NO: 2300489 - RNA, 15 nt, Human
ugacccagucccugg

SEQ ID NO: 2300490 - RNA, 14 nt, Human
ugacccagucccug

SEQ ID NO: 2300491 - RNA, 12 nt, Human
ugacccaguccc

SEQ ID NO: 2300492 - RNA, 21 nt, Human
ugacccaguccccgugccccg

SEQ ID NO: 2300493 - RNA, 20 nt, Human
ugacccagucccugggggaa

SEQ ID NO: 2300494 - RNA, 16 nt, Human
ugacccagucccuggg

SEQ ID NO: 2300495 - RNA, 16 nt, Human
ugacccagugccccca

SEQ ID NO: 2300496 - RNA, 18 nt, Human
ugacccagugcccccacu

SEQ ID NO: 2300497 - RNA, 17 nt, Human
ugacccagugcccccac

SEQ ID NO: 2300498 - RNA, 23 nt, Human
ugacccagugcccccacugacca

SEQ ID NO: 2300499 - RNA, 14 nt, Human
ugaccucugccuga

SEQ ID NO: 2300500 - RNA, 17 nt, Human
ugaccucuguuguccuc

SEQ ID NO: 2300501 - RNA, 18 nt, Human
ugaccucuguuguccucc

SEQ ID NO: 2300502 - RNA, 19 nt, Human
ugaccucuguuguccuccc

SEQ ID NO: 2300503 - RNA, 12 nt, Human
ugaccugaggcc

SEQ ID NO: 2300504 - RNA, 22 nt, Human
ugaccucuguuguccuccccuu

SEQ ID NO: 2300505 - RNA, 21 nt, Human
ugaccucuguuguccuccccu

SEQ ID NO: 2300506 - RNA, 13 nt, Human
ugaccugaaguuc

SEQ ID NO: 2300507 - RNA, 14 nt, Human
ugaccugaaguuca

SEQ ID NO: 2300508 - RNA, 18 nt, Human
ugaccugaaguucaccau

SEQ ID NO: 2300509 - RNA, 13 nt, Human
ugaccucugccug

SEQ ID NO: 2300510 - RNA, 20 nt, Human
ugaccccucauagcccucac

SEQ ID NO: 2300511 - RNA, 19 nt, Human
ugaccccucauagcccuca

SEQ ID NO: 2300512 - RNA, 22 nt, Human
ugacccccaaccaaguggcucc

SEQ ID NO: 2300513 - RNA, 14 nt, Human
ugacccccagcucc

SEQ ID NO: 2300514 - RNA, 13 nt, Human
ugacccagugaga

SEQ ID NO: 2300515 - RNA, 17 nt, Human
ugaccccucauagcccu

SEQ ID NO: 2300516 - RNA, 18 nt, Human
agaugcaaagaggcaaga

SEQ ID NO: 2300517 - RNA, 17 nt, Human
agaugcaaagaggcaag

SEQ ID NO: 2300518 - RNA, 16 nt, Human
agaugcaaagaggcaa

SEQ ID NO: 2300519 - RNA, 15 nt, Human
agaugcaaagaggca

SEQ ID NO: 2300520 - RNA, 14 nt, Human
agaugcaaagaggc

SEQ ID NO: 2300521 - RNA, 22 nt, Human
agaugcuagaacucccuuucaa

SEQ ID NO: 2300522 - RNA, 23 nt, Human
agaugcuagaacucccuuucaac

SEQ ID NO: 2300523 - RNA, 16 nt, Human
agaugcuucugggaga

SEQ ID NO: 2300524 - RNA, 15 nt, Human
agaugcuucugggag

SEQ ID NO: 2300525 - RNA, 12 nt, Human
agaugcuucugg

SEQ ID NO: 2300526 - RNA, 16 nt, Human
agaugcuuuucugucu

SEQ ID NO: 2300527 - RNA, 17 nt, Human
agaugcuuuucugucuc

SEQ ID NO: 2300528 - RNA, 19 nt, Human
agaugcuuuucugucucug

SEQ ID NO: 2300529 - RNA, 22 nt, Human
agaugcuuuucugucucugccu

SEQ ID NO: 2300530 - RNA, 16 nt, Human
agaugcuucucacugc

SEQ ID NO: 2300531 - RNA, 18 nt, Human
agaugcuucucacugcca

SEQ ID NO: 2300532 - RNA, 20 nt, Human
agauggauucucagauauuu

SEQ ID NO: 2300533 - RNA, 18 nt, Human
agauggauucucagauau

SEQ ID NO: 2300534 - RNA, 18 nt, Human
agauggauucuccacuca

SEQ ID NO: 2300535 - RNA, 13 nt, Human
agauggauucucc

SEQ ID NO: 2300536 - RNA, 20 nt, Human
agauggauuugccugugcca

SEQ ID NO: 2300537 - RNA, 15 nt, Human
agauggauuugccug

SEQ ID NO: 2300538 - RNA, 18 nt, Human
agauggauugguguaaaa

SEQ ID NO: 2300539 - RNA, 23 nt, Human
agauggauucuccacucaguugc

SEQ ID NO: 2300540 - RNA, 16 nt, Human
agauggcaaaugacca

SEQ ID NO: 2300541 - RNA, 15 nt, Human
agaugucagacuggc

SEQ ID NO: 2300542 - RNA, 17 nt, Human
agauggauucucagaua

SEQ ID NO: 2300543 - RNA, 16 nt, Human
agauggauucucagau

SEQ ID NO: 2300544 - RNA, 15 nt, Human
agauggauucucaga

SEQ ID NO: 2300545 - RNA, 11 nt, Human
agauggauucu

SEQ ID NO: 2300546 - RNA, 17 nt, Human
agauggaguucuugugc

SEQ ID NO: 2300547 - RNA, 19 nt, Human
agauggaguucuugugcca

SEQ ID NO: 2300548 - RNA, 18 nt, Human
agaugucuaauaguuauu

SEQ ID NO: 2300549 - RNA, 12 nt, Human
agaugucuauuc

SEQ ID NO: 2300550 - RNA, 22 nt, Human
agaugucucuggcgugugggua

SEQ ID NO: 2300551 - RNA, 13 nt, Human
agaugucuucgua

SEQ ID NO: 2300552 - RNA, 18 nt, Human
agaugucuucugccuguu

SEQ ID NO: 2300553 - RNA, 16 nt, Human
agaugucuucugccug

SEQ ID NO: 2300554 - RNA, 17 nt, Human
agaugucuucugccugu

SEQ ID NO: 2300555 - RNA, 15 nt, Human
agaugucuucguaca

SEQ ID NO: 2300556 - RNA, 18 nt, Human
agaugucuucguacaguu

SEQ ID NO: 2300557 - RNA, 19 nt, Human
agaugucuucguacaguuc

SEQ ID NO: 2300558 - RNA, 20 nt, Human
agaugucuucguacaguucu

SEQ ID NO: 2300559 - RNA, 18 nt, Human
agaugucagacuggcugg

SEQ ID NO: 2300560 - RNA, 20 nt, Human
agaugucagccgagccgggc

SEQ ID NO: 2300561 - RNA, 18 nt, Human
agaugucagccgagccgg

SEQ ID NO: 2300562 - RNA, 21 nt, Human
agaugucccuuucuuggccag

SEQ ID NO: 2300563 - RNA, 20 nt, Human
agaugucccuuucuuggcca

SEQ ID NO: 2300564 - RNA, 22 nt, Human
agaugucccuuucuuggccagu

SEQ ID NO: 2300565 - RNA, 20 nt, Human
agcaacagagugagacccug

SEQ ID NO: 2300566 - RNA, 23 nt, Human
agcaacagagugagacccugucu

SEQ ID NO: 2300567 - RNA, 22 nt, Human
agcaacagagugagacccuguc

SEQ ID NO: 2300568 - RNA, 18 nt, Human
agcaacacaagcuggaag

SEQ ID NO: 2300569 - RNA, 20 nt, Human
agcaacacaagcuggaagca

SEQ ID NO: 2300570 - RNA, 21 nt, Human
agcaacaauuuaugaauugaa

SEQ ID NO: 2300571 - RNA, 14 nt, Human
agcaacacaagcug

SEQ ID NO: 2300572 - RNA, 17 nt, Human
agcaacacaagcuggaa

SEQ ID NO: 2300573 - RNA, 20 nt, Human
agcaacauuuuacccacaca

SEQ ID NO: 2300574 - RNA, 18 nt, Human
agcaacagguuuuauaau

SEQ ID NO: 2300575 - RNA, 21 nt, Human
agcaacaggaaucaagagcug

SEQ ID NO: 2300576 - RNA, 22 nt, Human
agcaacaggaaucaagagcugc

SEQ ID NO: 2300577 - RNA, 23 nt, Human
agcaacaggaaucaagagcugcc

SEQ ID NO: 2300578 - RNA, 21 nt, Human
agcaacaucuagcaaauguua

SEQ ID NO: 2300579 - RNA, 19 nt, Human
agcaacagguuuuauaauu

SEQ ID NO: 2300580 - RNA, 22 nt, Human
agcaacauuuuacccacacaca

SEQ ID NO: 2300581 - RNA, 15 nt, Human
agcaaccaguuggcu

SEQ ID NO: 2300582 - RNA, 14 nt, Human
agcaaccccaggcu

SEQ ID NO: 2300583 - RNA, 16 nt, Human
agcaaccccaggcuga

SEQ ID NO: 2300584 - RNA, 15 nt, Human
agcaaccccaggcug

SEQ ID NO: 2300585 - RNA, 23 nt, Human
agauuuuccacaagauucccaga

SEQ ID NO: 2300586 - RNA, 12 nt, Human
agcaaaacaaaa

SEQ ID NO: 2300587 - RNA, 15 nt, Human
agcaacaauuuauga

SEQ ID NO: 2300588 - RNA, 12 nt, Human
agauuuucagaa

SEQ ID NO: 2300589 - RNA, 19 nt, Human
agauuugugaacucagcca

SEQ ID NO: 2300590 - RNA, 21 nt, Human
agauuugugaacucagccaag

SEQ ID NO: 2300591 - RNA, 15 nt, Human
agcaaaaagcaaaau

SEQ ID NO: 2300592 - RNA, 17 nt, Human
agauuuucagaaaauau

SEQ ID NO: 2300593 - RNA, 19 nt, Human
agauuuucagcaaacucuu

SEQ ID NO: 2300594 - RNA, 22 nt, Human
agauuugugaacucagccaagc

SEQ ID NO: 2300595 - RNA, 15 nt, Human
agauuuacacuggga

SEQ ID NO: 2300596 - RNA, 16 nt, Human
agauuuacacugggag

SEQ ID NO: 2300597 - RNA, 13 nt, Human
agauuuaucaaau

SEQ ID NO: 2300598 - RNA, 17 nt, Human
agauuuaucaaaucagu

SEQ ID NO: 2300599 - RNA, 15 nt, Human
agauuuaucaaauca

SEQ ID NO: 2300600 - RNA, 16 nt, Human
agauuuaucaaaucag

SEQ ID NO: 2300601 - RNA, 13 nt, Human
agauuucacucuc

SEQ ID NO: 2300602 - RNA, 14 nt, Human
agauuucacucucc

SEQ ID NO: 2300603 - RNA, 14 nt, Human
agauuugggcugga

SEQ ID NO: 2300604 - RNA, 17 nt, Human
agauuugggcuggaaca

SEQ ID NO: 2300605 - RNA, 11 nt, Human
agauuugugaa

SEQ ID NO: 2300606 - RNA, 13 nt, Human
agauuugugaacu

SEQ ID NO: 2300607 - RNA, 15 nt, Human
agauuugugaacuca

SEQ ID NO: 2300608 - RNA, 16 nt, Human
agauuugugaacucag

SEQ ID NO: 2300609 - RNA, 13 nt, Human
agauuugggcugg

SEQ ID NO: 2300610 - RNA, 16 nt, Human
agauuugaaggucugc

SEQ ID NO: 2300611 - RNA, 14 nt, Human
agauuucaagagau

SEQ ID NO: 2300612 - RNA, 13 nt, Human
agauuucaagaga

SEQ ID NO: 2300613 - RNA, 12 nt, Human
agauuugaccua

SEQ ID NO: 2300614 - RNA, 18 nt, Human
agauuuagugaaagcuag

SEQ ID NO: 2300615 - RNA, 13 nt, Human
agauuuaauuaau

SEQ ID NO: 2300616 - RNA, 22 nt, Human
agauuuaauuaaucaugaaugu

SEQ ID NO: 2300617 - RNA, 14 nt, Human
agauuuaugcauau

SEQ ID NO: 2300618 - RNA, 18 nt, Human
agauugugaauauuucca

SEQ ID NO: 2300619 - RNA, 16 nt, Human
agauuuaccacuugug

SEQ ID NO: 2300620 - RNA, 17 nt, Human
agauucacacugucugg

SEQ ID NO: 2300621 - RNA, 23 nt, Human
agauuggcucacacugagaaugu

SEQ ID NO: 2300622 - RNA, 13 nt, Human
agauucacacugu

SEQ ID NO: 2300623 - RNA, 12 nt, Human
agauugggucua

SEQ ID NO: 2300624 - RNA, 21 nt, Human
agauugugccccugcacucca

SEQ ID NO: 2300625 - RNA, 16 nt, Human
agauugugccccugca

SEQ ID NO: 2300626 - RNA, 17 nt, Human
ugacuugacagaacacu

SEQ ID NO: 2300627 - RNA, 19 nt, Human
ugacuugacagaacacugu

SEQ ID NO: 2300628 - RNA, 18 nt, Human
ugacuucugccuggagac

SEQ ID NO: 2300629 - RNA, 16 nt, Human
ugacuugacuuuaguc

SEQ ID NO: 2300630 - RNA, 13 nt, Human
ugacuugcccagu

SEQ ID NO: 2300631 - RNA, 18 nt, Human
ugacuuggggagauggag

SEQ ID NO: 2300632 - RNA, 19 nt, Human
ugacuuggggagauggagu

SEQ ID NO: 2300633 - RNA, 12 nt, Human
ugacuuguauau

SEQ ID NO: 2300634 - RNA, 19 nt, Human
ugacuuguauauuuuaaga

SEQ ID NO: 2300635 - RNA, 15 nt, Human
ugacuugugucccau

SEQ ID NO: 2300636 - RNA, 14 nt, Human
ugacuuccacaccu

SEQ ID NO: 2300637 - RNA, 21 nt, Human
ugacuucaggggcugcccgcu

SEQ ID NO: 2300638 - RNA, 20 nt, Human
ugacuucgacugugaccugu

SEQ ID NO: 2300639 - RNA, 22 nt, Human
ugacuucauuaauaauaaauuc

SEQ ID NO: 2300640 - RNA, 22 nt, Human
ugacuucaggggcugcccgcuc

SEQ ID NO: 2300641 - RNA, 23 nt, Human
ugacuucaaugauaguaagaaaa

SEQ ID NO: 2300642 - RNA, 13 nt, Human
ugacuucaggggc

SEQ ID NO: 2300643 - RNA, 17 nt, Human
ugacuucaggggcugcc

SEQ ID NO: 2300644 - RNA, 18 nt, Human
ugacuucaggggcugccc

SEQ ID NO: 2300645 - RNA, 14 nt, Human
ugacuucuccaggu

SEQ ID NO: 2300646 - RNA, 23 nt, Human
ugacuucuccaggucucacgggc

SEQ ID NO: 2300647 - RNA, 15 nt, Human
ugacuucuccagguc

SEQ ID NO: 2300648 - RNA, 16 nt, Human
ugacuucuccaggucu

SEQ ID NO: 2300649 - RNA, 12 nt, Human
ugacuucugccu

SEQ ID NO: 2300650 - RNA, 13 nt, Human
ugacuucugccug

SEQ ID NO: 2300651 - RNA, 15 nt, Human
ugacuucugccugga

SEQ ID NO: 2300652 - RNA, 16 nt, Human
ugacuucugccuggag

SEQ ID NO: 2300653 - RNA, 20 nt, Human
agauuauggagcuuuuuucc

SEQ ID NO: 2300654 - RNA, 22 nt, Human
agauucacaccugacucugaaa

SEQ ID NO: 2300655 - RNA, 16 nt, Human
agauucaaucccagga

SEQ ID NO: 2300656 - RNA, 20 nt, Human
agauuauaggcaccuaccac

SEQ ID NO: 2300657 - RNA, 12 nt, Human
ugacuuucaggu

SEQ ID NO: 2300658 - RNA, 18 nt, Human
ugacuuuauauggaugau

SEQ ID NO: 2300659 - RNA, 19 nt, Human
ugacuuuagucugcaaaau

SEQ ID NO: 2300660 - RNA, 18 nt, Human
ugacuuuagucugcaaaa

SEQ ID NO: 2300661 - RNA, 20 nt, Human
ugacuuauuuauauaaauuu

SEQ ID NO: 2300662 - RNA, 17 nt, Human
ugacuuauuuauauaaa

SEQ ID NO: 2300663 - RNA, 21 nt, Human
ugacuuauuuauauaaauuuu

SEQ ID NO: 2300664 - RNA, 18 nt, Human
ugacuguucaagagcaca

SEQ ID NO: 2300665 - RNA, 18 nt, Human
ugacuuauuuucucugug

SEQ ID NO: 2300666 - RNA, 19 nt, Human
ugacuuauuuucucugugu

SEQ ID NO: 2300667 - RNA, 17 nt, Human
ugacuucaaugauagua

SEQ ID NO: 2300668 - RNA, 14 nt, Human
ugacuccaggagag

SEQ ID NO: 2300669 - RNA, 11 nt, Human
ugacugugugu

SEQ ID NO: 2300670 - RNA, 24 nt, Human
ugacuguucaagagcacacuuggc

SEQ ID NO: 2300671 - RNA, 15 nt, Human
ugacuguuuccauca

SEQ ID NO: 2300672 - RNA, 12 nt, Human
ugacuccaggag

SEQ ID NO: 2300673 - RNA, 13 nt, Human
ugacucauccucu

SEQ ID NO: 2300674 - RNA, 11 nt, Human
ugacuccagga

SEQ ID NO: 2300675 - RNA, 17 nt, Human
ugacugucacuguuccu

SEQ ID NO: 2300676 - RNA, 16 nt, Human
ugacugucacuguucc

SEQ ID NO: 2300677 - RNA, 13 nt, Human
ugacugucacugu

SEQ ID NO: 2300678 - RNA, 20 nt, Human
ugacuccagaauuucccaaa

SEQ ID NO: 2300679 - RNA, 23 nt, Human
ugacuccagaauuucccaaagca

SEQ ID NO: 2300680 - RNA, 16 nt, Human
ugacucagaugucucu

SEQ ID NO: 2300681 - RNA, 21 nt, Human
ugacucagcauaccugcuggu

SEQ ID NO: 2300682 - RNA, 18 nt, Human
ugacucacuuaucccaag

SEQ ID NO: 2300683 - RNA, 15 nt, Human
ugaccugaggaagcg

SEQ ID NO: 2300684 - RNA, 14 nt, Human
ugaccugaggaagc

SEQ ID NO: 2300685 - RNA, 17 nt, Human
ugaccugaggcccuucu

SEQ ID NO: 2300686 - RNA, 14 nt, Human
ugaccugaggcccu

SEQ ID NO: 2300687 - RNA, 15 nt, Human
ugaccugaggcccuu

SEQ ID NO: 2300688 - RNA, 17 nt, Human
ugacuccagaauuuccc

SEQ ID NO: 2300689 - RNA, 19 nt, Human
ugacuccagaauuucccaa

SEQ ID NO: 2300690 - RNA, 20 nt, Human
ugacucauucugaaggagcc

SEQ ID NO: 2300691 - RNA, 19 nt, Human
ugacucagggcuccugggu

SEQ ID NO: 2300692 - RNA, 18 nt, Human
ugacucagggcuccuggg

SEQ ID NO: 2300693 - RNA, 17 nt, Human
ugacucagggcuccugg

SEQ ID NO: 2300694 - RNA, 15 nt, Human
ugacucagggcuccu

SEQ ID NO: 2300695 - RNA, 14 nt, Human
ugacucagggcucc

SEQ ID NO: 2300696 - RNA, 13 nt, Human
ugacucagggcuc

SEQ ID NO: 2300697 - RNA, 15 nt, Human
acccuucuccucuug

SEQ ID NO: 2300698 - RNA, 17 nt, Human
acccuucuccucuugua

SEQ ID NO: 2300699 - RNA, 19 nt, Human
acccuucuccucuuguaaa

SEQ ID NO: 2300700 - RNA, 21 nt, Human
acccuucuccucuuguaaaua

SEQ ID NO: 2300701 - RNA, 19 nt, Human
acccuuccucaccacuucc

SEQ ID NO: 2300702 - RNA, 22 nt, Human
acccuuccccuccuucucccuu

SEQ ID NO: 2300703 - RNA, 19 nt, Human
acccuucccuugagcccuc

SEQ ID NO: 2300704 - RNA, 20 nt, Human
acccuucccuugagcccucu

SEQ ID NO: 2300705 - RNA, 21 nt, Human
acccuucacauacccuccccc

SEQ ID NO: 2300706 - RNA, 12 nt, Human
acccuuugcccc

SEQ ID NO: 2300707 - RNA, 20 nt, Human
acccuuugaauuggacaaua

SEQ ID NO: 2300708 - RNA, 15 nt, Human
acccuugugguccca

SEQ ID NO: 2300709 - RNA, 19 nt, Human
acccuuguggucccacccc

SEQ ID NO: 2300710 - RNA, 16 nt, Human
acccuuguggucccac

SEQ ID NO: 2300711 - RNA, 17 nt, Human
acccuuguggucccacc

SEQ ID NO: 2300712 - RNA, 18 nt, Human
acccugccccugccccgu

SEQ ID NO: 2300713 - RNA, 15 nt, Human
acccugccccugccc

SEQ ID NO: 2300714 - RNA, 13 nt, Human
acccucuucaugg

SEQ ID NO: 2300715 - RNA, 14 nt, Human
acccucuuagaaaa

SEQ ID NO: 2300716 - RNA, 23 nt, Human
acccucuggagggguguggcucc

SEQ ID NO: 2300717 - RNA, 19 nt, Human
acccucugccaccagagac

SEQ ID NO: 2300718 - RNA, 14 nt, Human
acccugcccugugg

SEQ ID NO: 2300719 - RNA, 13 nt, Human
acccugcccugug

SEQ ID NO: 2300720 - RNA, 11 nt, Human
acccugcccug

SEQ ID NO: 2300721 - RNA, 12 nt, Human
acccugcccugu

SEQ ID NO: 2300722 - RNA, 17 nt, Human
acccuccuaucaccucc

SEQ ID NO: 2300723 - RNA, 14 nt, Human
acccucccuggagu

SEQ ID NO: 2300724 - RNA, 22 nt, Human
acccuccgccuucacuccggug

SEQ ID NO: 2300725 - RNA, 15 nt, Human
acccuccgccuucac

SEQ ID NO: 2300726 - RNA, 15 nt, Human
acccucccuggagug

SEQ ID NO: 2300727 - RNA, 12 nt, Human
acccucccugcu

SEQ ID NO: 2300728 - RNA, 13 nt, Human
acccucccugcug

SEQ ID NO: 2300729 - RNA, 14 nt, Human
acccucccugcugu

SEQ ID NO: 2300730 - RNA, 15 nt, Human
acccucccugcuguc

SEQ ID NO: 2300731 - RNA, 20 nt, Human
acccucccugcuguccccuc

SEQ ID NO: 2300732 - RNA, 21 nt, Human
acccucccugcuguccccucu

SEQ ID NO: 2300733 - RNA, 12 nt, Human
acccucccugga

SEQ ID NO: 2300734 - RNA, 13 nt, Human
acccucccuggag

SEQ ID NO: 2300735 - RNA, 21 nt, Human
acccuccuaucaccuccccuc

SEQ ID NO: 2300736 - RNA, 19 nt, Human
acccuccuccagaccauuc

SEQ ID NO: 2300737 - RNA, 13 nt, Human
acccuccuggcuc

SEQ ID NO: 2300738 - RNA, 11 nt, Human
acccuccuggc

SEQ ID NO: 2300739 - RNA, 14 nt, Human
acccuccuguaaau

SEQ ID NO: 2300740 - RNA, 17 nt, Human
acccuccuguaaauggu

SEQ ID NO: 2300741 - RNA, 21 nt, Human
acccuccuguaaaugguguac

SEQ ID NO: 2300742 - RNA, 13 nt, Human
acccuccugucuu

SEQ ID NO: 2300743 - RNA, 16 nt, Human
acccuccugucuuccc

SEQ ID NO: 2300744 - RNA, 18 nt, Human
acccuccugucuucccag

SEQ ID NO: 2300745 - RNA, 20 nt, Human
acccucugccaccagagacc

SEQ ID NO: 2300746 - RNA, 13 nt, Human
acccucccacccc

SEQ ID NO: 2300747 - RNA, 12 nt, Human
acccucccaccc

SEQ ID NO: 2300748 - RNA, 15 nt, Human
acccuccacucuccu

SEQ ID NO: 2300749 - RNA, 23 nt, Human
acccucccacccccuucucugcu

SEQ ID NO: 2300750 - RNA, 23 nt, Human
acccuccacccugucccccagcu

SEQ ID NO: 2300751 - RNA, 13 nt, Human
acccucccagacc

SEQ ID NO: 2300752 - RNA, 20 nt, Human
acccucccacccccuucucu

SEQ ID NO: 2300753 - RNA, 14 nt, Human
acccucccaccccc

SEQ ID NO: 2300754 - RNA, 16 nt, Human
acccucccauggcacc

SEQ ID NO: 2300755 - RNA, 15 nt, Human
acccucccagaccug

SEQ ID NO: 2300756 - RNA, 16 nt, Human
acccucccagaccugc

SEQ ID NO: 2300757 - RNA, 23 nt, Human
acccucccucuacugggagccua

SEQ ID NO: 2300758 - RNA, 17 nt, Human
acccucccauggcaccu

SEQ ID NO: 2300759 - RNA, 11 nt, Human
acccucccugc

SEQ ID NO: 2300760 - RNA, 24 nt, Human
acccgaggcugcccacuaugguca

SEQ ID NO: 2300761 - RNA, 21 nt, Human
acccgagucauucguucugug

SEQ ID NO: 2300762 - RNA, 12 nt, Human
acccgaugcugc

SEQ ID NO: 2300763 - RNA, 13 nt, Human
acccgaugcugcu

SEQ ID NO: 2300764 - RNA, 14 nt, Human
acccgaugcugcuu

SEQ ID NO: 2300765 - RNA, 22 nt, Human
acccgaugcugcuuuccccugu

SEQ ID NO: 2300766 - RNA, 13 nt, Human
acccuccacccug

SEQ ID NO: 2300767 - RNA, 23 nt, Human
acccgaugcugcuuuccccugug

SEQ ID NO: 2300768 - RNA, 14 nt, Human
acccuccacccugu

SEQ ID NO: 2300769 - RNA, 15 nt, Human
acccuccacccuguc

SEQ ID NO: 2300770 - RNA, 16 nt, Human
acccuccacccugucc

SEQ ID NO: 2300771 - RNA, 17 nt, Human
acccuccacccuguccc

SEQ ID NO: 2300772 - RNA, 17 nt, Human
acccgaggcugcccacu

SEQ ID NO: 2300773 - RNA, 15 nt, Human
acccgaggcugccca

SEQ ID NO: 2300774 - RNA, 14 nt, Human
acccgaggcugccc

SEQ ID NO: 2300775 - RNA, 14 nt, Human
acccgaggcccgca

SEQ ID NO: 2300776 - RNA, 13 nt, Human
acccgaggaaacu

SEQ ID NO: 2300777 - RNA, 16 nt, Human
acccgacagagggaag

SEQ ID NO: 2300778 - RNA, 23 nt, Human
accccuuuucagcuucugcuggg

SEQ ID NO: 2300779 - RNA, 19 nt, Human
accccuuuucagcuucugc

SEQ ID NO: 2300780 - RNA, 20 nt, Human
accccuuuucagcuucugcu

SEQ ID NO: 2300781 - RNA, 21 nt, Human
acccgacagagggaagaaaag

SEQ ID NO: 2300782 - RNA, 20 nt, Human
accccuucgcuccugugucu

SEQ ID NO: 2300783 - RNA, 15 nt, Human
accccuucucuccuc

SEQ ID NO: 2300784 - RNA, 17 nt, Human
accccuucucuccuccc

SEQ ID NO: 2300785 - RNA, 12 nt, Human
accccuuuccug

SEQ ID NO: 2300786 - RNA, 17 nt, Human
accccuuucuggcucuc

SEQ ID NO: 2300787 - RNA, 16 nt, Human
accccuuuucagcuuc

SEQ ID NO: 2300788 - RNA, 17 nt, Human
accccuuuucagcuucu

SEQ ID NO: 2300789 - RNA, 23 nt, Human
accccuucucuccuccccaaauc

SEQ ID NO: 2300790 - RNA, 15 nt, Human
ucagggucauagcau

SEQ ID NO: 2300791 - RNA, 18 nt, Human
ucagggguucgagaccag

SEQ ID NO: 2300792 - RNA, 22 nt, Human
ucagggguucgagaccagucug

SEQ ID NO: 2300793 - RNA, 19 nt, Human
ucaggcccuuauuuucaag

SEQ ID NO: 2300794 - RNA, 13 nt, Human
ucagggucccugg

SEQ ID NO: 2300795 - RNA, 14 nt, Human
ucagggucccuggu

SEQ ID NO: 2300796 - RNA, 18 nt, Human
ucagggucccugguggca

SEQ ID NO: 2300797 - RNA, 13 nt, Human
ucagguaacaggc

SEQ ID NO: 2300798 - RNA, 15 nt, Human
ucagguaacaggcag

SEQ ID NO: 2300799 - RNA, 16 nt, Human
ucagguaacaggcaga

SEQ ID NO: 2300800 - RNA, 19 nt, Human
accccuucgcuccuguguc

SEQ ID NO: 2300801 - RNA, 23 nt, Human
ucaggccaucaucaguggagcca

SEQ ID NO: 2300802 - RNA, 15 nt, Human
ucaggccgaaggagg

SEQ ID NO: 2300803 - RNA, 19 nt, Human
ucaggccaggugcaguggc

SEQ ID NO: 2300804 - RNA, 18 nt, Human
ucaggccaggugcagugg

SEQ ID NO: 2300805 - RNA, 17 nt, Human
ucaggccaggugcagug

SEQ ID NO: 2300806 - RNA, 16 nt, Human
ucaggccaggugcagu

SEQ ID NO: 2300807 - RNA, 22 nt, Human
ucaggccaucaucaguggagcc

SEQ ID NO: 2300808 - RNA, 21 nt, Human
ucaggccaucaucaguggagc

SEQ ID NO: 2300809 - RNA, 14 nt, Human
ucaggcccaaagcc

SEQ ID NO: 2300810 - RNA, 15 nt, Human
ucaggccagcugcuu

SEQ ID NO: 2300811 - RNA, 20 nt, Human
ucaggccagcugcuugggcu

SEQ ID NO: 2300812 - RNA, 11 nt, Human
ucaggccaggc

SEQ ID NO: 2300813 - RNA, 12 nt, Human
ucaggccaggcc

SEQ ID NO: 2300814 - RNA, 22 nt, Human
ucaggcauaggccugggugcug

SEQ ID NO: 2300815 - RNA, 17 nt, Human
ucaggcaugaacaugua

SEQ ID NO: 2300816 - RNA, 20 nt, Human
ucaggcauaggccugggugc

SEQ ID NO: 2300817 - RNA, 19 nt, Human
ucaggcauaggccugggug

SEQ ID NO: 2300818 - RNA, 22 nt, Human
ucaggaagaacacccucuaaau

SEQ ID NO: 2300819 - RNA, 18 nt, Human
ucaggcauaggccugggu

SEQ ID NO: 2300820 - RNA, 20 nt, Human
ucaggaagaugaaagaggag

SEQ ID NO: 2300821 - RNA, 15 nt, Human
ucaggcaugccugug

SEQ ID NO: 2300822 - RNA, 14 nt, Human
ucaggcaugccugu

SEQ ID NO: 2300823 - RNA, 18 nt, Human
ucaggcaugaacauguac

SEQ ID NO: 2300824 - RNA, 19 nt, Human
ucaggcaugaacauguacu

SEQ ID NO: 2300825 - RNA, 17 nt, Human
ucaggcaugccugugug

SEQ ID NO: 2300826 - RNA, 16 nt, Human
ucaggcaugccugugu

SEQ ID NO: 2300827 - RNA, 20 nt, Human
ucaggccaaacucaccugcc

SEQ ID NO: 2300828 - RNA, 23 nt, Human
ucaggccaaacucaccugccccu

SEQ ID NO: 2300829 - RNA, 16 nt, Human
ucaggaagcucagggc

SEQ ID NO: 2300830 - RNA, 17 nt, Human
ucaggaagcucagggcc

SEQ ID NO: 2300831 - RNA, 19 nt, Human
ucaggaagcucagggccug

SEQ ID NO: 2300832 - RNA, 20 nt, Human
ucaggaagcucagggccugg

SEQ ID NO: 2300833 - RNA, 22 nt, Human
accccuuccccacugccugccc

SEQ ID NO: 2300834 - RNA, 21 nt, Human
accccuuccccacugccugcc

SEQ ID NO: 2300835 - RNA, 19 nt, Human
ucagccuggccagacacag

SEQ ID NO: 2300836 - RNA, 20 nt, Human
ucagccuggccagacacagg

SEQ ID NO: 2300837 - RNA, 15 nt, Human
ucagcggggacagcu

SEQ ID NO: 2300838 - RNA, 16 nt, Human
ucagcggggacagcuc

SEQ ID NO: 2300839 - RNA, 17 nt, Human
ucagcggggacagcucc

SEQ ID NO: 2300840 - RNA, 14 nt, Human
ucagccuggugggc

SEQ ID NO: 2300841 - RNA, 12 nt, Human
ucaggaagaaau

SEQ ID NO: 2300842 - RNA, 23 nt, Human
ucaggaagaaaggagucugcaca

SEQ ID NO: 2300843 - RNA, 13 nt, Human
ucaggaagaacac

SEQ ID NO: 2300844 - RNA, 23 nt, Human
ucaggaagaaaucacagaaucau

SEQ ID NO: 2300845 - RNA, 15 nt, Human
ucaggaagaaaucac

SEQ ID NO: 2300846 - RNA, 22 nt, Human
ucaggaagaaaucacagaauca

SEQ ID NO: 2300847 - RNA, 13 nt, Human
ucagaucugucug

SEQ ID NO: 2300848 - RNA, 14 nt, Human
ucagaucugucuga

SEQ ID NO: 2300849 - RNA, 21 nt, Human
ucagaugaacucuuagaaaug

SEQ ID NO: 2300850 - RNA, 13 nt, Human
ucagaucuucugu

SEQ ID NO: 2300851 - RNA, 13 nt, Human
ucagaagacacug

SEQ ID NO: 2300852 - RNA, 12 nt, Human
ucagaagaaaga

SEQ ID NO: 2300853 - RNA, 20 nt, Human
ucagaaccucuuccccagaa

SEQ ID NO: 2300854 - RNA, 18 nt, Human
ucagaaccucuuccccag

SEQ ID NO: 2300855 - RNA, 17 nt, Human
ucagaaccucuucccca

SEQ ID NO: 2300856 - RNA, 16 nt, Human
ucagaaccucuucccc

SEQ ID NO: 2300857 - RNA, 15 nt, Human
ucagaaccucuuccc

SEQ ID NO: 2300858 - RNA, 24 nt, Human
ucagaacccuuggcuugcccacgu

SEQ ID NO: 2300859 - RNA, 20 nt, Human
ucagaacccuuggcuugccc

SEQ ID NO: 2300860 - RNA, 18 nt, Human
ucagaacccuuggcuugc

SEQ ID NO: 2300861 - RNA, 22 nt, Human
ucagaacucaaauggggccaga

SEQ ID NO: 2300862 - RNA, 21 nt, Human
ucagaacucaaauggggccag

SEQ ID NO: 2300863 - RNA, 15 nt, Human
ucagaacuagaauuu

SEQ ID NO: 2300864 - RNA, 18 nt, Human
ucagaugggaagacauga

SEQ ID NO: 2300865 - RNA, 15 nt, Human
ucagaugggaagaca

SEQ ID NO: 2300866 - RNA, 13 nt, Human
ucagaugucuucu

SEQ ID NO: 2300867 - RNA, 14 nt, Human
ucagaugucuucug

SEQ ID NO: 2300868 - RNA, 15 nt, Human
ucagaugucuucugc

SEQ ID NO: 2300869 - RNA, 16 nt, Human
ucagaugucuucugcc

SEQ ID NO: 2300870 - RNA, 17 nt, Human
ucagaugucuucugccu

SEQ ID NO: 2300871 - RNA, 19 nt, Human
ucagaugucuucugccugu

SEQ ID NO: 2300872 - RNA, 20 nt, Human
ucagaugucuucugccuguu

SEQ ID NO: 2300873 - RNA, 21 nt, Human
ucagaugucuucugccuguua

SEQ ID NO: 2300874 - RNA, 21 nt, Human
ucagaugcccagagggcccag

SEQ ID NO: 2300875 - RNA, 14 nt, Human
ucagaugcccagag

SEQ ID NO: 2300876 - RNA, 22 nt, Human
ucagaugucuucugccuguuau

SEQ ID NO: 2300877 - RNA, 14 nt, Human
ucagauucccagag

SEQ ID NO: 2300878 - RNA, 19 nt, Human
ucagauuuuaaaaagucuu

SEQ ID NO: 2300879 - RNA, 21 nt, Human
ucagauuuuaaaaagucuuca

SEQ ID NO: 2300880 - RNA, 13 nt, Human
ucagcccugaccc

SEQ ID NO: 2300881 - RNA, 17 nt, Human
ucagcccucccugcccc

SEQ ID NO: 2300882 - RNA, 19 nt, Human
ucagcccucccugccccuc

SEQ ID NO: 2300883 - RNA, 16 nt, Human
ucagcccugacccugu

SEQ ID NO: 2300884 - RNA, 13 nt, Human
ucagcccugaggu

SEQ ID NO: 2300885 - RNA, 23 nt, Human
ucagcccugaggugaaagggagc

SEQ ID NO: 2300886 - RNA, 18 nt, Human
ucagccccuccucugcca

SEQ ID NO: 2300887 - RNA, 13 nt, Human
ucagccccuccuc

SEQ ID NO: 2300888 - RNA, 12 nt, Human
ucagccccuccu

SEQ ID NO: 2300889 - RNA, 17 nt, Human
ucagccccuccucugcc

SEQ ID NO: 2300890 - RNA, 16 nt, Human
ucagccccuccucugc

SEQ ID NO: 2300891 - RNA, 15 nt, Human
ucagccccuccucug

SEQ ID NO: 2300892 - RNA, 14 nt, Human
ucagccccuccucu

SEQ ID NO: 2300893 - RNA, 18 nt, Human
ucagcccucccugccccu

SEQ ID NO: 2300894 - RNA, 20 nt, Human
ucagccccaccccagguccu

SEQ ID NO: 2300895 - RNA, 18 nt, Human
ucagcccaccccccucau

SEQ ID NO: 2300896 - RNA, 16 nt, Human
ucagcccauauuucau

SEQ ID NO: 2300897 - RNA, 17 nt, Human
ucagcccaccccccuca

SEQ ID NO: 2300898 - RNA, 12 nt, Human
ucagcccugggc

SEQ ID NO: 2300899 - RNA, 21 nt, Human
ucagcccuggaggugccagca

SEQ ID NO: 2300900 - RNA, 17 nt, Human
ucagcccuggaggugcc

SEQ ID NO: 2300901 - RNA, 19 nt, Human
ucagcccuggaggugccag

SEQ ID NO: 2300902 - RNA, 12 nt, Human
ucagcccuggag

SEQ ID NO: 2300903 - RNA, 13 nt, Human
ucagcccuggagg

SEQ ID NO: 2300904 - RNA, 14 nt, Human
ucagcccuggaggu

SEQ ID NO: 2300905 - RNA, 19 nt, Human
ucagcccugggccccacca

SEQ ID NO: 2300906 - RNA, 18 nt, Human
ucagcccugggccccacc

SEQ ID NO: 2300907 - RNA, 22 nt, Human
acccagcuaugguucucucgca

SEQ ID NO: 2300908 - RNA, 13 nt, Human
acccagcucuggu

SEQ ID NO: 2300909 - RNA, 15 nt, Human
acccagcucuggucc

SEQ ID NO: 2300910 - RNA, 15 nt, Human
acccagucccugggg

SEQ ID NO: 2300911 - RNA, 13 nt, Human
acccagucccugg

SEQ ID NO: 2300912 - RNA, 21 nt, Human
acccaguccccgugccccgcc

SEQ ID NO: 2300913 - RNA, 17 nt, Human
acccaguccccgugccc

SEQ ID NO: 2300914 - RNA, 17 nt, Human
acccaguaacucaucug

SEQ ID NO: 2300915 - RNA, 16 nt, Human
acccaguccacaaaau

SEQ ID NO: 2300916 - RNA, 18 nt, Human
acccaguaacucaucugu

SEQ ID NO: 2300917 - RNA, 16 nt, Human
accccauuuucugugg

SEQ ID NO: 2300918 - RNA, 15 nt, Human
acccccagccugcua

SEQ ID NO: 2300919 - RNA, 23 nt, Human
accccaugucaccggauccuggg

SEQ ID NO: 2300920 - RNA, 14 nt, Human
acccccagccugcu

SEQ ID NO: 2300921 - RNA, 14 nt, Human
acccagucccuggg

SEQ ID NO: 2300922 - RNA, 16 nt, Human
acccagucuguucccc

SEQ ID NO: 2300923 - RNA, 14 nt, Human
acccagugagcacu

SEQ ID NO: 2300924 - RNA, 18 nt, Human
acccagugcccccacuga

SEQ ID NO: 2300925 - RNA, 15 nt, Human
acccagugcccccac

SEQ ID NO: 2300926 - RNA, 18 nt, Human
accccaucugugaauaag

SEQ ID NO: 2300927 - RNA, 16 nt, Human
accccaucugugaaua

SEQ ID NO: 2300928 - RNA, 15 nt, Human
accccaucugugaau

SEQ ID NO: 2300929 - RNA, 15 nt, Human
accccaucugcccag

SEQ ID NO: 2300930 - RNA, 16 nt, Human
accccaucugcccagg

SEQ ID NO: 2300931 - RNA, 16 nt, Human
accccaugccaaagcu

SEQ ID NO: 2300932 - RNA, 17 nt, Human
accccaucugcccagga

SEQ ID NO: 2300933 - RNA, 12 nt, Human
accccaugcugu

SEQ ID NO: 2300934 - RNA, 16 nt, Human
accccaugcuguugau

SEQ ID NO: 2300935 - RNA, 17 nt, Human
accccaugcuguugauu

SEQ ID NO: 2300936 - RNA, 23 nt, Human
accccaugcuguugauugcuaaa

SEQ ID NO: 2300937 - RNA, 20 nt, Human
accccaugcuguugauugcu

SEQ ID NO: 2300938 - RNA, 22 nt, Human
accccaugcuguugauugcuaa

SEQ ID NO: 2300939 - RNA, 15 nt, Human
acccccgcccccugc

SEQ ID NO: 2300940 - RNA, 18 nt, Human
acccccgcccccugcccu

SEQ ID NO: 2300941 - RNA, 19 nt, Human
acccccgcccccugcccuc

SEQ ID NO: 2300942 - RNA, 20 nt, Human
acccccgcccccugcccucc

SEQ ID NO: 2300943 - RNA, 21 nt, Human
acccccgcccccugcccuccc

SEQ ID NO: 2300944 - RNA, 19 nt, Human
accccccagaaccuguccu

SEQ ID NO: 2300945 - RNA, 16 nt, Human
acccccucauuguuua

SEQ ID NO: 2300946 - RNA, 14 nt, Human
acccccgcccccug

SEQ ID NO: 2300947 - RNA, 13 nt, Human
acccccgcccccu

SEQ ID NO: 2300948 - RNA, 18 nt, Human
accccccagaaccugucc

SEQ ID NO: 2300949 - RNA, 19 nt, Human
accccccacucugugccug

SEQ ID NO: 2300950 - RNA, 22 nt, Human
accccccacacucacuccugag

SEQ ID NO: 2300951 - RNA, 16 nt, Human
accccccacucugugc

SEQ ID NO: 2300952 - RNA, 13 nt, Human
accccccaccugc

SEQ ID NO: 2300953 - RNA, 12 nt, Human
accccccaccug

SEQ ID NO: 2300954 - RNA, 14 nt, Human
accccccaagcugu

SEQ ID NO: 2300955 - RNA, 19 nt, Human
accccccaaccccugagga

SEQ ID NO: 2300956 - RNA, 20 nt, Human
accccccaaccccugaggaa

SEQ ID NO: 2300957 - RNA, 17 nt, Human
acccccauuucuauuua

SEQ ID NO: 2300958 - RNA, 18 nt, Human
acccccauuucuauuuau

SEQ ID NO: 2300959 - RNA, 17 nt, Human
acccccaucucucccuc

SEQ ID NO: 2300960 - RNA, 16 nt, Human
acccccaggaccccug

SEQ ID NO: 2300961 - RNA, 16 nt, Human
acccccagcuuugcua

SEQ ID NO: 2300962 - RNA, 21 nt, Human
acccccaggccucagucuccc

SEQ ID NO: 2300963 - RNA, 18 nt, Human
acccccagcuccggccug

SEQ ID NO: 2300964 - RNA, 14 nt, Human
acccccagcuuugc

SEQ ID NO: 2300965 - RNA, 19 nt, Human
acccccagcugcuuguguc

SEQ ID NO: 2300966 - RNA, 22 nt, Human
acccccagcuuugcccaacacc

SEQ ID NO: 2300967 - RNA, 12 nt, Human
acccccagcuca

SEQ ID NO: 2300968 - RNA, 13 nt, Human
acccccagcucaa

SEQ ID NO: 2300969 - RNA, 20 nt, Human
acccccagcucaauggacug

SEQ ID NO: 2300970 - RNA, 21 nt, Human
acccccagcucaauggacugg

SEQ ID NO: 2300971 - RNA, 15 nt, Human
acccccucccuggcc

SEQ ID NO: 2300972 - RNA, 14 nt, Human
acccccucccuggc

SEQ ID NO: 2300973 - RNA, 16 nt, Human
acccccuccccagggg

SEQ ID NO: 2300974 - RNA, 13 nt, Human
accccucccuuuc

SEQ ID NO: 2300975 - RNA, 14 nt, Human
accccucccuuucu

SEQ ID NO: 2300976 - RNA, 12 nt, Human
acccccucccca

SEQ ID NO: 2300977 - RNA, 19 nt, Human
acccccucaagccaauccc

SEQ ID NO: 2300978 - RNA, 14 nt, Human
acccccuccccagg

SEQ ID NO: 2300979 - RNA, 13 nt, Human
acccccuccccag

SEQ ID NO: 2300980 - RNA, 15 nt, Human
acccccuccccgccc

SEQ ID NO: 2300981 - RNA, 16 nt, Human
accccucccuuucucc

SEQ ID NO: 2300982 - RNA, 18 nt, Human
accccucccuuucucccc

SEQ ID NO: 2300983 - RNA, 19 nt, Human
accccucccuuucuccccu

SEQ ID NO: 2300984 - RNA, 23 nt, Human
accccucccuuucuccccugccc

SEQ ID NO: 2300985 - RNA, 13 nt, Human
accccuccucacu

SEQ ID NO: 2300986 - RNA, 14 nt, Human
accccuccucacug

SEQ ID NO: 2300987 - RNA, 16 nt, Human
accccuccucacuggc

SEQ ID NO: 2300988 - RNA, 17 nt, Human
accccuccucacuggcc

SEQ ID NO: 2300989 - RNA, 18 nt, Human
accccuccucacuggcca

SEQ ID NO: 2300990 - RNA, 19 nt, Human
accccuccucacuggccau

SEQ ID NO: 2300991 - RNA, 21 nt, Human
accccuccucacuggccaucc

SEQ ID NO: 2300992 - RNA, 23 nt, Human
accccuccucacuggccaucccu

SEQ ID NO: 2300993 - RNA, 12 nt, Human
accccuggcuuu

SEQ ID NO: 2300994 - RNA, 22 nt, Human
accccuggcuccaggccagggg

SEQ ID NO: 2300995 - RNA, 20 nt, Human
accccuggcuccaggccagg

SEQ ID NO: 2300996 - RNA, 19 nt, Human
accccuggcuccaggccag

SEQ ID NO: 2300997 - RNA, 16 nt, Human
accccuccuuccuuga

SEQ ID NO: 2300998 - RNA, 12 nt, Human
accccuccuucc

SEQ ID NO: 2300999 - RNA, 15 nt, Human
accccuccucccuuu

SEQ ID NO: 2301000 - RNA, 18 nt, Human
accccuccucccuuuuuc

SEQ ID NO: 2301001 - RNA, 23 nt, Human
accccuccucccuuuuuccuugu

SEQ ID NO: 2301002 - RNA, 17 nt, Human
accccuccuuccuugac

SEQ ID NO: 2301003 - RNA, 12 nt, Human
accccuggccuc

SEQ ID NO: 2301004 - RNA, 13 nt, Human
accccuggccucc

SEQ ID NO: 2301005 - RNA, 14 nt, Human
accccuggccuccg

SEQ ID NO: 2301006 - RNA, 12 nt, Human
ucagccugggca

SEQ ID NO: 2301007 - RNA, 10 nt, Human
ucagccuggg

SEQ ID NO: 2301008 - RNA, 20 nt, Human
accccuuccccacugccugc

SEQ ID NO: 2301009 - RNA, 18 nt, Human
accccuuccccacugccu

SEQ ID NO: 2301010 - RNA, 16 nt, Human
accccuuccccacugc

SEQ ID NO: 2301011 - RNA, 15 nt, Human
accccuuccccacug

SEQ ID NO: 2301012 - RNA, 14 nt, Human
accccuuccccacu

SEQ ID NO: 2301013 - RNA, 18 nt, Human
accccuuccauguggaga

SEQ ID NO: 2301014 - RNA, 19 nt, Human
accccuuccauguggagaa

SEQ ID NO: 2301015 - RNA, 19 nt, Human
ucagccuggcuucaaauug

SEQ ID NO: 2301016 - RNA, 18 nt, Human
accccuuagccucccuga

SEQ ID NO: 2301017 - RNA, 15 nt, Human
accccuuauccagga

SEQ ID NO: 2301018 - RNA, 16 nt, Human
accccuuauccaggac

SEQ ID NO: 2301019 - RNA, 17 nt, Human
accccuuagccucccug

SEQ ID NO: 2301020 - RNA, 16 nt, Human
accccuuagccucccu

SEQ ID NO: 2301021 - RNA, 17 nt, Human
accccuuauccaggacu

SEQ ID NO: 2301022 - RNA, 18 nt, Human
accccuuauccaggacuc

SEQ ID NO: 2301023 - RNA, 15 nt, Human
accccuuccaugugg

SEQ ID NO: 2301024 - RNA, 15 nt, Human
accccuuagccuccc

SEQ ID NO: 2301025 - RNA, 14 nt, Human
accccuuagccucc

SEQ ID NO: 2301026 - RNA, 15 nt, Human
accccuggcuuuuca

SEQ ID NO: 2301027 - RNA, 15 nt, Human
acccaagcaaggcca

SEQ ID NO: 2301028 - RNA, 19 nt, Human
acccaacuagcucuauguu

SEQ ID NO: 2301029 - RNA, 13 nt, Human
acccaacucuccu

SEQ ID NO: 2301030 - RNA, 15 nt, Human
acccaacucuccugg

SEQ ID NO: 2301031 - RNA, 16 nt, Human
acccaacucuccugga

SEQ ID NO: 2301032 - RNA, 19 nt, Human
acccacuugcuuuuaaaau

SEQ ID NO: 2301033 - RNA, 16 nt, Human
acccagaagaaaauag

SEQ ID NO: 2301034 - RNA, 12 nt, Human
acccaaccacuc

SEQ ID NO: 2301035 - RNA, 22 nt, Human
acccaaaagcucagccagcccc

SEQ ID NO: 2301036 - RNA, 21 nt, Human
acccaaauguucaucaaugaa

SEQ ID NO: 2301037 - RNA, 23 nt, Human
acccaaaagucaaaaggugccug

SEQ ID NO: 2301038 - RNA, 21 nt, Human
acccaaaagcucagccagccc

SEQ ID NO: 2301039 - RNA, 18 nt, Human
acccaaaaggcagaagca

SEQ ID NO: 2301040 - RNA, 16 nt, Human
acccagcccacuucug

SEQ ID NO: 2301041 - RNA, 17 nt, Human
acccagcccacuucugc

SEQ ID NO: 2301042 - RNA, 15 nt, Human
acccagacagcuccc

SEQ ID NO: 2301043 - RNA, 22 nt, Human
acccagacagcucccucugccu

SEQ ID NO: 2301044 - RNA, 21 nt, Human
acccagacagcucccucugcc

SEQ ID NO: 2301045 - RNA, 18 nt, Human
acccagcccacuucugcc

SEQ ID NO: 2301046 - RNA, 11 nt, Human
acccagcccau

SEQ ID NO: 2301047 - RNA, 16 nt, Human
ucagaacagagccuuu

SEQ ID NO: 2301048 - RNA, 22 nt, Human
ucagaaccauccauaguaguau

SEQ ID NO: 2301049 - RNA, 16 nt, Human
ucagaacccuuggcuu

SEQ ID NO: 2301050 - RNA, 15 nt, Human
ucagaacccuuggcu

SEQ ID NO: 2301051 - RNA, 13 nt, Human
accauuuauacaa

SEQ ID NO: 2301052 - RNA, 22 nt, Human
accauuuauacaaauuagaaaa

SEQ ID NO: 2301053 - RNA, 21 nt, Human
accauuuauacaaauuagaaa

SEQ ID NO: 2301054 - RNA, 19 nt, Human
accauuuauacaaauuaga

SEQ ID NO: 2301055 - RNA, 16 nt, Human
accauuuauacaaauu

SEQ ID NO: 2301056 - RNA, 23 nt, Human
accauuuauacaaauuagaaaau

SEQ ID NO: 2301057 - RNA, 14 nt, Human
accauuucagagag

SEQ ID NO: 2301058 - RNA, 11 nt, Human
accauuucaga

SEQ ID NO: 2301059 - RNA, 22 nt, Human
accauuuugggguacccacugc

SEQ ID NO: 2301060 - RNA, 20 nt, Human
accauuucagagaggccuuu

SEQ ID NO: 2301061 - RNA, 23 nt, Human
accauuuugggguacccacugcu

SEQ ID NO: 2301062 - RNA, 20 nt, Human
accauuuuuuaaggaaacaa

SEQ ID NO: 2301063 - RNA, 22 nt, Human
accauuuuuuaaggaaacaaua

SEQ ID NO: 2301064 - RNA, 15 nt, Human
acccaaaaggcagaa

SEQ ID NO: 2301065 - RNA, 13 nt, Human
acccaaaaggcag

SEQ ID NO: 2301066 - RNA, 21 nt, Human
accauugucuuguucugugau

SEQ ID NO: 2301067 - RNA, 19 nt, Human
accaugaguggcauggcca

SEQ ID NO: 2301068 - RNA, 22 nt, Human
accaugaguggcauggccacca

SEQ ID NO: 2301069 - RNA, 17 nt, Human
accauugucuuguucug

SEQ ID NO: 2301070 - RNA, 18 nt, Human
accauucuccaccugcca

SEQ ID NO: 2301071 - RNA, 13 nt, Human
accauucuccacc

SEQ ID NO: 2301072 - RNA, 16 nt, Human
accauucuccaccugc

SEQ ID NO: 2301073 - RNA, 18 nt, Human
accaugagaagagggccu

SEQ ID NO: 2301074 - RNA, 20 nt, Human
accaugagaagagggccugu

SEQ ID NO: 2301075 - RNA, 21 nt, Human
accaugagaagagggccugug

SEQ ID NO: 2301076 - RNA, 23 nt, Human
accaugagaauaagagaaagaaa

SEQ ID NO: 2301077 - RNA, 18 nt, Human
accaugagcaauucuccu

SEQ ID NO: 2301078 - RNA, 22 nt, Human
accaugauuaaccacuucagcu

SEQ ID NO: 2301079 - RNA, 23 nt, Human
accaugauuaaccacuucagcug

SEQ ID NO: 2301080 - RNA, 15 nt, Human
accauuccccauggg

SEQ ID NO: 2301081 - RNA, 12 nt, Human
accauuccccau

SEQ ID NO: 2301082 - RNA, 21 nt, Human
accagggagaccgagcgcuuu

SEQ ID NO: 2301083 - RNA, 20 nt, Human
accagggagccccuuugaug

SEQ ID NO: 2301084 - RNA, 14 nt, Human
ucacugucuuuccu

SEQ ID NO: 2301085 - RNA, 19 nt, Human
ucacuguugcccaggcugg

SEQ ID NO: 2301086 - RNA, 17 nt, Human
ucacuguugcccaggcu

SEQ ID NO: 2301087 - RNA, 18 nt, Human
ucacuguugcccaggcug

SEQ ID NO: 2301088 - RNA, 14 nt, Human
accagggcagggcc

SEQ ID NO: 2301089 - RNA, 15 nt, Human
accagggcagggcca

SEQ ID NO: 2301090 - RNA, 19 nt, Human
accagggccugagccaagc

SEQ ID NO: 2301091 - RNA, 23 nt, Human
accagggcgaacgacaauagcuu

SEQ ID NO: 2301092 - RNA, 22 nt, Human
accagggcgaacgacaauagcu

SEQ ID NO: 2301093 - RNA, 15 nt, Human
accaggggcaggcac

SEQ ID NO: 2301094 - RNA, 16 nt, Human
accaggggcaggcaca

SEQ ID NO: 2301095 - RNA, 17 nt, Human
accaggggcaggcacag

SEQ ID NO: 2301096 - RNA, 12 nt, Human
accagugacuuu

SEQ ID NO: 2301097 - RNA, 18 nt, Human
accaggggcaggcacagc

SEQ ID NO: 2301098 - RNA, 19 nt, Human
accaggggcaggcacagca

SEQ ID NO: 2301099 - RNA, 20 nt, Human
accaggggcaggcacagcac

SEQ ID NO: 2301100 - RNA, 17 nt, Human
accagugcaacagcacu

SEQ ID NO: 2301101 - RNA, 16 nt, Human
accaguguagccuugc

SEQ ID NO: 2301102 - RNA, 13 nt, Human
accaguguagccu

SEQ ID NO: 2301103 - RNA, 17 nt, Human
accaguggucucacaug

SEQ ID NO: 2301104 - RNA, 12 nt, Human
accaguggucuc

SEQ ID NO: 2301105 - RNA, 21 nt, Human
accaguguuguggauuuaaca

SEQ ID NO: 2301106 - RNA, 18 nt, Human
accagugcgauucuggau

SEQ ID NO: 2301107 - RNA, 18 nt, Human
accagugcaacagcacug

SEQ ID NO: 2301108 - RNA, 23 nt, Human
accagugcccaaagucuguguga

SEQ ID NO: 2301109 - RNA, 22 nt, Human
accagugcccaaagucugugug

SEQ ID NO: 2301110 - RNA, 17 nt, Human
accaguuaugugaauga

SEQ ID NO: 2301111 - RNA, 24 nt, Human
accaggggugauuucagagagggc

SEQ ID NO: 2301112 - RNA, 21 nt, Human
accaguguagccuugcccgga

SEQ ID NO: 2301113 - RNA, 21 nt, Human
accaguugcacuuggccucug

SEQ ID NO: 2301114 - RNA, 15 nt, Human
accaguucugggcaa

SEQ ID NO: 2301115 - RNA, 15 nt, Human
accaguugggagcac

SEQ ID NO: 2301116 - RNA, 24 nt, Human
accaugaagagauuuuucaugauu

SEQ ID NO: 2301117 - RNA, 19 nt, Human
ucacuguccuccaagccag

SEQ ID NO: 2301118 - RNA, 20 nt, Human
ucacugucaggaagaaauca

SEQ ID NO: 2301119 - RNA, 15 nt, Human
ucacugucugagagu

SEQ ID NO: 2301120 - RNA, 20 nt, Human
ucacugucugagaguuuagu

SEQ ID NO: 2301121 - RNA, 12 nt, Human
ucacugucuuuc

SEQ ID NO: 2301122 - RNA, 16 nt, Human
ucacuguugcccaggc

SEQ ID NO: 2301123 - RNA, 16 nt, Human
ucacuguccuccaagc

SEQ ID NO: 2301124 - RNA, 15 nt, Human
ucacuguccuccaag

SEQ ID NO: 2301125 - RNA, 18 nt, Human
ucacugucaggaagaaau

SEQ ID NO: 2301126 - RNA, 18 nt, Human
ucacugucccucaaauga

SEQ ID NO: 2301127 - RNA, 14 nt, Human
ucaccugggcaccu

SEQ ID NO: 2301128 - RNA, 14 nt, Human
ucacuguauaaaua

SEQ ID NO: 2301129 - RNA, 15 nt, Human
ucacuguauaaauag

SEQ ID NO: 2301130 - RNA, 16 nt, Human
ucacuguauaaauagg

SEQ ID NO: 2301131 - RNA, 17 nt, Human
ucacuguauaaauagga

SEQ ID NO: 2301132 - RNA, 19 nt, Human
ucacuguauaaauaggaga

SEQ ID NO: 2301133 - RNA, 23 nt, Human
ucacuguauaaauaggagaggau

SEQ ID NO: 2301134 - RNA, 24 nt, Human
ucacuguauaaauaggagaggaug

SEQ ID NO: 2301135 - RNA, 21 nt, Human
ucacuguagaaugauuucaug

SEQ ID NO: 2301136 - RNA, 12 nt, Human
ucacugcagccu

SEQ ID NO: 2301137 - RNA, 19 nt, Human
ucacugacacaaaaaguag

SEQ ID NO: 2301138 - RNA, 20 nt, Human
ucacugcacagugcaucuca

SEQ ID NO: 2301139 - RNA, 22 nt, Human
ucacugcacagugcaucucagc

SEQ ID NO: 2301140 - RNA, 24 nt, Human
ucacugcacagugcaucucagccc

SEQ ID NO: 2301141 - RNA, 23 nt, Human
ucacugaaugcuucugacuucau

SEQ ID NO: 2301142 - RNA, 17 nt, Human
ucaccugggcaccuggg

SEQ ID NO: 2301143 - RNA, 13 nt, Human
ucacugagacagc

SEQ ID NO: 2301144 - RNA, 14 nt, Human
ucacugagacagcc

SEQ ID NO: 2301145 - RNA, 15 nt, Human
ucacugagacagccc

SEQ ID NO: 2301146 - RNA, 16 nt, Human
ucaccugcuggccccu

SEQ ID NO: 2301147 - RNA, 15 nt, Human
ucaccugcuggcccc

SEQ ID NO: 2301148 - RNA, 11 nt, Human
ucaccugcugg

SEQ ID NO: 2301149 - RNA, 15 nt, Human
ucaccugaggucggg

SEQ ID NO: 2301150 - RNA, 16 nt, Human
ucaccugccccucaac

SEQ ID NO: 2301151 - RNA, 21 nt, Human
ucaccugcuggccccucaccu

SEQ ID NO: 2301152 - RNA, 20 nt, Human
ucaccugcuggccccucacc

SEQ ID NO: 2301153 - RNA, 19 nt, Human
ucaccugcuggccccucac

SEQ ID NO: 2301154 - RNA, 17 nt, Human
ucaccugcuggccccuc

SEQ ID NO: 2301155 - RNA, 20 nt, Human
uauuucauaaacaacuuaau

SEQ ID NO: 2301156 - RNA, 21 nt, Human
uauuucaucauauuauacaga

SEQ ID NO: 2301157 - RNA, 20 nt, Human
uauuucaucauauuauacag

SEQ ID NO: 2301158 - RNA, 17 nt, Human
uauuucaugaaaauugu

SEQ ID NO: 2301159 - RNA, 21 nt, Human
accacacuggacuccggcccu

SEQ ID NO: 2301160 - RNA, 22 nt, Human
accacacuggacuccggcccuc

SEQ ID NO: 2301161 - RNA, 17 nt, Human
accacacuuccugucca

SEQ ID NO: 2301162 - RNA, 16 nt, Human
accacacuuccugucc

SEQ ID NO: 2301163 - RNA, 13 nt, Human
accacacuuccug

SEQ ID NO: 2301164 - RNA, 22 nt, Human
accacacuuccuguccagagag

SEQ ID NO: 2301165 - RNA, 21 nt, Human
accacacuuccuguccagaga

SEQ ID NO: 2301166 - RNA, 12 nt, Human
accacagacaca

SEQ ID NO: 2301167 - RNA, 13 nt, Human
accacagacacac

SEQ ID NO: 2301168 - RNA, 14 nt, Human
accacagacacaca

SEQ ID NO: 2301169 - RNA, 15 nt, Human
accacagacacacac

SEQ ID NO: 2301170 - RNA, 21 nt, Human
uauuucaugcugggaaugaga

SEQ ID NO: 2301171 - RNA, 12 nt, Human
uauuucauuucu

SEQ ID NO: 2301172 - RNA, 14 nt, Human
accacaucuugcuc

SEQ ID NO: 2301173 - RNA, 20 nt, Human
accacauccuccguccagcc

SEQ ID NO: 2301174 - RNA, 14 nt, Human
accacauccuccgu

SEQ ID NO: 2301175 - RNA, 13 nt, Human
accacagugucug

SEQ ID NO: 2301176 - RNA, 12 nt, Human
accacagugucu

SEQ ID NO: 2301177 - RNA, 19 nt, Human
accacauagcaugaggcca

SEQ ID NO: 2301178 - RNA, 19 nt, Human
accacagcaggugucauau

SEQ ID NO: 2301179 - RNA, 16 nt, Human
accacagcaucauuuu

SEQ ID NO: 2301180 - RNA, 16 nt, Human
accacagccagcaccu

SEQ ID NO: 2301181 - RNA, 11 nt, Human
accacaguguc

SEQ ID NO: 2301182 - RNA, 17 nt, Human
accacagccagcaccug

SEQ ID NO: 2301183 - RNA, 11 nt, Human
accacagcagu

SEQ ID NO: 2301184 - RNA, 22 nt, Human
accacagacauacuaaccagca

SEQ ID NO: 2301185 - RNA, 21 nt, Human
accacagacauacuaaccagc

SEQ ID NO: 2301186 - RNA, 18 nt, Human
accacagcaaggcaccug

SEQ ID NO: 2301187 - RNA, 10 nt, Human
accacagcaa

SEQ ID NO: 2301188 - RNA, 20 nt, Human
accacagacacacacacgca

SEQ ID NO: 2301189 - RNA, 16 nt, Human
accacagacacacaca

SEQ ID NO: 2301190 - RNA, 18 nt, Human
accacagacacacacacg

SEQ ID NO: 2301191 - RNA, 16 nt, Human
accacagcacagccaa

SEQ ID NO: 2301192 - RNA, 16 nt, Human
accacagcagcugaac

SEQ ID NO: 2301193 - RNA, 21 nt, Human
accacagcagcugaacagcca

SEQ ID NO: 2301194 - RNA, 15 nt, Human
accacagcacagcca

SEQ ID NO: 2301195 - RNA, 19 nt, Human
accacagcaaggcaccugc

SEQ ID NO: 2301196 - RNA, 21 nt, Human
accacagcaaggcaccugcag

SEQ ID NO: 2301197 - RNA, 20 nt, Human
accacucaaauuaaucuuuc

SEQ ID NO: 2301198 - RNA, 20 nt, Human
accacaugccaagcacugug

SEQ ID NO: 2301199 - RNA, 20 nt, Human
accacaucuaagccugaagg

SEQ ID NO: 2301200 - RNA, 17 nt, Human
accacaucuuuaucugu

SEQ ID NO: 2301201 - RNA, 16 nt, Human
accacaucuaagccug

SEQ ID NO: 2301202 - RNA, 23 nt, Human
accacauccacacacgcaggaac

SEQ ID NO: 2301203 - RNA, 20 nt, Human
accacucuaucaaguauuau

SEQ ID NO: 2301204 - RNA, 22 nt, Human
accacauccuccguccagccgc

SEQ ID NO: 2301205 - RNA, 21 nt, Human
accacauccuccguccagccg

SEQ ID NO: 2301206 - RNA, 16 nt, Human
accacaucuugcucug

SEQ ID NO: 2301207 - RNA, 20 nt, Human
accacaucuugcucugcuga

SEQ ID NO: 2301208 - RNA, 21 nt, Human
accacaucuugcucugcugac

SEQ ID NO: 2301209 - RNA, 24 nt, Human
accacaucuugcucugcugacaga

SEQ ID NO: 2301210 - RNA, 13 nt, Human
accacugcagaag

SEQ ID NO: 2301211 - RNA, 19 nt, Human
accacugcagaagacagua

SEQ ID NO: 2301212 - RNA, 14 nt, Human
accacugcagaaga

SEQ ID NO: 2301213 - RNA, 14 nt, Human
accacuucagcuga

SEQ ID NO: 2301214 - RNA, 13 nt, Human
accacuucagcug

SEQ ID NO: 2301215 - RNA, 18 nt, Human
accacuuaaaaaaugucc

SEQ ID NO: 2301216 - RNA, 15 nt, Human
accacuucagcugac

SEQ ID NO: 2301217 - RNA, 20 nt, Human
accagccuggccaacauggu

SEQ ID NO: 2301218 - RNA, 15 nt, Human
accagccuggccaac

SEQ ID NO: 2301219 - RNA, 13 nt, Human
accagccugggca

SEQ ID NO: 2301220 - RNA, 20 nt, Human
accagccugaccaacauggu

SEQ ID NO: 2301221 - RNA, 17 nt, Human
accagccuuucucccag

SEQ ID NO: 2301222 - RNA, 16 nt, Human
accagccuuucuccca

SEQ ID NO: 2301223 - RNA, 14 nt, Human
accagccuguugga

SEQ ID NO: 2301224 - RNA, 23 nt, Human
accagccuguuggacccgcucug

SEQ ID NO: 2301225 - RNA, 14 nt, Human
accagccugggcag

SEQ ID NO: 2301226 - RNA, 20 nt, Human
accagccuggucaacauggu

SEQ ID NO: 2301227 - RNA, 12 nt, Human
accagccuggcc

SEQ ID NO: 2301228 - RNA, 11 nt, Human
accagccuggc

SEQ ID NO: 2301229 - RNA, 20 nt, Human
accagagccccacacggagg

SEQ ID NO: 2301230 - RNA, 17 nt, Human
accagagccccacacgg

SEQ ID NO: 2301231 - RNA, 14 nt, Human
accagagccccaca

SEQ ID NO: 2301232 - RNA, 23 nt, Human
accagagccauggacucuacacu

SEQ ID NO: 2301233 - RNA, 17 nt, Human
accagagccauggacuc

SEQ ID NO: 2301234 - RNA, 14 nt, Human
accagagccaugga

SEQ ID NO: 2301235 - RNA, 13 nt, Human
accagagccaugg

SEQ ID NO: 2301236 - RNA, 16 nt, Human
accagagcagaugcag

SEQ ID NO: 2301237 - RNA, 17 nt, Human
accagagcagaugcaga

SEQ ID NO: 2301238 - RNA, 22 nt, Human
accagagcagaugcagagagcc

SEQ ID NO: 2301239 - RNA, 20 nt, Human
accagagcauuuccaacacc

SEQ ID NO: 2301240 - RNA, 20 nt, Human
accagagauaauaugagaau

SEQ ID NO: 2301241 - RNA, 15 nt, Human
accagagcagaugca

SEQ ID NO: 2301242 - RNA, 12 nt, Human
accagagcagau

SEQ ID NO: 2301243 - RNA, 19 nt, Human
accagagcccaccuuggcu

SEQ ID NO: 2301244 - RNA, 22 nt, Human
accagagcccaccuuggcucaa

SEQ ID NO: 2301245 - RNA, 22 nt, Human
accagacaccuugacagggcac

SEQ ID NO: 2301246 - RNA, 23 nt, Human
accagacaccuugacagggcaca

SEQ ID NO: 2301247 - RNA, 16 nt, Human
accagagaccguccuc

SEQ ID NO: 2301248 - RNA, 18 nt, Human
accagagaccguccucac

SEQ ID NO: 2301249 - RNA, 17 nt, Human
accagacaccuugacag

SEQ ID NO: 2301250 - RNA, 12 nt, Human
accacuuuuguu

SEQ ID NO: 2301251 - RNA, 19 nt, Human
accacuuguguuuugcaag

SEQ ID NO: 2301252 - RNA, 23 nt, Human
accacuuguguuuugcaagccag

SEQ ID NO: 2301253 - RNA, 17 nt, Human
ucaccuccccuccuugc

SEQ ID NO: 2301254 - RNA, 21 nt, Human
ucaccuccggucgugucucug

SEQ ID NO: 2301255 - RNA, 23 nt, Human
ucaccuccggucgugucucuggu

SEQ ID NO: 2301256 - RNA, 15 nt, Human
ucaccuccccuccuu

SEQ ID NO: 2301257 - RNA, 14 nt, Human
ucaccuccccuccu

SEQ ID NO: 2301258 - RNA, 13 nt, Human
ucaccuccccucc

SEQ ID NO: 2301259 - RNA, 16 nt, Human
accaggccgccccagc

SEQ ID NO: 2301260 - RNA, 12 nt, Human
ucaccuccucua

SEQ ID NO: 2301261 - RNA, 22 nt, Human
ucaccuccucuaagguugggca

SEQ ID NO: 2301262 - RNA, 19 nt, Human
accaggccgccccagccuc

SEQ ID NO: 2301263 - RNA, 14 nt, Human
accaggccaccucc

SEQ ID NO: 2301264 - RNA, 17 nt, Human
accaggccaccucccca

SEQ ID NO: 2301265 - RNA, 15 nt, Human
ucaccucccccaucu

SEQ ID NO: 2301266 - RNA, 13 nt, Human
ucaccucccccau

SEQ ID NO: 2301267 - RNA, 19 nt, Human
ucaccugaagacucauucu

SEQ ID NO: 2301268 - RNA, 23 nt, Human
ucaccugagcccggaugcuucuc

SEQ ID NO: 2301269 - RNA, 22 nt, Human
ucaccugagcccggaugcuucu

SEQ ID NO: 2301270 - RNA, 21 nt, Human
ucaccugagcccggaugcuuc

SEQ ID NO: 2301271 - RNA, 22 nt, Human
ucaccugagcaggaccucugaa

SEQ ID NO: 2301272 - RNA, 23 nt, Human
ucaccugaagacucauucuucug

SEQ ID NO: 2301273 - RNA, 19 nt, Human
accaggcaacuugggaacu

SEQ ID NO: 2301274 - RNA, 14 nt, Human
accaggauggcccu

SEQ ID NO: 2301275 - RNA, 23 nt, Human
accaggcacgaacccaccugcug

SEQ ID NO: 2301276 - RNA, 22 nt, Human
accaggcacgaacccaccugcu

SEQ ID NO: 2301277 - RNA, 12 nt, Human
accaggccaccu

SEQ ID NO: 2301278 - RNA, 21 nt, Human
accaggcacgaacccaccugc

SEQ ID NO: 2301279 - RNA, 20 nt, Human
accaggcacgaacccaccug

SEQ ID NO: 2301280 - RNA, 22 nt, Human
accaggagucccugguaauaag

SEQ ID NO: 2301281 - RNA, 17 nt, Human
accaggagucccuggua

SEQ ID NO: 2301282 - RNA, 15 nt, Human
accagcgcccgcugg

SEQ ID NO: 2301283 - RNA, 15 nt, Human
accaggagcugcuca

SEQ ID NO: 2301284 - RNA, 16 nt, Human
accaggagcugcucac

SEQ ID NO: 2301285 - RNA, 18 nt, Human
accaggagggcacuggag

SEQ ID NO: 2301286 - RNA, 14 nt, Human
accaggagcugcuc

SEQ ID NO: 2301287 - RNA, 20 nt, Human
accaggagaaccacuacaug

SEQ ID NO: 2301288 - RNA, 19 nt, Human
accaggagaaccacuacau

SEQ ID NO: 2301289 - RNA, 18 nt, Human
accaggagaaccacuaca

SEQ ID NO: 2301290 - RNA, 14 nt, Human
accaggagaaccac

SEQ ID NO: 2301291 - RNA, 21 nt, Human
accaggacucccuccucaccu

SEQ ID NO: 2301292 - RNA, 18 nt, Human
accaggacucccuccuca

SEQ ID NO: 2301293 - RNA, 17 nt, Human
accaggacucccuccuc

SEQ ID NO: 2301294 - RNA, 22 nt, Human
accagccuuucucccaggccag

SEQ ID NO: 2301295 - RNA, 19 nt, Human
accagccuuucucccaggc

SEQ ID NO: 2301296 - RNA, 23 nt, Human
accagcgaggaggcuccagaggg

SEQ ID NO: 2301297 - RNA, 14 nt, Human
accagcgaagggag

SEQ ID NO: 2301298 - RNA, 13 nt, Human
accagcgcccgcu

SEQ ID NO: 2301299 - RNA, 14 nt, Human
accagcgcccgcug

SEQ ID NO: 2301300 - RNA, 14 nt, Human
accucucccugacc

SEQ ID NO: 2301301 - RNA, 17 nt, Human
accucucccugacccug

SEQ ID NO: 2301302 - RNA, 22 nt, Human
accucucccugacccuguauau

SEQ ID NO: 2301303 - RNA, 23 nt, Human
accucucccugacccuguauaua

SEQ ID NO: 2301304 - RNA, 13 nt, Human
accucucccuugg

SEQ ID NO: 2301305 - RNA, 14 nt, Human
accucucccuugga

SEQ ID NO: 2301306 - RNA, 15 nt, Human
accucucccuuggau

SEQ ID NO: 2301307 - RNA, 18 nt, Human
accucuaauuuauuuugu

SEQ ID NO: 2301308 - RNA, 21 nt, Human
accucuccccuggaacugucu

SEQ ID NO: 2301309 - RNA, 12 nt, Human
accucucccuca

SEQ ID NO: 2301310 - RNA, 22 nt, Human
accucuacuaaaaagaaggaaa

SEQ ID NO: 2301311 - RNA, 23 nt, Human
accucuacuaaaaagaaggaaaa

SEQ ID NO: 2301312 - RNA, 14 nt, Human
accucuccucaugu

SEQ ID NO: 2301313 - RNA, 20 nt, Human
accucuccuuuggccauucc

SEQ ID NO: 2301314 - RNA, 15 nt, Human
accucucccucaaca

SEQ ID NO: 2301315 - RNA, 23 nt, Human
accucucuccuuugcugaggccu

SEQ ID NO: 2301316 - RNA, 19 nt, Human
accucucucacuccuugaa

SEQ ID NO: 2301317 - RNA, 23 nt, Human
accucucccuuggauuguccccg

SEQ ID NO: 2301318 - RNA, 14 nt, Human
accucucucacucc

SEQ ID NO: 2301319 - RNA, 20 nt, Human
accucugaaaacggcccucu

SEQ ID NO: 2301320 - RNA, 14 nt, Human
accucucuuuuuca

SEQ ID NO: 2301321 - RNA, 20 nt, Human
accucugaaacccuggacca

SEQ ID NO: 2301322 - RNA, 22 nt, Human
accucucuuauagaauauuuau

SEQ ID NO: 2301323 - RNA, 23 nt, Human
accucucuuauagaauauuuauu

SEQ ID NO: 2301324 - RNA, 13 nt, Human
accucugauaccu

SEQ ID NO: 2301325 - RNA, 15 nt, Human
accucugauaccuca

SEQ ID NO: 2301326 - RNA, 22 nt, Human
accugaagcuaucguaaaauua

SEQ ID NO: 2301327 - RNA, 12 nt, Human
accucugcacaa

SEQ ID NO: 2301328 - RNA, 16 nt, Human
ucauuguaauguuacu

SEQ ID NO: 2301329 - RNA, 23 nt, Human
ucauuaagguauuauuuuuucca

SEQ ID NO: 2301330 - RNA, 16 nt, Human
accuccuuucucuucu

SEQ ID NO: 2301331 - RNA, 17 nt, Human
accuccuuucucuucuc

SEQ ID NO: 2301332 - RNA, 13 nt, Human
ucauuguaaucac

SEQ ID NO: 2301333 - RNA, 21 nt, Human
ucauuggauucugagagcugu

SEQ ID NO: 2301334 - RNA, 23 nt, Human
ucauugcuuugaagcaguugugu

SEQ ID NO: 2301335 - RNA, 11 nt, Human
ucauuggcuuu

SEQ ID NO: 2301336 - RNA, 14 nt, Human
ucauuggcuuuauc

SEQ ID NO: 2301337 - RNA, 16 nt, Human
ucauuggcuuuauccu

SEQ ID NO: 2301338 - RNA, 17 nt, Human
ucauuggcuuuauccuc

SEQ ID NO: 2301339 - RNA, 17 nt, Human
accucggugccuuccuc

SEQ ID NO: 2301340 - RNA, 18 nt, Human
accucgcuggacucucag

SEQ ID NO: 2301341 - RNA, 16 nt, Human
accucgcuggacucuc

SEQ ID NO: 2301342 - RNA, 14 nt, Human
accucgcuggacuc

SEQ ID NO: 2301343 - RNA, 18 nt, Human
accuccuuucucuucucu

SEQ ID NO: 2301344 - RNA, 20 nt, Human
accuccuuucucuucucugu

SEQ ID NO: 2301345 - RNA, 12 nt, Human
ucauucuccugc

SEQ ID NO: 2301346 - RNA, 15 nt, Human
ucauucguucugugg

SEQ ID NO: 2301347 - RNA, 22 nt, Human
ucauuaagcccucuuccaucau

SEQ ID NO: 2301348 - RNA, 19 nt, Human
ucauugaccugaggcccuu

SEQ ID NO: 2301349 - RNA, 13 nt, Human
ucauucuccugcc

SEQ ID NO: 2301350 - RNA, 14 nt, Human
ucauucuccugccu

SEQ ID NO: 2301351 - RNA, 15 nt, Human
ucauucuccugccug

SEQ ID NO: 2301352 - RNA, 16 nt, Human
ucauucuccugccugu

SEQ ID NO: 2301353 - RNA, 21 nt, Human
ucauucuccuuguguuacuaa

SEQ ID NO: 2301354 - RNA, 21 nt, Human
ucauugacuaucaaacugaag

SEQ ID NO: 2301355 - RNA, 20 nt, Human
ucauugacuaucaaacugaa

SEQ ID NO: 2301356 - RNA, 14 nt, Human
ucauugagaguuuu

SEQ ID NO: 2301357 - RNA, 18 nt, Human
ucauugagaguuuugucu

SEQ ID NO: 2301358 - RNA, 22 nt, Human
ucauugaccugaggcccuucuc

SEQ ID NO: 2301359 - RNA, 16 nt, Human
ucauugauaugaaaaa

SEQ ID NO: 2301360 - RNA, 15 nt, Human
ucauugauaugaaaa

SEQ ID NO: 2301361 - RNA, 13 nt, Human
ucauugauaugaa

SEQ ID NO: 2301362 - RNA, 19 nt, Human
ucauugagaguuuugucuu

SEQ ID NO: 2301363 - RNA, 18 nt, Human
ucauugauaugaaaaaua

SEQ ID NO: 2301364 - RNA, 17 nt, Human
ucauugauaugaaaaau

SEQ ID NO: 2301365 - RNA, 13 nt, Human
ucauugcuuacaa

SEQ ID NO: 2301366 - RNA, 21 nt, Human
ucauugcuuugaagcaguugu

SEQ ID NO: 2301367 - RNA, 22 nt, Human
ucaugacauuccuaaacuaucu

SEQ ID NO: 2301368 - RNA, 19 nt, Human
ucaugacauguuauauauu

SEQ ID NO: 2301369 - RNA, 21 nt, Human
ucaugacauguuauauauuuu

SEQ ID NO: 2301370 - RNA, 14 nt, Human
ucaugacauguuau

SEQ ID NO: 2301371 - RNA, 17 nt, Human
ucaugacauguuauaua

SEQ ID NO: 2301372 - RNA, 19 nt, Human
ucaugacaaagacugagua

SEQ ID NO: 2301373 - RNA, 20 nt, Human
ucaugaauucuuaugcuuau

SEQ ID NO: 2301374 - RNA, 19 nt, Human
ucauccacugugccaugug

SEQ ID NO: 2301375 - RNA, 21 nt, Human
ucauccacugugccaugugcc

SEQ ID NO: 2301376 - RNA, 23 nt, Human
ucauccacugugccaugugccag

SEQ ID NO: 2301377 - RNA, 22 nt, Human
ucaugaauuaguuuuauaugcu

SEQ ID NO: 2301378 - RNA, 17 nt, Human
ucaugacuuuuccaugu

SEQ ID NO: 2301379 - RNA, 18 nt, Human
ucaugacuuuuccaugua

SEQ ID NO: 2301380 - RNA, 16 nt, Human
ucaugagcugagcagg

SEQ ID NO: 2301381 - RNA, 18 nt, Human
ucaugagugaauaaaugu

SEQ ID NO: 2301382 - RNA, 12 nt, Human
ucaugcauuguu

SEQ ID NO: 2301383 - RNA, 18 nt, Human
ucaugcauguccuguaaa

SEQ ID NO: 2301384 - RNA, 15 nt, Human
ucaugcauggaaauu

SEQ ID NO: 2301385 - RNA, 22 nt, Human
ucaugauagaaggcuaugggga

SEQ ID NO: 2301386 - RNA, 14 nt, Human
ucaugcauggaaau

SEQ ID NO: 2301387 - RNA, 13 nt, Human
ucaugcccacccc

SEQ ID NO: 2301388 - RNA, 21 nt, Human
ucaugccaagcauuuaaugua

SEQ ID NO: 2301389 - RNA, 15 nt, Human
ucaugcccacccccu

SEQ ID NO: 2301390 - RNA, 21 nt, Human
ucaugccagcuacuuccuccu

SEQ ID NO: 2301391 - RNA, 23 nt, Human
ucaugccagcuacuuccuccucc

SEQ ID NO: 2301392 - RNA, 22 nt, Human
ucaugccaccauggccagccaa

SEQ ID NO: 2301393 - RNA, 12 nt, Human
ucaugccagcua

SEQ ID NO: 2301394 - RNA, 19 nt, Human
ucaugccaccauggccagc

SEQ ID NO: 2301395 - RNA, 16 nt, Human
ucaugccaagcauuua

SEQ ID NO: 2301396 - RNA, 16 nt, Human
ucaugcccacccccug

SEQ ID NO: 2301397 - RNA, 18 nt, Human
ucaugcccacccccugcc

SEQ ID NO: 2301398 - RNA, 19 nt, Human
ucaugcccacccccugccc

SEQ ID NO: 2301399 - RNA, 20 nt, Human
ucaugcccacccccugcccu

SEQ ID NO: 2301400 - RNA, 21 nt, Human
ucaugcccacccccugcccug

SEQ ID NO: 2301401 - RNA, 22 nt, Human
ucaugcccacccccugcccugc

SEQ ID NO: 2301402 - RNA, 23 nt, Human
ucaugcccacccccugcccugca

SEQ ID NO: 2301403 - RNA, 18 nt, Human
ucaugucaacuucuggcu

SEQ ID NO: 2301404 - RNA, 21 nt, Human
ucaugucaacuucuggcuccu

SEQ ID NO: 2301405 - RNA, 14 nt, Human
ucaugucaggccug

SEQ ID NO: 2301406 - RNA, 16 nt, Human
ucaugucaggccugug

SEQ ID NO: 2301407 - RNA, 17 nt, Human
ucaugucaggccugugu

SEQ ID NO: 2301408 - RNA, 19 nt, Human
ucaugucaggccugugugu

SEQ ID NO: 2301409 - RNA, 17 nt, Human
ucauguccccaaaccug

SEQ ID NO: 2301410 - RNA, 20 nt, Human
ucauguccccaaaccugcaa

SEQ ID NO: 2301411 - RNA, 21 nt, Human
ucauguccccaaaccugcaag

SEQ ID NO: 2301412 - RNA, 15 nt, Human
ucauuaaagcauuua

SEQ ID NO: 2301413 - RNA, 18 nt, Human
ucauuaaaggcuucucuc

SEQ ID NO: 2301414 - RNA, 21 nt, Human
ucauguuuuugaaacagaacc

SEQ ID NO: 2301415 - RNA, 14 nt, Human
ucauuaaaguucua

SEQ ID NO: 2301416 - RNA, 12 nt, Human
ucauuaaaguuc

SEQ ID NO: 2301417 - RNA, 13 nt, Human
ucauuaaaguucu

SEQ ID NO: 2301418 - RNA, 21 nt, Human
ucauuaaaauaaauaaaugca

SEQ ID NO: 2301419 - RNA, 14 nt, Human
ucauguuuugugac

SEQ ID NO: 2301420 - RNA, 15 nt, Human
ucauguuuugugacu

SEQ ID NO: 2301421 - RNA, 16 nt, Human
ucauguuuugugacua

SEQ ID NO: 2301422 - RNA, 17 nt, Human
ucauguuuugugacuau

SEQ ID NO: 2301423 - RNA, 23 nt, Human
ucauuccuugagaaaaacaauga

SEQ ID NO: 2301424 - RNA, 18 nt, Human
ucauuaagcccucuucca

SEQ ID NO: 2301425 - RNA, 19 nt, Human
ucauuaagcccucuuccau

SEQ ID NO: 2301426 - RNA, 15 nt, Human
ucauuaaauggggcu

SEQ ID NO: 2301427 - RNA, 17 nt, Human
ucauguucuuaauucuu

SEQ ID NO: 2301428 - RNA, 11 nt, Human
ucauguucuua

SEQ ID NO: 2301429 - RNA, 22 nt, Human
ucauguugcacacccacucagc

SEQ ID NO: 2301430 - RNA, 21 nt, Human
ucauguuccuucaagaucaug

SEQ ID NO: 2301431 - RNA, 17 nt, Human
ucauguuggccaggcug

SEQ ID NO: 2301432 - RNA, 13 nt, Human
ucauguuggucaa

SEQ ID NO: 2301433 - RNA, 18 nt, Human
ucauguuuuaacaaaaac

SEQ ID NO: 2301434 - RNA, 16 nt, Human
ucauguuuuaacaaaa

SEQ ID NO: 2301435 - RNA, 22 nt, Human
ucauguuuuccauuguuugaaa

SEQ ID NO: 2301436 - RNA, 14 nt, Human
ucauguuuaagaaa

SEQ ID NO: 2301437 - RNA, 16 nt, Human
ucauguuuaagaaauu

SEQ ID NO: 2301438 - RNA, 13 nt, Human
ucaugucuggcua

SEQ ID NO: 2301439 - RNA, 14 nt, Human
ucaugugaaaucau

SEQ ID NO: 2301440 - RNA, 12 nt, Human
ucaugugugucc

SEQ ID NO: 2301441 - RNA, 14 nt, Human
ucaugugugcucuu

SEQ ID NO: 2301442 - RNA, 20 nt, Human
ucaugugugcaacaggguau

SEQ ID NO: 2301443 - RNA, 16 nt, Human
ucaugugugcucuucu

SEQ ID NO: 2301444 - RNA, 17 nt, Human
ucauguguuugaacuuc

SEQ ID NO: 2301445 - RNA, 23 nt, Human
ucauguguguccacgacugucuc

SEQ ID NO: 2301446 - RNA, 21 nt, Human
ucauguguguccacgacuguc

SEQ ID NO: 2301447 - RNA, 16 nt, Human
ucauguguguccacga

SEQ ID NO: 2301448 - RNA, 13 nt, Human
ucauguuccucaa

SEQ ID NO: 2301449 - RNA, 14 nt, Human
ucauguuccuucaa

SEQ ID NO: 2301450 - RNA, 13 nt, Human
ucauguuccaaau

SEQ ID NO: 2301451 - RNA, 12 nt, Human
ucauauugaaua

SEQ ID NO: 2301452 - RNA, 16 nt, Human
ucauauuuacuucuua

SEQ ID NO: 2301453 - RNA, 22 nt, Human
ucauauuuacuucuuauacauu

SEQ ID NO: 2301454 - RNA, 21 nt, Human
ucauauuuacuucuuauacau

SEQ ID NO: 2301455 - RNA, 20 nt, Human
ucauauuuacuucuuauaca

SEQ ID NO: 2301456 - RNA, 23 nt, Human
accgagaguagccgagagccugc

SEQ ID NO: 2301457 - RNA, 15 nt, Human
accgagcaaagauca

SEQ ID NO: 2301458 - RNA, 17 nt, Human
accgagaguagccgaga

SEQ ID NO: 2301459 - RNA, 18 nt, Human
accgagucucuucuccac

SEQ ID NO: 2301460 - RNA, 17 nt, Human
accgacgcgucuccugu

SEQ ID NO: 2301461 - RNA, 18 nt, Human
accgacgcgucuccuguu

SEQ ID NO: 2301462 - RNA, 18 nt, Human
accgacguugccaucaaa

SEQ ID NO: 2301463 - RNA, 23 nt, Human
accgaccugguuuuuaaauagag

SEQ ID NO: 2301464 - RNA, 16 nt, Human
accgacgcgucuccug

SEQ ID NO: 2301465 - RNA, 20 nt, Human
accgaaguggacuggccccu

SEQ ID NO: 2301466 - RNA, 21 nt, Human
accgaaguggacuggccccug

SEQ ID NO: 2301467 - RNA, 23 nt, Human
accgaaguggacuggccccuggg

SEQ ID NO: 2301468 - RNA, 12 nt, Human
acccuuuggggg

SEQ ID NO: 2301469 - RNA, 12 nt, Human
acccuuugguuu

SEQ ID NO: 2301470 - RNA, 23 nt, Human
acccuuuggggggggcccgccug

SEQ ID NO: 2301471 - RNA, 22 nt, Human
acccuuugcugugaggcugucc

SEQ ID NO: 2301472 - RNA, 23 nt, Human
acccuuugcugugaggcuguccu

SEQ ID NO: 2301473 - RNA, 12 nt, Human
acccuuuuccag

SEQ ID NO: 2301474 - RNA, 21 nt, Human
acccuuugguuuuuuucuucu

SEQ ID NO: 2301475 - RNA, 23 nt, Human
acccuuugguuuuuuucuucugu

SEQ ID NO: 2301476 - RNA, 14 nt, Human
acccuuuuggcccc

SEQ ID NO: 2301477 - RNA, 10 nt, Human
acccuuuucu

SEQ ID NO: 2301478 - RNA, 23 nt, Human
acccuuuuggcccccgagcuggg

SEQ ID NO: 2301479 - RNA, 13 nt, Human
ucauauguugcuc

SEQ ID NO: 2301480 - RNA, 14 nt, Human
ucauauguugcuca

SEQ ID NO: 2301481 - RNA, 15 nt, Human
ucauauguugcucag

SEQ ID NO: 2301482 - RNA, 20 nt, Human
ucauauguugcucagucucc

SEQ ID NO: 2301483 - RNA, 18 nt, Human
ucauauguugcucagucu

SEQ ID NO: 2301484 - RNA, 19 nt, Human
ucauauguugcucagucuc

SEQ ID NO: 2301485 - RNA, 17 nt, Human
ucauauuccugcagccu

SEQ ID NO: 2301486 - RNA, 16 nt, Human
ucauauucugucugga

SEQ ID NO: 2301487 - RNA, 12 nt, Human
ucauauuauaca

SEQ ID NO: 2301488 - RNA, 20 nt, Human
accgcugccuaaguggcugc

SEQ ID NO: 2301489 - RNA, 19 nt, Human
accgcugccuaaguggcug

SEQ ID NO: 2301490 - RNA, 13 nt, Human
accgcugaauaug

SEQ ID NO: 2301491 - RNA, 17 nt, Human
accgcugauucucaggg

SEQ ID NO: 2301492 - RNA, 22 nt, Human
accgcuuccggcuccugugcuu

SEQ ID NO: 2301493 - RNA, 21 nt, Human
accgcugccuaaguggcugcu

SEQ ID NO: 2301494 - RNA, 16 nt, Human
accgcuuccggcuccu

SEQ ID NO: 2301495 - RNA, 23 nt, Human
accggagcuuucaaagaaggaau

SEQ ID NO: 2301496 - RNA, 16 nt, Human
accggacuuuucugca

SEQ ID NO: 2301497 - RNA, 15 nt, Human
accggacuuuucugc

SEQ ID NO: 2301498 - RNA, 18 nt, Human
accgugggcagggagcgg

SEQ ID NO: 2301499 - RNA, 16 nt, Human
accgugggcagggagc

SEQ ID NO: 2301500 - RNA, 21 nt, Human
accgccgacuuuguacccccc

SEQ ID NO: 2301501 - RNA, 16 nt, Human
accgccuccuacagcc

SEQ ID NO: 2301502 - RNA, 20 nt, Human
accgcuccccagcccagggu

SEQ ID NO: 2301503 - RNA, 19 nt, Human
accgcuccccagcccaggg

SEQ ID NO: 2301504 - RNA, 18 nt, Human
accgcuccccagcccagg

SEQ ID NO: 2301505 - RNA, 17 nt, Human
accgcuccccagcccag

SEQ ID NO: 2301506 - RNA, 15 nt, Human
accgcuccccagccc

SEQ ID NO: 2301507 - RNA, 12 nt, Human
accgccuucucu

SEQ ID NO: 2301508 - RNA, 11 nt, Human
accgcccccuc

SEQ ID NO: 2301509 - RNA, 12 nt, Human
accgcccccucc

SEQ ID NO: 2301510 - RNA, 14 nt, Human
accgcccccuccuc

SEQ ID NO: 2301511 - RNA, 19 nt, Human
accgcccccuccucuagcu

SEQ ID NO: 2301512 - RNA, 18 nt, Human
accgccgacuuuguaccc

SEQ ID NO: 2301513 - RNA, 23 nt, Human
accgaugcuccagccaaccccug

SEQ ID NO: 2301514 - RNA, 22 nt, Human
accgauucaucucucagaaggg

SEQ ID NO: 2301515 - RNA, 15 nt, Human
accgaugcuccagcc

SEQ ID NO: 2301516 - RNA, 13 nt, Human
accgaugcuccag

SEQ ID NO: 2301517 - RNA, 21 nt, Human
accgagugaaccuaccuucau

SEQ ID NO: 2301518 - RNA, 20 nt, Human
accgcagacaggaccaggga

SEQ ID NO: 2301519 - RNA, 20 nt, Human
accgagucucuucuccacug

SEQ ID NO: 2301520 - RNA, 21 nt, Human
accgagucucuucuccacugg

SEQ ID NO: 2301521 - RNA, 24 nt, Human
accgagucucuucuccacuggaug

SEQ ID NO: 2301522 - RNA, 17 nt, Human
accgagcaaagaucaaa

SEQ ID NO: 2301523 - RNA, 19 nt, Human
accgagcaaagaucaaaau

SEQ ID NO: 2301524 - RNA, 23 nt, Human
accgagccucugucacugcaggc

SEQ ID NO: 2301525 - RNA, 14 nt, Human
accgagugaaccua

SEQ ID NO: 2301526 - RNA, 19 nt, Human
accgcaggaagcugcuccg

SEQ ID NO: 2301527 - RNA, 16 nt, Human
accgcaggaagcugcu

SEQ ID NO: 2301528 - RNA, 21 nt, Human
accgcagucgucgcacagucu

SEQ ID NO: 2301529 - RNA, 22 nt, Human
accgcagucgucgcacagucuc

SEQ ID NO: 2301530 - RNA, 23 nt, Human
accgcagucgucgcacagucucu

SEQ ID NO: 2301531 - RNA, 14 nt, Human
accgcaugcccccu

SEQ ID NO: 2301532 - RNA, 22 nt, Human
accgcaugcccccucgugccag

SEQ ID NO: 2301533 - RNA, 21 nt, Human
accgccacacacacaggagca

SEQ ID NO: 2301534 - RNA, 20 nt, Human
accgccagauggggccucug

SEQ ID NO: 2301535 - RNA, 17 nt, Human
accgccacauggcuucc

SEQ ID NO: 2301536 - RNA, 17 nt, Human
accgccagauggggccu

SEQ ID NO: 2301537 - RNA, 14 nt, Human
accgcaggaagcug

SEQ ID NO: 2301538 - RNA, 13 nt, Human
accgcaggaagcu

SEQ ID NO: 2301539 - RNA, 12 nt, Human
accgcaggaagc

SEQ ID NO: 2301540 - RNA, 17 nt, Human
accgccaaggcuggggg

SEQ ID NO: 2301541 - RNA, 17 nt, Human
accuauaugauuuauag

SEQ ID NO: 2301542 - RNA, 15 nt, Human
accuaucucguggga

SEQ ID NO: 2301543 - RNA, 17 nt, Human
accuaucucgugggaga

SEQ ID NO: 2301544 - RNA, 18 nt, Human
accuaucucgugggagag

SEQ ID NO: 2301545 - RNA, 22 nt, Human
accuauagucccagcuacucag

SEQ ID NO: 2301546 - RNA, 22 nt, Human
accuauauaauaaagcuacuga

SEQ ID NO: 2301547 - RNA, 13 nt, Human
accuauaugauuu

SEQ ID NO: 2301548 - RNA, 16 nt, Human
accuauagucccagcu

SEQ ID NO: 2301549 - RNA, 15 nt, Human
accuauagucccagc

SEQ ID NO: 2301550 - RNA, 22 nt, Human
accuaugguauaaugguugacu

SEQ ID NO: 2301551 - RNA, 19 nt, Human
accuaugauauuuucugug

SEQ ID NO: 2301552 - RNA, 15 nt, Human
accuaugucauuuca

SEQ ID NO: 2301553 - RNA, 12 nt, Human
accuaugucauu

SEQ ID NO: 2301554 - RNA, 14 nt, Human
accucaagcugcau

SEQ ID NO: 2301555 - RNA, 18 nt, Human
accuaugucauuucauuu

SEQ ID NO: 2301556 - RNA, 16 nt, Human
accuaugucauuucau

SEQ ID NO: 2301557 - RNA, 23 nt, Human
accuagcagcaccguucugugca

SEQ ID NO: 2301558 - RNA, 16 nt, Human
accuagcgucaguauu

SEQ ID NO: 2301559 - RNA, 13 nt, Human
accuagccuuaga

SEQ ID NO: 2301560 - RNA, 22 nt, Human
accuagcagcaccguucugugc

SEQ ID NO: 2301561 - RNA, 21 nt, Human
accuagcagcaccguucugug

SEQ ID NO: 2301562 - RNA, 14 nt, Human
accuagcagcaccg

SEQ ID NO: 2301563 - RNA, 20 nt, Human
accuaaguuucaguugauuu

SEQ ID NO: 2301564 - RNA, 18 nt, Human
accuaaguccuuuaugug

SEQ ID NO: 2301565 - RNA, 23 nt, Human
accuaagggacauguuuugauaa

SEQ ID NO: 2301566 - RNA, 21 nt, Human
accuaacucaccuaacucaua

SEQ ID NO: 2301567 - RNA, 15 nt, Human
accuaagggacaugu

SEQ ID NO: 2301568 - RNA, 16 nt, Human
accuaagggacauguu

SEQ ID NO: 2301569 - RNA, 16 nt, Human
accuaaucaggcugag

SEQ ID NO: 2301570 - RNA, 17 nt, Human
accuaaucaggcugagg

SEQ ID NO: 2301571 - RNA, 15 nt, Human
accuaauccaggcag

SEQ ID NO: 2301572 - RNA, 11 nt, Human
accuaauccaa

SEQ ID NO: 2301573 - RNA, 20 nt, Human
accuaauccaggcagaucca

SEQ ID NO: 2301574 - RNA, 18 nt, Human
accuaaccccuuuccugc

SEQ ID NO: 2301575 - RNA, 14 nt, Human
accguuucuucccu

SEQ ID NO: 2301576 - RNA, 13 nt, Human
accuaaaaaagau

SEQ ID NO: 2301577 - RNA, 17 nt, Human
accuaaccccuuuccug

SEQ ID NO: 2301578 - RNA, 19 nt, Human
accuaacgcccuauuuuug

SEQ ID NO: 2301579 - RNA, 18 nt, Human
accguuggggauugggga

SEQ ID NO: 2301580 - RNA, 13 nt, Human
accguuucuuccc

SEQ ID NO: 2301581 - RNA, 14 nt, Human
accguucugugcac

SEQ ID NO: 2301582 - RNA, 21 nt, Human
accguguugguuuugacugga

SEQ ID NO: 2301583 - RNA, 14 nt, Human
accguguaaaccaa

SEQ ID NO: 2301584 - RNA, 16 nt, Human
accgugggcucccuga

SEQ ID NO: 2301585 - RNA, 14 nt, Human
accgugggcucccu

SEQ ID NO: 2301586 - RNA, 15 nt, Human
accgugggcggggcc

SEQ ID NO: 2301587 - RNA, 17 nt, Human
accgugggcggggccuu

SEQ ID NO: 2301588 - RNA, 19 nt, Human
accgugggcggggccuugc

SEQ ID NO: 2301589 - RNA, 20 nt, Human
accgugggcggggccuugcg

SEQ ID NO: 2301590 - RNA, 13 nt, Human
accuccccaggcc

SEQ ID NO: 2301591 - RNA, 14 nt, Human
accuccccaggccg

SEQ ID NO: 2301592 - RNA, 19 nt, Human
accuccccaggccguggcu

SEQ ID NO: 2301593 - RNA, 20 nt, Human
accuccccaggccguggcug

SEQ ID NO: 2301594 - RNA, 13 nt, Human
accuccccagccu

SEQ ID NO: 2301595 - RNA, 23 nt, Human
accuccccagccccuagcccagg

SEQ ID NO: 2301596 - RNA, 20 nt, Human
accuccgccucuuggguuca

SEQ ID NO: 2301597 - RNA, 18 nt, Human
accuccccccacugcagg

SEQ ID NO: 2301598 - RNA, 17 nt, Human
accuccccccacugcag

SEQ ID NO: 2301599 - RNA, 16 nt, Human
accuccccccacugca

SEQ ID NO: 2301600 - RNA, 15 nt, Human
accuccccccacugc

SEQ ID NO: 2301601 - RNA, 14 nt, Human
accuccccccacug

SEQ ID NO: 2301602 - RNA, 13 nt, Human
accuccccccacu

SEQ ID NO: 2301603 - RNA, 23 nt, Human
accuccuacgucaaacaugaagu

SEQ ID NO: 2301604 - RNA, 19 nt, Human
accucccccucccccuucu

SEQ ID NO: 2301605 - RNA, 22 nt, Human
accuccccccacugcaggcccc

SEQ ID NO: 2301606 - RNA, 20 nt, Human
accucccccucccccuucuc

SEQ ID NO: 2301607 - RNA, 16 nt, Human
accuccuccacaccag

SEQ ID NO: 2301608 - RNA, 14 nt, Human
accuccucagggau

SEQ ID NO: 2301609 - RNA, 23 nt, Human
accuccucagggauggccguugg

SEQ ID NO: 2301610 - RNA, 13 nt, Human
accuccucaggga

SEQ ID NO: 2301611 - RNA, 19 nt, Human
accucagaguccaggcccc

SEQ ID NO: 2301612 - RNA, 17 nt, Human
accucagaguccaggcc

SEQ ID NO: 2301613 - RNA, 20 nt, Human
accucagaguccaggcccca

SEQ ID NO: 2301614 - RNA, 22 nt, Human
accucagaggcuguucuugggg

SEQ ID NO: 2301615 - RNA, 18 nt, Human
accucagaguauggagcu

SEQ ID NO: 2301616 - RNA, 20 nt, Human
accucacugaaaacaucugg

SEQ ID NO: 2301617 - RNA, 22 nt, Human
accucagacuuaccaggaagca

SEQ ID NO: 2301618 - RNA, 10 nt, Human
accucagccu

SEQ ID NO: 2301619 - RNA, 23 nt, Human
accucagccaugaggaguugcug

SEQ ID NO: 2301620 - RNA, 22 nt, Human
accucagccaugaggaguugcu

SEQ ID NO: 2301621 - RNA, 14 nt, Human
accucagccaugag

SEQ ID NO: 2301622 - RNA, 15 nt, Human
accucagccuagacc

SEQ ID NO: 2301623 - RNA, 13 nt, Human
accucagccuaga

SEQ ID NO: 2301624 - RNA, 16 nt, Human
accuccccagccccua

SEQ ID NO: 2301625 - RNA, 19 nt, Human
accuccccagccccuagcc

SEQ ID NO: 2301626 - RNA, 21 nt, Human
accucaagggggacugucuuu

SEQ ID NO: 2301627 - RNA, 20 nt, Human
accucaagggggacugucuu

SEQ ID NO: 2301628 - RNA, 15 nt, Human
accucaagggggacu

SEQ ID NO: 2301629 - RNA, 10 nt, Human
accucaaggg

SEQ ID NO: 2301630 - RNA, 16 nt, Human
accucaagcugcaucu

SEQ ID NO: 2301631 - RNA, 19 nt, Human
accucaaguuuuuguuuug

SEQ ID NO: 2301632 - RNA, 23 nt, Human
accucacugggguccuggggccu

SEQ ID NO: 2301633 - RNA, 21 nt, Human
accucacugggguccuggggc

SEQ ID NO: 2301634 - RNA, 12 nt, Human
accucaccccac

SEQ ID NO: 2301635 - RNA, 15 nt, Human
accucaccccacuua

SEQ ID NO: 2301636 - RNA, 11 nt, Human
accucacccca

SEQ ID NO: 2301637 - RNA, 18 nt, Human
accucacagaaaugagau

SEQ ID NO: 2301638 - RNA, 23 nt, Human
accuuaggaauaaucuccuguua

SEQ ID NO: 2301639 - RNA, 15 nt, Human
accuuaggcagggaa

SEQ ID NO: 2301640 - RNA, 13 nt, Human
accuuaggcaggg

SEQ ID NO: 2301641 - RNA, 16 nt, Human
accuuaggcagggaag

SEQ ID NO: 2301642 - RNA, 13 nt, Human
accuuaggccuuc

SEQ ID NO: 2301643 - RNA, 22 nt, Human
accuuagcuggcauuacagcug

SEQ ID NO: 2301644 - RNA, 21 nt, Human
accuuagcuggcauuacagcu

SEQ ID NO: 2301645 - RNA, 18 nt, Human
accuuagauuagcucugg

SEQ ID NO: 2301646 - RNA, 19 nt, Human
accuuagauuagcucugga

SEQ ID NO: 2301647 - RNA, 17 nt, Human
accuuagauuagcucug

SEQ ID NO: 2301648 - RNA, 14 nt, Human
accuuagccugccc

SEQ ID NO: 2301649 - RNA, 17 nt, Human
accuuagacagucccug

SEQ ID NO: 2301650 - RNA, 17 nt, Human
accuuaggccuuccucu

SEQ ID NO: 2301651 - RNA, 16 nt, Human
accuuaggccuuccuc

SEQ ID NO: 2301652 - RNA, 15 nt, Human
accuuaggccuuccu

SEQ ID NO: 2301653 - RNA, 14 nt, Human
accuuaggccuucc

SEQ ID NO: 2301654 - RNA, 20 nt, Human
accuuaggccuuccucucuc

SEQ ID NO: 2301655 - RNA, 18 nt, Human
accuuaggccuuccucuc

SEQ ID NO: 2301656 - RNA, 21 nt, Human
accuuaggccuuccucucucc

SEQ ID NO: 2301657 - RNA, 14 nt, Human
accuuaguggcuuu

SEQ ID NO: 2301658 - RNA, 14 nt, Human
accuuaguguuucu

SEQ ID NO: 2301659 - RNA, 15 nt, Human
accuuaguguuucug

SEQ ID NO: 2301660 - RNA, 19 nt, Human
accuuaguguuucugugca

SEQ ID NO: 2301661 - RNA, 20 nt, Human
accuuaguguuucugugcau

SEQ ID NO: 2301662 - RNA, 21 nt, Human
accuuaguguuucugugcaug

SEQ ID NO: 2301663 - RNA, 21 nt, Human
uccaccaggaaccucuucaga

SEQ ID NO: 2301664 - RNA, 19 nt, Human
uccaccaggaaccucuuca

SEQ ID NO: 2301665 - RNA, 15 nt, Human
uccaccaucaagcca

SEQ ID NO: 2301666 - RNA, 22 nt, Human
accuggucacaggacucugccu

SEQ ID NO: 2301667 - RNA, 23 nt, Human
accuggucacaggacucugccuc

SEQ ID NO: 2301668 - RNA, 22 nt, Human
accugguuccggaauccugucc

SEQ ID NO: 2301669 - RNA, 15 nt, Human
accugguggccucug

SEQ ID NO: 2301670 - RNA, 22 nt, Human
accuggugcuggauauuuucaa

SEQ ID NO: 2301671 - RNA, 21 nt, Human
accuuaaguaagcaacagcau

SEQ ID NO: 2301672 - RNA, 11 nt, Human
accuggugcug

SEQ ID NO: 2301673 - RNA, 10 nt, Human
accuggugcu

SEQ ID NO: 2301674 - RNA, 14 nt, Human
accuggucucuccu

SEQ ID NO: 2301675 - RNA, 14 nt, Human
accuggugcuggau

SEQ ID NO: 2301676 - RNA, 13 nt, Human
accuggugcugga

SEQ ID NO: 2301677 - RNA, 16 nt, Human
accuggugcugccucu

SEQ ID NO: 2301678 - RNA, 21 nt, Human
accuuacuguggaggaaggau

SEQ ID NO: 2301679 - RNA, 19 nt, Human
accuuaccaacuuucugua

SEQ ID NO: 2301680 - RNA, 15 nt, Human
accuuacuguggagg

SEQ ID NO: 2301681 - RNA, 20 nt, Human
accuuaccaacuuucuguaa

SEQ ID NO: 2301682 - RNA, 16 nt, Human
accuuaccaacuuucu

SEQ ID NO: 2301683 - RNA, 17 nt, Human
accuuaccaacuuucug

SEQ ID NO: 2301684 - RNA, 18 nt, Human
accuuaccaacuuucugu

SEQ ID NO: 2301685 - RNA, 15 nt, Human
accuuaccaacuuuc

SEQ ID NO: 2301686 - RNA, 22 nt, Human
accuuaaguaagcaacagcaua

SEQ ID NO: 2301687 - RNA, 12 nt, Human
accuucuguggc

SEQ ID NO: 2301688 - RNA, 13 nt, Human
accuucuguaguu

SEQ ID NO: 2301689 - RNA, 13 nt, Human
accuucuccuuca

SEQ ID NO: 2301690 - RNA, 13 nt, Human
accuucuguggcu

SEQ ID NO: 2301691 - RNA, 15 nt, Human
accuucuguggcuca

SEQ ID NO: 2301692 - RNA, 20 nt, Human
accuucuucagccaccucuc

SEQ ID NO: 2301693 - RNA, 19 nt, Human
accuucuucagccaccucu

SEQ ID NO: 2301694 - RNA, 16 nt, Human
accuucuguggcucac

SEQ ID NO: 2301695 - RNA, 15 nt, Human
accuugacagggcac

SEQ ID NO: 2301696 - RNA, 14 nt, Human
accuugacagggca

SEQ ID NO: 2301697 - RNA, 15 nt, Human
accuugaaugaugcc

SEQ ID NO: 2301698 - RNA, 19 nt, Human
accuuccauggcucuuuuu

SEQ ID NO: 2301699 - RNA, 17 nt, Human
accuuccagcuccugua

SEQ ID NO: 2301700 - RNA, 14 nt, Human
accuucccaaacgc

SEQ ID NO: 2301701 - RNA, 13 nt, Human
accuuccagcucc

SEQ ID NO: 2301702 - RNA, 14 nt, Human
accuuccagcuccu

SEQ ID NO: 2301703 - RNA, 11 nt, Human
accuuaucugu

SEQ ID NO: 2301704 - RNA, 22 nt, Human
accuuaguguuucugugcaugg

SEQ ID NO: 2301705 - RNA, 13 nt, Human
accuuaucugugc

SEQ ID NO: 2301706 - RNA, 17 nt, Human
accuuccaagagccuga

SEQ ID NO: 2301707 - RNA, 11 nt, Human
accuucccagc

SEQ ID NO: 2301708 - RNA, 17 nt, Human
accuuccagucaggaug

SEQ ID NO: 2301709 - RNA, 22 nt, Human
accuucccaaacgccuccccug

SEQ ID NO: 2301710 - RNA, 21 nt, Human
accuucccaaacgccuccccu

SEQ ID NO: 2301711 - RNA, 19 nt, Human
accuucccaaacgccuccc

SEQ ID NO: 2301712 - RNA, 14 nt, Human
accuucuccaaaug

SEQ ID NO: 2301713 - RNA, 12 nt, Human
accuucccagcu

SEQ ID NO: 2301714 - RNA, 17 nt, Human
accuucuccccauucug

SEQ ID NO: 2301715 - RNA, 23 nt, Human
accuucucccucauuucaggagc

SEQ ID NO: 2301716 - RNA, 12 nt, Human
accuucuccuuc

SEQ ID NO: 2301717 - RNA, 17 nt, Human
uccacguucaccccucc

SEQ ID NO: 2301718 - RNA, 19 nt, Human
uccacguucugcucaucau

SEQ ID NO: 2301719 - RNA, 18 nt, Human
uccacggucuguucuuga

SEQ ID NO: 2301720 - RNA, 16 nt, Human
uccacgucccccuggg

SEQ ID NO: 2301721 - RNA, 17 nt, Human
uccacgucccccugggg

SEQ ID NO: 2301722 - RNA, 18 nt, Human
uccacgucccccuggggc

SEQ ID NO: 2301723 - RNA, 16 nt, Human
uccacggucuguucuu

SEQ ID NO: 2301724 - RNA, 13 nt, Human
uccacuacugcua

SEQ ID NO: 2301725 - RNA, 15 nt, Human
uccacuagugcaaau

SEQ ID NO: 2301726 - RNA, 17 nt, Human
uccacuagugcaaauca

SEQ ID NO: 2301727 - RNA, 16 nt, Human
uccacuacaccuggcu

SEQ ID NO: 2301728 - RNA, 17 nt, Human
uccacuacaccuggcug

SEQ ID NO: 2301729 - RNA, 18 nt, Human
uccacuacaccuggcuga

SEQ ID NO: 2301730 - RNA, 21 nt, Human
uccacguucugcucaucauuc

SEQ ID NO: 2301731 - RNA, 20 nt, Human
uccacguucugcucaucauu

SEQ ID NO: 2301732 - RNA, 11 nt, Human
uccacuaaccc

SEQ ID NO: 2301733 - RNA, 16 nt, Human
uccacuaaccccgggc

SEQ ID NO: 2301734 - RNA, 19 nt, Human
uccacuaaccccgggcggg

SEQ ID NO: 2301735 - RNA, 15 nt, Human
uccacuacaccuggc

SEQ ID NO: 2301736 - RNA, 11 nt, Human
accuuugucac

SEQ ID NO: 2301737 - RNA, 23 nt, Human
accuuuguauucucuccuguacc

SEQ ID NO: 2301738 - RNA, 19 nt, Human
accuuuguauucucuccug

SEQ ID NO: 2301739 - RNA, 15 nt, Human
accuuuguauucucu

SEQ ID NO: 2301740 - RNA, 22 nt, Human
uccagaaguuugagaucagccu

SEQ ID NO: 2301741 - RNA, 23 nt, Human
uccagaagggguuuggucuggga

SEQ ID NO: 2301742 - RNA, 15 nt, Human
uccagaagugugauu

SEQ ID NO: 2301743 - RNA, 22 nt, Human
uccagaauaaaacgcaaagggc

SEQ ID NO: 2301744 - RNA, 18 nt, Human
uccagaaucuaaagccag

SEQ ID NO: 2301745 - RNA, 19 nt, Human
uccagaaucuaaagccagu

SEQ ID NO: 2301746 - RNA, 12 nt, Human
uccagaauaucu

SEQ ID NO: 2301747 - RNA, 14 nt, Human
uccagaauaucugg

SEQ ID NO: 2301748 - RNA, 23 nt, Human
uccagaauaucugggauucuacu

SEQ ID NO: 2301749 - RNA, 14 nt, Human
uccagaaucuaaag

SEQ ID NO: 2301750 - RNA, 16 nt, Human
uccagaaugcuguaca

SEQ ID NO: 2301751 - RNA, 15 nt, Human
uccagaaugcuguac

SEQ ID NO: 2301752 - RNA, 13 nt, Human
uccagaaugcugu

SEQ ID NO: 2301753 - RNA, 24 nt, Human
uccacucugcuucucugacuucug

SEQ ID NO: 2301754 - RNA, 21 nt, Human
uccacucugcuucucugacuu

SEQ ID NO: 2301755 - RNA, 23 nt, Human
uccacucugcuucucugacuucu

SEQ ID NO: 2301756 - RNA, 13 nt, Human
uccacugagcucc

SEQ ID NO: 2301757 - RNA, 14 nt, Human
uccacugagcucca

SEQ ID NO: 2301758 - RNA, 19 nt, Human
uccacucuccuugcuaccc

SEQ ID NO: 2301759 - RNA, 12 nt, Human
uccacucugcuu

SEQ ID NO: 2301760 - RNA, 22 nt, Human
uccacucucccccacccccucc

SEQ ID NO: 2301761 - RNA, 18 nt, Human
uccacuagugcaaaucau

SEQ ID NO: 2301762 - RNA, 17 nt, Human
uccacucuccuugcuac

SEQ ID NO: 2301763 - RNA, 14 nt, Human
uccacucugcuucu

SEQ ID NO: 2301764 - RNA, 15 nt, Human
uccacucugcuucuc

SEQ ID NO: 2301765 - RNA, 19 nt, Human
uccacucugcuucucugac

SEQ ID NO: 2301766 - RNA, 20 nt, Human
uccacucugcuucucugacu

SEQ ID NO: 2301767 - RNA, 23 nt, Human
uccagccugggcagccaggcugc

SEQ ID NO: 2301768 - RNA, 22 nt, Human
uccagccugggcagccaggcug

SEQ ID NO: 2301769 - RNA, 19 nt, Human
uccagccugggcagccagg

SEQ ID NO: 2301770 - RNA, 20 nt, Human
uccagccugggcaacagagc

SEQ ID NO: 2301771 - RNA, 13 nt, Human
uccagccugggca

SEQ ID NO: 2301772 - RNA, 12 nt, Human
uccagccugggc

SEQ ID NO: 2301773 - RNA, 13 nt, Human
uccagccugagca

SEQ ID NO: 2301774 - RNA, 21 nt, Human
uccagccugagcgacagugag

SEQ ID NO: 2301775 - RNA, 11 nt, Human
uccagccugcc

SEQ ID NO: 2301776 - RNA, 23 nt, Human
uccagaccccuggcuuuucacug

SEQ ID NO: 2301777 - RNA, 17 nt, Human
uccagccccuucucaga

SEQ ID NO: 2301778 - RNA, 18 nt, Human
uccagccccuucucagaa

SEQ ID NO: 2301779 - RNA, 22 nt, Human
uccagccccuggaugcagccuc

SEQ ID NO: 2301780 - RNA, 20 nt, Human
uccagccugagcgacaguga

SEQ ID NO: 2301781 - RNA, 22 nt, Human
uccagccccuucucagaaucua

SEQ ID NO: 2301782 - RNA, 21 nt, Human
uccagccccuucucagaaucu

SEQ ID NO: 2301783 - RNA, 12 nt, Human
uccagccucugu

SEQ ID NO: 2301784 - RNA, 16 nt, Human
uccagccucuguuccc

SEQ ID NO: 2301785 - RNA, 21 nt, Human
uccagccucuguuccccuagu

SEQ ID NO: 2301786 - RNA, 15 nt, Human
uccagaccccuggcu

SEQ ID NO: 2301787 - RNA, 16 nt, Human
uccagaccccuggcuu

SEQ ID NO: 2301788 - RNA, 17 nt, Human
uccagaccccuggcuuu

SEQ ID NO: 2301789 - RNA, 18 nt, Human
uccagaccccuggcuuuu

SEQ ID NO: 2301790 - RNA, 15 nt, Human
uccagccccuggaug

SEQ ID NO: 2301791 - RNA, 14 nt, Human
uccagccccuggau

SEQ ID NO: 2301792 - RNA, 16 nt, Human
uccagccccuggaugc

SEQ ID NO: 2301793 - RNA, 17 nt, Human
uccagccccuggaugca

SEQ ID NO: 2301794 - RNA, 19 nt, Human
uccagccccuggaugcagc

SEQ ID NO: 2301795 - RNA, 21 nt, Human
uccagccccuggaugcagccu

SEQ ID NO: 2301796 - RNA, 22 nt, Human
ucauuuuaacaucugagaaaag

SEQ ID NO: 2301797 - RNA, 15 nt, Human
ucauuuguuggaaug

SEQ ID NO: 2301798 - RNA, 18 nt, Human
ucauuuuacccuuggcuc

SEQ ID NO: 2301799 - RNA, 14 nt, Human
ucauuuuaauuauu

SEQ ID NO: 2301800 - RNA, 13 nt, Human
ucauuuuaauuau

SEQ ID NO: 2301801 - RNA, 20 nt, Human
ucauuuuaacaucugagaaa

SEQ ID NO: 2301802 - RNA, 20 nt, Human
ucauuugcuaacuagcuugg

SEQ ID NO: 2301803 - RNA, 19 nt, Human
ucauuugcccuuaaggaca

SEQ ID NO: 2301804 - RNA, 21 nt, Human
ucauuugcccuuaaggacaaa

SEQ ID NO: 2301805 - RNA, 16 nt, Human
ucauuugaugcuaaau

SEQ ID NO: 2301806 - RNA, 21 nt, Human
ucauuugagcagggcucagcg

SEQ ID NO: 2301807 - RNA, 13 nt, Human
ucauuugugucaa

SEQ ID NO: 2301808 - RNA, 15 nt, Human
ucauuugugucaaug

SEQ ID NO: 2301809 - RNA, 12 nt, Human
ucauuuguguca

SEQ ID NO: 2301810 - RNA, 18 nt, Human
ucauuugugccagaaugc

SEQ ID NO: 2301811 - RNA, 19 nt, Human
ucauuuuccccccacucuc

SEQ ID NO: 2301812 - RNA, 15 nt, Human
ucauuuuccccccac

SEQ ID NO: 2301813 - RNA, 18 nt, Human
ucauuuuauaugucaaag

SEQ ID NO: 2301814 - RNA, 15 nt, Human
ucauuuuauguuaag

SEQ ID NO: 2301815 - RNA, 16 nt, Human
ucauuuuauaugucaa

SEQ ID NO: 2301816 - RNA, 17 nt, Human
ucauuuuauaugucaaa

SEQ ID NO: 2301817 - RNA, 21 nt, Human
ucauuuuauaugucaaagcag

SEQ ID NO: 2301818 - RNA, 13 nt, Human
ucauuuuuucuua

SEQ ID NO: 2301819 - RNA, 17 nt, Human
ucauuuuuuuaauuuau

SEQ ID NO: 2301820 - RNA, 19 nt, Human
ucauuuuuguuucuaccuc

SEQ ID NO: 2301821 - RNA, 20 nt, Human
ucauuuuuguuucuaccucc

SEQ ID NO: 2301822 - RNA, 16 nt, Human
ucauuuuuguacaguu

SEQ ID NO: 2301823 - RNA, 21 nt, Human
ucauuuuuguacaguuugcug

SEQ ID NO: 2301824 - RNA, 22 nt, Human
ucauuuuuguacaguuugcugu

SEQ ID NO: 2301825 - RNA, 23 nt, Human
ucauuuuuguacaguuugcugua

SEQ ID NO: 2301826 - RNA, 23 nt, Human
uccaaagucucuggaauuugaaa

SEQ ID NO: 2301827 - RNA, 10 nt, Human
uccaaauaaa

SEQ ID NO: 2301828 - RNA, 13 nt, Human
uccaaauaaaaac

SEQ ID NO: 2301829 - RNA, 13 nt, Human
ucauuuuuuuuaa

SEQ ID NO: 2301830 - RNA, 18 nt, Human
ucauuuuuuuccaggcug

SEQ ID NO: 2301831 - RNA, 13 nt, Human
ucauuuuuuucca

SEQ ID NO: 2301832 - RNA, 16 nt, Human
ucauuuuuuuccaggc

SEQ ID NO: 2301833 - RNA, 18 nt, Human
accugcucuccucuugcc

SEQ ID NO: 2301834 - RNA, 17 nt, Human
accugcucuccucuugc

SEQ ID NO: 2301835 - RNA, 23 nt, Human
accugcggugcuaucucccccag

SEQ ID NO: 2301836 - RNA, 19 nt, Human
accugcggugcuaucuccc

SEQ ID NO: 2301837 - RNA, 22 nt, Human
accugcggugcuaucuccccca

SEQ ID NO: 2301838 - RNA, 15 nt, Human
accugaagucuuugu

SEQ ID NO: 2301839 - RNA, 22 nt, Human
accugaagucuuuguacagaca

SEQ ID NO: 2301840 - RNA, 18 nt, Human
accugcggugcuaucucc

SEQ ID NO: 2301841 - RNA, 13 nt, Human
accugaaguucac

SEQ ID NO: 2301842 - RNA, 15 nt, Human
accugaaguucacca

SEQ ID NO: 2301843 - RNA, 22 nt, Human
accugcugagagacccaaggag

SEQ ID NO: 2301844 - RNA, 18 nt, Human
accuggaacuuggggagu

SEQ ID NO: 2301845 - RNA, 22 nt, Human
accugcuuggguggagaagcca

SEQ ID NO: 2301846 - RNA, 23 nt, Human
accugcuuggguggagaagccau

SEQ ID NO: 2301847 - RNA, 19 nt, Human
accugcucuccucuugcca

SEQ ID NO: 2301848 - RNA, 13 nt, Human
accugcucucuug

SEQ ID NO: 2301849 - RNA, 16 nt, Human
accugcucucuuguaa

SEQ ID NO: 2301850 - RNA, 19 nt, Human
accugcugagagacccaag

SEQ ID NO: 2301851 - RNA, 16 nt, Human
accugcugagagaccc

SEQ ID NO: 2301852 - RNA, 19 nt, Human
accugcugaagggcagagg

SEQ ID NO: 2301853 - RNA, 19 nt, Human
ucauuugagcagggcucag

SEQ ID NO: 2301854 - RNA, 21 nt, Human
accuggaagggcuagaaccug

SEQ ID NO: 2301855 - RNA, 16 nt, Human
ucauuugaacaacuag

SEQ ID NO: 2301856 - RNA, 17 nt, Human
accuggaauauauaacc

SEQ ID NO: 2301857 - RNA, 14 nt, Human
accuggaauauaua

SEQ ID NO: 2301858 - RNA, 21 nt, Human
uccaacaccacagacacacac

SEQ ID NO: 2301859 - RNA, 22 nt, Human
uccaacaccacagacacacaca

SEQ ID NO: 2301860 - RNA, 17 nt, Human
uccaacaccacagacac

SEQ ID NO: 2301861 - RNA, 18 nt, Human
uccaacaccacagacaca

SEQ ID NO: 2301862 - RNA, 19 nt, Human
uccaacaccacagacacac

SEQ ID NO: 2301863 - RNA, 20 nt, Human
uccaacaccacagacacaca

SEQ ID NO: 2301864 - RNA, 23 nt, Human
uccaacaccaagcacagcagccu

SEQ ID NO: 2301865 - RNA, 20 nt, Human
uccaaaugaauguugucugu

SEQ ID NO: 2301866 - RNA, 16 nt, Human
uccaacaccacagaca

SEQ ID NO: 2301867 - RNA, 21 nt, Human
uccaacaccaagcacagcagc

SEQ ID NO: 2301868 - RNA, 17 nt, Human
uccaacaccaagcacag

SEQ ID NO: 2301869 - RNA, 19 nt, Human
uccaaaugaaugaccuugu

SEQ ID NO: 2301870 - RNA, 16 nt, Human
uccaaaugaaugaccu

SEQ ID NO: 2301871 - RNA, 17 nt, Human
uccaaauaagaaaccua

SEQ ID NO: 2301872 - RNA, 17 nt, Human
uccaaauaaaaacuaaa

SEQ ID NO: 2301873 - RNA, 18 nt, Human
uccaaauaaaaacuaaau

SEQ ID NO: 2301874 - RNA, 15 nt, Human
uccaaaugcagcuuu

SEQ ID NO: 2301875 - RNA, 14 nt, Human
uccaaaugcagcuu

SEQ ID NO: 2301876 - RNA, 19 nt, Human
uccaacguggggcagcaca

SEQ ID NO: 2301877 - RNA, 19 nt, Human
uccaacuaaugccuuacuc

SEQ ID NO: 2301878 - RNA, 15 nt, Human
uccaacuaaugccuu

SEQ ID NO: 2301879 - RNA, 17 nt, Human
uccaacguggggcagca

SEQ ID NO: 2301880 - RNA, 18 nt, Human
uccaacguggggcagcac

SEQ ID NO: 2301881 - RNA, 14 nt, Human
uccaacguggccca

SEQ ID NO: 2301882 - RNA, 16 nt, Human
uccaacguggcccaga

SEQ ID NO: 2301883 - RNA, 17 nt, Human
uccaacaggagcuggga

SEQ ID NO: 2301884 - RNA, 13 nt, Human
uccaacagugagu

SEQ ID NO: 2301885 - RNA, 16 nt, Human
uccaacaggagcuggg

SEQ ID NO: 2301886 - RNA, 14 nt, Human
uccaacaggagcug

SEQ ID NO: 2301887 - RNA, 19 nt, Human
uccaacagcucaagucuuc

SEQ ID NO: 2301888 - RNA, 17 nt, Human
uccaacagaagaacugu

SEQ ID NO: 2301889 - RNA, 14 nt, Human
uccaaccuucccaa

SEQ ID NO: 2301890 - RNA, 18 nt, Human
uccaagcuccaucuccac

SEQ ID NO: 2301891 - RNA, 16 nt, Human
uccaagcucccaggca

SEQ ID NO: 2301892 - RNA, 14 nt, Human
uccaagcucccagg

SEQ ID NO: 2301893 - RNA, 15 nt, Human
uccaagcucccaggc

SEQ ID NO: 2301894 - RNA, 12 nt, Human
uccaagcuccca

SEQ ID NO: 2301895 - RNA, 13 nt, Human
uccaagcucccag

SEQ ID NO: 2301896 - RNA, 21 nt, Human
uccaacuaucucauuuccaag

SEQ ID NO: 2301897 - RNA, 22 nt, Human
uccaacuaaugccuuacucuuc

SEQ ID NO: 2301898 - RNA, 14 nt, Human
uccacagugacucc

SEQ ID NO: 2301899 - RNA, 14 nt, Human
uccaauaaaccagg

SEQ ID NO: 2301900 - RNA, 23 nt, Human
uccaauaaaugugaaauucuguc

SEQ ID NO: 2301901 - RNA, 12 nt, Human
uccaauaaacag

SEQ ID NO: 2301902 - RNA, 13 nt, Human
uccaauaaacagg

SEQ ID NO: 2301903 - RNA, 14 nt, Human
uccaauaaacagga

SEQ ID NO: 2301904 - RNA, 18 nt, Human
uccaagugugugugcgug

SEQ ID NO: 2301905 - RNA, 14 nt, Human
uccaagugugugug

SEQ ID NO: 2301906 - RNA, 13 nt, Human
uccaagugugugu

SEQ ID NO: 2301907 - RNA, 21 nt, Human
uccaagugugcauauuguaca

SEQ ID NO: 2301908 - RNA, 14 nt, Human
uccaagugugcaua

SEQ ID NO: 2301909 - RNA, 15 nt, Human
uccaagugugcauau

SEQ ID NO: 2301910 - RNA, 19 nt, Human
uccaagugugcauauugua

SEQ ID NO: 2301911 - RNA, 20 nt, Human
uccaagugugcauauuguac

SEQ ID NO: 2301912 - RNA, 21 nt, Human
uccaaguuuacucaacccucu

SEQ ID NO: 2301913 - RNA, 17 nt, Human
uccaauaaaaugccuca

SEQ ID NO: 2301914 - RNA, 11 nt, Human
uccaagcuggu

SEQ ID NO: 2301915 - RNA, 11 nt, Human
uccaagugugc

SEQ ID NO: 2301916 - RNA, 13 nt, Human
uccaagugugcau

SEQ ID NO: 2301917 - RNA, 22 nt, Human
uccaagcugggagauucaaggg

SEQ ID NO: 2301918 - RNA, 12 nt, Human
uccaagcuggga

SEQ ID NO: 2301919 - RNA, 13 nt, Human
uccacaguucagu

SEQ ID NO: 2301920 - RNA, 18 nt, Human
uccacauaaggaaacugg

SEQ ID NO: 2301921 - RNA, 15 nt, Human
uccacaguucagugg

SEQ ID NO: 2301922 - RNA, 16 nt, Human
uccacaguucaguggc

SEQ ID NO: 2301923 - RNA, 22 nt, Human
uccacaguucgaccugcggcug

SEQ ID NO: 2301924 - RNA, 23 nt, Human
uccacaguucaguggcagggcuc

SEQ ID NO: 2301925 - RNA, 18 nt, Human
uccaccaacccaucagaa

SEQ ID NO: 2301926 - RNA, 16 nt, Human
uccaccaacccaucag

SEQ ID NO: 2301927 - RNA, 18 nt, Human
uccaccaagccuggucag

SEQ ID NO: 2301928 - RNA, 17 nt, Human
uccaccacccaaaaguc

SEQ ID NO: 2301929 - RNA, 13 nt, Human
uccaccacccaaa

SEQ ID NO: 2301930 - RNA, 23 nt, Human
uccaccaccacuggccaccaggc

SEQ ID NO: 2301931 - RNA, 14 nt, Human
uccaccaccucccu

SEQ ID NO: 2301932 - RNA, 16 nt, Human
uccaccaccucccuca

SEQ ID NO: 2301933 - RNA, 17 nt, Human
uccaccaccucccucac

SEQ ID NO: 2301934 - RNA, 18 nt, Human
uccaccaccucccucacc

SEQ ID NO: 2301935 - RNA, 15 nt, Human
uccaccagccugcac

SEQ ID NO: 2301936 - RNA, 14 nt, Human
uccaccagccugca

SEQ ID NO: 2301937 - RNA, 16 nt, Human
uccaccagccugcacu

SEQ ID NO: 2301938 - RNA, 15 nt, Human
uccaccaggaaccuc

SEQ ID NO: 2301939 - RNA, 22 nt, Human
uccaccaccucccucaccaaca

SEQ ID NO: 2301940 - RNA, 17 nt, Human
uccaccaagaaagcagg

SEQ ID NO: 2301941 - RNA, 13 nt, Human
uccaccaccacug

SEQ ID NO: 2301942 - RNA, 14 nt, Human
uccaccaccacugg

SEQ ID NO: 2301943 - RNA, 18 nt, Human
uccaccaccacuggccac

SEQ ID NO: 2301944 - RNA, 19 nt, Human
uccaccaccacuggccacc

SEQ ID NO: 2301945 - RNA, 21 nt, Human
uccaccaccacuggccaccag

SEQ ID NO: 2301946 - RNA, 22 nt, Human
uccaccaccacuggccaccagg

SEQ ID NO: 2301947 - RNA, 23 nt, Human
uccaccaagccuggucagcccaa

SEQ ID NO: 2301948 - RNA, 22 nt, Human
uccaccaagccuggucagccca

SEQ ID NO: 2301949 - RNA, 20 nt, Human
uccugcaggccaggccagcu

SEQ ID NO: 2301950 - RNA, 19 nt, Human
uccugcaggccaggccagc

SEQ ID NO: 2301951 - RNA, 14 nt, Human
uccugcaggccagg

SEQ ID NO: 2301952 - RNA, 22 nt, Human
uccugcaggcagccaggccaca

SEQ ID NO: 2301953 - RNA, 19 nt, Human
uccugccucagccucccaa

SEQ ID NO: 2301954 - RNA, 16 nt, Human
uccugcauucacccag

SEQ ID NO: 2301955 - RNA, 22 nt, Human
uccugcauucacccagacagcu

SEQ ID NO: 2301956 - RNA, 22 nt, Human
uccugcagggccagaccugccu

SEQ ID NO: 2301957 - RNA, 18 nt, Human
uccugcagguaaacaguu

SEQ ID NO: 2301958 - RNA, 21 nt, Human
uccugcagucuggcugagccc

SEQ ID NO: 2301959 - RNA, 16 nt, Human
uccugcaggcagccag

SEQ ID NO: 2301960 - RNA, 17 nt, Human
uccugcaggcagccagg

SEQ ID NO: 2301961 - RNA, 19 nt, Human
uccugcaggcagccaggcc

SEQ ID NO: 2301962 - RNA, 20 nt, Human
uccugcaggcagccaggcca

SEQ ID NO: 2301963 - RNA, 21 nt, Human
uccugccucgaacuggcugca

SEQ ID NO: 2301964 - RNA, 23 nt, Human
uccugcgggcuuuuccccggucc

SEQ ID NO: 2301965 - RNA, 13 nt, Human
uccugcggguggg

SEQ ID NO: 2301966 - RNA, 14 nt, Human
uccugcgggugggg

SEQ ID NO: 2301967 - RNA, 21 nt, Human
uccugcguccuccucaccuca

SEQ ID NO: 2301968 - RNA, 16 nt, Human
uccugcguccuccuca

SEQ ID NO: 2301969 - RNA, 18 nt, Human
uccugcguccuccucacc

SEQ ID NO: 2301970 - RNA, 13 nt, Human
uccugcguccucc

SEQ ID NO: 2301971 - RNA, 14 nt, Human
uccugcguccuccu

SEQ ID NO: 2301972 - RNA, 15 nt, Human
uccugcguccuccuc

SEQ ID NO: 2301973 - RNA, 17 nt, Human
uccugccucagccuccg

SEQ ID NO: 2301974 - RNA, 14 nt, Human
uccugccuccgccu

SEQ ID NO: 2301975 - RNA, 20 nt, Human
uccugccucgaacuggcugc

SEQ ID NO: 2301976 - RNA, 18 nt, Human
uccugcuacucuguuccu

SEQ ID NO: 2301977 - RNA, 16 nt, Human
uccugcucauauugug

SEQ ID NO: 2301978 - RNA, 15 nt, Human
uccugcucauauugu

SEQ ID NO: 2301979 - RNA, 19 nt, Human
uccugcuacaacuucagca

SEQ ID NO: 2301980 - RNA, 14 nt, Human
uccugcuacucugu

SEQ ID NO: 2301981 - RNA, 20 nt, Human
uccugcuacaacuucagcag

SEQ ID NO: 2301982 - RNA, 21 nt, Human
uccugcuacaacuucagcagu

SEQ ID NO: 2301983 - RNA, 16 nt, Human
uccugcuccacagugu

SEQ ID NO: 2301984 - RNA, 13 nt, Human
uccugcucugccc

SEQ ID NO: 2301985 - RNA, 13 nt, Human
uccugcuccacag

SEQ ID NO: 2301986 - RNA, 14 nt, Human
uccugcuccacagc

SEQ ID NO: 2301987 - RNA, 18 nt, Human
uccugcuccacagccauc

SEQ ID NO: 2301988 - RNA, 14 nt, Human
uccugcuccacagu

SEQ ID NO: 2301989 - RNA, 15 nt, Human
uccugcuccacagug

SEQ ID NO: 2301990 - RNA, 18 nt, Human
uccugcuccacaguguug

SEQ ID NO: 2301991 - RNA, 19 nt, Human
uccugaguagcuggauuac

SEQ ID NO: 2301992 - RNA, 20 nt, Human
uccugaguagcugggauuac

SEQ ID NO: 2301993 - RNA, 22 nt, Human
uccugaggggcaucugccccuc

SEQ ID NO: 2301994 - RNA, 21 nt, Human
uccugaggggcaucugccccu

SEQ ID NO: 2301995 - RNA, 18 nt, Human
acugcacagcguccuguc

SEQ ID NO: 2301996 - RNA, 17 nt, Human
uccugaggguccccacc

SEQ ID NO: 2301997 - RNA, 19 nt, Human
uccugaggguccccaccug

SEQ ID NO: 2301998 - RNA, 22 nt, Human
uccugaggguccccaccuggga

SEQ ID NO: 2301999 - RNA, 23 nt, Human
uccugauaugauuuaaaacaugu

SEQ ID NO: 2302000 - RNA, 18 nt, Human
uccugauaauaauugauc

SEQ ID NO: 2302001 - RNA, 19 nt, Human
uccugauaauaauugauca

SEQ ID NO: 2302002 - RNA, 24 nt, Human
uccugauaugauuuaaaacaugua

SEQ ID NO: 2302003 - RNA, 21 nt, Human
uccugauggcaggauggccug

SEQ ID NO: 2302004 - RNA, 18 nt, Human
uccugaugguacaggaaa

SEQ ID NO: 2302005 - RNA, 17 nt, Human
uccugauaauaauugau

SEQ ID NO: 2302006 - RNA, 15 nt, Human
uccugaguggugcca

SEQ ID NO: 2302007 - RNA, 16 nt, Human
acugcacagugcaucu

SEQ ID NO: 2302008 - RNA, 23 nt, Human
acugcacagagcucuccagcucc

SEQ ID NO: 2302009 - RNA, 20 nt, Human
acugcacagcggccccugca

SEQ ID NO: 2302010 - RNA, 22 nt, Human
acugcacagcggccccugcauc

SEQ ID NO: 2302011 - RNA, 16 nt, Human
acugcacagcguccug

SEQ ID NO: 2302012 - RNA, 18 nt, Human
acugcacagugcaucuca

SEQ ID NO: 2302013 - RNA, 20 nt, Human
acugcaauccugucuuucug

SEQ ID NO: 2302014 - RNA, 17 nt, Human
acugcaauuaaagugau

SEQ ID NO: 2302015 - RNA, 21 nt, Human
acugcaauccugucuuucuga

SEQ ID NO: 2302016 - RNA, 12 nt, Human
acugcacagagc

SEQ ID NO: 2302017 - RNA, 15 nt, Human
acugcacagagcucu

SEQ ID NO: 2302018 - RNA, 16 nt, Human
acugcacagagcucuc

SEQ ID NO: 2302019 - RNA, 17 nt, Human
acugcacagagcucucc

SEQ ID NO: 2302020 - RNA, 18 nt, Human
acugcacagagcucucca

SEQ ID NO: 2302021 - RNA, 19 nt, Human
acugcacagagcucuccag

SEQ ID NO: 2302022 - RNA, 21 nt, Human
uccugcacuuacuugcuuauu

SEQ ID NO: 2302023 - RNA, 17 nt, Human
uccugcagaccacgccc

SEQ ID NO: 2302024 - RNA, 15 nt, Human
uccugcaggcagcca

SEQ ID NO: 2302025 - RNA, 12 nt, Human
uccugcagccuc

SEQ ID NO: 2302026 - RNA, 15 nt, Human
uccugcagccuccuc

SEQ ID NO: 2302027 - RNA, 16 nt, Human
uccugcagccuccucc

SEQ ID NO: 2302028 - RNA, 18 nt, Human
uccugcagccuccuccug

SEQ ID NO: 2302029 - RNA, 19 nt, Human
uccugcagccuccuccuga

SEQ ID NO: 2302030 - RNA, 22 nt, Human
uccugcagccuccuccugacca

SEQ ID NO: 2302031 - RNA, 19 nt, Human
uccugcaaaauuuuauagc

SEQ ID NO: 2302032 - RNA, 17 nt, Human
uccugcaaaauuuuaua

SEQ ID NO: 2302033 - RNA, 17 nt, Human
uccugcaacucaaggac

SEQ ID NO: 2302034 - RNA, 20 nt, Human
uccugauggucagcucccuu

SEQ ID NO: 2302035 - RNA, 21 nt, Human
uccugauggucagcucccuuc

SEQ ID NO: 2302036 - RNA, 23 nt, Human
uccugaugguacaggaaagcuca

SEQ ID NO: 2302037 - RNA, 17 nt, Human
uccugauggucagcucc

SEQ ID NO: 2302038 - RNA, 18 nt, Human
uccugauggucagcuccc

SEQ ID NO: 2302039 - RNA, 19 nt, Human
uccugauggucagcucccu

SEQ ID NO: 2302040 - RNA, 20 nt, Human
uccugcaaugaagucucuga

SEQ ID NO: 2302041 - RNA, 18 nt, Human
uccugcaaugaagucucu

SEQ ID NO: 2302042 - RNA, 15 nt, Human
uccugcaaugaaguc

SEQ ID NO: 2302043 - RNA, 18 nt, Human
uccugcaacucaaggacu

SEQ ID NO: 2302044 - RNA, 16 nt, Human
acugcaaccuccgccu

SEQ ID NO: 2302045 - RNA, 22 nt, Human
acugcaaccuccgccucuuggg

SEQ ID NO: 2302046 - RNA, 20 nt, Human
acugcaaccuucgccaccug

SEQ ID NO: 2302047 - RNA, 13 nt, Human
acugcaaccuccg

SEQ ID NO: 2302048 - RNA, 14 nt, Human
acugcaaccuccgc

SEQ ID NO: 2302049 - RNA, 18 nt, Human
acugcaacaggcuugugc

SEQ ID NO: 2302050 - RNA, 22 nt, Human
acugcaaaugucaucagaacuu

SEQ ID NO: 2302051 - RNA, 21 nt, Human
acugcaaaugucaucagaacu

SEQ ID NO: 2302052 - RNA, 21 nt, Human
acugaguuaaauuauacugga

SEQ ID NO: 2302053 - RNA, 15 nt, Human
acugaguuacauugu

SEQ ID NO: 2302054 - RNA, 18 nt, Human
acugaguuacauugucau

SEQ ID NO: 2302055 - RNA, 15 nt, Human
acugauaaagaaaga

SEQ ID NO: 2302056 - RNA, 21 nt, Human
acugaggggucuccaggagga

SEQ ID NO: 2302057 - RNA, 18 nt, Human
acugaggggucuccagga

SEQ ID NO: 2302058 - RNA, 16 nt, Human
acugaguccuuaaaca

SEQ ID NO: 2302059 - RNA, 20 nt, Human
acugaguaagaaaugcugcc

SEQ ID NO: 2302060 - RNA, 16 nt, Human
acugagugccuuuugg

SEQ ID NO: 2302061 - RNA, 23 nt, Human
acugaguacguugugcauuuggu

SEQ ID NO: 2302062 - RNA, 22 nt, Human
acugaguacguugugcauuugg

SEQ ID NO: 2302063 - RNA, 18 nt, Human
acugaguacguugugcau

SEQ ID NO: 2302064 - RNA, 23 nt, Human
acugagggcagucgauagagcug

SEQ ID NO: 2302065 - RNA, 22 nt, Human
acugagggacucugaagccucu

SEQ ID NO: 2302066 - RNA, 12 nt, Human
acugagggccac

SEQ ID NO: 2302067 - RNA, 22 nt, Human
acugagggccacacuauuacca

SEQ ID NO: 2302068 - RNA, 21 nt, Human
acugaguacguugugcauuug

SEQ ID NO: 2302069 - RNA, 19 nt, Human
acugaguacguugugcauu

SEQ ID NO: 2302070 - RNA, 17 nt, Human
acugagcuucucuguga

SEQ ID NO: 2302071 - RNA, 18 nt, Human
acugagcuucucugugaa

SEQ ID NO: 2302072 - RNA, 12 nt, Human
acugagcuugga

SEQ ID NO: 2302073 - RNA, 16 nt, Human
acugagcuuggaagcu

SEQ ID NO: 2302074 - RNA, 13 nt, Human
acugagcuuggaa

SEQ ID NO: 2302075 - RNA, 18 nt, Human
acugaggaaugaugaagc

SEQ ID NO: 2302076 - RNA, 21 nt, Human
acugagcuccucugggcagga

SEQ ID NO: 2302077 - RNA, 17 nt, Human
acugaggaauuucaccu

SEQ ID NO: 2302078 - RNA, 16 nt, Human
acugaggaauuuucuu

SEQ ID NO: 2302079 - RNA, 19 nt, Human
acugaggaauuucaccugu

SEQ ID NO: 2302080 - RNA, 17 nt, Human
acugagcuuggaagcuu

SEQ ID NO: 2302081 - RNA, 13 nt, Human
acugaggaagaac

SEQ ID NO: 2302082 - RNA, 22 nt, Human
acugaggaagaacggggcucuu

SEQ ID NO: 2302083 - RNA, 14 nt, Human
acugagcuccucug

SEQ ID NO: 2302084 - RNA, 13 nt, Human
acugagcuccucu

SEQ ID NO: 2302085 - RNA, 16 nt, Human
acugagcuccaugugc

SEQ ID NO: 2302086 - RNA, 23 nt, Human
acugagcuccaugugcccccucu

SEQ ID NO: 2302087 - RNA, 19 nt, Human
acugagcuccucugggcag

SEQ ID NO: 2302088 - RNA, 16 nt, Human
acugagcuccucuggg

SEQ ID NO: 2302089 - RNA, 16 nt, Human
acugagcuucucugug

SEQ ID NO: 2302090 - RNA, 19 nt, Human
uccucuccccagcccagag

SEQ ID NO: 2302091 - RNA, 18 nt, Human
uccucuccccagcccaga

SEQ ID NO: 2302092 - RNA, 17 nt, Human
uccucuccccagcccag

SEQ ID NO: 2302093 - RNA, 15 nt, Human
uccucuccccagcaa

SEQ ID NO: 2302094 - RNA, 16 nt, Human
uccucuccccagccca

SEQ ID NO: 2302095 - RNA, 15 nt, Human
uccucuccccagccc

SEQ ID NO: 2302096 - RNA, 14 nt, Human
uccucuccccagcc

SEQ ID NO: 2302097 - RNA, 17 nt, Human
uccucuccaccuagugg

SEQ ID NO: 2302098 - RNA, 19 nt, Human
uccucuccaccuaguggcu

SEQ ID NO: 2302099 - RNA, 15 nt, Human
acugaggcacgagca

SEQ ID NO: 2302100 - RNA, 20 nt, Human
acugaggaauuuucuuugug

SEQ ID NO: 2302101 - RNA, 15 nt, Human
acugaggaccagcca

SEQ ID NO: 2302102 - RNA, 14 nt, Human
acugaggaucagag

SEQ ID NO: 2302103 - RNA, 22 nt, Human
acugaggcagacagcagcucag

SEQ ID NO: 2302104 - RNA, 19 nt, Human
acugaggcagacagcagcu

SEQ ID NO: 2302105 - RNA, 15 nt, Human
acugaggcagacagc

SEQ ID NO: 2302106 - RNA, 13 nt, Human
acugaggcagaca

SEQ ID NO: 2302107 - RNA, 14 nt, Human
acugaggcagggaa

SEQ ID NO: 2302108 - RNA, 12 nt, Human
acugaggcaggg

SEQ ID NO: 2302109 - RNA, 23 nt, Human
acugaggcagacagcagcucagg

SEQ ID NO: 2302110 - RNA, 15 nt, Human
acugaggcagggaag

SEQ ID NO: 2302111 - RNA, 22 nt, Human
acugaggccaaaagaggccuga

SEQ ID NO: 2302112 - RNA, 22 nt, Human
acugagggaccaacugggccca

SEQ ID NO: 2302113 - RNA, 21 nt, Human
acugaggccuaaaaguaaaca

SEQ ID NO: 2302114 - RNA, 14 nt, Human
acugagggacucug

SEQ ID NO: 2302115 - RNA, 12 nt, Human
acugagggcagu

SEQ ID NO: 2302116 - RNA, 17 nt, Human
acugagggacucugaag

SEQ ID NO: 2302117 - RNA, 18 nt, Human
acugagggacucugaagc

SEQ ID NO: 2302118 - RNA, 21 nt, Human
acugagggaccaacugggccc

SEQ ID NO: 2302119 - RNA, 20 nt, Human
acugagggaccaacugggcc

SEQ ID NO: 2302120 - RNA, 13 nt, Human
acugaggccugag

SEQ ID NO: 2302121 - RNA, 14 nt, Human
acugaggccugagc

SEQ ID NO: 2302122 - RNA, 22 nt, Human
acugaggggaggggagcauggg

SEQ ID NO: 2302123 - RNA, 17 nt, Human
acugaggggaggggagc

SEQ ID NO: 2302124 - RNA, 18 nt, Human
uccugugcuacuuugccu

SEQ ID NO: 2302125 - RNA, 20 nt, Human
uccugugcaugggugaaggg

SEQ ID NO: 2302126 - RNA, 18 nt, Human
uccugugcaugggugaag

SEQ ID NO: 2302127 - RNA, 16 nt, Human
uccugugcauggguga

SEQ ID NO: 2302128 - RNA, 15 nt, Human
uccugugcaugggug

SEQ ID NO: 2302129 - RNA, 18 nt, Human
uccugugacauguaacag

SEQ ID NO: 2302130 - RNA, 18 nt, Human
uccugugacuucagcucu

SEQ ID NO: 2302131 - RNA, 20 nt, Human
uccugugaaugccacugccu

SEQ ID NO: 2302132 - RNA, 22 nt, Human
uccugugaaugccacugccuuc

SEQ ID NO: 2302133 - RNA, 14 nt, Human
uccugugacaugua

SEQ ID NO: 2302134 - RNA, 15 nt, Human
uccugugacauguaa

SEQ ID NO: 2302135 - RNA, 14 nt, Human
uccuguggcaggca

SEQ ID NO: 2302136 - RNA, 17 nt, Human
uccugugcccacauccc

SEQ ID NO: 2302137 - RNA, 15 nt, Human
uccuguggcaggcag

SEQ ID NO: 2302138 - RNA, 16 nt, Human
uccuguggcaggcagc

SEQ ID NO: 2302139 - RNA, 19 nt, Human
uccuguggcaggcagcgcc

SEQ ID NO: 2302140 - RNA, 20 nt, Human
uccuguggcaggcagcgcca

SEQ ID NO: 2302141 - RNA, 12 nt, Human
uccuguggcccc

SEQ ID NO: 2302142 - RNA, 21 nt, Human
uccuguggcaggcagcgccaa

SEQ ID NO: 2302143 - RNA, 22 nt, Human
uccuguggccccacccugggcc

SEQ ID NO: 2302144 - RNA, 23 nt, Human
uccuguggccccacccugggccc

SEQ ID NO: 2302145 - RNA, 22 nt, Human
uccuguguaaucauuucuuggg

SEQ ID NO: 2302146 - RNA, 18 nt, Human
uccuguguaaucauuucu

SEQ ID NO: 2302147 - RNA, 13 nt, Human
uccuguguacagg

SEQ ID NO: 2302148 - RNA, 22 nt, Human
uccugugggggaagagcacagc

SEQ ID NO: 2302149 - RNA, 23 nt, Human
uccugugggggaagagcacagcc

SEQ ID NO: 2302150 - RNA, 19 nt, Human
uccugucuuuaaggaaaaa

SEQ ID NO: 2302151 - RNA, 15 nt, Human
uccugucuuucugag

SEQ ID NO: 2302152 - RNA, 16 nt, Human
uccugugaaugccacu

SEQ ID NO: 2302153 - RNA, 22 nt, Human
uccugucuuucugagcacacuu

SEQ ID NO: 2302154 - RNA, 18 nt, Human
uccugucuuuaaggaaaa

SEQ ID NO: 2302155 - RNA, 17 nt, Human
uccugucuuuaaggaaa

SEQ ID NO: 2302156 - RNA, 21 nt, Human
uccugucuuuaaagccugccu

SEQ ID NO: 2302157 - RNA, 11 nt, Human
uccugucuucc

SEQ ID NO: 2302158 - RNA, 12 nt, Human
uccugucuuccc

SEQ ID NO: 2302159 - RNA, 14 nt, Human
uccugucuucccag

SEQ ID NO: 2302160 - RNA, 15 nt, Human
uccugucuuccugca

SEQ ID NO: 2302161 - RNA, 17 nt, Human
uccugucuucccagggu

SEQ ID NO: 2302162 - RNA, 15 nt, Human
uccugucuucccagg

SEQ ID NO: 2302163 - RNA, 16 nt, Human
uccugucuucccaggg

SEQ ID NO: 2302164 - RNA, 23 nt, Human
uccugggguauaaaacuuuccuc

SEQ ID NO: 2302165 - RNA, 19 nt, Human
uccuggguggucugcaggc

SEQ ID NO: 2302166 - RNA, 15 nt, Human
uccuggguggucugc

SEQ ID NO: 2302167 - RNA, 22 nt, Human
uccuggguggucugcaggcagg

SEQ ID NO: 2302168 - RNA, 21 nt, Human
uccuggguggucugcaggcag

SEQ ID NO: 2302169 - RNA, 23 nt, Human
uccuggguuuucuuaaccaucuu

SEQ ID NO: 2302170 - RNA, 22 nt, Human
uccuggguuuuguauucucuga

SEQ ID NO: 2302171 - RNA, 21 nt, Human
uccuggguuuuguauucucug

SEQ ID NO: 2302172 - RNA, 20 nt, Human
uccuggguuuuguauucucu

SEQ ID NO: 2302173 - RNA, 17 nt, Human
uccuggguuuuguauuc

SEQ ID NO: 2302174 - RNA, 23 nt, Human
uccuggguuuuguauucucugag

SEQ ID NO: 2302175 - RNA, 15 nt, Human
uccugguacccagcc

SEQ ID NO: 2302176 - RNA, 16 nt, Human
uccugguacccagcca

SEQ ID NO: 2302177 - RNA, 13 nt, Human
uccugguagaaua

SEQ ID NO: 2302178 - RNA, 17 nt, Human
uccugguacccagccau

SEQ ID NO: 2302179 - RNA, 18 nt, Human
uccugguacccagccauc

SEQ ID NO: 2302180 - RNA, 13 nt, Human
uccugggcucagg

SEQ ID NO: 2302181 - RNA, 12 nt, Human
uccugggcucag

SEQ ID NO: 2302182 - RNA, 16 nt, Human
uccugggcgcccugga

SEQ ID NO: 2302183 - RNA, 18 nt, Human
uccugggcgcccuggaag

SEQ ID NO: 2302184 - RNA, 19 nt, Human
uccugggcgcccuggaagc

SEQ ID NO: 2302185 - RNA, 20 nt, Human
uccugggcgcccuggaagcc

SEQ ID NO: 2302186 - RNA, 16 nt, Human
uccugggccugcagaa

SEQ ID NO: 2302187 - RNA, 13 nt, Human
uccugggcgcccu

SEQ ID NO: 2302188 - RNA, 14 nt, Human
uccugggcgcccug

SEQ ID NO: 2302189 - RNA, 15 nt, Human
uccugggccugcaga

SEQ ID NO: 2302190 - RNA, 13 nt, Human
uccugggccugca

SEQ ID NO: 2302191 - RNA, 13 nt, Human
uccuggggccucg

SEQ ID NO: 2302192 - RNA, 12 nt, Human
uccugggcuggu

SEQ ID NO: 2302193 - RNA, 19 nt, Human
uccuggggaaccugacccc

SEQ ID NO: 2302194 - RNA, 18 nt, Human
uccuggggaaccugaccc

SEQ ID NO: 2302195 - RNA, 18 nt, Human
uccuggggcucugugcag

SEQ ID NO: 2302196 - RNA, 16 nt, Human
uccuggggcucugugc

SEQ ID NO: 2302197 - RNA, 15 nt, Human
uccuggggcucugug

SEQ ID NO: 2302198 - RNA, 15 nt, Human
uccuggggcucccuu

SEQ ID NO: 2302199 - RNA, 16 nt, Human
uccuggggcucccuuc

SEQ ID NO: 2302200 - RNA, 15 nt, Human
uccuggggccucuug

SEQ ID NO: 2302201 - RNA, 14 nt, Human
uccuggggcucccu

SEQ ID NO: 2302202 - RNA, 22 nt, Human
uccuggggccucggagccucau

SEQ ID NO: 2302203 - RNA, 21 nt, Human
uccuggggccucggagccuca

SEQ ID NO: 2302204 - RNA, 19 nt, Human
uccuggggcucugugcagg

SEQ ID NO: 2302205 - RNA, 21 nt, Human
uccuggggguucuuucuuccu

SEQ ID NO: 2302206 - RNA, 22 nt, Human
uccuggggguucuuucuuccuc

SEQ ID NO: 2302207 - RNA, 23 nt, Human
uccuggggguucuuucuuccucu

SEQ ID NO: 2302208 - RNA, 16 nt, Human
uccugggcccucucug

SEQ ID NO: 2302209 - RNA, 18 nt, Human
uccugcugcagaggggca

SEQ ID NO: 2302210 - RNA, 21 nt, Human
uccugcugcagaggggcaggc

SEQ ID NO: 2302211 - RNA, 12 nt, Human
uccugggccugc

SEQ ID NO: 2302212 - RNA, 23 nt, Human
uccugggcccucucugcucugcg

SEQ ID NO: 2302213 - RNA, 21 nt, Human
uccugggcccucucugcucug

SEQ ID NO: 2302214 - RNA, 17 nt, Human
uccugggcccucucugc

SEQ ID NO: 2302215 - RNA, 13 nt, Human
uccugcugcaguu

SEQ ID NO: 2302216 - RNA, 12 nt, Human
uccugcugcacc

SEQ ID NO: 2302217 - RNA, 13 nt, Human
uccugcugcacca

SEQ ID NO: 2302218 - RNA, 17 nt, Human
uccugcugcaccaaccc

SEQ ID NO: 2302219 - RNA, 19 nt, Human
uccugcugcaccaacccag

SEQ ID NO: 2302220 - RNA, 20 nt, Human
uccugcugcaccaacccagc

SEQ ID NO: 2302221 - RNA, 21 nt, Human
uccugcugcaccaacccagcc

SEQ ID NO: 2302222 - RNA, 22 nt, Human
uccugcugcaccaacccagccg

SEQ ID NO: 2302223 - RNA, 16 nt, Human
uccugcugcagagggg

SEQ ID NO: 2302224 - RNA, 19 nt, Human
uccuguucuuaagacguga

SEQ ID NO: 2302225 - RNA, 12 nt, Human
uccuguucugaa

SEQ ID NO: 2302226 - RNA, 13 nt, Human
uccuguugcaccc

SEQ ID NO: 2302227 - RNA, 16 nt, Human
uccuguugcacccagc

SEQ ID NO: 2302228 - RNA, 19 nt, Human
uccuguugcacccagcccu

SEQ ID NO: 2302229 - RNA, 20 nt, Human
uccuguugcacccagcccug

SEQ ID NO: 2302230 - RNA, 21 nt, Human
uccuguugcacccagcccugg

SEQ ID NO: 2302231 - RNA, 22 nt, Human
uccuguugcacccagcccuggu

SEQ ID NO: 2302232 - RNA, 21 nt, Human
uccuguuggauuuguuuaaaa

SEQ ID NO: 2302233 - RNA, 23 nt, Human
uccuguuagcuguuauuucuauu

SEQ ID NO: 2302234 - RNA, 22 nt, Human
uccuguuagguauuagaaagug

SEQ ID NO: 2302235 - RNA, 18 nt, Human
uccuguuacuuaccuaaa

SEQ ID NO: 2302236 - RNA, 19 nt, Human
uccuguguuucuagggaaa

SEQ ID NO: 2302237 - RNA, 20 nt, Human
uccuguguuuuuucugccac

SEQ ID NO: 2302238 - RNA, 19 nt, Human
uccuguucccaugagauga

SEQ ID NO: 2302239 - RNA, 21 nt, Human
uccuguuguuguuaaugaaaa

SEQ ID NO: 2302240 - RNA, 20 nt, Human
uccuguuguuauggaaacug

SEQ ID NO: 2302241 - RNA, 19 nt, Human
uccuguuguuguuaaugaa

SEQ ID NO: 2302242 - RNA, 14 nt, Human
uccuguuuuucaca

SEQ ID NO: 2302243 - RNA, 18 nt, Human
uccuguuugggccccucu

SEQ ID NO: 2302244 - RNA, 22 nt, Human
uccuguuugggccccucuccca

SEQ ID NO: 2302245 - RNA, 12 nt, Human
uccuguguuucu

SEQ ID NO: 2302246 - RNA, 18 nt, Human
uccugugugugcgccuac

SEQ ID NO: 2302247 - RNA, 13 nt, Human
uccugugugugcg

SEQ ID NO: 2302248 - RNA, 14 nt, Human
uccugugugugcgc

SEQ ID NO: 2302249 - RNA, 22 nt, Human
uccuguguguccaaaacugccu

SEQ ID NO: 2302250 - RNA, 19 nt, Human
uccugugugauugacagcu

SEQ ID NO: 2302251 - RNA, 15 nt, Human
uccugugugcaguga

SEQ ID NO: 2302252 - RNA, 23 nt, Human
uccuguguaaucauuucuugggc

SEQ ID NO: 2302253 - RNA, 23 nt, Human
uccugugucuugcaauggcagcc

SEQ ID NO: 2302254 - RNA, 24 nt, Human
uccugugucuugcaauggcagccu

SEQ ID NO: 2302255 - RNA, 15 nt, Human
uccuuaaacagggca

SEQ ID NO: 2302256 - RNA, 16 nt, Human
uccuguuuuucugggu

SEQ ID NO: 2302257 - RNA, 17 nt, Human
uccuguuuuucugggug

SEQ ID NO: 2302258 - RNA, 20 nt, Human
uccuguuuuucuggguggcc

SEQ ID NO: 2302259 - RNA, 16 nt, Human
uccuuaaacugugugg

SEQ ID NO: 2302260 - RNA, 15 nt, Human
uccuuaaacugugug

SEQ ID NO: 2302261 - RNA, 14 nt, Human
uccuuaaacugugu

SEQ ID NO: 2302262 - RNA, 23 nt, Human
uccuuaaacagggcaucuccagg

SEQ ID NO: 2302263 - RNA, 23 nt, Human
uccuuaaacuguguggacuguga

SEQ ID NO: 2302264 - RNA, 17 nt, Human
uccuuaaacugugugga

SEQ ID NO: 2302265 - RNA, 13 nt, Human
acugcacuguuuu

SEQ ID NO: 2302266 - RNA, 23 nt, Human
uccuuaaauaaacucaaugagcu

SEQ ID NO: 2302267 - RNA, 22 nt, Human
uccuuaaaggcaccaucuaaua

SEQ ID NO: 2302268 - RNA, 19 nt, Human
acugcagccucaaccuccu

SEQ ID NO: 2302269 - RNA, 23 nt, Human
uccuuaaaggcaccaucuaauag

SEQ ID NO: 2302270 - RNA, 21 nt, Human
acugcagaauacaguaagcug

SEQ ID NO: 2302271 - RNA, 16 nt, Human
acugcagaccuguccu

SEQ ID NO: 2302272 - RNA, 18 nt, Human
acugcagaccuguccucc

SEQ ID NO: 2302273 - RNA, 21 nt, Human
acugcagccucaaccuccugg

SEQ ID NO: 2302274 - RNA, 22 nt, Human
acugcagccucaaccuccuggg

SEQ ID NO: 2302275 - RNA, 12 nt, Human
acugcaggcccc

SEQ ID NO: 2302276 - RNA, 19 nt, Human
acugcaggcaucacagcua

SEQ ID NO: 2302277 - RNA, 15 nt, Human
acugcagcuuuacau

SEQ ID NO: 2302278 - RNA, 21 nt, Human
acugcaggccccgcuugucca

SEQ ID NO: 2302279 - RNA, 15 nt, Human
acugcaggccccgcu

SEQ ID NO: 2302280 - RNA, 12 nt, Human
acugcaggcccu

SEQ ID NO: 2302281 - RNA, 13 nt, Human
acugcaggcccug

SEQ ID NO: 2302282 - RNA, 14 nt, Human
acugcaggcccugg

SEQ ID NO: 2302283 - RNA, 15 nt, Human
acugcaggcccuggc

SEQ ID NO: 2302284 - RNA, 16 nt, Human
acugcaggcccuggcc

SEQ ID NO: 2302285 - RNA, 23 nt, Human
acugcagccucaaccuccugggc

SEQ ID NO: 2302286 - RNA, 20 nt, Human
acugcagaccuguccuccug

SEQ ID NO: 2302287 - RNA, 21 nt, Human
acugcagaccuguccuccugg

SEQ ID NO: 2302288 - RNA, 23 nt, Human
acugcagaccuguccuccuggug

SEQ ID NO: 2302289 - RNA, 23 nt, Human
acugcaggccccgcuuguccagc

SEQ ID NO: 2302290 - RNA, 13 nt, Human
acugcagggccag

SEQ ID NO: 2302291 - RNA, 15 nt, Human
acugcagggccagga

SEQ ID NO: 2302292 - RNA, 16 nt, Human
acugcagggccaggac

SEQ ID NO: 2302293 - RNA, 17 nt, Human
acugcagggccaggacu

SEQ ID NO: 2302294 - RNA, 20 nt, Human
acugcagggccaggacugag

SEQ ID NO: 2302295 - RNA, 17 nt, Human
acugcagggacugccag

SEQ ID NO: 2302296 - RNA, 18 nt, Human
acugcagggacugccagu

SEQ ID NO: 2302297 - RNA, 16 nt, Human
acugcagggacugcca

SEQ ID NO: 2302298 - RNA, 23 nt, Human
acugcagggaaaauuauuugcau

SEQ ID NO: 2302299 - RNA, 10 nt, Human
acugcaggga

SEQ ID NO: 2302300 - RNA, 17 nt, Human
acugcaggcccuggccu

SEQ ID NO: 2302301 - RNA, 18 nt, Human
acugcaggcccuggccuc

SEQ ID NO: 2302302 - RNA, 19 nt, Human
acugcaggcccuggccucc

SEQ ID NO: 2302303 - RNA, 22 nt, Human
acugcaggcccuggccuccccu

SEQ ID NO: 2302304 - RNA, 23 nt, Human
acuggcauggauauaguuuuacu

SEQ ID NO: 2302305 - RNA, 21 nt, Human
acuggcauggauauaguuuua

SEQ ID NO: 2302306 - RNA, 22 nt, Human
acuggccugcacggugggccuu

SEQ ID NO: 2302307 - RNA, 23 nt, Human
acuggccucugcugauccuccca

SEQ ID NO: 2302308 - RNA, 21 nt, Human
acuggcuagaguccucacucc

SEQ ID NO: 2302309 - RNA, 18 nt, Human
acuggcuagaguccucac

SEQ ID NO: 2302310 - RNA, 23 nt, Human
acuggcguagaaguuuuuguacu

SEQ ID NO: 2302311 - RNA, 16 nt, Human
acuggccucugcugau

SEQ ID NO: 2302312 - RNA, 19 nt, Human
acuggcgacacguagcagc

SEQ ID NO: 2302313 - RNA, 22 nt, Human
acuggcaguuuuccauugguuu

SEQ ID NO: 2302314 - RNA, 16 nt, Human
acuggcaguuuuccau

SEQ ID NO: 2302315 - RNA, 14 nt, Human
acuggcagcaucuu

SEQ ID NO: 2302316 - RNA, 16 nt, Human
acuggcacugaauuaa

SEQ ID NO: 2302317 - RNA, 21 nt, Human
acuggcaaacuucagacugaa

SEQ ID NO: 2302318 - RNA, 20 nt, Human
acuggcacugaauuaaucau

SEQ ID NO: 2302319 - RNA, 22 nt, Human
acuggcacaguuuucugagaaa

SEQ ID NO: 2302320 - RNA, 21 nt, Human
acuggcacaguuuucugagaa

SEQ ID NO: 2302321 - RNA, 17 nt, Human
acuggcuggcugcagug

SEQ ID NO: 2302322 - RNA, 16 nt, Human
acuggcuggcugcagu

SEQ ID NO: 2302323 - RNA, 17 nt, Human
acuggcugccuccacuc

SEQ ID NO: 2302324 - RNA, 19 nt, Human
acuggcugccuccacuccc

SEQ ID NO: 2302325 - RNA, 21 nt, Human
acuggcugccuccacucccac

SEQ ID NO: 2302326 - RNA, 22 nt, Human
acuggcugccuccacucccacu

SEQ ID NO: 2302327 - RNA, 12 nt, Human
acuggcugguga

SEQ ID NO: 2302328 - RNA, 13 nt, Human
uccuucagcccuc

SEQ ID NO: 2302329 - RNA, 14 nt, Human
uccuucagcccuca

SEQ ID NO: 2302330 - RNA, 15 nt, Human
uccuucagcccucac

SEQ ID NO: 2302331 - RNA, 19 nt, Human
uccuucagcccucaccccu

SEQ ID NO: 2302332 - RNA, 22 nt, Human
acuggcucauauuccugcagcc

SEQ ID NO: 2302333 - RNA, 12 nt, Human
acuggcucucca

SEQ ID NO: 2302334 - RNA, 13 nt, Human
acuggcucuccaa

SEQ ID NO: 2302335 - RNA, 14 nt, Human
acuggcucuccaag

SEQ ID NO: 2302336 - RNA, 15 nt, Human
acuggcucuccaagu

SEQ ID NO: 2302337 - RNA, 16 nt, Human
acuggcucuccaagug

SEQ ID NO: 2302338 - RNA, 14 nt, Human
acuggcucucucca

SEQ ID NO: 2302339 - RNA, 15 nt, Human
acuggcucucuccag

SEQ ID NO: 2302340 - RNA, 17 nt, Human
acuggcucuccaagugc

SEQ ID NO: 2302341 - RNA, 20 nt, Human
acuggcucuccaagugccag

SEQ ID NO: 2302342 - RNA, 21 nt, Human
acuggcucuccaagugccaga

SEQ ID NO: 2302343 - RNA, 22 nt, Human
acuggcucuccaagugccagag

SEQ ID NO: 2302344 - RNA, 22 nt, Human
acuggcugcaaaggguaucagg

SEQ ID NO: 2302345 - RNA, 16 nt, Human
acuggcucucuccagg

SEQ ID NO: 2302346 - RNA, 17 nt, Human
acuggcucucuccagga

SEQ ID NO: 2302347 - RNA, 23 nt, Human
acuggcucucuccaggauccaga

SEQ ID NO: 2302348 - RNA, 19 nt, Human
acuggcugccagcuauuuu

SEQ ID NO: 2302349 - RNA, 20 nt, Human
acuggcugccagcuauuuuu

SEQ ID NO: 2302350 - RNA, 12 nt, Human
acuggcugccuc

SEQ ID NO: 2302351 - RNA, 14 nt, Human
acuggcugccucca

SEQ ID NO: 2302352 - RNA, 16 nt, Human
acuggcugccuccacu

SEQ ID NO: 2302353 - RNA, 21 nt, Human
uccuuccucacaccaggcuug

SEQ ID NO: 2302354 - RNA, 16 nt, Human
uccuuccucugagccu

SEQ ID NO: 2302355 - RNA, 16 nt, Human
uccuuccucacaccag

SEQ ID NO: 2302356 - RNA, 21 nt, Human
uccuuccuacacccuuggacu

SEQ ID NO: 2302357 - RNA, 16 nt, Human
uccuuccucugaggcu

SEQ ID NO: 2302358 - RNA, 17 nt, Human
uccuuccucugagccuu

SEQ ID NO: 2302359 - RNA, 22 nt, Human
uccuuccuacacccuuggacuu

SEQ ID NO: 2302360 - RNA, 23 nt, Human
uccuuccuacacccuuggacuug

SEQ ID NO: 2302361 - RNA, 20 nt, Human
uccuuccuggagcccagagg

SEQ ID NO: 2302362 - RNA, 12 nt, Human
uccuucccucuc

SEQ ID NO: 2302363 - RNA, 17 nt, Human
uccuuccccuuucccca

SEQ ID NO: 2302364 - RNA, 20 nt, Human
uccuucccaggaguggagga

SEQ ID NO: 2302365 - RNA, 21 nt, Human
uccuuccaacaggagcuggga

SEQ ID NO: 2302366 - RNA, 20 nt, Human
uccuuccaacaggagcuggg

SEQ ID NO: 2302367 - RNA, 14 nt, Human
uccuuccaacagga

SEQ ID NO: 2302368 - RNA, 15 nt, Human
uccuucauuuccucc

SEQ ID NO: 2302369 - RNA, 15 nt, Human
uccuucccuggcuug

SEQ ID NO: 2302370 - RNA, 14 nt, Human
uccuucccuggcuu

SEQ ID NO: 2302371 - RNA, 12 nt, Human
uccuucccuggc

SEQ ID NO: 2302372 - RNA, 20 nt, Human
uccuucccugggcugugcua

SEQ ID NO: 2302373 - RNA, 15 nt, Human
uccuucccuucucca

SEQ ID NO: 2302374 - RNA, 12 nt, Human
uccuucccuggg

SEQ ID NO: 2302375 - RNA, 19 nt, Human
uccuucccugggcugugcu

SEQ ID NO: 2302376 - RNA, 12 nt, Human
uccuucagugca

SEQ ID NO: 2302377 - RNA, 18 nt, Human
uccuucagggugaugcca

SEQ ID NO: 2302378 - RNA, 23 nt, Human
uccuucagggugaugccagguuc

SEQ ID NO: 2302379 - RNA, 18 nt, Human
uccuucagcuuccauuuc

SEQ ID NO: 2302380 - RNA, 21 nt, Human
uccuucagcccucaccccugg

SEQ ID NO: 2302381 - RNA, 12 nt, Human
uccuucagugcc

SEQ ID NO: 2302382 - RNA, 11 nt, Human
uccuucagugc

SEQ ID NO: 2302383 - RNA, 13 nt, Human
uccuucagccuga

SEQ ID NO: 2302384 - RNA, 22 nt, Human
uccuucagugccuuauggaaca

SEQ ID NO: 2302385 - RNA, 14 nt, Human
uccuucauuuccuc

SEQ ID NO: 2302386 - RNA, 11 nt, Human
uccuucauuuc

SEQ ID NO: 2302387 - RNA, 13 nt, Human
uccuucagugccu

SEQ ID NO: 2302388 - RNA, 20 nt, Human
uccuucagugccuuauggaa

SEQ ID NO: 2302389 - RNA, 17 nt, Human
acugcugcuagagccag

SEQ ID NO: 2302390 - RNA, 21 nt, Human
acugcugcccagccuccaagc

SEQ ID NO: 2302391 - RNA, 16 nt, Human
acugcugcccagccuc

SEQ ID NO: 2302392 - RNA, 18 nt, Human
acugcugcccagccucca

SEQ ID NO: 2302393 - RNA, 12 nt, Human
acugcuggcugc

SEQ ID NO: 2302394 - RNA, 21 nt, Human
acugcugcuuuuugagguggc

SEQ ID NO: 2302395 - RNA, 13 nt, Human
acugcugcugccu

SEQ ID NO: 2302396 - RNA, 14 nt, Human
acugcugcuucucc

SEQ ID NO: 2302397 - RNA, 12 nt, Human
acugcugcuuuu

SEQ ID NO: 2302398 - RNA, 18 nt, Human
acugcuuccagugaggcu

SEQ ID NO: 2302399 - RNA, 21 nt, Human
acugcuuccagugaggcucug

SEQ ID NO: 2302400 - RNA, 22 nt, Human
acugcuuccagugaggcucugc

SEQ ID NO: 2302401 - RNA, 23 nt, Human
acugcuuccagugaggcucugcc

SEQ ID NO: 2302402 - RNA, 20 nt, Human
acuggcaaacuucagacuga

SEQ ID NO: 2302403 - RNA, 16 nt, Human
acuggcaaacuucaga

SEQ ID NO: 2302404 - RNA, 13 nt, Human
acuggcaaacuuc

SEQ ID NO: 2302405 - RNA, 12 nt, Human
acuggcaaaagg

SEQ ID NO: 2302406 - RNA, 22 nt, Human
acuggcaaaaggaucuuugugg

SEQ ID NO: 2302407 - RNA, 22 nt, Human
acuggauuaaacuuaaucuaaa

SEQ ID NO: 2302408 - RNA, 13 nt, Human
acugcuggcugcc

SEQ ID NO: 2302409 - RNA, 15 nt, Human
acugcuucccauccu

SEQ ID NO: 2302410 - RNA, 16 nt, Human
acugcuucccauccua

SEQ ID NO: 2302411 - RNA, 17 nt, Human
acugcuucccauccuac

SEQ ID NO: 2302412 - RNA, 19 nt, Human
acugcuucccauccuaccc

SEQ ID NO: 2302413 - RNA, 20 nt, Human
acugcuucccauccuacccu

SEQ ID NO: 2302414 - RNA, 18 nt, Human
acugcuugaggaaaacaa

SEQ ID NO: 2302415 - RNA, 15 nt, Human
acugcuugaggaaaa

SEQ ID NO: 2302416 - RNA, 14 nt, Human
acugcuugaggaaa

SEQ ID NO: 2302417 - RNA, 20 nt, Human
acugcauaccaaccugggca

SEQ ID NO: 2302418 - RNA, 16 nt, Human
acugcauaccaaccug

SEQ ID NO: 2302419 - RNA, 14 nt, Human
acugcauacaaucu

SEQ ID NO: 2302420 - RNA, 21 nt, Human
acugcagugaaagacaagcug

SEQ ID NO: 2302421 - RNA, 22 nt, Human
acugcagugaaagacaagcugc

SEQ ID NO: 2302422 - RNA, 22 nt, Human
acugcagggccaggacugagcc

SEQ ID NO: 2302423 - RNA, 15 nt, Human
acugcaggggccgag

SEQ ID NO: 2302424 - RNA, 18 nt, Human
acugccuuggcuucaggg

SEQ ID NO: 2302425 - RNA, 22 nt, Human
acugccuugaauauccccuccc

SEQ ID NO: 2302426 - RNA, 11 nt, Human
acugccuuuga

SEQ ID NO: 2302427 - RNA, 17 nt, Human
acugccuugaauauccc

SEQ ID NO: 2302428 - RNA, 18 nt, Human
acugccuugaauaucccc

SEQ ID NO: 2302429 - RNA, 21 nt, Human
acugccuugaauauccccucc

SEQ ID NO: 2302430 - RNA, 22 nt, Human
acugccuucucaacuccaaacu

SEQ ID NO: 2302431 - RNA, 19 nt, Human
acugccuuuggcagaguuc

SEQ ID NO: 2302432 - RNA, 16 nt, Human
acugccuuuggcagag

SEQ ID NO: 2302433 - RNA, 13 nt, Human
acugccuuugacc

SEQ ID NO: 2302434 - RNA, 15 nt, Human
acugcgacuuucugc

SEQ ID NO: 2302435 - RNA, 17 nt, Human
acugcgacuuucugccu

SEQ ID NO: 2302436 - RNA, 18 nt, Human
acugcgacuuucugccug

SEQ ID NO: 2302437 - RNA, 19 nt, Human
acugcgggaugguccuggg

SEQ ID NO: 2302438 - RNA, 20 nt, Human
acugcggaaaaggaaggaaa

SEQ ID NO: 2302439 - RNA, 23 nt, Human
acugcggagaaccuugugccugg

SEQ ID NO: 2302440 - RNA, 18 nt, Human
acugcgaucuucagagca

SEQ ID NO: 2302441 - RNA, 19 nt, Human
acugcgaucuucagagcag

SEQ ID NO: 2302442 - RNA, 19 nt, Human
acugcgacuuucugccugg

SEQ ID NO: 2302443 - RNA, 21 nt, Human
acugcgacuuucugccuggag

SEQ ID NO: 2302444 - RNA, 22 nt, Human
acugcgacuuucugccuggagu

SEQ ID NO: 2302445 - RNA, 23 nt, Human
acugcgacuuucugccuggagug

SEQ ID NO: 2302446 - RNA, 22 nt, Human
acugcgggaugguccuggggcu

SEQ ID NO: 2302447 - RNA, 16 nt, Human
acugcggggcuuggcu

SEQ ID NO: 2302448 - RNA, 18 nt, Human
acugcggggcuuggcuga

SEQ ID NO: 2302449 - RNA, 21 nt, Human
acugcgggaugguccuggggc

SEQ ID NO: 2302450 - RNA, 20 nt, Human
acugcgggaugguccugggg

SEQ ID NO: 2302451 - RNA, 22 nt, Human
acugcuacuguaauuuuauaug

SEQ ID NO: 2302452 - RNA, 18 nt, Human
acugcuacuguaauuuua

SEQ ID NO: 2302453 - RNA, 18 nt, Human
acugcuaggcgagugcca

SEQ ID NO: 2302454 - RNA, 19 nt, Human
acugcuaggcgagugccag

SEQ ID NO: 2302455 - RNA, 20 nt, Human
acugcuaggcgagugccagg

SEQ ID NO: 2302456 - RNA, 21 nt, Human
acugcuaggcgagugccagga

SEQ ID NO: 2302457 - RNA, 22 nt, Human
acugcuaggcgagugccaggac

SEQ ID NO: 2302458 - RNA, 23 nt, Human
acugcuaggcgagugccaggacu

SEQ ID NO: 2302459 - RNA, 21 nt, Human
acugcuaggugggccagcccc

SEQ ID NO: 2302460 - RNA, 20 nt, Human
acugcuaggugggccagccc

SEQ ID NO: 2302461 - RNA, 17 nt, Human
acugcuaggugggccag

SEQ ID NO: 2302462 - RNA, 16 nt, Human
acugcuaggugggcca

SEQ ID NO: 2302463 - RNA, 23 nt, Human
acugcuaggugggccagccccuc

SEQ ID NO: 2302464 - RNA, 22 nt, Human
acugcuaggugggccagccccu

SEQ ID NO: 2302465 - RNA, 19 nt, Human
acugcuagucuuaagaacu

SEQ ID NO: 2302466 - RNA, 18 nt, Human
acugcucaagaagacaug

SEQ ID NO: 2302467 - RNA, 16 nt, Human
acugcucaagaagaca

SEQ ID NO: 2302468 - RNA, 23 nt, Human
acugcucaucauuccuugagaaa

SEQ ID NO: 2302469 - RNA, 19 nt, Human
acugcucaucauuccuuga

SEQ ID NO: 2302470 - RNA, 18 nt, Human
acugcuccccagcccugg

SEQ ID NO: 2302471 - RNA, 12 nt, Human
acugcucugaug

SEQ ID NO: 2302472 - RNA, 15 nt, Human
acugcucuuguuucu

SEQ ID NO: 2302473 - RNA, 18 nt, Human
acugcucuuguuucuuuu

SEQ ID NO: 2302474 - RNA, 11 nt, Human
acugcugcaag

SEQ ID NO: 2302475 - RNA, 15 nt, Human
acugcugcaaggccu

SEQ ID NO: 2302476 - RNA, 18 nt, Human
acugcugcaaggccuuuc

SEQ ID NO: 2302477 - RNA, 15 nt, Human
ucgaauuuuuauuau

SEQ ID NO: 2302478 - RNA, 16 nt, Human
ucgaagcucagcccac

SEQ ID NO: 2302479 - RNA, 15 nt, Human
ucgaagcucagccca

SEQ ID NO: 2302480 - RNA, 14 nt, Human
ucgaagcucagccc

SEQ ID NO: 2302481 - RNA, 23 nt, Human
ucgaagcgcgccacucgcuuccc

SEQ ID NO: 2302482 - RNA, 15 nt, Human
uccuuucuaaacaag

SEQ ID NO: 2302483 - RNA, 15 nt, Human
ucgaacuggcugcaa

SEQ ID NO: 2302484 - RNA, 14 nt, Human
ucgaacuggcugca

SEQ ID NO: 2302485 - RNA, 13 nt, Human
ucgaacuggcugc

SEQ ID NO: 2302486 - RNA, 13 nt, Human
uccuuuccccagc

SEQ ID NO: 2302487 - RNA, 14 nt, Human
uccuuuccccagcc

SEQ ID NO: 2302488 - RNA, 15 nt, Human
uccuuuccccagccc

SEQ ID NO: 2302489 - RNA, 17 nt, Human
uccuuuccaaggcuucu

SEQ ID NO: 2302490 - RNA, 18 nt, Human
uccuuuccaaggcuucuc

SEQ ID NO: 2302491 - RNA, 16 nt, Human
uccuuucauuuacugu

SEQ ID NO: 2302492 - RNA, 20 nt, Human
uccuuucauuuacuguggcu

SEQ ID NO: 2302493 - RNA, 14 nt, Human
uccuuucccuccac

SEQ ID NO: 2302494 - RNA, 16 nt, Human
uccuuuccccagccca

SEQ ID NO: 2302495 - RNA, 17 nt, Human
uccuuuccccagcccag

SEQ ID NO: 2302496 - RNA, 20 nt, Human
uccuuuccccagcccagggu

SEQ ID NO: 2302497 - RNA, 13 nt, Human
uccuuucccucca

SEQ ID NO: 2302498 - RNA, 18 nt, Human
uccuuuccccagcccagg

SEQ ID NO: 2302499 - RNA, 14 nt, Human
uccuuucuaaacaa

SEQ ID NO: 2302500 - RNA, 22 nt, Human
uccuuucuaacaaaaaaauaua

SEQ ID NO: 2302501 - RNA, 19 nt, Human
uccuuucaaugguuugcaa

SEQ ID NO: 2302502 - RNA, 17 nt, Human
uccuuucaccccagggc

SEQ ID NO: 2302503 - RNA, 20 nt, Human
uccuuucacaaccuucugug

SEQ ID NO: 2302504 - RNA, 15 nt, Human
uccuuucaccacaug

SEQ ID NO: 2302505 - RNA, 22 nt, Human
uccuuucagggaauuucaggaa

SEQ ID NO: 2302506 - RNA, 21 nt, Human
uccuuucagggaauuucagga

SEQ ID NO: 2302507 - RNA, 23 nt, Human
uccuuucagggaauuucaggaac

SEQ ID NO: 2302508 - RNA, 21 nt, Human
uccuuucaccccagggccuga

SEQ ID NO: 2302509 - RNA, 19 nt, Human
uccuuucaccccagggccu

SEQ ID NO: 2302510 - RNA, 18 nt, Human
uccuuucaccccagggcc

SEQ ID NO: 2302511 - RNA, 16 nt, Human
uccuuuauauuuagug

SEQ ID NO: 2302512 - RNA, 21 nt, Human
uccuuuauguggaaaacagaa

SEQ ID NO: 2302513 - RNA, 16 nt, Human
uccuuucacaaccuuc

SEQ ID NO: 2302514 - RNA, 18 nt, Human
uccuuucacaaccuucug

SEQ ID NO: 2302515 - RNA, 19 nt, Human
uccuuucacaaccuucugu

SEQ ID NO: 2302516 - RNA, 14 nt, Human
uccuuccugucuuc

SEQ ID NO: 2302517 - RNA, 13 nt, Human
uccuuccugucuu

SEQ ID NO: 2302518 - RNA, 12 nt, Human
uccuuccugucu

SEQ ID NO: 2302519 - RNA, 19 nt, Human
uccuuccugucuuccugca

SEQ ID NO: 2302520 - RNA, 17 nt, Human
uccuuccugucuuccug

SEQ ID NO: 2302521 - RNA, 14 nt, Human
uccuuccuguucug

SEQ ID NO: 2302522 - RNA, 23 nt, Human
uccuuuaggagggaguuaucuaa

SEQ ID NO: 2302523 - RNA, 13 nt, Human
uccuuuauaauga

SEQ ID NO: 2302524 - RNA, 20 nt, Human
ucgaauuuuuauuauuuguu

SEQ ID NO: 2302525 - RNA, 12 nt, Human
ucgacacagagu

SEQ ID NO: 2302526 - RNA, 17 nt, Human
ucgaccaauucaacccu

SEQ ID NO: 2302527 - RNA, 14 nt, Human
ucgaccccaaagcc

SEQ ID NO: 2302528 - RNA, 19 nt, Human
ucgaccccaaagccccuug

SEQ ID NO: 2302529 - RNA, 18 nt, Human
ucgaccugauuuacaguu

SEQ ID NO: 2302530 - RNA, 19 nt, Human
ucgaccugauuuacaguuu

SEQ ID NO: 2302531 - RNA, 17 nt, Human
ucgacugugaccugugg

SEQ ID NO: 2302532 - RNA, 16 nt, Human
ucgacugugaccugug

SEQ ID NO: 2302533 - RNA, 16 nt, Human
ucgacucagccucagg

SEQ ID NO: 2302534 - RNA, 14 nt, Human
ucgacucaggaucc

SEQ ID NO: 2302535 - RNA, 16 nt, Human
ucgacucaggauccag

SEQ ID NO: 2302536 - RNA, 21 nt, Human
ucgacucaggauccagucccu

SEQ ID NO: 2302537 - RNA, 14 nt, Human
ucgacucagccuca

SEQ ID NO: 2302538 - RNA, 20 nt, Human
ucgaccugcggcugcugugu

SEQ ID NO: 2302539 - RNA, 22 nt, Human
ucgaccugcggcugcugugugc

SEQ ID NO: 2302540 - RNA, 13 nt, Human
ucgaccugccucg

SEQ ID NO: 2302541 - RNA, 21 nt, Human
ucgagcaguccugccucagcc

SEQ ID NO: 2302542 - RNA, 17 nt, Human
ucgagcaguccugccuc

SEQ ID NO: 2302543 - RNA, 14 nt, Human
ucgagcagggugcu

SEQ ID NO: 2302544 - RNA, 13 nt, Human
ucgaggacaggga

SEQ ID NO: 2302545 - RNA, 15 nt, Human
ucgagcaugccugga

SEQ ID NO: 2302546 - RNA, 14 nt, Human
ucgagcaugccugg

SEQ ID NO: 2302547 - RNA, 22 nt, Human
ucgagcaguccugccucagccu

SEQ ID NO: 2302548 - RNA, 20 nt, Human
ucgagcagggugcugugggu

SEQ ID NO: 2302549 - RNA, 19 nt, Human
ucgaggacuguauuuguga

SEQ ID NO: 2302550 - RNA, 18 nt, Human
ucgaggcccagcgaccuc

SEQ ID NO: 2302551 - RNA, 20 nt, Human
ucgaggacuguauuugugac

SEQ ID NO: 2302552 - RNA, 22 nt, Human
ucgccuuagcacuaccacuccu

SEQ ID NO: 2302553 - RNA, 14 nt, Human
ucgccuuagcaugu

SEQ ID NO: 2302554 - RNA, 16 nt, Human
ucgccuguaaucucac

SEQ ID NO: 2302555 - RNA, 14 nt, Human
ucgaggacagggag

SEQ ID NO: 2302556 - RNA, 17 nt, Human
ucgaggacagggaggug

SEQ ID NO: 2302557 - RNA, 20 nt, Human
ucgccuuagcauguuugcug

SEQ ID NO: 2302558 - RNA, 21 nt, Human
ucgccuuagcauguuugcuga

SEQ ID NO: 2302559 - RNA, 23 nt, Human
ucgccuuucccaggugcuacacc

SEQ ID NO: 2302560 - RNA, 14 nt, Human
ucgcgacaaugcaa

SEQ ID NO: 2302561 - RNA, 13 nt, Human
ucgcgacaaugca

SEQ ID NO: 2302562 - RNA, 22 nt, Human
acugggaugggaggagaggaca

SEQ ID NO: 2302563 - RNA, 22 nt, Human
acugggcuuggggaccagagcu

SEQ ID NO: 2302564 - RNA, 18 nt, Human
acugggcaaugauggcaa

SEQ ID NO: 2302565 - RNA, 13 nt, Human
acugggcaaugau

SEQ ID NO: 2302566 - RNA, 23 nt, Human
acugggagccuacccacccccag

SEQ ID NO: 2302567 - RNA, 12 nt, Human
acugggagccua

SEQ ID NO: 2302568 - RNA, 19 nt, Human
acugggagaggugccagca

SEQ ID NO: 2302569 - RNA, 22 nt, Human
acugggagaggugccagcaacu

SEQ ID NO: 2302570 - RNA, 23 nt, Human
acugggagaggugccagcaacug

SEQ ID NO: 2302571 - RNA, 12 nt, Human
ucgcuccugugu

SEQ ID NO: 2302572 - RNA, 14 nt, Human
ucgcuccugcccac

SEQ ID NO: 2302573 - RNA, 13 nt, Human
ucgcuccuguguc

SEQ ID NO: 2302574 - RNA, 17 nt, Human
acugggagaaaugaaaa

SEQ ID NO: 2302575 - RNA, 20 nt, Human
acuggguacuuguggacaca

SEQ ID NO: 2302576 - RNA, 23 nt, Human
acuggguacuuguggacacagcu

SEQ ID NO: 2302577 - RNA, 16 nt, Human
acuguaaggcaaucau

SEQ ID NO: 2302578 - RNA, 21 nt, Human
acuggggauugggugggcagg

SEQ ID NO: 2302579 - RNA, 12 nt, Human
acuggggcacuu

SEQ ID NO: 2302580 - RNA, 19 nt, Human
acuggguacuuguggacac

SEQ ID NO: 2302581 - RNA, 17 nt, Human
acuggggauuggguggg

SEQ ID NO: 2302582 - RNA, 18 nt, Human
acuggggaugugggaggg

SEQ ID NO: 2302583 - RNA, 16 nt, Human
acuggggaugugggag

SEQ ID NO: 2302584 - RNA, 17 nt, Human
acuggggaugugggagg

SEQ ID NO: 2302585 - RNA, 21 nt, Human
acuggggagcccgucucagug

SEQ ID NO: 2302586 - RNA, 13 nt, Human
acuggggagcccg

SEQ ID NO: 2302587 - RNA, 17 nt, Human
acuggggagcccgucuc

SEQ ID NO: 2302588 - RNA, 16 nt, Human
acugggaugagccgcu

SEQ ID NO: 2302589 - RNA, 13 nt, Human
acuguacuccucc

SEQ ID NO: 2302590 - RNA, 14 nt, Human
acuguacuccuccc

SEQ ID NO: 2302591 - RNA, 23 nt, Human
acuguagaaaagggaacugaaca

SEQ ID NO: 2302592 - RNA, 15 nt, Human
acuguagaaaugaug

SEQ ID NO: 2302593 - RNA, 18 nt, Human
acuguagaaugauuucau

SEQ ID NO: 2302594 - RNA, 20 nt, Human
acuguagaaugauuucaugc

SEQ ID NO: 2302595 - RNA, 19 nt, Human
acuguagaaugauuucaug

SEQ ID NO: 2302596 - RNA, 14 nt, Human
acuguacaugaaaa

SEQ ID NO: 2302597 - RNA, 13 nt, Human
acuguacaugaaa

SEQ ID NO: 2302598 - RNA, 23 nt, Human
acuguacaugaaaacacauuuuu

SEQ ID NO: 2302599 - RNA, 13 nt, Human
acuguacaaagua

SEQ ID NO: 2302600 - RNA, 19 nt, Human
acuguaauuugugauacaa

SEQ ID NO: 2302601 - RNA, 12 nt, Human
acuguaauuuag

SEQ ID NO: 2302602 - RNA, 23 nt, Human
acuguaaugaaccgcugaauaug

SEQ ID NO: 2302603 - RNA, 21 nt, Human
acuguaagacucauucccuag

SEQ ID NO: 2302604 - RNA, 22 nt, Human
acuguaaugaaccgcugaauau

SEQ ID NO: 2302605 - RNA, 16 nt, Human
acuguaauaaagauga

SEQ ID NO: 2302606 - RNA, 15 nt, Human
acuguacaaaguaga

SEQ ID NO: 2302607 - RNA, 14 nt, Human
acuguacaaaguag

SEQ ID NO: 2302608 - RNA, 17 nt, Human
acuguaauuuuauauga

SEQ ID NO: 2302609 - RNA, 20 nt, Human
acuguacagacagaaaaaac

SEQ ID NO: 2302610 - RNA, 21 nt, Human
ucccagguaccagcugcgcuu

SEQ ID NO: 2302611 - RNA, 19 nt, Human
ucccagguaccagcugcgc

SEQ ID NO: 2302612 - RNA, 15 nt, Human
ucccagugaauucuu

SEQ ID NO: 2302613 - RNA, 16 nt, Human
ucccagucucuggcag

SEQ ID NO: 2302614 - RNA, 22 nt, Human
ucccagugccgagaaggaagcc

SEQ ID NO: 2302615 - RNA, 19 nt, Human
ucccagugccgagaaggaa

SEQ ID NO: 2302616 - RNA, 15 nt, Human
ucccaguucaggagu

SEQ ID NO: 2302617 - RNA, 17 nt, Human
ucccagugucuuccugu

SEQ ID NO: 2302618 - RNA, 19 nt, Human
ucccagugucuuccugugg

SEQ ID NO: 2302619 - RNA, 21 nt, Human
ucccagugggaggggcaggcu

SEQ ID NO: 2302620 - RNA, 22 nt, Human
ucccagugggaggggcaggcug

SEQ ID NO: 2302621 - RNA, 23 nt, Human
ucccagugggaggggcaggcuga

SEQ ID NO: 2302622 - RNA, 15 nt, Human
ucccagugucuuccu

SEQ ID NO: 2302623 - RNA, 22 nt, Human
ucccaguggcugcugcccaggc

SEQ ID NO: 2302624 - RNA, 23 nt, Human
ucccaguggcugcugcccaggcc

SEQ ID NO: 2302625 - RNA, 10 nt, Human
ucccaguggg

SEQ ID NO: 2302626 - RNA, 15 nt, Human
ucccagugggaggcg

SEQ ID NO: 2302627 - RNA, 14 nt, Human
ucccagugggaggg

SEQ ID NO: 2302628 - RNA, 15 nt, Human
ucccagugggagggg

SEQ ID NO: 2302629 - RNA, 17 nt, Human
ucccagugggaggggca

SEQ ID NO: 2302630 - RNA, 20 nt, Human
ucccagugggaggggcaggc

SEQ ID NO: 2302631 - RNA, 22 nt, Human
ucccaguggccucaacccuccc

SEQ ID NO: 2302632 - RNA, 20 nt, Human
ucccaguggccucaacccuc

SEQ ID NO: 2302633 - RNA, 15 nt, Human
ucccaguggcugcug

SEQ ID NO: 2302634 - RNA, 16 nt, Human
ucccaguggcugcugc

SEQ ID NO: 2302635 - RNA, 17 nt, Human
ucccaguggcugcugcc

SEQ ID NO: 2302636 - RNA, 18 nt, Human
ucccaguggcugcugccc

SEQ ID NO: 2302637 - RNA, 19 nt, Human
ucccaguggcugcugccca

SEQ ID NO: 2302638 - RNA, 21 nt, Human
ucccaguggcugcugcccagg

SEQ ID NO: 2302639 - RNA, 19 nt, Human
ucccaguggccucaacccu

SEQ ID NO: 2302640 - RNA, 18 nt, Human
ucccaguggccucaaccc

SEQ ID NO: 2302641 - RNA, 14 nt, Human
ucccaguggccuca

SEQ ID NO: 2302642 - RNA, 20 nt, Human
ucccagugacacuucagaga

SEQ ID NO: 2302643 - RNA, 22 nt, Human
ucccagugacacuucagagagc

SEQ ID NO: 2302644 - RNA, 19 nt, Human
ucccagugacacuucagag

SEQ ID NO: 2302645 - RNA, 15 nt, Human
ucccagugacacuuc

SEQ ID NO: 2302646 - RNA, 18 nt, Human
ucccaggggaccacaccu

SEQ ID NO: 2302647 - RNA, 13 nt, Human
acuacauucauuu

SEQ ID NO: 2302648 - RNA, 18 nt, Human
ucccaggggcuggcuuca

SEQ ID NO: 2302649 - RNA, 19 nt, Human
acuacaugugguuuauaga

SEQ ID NO: 2302650 - RNA, 23 nt, Human
ucccaggguagcccgccugccag

SEQ ID NO: 2302651 - RNA, 21 nt, Human
ucccaggguagcccgccugcc

SEQ ID NO: 2302652 - RNA, 22 nt, Human
ucccaggguagcccgccugcca

SEQ ID NO: 2302653 - RNA, 21 nt, Human
ucccaggggcccaaggcggcc

SEQ ID NO: 2302654 - RNA, 22 nt, Human
ucccaggggcccaaggcggccc

SEQ ID NO: 2302655 - RNA, 16 nt, Human
ucccaggguagcccgc

SEQ ID NO: 2302656 - RNA, 18 nt, Human
ucccaggguagcccgccu

SEQ ID NO: 2302657 - RNA, 18 nt, Human
ucccagguaagcaggagg

SEQ ID NO: 2302658 - RNA, 19 nt, Human
ucccagguaagcaggagga

SEQ ID NO: 2302659 - RNA, 16 nt, Human
ucccagguaccagcug

SEQ ID NO: 2302660 - RNA, 17 nt, Human
ucccagguaccagcugc

SEQ ID NO: 2302661 - RNA, 18 nt, Human
ucccagguaccagcugcg

SEQ ID NO: 2302662 - RNA, 20 nt, Human
acuacaugcagcccaugccc

SEQ ID NO: 2302663 - RNA, 15 nt, Human
acuacaugugguuua

SEQ ID NO: 2302664 - RNA, 18 nt, Human
acuacaugugguuuauag

SEQ ID NO: 2302665 - RNA, 14 nt, Human
acuacaugcacuug

SEQ ID NO: 2302666 - RNA, 12 nt, Human
acuacaugcacu

SEQ ID NO: 2302667 - RNA, 19 nt, Human
acuacaucgcccuccacau

SEQ ID NO: 2302668 - RNA, 20 nt, Human
acuacaugagaacaaacaga

SEQ ID NO: 2302669 - RNA, 17 nt, Human
acuacaucgcccuccac

SEQ ID NO: 2302670 - RNA, 17 nt, Human
acuacauaaacugacuu

SEQ ID NO: 2302671 - RNA, 23 nt, Human
acuacauaaacugacuuuauccu

SEQ ID NO: 2302672 - RNA, 15 nt, Human
acuacagucaggaaa

SEQ ID NO: 2302673 - RNA, 13 nt, Human
acuacauaaacug

SEQ ID NO: 2302674 - RNA, 16 nt, Human
acuacauaaacugacu

SEQ ID NO: 2302675 - RNA, 16 nt, Human
acuacaguccucccau

SEQ ID NO: 2302676 - RNA, 23 nt, Human
ucccaguucaggagucccaagga

SEQ ID NO: 2302677 - RNA, 20 nt, Human
ucccaguucaggagucccaa

SEQ ID NO: 2302678 - RNA, 14 nt, Human
acuaaccccgggcg

SEQ ID NO: 2302679 - RNA, 20 nt, Human
ucccagugucuuccuguggg

SEQ ID NO: 2302680 - RNA, 18 nt, Human
ucccauaaccgcugauuc

SEQ ID NO: 2302681 - RNA, 22 nt, Human
ucccauaauuuucuucaugcaa

SEQ ID NO: 2302682 - RNA, 15 nt, Human
ucccauaagcuauag

SEQ ID NO: 2302683 - RNA, 22 nt, Human
ucccauaaccgcugauucucag

SEQ ID NO: 2302684 - RNA, 17 nt, Human
ucccauagccaggaaac

SEQ ID NO: 2302685 - RNA, 14 nt, Human
ucccauaccaccca

SEQ ID NO: 2302686 - RNA, 15 nt, Human
ucccauaggcccagu

SEQ ID NO: 2302687 - RNA, 16 nt, Human
ucccauaugccugggc

SEQ ID NO: 2302688 - RNA, 15 nt, Human
ucccauaugccuggg

SEQ ID NO: 2302689 - RNA, 13 nt, Human
ucccaucucacac

SEQ ID NO: 2302690 - RNA, 13 nt, Human
ucccaucgcuguc

SEQ ID NO: 2302691 - RNA, 15 nt, Human
ucccauauccugccu

SEQ ID NO: 2302692 - RNA, 18 nt, Human
ucccauauccugccucag

SEQ ID NO: 2302693 - RNA, 14 nt, Human
ucccaucucacaca

SEQ ID NO: 2302694 - RNA, 19 nt, Human
ucccaucucacacaugagc

SEQ ID NO: 2302695 - RNA, 22 nt, Human
uccccaaaaaccucacccgagg

SEQ ID NO: 2302696 - RNA, 16 nt, Human
uccccaaaaaccucac

SEQ ID NO: 2302697 - RNA, 20 nt, Human
ucccauuuuggaaguuuuca

SEQ ID NO: 2302698 - RNA, 18 nt, Human
uccccaaagucuuaaaau

SEQ ID NO: 2302699 - RNA, 18 nt, Human
uccccaaaucaauacacu

SEQ ID NO: 2302700 - RNA, 23 nt, Human
uccccaaaucaauacacuaguug

SEQ ID NO: 2302701 - RNA, 16 nt, Human
uccccaaaccugcaag

SEQ ID NO: 2302702 - RNA, 19 nt, Human
uccccaaauccgaaccucc

SEQ ID NO: 2302703 - RNA, 14 nt, Human
uccccaaauccgaa

SEQ ID NO: 2302704 - RNA, 23 nt, Human
uccccaacagcgacauagcccau

SEQ ID NO: 2302705 - RNA, 14 nt, Human
uccccaacagugug

SEQ ID NO: 2302706 - RNA, 18 nt, Human
uccccaacauguaauaag

SEQ ID NO: 2302707 - RNA, 20 nt, Human
uccccaacagugugaaguua

SEQ ID NO: 2302708 - RNA, 21 nt, Human
uccccaacagugugaaguuag

SEQ ID NO: 2302709 - RNA, 15 nt, Human
uccccaacaguguga

SEQ ID NO: 2302710 - RNA, 16 nt, Human
uccccaacagugugaa

SEQ ID NO: 2302711 - RNA, 18 nt, Human
uccccaacagugugaagu

SEQ ID NO: 2302712 - RNA, 19 nt, Human
uccccaacagugugaaguu

SEQ ID NO: 2302713 - RNA, 20 nt, Human
uccccaacccugccccugcc

SEQ ID NO: 2302714 - RNA, 18 nt, Human
uccccaacccugccccug

SEQ ID NO: 2302715 - RNA, 17 nt, Human
uccccaacccugccccu

SEQ ID NO: 2302716 - RNA, 16 nt, Human
uccccaacccugcccc

SEQ ID NO: 2302717 - RNA, 23 nt, Human
uccccaacagugugaaguuagaa

SEQ ID NO: 2302718 - RNA, 19 nt, Human
uccccaacccugccccugc

SEQ ID NO: 2302719 - RNA, 17 nt, Human
uccccaagaaagccuca

SEQ ID NO: 2302720 - RNA, 15 nt, Human
uccccaagccuggca

SEQ ID NO: 2302721 - RNA, 23 nt, Human
uccccaagauucacaccugacuc

SEQ ID NO: 2302722 - RNA, 21 nt, Human
uccccaauaauugcagaacua

SEQ ID NO: 2302723 - RNA, 20 nt, Human
uccccaauaauugcagaacu

SEQ ID NO: 2302724 - RNA, 14 nt, Human
uccccacacuccua

SEQ ID NO: 2302725 - RNA, 18 nt, Human
acguuuacaagccccccc

SEQ ID NO: 2302726 - RNA, 12 nt, Human
acguuucuaaag

SEQ ID NO: 2302727 - RNA, 21 nt, Human
uccagcuauuuuuauuuguuu

SEQ ID NO: 2302728 - RNA, 15 nt, Human
uccagcucaccagcc

SEQ ID NO: 2302729 - RNA, 14 nt, Human
uccagcucaccagc

SEQ ID NO: 2302730 - RNA, 12 nt, Human
uccagccugggu

SEQ ID NO: 2302731 - RNA, 20 nt, Human
uccagcuauaacaguaggga

SEQ ID NO: 2302732 - RNA, 24 nt, Human
uccagccugggugacagagcaagu

SEQ ID NO: 2302733 - RNA, 20 nt, Human
uccagccugggcgacagagc

SEQ ID NO: 2302734 - RNA, 17 nt, Human
uccagccugggcgacag

SEQ ID NO: 2302735 - RNA, 17 nt, Human
uccagccuggggucugg

SEQ ID NO: 2302736 - RNA, 13 nt, Human
uccagccugggug

SEQ ID NO: 2302737 - RNA, 12 nt, Human
acuaaaaauaca

SEQ ID NO: 2302738 - RNA, 16 nt, Human
acuaaaaagaaggaaa

SEQ ID NO: 2302739 - RNA, 11 nt, Human
acuaaaagaua

SEQ ID NO: 2302740 - RNA, 13 nt, Human
acuaaaaauauua

SEQ ID NO: 2302741 - RNA, 17 nt, Human
acuaaaaagaaggaaaa

SEQ ID NO: 2302742 - RNA, 20 nt, Human
acguuuuuaauauaaagccu

SEQ ID NO: 2302743 - RNA, 13 nt, Human
acguuuuuccuuu

SEQ ID NO: 2302744 - RNA, 14 nt, Human
acguuuuuccuuua

SEQ ID NO: 2302745 - RNA, 22 nt, Human
acguuuuuguaaauuaaucuuu

SEQ ID NO: 2302746 - RNA, 13 nt, Human
acuaaaaauacaa

SEQ ID NO: 2302747 - RNA, 12 nt, Human
acguuuccauca

SEQ ID NO: 2302748 - RNA, 16 nt, Human
acguuuacuuaucuua

SEQ ID NO: 2302749 - RNA, 14 nt, Human
acguuucuaaaggc

SEQ ID NO: 2302750 - RNA, 18 nt, Human
acguuuuauuguguuuuu

SEQ ID NO: 2302751 - RNA, 16 nt, Human
acguuuuauuguguuu

SEQ ID NO: 2302752 - RNA, 15 nt, Human
acguuuuauuguguu

SEQ ID NO: 2302753 - RNA, 14 nt, Human
acguuuuauugugu

SEQ ID NO: 2302754 - RNA, 15 nt, Human
acguuuccugagaag

SEQ ID NO: 2302755 - RNA, 23 nt, Human
acuaaacugguuuguugcagcca

SEQ ID NO: 2302756 - RNA, 23 nt, Human
acuaaacucucuuugggaauguu

SEQ ID NO: 2302757 - RNA, 15 nt, Human
acuaaacucucuuug

SEQ ID NO: 2302758 - RNA, 16 nt, Human
acuaaacucucuuugg

SEQ ID NO: 2302759 - RNA, 16 nt, Human
acuaaacucauuuaua

SEQ ID NO: 2302760 - RNA, 14 nt, Human
acuaaacucauuua

SEQ ID NO: 2302761 - RNA, 12 nt, Human
acuaaacucauu

SEQ ID NO: 2302762 - RNA, 14 nt, Human
acuaaacauuuugu

SEQ ID NO: 2302763 - RNA, 13 nt, Human
acuaaacauuuug

SEQ ID NO: 2302764 - RNA, 20 nt, Human
acuaaagcaguggacaccag

SEQ ID NO: 2302765 - RNA, 14 nt, Human
acuaaaguauguaa

SEQ ID NO: 2302766 - RNA, 22 nt, Human
acuaaaguauguaaaguaugua

SEQ ID NO: 2302767 - RNA, 12 nt, Human
acuaaaagaucg

SEQ ID NO: 2302768 - RNA, 23 nt, Human
acuaaaagauauaagugcuguau

SEQ ID NO: 2302769 - RNA, 20 nt, Human
acuaaaaguucuucuccaau

SEQ ID NO: 2302770 - RNA, 16 nt, Human
acuaaaagauauaagu

SEQ ID NO: 2302771 - RNA, 19 nt, Human
acuaaaagauauaagugcu

SEQ ID NO: 2302772 - RNA, 20 nt, Human
acuaaaagauauaagugcug

SEQ ID NO: 2302773 - RNA, 21 nt, Human
acuaaaagauauaagugcugu

SEQ ID NO: 2302774 - RNA, 14 nt, Human
acuaaaauauuuau

SEQ ID NO: 2302775 - RNA, 13 nt, Human
acuaaccacgcug

SEQ ID NO: 2302776 - RNA, 16 nt, Human
acuaaccagcagaaau

SEQ ID NO: 2302777 - RNA, 15 nt, Human
acuaaauagcaugua

SEQ ID NO: 2302778 - RNA, 16 nt, Human
acuaaauagcauguau

SEQ ID NO: 2302779 - RNA, 18 nt, Human
acuaaauagcauguauug

SEQ ID NO: 2302780 - RNA, 19 nt, Human
acuaaauagcauguauugu

SEQ ID NO: 2302781 - RNA, 20 nt, Human
acuaaauagcauguauugug

SEQ ID NO: 2302782 - RNA, 23 nt, Human
acuaaauagcauguauugugucu

SEQ ID NO: 2302783 - RNA, 23 nt, Human
acuaaccagggaagcugucccuc

SEQ ID NO: 2302784 - RNA, 14 nt, Human
acuaaaucucuaau

SEQ ID NO: 2302785 - RNA, 16 nt, Human
acuaaaucucuaauau

SEQ ID NO: 2302786 - RNA, 17 nt, Human
acuaaaucucuaauaug

SEQ ID NO: 2302787 - RNA, 15 nt, Human
acuacaguccuccca

SEQ ID NO: 2302788 - RNA, 23 nt, Human
acuacaggugugagucaccaagc

SEQ ID NO: 2302789 - RNA, 17 nt, Human
acuaaccagcagaaaug

SEQ ID NO: 2302790 - RNA, 15 nt, Human
acuauauuguacaca

SEQ ID NO: 2302791 - RNA, 18 nt, Human
acuauauuaucaugcaaa

SEQ ID NO: 2302792 - RNA, 13 nt, Human
acuauaugugaau

SEQ ID NO: 2302793 - RNA, 22 nt, Human
acuauaucuguauauaaaauau

SEQ ID NO: 2302794 - RNA, 13 nt, Human
acuauauauguga

SEQ ID NO: 2302795 - RNA, 18 nt, Human
acuauauagagauguuuu

SEQ ID NO: 2302796 - RNA, 14 nt, Human
acuauaucuguaua

SEQ ID NO: 2302797 - RNA, 17 nt, Human
acuauaucuguauauaa

SEQ ID NO: 2302798 - RNA, 18 nt, Human
acuauaucuguauauaaa

SEQ ID NO: 2302799 - RNA, 14 nt, Human
acuauagcccaggu

SEQ ID NO: 2302800 - RNA, 20 nt, Human
acuauagcccagguccucug

SEQ ID NO: 2302801 - RNA, 16 nt, Human
acuauauagagauguu

SEQ ID NO: 2302802 - RNA, 17 nt, Human
acuauauagagauguuu

SEQ ID NO: 2302803 - RNA, 17 nt, Human
acuauagccuaggugac

SEQ ID NO: 2302804 - RNA, 23 nt, Human
acuauaauuuaccugaagucuuu

SEQ ID NO: 2302805 - RNA, 19 nt, Human
uccccaggccguggcugcc

SEQ ID NO: 2302806 - RNA, 21 nt, Human
uccccaggccccaggaagccg

SEQ ID NO: 2302807 - RNA, 20 nt, Human
uccccaggccccaggaagcc

SEQ ID NO: 2302808 - RNA, 21 nt, Human
uccccaggccguggcugccca

SEQ ID NO: 2302809 - RNA, 23 nt, Human
uccccaggccguggcugcccaca

SEQ ID NO: 2302810 - RNA, 19 nt, Human
uccccaggccccaggaagc

SEQ ID NO: 2302811 - RNA, 13 nt, Human
uccccaggcccca

SEQ ID NO: 2302812 - RNA, 11 nt, Human
uccccaggccc

SEQ ID NO: 2302813 - RNA, 23 nt, Human
uccccaggccaggccaccaggau

SEQ ID NO: 2302814 - RNA, 14 nt, Human
uccccaggccaggc

SEQ ID NO: 2302815 - RNA, 16 nt, Human
uccccaggccaggcca

SEQ ID NO: 2302816 - RNA, 19 nt, Human
uccccaggccaggccacca

SEQ ID NO: 2302817 - RNA, 22 nt, Human
uccccaggccaggccaccagga

SEQ ID NO: 2302818 - RNA, 23 nt, Human
uccccaggaggccagccuugacc

SEQ ID NO: 2302819 - RNA, 16 nt, Human
uccccaggcaccucac

SEQ ID NO: 2302820 - RNA, 14 nt, Human
uccccacgcccucc

SEQ ID NO: 2302821 - RNA, 12 nt, Human
uccccaggccag

SEQ ID NO: 2302822 - RNA, 20 nt, Human
uccccaccuucuucagccac

SEQ ID NO: 2302823 - RNA, 23 nt, Human
uccccaccuucaauuccugggcc

SEQ ID NO: 2302824 - RNA, 22 nt, Human
uccccaccuucaauuccugggc

SEQ ID NO: 2302825 - RNA, 20 nt, Human
uccccaccuucaauuccugg

SEQ ID NO: 2302826 - RNA, 18 nt, Human
uccccaccuucaauuccu

SEQ ID NO: 2302827 - RNA, 13 nt, Human
uccccaccuggga

SEQ ID NO: 2302828 - RNA, 14 nt, Human
uccccaccugggac

SEQ ID NO: 2302829 - RNA, 10 nt, Human
uccccacacu

SEQ ID NO: 2302830 - RNA, 24 nt, Human
uccccaccgcagacaggaccaggg

SEQ ID NO: 2302831 - RNA, 19 nt, Human
acuauguugcccaggcagg

SEQ ID NO: 2302832 - RNA, 20 nt, Human
acuauguugcccaggcaggu

SEQ ID NO: 2302833 - RNA, 23 nt, Human
acuauguugcccaggcaggucuu

SEQ ID NO: 2302834 - RNA, 18 nt, Human
acuaugaacuucucucag

SEQ ID NO: 2302835 - RNA, 19 nt, Human
acuaugaacuucucucaga

SEQ ID NO: 2302836 - RNA, 21 nt, Human
acuaugaacuucucucagacu

SEQ ID NO: 2302837 - RNA, 13 nt, Human
acuaugaaucuau

SEQ ID NO: 2302838 - RNA, 22 nt, Human
acuaugaaucuauuauacugua

SEQ ID NO: 2302839 - RNA, 23 nt, Human
acuaugaaugggcaaaacugaau

SEQ ID NO: 2302840 - RNA, 17 nt, Human
acuauuauaauuuaaug

SEQ ID NO: 2302841 - RNA, 21 nt, Human
acuauuaagaggcagaaaauu

SEQ ID NO: 2302842 - RNA, 21 nt, Human
acuauuauaauuuaaugcaug

SEQ ID NO: 2302843 - RNA, 18 nt, Human
acuauuauccccauuucu

SEQ ID NO: 2302844 - RNA, 14 nt, Human
acuauuaagaggca

SEQ ID NO: 2302845 - RNA, 15 nt, Human
acucaacaugaguca

SEQ ID NO: 2302846 - RNA, 16 nt, Human
acucaacaugagucaa

SEQ ID NO: 2302847 - RNA, 19 nt, Human
acucaacaugagucaagag

SEQ ID NO: 2302848 - RNA, 19 nt, Human
acucaaauuaaucuuucuu

SEQ ID NO: 2302849 - RNA, 22 nt, Human
acucaacauguuacugaccagc

SEQ ID NO: 2302850 - RNA, 21 nt, Human
acucaacauguuacugaccag

SEQ ID NO: 2302851 - RNA, 20 nt, Human
acucaacauguuacugacca

SEQ ID NO: 2302852 - RNA, 17 nt, Human
acucaacauguuacuga

SEQ ID NO: 2302853 - RNA, 23 nt, Human
acucaacauguuacugaccagca

SEQ ID NO: 2302854 - RNA, 17 nt, Human
acuauguugcccaggca

SEQ ID NO: 2302855 - RNA, 18 nt, Human
acuauguugcccaggcag

SEQ ID NO: 2302856 - RNA, 18 nt, Human
acuaugaacuacaaagcu

SEQ ID NO: 2302857 - RNA, 22 nt, Human
acuaugaaguuuuuuuuauaca

SEQ ID NO: 2302858 - RNA, 22 nt, Human
acuaucaugucaaacgugaaaa

SEQ ID NO: 2302859 - RNA, 20 nt, Human
acuaucagcccaagaugcuu

SEQ ID NO: 2302860 - RNA, 22 nt, Human
acuaucaguuuguccuguagag

SEQ ID NO: 2302861 - RNA, 17 nt, Human
acuaucccggcugcccu

SEQ ID NO: 2302862 - RNA, 16 nt, Human
acuaucccggcugccc

SEQ ID NO: 2302863 - RNA, 22 nt, Human
acuaucuuuuugcuuacaguuu

SEQ ID NO: 2302864 - RNA, 16 nt, Human
acuaucuuggugaauu

SEQ ID NO: 2302865 - RNA, 18 nt, Human
acuaucccggcugcccuu

SEQ ID NO: 2302866 - RNA, 22 nt, Human
acuauccauaguggacauuguu

SEQ ID NO: 2302867 - RNA, 22 nt, Human
uccccuuuucuuuucuacccua

SEQ ID NO: 2302868 - RNA, 23 nt, Human
ucccgaaccccaaggagggagau

SEQ ID NO: 2302869 - RNA, 19 nt, Human
ucccgauucacccugucca

SEQ ID NO: 2302870 - RNA, 21 nt, Human
ucccgcaaacccccuuugugc

SEQ ID NO: 2302871 - RNA, 22 nt, Human
ucccgcaaacccccuuugugcu

SEQ ID NO: 2302872 - RNA, 18 nt, Human
ucccgccagacuguuaga

SEQ ID NO: 2302873 - RNA, 20 nt, Human
ucccgaguagcugggacuac

SEQ ID NO: 2302874 - RNA, 18 nt, Human
ucccgaauagcugggacu

SEQ ID NO: 2302875 - RNA, 21 nt, Human
ucccgccucuucuucuucaga

SEQ ID NO: 2302876 - RNA, 19 nt, Human
ucccgccucuucuucuuca

SEQ ID NO: 2302877 - RNA, 13 nt, Human
ucccgcucagccc

SEQ ID NO: 2302878 - RNA, 21 nt, Human
ucccgccccuucccacucacc

SEQ ID NO: 2302879 - RNA, 15 nt, Human
ucccgccccuucccc

SEQ ID NO: 2302880 - RNA, 14 nt, Human
ucccgcucagcccu

SEQ ID NO: 2302881 - RNA, 15 nt, Human
ucccgcucagcccuc

SEQ ID NO: 2302882 - RNA, 16 nt, Human
ucccgcucagcccucc

SEQ ID NO: 2302883 - RNA, 20 nt, Human
ucccgcucagcccucccugc

SEQ ID NO: 2302884 - RNA, 16 nt, Human
ucccucaaccccacca

SEQ ID NO: 2302885 - RNA, 16 nt, Human
ucccucaauucccccu

SEQ ID NO: 2302886 - RNA, 23 nt, Human
ucccucaacaagggagagaccuc

SEQ ID NO: 2302887 - RNA, 17 nt, Human
ucccucacccacccaca

SEQ ID NO: 2302888 - RNA, 22 nt, Human
ucccucacccacuuuggccucc

SEQ ID NO: 2302889 - RNA, 15 nt, Human
ucccucacccugagc

SEQ ID NO: 2302890 - RNA, 17 nt, Human
ucccucacccugagccc

SEQ ID NO: 2302891 - RNA, 19 nt, Human
ucccucacccugagccccu

SEQ ID NO: 2302892 - RNA, 20 nt, Human
ucccucacccugagccccuu

SEQ ID NO: 2302893 - RNA, 21 nt, Human
ucccucacccugagccccuuc

SEQ ID NO: 2302894 - RNA, 12 nt, Human
ucccucaccugu

SEQ ID NO: 2302895 - RNA, 13 nt, Human
ucccucaccugua

SEQ ID NO: 2302896 - RNA, 14 nt, Human
ucccucaccuguag

SEQ ID NO: 2302897 - RNA, 20 nt, Human
ucccucaccuguagcagcca

SEQ ID NO: 2302898 - RNA, 13 nt, Human
ucccucaaaugac

SEQ ID NO: 2302899 - RNA, 20 nt, Human
ucccucaaagcacacgucau

SEQ ID NO: 2302900 - RNA, 17 nt, Human
ucccggcacuccaugcu

SEQ ID NO: 2302901 - RNA, 19 nt, Human
ucccucaaaugacccaaag

SEQ ID NO: 2302902 - RNA, 20 nt, Human
ucccucaaaugacccaaaga

SEQ ID NO: 2302903 - RNA, 18 nt, Human
ucccucaacaagggagag

SEQ ID NO: 2302904 - RNA, 22 nt, Human
ucccucaacaagggagagaccu

SEQ ID NO: 2302905 - RNA, 23 nt, Human
ucccggcaugggaaagccaccuc

SEQ ID NO: 2302906 - RNA, 22 nt, Human
ucccuauuuuuuuucuguuaua

SEQ ID NO: 2302907 - RNA, 21 nt, Human
ucccuauuuuuuuucuguuau

SEQ ID NO: 2302908 - RNA, 18 nt, Human
ucccuauuagagaagaga

SEQ ID NO: 2302909 - RNA, 18 nt, Human
ucccggagguuggguggg

SEQ ID NO: 2302910 - RNA, 16 nt, Human
ucccggagggcccuga

SEQ ID NO: 2302911 - RNA, 21 nt, Human
ucccggagggcccugagcuga

SEQ ID NO: 2302912 - RNA, 13 nt, Human
ucccgcugcugcu

SEQ ID NO: 2302913 - RNA, 15 nt, Human
ucccgcugcugcugc

SEQ ID NO: 2302914 - RNA, 21 nt, Human
ucccggacugcaagcagggcu

SEQ ID NO: 2302915 - RNA, 19 nt, Human
acucaagaagcaggcuaca

SEQ ID NO: 2302916 - RNA, 13 nt, Human
acucaacccucuc

SEQ ID NO: 2302917 - RNA, 15 nt, Human
acucaacccucucag

SEQ ID NO: 2302918 - RNA, 13 nt, Human
acucaagaagcag

SEQ ID NO: 2302919 - RNA, 14 nt, Human
acucaagaagcagg

SEQ ID NO: 2302920 - RNA, 15 nt, Human
acucaagaagcaggc

SEQ ID NO: 2302921 - RNA, 16 nt, Human
acucaagaagcaggcu

SEQ ID NO: 2302922 - RNA, 14 nt, Human
uccccucagcucca

SEQ ID NO: 2302923 - RNA, 12 nt, Human
uccccucagcuc

SEQ ID NO: 2302924 - RNA, 21 nt, Human
uccccucacagccucugaccc

SEQ ID NO: 2302925 - RNA, 19 nt, Human
uccccucacugauggacaa

SEQ ID NO: 2302926 - RNA, 12 nt, Human
uccccucacugg

SEQ ID NO: 2302927 - RNA, 13 nt, Human
uccccucacugga

SEQ ID NO: 2302928 - RNA, 15 nt, Human
uccccucaccuccuc

SEQ ID NO: 2302929 - RNA, 17 nt, Human
uccccucaccuccucua

SEQ ID NO: 2302930 - RNA, 17 nt, Human
uccccucacagccucug

SEQ ID NO: 2302931 - RNA, 18 nt, Human
uccccucacagccucuga

SEQ ID NO: 2302932 - RNA, 19 nt, Human
uccccucacagccucugac

SEQ ID NO: 2302933 - RNA, 20 nt, Human
uccccucacagccucugacc

SEQ ID NO: 2302934 - RNA, 17 nt, Human
uccccuccgccaggcga

SEQ ID NO: 2302935 - RNA, 14 nt, Human
uccccucccuguca

SEQ ID NO: 2302936 - RNA, 16 nt, Human
uccccucccuggguuc

SEQ ID NO: 2302937 - RNA, 13 nt, Human
uccccucccuguc

SEQ ID NO: 2302938 - RNA, 13 nt, Human
uccccuccuaccc

SEQ ID NO: 2302939 - RNA, 20 nt, Human
uccccuccgccaggcgagau

SEQ ID NO: 2302940 - RNA, 14 nt, Human
uccccuccuacccc

SEQ ID NO: 2302941 - RNA, 17 nt, Human
uccccuccuaccccucc

SEQ ID NO: 2302942 - RNA, 19 nt, Human
uccccuccuaccccuccca

SEQ ID NO: 2302943 - RNA, 12 nt, Human
uccccuccucca

SEQ ID NO: 2302944 - RNA, 20 nt, Human
uccccuccuaccccucccag

SEQ ID NO: 2302945 - RNA, 22 nt, Human
uccccuccuaccccucccagcu

SEQ ID NO: 2302946 - RNA, 16 nt, Human
uccccuccaagguaug

SEQ ID NO: 2302947 - RNA, 13 nt, Human
uccccucauucag

SEQ ID NO: 2302948 - RNA, 15 nt, Human
uccccuccacuguca

SEQ ID NO: 2302949 - RNA, 12 nt, Human
uccccuccacug

SEQ ID NO: 2302950 - RNA, 13 nt, Human
uccccucccuggg

SEQ ID NO: 2302951 - RNA, 14 nt, Human
uccccucccugggu

SEQ ID NO: 2302952 - RNA, 12 nt, Human
uccccuccaacc

SEQ ID NO: 2302953 - RNA, 15 nt, Human
uccccucagcuccag

SEQ ID NO: 2302954 - RNA, 16 nt, Human
uccccucaggacugca

SEQ ID NO: 2302955 - RNA, 13 nt, Human
uccccuccaaccu

SEQ ID NO: 2302956 - RNA, 22 nt, Human
uccccuccaaccuggggggcag

SEQ ID NO: 2302957 - RNA, 14 nt, Human
uccccuccucacuc

SEQ ID NO: 2302958 - RNA, 14 nt, Human
uccccuccucuccc

SEQ ID NO: 2302959 - RNA, 16 nt, Human
uccccuccucuccccu

SEQ ID NO: 2302960 - RNA, 18 nt, Human
uccccuccucuccccuac

SEQ ID NO: 2302961 - RNA, 14 nt, Human
uccccuccuccacu

SEQ ID NO: 2302962 - RNA, 16 nt, Human
uccccuccuccacucu

SEQ ID NO: 2302963 - RNA, 13 nt, Human
uccccuucucuca

SEQ ID NO: 2302964 - RNA, 16 nt, Human
uccccuugagcugaga

SEQ ID NO: 2302965 - RNA, 15 nt, Human
uccccuugagcugag

SEQ ID NO: 2302966 - RNA, 16 nt, Human
uccccuucugaaucag

SEQ ID NO: 2302967 - RNA, 14 nt, Human
uccccuugagcuga

SEQ ID NO: 2302968 - RNA, 18 nt, Human
uccccuucucucaucucu

SEQ ID NO: 2302969 - RNA, 15 nt, Human
uccccuucucucauc

SEQ ID NO: 2302970 - RNA, 16 nt, Human
uccccuucucucaucu

SEQ ID NO: 2302971 - RNA, 15 nt, Human
ucccgaauagcuggg

SEQ ID NO: 2302972 - RNA, 16 nt, Human
ucccgaauagcuggga

SEQ ID NO: 2302973 - RNA, 21 nt, Human
uccccuuuucuuuucuacccu

SEQ ID NO: 2302974 - RNA, 16 nt, Human
uccccuugcccagggc

SEQ ID NO: 2302975 - RNA, 15 nt, Human
uccccuugcccaggg

SEQ ID NO: 2302976 - RNA, 13 nt, Human
uccccuugcccag

SEQ ID NO: 2302977 - RNA, 20 nt, Human
uccucacaacauggugucug

SEQ ID NO: 2302978 - RNA, 20 nt, Human
uccucacaucuuucacacuu

SEQ ID NO: 2302979 - RNA, 14 nt, Human
uccucaauccagcu

SEQ ID NO: 2302980 - RNA, 13 nt, Human
uccucaauccagc

SEQ ID NO: 2302981 - RNA, 12 nt, Human
uccucaauccag

SEQ ID NO: 2302982 - RNA, 21 nt, Human
uccucaaggggccauccuguc

SEQ ID NO: 2302983 - RNA, 18 nt, Human
uccucaaguccccaagau

SEQ ID NO: 2302984 - RNA, 23 nt, Human
uccucaacucaccuaauguuuau

SEQ ID NO: 2302985 - RNA, 17 nt, Human
uccucaacacccaacug

SEQ ID NO: 2302986 - RNA, 16 nt, Human
uccucaaacacugcag

SEQ ID NO: 2302987 - RNA, 23 nt, Human
uccucaagaaauaaaaggaagcc

SEQ ID NO: 2302988 - RNA, 17 nt, Human
uccucaagaaauaaaag

SEQ ID NO: 2302989 - RNA, 14 nt, Human
uccucaaggggcca

SEQ ID NO: 2302990 - RNA, 15 nt, Human
uccucaaggggccau

SEQ ID NO: 2302991 - RNA, 18 nt, Human
uccucaaggggccauccu

SEQ ID NO: 2302992 - RNA, 16 nt, Human
acucuuauugcccacg

SEQ ID NO: 2302993 - RNA, 19 nt, Human
acucuuauugcccacgcug

SEQ ID NO: 2302994 - RNA, 14 nt, Human
uccucaaacaacac

SEQ ID NO: 2302995 - RNA, 23 nt, Human
acucuuaucucagucaugcauaa

SEQ ID NO: 2302996 - RNA, 14 nt, Human
uccucaaacacugc

SEQ ID NO: 2302997 - RNA, 15 nt, Human
uccucaaacacugca

SEQ ID NO: 2302998 - RNA, 15 nt, Human
uccucacuggguggg

SEQ ID NO: 2302999 - RNA, 14 nt, Human
uccucacugggugg

SEQ ID NO: 2303000 - RNA, 13 nt, Human
uccucacugggug

SEQ ID NO: 2303001 - RNA, 22 nt, Human
uccucacuggccaucccucgug

SEQ ID NO: 2303002 - RNA, 23 nt, Human
uccucacugcucccugaagccag

SEQ ID NO: 2303003 - RNA, 13 nt, Human
uccucacuggcca

SEQ ID NO: 2303004 - RNA, 17 nt, Human
uccucacuggccauccc

SEQ ID NO: 2303005 - RNA, 18 nt, Human
uccucacuggccaucccu

SEQ ID NO: 2303006 - RNA, 21 nt, Human
uccucacucccuucccauaag

SEQ ID NO: 2303007 - RNA, 13 nt, Human
uccucacugcucc

SEQ ID NO: 2303008 - RNA, 16 nt, Human
uccucacucccuucua

SEQ ID NO: 2303009 - RNA, 15 nt, Human
uccucacugcucccu

SEQ ID NO: 2303010 - RNA, 17 nt, Human
uccucacugcucccuga

SEQ ID NO: 2303011 - RNA, 20 nt, Human
uccucacugcucccugaagc

SEQ ID NO: 2303012 - RNA, 21 nt, Human
uccucacugcucccugaagcc

SEQ ID NO: 2303013 - RNA, 19 nt, Human
uccucacucccuucccaua

SEQ ID NO: 2303014 - RNA, 17 nt, Human
uccucacucccuuccca

SEQ ID NO: 2303015 - RNA, 17 nt, Human
uccucaccccuguccuc

SEQ ID NO: 2303016 - RNA, 19 nt, Human
uccucaccccuguccucac

SEQ ID NO: 2303017 - RNA, 12 nt, Human
uccucaccccug

SEQ ID NO: 2303018 - RNA, 13 nt, Human
uccucaccccugu

SEQ ID NO: 2303019 - RNA, 14 nt, Human
uccucaccccuguc

SEQ ID NO: 2303020 - RNA, 15 nt, Human
uccucaccccugucc

SEQ ID NO: 2303021 - RNA, 20 nt, Human
uccucaccccgucugggguu

SEQ ID NO: 2303022 - RNA, 14 nt, Human
uccucaccacaugc

SEQ ID NO: 2303023 - RNA, 20 nt, Human
uccucacccccagcuuugcu

SEQ ID NO: 2303024 - RNA, 16 nt, Human
uccucacccccagcuu

SEQ ID NO: 2303025 - RNA, 13 nt, Human
uccucacccccag

SEQ ID NO: 2303026 - RNA, 22 nt, Human
uccucacuggguggggugagga

SEQ ID NO: 2303027 - RNA, 21 nt, Human
uccucacuuccauacagcucu

SEQ ID NO: 2303028 - RNA, 22 nt, Human
uccucacuuccauacagcucua

SEQ ID NO: 2303029 - RNA, 20 nt, Human
uccucagaucuucugugggu

SEQ ID NO: 2303030 - RNA, 19 nt, Human
uccucagaucauccagaag

SEQ ID NO: 2303031 - RNA, 20 nt, Human
uccucagagaauuucuacca

SEQ ID NO: 2303032 - RNA, 17 nt, Human
uccucagagaauuucua

SEQ ID NO: 2303033 - RNA, 23 nt, Human
uccucagguggccaugccucagc

SEQ ID NO: 2303034 - RNA, 20 nt, Human
uccucaguuuaauccuucua

SEQ ID NO: 2303035 - RNA, 23 nt, Human
uccucauaaaaagcaaaacaaaa

SEQ ID NO: 2303036 - RNA, 16 nt, Human
uccucauaaaaagcaa

SEQ ID NO: 2303037 - RNA, 11 nt, Human
uccucagccuu

SEQ ID NO: 2303038 - RNA, 20 nt, Human
uccucagccuccucaucugg

SEQ ID NO: 2303039 - RNA, 14 nt, Human
uccucauacccacc

SEQ ID NO: 2303040 - RNA, 18 nt, Human
uccucauacccaccccca

SEQ ID NO: 2303041 - RNA, 18 nt, Human
uccuccccuucccugcaa

SEQ ID NO: 2303042 - RNA, 17 nt, Human
uccuccccuucccugca

SEQ ID NO: 2303043 - RNA, 15 nt, Human
uccuccccuucccug

SEQ ID NO: 2303044 - RNA, 14 nt, Human
uccuccccuucccu

SEQ ID NO: 2303045 - RNA, 13 nt, Human
uccuccccuuccc

SEQ ID NO: 2303046 - RNA, 22 nt, Human
uccuccccuccuccuggacucc

SEQ ID NO: 2303047 - RNA, 20 nt, Human
uccuccccuccuccuggacu

SEQ ID NO: 2303048 - RNA, 18 nt, Human
uccuccccuccuccugga

SEQ ID NO: 2303049 - RNA, 16 nt, Human
uccuccccuccuccug

SEQ ID NO: 2303050 - RNA, 22 nt, Human
uccucauacccacccccaccca

SEQ ID NO: 2303051 - RNA, 12 nt, Human
uccucuccacug

SEQ ID NO: 2303052 - RNA, 22 nt, Human
uccucccugcaucugaccagca

SEQ ID NO: 2303053 - RNA, 14 nt, Human
uccucuccacccuc

SEQ ID NO: 2303054 - RNA, 16 nt, Human
uccucuccacccuccc

SEQ ID NO: 2303055 - RNA, 13 nt, Human
uccucuccaccua

SEQ ID NO: 2303056 - RNA, 13 nt, Human
uccucuccacugc

SEQ ID NO: 2303057 - RNA, 14 nt, Human
uccucuccacugcc

SEQ ID NO: 2303058 - RNA, 12 nt, Human
uccucuccccag

SEQ ID NO: 2303059 - RNA, 15 nt, Human
uccucuccacugccu

SEQ ID NO: 2303060 - RNA, 16 nt, Human
uccucuccacugccuu

SEQ ID NO: 2303061 - RNA, 15 nt, Human
uccucccucccucuu

SEQ ID NO: 2303062 - RNA, 17 nt, Human
uccucccucccucuuuc

SEQ ID NO: 2303063 - RNA, 13 nt, Human
uccucccuccugc

SEQ ID NO: 2303064 - RNA, 18 nt, Human
uccucccucugaggcugu

SEQ ID NO: 2303065 - RNA, 13 nt, Human
uccucuccacccu

SEQ ID NO: 2303066 - RNA, 14 nt, Human
uccucccugcaucu

SEQ ID NO: 2303067 - RNA, 19 nt, Human
uccucccucugaggcugua

SEQ ID NO: 2303068 - RNA, 19 nt, Human
uccucccucccucuuuccc

SEQ ID NO: 2303069 - RNA, 20 nt, Human
uccuagggaaaaguucauag

SEQ ID NO: 2303070 - RNA, 19 nt, Human
uccuagggaaggguggugg

SEQ ID NO: 2303071 - RNA, 17 nt, Human
uccuagggccuggguuu

SEQ ID NO: 2303072 - RNA, 22 nt, Human
uccuaggcuccaccccauccag

SEQ ID NO: 2303073 - RNA, 18 nt, Human
acucgcgacaaugcaaac

SEQ ID NO: 2303074 - RNA, 13 nt, Human
uccuaggccacac

SEQ ID NO: 2303075 - RNA, 20 nt, Human
uccuaggcuccaccccaucc

SEQ ID NO: 2303076 - RNA, 19 nt, Human
uccuaggcauuugcugaau

SEQ ID NO: 2303077 - RNA, 15 nt, Human
acucgcuucccccau

SEQ ID NO: 2303078 - RNA, 12 nt, Human
acucgcuucccc

SEQ ID NO: 2303079 - RNA, 18 nt, Human
uccuagguaggguuuaau

SEQ ID NO: 2303080 - RNA, 20 nt, Human
acucgcgacaaugcaaacca

SEQ ID NO: 2303081 - RNA, 23 nt, Human
acucgcgacaaugcaaaccauca

SEQ ID NO: 2303082 - RNA, 12 nt, Human
acucuccccaca

SEQ ID NO: 2303083 - RNA, 11 nt, Human
acucuccccac

SEQ ID NO: 2303084 - RNA, 10 nt, Human
acucucccca

SEQ ID NO: 2303085 - RNA, 15 nt, Human
acucucccauggcuu

SEQ ID NO: 2303086 - RNA, 23 nt, Human
acucucccauggcuuaaugcuuc

SEQ ID NO: 2303087 - RNA, 19 nt, Human
acucuccaaccuggacaac

SEQ ID NO: 2303088 - RNA, 14 nt, Human
acucucccauggcu

SEQ ID NO: 2303089 - RNA, 13 nt, Human
acucuccaucuua

SEQ ID NO: 2303090 - RNA, 15 nt, Human
acucuccccacacua

SEQ ID NO: 2303091 - RNA, 14 nt, Human
acucuccccacacu

SEQ ID NO: 2303092 - RNA, 10 nt, Human
acucuccccc

SEQ ID NO: 2303093 - RNA, 17 nt, Human
acucuccucugcugcug

SEQ ID NO: 2303094 - RNA, 20 nt, Human
acucgcuucccccauagcca

SEQ ID NO: 2303095 - RNA, 15 nt, Human
acucgcuugugcaga

SEQ ID NO: 2303096 - RNA, 16 nt, Human
acucggcacccugcaa

SEQ ID NO: 2303097 - RNA, 17 nt, Human
acucgcuugugcagaaa

SEQ ID NO: 2303098 - RNA, 23 nt, Human
acucgcuugugcagaaaacauug

SEQ ID NO: 2303099 - RNA, 22 nt, Human
acucgggaggcugagacaggag

SEQ ID NO: 2303100 - RNA, 20 nt, Human
acucgggaggcugagacagg

SEQ ID NO: 2303101 - RNA, 14 nt, Human
acucgggcuccugu

SEQ ID NO: 2303102 - RNA, 17 nt, Human
acucuccaaccuggaca

SEQ ID NO: 2303103 - RNA, 14 nt, Human
acucuccaaccugg

SEQ ID NO: 2303104 - RNA, 21 nt, Human
acucucauuccccagguggcu

SEQ ID NO: 2303105 - RNA, 17 nt, Human
acucucauuccccaggu

SEQ ID NO: 2303106 - RNA, 16 nt, Human
acucucauuccccagg

SEQ ID NO: 2303107 - RNA, 15 nt, Human
acucgggcuccugug

SEQ ID NO: 2303108 - RNA, 17 nt, Human
acucgggcuccugugcc

SEQ ID NO: 2303109 - RNA, 18 nt, Human
acucgggcuccugugccc

SEQ ID NO: 2303110 - RNA, 19 nt, Human
acucgggcuccugugcccu

SEQ ID NO: 2303111 - RNA, 21 nt, Human
acucugaagggcaucaugcau

SEQ ID NO: 2303112 - RNA, 20 nt, Human
acucugaagggcaucaugca

SEQ ID NO: 2303113 - RNA, 23 nt, Human
acucugaagcugacgaacuucca

SEQ ID NO: 2303114 - RNA, 12 nt, Human
acucugaagcug

SEQ ID NO: 2303115 - RNA, 18 nt, Human
acucugaagccucuggga

SEQ ID NO: 2303116 - RNA, 19 nt, Human
acucugaagccucugggaa

SEQ ID NO: 2303117 - RNA, 16 nt, Human
acucugaaaugaagau

SEQ ID NO: 2303118 - RNA, 9 nt, Human
acucugaac

SEQ ID NO: 2303119 - RNA, 14 nt, Human
acucugaagccucu

SEQ ID NO: 2303120 - RNA, 15 nt, Human
acucugaagccucug

SEQ ID NO: 2303121 - RNA, 16 nt, Human
acucugaagccucugg

SEQ ID NO: 2303122 - RNA, 17 nt, Human
acucugaagccucuggg

SEQ ID NO: 2303123 - RNA, 14 nt, Human
acucugcacauacg

SEQ ID NO: 2303124 - RNA, 11 nt, Human
acucugcacau

SEQ ID NO: 2303125 - RNA, 13 nt, Human
acucugcacaugu

SEQ ID NO: 2303126 - RNA, 17 nt, Human
acucugcacaugucuug

SEQ ID NO: 2303127 - RNA, 21 nt, Human
acucuccucugcugcuggcug

SEQ ID NO: 2303128 - RNA, 14 nt, Human
acucucccccaccc

SEQ ID NO: 2303129 - RNA, 14 nt, Human
acucugaaaucuga

SEQ ID NO: 2303130 - RNA, 17 nt, Human
acucugaaaucugaaga

SEQ ID NO: 2303131 - RNA, 18 nt, Human
acucuccucugcugcugg

SEQ ID NO: 2303132 - RNA, 19 nt, Human
acucuccucugcugcuggc

SEQ ID NO: 2303133 - RNA, 14 nt, Human
acucugcuuugacu

SEQ ID NO: 2303134 - RNA, 13 nt, Human
acucugcuuguua

SEQ ID NO: 2303135 - RNA, 22 nt, Human
acucugcuuugacugagcagac

SEQ ID NO: 2303136 - RNA, 20 nt, Human
acucugcuuugacugagcag

SEQ ID NO: 2303137 - RNA, 23 nt, Human
acucugcuuugacugagcagacu

SEQ ID NO: 2303138 - RNA, 18 nt, Human
acucugcuugauuuuugc

SEQ ID NO: 2303139 - RNA, 16 nt, Human
acucugcuugauuuuu

SEQ ID NO: 2303140 - RNA, 15 nt, Human
acucugcuugauuuu

SEQ ID NO: 2303141 - RNA, 22 nt, Human
acucugcuucucugacuucugc

SEQ ID NO: 2303142 - RNA, 12 nt, Human
acucuuaucuca

SEQ ID NO: 2303143 - RNA, 13 nt, Human
acucuuaucucag

SEQ ID NO: 2303144 - RNA, 22 nt, Human
acucuuaucucagucaugcaua

SEQ ID NO: 2303145 - RNA, 21 nt, Human
acucuggagguuuguuuagaa

SEQ ID NO: 2303146 - RNA, 14 nt, Human
acucugcacuacuc

SEQ ID NO: 2303147 - RNA, 15 nt, Human
acucugcacuacucc

SEQ ID NO: 2303148 - RNA, 19 nt, Human
acucugcacuacuccucug

SEQ ID NO: 2303149 - RNA, 23 nt, Human
acucugcacuacuccucugcagu

SEQ ID NO: 2303150 - RNA, 18 nt, Human
acucugcacaugucuugu

SEQ ID NO: 2303151 - RNA, 19 nt, Human
acucugcacaugucuugua

SEQ ID NO: 2303152 - RNA, 21 nt, Human
acucugcacaugucuuguaca

SEQ ID NO: 2303153 - RNA, 22 nt, Human
acucugcacaugucuuguacau

SEQ ID NO: 2303154 - RNA, 16 nt, Human
acucugcauucuagua

SEQ ID NO: 2303155 - RNA, 17 nt, Human
acucugcuucucugacu

SEQ ID NO: 2303156 - RNA, 18 nt, Human
acucugcuucucugacuu

SEQ ID NO: 2303157 - RNA, 20 nt, Human
acucugcuucucugacuucu

SEQ ID NO: 2303158 - RNA, 21 nt, Human
acucugcuucucugacuucug

SEQ ID NO: 2303159 - RNA, 20 nt, Human
ucccuguauuuucuuucucu

SEQ ID NO: 2303160 - RNA, 21 nt, Human
ucccuguauuuucuuucucua

SEQ ID NO: 2303161 - RNA, 21 nt, Human
ucccuguaauuguuguuugua

SEQ ID NO: 2303162 - RNA, 20 nt, Human
ucccuguaauuguuguuugu

SEQ ID NO: 2303163 - RNA, 23 nt, Human
ucccuguaaccucuucagaggcc

SEQ ID NO: 2303164 - RNA, 22 nt, Human
ucccuguaaccucuucagaggc

SEQ ID NO: 2303165 - RNA, 19 nt, Human
ucccuguaaccucuucaga

SEQ ID NO: 2303166 - RNA, 18 nt, Human
ucccuguaaccucuucag

SEQ ID NO: 2303167 - RNA, 18 nt, Human
acuccugcaaaauuuuau

SEQ ID NO: 2303168 - RNA, 12 nt, Human
ucccugguucug

SEQ ID NO: 2303169 - RNA, 14 nt, Human
ucccuguaaccucu

SEQ ID NO: 2303170 - RNA, 16 nt, Human
ucccugguucugauga

SEQ ID NO: 2303171 - RNA, 17 nt, Human
ucccugguucugaugau

SEQ ID NO: 2303172 - RNA, 23 nt, Human
acuccugcacacgcuccuuccuc

SEQ ID NO: 2303173 - RNA, 19 nt, Human
ucccuguuugaagccugcc

SEQ ID NO: 2303174 - RNA, 21 nt, Human
ucccuguuuaauauuuaaaca

SEQ ID NO: 2303175 - RNA, 22 nt, Human
ucccuguuuaauauuuaaacag

SEQ ID NO: 2303176 - RNA, 14 nt, Human
ucccuguuuaauau

SEQ ID NO: 2303177 - RNA, 15 nt, Human
ucccuguuuaauauu

SEQ ID NO: 2303178 - RNA, 16 nt, Human
ucccuguuuaauauuu

SEQ ID NO: 2303179 - RNA, 18 nt, Human
ucccuguuuaauauuuaa

SEQ ID NO: 2303180 - RNA, 18 nt, Human
ucccuguuggucgguggg

SEQ ID NO: 2303181 - RNA, 21 nt, Human
ucccuguugacgaagucucuu

SEQ ID NO: 2303182 - RNA, 11 nt, Human
ucccuguuuaa

SEQ ID NO: 2303183 - RNA, 14 nt, Human
ucccuguugaagcu

SEQ ID NO: 2303184 - RNA, 20 nt, Human
ucccuguugacgaagucucu

SEQ ID NO: 2303185 - RNA, 17 nt, Human
ucccuguuccccagaga

SEQ ID NO: 2303186 - RNA, 22 nt, Human
ucccugucaccaagcucacagu

SEQ ID NO: 2303187 - RNA, 15 nt, Human
ucccugucaccaagc

SEQ ID NO: 2303188 - RNA, 14 nt, Human
ucccugucaccaag

SEQ ID NO: 2303189 - RNA, 22 nt, Human
ucccuguauuuucuuucucuac

SEQ ID NO: 2303190 - RNA, 17 nt, Human
ucccuguguugucucua

SEQ ID NO: 2303191 - RNA, 18 nt, Human
ucccuguuccccagagaa

SEQ ID NO: 2303192 - RNA, 16 nt, Human
ucccuguuccccagag

SEQ ID NO: 2303193 - RNA, 15 nt, Human
ucccuguuccccaga

SEQ ID NO: 2303194 - RNA, 11 nt, Human
ucccuucaacc

SEQ ID NO: 2303195 - RNA, 20 nt, Human
ucccuguuugaagccugccc

SEQ ID NO: 2303196 - RNA, 21 nt, Human
ucccuucaaccauuccccaug

SEQ ID NO: 2303197 - RNA, 19 nt, Human
ucccuugguggcaagagcc

SEQ ID NO: 2303198 - RNA, 18 nt, Human
ucccuuacgugaguccug

SEQ ID NO: 2303199 - RNA, 22 nt, Human
ucccuuacgugaguccuggcau

SEQ ID NO: 2303200 - RNA, 22 nt, Human
ucccuuuccaaaugcccagcuu

SEQ ID NO: 2303201 - RNA, 21 nt, Human
ucccuuucacaaaauuuuauu

SEQ ID NO: 2303202 - RNA, 13 nt, Human
ucccuuucccuuc

SEQ ID NO: 2303203 - RNA, 15 nt, Human
ucccuuucccuucuu

SEQ ID NO: 2303204 - RNA, 13 nt, Human
ucccuugugugug

SEQ ID NO: 2303205 - RNA, 16 nt, Human
ucccuugugcgugggu

SEQ ID NO: 2303206 - RNA, 15 nt, Human
ucccuugugugugug

SEQ ID NO: 2303207 - RNA, 13 nt, Human
ucccuuguucucu

SEQ ID NO: 2303208 - RNA, 14 nt, Human
ucccuuguucucua

SEQ ID NO: 2303209 - RNA, 18 nt, Human
ucccuuguucucuaaguu

SEQ ID NO: 2303210 - RNA, 20 nt, Human
uccgugagugaaccaucauu

SEQ ID NO: 2303211 - RNA, 16 nt, Human
uccgugccuccaccac

SEQ ID NO: 2303212 - RNA, 17 nt, Human
uccgugccuccaccacc

SEQ ID NO: 2303213 - RNA, 19 nt, Human
uccguuagcuccuguggcc

SEQ ID NO: 2303214 - RNA, 21 nt, Human
uccgugccuccaccaccacug

SEQ ID NO: 2303215 - RNA, 20 nt, Human
uccgucuaagucaugagcug

SEQ ID NO: 2303216 - RNA, 22 nt, Human
uccgucuaagucaugagcugag

SEQ ID NO: 2303217 - RNA, 23 nt, Human
uccgucuaguuaacauuucaagg

SEQ ID NO: 2303218 - RNA, 18 nt, Human
uccgugaaaacggagcug

SEQ ID NO: 2303219 - RNA, 15 nt, Human
uccguauuucagacu

SEQ ID NO: 2303220 - RNA, 14 nt, Human
uccguauuucagac

SEQ ID NO: 2303221 - RNA, 17 nt, Human
ucccuuugcccagaaag

SEQ ID NO: 2303222 - RNA, 22 nt, Human
ucccuuugacgccaucccagcc

SEQ ID NO: 2303223 - RNA, 23 nt, Human
ucccuuugacgccaucccagccc

SEQ ID NO: 2303224 - RNA, 17 nt, Human
uccuaaaauaagggcag

SEQ ID NO: 2303225 - RNA, 22 nt, Human
uccuaaaauaagggcagaguca

SEQ ID NO: 2303226 - RNA, 14 nt, Human
uccuagaguagagu

SEQ ID NO: 2303227 - RNA, 23 nt, Human
uccuaaaauaagggcagagucac

SEQ ID NO: 2303228 - RNA, 15 nt, Human
uccuaaaacaaauag

SEQ ID NO: 2303229 - RNA, 22 nt, Human
uccuaaaacaaaagcucaucca

SEQ ID NO: 2303230 - RNA, 17 nt, Human
uccuaaaacaccuggua

SEQ ID NO: 2303231 - RNA, 22 nt, Human
uccguugggccccagccuucuu

SEQ ID NO: 2303232 - RNA, 13 nt, Human
uccguuggccacu

SEQ ID NO: 2303233 - RNA, 15 nt, Human
uccguuggccacucc

SEQ ID NO: 2303234 - RNA, 18 nt, Human
uccuagauggcagucacu

SEQ ID NO: 2303235 - RNA, 13 nt, Human
uccuagaugcucu

SEQ ID NO: 2303236 - RNA, 22 nt, Human
uccuagauggcagucacugaau

SEQ ID NO: 2303237 - RNA, 17 nt, Human
uccuagcacacacuuuu

SEQ ID NO: 2303238 - RNA, 19 nt, Human
uccuagcacacacuuuugg

SEQ ID NO: 2303239 - RNA, 18 nt, Human
uccuagcacacacuuuug

SEQ ID NO: 2303240 - RNA, 14 nt, Human
uccuaggcauuugc

SEQ ID NO: 2303241 - RNA, 20 nt, Human
uccuagcacuuugggaggcc

SEQ ID NO: 2303242 - RNA, 21 nt, Human
uccuagauggcagucacugaa

SEQ ID NO: 2303243 - RNA, 19 nt, Human
acuccaacagaagaacugu

SEQ ID NO: 2303244 - RNA, 18 nt, Human
acuccaacagaagaacug

SEQ ID NO: 2303245 - RNA, 20 nt, Human
acucauuuuaaaaaauggaa

SEQ ID NO: 2303246 - RNA, 19 nt, Human
acuccaagauauggacaca

SEQ ID NO: 2303247 - RNA, 21 nt, Human
acuccaauuaaggauuuuaug

SEQ ID NO: 2303248 - RNA, 17 nt, Human
acuccaauuaaggauuu

SEQ ID NO: 2303249 - RNA, 18 nt, Human
acuccagccugggcgaca

SEQ ID NO: 2303250 - RNA, 15 nt, Human
acuccagccugggcg

SEQ ID NO: 2303251 - RNA, 23 nt, Human
acuccagccugggcaacagagca

SEQ ID NO: 2303252 - RNA, 18 nt, Human
acuccagccugggcaaca

SEQ ID NO: 2303253 - RNA, 13 nt, Human
acuccacaucugc

SEQ ID NO: 2303254 - RNA, 14 nt, Human
acuccacaucugcc

SEQ ID NO: 2303255 - RNA, 15 nt, Human
acuccacaucugccu

SEQ ID NO: 2303256 - RNA, 16 nt, Human
acuccacaucugccuu

SEQ ID NO: 2303257 - RNA, 13 nt, Human
acuccaggagagg

SEQ ID NO: 2303258 - RNA, 14 nt, Human
acuccaggagagga

SEQ ID NO: 2303259 - RNA, 21 nt, Human
acuccagccugggcaacacag

SEQ ID NO: 2303260 - RNA, 20 nt, Human
acuccagccugggugacaga

SEQ ID NO: 2303261 - RNA, 20 nt, Human
acuccagccugggcgacaga

SEQ ID NO: 2303262 - RNA, 20 nt, Human
acuccagcuggguuggaaaa

SEQ ID NO: 2303263 - RNA, 15 nt, Human
acuccugaccucaag

SEQ ID NO: 2303264 - RNA, 21 nt, Human
acuccuaggcaggacaugcug

SEQ ID NO: 2303265 - RNA, 16 nt, Human
acuccuaggaaaauac

SEQ ID NO: 2303266 - RNA, 13 nt, Human
acuccuaggcagg

SEQ ID NO: 2303267 - RNA, 16 nt, Human
acuccuaggcaggaca

SEQ ID NO: 2303268 - RNA, 18 nt, Human
acuccuaggcaggacaug

SEQ ID NO: 2303269 - RNA, 20 nt, Human
acuccuaggcaggacaugcu

SEQ ID NO: 2303270 - RNA, 15 nt, Human
acuccugcaaaauuu

SEQ ID NO: 2303271 - RNA, 13 nt, Human
acuccugcaaaau

SEQ ID NO: 2303272 - RNA, 20 nt, Human
acuccugaggacagcugucc

SEQ ID NO: 2303273 - RNA, 21 nt, Human
acuccugaggacagcuguccu

SEQ ID NO: 2303274 - RNA, 23 nt, Human
acuccugagaccccuggccuccg

SEQ ID NO: 2303275 - RNA, 16 nt, Human
acuccugaggacagcu

SEQ ID NO: 2303276 - RNA, 17 nt, Human
acuccugaggacagcug

SEQ ID NO: 2303277 - RNA, 19 nt, Human
acuccugaggacagcuguc

SEQ ID NO: 2303278 - RNA, 17 nt, Human
acuccugagaccccugg

SEQ ID NO: 2303279 - RNA, 18 nt, Human
acuccugagaccccuggc

SEQ ID NO: 2303280 - RNA, 20 nt, Human
acuccugagaccccuggccu

SEQ ID NO: 2303281 - RNA, 21 nt, Human
acuccugagaccccuggccuc

SEQ ID NO: 2303282 - RNA, 17 nt, Human
acuccuaccucagccua

SEQ ID NO: 2303283 - RNA, 16 nt, Human
acuccuaccucagccu

SEQ ID NO: 2303284 - RNA, 15 nt, Human
acuccuaccucagcc

SEQ ID NO: 2303285 - RNA, 14 nt, Human
acuccuaccucagc

SEQ ID NO: 2303286 - RNA, 14 nt, Human
acuccuaccuggua

SEQ ID NO: 2303287 - RNA, 20 nt, Human
acuccuagagaacgcagccc

SEQ ID NO: 2303288 - RNA, 21 nt, Human
acuccuagagaacgcagcccu

SEQ ID NO: 2303289 - RNA, 22 nt, Human
acuccuagagaacgcagcccua

SEQ ID NO: 2303290 - RNA, 23 nt, Human
acuccuagagaacgcagcccuag

SEQ ID NO: 2303291 - RNA, 16 nt, Human
acuccuacaccuaacu

SEQ ID NO: 2303292 - RNA, 17 nt, Human
acuccuacaccuaacuc

SEQ ID NO: 2303293 - RNA, 18 nt, Human
acuccuacaccuaacuca

SEQ ID NO: 2303294 - RNA, 16 nt, Human
acucaugcugaaagcc

SEQ ID NO: 2303295 - RNA, 15 nt, Human
acucauugcugagcc

SEQ ID NO: 2303296 - RNA, 20 nt, Human
acucauugcugagccucugc

SEQ ID NO: 2303297 - RNA, 18 nt, Human
acucauugcugagccucu

SEQ ID NO: 2303298 - RNA, 16 nt, Human
acucauuuccuaugua

SEQ ID NO: 2303299 - RNA, 21 nt, Human
acucauuuauaaagcuaaaau

SEQ ID NO: 2303300 - RNA, 23 nt, Human
acucauugcugagccucugcucc

SEQ ID NO: 2303301 - RNA, 22 nt, Human
acucauugcugagccucugcuc

SEQ ID NO: 2303302 - RNA, 21 nt, Human
acucauugcugagccucugcu

SEQ ID NO: 2303303 - RNA, 17 nt, Human
acucaucauaaaauaaa

SEQ ID NO: 2303304 - RNA, 16 nt, Human
acucaucauaaaauaa

SEQ ID NO: 2303305 - RNA, 14 nt, Human
acucaugagaaguu

SEQ ID NO: 2303306 - RNA, 19 nt, Human
acucaucccuaaugcugca

SEQ ID NO: 2303307 - RNA, 21 nt, Human
acucaugaucuugugacauau

SEQ ID NO: 2303308 - RNA, 15 nt, Human
acucaugaucuugug

SEQ ID NO: 2303309 - RNA, 12 nt, Human
acucaugcugaa

SEQ ID NO: 2303310 - RNA, 13 nt, Human
acucaugcugaaa

SEQ ID NO: 2303311 - RNA, 14 nt, Human
acucaugcugaaag

SEQ ID NO: 2303312 - RNA, 15 nt, Human
acucaucauaaaaua

SEQ ID NO: 2303313 - RNA, 14 nt, Human
acucaucauaaaau

SEQ ID NO: 2303314 - RNA, 13 nt, Human
acucaucauaaaa

SEQ ID NO: 2303315 - RNA, 12 nt, Human
acucaucauaaa

SEQ ID NO: 2303316 - RNA, 9 nt, Human
acucaucau

SEQ ID NO: 2303317 - RNA, 21 nt, Human
ucccucaucugucccuccggg

SEQ ID NO: 2303318 - RNA, 23 nt, Human
ucccucauuccaccuucccaugc

SEQ ID NO: 2303319 - RNA, 16 nt, Human
acucaucuagguaaau

SEQ ID NO: 2303320 - RNA, 18 nt, Human
acucaucuagguaaauua

SEQ ID NO: 2303321 - RNA, 21 nt, Human
ucccucagucuggcccuuccu

SEQ ID NO: 2303322 - RNA, 21 nt, Human
ucccucaccuuggcaccagac

SEQ ID NO: 2303323 - RNA, 15 nt, Human
ucccucaccuuggca

SEQ ID NO: 2303324 - RNA, 22 nt, Human
ucccucacccugagccccuucc

SEQ ID NO: 2303325 - RNA, 22 nt, Human
ucccucauccucauacccaccc

SEQ ID NO: 2303326 - RNA, 20 nt, Human
ucccucaccuuggcaccaga

SEQ ID NO: 2303327 - RNA, 16 nt, Human
ucccucagugcccuca

SEQ ID NO: 2303328 - RNA, 16 nt, Human
ucccucaucugucccu

SEQ ID NO: 2303329 - RNA, 13 nt, Human
ucccucaucucuc

SEQ ID NO: 2303330 - RNA, 12 nt, Human
acacccagccuc

SEQ ID NO: 2303331 - RNA, 13 nt, Human
acacccuguacug

SEQ ID NO: 2303332 - RNA, 16 nt, Human
acaccgggccuggaga

SEQ ID NO: 2303333 - RNA, 22 nt, Human
acacccuguacuguucuguguc

SEQ ID NO: 2303334 - RNA, 19 nt, Human
acaccgggguggugggaac

SEQ ID NO: 2303335 - RNA, 17 nt, Human
acaccguguaaaccaaa

SEQ ID NO: 2303336 - RNA, 15 nt, Human
acaccuaacucaccu

SEQ ID NO: 2303337 - RNA, 14 nt, Human
acaccuaagggaca

SEQ ID NO: 2303338 - RNA, 18 nt, Human
acaccuaagggacauguu

SEQ ID NO: 2303339 - RNA, 19 nt, Human
acaccguguaaaccaaagc

SEQ ID NO: 2303340 - RNA, 20 nt, Human
acaccguguaaaccaaagcc

SEQ ID NO: 2303341 - RNA, 15 nt, Human
acaccuagcaucuca

SEQ ID NO: 2303342 - RNA, 21 nt, Human
acaccuacucuaucagagaaa

SEQ ID NO: 2303343 - RNA, 22 nt, Human
acaccuaagggacauguuuuga

SEQ ID NO: 2303344 - RNA, 18 nt, Human
acaccuaccaaaaaauaa

SEQ ID NO: 2303345 - RNA, 18 nt, Human
acaccaggcugugggccu

SEQ ID NO: 2303346 - RNA, 11 nt, Human
acacccuguga

SEQ ID NO: 2303347 - RNA, 12 nt, Human
acacccugugau

SEQ ID NO: 2303348 - RNA, 18 nt, Human
acacccugugauggggcc

SEQ ID NO: 2303349 - RNA, 21 nt, Human
acaccaggcuugccugcaggc

SEQ ID NO: 2303350 - RNA, 14 nt, Human
acaccaggcugugg

SEQ ID NO: 2303351 - RNA, 12 nt, Human
acaccaggcugu

SEQ ID NO: 2303352 - RNA, 21 nt, Human
acaccaggccguccucccggg

SEQ ID NO: 2303353 - RNA, 22 nt, Human
acaccaggccguccucccgggc

SEQ ID NO: 2303354 - RNA, 19 nt, Human
acacccagcccacuucugc

SEQ ID NO: 2303355 - RNA, 20 nt, Human
acacccagcccacuucugcc

SEQ ID NO: 2303356 - RNA, 21 nt, Human
acacccagcccacuucugcca

SEQ ID NO: 2303357 - RNA, 20 nt, Human
acaccagccuuucucccagg

SEQ ID NO: 2303358 - RNA, 19 nt, Human
acaccagccucgucuucau

SEQ ID NO: 2303359 - RNA, 21 nt, Human
acaccagccccugccccagcc

SEQ ID NO: 2303360 - RNA, 22 nt, Human
acaccagccccugccccagccc

SEQ ID NO: 2303361 - RNA, 22 nt, Human
acaccagccaggcucugugcug

SEQ ID NO: 2303362 - RNA, 13 nt, Human
acaccagccccug

SEQ ID NO: 2303363 - RNA, 15 nt, Human
acaccagccccugcc

SEQ ID NO: 2303364 - RNA, 17 nt, Human
acaccagccccugcccc

SEQ ID NO: 2303365 - RNA, 17 nt, Human
acaccaggagucccugg

SEQ ID NO: 2303366 - RNA, 15 nt, Human
acaccagcuguucug

SEQ ID NO: 2303367 - RNA, 23 nt, Human
acaccagcuguucugucccuugg

SEQ ID NO: 2303368 - RNA, 19 nt, Human
acaccaggagucccuggua

SEQ ID NO: 2303369 - RNA, 12 nt, Human
acaccaggccgu

SEQ ID NO: 2303370 - RNA, 15 nt, Human
acacaucuucccuag

SEQ ID NO: 2303371 - RNA, 14 nt, Human
acacaucuucccua

SEQ ID NO: 2303372 - RNA, 13 nt, Human
acacaucuucccu

SEQ ID NO: 2303373 - RNA, 13 nt, Human
acacaucuuuccu

SEQ ID NO: 2303374 - RNA, 16 nt, Human
acaccagccaggcucu

SEQ ID NO: 2303375 - RNA, 17 nt, Human
acaccagccaggcucug

SEQ ID NO: 2303376 - RNA, 21 nt, Human
acacaugcaaggucauuuuuu

SEQ ID NO: 2303377 - RNA, 15 nt, Human
acacaucuucaacag

SEQ ID NO: 2303378 - RNA, 14 nt, Human
acacaucuccucca

SEQ ID NO: 2303379 - RNA, 12 nt, Human
acacaucuccuc

SEQ ID NO: 2303380 - RNA, 17 nt, Human
acacaucccuaaugugu

SEQ ID NO: 2303381 - RNA, 19 nt, Human
acacaucccuaaugugugc

SEQ ID NO: 2303382 - RNA, 18 nt, Human
acacaugcaaggucauuu

SEQ ID NO: 2303383 - RNA, 20 nt, Human
acacaugcaaggucauuuuu

SEQ ID NO: 2303384 - RNA, 19 nt, Human
acacaugcaaggucauuuu

SEQ ID NO: 2303385 - RNA, 20 nt, Human
acacaucccuaaugugugcc

SEQ ID NO: 2303386 - RNA, 12 nt, Human
acacaucaguca

SEQ ID NO: 2303387 - RNA, 22 nt, Human
uauaaaauaaauauauauaaac

SEQ ID NO: 2303388 - RNA, 23 nt, Human
uauaaaauaauuuuuauauuuga

SEQ ID NO: 2303389 - RNA, 22 nt, Human
acacaucagcuugcccuguuaa

SEQ ID NO: 2303390 - RNA, 23 nt, Human
uaguuuucauacacagccugggc

SEQ ID NO: 2303391 - RNA, 11 nt, Human
uauaaaagaug

SEQ ID NO: 2303392 - RNA, 17 nt, Human
uaguuuucaguuuguau

SEQ ID NO: 2303393 - RNA, 12 nt, Human
uauaaaagccug

SEQ ID NO: 2303394 - RNA, 20 nt, Human
uauaaaagauggggucugua

SEQ ID NO: 2303395 - RNA, 21 nt, Human
uauaaaagauggggucuguaa

SEQ ID NO: 2303396 - RNA, 22 nt, Human
uauaaaagauggggucuguaaa

SEQ ID NO: 2303397 - RNA, 23 nt, Human
uauaaaagauggggucuguaaaa

SEQ ID NO: 2303398 - RNA, 14 nt, Human
uauaaaagccuguu

SEQ ID NO: 2303399 - RNA, 17 nt, Human
uauaaaagccuguuuaa

SEQ ID NO: 2303400 - RNA, 21 nt, Human
uauaaaauaauuuuuauauuu

SEQ ID NO: 2303401 - RNA, 22 nt, Human
uauaaaauaauuuuuauauuug

SEQ ID NO: 2303402 - RNA, 20 nt, Human
uagucacuuuuuuuuuccaa

SEQ ID NO: 2303403 - RNA, 17 nt, Human
uagucacuuauuucaua

SEQ ID NO: 2303404 - RNA, 13 nt, Human
uagucacuuuuuu

SEQ ID NO: 2303405 - RNA, 13 nt, Human
uagucaugugacc

SEQ ID NO: 2303406 - RNA, 22 nt, Human
uaguccaaugucuuuuuaagcu

SEQ ID NO: 2303407 - RNA, 11 nt, Human
uagucucaguu

SEQ ID NO: 2303408 - RNA, 18 nt, Human
uaguccaaugucuuuuua

SEQ ID NO: 2303409 - RNA, 19 nt, Human
uagucucaguuuguguguc

SEQ ID NO: 2303410 - RNA, 22 nt, Human
uagucucaguuugugugucuua

SEQ ID NO: 2303411 - RNA, 21 nt, Human
uagucucauuacuuuugaagu

SEQ ID NO: 2303412 - RNA, 17 nt, Human
uagucuccuuugcacug

SEQ ID NO: 2303413 - RNA, 18 nt, Human
uagucuccuuugcacuga

SEQ ID NO: 2303414 - RNA, 19 nt, Human
uagucuccuuugcacugag

SEQ ID NO: 2303415 - RNA, 18 nt, Human
uagucugugugaagguga

SEQ ID NO: 2303416 - RNA, 13 nt, Human
uagucugguuucu

SEQ ID NO: 2303417 - RNA, 12 nt, Human
uagucugguuuc

SEQ ID NO: 2303418 - RNA, 20 nt, Human
uagugacccggaggccacau

SEQ ID NO: 2303419 - RNA, 22 nt, Human
uagugagcagucaggaaagaga

SEQ ID NO: 2303420 - RNA, 21 nt, Human
uagucucuuguauuaaacucu

SEQ ID NO: 2303421 - RNA, 23 nt, Human
uagucugcaaaaugaggaaugua

SEQ ID NO: 2303422 - RNA, 20 nt, Human
uagucuccuuugcacugagg

SEQ ID NO: 2303423 - RNA, 21 nt, Human
uagucuccuuugcacugaggg

SEQ ID NO: 2303424 - RNA, 22 nt, Human
uagucuccuuugcacugagggc

SEQ ID NO: 2303425 - RNA, 20 nt, Human
uagucucuaucauuaaaguu

SEQ ID NO: 2303426 - RNA, 21 nt, Human
uagucucuaucauuaaaguuc

SEQ ID NO: 2303427 - RNA, 23 nt, Human
uagucucucuggggccacacaga

SEQ ID NO: 2303428 - RNA, 14 nt, Human
uagucucugugcuu

SEQ ID NO: 2303429 - RNA, 17 nt, Human
uagucucugugcuuuga

SEQ ID NO: 2303430 - RNA, 23 nt, Human
acaagcugcacccucaggcaggu

SEQ ID NO: 2303431 - RNA, 22 nt, Human
acaagcugcacccucaggcagg

SEQ ID NO: 2303432 - RNA, 21 nt, Human
acaagcugcacccucaggcag

SEQ ID NO: 2303433 - RNA, 19 nt, Human
acaagcugcacccucaggc

SEQ ID NO: 2303434 - RNA, 16 nt, Human
acaagcuggaagcaca

SEQ ID NO: 2303435 - RNA, 18 nt, Human
acaagcuggaagcacaug

SEQ ID NO: 2303436 - RNA, 20 nt, Human
acaagcuuuuuuacacaaau

SEQ ID NO: 2303437 - RNA, 21 nt, Human
acaaggaagucaaagcaagga

SEQ ID NO: 2303438 - RNA, 17 nt, Human
acaaggaaggugguggg

SEQ ID NO: 2303439 - RNA, 23 nt, Human
uagucacugccugcagaggucug

SEQ ID NO: 2303440 - RNA, 21 nt, Human
uagucaggugccucaagagaa

SEQ ID NO: 2303441 - RNA, 16 nt, Human
uaguuaguagcauguu

SEQ ID NO: 2303442 - RNA, 15 nt, Human
uaguuaguagcaugu

SEQ ID NO: 2303443 - RNA, 20 nt, Human
uaguuaggauagcauuuuug

SEQ ID NO: 2303444 - RNA, 23 nt, Human
uaguuaggaaauaaaaccuuuca

SEQ ID NO: 2303445 - RNA, 21 nt, Human
uaguuacuguugugaccugaa

SEQ ID NO: 2303446 - RNA, 15 nt, Human
uaguuaggauagcau

SEQ ID NO: 2303447 - RNA, 22 nt, Human
uaguuaggaaauaaaaccuuuc

SEQ ID NO: 2303448 - RNA, 21 nt, Human
uaguuaggaaauaaaaccuuu

SEQ ID NO: 2303449 - RNA, 18 nt, Human
uaguuaggaaauaaaacc

SEQ ID NO: 2303450 - RNA, 16 nt, Human
uaguuaggaaauaaaa

SEQ ID NO: 2303451 - RNA, 23 nt, Human
uaguucccugaaaacccagagag

SEQ ID NO: 2303452 - RNA, 12 nt, Human
uaguuccugcua

SEQ ID NO: 2303453 - RNA, 15 nt, Human
uaguuauaguuucag

SEQ ID NO: 2303454 - RNA, 20 nt, Human
uaguuccucauuagcauuuu

SEQ ID NO: 2303455 - RNA, 18 nt, Human
uagugaucugaacagaaa

SEQ ID NO: 2303456 - RNA, 17 nt, Human
uagugaucugaacagaa

SEQ ID NO: 2303457 - RNA, 20 nt, Human
uagugaucacagcagcuucu

SEQ ID NO: 2303458 - RNA, 14 nt, Human
uagugaucacagca

SEQ ID NO: 2303459 - RNA, 15 nt, Human
uagugaucacagcag

SEQ ID NO: 2303460 - RNA, 16 nt, Human
uagugacuuguguccc

SEQ ID NO: 2303461 - RNA, 22 nt, Human
uaguuagccaauauuuuucuua

SEQ ID NO: 2303462 - RNA, 17 nt, Human
uaguuacuguugugacc

SEQ ID NO: 2303463 - RNA, 18 nt, Human
uaguuacuguugugaccu

SEQ ID NO: 2303464 - RNA, 20 nt, Human
uaguucucacuguucccucu

SEQ ID NO: 2303465 - RNA, 19 nt, Human
uaguucucagcucuucuga

SEQ ID NO: 2303466 - RNA, 15 nt, Human
uaguucguagcuuuc

SEQ ID NO: 2303467 - RNA, 16 nt, Human
uaguuccugcuacaac

SEQ ID NO: 2303468 - RNA, 17 nt, Human
uaguuuuaucacaugua

SEQ ID NO: 2303469 - RNA, 19 nt, Human
uaguuuuaucacauguaug

SEQ ID NO: 2303470 - RNA, 20 nt, Human
uaguuuuaucacauguaugu

SEQ ID NO: 2303471 - RNA, 21 nt, Human
uaguuuuaucacauguauguu

SEQ ID NO: 2303472 - RNA, 16 nt, Human
uaguuuuauaugcuuc

SEQ ID NO: 2303473 - RNA, 13 nt, Human
uaguucuguagaa

SEQ ID NO: 2303474 - RNA, 14 nt, Human
uaguucuguagaaa

SEQ ID NO: 2303475 - RNA, 15 nt, Human
uaguucuguagaaau

SEQ ID NO: 2303476 - RNA, 16 nt, Human
uaguucuguagaaaug

SEQ ID NO: 2303477 - RNA, 18 nt, Human
uaguucuguagaaauggu

SEQ ID NO: 2303478 - RNA, 18 nt, Human
uauagguuuuaaagaccu

SEQ ID NO: 2303479 - RNA, 15 nt, Human
uauagguugugcaaa

SEQ ID NO: 2303480 - RNA, 22 nt, Human
uauagguugugcaaauuaacag

SEQ ID NO: 2303481 - RNA, 16 nt, Human
uauagguuuuguuugc

SEQ ID NO: 2303482 - RNA, 17 nt, Human
uauagguuuuguuugcu

SEQ ID NO: 2303483 - RNA, 23 nt, Human
uauaggugcuacaaaaacacagc

SEQ ID NO: 2303484 - RNA, 20 nt, Human
uauaggugcuacaaaaacac

SEQ ID NO: 2303485 - RNA, 21 nt, Human
uauaggugcuacaaaaacaca

SEQ ID NO: 2303486 - RNA, 13 nt, Human
uauauauagaauc

SEQ ID NO: 2303487 - RNA, 12 nt, Human
uauauauagaau

SEQ ID NO: 2303488 - RNA, 19 nt, Human
uauauauaauucuguacau

SEQ ID NO: 2303489 - RNA, 20 nt, Human
uauauauaauucuguacaua

SEQ ID NO: 2303490 - RNA, 13 nt, Human
uauauauacagua

SEQ ID NO: 2303491 - RNA, 13 nt, Human
uauauauaaaccu

SEQ ID NO: 2303492 - RNA, 16 nt, Human
uauauauaaaccuaaa

SEQ ID NO: 2303493 - RNA, 12 nt, Human
uauauauaaaau

SEQ ID NO: 2303494 - RNA, 13 nt, Human
uauauauaaaaua

SEQ ID NO: 2303495 - RNA, 12 nt, Human
uauauauaaacc

SEQ ID NO: 2303496 - RNA, 12 nt, Human
uauauauaaaua

SEQ ID NO: 2303497 - RNA, 14 nt, Human
uauauauaaauaaa

SEQ ID NO: 2303498 - RNA, 16 nt, Human
uauauauaauucugua

SEQ ID NO: 2303499 - RNA, 13 nt, Human
uauauauaaauaa

SEQ ID NO: 2303500 - RNA, 18 nt, Human
uauauauaauucuguaca

SEQ ID NO: 2303501 - RNA, 13 nt, Human
uauagcuauuuuu

SEQ ID NO: 2303502 - RNA, 12 nt, Human
uauagcuauuuu

SEQ ID NO: 2303503 - RNA, 13 nt, Human
uauaggaauugac

SEQ ID NO: 2303504 - RNA, 19 nt, Human
uauaggaauugacccacaa

SEQ ID NO: 2303505 - RNA, 14 nt, Human
uauaggaauugacc

SEQ ID NO: 2303506 - RNA, 22 nt, Human
uauagcuacaggaagcacccca

SEQ ID NO: 2303507 - RNA, 16 nt, Human
uauagcuacaggaagc

SEQ ID NO: 2303508 - RNA, 11 nt, Human
uauagcuauua

SEQ ID NO: 2303509 - RNA, 14 nt, Human
uauagcuauuacug

SEQ ID NO: 2303510 - RNA, 22 nt, Human
uauagcuauuacugucugguuu

SEQ ID NO: 2303511 - RNA, 13 nt, Human
uauagcaauccau

SEQ ID NO: 2303512 - RNA, 20 nt, Human
uauagccuaggugacagagu

SEQ ID NO: 2303513 - RNA, 14 nt, Human
uauagauuugaccu

SEQ ID NO: 2303514 - RNA, 14 nt, Human
acacuccaucagcu

SEQ ID NO: 2303515 - RNA, 21 nt, Human
acacuccagugccagcaauga

SEQ ID NO: 2303516 - RNA, 16 nt, Human
acacuccaagauaugg

SEQ ID NO: 2303517 - RNA, 16 nt, Human
acacuccagugccagc

SEQ ID NO: 2303518 - RNA, 19 nt, Human
acacuccagugccagcaau

SEQ ID NO: 2303519 - RNA, 14 nt, Human
acacuccaagauau

SEQ ID NO: 2303520 - RNA, 17 nt, Human
uauauccuuucuaacaa

SEQ ID NO: 2303521 - RNA, 16 nt, Human
acacuccaauuaagga

SEQ ID NO: 2303522 - RNA, 15 nt, Human
acacuccaauuaagg

SEQ ID NO: 2303523 - RNA, 21 nt, Human
acacucauugaccugaggccc

SEQ ID NO: 2303524 - RNA, 23 nt, Human
acacucauugaccugaggcccuu

SEQ ID NO: 2303525 - RNA, 19 nt, Human
uauauccauguacuguagu

SEQ ID NO: 2303526 - RNA, 18 nt, Human
uauauccauguacuguag

SEQ ID NO: 2303527 - RNA, 17 nt, Human
uauauccauguacugua

SEQ ID NO: 2303528 - RNA, 16 nt, Human
uauauccauguacugu

SEQ ID NO: 2303529 - RNA, 15 nt, Human
uauauccauguacug

SEQ ID NO: 2303530 - RNA, 14 nt, Human
uauauccauguacu

SEQ ID NO: 2303531 - RNA, 20 nt, Human
uauauccaaaagcuuuuuau

SEQ ID NO: 2303532 - RNA, 15 nt, Human
uauaucagccugagu

SEQ ID NO: 2303533 - RNA, 23 nt, Human
uauaucagccugagucuccugug

SEQ ID NO: 2303534 - RNA, 14 nt, Human
uauaucccagaaau

SEQ ID NO: 2303535 - RNA, 19 nt, Human
acacucauugaccugaggc

SEQ ID NO: 2303536 - RNA, 16 nt, Human
uauauccuuucuaaca

SEQ ID NO: 2303537 - RNA, 13 nt, Human
uauauaucaaaua

SEQ ID NO: 2303538 - RNA, 13 nt, Human
uauauauauaaaa

SEQ ID NO: 2303539 - RNA, 14 nt, Human
uauauauauaaaca

SEQ ID NO: 2303540 - RNA, 13 nt, Human
uauauauauauau

SEQ ID NO: 2303541 - RNA, 14 nt, Human
uauauauauaaaau

SEQ ID NO: 2303542 - RNA, 11 nt, Human
uauaucagccu

SEQ ID NO: 2303543 - RNA, 18 nt, Human
uauaucagaaaagggaag

SEQ ID NO: 2303544 - RNA, 22 nt, Human
uauaucaacagauaguuguguu

SEQ ID NO: 2303545 - RNA, 13 nt, Human
uauaucagaaaag

SEQ ID NO: 2303546 - RNA, 19 nt, Human
uauaucacauguuuucucu

SEQ ID NO: 2303547 - RNA, 14 nt, Human
uauauauccucugu

SEQ ID NO: 2303548 - RNA, 16 nt, Human
uauauauccucuguau

SEQ ID NO: 2303549 - RNA, 22 nt, Human
uauauaucauauugguauucac

SEQ ID NO: 2303550 - RNA, 12 nt, Human
uauacacacagc

SEQ ID NO: 2303551 - RNA, 21 nt, Human
uauacaacccuggcauuaugu

SEQ ID NO: 2303552 - RNA, 22 nt, Human
uauacaacccuggcauuauguc

SEQ ID NO: 2303553 - RNA, 15 nt, Human
uauacaauaacauaa

SEQ ID NO: 2303554 - RNA, 14 nt, Human
uauacaacagugcu

SEQ ID NO: 2303555 - RNA, 15 nt, Human
uauacaacagugcua

SEQ ID NO: 2303556 - RNA, 16 nt, Human
uauacaacagugcuaa

SEQ ID NO: 2303557 - RNA, 20 nt, Human
uauacaacagugcuaaaaau

SEQ ID NO: 2303558 - RNA, 21 nt, Human
uauacaacagugcuaaaaaug

SEQ ID NO: 2303559 - RNA, 19 nt, Human
uauaauuuugugaagcaaa

SEQ ID NO: 2303560 - RNA, 20 nt, Human
uauacaguaacuuuaugugu

SEQ ID NO: 2303561 - RNA, 21 nt, Human
uauacaguaacuuuaugugua

SEQ ID NO: 2303562 - RNA, 16 nt, Human
uauacaguaacuuuau

SEQ ID NO: 2303563 - RNA, 18 nt, Human
uauacaguaacuuuaugu

SEQ ID NO: 2303564 - RNA, 19 nt, Human
uauacaguaacuuuaugug

SEQ ID NO: 2303565 - RNA, 21 nt, Human
uauacacuuacacuuuaugca

SEQ ID NO: 2303566 - RNA, 11 nt, Human
uauacacauaa

SEQ ID NO: 2303567 - RNA, 14 nt, Human
uauacacuguaaug

SEQ ID NO: 2303568 - RNA, 14 nt, Human
uauacauaaacaag

SEQ ID NO: 2303569 - RNA, 13 nt, Human
uauacauaaacaa

SEQ ID NO: 2303570 - RNA, 17 nt, Human
uauaccagcaauauauc

SEQ ID NO: 2303571 - RNA, 22 nt, Human
uauacauucuuuaucuugacau

SEQ ID NO: 2303572 - RNA, 16 nt, Human
uauacauucuuuaucu

SEQ ID NO: 2303573 - RNA, 17 nt, Human
uauacauucuuuaucuu

SEQ ID NO: 2303574 - RNA, 14 nt, Human
uauacauuugauaa

SEQ ID NO: 2303575 - RNA, 22 nt, Human
uauacaguaacuuuauguguaa

SEQ ID NO: 2303576 - RNA, 19 nt, Human
uauaccauggugaauuaau

SEQ ID NO: 2303577 - RNA, 19 nt, Human
uauaccaguauaauugagu

SEQ ID NO: 2303578 - RNA, 16 nt, Human
uauagauuauaacuug

SEQ ID NO: 2303579 - RNA, 15 nt, Human
uauagauuauaacuu

SEQ ID NO: 2303580 - RNA, 20 nt, Human
uauaagaagcuuucaguauu

SEQ ID NO: 2303581 - RNA, 16 nt, Human
uauaagaauaaaaugu

SEQ ID NO: 2303582 - RNA, 20 nt, Human
uauaaccaguguuguggauu

SEQ ID NO: 2303583 - RNA, 19 nt, Human
uauaagaauaaaauguuga

SEQ ID NO: 2303584 - RNA, 16 nt, Human
uauaagaggcugauaa

SEQ ID NO: 2303585 - RNA, 16 nt, Human
uauaagauuagaauga

SEQ ID NO: 2303586 - RNA, 22 nt, Human
uauaauuuuaugaaugucuuug

SEQ ID NO: 2303587 - RNA, 17 nt, Human
uauaauuuuaugaaugu

SEQ ID NO: 2303588 - RNA, 14 nt, Human
uauaauuuugugaa

SEQ ID NO: 2303589 - RNA, 21 nt, Human
uauaauuuaccugaagucuuu

SEQ ID NO: 2303590 - RNA, 16 nt, Human
uauaagcccacuguua

SEQ ID NO: 2303591 - RNA, 12 nt, Human
uauaacagguua

SEQ ID NO: 2303592 - RNA, 13 nt, Human
uauaacagguuau

SEQ ID NO: 2303593 - RNA, 15 nt, Human
uauaacagguuauuu

SEQ ID NO: 2303594 - RNA, 20 nt, Human
uauaacagguuauuuuaguu

SEQ ID NO: 2303595 - RNA, 21 nt, Human
uauaacagguuauuuuaguuu

SEQ ID NO: 2303596 - RNA, 20 nt, Human
uauaaccacaaagcacaguu

SEQ ID NO: 2303597 - RNA, 23 nt, Human
acaccucaguucccuuggccuca

SEQ ID NO: 2303598 - RNA, 22 nt, Human
acaccucaguucccuuggccuc

SEQ ID NO: 2303599 - RNA, 12 nt, Human
acaccucccagg

SEQ ID NO: 2303600 - RNA, 21 nt, Human
acaccucagaggcuguucuug

SEQ ID NO: 2303601 - RNA, 20 nt, Human
acaccuccacaguucagugg

SEQ ID NO: 2303602 - RNA, 18 nt, Human
uauaacaaugcuguauuu

SEQ ID NO: 2303603 - RNA, 21 nt, Human
acaccuagcuuuauucuucag

SEQ ID NO: 2303604 - RNA, 18 nt, Human
acaccuagcuuuauucuu

SEQ ID NO: 2303605 - RNA, 20 nt, Human
acaccuaugucauuucauuu

SEQ ID NO: 2303606 - RNA, 17 nt, Human
acaccuaugucauuuca

SEQ ID NO: 2303607 - RNA, 22 nt, Human
acaccuagcuuuauucuucaga

SEQ ID NO: 2303608 - RNA, 21 nt, Human
acaccucaguucccuuggccu

SEQ ID NO: 2303609 - RNA, 18 nt, Human
acaccucaguucccuugg

SEQ ID NO: 2303610 - RNA, 20 nt, Human
acaccucagaggcuguucuu

SEQ ID NO: 2303611 - RNA, 19 nt, Human
acagcccaaagaaggaaaa

SEQ ID NO: 2303612 - RNA, 15 nt, Human
acagcccacguccug

SEQ ID NO: 2303613 - RNA, 16 nt, Human
acagcccacguccugu

SEQ ID NO: 2303614 - RNA, 13 nt, Human
acagcccaccugg

SEQ ID NO: 2303615 - RNA, 17 nt, Human
acagcccacguccuguc

SEQ ID NO: 2303616 - RNA, 19 nt, Human
acagcccacguccugucag

SEQ ID NO: 2303617 - RNA, 20 nt, Human
acagcccacguccugucagu

SEQ ID NO: 2303618 - RNA, 12 nt, Human
acagccccaccc

SEQ ID NO: 2303619 - RNA, 14 nt, Human
acagccccacccug

SEQ ID NO: 2303620 - RNA, 13 nt, Human
acagccccacccu

SEQ ID NO: 2303621 - RNA, 15 nt, Human
acagccccacccugg

SEQ ID NO: 2303622 - RNA, 13 nt, Human
acagccccagagc

SEQ ID NO: 2303623 - RNA, 14 nt, Human
acagccccagagca

SEQ ID NO: 2303624 - RNA, 15 nt, Human
acagccccagagcag

SEQ ID NO: 2303625 - RNA, 17 nt, Human
acagccccagagcaggg

SEQ ID NO: 2303626 - RNA, 16 nt, Human
acagccucccaccccc

SEQ ID NO: 2303627 - RNA, 15 nt, Human
acagccucccacccc

SEQ ID NO: 2303628 - RNA, 17 nt, Human
acagccuccccugccag

SEQ ID NO: 2303629 - RNA, 15 nt, Human
acagccuccccugcc

SEQ ID NO: 2303630 - RNA, 22 nt, Human
acagccuccccugccagggcag

SEQ ID NO: 2303631 - RNA, 21 nt, Human
acagccuccccugccagggca

SEQ ID NO: 2303632 - RNA, 19 nt, Human
acagccuccccugccaggg

SEQ ID NO: 2303633 - RNA, 18 nt, Human
acagccuccccugccagg

SEQ ID NO: 2303634 - RNA, 16 nt, Human
acagccccagagcagg

SEQ ID NO: 2303635 - RNA, 12 nt, Human
acagccuccucu

SEQ ID NO: 2303636 - RNA, 13 nt, Human
acagccuccucug

SEQ ID NO: 2303637 - RNA, 15 nt, Human
acagccuccucuguc

SEQ ID NO: 2303638 - RNA, 17 nt, Human
acagccuccucugucug

SEQ ID NO: 2303639 - RNA, 19 nt, Human
acagccuccucugucugcc

SEQ ID NO: 2303640 - RNA, 20 nt, Human
acagccuccucugucugccc

SEQ ID NO: 2303641 - RNA, 22 nt, Human
acagccuccucugucugcccuu

SEQ ID NO: 2303642 - RNA, 23 nt, Human
acagccuccucugucugcccuuc

SEQ ID NO: 2303643 - RNA, 12 nt, Human
acagccucugac

SEQ ID NO: 2303644 - RNA, 16 nt, Human
acagccucugaccccu

SEQ ID NO: 2303645 - RNA, 18 nt, Human
acagccucugaccccucc

SEQ ID NO: 2303646 - RNA, 17 nt, Human
acagcagcucaggcaca

SEQ ID NO: 2303647 - RNA, 14 nt, Human
acagcagcugaaca

SEQ ID NO: 2303648 - RNA, 12 nt, Human
acagcagcuuca

SEQ ID NO: 2303649 - RNA, 16 nt, Human
acagcagcucaggcac

SEQ ID NO: 2303650 - RNA, 15 nt, Human
acagcagcucaggca

SEQ ID NO: 2303651 - RNA, 22 nt, Human
acagcagcuucaccagagcauu

SEQ ID NO: 2303652 - RNA, 13 nt, Human
acagcagcuucac

SEQ ID NO: 2303653 - RNA, 16 nt, Human
acagcagcuucaccag

SEQ ID NO: 2303654 - RNA, 17 nt, Human
acagcagcuucaccaga

SEQ ID NO: 2303655 - RNA, 18 nt, Human
acagcagcuucaccagag

SEQ ID NO: 2303656 - RNA, 14 nt, Human
acagcagcucaggc

SEQ ID NO: 2303657 - RNA, 22 nt, Human
acagcagccuggggcuggccuc

SEQ ID NO: 2303658 - RNA, 19 nt, Human
acagauaagcaagagagau

SEQ ID NO: 2303659 - RNA, 18 nt, Human
acagauaagcaagagaga

SEQ ID NO: 2303660 - RNA, 15 nt, Human
acagauaagcaagag

SEQ ID NO: 2303661 - RNA, 18 nt, Human
acagcagccccugcacaa

SEQ ID NO: 2303662 - RNA, 20 nt, Human
acagaguuuucacucuuauu

SEQ ID NO: 2303663 - RNA, 13 nt, Human
acagauaagcaag

SEQ ID NO: 2303664 - RNA, 18 nt, Human
acagaguuuucacucuua

SEQ ID NO: 2303665 - RNA, 17 nt, Human
acagagugugcuggagg

SEQ ID NO: 2303666 - RNA, 19 nt, Human
acagagugugcuggaggac

SEQ ID NO: 2303667 - RNA, 17 nt, Human
uaucuuggacugacauu

SEQ ID NO: 2303668 - RNA, 18 nt, Human
uaugagcuuccuucugug

SEQ ID NO: 2303669 - RNA, 17 nt, Human
uaucuugcucuguaauc

SEQ ID NO: 2303670 - RNA, 15 nt, Human
uaucuugcucuguaa

SEQ ID NO: 2303671 - RNA, 15 nt, Human
uaucuugaauaaugu

SEQ ID NO: 2303672 - RNA, 15 nt, Human
uaucuugaagacuuu

SEQ ID NO: 2303673 - RNA, 16 nt, Human
uaugagcuuuauguaa

SEQ ID NO: 2303674 - RNA, 17 nt, Human
uaugaggacuugugucu

SEQ ID NO: 2303675 - RNA, 23 nt, Human
uaugaggacuugugucucugugc

SEQ ID NO: 2303676 - RNA, 17 nt, Human
uaugaggaauaauuauu

SEQ ID NO: 2303677 - RNA, 20 nt, Human
uaucuuggacugacauuuag

SEQ ID NO: 2303678 - RNA, 21 nt, Human
uaugagcuuccuucugugaaa

SEQ ID NO: 2303679 - RNA, 22 nt, Human
uaugaggcaaccacaggcagca

SEQ ID NO: 2303680 - RNA, 14 nt, Human
uaugaggaugcaga

SEQ ID NO: 2303681 - RNA, 13 nt, Human
uaugaggcauuug

SEQ ID NO: 2303682 - RNA, 21 nt, Human
uaugaucacggcucacugcag

SEQ ID NO: 2303683 - RNA, 23 nt, Human
uaugaucacggcucacugcagcc

SEQ ID NO: 2303684 - RNA, 15 nt, Human
uaugaggucuaggaa

SEQ ID NO: 2303685 - RNA, 15 nt, Human
uaugagucaaugugc

SEQ ID NO: 2303686 - RNA, 19 nt, Human
uaugaggucuaggaacaua

SEQ ID NO: 2303687 - RNA, 15 nt, Human
uaugagggaaaauga

SEQ ID NO: 2303688 - RNA, 22 nt, Human
uaugaguuguuuucagacucag

SEQ ID NO: 2303689 - RNA, 18 nt, Human
uaugaguuguuuucagac

SEQ ID NO: 2303690 - RNA, 23 nt, Human
uaugagucaaugugcaguguagc

SEQ ID NO: 2303691 - RNA, 16 nt, Human
uaugagucaaugugca

SEQ ID NO: 2303692 - RNA, 17 nt, Human
uaugagucaaugugcag

SEQ ID NO: 2303693 - RNA, 23 nt, Human
uaugaguuuuugauagcuuuauu

SEQ ID NO: 2303694 - RNA, 22 nt, Human
uaugaguuuuugauagcuuuau

SEQ ID NO: 2303695 - RNA, 21 nt, Human
uaugaguuuuugauagcuuua

SEQ ID NO: 2303696 - RNA, 17 nt, Human
uaugaguuucauagcua

SEQ ID NO: 2303697 - RNA, 21 nt, Human
uaugaguuucauagcuaagaa

SEQ ID NO: 2303698 - RNA, 14 nt, Human
uaugaucacggcuc

SEQ ID NO: 2303699 - RNA, 18 nt, Human
uaugaugugggucaagga

SEQ ID NO: 2303700 - RNA, 15 nt, Human
uaugauguguuguga

SEQ ID NO: 2303701 - RNA, 17 nt, Human
uaugauguguugugaua

SEQ ID NO: 2303702 - RNA, 18 nt, Human
uaugauguguugugauag

SEQ ID NO: 2303703 - RNA, 13 nt, Human
uaugauguauauu

SEQ ID NO: 2303704 - RNA, 15 nt, Human
uaugaugcuguugcc

SEQ ID NO: 2303705 - RNA, 22 nt, Human
uaugaugauacaagauuagaag

SEQ ID NO: 2303706 - RNA, 18 nt, Human
uaugcucugcauguuaca

SEQ ID NO: 2303707 - RNA, 14 nt, Human
uaugcucugcaugu

SEQ ID NO: 2303708 - RNA, 15 nt, Human
uaugaucgcgccacu

SEQ ID NO: 2303709 - RNA, 15 nt, Human
uaugaucccagcacu

SEQ ID NO: 2303710 - RNA, 21 nt, Human
uaugauggguguuuuuagcag

SEQ ID NO: 2303711 - RNA, 19 nt, Human
uaugaucucagguucuccu

SEQ ID NO: 2303712 - RNA, 21 nt, Human
uaugaugacucccuuaaaaua

SEQ ID NO: 2303713 - RNA, 23 nt, Human
uauggccucagcugccucacuuc

SEQ ID NO: 2303714 - RNA, 19 nt, Human
uauggccucagcugccuca

SEQ ID NO: 2303715 - RNA, 12 nt, Human
uauggccucagc

SEQ ID NO: 2303716 - RNA, 19 nt, Human
uaugcucugcauguuacau

SEQ ID NO: 2303717 - RNA, 19 nt, Human
uaugcugaaacagaauacu

SEQ ID NO: 2303718 - RNA, 22 nt, Human
uauggccugugagcuaggaauu

SEQ ID NO: 2303719 - RNA, 14 nt, Human
uauggccuguggau

SEQ ID NO: 2303720 - RNA, 16 nt, Human
uauggcuauaggugcu

SEQ ID NO: 2303721 - RNA, 22 nt, Human
uaugcugaguauguuaagcucu

SEQ ID NO: 2303722 - RNA, 15 nt, Human
uaugggagccccagg

SEQ ID NO: 2303723 - RNA, 17 nt, Human
uauggcuggccacugca

SEQ ID NO: 2303724 - RNA, 16 nt, Human
uauggcuuuugugcau

SEQ ID NO: 2303725 - RNA, 22 nt, Human
uauggcuagaauauccuacuuc

SEQ ID NO: 2303726 - RNA, 17 nt, Human
uauggcucacuaugaau

SEQ ID NO: 2303727 - RNA, 17 nt, Human
uauggcuagaauauccu

SEQ ID NO: 2303728 - RNA, 21 nt, Human
uauggcuagaauauccuacuu

SEQ ID NO: 2303729 - RNA, 17 nt, Human
uauggcuauaggugcua

SEQ ID NO: 2303730 - RNA, 16 nt, Human
uaugggagccccaggg

SEQ ID NO: 2303731 - RNA, 15 nt, Human
uaugggcaaaaaacu

SEQ ID NO: 2303732 - RNA, 17 nt, Human
uaugggcauuguaguua

SEQ ID NO: 2303733 - RNA, 18 nt, Human
uauggggauagaugugug

SEQ ID NO: 2303734 - RNA, 17 nt, Human
uauggggauagaugugu

SEQ ID NO: 2303735 - RNA, 14 nt, Human
acagccuggcacag

SEQ ID NO: 2303736 - RNA, 19 nt, Human
uauggggauagaugugugg

SEQ ID NO: 2303737 - RNA, 15 nt, Human
acagccuggcacagg

SEQ ID NO: 2303738 - RNA, 21 nt, Human
acagccuguggcggugccugg

SEQ ID NO: 2303739 - RNA, 20 nt, Human
acagccuguggcggugccug

SEQ ID NO: 2303740 - RNA, 22 nt, Human
uauggggagaaaagacaugaau

SEQ ID NO: 2303741 - RNA, 14 nt, Human
acagcuaacaugga

SEQ ID NO: 2303742 - RNA, 15 nt, Human
acagcuaacauggaa

SEQ ID NO: 2303743 - RNA, 16 nt, Human
acagcucccaccccac

SEQ ID NO: 2303744 - RNA, 15 nt, Human
acagcucccacccca

SEQ ID NO: 2303745 - RNA, 14 nt, Human
acagcucccacccc

SEQ ID NO: 2303746 - RNA, 13 nt, Human
acagcucccaccc

SEQ ID NO: 2303747 - RNA, 17 nt, Human
acagcuccacccuggcc

SEQ ID NO: 2303748 - RNA, 23 nt, Human
acagcucaguucuagucucucug

SEQ ID NO: 2303749 - RNA, 21 nt, Human
acagcucaguucuagucucuc

SEQ ID NO: 2303750 - RNA, 21 nt, Human
acagcucaggaucucuuagca

SEQ ID NO: 2303751 - RNA, 22 nt, Human
acagccuguggcggugccuggg

SEQ ID NO: 2303752 - RNA, 20 nt, Human
acagcuaaucagcauucuca

SEQ ID NO: 2303753 - RNA, 17 nt, Human
acagcuaacauggaagu

SEQ ID NO: 2303754 - RNA, 22 nt, Human
acagacucgauucauauugaau

SEQ ID NO: 2303755 - RNA, 17 nt, Human
acagacuccugaggaca

SEQ ID NO: 2303756 - RNA, 20 nt, Human
acagacucacaaccugaacc

SEQ ID NO: 2303757 - RNA, 22 nt, Human
acagacucacaaccugaaccua

SEQ ID NO: 2303758 - RNA, 20 nt, Human
acagacucaaaugcucagac

SEQ ID NO: 2303759 - RNA, 17 nt, Human
acagacuauuuaacuug

SEQ ID NO: 2303760 - RNA, 16 nt, Human
acagacagacacacac

SEQ ID NO: 2303761 - RNA, 18 nt, Human
acagacccugcccugugg

SEQ ID NO: 2303762 - RNA, 20 nt, Human
acagacccugcccugugggc

SEQ ID NO: 2303763 - RNA, 23 nt, Human
acagacugcgauuugucccaggu

SEQ ID NO: 2303764 - RNA, 14 nt, Human
acagacuggaagca

SEQ ID NO: 2303765 - RNA, 16 nt, Human
uauauugauccagaaa

SEQ ID NO: 2303766 - RNA, 17 nt, Human
acacuccccugcacugg

SEQ ID NO: 2303767 - RNA, 16 nt, Human
acacuccuacaccuaa

SEQ ID NO: 2303768 - RNA, 14 nt, Human
acacucccuugggc

SEQ ID NO: 2303769 - RNA, 15 nt, Human
acacuccccugcacu

SEQ ID NO: 2303770 - RNA, 16 nt, Human
acacuccaucagcuua

SEQ ID NO: 2303771 - RNA, 15 nt, Human
acacuccccgaaguc

SEQ ID NO: 2303772 - RNA, 11 nt, Human
acacuccuuca

SEQ ID NO: 2303773 - RNA, 23 nt, Human
acagacacaggcccggcuccagg

SEQ ID NO: 2303774 - RNA, 14 nt, Human
acacuccuagagaa

SEQ ID NO: 2303775 - RNA, 20 nt, Human
acacuccuagagaacgcagc

SEQ ID NO: 2303776 - RNA, 23 nt, Human
acacuccuagagaacgcagcccu

SEQ ID NO: 2303777 - RNA, 15 nt, Human
acagacagcccucca

SEQ ID NO: 2303778 - RNA, 13 nt, Human
acagacagcccuc

SEQ ID NO: 2303779 - RNA, 21 nt, Human
acagacacucccacuuggcau

SEQ ID NO: 2303780 - RNA, 14 nt, Human
acagacacuggcau

SEQ ID NO: 2303781 - RNA, 18 nt, Human
acagacacuaaguuauag

SEQ ID NO: 2303782 - RNA, 17 nt, Human
acagacccugcccugug

SEQ ID NO: 2303783 - RNA, 16 nt, Human
acagacccugcccugu

SEQ ID NO: 2303784 - RNA, 17 nt, Human
uaucacacuucugugag

SEQ ID NO: 2303785 - RNA, 15 nt, Human
uaucacagucuaauu

SEQ ID NO: 2303786 - RNA, 16 nt, Human
uaucacagucuaauuu

SEQ ID NO: 2303787 - RNA, 13 nt, Human
uaucacacuucug

SEQ ID NO: 2303788 - RNA, 12 nt, Human
uaucacauguuu

SEQ ID NO: 2303789 - RNA, 18 nt, Human
uaucacauguauguuuug

SEQ ID NO: 2303790 - RNA, 21 nt, Human
uaucacauguauguuuuggua

SEQ ID NO: 2303791 - RNA, 20 nt, Human
uaucacagucuaauuuuuau

SEQ ID NO: 2303792 - RNA, 12 nt, Human
uaucacauguau

SEQ ID NO: 2303793 - RNA, 16 nt, Human
uaucacauguauguuu

SEQ ID NO: 2303794 - RNA, 17 nt, Human
uaucacauguauguuuu

SEQ ID NO: 2303795 - RNA, 17 nt, Human
uaucaauccuuguucag

SEQ ID NO: 2303796 - RNA, 18 nt, Human
uaucaaucaguauaauuc

SEQ ID NO: 2303797 - RNA, 15 nt, Human
uaucaaucaguauaa

SEQ ID NO: 2303798 - RNA, 13 nt, Human
uaucaauagucaa

SEQ ID NO: 2303799 - RNA, 15 nt, Human
uaucaauagucaaga

SEQ ID NO: 2303800 - RNA, 20 nt, Human
uaucaauagucaagaaaaau

SEQ ID NO: 2303801 - RNA, 18 nt, Human
uaucacugacacaaaaag

SEQ ID NO: 2303802 - RNA, 13 nt, Human
uaucacauuauuu

SEQ ID NO: 2303803 - RNA, 18 nt, Human
uaucacauguuuucucug

SEQ ID NO: 2303804 - RNA, 15 nt, Human
uaucaccacaguaag

SEQ ID NO: 2303805 - RNA, 18 nt, Human
uaucaccagagagggacu

SEQ ID NO: 2303806 - RNA, 15 nt, Human
uaucaccagcugccu

SEQ ID NO: 2303807 - RNA, 17 nt, Human
uaucaccagcugccucu

SEQ ID NO: 2303808 - RNA, 18 nt, Human
uaucacccagaagaaaau

SEQ ID NO: 2303809 - RNA, 14 nt, Human
uaucaagugucuuc

SEQ ID NO: 2303810 - RNA, 24 nt, Human
uauauuuacagugaaaauguaagc

SEQ ID NO: 2303811 - RNA, 18 nt, Human
uaucaaguauuauaccuu

SEQ ID NO: 2303812 - RNA, 21 nt, Human
uaucaaguauuauaccuuuuu

SEQ ID NO: 2303813 - RNA, 15 nt, Human
uauauuuacaaaugg

SEQ ID NO: 2303814 - RNA, 12 nt, Human
uauauugauaac

SEQ ID NO: 2303815 - RNA, 23 nt, Human
acagacuccugaggacagcuguc

SEQ ID NO: 2303816 - RNA, 22 nt, Human
uauauugauaacagcacugacu

SEQ ID NO: 2303817 - RNA, 23 nt, Human
uauauugauaacagcacugacua

SEQ ID NO: 2303818 - RNA, 17 nt, Human
uauauugguaacauccu

SEQ ID NO: 2303819 - RNA, 18 nt, Human
uauauugguaacauccuu

SEQ ID NO: 2303820 - RNA, 19 nt, Human
uauauugguaacauccuuu

SEQ ID NO: 2303821 - RNA, 21 nt, Human
uauauugguaacauccuuucu

SEQ ID NO: 2303822 - RNA, 14 nt, Human
uauauuuacaaaug

SEQ ID NO: 2303823 - RNA, 16 nt, Human
acagacuucuccagac

SEQ ID NO: 2303824 - RNA, 15 nt, Human
acagacuucuccaga

SEQ ID NO: 2303825 - RNA, 13 nt, Human
acagacuucugaa

SEQ ID NO: 2303826 - RNA, 17 nt, Human
acagacuucuccagacc

SEQ ID NO: 2303827 - RNA, 14 nt, Human
acagacuucugaaa

SEQ ID NO: 2303828 - RNA, 18 nt, Human
uaucuccucgcaagcugg

SEQ ID NO: 2303829 - RNA, 22 nt, Human
acagacuggaagcacagcuuca

SEQ ID NO: 2303830 - RNA, 15 nt, Human
acagagaggacgugg

SEQ ID NO: 2303831 - RNA, 16 nt, Human
acagagaggacuguag

SEQ ID NO: 2303832 - RNA, 17 nt, Human
acagagacauuccuccg

SEQ ID NO: 2303833 - RNA, 19 nt, Human
acagagacauuccuccgag

SEQ ID NO: 2303834 - RNA, 14 nt, Human
acagagaccuccug

SEQ ID NO: 2303835 - RNA, 23 nt, Human
acagagacaggcccaagagauga

SEQ ID NO: 2303836 - RNA, 16 nt, Human
acagagacauuccucc

SEQ ID NO: 2303837 - RNA, 21 nt, Human
acagagacaggcccaagagau

SEQ ID NO: 2303838 - RNA, 15 nt, Human
acagagacaggccca

SEQ ID NO: 2303839 - RNA, 21 nt, Human
acagagacaccugcaccuccc

SEQ ID NO: 2303840 - RNA, 17 nt, Human
acagagacaccugcacc

SEQ ID NO: 2303841 - RNA, 16 nt, Human
acagagacaccugcac

SEQ ID NO: 2303842 - RNA, 15 nt, Human
acagagacaccugca

SEQ ID NO: 2303843 - RNA, 21 nt, Human
acagagagggggccaccuccc

SEQ ID NO: 2303844 - RNA, 18 nt, Human
acagagaggagaaacaca

SEQ ID NO: 2303845 - RNA, 20 nt, Human
acagagaggagaaacacauc

SEQ ID NO: 2303846 - RNA, 16 nt, Human
acagagaggagaaaca

SEQ ID NO: 2303847 - RNA, 14 nt, Human
acagagaggagaaa

SEQ ID NO: 2303848 - RNA, 20 nt, Human
acagagcccacgcccccacu

SEQ ID NO: 2303849 - RNA, 21 nt, Human
acagagccucgggacaucaaa

SEQ ID NO: 2303850 - RNA, 23 nt, Human
acagagccuucugaggacauucc

SEQ ID NO: 2303851 - RNA, 16 nt, Human
acagagcuacacaggg

SEQ ID NO: 2303852 - RNA, 24 nt, Human
acagaguggucuuucuggagaggu

SEQ ID NO: 2303853 - RNA, 21 nt, Human
acagaguggucuuucuggaga

SEQ ID NO: 2303854 - RNA, 19 nt, Human
acagaguggucuuucugga

SEQ ID NO: 2303855 - RNA, 18 nt, Human
acagaguggucuuucugg

SEQ ID NO: 2303856 - RNA, 19 nt, Human
acagagugauagccuuccg

SEQ ID NO: 2303857 - RNA, 22 nt, Human
acagaguggacuguucccugag

SEQ ID NO: 2303858 - RNA, 21 nt, Human
acagagcgagagucugucuca

SEQ ID NO: 2303859 - RNA, 18 nt, Human
acagagcuacacagggga

SEQ ID NO: 2303860 - RNA, 21 nt, Human
acagagugagacucugucuca

SEQ ID NO: 2303861 - RNA, 18 nt, Human
uauccauguacuguaguu

SEQ ID NO: 2303862 - RNA, 14 nt, Human
uauccauuaucaug

SEQ ID NO: 2303863 - RNA, 22 nt, Human
uauccauguacuguaguuuuuc

SEQ ID NO: 2303864 - RNA, 16 nt, Human
uauccauguacuguag

SEQ ID NO: 2303865 - RNA, 15 nt, Human
uauccauguacugua

SEQ ID NO: 2303866 - RNA, 14 nt, Human
uauccauguacugu

SEQ ID NO: 2303867 - RNA, 13 nt, Human
uauccauguacug

SEQ ID NO: 2303868 - RNA, 20 nt, Human
uauccaugggggcagggcau

SEQ ID NO: 2303869 - RNA, 19 nt, Human
uauccaugggggcagggca

SEQ ID NO: 2303870 - RNA, 18 nt, Human
uauccaugggggcagggc

SEQ ID NO: 2303871 - RNA, 17 nt, Human
uauccaugggggcaggg

SEQ ID NO: 2303872 - RNA, 21 nt, Human
uaucagaagaccacaaaaauu

SEQ ID NO: 2303873 - RNA, 18 nt, Human
uauccauggggaagggau

SEQ ID NO: 2303874 - RNA, 10 nt, Human
uaucagaauu

SEQ ID NO: 2303875 - RNA, 22 nt, Human
uauccauauugagucaaauggu

SEQ ID NO: 2303876 - RNA, 23 nt, Human
uaucagaagaccacaaaaauuga

SEQ ID NO: 2303877 - RNA, 14 nt, Human
uaucagaagaccac

SEQ ID NO: 2303878 - RNA, 16 nt, Human
uaucuagauacuguau

SEQ ID NO: 2303879 - RNA, 15 nt, Human
uaucuagauacugua

SEQ ID NO: 2303880 - RNA, 21 nt, Human
uaucuacucuccucaucucua

SEQ ID NO: 2303881 - RNA, 20 nt, Human
uaucuacugauaaagaaaga

SEQ ID NO: 2303882 - RNA, 20 nt, Human
uaucuacucuccucaucucu

SEQ ID NO: 2303883 - RNA, 14 nt, Human
uaucuacucuccuc

SEQ ID NO: 2303884 - RNA, 16 nt, Human
uauccauucuuucuga

SEQ ID NO: 2303885 - RNA, 15 nt, Human
uauccauuucucaug

SEQ ID NO: 2303886 - RNA, 14 nt, Human
uauccauucuuucu

SEQ ID NO: 2303887 - RNA, 19 nt, Human
uauccauuaucauguguaa

SEQ ID NO: 2303888 - RNA, 15 nt, Human
uauccauuaucaugu

SEQ ID NO: 2303889 - RNA, 16 nt, Human
uauccauuaucaugug

SEQ ID NO: 2303890 - RNA, 17 nt, Human
uauccauuaucaugugu

SEQ ID NO: 2303891 - RNA, 18 nt, Human
uauccauuaucaugugua

SEQ ID NO: 2303892 - RNA, 19 nt, Human
uaucuagugcagcugauuu

SEQ ID NO: 2303893 - RNA, 14 nt, Human
uaucuagugcagcu

SEQ ID NO: 2303894 - RNA, 23 nt, Human
uaucuagugcagcugauuuuaac

SEQ ID NO: 2303895 - RNA, 20 nt, Human
uaucuagugcagcugauuuu

SEQ ID NO: 2303896 - RNA, 17 nt, Human
uaucucccccagcccca

SEQ ID NO: 2303897 - RNA, 18 nt, Human
uaucucccccagccccau

SEQ ID NO: 2303898 - RNA, 17 nt, Human
uaucuaguuuaauuaau

SEQ ID NO: 2303899 - RNA, 16 nt, Human
uaucucccccagcccc

SEQ ID NO: 2303900 - RNA, 20 nt, Human
uaucuagcaaucacaacacu

SEQ ID NO: 2303901 - RNA, 19 nt, Human
uaucuagauacuguaucau

SEQ ID NO: 2303902 - RNA, 22 nt, Human
uauucuuaagggaacuuccaca

SEQ ID NO: 2303903 - RNA, 16 nt, Human
uauucuguuggccagu

SEQ ID NO: 2303904 - RNA, 15 nt, Human
uauucuuauuuaaug

SEQ ID NO: 2303905 - RNA, 14 nt, Human
uauucuucauaaca

SEQ ID NO: 2303906 - RNA, 13 nt, Human
uauucuucucuuc

SEQ ID NO: 2303907 - RNA, 14 nt, Human
uauucugauuccac

SEQ ID NO: 2303908 - RNA, 12 nt, Human
uauucuggaguu

SEQ ID NO: 2303909 - RNA, 22 nt, Human
uauucugauuacacaaaacaaa

SEQ ID NO: 2303910 - RNA, 21 nt, Human
uauucucuuaauuuuucuuaa

SEQ ID NO: 2303911 - RNA, 19 nt, Human
uauucuguagauucugugg

SEQ ID NO: 2303912 - RNA, 22 nt, Human
uauucuguagauucuguggaac

SEQ ID NO: 2303913 - RNA, 19 nt, Human
acaguuccucgcccugggu

SEQ ID NO: 2303914 - RNA, 18 nt, Human
acaguuccucgcccuggg

SEQ ID NO: 2303915 - RNA, 13 nt, Human
acaguuccuucag

SEQ ID NO: 2303916 - RNA, 13 nt, Human
acaguucugaaga

SEQ ID NO: 2303917 - RNA, 15 nt, Human
acaguucugaagaau

SEQ ID NO: 2303918 - RNA, 17 nt, Human
acaguucucuccuucuu

SEQ ID NO: 2303919 - RNA, 18 nt, Human
acaguucuuugggccaga

SEQ ID NO: 2303920 - RNA, 17 nt, Human
acaguucuuugggccag

SEQ ID NO: 2303921 - RNA, 21 nt, Human
acaguucuucgggaagagagg

SEQ ID NO: 2303922 - RNA, 24 nt, Human
acaguucuucgggaagagaggagu

SEQ ID NO: 2303923 - RNA, 17 nt, Human
acaguucuugugugguu

SEQ ID NO: 2303924 - RNA, 23 nt, Human
acaguucuugugugguuuggccc

SEQ ID NO: 2303925 - RNA, 15 nt, Human
acaguucuucgggaa

SEQ ID NO: 2303926 - RNA, 19 nt, Human
acaguucuucgggaagaga

SEQ ID NO: 2303927 - RNA, 20 nt, Human
acaguucuucgggaagagag

SEQ ID NO: 2303928 - RNA, 24 nt, Human
uauucucuccuguaccucuugagc

SEQ ID NO: 2303929 - RNA, 20 nt, Human
uauucucuccuguaccucuu

SEQ ID NO: 2303930 - RNA, 19 nt, Human
uauucucugagcugugcag

SEQ ID NO: 2303931 - RNA, 18 nt, Human
uauucucugagcugugca

SEQ ID NO: 2303932 - RNA, 19 nt, Human
acaguucuuugggccagac

SEQ ID NO: 2303933 - RNA, 12 nt, Human
uauucucugagc

SEQ ID NO: 2303934 - RNA, 16 nt, Human
acaguuccucgcccug

SEQ ID NO: 2303935 - RNA, 15 nt, Human
acaguuccucgcccu

SEQ ID NO: 2303936 - RNA, 14 nt, Human
acaguuccucgccc

SEQ ID NO: 2303937 - RNA, 12 nt, Human
acaguuccucgc

SEQ ID NO: 2303938 - RNA, 16 nt, Human
acaguucucuccuucu

SEQ ID NO: 2303939 - RNA, 23 nt, Human
acaguucggugagcuacaaaugc

SEQ ID NO: 2303940 - RNA, 22 nt, Human
acaguucggugagcuacaaaug

SEQ ID NO: 2303941 - RNA, 19 nt, Human
acaguucggugagcuacaa

SEQ ID NO: 2303942 - RNA, 22 nt, Human
acaguuaggguugaguuacuuc

SEQ ID NO: 2303943 - RNA, 23 nt, Human
acaguuagcaaacuuuguauguc

SEQ ID NO: 2303944 - RNA, 20 nt, Human
acaguuacucagaauucucu

SEQ ID NO: 2303945 - RNA, 13 nt, Human
acaguuacucaga

SEQ ID NO: 2303946 - RNA, 20 nt, Human
acaguucaauucucauuugu

SEQ ID NO: 2303947 - RNA, 20 nt, Human
acaguucaagaaagcuucaa

SEQ ID NO: 2303948 - RNA, 12 nt, Human
acaguucaagaa

SEQ ID NO: 2303949 - RNA, 20 nt, Human
acaguucauguuugcuucau

SEQ ID NO: 2303950 - RNA, 15 nt, Human
acaguucauauguac

SEQ ID NO: 2303951 - RNA, 23 nt, Human
acaguucaguggcagggcucagg

SEQ ID NO: 2303952 - RNA, 12 nt, Human
acaguucaguuc

SEQ ID NO: 2303953 - RNA, 16 nt, Human
acaguucaguuccucu

SEQ ID NO: 2303954 - RNA, 21 nt, Human
acaguucaguuccucuuugca

SEQ ID NO: 2303955 - RNA, 13 nt, Human
acaguucaguggc

SEQ ID NO: 2303956 - RNA, 20 nt, Human
acaguucaguggcagggcuc

SEQ ID NO: 2303957 - RNA, 21 nt, Human
acaguucaguggcagggcuca

SEQ ID NO: 2303958 - RNA, 16 nt, Human
acaguucaagaaagcu

SEQ ID NO: 2303959 - RNA, 15 nt, Human
uauuguaaacaugug

SEQ ID NO: 2303960 - RNA, 14 nt, Human
uauuguaaauaugu

SEQ ID NO: 2303961 - RNA, 17 nt, Human
uauuguaaacauguguu

SEQ ID NO: 2303962 - RNA, 18 nt, Human
uauuguaaacauguguuu

SEQ ID NO: 2303963 - RNA, 16 nt, Human
uauuguaaacaugugu

SEQ ID NO: 2303964 - RNA, 19 nt, Human
uauuguaagaaauacugua

SEQ ID NO: 2303965 - RNA, 17 nt, Human
uauuguaagaaauacug

SEQ ID NO: 2303966 - RNA, 11 nt, Human
uauuguaagaa

SEQ ID NO: 2303967 - RNA, 15 nt, Human
uauuguaaauauguu

SEQ ID NO: 2303968 - RNA, 15 nt, Human
uauuguaacagacau

SEQ ID NO: 2303969 - RNA, 16 nt, Human
uauuguaacagacauu

SEQ ID NO: 2303970 - RNA, 17 nt, Human
uauuguaacagacauug

SEQ ID NO: 2303971 - RNA, 18 nt, Human
uauuguaacagacauugu

SEQ ID NO: 2303972 - RNA, 19 nt, Human
uauuguaacagacauuguu

SEQ ID NO: 2303973 - RNA, 15 nt, Human
uauugguaacauccu

SEQ ID NO: 2303974 - RNA, 20 nt, Human
uauuggguucauuauuggaa

SEQ ID NO: 2303975 - RNA, 18 nt, Human
uauuggguucauuauugg

SEQ ID NO: 2303976 - RNA, 22 nt, Human
uauugguaacauccuuucuauu

SEQ ID NO: 2303977 - RNA, 18 nt, Human
uauugguaacauccuuuc

SEQ ID NO: 2303978 - RNA, 21 nt, Human
uauugguaacauccuuucuau

SEQ ID NO: 2303979 - RNA, 22 nt, Human
uauugguccagcuugcucuuca

SEQ ID NO: 2303980 - RNA, 13 nt, Human
uauugguccagcu

SEQ ID NO: 2303981 - RNA, 16 nt, Human
uauuggguucauuauu

SEQ ID NO: 2303982 - RNA, 14 nt, Human
uauuggguucauua

SEQ ID NO: 2303983 - RNA, 23 nt, Human
uauuggguagauauuuuuucuga

SEQ ID NO: 2303984 - RNA, 16 nt, Human
uauuggggucugaccc

SEQ ID NO: 2303985 - RNA, 17 nt, Human
uauuggggucugacccc

SEQ ID NO: 2303986 - RNA, 14 nt, Human
uauugacuuugucu

SEQ ID NO: 2303987 - RNA, 17 nt, Human
uauugacuuguauauuu

SEQ ID NO: 2303988 - RNA, 14 nt, Human
uauugacuuguaua

SEQ ID NO: 2303989 - RNA, 15 nt, Human
uauugacuuguauau

SEQ ID NO: 2303990 - RNA, 19 nt, Human
uauugacuucaaugauagu

SEQ ID NO: 2303991 - RNA, 18 nt, Human
uauugagaauuuuaaauu

SEQ ID NO: 2303992 - RNA, 15 nt, Human
uauugagaaagagca

SEQ ID NO: 2303993 - RNA, 14 nt, Human
uauugagucaaaug

SEQ ID NO: 2303994 - RNA, 14 nt, Human
uauuggccuggagg

SEQ ID NO: 2303995 - RNA, 23 nt, Human
uauuggcuaaauugaaaccugga

SEQ ID NO: 2303996 - RNA, 14 nt, Human
uauuggcugggagu

SEQ ID NO: 2303997 - RNA, 10 nt, Human
uauucuuuga

SEQ ID NO: 2303998 - RNA, 18 nt, Human
uauucuuugauguuaaca

SEQ ID NO: 2303999 - RNA, 20 nt, Human
uauucuuugauguuaacaca

SEQ ID NO: 2304000 - RNA, 21 nt, Human
uauucuuugauguuaacacau

SEQ ID NO: 2304001 - RNA, 22 nt, Human
uauucuuugauguuaacacauu

SEQ ID NO: 2304002 - RNA, 23 nt, Human
uauucuuugauguuaacacauuu

SEQ ID NO: 2304003 - RNA, 24 nt, Human
uauucuuugauguuaacacauuuu

SEQ ID NO: 2304004 - RNA, 22 nt, Human
uauucuucucuuccuuuuauca

SEQ ID NO: 2304005 - RNA, 18 nt, Human
uauugaacuuggaaagaa

SEQ ID NO: 2304006 - RNA, 20 nt, Human
uauugaaauuguacauauuu

SEQ ID NO: 2304007 - RNA, 12 nt, Human
uauugaagcauu

SEQ ID NO: 2304008 - RNA, 13 nt, Human
uauugaacuuuuu

SEQ ID NO: 2304009 - RNA, 14 nt, Human
uauugaacuuuuuu

SEQ ID NO: 2304010 - RNA, 16 nt, Human
uauugaaucuauuuaa

SEQ ID NO: 2304011 - RNA, 17 nt, Human
uauugaaucuauuuaag

SEQ ID NO: 2304012 - RNA, 22 nt, Human
uauugaaucauguaguaucaaa

SEQ ID NO: 2304013 - RNA, 12 nt, Human
uauugaauguuu

SEQ ID NO: 2304014 - RNA, 11 nt, Human
uauugaaucua

SEQ ID NO: 2304015 - RNA, 18 nt, Human
uauugaaucauguaguau

SEQ ID NO: 2304016 - RNA, 22 nt, Human
uauugaauauaauauauuugug

SEQ ID NO: 2304017 - RNA, 20 nt, Human
uauugaauauaauauauuug

SEQ ID NO: 2304018 - RNA, 21 nt, Human
uauugaauauaauauauuugu

SEQ ID NO: 2304019 - RNA, 19 nt, Human
uauugaagcauuuuauaaa

SEQ ID NO: 2304020 - RNA, 17 nt, Human
uauugaagcauuuuaua

SEQ ID NO: 2304021 - RNA, 16 nt, Human
uauugaagcauuuuau

SEQ ID NO: 2304022 - RNA, 15 nt, Human
uauugaagcauuuua

SEQ ID NO: 2304023 - RNA, 13 nt, Human
uauugaagcauuu

SEQ ID NO: 2304024 - RNA, 15 nt, Human
uauugacaaacucuc

SEQ ID NO: 2304025 - RNA, 14 nt, Human
uauugacaaacucu

SEQ ID NO: 2304026 - RNA, 18 nt, Human
uauugacaauaauuucag

SEQ ID NO: 2304027 - RNA, 17 nt, Human
uauugacaauaauuuca

SEQ ID NO: 2304028 - RNA, 13 nt, Human
uauugacaauaau

SEQ ID NO: 2304029 - RNA, 23 nt, Human
uauugacacagaaaauguugaga

SEQ ID NO: 2304030 - RNA, 20 nt, Human
uauugacacagaaaauguug

SEQ ID NO: 2304031 - RNA, 18 nt, Human
uauugacacagaaaaugu

SEQ ID NO: 2304032 - RNA, 16 nt, Human
uauugacacagaaaau

SEQ ID NO: 2304033 - RNA, 13 nt, Human
uauugacacagaa

SEQ ID NO: 2304034 - RNA, 21 nt, Human
uauuuagcaugacaagcccca

SEQ ID NO: 2304035 - RNA, 22 nt, Human
uauuuagauuguuaaaauaacu

SEQ ID NO: 2304036 - RNA, 11 nt, Human
uauuuagcaug

SEQ ID NO: 2304037 - RNA, 19 nt, Human
uauuuaguguucauaaaua

SEQ ID NO: 2304038 - RNA, 17 nt, Human
uauuuaggcagauugaa

SEQ ID NO: 2304039 - RNA, 15 nt, Human
uauuuaguuauaguu

SEQ ID NO: 2304040 - RNA, 17 nt, Human
uauuuaguuauaguuuc

SEQ ID NO: 2304041 - RNA, 18 nt, Human
uauuuagggaacugcuug

SEQ ID NO: 2304042 - RNA, 17 nt, Human
uauuuagggaacugcuu

SEQ ID NO: 2304043 - RNA, 13 nt, Human
uauuuauuuaaau

SEQ ID NO: 2304044 - RNA, 16 nt, Human
uauuuauuuaagcuua

SEQ ID NO: 2304045 - RNA, 12 nt, Human
uauuuauuuaau

SEQ ID NO: 2304046 - RNA, 11 nt, Human
uauuuauuuac

SEQ ID NO: 2304047 - RNA, 16 nt, Human
uauuuauuuaaauguc

SEQ ID NO: 2304048 - RNA, 18 nt, Human
uauuuauuuaaaugucua

SEQ ID NO: 2304049 - RNA, 14 nt, Human
uauuuauuuaaauu

SEQ ID NO: 2304050 - RNA, 14 nt, Human
uauuuauuuaugga

SEQ ID NO: 2304051 - RNA, 13 nt, Human
uauuuauuuaugg

SEQ ID NO: 2304052 - RNA, 17 nt, Human
uauuuauuuacugagcu

SEQ ID NO: 2304053 - RNA, 13 nt, Human
uauuuauuuacug

SEQ ID NO: 2304054 - RNA, 21 nt, Human
uauuuauuuaauaacaauugu

SEQ ID NO: 2304055 - RNA, 14 nt, Human
uauuuauuuaguau

SEQ ID NO: 2304056 - RNA, 22 nt, Human
uauuucaauuuccaagagcuga

SEQ ID NO: 2304057 - RNA, 18 nt, Human
uauuucaaauuggagcuu

SEQ ID NO: 2304058 - RNA, 14 nt, Human
uauuucaagacauu

SEQ ID NO: 2304059 - RNA, 20 nt, Human
uauuucacuuuagaugcuga

SEQ ID NO: 2304060 - RNA, 18 nt, Human
uauuuauuuuccucccca

SEQ ID NO: 2304061 - RNA, 17 nt, Human
uauuuauuuuccucccc

SEQ ID NO: 2304062 - RNA, 20 nt, Human
uauuuauuuuuuuuaaguau

SEQ ID NO: 2304063 - RNA, 20 nt, Human
uauuucaaaauauacauuca

SEQ ID NO: 2304064 - RNA, 14 nt, Human
uauuucaaauugga

SEQ ID NO: 2304065 - RNA, 14 nt, Human
uauuuauuuauuua

SEQ ID NO: 2304066 - RNA, 18 nt, Human
uauuuauuuuaauaaugu

SEQ ID NO: 2304067 - RNA, 14 nt, Human
uauuuauuuuaaua

SEQ ID NO: 2304068 - RNA, 16 nt, Human
uauuuauuuuaauaau

SEQ ID NO: 2304069 - RNA, 15 nt, Human
uauuuaauguuaugu

SEQ ID NO: 2304070 - RNA, 21 nt, Human
uauuuaaugccgauauacucu

SEQ ID NO: 2304071 - RNA, 19 nt, Human
uauuuaaugauaaguaaau

SEQ ID NO: 2304072 - RNA, 16 nt, Human
uauuuaauuagugcua

SEQ ID NO: 2304073 - RNA, 17 nt, Human
uauuuaauuagugcuaa

SEQ ID NO: 2304074 - RNA, 18 nt, Human
uauuuaauuagugcuaag

SEQ ID NO: 2304075 - RNA, 19 nt, Human
uauuuaauuagugcuaagu

SEQ ID NO: 2304076 - RNA, 21 nt, Human
uauuuaauuagugcuaagugu

SEQ ID NO: 2304077 - RNA, 14 nt, Human
uauuuaauucaugu

SEQ ID NO: 2304078 - RNA, 23 nt, Human
uauuuaauuuuuuugagacagag

SEQ ID NO: 2304079 - RNA, 16 nt, Human
uauuuacauaugaaau

SEQ ID NO: 2304080 - RNA, 14 nt, Human
uauuuacauaugaa

SEQ ID NO: 2304081 - RNA, 20 nt, Human
uauuuacagugaaaauguaa

SEQ ID NO: 2304082 - RNA, 22 nt, Human
uauuuacagugaaaauguaagc

SEQ ID NO: 2304083 - RNA, 21 nt, Human
uauuuacauaugaaauuuaau

SEQ ID NO: 2304084 - RNA, 17 nt, Human
uauuuacauaugaaauu

SEQ ID NO: 2304085 - RNA, 21 nt, Human
uauuuacaugaauugcauuuu

SEQ ID NO: 2304086 - RNA, 14 nt, Human
uauuuacgcuuuga

SEQ ID NO: 2304087 - RNA, 14 nt, Human
uauuuacugagcuu

SEQ ID NO: 2304088 - RNA, 22 nt, Human
uauuuacgcuuugauucauagu

SEQ ID NO: 2304089 - RNA, 16 nt, Human
uauuuacugagcuucu

SEQ ID NO: 2304090 - RNA, 19 nt, Human
uauuuacugagcuucucug

SEQ ID NO: 2304091 - RNA, 19 nt, Human
uauuuacgcuuugauucau

SEQ ID NO: 2304092 - RNA, 15 nt, Human
uauuuacgcuuugau

SEQ ID NO: 2304093 - RNA, 23 nt, Human
uauuuacugagcuucucugugaa

SEQ ID NO: 2304094 - RNA, 21 nt, Human
uauuuacugagcuucucugug

SEQ ID NO: 2304095 - RNA, 22 nt, Human
uauuuacugagcuucucuguga

SEQ ID NO: 2304096 - RNA, 18 nt, Human
uauuuacuucuuauacau

SEQ ID NO: 2304097 - RNA, 19 nt, Human
uauuuagauuguuaaaaua

SEQ ID NO: 2304098 - RNA, 17 nt, Human
uauuuagauuguuaaaa

SEQ ID NO: 2304099 - RNA, 20 nt, Human
uauuuagcaccagggaaggg

SEQ ID NO: 2304100 - RNA, 21 nt, Human
uauuuagacucaucuuacugu

SEQ ID NO: 2304101 - RNA, 18 nt, Human
uauuuagauauaacacua

SEQ ID NO: 2304102 - RNA, 13 nt, Human
uauuuagacaaga

SEQ ID NO: 2304103 - RNA, 15 nt, Human
uauuuagacaagaga

SEQ ID NO: 2304104 - RNA, 19 nt, Human
uauuuagacaagagauggg

SEQ ID NO: 2304105 - RNA, 20 nt, Human
uauuuagacaagagauggga

SEQ ID NO: 2304106 - RNA, 16 nt, Human
uauuuaagcuuauguc

SEQ ID NO: 2304107 - RNA, 18 nt, Human
uauuuaagccucauauuu

SEQ ID NO: 2304108 - RNA, 20 nt, Human
uauuuaagccucauauuuaa

SEQ ID NO: 2304109 - RNA, 21 nt, Human
uauuuaagccucauauuuaaa

SEQ ID NO: 2304110 - RNA, 10 nt, Human
uauuuaauaa

SEQ ID NO: 2304111 - RNA, 11 nt, Human
uauuuaauaac

SEQ ID NO: 2304112 - RNA, 17 nt, Human
uauuuaauaacaauugu

SEQ ID NO: 2304113 - RNA, 15 nt, Human
uauuuaauaacauua

SEQ ID NO: 2304114 - RNA, 13 nt, Human
uauuuaauaacau

SEQ ID NO: 2304115 - RNA, 14 nt, Human
uauuuaauaacauu

SEQ ID NO: 2304116 - RNA, 20 nt, Human
uauuuaagauaguuuugcca

SEQ ID NO: 2304117 - RNA, 21 nt, Human
uauuuaacuugaggguaauaa

SEQ ID NO: 2304118 - RNA, 17 nt, Human
uauuuaagauaauuaua

SEQ ID NO: 2304119 - RNA, 20 nt, Human
uauuuaagauaauuauaaua

SEQ ID NO: 2304120 - RNA, 21 nt, Human
uauuuaaugaaagacuguaca

SEQ ID NO: 2304121 - RNA, 15 nt, Human
uauuuaaugaaagac

SEQ ID NO: 2304122 - RNA, 19 nt, Human
uauugugaaguacauauua

SEQ ID NO: 2304123 - RNA, 17 nt, Human
uauugugaaguacauau

SEQ ID NO: 2304124 - RNA, 15 nt, Human
uauugugaaguacau

SEQ ID NO: 2304125 - RNA, 13 nt, Human
uauugugaucuau

SEQ ID NO: 2304126 - RNA, 21 nt, Human
uauugugaucuaucaauaguc

SEQ ID NO: 2304127 - RNA, 22 nt, Human
uauugugauuucccguggcccc

SEQ ID NO: 2304128 - RNA, 17 nt, Human
uauugugauuugacugu

SEQ ID NO: 2304129 - RNA, 16 nt, Human
uauugucagauauuuu

SEQ ID NO: 2304130 - RNA, 22 nt, Human
uauugucaguaucuguaucucu

SEQ ID NO: 2304131 - RNA, 15 nt, Human
uauuguccauugucc

SEQ ID NO: 2304132 - RNA, 17 nt, Human
uauugucauuaaaggua

SEQ ID NO: 2304133 - RNA, 17 nt, Human
uauuguccauuguccaa

SEQ ID NO: 2304134 - RNA, 17 nt, Human
uauugucuagugaaacu

SEQ ID NO: 2304135 - RNA, 20 nt, Human
uauuuaacuugagcuuuaaa

SEQ ID NO: 2304136 - RNA, 14 nt, Human
uauuuaacuugagg

SEQ ID NO: 2304137 - RNA, 21 nt, Human
uauuuaacugccuuguguaca

SEQ ID NO: 2304138 - RNA, 13 nt, Human
uauuuaacuugag

SEQ ID NO: 2304139 - RNA, 23 nt, Human
uauuuaacagcugaauuaucuau

SEQ ID NO: 2304140 - RNA, 21 nt, Human
uauuuaacagcugaauuaucu

SEQ ID NO: 2304141 - RNA, 15 nt, Human
uauuuaacagcugaa

SEQ ID NO: 2304142 - RNA, 18 nt, Human
uauugugauuugacuguu

SEQ ID NO: 2304143 - RNA, 19 nt, Human
uauugugauuugacuguuu

SEQ ID NO: 2304144 - RNA, 20 nt, Human
uauugugauuugacuguuuu

SEQ ID NO: 2304145 - RNA, 21 nt, Human
uauugugauuugacuguuuuu

SEQ ID NO: 2304146 - RNA, 11 nt, Human
uauuguacagu

SEQ ID NO: 2304147 - RNA, 15 nt, Human
uauuguacacuuuuu

SEQ ID NO: 2304148 - RNA, 20 nt, Human
uauuguacacuuuuuugggg

SEQ ID NO: 2304149 - RNA, 11 nt, Human
uauuguacaga

SEQ ID NO: 2304150 - RNA, 12 nt, Human
uauuguacagaa

SEQ ID NO: 2304151 - RNA, 12 nt, Human
uauuguacacuu

SEQ ID NO: 2304152 - RNA, 13 nt, Human
uauuguacacuuu

SEQ ID NO: 2304153 - RNA, 12 nt, Human
uauuguacaguu

SEQ ID NO: 2304154 - RNA, 13 nt, Human
uauuguacaguuu

SEQ ID NO: 2304155 - RNA, 14 nt, Human
uauuguacaguuuu

SEQ ID NO: 2304156 - RNA, 15 nt, Human
uauuguacaguuuuu

SEQ ID NO: 2304157 - RNA, 17 nt, Human
uauuguacaguuuuuau

SEQ ID NO: 2304158 - RNA, 11 nt, Human
uauuguaccuc

SEQ ID NO: 2304159 - RNA, 13 nt, Human
uauuguaccucuc

SEQ ID NO: 2304160 - RNA, 14 nt, Human
uauuguaccucucu

SEQ ID NO: 2304161 - RNA, 20 nt, Human
uauuguacagcuguuuaaga

SEQ ID NO: 2304162 - RNA, 13 nt, Human
uauuguaccuuuu

SEQ ID NO: 2304163 - RNA, 17 nt, Human
uauuguaccuuuuaaca

SEQ ID NO: 2304164 - RNA, 15 nt, Human
uauuguagcauuucu

SEQ ID NO: 2304165 - RNA, 16 nt, Human
uauuguagcauuucuu

SEQ ID NO: 2304166 - RNA, 17 nt, Human
uauuguagcauuucuug

SEQ ID NO: 2304167 - RNA, 16 nt, Human
uauuguauaaacuauc

SEQ ID NO: 2304168 - RNA, 21 nt, Human
uauuguauaaacuaucaguuu

SEQ ID NO: 2304169 - RNA, 22 nt, Human
uauuguauaagauuagaaugaa

SEQ ID NO: 2304170 - RNA, 18 nt, Human
uauuguauuacuagaaga

SEQ ID NO: 2304171 - RNA, 13 nt, Human
uauugucaaagug

SEQ ID NO: 2304172 - RNA, 17 nt, Human
uauugucaaagugguga

SEQ ID NO: 2304173 - RNA, 10 nt, Human
uauuguauuu

SEQ ID NO: 2304174 - RNA, 15 nt, Human
uauuguauuuauuca

SEQ ID NO: 2304175 - RNA, 16 nt, Human
uauuguauuuauucaa

SEQ ID NO: 2304176 - RNA, 17 nt, Human
uauuguauuuauucaau

SEQ ID NO: 2304177 - RNA, 18 nt, Human
uauuguauuuauucaaua

SEQ ID NO: 2304178 - RNA, 20 nt, Human
uauuguauuuauucaauaaa

SEQ ID NO: 2304179 - RNA, 15 nt, Human
uauuguauuuauucc

SEQ ID NO: 2304180 - RNA, 18 nt, Human
uauuguauuuauuccaua

SEQ ID NO: 2304181 - RNA, 15 nt, Human
uauucagcucaugga

SEQ ID NO: 2304182 - RNA, 14 nt, Human
uauucagacaagca

SEQ ID NO: 2304183 - RNA, 18 nt, Human
uauucagacaagcaacag

SEQ ID NO: 2304184 - RNA, 22 nt, Human
uauucagacaagcaacagguuu

SEQ ID NO: 2304185 - RNA, 19 nt, Human
uauucaacucauaagacuu

SEQ ID NO: 2304186 - RNA, 20 nt, Human
uauucaaguuauuguacagc

SEQ ID NO: 2304187 - RNA, 16 nt, Human
uauucaaguuauugua

SEQ ID NO: 2304188 - RNA, 18 nt, Human
uauuauaaauuauguuua

SEQ ID NO: 2304189 - RNA, 15 nt, Human
uauuauaaauuaugu

SEQ ID NO: 2304190 - RNA, 16 nt, Human
uauuauaaauuauguu

SEQ ID NO: 2304191 - RNA, 20 nt, Human
uauuauaaauuauguuuaua

SEQ ID NO: 2304192 - RNA, 12 nt, Human
uauucaggacuu

SEQ ID NO: 2304193 - RNA, 16 nt, Human
uauucaggagaguaga

SEQ ID NO: 2304194 - RNA, 18 nt, Human
uauucaggaagcucaggg

SEQ ID NO: 2304195 - RNA, 22 nt, Human
uauucaggaagcucagggccug

SEQ ID NO: 2304196 - RNA, 21 nt, Human
uauucauauuuucuuucaaaa

SEQ ID NO: 2304197 - RNA, 23 nt, Human
uauucauagcagcuuauucacaa

SEQ ID NO: 2304198 - RNA, 16 nt, Human
uauucauaguuuaauu

SEQ ID NO: 2304199 - RNA, 14 nt, Human
uauucauaauuauu

SEQ ID NO: 2304200 - RNA, 14 nt, Human
uauuaguuuugauu

SEQ ID NO: 2304201 - RNA, 14 nt, Human
uauuauaaauuaug

SEQ ID NO: 2304202 - RNA, 13 nt, Human
uauuaguuaauau

SEQ ID NO: 2304203 - RNA, 16 nt, Human
uauuaguguaugcuuu

SEQ ID NO: 2304204 - RNA, 16 nt, Human
uauuagugaugucauc

SEQ ID NO: 2304205 - RNA, 23 nt, Human
uauuagccacaaaauugggaaag

SEQ ID NO: 2304206 - RNA, 15 nt, Human
uauuagccacaaaau

SEQ ID NO: 2304207 - RNA, 13 nt, Human
uauuagccaggau

SEQ ID NO: 2304208 - RNA, 17 nt, Human
uauuagccaggaucaug

SEQ ID NO: 2304209 - RNA, 18 nt, Human
uauuagccaggaucaugg

SEQ ID NO: 2304210 - RNA, 19 nt, Human
uauuagccaggaucauggu

SEQ ID NO: 2304211 - RNA, 21 nt, Human
uauuagccagguaaugugaau

SEQ ID NO: 2304212 - RNA, 16 nt, Human
uauuagccagucuuua

SEQ ID NO: 2304213 - RNA, 23 nt, Human
uauuagccaggaucaugguguaa

SEQ ID NO: 2304214 - RNA, 23 nt, Human
uauuagaugugauuuaauagugu

SEQ ID NO: 2304215 - RNA, 22 nt, Human
uauuagauguucucuaucauuu

SEQ ID NO: 2304216 - RNA, 17 nt, Human
uauuagauguucucuau

SEQ ID NO: 2304217 - RNA, 21 nt, Human
uauuagauguucucuaucauu

SEQ ID NO: 2304218 - RNA, 12 nt, Human
uauuagauguuc

SEQ ID NO: 2304219 - RNA, 16 nt, Human
uauuagaugugauuua

SEQ ID NO: 2304220 - RNA, 20 nt, Human
uauuagaugugauuuaauag

SEQ ID NO: 2304221 - RNA, 14 nt, Human
uauuagauguucuc

SEQ ID NO: 2304222 - RNA, 15 nt, Human
uauuagauguucucu

SEQ ID NO: 2304223 - RNA, 11 nt, Human
uauuaccucug

SEQ ID NO: 2304224 - RNA, 13 nt, Human
uauuaccucugau

SEQ ID NO: 2304225 - RNA, 22 nt, Human
uauuacccccuccuucagacac

SEQ ID NO: 2304226 - RNA, 15 nt, Human
uauuagaauaccaca

SEQ ID NO: 2304227 - RNA, 15 nt, Human
uauuaccaugagaag

SEQ ID NO: 2304228 - RNA, 21 nt, Human
uauuacccccuccuucagaca

SEQ ID NO: 2304229 - RNA, 16 nt, Human
uauuaccacagacaua

SEQ ID NO: 2304230 - RNA, 14 nt, Human
uauuaccucugaua

SEQ ID NO: 2304231 - RNA, 19 nt, Human
uauuaccucugauaccuca

SEQ ID NO: 2304232 - RNA, 12 nt, Human
uauuagagaaga

SEQ ID NO: 2304233 - RNA, 16 nt, Human
uauuagagcauugaau

SEQ ID NO: 2304234 - RNA, 18 nt, Human
uauuagagugucuuucca

SEQ ID NO: 2304235 - RNA, 15 nt, Human
uauuagagugucuuu

SEQ ID NO: 2304236 - RNA, 13 nt, Human
uauuagaugugau

SEQ ID NO: 2304237 - RNA, 14 nt, Human
uauuagaugugauu

SEQ ID NO: 2304238 - RNA, 15 nt, Human
uauuagaugugauuu

SEQ ID NO: 2304239 - RNA, 16 nt, Human
acagcucccucugccu

SEQ ID NO: 2304240 - RNA, 21 nt, Human
acagcugcuccuagagggagg

SEQ ID NO: 2304241 - RNA, 23 nt, Human
acagcugcuccuagagggagggg

SEQ ID NO: 2304242 - RNA, 22 nt, Human
acagcugcuccuagagggaggg

SEQ ID NO: 2304243 - RNA, 12 nt, Human
acagcuccuccc

SEQ ID NO: 2304244 - RNA, 14 nt, Human
acagcuccucccac

SEQ ID NO: 2304245 - RNA, 22 nt, Human
acagcucccaccccacccccuu

SEQ ID NO: 2304246 - RNA, 18 nt, Human
acagcucccaccccaccc

SEQ ID NO: 2304247 - RNA, 17 nt, Human
acagcucccucugccug

SEQ ID NO: 2304248 - RNA, 14 nt, Human
acagcucccucugc

SEQ ID NO: 2304249 - RNA, 23 nt, Human
acagcugcuuucuguugucauug

SEQ ID NO: 2304250 - RNA, 13 nt, Human
acagcuggccucc

SEQ ID NO: 2304251 - RNA, 11 nt, Human
acagcugcugg

SEQ ID NO: 2304252 - RNA, 13 nt, Human
acagcugcuuucu

SEQ ID NO: 2304253 - RNA, 15 nt, Human
acagcugcuuucugu

SEQ ID NO: 2304254 - RNA, 21 nt, Human
acagcugcuuucuguugucau

SEQ ID NO: 2304255 - RNA, 13 nt, Human
acagcugggcugu

SEQ ID NO: 2304256 - RNA, 16 nt, Human
acagcuggguggcacu

SEQ ID NO: 2304257 - RNA, 21 nt, Human
uauguguguaugggugugugu

SEQ ID NO: 2304258 - RNA, 12 nt, Human
uauguguguaug

SEQ ID NO: 2304259 - RNA, 19 nt, Human
uauguguguauauguaugu

SEQ ID NO: 2304260 - RNA, 12 nt, Human
uauguguguaua

SEQ ID NO: 2304261 - RNA, 18 nt, Human
acagcuggguggcacugc

SEQ ID NO: 2304262 - RNA, 19 nt, Human
acagcuggguggcacugcc

SEQ ID NO: 2304263 - RNA, 20 nt, Human
acagcuggguggcacugcca

SEQ ID NO: 2304264 - RNA, 23 nt, Human
acagcuggguggcacugccaugc

SEQ ID NO: 2304265 - RNA, 19 nt, Human
uauguguguguauguuugc

SEQ ID NO: 2304266 - RNA, 19 nt, Human
uauguguguguaugcuacu

SEQ ID NO: 2304267 - RNA, 13 nt, Human
uauguguguguau

SEQ ID NO: 2304268 - RNA, 12 nt, Human
uaugugugugua

SEQ ID NO: 2304269 - RNA, 11 nt, Human
uaugugugugu

SEQ ID NO: 2304270 - RNA, 22 nt, Human
uauguguguguguugugugugg

SEQ ID NO: 2304271 - RNA, 14 nt, Human
uauguguguguguu

SEQ ID NO: 2304272 - RNA, 18 nt, Human
uauguuuuagcauguguu

SEQ ID NO: 2304273 - RNA, 22 nt, Human
uauuaaaaauauaaaacugcgu

SEQ ID NO: 2304274 - RNA, 16 nt, Human
uauguuuuagcaugug

SEQ ID NO: 2304275 - RNA, 14 nt, Human
uauguuuuagcaug

SEQ ID NO: 2304276 - RNA, 23 nt, Human
uauguguguguguuguguguggg

SEQ ID NO: 2304277 - RNA, 17 nt, Human
uauguuuuaagaggcag

SEQ ID NO: 2304278 - RNA, 19 nt, Human
uauguuuuaagaggcaggg

SEQ ID NO: 2304279 - RNA, 22 nt, Human
uauuaaaaaucucaaauuucua

SEQ ID NO: 2304280 - RNA, 20 nt, Human
uauuaaaaaucucaaauuuc

SEQ ID NO: 2304281 - RNA, 18 nt, Human
uauuaaaaaucucaaauu

SEQ ID NO: 2304282 - RNA, 16 nt, Human
uauuaaaaaucucaaa

SEQ ID NO: 2304283 - RNA, 17 nt, Human
uauuacaucuuucacau

SEQ ID NO: 2304284 - RNA, 16 nt, Human
uauuacauggcagugu

SEQ ID NO: 2304285 - RNA, 12 nt, Human
uauuacaucuuu

SEQ ID NO: 2304286 - RNA, 16 nt, Human
uauuaaauacaaaacu

SEQ ID NO: 2304287 - RNA, 19 nt, Human
uauuaaauacaaaacuucc

SEQ ID NO: 2304288 - RNA, 12 nt, Human
uauuaaauacag

SEQ ID NO: 2304289 - RNA, 18 nt, Human
uauuaaauacaaaacuuc

SEQ ID NO: 2304290 - RNA, 14 nt, Human
acagcgacauagcc

SEQ ID NO: 2304291 - RNA, 12 nt, Human
uauuaaagacag

SEQ ID NO: 2304292 - RNA, 22 nt, Human
uauuaaacguaugcaugugaag

SEQ ID NO: 2304293 - RNA, 20 nt, Human
uauuaaacguaugcauguga

SEQ ID NO: 2304294 - RNA, 21 nt, Human
uauuaaacguaugcaugugaa

SEQ ID NO: 2304295 - RNA, 23 nt, Human
uauuaaacagauuuuuacaaaug

SEQ ID NO: 2304296 - RNA, 20 nt, Human
uauuaaaaauauggaacuuc

SEQ ID NO: 2304297 - RNA, 22 nt, Human
uauuaaaaauauggaacuucua

SEQ ID NO: 2304298 - RNA, 23 nt, Human
uauuaaaaaucucaaauuucuaa

SEQ ID NO: 2304299 - RNA, 12 nt, Human
uauuaaaacuca

SEQ ID NO: 2304300 - RNA, 20 nt, Human
uauuaaacagauuuuuacaa

SEQ ID NO: 2304301 - RNA, 21 nt, Human
uauuaaacagauuuuuacaaa

SEQ ID NO: 2304302 - RNA, 16 nt, Human
acagggcagcugggcc

SEQ ID NO: 2304303 - RNA, 17 nt, Human
acagggcagcugggccc

SEQ ID NO: 2304304 - RNA, 18 nt, Human
acagggcagcugggccca

SEQ ID NO: 2304305 - RNA, 16 nt, Human
acagggcaucuccagg

SEQ ID NO: 2304306 - RNA, 21 nt, Human
acagggcagcugggcccaacc

SEQ ID NO: 2304307 - RNA, 17 nt, Human
acagggcaucuccagga

SEQ ID NO: 2304308 - RNA, 22 nt, Human
acagguuuuccugaagaauuga

SEQ ID NO: 2304309 - RNA, 16 nt, Human
acagggcagagccggg

SEQ ID NO: 2304310 - RNA, 22 nt, Human
acagggcacaccgggcacucag

SEQ ID NO: 2304311 - RNA, 21 nt, Human
acaggcugggcuucaguggca

SEQ ID NO: 2304312 - RNA, 14 nt, Human
acaggcugggcuuc

SEQ ID NO: 2304313 - RNA, 17 nt, Human
acaggcugggcuucagu

SEQ ID NO: 2304314 - RNA, 15 nt, Human
acaguaacuuuaugu

SEQ ID NO: 2304315 - RNA, 21 nt, Human
acaguaucacugucuuuccua

SEQ ID NO: 2304316 - RNA, 10 nt, Human
acaguaacuu

SEQ ID NO: 2304317 - RNA, 23 nt, Human
acaguaucacugucuuuccuaga

SEQ ID NO: 2304318 - RNA, 19 nt, Human
acaguaugagucaaugugc

SEQ ID NO: 2304319 - RNA, 17 nt, Human
acaguaugucccauagg

SEQ ID NO: 2304320 - RNA, 21 nt, Human
acaguaugagucaaugugcag

SEQ ID NO: 2304321 - RNA, 23 nt, Human
acaguaugagucaaugugcagug

SEQ ID NO: 2304322 - RNA, 21 nt, Human
acaguauggcagcuuuccuca

SEQ ID NO: 2304323 - RNA, 21 nt, Human
acagggcaucuccaggaaggc

SEQ ID NO: 2304324 - RNA, 22 nt, Human
acagggcaugccccggccaccu

SEQ ID NO: 2304325 - RNA, 23 nt, Human
acagggcaugccccggccaccuc

SEQ ID NO: 2304326 - RNA, 24 nt, Human
acagggcaugccccggccaccucu

SEQ ID NO: 2304327 - RNA, 12 nt, Human
acaguaaacauu

SEQ ID NO: 2304328 - RNA, 12 nt, Human
acaguaaauaaa

SEQ ID NO: 2304329 - RNA, 17 nt, Human
acaguaaauaaauuguu

SEQ ID NO: 2304330 - RNA, 18 nt, Human
acaguaaauaaauuguuu

SEQ ID NO: 2304331 - RNA, 17 nt, Human
acaguaacgcaggggaa

SEQ ID NO: 2304332 - RNA, 19 nt, Human
acaguaacgcaggggaaac

SEQ ID NO: 2304333 - RNA, 13 nt, Human
acaguaaauaaau

SEQ ID NO: 2304334 - RNA, 14 nt, Human
acaguaaauaaauu

SEQ ID NO: 2304335 - RNA, 15 nt, Human
acaguaaauaaauug

SEQ ID NO: 2304336 - RNA, 23 nt, Human
acaguaaauaaauuguuugacca

SEQ ID NO: 2304337 - RNA, 17 nt, Human
acagucaaggaguggcu

SEQ ID NO: 2304338 - RNA, 17 nt, Human
acagucaaaacagagau

SEQ ID NO: 2304339 - RNA, 16 nt, Human
acagucaaaacagaga

SEQ ID NO: 2304340 - RNA, 12 nt, Human
acagucccugcc

SEQ ID NO: 2304341 - RNA, 13 nt, Human
acagucccugcca

SEQ ID NO: 2304342 - RNA, 17 nt, Human
acaguauuuugguucuu

SEQ ID NO: 2304343 - RNA, 15 nt, Human
acaguauuacuucug

SEQ ID NO: 2304344 - RNA, 16 nt, Human
acaguauuacuucugc

SEQ ID NO: 2304345 - RNA, 17 nt, Human
acaguauuacuucugcu

SEQ ID NO: 2304346 - RNA, 19 nt, Human
acaguauuacuucugcuac

SEQ ID NO: 2304347 - RNA, 18 nt, Human
acagucaaaacagagaug

SEQ ID NO: 2304348 - RNA, 18 nt, Human
acaguccuaacugguaua

SEQ ID NO: 2304349 - RNA, 12 nt, Human
acaguccuggga

SEQ ID NO: 2304350 - RNA, 19 nt, Human
acaguccuaacugguauag

SEQ ID NO: 2304351 - RNA, 17 nt, Human
acaguccucccaucuca

SEQ ID NO: 2304352 - RNA, 18 nt, Human
acaguccuuaccagcaga

SEQ ID NO: 2304353 - RNA, 20 nt, Human
acaguccuuaccagcagagc

SEQ ID NO: 2304354 - RNA, 15 nt, Human
acagucccugccaau

SEQ ID NO: 2304355 - RNA, 13 nt, Human
acaguccucccau

SEQ ID NO: 2304356 - RNA, 14 nt, Human
acaguccucccauc

SEQ ID NO: 2304357 - RNA, 15 nt, Human
acaguccucccaucu

SEQ ID NO: 2304358 - RNA, 22 nt, Human
acagugugaaguuagaauuccu

SEQ ID NO: 2304359 - RNA, 15 nt, Human
acagugugaaguuag

SEQ ID NO: 2304360 - RNA, 16 nt, Human
acagugugaaguuaga

SEQ ID NO: 2304361 - RNA, 18 nt, Human
acagugugaaguuagaau

SEQ ID NO: 2304362 - RNA, 19 nt, Human
acagugugaaguuagaauu

SEQ ID NO: 2304363 - RNA, 14 nt, Human
acaguguuaaauga

SEQ ID NO: 2304364 - RNA, 17 nt, Human
acaguguuaggccuggc

SEQ ID NO: 2304365 - RNA, 14 nt, Human
acagugagccugaa

SEQ ID NO: 2304366 - RNA, 12 nt, Human
acagugagccug

SEQ ID NO: 2304367 - RNA, 12 nt, Human
acagugagccaa

SEQ ID NO: 2304368 - RNA, 13 nt, Human
acagugagccaag

SEQ ID NO: 2304369 - RNA, 12 nt, Human
acagugugaagu

SEQ ID NO: 2304370 - RNA, 13 nt, Human
acagugugaaguu

SEQ ID NO: 2304371 - RNA, 17 nt, Human
acagugaaggcuguccu

SEQ ID NO: 2304372 - RNA, 14 nt, Human
acagugaagcaaau

SEQ ID NO: 2304373 - RNA, 21 nt, Human
acagugaaaauguaagcuguu

SEQ ID NO: 2304374 - RNA, 18 nt, Human
acagugacucgggcuccu

SEQ ID NO: 2304375 - RNA, 19 nt, Human
acagugacucgggcuccug

SEQ ID NO: 2304376 - RNA, 20 nt, Human
acagugacucgggcuccugu

SEQ ID NO: 2304377 - RNA, 23 nt, Human
acagugacucgggcuccugugcc

SEQ ID NO: 2304378 - RNA, 18 nt, Human
acagugagacucugucuc

SEQ ID NO: 2304379 - RNA, 14 nt, Human
acagugagacucug

SEQ ID NO: 2304380 - RNA, 21 nt, Human
acaguuaaaugagaacaugaa

SEQ ID NO: 2304381 - RNA, 14 nt, Human
acaguuaacuuuca

SEQ ID NO: 2304382 - RNA, 13 nt, Human
acaguuaacuuuc

SEQ ID NO: 2304383 - RNA, 16 nt, Human
acaguuaacuuucaga

SEQ ID NO: 2304384 - RNA, 21 nt, Human
acaguuaccucugccucagaa

SEQ ID NO: 2304385 - RNA, 19 nt, Human
acaguguuucgacagcuga

SEQ ID NO: 2304386 - RNA, 23 nt, Human
acaguguuucccauaauuuucuu

SEQ ID NO: 2304387 - RNA, 17 nt, Human
acaguguuugcaauggu

SEQ ID NO: 2304388 - RNA, 16 nt, Human
acaguguuuuuguaaa

SEQ ID NO: 2304389 - RNA, 18 nt, Human
acaguguuuuuguaaagu

SEQ ID NO: 2304390 - RNA, 20 nt, Human
acaguguuuuuguaaagugu

SEQ ID NO: 2304391 - RNA, 22 nt, Human
acaguguuuuuguaaagugugg

SEQ ID NO: 2304392 - RNA, 15 nt, Human
acaguuaagagaaau

SEQ ID NO: 2304393 - RNA, 22 nt, Human
acaguguuauuuucuuugaaau

SEQ ID NO: 2304394 - RNA, 13 nt, Human
acaguguucuguu

SEQ ID NO: 2304395 - RNA, 20 nt, Human
acaguguuauuuucuuugaa

SEQ ID NO: 2304396 - RNA, 16 nt, Human
acaguguuauuuucuu

SEQ ID NO: 2304397 - RNA, 14 nt, Human
acaguguucuguuu

SEQ ID NO: 2304398 - RNA, 15 nt, Human
acaguguucuguuua

SEQ ID NO: 2304399 - RNA, 16 nt, Human
acaguguucuguuuaa

SEQ ID NO: 2304400 - RNA, 17 nt, Human
acaguguucuguuuaau

SEQ ID NO: 2304401 - RNA, 11 nt, Human
acaguguuccg

SEQ ID NO: 2304402 - RNA, 19 nt, Human
acaguguuaggccuggcac

SEQ ID NO: 2304403 - RNA, 21 nt, Human
acaguguuaggccuggcacag

SEQ ID NO: 2304404 - RNA, 22 nt, Human
acaguguuaggccuggcacagu

SEQ ID NO: 2304405 - RNA, 23 nt, Human
acaguguuaggccuggcacagug

SEQ ID NO: 2304406 - RNA, 22 nt, Human
acaguguuucccauaauuuucu

SEQ ID NO: 2304407 - RNA, 18 nt, Human
acaguguuucccauaauu

SEQ ID NO: 2304408 - RNA, 16 nt, Human
acaguguuucccauaa

SEQ ID NO: 2304409 - RNA, 15 nt, Human
acaguguuucccaua

SEQ ID NO: 2304410 - RNA, 9 nt, Human
acaguguuu

SEQ ID NO: 2304411 - RNA, 22 nt, Human
acaguguucuguuuaauacuca

SEQ ID NO: 2304412 - RNA, 21 nt, Human
acaguguugaaaauguucaga

SEQ ID NO: 2304413 - RNA, 19 nt, Human
acaguguugaaaauguuca

SEQ ID NO: 2304414 - RNA, 22 nt, Human
acagucuaauuuuuauucauaa

SEQ ID NO: 2304415 - RNA, 18 nt, Human
acagucuaauuuuuauuc

SEQ ID NO: 2304416 - RNA, 21 nt, Human
acagucuaauuuuuauucaua

SEQ ID NO: 2304417 - RNA, 14 nt, Human
acagucuaauuuuu

SEQ ID NO: 2304418 - RNA, 13 nt, Human
acagucuaauuuu

SEQ ID NO: 2304419 - RNA, 22 nt, Human
acaguccugggagaaccucagg

SEQ ID NO: 2304420 - RNA, 21 nt, Human
acaguccugggagaaccucag

SEQ ID NO: 2304421 - RNA, 23 nt, Human
acaguccugggagaaccucaggc

SEQ ID NO: 2304422 - RNA, 23 nt, Human
acaguccucuccaccuaguggcu

SEQ ID NO: 2304423 - RNA, 21 nt, Human
acaguccuuaccagcagagca

SEQ ID NO: 2304424 - RNA, 22 nt, Human
acaguccuuaccagcagagcac

SEQ ID NO: 2304425 - RNA, 16 nt, Human
acagucucaggaaauc

SEQ ID NO: 2304426 - RNA, 15 nt, Human
acagucucaggaaau

SEQ ID NO: 2304427 - RNA, 14 nt, Human
acagucucaggaaa

SEQ ID NO: 2304428 - RNA, 13 nt, Human
acagucucaggaa

SEQ ID NO: 2304429 - RNA, 15 nt, Human
acagucuuguauuaa

SEQ ID NO: 2304430 - RNA, 18 nt, Human
acagucuuguauuaaguu

SEQ ID NO: 2304431 - RNA, 22 nt, Human
acagucuuguauuaaguuguua

SEQ ID NO: 2304432 - RNA, 15 nt, Human
acagucuugcagcag

SEQ ID NO: 2304433 - RNA, 14 nt, Human
acagugaaaaugua

SEQ ID NO: 2304434 - RNA, 18 nt, Human
acagugaaaauguaagcu

SEQ ID NO: 2304435 - RNA, 20 nt, Human
acagugaaagaaaauaacaa

SEQ ID NO: 2304436 - RNA, 14 nt, Human
acagucuuguauua

SEQ ID NO: 2304437 - RNA, 19 nt, Human
acagucuuccauuugcaag

SEQ ID NO: 2304438 - RNA, 14 nt, Human
acagucuuccauuu

SEQ ID NO: 2304439 - RNA, 20 nt, Human
acagucucuuuaaucuucag

SEQ ID NO: 2304440 - RNA, 19 nt, Human
acagucugaucgugacgcu

SEQ ID NO: 2304441 - RNA, 20 nt, Human
acagucugaucgugacgcug

SEQ ID NO: 2304442 - RNA, 22 nt, Human
acagucugaucgugacgcugaa

SEQ ID NO: 2304443 - RNA, 13 nt, Human
acagucugucaug

SEQ ID NO: 2304444 - RNA, 19 nt, Human
acagucucuuuaaucuuca

SEQ ID NO: 2304445 - RNA, 14 nt, Human
acagucucuuuaau

SEQ ID NO: 2304446 - RNA, 17 nt, Human
acagucucaggaaauca

SEQ ID NO: 2304447 - RNA, 13 nt, Human
uacguaugagacg

SEQ ID NO: 2304448 - RNA, 16 nt, Human
uacguacaugugaggc

SEQ ID NO: 2304449 - RNA, 14 nt, Human
uacgucugacaggc

SEQ ID NO: 2304450 - RNA, 18 nt, Human
uacgucaaacaugaagug

SEQ ID NO: 2304451 - RNA, 15 nt, Human
uacguguagcuauau

SEQ ID NO: 2304452 - RNA, 14 nt, Human
uacguuaccaggca

SEQ ID NO: 2304453 - RNA, 15 nt, Human
uacgugugauuuuuc

SEQ ID NO: 2304454 - RNA, 14 nt, Human
uacguugugcauuu

SEQ ID NO: 2304455 - RNA, 13 nt, Human
uacguugugcauu

SEQ ID NO: 2304456 - RNA, 15 nt, Human
uacguuauuguugac

SEQ ID NO: 2304457 - RNA, 16 nt, Human
uacguuauuguugacu

SEQ ID NO: 2304458 - RNA, 15 nt, Human
uacguuccuauuguc

SEQ ID NO: 2304459 - RNA, 16 nt, Human
uacuagguaacuucau

SEQ ID NO: 2304460 - RNA, 15 nt, Human
uacuagguaacuuca

SEQ ID NO: 2304461 - RNA, 18 nt, Human
uacguuccuauugucauu

SEQ ID NO: 2304462 - RNA, 22 nt, Human
uacguuccuauugucauuaaag

SEQ ID NO: 2304463 - RNA, 19 nt, Human
uacuagguaacuucauauu

SEQ ID NO: 2304464 - RNA, 15 nt, Human
uacucaagcccgcgg

SEQ ID NO: 2304465 - RNA, 19 nt, Human
uacucaagaggcugaggca

SEQ ID NO: 2304466 - RNA, 15 nt, Human
uacucaagaggcuga

SEQ ID NO: 2304467 - RNA, 23 nt, Human
uacucaacccucucaggugacca

SEQ ID NO: 2304468 - RNA, 14 nt, Human
uacucaacccucuc

SEQ ID NO: 2304469 - RNA, 11 nt, Human
uacuauuuaaa

SEQ ID NO: 2304470 - RNA, 22 nt, Human
uacuauucaguggcgagaaaua

SEQ ID NO: 2304471 - RNA, 16 nt, Human
uacuauguaucaauga

SEQ ID NO: 2304472 - RNA, 21 nt, Human
uacuaguugugaccuuagugu

SEQ ID NO: 2304473 - RNA, 19 nt, Human
uacuaguuacacaucuuca

SEQ ID NO: 2304474 - RNA, 14 nt, Human
uacuaguuacacau

SEQ ID NO: 2304475 - RNA, 16 nt, Human
uacuauaauuuaccug

SEQ ID NO: 2304476 - RNA, 21 nt, Human
uacucuuaggaagagaaacca

SEQ ID NO: 2304477 - RNA, 21 nt, Human
uacucuuaaguuucucagcuc

SEQ ID NO: 2304478 - RNA, 12 nt, Human
uacucuuccgaa

SEQ ID NO: 2304479 - RNA, 22 nt, Human
uacucuucaguuaagccuuugg

SEQ ID NO: 2304480 - RNA, 18 nt, Human
uacucuuaggaagagaaa

SEQ ID NO: 2304481 - RNA, 15 nt, Human
uacucuuaaguuucu

SEQ ID NO: 2304482 - RNA, 20 nt, Human
uacucuuaaguuucucagcu

SEQ ID NO: 2304483 - RNA, 20 nt, Human
uacucuuaagccaucuuggu

SEQ ID NO: 2304484 - RNA, 21 nt, Human
uacucuuaagccaucuuggua

SEQ ID NO: 2304485 - RNA, 22 nt, Human
uacucuuaagccaucuugguaa

SEQ ID NO: 2304486 - RNA, 23 nt, Human
uacucuuaagccaucuugguaaa

SEQ ID NO: 2304487 - RNA, 18 nt, Human
uacucuuauagacaacau

SEQ ID NO: 2304488 - RNA, 19 nt, Human
uacucuguuccuucacauc

SEQ ID NO: 2304489 - RNA, 14 nt, Human
uacucuguuccuuc

SEQ ID NO: 2304490 - RNA, 14 nt, Human
uacucuuaagccau

SEQ ID NO: 2304491 - RNA, 15 nt, Human
uacucuuaagccauc

SEQ ID NO: 2304492 - RNA, 16 nt, Human
uacucuuaagccaucu

SEQ ID NO: 2304493 - RNA, 17 nt, Human
uacucuuaagccaucuu

SEQ ID NO: 2304494 - RNA, 21 nt, Human
uacucugugucagguggggca

SEQ ID NO: 2304495 - RNA, 22 nt, Human
uacucaauguuacuaucugcuu

SEQ ID NO: 2304496 - RNA, 14 nt, Human
uacucaauggauuu

SEQ ID NO: 2304497 - RNA, 22 nt, Human
uacucaauugauaaacauuuaa

SEQ ID NO: 2304498 - RNA, 18 nt, Human
uacucuucuugaaauuuu

SEQ ID NO: 2304499 - RNA, 17 nt, Human
uacucuucuugaaauuu

SEQ ID NO: 2304500 - RNA, 14 nt, Human
uacucuucuugaaa

SEQ ID NO: 2304501 - RNA, 22 nt, Human
uacugaagaugcagcaaaaugu

SEQ ID NO: 2304502 - RNA, 12 nt, Human
uacugaaggaaa

SEQ ID NO: 2304503 - RNA, 13 nt, Human
uacugaaggaaaa

SEQ ID NO: 2304504 - RNA, 14 nt, Human
uacugaaggaaaaa

SEQ ID NO: 2304505 - RNA, 18 nt, Human
uacugaaggaaaaacaca

SEQ ID NO: 2304506 - RNA, 19 nt, Human
uacugaaggaaaaacacaa

SEQ ID NO: 2304507 - RNA, 20 nt, Human
uacugaaggaaaaacacaag

SEQ ID NO: 2304508 - RNA, 23 nt, Human
uacugaaggaaaaacacaagcaa

SEQ ID NO: 2304509 - RNA, 19 nt, Human
uacuggugcagucauuaug

SEQ ID NO: 2304510 - RNA, 13 nt, Human
uacugacaugugg

SEQ ID NO: 2304511 - RNA, 20 nt, Human
uacugacauguggggccagg

SEQ ID NO: 2304512 - RNA, 17 nt, Human
uacugaagguaaaauug

SEQ ID NO: 2304513 - RNA, 23 nt, Human
uacugacacuuugccagaaagca

SEQ ID NO: 2304514 - RNA, 12 nt, Human
uacuguaaagaa

SEQ ID NO: 2304515 - RNA, 16 nt, Human
uacuguaaagaaagag

SEQ ID NO: 2304516 - RNA, 13 nt, Human
uacuguaaagaaa

SEQ ID NO: 2304517 - RNA, 20 nt, Human
uacuguaaagaaagagagaa

SEQ ID NO: 2304518 - RNA, 19 nt, Human
uacuguaaagaaagagaga

SEQ ID NO: 2304519 - RNA, 18 nt, Human
uacuguaaagaaagagag

SEQ ID NO: 2304520 - RNA, 17 nt, Human
uacuguaaagaaagaga

SEQ ID NO: 2304521 - RNA, 17 nt, Human
aauucuuacaaacaugu

SEQ ID NO: 2304522 - RNA, 13 nt, Human
aauucuuaaauau

SEQ ID NO: 2304523 - RNA, 13 nt, Human
aauucuuacaugu

SEQ ID NO: 2304524 - RNA, 16 nt, Human
aauucuuaaguauguu

SEQ ID NO: 2304525 - RNA, 15 nt, Human
aauucuuacauguuu

SEQ ID NO: 2304526 - RNA, 15 nt, Human
aauucuuaugcuuau

SEQ ID NO: 2304527 - RNA, 21 nt, Human
uacccugcgcccaguccuucc

SEQ ID NO: 2304528 - RNA, 23 nt, Human
uacccugcgcccaguccuuccac

SEQ ID NO: 2304529 - RNA, 18 nt, Human
uacccuggccgcccccug

SEQ ID NO: 2304530 - RNA, 20 nt, Human
uacccuuggcucaauccucu

SEQ ID NO: 2304531 - RNA, 20 nt, Human
uacccuuuagacuguagccu

SEQ ID NO: 2304532 - RNA, 17 nt, Human
uacccuuuuucuccagc

SEQ ID NO: 2304533 - RNA, 18 nt, Human
uacccuuuuucuccagcu

SEQ ID NO: 2304534 - RNA, 19 nt, Human
uacccuuuuucuccagcug

SEQ ID NO: 2304535 - RNA, 18 nt, Human
aauucuucagguggaaaa

SEQ ID NO: 2304536 - RNA, 11 nt, Human
aauucuucccu

SEQ ID NO: 2304537 - RNA, 21 nt, Human
aauucuucccuaucuuugcca

SEQ ID NO: 2304538 - RNA, 13 nt, Human
aauucuucugaac

SEQ ID NO: 2304539 - RNA, 22 nt, Human
aauucuucuccacuuucuagcc

SEQ ID NO: 2304540 - RNA, 15 nt, Human
aauucuugaaggaaa

SEQ ID NO: 2304541 - RNA, 18 nt, Human
aauucuucugaacucaaa

SEQ ID NO: 2304542 - RNA, 15 nt, Human
aauucuucugaacuc

SEQ ID NO: 2304543 - RNA, 16 nt, Human
aauucuugaaggaaaa

SEQ ID NO: 2304544 - RNA, 21 nt, Human
aauucuugaaggaaaaugaua

SEQ ID NO: 2304545 - RNA, 21 nt, Human
aauucuugccaaauauaaaua

SEQ ID NO: 2304546 - RNA, 20 nt, Human
aauucuugcaaaguaucccu

SEQ ID NO: 2304547 - RNA, 14 nt, Human
aauucuugcaaagu

SEQ ID NO: 2304548 - RNA, 23 nt, Human
aauucuucugaacucaaacugag

SEQ ID NO: 2304549 - RNA, 15 nt, Human
aauucuuggaauacu

SEQ ID NO: 2304550 - RNA, 13 nt, Human
aauucuuggaaua

SEQ ID NO: 2304551 - RNA, 14 nt, Human
aauucuuguauauu

SEQ ID NO: 2304552 - RNA, 20 nt, Human
aauucuugguugaggaaaca

SEQ ID NO: 2304553 - RNA, 19 nt, Human
aauucuugguugaggaaac

SEQ ID NO: 2304554 - RNA, 18 nt, Human
aauucuugguugaggaaa

SEQ ID NO: 2304555 - RNA, 20 nt, Human
aauucuuguauauuauggaa

SEQ ID NO: 2304556 - RNA, 14 nt, Human
aauucuuuauacaa

SEQ ID NO: 2304557 - RNA, 19 nt, Human
aauucuuuauacaacagug

SEQ ID NO: 2304558 - RNA, 20 nt, Human
aauucuuuauacaacagugc

SEQ ID NO: 2304559 - RNA, 21 nt, Human
aauucuuuauacaacagugcu

SEQ ID NO: 2304560 - RNA, 22 nt, Human
aauucuuuauacaacagugcua

SEQ ID NO: 2304561 - RNA, 16 nt, Human
aauucuuguauauuau

SEQ ID NO: 2304562 - RNA, 15 nt, Human
aauucuuguauauua

SEQ ID NO: 2304563 - RNA, 13 nt, Human
aauucuuuauaca

SEQ ID NO: 2304564 - RNA, 22 nt, Human
aauucuuugaccuguugggagu

SEQ ID NO: 2304565 - RNA, 18 nt, Human
aauucuuugaccuguugg

SEQ ID NO: 2304566 - RNA, 21 nt, Human
aauugaacuuaaauaaauguc

SEQ ID NO: 2304567 - RNA, 21 nt, Human
aauugaaaggcauucucugaa

SEQ ID NO: 2304568 - RNA, 17 nt, Human
aauugaaaggcauucuc

SEQ ID NO: 2304569 - RNA, 22 nt, Human
aauugaaaggcauucucugaag

SEQ ID NO: 2304570 - RNA, 22 nt, Human
aauugaacuuaaauaaauguca

SEQ ID NO: 2304571 - RNA, 13 nt, Human
aauugacccacaa

SEQ ID NO: 2304572 - RNA, 15 nt, Human
uacguacacauuuua

SEQ ID NO: 2304573 - RNA, 19 nt, Human
aauugacccacaagaaaug

SEQ ID NO: 2304574 - RNA, 16 nt, Human
aauugacccacaagaa

SEQ ID NO: 2304575 - RNA, 20 nt, Human
aauuguuucaaaauaaaaac

SEQ ID NO: 2304576 - RNA, 15 nt, Human
aauuguuuaaguguu

SEQ ID NO: 2304577 - RNA, 23 nt, Human
aauuguuguuucuuucuaguggu

SEQ ID NO: 2304578 - RNA, 20 nt, Human
aauuguuuaaguguuguaaa

SEQ ID NO: 2304579 - RNA, 22 nt, Human
aauuguuuggggaugagaaagg

SEQ ID NO: 2304580 - RNA, 23 nt, Human
aauuguuguuuguauguauaauu

SEQ ID NO: 2304581 - RNA, 22 nt, Human
aauuguuguuuguauguauaau

SEQ ID NO: 2304582 - RNA, 21 nt, Human
aauuguuguuuguauguauaa

SEQ ID NO: 2304583 - RNA, 19 nt, Human
aauuguuguuuguauguau

SEQ ID NO: 2304584 - RNA, 17 nt, Human
aauuguuguuuguaugu

SEQ ID NO: 2304585 - RNA, 14 nt, Human
aauuguuguuugua

SEQ ID NO: 2304586 - RNA, 13 nt, Human
aauuguuguuugu

SEQ ID NO: 2304587 - RNA, 20 nt, Human
aauuguuguuucuuucuagu

SEQ ID NO: 2304588 - RNA, 21 nt, Human
aauuguuguuucuuucuagug

SEQ ID NO: 2304589 - RNA, 23 nt, Human
aauugugugugaugugaagccaa

SEQ ID NO: 2304590 - RNA, 23 nt, Human
aauuguugcuaaucuucuuaugc

SEQ ID NO: 2304591 - RNA, 12 nt, Human
aauuguuguuuc

SEQ ID NO: 2304592 - RNA, 13 nt, Human
aauuguuguuucu

SEQ ID NO: 2304593 - RNA, 15 nt, Human
aauuguuguuucuuu

SEQ ID NO: 2304594 - RNA, 17 nt, Human
aauuguuguuucuuucu

SEQ ID NO: 2304595 - RNA, 18 nt, Human
aauuguuguuucuuucua

SEQ ID NO: 2304596 - RNA, 19 nt, Human
aauuguuguuucuuucuag

SEQ ID NO: 2304597 - RNA, 12 nt, Human
aauugcuccuug

SEQ ID NO: 2304598 - RNA, 20 nt, Human
aauugcuccuaagcuucaaa

SEQ ID NO: 2304599 - RNA, 23 nt, Human
aauugcuauguuuugacauuuuu

SEQ ID NO: 2304600 - RNA, 20 nt, Human
uacuguaaagagaccuaccu

SEQ ID NO: 2304601 - RNA, 11 nt, Human
uacuguaacac

SEQ ID NO: 2304602 - RNA, 18 nt, Human
uacuguaacacuuuacaa

SEQ ID NO: 2304603 - RNA, 23 nt, Human
uacuguaaagaaagagagaaaau

SEQ ID NO: 2304604 - RNA, 21 nt, Human
uacuguaaagaaagagagaaa

SEQ ID NO: 2304605 - RNA, 13 nt, Human
uacuguaagaaaa

SEQ ID NO: 2304606 - RNA, 23 nt, Human
aauugugugaaagguacuucaaa

SEQ ID NO: 2304607 - RNA, 12 nt, Human
aauugcugugcc

SEQ ID NO: 2304608 - RNA, 13 nt, Human
aauugcugugccu

SEQ ID NO: 2304609 - RNA, 22 nt, Human
aauugcugugccucccaaaauu

SEQ ID NO: 2304610 - RNA, 18 nt, Human
aauugcuguguaucugau

SEQ ID NO: 2304611 - RNA, 13 nt, Human
aauugcuguguau

SEQ ID NO: 2304612 - RNA, 15 nt, Human
aauugcuuacauuuu

SEQ ID NO: 2304613 - RNA, 20 nt, Human
aauugcuuacauuuuuacaa

SEQ ID NO: 2304614 - RNA, 21 nt, Human
aauugcuuacauuuuuacaau

SEQ ID NO: 2304615 - RNA, 16 nt, Human
aauuguuugucuuuaa

SEQ ID NO: 2304616 - RNA, 13 nt, Human
aauuuaaaaaaua

SEQ ID NO: 2304617 - RNA, 16 nt, Human
aauuguuuugcacuuu

SEQ ID NO: 2304618 - RNA, 17 nt, Human
aauuguuuugcacuuuu

SEQ ID NO: 2304619 - RNA, 20 nt, Human
aauuguuuugcacuuuuuua

SEQ ID NO: 2304620 - RNA, 14 nt, Human
aauuuaaaaaauaa

SEQ ID NO: 2304621 - RNA, 13 nt, Human
aauuuaaaagucu

SEQ ID NO: 2304622 - RNA, 12 nt, Human
aauuuaaagcaa

SEQ ID NO: 2304623 - RNA, 18 nt, Human
aauuuaaacccauuuuag

SEQ ID NO: 2304624 - RNA, 19 nt, Human
aauuuaaacccauuuuagu

SEQ ID NO: 2304625 - RNA, 18 nt, Human
aauuuaaaggguguacuu

SEQ ID NO: 2304626 - RNA, 9 nt, Human
aauuuaaac

SEQ ID NO: 2304627 - RNA, 10 nt, Human
aauuuaaaca

SEQ ID NO: 2304628 - RNA, 15 nt, Human
aauuuaaacaccucc

SEQ ID NO: 2304629 - RNA, 19 nt, Human
aauuuaaacaccuccucau

SEQ ID NO: 2304630 - RNA, 11 nt, Human
aauuuaaacag

SEQ ID NO: 2304631 - RNA, 18 nt, Human
aauuuaaacaggcccagc

SEQ ID NO: 2304632 - RNA, 20 nt, Human
aauuuaaacaggcccagcau

SEQ ID NO: 2304633 - RNA, 19 nt, Human
aauuuaaacaggcccagca

SEQ ID NO: 2304634 - RNA, 17 nt, Human
aauuuaaacccauuuua

SEQ ID NO: 2304635 - RNA, 18 nt, Human
aauuuaauucauguuucu

SEQ ID NO: 2304636 - RNA, 21 nt, Human
aauuuaauuagggguugcuaa

SEQ ID NO: 2304637 - RNA, 14 nt, Human
aauuuaauauagcu

SEQ ID NO: 2304638 - RNA, 14 nt, Human
aauuuaaugcaugu

SEQ ID NO: 2304639 - RNA, 20 nt, Human
aauuuaagugcguguguaga

SEQ ID NO: 2304640 - RNA, 14 nt, Human
aauuuaaauauaau

SEQ ID NO: 2304641 - RNA, 23 nt, Human
aauuuaagugcguguguagaguu

SEQ ID NO: 2304642 - RNA, 22 nt, Human
aauuuaaaggguguacuuauau

SEQ ID NO: 2304643 - RNA, 19 nt, Human
aauuuaaaggguguacuua

SEQ ID NO: 2304644 - RNA, 21 nt, Human
aauuuaaaggguguacuuaua

SEQ ID NO: 2304645 - RNA, 23 nt, Human
aauuuaauucauguuucuuaaau

SEQ ID NO: 2304646 - RNA, 19 nt, Human
aauuuaauucauguuucuu

SEQ ID NO: 2304647 - RNA, 16 nt, Human
aauuuacaaaaauaua

SEQ ID NO: 2304648 - RNA, 18 nt, Human
aauuuacaaaaauauaaa

SEQ ID NO: 2304649 - RNA, 21 nt, Human
aauuuacaaaaauauaaaaua

SEQ ID NO: 2304650 - RNA, 13 nt, Human
aauuuacaaagug

SEQ ID NO: 2304651 - RNA, 14 nt, Human
aauuuacaaagugu

SEQ ID NO: 2304652 - RNA, 17 nt, Human
aauuuacaaagugugua

SEQ ID NO: 2304653 - RNA, 19 nt, Human
aauuuacauacucugcuua

SEQ ID NO: 2304654 - RNA, 14 nt, Human
aauuuacauggcaa

SEQ ID NO: 2304655 - RNA, 15 nt, Human
aauuuacaaagugug

SEQ ID NO: 2304656 - RNA, 16 nt, Human
aauuuacaaagugugu

SEQ ID NO: 2304657 - RNA, 21 nt, Human
aauuugauaguauugugcaua

SEQ ID NO: 2304658 - RNA, 14 nt, Human
aauuugauaucaca

SEQ ID NO: 2304659 - RNA, 16 nt, Human
aauuugauaucacagu

SEQ ID NO: 2304660 - RNA, 20 nt, Human
aauuugaguuggaucaucua

SEQ ID NO: 2304661 - RNA, 14 nt, Human
aauuugaggacaac

SEQ ID NO: 2304662 - RNA, 21 nt, Human
aauuugauacauaugugaaua

SEQ ID NO: 2304663 - RNA, 20 nt, Human
aauuugauacauaugugaau

SEQ ID NO: 2304664 - RNA, 13 nt, Human
aauuugagugcuc

SEQ ID NO: 2304665 - RNA, 18 nt, Human
aauuugaucguuccaguu

SEQ ID NO: 2304666 - RNA, 18 nt, Human
aauuugauaucacagucu

SEQ ID NO: 2304667 - RNA, 20 nt, Human
uacuuauuuuugacaguguu

SEQ ID NO: 2304668 - RNA, 12 nt, Human
uacuucaaaagu

SEQ ID NO: 2304669 - RNA, 14 nt, Human
uacuucaaaaguau

SEQ ID NO: 2304670 - RNA, 16 nt, Human
uacuucaaaaguauuu

SEQ ID NO: 2304671 - RNA, 19 nt, Human
uacuucaaaaguauuuucc

SEQ ID NO: 2304672 - RNA, 14 nt, Human
uacuucaaauccuu

SEQ ID NO: 2304673 - RNA, 19 nt, Human
uacuucaaauccuugaaga

SEQ ID NO: 2304674 - RNA, 17 nt, Human
aauuugagauacaaaca

SEQ ID NO: 2304675 - RNA, 13 nt, Human
aauuugaggacaa

SEQ ID NO: 2304676 - RNA, 20 nt, Human
aauuugagagaaauaugaag

SEQ ID NO: 2304677 - RNA, 18 nt, Human
aauuugagagaaauauga

SEQ ID NO: 2304678 - RNA, 16 nt, Human
aauuugaaugaaaaau

SEQ ID NO: 2304679 - RNA, 15 nt, Human
aauuugaaugaaaaa

SEQ ID NO: 2304680 - RNA, 14 nt, Human
aauuugaaugaaaa

SEQ ID NO: 2304681 - RNA, 13 nt, Human
aauuugaaugaaa

SEQ ID NO: 2304682 - RNA, 12 nt, Human
aauuugaaugaa

SEQ ID NO: 2304683 - RNA, 15 nt, Human
aauuugaaacacuuu

SEQ ID NO: 2304684 - RNA, 13 nt, Human
aauuucuguccuu

SEQ ID NO: 2304685 - RNA, 14 nt, Human
aauuugaaauuuag

SEQ ID NO: 2304686 - RNA, 21 nt, Human
aauuucuguguugccaagcuc

SEQ ID NO: 2304687 - RNA, 20 nt, Human
aauuugaaacacuuugcaua

SEQ ID NO: 2304688 - RNA, 18 nt, Human
aauuuaucuugucucugg

SEQ ID NO: 2304689 - RNA, 19 nt, Human
aauuuaucuugucucuggg

SEQ ID NO: 2304690 - RNA, 20 nt, Human
aauuuaucuugucucugggc

SEQ ID NO: 2304691 - RNA, 23 nt, Human
aauuuauccugaaauuucagauu

SEQ ID NO: 2304692 - RNA, 19 nt, Human
aauuuauccugaaauuuca

SEQ ID NO: 2304693 - RNA, 18 nt, Human
aauuuauccugaaauuuc

SEQ ID NO: 2304694 - RNA, 20 nt, Human
aauuuagguuuuuauuagua

SEQ ID NO: 2304695 - RNA, 18 nt, Human
aauuuagguuuuuauuag

SEQ ID NO: 2304696 - RNA, 17 nt, Human
aauuuagaaauauaauu

SEQ ID NO: 2304697 - RNA, 15 nt, Human
aauuuaccugaaguc

SEQ ID NO: 2304698 - RNA, 22 nt, Human
aauuucuaaaaaacagaggcca

SEQ ID NO: 2304699 - RNA, 18 nt, Human
aauuucuaccauuucaga

SEQ ID NO: 2304700 - RNA, 16 nt, Human
aauuucuaccauuuca

SEQ ID NO: 2304701 - RNA, 17 nt, Human
aauuucuacuuugaagu

SEQ ID NO: 2304702 - RNA, 16 nt, Human
aauuucuacuuugaag

SEQ ID NO: 2304703 - RNA, 15 nt, Human
aauuucuacuuugaa

SEQ ID NO: 2304704 - RNA, 11 nt, Human
aauuucucccc

SEQ ID NO: 2304705 - RNA, 12 nt, Human
aauuucucccca

SEQ ID NO: 2304706 - RNA, 13 nt, Human
aauuucuccccag

SEQ ID NO: 2304707 - RNA, 19 nt, Human
aauuucuccccagggugga

SEQ ID NO: 2304708 - RNA, 12 nt, Human
aauuucuccucc

SEQ ID NO: 2304709 - RNA, 14 nt, Human
aauuucuccucccu

SEQ ID NO: 2304710 - RNA, 20 nt, Human
aauuucuccucccuuccuuu

SEQ ID NO: 2304711 - RNA, 20 nt, Human
aauuucucccagucauuuaa

SEQ ID NO: 2304712 - RNA, 20 nt, Human
aauuuaugaguuuuugauag

SEQ ID NO: 2304713 - RNA, 19 nt, Human
aauuuaugaguuuuugaua

SEQ ID NO: 2304714 - RNA, 14 nt, Human
aauuuaugugaugg

SEQ ID NO: 2304715 - RNA, 16 nt, Human
aauuuaugaguuuuug

SEQ ID NO: 2304716 - RNA, 23 nt, Human
aauuuaugaauugaauuaucuug

SEQ ID NO: 2304717 - RNA, 21 nt, Human
aauuuaugaauugaauuaucu

SEQ ID NO: 2304718 - RNA, 21 nt, Human
aauuucuaaaucuccaaaaua

SEQ ID NO: 2304719 - RNA, 13 nt, Human
aauuucuaaaucu

SEQ ID NO: 2304720 - RNA, 13 nt, Human
acaaaaaaaucug

SEQ ID NO: 2304721 - RNA, 20 nt, Human
acaaaaaaauauauuuaaug

SEQ ID NO: 2304722 - RNA, 21 nt, Human
acaaaaacagccucacagaag

SEQ ID NO: 2304723 - RNA, 15 nt, Human
acaaaaacagccuca

SEQ ID NO: 2304724 - RNA, 19 nt, Human
acaaaaaaaucugcagaag

SEQ ID NO: 2304725 - RNA, 16 nt, Human
acaaaaaaaucugcag

SEQ ID NO: 2304726 - RNA, 18 nt, Human
acaaaaaaaucugcagaa

SEQ ID NO: 2304727 - RNA, 13 nt, Human
acaaaaacauggc

SEQ ID NO: 2304728 - RNA, 21 nt, Human
aauuuuuuucaucuucucugg

SEQ ID NO: 2304729 - RNA, 20 nt, Human
aauuuuuuuccuuaccuuuu

SEQ ID NO: 2304730 - RNA, 19 nt, Human
aauuuuuuuauuguuuaaa

SEQ ID NO: 2304731 - RNA, 16 nt, Human
aauuuuuuucugcaac

SEQ ID NO: 2304732 - RNA, 17 nt, Human
aauuuuuuugagacaga

SEQ ID NO: 2304733 - RNA, 19 nt, Human
acaaaaaaaaaguuuuauu

SEQ ID NO: 2304734 - RNA, 21 nt, Human
acaaaaaaaaaguuuuauuuu

SEQ ID NO: 2304735 - RNA, 22 nt, Human
acaaaaaaaaaguuuuauuuuu

SEQ ID NO: 2304736 - RNA, 17 nt, Human
acaaaaaaaaaguuuua

SEQ ID NO: 2304737 - RNA, 13 nt, Human
acaaaaaaauaua

SEQ ID NO: 2304738 - RNA, 17 nt, Human
acaaaaaaauauauuua

SEQ ID NO: 2304739 - RNA, 15 nt, Human
aauuuuuuuauuacu

SEQ ID NO: 2304740 - RNA, 17 nt, Human
aauuuuuuuauuacuga

SEQ ID NO: 2304741 - RNA, 19 nt, Human
aauuuuuuucaauauuuau

SEQ ID NO: 2304742 - RNA, 15 nt, Human
aauuuuuuucaauau

SEQ ID NO: 2304743 - RNA, 16 nt, Human
aauuuuuuuauuguuu

SEQ ID NO: 2304744 - RNA, 18 nt, Human
aauuuuuuuauuguuuaa

SEQ ID NO: 2304745 - RNA, 20 nt, Human
aauuuuuuaucaugcauguc

SEQ ID NO: 2304746 - RNA, 18 nt, Human
aauuuuuuaucaugcaug

SEQ ID NO: 2304747 - RNA, 19 nt, Human
aauuuuuucucuaggaaau

SEQ ID NO: 2304748 - RNA, 14 nt, Human
aauuuuuguauuuu

SEQ ID NO: 2304749 - RNA, 16 nt, Human
aauuuuucugcacuga

SEQ ID NO: 2304750 - RNA, 23 nt, Human
aauuuuucugcacugagcagagu

SEQ ID NO: 2304751 - RNA, 20 nt, Human
aauuuuucucuaacucagaa

SEQ ID NO: 2304752 - RNA, 22 nt, Human
aauuuuucucuaacucagaaac

SEQ ID NO: 2304753 - RNA, 12 nt, Human
aauuuuucugca

SEQ ID NO: 2304754 - RNA, 23 nt, Human
aauuuuucauugauaugaaaaau

SEQ ID NO: 2304755 - RNA, 20 nt, Human
aauuuuucauugauaugaaa

SEQ ID NO: 2304756 - RNA, 19 nt, Human
aauuuuucagaugcuucug

SEQ ID NO: 2304757 - RNA, 18 nt, Human
aauuuuuauuaaauuaug

SEQ ID NO: 2304758 - RNA, 17 nt, Human
aauuuuuauuaaauuau

SEQ ID NO: 2304759 - RNA, 15 nt, Human
aauuuuucagaugcu

SEQ ID NO: 2304760 - RNA, 15 nt, Human
aauuuuuauuuuucu

SEQ ID NO: 2304761 - RNA, 16 nt, Human
aauuuuuauuuuucua

SEQ ID NO: 2304762 - RNA, 15 nt, Human
aauuuuuauucauaa

SEQ ID NO: 2304763 - RNA, 16 nt, Human
aauuuuuauucauaag

SEQ ID NO: 2304764 - RNA, 16 nt, Human
aauuuuuauuauuugu

SEQ ID NO: 2304765 - RNA, 21 nt, Human
aauuuuuauuauuuguuuucc

SEQ ID NO: 2304766 - RNA, 13 nt, Human
aauuuuuauucau

SEQ ID NO: 2304767 - RNA, 17 nt, Human
aauuuuaaauaaaagug

SEQ ID NO: 2304768 - RNA, 14 nt, Human
aauuuuaaacaaag

SEQ ID NO: 2304769 - RNA, 22 nt, Human
aauuuuaaauaaaagugaucaa

SEQ ID NO: 2304770 - RNA, 18 nt, Human
aauuuuaaauaaaaguga

SEQ ID NO: 2304771 - RNA, 19 nt, Human
aauuuuaaccuaugauauu

SEQ ID NO: 2304772 - RNA, 17 nt, Human
aauuuuaaacaaagguu

SEQ ID NO: 2304773 - RNA, 12 nt, Human
aauuuuaaauua

SEQ ID NO: 2304774 - RNA, 19 nt, Human
aauuuuuauauuugaaaua

SEQ ID NO: 2304775 - RNA, 17 nt, Human
aauuuguuugugcuucu

SEQ ID NO: 2304776 - RNA, 20 nt, Human
aauuuguaucugaaggagau

SEQ ID NO: 2304777 - RNA, 22 nt, Human
aauuuguaucugaaggagauuu

SEQ ID NO: 2304778 - RNA, 18 nt, Human
aauuuguuugugcuucua

SEQ ID NO: 2304779 - RNA, 14 nt, Human
aauuuuaaaaauga

SEQ ID NO: 2304780 - RNA, 21 nt, Human
aauuuuaaaaaugaauccuac

SEQ ID NO: 2304781 - RNA, 17 nt, Human
aauuuuaaaaaugaauc

SEQ ID NO: 2304782 - RNA, 12 nt, Human
aauuuguaucug

SEQ ID NO: 2304783 - RNA, 14 nt, Human
aauuuguaucugaa

SEQ ID NO: 2304784 - RNA, 15 nt, Human
aauuuguaucugaag

SEQ ID NO: 2304785 - RNA, 17 nt, Human
aauuuguaucugaagga

SEQ ID NO: 2304786 - RNA, 18 nt, Human
aauuuguaucugaaggag

SEQ ID NO: 2304787 - RNA, 19 nt, Human
aauuuguaucugaaggaga

SEQ ID NO: 2304788 - RNA, 20 nt, Human
aauuuguacauauguaaaau

SEQ ID NO: 2304789 - RNA, 19 nt, Human
aauuuguaauugcuuacau

SEQ ID NO: 2304790 - RNA, 15 nt, Human
aauuuguaauugcuu

SEQ ID NO: 2304791 - RNA, 22 nt, Human
uagacaguaugagucaaugugc

SEQ ID NO: 2304792 - RNA, 15 nt, Human
aauuuguaaccucag

SEQ ID NO: 2304793 - RNA, 16 nt, Human
aauuuguaaccucagc

SEQ ID NO: 2304794 - RNA, 13 nt, Human
aauuuguaaguuu

SEQ ID NO: 2304795 - RNA, 14 nt, Human
aauuuguaaguuua

SEQ ID NO: 2304796 - RNA, 15 nt, Human
aauuuguaaguuuau

SEQ ID NO: 2304797 - RNA, 14 nt, Human
aauuuguaaguuuc

SEQ ID NO: 2304798 - RNA, 16 nt, Human
aauuuguaaguuucag

SEQ ID NO: 2304799 - RNA, 18 nt, Human
aauuuguaaguuucaggu

SEQ ID NO: 2304800 - RNA, 19 nt, Human
aauuuguaaguuucaggug

SEQ ID NO: 2304801 - RNA, 23 nt, Human
aauuuguaaguuucaggugacau

SEQ ID NO: 2304802 - RNA, 12 nt, Human
uagacagucccu

SEQ ID NO: 2304803 - RNA, 14 nt, Human
uagacagucccugc

SEQ ID NO: 2304804 - RNA, 22 nt, Human
uagacaaguccagccuggcaag

SEQ ID NO: 2304805 - RNA, 16 nt, Human
uagacaauuuauuaug

SEQ ID NO: 2304806 - RNA, 21 nt, Human
uagacagagucucacuguugc

SEQ ID NO: 2304807 - RNA, 15 nt, Human
uagaauuuauucaau

SEQ ID NO: 2304808 - RNA, 19 nt, Human
uagaauuggcugaacucau

SEQ ID NO: 2304809 - RNA, 20 nt, Human
uagaauuuauucaauuccuc

SEQ ID NO: 2304810 - RNA, 22 nt, Human
uagaauuuauucaauuccucug

SEQ ID NO: 2304811 - RNA, 13 nt, Human
uagaauugcauug

SEQ ID NO: 2304812 - RNA, 15 nt, Human
uagaauugcauugac

SEQ ID NO: 2304813 - RNA, 14 nt, Human
uagaauugcauuga

SEQ ID NO: 2304814 - RNA, 15 nt, Human
uagacaacccugcaa

SEQ ID NO: 2304815 - RNA, 19 nt, Human
uagacaaauauuuggaggg

SEQ ID NO: 2304816 - RNA, 23 nt, Human
uagaauuuauucaauuccucugg

SEQ ID NO: 2304817 - RNA, 17 nt, Human
uagaagucuuagaugua

SEQ ID NO: 2304818 - RNA, 16 nt, Human
uagaagucuuagaugu

SEQ ID NO: 2304819 - RNA, 16 nt, Human
uagaagucacacagua

SEQ ID NO: 2304820 - RNA, 22 nt, Human
uagaagccccguuauaacuccu

SEQ ID NO: 2304821 - RNA, 16 nt, Human
uagaagccaagggaaa

SEQ ID NO: 2304822 - RNA, 19 nt, Human
uagaagccaagggaaaggg

SEQ ID NO: 2304823 - RNA, 19 nt, Human
uagaagucuuagauguaua

SEQ ID NO: 2304824 - RNA, 18 nt, Human
uagaagucuuagauguau

SEQ ID NO: 2304825 - RNA, 20 nt, Human
uagaagucuuagauguauau

SEQ ID NO: 2304826 - RNA, 14 nt, Human
uagaagcuggagga

SEQ ID NO: 2304827 - RNA, 18 nt, Human
uagaagauggcacuuaua

SEQ ID NO: 2304828 - RNA, 16 nt, Human
uagaagauccuacccc

SEQ ID NO: 2304829 - RNA, 21 nt, Human
uagaagacucuaccagacugu

SEQ ID NO: 2304830 - RNA, 23 nt, Human
uagaagauauuagucuuggggca

SEQ ID NO: 2304831 - RNA, 21 nt, Human
uagaacuugcagcugauguug

SEQ ID NO: 2304832 - RNA, 20 nt, Human
uagaagacucuaccagacug

SEQ ID NO: 2304833 - RNA, 15 nt, Human
uagaagucacacagu

SEQ ID NO: 2304834 - RNA, 14 nt, Human
uagaagcauuccuu

SEQ ID NO: 2304835 - RNA, 20 nt, Human
uagaagcauuccuucuuuga

SEQ ID NO: 2304836 - RNA, 21 nt, Human
uagaagcauuccuucuuugau

SEQ ID NO: 2304837 - RNA, 22 nt, Human
uagaagcauuccuucuuugaua

SEQ ID NO: 2304838 - RNA, 23 nt, Human
uagaagcauuccuucuuugauaa

SEQ ID NO: 2304839 - RNA, 12 nt, Human
uagaagccaagg

SEQ ID NO: 2304840 - RNA, 15 nt, Human
uagaagccaagggaa

SEQ ID NO: 2304841 - RNA, 23 nt, Human
uagaacucuccaucuuauuuuca

SEQ ID NO: 2304842 - RNA, 19 nt, Human
uagaacucugaaaugaaga

SEQ ID NO: 2304843 - RNA, 22 nt, Human
uagaacuggagaggcuagaacc

SEQ ID NO: 2304844 - RNA, 19 nt, Human
uagaacuguaugucagaca

SEQ ID NO: 2304845 - RNA, 16 nt, Human
uagaacuugacccccu

SEQ ID NO: 2304846 - RNA, 20 nt, Human
uagaacuguaugucagacau

SEQ ID NO: 2304847 - RNA, 19 nt, Human
uagaacuuuaagcaacaag

SEQ ID NO: 2304848 - RNA, 22 nt, Human
uagaacuuggauguaccugccc

SEQ ID NO: 2304849 - RNA, 16 nt, Human
uagaaccuggaagggc

SEQ ID NO: 2304850 - RNA, 17 nt, Human
uagaaccuggaagggcu

SEQ ID NO: 2304851 - RNA, 22 nt, Human
uagaaccuggagggcuagaacc

SEQ ID NO: 2304852 - RNA, 17 nt, Human
uagaaccuggagggcug

SEQ ID NO: 2304853 - RNA, 23 nt, Human
uagaaccuggaagggcuagaacc

SEQ ID NO: 2304854 - RNA, 13 nt, Human
uagaaccuggaga

SEQ ID NO: 2304855 - RNA, 22 nt, Human
uagaaccuggagagcuagaacc

SEQ ID NO: 2304856 - RNA, 13 nt, Human
uagaaccuggagg

SEQ ID NO: 2304857 - RNA, 19 nt, Human
uagaacucaguuuuaacua

SEQ ID NO: 2304858 - RNA, 22 nt, Human
uagaacucaguuuuaacuagaa

SEQ ID NO: 2304859 - RNA, 15 nt, Human
uagaacucccuuuca

SEQ ID NO: 2304860 - RNA, 21 nt, Human
uacuucaaguuaaagugaaua

SEQ ID NO: 2304861 - RNA, 14 nt, Human
uacuucacugucag

SEQ ID NO: 2304862 - RNA, 19 nt, Human
uacuucacugucaggaaga

SEQ ID NO: 2304863 - RNA, 15 nt, Human
uacuucacuuuaauu

SEQ ID NO: 2304864 - RNA, 22 nt, Human
uacuucacuuuaauucucaugu

SEQ ID NO: 2304865 - RNA, 16 nt, Human
uacuucaugcugucua

SEQ ID NO: 2304866 - RNA, 16 nt, Human
uacuucacuuuaauuc

SEQ ID NO: 2304867 - RNA, 19 nt, Human
uacuucacuuuaauucuca

SEQ ID NO: 2304868 - RNA, 19 nt, Human
uacuucaggggcacuucau

SEQ ID NO: 2304869 - RNA, 22 nt, Human
uacuucaggggcacuucauuga

SEQ ID NO: 2304870 - RNA, 23 nt, Human
uacuucaaguuaaagugaauaac

SEQ ID NO: 2304871 - RNA, 18 nt, Human
uacuucaaguuaaaguga

SEQ ID NO: 2304872 - RNA, 23 nt, Human
uacuucaaaaguauuuuccugua

SEQ ID NO: 2304873 - RNA, 21 nt, Human
uacuucaaauccuugaagauu

SEQ ID NO: 2304874 - RNA, 18 nt, Human
uagaggaaaaaaaugacu

SEQ ID NO: 2304875 - RNA, 17 nt, Human
uagaggaaaaaaaugac

SEQ ID NO: 2304876 - RNA, 20 nt, Human
uagagcuguauuaagccacu

SEQ ID NO: 2304877 - RNA, 19 nt, Human
uagagcugauccagagcac

SEQ ID NO: 2304878 - RNA, 17 nt, Human
uagagcuuucaaguaca

SEQ ID NO: 2304879 - RNA, 15 nt, Human
uagagcuucuggcac

SEQ ID NO: 2304880 - RNA, 21 nt, Human
uagagccaggcacacacugug

SEQ ID NO: 2304881 - RNA, 14 nt, Human
uagagcugauccag

SEQ ID NO: 2304882 - RNA, 15 nt, Human
uagagcugauccaga

SEQ ID NO: 2304883 - RNA, 18 nt, Human
uagagcugauccagagca

SEQ ID NO: 2304884 - RNA, 17 nt, Human
uagagcaguuucugucc

SEQ ID NO: 2304885 - RNA, 23 nt, Human
uagagcagggauuaaccucugca

SEQ ID NO: 2304886 - RNA, 22 nt, Human
uagagcaguuucuguccugcug

SEQ ID NO: 2304887 - RNA, 19 nt, Human
uagagcauugaauuggaga

SEQ ID NO: 2304888 - RNA, 15 nt, Human
uagagcauugccauu

SEQ ID NO: 2304889 - RNA, 16 nt, Human
uagagcauugccauuc

SEQ ID NO: 2304890 - RNA, 23 nt, Human
uagagcugacacaaaccugccug

SEQ ID NO: 2304891 - RNA, 15 nt, Human
uagagccaggcacac

SEQ ID NO: 2304892 - RNA, 19 nt, Human
uagagccaggcacacacug

SEQ ID NO: 2304893 - RNA, 19 nt, Human
uagagcauugccauucccu

SEQ ID NO: 2304894 - RNA, 12 nt, Human
uagagccaggca

SEQ ID NO: 2304895 - RNA, 14 nt, Human
uagagccaggcaca

SEQ ID NO: 2304896 - RNA, 19 nt, Human
uagagcagaugaccccucc

SEQ ID NO: 2304897 - RNA, 14 nt, Human
uagagcagcccugg

SEQ ID NO: 2304898 - RNA, 19 nt, Human
uagagcagcccuggaguca

SEQ ID NO: 2304899 - RNA, 11 nt, Human
uagagcaggcg

SEQ ID NO: 2304900 - RNA, 20 nt, Human
uagagcaggcguucagcuca

SEQ ID NO: 2304901 - RNA, 22 nt, Human
uagagcaggcguucagcucacu

SEQ ID NO: 2304902 - RNA, 16 nt, Human
acaaaaagaacaaaaa

SEQ ID NO: 2304903 - RNA, 16 nt, Human
acaaaaagcauaaaaa

SEQ ID NO: 2304904 - RNA, 22 nt, Human
uagaggaaaaaaaugacuaaaa

SEQ ID NO: 2304905 - RNA, 19 nt, Human
uagaggaaauaagaaaaau

SEQ ID NO: 2304906 - RNA, 16 nt, Human
uagaucacgagaucaa

SEQ ID NO: 2304907 - RNA, 16 nt, Human
uagaucaccagaauaa

SEQ ID NO: 2304908 - RNA, 17 nt, Human
uagaucacgagaucaag

SEQ ID NO: 2304909 - RNA, 20 nt, Human
uagaggaaauaagaaaaauc

SEQ ID NO: 2304910 - RNA, 13 nt, Human
uagaucaaauacu

SEQ ID NO: 2304911 - RNA, 14 nt, Human
uagaucaaauacuu

SEQ ID NO: 2304912 - RNA, 17 nt, Human
uagaucaaauacuuuaa

SEQ ID NO: 2304913 - RNA, 23 nt, Human
uagaucaaauacuuuaaaggaaa

SEQ ID NO: 2304914 - RNA, 16 nt, Human
uagaugcaguucugaa

SEQ ID NO: 2304915 - RNA, 17 nt, Human
uagaugcaguucugaag

SEQ ID NO: 2304916 - RNA, 19 nt, Human
uagaugcaguucugaagaa

SEQ ID NO: 2304917 - RNA, 22 nt, Human
uagauuuuagacccuauugcug

SEQ ID NO: 2304918 - RNA, 14 nt, Human
uagaucaugaagaa

SEQ ID NO: 2304919 - RNA, 13 nt, Human
uagauuuuccaaa

SEQ ID NO: 2304920 - RNA, 12 nt, Human
uagauuuuccaa

SEQ ID NO: 2304921 - RNA, 14 nt, Human
uagauuuucuuuaa

SEQ ID NO: 2304922 - RNA, 15 nt, Human
uagauuuucuuuaaa

SEQ ID NO: 2304923 - RNA, 16 nt, Human
uagauuuucuuuaaaa

SEQ ID NO: 2304924 - RNA, 19 nt, Human
uagauuuucuuuaaaagaa

SEQ ID NO: 2304925 - RNA, 16 nt, Human
uagcacagacccugcc

SEQ ID NO: 2304926 - RNA, 17 nt, Human
uagcacagacccugccc

SEQ ID NO: 2304927 - RNA, 18 nt, Human
uagcacagacccugcccu

SEQ ID NO: 2304928 - RNA, 19 nt, Human
uagcacagacccugcccug

SEQ ID NO: 2304929 - RNA, 22 nt, Human
uagcauguguuugguucugggg

SEQ ID NO: 2304930 - RNA, 21 nt, Human
uagcauguguuugguucuggg

SEQ ID NO: 2304931 - RNA, 18 nt, Human
uagcacaggggggccgcc

SEQ ID NO: 2304932 - RNA, 16 nt, Human
uagcaccagggaaggg

SEQ ID NO: 2304933 - RNA, 18 nt, Human
uagcaugucgucaaagcu

SEQ ID NO: 2304934 - RNA, 21 nt, Human
uagcaugucgucaaagcugaa

SEQ ID NO: 2304935 - RNA, 15 nt, Human
uagauuuuguuuugc

SEQ ID NO: 2304936 - RNA, 14 nt, Human
uagcaccagggaag

SEQ ID NO: 2304937 - RNA, 13 nt, Human
uagcaccagggaa

SEQ ID NO: 2304938 - RNA, 13 nt, Human
acaacaagaguuu

SEQ ID NO: 2304939 - RNA, 14 nt, Human
acaacacacacacu

SEQ ID NO: 2304940 - RNA, 12 nt, Human
acaacacucaca

SEQ ID NO: 2304941 - RNA, 15 nt, Human
acaacaaccugguca

SEQ ID NO: 2304942 - RNA, 18 nt, Human
acaaauucugucucugga

SEQ ID NO: 2304943 - RNA, 15 nt, Human
acaacaacaaaauga

SEQ ID NO: 2304944 - RNA, 23 nt, Human
acaagaaggguuuuccacccugg

SEQ ID NO: 2304945 - RNA, 20 nt, Human
acaagaagccacagaccuag

SEQ ID NO: 2304946 - RNA, 15 nt, Human
acaagaacugaaacc

SEQ ID NO: 2304947 - RNA, 18 nt, Human
acaagaaauuugauuucu

SEQ ID NO: 2304948 - RNA, 14 nt, Human
acaagaagaagggc

SEQ ID NO: 2304949 - RNA, 13 nt, Human
acaagaagaccag

SEQ ID NO: 2304950 - RNA, 22 nt, Human
acaagaaaugaaagcagggacu

SEQ ID NO: 2304951 - RNA, 20 nt, Human
acaaauuagguuuuguacaa

SEQ ID NO: 2304952 - RNA, 22 nt, Human
acaaauuagaaaauguuauuua

SEQ ID NO: 2304953 - RNA, 22 nt, Human
acaaauuauguuacaucuguuu

SEQ ID NO: 2304954 - RNA, 17 nt, Human
acaaauuauuaaugaaa

SEQ ID NO: 2304955 - RNA, 17 nt, Human
acaaauucauauucugu

SEQ ID NO: 2304956 - RNA, 22 nt, Human
acaaauguguaucggaugcuuu

SEQ ID NO: 2304957 - RNA, 13 nt, Human
uagcauuucuuga

SEQ ID NO: 2304958 - RNA, 16 nt, Human
uagcauuucuugaugu

SEQ ID NO: 2304959 - RNA, 22 nt, Human
uagcauuuaguccaaugucuuu

SEQ ID NO: 2304960 - RNA, 20 nt, Human
uagcauugugaacugacagg

SEQ ID NO: 2304961 - RNA, 13 nt, Human
uagcauuucauuc

SEQ ID NO: 2304962 - RNA, 15 nt, Human
uagcauuucauucuu

SEQ ID NO: 2304963 - RNA, 16 nt, Human
uagcauuucauucuuc

SEQ ID NO: 2304964 - RNA, 17 nt, Human
uagcauuucauucuucu

SEQ ID NO: 2304965 - RNA, 18 nt, Human
uagcauuucauucuucuc

SEQ ID NO: 2304966 - RNA, 12 nt, Human
uagcauuucuug

SEQ ID NO: 2304967 - RNA, 16 nt, Human
uagcauuaacuaaucu

SEQ ID NO: 2304968 - RNA, 20 nt, Human
uagcauguugagccaggccu

SEQ ID NO: 2304969 - RNA, 13 nt, Human
uagcauguuugcu

SEQ ID NO: 2304970 - RNA, 16 nt, Human
uagcauguuugcugaa

SEQ ID NO: 2304971 - RNA, 12 nt, Human
uagcauuaacua

SEQ ID NO: 2304972 - RNA, 17 nt, Human
uagcauguuugcugaac

SEQ ID NO: 2304973 - RNA, 13 nt, Human
acaagcaagcucc

SEQ ID NO: 2304974 - RNA, 15 nt, Human
acaagcaagcuccca

SEQ ID NO: 2304975 - RNA, 20 nt, Human
acaagagcccagcagggccu

SEQ ID NO: 2304976 - RNA, 13 nt, Human
acaagagcccagc

SEQ ID NO: 2304977 - RNA, 22 nt, Human
acaagcaauuagacaagaacuu

SEQ ID NO: 2304978 - RNA, 11 nt, Human
acaagcagagg

SEQ ID NO: 2304979 - RNA, 21 nt, Human
acaagcauucugucuugaagg

SEQ ID NO: 2304980 - RNA, 18 nt, Human
acaagcacuaaacaaaga

SEQ ID NO: 2304981 - RNA, 18 nt, Human
acaagagcagccuguggc

SEQ ID NO: 2304982 - RNA, 16 nt, Human
acaagagcagccugug

SEQ ID NO: 2304983 - RNA, 15 nt, Human
acaagagcagccugu

SEQ ID NO: 2304984 - RNA, 14 nt, Human
acaagagcagccug

SEQ ID NO: 2304985 - RNA, 21 nt, Human
acaagagcacuacauucauuu

SEQ ID NO: 2304986 - RNA, 15 nt, Human
acaagagcacuacau

SEQ ID NO: 2304987 - RNA, 20 nt, Human
acaagagcagccuguggcau

SEQ ID NO: 2304988 - RNA, 19 nt, Human
acaagagcagccuguggca

SEQ ID NO: 2304989 - RNA, 18 nt, Human
acaagagcccaggccucc

SEQ ID NO: 2304990 - RNA, 17 nt, Human
acaagagcccaggccuc

SEQ ID NO: 2304991 - RNA, 13 nt, Human
acaagccagcugg

SEQ ID NO: 2304992 - RNA, 15 nt, Human
acaagccagcuggag

SEQ ID NO: 2304993 - RNA, 15 nt, Human
acaagccccaggcag

SEQ ID NO: 2304994 - RNA, 14 nt, Human
acaagccccaggca

SEQ ID NO: 2304995 - RNA, 12 nt, Human
acaagccacccc

SEQ ID NO: 2304996 - RNA, 18 nt, Human
acaagccacgaaugaaug

SEQ ID NO: 2304997 - RNA, 18 nt, Human
acaagccacagaagccag

SEQ ID NO: 2304998 - RNA, 12 nt, Human
acaagccacaga

SEQ ID NO: 2304999 - RNA, 13 nt, Human
acaagccacagaa

SEQ ID NO: 2305000 - RNA, 14 nt, Human
acaagccaacuugu

SEQ ID NO: 2305001 - RNA, 21 nt, Human
acaagccaacuuguaaauaca

SEQ ID NO: 2305002 - RNA, 20 nt, Human
acaagcgugagccacugcac

SEQ ID NO: 2305003 - RNA, 21 nt, Human
acaagcgugagccacugcacc

SEQ ID NO: 2305004 - RNA, 18 nt, Human
acaagcgugagccacugc

SEQ ID NO: 2305005 - RNA, 14 nt, Human
acaagcuaaaauua

SEQ ID NO: 2305006 - RNA, 13 nt, Human
acaagcugcaccc

SEQ ID NO: 2305007 - RNA, 12 nt, Human
uaauguauuuua

SEQ ID NO: 2305008 - RNA, 19 nt, Human
uaauguauuuuauuguaac

SEQ ID NO: 2305009 - RNA, 21 nt, Human
uaaugugaaaaugguccagga

SEQ ID NO: 2305010 - RNA, 17 nt, Human
uaaugugccuaguucuu

SEQ ID NO: 2305011 - RNA, 13 nt, Human
uaaugugauauua

SEQ ID NO: 2305012 - RNA, 13 nt, Human
uaaugugaagugu

SEQ ID NO: 2305013 - RNA, 23 nt, Human
aaucuucugaacuuggcgcugcc

SEQ ID NO: 2305014 - RNA, 12 nt, Human
uaaugugcugug

SEQ ID NO: 2305015 - RNA, 13 nt, Human
uaaugugcugugu

SEQ ID NO: 2305016 - RNA, 14 nt, Human
uaaugugcugugua

SEQ ID NO: 2305017 - RNA, 15 nt, Human
uaaugugcuguguaa

SEQ ID NO: 2305018 - RNA, 16 nt, Human
uaaugugcuguguaaa

SEQ ID NO: 2305019 - RNA, 17 nt, Human
uaaugugcuguguaaag

SEQ ID NO: 2305020 - RNA, 18 nt, Human
uaaugugcuguguaaagu

SEQ ID NO: 2305021 - RNA, 19 nt, Human
uaaugugcuguguaaaguu

SEQ ID NO: 2305022 - RNA, 19 nt, Human
aaucuugggggguuuuuac

SEQ ID NO: 2305023 - RNA, 13 nt, Human
aaucuugcucugc

SEQ ID NO: 2305024 - RNA, 23 nt, Human
aaucuuuuacaacugccucgaaa

SEQ ID NO: 2305025 - RNA, 13 nt, Human
aaucuugaaaaug

SEQ ID NO: 2305026 - RNA, 20 nt, Human
uaaugugcuguguaaaguua

SEQ ID NO: 2305027 - RNA, 21 nt, Human
uaaugugcuguguaaaguuag

SEQ ID NO: 2305028 - RNA, 22 nt, Human
uaaugugcuguguaaaguuagu

SEQ ID NO: 2305029 - RNA, 14 nt, Human
aaucuugaaauuaa

SEQ ID NO: 2305030 - RNA, 17 nt, Human
aaucuugaaauuaagaa

SEQ ID NO: 2305031 - RNA, 22 nt, Human
aaucuugacuacagucaggaaa

SEQ ID NO: 2305032 - RNA, 14 nt, Human
aaugaaugaaacau

SEQ ID NO: 2305033 - RNA, 15 nt, Human
aaugaaugaaugaau

SEQ ID NO: 2305034 - RNA, 15 nt, Human
aaugaaugucagugu

SEQ ID NO: 2305035 - RNA, 14 nt, Human
aaugaaugucagug

SEQ ID NO: 2305036 - RNA, 18 nt, Human
aaugaaaaauuuaagcau

SEQ ID NO: 2305037 - RNA, 17 nt, Human
aaugaaaaauuuaagca

SEQ ID NO: 2305038 - RNA, 17 nt, Human
aaugaaaaauucucagu

SEQ ID NO: 2305039 - RNA, 14 nt, Human
aaugaaaaauucuc

SEQ ID NO: 2305040 - RNA, 14 nt, Human
aaugaaaaaaugua

SEQ ID NO: 2305041 - RNA, 21 nt, Human
aaucuuuuuuagcauaaaauu

SEQ ID NO: 2305042 - RNA, 18 nt, Human
aaucuuuucacaaauaaa

SEQ ID NO: 2305043 - RNA, 14 nt, Human
aaucuuuucacaaa

SEQ ID NO: 2305044 - RNA, 15 nt, Human
aaucuuuucacaaau

SEQ ID NO: 2305045 - RNA, 16 nt, Human
aaucuuuucacaaaua

SEQ ID NO: 2305046 - RNA, 17 nt, Human
aaucuuuucacaaauaa

SEQ ID NO: 2305047 - RNA, 17 nt, Human
uaauguaagcucuacug

SEQ ID NO: 2305048 - RNA, 16 nt, Human
uaauguaagcucuacu

SEQ ID NO: 2305049 - RNA, 15 nt, Human
uaauguaagacaaau

SEQ ID NO: 2305050 - RNA, 15 nt, Human
uaaugaaguuugaau

SEQ ID NO: 2305051 - RNA, 16 nt, Human
uaaugaaguuugaaug

SEQ ID NO: 2305052 - RNA, 17 nt, Human
uaaugaaguuugaaugu

SEQ ID NO: 2305053 - RNA, 18 nt, Human
uaaugaaguuugaauguu

SEQ ID NO: 2305054 - RNA, 22 nt, Human
uaaugaagggaaaggauauuuu

SEQ ID NO: 2305055 - RNA, 14 nt, Human
uaaugaagcuuuau

SEQ ID NO: 2305056 - RNA, 13 nt, Human
uaaugaaguuuga

SEQ ID NO: 2305057 - RNA, 14 nt, Human
uaaugaaguuugaa

SEQ ID NO: 2305058 - RNA, 23 nt, Human
uaaugaagaaaguggaaaacaag

SEQ ID NO: 2305059 - RNA, 22 nt, Human
uaaugaagaaaguggaaaacaa

SEQ ID NO: 2305060 - RNA, 18 nt, Human
uaaugaaccgcugaauau

SEQ ID NO: 2305061 - RNA, 14 nt, Human
uaaugaaauaucug

SEQ ID NO: 2305062 - RNA, 16 nt, Human
uaaugaaccgcugaau

SEQ ID NO: 2305063 - RNA, 17 nt, Human
uaaugaagaaaguggaa

SEQ ID NO: 2305064 - RNA, 16 nt, Human
uaaugaagaaagugga

SEQ ID NO: 2305065 - RNA, 19 nt, Human
uaaugaaauaucuguauuu

SEQ ID NO: 2305066 - RNA, 16 nt, Human
uaaugucacaggcagg

SEQ ID NO: 2305067 - RNA, 17 nt, Human
uaaugucacaggcaggu

SEQ ID NO: 2305068 - RNA, 15 nt, Human
uaaugucacaggcag

SEQ ID NO: 2305069 - RNA, 18 nt, Human
uaauguaauaacugugaa

SEQ ID NO: 2305070 - RNA, 17 nt, Human
uaauguaauaacuguga

SEQ ID NO: 2305071 - RNA, 23 nt, Human
uaaugugaaacuggauuaaacuu

SEQ ID NO: 2305072 - RNA, 22 nt, Human
uaaugugaaacuggauuaaacu

SEQ ID NO: 2305073 - RNA, 20 nt, Human
uaaugugaaacuggauuaaa

SEQ ID NO: 2305074 - RNA, 12 nt, Human
uaaugugaaacu

SEQ ID NO: 2305075 - RNA, 12 nt, Human
aauacaguguua

SEQ ID NO: 2305076 - RNA, 21 nt, Human
aauacagucuuccauuugcaa

SEQ ID NO: 2305077 - RNA, 18 nt, Human
aauacaguuguuggccuc

SEQ ID NO: 2305078 - RNA, 17 nt, Human
aauacaguacaggcagc

SEQ ID NO: 2305079 - RNA, 16 nt, Human
aauacaguacaggcag

SEQ ID NO: 2305080 - RNA, 15 nt, Human
aauacaguacaggca

SEQ ID NO: 2305081 - RNA, 17 nt, Human
uaacaagcucccaggcc

SEQ ID NO: 2305082 - RNA, 21 nt, Human
aauacaguacaggcagcacag

SEQ ID NO: 2305083 - RNA, 18 nt, Human
aauacaguacaggcagca

SEQ ID NO: 2305084 - RNA, 20 nt, Human
aauacaguaucucagggccu

SEQ ID NO: 2305085 - RNA, 19 nt, Human
uaacaaugcuguauuuuaa

SEQ ID NO: 2305086 - RNA, 19 nt, Human
aauacaguuugucacauga

SEQ ID NO: 2305087 - RNA, 18 nt, Human
uaauacagcaacaauuua

SEQ ID NO: 2305088 - RNA, 22 nt, Human
uaauacacuaauuccuuucuau

SEQ ID NO: 2305089 - RNA, 23 nt, Human
uaauacaccacuacauucuguua

SEQ ID NO: 2305090 - RNA, 21 nt, Human
uaauacaccacuacauucugu

SEQ ID NO: 2305091 - RNA, 22 nt, Human
uaauacaccacuacauucuguu

SEQ ID NO: 2305092 - RNA, 21 nt, Human
uaauagaagaacauccaagga

SEQ ID NO: 2305093 - RNA, 12 nt, Human
uaauagaagaac

SEQ ID NO: 2305094 - RNA, 19 nt, Human
uaauagaaaacugaaaauc

SEQ ID NO: 2305095 - RNA, 15 nt, Human
uaauagaaaacugaa

SEQ ID NO: 2305096 - RNA, 16 nt, Human
uaauagaaaacugaaa

SEQ ID NO: 2305097 - RNA, 18 nt, Human
uaauagaaaacugaaaau

SEQ ID NO: 2305098 - RNA, 18 nt, Human
uaauaccucugugugcuc

SEQ ID NO: 2305099 - RNA, 15 nt, Human
uaauaccugggugau

SEQ ID NO: 2305100 - RNA, 20 nt, Human
uaauaccugggugauuacau

SEQ ID NO: 2305101 - RNA, 18 nt, Human
uaauacuugcuuuggaaa

SEQ ID NO: 2305102 - RNA, 20 nt, Human
uaauacagccaaagauaauc

SEQ ID NO: 2305103 - RNA, 23 nt, Human
uaauacagcagugucaucagaag

SEQ ID NO: 2305104 - RNA, 20 nt, Human
uaauacacuaauuccuuucu

SEQ ID NO: 2305105 - RNA, 19 nt, Human
uaauacagcagugucauca

SEQ ID NO: 2305106 - RNA, 22 nt, Human
uaauacagcaacaauuuaugaa

SEQ ID NO: 2305107 - RNA, 21 nt, Human
uaauacagcaacaauuuauga

SEQ ID NO: 2305108 - RNA, 16 nt, Human
uaauaccacagcuuuu

SEQ ID NO: 2305109 - RNA, 13 nt, Human
uaauaccucccuu

SEQ ID NO: 2305110 - RNA, 22 nt, Human
uaauaccauuuuuuaaggaaac

SEQ ID NO: 2305111 - RNA, 13 nt, Human
uaauaccucugug

SEQ ID NO: 2305112 - RNA, 14 nt, Human
uaauaccucugugu

SEQ ID NO: 2305113 - RNA, 15 nt, Human
uaauaccucugugug

SEQ ID NO: 2305114 - RNA, 22 nt, Human
uaaucauuucuugggcccuccu

SEQ ID NO: 2305115 - RNA, 19 nt, Human
uaaucauuucuugggcccu

SEQ ID NO: 2305116 - RNA, 12 nt, Human
uaaucauuucuu

SEQ ID NO: 2305117 - RNA, 19 nt, Human
uaauccaauggguuuuucc

SEQ ID NO: 2305118 - RNA, 22 nt, Human
uaauccaagcaaaugugaauca

SEQ ID NO: 2305119 - RNA, 16 nt, Human
uaaucagugucucaca

SEQ ID NO: 2305120 - RNA, 17 nt, Human
uaaucagugucucacac

SEQ ID NO: 2305121 - RNA, 21 nt, Human
uaaucaugaaauuacuuauca

SEQ ID NO: 2305122 - RNA, 18 nt, Human
uaaucaugaaauuacuua

SEQ ID NO: 2305123 - RNA, 13 nt, Human
uaaucaugaaugu

SEQ ID NO: 2305124 - RNA, 20 nt, Human
uaaucauucuuauuucauga

SEQ ID NO: 2305125 - RNA, 16 nt, Human
uaaucaugaaugugua

SEQ ID NO: 2305126 - RNA, 17 nt, Human
uaaucaugaauguguaa

SEQ ID NO: 2305127 - RNA, 22 nt, Human
uaaucauucuuauuucaugaaa

SEQ ID NO: 2305128 - RNA, 14 nt, Human
uaaucauugccugg

SEQ ID NO: 2305129 - RNA, 15 nt, Human
uaaucauugccuggu

SEQ ID NO: 2305130 - RNA, 20 nt, Human
uaaucuugcucugcuugaca

SEQ ID NO: 2305131 - RNA, 15 nt, Human
uaaucuugcucugcu

SEQ ID NO: 2305132 - RNA, 14 nt, Human
uaaucuugcucugc

SEQ ID NO: 2305133 - RNA, 13 nt, Human
uaauccagcugau

SEQ ID NO: 2305134 - RNA, 22 nt, Human
uaaucuugaauuguaacuguuc

SEQ ID NO: 2305135 - RNA, 14 nt, Human
uaauccagaauaac

SEQ ID NO: 2305136 - RNA, 14 nt, Human
uaaucuucugccuu

SEQ ID NO: 2305137 - RNA, 16 nt, Human
uaaucuugaauuguaa

SEQ ID NO: 2305138 - RNA, 15 nt, Human
uaaucuucugccuuc

SEQ ID NO: 2305139 - RNA, 17 nt, Human
uaaucuuuaauuuuaca

SEQ ID NO: 2305140 - RNA, 13 nt, Human
uaaucuuucacag

SEQ ID NO: 2305141 - RNA, 16 nt, Human
uaauauuccucaguuc

SEQ ID NO: 2305142 - RNA, 16 nt, Human
uaauauugacuuguau

SEQ ID NO: 2305143 - RNA, 18 nt, Human
uaauauugacuuguauau

SEQ ID NO: 2305144 - RNA, 21 nt, Human
uaauagaauauaauuaucgga

SEQ ID NO: 2305145 - RNA, 19 nt, Human
uaauauugagaaagaaacu

SEQ ID NO: 2305146 - RNA, 14 nt, Human
uaauauugagaaag

SEQ ID NO: 2305147 - RNA, 16 nt, Human
uaauauuguggugcca

SEQ ID NO: 2305148 - RNA, 21 nt, Human
uaauauugauaugcuuauaca

SEQ ID NO: 2305149 - RNA, 13 nt, Human
uaaucagccucuu

SEQ ID NO: 2305150 - RNA, 12 nt, Human
uaaucagccucu

SEQ ID NO: 2305151 - RNA, 16 nt, Human
uaauauucauuguaua

SEQ ID NO: 2305152 - RNA, 13 nt, Human
uaauauuuaaaca

SEQ ID NO: 2305153 - RNA, 15 nt, Human
uaaucagccucuuaa

SEQ ID NO: 2305154 - RNA, 14 nt, Human
uaaucagccucuua

SEQ ID NO: 2305155 - RNA, 19 nt, Human
uaaucagggaggucauuuu

SEQ ID NO: 2305156 - RNA, 21 nt, Human
uaauauuuaaacagcaguguu

SEQ ID NO: 2305157 - RNA, 15 nt, Human
uaaucaggcugaggu

SEQ ID NO: 2305158 - RNA, 11 nt, Human
uaaucaguguc

SEQ ID NO: 2305159 - RNA, 15 nt, Human
uaaucagugucucac

SEQ ID NO: 2305160 - RNA, 22 nt, Human
uaaucagguccucagagaauuu

SEQ ID NO: 2305161 - RNA, 19 nt, Human
uaaucagguccucagagaa

SEQ ID NO: 2305162 - RNA, 17 nt, Human
uaaucagugugucuaaa

SEQ ID NO: 2305163 - RNA, 18 nt, Human
uaaucagugugucuaaau

SEQ ID NO: 2305164 - RNA, 15 nt, Human
aaugcaacaacaugu

SEQ ID NO: 2305165 - RNA, 18 nt, Human
aaugcaacaacauguaua

SEQ ID NO: 2305166 - RNA, 16 nt, Human
aaugcaaauccuaugu

SEQ ID NO: 2305167 - RNA, 14 nt, Human
aaugcaacaugugu

SEQ ID NO: 2305168 - RNA, 14 nt, Human
aaugcaauauguau

SEQ ID NO: 2305169 - RNA, 21 nt, Human
aaugcaagauuuuccacaaga

SEQ ID NO: 2305170 - RNA, 16 nt, Human
aaugcaauauuaaugc

SEQ ID NO: 2305171 - RNA, 17 nt, Human
aaugcaagcuaguggcu

SEQ ID NO: 2305172 - RNA, 18 nt, Human
aaugcacaaacagaggcc

SEQ ID NO: 2305173 - RNA, 22 nt, Human
aaugcaaaccaucauugaaauc

SEQ ID NO: 2305174 - RNA, 23 nt, Human
aaugcaaaccaucauugaaaucu

SEQ ID NO: 2305175 - RNA, 16 nt, Human
aaugaccucaagaugu

SEQ ID NO: 2305176 - RNA, 21 nt, Human
aaugaccaguaauugugaaaa

SEQ ID NO: 2305177 - RNA, 16 nt, Human
aaugacccaaagacca

SEQ ID NO: 2305178 - RNA, 18 nt, Human
aaugaccaguaauuguga

SEQ ID NO: 2305179 - RNA, 19 nt, Human
aaugaccaguaauugugaa

SEQ ID NO: 2305180 - RNA, 18 nt, Human
aaugaauccuacacaccu

SEQ ID NO: 2305181 - RNA, 20 nt, Human
aaugaaugucagugugacug

SEQ ID NO: 2305182 - RNA, 21 nt, Human
aaugaaugucagugugacuga

SEQ ID NO: 2305183 - RNA, 13 nt, Human
aaugaccuuucaa

SEQ ID NO: 2305184 - RNA, 14 nt, Human
aaugaccuuucaau

SEQ ID NO: 2305185 - RNA, 15 nt, Human
aaugaccuuucaaua

SEQ ID NO: 2305186 - RNA, 14 nt, Human
aaugcaaaccauca

SEQ ID NO: 2305187 - RNA, 16 nt, Human
aaugcaaaccaucauu

SEQ ID NO: 2305188 - RNA, 20 nt, Human
uaauuaucgggaacaguguu

SEQ ID NO: 2305189 - RNA, 19 nt, Human
uaauuaucgggaacagugu

SEQ ID NO: 2305190 - RNA, 18 nt, Human
uaauuaucgggaacagug

SEQ ID NO: 2305191 - RNA, 21 nt, Human
uaauuaucggaagcagugccu

SEQ ID NO: 2305192 - RNA, 19 nt, Human
uaauuaucggaagcagugc

SEQ ID NO: 2305193 - RNA, 18 nt, Human
uaauuaucggaagcagug

SEQ ID NO: 2305194 - RNA, 17 nt, Human
uaauuaucggaagcagu

SEQ ID NO: 2305195 - RNA, 12 nt, Human
aaugaaugaccu

SEQ ID NO: 2305196 - RNA, 13 nt, Human
uaauuaugacagu

SEQ ID NO: 2305197 - RNA, 21 nt, Human
uaauuaugacaguuauacugu

SEQ ID NO: 2305198 - RNA, 21 nt, Human
uaauuaugccuuuuuugauca

SEQ ID NO: 2305199 - RNA, 23 nt, Human
uaauuaucgggaacaguguuucc

SEQ ID NO: 2305200 - RNA, 21 nt, Human
uaauuaucgggaacaguguuu

SEQ ID NO: 2305201 - RNA, 16 nt, Human
uaauuaucuaaaguau

SEQ ID NO: 2305202 - RNA, 16 nt, Human
uaauucaccaaaguau

SEQ ID NO: 2305203 - RNA, 17 nt, Human
uaauucaccaaaguauu

SEQ ID NO: 2305204 - RNA, 18 nt, Human
uaauucagcacugauuuc

SEQ ID NO: 2305205 - RNA, 18 nt, Human
uaauucaccaaaguauuu

SEQ ID NO: 2305206 - RNA, 19 nt, Human
uaauucagcacugauuuca

SEQ ID NO: 2305207 - RNA, 21 nt, Human
uaauucagcacugauuucaca

SEQ ID NO: 2305208 - RNA, 22 nt, Human
uaauucagcacugauuucacaa

SEQ ID NO: 2305209 - RNA, 23 nt, Human
uaauuaguuccucauuagcauuu

SEQ ID NO: 2305210 - RNA, 21 nt, Human
uaauuagugcuaagugugaac

SEQ ID NO: 2305211 - RNA, 20 nt, Human
uaauuauacccccugcaaag

SEQ ID NO: 2305212 - RNA, 19 nt, Human
aaugcacuuuguucuggcu

SEQ ID NO: 2305213 - RNA, 20 nt, Human
aaugcacuuuguucuggcuc

SEQ ID NO: 2305214 - RNA, 19 nt, Human
aaugcacaaacagaggccg

SEQ ID NO: 2305215 - RNA, 20 nt, Human
aaugcacaaacagaggccgc

SEQ ID NO: 2305216 - RNA, 13 nt, Human
aaugcacuuuguu

SEQ ID NO: 2305217 - RNA, 16 nt, Human
aaugcacuuuguucug

SEQ ID NO: 2305218 - RNA, 22 nt, Human
uaauuugauaguauugugcaua

SEQ ID NO: 2305219 - RNA, 12 nt, Human
uaauuugauauc

SEQ ID NO: 2305220 - RNA, 15 nt, Human
uaauuugagagaaau

SEQ ID NO: 2305221 - RNA, 22 nt, Human
uaauuugaggacaaccauucca

SEQ ID NO: 2305222 - RNA, 18 nt, Human
uaauuugaggacaaccau

SEQ ID NO: 2305223 - RNA, 12 nt, Human
uaauuucuuugc

SEQ ID NO: 2305224 - RNA, 16 nt, Human
uaauuucuuugccugu

SEQ ID NO: 2305225 - RNA, 19 nt, Human
uaauuucuccucccuuccu

SEQ ID NO: 2305226 - RNA, 19 nt, Human
uaauuucuuacuaaacauu

SEQ ID NO: 2305227 - RNA, 17 nt, Human
uaauuucuuugccuguu

SEQ ID NO: 2305228 - RNA, 18 nt, Human
uaauuucuuugccuguuc

SEQ ID NO: 2305229 - RNA, 23 nt, Human
uaauuucuuugccuguucaguua

SEQ ID NO: 2305230 - RNA, 22 nt, Human
uaauuugaaaacauaaucugca

SEQ ID NO: 2305231 - RNA, 22 nt, Human
uaauuuuuguguuuuuaauaaa

SEQ ID NO: 2305232 - RNA, 21 nt, Human
uaauuuuuguauuuuuaguag

SEQ ID NO: 2305233 - RNA, 13 nt, Human
uaauuuuuuacua

SEQ ID NO: 2305234 - RNA, 19 nt, Human
uaauuuuuuagagagcugu

SEQ ID NO: 2305235 - RNA, 12 nt, Human
uaauuugaucuu

SEQ ID NO: 2305236 - RNA, 20 nt, Human
uaauuugcauuaaauucaca

SEQ ID NO: 2305237 - RNA, 14 nt, Human
uaauuugauguuua

SEQ ID NO: 2305238 - RNA, 12 nt, Human
uaauuugcauua

SEQ ID NO: 2305239 - RNA, 19 nt, Human
uaauuugauaucacagucu

SEQ ID NO: 2305240 - RNA, 22 nt, Human
uaauuugauaucacagucuaau

SEQ ID NO: 2305241 - RNA, 17 nt, Human
uaauuugcauuaaauuc

SEQ ID NO: 2305242 - RNA, 16 nt, Human
uaauuugcauuaaauu

SEQ ID NO: 2305243 - RNA, 21 nt, Human
uaauuuaaugcauguuaggaa

SEQ ID NO: 2305244 - RNA, 19 nt, Human
uaauuuacaaaaauauaaa

SEQ ID NO: 2305245 - RNA, 21 nt, Human
uaauuuacaaaaauauaaaau

SEQ ID NO: 2305246 - RNA, 22 nt, Human
uaauuuacaaaaauauaaaaua

SEQ ID NO: 2305247 - RNA, 14 nt, Human
uaauucauguuucu

SEQ ID NO: 2305248 - RNA, 19 nt, Human
uaauucaucccaacugucu

SEQ ID NO: 2305249 - RNA, 14 nt, Human
uaauuuaaugcaug

SEQ ID NO: 2305250 - RNA, 13 nt, Human
uaauucauguugc

SEQ ID NO: 2305251 - RNA, 15 nt, Human
uaauucagcucuuga

SEQ ID NO: 2305252 - RNA, 17 nt, Human
uaauuuccuggugugaa

SEQ ID NO: 2305253 - RNA, 13 nt, Human
uaauuucuccucc

SEQ ID NO: 2305254 - RNA, 14 nt, Human
uaauuucuccuccc

SEQ ID NO: 2305255 - RNA, 17 nt, Human
uaauuuaccugaagucu

SEQ ID NO: 2305256 - RNA, 18 nt, Human
uaauuuaccugaagucuu

SEQ ID NO: 2305257 - RNA, 19 nt, Human
uacaagcccccccuuccac

SEQ ID NO: 2305258 - RNA, 16 nt, Human
uacaagccugcacaau

SEQ ID NO: 2305259 - RNA, 13 nt, Human
uacaaguguauau

SEQ ID NO: 2305260 - RNA, 21 nt, Human
uacaagcgugagccacugcac

SEQ ID NO: 2305261 - RNA, 20 nt, Human
uacaauaaaaucuugaaaau

SEQ ID NO: 2305262 - RNA, 21 nt, Human
uacaaguguauaucagaaaag

SEQ ID NO: 2305263 - RNA, 15 nt, Human
uacaaguuagaaaac

SEQ ID NO: 2305264 - RNA, 13 nt, Human
uacaaguuagaaa

SEQ ID NO: 2305265 - RNA, 14 nt, Human
uacaaguguauauc

SEQ ID NO: 2305266 - RNA, 15 nt, Human
uacaaguguauauca

SEQ ID NO: 2305267 - RNA, 16 nt, Human
uacaagcgugagccac

SEQ ID NO: 2305268 - RNA, 18 nt, Human
uacaagcgugagccacug

SEQ ID NO: 2305269 - RNA, 19 nt, Human
uacaagcgugagccacugc

SEQ ID NO: 2305270 - RNA, 20 nt, Human
uacaagcgugagccacugca

SEQ ID NO: 2305271 - RNA, 14 nt, Human
uacaagcccccccu

SEQ ID NO: 2305272 - RNA, 15 nt, Human
uacaagcccccccuu

SEQ ID NO: 2305273 - RNA, 21 nt, Human
uacaagccauucuaaggaaau

SEQ ID NO: 2305274 - RNA, 21 nt, Human
uacaagcauucugucuugaag

SEQ ID NO: 2305275 - RNA, 18 nt, Human
uacaagccagcuggagaa

SEQ ID NO: 2305276 - RNA, 16 nt, Human
uaauuuuuuucaauau

SEQ ID NO: 2305277 - RNA, 20 nt, Human
uaauuuuuuuauuguuuaaa

SEQ ID NO: 2305278 - RNA, 16 nt, Human
uacaaaaacauggccu

SEQ ID NO: 2305279 - RNA, 14 nt, Human
uaauuuuuuuauug

SEQ ID NO: 2305280 - RNA, 14 nt, Human
uaauuuuuuuaauu

SEQ ID NO: 2305281 - RNA, 15 nt, Human
uaauuuuuuuauugu

SEQ ID NO: 2305282 - RNA, 16 nt, Human
uaauuuuuuuauuguu

SEQ ID NO: 2305283 - RNA, 17 nt, Human
uaauuuuuuuauuguuu

SEQ ID NO: 2305284 - RNA, 18 nt, Human
uaauuuuuuuauuguuua

SEQ ID NO: 2305285 - RNA, 17 nt, Human
uaauuuuuuauucaagu

SEQ ID NO: 2305286 - RNA, 17 nt, Human
uaauuuuuuuaaccaaa

SEQ ID NO: 2305287 - RNA, 20 nt, Human
uaauuuuuuuaaccaaaggu

SEQ ID NO: 2305288 - RNA, 21 nt, Human
uaauuuuuuuaaccaaaggug

SEQ ID NO: 2305289 - RNA, 22 nt, Human
uaauuuuuuuaaccaaagguga

SEQ ID NO: 2305290 - RNA, 18 nt, Human
uacaaaaacacagcaagg

SEQ ID NO: 2305291 - RNA, 17 nt, Human
uacaaaaacacagcaag

SEQ ID NO: 2305292 - RNA, 14 nt, Human
uacccgcagaguuc

SEQ ID NO: 2305293 - RNA, 18 nt, Human
uaccccuuucuggcucuc

SEQ ID NO: 2305294 - RNA, 19 nt, Human
uaccccuuagccucccuga

SEQ ID NO: 2305295 - RNA, 20 nt, Human
uacccgggaagggggcuggg

SEQ ID NO: 2305296 - RNA, 16 nt, Human
uaccccucccagcuga

SEQ ID NO: 2305297 - RNA, 19 nt, Human
uaccccucccagcugacag

SEQ ID NO: 2305298 - RNA, 13 nt, Human
uaccccugaucug

SEQ ID NO: 2305299 - RNA, 17 nt, Human
uaccccgcagacaccuu

SEQ ID NO: 2305300 - RNA, 22 nt, Human
uacccccgcccaggcuggccag

SEQ ID NO: 2305301 - RNA, 23 nt, Human
uacccccuucugggcaucuguuc

SEQ ID NO: 2305302 - RNA, 10 nt, Human
uaccccuccc

SEQ ID NO: 2305303 - RNA, 13 nt, Human
uaccccucccagc

SEQ ID NO: 2305304 - RNA, 14 nt, Human
uaccccucccagcu

SEQ ID NO: 2305305 - RNA, 15 nt, Human
uaccccucccagcug

SEQ ID NO: 2305306 - RNA, 14 nt, Human
uacccucccacccc

SEQ ID NO: 2305307 - RNA, 13 nt, Human
uacccucccaccc

SEQ ID NO: 2305308 - RNA, 15 nt, Human
uacccucauguucuu

SEQ ID NO: 2305309 - RNA, 16 nt, Human
uacccucauguucuua

SEQ ID NO: 2305310 - RNA, 15 nt, Human
uacccucccaccccc

SEQ ID NO: 2305311 - RNA, 11 nt, Human
uacccuccccc

SEQ ID NO: 2305312 - RNA, 11 nt, Human
uacccucccug

SEQ ID NO: 2305313 - RNA, 12 nt, Human
uacccucccugc

SEQ ID NO: 2305314 - RNA, 14 nt, Human
uacccucccugcug

SEQ ID NO: 2305315 - RNA, 15 nt, Human
uacccucccugcugu

SEQ ID NO: 2305316 - RNA, 12 nt, Human
uacccuccuggc

SEQ ID NO: 2305317 - RNA, 15 nt, Human
uacccuccuggcucu

SEQ ID NO: 2305318 - RNA, 17 nt, Human
uacccucccugcugucc

SEQ ID NO: 2305319 - RNA, 18 nt, Human
uacccucccugcuguccc

SEQ ID NO: 2305320 - RNA, 22 nt, Human
uacccucccugcuguccccucu

SEQ ID NO: 2305321 - RNA, 23 nt, Human
uacccucccugcuguccccucuu

SEQ ID NO: 2305322 - RNA, 15 nt, Human
uacccucgggcccac

SEQ ID NO: 2305323 - RNA, 12 nt, Human
uacccuccucca

SEQ ID NO: 2305324 - RNA, 15 nt, Human
uacccuccuguaaau

SEQ ID NO: 2305325 - RNA, 17 nt, Human
uacccucgggcccaccu

SEQ ID NO: 2305326 - RNA, 18 nt, Human
uacccucgggcccaccug

SEQ ID NO: 2305327 - RNA, 20 nt, Human
uacccucgggcccaccuggc

SEQ ID NO: 2305328 - RNA, 21 nt, Human
uacccucgggcccaccuggcc

SEQ ID NO: 2305329 - RNA, 13 nt, Human
uacccucucagcu

SEQ ID NO: 2305330 - RNA, 22 nt, Human
uacccucgggcccaccuggcca

SEQ ID NO: 2305331 - RNA, 23 nt, Human
uacccucgggcccaccuggccac

SEQ ID NO: 2305332 - RNA, 15 nt, Human
uacccucucagcucc

SEQ ID NO: 2305333 - RNA, 16 nt, Human
uacccucucagcucca

SEQ ID NO: 2305334 - RNA, 17 nt, Human
uacccucucagcuccag

SEQ ID NO: 2305335 - RNA, 20 nt, Human
uacccucucagcuccaggug

SEQ ID NO: 2305336 - RNA, 21 nt, Human
uacccucucagcuccaggugg

SEQ ID NO: 2305337 - RNA, 12 nt, Human
uacccucuggag

SEQ ID NO: 2305338 - RNA, 14 nt, Human
uacccucuggaggg

SEQ ID NO: 2305339 - RNA, 22 nt, Human
uacccucuggagggguguggcu

SEQ ID NO: 2305340 - RNA, 22 nt, Human
uacccuggcacuauaauguaag

SEQ ID NO: 2305341 - RNA, 20 nt, Human
uacccuggcacuauaaugua

SEQ ID NO: 2305342 - RNA, 22 nt, Human
uacccucuucauggauggggga

SEQ ID NO: 2305343 - RNA, 20 nt, Human
uacccugcgauuuugccugu

SEQ ID NO: 2305344 - RNA, 18 nt, Human
uacccugagcugaggcag

SEQ ID NO: 2305345 - RNA, 17 nt, Human
uacccugagcugaggca

SEQ ID NO: 2305346 - RNA, 16 nt, Human
uacccugagcugaggc

SEQ ID NO: 2305347 - RNA, 15 nt, Human
uacauuuaauacagc

SEQ ID NO: 2305348 - RNA, 13 nt, Human
uacauuuaauaca

SEQ ID NO: 2305349 - RNA, 16 nt, Human
uacauuuaugauuuaa

SEQ ID NO: 2305350 - RNA, 12 nt, Human
uacauuuaugau

SEQ ID NO: 2305351 - RNA, 14 nt, Human
uacauuuaugauuu

SEQ ID NO: 2305352 - RNA, 19 nt, Human
uacauuuauaauguuugcu

SEQ ID NO: 2305353 - RNA, 20 nt, Human
uacauuuauaguuguaacua

SEQ ID NO: 2305354 - RNA, 23 nt, Human
uacauuguuugucugucuucaua

SEQ ID NO: 2305355 - RNA, 22 nt, Human
uaccagacgguucaccagccuc

SEQ ID NO: 2305356 - RNA, 15 nt, Human
uaccagacuguguau

SEQ ID NO: 2305357 - RNA, 23 nt, Human
uaccagacgguucaccagccucu

SEQ ID NO: 2305358 - RNA, 23 nt, Human
uaccagacuguguauucauugaa

SEQ ID NO: 2305359 - RNA, 21 nt, Human
uaccagacgguucaccagccu

SEQ ID NO: 2305360 - RNA, 17 nt, Human
uaccacuuuuguucuug

SEQ ID NO: 2305361 - RNA, 15 nt, Human
uaccaugaaacaaag

SEQ ID NO: 2305362 - RNA, 20 nt, Human
uaccauaguaccauuuauac

SEQ ID NO: 2305363 - RNA, 18 nt, Human
uaccaucagggacaggau

SEQ ID NO: 2305364 - RNA, 16 nt, Human
uaccccaauuccuugu

SEQ ID NO: 2305365 - RNA, 14 nt, Human
uaccaugaacagaa

SEQ ID NO: 2305366 - RNA, 20 nt, Human
uaccaugaacagaaaacauu

SEQ ID NO: 2305367 - RNA, 20 nt, Human
uaccaugagaagagggccug

SEQ ID NO: 2305368 - RNA, 22 nt, Human
uaccaugagaagagggccugug

SEQ ID NO: 2305369 - RNA, 15 nt, Human
uaccauaauguauuu

SEQ ID NO: 2305370 - RNA, 16 nt, Human
uaccauauacagcuca

SEQ ID NO: 2305371 - RNA, 17 nt, Human
uaccauccccuguagag

SEQ ID NO: 2305372 - RNA, 22 nt, Human
uaccccaccacgauguggcccu

SEQ ID NO: 2305373 - RNA, 17 nt, Human
uaccccaauuccuugua

SEQ ID NO: 2305374 - RNA, 12 nt, Human
uaccccacccuc

SEQ ID NO: 2305375 - RNA, 13 nt, Human
uaccccacccuca

SEQ ID NO: 2305376 - RNA, 14 nt, Human
uaccccacccucag

SEQ ID NO: 2305377 - RNA, 15 nt, Human
uaccccacccucagc

SEQ ID NO: 2305378 - RNA, 22 nt, Human
uaccccacccucagcaccccuu

SEQ ID NO: 2305379 - RNA, 23 nt, Human
uaccccacccucagcaccccuuc

SEQ ID NO: 2305380 - RNA, 16 nt, Human
uacccccuaagagcca

SEQ ID NO: 2305381 - RNA, 17 nt, Human
uacccccuucugggcau

SEQ ID NO: 2305382 - RNA, 17 nt, Human
uacccccgcccaggcug

SEQ ID NO: 2305383 - RNA, 20 nt, Human
uacccccgcccaggcuggcc

SEQ ID NO: 2305384 - RNA, 15 nt, Human
uaccccccucugucu

SEQ ID NO: 2305385 - RNA, 12 nt, Human
uacccccgccca

SEQ ID NO: 2305386 - RNA, 16 nt, Human
uacccccgcccaggcu

SEQ ID NO: 2305387 - RNA, 15 nt, Human
uaccccaucauucau

SEQ ID NO: 2305388 - RNA, 16 nt, Human
uacccccaggguugag

SEQ ID NO: 2305389 - RNA, 17 nt, Human
uaccccccaaccccuga

SEQ ID NO: 2305390 - RNA, 12 nt, Human
aauuaacacugc

SEQ ID NO: 2305391 - RNA, 17 nt, Human
aauuaaauuuugugucu

SEQ ID NO: 2305392 - RNA, 18 nt, Human
aauuaaauuuugugucuc

SEQ ID NO: 2305393 - RNA, 20 nt, Human
aauguugcuuaggaugugug

SEQ ID NO: 2305394 - RNA, 19 nt, Human
aauuaacaugaauauuuag

SEQ ID NO: 2305395 - RNA, 22 nt, Human
aauuaacuuuuauaaacuuuac

SEQ ID NO: 2305396 - RNA, 20 nt, Human
aauuaacuuuuauaaacuuu

SEQ ID NO: 2305397 - RNA, 18 nt, Human
aauuaacuuuuauaaacu

SEQ ID NO: 2305398 - RNA, 23 nt, Human
aaugugaaucagacccuacccca

SEQ ID NO: 2305399 - RNA, 17 nt, Human
aaugugaauaaaauuau

SEQ ID NO: 2305400 - RNA, 17 nt, Human
aaugugaaugggaaaag

SEQ ID NO: 2305401 - RNA, 15 nt, Human
aaugugaccaggggu

SEQ ID NO: 2305402 - RNA, 17 nt, Human
aaugugaccagggguga

SEQ ID NO: 2305403 - RNA, 20 nt, Human
aaugugaacuuuauuaaaua

SEQ ID NO: 2305404 - RNA, 14 nt, Human
aaugugaaguguua

SEQ ID NO: 2305405 - RNA, 17 nt, Human
aaugugaaguguuaaua

SEQ ID NO: 2305406 - RNA, 16 nt, Human
aaugugaauaaaauua

SEQ ID NO: 2305407 - RNA, 15 nt, Human
aaugugaacuuuauu

SEQ ID NO: 2305408 - RNA, 19 nt, Human
aaugugaacagcggcugga

SEQ ID NO: 2305409 - RNA, 13 nt, Human
aaugugaaagcac

SEQ ID NO: 2305410 - RNA, 14 nt, Human
aauguugaauuuug

SEQ ID NO: 2305411 - RNA, 18 nt, Human
aauguugacaugggacau

SEQ ID NO: 2305412 - RNA, 18 nt, Human
aauguugagaaucccaaa

SEQ ID NO: 2305413 - RNA, 19 nt, Human
uacauuguuugucugucuu

SEQ ID NO: 2305414 - RNA, 23 nt, Human
uacauuguugagcuauugcuguu

SEQ ID NO: 2305415 - RNA, 13 nt, Human
uacauuguugagc

SEQ ID NO: 2305416 - RNA, 15 nt, Human
uacauuguucaauua

SEQ ID NO: 2305417 - RNA, 16 nt, Human
uacauugugaaacuuc

SEQ ID NO: 2305418 - RNA, 19 nt, Human
uacauugucucuaaauugu

SEQ ID NO: 2305419 - RNA, 17 nt, Human
uacauugucauuuauau

SEQ ID NO: 2305420 - RNA, 18 nt, Human
uacauugucauuuauaua

SEQ ID NO: 2305421 - RNA, 14 nt, Human
uacauuguucaauu

SEQ ID NO: 2305422 - RNA, 23 nt, Human
uacauugugggauguucagcacu

SEQ ID NO: 2305423 - RNA, 23 nt, Human
uacauuaauuauuauugcuguug

SEQ ID NO: 2305424 - RNA, 22 nt, Human
uacauuaauuauuauugcuguu

SEQ ID NO: 2305425 - RNA, 15 nt, Human
uacauuaauuaucua

SEQ ID NO: 2305426 - RNA, 15 nt, Human
uacauuaauguuaau

SEQ ID NO: 2305427 - RNA, 20 nt, Human
uacauuaauguuaauucagc

SEQ ID NO: 2305428 - RNA, 23 nt, Human
uacauuaauguuaauucagcacu

SEQ ID NO: 2305429 - RNA, 19 nt, Human
uacauuagcaguuugcuuu

SEQ ID NO: 2305430 - RNA, 20 nt, Human
uacauuagcaguuugcuuug

SEQ ID NO: 2305431 - RNA, 12 nt, Human
uacauuaauguu

SEQ ID NO: 2305432 - RNA, 15 nt, Human
uacauguauugcaca

SEQ ID NO: 2305433 - RNA, 12 nt, Human
uacauguauuau

SEQ ID NO: 2305434 - RNA, 22 nt, Human
uacauguauuauuucauuaugu

SEQ ID NO: 2305435 - RNA, 16 nt, Human
uacaugguugugaccu

SEQ ID NO: 2305436 - RNA, 19 nt, Human
uacauguaaaacauuaucu

SEQ ID NO: 2305437 - RNA, 13 nt, Human
uacauguaguagu

SEQ ID NO: 2305438 - RNA, 17 nt, Human
uacauguacugauuacu

SEQ ID NO: 2305439 - RNA, 22 nt, Human
aauuaaggauuuuaugcuuuaa

SEQ ID NO: 2305440 - RNA, 20 nt, Human
aauuaaggauuuuaugcuuu

SEQ ID NO: 2305441 - RNA, 16 nt, Human
aauuaaggauuuuaug

SEQ ID NO: 2305442 - RNA, 13 nt, Human
aauuaaguacuau

SEQ ID NO: 2305443 - RNA, 16 nt, Human
aauuaaggcauaagaa

SEQ ID NO: 2305444 - RNA, 18 nt, Human
uacaccuuucuccuuugu

SEQ ID NO: 2305445 - RNA, 23 nt, Human
uacaccuggcugagguuccucug

SEQ ID NO: 2305446 - RNA, 19 nt, Human
uacaccuuucuccuuugua

SEQ ID NO: 2305447 - RNA, 20 nt, Human
uacaccuuucuccuuuguac

SEQ ID NO: 2305448 - RNA, 13 nt, Human
uacacgggacuga

SEQ ID NO: 2305449 - RNA, 13 nt, Human
uacacggaaaacg

SEQ ID NO: 2305450 - RNA, 12 nt, Human
uacaccuggcug

SEQ ID NO: 2305451 - RNA, 13 nt, Human
uacaccuggcuga

SEQ ID NO: 2305452 - RNA, 14 nt, Human
uacaccuggcugag

SEQ ID NO: 2305453 - RNA, 15 nt, Human
uacaccuggcugagg

SEQ ID NO: 2305454 - RNA, 22 nt, Human
uacaccuggcugagguuccucu

SEQ ID NO: 2305455 - RNA, 21 nt, Human
uacaccuaugucauuucauuu

SEQ ID NO: 2305456 - RNA, 17 nt, Human
uacaccuaugucauuuc

SEQ ID NO: 2305457 - RNA, 14 nt, Human
uacaccuaugucau

SEQ ID NO: 2305458 - RNA, 17 nt, Human
aauguacaucuggccuu

SEQ ID NO: 2305459 - RNA, 17 nt, Human
aauguaaaauguugaau

SEQ ID NO: 2305460 - RNA, 14 nt, Human
aauguaagcuguuu

SEQ ID NO: 2305461 - RNA, 14 nt, Human
aauguacccaguau

SEQ ID NO: 2305462 - RNA, 15 nt, Human
aauguacauuaauua

SEQ ID NO: 2305463 - RNA, 23 nt, Human
aauguacagcaaggagauuuaca

SEQ ID NO: 2305464 - RNA, 21 nt, Human
aauguacagcaaggagauuua

SEQ ID NO: 2305465 - RNA, 23 nt, Human
uacagauuuugauagcaaagcga

SEQ ID NO: 2305466 - RNA, 21 nt, Human
uacagauuuugauagcaaagc

SEQ ID NO: 2305467 - RNA, 22 nt, Human
uacagauuuugauagcaaagcg

SEQ ID NO: 2305468 - RNA, 22 nt, Human
uacagcaaggagauuuacaacu

SEQ ID NO: 2305469 - RNA, 15 nt, Human
uacagauuuugauag

SEQ ID NO: 2305470 - RNA, 16 nt, Human
uacagauuuugauagc

SEQ ID NO: 2305471 - RNA, 17 nt, Human
uacagauuuugauagca

SEQ ID NO: 2305472 - RNA, 18 nt, Human
uacagauuuugauagcaa

SEQ ID NO: 2305473 - RNA, 18 nt, Human
uacagacguaugcuuauu

SEQ ID NO: 2305474 - RNA, 17 nt, Human
uacagacguaugcuuau

SEQ ID NO: 2305475 - RNA, 16 nt, Human
uacagacguaugcuua

SEQ ID NO: 2305476 - RNA, 15 nt, Human
uacagacuucuccag

SEQ ID NO: 2305477 - RNA, 14 nt, Human
uacagacuucucca

SEQ ID NO: 2305478 - RNA, 23 nt, Human
uacagagaacuaacacuauuuua

SEQ ID NO: 2305479 - RNA, 19 nt, Human
uacagagaacuaacacuau

SEQ ID NO: 2305480 - RNA, 22 nt, Human
uacagagaacuaacacuauuuu

SEQ ID NO: 2305481 - RNA, 14 nt, Human
aaugguuugaauau

SEQ ID NO: 2305482 - RNA, 17 nt, Human
aaugguuuaacuucugc

SEQ ID NO: 2305483 - RNA, 13 nt, Human
aaugguuucaaag

SEQ ID NO: 2305484 - RNA, 22 nt, Human
aaugguuuaacuucugccugug

SEQ ID NO: 2305485 - RNA, 24 nt, Human
aaugguuguauuagauguucucua

SEQ ID NO: 2305486 - RNA, 16 nt, Human
aaugguuuaaaugguc

SEQ ID NO: 2305487 - RNA, 18 nt, Human
aaugguuguauuagaugu

SEQ ID NO: 2305488 - RNA, 19 nt, Human
aaugguuguauuagauguu

SEQ ID NO: 2305489 - RNA, 21 nt, Human
aaugguuguauuagauguucu

SEQ ID NO: 2305490 - RNA, 23 nt, Human
aaugguuguauuagauguucucu

SEQ ID NO: 2305491 - RNA, 22 nt, Human
uacaaucauugcugaaaauggu

SEQ ID NO: 2305492 - RNA, 17 nt, Human
uacaaucauugcugaaa

SEQ ID NO: 2305493 - RNA, 23 nt, Human
uacaaucauugcugaaaauggua

SEQ ID NO: 2305494 - RNA, 16 nt, Human
uacaauaaauaaucug

SEQ ID NO: 2305495 - RNA, 15 nt, Human
uacaauaaauaaucu

SEQ ID NO: 2305496 - RNA, 16 nt, Human
uacaauaauucuauga

SEQ ID NO: 2305497 - RNA, 13 nt, Human
uacaauaaauaau

SEQ ID NO: 2305498 - RNA, 21 nt, Human
uacaauaaaacuuugcugcca

SEQ ID NO: 2305499 - RNA, 13 nt, Human
uacaauaacauaa

SEQ ID NO: 2305500 - RNA, 20 nt, Human
uacaaucaaaggaaaauagu

SEQ ID NO: 2305501 - RNA, 16 nt, Human
uacaauauuuaaaauu

SEQ ID NO: 2305502 - RNA, 14 nt, Human
uacaauauuuaaaa

SEQ ID NO: 2305503 - RNA, 12 nt, Human
uacaauauuuaa

SEQ ID NO: 2305504 - RNA, 17 nt, Human
aaugguuugaauauaaa

SEQ ID NO: 2305505 - RNA, 23 nt, Human
aaugguuugaauauaaacacuau

SEQ ID NO: 2305506 - RNA, 22 nt, Human
aaugguuuucuuguguguuuau

SEQ ID NO: 2305507 - RNA, 17 nt, Human
aaugguuuucuugugug

SEQ ID NO: 2305508 - RNA, 18 nt, Human
aaugguuuucuugugugu

SEQ ID NO: 2305509 - RNA, 15 nt, Human
aauguaagcucuacu

SEQ ID NO: 2305510 - RNA, 13 nt, Human
aauguaagcucua

SEQ ID NO: 2305511 - RNA, 13 nt, Human
aauguaagacaaa

SEQ ID NO: 2305512 - RNA, 20 nt, Human
aauguagguaugaauaaguu

SEQ ID NO: 2305513 - RNA, 22 nt, Human
aauguaggcuuaguuugugugu

SEQ ID NO: 2305514 - RNA, 21 nt, Human
aauguagcugguuuccucauu

SEQ ID NO: 2305515 - RNA, 21 nt, Human
aauguaggccaaauuuguagu

SEQ ID NO: 2305516 - RNA, 16 nt, Human
aauguaggcuuaguuu

SEQ ID NO: 2305517 - RNA, 19 nt, Human
aauguaggcuuaguuugug

SEQ ID NO: 2305518 - RNA, 17 nt, Human
aauguagcugguuuccu

SEQ ID NO: 2305519 - RNA, 14 nt, Human
aauguagcugguuu

SEQ ID NO: 2305520 - RNA, 13 nt, Human
aauguagccaugg

SEQ ID NO: 2305521 - RNA, 12 nt, Human
aauguagauuuu

SEQ ID NO: 2305522 - RNA, 12 nt, Human
aauguagagggg

SEQ ID NO: 2305523 - RNA, 12 nt, Human
uacauacugcug

SEQ ID NO: 2305524 - RNA, 23 nt, Human
uacauacuuucauccugacucug

SEQ ID NO: 2305525 - RNA, 13 nt, Human
uacauacugcugu

SEQ ID NO: 2305526 - RNA, 14 nt, Human
uacauagaugcuua

SEQ ID NO: 2305527 - RNA, 20 nt, Human
uacauacaccagcauuccuu

SEQ ID NO: 2305528 - RNA, 16 nt, Human
uacauacaccagcauu

SEQ ID NO: 2305529 - RNA, 15 nt, Human
uacauacaccagcau

SEQ ID NO: 2305530 - RNA, 14 nt, Human
uacauacaccagca

SEQ ID NO: 2305531 - RNA, 22 nt, Human
uacauacccuggccgcccccug

SEQ ID NO: 2305532 - RNA, 17 nt, Human
aauguaucuuauucaca

SEQ ID NO: 2305533 - RNA, 18 nt, Human
aauguaucuuauucacau

SEQ ID NO: 2305534 - RNA, 15 nt, Human
aauguaugcuucaua

SEQ ID NO: 2305535 - RNA, 17 nt, Human
aauguaugcuucauaca

SEQ ID NO: 2305536 - RNA, 16 nt, Human
aauguaugcuucauac

SEQ ID NO: 2305537 - RNA, 13 nt, Human
aauguaucuuauu

SEQ ID NO: 2305538 - RNA, 16 nt, Human
aauguaucuuauucac

SEQ ID NO: 2305539 - RNA, 22 nt, Human
aauguaucauagaaauguaacu

SEQ ID NO: 2305540 - RNA, 18 nt, Human
aauguaucaggaaauaua

SEQ ID NO: 2305541 - RNA, 15 nt, Human
aauguaucaggaaau

SEQ ID NO: 2305542 - RNA, 16 nt, Human
aauguaucauagaaau

SEQ ID NO: 2305543 - RNA, 19 nt, Human
aauguaucauagaaaugua

SEQ ID NO: 2305544 - RNA, 18 nt, Human
aauguaucauagaaaugu

SEQ ID NO: 2305545 - RNA, 14 nt, Human
aaugucacaggcag

SEQ ID NO: 2305546 - RNA, 22 nt, Human
aaugugaaacuggauuaaacuu

SEQ ID NO: 2305547 - RNA, 13 nt, Human
aaugucacaggca

SEQ ID NO: 2305548 - RNA, 14 nt, Human
aauguauuuuuccu

SEQ ID NO: 2305549 - RNA, 13 nt, Human
uacagucugucau

SEQ ID NO: 2305550 - RNA, 16 nt, Human
uacagucugucaugaa

SEQ ID NO: 2305551 - RNA, 17 nt, Human
uacaguccucccaucuc

SEQ ID NO: 2305552 - RNA, 18 nt, Human
uacaguccucccaucuca

SEQ ID NO: 2305553 - RNA, 18 nt, Human
uacaguaucucagggccu

SEQ ID NO: 2305554 - RNA, 20 nt, Human
uacagcaacaauuuaugaau

SEQ ID NO: 2305555 - RNA, 19 nt, Human
uacagcaacaauuuaugaa

SEQ ID NO: 2305556 - RNA, 22 nt, Human
uacagcaacaauuuaugaauug

SEQ ID NO: 2305557 - RNA, 12 nt, Human
uacaguccuccc

SEQ ID NO: 2305558 - RNA, 15 nt, Human
uacaguccucccauc

SEQ ID NO: 2305559 - RNA, 13 nt, Human
uacagucuuguau

SEQ ID NO: 2305560 - RNA, 17 nt, Human
uacagucuugcagcagg

SEQ ID NO: 2305561 - RNA, 15 nt, Human
uacagugaaaaugua

SEQ ID NO: 2305562 - RNA, 20 nt, Human
uacagugaaaauguaagcug

SEQ ID NO: 2305563 - RNA, 14 nt, Human
uacagugagccaag

SEQ ID NO: 2305564 - RNA, 21 nt, Human
uacagugaaaauguaagcugu

SEQ ID NO: 2305565 - RNA, 22 nt, Human
uacagugaaaauguaagcuguu

SEQ ID NO: 2305566 - RNA, 23 nt, Human
uacagugaaaauguaagcuguuu

SEQ ID NO: 2305567 - RNA, 12 nt, Human
uacagugagcca

SEQ ID NO: 2305568 - RNA, 12 nt, Human
uacagucuugua

SEQ ID NO: 2305569 - RNA, 22 nt, Human
uacagucuuccauuugcaaggg

SEQ ID NO: 2305570 - RNA, 20 nt, Human
uacagucuuccauuugcaag

SEQ ID NO: 2305571 - RNA, 19 nt, Human
uacagucuuccauuugcaa

SEQ ID NO: 2305572 - RNA, 18 nt, Human
uacagucuuccauuugca

SEQ ID NO: 2305573 - RNA, 15 nt, Human
uacagucugucauga

SEQ ID NO: 2305574 - RNA, 14 nt, Human
uacagucugucaug

SEQ ID NO: 2305575 - RNA, 11 nt, Human
uacagugguuu

SEQ ID NO: 2305576 - RNA, 16 nt, Human
uacauaaguaauucaa

SEQ ID NO: 2305577 - RNA, 17 nt, Human
uacauaaguaauucaag

SEQ ID NO: 2305578 - RNA, 15 nt, Human
uacauaaguuuagga

SEQ ID NO: 2305579 - RNA, 19 nt, Human
uacauaaguaauucaagaa

SEQ ID NO: 2305580 - RNA, 12 nt, Human
uacauaaucugu

SEQ ID NO: 2305581 - RNA, 15 nt, Human
uacauaaucuguaca

SEQ ID NO: 2305582 - RNA, 20 nt, Human
uacauaaucuguacaaugaa

SEQ ID NO: 2305583 - RNA, 15 nt, Human
uacauaaugcgugca

SEQ ID NO: 2305584 - RNA, 16 nt, Human
aaggguucccucaaga

SEQ ID NO: 2305585 - RNA, 17 nt, Human
aaggguucuggcugccc

SEQ ID NO: 2305586 - RNA, 17 nt, Human
aaggguuuguggcuggg

SEQ ID NO: 2305587 - RNA, 14 nt, Human
aaguaaaaccacag

SEQ ID NO: 2305588 - RNA, 16 nt, Human
aaguaaaaccacagca

SEQ ID NO: 2305589 - RNA, 15 nt, Human
aaguaaaaccacagc

SEQ ID NO: 2305590 - RNA, 20 nt, Human
aaggggcagucuggaggggc

SEQ ID NO: 2305591 - RNA, 19 nt, Human
aaggggcagucuggagggg

SEQ ID NO: 2305592 - RNA, 18 nt, Human
aaggggcagucuggaggg

SEQ ID NO: 2305593 - RNA, 21 nt, Human
aagggugaugggaaagcauug

SEQ ID NO: 2305594 - RNA, 20 nt, Human
aagggugcugcuucccucug

SEQ ID NO: 2305595 - RNA, 13 nt, Human
aagggugucugag

SEQ ID NO: 2305596 - RNA, 23 nt, Human
aagggugcugcuucccucugccu

SEQ ID NO: 2305597 - RNA, 14 nt, Human
aaggguuauauuuu

SEQ ID NO: 2305598 - RNA, 14 nt, Human
aaggguuaagaaaa

SEQ ID NO: 2305599 - RNA, 19 nt, Human
aagggugcugcuucccucu

SEQ ID NO: 2305600 - RNA, 16 nt, Human
aagggugcugcuuccc

SEQ ID NO: 2305601 - RNA, 20 nt, Human
aaggguuuguggcugggggc

SEQ ID NO: 2305602 - RNA, 12 nt, Human
aaguaaaacuug

SEQ ID NO: 2305603 - RNA, 16 nt, Human
aaggguuuuaauguag

SEQ ID NO: 2305604 - RNA, 18 nt, Human
aaguaaaaccacagcagu

SEQ ID NO: 2305605 - RNA, 17 nt, Human
aaguaaaaccacagcag

SEQ ID NO: 2305606 - RNA, 18 nt, Human
guuucuagcacuggccug

SEQ ID NO: 2305607 - RNA, 16 nt, Human
guuucuaccucccaga

SEQ ID NO: 2305608 - RNA, 18 nt, Human
guuucuagcuagaaauau

SEQ ID NO: 2305609 - RNA, 23 nt, Human
guuucuagcuagaaauaugauuu

SEQ ID NO: 2305610 - RNA, 15 nt, Human
guuucuaccucccag

SEQ ID NO: 2305611 - RNA, 12 nt, Human
aaguaaagcuaa

SEQ ID NO: 2305612 - RNA, 21 nt, Human
aaguaaagcuaaaaugauuuu

SEQ ID NO: 2305613 - RNA, 16 nt, Human
aaggcuggcugggcau

SEQ ID NO: 2305614 - RNA, 16 nt, Human
aagggcccagauucua

SEQ ID NO: 2305615 - RNA, 20 nt, Human
aagggcccuucacugccuuu

SEQ ID NO: 2305616 - RNA, 16 nt, Human
aaggggaggcagccgg

SEQ ID NO: 2305617 - RNA, 14 nt, Human
aaggggaggcagcc

SEQ ID NO: 2305618 - RNA, 15 nt, Human
aaggggaggagggcg

SEQ ID NO: 2305619 - RNA, 22 nt, Human
aaggggauguauccaugggggc

SEQ ID NO: 2305620 - RNA, 13 nt, Human
aaggggaggaggg

SEQ ID NO: 2305621 - RNA, 16 nt, Human
aaggggagcccacugu

SEQ ID NO: 2305622 - RNA, 13 nt, Human
aaggggagcccac

SEQ ID NO: 2305623 - RNA, 17 nt, Human
aaggguaucaggugcug

SEQ ID NO: 2305624 - RNA, 17 nt, Human
aaggggcaguggugguu

SEQ ID NO: 2305625 - RNA, 14 nt, Human
aaggggcaguggug

SEQ ID NO: 2305626 - RNA, 19 nt, Human
aaggguaucaggugcugcc

SEQ ID NO: 2305627 - RNA, 16 nt, Human
aaggguaucuggugac

SEQ ID NO: 2305628 - RNA, 20 nt, Human
aaggcugaggaaaggccagc

SEQ ID NO: 2305629 - RNA, 19 nt, Human
aaggcugaggaaaggccag

SEQ ID NO: 2305630 - RNA, 17 nt, Human
aaggcugaggaaaggcc

SEQ ID NO: 2305631 - RNA, 23 nt, Human
aaggcugaugccaaguuguuuga

SEQ ID NO: 2305632 - RNA, 16 nt, Human
aaggcugaugucaauu

SEQ ID NO: 2305633 - RNA, 23 nt, Human
aaggcugaggaaaggccagcugg

SEQ ID NO: 2305634 - RNA, 14 nt, Human
aaggcugcgucugg

SEQ ID NO: 2305635 - RNA, 16 nt, Human
aaggcugcgucuggag

SEQ ID NO: 2305636 - RNA, 19 nt, Human
aaggcugcgucuggagggg

SEQ ID NO: 2305637 - RNA, 15 nt, Human
aaggcugcuuagaau

SEQ ID NO: 2305638 - RNA, 18 nt, Human
aaggcuggagugcagugg

SEQ ID NO: 2305639 - RNA, 15 nt, Human
aagggcccagagagg

SEQ ID NO: 2305640 - RNA, 13 nt, Human
aagggcccagaga

SEQ ID NO: 2305641 - RNA, 20 nt, Human
guuguaaauauuuauguaaa

SEQ ID NO: 2305642 - RNA, 14 nt, Human
guuguaaauauuua

SEQ ID NO: 2305643 - RNA, 16 nt, Human
guuguaaauauauaaa

SEQ ID NO: 2305644 - RNA, 18 nt, Human
guuguaaauauauaaaua

SEQ ID NO: 2305645 - RNA, 14 nt, Human
guuguaaauauaua

SEQ ID NO: 2305646 - RNA, 15 nt, Human
guuguaaauauauaa

SEQ ID NO: 2305647 - RNA, 13 nt, Human
guuguaaaauaua

SEQ ID NO: 2305648 - RNA, 14 nt, Human
guuguaaaauauag

SEQ ID NO: 2305649 - RNA, 22 nt, Human
guuguaaaauauagcuguacaa

SEQ ID NO: 2305650 - RNA, 16 nt, Human
guuguaaacaggaagc

SEQ ID NO: 2305651 - RNA, 19 nt, Human
aaggcugaccaagagagaa

SEQ ID NO: 2305652 - RNA, 21 nt, Human
guuguaacuaggcucagagau

SEQ ID NO: 2305653 - RNA, 19 nt, Human
aaggcugagaggagagaga

SEQ ID NO: 2305654 - RNA, 13 nt, Human
guuguaacuaggc

SEQ ID NO: 2305655 - RNA, 18 nt, Human
guuguaacuaggcucaga

SEQ ID NO: 2305656 - RNA, 19 nt, Human
guuguaacuaggcucagag

SEQ ID NO: 2305657 - RNA, 23 nt, Human
guuuuauacuguacuuaauaaau

SEQ ID NO: 2305658 - RNA, 15 nt, Human
guuuuauacugaagg

SEQ ID NO: 2305659 - RNA, 21 nt, Human
guuuuauacugaaggaaaaac

SEQ ID NO: 2305660 - RNA, 18 nt, Human
guuuuauacuguacuuaa

SEQ ID NO: 2305661 - RNA, 15 nt, Human
guuuucugagaaaga

SEQ ID NO: 2305662 - RNA, 15 nt, Human
guuuuauaauuuugu

SEQ ID NO: 2305663 - RNA, 22 nt, Human
guuuuauaauuuugugaagcaa

SEQ ID NO: 2305664 - RNA, 18 nt, Human
guuuuacugcagcuuugu

SEQ ID NO: 2305665 - RNA, 16 nt, Human
guuuuacugcagcuuu

SEQ ID NO: 2305666 - RNA, 21 nt, Human
guuuuacuuuuaaacugugua

SEQ ID NO: 2305667 - RNA, 18 nt, Human
guuuuacuuuuaaacugu

SEQ ID NO: 2305668 - RNA, 13 nt, Human
guuuuacuuuuaa

SEQ ID NO: 2305669 - RNA, 15 nt, Human
guuuuacugcagcuu

SEQ ID NO: 2305670 - RNA, 14 nt, Human
guuuuacugugaaa

SEQ ID NO: 2305671 - RNA, 14 nt, Human
guuuuaagaggcag

SEQ ID NO: 2305672 - RNA, 22 nt, Human
guuuggcugugucuaaacugca

SEQ ID NO: 2305673 - RNA, 20 nt, Human
guuuggcugugucuaaacug

SEQ ID NO: 2305674 - RNA, 21 nt, Human
guuuggcugugucuaaacugc

SEQ ID NO: 2305675 - RNA, 15 nt, Human
guuuggcugugucua

SEQ ID NO: 2305676 - RNA, 17 nt, Human
guuuggcugugucuaaa

SEQ ID NO: 2305677 - RNA, 18 nt, Human
guuuggcugugucuaaac

SEQ ID NO: 2305678 - RNA, 19 nt, Human
guuuggcugugucuaaacu

SEQ ID NO: 2305679 - RNA, 18 nt, Human
guuuuaaggaugcuugua

SEQ ID NO: 2305680 - RNA, 16 nt, Human
guuuuaagaggcaggg

SEQ ID NO: 2305681 - RNA, 21 nt, Human
guuuggcgggccaaggacugc

SEQ ID NO: 2305682 - RNA, 18 nt, Human
guuuggcgggccaaggac

SEQ ID NO: 2305683 - RNA, 16 nt, Human
guuuggcgggccaagg

SEQ ID NO: 2305684 - RNA, 15 nt, Human
guuuggccaucucug

SEQ ID NO: 2305685 - RNA, 17 nt, Human
guuugcucaccuggggu

SEQ ID NO: 2305686 - RNA, 20 nt, Human
guuugcuaucuuaauuuugg

SEQ ID NO: 2305687 - RNA, 17 nt, Human
guuugcuauuagagcau

SEQ ID NO: 2305688 - RNA, 20 nt, Human
guuuggauucuuauguagca

SEQ ID NO: 2305689 - RNA, 15 nt, Human
guuuggcaauaguuu

SEQ ID NO: 2305690 - RNA, 17 nt, Human
guuuggcaauaguuugc

SEQ ID NO: 2305691 - RNA, 19 nt, Human
guuuggcaauaguuugcau

SEQ ID NO: 2305692 - RNA, 13 nt, Human
guuucucugcugu

SEQ ID NO: 2305693 - RNA, 12 nt, Human
guuucucugcug

SEQ ID NO: 2305694 - RNA, 20 nt, Human
guuucucccucucacugucu

SEQ ID NO: 2305695 - RNA, 22 nt, Human
guuucucccucucacugucuga

SEQ ID NO: 2305696 - RNA, 22 nt, Human
guuucugccgcagcccugcaga

SEQ ID NO: 2305697 - RNA, 18 nt, Human
guuucugccgcagcccug

SEQ ID NO: 2305698 - RNA, 16 nt, Human
guuucugccucugagg

SEQ ID NO: 2305699 - RNA, 14 nt, Human
guuucuggucucua

SEQ ID NO: 2305700 - RNA, 18 nt, Human
guuucugguggucuguug

SEQ ID NO: 2305701 - RNA, 21 nt, Human
guuucugguggucuguuggca

SEQ ID NO: 2305702 - RNA, 23 nt, Human
guuucucccccugggcucugccc

SEQ ID NO: 2305703 - RNA, 22 nt, Human
guuucucccccugggcucugcc

SEQ ID NO: 2305704 - RNA, 17 nt, Human
guuucucccccugggcu

SEQ ID NO: 2305705 - RNA, 15 nt, Human
guuucucccccuggg

SEQ ID NO: 2305706 - RNA, 14 nt, Human
guuucucccccugg

SEQ ID NO: 2305707 - RNA, 18 nt, Human
guuucuccaaacugaagc

SEQ ID NO: 2305708 - RNA, 19 nt, Human
guuucucagcucccauuuc

SEQ ID NO: 2305709 - RNA, 18 nt, Human
guuucuagggaaaugaaa

SEQ ID NO: 2305710 - RNA, 15 nt, Human
guuucuagggaaaug

SEQ ID NO: 2305711 - RNA, 21 nt, Human
guuucucagauccuuguuuca

SEQ ID NO: 2305712 - RNA, 15 nt, Human
guuucucagcuccca

SEQ ID NO: 2305713 - RNA, 14 nt, Human
guuucucagcuccc

SEQ ID NO: 2305714 - RNA, 17 nt, Human
guuugccucugccucug

SEQ ID NO: 2305715 - RNA, 19 nt, Human
guuugcaucugaaaauuga

SEQ ID NO: 2305716 - RNA, 14 nt, Human
guuugccugagggc

SEQ ID NO: 2305717 - RNA, 16 nt, Human
guuugcuaucuuaauu

SEQ ID NO: 2305718 - RNA, 18 nt, Human
guuugcuaucuuaauuuu

SEQ ID NO: 2305719 - RNA, 18 nt, Human
guuugccuucuacuuuua

SEQ ID NO: 2305720 - RNA, 13 nt, Human
guuugcuaaguga

SEQ ID NO: 2305721 - RNA, 20 nt, Human
guuugcagagcuugaacaca

SEQ ID NO: 2305722 - RNA, 21 nt, Human
guuugcagaaaagcaccugcc

SEQ ID NO: 2305723 - RNA, 22 nt, Human
guuugcacuguaugcuggacgg

SEQ ID NO: 2305724 - RNA, 19 nt, Human
guuugcagaaaagcaccug

SEQ ID NO: 2305725 - RNA, 22 nt, Human
guuugcagaaaagcaccugccg

SEQ ID NO: 2305726 - RNA, 16 nt, Human
guuugcagaugacaaa

SEQ ID NO: 2305727 - RNA, 14 nt, Human
guuugcauagguga

SEQ ID NO: 2305728 - RNA, 20 nt, Human
guuugcacuguaugcuggac

SEQ ID NO: 2305729 - RNA, 19 nt, Human
guuugcacuguaugcugga

SEQ ID NO: 2305730 - RNA, 20 nt, Human
guuucuggucucuaggcugg

SEQ ID NO: 2305731 - RNA, 23 nt, Human
guuugcacguuaugguguuucuc

SEQ ID NO: 2305732 - RNA, 19 nt, Human
guuuuuuuguauaguaaag

SEQ ID NO: 2305733 - RNA, 19 nt, Human
guuuuuuucuucuguauuu

SEQ ID NO: 2305734 - RNA, 20 nt, Human
guuuuuuuuaaauaaaagca

SEQ ID NO: 2305735 - RNA, 17 nt, Human
guuuuuuuucuaaaacu

SEQ ID NO: 2305736 - RNA, 13 nt, Human
guuuuuuuucuaa

SEQ ID NO: 2305737 - RNA, 18 nt, Human
guuuuuuuuaaauaaaag

SEQ ID NO: 2305738 - RNA, 15 nt, Human
guuuuuuuuuaaaga

SEQ ID NO: 2305739 - RNA, 23 nt, Human
guuuuuuuuuaaaaaagaaacau

SEQ ID NO: 2305740 - RNA, 19 nt, Human
guuuuuuagaucaaauacu

SEQ ID NO: 2305741 - RNA, 15 nt, Human
guuuuuuaugcuaau

SEQ ID NO: 2305742 - RNA, 21 nt, Human
guuuuuuaaaauauuuaucug

SEQ ID NO: 2305743 - RNA, 16 nt, Human
guuuuuuagaucaaau

SEQ ID NO: 2305744 - RNA, 21 nt, Human
guuuuuuccugagcuuggcca

SEQ ID NO: 2305745 - RNA, 14 nt, Human
guuuuuuccugagc

SEQ ID NO: 2305746 - RNA, 12 nt, Human
guuuuuugaaaa

SEQ ID NO: 2305747 - RNA, 9 nt, Human
guuuuuugg

SEQ ID NO: 2305748 - RNA, 10 nt, Human
guuuuuuggu

SEQ ID NO: 2305749 - RNA, 16 nt, Human
guuuuugucuuaaaaa

SEQ ID NO: 2305750 - RNA, 21 nt, Human
guuuuuguaaauuaaucuuuu

SEQ ID NO: 2305751 - RNA, 14 nt, Human
guuuuuguacugua

SEQ ID NO: 2305752 - RNA, 15 nt, Human
guuuuuguaaagugu

SEQ ID NO: 2305753 - RNA, 16 nt, Human
guuuuuguaaagugug

SEQ ID NO: 2305754 - RNA, 14 nt, Human
guuuuuguaaauua

SEQ ID NO: 2305755 - RNA, 15 nt, Human
guuuuuguucaaagc

SEQ ID NO: 2305756 - RNA, 23 nt, Human
guuuuuguucuuaauugcacucu

SEQ ID NO: 2305757 - RNA, 17 nt, Human
guuuuuguuuggagagc

SEQ ID NO: 2305758 - RNA, 18 nt, Human
guuuuugguuuuuaaaac

SEQ ID NO: 2305759 - RNA, 15 nt, Human
guuuuugcacauguu

SEQ ID NO: 2305760 - RNA, 17 nt, Human
guuuuucugcuuuugaa

SEQ ID NO: 2305761 - RNA, 16 nt, Human
guuuuucuggguggcc

SEQ ID NO: 2305762 - RNA, 14 nt, Human
guuuuucugccagg

SEQ ID NO: 2305763 - RNA, 17 nt, Human
guuuuucugccagggag

SEQ ID NO: 2305764 - RNA, 18 nt, Human
guuuuucuaggccugggg

SEQ ID NO: 2305765 - RNA, 18 nt, Human
aagugagaauaggcagcc

SEQ ID NO: 2305766 - RNA, 21 nt, Human
aagugacuuagcagaugcugg

SEQ ID NO: 2305767 - RNA, 19 nt, Human
guuuuucuacuuuuaaaga

SEQ ID NO: 2305768 - RNA, 15 nt, Human
aagugagaagauggu

SEQ ID NO: 2305769 - RNA, 19 nt, Human
aagugacuguucaagagca

SEQ ID NO: 2305770 - RNA, 19 nt, Human
aagugacuuagcagaugcu

SEQ ID NO: 2305771 - RNA, 19 nt, Human
aagugacuuuggcugcaug

SEQ ID NO: 2305772 - RNA, 23 nt, Human
aagugaauuugaaugaaaaauuu

SEQ ID NO: 2305773 - RNA, 20 nt, Human
aagugaauuugaaugaaaaa

SEQ ID NO: 2305774 - RNA, 19 nt, Human
aagugaauuugaaugaaaa

SEQ ID NO: 2305775 - RNA, 17 nt, Human
aagugaauuugaaugaa

SEQ ID NO: 2305776 - RNA, 16 nt, Human
aagugaauuugaauga

SEQ ID NO: 2305777 - RNA, 14 nt, Human
aagugaauuugaau

SEQ ID NO: 2305778 - RNA, 19 nt, Human
aagucaugcaaaggcuggg

SEQ ID NO: 2305779 - RNA, 18 nt, Human
aagugaaugcucaaguuu

SEQ ID NO: 2305780 - RNA, 19 nt, Human
aagugaauuuuucucuaac

SEQ ID NO: 2305781 - RNA, 17 nt, Human
aagugaauuuuucucua

SEQ ID NO: 2305782 - RNA, 14 nt, Human
aagugaauuuuucu

SEQ ID NO: 2305783 - RNA, 21 nt, Human
aagugacaaggccccagagac

SEQ ID NO: 2305784 - RNA, 20 nt, Human
aagugacaaggccccagaga

SEQ ID NO: 2305785 - RNA, 24 nt, Human
aagugacacagcagcuucaccaga

SEQ ID NO: 2305786 - RNA, 12 nt, Human
aagugacaggga

SEQ ID NO: 2305787 - RNA, 19 nt, Human
aagugacaaggccccagag

SEQ ID NO: 2305788 - RNA, 18 nt, Human
aagugacaaggccccaga

SEQ ID NO: 2305789 - RNA, 16 nt, Human
aagugacaaggcccca

SEQ ID NO: 2305790 - RNA, 22 nt, Human
aagugacagggaagcuacaggu

SEQ ID NO: 2305791 - RNA, 23 nt, Human
aagugacagggaagcuacagguu

SEQ ID NO: 2305792 - RNA, 15 nt, Human
aagugacagggaagc

SEQ ID NO: 2305793 - RNA, 16 nt, Human
aagugacagggaagcu

SEQ ID NO: 2305794 - RNA, 19 nt, Human
aagugacagggaagcuaca

SEQ ID NO: 2305795 - RNA, 20 nt, Human
aagugacagggaagcuacag

SEQ ID NO: 2305796 - RNA, 11 nt, Human
aagucaugagc

SEQ ID NO: 2305797 - RNA, 15 nt, Human
aagucauccaaucua

SEQ ID NO: 2305798 - RNA, 23 nt, Human
aagucaugaagcccaagugaaau

SEQ ID NO: 2305799 - RNA, 17 nt, Human
aagucaugaagcccaag

SEQ ID NO: 2305800 - RNA, 15 nt, Human
aagucaugaagccca

SEQ ID NO: 2305801 - RNA, 17 nt, Human
aagucuuagauguauau

SEQ ID NO: 2305802 - RNA, 17 nt, Human
aagucaugcaaaggcug

SEQ ID NO: 2305803 - RNA, 15 nt, Human
aagugaaugcuggga

SEQ ID NO: 2305804 - RNA, 19 nt, Human
aagucuuagauguauauau

SEQ ID NO: 2305805 - RNA, 18 nt, Human
aagucuuagauguauaua

SEQ ID NO: 2305806 - RNA, 15 nt, Human
aaguacuauguauca

SEQ ID NO: 2305807 - RNA, 22 nt, Human
guuuucugagaaagacuauuca

SEQ ID NO: 2305808 - RNA, 17 nt, Human
guuuucugagaaagacu

SEQ ID NO: 2305809 - RNA, 16 nt, Human
guuuucugagaaagac

SEQ ID NO: 2305810 - RNA, 16 nt, Human
aaguacuauguaucaa

SEQ ID NO: 2305811 - RNA, 23 nt, Human
aaguacugcuguaaauaaaugcu

SEQ ID NO: 2305812 - RNA, 20 nt, Human
aaguacugcuguaaauaaau

SEQ ID NO: 2305813 - RNA, 17 nt, Human
aaguacugcuguaaaua

SEQ ID NO: 2305814 - RNA, 21 nt, Human
aaguacuucuccacccugcuc

SEQ ID NO: 2305815 - RNA, 15 nt, Human
aaguacuggagaaaa

SEQ ID NO: 2305816 - RNA, 22 nt, Human
aaguacuucuccacccugcucu

SEQ ID NO: 2305817 - RNA, 23 nt, Human
aaguacuucuccacccugcucuc

SEQ ID NO: 2305818 - RNA, 23 nt, Human
aaguauguuagugcaaauuguca

SEQ ID NO: 2305819 - RNA, 21 nt, Human
aaguauguuagugcaaauugu

SEQ ID NO: 2305820 - RNA, 16 nt, Human
aaguauguuuuagcau

SEQ ID NO: 2305821 - RNA, 15 nt, Human
aaguauuauuuucca

SEQ ID NO: 2305822 - RNA, 19 nt, Human
aagucacaucacaggacac

SEQ ID NO: 2305823 - RNA, 17 nt, Human
aagucacaucacaggac

SEQ ID NO: 2305824 - RNA, 16 nt, Human
aagucacaucacagga

SEQ ID NO: 2305825 - RNA, 13 nt, Human
aagucacacagug

SEQ ID NO: 2305826 - RNA, 18 nt, Human
aagucaauguuuucaguu

SEQ ID NO: 2305827 - RNA, 18 nt, Human
aagucagugggaacguga

SEQ ID NO: 2305828 - RNA, 23 nt, Human
aagucaguccaggaugcuaacau

SEQ ID NO: 2305829 - RNA, 21 nt, Human
aagucagugcccaacuguuau

SEQ ID NO: 2305830 - RNA, 20 nt, Human
aagucagugcccaacuguua

SEQ ID NO: 2305831 - RNA, 12 nt, Human
aagucacugcac

SEQ ID NO: 2305832 - RNA, 14 nt, Human
aagucaccggagcu

SEQ ID NO: 2305833 - RNA, 23 nt, Human
aagucacucccaagcccccuccu

SEQ ID NO: 2305834 - RNA, 18 nt, Human
aagucaccggagcuuuca

SEQ ID NO: 2305835 - RNA, 17 nt, Human
aagucacucccaagccc

SEQ ID NO: 2305836 - RNA, 21 nt, Human
aagucaagugaaaaaggagga

SEQ ID NO: 2305837 - RNA, 24 nt, Human
aagucacacaguauuacuucugcu

SEQ ID NO: 2305838 - RNA, 19 nt, Human
aagucaaggguaggguggg

SEQ ID NO: 2305839 - RNA, 17 nt, Human
aagucaauguuuucagu

SEQ ID NO: 2305840 - RNA, 16 nt, Human
aagucaaccaauguag

SEQ ID NO: 2305841 - RNA, 22 nt, Human
aagucaaccaauguagaaagcu

SEQ ID NO: 2305842 - RNA, 16 nt, Human
aagucaaccugccuga

SEQ ID NO: 2305843 - RNA, 21 nt, Human
aaguauucuguacucuuagau

SEQ ID NO: 2305844 - RNA, 19 nt, Human
aaguauucuuauuuaauga

SEQ ID NO: 2305845 - RNA, 18 nt, Human
aaguauucuuauuuaaug

SEQ ID NO: 2305846 - RNA, 17 nt, Human
aaggccuggcccacagc

SEQ ID NO: 2305847 - RNA, 16 nt, Human
aaggccucuuccuugc

SEQ ID NO: 2305848 - RNA, 15 nt, Human
aaggccuuaauaugu

SEQ ID NO: 2305849 - RNA, 11 nt, Human
aaggccuuuaa

SEQ ID NO: 2305850 - RNA, 12 nt, Human
aaggccuucucc

SEQ ID NO: 2305851 - RNA, 15 nt, Human
aaggccuucuccucc

SEQ ID NO: 2305852 - RNA, 15 nt, Human
aaggccuuuaaaauu

SEQ ID NO: 2305853 - RNA, 16 nt, Human
aaggccuuuaaaauuu

SEQ ID NO: 2305854 - RNA, 17 nt, Human
aaggccuuuaaaauuuu

SEQ ID NO: 2305855 - RNA, 14 nt, Human
aaggccuuucugug

SEQ ID NO: 2305856 - RNA, 23 nt, Human
aaggcgaucccaucuugauaaga

SEQ ID NO: 2305857 - RNA, 18 nt, Human
aaggcgggagcaucucuu

SEQ ID NO: 2305858 - RNA, 13 nt, Human
aaggcggccccuc

SEQ ID NO: 2305859 - RNA, 14 nt, Human
aaggcguggagcug

SEQ ID NO: 2305860 - RNA, 13 nt, Human
aaggcuaccuuug

SEQ ID NO: 2305861 - RNA, 14 nt, Human
guugcccaggcugg

SEQ ID NO: 2305862 - RNA, 15 nt, Human
aaggcuaccuuugua

SEQ ID NO: 2305863 - RNA, 14 nt, Human
aaggcccccuacgc

SEQ ID NO: 2305864 - RNA, 19 nt, Human
aaggccccgcccaggcuua

SEQ ID NO: 2305865 - RNA, 14 nt, Human
aaggccccgcccag

SEQ ID NO: 2305866 - RNA, 16 nt, Human
aaggccccgcccaggc

SEQ ID NO: 2305867 - RNA, 15 nt, Human
aaggccccagagacu

SEQ ID NO: 2305868 - RNA, 22 nt, Human
aaggaugccaagaaguuuaagg

SEQ ID NO: 2305869 - RNA, 19 nt, Human
aaggaugcccaaagaugca

SEQ ID NO: 2305870 - RNA, 14 nt, Human
aaggaugcccaaag

SEQ ID NO: 2305871 - RNA, 22 nt, Human
aaggaugcacagaguuguuaca

SEQ ID NO: 2305872 - RNA, 20 nt, Human
aaggaugccaagaaguuuaa

SEQ ID NO: 2305873 - RNA, 20 nt, Human
aaggaucuuuguggccaagg

SEQ ID NO: 2305874 - RNA, 18 nt, Human
aaggaucuuuguggccaa

SEQ ID NO: 2305875 - RNA, 24 nt, Human
aaggaugcacagaguuguuacauu

SEQ ID NO: 2305876 - RNA, 21 nt, Human
guugggguggguauaaaagau

SEQ ID NO: 2305877 - RNA, 16 nt, Human
guuggggucuggcagc

SEQ ID NO: 2305878 - RNA, 19 nt, Human
guugguuccaagcccugga

SEQ ID NO: 2305879 - RNA, 23 nt, Human
guugggguggguauaaaagaugg

SEQ ID NO: 2305880 - RNA, 18 nt, Human
guugguuccaagcccugg

SEQ ID NO: 2305881 - RNA, 17 nt, Human
guugggcuggugucacc

SEQ ID NO: 2305882 - RNA, 21 nt, Human
guugggagaaugucaguaugu

SEQ ID NO: 2305883 - RNA, 14 nt, Human
guugggagaauguc

SEQ ID NO: 2305884 - RNA, 17 nt, Human
guugggaaugaggcuug

SEQ ID NO: 2305885 - RNA, 14 nt, Human
guugggaagacaug

SEQ ID NO: 2305886 - RNA, 19 nt, Human
guugggaaugaggcuugcu

SEQ ID NO: 2305887 - RNA, 21 nt, Human
guugggaaugaggcuugcuga

SEQ ID NO: 2305888 - RNA, 15 nt, Human
guugcccaggcuggc

SEQ ID NO: 2305889 - RNA, 16 nt, Human
aaggcuaaaacuuaac

SEQ ID NO: 2305890 - RNA, 19 nt, Human
aaggcguggagcugccuga

SEQ ID NO: 2305891 - RNA, 16 nt, Human
aaggcguggagcugcc

SEQ ID NO: 2305892 - RNA, 18 nt, Human
aaggcguggagcugccug

SEQ ID NO: 2305893 - RNA, 16 nt, Human
guugcccaggcuggcg

SEQ ID NO: 2305894 - RNA, 22 nt, Human
guugcuaagaagcgagcacuga

SEQ ID NO: 2305895 - RNA, 20 nt, Human
guugcucaaaucuauucaga

SEQ ID NO: 2305896 - RNA, 18 nt, Human
guugcucaaaaaaugagc

SEQ ID NO: 2305897 - RNA, 17 nt, Human
guugcuaagccccagca

SEQ ID NO: 2305898 - RNA, 22 nt, Human
guugcuaagccccagcaagcaa

SEQ ID NO: 2305899 - RNA, 22 nt, Human
guugcuccgccucugcuggcac

SEQ ID NO: 2305900 - RNA, 20 nt, Human
guugcuccgccucugcuggc

SEQ ID NO: 2305901 - RNA, 18 nt, Human
guugcuccgccucugcug

SEQ ID NO: 2305902 - RNA, 22 nt, Human
guugcucagucucccuuucccu

SEQ ID NO: 2305903 - RNA, 13 nt, Human
guugcugaauagg

SEQ ID NO: 2305904 - RNA, 23 nt, Human
guuggcugggggccucagugcca

SEQ ID NO: 2305905 - RNA, 23 nt, Human
guugcugaugaacucuuaaucaa

SEQ ID NO: 2305906 - RNA, 16 nt, Human
aaggagacucaccucu

SEQ ID NO: 2305907 - RNA, 23 nt, Human
aaggagacucaccucugccucaa

SEQ ID NO: 2305908 - RNA, 22 nt, Human
aaggagacucaccucugccuca

SEQ ID NO: 2305909 - RNA, 20 nt, Human
aaggagacucaccucugccu

SEQ ID NO: 2305910 - RNA, 17 nt, Human
aaggagacucaccucug

SEQ ID NO: 2305911 - RNA, 11 nt, Human
aaggagagaaa

SEQ ID NO: 2305912 - RNA, 12 nt, Human
aaggagagaaag

SEQ ID NO: 2305913 - RNA, 14 nt, Human
aaggagagaaagug

SEQ ID NO: 2305914 - RNA, 12 nt, Human
aaggagacacaa

SEQ ID NO: 2305915 - RNA, 21 nt, Human
aaggaagucaaagcaaggaaa

SEQ ID NO: 2305916 - RNA, 16 nt, Human
aaggaagguuuucucc

SEQ ID NO: 2305917 - RNA, 17 nt, Human
aaggaagguuuucucca

SEQ ID NO: 2305918 - RNA, 16 nt, Human
aaggaagguucuggug

SEQ ID NO: 2305919 - RNA, 18 nt, Human
aaggaagguggauggccc

SEQ ID NO: 2305920 - RNA, 13 nt, Human
aaggagagccugc

SEQ ID NO: 2305921 - RNA, 16 nt, Human
aaggagagaaaguggg

SEQ ID NO: 2305922 - RNA, 18 nt, Human
aaggagagaaggggagga

SEQ ID NO: 2305923 - RNA, 18 nt, Human
aaggagauuuacaacugg

SEQ ID NO: 2305924 - RNA, 14 nt, Human
aaggagagccugcu

SEQ ID NO: 2305925 - RNA, 18 nt, Human
aaggagauuuuccuuccu

SEQ ID NO: 2305926 - RNA, 17 nt, Human
aaggagauuuacaacug

SEQ ID NO: 2305927 - RNA, 22 nt, Human
aaggagcaagucagaauagaaa

SEQ ID NO: 2305928 - RNA, 16 nt, Human
aaggaaggaaagaaag

SEQ ID NO: 2305929 - RNA, 13 nt, Human
aaggaaggaaaga

SEQ ID NO: 2305930 - RNA, 12 nt, Human
aaggaaggaaag

SEQ ID NO: 2305931 - RNA, 20 nt, Human
aaggaaaccacagcugcugg

SEQ ID NO: 2305932 - RNA, 15 nt, Human
aaggaaaccagugca

SEQ ID NO: 2305933 - RNA, 11 nt, Human
aaggaaggaaa

SEQ ID NO: 2305934 - RNA, 16 nt, Human
aaggaaacccagcucu

SEQ ID NO: 2305935 - RNA, 22 nt, Human
aaggaaggagacucaccucugc

SEQ ID NO: 2305936 - RNA, 20 nt, Human
aaggaaggagacucaccucu

SEQ ID NO: 2305937 - RNA, 21 nt, Human
aaggaaggcucuucuccccag

SEQ ID NO: 2305938 - RNA, 22 nt, Human
aaggaagggcauccuucugccu

SEQ ID NO: 2305939 - RNA, 12 nt, Human
aaggaaggugga

SEQ ID NO: 2305940 - RNA, 17 nt, Human
aaggaagguggauggcc

SEQ ID NO: 2305941 - RNA, 15 nt, Human
aaggaaacccagcuc

SEQ ID NO: 2305942 - RNA, 19 nt, Human
guugaucuggaacccagac

SEQ ID NO: 2305943 - RNA, 13 nt, Human
aaggaaaaugauc

SEQ ID NO: 2305944 - RNA, 14 nt, Human
aaggaaaaugaucu

SEQ ID NO: 2305945 - RNA, 16 nt, Human
aaggaaaccacagcug

SEQ ID NO: 2305946 - RNA, 17 nt, Human
aaggaaaccacagcugc

SEQ ID NO: 2305947 - RNA, 18 nt, Human
aaggaaaccacagcugcu

SEQ ID NO: 2305948 - RNA, 17 nt, Human
guugaucuggaacccag

SEQ ID NO: 2305949 - RNA, 16 nt, Human
guugaucuggaaccca

SEQ ID NO: 2305950 - RNA, 14 nt, Human
guugaucagaucug

SEQ ID NO: 2305951 - RNA, 15 nt, Human
guugaucuggaaccc

SEQ ID NO: 2305952 - RNA, 14 nt, Human
aaggaaaaugauac

SEQ ID NO: 2305953 - RNA, 12 nt, Human
aaggaaaaugau

SEQ ID NO: 2305954 - RNA, 23 nt, Human
aaggaucuguuuuuaaaaaucau

SEQ ID NO: 2305955 - RNA, 21 nt, Human
aaggaucuguuuuuaaaaauc

SEQ ID NO: 2305956 - RNA, 16 nt, Human
aaggaucuuuguggcc

SEQ ID NO: 2305957 - RNA, 15 nt, Human
aaggaucuguuuuua

SEQ ID NO: 2305958 - RNA, 22 nt, Human
aaggaucucucaggagcacagg

SEQ ID NO: 2305959 - RNA, 20 nt, Human
aaggaucucucaggagcaca

SEQ ID NO: 2305960 - RNA, 21 nt, Human
aaggaucucucaggagcacag

SEQ ID NO: 2305961 - RNA, 19 nt, Human
aaggauagaugcuggccca

SEQ ID NO: 2305962 - RNA, 16 nt, Human
aaggaucucucaggag

SEQ ID NO: 2305963 - RNA, 20 nt, Human
aaggauccugagccagauuu

SEQ ID NO: 2305964 - RNA, 22 nt, Human
aaggauccugagccagauuuca

SEQ ID NO: 2305965 - RNA, 22 nt, Human
aaggauauuuacuacuuuugca

SEQ ID NO: 2305966 - RNA, 22 nt, Human
aaggaucagaacagcagagguu

SEQ ID NO: 2305967 - RNA, 11 nt, Human
aaggauaaagu

SEQ ID NO: 2305968 - RNA, 20 nt, Human
aaggauagaugcuggcccag

SEQ ID NO: 2305969 - RNA, 11 nt, Human
aaggauccuga

SEQ ID NO: 2305970 - RNA, 12 nt, Human
aaggauccugag

SEQ ID NO: 2305971 - RNA, 20 nt, Human
aaggagcccuuaucugugcu

SEQ ID NO: 2305972 - RNA, 20 nt, Human
aaggaggaagagaaaaaaua

SEQ ID NO: 2305973 - RNA, 19 nt, Human
aaggagccccauuccuggg

SEQ ID NO: 2305974 - RNA, 17 nt, Human
aaggagccccauuccug

SEQ ID NO: 2305975 - RNA, 23 nt, Human
aaggaggauuccauuuggcagag

SEQ ID NO: 2305976 - RNA, 21 nt, Human
aaggauaaaguugguaaaccu

SEQ ID NO: 2305977 - RNA, 13 nt, Human
aaggauaaugaau

SEQ ID NO: 2305978 - RNA, 23 nt, Human
aaggauaaaguugguaaaccuuu

SEQ ID NO: 2305979 - RNA, 23 nt, Human
aagcuuugcuuaugguaauaaaa

SEQ ID NO: 2305980 - RNA, 17 nt, Human
aagcuuugccagcugcu

SEQ ID NO: 2305981 - RNA, 15 nt, Human
aagcuuucugucucc

SEQ ID NO: 2305982 - RNA, 15 nt, Human
aagcuguuuccauag

SEQ ID NO: 2305983 - RNA, 23 nt, Human
aagcuguuuccauagggugacac

SEQ ID NO: 2305984 - RNA, 14 nt, Human
aagcuguuguacau

SEQ ID NO: 2305985 - RNA, 17 nt, Human
aagcuguuguacauuua

SEQ ID NO: 2305986 - RNA, 18 nt, Human
aagcuguuguacauuuau

SEQ ID NO: 2305987 - RNA, 20 nt, Human
aagcuguuguacauuuauga

SEQ ID NO: 2305988 - RNA, 16 nt, Human
aagcuuuccugcccca

SEQ ID NO: 2305989 - RNA, 21 nt, Human
aagcuguuguacauuuaugau

SEQ ID NO: 2305990 - RNA, 18 nt, Human
aagcuuuccugccccagg

SEQ ID NO: 2305991 - RNA, 21 nt, Human
aagcuuuccugccccaggccu

SEQ ID NO: 2305992 - RNA, 22 nt, Human
aagcuuuccugccccaggccug

SEQ ID NO: 2305993 - RNA, 18 nt, Human
aagcuguuacugucuuca

SEQ ID NO: 2305994 - RNA, 13 nt, Human
aagcucugcuccu

SEQ ID NO: 2305995 - RNA, 19 nt, Human
aagcuguuggccucugcaa

SEQ ID NO: 2305996 - RNA, 12 nt, Human
aagcuguuguac

SEQ ID NO: 2305997 - RNA, 13 nt, Human
aagcuguuguaca

SEQ ID NO: 2305998 - RNA, 22 nt, Human
aagcuguugaugguagguggca

SEQ ID NO: 2305999 - RNA, 19 nt, Human
aaggaaaaaagagaaguau

SEQ ID NO: 2306000 - RNA, 23 nt, Human
guuccccuaguaagugccuucca

SEQ ID NO: 2306001 - RNA, 18 nt, Human
aagcuuuuagaaauacug

SEQ ID NO: 2306002 - RNA, 14 nt, Human
aagcuuuuagaaau

SEQ ID NO: 2306003 - RNA, 13 nt, Human
aagcuuuuagaaa

SEQ ID NO: 2306004 - RNA, 16 nt, Human
aagcuuuuaugugaaa

SEQ ID NO: 2306005 - RNA, 15 nt, Human
guuccccuguucacu

SEQ ID NO: 2306006 - RNA, 17 nt, Human
guuccccuguucacucu

SEQ ID NO: 2306007 - RNA, 13 nt, Human
guuccccucacug

SEQ ID NO: 2306008 - RNA, 22 nt, Human
guuccccuccuccacucucccc

SEQ ID NO: 2306009 - RNA, 19 nt, Human
aaggaaaaaauaacaauga

SEQ ID NO: 2306010 - RNA, 16 nt, Human
aaggaaaaaauaacaa

SEQ ID NO: 2306011 - RNA, 22 nt, Human
aagcucugaagucacaucacag

SEQ ID NO: 2306012 - RNA, 16 nt, Human
aagcucugaagucaca

SEQ ID NO: 2306013 - RNA, 12 nt, Human
aagcucugaagu

SEQ ID NO: 2306014 - RNA, 15 nt, Human
aagcucuauuaagau

SEQ ID NO: 2306015 - RNA, 15 nt, Human
aagcucucugcaucu

SEQ ID NO: 2306016 - RNA, 22 nt, Human
aagcucucugcaucuacuccca

SEQ ID NO: 2306017 - RNA, 19 nt, Human
aagcuccuccucccugcau

SEQ ID NO: 2306018 - RNA, 18 nt, Human
aagcuccuccucccugca

SEQ ID NO: 2306019 - RNA, 17 nt, Human
aagcuccuccucccugc

SEQ ID NO: 2306020 - RNA, 16 nt, Human
aagcuccuccucccug

SEQ ID NO: 2306021 - RNA, 15 nt, Human
aagcuccuccucccu

SEQ ID NO: 2306022 - RNA, 13 nt, Human
aagcuccuccucc

SEQ ID NO: 2306023 - RNA, 18 nt, Human
aagcuccuagcagagaga

SEQ ID NO: 2306024 - RNA, 21 nt, Human
aagcuccuccucccugcaucu

SEQ ID NO: 2306025 - RNA, 16 nt, Human
aagcucuagugggaag

SEQ ID NO: 2306026 - RNA, 23 nt, Human
aagcucccaggcauuccccagga

SEQ ID NO: 2306027 - RNA, 16 nt, Human
aagcuccuagcagaga

SEQ ID NO: 2306028 - RNA, 14 nt, Human
aagcucccaggccg

SEQ ID NO: 2306029 - RNA, 12 nt, Human
aagcucccaggc

SEQ ID NO: 2306030 - RNA, 22 nt, Human
aagcucccaggcauuccccagg

SEQ ID NO: 2306031 - RNA, 20 nt, Human
aagcuccaucuccacuccag

SEQ ID NO: 2306032 - RNA, 10 nt, Human
guguuuauuu

SEQ ID NO: 2306033 - RNA, 13 nt, Human
guguuuauuuaua

SEQ ID NO: 2306034 - RNA, 13 nt, Human
guguuuauuguca

SEQ ID NO: 2306035 - RNA, 17 nt, Human
aagcucccaagggaugg

SEQ ID NO: 2306036 - RNA, 19 nt, Human
aagcucccaagggauggug

SEQ ID NO: 2306037 - RNA, 21 nt, Human
aagcucccaagggauggugcc

SEQ ID NO: 2306038 - RNA, 13 nt, Human
aagcucccaggaa

SEQ ID NO: 2306039 - RNA, 14 nt, Human
aagcucccaggaac

SEQ ID NO: 2306040 - RNA, 16 nt, Human
aagcucccaggaacaa

SEQ ID NO: 2306041 - RNA, 11 nt, Human
aagcucccagg

SEQ ID NO: 2306042 - RNA, 12 nt, Human
guguuuaugugu

SEQ ID NO: 2306043 - RNA, 16 nt, Human
guguuuaugugugugu

SEQ ID NO: 2306044 - RNA, 16 nt, Human
guguuuaaauaaagua

SEQ ID NO: 2306045 - RNA, 22 nt, Human
guguuuaagacauuuuuggaag

SEQ ID NO: 2306046 - RNA, 15 nt, Human
guguuuaguugcaga

SEQ ID NO: 2306047 - RNA, 18 nt, Human
guucuccguuagcuccug

SEQ ID NO: 2306048 - RNA, 19 nt, Human
guucuccguuagcuccugu

SEQ ID NO: 2306049 - RNA, 16 nt, Human
guucucugaggacacu

SEQ ID NO: 2306050 - RNA, 11 nt, Human
guucucugccc

SEQ ID NO: 2306051 - RNA, 17 nt, Human
guucugucucauaugau

SEQ ID NO: 2306052 - RNA, 18 nt, Human
guucugucccuuggagcu

SEQ ID NO: 2306053 - RNA, 11 nt, Human
guucugugcac

SEQ ID NO: 2306054 - RNA, 11 nt, Human
guucuguggaa

SEQ ID NO: 2306055 - RNA, 12 nt, Human
guucuguggaaa

SEQ ID NO: 2306056 - RNA, 14 nt, Human
guucuguggaaagu

SEQ ID NO: 2306057 - RNA, 16 nt, Human
guucuguggaaagugu

SEQ ID NO: 2306058 - RNA, 17 nt, Human
guucuguggaaagugua

SEQ ID NO: 2306059 - RNA, 19 nt, Human
guucuguggaaaguguaaa

SEQ ID NO: 2306060 - RNA, 20 nt, Human
guucuguggaaaguguaaag

SEQ ID NO: 2306061 - RNA, 21 nt, Human
guucuguggaaaguguaaagc

SEQ ID NO: 2306062 - RNA, 22 nt, Human
guucuguggaaaguguaaagca

SEQ ID NO: 2306063 - RNA, 12 nt, Human
guucucugcccu

SEQ ID NO: 2306064 - RNA, 18 nt, Human
guucuauuuggaauuuau

SEQ ID NO: 2306065 - RNA, 14 nt, Human
guucuauuuggaau

SEQ ID NO: 2306066 - RNA, 15 nt, Human
guucuauuuggaauu

SEQ ID NO: 2306067 - RNA, 13 nt, Human
guucuauuuggaa

SEQ ID NO: 2306068 - RNA, 15 nt, Human
guucuaguuuucagu

SEQ ID NO: 2306069 - RNA, 18 nt, Human
guucuauuucagugccaa

SEQ ID NO: 2306070 - RNA, 15 nt, Human
guucuauuuaaugga

SEQ ID NO: 2306071 - RNA, 13 nt, Human
guucuaguuuuca

SEQ ID NO: 2306072 - RNA, 14 nt, Human
guucuaguuuucag

SEQ ID NO: 2306073 - RNA, 18 nt, Human
guuccccuguucacucua

SEQ ID NO: 2306074 - RNA, 13 nt, Human
guuccccuuccac

SEQ ID NO: 2306075 - RNA, 14 nt, Human
guucuaguuugcau

SEQ ID NO: 2306076 - RNA, 15 nt, Human
guucuaguuugcauu

SEQ ID NO: 2306077 - RNA, 11 nt, Human
guucucaucuu

SEQ ID NO: 2306078 - RNA, 16 nt, Human
guucucaucuuucuug

SEQ ID NO: 2306079 - RNA, 17 nt, Human
guucucagguguugcca

SEQ ID NO: 2306080 - RNA, 15 nt, Human
guucucagggcuccu

SEQ ID NO: 2306081 - RNA, 23 nt, Human
guucucagggcuccugccuucug

SEQ ID NO: 2306082 - RNA, 19 nt, Human
guucucagcucccccuguc

SEQ ID NO: 2306083 - RNA, 20 nt, Human
guucucagcucccccugucc

SEQ ID NO: 2306084 - RNA, 13 nt, Human
guucucagggcuc

SEQ ID NO: 2306085 - RNA, 14 nt, Human
guucucagggcucc

SEQ ID NO: 2306086 - RNA, 12 nt, Human
guucucacaccc

SEQ ID NO: 2306087 - RNA, 12 nt, Human
guucucacuguu

SEQ ID NO: 2306088 - RNA, 16 nt, Human
guucucacacccaccg

SEQ ID NO: 2306089 - RNA, 17 nt, Human
guucucacacccaccgu

SEQ ID NO: 2306090 - RNA, 13 nt, Human
guucucagcuccc

SEQ ID NO: 2306091 - RNA, 16 nt, Human
guucucacuguucccu

SEQ ID NO: 2306092 - RNA, 19 nt, Human
guucucacuguucccucug

SEQ ID NO: 2306093 - RNA, 14 nt, Human
guucucagcucccc

SEQ ID NO: 2306094 - RNA, 15 nt, Human
guucucagcuccccc

SEQ ID NO: 2306095 - RNA, 17 nt, Human
guucucagcucccccug

SEQ ID NO: 2306096 - RNA, 18 nt, Human
guucucagcucccccugu

SEQ ID NO: 2306097 - RNA, 15 nt, Human
guucugugucugugu

SEQ ID NO: 2306098 - RNA, 23 nt, Human
guucugugguuuuccccucccug

SEQ ID NO: 2306099 - RNA, 13 nt, Human
guucugugucuuu

SEQ ID NO: 2306100 - RNA, 22 nt, Human
guucugugucuuucacagcucc

SEQ ID NO: 2306101 - RNA, 19 nt, Human
guucugugguuuuccccuc

SEQ ID NO: 2306102 - RNA, 21 nt, Human
guucugugguuuuccccuccc

SEQ ID NO: 2306103 - RNA, 23 nt, Human
guucugugucuuucacagcuccu

SEQ ID NO: 2306104 - RNA, 16 nt, Human
guucuguuuugccuga

SEQ ID NO: 2306105 - RNA, 14 nt, Human
guucuguuuacauc

SEQ ID NO: 2306106 - RNA, 16 nt, Human
guucuguuuacaucag

SEQ ID NO: 2306107 - RNA, 19 nt, Human
guucuguuuacaucaguuu

SEQ ID NO: 2306108 - RNA, 15 nt, Human
guugacacaggucuu

SEQ ID NO: 2306109 - RNA, 20 nt, Human
guugacaccucgccccugcu

SEQ ID NO: 2306110 - RNA, 20 nt, Human
guugaucacuggcaaugaaa

SEQ ID NO: 2306111 - RNA, 14 nt, Human
guugauauuucuau

SEQ ID NO: 2306112 - RNA, 20 nt, Human
guugauauuucgaaagcugc

SEQ ID NO: 2306113 - RNA, 13 nt, Human
guugagcuguuuu

SEQ ID NO: 2306114 - RNA, 24 nt, Human
guugagcucucggaacugcaugcu

SEQ ID NO: 2306115 - RNA, 12 nt, Human
guugauaguuua

SEQ ID NO: 2306116 - RNA, 23 nt, Human
guugauagcacagacccugcccu

SEQ ID NO: 2306117 - RNA, 20 nt, Human
guugagccccaaguccugaa

SEQ ID NO: 2306118 - RNA, 22 nt, Human
guugauagcacagacccugccc

SEQ ID NO: 2306119 - RNA, 15 nt, Human
guugagccccuggag

SEQ ID NO: 2306120 - RNA, 14 nt, Human
guugagccuuuucc

SEQ ID NO: 2306121 - RNA, 10 nt, Human
guugagcccc

SEQ ID NO: 2306122 - RNA, 15 nt, Human
guugagccccaaguc

SEQ ID NO: 2306123 - RNA, 16 nt, Human
guugagccccaagucc

SEQ ID NO: 2306124 - RNA, 19 nt, Human
guugagccccaaguccuga

SEQ ID NO: 2306125 - RNA, 12 nt, Human
guugacagcagg

SEQ ID NO: 2306126 - RNA, 18 nt, Human
guugacaguucauaugua

SEQ ID NO: 2306127 - RNA, 17 nt, Human
guugacaguucugaaga

SEQ ID NO: 2306128 - RNA, 16 nt, Human
guugacaguucugaag

SEQ ID NO: 2306129 - RNA, 23 nt, Human
guugagccaggccugggucugug

SEQ ID NO: 2306130 - RNA, 15 nt, Human
guugagccaggccug

SEQ ID NO: 2306131 - RNA, 20 nt, Human
guugagccagcagacauugu

SEQ ID NO: 2306132 - RNA, 22 nt, Human
guugagccagcagacauuguca

SEQ ID NO: 2306133 - RNA, 15 nt, Human
guugagccagcagac

SEQ ID NO: 2306134 - RNA, 16 nt, Human
guugagccagcagaca

SEQ ID NO: 2306135 - RNA, 18 nt, Human
guugagccagcagacauu

SEQ ID NO: 2306136 - RNA, 19 nt, Human
guugagcagggauccuggu

SEQ ID NO: 2306137 - RNA, 22 nt, Human
aaguuuucccuugaggaaacaa

SEQ ID NO: 2306138 - RNA, 13 nt, Human
aaguuuuccugag

SEQ ID NO: 2306139 - RNA, 21 nt, Human
aaguuuucccuugaggaaaca

SEQ ID NO: 2306140 - RNA, 11 nt, Human
aaguuuucagg

SEQ ID NO: 2306141 - RNA, 15 nt, Human
aaguuuucaaugaug

SEQ ID NO: 2306142 - RNA, 23 nt, Human
aaguuuucagaaccucuucccca

SEQ ID NO: 2306143 - RNA, 14 nt, Human
aaguuuguuuuuaa

SEQ ID NO: 2306144 - RNA, 21 nt, Human
aaguuuuaggacaaacagcuc

SEQ ID NO: 2306145 - RNA, 14 nt, Human
aaguuuuaggacaa

SEQ ID NO: 2306146 - RNA, 15 nt, Human
aaguuuugcauuuau

SEQ ID NO: 2306147 - RNA, 14 nt, Human
uaaaauguuaaaac

SEQ ID NO: 2306148 - RNA, 18 nt, Human
aaguuuugaaaagcuauu

SEQ ID NO: 2306149 - RNA, 12 nt, Human
aaguuuugaaaa

SEQ ID NO: 2306150 - RNA, 13 nt, Human
aaguuuugaaaag

SEQ ID NO: 2306151 - RNA, 15 nt, Human
aaguuuugaaaagcu

SEQ ID NO: 2306152 - RNA, 16 nt, Human
aaguuuugaaaagcua

SEQ ID NO: 2306153 - RNA, 14 nt, Human
uaaaauguugaaua

SEQ ID NO: 2306154 - RNA, 19 nt, Human
uaaaauguugaaaagucaa

SEQ ID NO: 2306155 - RNA, 20 nt, Human
uaaaauguugaaaagucaaa

SEQ ID NO: 2306156 - RNA, 22 nt, Human
uaaaauguucacuuuugacaaa

SEQ ID NO: 2306157 - RNA, 17 nt, Human
uaaaauguucacuuuug

SEQ ID NO: 2306158 - RNA, 14 nt, Human
uaaaauguugaaaa

SEQ ID NO: 2306159 - RNA, 15 nt, Human
uaaaauguugaaaag

SEQ ID NO: 2306160 - RNA, 17 nt, Human
uaaaauguugaaaaguc

SEQ ID NO: 2306161 - RNA, 18 nt, Human
uaaaauguugaaaaguca

SEQ ID NO: 2306162 - RNA, 21 nt, Human
aaguuugcacuguaugcugga

SEQ ID NO: 2306163 - RNA, 13 nt, Human
aaguuugcuuaga

SEQ ID NO: 2306164 - RNA, 14 nt, Human
aaguuugcacugua

SEQ ID NO: 2306165 - RNA, 15 nt, Human
aaguuugcuuagaaa

SEQ ID NO: 2306166 - RNA, 19 nt, Human
aaguuuggcaauaguuugc

SEQ ID NO: 2306167 - RNA, 16 nt, Human
aaguuugcuuagaaaa

SEQ ID NO: 2306168 - RNA, 16 nt, Human
aaguuucaguugauuu

SEQ ID NO: 2306169 - RNA, 17 nt, Human
aaguuucaggugacaug

SEQ ID NO: 2306170 - RNA, 19 nt, Human
aaguuucaggugacaugug

SEQ ID NO: 2306171 - RNA, 21 nt, Human
aaguuucaggugacaugugaa

SEQ ID NO: 2306172 - RNA, 22 nt, Human
aaguuucaggugacaugugaaa

SEQ ID NO: 2306173 - RNA, 12 nt, Human
aaguuugcaauu

SEQ ID NO: 2306174 - RNA, 20 nt, Human
aaguuucacugacuuagaac

SEQ ID NO: 2306175 - RNA, 19 nt, Human
aaguuucaggauacaugug

SEQ ID NO: 2306176 - RNA, 21 nt, Human
aaguuucagagaccauugcaa

SEQ ID NO: 2306177 - RNA, 12 nt, Human
aaguuucaggug

SEQ ID NO: 2306178 - RNA, 14 nt, Human
aaguuucaggugac

SEQ ID NO: 2306179 - RNA, 15 nt, Human
aaguuucaggugaca

SEQ ID NO: 2306180 - RNA, 16 nt, Human
aaguuucaggugacau

SEQ ID NO: 2306181 - RNA, 16 nt, Human
aaguuucaaugugauu

SEQ ID NO: 2306182 - RNA, 22 nt, Human
aaguuucaaugugauucuaaug

SEQ ID NO: 2306183 - RNA, 17 nt, Human
aaguuuaugucuaaaga

SEQ ID NO: 2306184 - RNA, 16 nt, Human
aaguuuaugucuaaag

SEQ ID NO: 2306185 - RNA, 17 nt, Human
uaaaauuuuaucucuua

SEQ ID NO: 2306186 - RNA, 17 nt, Human
uaaaauuuuuaaucuuu

SEQ ID NO: 2306187 - RNA, 15 nt, Human
uaaaauuuguugcau

SEQ ID NO: 2306188 - RNA, 14 nt, Human
uaaaauuauuccuu

SEQ ID NO: 2306189 - RNA, 14 nt, Human
uaaaauuuguugca

SEQ ID NO: 2306190 - RNA, 16 nt, Human
uaaaauuaaagcugaa

SEQ ID NO: 2306191 - RNA, 18 nt, Human
uaaaauuaaagcugaaaa

SEQ ID NO: 2306192 - RNA, 14 nt, Human
uaaaauuaaagcua

SEQ ID NO: 2306193 - RNA, 19 nt, Human
uaaaauuaaagcugaaaac

SEQ ID NO: 2306194 - RNA, 19 nt, Human
uaaaauuauagaugggaau

SEQ ID NO: 2306195 - RNA, 13 nt, Human
uaaacaaagguug

SEQ ID NO: 2306196 - RNA, 19 nt, Human
uaaaccaaggcuagaacca

SEQ ID NO: 2306197 - RNA, 17 nt, Human
uaaacaaaguuacuagg

SEQ ID NO: 2306198 - RNA, 15 nt, Human
uaaacaaaguuacua

SEQ ID NO: 2306199 - RNA, 14 nt, Human
uaaacaaaguuacu

SEQ ID NO: 2306200 - RNA, 22 nt, Human
uaaaccaccagugcccaaaguc

SEQ ID NO: 2306201 - RNA, 21 nt, Human
uaaaccacaaggcuguugcau

SEQ ID NO: 2306202 - RNA, 21 nt, Human
uaaaccagguuuagacaguau

SEQ ID NO: 2306203 - RNA, 19 nt, Human
uaaaccauaaaaagcugac

SEQ ID NO: 2306204 - RNA, 17 nt, Human
uaaaccauaaaaagcug

SEQ ID NO: 2306205 - RNA, 18 nt, Human
uaaaccauaaaaagcuga

SEQ ID NO: 2306206 - RNA, 19 nt, Human
uaaaauuuuuaaucuuuaa

SEQ ID NO: 2306207 - RNA, 16 nt, Human
uaaaauuuuuuuagaa

SEQ ID NO: 2306208 - RNA, 17 nt, Human
uaaaauuuuuuuagaaa

SEQ ID NO: 2306209 - RNA, 18 nt, Human
uaaaauuuuuuuagaaag

SEQ ID NO: 2306210 - RNA, 19 nt, Human
uaaaauuuuuuuagaaagc

SEQ ID NO: 2306211 - RNA, 23 nt, Human
uaaaauuuuuuuucauguuuuaa

SEQ ID NO: 2306212 - RNA, 18 nt, Human
uaaacaaaauagaagcug

SEQ ID NO: 2306213 - RNA, 23 nt, Human
uaaacaaaauagaagcuguagua

SEQ ID NO: 2306214 - RNA, 20 nt, Human
uaaaauuuuuuuucauguuu

SEQ ID NO: 2306215 - RNA, 19 nt, Human
uaaaauuuuuuuucauguu

SEQ ID NO: 2306216 - RNA, 17 nt, Human
uaaaauuuuuuuucaug

SEQ ID NO: 2306217 - RNA, 16 nt, Human
uaaaauuuuuuuucau

SEQ ID NO: 2306218 - RNA, 20 nt, Human
uaaaauuuuuuuagaaagca

SEQ ID NO: 2306219 - RNA, 21 nt, Human
uaaaauuuuuuuagaaagcau

SEQ ID NO: 2306220 - RNA, 14 nt, Human
aaguucauaggguc

SEQ ID NO: 2306221 - RNA, 15 nt, Human
aaguucauauuccau

SEQ ID NO: 2306222 - RNA, 21 nt, Human
aaguucauauuccauauuuau

SEQ ID NO: 2306223 - RNA, 22 nt, Human
aaguucauauuccauauuuauu

SEQ ID NO: 2306224 - RNA, 23 nt, Human
aaguucauauuccauauuuauuc

SEQ ID NO: 2306225 - RNA, 17 nt, Human
aaguucuagagaagagg

SEQ ID NO: 2306226 - RNA, 21 nt, Human
aaguucuagagaagaggcugg

SEQ ID NO: 2306227 - RNA, 18 nt, Human
aaguuauugacaaacucu

SEQ ID NO: 2306228 - RNA, 14 nt, Human
aaguuauugacaaa

SEQ ID NO: 2306229 - RNA, 14 nt, Human
aaguuauugcaguu

SEQ ID NO: 2306230 - RNA, 15 nt, Human
aaguuauugcaguuu

SEQ ID NO: 2306231 - RNA, 17 nt, Human
aaguuauugcaguuuau

SEQ ID NO: 2306232 - RNA, 23 nt, Human
aaguuauugcaguuuaucauuca

SEQ ID NO: 2306233 - RNA, 18 nt, Human
aaguucuagagaagaggc

SEQ ID NO: 2306234 - RNA, 15 nt, Human
aaguucugaguguuu

SEQ ID NO: 2306235 - RNA, 15 nt, Human
aaguucugacuugac

SEQ ID NO: 2306236 - RNA, 17 nt, Human
aaguucugcagauaaac

SEQ ID NO: 2306237 - RNA, 14 nt, Human
aaguuuaauugacu

SEQ ID NO: 2306238 - RNA, 22 nt, Human
aaguuuacaguaaauaaauugu

SEQ ID NO: 2306239 - RNA, 11 nt, Human
aaguuuagaga

SEQ ID NO: 2306240 - RNA, 19 nt, Human
aaguuuacucaacccucuc

SEQ ID NO: 2306241 - RNA, 19 nt, Human
aaguuuacauuguaaauag

SEQ ID NO: 2306242 - RNA, 20 nt, Human
aaguuuacaguaaauaaauu

SEQ ID NO: 2306243 - RNA, 21 nt, Human
aaguuuacaguaaauaaauug

SEQ ID NO: 2306244 - RNA, 19 nt, Human
aaguuuacaaucaaaggaa

SEQ ID NO: 2306245 - RNA, 18 nt, Human
aaguuuacaaucaaagga

SEQ ID NO: 2306246 - RNA, 20 nt, Human
aaguuuaauggugccuucau

SEQ ID NO: 2306247 - RNA, 18 nt, Human
aaguuuacaaguguauau

SEQ ID NO: 2306248 - RNA, 21 nt, Human
aaguuuacaaguguauaucag

SEQ ID NO: 2306249 - RNA, 18 nt, Human
aaguuuacauuguaaaua

SEQ ID NO: 2306250 - RNA, 23 nt, Human
aaguuuacaaguguauaucagaa

SEQ ID NO: 2306251 - RNA, 12 nt, Human
aaguuuacagua

SEQ ID NO: 2306252 - RNA, 18 nt, Human
aaguuuacaguaaauaaa

SEQ ID NO: 2306253 - RNA, 19 nt, Human
aaguuuacaguaaauaaau

SEQ ID NO: 2306254 - RNA, 20 nt, Human
aaguguuguaaauauuuaug

SEQ ID NO: 2306255 - RNA, 18 nt, Human
aaguguuguaaauauuua

SEQ ID NO: 2306256 - RNA, 22 nt, Human
aaguguuguaaauauuuaugua

SEQ ID NO: 2306257 - RNA, 15 nt, Human
aaguguuuauuuuuc

SEQ ID NO: 2306258 - RNA, 16 nt, Human
aaguguuuauuuuuca

SEQ ID NO: 2306259 - RNA, 19 nt, Human
aaguguuuauuuuucauau

SEQ ID NO: 2306260 - RNA, 23 nt, Human
aaguguuggcuaaugaagggaaa

SEQ ID NO: 2306261 - RNA, 17 nt, Human
aaguguuguaaauauuu

SEQ ID NO: 2306262 - RNA, 14 nt, Human
aaguguuucuguua

SEQ ID NO: 2306263 - RNA, 21 nt, Human
aaguguuuauuuuucauauug

SEQ ID NO: 2306264 - RNA, 21 nt, Human
aaguguuucuguuauuaacaa

SEQ ID NO: 2306265 - RNA, 23 nt, Human
aaguguuucuguuauuaacaaac

SEQ ID NO: 2306266 - RNA, 23 nt, Human
aaguguuuuguucuuucuggagu

SEQ ID NO: 2306267 - RNA, 20 nt, Human
guuuuuuuuuccuguccuuc

SEQ ID NO: 2306268 - RNA, 23 nt, Human
guuuuuuuuuauacacuguaaug

SEQ ID NO: 2306269 - RNA, 19 nt, Human
guuuuuuuuuccuguccuu

SEQ ID NO: 2306270 - RNA, 14 nt, Human
guuuuuuuucuucu

SEQ ID NO: 2306271 - RNA, 20 nt, Human
guuuuuuuuuauacacugua

SEQ ID NO: 2306272 - RNA, 17 nt, Human
guuuuuuuuuaaagacu

SEQ ID NO: 2306273 - RNA, 17 nt, Human
aaguuacacauuuuuca

SEQ ID NO: 2306274 - RNA, 17 nt, Human
aaguuaaagugaauaac

SEQ ID NO: 2306275 - RNA, 18 nt, Human
aaguuaaacauugaagua

SEQ ID NO: 2306276 - RNA, 14 nt, Human
aaguuaaauaaauc

SEQ ID NO: 2306277 - RNA, 12 nt, Human
aaguuaaauaaa

SEQ ID NO: 2306278 - RNA, 19 nt, Human
aaguuauuaauauuuuaau

SEQ ID NO: 2306279 - RNA, 19 nt, Human
aaguuacuuugucagaggc

SEQ ID NO: 2306280 - RNA, 14 nt, Human
aaguuagaauuccu

SEQ ID NO: 2306281 - RNA, 16 nt, Human
aaguuacuuauucuag

SEQ ID NO: 2306282 - RNA, 15 nt, Human
aaguuacuuauucua

SEQ ID NO: 2306283 - RNA, 23 nt, Human
aaguuacuucacuuuaauucuca

SEQ ID NO: 2306284 - RNA, 12 nt, Human
aaguuacuuugu

SEQ ID NO: 2306285 - RNA, 22 nt, Human
aaguuacuucacuuuaauucuc

SEQ ID NO: 2306286 - RNA, 12 nt, Human
aaguuacugaau

SEQ ID NO: 2306287 - RNA, 14 nt, Human
aaguuacugaaugc

SEQ ID NO: 2306288 - RNA, 15 nt, Human
aaguuacugaaugca

SEQ ID NO: 2306289 - RNA, 21 nt, Human
aaguuacuagguaacuucaua

SEQ ID NO: 2306290 - RNA, 20 nt, Human
aaguuacuagguaacuucau

SEQ ID NO: 2306291 - RNA, 19 nt, Human
aaguuacuagguaacuuca

SEQ ID NO: 2306292 - RNA, 18 nt, Human
aaguuacuagguaacuuc

SEQ ID NO: 2306293 - RNA, 18 nt, Human
uaaagaguuaguuugagu

SEQ ID NO: 2306294 - RNA, 20 nt, Human
uaaagaggcugaaagaggcc

SEQ ID NO: 2306295 - RNA, 17 nt, Human
uaaagaggcugaaagag

SEQ ID NO: 2306296 - RNA, 19 nt, Human
uaaagagcccuugccuccc

SEQ ID NO: 2306297 - RNA, 21 nt, Human
uaaagagcccuugccucccca

SEQ ID NO: 2306298 - RNA, 18 nt, Human
uaaagagauucacacaca

SEQ ID NO: 2306299 - RNA, 15 nt, Human
uaaagagcccuugcc

SEQ ID NO: 2306300 - RNA, 16 nt, Human
uaaagagcccuugccu

SEQ ID NO: 2306301 - RNA, 17 nt, Human
uaaagagcccuugccuc

SEQ ID NO: 2306302 - RNA, 12 nt, Human
uaaagagagaau

SEQ ID NO: 2306303 - RNA, 13 nt, Human
uaaagagagguua

SEQ ID NO: 2306304 - RNA, 19 nt, Human
uaaagagaccuaccucagg

SEQ ID NO: 2306305 - RNA, 20 nt, Human
uaaagagaccuaccucaggu

SEQ ID NO: 2306306 - RNA, 22 nt, Human
uaaagagaccuaccucagguug

SEQ ID NO: 2306307 - RNA, 13 nt, Human
uaaagauggaaaa

SEQ ID NO: 2306308 - RNA, 22 nt, Human
uaaagaugcaaggaccaggacu

SEQ ID NO: 2306309 - RNA, 21 nt, Human
uaaagaugcaaggaccaggac

SEQ ID NO: 2306310 - RNA, 13 nt, Human
uaaagaugaucua

SEQ ID NO: 2306311 - RNA, 21 nt, Human
uaaagaugaucuacucagaaa

SEQ ID NO: 2306312 - RNA, 11 nt, Human
uaaagaugauc

SEQ ID NO: 2306313 - RNA, 12 nt, Human
uaaagaguucuu

SEQ ID NO: 2306314 - RNA, 23 nt, Human
uaaagauacagaacucuuucaaa

SEQ ID NO: 2306315 - RNA, 22 nt, Human
uaaagauauuuuuaucuuuaua

SEQ ID NO: 2306316 - RNA, 21 nt, Human
uaaagauauuuuuaucuuuau

SEQ ID NO: 2306317 - RNA, 18 nt, Human
uaaagauauuuuuaucuu

SEQ ID NO: 2306318 - RNA, 20 nt, Human
uaaaggcuauacuugucuug

SEQ ID NO: 2306319 - RNA, 21 nt, Human
uaaagcaacugucuauuucug

SEQ ID NO: 2306320 - RNA, 17 nt, Human
uaaaggcucgauuuugu

SEQ ID NO: 2306321 - RNA, 18 nt, Human
uaaaggcucgauuuugua

SEQ ID NO: 2306322 - RNA, 19 nt, Human
uaaaggcucgauuuuguau

SEQ ID NO: 2306323 - RNA, 22 nt, Human
uaaaggcucgauuuuguaucug

SEQ ID NO: 2306324 - RNA, 14 nt, Human
uaaaggcuucucuc

SEQ ID NO: 2306325 - RNA, 15 nt, Human
uaaaggcuucucucu

SEQ ID NO: 2306326 - RNA, 21 nt, Human
uaaaggcuaccuuuguauucu

SEQ ID NO: 2306327 - RNA, 16 nt, Human
uaaagcaacugucuau

SEQ ID NO: 2306328 - RNA, 20 nt, Human
uaaagcaacugucuauuucu

SEQ ID NO: 2306329 - RNA, 19 nt, Human
uaaaggcuaccuuuguauu

SEQ ID NO: 2306330 - RNA, 14 nt, Human
uaaagauuucuuga

SEQ ID NO: 2306331 - RNA, 15 nt, Human
uaaagauuuaucaaa

SEQ ID NO: 2306332 - RNA, 22 nt, Human
uaaagauuuaucaaaucaguca

SEQ ID NO: 2306333 - RNA, 15 nt, Human
uaaagauguuaaaaa

SEQ ID NO: 2306334 - RNA, 10 nt, Human
uaaagacaga

SEQ ID NO: 2306335 - RNA, 15 nt, Human
uaaagacagaggcag

SEQ ID NO: 2306336 - RNA, 21 nt, Human
uaaagacagggaagagcagaa

SEQ ID NO: 2306337 - RNA, 19 nt, Human
uaaagacaggguuucacca

SEQ ID NO: 2306338 - RNA, 9 nt, Human
uaaagacag

SEQ ID NO: 2306339 - RNA, 22 nt, Human
uaaagacaaagacaaauucugu

SEQ ID NO: 2306340 - RNA, 20 nt, Human
uaaagacaaagacaaauucu

SEQ ID NO: 2306341 - RNA, 19 nt, Human
uaaagacaaagacaaauuc

SEQ ID NO: 2306342 - RNA, 15 nt, Human
uaaagacaccuacug

SEQ ID NO: 2306343 - RNA, 20 nt, Human
uaaagacuggcuuuuauuaa

SEQ ID NO: 2306344 - RNA, 15 nt, Human
uaaagacuggcuuuu

SEQ ID NO: 2306345 - RNA, 15 nt, Human
uaaagagaccuaccu

SEQ ID NO: 2306346 - RNA, 14 nt, Human
uaaagacuggcuuu

SEQ ID NO: 2306347 - RNA, 16 nt, Human
uaaagacuuuuaugau

SEQ ID NO: 2306348 - RNA, 14 nt, Human
uaaagaagguuuca

SEQ ID NO: 2306349 - RNA, 15 nt, Human
uaaagaauaauaugc

SEQ ID NO: 2306350 - RNA, 15 nt, Human
uaaagacaaagacaa

SEQ ID NO: 2306351 - RNA, 11 nt, Human
uaaagacaaag

SEQ ID NO: 2306352 - RNA, 16 nt, Human
uaaagaaauugcaaua

SEQ ID NO: 2306353 - RNA, 17 nt, Human
uaaagaaauugcaauaa

SEQ ID NO: 2306354 - RNA, 19 nt, Human
uaaagaacacccuauauuu

SEQ ID NO: 2306355 - RNA, 15 nt, Human
uaaagaacauaaaua

SEQ ID NO: 2306356 - RNA, 13 nt, Human
uaaagaagauguu

SEQ ID NO: 2306357 - RNA, 18 nt, Human
uaaagaagauguuuaacu

SEQ ID NO: 2306358 - RNA, 13 nt, Human
uaaagaagcaaua

SEQ ID NO: 2306359 - RNA, 21 nt, Human
uaaagaagcaauaaagaagag

SEQ ID NO: 2306360 - RNA, 14 nt, Human
uaaacccauuuuag

SEQ ID NO: 2306361 - RNA, 23 nt, Human
uaaacccauuuuagucacuuuuu

SEQ ID NO: 2306362 - RNA, 19 nt, Human
uaaacccaguaguggugac

SEQ ID NO: 2306363 - RNA, 18 nt, Human
uaaaccgccaaggcuggg

SEQ ID NO: 2306364 - RNA, 16 nt, Human
uaaaccgccaaggcug

SEQ ID NO: 2306365 - RNA, 18 nt, Human
uaaaccuaaaaaagauau

SEQ ID NO: 2306366 - RNA, 15 nt, Human
uaaaccuaaaaaaga

SEQ ID NO: 2306367 - RNA, 16 nt, Human
uaaaccuaaaaaagau

SEQ ID NO: 2306368 - RNA, 13 nt, Human
uaaaccuaaaaaa

SEQ ID NO: 2306369 - RNA, 18 nt, Human
uaaaccucaaaaugucua

SEQ ID NO: 2306370 - RNA, 19 nt, Human
uaaaccucaaaaugucuaa

SEQ ID NO: 2306371 - RNA, 17 nt, Human
uaaacgugaugaucagc

SEQ ID NO: 2306372 - RNA, 20 nt, Human
uaaacguaugcaugugaaga

SEQ ID NO: 2306373 - RNA, 23 nt, Human
uaaacggauuauuuuuucagacc

SEQ ID NO: 2306374 - RNA, 15 nt, Human
uaaacguaugcaugu

SEQ ID NO: 2306375 - RNA, 22 nt, Human
uaaacgugaugaucagcuguuu

SEQ ID NO: 2306376 - RNA, 17 nt, Human
uaaacgugcagacuaug

SEQ ID NO: 2306377 - RNA, 15 nt, Human
uaaacggauuccaaa

SEQ ID NO: 2306378 - RNA, 19 nt, Human
uaaacggauuauuuuuuca

SEQ ID NO: 2306379 - RNA, 20 nt, Human
uaaacggauuauuuuuucag

SEQ ID NO: 2306380 - RNA, 21 nt, Human
uaaacggauuauuuuuucaga

SEQ ID NO: 2306381 - RNA, 22 nt, Human
uaaacggauuauuuuuucagac

SEQ ID NO: 2306382 - RNA, 13 nt, Human
uaaacggauuauu

SEQ ID NO: 2306383 - RNA, 14 nt, Human
uaaacggauuauuu

SEQ ID NO: 2306384 - RNA, 15 nt, Human
uaaacggauuauuuu

SEQ ID NO: 2306385 - RNA, 16 nt, Human
uaaacggauuauuuuu

SEQ ID NO: 2306386 - RNA, 17 nt, Human
uaaacggauuauuuuuu

SEQ ID NO: 2306387 - RNA, 18 nt, Human
uaaacggauuauuuuuuc

SEQ ID NO: 2306388 - RNA, 16 nt, Human
uaaaccuuaguacuga

SEQ ID NO: 2306389 - RNA, 15 nt, Human
uaaaccuuaaguaag

SEQ ID NO: 2306390 - RNA, 18 nt, Human
uaaaccucuaauuuauuu

SEQ ID NO: 2306391 - RNA, 22 nt, Human
uaaacgauuuaauucucuugaa

SEQ ID NO: 2306392 - RNA, 18 nt, Human
uaaacgauuuaauucucu

SEQ ID NO: 2306393 - RNA, 15 nt, Human
uaaacuauuugucuu

SEQ ID NO: 2306394 - RNA, 15 nt, Human
uaaacucaaaacuua

SEQ ID NO: 2306395 - RNA, 19 nt, Human
uaaacucaaaacuuaacau

SEQ ID NO: 2306396 - RNA, 22 nt, Human
uaaacuaucuuggugaauuuuu

SEQ ID NO: 2306397 - RNA, 17 nt, Human
uaaacuaucaguuuguc

SEQ ID NO: 2306398 - RNA, 14 nt, Human
uaaacuaucuuuuu

SEQ ID NO: 2306399 - RNA, 21 nt, Human
uaaacuaucuuggugaauuuu

SEQ ID NO: 2306400 - RNA, 20 nt, Human
uaaacuaucuuggugaauuu

SEQ ID NO: 2306401 - RNA, 13 nt, Human
uaaacuaucaguu

SEQ ID NO: 2306402 - RNA, 14 nt, Human
uaaacuauauuuuc

SEQ ID NO: 2306403 - RNA, 23 nt, Human
uaaacuagcauaucugccuuuau

SEQ ID NO: 2306404 - RNA, 21 nt, Human
uaaacuagcauaucugccuuu

SEQ ID NO: 2306405 - RNA, 22 nt, Human
uaaacuagcauaucugccuuua

SEQ ID NO: 2306406 - RNA, 17 nt, Human
uaaacuagcauaucugc

SEQ ID NO: 2306407 - RNA, 19 nt, Human
uaaacuagcauaucugccu

SEQ ID NO: 2306408 - RNA, 14 nt, Human
uaaacucauuuaua

SEQ ID NO: 2306409 - RNA, 14 nt, Human
uaaacuccuguccu

SEQ ID NO: 2306410 - RNA, 15 nt, Human
uaaacuccuguccuu

SEQ ID NO: 2306411 - RNA, 14 nt, Human
uaaacucuaaacau

SEQ ID NO: 2306412 - RNA, 15 nt, Human
uaaacucuaaacauu

SEQ ID NO: 2306413 - RNA, 22 nt, Human
uaaacucuaaacauuaaucaau

SEQ ID NO: 2306414 - RNA, 23 nt, Human
uaaacucaaaauauuuguacaua

SEQ ID NO: 2306415 - RNA, 22 nt, Human
uaaacucaaaauauuuguacau

SEQ ID NO: 2306416 - RNA, 20 nt, Human
uaaacucaaaacuuaacaua

SEQ ID NO: 2306417 - RNA, 11 nt, Human
uaaacucaggg

SEQ ID NO: 2306418 - RNA, 19 nt, Human
uaaacucagggacagagcc

SEQ ID NO: 2306419 - RNA, 20 nt, Human
uaaacucagggacagagcca

SEQ ID NO: 2306420 - RNA, 21 nt, Human
uaaacucaaaauauuuguaca

SEQ ID NO: 2306421 - RNA, 19 nt, Human
uaaacucaaaauauuugua

SEQ ID NO: 2306422 - RNA, 16 nt, Human
uaaacucaaaauauuu

SEQ ID NO: 2306423 - RNA, 14 nt, Human
uaaacucaaaauau

SEQ ID NO: 2306424 - RNA, 16 nt, Human
uaaacugcauuagaaa

SEQ ID NO: 2306425 - RNA, 15 nt, Human
uaaagaaagagagaa

SEQ ID NO: 2306426 - RNA, 17 nt, Human
uaaagaaagagagaaaa

SEQ ID NO: 2306427 - RNA, 16 nt, Human
uaaagaaagagagaaa

SEQ ID NO: 2306428 - RNA, 12 nt, Human
uaaacugccccc

SEQ ID NO: 2306429 - RNA, 14 nt, Human
uaaacugacuuuau

SEQ ID NO: 2306430 - RNA, 15 nt, Human
uaaacugacuuuauc

SEQ ID NO: 2306431 - RNA, 16 nt, Human
uaaacugacuuuaucc

SEQ ID NO: 2306432 - RNA, 10 nt, Human
uaaacugcau

SEQ ID NO: 2306433 - RNA, 18 nt, Human
uaaacucucuuugggaau

SEQ ID NO: 2306434 - RNA, 21 nt, Human
uaaacucucuuugggaauguu

SEQ ID NO: 2306435 - RNA, 20 nt, Human
uaaacucuucacaaaaucug

SEQ ID NO: 2306436 - RNA, 15 nt, Human
uaaacucuguugcaa

SEQ ID NO: 2306437 - RNA, 11 nt, Human
uaaagaaaguc

SEQ ID NO: 2306438 - RNA, 17 nt, Human
uaaagaaagucgaauua

SEQ ID NO: 2306439 - RNA, 21 nt, Human
uaaagaaagucgaauuaauag

SEQ ID NO: 2306440 - RNA, 23 nt, Human
uaaagaaagagagaaaauaaaaa

SEQ ID NO: 2306441 - RNA, 22 nt, Human
uaaagaaagagagaaaauaaaa

SEQ ID NO: 2306442 - RNA, 11 nt, Human
uaaagaaagau

SEQ ID NO: 2306443 - RNA, 21 nt, Human
uaaagaaagagagaaaauaaa

SEQ ID NO: 2306444 - RNA, 20 nt, Human
uaaagaaagagagaaaauaa

SEQ ID NO: 2306445 - RNA, 19 nt, Human
uaaagaaagagagaaaaua

SEQ ID NO: 2306446 - RNA, 18 nt, Human
uaaagaaagagagaaaau

SEQ ID NO: 2306447 - RNA, 19 nt, Human
aauaaaaugaggacauguu

SEQ ID NO: 2306448 - RNA, 18 nt, Human
aauaaaaucauguacauu

SEQ ID NO: 2306449 - RNA, 11 nt, Human
aauaaaaucau

SEQ ID NO: 2306450 - RNA, 18 nt, Human
aauaaaggaugugauugu

SEQ ID NO: 2306451 - RNA, 14 nt, Human
aauaaaguaauuau

SEQ ID NO: 2306452 - RNA, 15 nt, Human
aauaaaguauauaua

SEQ ID NO: 2306453 - RNA, 11 nt, Human
aauaaaguauc

SEQ ID NO: 2306454 - RNA, 15 nt, Human
aauaaaguaucaugc

SEQ ID NO: 2306455 - RNA, 16 nt, Human
aauaaaguacaagagc

SEQ ID NO: 2306456 - RNA, 15 nt, Human
aauaaaauaauucua

SEQ ID NO: 2306457 - RNA, 14 nt, Human
aauaaaauaaaaau

SEQ ID NO: 2306458 - RNA, 16 nt, Human
aauaaaauaauucuaa

SEQ ID NO: 2306459 - RNA, 17 nt, Human
aauaaaauaauucuaaa

SEQ ID NO: 2306460 - RNA, 16 nt, Human
aauaaaaucuugaaaa

SEQ ID NO: 2306461 - RNA, 22 nt, Human
aauaaaauccauacauuugugu

SEQ ID NO: 2306462 - RNA, 13 nt, Human
aauaaaaauggau

SEQ ID NO: 2306463 - RNA, 15 nt, Human
aauaaaaauguuuaa

SEQ ID NO: 2306464 - RNA, 14 nt, Human
aauaaaaauguuua

SEQ ID NO: 2306465 - RNA, 16 nt, Human
aauaaaagauauaaau

SEQ ID NO: 2306466 - RNA, 21 nt, Human
aauaaaagcagcaucugcuaa

SEQ ID NO: 2306467 - RNA, 18 nt, Human
aauaaaagcagcaucugc

SEQ ID NO: 2306468 - RNA, 22 nt, Human
uaaagcaacugucuauuucugc

SEQ ID NO: 2306469 - RNA, 12 nt, Human
aauaaaaggaaa

SEQ ID NO: 2306470 - RNA, 13 nt, Human
aauaaaaggaaaa

SEQ ID NO: 2306471 - RNA, 14 nt, Human
aauaaaaggaaaag

SEQ ID NO: 2306472 - RNA, 17 nt, Human
aauaaaaggaaaagcaa

SEQ ID NO: 2306473 - RNA, 16 nt, Human
aauaaaagugaccuuu

SEQ ID NO: 2306474 - RNA, 21 nt, Human
aauaaaaggaagccaaagagu

SEQ ID NO: 2306475 - RNA, 20 nt, Human
aauaaaaggaagccaaagag

SEQ ID NO: 2306476 - RNA, 21 nt, Human
aauaaaaacugacuccuuaga

SEQ ID NO: 2306477 - RNA, 19 nt, Human
aauaaaaacugacuccuua

SEQ ID NO: 2306478 - RNA, 14 nt, Human
aauaaaaaccaaga

SEQ ID NO: 2306479 - RNA, 22 nt, Human
aauaaaaaccaagaagaugucu

SEQ ID NO: 2306480 - RNA, 12 nt, Human
aauaaaaacaaa

SEQ ID NO: 2306481 - RNA, 16 nt, Human
aauaaaaauaaauuug

SEQ ID NO: 2306482 - RNA, 15 nt, Human
aauaaaaauaaauuc

SEQ ID NO: 2306483 - RNA, 22 nt, Human
aauaaaaauauuguguugugaa

SEQ ID NO: 2306484 - RNA, 12 nt, Human
aauaaaaauaau

SEQ ID NO: 2306485 - RNA, 18 nt, Human
aauaaaaaaaagaaaaaa

SEQ ID NO: 2306486 - RNA, 17 nt, Human
aauaaaaaaaagaaaaa

SEQ ID NO: 2306487 - RNA, 13 nt, Human
aauaaaaaaugga

SEQ ID NO: 2306488 - RNA, 22 nt, Human
uaaaguguaaauccuuuuucuu

SEQ ID NO: 2306489 - RNA, 16 nt, Human
uaaaguguaaauccuu

SEQ ID NO: 2306490 - RNA, 21 nt, Human
uaaaguggguuauucuggagu

SEQ ID NO: 2306491 - RNA, 22 nt, Human
uaaaguggguuauucuggaguu

SEQ ID NO: 2306492 - RNA, 14 nt, Human
uaaaguguauuuuu

SEQ ID NO: 2306493 - RNA, 19 nt, Human
uaaaguguauuuuuuuacu

SEQ ID NO: 2306494 - RNA, 15 nt, Human
uaaaguguauuuuuu

SEQ ID NO: 2306495 - RNA, 13 nt, Human
uaaagucccaggu

SEQ ID NO: 2306496 - RNA, 18 nt, Human
uaaagucagguccaauuu

SEQ ID NO: 2306497 - RNA, 20 nt, Human
uaaagucgagcuuuucuaaa

SEQ ID NO: 2306498 - RNA, 17 nt, Human
uaaagucagguccaauu

SEQ ID NO: 2306499 - RNA, 21 nt, Human
uaaagggaaaggauucaugug

SEQ ID NO: 2306500 - RNA, 17 nt, Human
uaaaggcuucucucuca

SEQ ID NO: 2306501 - RNA, 19 nt, Human
uaaaggcuucucucucacc

SEQ ID NO: 2306502 - RNA, 13 nt, Human
uaaagucaggggu

SEQ ID NO: 2306503 - RNA, 16 nt, Human
uaaagugauaauuucu

SEQ ID NO: 2306504 - RNA, 15 nt, Human
uaaagugauauuucc

SEQ ID NO: 2306505 - RNA, 20 nt, Human
uaaagugagcucuaugggca

SEQ ID NO: 2306506 - RNA, 16 nt, Human
uaaagugauauuuccc

SEQ ID NO: 2306507 - RNA, 19 nt, Human
uaaagucgagcuuuucuaa

SEQ ID NO: 2306508 - RNA, 11 nt, Human
uaaagugauua

SEQ ID NO: 2306509 - RNA, 22 nt, Human
uaaagugauuaaacgugcagac

SEQ ID NO: 2306510 - RNA, 16 nt, Human
uaaagugauuaaacgu

SEQ ID NO: 2306511 - RNA, 18 nt, Human
uaaagugauuaaacgugc

SEQ ID NO: 2306512 - RNA, 17 nt, Human
aauaaggccuuaauaug

SEQ ID NO: 2306513 - RNA, 14 nt, Human
aauaagguugaaca

SEQ ID NO: 2306514 - RNA, 16 nt, Human
aauaaggucaaugcca

SEQ ID NO: 2306515 - RNA, 15 nt, Human
aauaacuaaaaggua

SEQ ID NO: 2306516 - RNA, 20 nt, Human
aauaacauaauuuguacaua

SEQ ID NO: 2306517 - RNA, 15 nt, Human
aauaacagugcauau

SEQ ID NO: 2306518 - RNA, 19 nt, Human
aauaacuaguguugcuugg

SEQ ID NO: 2306519 - RNA, 14 nt, Human
aauaacuccuucuu

SEQ ID NO: 2306520 - RNA, 16 nt, Human
aauaacuacuguguuc

SEQ ID NO: 2306521 - RNA, 15 nt, Human
aauaacuacuguguu

SEQ ID NO: 2306522 - RNA, 14 nt, Human
aauaacuacugugu

SEQ ID NO: 2306523 - RNA, 13 nt, Human
aauaacuacugug

SEQ ID NO: 2306524 - RNA, 18 nt, Human
aauaacuacuguguuccu

SEQ ID NO: 2306525 - RNA, 17 nt, Human
aauaacuacuguguucc

SEQ ID NO: 2306526 - RNA, 19 nt, Human
aauaacuacuguguuccug

SEQ ID NO: 2306527 - RNA, 14 nt, Human
aauaagcuaaagag

SEQ ID NO: 2306528 - RNA, 17 nt, Human
aauaagcaucaaacucu

SEQ ID NO: 2306529 - RNA, 13 nt, Human
aauaagcuaaaga

SEQ ID NO: 2306530 - RNA, 12 nt, Human
aauaaauaaaug

SEQ ID NO: 2306531 - RNA, 14 nt, Human
aauaaauaaaugca

SEQ ID NO: 2306532 - RNA, 19 nt, Human
aauaaaguuugcuuagaaa

SEQ ID NO: 2306533 - RNA, 16 nt, Human
aauaaaguaucaugca

SEQ ID NO: 2306534 - RNA, 17 nt, Human
aauaaaguaucaugcau

SEQ ID NO: 2306535 - RNA, 18 nt, Human
aauaaaguaucaugcauu

SEQ ID NO: 2306536 - RNA, 19 nt, Human
aauaaaguaucaugcauuc

SEQ ID NO: 2306537 - RNA, 21 nt, Human
aauaaauagcuauauccaugu

SEQ ID NO: 2306538 - RNA, 19 nt, Human
aauaaauagcuauauccau

SEQ ID NO: 2306539 - RNA, 20 nt, Human
aauaaauaccucuuagcuga

SEQ ID NO: 2306540 - RNA, 11 nt, Human
aauaaauauau

SEQ ID NO: 2306541 - RNA, 12 nt, Human
aauaaauauaua

SEQ ID NO: 2306542 - RNA, 13 nt, Human
aauaaauauauau

SEQ ID NO: 2306543 - RNA, 15 nt, Human
aauaaauauauauau

SEQ ID NO: 2306544 - RNA, 16 nt, Human
aauaaauauauauauc

SEQ ID NO: 2306545 - RNA, 14 nt, Human
aauaaauauauaua

SEQ ID NO: 2306546 - RNA, 15 nt, Human
aauaaauauauauaa

SEQ ID NO: 2306547 - RNA, 16 nt, Human
aauaaauauauauaaa

SEQ ID NO: 2306548 - RNA, 19 nt, Human
aauaaauauauauaaaccu

SEQ ID NO: 2306549 - RNA, 17 nt, Human
aauaaauuauuuauuau

SEQ ID NO: 2306550 - RNA, 18 nt, Human
aauaaauuaaaacaugca

SEQ ID NO: 2306551 - RNA, 20 nt, Human
aauaaaugugaaauucuguc

SEQ ID NO: 2306552 - RNA, 12 nt, Human
aauaaauuauuu

SEQ ID NO: 2306553 - RNA, 21 nt, Human
aauaaaugugccuucauuuuu

SEQ ID NO: 2306554 - RNA, 12 nt, Human
aauaaaugugcc

SEQ ID NO: 2306555 - RNA, 22 nt, Human
aauaacauguaauuaaguacua

SEQ ID NO: 2306556 - RNA, 19 nt, Human
aauaacauguaauuaagua

SEQ ID NO: 2306557 - RNA, 12 nt, Human
aauaacauguaa

SEQ ID NO: 2306558 - RNA, 16 nt, Human
aauaacaagucgauga

SEQ ID NO: 2306559 - RNA, 14 nt, Human
aauaaauucagaua

SEQ ID NO: 2306560 - RNA, 21 nt, Human
aauaaauuugguucuaauaga

SEQ ID NO: 2306561 - RNA, 18 nt, Human
aauaaauuugguucuaau

SEQ ID NO: 2306562 - RNA, 15 nt, Human
aauaacaauaaaaga

SEQ ID NO: 2306563 - RNA, 21 nt, Human
uaaauaaauuguauauucacu

SEQ ID NO: 2306564 - RNA, 22 nt, Human
uaaauaaauuguauauucacuu

SEQ ID NO: 2306565 - RNA, 20 nt, Human
uaaauaaauuguuugaccau

SEQ ID NO: 2306566 - RNA, 13 nt, Human
uaaauaaauuguu

SEQ ID NO: 2306567 - RNA, 15 nt, Human
uaaauaaauuguuug

SEQ ID NO: 2306568 - RNA, 18 nt, Human
uaaauaaaugucauuaaa

SEQ ID NO: 2306569 - RNA, 12 nt, Human
uaaauaaauugu

SEQ ID NO: 2306570 - RNA, 14 nt, Human
uaaauaaauuguau

SEQ ID NO: 2306571 - RNA, 15 nt, Human
uaaauaaauuguaua

SEQ ID NO: 2306572 - RNA, 16 nt, Human
uaaauaaauuguauau

SEQ ID NO: 2306573 - RNA, 17 nt, Human
uaaauaaauuguauauu

SEQ ID NO: 2306574 - RNA, 18 nt, Human
uaaauaaauuguauauuc

SEQ ID NO: 2306575 - RNA, 19 nt, Human
uaaauaaauuguauauuca

SEQ ID NO: 2306576 - RNA, 20 nt, Human
uaaauaaauuguauauucac

SEQ ID NO: 2306577 - RNA, 16 nt, Human
uaaauaaaugucauua

SEQ ID NO: 2306578 - RNA, 22 nt, Human
aauacaccaccucacuccuguu

SEQ ID NO: 2306579 - RNA, 22 nt, Human
uaaauaaauguaucuuauucac

SEQ ID NO: 2306580 - RNA, 22 nt, Human
uaaauaaaugaaguauuucuca

SEQ ID NO: 2306581 - RNA, 20 nt, Human
aauacaccacuacauucugu

SEQ ID NO: 2306582 - RNA, 18 nt, Human
aauacaccacuacauucu

SEQ ID NO: 2306583 - RNA, 16 nt, Human
aauacaccacuacauu

SEQ ID NO: 2306584 - RNA, 14 nt, Human
aauacaauaaguua

SEQ ID NO: 2306585 - RNA, 18 nt, Human
aauaauuauccagaguuu

SEQ ID NO: 2306586 - RNA, 20 nt, Human
aauaauuaugaguuugcuua

SEQ ID NO: 2306587 - RNA, 23 nt, Human
aauacacauagcauguaauggua

SEQ ID NO: 2306588 - RNA, 20 nt, Human
aauacaccaccucacuccug

SEQ ID NO: 2306589 - RNA, 21 nt, Human
aauacaccaccucacuccugu

SEQ ID NO: 2306590 - RNA, 15 nt, Human
aauacacaaguaaac

SEQ ID NO: 2306591 - RNA, 17 nt, Human
aauacacaaguaaacau

SEQ ID NO: 2306592 - RNA, 15 nt, Human
aauacaccacuacau

SEQ ID NO: 2306593 - RNA, 14 nt, Human
aauacacacucaaa

SEQ ID NO: 2306594 - RNA, 20 nt, Human
uaaauagcuauauccaugua

SEQ ID NO: 2306595 - RNA, 19 nt, Human
uaaauagcuauauccaugu

SEQ ID NO: 2306596 - RNA, 22 nt, Human
uaaauagcuauauccauguacu

SEQ ID NO: 2306597 - RNA, 16 nt, Human
uaaauaggagaggaug

SEQ ID NO: 2306598 - RNA, 21 nt, Human
uaaauaggagaggaugagagc

SEQ ID NO: 2306599 - RNA, 17 nt, Human
uaaauacagacacuaag

SEQ ID NO: 2306600 - RNA, 19 nt, Human
uaaauaguaaaaauaaaau

SEQ ID NO: 2306601 - RNA, 20 nt, Human
uaaauaguaaaaauaaaauu

SEQ ID NO: 2306602 - RNA, 14 nt, Human
uaaauagcuauauc

SEQ ID NO: 2306603 - RNA, 16 nt, Human
uaaauacagacacuaa

SEQ ID NO: 2306604 - RNA, 14 nt, Human
uaaauacagacacu

SEQ ID NO: 2306605 - RNA, 15 nt, Human
uaaauacagacacua

SEQ ID NO: 2306606 - RNA, 18 nt, Human
uaaauagcuauauccaug

SEQ ID NO: 2306607 - RNA, 17 nt, Human
uaaauagcuauauccau

SEQ ID NO: 2306608 - RNA, 16 nt, Human
uaaauagcuauaucca

SEQ ID NO: 2306609 - RNA, 15 nt, Human
uaaauagcuauaucc

SEQ ID NO: 2306610 - RNA, 23 nt, Human
uaaauacaccaccucacuccugu

SEQ ID NO: 2306611 - RNA, 19 nt, Human
uaaauacacauagcaugua

SEQ ID NO: 2306612 - RNA, 18 nt, Human
uaaauacacaacacacac

SEQ ID NO: 2306613 - RNA, 17 nt, Human
uaaauacaaaacuucca

SEQ ID NO: 2306614 - RNA, 17 nt, Human
uaaauccuuuuucuuua

SEQ ID NO: 2306615 - RNA, 15 nt, Human
uaaaucccauucaua

SEQ ID NO: 2306616 - RNA, 18 nt, Human
uaaaucgcuuuugauaau

SEQ ID NO: 2306617 - RNA, 19 nt, Human
uaaaucgcuuuugauaauc

SEQ ID NO: 2306618 - RNA, 23 nt, Human
uaaaucccauucauaacuuucau

SEQ ID NO: 2306619 - RNA, 17 nt, Human
uaaauccuuuacuguua

SEQ ID NO: 2306620 - RNA, 19 nt, Human
uaaauccuuuuucuuuaua

SEQ ID NO: 2306621 - RNA, 15 nt, Human
uaaaucuagacucaa

SEQ ID NO: 2306622 - RNA, 18 nt, Human
uaaaucuaguauacauug

SEQ ID NO: 2306623 - RNA, 19 nt, Human
uaaaucuccaaaauaaaac

SEQ ID NO: 2306624 - RNA, 18 nt, Human
uaaauaguauuugagagu

SEQ ID NO: 2306625 - RNA, 16 nt, Human
uaaauauaauucugua

SEQ ID NO: 2306626 - RNA, 18 nt, Human
uaaauauaauucuguaaa

SEQ ID NO: 2306627 - RNA, 19 nt, Human
uaaauauaauucuguaaau

SEQ ID NO: 2306628 - RNA, 13 nt, Human
uaaauauaauucu

SEQ ID NO: 2306629 - RNA, 15 nt, Human
uaaauauaauucugu

SEQ ID NO: 2306630 - RNA, 12 nt, Human
uaacaaauuaug

SEQ ID NO: 2306631 - RNA, 18 nt, Human
uaacaaaaacuacacaua

SEQ ID NO: 2306632 - RNA, 22 nt, Human
uaacaaaacacucggcauuuca

SEQ ID NO: 2306633 - RNA, 20 nt, Human
uaacaaaaaaauauauuuaa

SEQ ID NO: 2306634 - RNA, 23 nt, Human
uaacaaaaaaauauauuuaauga

SEQ ID NO: 2306635 - RNA, 19 nt, Human
uaaauuuuuuuuguuucau

SEQ ID NO: 2306636 - RNA, 16 nt, Human
uaaauuuuuuuccuua

SEQ ID NO: 2306637 - RNA, 16 nt, Human
uaaauuuugaguucua

SEQ ID NO: 2306638 - RNA, 15 nt, Human
uaaauuuuaauuuau

SEQ ID NO: 2306639 - RNA, 16 nt, Human
uaaauuuuacccuuua

SEQ ID NO: 2306640 - RNA, 18 nt, Human
uaaauuuuacccuuuaga

SEQ ID NO: 2306641 - RNA, 13 nt, Human
uaacaagccaccc

SEQ ID NO: 2306642 - RNA, 15 nt, Human
uaacaagcucccagg

SEQ ID NO: 2306643 - RNA, 16 nt, Human
uaacaagguccaagau

SEQ ID NO: 2306644 - RNA, 20 nt, Human
uaacaagucgaugaacuauu

SEQ ID NO: 2306645 - RNA, 15 nt, Human
uaacaaugcuguauu

SEQ ID NO: 2306646 - RNA, 17 nt, Human
uaacaaugcuguauuuu

SEQ ID NO: 2306647 - RNA, 16 nt, Human
uaacaacuaugauuug

SEQ ID NO: 2306648 - RNA, 21 nt, Human
uaacaacuaugauuuggaaaa

SEQ ID NO: 2306649 - RNA, 22 nt, Human
uaacaacuaugauuuggaaaau

SEQ ID NO: 2306650 - RNA, 14 nt, Human
uaacaaccuggaga

SEQ ID NO: 2306651 - RNA, 13 nt, Human
uaacaacuaggga

SEQ ID NO: 2306652 - RNA, 14 nt, Human
uaacaagaaacuca

SEQ ID NO: 2306653 - RNA, 18 nt, Human
uaacaagaucuuucagga

SEQ ID NO: 2306654 - RNA, 17 nt, Human
uaacaagaucuuucagg

SEQ ID NO: 2306655 - RNA, 16 nt, Human
uaacaagaucuuucag

SEQ ID NO: 2306656 - RNA, 18 nt, Human
uaacaagaaacucacccc

SEQ ID NO: 2306657 - RNA, 22 nt, Human
uaaauuaggaauaaauaaaaau

SEQ ID NO: 2306658 - RNA, 21 nt, Human
uaaauuaggaauaaauaaaaa

SEQ ID NO: 2306659 - RNA, 18 nt, Human
uaaauuaguauuuauuua

SEQ ID NO: 2306660 - RNA, 17 nt, Human
uaaauuaggaauaaaua

SEQ ID NO: 2306661 - RNA, 14 nt, Human
uaaauuaggaauaa

SEQ ID NO: 2306662 - RNA, 13 nt, Human
uaaauuaagacau

SEQ ID NO: 2306663 - RNA, 13 nt, Human
uaaauuaaucuuu

SEQ ID NO: 2306664 - RNA, 19 nt, Human
uaaauuacaauugucauuu

SEQ ID NO: 2306665 - RNA, 20 nt, Human
uaaauguuuuuuuuuaaaga

SEQ ID NO: 2306666 - RNA, 18 nt, Human
uaaauguuuuucuaugua

SEQ ID NO: 2306667 - RNA, 20 nt, Human
uaaauguuuuucuauguagu

SEQ ID NO: 2306668 - RNA, 12 nt, Human
uaaauuaagaca

SEQ ID NO: 2306669 - RNA, 15 nt, Human
uaaauuaagacaugc

SEQ ID NO: 2306670 - RNA, 22 nt, Human
uaaauuaacuuuuauaaacuuu

SEQ ID NO: 2306671 - RNA, 17 nt, Human
uaaaugaggggccucag

SEQ ID NO: 2306672 - RNA, 21 nt, Human
uaaaugauguggugccugagg

SEQ ID NO: 2306673 - RNA, 17 nt, Human
uaaaugauucuuaguga

SEQ ID NO: 2306674 - RNA, 17 nt, Human
uaaaugauuucauucaa

SEQ ID NO: 2306675 - RNA, 15 nt, Human
uaaauguugacaugg

SEQ ID NO: 2306676 - RNA, 13 nt, Human
uaaaugaauguuu

SEQ ID NO: 2306677 - RNA, 19 nt, Human
uaaaucuaguauacauugu

SEQ ID NO: 2306678 - RNA, 12 nt, Human
uaaaugaauguu

SEQ ID NO: 2306679 - RNA, 16 nt, Human
uaaaugagcuauguau

SEQ ID NO: 2306680 - RNA, 18 nt, Human
uaaaugagcuauguauua

SEQ ID NO: 2306681 - RNA, 21 nt, Human
uaaaucuccaaaauaaaacuu

SEQ ID NO: 2306682 - RNA, 20 nt, Human
uaaaucuccaaaauaaaacu

SEQ ID NO: 2306683 - RNA, 21 nt, Human
guggcaagcugugacuucucc

SEQ ID NO: 2306684 - RNA, 22 nt, Human
guggcaaagccuucauugccuu

SEQ ID NO: 2306685 - RNA, 22 nt, Human
guggcacacaccuguaguccca

SEQ ID NO: 2306686 - RNA, 16 nt, Human
guggcaaggcugugcu

SEQ ID NO: 2306687 - RNA, 12 nt, Human
guggcacaggcc

SEQ ID NO: 2306688 - RNA, 13 nt, Human
guggcaaggcugu

SEQ ID NO: 2306689 - RNA, 15 nt, Human
guggcaaggcugugc

SEQ ID NO: 2306690 - RNA, 23 nt, Human
guggauuuaacagaaauguacag

SEQ ID NO: 2306691 - RNA, 21 nt, Human
guggauuuugguuuuguuccc

SEQ ID NO: 2306692 - RNA, 15 nt, Human
guggacuggccccug

SEQ ID NO: 2306693 - RNA, 16 nt, Human
guggacuggccccugg

SEQ ID NO: 2306694 - RNA, 20 nt, Human
guggauuuaacagaaaugua

SEQ ID NO: 2306695 - RNA, 14 nt, Human
guggacuccagacu

SEQ ID NO: 2306696 - RNA, 14 nt, Human
guggacucugcaca

SEQ ID NO: 2306697 - RNA, 17 nt, Human
guggacucugcacaugu

SEQ ID NO: 2306698 - RNA, 21 nt, Human
guggacuccagacucucugug

SEQ ID NO: 2306699 - RNA, 21 nt, Human
guggacucagggcagcgccag

SEQ ID NO: 2306700 - RNA, 16 nt, Human
guggacucagggcagc

SEQ ID NO: 2306701 - RNA, 15 nt, Human
guggacucagggcag

SEQ ID NO: 2306702 - RNA, 14 nt, Human
guggacucagggca

SEQ ID NO: 2306703 - RNA, 13 nt, Human
guggacuggaagg

SEQ ID NO: 2306704 - RNA, 17 nt, Human
guggacucuuugguggc

SEQ ID NO: 2306705 - RNA, 18 nt, Human
guggacucuuugguggcu

SEQ ID NO: 2306706 - RNA, 23 nt, Human
guggacucuuugguggcuuugca

SEQ ID NO: 2306707 - RNA, 21 nt, Human
guggauuuaacagaaauguac

SEQ ID NO: 2306708 - RNA, 14 nt, Human
guggcaccagcagc

SEQ ID NO: 2306709 - RNA, 13 nt, Human
guggcaccagcag

SEQ ID NO: 2306710 - RNA, 16 nt, Human
guggcacaggcccccu

SEQ ID NO: 2306711 - RNA, 23 nt, Human
guggcagauaaucagccucuuaa

SEQ ID NO: 2306712 - RNA, 21 nt, Human
guggcagauaaucagccucuu

SEQ ID NO: 2306713 - RNA, 20 nt, Human
guggcagauaaucagccucu

SEQ ID NO: 2306714 - RNA, 19 nt, Human
guggcacuuuuucauuugc

SEQ ID NO: 2306715 - RNA, 15 nt, Human
guggcagagcuugga

SEQ ID NO: 2306716 - RNA, 23 nt, Human
guggcagagcuuggacuggaugc

SEQ ID NO: 2306717 - RNA, 14 nt, Human
guggcagcugcggu

SEQ ID NO: 2306718 - RNA, 22 nt, Human
guggcagcucaccucucccuug

SEQ ID NO: 2306719 - RNA, 23 nt, Human
aagaccagagauaguggggagac

SEQ ID NO: 2306720 - RNA, 13 nt, Human
aagacccaaaagg

SEQ ID NO: 2306721 - RNA, 22 nt, Human
aagaauuuucagaccccagcgg

SEQ ID NO: 2306722 - RNA, 19 nt, Human
aagaauuuuaaaaaugaau

SEQ ID NO: 2306723 - RNA, 20 nt, Human
aagaauuuuaaaaaugaauc

SEQ ID NO: 2306724 - RNA, 13 nt, Human
aagaauuuuuaaa

SEQ ID NO: 2306725 - RNA, 20 nt, Human
aagaauuuucagaccccagc

SEQ ID NO: 2306726 - RNA, 13 nt, Human
aagaauuuuaaaa

SEQ ID NO: 2306727 - RNA, 14 nt, Human
aagaauuuuaaaaa

SEQ ID NO: 2306728 - RNA, 15 nt, Human
aagaauuuuaaaaau

SEQ ID NO: 2306729 - RNA, 16 nt, Human
aagaauuuuaaaaaug

SEQ ID NO: 2306730 - RNA, 17 nt, Human
aagaauuuuaaaaauga

SEQ ID NO: 2306731 - RNA, 18 nt, Human
aagaauuuuaaaaaugaa

SEQ ID NO: 2306732 - RNA, 19 nt, Human
aagaauucaaacuggggcc

SEQ ID NO: 2306733 - RNA, 16 nt, Human
aagaauuauuuugaug

SEQ ID NO: 2306734 - RNA, 23 nt, Human
aagaauuucuugguaagaagccg

SEQ ID NO: 2306735 - RNA, 22 nt, Human
aagaauuucuugguaagaagcc

SEQ ID NO: 2306736 - RNA, 20 nt, Human
aagaauuucuugguaagaag

SEQ ID NO: 2306737 - RNA, 18 nt, Human
aagaauugaacccaggag

SEQ ID NO: 2306738 - RNA, 16 nt, Human
aagaauugaacccagg

SEQ ID NO: 2306739 - RNA, 15 nt, Human
aagaauguuuauagc

SEQ ID NO: 2306740 - RNA, 15 nt, Human
aagaauauuugaaug

SEQ ID NO: 2306741 - RNA, 21 nt, Human
aagaaucacaauaauuuucua

SEQ ID NO: 2306742 - RNA, 13 nt, Human
aagaauauuuuaa

SEQ ID NO: 2306743 - RNA, 19 nt, Human
guggcagagcuuggacugg

SEQ ID NO: 2306744 - RNA, 17 nt, Human
guggcagcugcggucca

SEQ ID NO: 2306745 - RNA, 11 nt, Human
aagaauauuug

SEQ ID NO: 2306746 - RNA, 13 nt, Human
aagaauauucagg

SEQ ID NO: 2306747 - RNA, 15 nt, Human
aagaaguaggcauga

SEQ ID NO: 2306748 - RNA, 21 nt, Human
aagaagguuaccaagaagccu

SEQ ID NO: 2306749 - RNA, 18 nt, Human
aagaagguuuguguuuuu

SEQ ID NO: 2306750 - RNA, 18 nt, Human
gugcugcccugcccaccu

SEQ ID NO: 2306751 - RNA, 24 nt, Human
aagaaggguccuucccucucccca

SEQ ID NO: 2306752 - RNA, 21 nt, Human
aagaaggguccuucccucucc

SEQ ID NO: 2306753 - RNA, 17 nt, Human
aagaaggguccuucccu

SEQ ID NO: 2306754 - RNA, 23 nt, Human
aagaagguuucagaaagaagugg

SEQ ID NO: 2306755 - RNA, 13 nt, Human
aagaagggaugga

SEQ ID NO: 2306756 - RNA, 22 nt, Human
aagaagggcuagaaccuggagg

SEQ ID NO: 2306757 - RNA, 14 nt, Human
aagaagggagaaga

SEQ ID NO: 2306758 - RNA, 15 nt, Human
aagaagggagaagaa

SEQ ID NO: 2306759 - RNA, 17 nt, Human
aagaagggagaagaaag

SEQ ID NO: 2306760 - RNA, 13 nt, Human
gugcugcuucccu

SEQ ID NO: 2306761 - RNA, 16 nt, Human
gugcugcuucccucug

SEQ ID NO: 2306762 - RNA, 18 nt, Human
gugcuggaauucuaacaa

SEQ ID NO: 2306763 - RNA, 21 nt, Human
gugcugcccugcccaccuggc

SEQ ID NO: 2306764 - RNA, 19 nt, Human
gugcugcccugcccaccug

SEQ ID NO: 2306765 - RNA, 20 nt, Human
gugcugcccugcccaccugg

SEQ ID NO: 2306766 - RNA, 19 nt, Human
gugcugggccccugccucu

SEQ ID NO: 2306767 - RNA, 20 nt, Human
gugcuggauggagcccaggc

SEQ ID NO: 2306768 - RNA, 13 nt, Human
gugcuguauaaaa

SEQ ID NO: 2306769 - RNA, 15 nt, Human
gugcuguauaaaauc

SEQ ID NO: 2306770 - RNA, 16 nt, Human
gugcugguguccugac

SEQ ID NO: 2306771 - RNA, 19 nt, Human
gugcugguguccugaccac

SEQ ID NO: 2306772 - RNA, 20 nt, Human
gugcugguguccugaccacc

SEQ ID NO: 2306773 - RNA, 23 nt, Human
gugcugguguccugaccacccuc

SEQ ID NO: 2306774 - RNA, 13 nt, Human
gugcugguguccu

SEQ ID NO: 2306775 - RNA, 15 nt, Human
gugcugguguccuga

SEQ ID NO: 2306776 - RNA, 12 nt, Human
gugcuggagcca

SEQ ID NO: 2306777 - RNA, 15 nt, Human
gugcuggagccacua

SEQ ID NO: 2306778 - RNA, 18 nt, Human
gugcuggagccacuaacu

SEQ ID NO: 2306779 - RNA, 19 nt, Human
gugcuggagccacuaacua

SEQ ID NO: 2306780 - RNA, 14 nt, Human
gugcuggaggacug

SEQ ID NO: 2306781 - RNA, 16 nt, Human
gugcuggaggacugag

SEQ ID NO: 2306782 - RNA, 16 nt, Human
gugcuggaggugggag

SEQ ID NO: 2306783 - RNA, 17 nt, Human
gugcuggaggugggagc

SEQ ID NO: 2306784 - RNA, 19 nt, Human
gugcuggaggugggagcag

SEQ ID NO: 2306785 - RNA, 21 nt, Human
gugcuggaggugggagcagga

SEQ ID NO: 2306786 - RNA, 24 nt, Human
gugcuggaggugggagcaggagau

SEQ ID NO: 2306787 - RNA, 16 nt, Human
gugcugggccccugcc

SEQ ID NO: 2306788 - RNA, 15 nt, Human
gugcuggcaaccacu

SEQ ID NO: 2306789 - RNA, 18 nt, Human
gugcuggcaccaccaggc

SEQ ID NO: 2306790 - RNA, 18 nt, Human
gugcuggauggagcccag

SEQ ID NO: 2306791 - RNA, 19 nt, Human
gugcuggauggagcccagg

SEQ ID NO: 2306792 - RNA, 18 nt, Human
gugcuguccucagguggc

SEQ ID NO: 2306793 - RNA, 21 nt, Human
gugcuguauaaaaucagccaa

SEQ ID NO: 2306794 - RNA, 16 nt, Human
gugcuguauaaaauca

SEQ ID NO: 2306795 - RNA, 17 nt, Human
gugcuguauaaaaucag

SEQ ID NO: 2306796 - RNA, 12 nt, Human
gugcugugaaaa

SEQ ID NO: 2306797 - RNA, 20 nt, Human
gugcugucugaucugugcuu

SEQ ID NO: 2306798 - RNA, 15 nt, Human
gugcugugcccaagu

SEQ ID NO: 2306799 - RNA, 16 nt, Human
gugcugugcccaaguu

SEQ ID NO: 2306800 - RNA, 13 nt, Human
gugcuguggaagc

SEQ ID NO: 2306801 - RNA, 11 nt, Human
gugcuguggcc

SEQ ID NO: 2306802 - RNA, 14 nt, Human
gugcuguggaagca

SEQ ID NO: 2306803 - RNA, 14 nt, Human
gugcuguggccagg

SEQ ID NO: 2306804 - RNA, 15 nt, Human
gugcuguggccaggg

SEQ ID NO: 2306805 - RNA, 16 nt, Human
gugcuguggccagggu

SEQ ID NO: 2306806 - RNA, 17 nt, Human
gugcuguggccagggug

SEQ ID NO: 2306807 - RNA, 18 nt, Human
gugcuguggccaggguga

SEQ ID NO: 2306808 - RNA, 17 nt, Human
gugcuguggccugggca

SEQ ID NO: 2306809 - RNA, 16 nt, Human
gugcuguggccugggc

SEQ ID NO: 2306810 - RNA, 19 nt, Human
gugcuguggccugggcaag

SEQ ID NO: 2306811 - RNA, 23 nt, Human
gugcuguggccagggugagagcu

SEQ ID NO: 2306812 - RNA, 16 nt, Human
guggaagaagagggag

SEQ ID NO: 2306813 - RNA, 14 nt, Human
guggaagcccuccu

SEQ ID NO: 2306814 - RNA, 13 nt, Human
guggaagcccucc

SEQ ID NO: 2306815 - RNA, 20 nt, Human
guggaagaggggacaggucc

SEQ ID NO: 2306816 - RNA, 17 nt, Human
guggaagcccuccuucc

SEQ ID NO: 2306817 - RNA, 16 nt, Human
guggaagcccuccuuc

SEQ ID NO: 2306818 - RNA, 18 nt, Human
guggaagcccuccuucca

SEQ ID NO: 2306819 - RNA, 20 nt, Human
guggaauuauuuuaaaagau

SEQ ID NO: 2306820 - RNA, 17 nt, Human
guggaagagggcugcaa

SEQ ID NO: 2306821 - RNA, 20 nt, Human
guggaagaagggagaagaaa

SEQ ID NO: 2306822 - RNA, 15 nt, Human
guggaagaggggaca

SEQ ID NO: 2306823 - RNA, 16 nt, Human
guggaagaggggacag

SEQ ID NO: 2306824 - RNA, 17 nt, Human
guggaagaggggacagg

SEQ ID NO: 2306825 - RNA, 14 nt, Human
guggaagagggcug

SEQ ID NO: 2306826 - RNA, 17 nt, Human
guggaagaagagggaga

SEQ ID NO: 2306827 - RNA, 15 nt, Human
guggaagaagggaga

SEQ ID NO: 2306828 - RNA, 16 nt, Human
guggaagaagggagaa

SEQ ID NO: 2306829 - RNA, 18 nt, Human
guggaagaagggagaaga

SEQ ID NO: 2306830 - RNA, 15 nt, Human
guggacaccaggagu

SEQ ID NO: 2306831 - RNA, 20 nt, Human
guggaaggcaucagucccua

SEQ ID NO: 2306832 - RNA, 22 nt, Human
guggacaccaggagucccuggu

SEQ ID NO: 2306833 - RNA, 21 nt, Human
guggacaccaggagucccugg

SEQ ID NO: 2306834 - RNA, 15 nt, Human
guggacuaaaagaua

SEQ ID NO: 2306835 - RNA, 23 nt, Human
guggacuaaaagauauaagugcu

SEQ ID NO: 2306836 - RNA, 14 nt, Human
guggacuaaaagau

SEQ ID NO: 2306837 - RNA, 14 nt, Human
guggacacagcucu

SEQ ID NO: 2306838 - RNA, 15 nt, Human
guggacacagcucuu

SEQ ID NO: 2306839 - RNA, 17 nt, Human
guggacacagcucuucu

SEQ ID NO: 2306840 - RNA, 24 nt, Human
guggacacagcucuucuccaggcu

SEQ ID NO: 2306841 - RNA, 19 nt, Human
aagaaggcagcagguggca

SEQ ID NO: 2306842 - RNA, 14 nt, Human
aagaagcuguugua

SEQ ID NO: 2306843 - RNA, 17 nt, Human
aagaagccgggaacaga

SEQ ID NO: 2306844 - RNA, 15 nt, Human
aagaagcucucuccu

SEQ ID NO: 2306845 - RNA, 14 nt, Human
aagaagcucucucc

SEQ ID NO: 2306846 - RNA, 19 nt, Human
aagaagcccccagcuaaga

SEQ ID NO: 2306847 - RNA, 16 nt, Human
aagaagcccccagcua

SEQ ID NO: 2306848 - RNA, 15 nt, Human
aagaagcccccagcu

SEQ ID NO: 2306849 - RNA, 19 nt, Human
aagaagccacagaccuagg

SEQ ID NO: 2306850 - RNA, 12 nt, Human
aagaagcaggcu

SEQ ID NO: 2306851 - RNA, 14 nt, Human
aagaagcaggcuac

SEQ ID NO: 2306852 - RNA, 19 nt, Human
aagaagcaggcuacacuga

SEQ ID NO: 2306853 - RNA, 22 nt, Human
aagaagcaccaaucaugaauua

SEQ ID NO: 2306854 - RNA, 16 nt, Human
aagaagcccaggaaag

SEQ ID NO: 2306855 - RNA, 17 nt, Human
aagaagcccaggaaagg

SEQ ID NO: 2306856 - RNA, 23 nt, Human
aagaaaaucagauggagcaugaa

SEQ ID NO: 2306857 - RNA, 20 nt, Human
aagaaaauauuuugucuaaa

SEQ ID NO: 2306858 - RNA, 15 nt, Human
aagaaaaucauauug

SEQ ID NO: 2306859 - RNA, 13 nt, Human
aagaaaaucacuu

SEQ ID NO: 2306860 - RNA, 14 nt, Human
aagaaaauauuuug

SEQ ID NO: 2306861 - RNA, 15 nt, Human
aagaaaauauuuugu

SEQ ID NO: 2306862 - RNA, 22 nt, Human
aagaaaaucuauuuuguaacuu

SEQ ID NO: 2306863 - RNA, 17 nt, Human
aagaaaaucauauugcu

SEQ ID NO: 2306864 - RNA, 20 nt, Human
aagaaaaucauauugcuucu

SEQ ID NO: 2306865 - RNA, 13 nt, Human
aagaaaauaugca

SEQ ID NO: 2306866 - RNA, 11 nt, Human
aagaaaauauu

SEQ ID NO: 2306867 - RNA, 13 nt, Human
aagaaaauauuuu

SEQ ID NO: 2306868 - RNA, 13 nt, Human
aagaaaauaucac

SEQ ID NO: 2306869 - RNA, 16 nt, Human
aagaaaggguguuuuu

SEQ ID NO: 2306870 - RNA, 16 nt, Human
aagaaaauugcugugc

SEQ ID NO: 2306871 - RNA, 21 nt, Human
aagaaauaaaaggaagccaaa

SEQ ID NO: 2306872 - RNA, 23 nt, Human
aagaaauaaaaggaagccaaaga

SEQ ID NO: 2306873 - RNA, 20 nt, Human
aagaaaguugcacggcugcu

SEQ ID NO: 2306874 - RNA, 22 nt, Human
aagaaaguugcacggcugcuga

SEQ ID NO: 2306875 - RNA, 19 nt, Human
aagaaaauacauaagacca

SEQ ID NO: 2306876 - RNA, 23 nt, Human
aagaaaauaaaaaaaagaaaaaa

SEQ ID NO: 2306877 - RNA, 22 nt, Human
aagaaaauaaaaaaaagaaaaa

SEQ ID NO: 2306878 - RNA, 16 nt, Human
aagaaaagugggccag

SEQ ID NO: 2306879 - RNA, 16 nt, Human
aagaaaagugguuguu

SEQ ID NO: 2306880 - RNA, 13 nt, Human
aagaaaauaaaaa

SEQ ID NO: 2306881 - RNA, 21 nt, Human
aagaaaauaaaaaaaagaaaa

SEQ ID NO: 2306882 - RNA, 18 nt, Human
aagaaaauaaaaaaaaga

SEQ ID NO: 2306883 - RNA, 15 nt, Human
aagaaaagugggcca

SEQ ID NO: 2306884 - RNA, 15 nt, Human
aagaaaagauaaaga

SEQ ID NO: 2306885 - RNA, 19 nt, Human
aagaaaagugaaugcucaa

SEQ ID NO: 2306886 - RNA, 22 nt, Human
aagaaaaguagguuuacauuca

SEQ ID NO: 2306887 - RNA, 22 nt, Human
aagaaaagauuuuaaucaaguu

SEQ ID NO: 2306888 - RNA, 12 nt, Human
aagaaaagauuu

SEQ ID NO: 2306889 - RNA, 14 nt, Human
aagaaaacccaccc

SEQ ID NO: 2306890 - RNA, 23 nt, Human
aagaaaagagauauuuuaaaaug

SEQ ID NO: 2306891 - RNA, 16 nt, Human
aagaaaagagcuuucu

SEQ ID NO: 2306892 - RNA, 11 nt, Human
aagaaaagaua

SEQ ID NO: 2306893 - RNA, 13 nt, Human
aagaaaaaucaug

SEQ ID NO: 2306894 - RNA, 14 nt, Human
aagaaaaaucaugu

SEQ ID NO: 2306895 - RNA, 18 nt, Human
aagaaaacaucuauucuc

SEQ ID NO: 2306896 - RNA, 17 nt, Human
aacuuguauuaaagaca

SEQ ID NO: 2306897 - RNA, 20 nt, Human
aacuugucuuuuucuggacu

SEQ ID NO: 2306898 - RNA, 18 nt, Human
aacuuguuacuaaagaaa

SEQ ID NO: 2306899 - RNA, 13 nt, Human
aacuuguuuucug

SEQ ID NO: 2306900 - RNA, 20 nt, Human
aagaaaaaggaugcacagag

SEQ ID NO: 2306901 - RNA, 19 nt, Human
aagaaaaaggaugcacaga

SEQ ID NO: 2306902 - RNA, 20 nt, Human
aagaaaaagucauccaaucu

SEQ ID NO: 2306903 - RNA, 22 nt, Human
aagaaaaaggaugcacagaguu

SEQ ID NO: 2306904 - RNA, 14 nt, Human
aacuuggaaauagu

SEQ ID NO: 2306905 - RNA, 23 nt, Human
aacuuggaaaaauccagaaagaa

SEQ ID NO: 2306906 - RNA, 18 nt, Human
gugccuggguggggcugc

SEQ ID NO: 2306907 - RNA, 17 nt, Human
gugccuggguggggcug

SEQ ID NO: 2306908 - RNA, 22 nt, Human
gugccuggguggacauggcccc

SEQ ID NO: 2306909 - RNA, 15 nt, Human
aacuuggagccccag

SEQ ID NO: 2306910 - RNA, 23 nt, Human
aacuuggaauuuguaaccucagc

SEQ ID NO: 2306911 - RNA, 12 nt, Human
aacuuggagccg

SEQ ID NO: 2306912 - RNA, 15 nt, Human
aacuuggauuuuuga

SEQ ID NO: 2306913 - RNA, 14 nt, Human
aacuuggcgcugcc

SEQ ID NO: 2306914 - RNA, 14 nt, Human
aacuuguaaauaca

SEQ ID NO: 2306915 - RNA, 23 nt, Human
aacuugguucccauuugcuccuu

SEQ ID NO: 2306916 - RNA, 18 nt, Human
aacuuguaaaugcuguca

SEQ ID NO: 2306917 - RNA, 15 nt, Human
aacuuguaaaugcug

SEQ ID NO: 2306918 - RNA, 15 nt, Human
aacuuguaaauacac

SEQ ID NO: 2306919 - RNA, 15 nt, Human
aacuuguaaaugugg

SEQ ID NO: 2306920 - RNA, 20 nt, Human
aacuuguaauuuuuuuaauu

SEQ ID NO: 2306921 - RNA, 12 nt, Human
gugccugagagu

SEQ ID NO: 2306922 - RNA, 18 nt, Human
gugccugagaggcaggca

SEQ ID NO: 2306923 - RNA, 20 nt, Human
gugccugauccagccucucc

SEQ ID NO: 2306924 - RNA, 23 nt, Human
gugccugauccagccucuccccu

SEQ ID NO: 2306925 - RNA, 18 nt, Human
gugccugauucggcuguc

SEQ ID NO: 2306926 - RNA, 19 nt, Human
gugccugauucggcugucu

SEQ ID NO: 2306927 - RNA, 21 nt, Human
gugccugauucggcugucuca

SEQ ID NO: 2306928 - RNA, 22 nt, Human
gugccugauucggcugucucag

SEQ ID NO: 2306929 - RNA, 22 nt, Human
gugccaauggaaccuccuuucu

SEQ ID NO: 2306930 - RNA, 20 nt, Human
gugccaauauguauuguaaa

SEQ ID NO: 2306931 - RNA, 21 nt, Human
gugccaauauguauuguaaac

SEQ ID NO: 2306932 - RNA, 14 nt, Human
gugccugagaggca

SEQ ID NO: 2306933 - RNA, 15 nt, Human
gugccugagaggcag

SEQ ID NO: 2306934 - RNA, 16 nt, Human
gugccugagaggcagg

SEQ ID NO: 2306935 - RNA, 17 nt, Human
gugccugagaggcaggc

SEQ ID NO: 2306936 - RNA, 15 nt, Human
gugccucugggacug

SEQ ID NO: 2306937 - RNA, 14 nt, Human
gugccucugggacu

SEQ ID NO: 2306938 - RNA, 15 nt, Human
gugccaauauguauu

SEQ ID NO: 2306939 - RNA, 17 nt, Human
gugccaauauguauugu

SEQ ID NO: 2306940 - RNA, 19 nt, Human
gugccaauauguauuguaa

SEQ ID NO: 2306941 - RNA, 17 nt, Human
gugccugggaauguauu

SEQ ID NO: 2306942 - RNA, 16 nt, Human
gugccugggaauguau

SEQ ID NO: 2306943 - RNA, 20 nt, Human
gugccuggcucagagccagu

SEQ ID NO: 2306944 - RNA, 15 nt, Human
gugccugggaaugua

SEQ ID NO: 2306945 - RNA, 16 nt, Human
gugccuggcucagagc

SEQ ID NO: 2306946 - RNA, 18 nt, Human
gugccuggcucagagcca

SEQ ID NO: 2306947 - RNA, 12 nt, Human
gugccuggccug

SEQ ID NO: 2306948 - RNA, 15 nt, Human
gugccuggccuggca

SEQ ID NO: 2306949 - RNA, 19 nt, Human
gugccuggccuggcacaca

SEQ ID NO: 2306950 - RNA, 12 nt, Human
gugccuggcuca

SEQ ID NO: 2306951 - RNA, 14 nt, Human
gugccuggcucaga

SEQ ID NO: 2306952 - RNA, 22 nt, Human
gugccuggacauuugccuugcu

SEQ ID NO: 2306953 - RNA, 16 nt, Human
gugccuggccacgccc

SEQ ID NO: 2306954 - RNA, 11 nt, Human
gugccugcagc

SEQ ID NO: 2306955 - RNA, 23 nt, Human
gugccugccugggaguuuuguau

SEQ ID NO: 2306956 - RNA, 19 nt, Human
gugccaagcacagugccug

SEQ ID NO: 2306957 - RNA, 18 nt, Human
gugccaagcacagugccu

SEQ ID NO: 2306958 - RNA, 17 nt, Human
gugccaagcacagugcc

SEQ ID NO: 2306959 - RNA, 14 nt, Human
gugccaagcagagg

SEQ ID NO: 2306960 - RNA, 16 nt, Human
gugccaagcacagugc

SEQ ID NO: 2306961 - RNA, 14 nt, Human
gugccaagcacagu

SEQ ID NO: 2306962 - RNA, 21 nt, Human
gugccaacaguguuaggccug

SEQ ID NO: 2306963 - RNA, 18 nt, Human
gugcacguggcauguggc

SEQ ID NO: 2306964 - RNA, 23 nt, Human
gugccaacacucaagaagcaggc

SEQ ID NO: 2306965 - RNA, 15 nt, Human
gugcauuuggugguu

SEQ ID NO: 2306966 - RNA, 21 nt, Human
gugcacguggagagcuggugc

SEQ ID NO: 2306967 - RNA, 21 nt, Human
gugcacguggcauguggccug

SEQ ID NO: 2306968 - RNA, 20 nt, Human
gugcauuugaggucuguucu

SEQ ID NO: 2306969 - RNA, 22 nt, Human
gugcauuugaggucuguucuuu

SEQ ID NO: 2306970 - RNA, 21 nt, Human
gugcauuugaggucuguucuu

SEQ ID NO: 2306971 - RNA, 21 nt, Human
aacugcauuaccgcguuguaa

SEQ ID NO: 2306972 - RNA, 16 nt, Human
aacugcaugcugcugg

SEQ ID NO: 2306973 - RNA, 22 nt, Human
aacugcauuaccgcguuguaaa

SEQ ID NO: 2306974 - RNA, 14 nt, Human
aacugcaugcugcu

SEQ ID NO: 2306975 - RNA, 23 nt, Human
aacugcagggaaaauuauuugca

SEQ ID NO: 2306976 - RNA, 14 nt, Human
aacugcagggaaaa

SEQ ID NO: 2306977 - RNA, 23 nt, Human
aacugcaggcccuggccuccccu

SEQ ID NO: 2306978 - RNA, 12 nt, Human
gugcacacacca

SEQ ID NO: 2306979 - RNA, 14 nt, Human
gugcacacaccaga

SEQ ID NO: 2306980 - RNA, 18 nt, Human
gugcacguggagagcugg

SEQ ID NO: 2306981 - RNA, 16 nt, Human
gugcacguggagagcu

SEQ ID NO: 2306982 - RNA, 15 nt, Human
gugcacguggagagc

SEQ ID NO: 2306983 - RNA, 18 nt, Human
gugcacguacacacacau

SEQ ID NO: 2306984 - RNA, 17 nt, Human
gugcacacaccagagcc

SEQ ID NO: 2306985 - RNA, 23 nt, Human
aacugcauuaccgcguuguaaaa

SEQ ID NO: 2306986 - RNA, 18 nt, Human
gugcacgcaguggccuuc

SEQ ID NO: 2306987 - RNA, 14 nt, Human
gugggucaaggaau

SEQ ID NO: 2306988 - RNA, 16 nt, Human
guggguauaaaagaug

SEQ ID NO: 2306989 - RNA, 16 nt, Human
guggguccaggggccc

SEQ ID NO: 2306990 - RNA, 19 nt, Human
guggguccaggggccccuc

SEQ ID NO: 2306991 - RNA, 22 nt, Human
guggguccaugggcagagccca

SEQ ID NO: 2306992 - RNA, 20 nt, Human
guggguccaugggcagagcc

SEQ ID NO: 2306993 - RNA, 18 nt, Human
guggguccaugggcagag

SEQ ID NO: 2306994 - RNA, 20 nt, Human
guggguccaggggccccucc

SEQ ID NO: 2306995 - RNA, 23 nt, Human
guggguccaggggccccuccagc

SEQ ID NO: 2306996 - RNA, 20 nt, Human
guggguagaucacgagauca

SEQ ID NO: 2306997 - RNA, 22 nt, Human
guggggguggaauaaaauacua

SEQ ID NO: 2306998 - RNA, 23 nt, Human
gugggggugcagaugagguugcu

SEQ ID NO: 2306999 - RNA, 14 nt, Human
guggguagacacac

SEQ ID NO: 2307000 - RNA, 12 nt, Human
guggguauaaaa

SEQ ID NO: 2307001 - RNA, 15 nt, Human
guggggguggaggcu

SEQ ID NO: 2307002 - RNA, 21 nt, Human
guggguagguuggacuggaaa

SEQ ID NO: 2307003 - RNA, 13 nt, Human
guggguauaaaag

SEQ ID NO: 2307004 - RNA, 15 nt, Human
guggguauaaaagau

SEQ ID NO: 2307005 - RNA, 24 nt, Human
gugggauguucagcacugucccuu

SEQ ID NO: 2307006 - RNA, 18 nt, Human
guggggggggugcugggc

SEQ ID NO: 2307007 - RNA, 19 nt, Human
guggggguagagcugaucc

SEQ ID NO: 2307008 - RNA, 14 nt, Human
gugggggucugugu

SEQ ID NO: 2307009 - RNA, 16 nt, Human
gugggggucugugugu

SEQ ID NO: 2307010 - RNA, 15 nt, Human
gugggggucugugug

SEQ ID NO: 2307011 - RNA, 20 nt, Human
gugguguuuccugcaggcca

SEQ ID NO: 2307012 - RNA, 23 nt, Human
guggugugucccccucuguccag

SEQ ID NO: 2307013 - RNA, 14 nt, Human
gugguguggagaag

SEQ ID NO: 2307014 - RNA, 22 nt, Human
gugguguggagaagccacaggc

SEQ ID NO: 2307015 - RNA, 15 nt, Human
gugguguuuccuggc

SEQ ID NO: 2307016 - RNA, 16 nt, Human
gugguguuuccuggca

SEQ ID NO: 2307017 - RNA, 23 nt, Human
gugguggcauacgccuguagucc

SEQ ID NO: 2307018 - RNA, 23 nt, Human
gugguggcagggccuagcugcua

SEQ ID NO: 2307019 - RNA, 15 nt, Human
gugguggcagggccu

SEQ ID NO: 2307020 - RNA, 17 nt, Human
gugguggcagggccuag

SEQ ID NO: 2307021 - RNA, 21 nt, Human
gugguggcagggccuagcugc

SEQ ID NO: 2307022 - RNA, 18 nt, Human
gugguggcucacgccugu

SEQ ID NO: 2307023 - RNA, 18 nt, Human
gugguggcucaugccugu

SEQ ID NO: 2307024 - RNA, 18 nt, Human
gugguggcccacgccugu

SEQ ID NO: 2307025 - RNA, 18 nt, Human
gugguggcgggcgccugu

SEQ ID NO: 2307026 - RNA, 18 nt, Human
gugguggaagaggggaca

SEQ ID NO: 2307027 - RNA, 15 nt, Human
guggugcugacaaag

SEQ ID NO: 2307028 - RNA, 14 nt, Human
guggugcugggacu

SEQ ID NO: 2307029 - RNA, 18 nt, Human
guggugcucaguuguaga

SEQ ID NO: 2307030 - RNA, 20 nt, Human
gugggucccacuuccccucc

SEQ ID NO: 2307031 - RNA, 21 nt, Human
gugggucccacuuccccuccu

SEQ ID NO: 2307032 - RNA, 16 nt, Human
gugguggcacaggccc

SEQ ID NO: 2307033 - RNA, 14 nt, Human
gugguggagccagu

SEQ ID NO: 2307034 - RNA, 20 nt, Human
gugguggaucuguccaagga

SEQ ID NO: 2307035 - RNA, 19 nt, Human
gugguggaagaggggacag

SEQ ID NO: 2307036 - RNA, 12 nt, Human
gugguggagcca

SEQ ID NO: 2307037 - RNA, 22 nt, Human
gugguggagccaguaaacagag

SEQ ID NO: 2307038 - RNA, 23 nt, Human
gugggaaagauuacuuuuucuuu

SEQ ID NO: 2307039 - RNA, 17 nt, Human
gugggaacgacugggca

SEQ ID NO: 2307040 - RNA, 18 nt, Human
guggcuuugcauuuuaaa

SEQ ID NO: 2307041 - RNA, 22 nt, Human
guggcuuugcauuuuaaaaaug

SEQ ID NO: 2307042 - RNA, 23 nt, Human
guggcuuugcauuuuaaaaauga

SEQ ID NO: 2307043 - RNA, 20 nt, Human
guggcuuuuuuccuccugug

SEQ ID NO: 2307044 - RNA, 16 nt, Human
guggcuuucagccucu

SEQ ID NO: 2307045 - RNA, 22 nt, Human
guggcuugagaaauauggacac

SEQ ID NO: 2307046 - RNA, 16 nt, Human
guggcuuugcauuuua

SEQ ID NO: 2307047 - RNA, 18 nt, Human
guggcuuucagccucugg

SEQ ID NO: 2307048 - RNA, 14 nt, Human
guggcuucuuaauc

SEQ ID NO: 2307049 - RNA, 21 nt, Human
guggcuucccgcucagcccuc

SEQ ID NO: 2307050 - RNA, 15 nt, Human
guggccucccaacuc

SEQ ID NO: 2307051 - RNA, 12 nt, Human
guggccucagaa

SEQ ID NO: 2307052 - RNA, 11 nt, Human
guggccucaga

SEQ ID NO: 2307053 - RNA, 13 nt, Human
guggccucagaau

SEQ ID NO: 2307054 - RNA, 21 nt, Human
guggccucaacccucccucag

SEQ ID NO: 2307055 - RNA, 20 nt, Human
guggccucaacccucccuca

SEQ ID NO: 2307056 - RNA, 23 nt, Human
guggccccguuucugguggucug

SEQ ID NO: 2307057 - RNA, 17 nt, Human
guggcccgacagccugg

SEQ ID NO: 2307058 - RNA, 13 nt, Human
guggccucccaac

SEQ ID NO: 2307059 - RNA, 14 nt, Human
guggccucccaacu

SEQ ID NO: 2307060 - RNA, 17 nt, Human
gugggaacgugacugcc

SEQ ID NO: 2307061 - RNA, 21 nt, Human
gugggaacgagaggggaagag

SEQ ID NO: 2307062 - RNA, 12 nt, Human
gugggaaaacac

SEQ ID NO: 2307063 - RNA, 23 nt, Human
gugggaacgacugggcacugcca

SEQ ID NO: 2307064 - RNA, 18 nt, Human
gugggaacgagaggggaa

SEQ ID NO: 2307065 - RNA, 20 nt, Human
gugggaacgagaggggaaga

SEQ ID NO: 2307066 - RNA, 15 nt, Human
gugggagagcccagc

SEQ ID NO: 2307067 - RNA, 13 nt, Human
gugggagaggucu

SEQ ID NO: 2307068 - RNA, 14 nt, Human
gugggagagcccag

SEQ ID NO: 2307069 - RNA, 13 nt, Human
gugggagagccca

SEQ ID NO: 2307070 - RNA, 19 nt, Human
gugggagcagcgguuuggg

SEQ ID NO: 2307071 - RNA, 12 nt, Human
gugggagcagga

SEQ ID NO: 2307072 - RNA, 13 nt, Human
gugggagcaggag

SEQ ID NO: 2307073 - RNA, 14 nt, Human
gugggagcaggaga

SEQ ID NO: 2307074 - RNA, 15 nt, Human
gugggagcaggagau

SEQ ID NO: 2307075 - RNA, 22 nt, Human
gugggagcaggagauugagaag

SEQ ID NO: 2307076 - RNA, 12 nt, Human
gugggagcugag

SEQ ID NO: 2307077 - RNA, 17 nt, Human
gugggauggaggagaag

SEQ ID NO: 2307078 - RNA, 23 nt, Human
gugggauguucagcacugucccu

SEQ ID NO: 2307079 - RNA, 16 nt, Human
gugggauggaggagaa

SEQ ID NO: 2307080 - RNA, 19 nt, Human
gugggaucugccccucccu

SEQ ID NO: 2307081 - RNA, 14 nt, Human
gugggauggaggag

SEQ ID NO: 2307082 - RNA, 18 nt, Human
gugggaucugccccuccc

SEQ ID NO: 2307083 - RNA, 16 nt, Human
gugggagcgugggagg

SEQ ID NO: 2307084 - RNA, 15 nt, Human
gugggauccuccagg

SEQ ID NO: 2307085 - RNA, 18 nt, Human
gugggauccuccaggugc

SEQ ID NO: 2307086 - RNA, 11 nt, Human
aagagcugagg

SEQ ID NO: 2307087 - RNA, 18 nt, Human
aagagcugaggcaauucu

SEQ ID NO: 2307088 - RNA, 18 nt, Human
aagagcuguucacagcca

SEQ ID NO: 2307089 - RNA, 20 nt, Human
aagagcuagcgcugccgcac

SEQ ID NO: 2307090 - RNA, 19 nt, Human
aagagcuagcgcugccgca

SEQ ID NO: 2307091 - RNA, 16 nt, Human
aagagcuagcgcugcc

SEQ ID NO: 2307092 - RNA, 13 nt, Human
aagagcccuugcc

SEQ ID NO: 2307093 - RNA, 21 nt, Human
aagagccauguagaagcugca

SEQ ID NO: 2307094 - RNA, 16 nt, Human
guggcccgacagccug

SEQ ID NO: 2307095 - RNA, 16 nt, Human
guggccccguuucugg

SEQ ID NO: 2307096 - RNA, 17 nt, Human
guggccccguuucuggu

SEQ ID NO: 2307097 - RNA, 15 nt, Human
guggccccagccugg

SEQ ID NO: 2307098 - RNA, 16 nt, Human
guggccccagccuggc

SEQ ID NO: 2307099 - RNA, 17 nt, Human
guggccccagccuggcc

SEQ ID NO: 2307100 - RNA, 18 nt, Human
guggccccagccuggccc

SEQ ID NO: 2307101 - RNA, 19 nt, Human
guggccccagccuggccca

SEQ ID NO: 2307102 - RNA, 20 nt, Human
guggccccagccuggcccag

SEQ ID NO: 2307103 - RNA, 21 nt, Human
guggccccagccuggcccagc

SEQ ID NO: 2307104 - RNA, 22 nt, Human
guggccccagccuggcccagcu

SEQ ID NO: 2307105 - RNA, 12 nt, Human
guggccccagcc

SEQ ID NO: 2307106 - RNA, 13 nt, Human
guggccccagccu

SEQ ID NO: 2307107 - RNA, 14 nt, Human
guggccccagccug

SEQ ID NO: 2307108 - RNA, 13 nt, Human
aagagcugcccuc

SEQ ID NO: 2307109 - RNA, 23 nt, Human
guggccccacccugggcccuggg

SEQ ID NO: 2307110 - RNA, 16 nt, Human
aagagcuguccuggua

SEQ ID NO: 2307111 - RNA, 21 nt, Human
guggccccacccugggcccug

SEQ ID NO: 2307112 - RNA, 19 nt, Human
aagagcuguucacagccag

SEQ ID NO: 2307113 - RNA, 15 nt, Human
aagagauuccugagc

SEQ ID NO: 2307114 - RNA, 20 nt, Human
aagagaugggcuuguuuucu

SEQ ID NO: 2307115 - RNA, 18 nt, Human
aagagaugggcuuguuuu

SEQ ID NO: 2307116 - RNA, 16 nt, Human
aagagcccaggccucc

SEQ ID NO: 2307117 - RNA, 12 nt, Human
aagagcccaggc

SEQ ID NO: 2307118 - RNA, 14 nt, Human
aagagcccaggccu

SEQ ID NO: 2307119 - RNA, 19 nt, Human
aagagauugugguuucauu

SEQ ID NO: 2307120 - RNA, 16 nt, Human
aagagauugugguuuc

SEQ ID NO: 2307121 - RNA, 17 nt, Human
aagagauggccugagaa

SEQ ID NO: 2307122 - RNA, 17 nt, Human
aagagaugggcuuguuu

SEQ ID NO: 2307123 - RNA, 20 nt, Human
aagagaugaugaaaauauuu

SEQ ID NO: 2307124 - RNA, 16 nt, Human
aagacuguacaaagua

SEQ ID NO: 2307125 - RNA, 22 nt, Human
aagacuggcuuuuauuaaugca

SEQ ID NO: 2307126 - RNA, 13 nt, Human
aagacuguaauga

SEQ ID NO: 2307127 - RNA, 16 nt, Human
aagacuguaaugaauc

SEQ ID NO: 2307128 - RNA, 13 nt, Human
aagaccccaccca

SEQ ID NO: 2307129 - RNA, 13 nt, Human
aagaccauuuuuc

SEQ ID NO: 2307130 - RNA, 12 nt, Human
aagaccagucca

SEQ ID NO: 2307131 - RNA, 23 nt, Human
aagaccccuuaccacugcucuga

SEQ ID NO: 2307132 - RNA, 16 nt, Human
aagaccccacccaagc

SEQ ID NO: 2307133 - RNA, 22 nt, Human
aagaccccacccaagcuuggca

SEQ ID NO: 2307134 - RNA, 21 nt, Human
aagacgcugugcugcccugcc

SEQ ID NO: 2307135 - RNA, 22 nt, Human
aagacgcugugcugcccugccc

SEQ ID NO: 2307136 - RNA, 20 nt, Human
aagacgcugugcugcccugc

SEQ ID NO: 2307137 - RNA, 23 nt, Human
aagacgcugugcugcccugccca

SEQ ID NO: 2307138 - RNA, 14 nt, Human
aagacuauucaaac

SEQ ID NO: 2307139 - RNA, 21 nt, Human
aagacucaagugggaacgacu

SEQ ID NO: 2307140 - RNA, 14 nt, Human
aagacucaguguuc

SEQ ID NO: 2307141 - RNA, 23 nt, Human
aagacucaagugggaacgacugg

SEQ ID NO: 2307142 - RNA, 17 nt, Human
aagacucauucccuaga

SEQ ID NO: 2307143 - RNA, 16 nt, Human
aagacuccucggccug

SEQ ID NO: 2307144 - RNA, 23 nt, Human
aagacuggaagcuaauuugcauu

SEQ ID NO: 2307145 - RNA, 22 nt, Human
aagacuggaagcuaauuugcau

SEQ ID NO: 2307146 - RNA, 20 nt, Human
aagacuggaagcuaauuugc

SEQ ID NO: 2307147 - RNA, 21 nt, Human
aagacuggaagguggggacag

SEQ ID NO: 2307148 - RNA, 11 nt, Human
aagacuggcuu

SEQ ID NO: 2307149 - RNA, 23 nt, Human
aagacuggcuuuuauuaaugcac

SEQ ID NO: 2307150 - RNA, 17 nt, Human
aagacucauucuucugu

SEQ ID NO: 2307151 - RNA, 14 nt, Human
aagacuccaaagaa

SEQ ID NO: 2307152 - RNA, 17 nt, Human
aagacuccaaagaaaug

SEQ ID NO: 2307153 - RNA, 16 nt, Human
aagacuccaaagaaau

SEQ ID NO: 2307154 - RNA, 16 nt, Human
guguugaaaauguuca

SEQ ID NO: 2307155 - RNA, 18 nt, Human
guguguucugauuagaaa

SEQ ID NO: 2307156 - RNA, 15 nt, Human
guguguuccaacugc

SEQ ID NO: 2307157 - RNA, 18 nt, Human
guguguuccaacugcccc

SEQ ID NO: 2307158 - RNA, 13 nt, Human
guguucugugaua

SEQ ID NO: 2307159 - RNA, 14 nt, Human
guguguuauuuaaa

SEQ ID NO: 2307160 - RNA, 17 nt, Human
guguugaaaauguucag

SEQ ID NO: 2307161 - RNA, 19 nt, Human
guguugagccuuuucccuc

SEQ ID NO: 2307162 - RNA, 14 nt, Human
guguuuaagacauu

SEQ ID NO: 2307163 - RNA, 13 nt, Human
guguuuaagacau

SEQ ID NO: 2307164 - RNA, 11 nt, Human
guguuuaaaua

SEQ ID NO: 2307165 - RNA, 18 nt, Human
guguuuaaagagagguua

SEQ ID NO: 2307166 - RNA, 21 nt, Human
gugugguuugguguguucccg

SEQ ID NO: 2307167 - RNA, 18 nt, Human
guguggugcagugugaaa

SEQ ID NO: 2307168 - RNA, 23 nt, Human
gugugguggguucuuuggaagga

SEQ ID NO: 2307169 - RNA, 14 nt, Human
guguggugcagugu

SEQ ID NO: 2307170 - RNA, 13 nt, Human
guguggugcagug

SEQ ID NO: 2307171 - RNA, 19 nt, Human
gugugguguuuccuggcac

SEQ ID NO: 2307172 - RNA, 21 nt, Human
guguguggguggauauaaaua

SEQ ID NO: 2307173 - RNA, 13 nt, Human
guguguguaugug

SEQ ID NO: 2307174 - RNA, 13 nt, Human
gugugugugugug

SEQ ID NO: 2307175 - RNA, 13 nt, Human
gugugugugugcg

SEQ ID NO: 2307176 - RNA, 12 nt, Human
gugugugugugu

SEQ ID NO: 2307177 - RNA, 14 nt, Human
guguguguguccuu

SEQ ID NO: 2307178 - RNA, 15 nt, Human
gugugugugcguguu

SEQ ID NO: 2307179 - RNA, 14 nt, Human
gugugugugugugu

SEQ ID NO: 2307180 - RNA, 14 nt, Human
gugugugugugugc

SEQ ID NO: 2307181 - RNA, 15 nt, Human
gugugugugugugug

SEQ ID NO: 2307182 - RNA, 17 nt, Human
guguguguugugugugg

SEQ ID NO: 2307183 - RNA, 12 nt, Human
guguguguaugu

SEQ ID NO: 2307184 - RNA, 17 nt, Human
guguguguauguuugca

SEQ ID NO: 2307185 - RNA, 13 nt, Human
gugugugugaaug

SEQ ID NO: 2307186 - RNA, 9 nt, Human
gugugugug

SEQ ID NO: 2307187 - RNA, 14 nt, Human
gugugugugcgugu

SEQ ID NO: 2307188 - RNA, 19 nt, Human
guguguguaugcgugugug

SEQ ID NO: 2307189 - RNA, 14 nt, Human
guguguguaugugg

SEQ ID NO: 2307190 - RNA, 13 nt, Human
gugugagucacca

SEQ ID NO: 2307191 - RNA, 18 nt, Human
gugugagucaccaagccc

SEQ ID NO: 2307192 - RNA, 15 nt, Human
gugugguguuuccug

SEQ ID NO: 2307193 - RNA, 19 nt, Human
guguggugcagugugaaaa

SEQ ID NO: 2307194 - RNA, 17 nt, Human
gugugaggccagggcag

SEQ ID NO: 2307195 - RNA, 17 nt, Human
gugugaguaagagcugg

SEQ ID NO: 2307196 - RNA, 15 nt, Human
gugugaggccagggc

SEQ ID NO: 2307197 - RNA, 14 nt, Human
gugugaggccaggg

SEQ ID NO: 2307198 - RNA, 21 nt, Human
guguccauugacauguacaga

SEQ ID NO: 2307199 - RNA, 12 nt, Human
gugugaggccag

SEQ ID NO: 2307200 - RNA, 21 nt, Human
gugucuugcaauggcagccuu

SEQ ID NO: 2307201 - RNA, 16 nt, Human
gugucuugggcagagc

SEQ ID NO: 2307202 - RNA, 17 nt, Human
gugucuugggcagagcu

SEQ ID NO: 2307203 - RNA, 20 nt, Human
gugucuugggcagagcuggc

SEQ ID NO: 2307204 - RNA, 23 nt, Human
gugucuugggcagagcuggcucu

SEQ ID NO: 2307205 - RNA, 18 nt, Human
guguccacgacugucucc

SEQ ID NO: 2307206 - RNA, 22 nt, Human
aagcaagugauugggacagagg

SEQ ID NO: 2307207 - RNA, 16 nt, Human
aagcaaguauuagaau

SEQ ID NO: 2307208 - RNA, 16 nt, Human
guguccaugugugugc

SEQ ID NO: 2307209 - RNA, 16 nt, Human
guguccauugacaugu

SEQ ID NO: 2307210 - RNA, 15 nt, Human
guguccaugugugug

SEQ ID NO: 2307211 - RNA, 14 nt, Human
guguccaugugugu

SEQ ID NO: 2307212 - RNA, 19 nt, Human
guguccauugacauguaca

SEQ ID NO: 2307213 - RNA, 20 nt, Human
guguccauugacauguacag

SEQ ID NO: 2307214 - RNA, 23 nt, Human
guguccauugacauguacagaga

SEQ ID NO: 2307215 - RNA, 18 nt, Human
guguccaugcgcucaggg

SEQ ID NO: 2307216 - RNA, 19 nt, Human
guguccaugcgcucagggc

SEQ ID NO: 2307217 - RNA, 20 nt, Human
guguccaugcgcucagggcc

SEQ ID NO: 2307218 - RNA, 21 nt, Human
guguccaugcgcucagggcca

SEQ ID NO: 2307219 - RNA, 19 nt, Human
gugucuugcaauggcagcc

SEQ ID NO: 2307220 - RNA, 20 nt, Human
gugucccaaaaagaaaggag

SEQ ID NO: 2307221 - RNA, 14 nt, Human
gugguuauuucuca

SEQ ID NO: 2307222 - RNA, 22 nt, Human
gugguuauuucucaacaaagca

SEQ ID NO: 2307223 - RNA, 23 nt, Human
gugguuaaugccauggacagaag

SEQ ID NO: 2307224 - RNA, 21 nt, Human
gugguucacucuuggagccug

SEQ ID NO: 2307225 - RNA, 20 nt, Human
gugguucacucuuggagccu

SEQ ID NO: 2307226 - RNA, 18 nt, Human
gugguuauggagagggug

SEQ ID NO: 2307227 - RNA, 19 nt, Human
gugguguuuccuggcacug

SEQ ID NO: 2307228 - RNA, 16 nt, Human
aagaguaggaagacuu

SEQ ID NO: 2307229 - RNA, 18 nt, Human
aagaguaggaagacuuug

SEQ ID NO: 2307230 - RNA, 19 nt, Human
aagaguaggaagacuuugg

SEQ ID NO: 2307231 - RNA, 15 nt, Human
aagauauuuugcuuu

SEQ ID NO: 2307232 - RNA, 17 nt, Human
aagaucaaaauaaaaag

SEQ ID NO: 2307233 - RNA, 21 nt, Human
aagaucaaaauaaaaagugac

SEQ ID NO: 2307234 - RNA, 22 nt, Human
aagauauuuugcuuugugauuu

SEQ ID NO: 2307235 - RNA, 20 nt, Human
aagauauuuugcuuugugau

SEQ ID NO: 2307236 - RNA, 17 nt, Human
aagauauuuugcuuugu

SEQ ID NO: 2307237 - RNA, 21 nt, Human
aagauccugucuuuaaggaaa

SEQ ID NO: 2307238 - RNA, 23 nt, Human
aagauccuaccccaauuccuugu

SEQ ID NO: 2307239 - RNA, 15 nt, Human
aagaugacauugcua

SEQ ID NO: 2307240 - RNA, 16 nt, Human
aagaugacauugcuaa

SEQ ID NO: 2307241 - RNA, 17 nt, Human
aagaugacauugcuaag

SEQ ID NO: 2307242 - RNA, 20 nt, Human
aagaugacauugcuaagaug

SEQ ID NO: 2307243 - RNA, 17 nt, Human
aagaucauauacgugaa

SEQ ID NO: 2307244 - RNA, 16 nt, Human
aagaucauguacccca

SEQ ID NO: 2307245 - RNA, 15 nt, Human
aagauccccucagga

SEQ ID NO: 2307246 - RNA, 16 nt, Human
aagauccccucaggac

SEQ ID NO: 2307247 - RNA, 22 nt, Human
aagauccuaaaacaaaagcuca

SEQ ID NO: 2307248 - RNA, 19 nt, Human
aagaucacgcuccccgccu

SEQ ID NO: 2307249 - RNA, 16 nt, Human
aagaucacgcuccccg

SEQ ID NO: 2307250 - RNA, 22 nt, Human
aagaucaaaauaaaaagugaca

SEQ ID NO: 2307251 - RNA, 17 nt, Human
aagaucacgcuccccgc

SEQ ID NO: 2307252 - RNA, 23 nt, Human
aagaucacuuucucaguuuucau

SEQ ID NO: 2307253 - RNA, 17 nt, Human
aagaucacuuucucagu

SEQ ID NO: 2307254 - RNA, 15 nt, Human
aagaucacuuucuca

SEQ ID NO: 2307255 - RNA, 19 nt, Human
aagaucacuuguuguuuua

SEQ ID NO: 2307256 - RNA, 21 nt, Human
aagaucacuuguuguuuuacu

SEQ ID NO: 2307257 - RNA, 14 nt, Human
aagcaaacacauua

SEQ ID NO: 2307258 - RNA, 17 nt, Human
aagcaaaucagaaacuu

SEQ ID NO: 2307259 - RNA, 13 nt, Human
aagcaaacacauu

SEQ ID NO: 2307260 - RNA, 12 nt, Human
aagcaaacacau

SEQ ID NO: 2307261 - RNA, 16 nt, Human
aagaugucagacuggc

SEQ ID NO: 2307262 - RNA, 19 nt, Human
aagcaaaauuuuuucucua

SEQ ID NO: 2307263 - RNA, 16 nt, Human
aagcaagauuucagau

SEQ ID NO: 2307264 - RNA, 14 nt, Human
aagcaaaugugaau

SEQ ID NO: 2307265 - RNA, 12 nt, Human
aagcaaaugucu

SEQ ID NO: 2307266 - RNA, 13 nt, Human
aagcaaaugugaa

SEQ ID NO: 2307267 - RNA, 20 nt, Human
aagaugcaaggaccaggacu

SEQ ID NO: 2307268 - RNA, 15 nt, Human
aagaugcaaggacca

SEQ ID NO: 2307269 - RNA, 15 nt, Human
aagaugaucagaccu

SEQ ID NO: 2307270 - RNA, 14 nt, Human
aagaugaucauuug

SEQ ID NO: 2307271 - RNA, 18 nt, Human
aagaugaucuacucagaa

SEQ ID NO: 2307272 - RNA, 19 nt, Human
aagauguagaggagaaacu

SEQ ID NO: 2307273 - RNA, 18 nt, Human
aagaugagagaacuggag

SEQ ID NO: 2307274 - RNA, 17 nt, Human
aagaugagagaacugga

SEQ ID NO: 2307275 - RNA, 23 nt, Human
aagaugacauugcuaagaugcuc

SEQ ID NO: 2307276 - RNA, 21 nt, Human
aagaugacauugcuaagaugc

SEQ ID NO: 2307277 - RNA, 22 nt, Human
aagaugacauugcuaagaugcu

SEQ ID NO: 2307278 - RNA, 22 nt, Human
aagauguagaggagaaacugga

SEQ ID NO: 2307279 - RNA, 16 nt, Human
aagauguagauuuauu

SEQ ID NO: 2307280 - RNA, 17 nt, Human
aagaugaucuacucaga

SEQ ID NO: 2307281 - RNA, 15 nt, Human
aagaugcaauguaga

SEQ ID NO: 2307282 - RNA, 22 nt, Human
aagauguagauuuauuucauca

SEQ ID NO: 2307283 - RNA, 19 nt, Human
aagauguagauuuauuuca

SEQ ID NO: 2307284 - RNA, 13 nt, Human
aagcaaaauguga

SEQ ID NO: 2307285 - RNA, 14 nt, Human
guagccuuccucca

SEQ ID NO: 2307286 - RNA, 23 nt, Human
guagccuugcccggauucuggga

SEQ ID NO: 2307287 - RNA, 15 nt, Human
guagccuugcccgga

SEQ ID NO: 2307288 - RNA, 21 nt, Human
guagccucgccgucugugaau

SEQ ID NO: 2307289 - RNA, 12 nt, Human
guagccugugca

SEQ ID NO: 2307290 - RNA, 22 nt, Human
guagccuggauauuauucuugu

SEQ ID NO: 2307291 - RNA, 23 nt, Human
guagcuccucaacucaccuaaug

SEQ ID NO: 2307292 - RNA, 12 nt, Human
guagcucaggug

SEQ ID NO: 2307293 - RNA, 14 nt, Human
guagcucagguggg

SEQ ID NO: 2307294 - RNA, 14 nt, Human
guccauggaaugcu

SEQ ID NO: 2307295 - RNA, 15 nt, Human
guccauggaaugcuu

SEQ ID NO: 2307296 - RNA, 18 nt, Human
guccauggaaugcuugaa

SEQ ID NO: 2307297 - RNA, 17 nt, Human
guagcuagaggaaccaa

SEQ ID NO: 2307298 - RNA, 13 nt, Human
guagcuauaucua

SEQ ID NO: 2307299 - RNA, 16 nt, Human
guagcuauaucuauau

SEQ ID NO: 2307300 - RNA, 11 nt, Human
guagcucaggu

SEQ ID NO: 2307301 - RNA, 15 nt, Human
guagcuagaggaacc

SEQ ID NO: 2307302 - RNA, 14 nt, Human
guagcuagaggaac

SEQ ID NO: 2307303 - RNA, 22 nt, Human
guagcucuaggagggcuggcaa

SEQ ID NO: 2307304 - RNA, 19 nt, Human
gucccaccuuggcugcagg

SEQ ID NO: 2307305 - RNA, 22 nt, Human
guccccccacccucauucuacu

SEQ ID NO: 2307306 - RNA, 13 nt, Human
guccauucuccca

SEQ ID NO: 2307307 - RNA, 15 nt, Human
guccauucucccagg

SEQ ID NO: 2307308 - RNA, 14 nt, Human
guccauugacaugu

SEQ ID NO: 2307309 - RNA, 15 nt, Human
guccauugacaugua

SEQ ID NO: 2307310 - RNA, 19 nt, Human
guccauugacauguacaga

SEQ ID NO: 2307311 - RNA, 17 nt, Human
guccauugacauguaca

SEQ ID NO: 2307312 - RNA, 18 nt, Human
guccauugacauguacag

SEQ ID NO: 2307313 - RNA, 14 nt, Human
gucccccucuggcu

SEQ ID NO: 2307314 - RNA, 12 nt, Human
gucccccucugg

SEQ ID NO: 2307315 - RNA, 17 nt, Human
gucccaccuuggcugca

SEQ ID NO: 2307316 - RNA, 18 nt, Human
gucccaccuuggcugcag

SEQ ID NO: 2307317 - RNA, 13 nt, Human
guccaugugugug

SEQ ID NO: 2307318 - RNA, 19 nt, Human
guccaugugguucuucaaa

SEQ ID NO: 2307319 - RNA, 14 nt, Human
guccaugugugugc

SEQ ID NO: 2307320 - RNA, 23 nt, Human
guccaugggcagagcccaaggga

SEQ ID NO: 2307321 - RNA, 18 nt, Human
guccaugggcagagccca

SEQ ID NO: 2307322 - RNA, 16 nt, Human
guccaugggcagagcc

SEQ ID NO: 2307323 - RNA, 14 nt, Human
guccaugggcagag

SEQ ID NO: 2307324 - RNA, 13 nt, Human
guccaugggcaga

SEQ ID NO: 2307325 - RNA, 20 nt, Human
guccauggaaugcuugaaaa

SEQ ID NO: 2307326 - RNA, 21 nt, Human
guccauggaaugcuugaaaaa

SEQ ID NO: 2307327 - RNA, 22 nt, Human
gucccuuucuuggccaguuauc

SEQ ID NO: 2307328 - RNA, 14 nt, Human
guccguuuacucca

SEQ ID NO: 2307329 - RNA, 13 nt, Human
guccuaaaacacc

SEQ ID NO: 2307330 - RNA, 22 nt, Human
guccuaagaaagaggagugcuu

SEQ ID NO: 2307331 - RNA, 16 nt, Human
guccuaacugguauag

SEQ ID NO: 2307332 - RNA, 14 nt, Human
guccuaagaaagag

SEQ ID NO: 2307333 - RNA, 19 nt, Human
guccuaaggacacacuaau

SEQ ID NO: 2307334 - RNA, 23 nt, Human
guccccuuuucuuuucuacccua

SEQ ID NO: 2307335 - RNA, 22 nt, Human
guccgaaagggacuuggaagcu

SEQ ID NO: 2307336 - RNA, 21 nt, Human
guccgaaagggacuuggaagc

SEQ ID NO: 2307337 - RNA, 13 nt, Human
gucccuuuuccuu

SEQ ID NO: 2307338 - RNA, 12 nt, Human
guccccuucucu

SEQ ID NO: 2307339 - RNA, 13 nt, Human
guccccuucucuc

SEQ ID NO: 2307340 - RNA, 14 nt, Human
guccccuucucuca

SEQ ID NO: 2307341 - RNA, 17 nt, Human
guccccuucucucaucu

SEQ ID NO: 2307342 - RNA, 18 nt, Human
guccccuucucucaucuc

SEQ ID NO: 2307343 - RNA, 19 nt, Human
guccccuucucucaucucu

SEQ ID NO: 2307344 - RNA, 20 nt, Human
guccccuucucucaucucuu

SEQ ID NO: 2307345 - RNA, 22 nt, Human
guccccuuuguauuccuuaaau

SEQ ID NO: 2307346 - RNA, 22 nt, Human
guccccuuuucuuuucuacccu

SEQ ID NO: 2307347 - RNA, 15 nt, Human
guccccucagcucca

SEQ ID NO: 2307348 - RNA, 18 nt, Human
guccccucagcuccagac

SEQ ID NO: 2307349 - RNA, 12 nt, Human
guccccucaccu

SEQ ID NO: 2307350 - RNA, 13 nt, Human
guccccucagcuc

SEQ ID NO: 2307351 - RNA, 14 nt, Human
guccccucagcucc

SEQ ID NO: 2307352 - RNA, 21 nt, Human
gucccccucuguccaggcacu

SEQ ID NO: 2307353 - RNA, 22 nt, Human
guccccgugccccgccuccccg

SEQ ID NO: 2307354 - RNA, 15 nt, Human
guccccgugccccgc

SEQ ID NO: 2307355 - RNA, 23 nt, Human
guccccuguuuguuucugaaagg

SEQ ID NO: 2307356 - RNA, 13 nt, Human
guccccuuccauc

SEQ ID NO: 2307357 - RNA, 11 nt, Human
guccccuucuc

SEQ ID NO: 2307358 - RNA, 12 nt, Human
guccccucccau

SEQ ID NO: 2307359 - RNA, 14 nt, Human
guccccucccaucu

SEQ ID NO: 2307360 - RNA, 15 nt, Human
guccccucccaucug

SEQ ID NO: 2307361 - RNA, 16 nt, Human
guccccucccaucugg

SEQ ID NO: 2307362 - RNA, 13 nt, Human
gucccccugacaa

SEQ ID NO: 2307363 - RNA, 19 nt, Human
gucccccucuguccaggca

SEQ ID NO: 2307364 - RNA, 13 nt, Human
gucccccucuguc

SEQ ID NO: 2307365 - RNA, 15 nt, Human
guccccgcacugggc

SEQ ID NO: 2307366 - RNA, 16 nt, Human
guccccgcacugggcu

SEQ ID NO: 2307367 - RNA, 21 nt, Human
aacauaaccauuacagggagc

SEQ ID NO: 2307368 - RNA, 20 nt, Human
aacauaaucuucugccuucu

SEQ ID NO: 2307369 - RNA, 13 nt, Human
aacagugagccug

SEQ ID NO: 2307370 - RNA, 21 nt, Human
aacagugagccugaauuuugu

SEQ ID NO: 2307371 - RNA, 18 nt, Human
aacauaaauaaaaugacc

SEQ ID NO: 2307372 - RNA, 18 nt, Human
aacauacucccaucugug

SEQ ID NO: 2307373 - RNA, 16 nt, Human
aacauacucccaucug

SEQ ID NO: 2307374 - RNA, 17 nt, Human
aacauacuggcugguga

SEQ ID NO: 2307375 - RNA, 22 nt, Human
aacauaaucuucugccuucuca

SEQ ID NO: 2307376 - RNA, 12 nt, Human
aacauaauuaaa

SEQ ID NO: 2307377 - RNA, 20 nt, Human
aacauacucccaucugugaa

SEQ ID NO: 2307378 - RNA, 20 nt, Human
aacauguuuacuuuucaggg

SEQ ID NO: 2307379 - RNA, 16 nt, Human
aacauguuacugacca

SEQ ID NO: 2307380 - RNA, 22 nt, Human
aacauauuuguuaaauauuuac

SEQ ID NO: 2307381 - RNA, 20 nt, Human
aacauauuuguuaaauauuu

SEQ ID NO: 2307382 - RNA, 13 nt, Human
aacauauuuguua

SEQ ID NO: 2307383 - RNA, 14 nt, Human
aacauauuguugaa

SEQ ID NO: 2307384 - RNA, 17 nt, Human
aacauguuacugaccag

SEQ ID NO: 2307385 - RNA, 13 nt, Human
aacauguuccuga

SEQ ID NO: 2307386 - RNA, 11 nt, Human
aacauguuucc

SEQ ID NO: 2307387 - RNA, 22 nt, Human
aacauguuuuucuucucccuca

SEQ ID NO: 2307388 - RNA, 17 nt, Human
aacauaugaaaauacaa

SEQ ID NO: 2307389 - RNA, 14 nt, Human
aacaucaacaucuu

SEQ ID NO: 2307390 - RNA, 22 nt, Human
aacauagaaauugccugacgaa

SEQ ID NO: 2307391 - RNA, 16 nt, Human
aacauauauaacaaug

SEQ ID NO: 2307392 - RNA, 13 nt, Human
guccuacccaccc

SEQ ID NO: 2307393 - RNA, 20 nt, Human
aacagacuggaagcacagcu

SEQ ID NO: 2307394 - RNA, 13 nt, Human
aacagagaaggca

SEQ ID NO: 2307395 - RNA, 16 nt, Human
guccuaccaauagauu

SEQ ID NO: 2307396 - RNA, 16 nt, Human
aacagagaaggcagga

SEQ ID NO: 2307397 - RNA, 15 nt, Human
aacagagaaggcagg

SEQ ID NO: 2307398 - RNA, 19 nt, Human
aacagagacaggcccaaga

SEQ ID NO: 2307399 - RNA, 13 nt, Human
aacagagauguga

SEQ ID NO: 2307400 - RNA, 20 nt, Human
aacagaggaagaauuuguua

SEQ ID NO: 2307401 - RNA, 21 nt, Human
aacagaggccauggcagaaua

SEQ ID NO: 2307402 - RNA, 17 nt, Human
aacagaggccauggcag

SEQ ID NO: 2307403 - RNA, 19 nt, Human
aacagagugagacccuguc

SEQ ID NO: 2307404 - RNA, 22 nt, Human
aacagaugcaaugugcuacuga

SEQ ID NO: 2307405 - RNA, 21 nt, Human
aacagaugcaaugugcuacug

SEQ ID NO: 2307406 - RNA, 23 nt, Human
aacagaugcaaugugcuacugau

SEQ ID NO: 2307407 - RNA, 14 nt, Human
aacagaugcuuuuc

SEQ ID NO: 2307408 - RNA, 19 nt, Human
aacagauuauuaccuuaca

SEQ ID NO: 2307409 - RNA, 17 nt, Human
aacagucuucaggcaaa

SEQ ID NO: 2307410 - RNA, 23 nt, Human
aacagucugaucgugacgcugaa

SEQ ID NO: 2307411 - RNA, 16 nt, Human
aacagguuuuauaauu

SEQ ID NO: 2307412 - RNA, 22 nt, Human
aacagguuauuuuaguuucugu

SEQ ID NO: 2307413 - RNA, 12 nt, Human
aacagucugauc

SEQ ID NO: 2307414 - RNA, 19 nt, Human
aacagucucaggaaaucaa

SEQ ID NO: 2307415 - RNA, 19 nt, Human
aacagguuuuccugaagaa

SEQ ID NO: 2307416 - RNA, 16 nt, Human
aacagguuauuuuagu

SEQ ID NO: 2307417 - RNA, 20 nt, Human
aacagguuauuuuaguuucu

SEQ ID NO: 2307418 - RNA, 21 nt, Human
aacagguuauuuuaguuucug

SEQ ID NO: 2307419 - RNA, 17 nt, Human
aacagucucaggaaauc

SEQ ID NO: 2307420 - RNA, 20 nt, Human
aacaggucuccucuuaaaaa

SEQ ID NO: 2307421 - RNA, 16 nt, Human
aacagguggcaggacc

SEQ ID NO: 2307422 - RNA, 14 nt, Human
aacagguggagaaa

SEQ ID NO: 2307423 - RNA, 19 nt, Human
aacagguggcaggaccagg

SEQ ID NO: 2307424 - RNA, 21 nt, Human
aacagguggcaggaccaggac

SEQ ID NO: 2307425 - RNA, 22 nt, Human
aacagguggcaggaccaggacu

SEQ ID NO: 2307426 - RNA, 23 nt, Human
aacagguggcaggaccaggacua

SEQ ID NO: 2307427 - RNA, 19 nt, Human
aacaggucuccucuuaaaa

SEQ ID NO: 2307428 - RNA, 18 nt, Human
aacaggucuccucuuaaa

SEQ ID NO: 2307429 - RNA, 17 nt, Human
aacaggucuccucuuaa

SEQ ID NO: 2307430 - RNA, 15 nt, Human
aacaggucuccucuu

SEQ ID NO: 2307431 - RNA, 13 nt, Human
aacaggucuccuc

SEQ ID NO: 2307432 - RNA, 12 nt, Human
aacaggucuccu

SEQ ID NO: 2307433 - RNA, 18 nt, Human
aacagauucacacugucu

SEQ ID NO: 2307434 - RNA, 20 nt, Human
aacagauguuucuuuuguau

SEQ ID NO: 2307435 - RNA, 17 nt, Human
aacagauguuucuuuug

SEQ ID NO: 2307436 - RNA, 24 nt, Human
aacagauguuucuuuuguauguaa

SEQ ID NO: 2307437 - RNA, 15 nt, Human
aacagauucacacug

SEQ ID NO: 2307438 - RNA, 16 nt, Human
aacagauucacacugu

SEQ ID NO: 2307439 - RNA, 15 nt, Human
gucgcccucccaggc

SEQ ID NO: 2307440 - RNA, 18 nt, Human
gucgcccuggacugugug

SEQ ID NO: 2307441 - RNA, 20 nt, Human
gucuaccugaggggccucuu

SEQ ID NO: 2307442 - RNA, 23 nt, Human
gucgcccagucuggaaugcagug

SEQ ID NO: 2307443 - RNA, 14 nt, Human
gucgcccuggacug

SEQ ID NO: 2307444 - RNA, 17 nt, Human
gucuauaugaaaaacaa

SEQ ID NO: 2307445 - RNA, 14 nt, Human
gucuauauguuugu

SEQ ID NO: 2307446 - RNA, 21 nt, Human
gucuauaaucccagcacuuug

SEQ ID NO: 2307447 - RNA, 20 nt, Human
gucuauaaucccagcacuuu

SEQ ID NO: 2307448 - RNA, 18 nt, Human
gucuagauggcuccucuc

SEQ ID NO: 2307449 - RNA, 17 nt, Human
gucuagauggcuccucu

SEQ ID NO: 2307450 - RNA, 19 nt, Human
gucuagauggcuccucuca

SEQ ID NO: 2307451 - RNA, 16 nt, Human
gucuagauggcuccuc

SEQ ID NO: 2307452 - RNA, 15 nt, Human
gucuagauggcuccu

SEQ ID NO: 2307453 - RNA, 21 nt, Human
gucuagagagggaggcaagcc

SEQ ID NO: 2307454 - RNA, 16 nt, Human
gucuagagagggaggc

SEQ ID NO: 2307455 - RNA, 15 nt, Human
gucuagagagggagg

SEQ ID NO: 2307456 - RNA, 14 nt, Human
gucuagagagggag

SEQ ID NO: 2307457 - RNA, 13 nt, Human
gucuagagaggga

SEQ ID NO: 2307458 - RNA, 17 nt, Human
gucuagaaguuguuugu

SEQ ID NO: 2307459 - RNA, 23 nt, Human
gucuacucuuaagccaucuuggu

SEQ ID NO: 2307460 - RNA, 21 nt, Human
gucuagaaguuguuugucauc

SEQ ID NO: 2307461 - RNA, 20 nt, Human
gucuacucauuccccggggc

SEQ ID NO: 2307462 - RNA, 17 nt, Human
gucuacucuuaagccau

SEQ ID NO: 2307463 - RNA, 18 nt, Human
gucuacucuuaagccauc

SEQ ID NO: 2307464 - RNA, 19 nt, Human
gucuacucuuaagccaucu

SEQ ID NO: 2307465 - RNA, 16 nt, Human
gucgaauuuuuauuau

SEQ ID NO: 2307466 - RNA, 23 nt, Human
gucgagcuggaugucccaccucu

SEQ ID NO: 2307467 - RNA, 12 nt, Human
gucgagacacuu

SEQ ID NO: 2307468 - RNA, 14 nt, Human
gucgaggacaggga

SEQ ID NO: 2307469 - RNA, 17 nt, Human
guccuuuuguaccaugg

SEQ ID NO: 2307470 - RNA, 20 nt, Human
guccuuuauguggaaaacag

SEQ ID NO: 2307471 - RNA, 21 nt, Human
guccuuuauguggaaaacaga

SEQ ID NO: 2307472 - RNA, 22 nt, Human
guccuuuuguaccaugguguga

SEQ ID NO: 2307473 - RNA, 17 nt, Human
gucgaauuaauagcuuu

SEQ ID NO: 2307474 - RNA, 19 nt, Human
guccuuuuuuuccaucuuu

SEQ ID NO: 2307475 - RNA, 16 nt, Human
guccuuuuuuuccauc

SEQ ID NO: 2307476 - RNA, 13 nt, Human
gucgcccaggaga

SEQ ID NO: 2307477 - RNA, 12 nt, Human
gucgcccaggag

SEQ ID NO: 2307478 - RNA, 14 nt, Human
gucgcccaggcugg

SEQ ID NO: 2307479 - RNA, 15 nt, Human
gucgcccaggcugga

SEQ ID NO: 2307480 - RNA, 20 nt, Human
gucgcccaggcuggagugca

SEQ ID NO: 2307481 - RNA, 13 nt, Human
gucgcccagucug

SEQ ID NO: 2307482 - RNA, 14 nt, Human
gucgcccagucugg

SEQ ID NO: 2307483 - RNA, 18 nt, Human
guccuugcaccugcaucc

SEQ ID NO: 2307484 - RNA, 12 nt, Human
guccuugcccuu

SEQ ID NO: 2307485 - RNA, 17 nt, Human
guccuugcaccugcauc

SEQ ID NO: 2307486 - RNA, 16 nt, Human
guccuugcaccugcau

SEQ ID NO: 2307487 - RNA, 15 nt, Human
guccuugcaccugca

SEQ ID NO: 2307488 - RNA, 14 nt, Human
guccuugcaccugc

SEQ ID NO: 2307489 - RNA, 18 nt, Human
guccuugcaccccucacu

SEQ ID NO: 2307490 - RNA, 19 nt, Human
guccuugcaccccucacuc

SEQ ID NO: 2307491 - RNA, 22 nt, Human
guccuugcacacuccccugcac

SEQ ID NO: 2307492 - RNA, 16 nt, Human
guccuugcaccccuca

SEQ ID NO: 2307493 - RNA, 12 nt, Human
guccuugcacac

SEQ ID NO: 2307494 - RNA, 17 nt, Human
guccugcugcaguugcc

SEQ ID NO: 2307495 - RNA, 14 nt, Human
guccuuggugugac

SEQ ID NO: 2307496 - RNA, 17 nt, Human
guccuuggaaguuucau

SEQ ID NO: 2307497 - RNA, 22 nt, Human
guccuuggugugacccucugaa

SEQ ID NO: 2307498 - RNA, 22 nt, Human
guccuugcugguuuucuggaug

SEQ ID NO: 2307499 - RNA, 14 nt, Human
guccuugcuuggcu

SEQ ID NO: 2307500 - RNA, 21 nt, Human
guccuuuacacucaggcuuuc

SEQ ID NO: 2307501 - RNA, 14 nt, Human
guccuuuaguaccu

SEQ ID NO: 2307502 - RNA, 13 nt, Human
guccuuuaugugg

SEQ ID NO: 2307503 - RNA, 16 nt, Human
guccuuuauguggaaa

SEQ ID NO: 2307504 - RNA, 19 nt, Human
guccugcgucgaagcuuug

SEQ ID NO: 2307505 - RNA, 14 nt, Human
guccugcuccacag

SEQ ID NO: 2307506 - RNA, 16 nt, Human
guccugcuccacagug

SEQ ID NO: 2307507 - RNA, 17 nt, Human
guccugcuccacagugu

SEQ ID NO: 2307508 - RNA, 19 nt, Human
guccugcuccacaguguug

SEQ ID NO: 2307509 - RNA, 20 nt, Human
guccugauggucagcucccu

SEQ ID NO: 2307510 - RNA, 23 nt, Human
guccugauggucagcucccuucu

SEQ ID NO: 2307511 - RNA, 22 nt, Human
guccugccuguggcgccgucuc

SEQ ID NO: 2307512 - RNA, 13 nt, Human
guccugcugcagu

SEQ ID NO: 2307513 - RNA, 16 nt, Human
guccugcugcaguugc

SEQ ID NO: 2307514 - RNA, 21 nt, Human
aacauuaaaacaauauuguuu

SEQ ID NO: 2307515 - RNA, 23 nt, Human
aacauuaaaacaauauuguuucu

SEQ ID NO: 2307516 - RNA, 13 nt, Human
aacauuaagaaaa

SEQ ID NO: 2307517 - RNA, 14 nt, Human
aacauuaagaaaau

SEQ ID NO: 2307518 - RNA, 20 nt, Human
aacauuacagggaaugccug

SEQ ID NO: 2307519 - RNA, 22 nt, Human
aacauuacagggaaugccugag

SEQ ID NO: 2307520 - RNA, 16 nt, Human
aacauuaccuuacugu

SEQ ID NO: 2307521 - RNA, 16 nt, Human
aacauuaagaaaauca

SEQ ID NO: 2307522 - RNA, 18 nt, Human
aacauuaagaaaaucaua

SEQ ID NO: 2307523 - RNA, 19 nt, Human
aacauuaagaaaaucauau

SEQ ID NO: 2307524 - RNA, 21 nt, Human
aacauuaagauugaggccugc

SEQ ID NO: 2307525 - RNA, 17 nt, Human
guccugaucagagccgu

SEQ ID NO: 2307526 - RNA, 15 nt, Human
guccugauggucagc

SEQ ID NO: 2307527 - RNA, 17 nt, Human
guccugauggucagcuc

SEQ ID NO: 2307528 - RNA, 18 nt, Human
guccugauggucagcucc

SEQ ID NO: 2307529 - RNA, 19 nt, Human
guccugauggucagcuccc

SEQ ID NO: 2307530 - RNA, 17 nt, Human
aacauuaccuuacugug

SEQ ID NO: 2307531 - RNA, 19 nt, Human
aacauuaccuuacugugga

SEQ ID NO: 2307532 - RNA, 17 nt, Human
aacauuuuacccacaca

SEQ ID NO: 2307533 - RNA, 15 nt, Human
aacauuuuacccaca

SEQ ID NO: 2307534 - RNA, 13 nt, Human
aacauuuucacac

SEQ ID NO: 2307535 - RNA, 16 nt, Human
aacauuuugucauaua

SEQ ID NO: 2307536 - RNA, 22 nt, Human
aacauuuguucuauagcuuuuc

SEQ ID NO: 2307537 - RNA, 14 nt, Human
gucuccauggcccu

SEQ ID NO: 2307538 - RNA, 19 nt, Human
gucuccagugguugcuguu

SEQ ID NO: 2307539 - RNA, 20 nt, Human
gucuccagugguugcuguug

SEQ ID NO: 2307540 - RNA, 14 nt, Human
aacauuuuaauuca

SEQ ID NO: 2307541 - RNA, 18 nt, Human
aacauuuuaaauggacag

SEQ ID NO: 2307542 - RNA, 15 nt, Human
aacauuuuaaaugga

SEQ ID NO: 2307543 - RNA, 17 nt, Human
aacauuuuaaauggaca

SEQ ID NO: 2307544 - RNA, 15 nt, Human
aacauuuuaaauaaa

SEQ ID NO: 2307545 - RNA, 19 nt, Human
aacauuuuaaauaaaagaa

SEQ ID NO: 2307546 - RNA, 20 nt, Human
aacauuuuaaauaaaagaaa

SEQ ID NO: 2307547 - RNA, 13 nt, Human
aacauuuuaaaug

SEQ ID NO: 2307548 - RNA, 20 nt, Human
gucuccagccccuucucaga

SEQ ID NO: 2307549 - RNA, 20 nt, Human
gucuccagacccccaccccu

SEQ ID NO: 2307550 - RNA, 17 nt, Human
gucuccagacccccacc

SEQ ID NO: 2307551 - RNA, 15 nt, Human
gucuccaggggcugc

SEQ ID NO: 2307552 - RNA, 22 nt, Human
gucuccagccccuucucagaau

SEQ ID NO: 2307553 - RNA, 16 nt, Human
gucuccaggggcugcu

SEQ ID NO: 2307554 - RNA, 19 nt, Human
gucuccaggggcugcuucc

SEQ ID NO: 2307555 - RNA, 20 nt, Human
gucuccaggggcugcuuccu

SEQ ID NO: 2307556 - RNA, 21 nt, Human
gucuccaggggcugcuuccuc

SEQ ID NO: 2307557 - RNA, 13 nt, Human
gucuccauguuug

SEQ ID NO: 2307558 - RNA, 21 nt, Human
gucuccaguauccacuuugca

SEQ ID NO: 2307559 - RNA, 18 nt, Human
gucuccagugguugcugu

SEQ ID NO: 2307560 - RNA, 22 nt, Human
gucuccaggggcugcuuccucc

SEQ ID NO: 2307561 - RNA, 23 nt, Human
gucuccaggggcugcuuccuccu

SEQ ID NO: 2307562 - RNA, 13 nt, Human
aaccacaucuugc

SEQ ID NO: 2307563 - RNA, 15 nt, Human
aaccacagcccuguc

SEQ ID NO: 2307564 - RNA, 14 nt, Human
aaccacagcccugu

SEQ ID NO: 2307565 - RNA, 13 nt, Human
aaccacagcccug

SEQ ID NO: 2307566 - RNA, 12 nt, Human
aaccacagcccu

SEQ ID NO: 2307567 - RNA, 16 nt, Human
aaccacagcccuguca

SEQ ID NO: 2307568 - RNA, 18 nt, Human
aaccacagcugcuggaga

SEQ ID NO: 2307569 - RNA, 13 nt, Human
aaccacagcugcu

SEQ ID NO: 2307570 - RNA, 14 nt, Human
aaccacagcugcug

SEQ ID NO: 2307571 - RNA, 15 nt, Human
aaccacagcugcugg

SEQ ID NO: 2307572 - RNA, 16 nt, Human
aaccacagcugcugga

SEQ ID NO: 2307573 - RNA, 16 nt, Human
aaccaaauauuccaga

SEQ ID NO: 2307574 - RNA, 22 nt, Human
aaccaaaucacugaacuuugcu

SEQ ID NO: 2307575 - RNA, 15 nt, Human
aaccaaaucuggaag

SEQ ID NO: 2307576 - RNA, 10 nt, Human
aaccaaaggu

SEQ ID NO: 2307577 - RNA, 14 nt, Human
aaccaaaggugaag

SEQ ID NO: 2307578 - RNA, 16 nt, Human
aaccaaaggugaagga

SEQ ID NO: 2307579 - RNA, 20 nt, Human
aaccaaaggugaaggaauau

SEQ ID NO: 2307580 - RNA, 21 nt, Human
aaccaaaggugaaggaauaua

SEQ ID NO: 2307581 - RNA, 23 nt, Human
aaccaaaggugaaggaauauaug

SEQ ID NO: 2307582 - RNA, 14 nt, Human
aaccaagaagggcu

SEQ ID NO: 2307583 - RNA, 17 nt, Human
aaccaacuacaaccaag

SEQ ID NO: 2307584 - RNA, 23 nt, Human
aaccaaaguaaccuuuugcaccu

SEQ ID NO: 2307585 - RNA, 16 nt, Human
gucucaaacuccugac

SEQ ID NO: 2307586 - RNA, 19 nt, Human
gucucaaaaaaagaaaaag

SEQ ID NO: 2307587 - RNA, 22 nt, Human
gucucaaacucuugaccucagg

SEQ ID NO: 2307588 - RNA, 14 nt, Human
gucuaugggacuca

SEQ ID NO: 2307589 - RNA, 15 nt, Human
gucuaugggacucaa

SEQ ID NO: 2307590 - RNA, 13 nt, Human
gucuauccacaga

SEQ ID NO: 2307591 - RNA, 14 nt, Human
gucuauccacagag

SEQ ID NO: 2307592 - RNA, 15 nt, Human
gucuauccacagaga

SEQ ID NO: 2307593 - RNA, 20 nt, Human
gucucaagagggcacuggug

SEQ ID NO: 2307594 - RNA, 22 nt, Human
gucucaagagggcacugguggc

SEQ ID NO: 2307595 - RNA, 12 nt, Human
gucucaaugcuc

SEQ ID NO: 2307596 - RNA, 14 nt, Human
gucucaaugcucau

SEQ ID NO: 2307597 - RNA, 21 nt, Human
gucucaacccuuuugucugcc

SEQ ID NO: 2307598 - RNA, 19 nt, Human
gucucaagggcuagcaucc

SEQ ID NO: 2307599 - RNA, 15 nt, Human
gucucaagagggcac

SEQ ID NO: 2307600 - RNA, 17 nt, Human
gucucaagagggcacug

SEQ ID NO: 2307601 - RNA, 16 nt, Human
gucucaaacuccuggg

SEQ ID NO: 2307602 - RNA, 21 nt, Human
gucuaugacuuauuuccuuca

SEQ ID NO: 2307603 - RNA, 20 nt, Human
gucucaaacuccugggcuca

SEQ ID NO: 2307604 - RNA, 16 nt, Human
gucucaguccaccuga

SEQ ID NO: 2307605 - RNA, 18 nt, Human
gucucaggcuggugggag

SEQ ID NO: 2307606 - RNA, 22 nt, Human
gucucaggcuggugggaggggc

SEQ ID NO: 2307607 - RNA, 16 nt, Human
gucuccaaccccccag

SEQ ID NO: 2307608 - RNA, 17 nt, Human
gucuccaaccccccagc

SEQ ID NO: 2307609 - RNA, 20 nt, Human
gucuccaaccccccagcacu

SEQ ID NO: 2307610 - RNA, 21 nt, Human
gucuccaaccccccagcacug

SEQ ID NO: 2307611 - RNA, 15 nt, Human
gucuccagaccccca

SEQ ID NO: 2307612 - RNA, 21 nt, Human
gucuccaccaggaaccucuuc

SEQ ID NO: 2307613 - RNA, 20 nt, Human
gucuccaccaggaaccucuu

SEQ ID NO: 2307614 - RNA, 19 nt, Human
gucuccaccaggaaccucu

SEQ ID NO: 2307615 - RNA, 17 nt, Human
gucuccaccaggaaccu

SEQ ID NO: 2307616 - RNA, 16 nt, Human
gucuccaccaggaacc

SEQ ID NO: 2307617 - RNA, 15 nt, Human
gucuccaccaggaac

SEQ ID NO: 2307618 - RNA, 12 nt, Human
gucuccaccagg

SEQ ID NO: 2307619 - RNA, 22 nt, Human
gucuccaaccccccagcacuga

SEQ ID NO: 2307620 - RNA, 20 nt, Human
gucuccacacacagcugggc

SEQ ID NO: 2307621 - RNA, 23 nt, Human
gucuccacacacagcugggcugu

SEQ ID NO: 2307622 - RNA, 16 nt, Human
gucucaggucccugca

SEQ ID NO: 2307623 - RNA, 23 nt, Human
gucucaguccaugaagauguaga

SEQ ID NO: 2307624 - RNA, 23 nt, Human
gucucacaguguugcccaggcug

SEQ ID NO: 2307625 - RNA, 19 nt, Human
gucucacaguguugcccag

SEQ ID NO: 2307626 - RNA, 17 nt, Human
gucucaaugcucauaac

SEQ ID NO: 2307627 - RNA, 15 nt, Human
gucucacacuggcgu

SEQ ID NO: 2307628 - RNA, 13 nt, Human
gucucacagcccu

SEQ ID NO: 2307629 - RNA, 15 nt, Human
gucucaggucccugc

SEQ ID NO: 2307630 - RNA, 13 nt, Human
gucucaggcuggu

SEQ ID NO: 2307631 - RNA, 17 nt, Human
gucucaggcugguggga

SEQ ID NO: 2307632 - RNA, 23 nt, Human
aaccaugaguggcauggccacca

SEQ ID NO: 2307633 - RNA, 13 nt, Human
gucucuuguaauc

SEQ ID NO: 2307634 - RNA, 13 nt, Human
gucucuugguccu

SEQ ID NO: 2307635 - RNA, 20 nt, Human
gucucuugguccugcugcag

SEQ ID NO: 2307636 - RNA, 18 nt, Human
gucucuugguccugcugc

SEQ ID NO: 2307637 - RNA, 19 nt, Human
gucucuugguccugcugca

SEQ ID NO: 2307638 - RNA, 22 nt, Human
aaccaucccugaugucugucug

SEQ ID NO: 2307639 - RNA, 19 nt, Human
aaccauccccuccguggca

SEQ ID NO: 2307640 - RNA, 21 nt, Human
aaccaugaagagauuuuucau

SEQ ID NO: 2307641 - RNA, 23 nt, Human
aaccaugaagagauuuuucauga

SEQ ID NO: 2307642 - RNA, 20 nt, Human
aaccaucugucccugccuca

SEQ ID NO: 2307643 - RNA, 15 nt, Human
aaccaugaagacagg

SEQ ID NO: 2307644 - RNA, 16 nt, Human
aaccaugaagacagga

SEQ ID NO: 2307645 - RNA, 17 nt, Human
aaccaugaagacaggau

SEQ ID NO: 2307646 - RNA, 17 nt, Human
gucucuugguccugcug

SEQ ID NO: 2307647 - RNA, 22 nt, Human
aaccaugagaccacuguuauca

SEQ ID NO: 2307648 - RNA, 24 nt, Human
aaccaugaagagauuuuucaugau

SEQ ID NO: 2307649 - RNA, 19 nt, Human
aaccaugcaaaugcuauga

SEQ ID NO: 2307650 - RNA, 17 nt, Human
gucucuuuaaucuucag

SEQ ID NO: 2307651 - RNA, 19 nt, Human
gucucuuguauuaaacucu

SEQ ID NO: 2307652 - RNA, 16 nt, Human
gucucuuguauuaaac

SEQ ID NO: 2307653 - RNA, 18 nt, Human
gucucuuuaaugucacag

SEQ ID NO: 2307654 - RNA, 19 nt, Human
gucucuuuaaugucacagg

SEQ ID NO: 2307655 - RNA, 20 nt, Human
gucucuuuaaugucacaggc

SEQ ID NO: 2307656 - RNA, 16 nt, Human
gucugaagucacugca

SEQ ID NO: 2307657 - RNA, 14 nt, Human
gucugaaggcuggg

SEQ ID NO: 2307658 - RNA, 19 nt, Human
gucugaaggcuggguucug

SEQ ID NO: 2307659 - RNA, 22 nt, Human
gucucuuuaaugucacaggcag

SEQ ID NO: 2307660 - RNA, 23 nt, Human
gucucuuuaaugucacaggcagg

SEQ ID NO: 2307661 - RNA, 19 nt, Human
gucuggagaagcagugagc

SEQ ID NO: 2307662 - RNA, 21 nt, Human
gucuggagaagcucccaggaa

SEQ ID NO: 2307663 - RNA, 22 nt, Human
gucuggagaagcucccaggaac

SEQ ID NO: 2307664 - RNA, 23 nt, Human
gucuggagaagcucccaggaaca

SEQ ID NO: 2307665 - RNA, 17 nt, Human
gucuggagaagcaguga

SEQ ID NO: 2307666 - RNA, 14 nt, Human
gucuggagaagcag

SEQ ID NO: 2307667 - RNA, 18 nt, Human
gucucuuuaaucuucagu

SEQ ID NO: 2307668 - RNA, 16 nt, Human
gucugaagugguuguu

SEQ ID NO: 2307669 - RNA, 17 nt, Human
gucuggaggggccccug

SEQ ID NO: 2307670 - RNA, 10 nt, Human
gucuggaggg

SEQ ID NO: 2307671 - RNA, 21 nt, Human
gucuggaguugaucuggaacc

SEQ ID NO: 2307672 - RNA, 23 nt, Human
gucuggaggggccccugcuucuc

SEQ ID NO: 2307673 - RNA, 18 nt, Human
gucuggaggggccccugc

SEQ ID NO: 2307674 - RNA, 21 nt, Human
gucugacaggcaaugcuggcu

SEQ ID NO: 2307675 - RNA, 17 nt, Human
gucugaagucacugcac

SEQ ID NO: 2307676 - RNA, 19 nt, Human
gucugaagucacugcacag

SEQ ID NO: 2307677 - RNA, 22 nt, Human
gucugacaggcaaugcuggcug

SEQ ID NO: 2307678 - RNA, 23 nt, Human
gucugacaggcaaugcuggcugu

SEQ ID NO: 2307679 - RNA, 14 nt, Human
gucugguuucuaga

SEQ ID NO: 2307680 - RNA, 13 nt, Human
gucuucacaacag

SEQ ID NO: 2307681 - RNA, 16 nt, Human
gucuucacagcucugu

SEQ ID NO: 2307682 - RNA, 22 nt, Human
gucugguuucaccgaggacaug

SEQ ID NO: 2307683 - RNA, 17 nt, Human
gucugguuucaccgagg

SEQ ID NO: 2307684 - RNA, 13 nt, Human
gucuggugggagg

SEQ ID NO: 2307685 - RNA, 12 nt, Human
gucuucagccua

SEQ ID NO: 2307686 - RNA, 15 nt, Human
gucuucacggcagga

SEQ ID NO: 2307687 - RNA, 17 nt, Human
gucuucacagcucugug

SEQ ID NO: 2307688 - RNA, 13 nt, Human
gucugguuucuag

SEQ ID NO: 2307689 - RNA, 20 nt, Human
gucuucaccugauucaacua

SEQ ID NO: 2307690 - RNA, 15 nt, Human
gucuucagccuagcc

SEQ ID NO: 2307691 - RNA, 13 nt, Human
gucuucagccuag

SEQ ID NO: 2307692 - RNA, 23 nt, Human
gucuucagccuagccgaccucag

SEQ ID NO: 2307693 - RNA, 14 nt, Human
gucuucagccucuu

SEQ ID NO: 2307694 - RNA, 23 nt, Human
gucugggguucagccccuccucu

SEQ ID NO: 2307695 - RNA, 20 nt, Human
gucugggguucagccccucc

SEQ ID NO: 2307696 - RNA, 15 nt, Human
gucuggugaagcuca

SEQ ID NO: 2307697 - RNA, 18 nt, Human
gucuggucuccucagccu

SEQ ID NO: 2307698 - RNA, 13 nt, Human
gucugguggcccc

SEQ ID NO: 2307699 - RNA, 20 nt, Human
gucugguggccccguuucug

SEQ ID NO: 2307700 - RNA, 18 nt, Human
gucugggguucagccccu

SEQ ID NO: 2307701 - RNA, 17 nt, Human
gucugggguucagcccc

SEQ ID NO: 2307702 - RNA, 16 nt, Human
gucugggguucagccc

SEQ ID NO: 2307703 - RNA, 22 nt, Human
gucuggaucugggacccuuucc

SEQ ID NO: 2307704 - RNA, 22 nt, Human
gucuuuguaaugucaccaccuu

SEQ ID NO: 2307705 - RNA, 16 nt, Human
gucuuuguacagacaa

SEQ ID NO: 2307706 - RNA, 21 nt, Human
gucuuuguaaugucaccaccu

SEQ ID NO: 2307707 - RNA, 15 nt, Human
gucuucccuaccuca

SEQ ID NO: 2307708 - RNA, 13 nt, Human
gucuucccagggu

SEQ ID NO: 2307709 - RNA, 15 nt, Human
gucuucccaggguag

SEQ ID NO: 2307710 - RNA, 17 nt, Human
gucuuccauaauguaua

SEQ ID NO: 2307711 - RNA, 12 nt, Human
gucuucccaggg

SEQ ID NO: 2307712 - RNA, 15 nt, Human
gucuuccauuugcaa

SEQ ID NO: 2307713 - RNA, 15 nt, Human
gucuuuguacagaca

SEQ ID NO: 2307714 - RNA, 18 nt, Human
gucuucagggggccaggu

SEQ ID NO: 2307715 - RNA, 23 nt, Human
gucuucauaccuacauguauuug

SEQ ID NO: 2307716 - RNA, 23 nt, Human
gucuucagccucuuucugucccu

SEQ ID NO: 2307717 - RNA, 22 nt, Human
gucuucagccucuuucuguccc

SEQ ID NO: 2307718 - RNA, 16 nt, Human
gucuucaguaagccgu

SEQ ID NO: 2307719 - RNA, 15 nt, Human
gucuuccauaaugua

SEQ ID NO: 2307720 - RNA, 13 nt, Human
gucuuccauaaug

SEQ ID NO: 2307721 - RNA, 21 nt, Human
gucuucauuaagcccucuucc

SEQ ID NO: 2307722 - RNA, 22 nt, Human
gucuucauuaagcccucuucca

SEQ ID NO: 2307723 - RNA, 16 nt, Human
gucuucauuucauugu

SEQ ID NO: 2307724 - RNA, 17 nt, Human
gucuucauuucauugua

SEQ ID NO: 2307725 - RNA, 24 nt, Human
gucuuuuaggacccuucccuugag

SEQ ID NO: 2307726 - RNA, 11 nt, Human
gucuuuucauc

SEQ ID NO: 2307727 - RNA, 18 nt, Human
aaccugauugugucucuu

SEQ ID NO: 2307728 - RNA, 18 nt, Human
aaccugauguuaaaauuc

SEQ ID NO: 2307729 - RNA, 19 nt, Human
aaccugcaagggcucccca

SEQ ID NO: 2307730 - RNA, 17 nt, Human
aaccugauguuaaaauu

SEQ ID NO: 2307731 - RNA, 15 nt, Human
aaccugaugcugacu

SEQ ID NO: 2307732 - RNA, 17 nt, Human
aaccugaugcagucacg

SEQ ID NO: 2307733 - RNA, 19 nt, Human
aaccugauugugucucuug

SEQ ID NO: 2307734 - RNA, 19 nt, Human
aaccuguuuaaauauuuca

SEQ ID NO: 2307735 - RNA, 21 nt, Human
aaccuguugauagcaagugaa

SEQ ID NO: 2307736 - RNA, 24 nt, Human
aaccuguuaccuacuuugacuuuu

SEQ ID NO: 2307737 - RNA, 17 nt, Human
aaccuguucugcuuucc

SEQ ID NO: 2307738 - RNA, 13 nt, Human
aaccuguucugcu

SEQ ID NO: 2307739 - RNA, 21 nt, Human
aaccuguuaccuacuuugacu

SEQ ID NO: 2307740 - RNA, 22 nt, Human
aaccugcaagggcuccccacug

SEQ ID NO: 2307741 - RNA, 15 nt, Human
aaccugccagggaga

SEQ ID NO: 2307742 - RNA, 19 nt, Human
aaccugccagggagacaga

SEQ ID NO: 2307743 - RNA, 11 nt, Human
aaccugcccug

SEQ ID NO: 2307744 - RNA, 13 nt, Human
aaccugcccugcc

SEQ ID NO: 2307745 - RNA, 15 nt, Human
aaccugcccugccug

SEQ ID NO: 2307746 - RNA, 16 nt, Human
aaccugcccugccuga

SEQ ID NO: 2307747 - RNA, 16 nt, Human
aacuagaaaucugcca

SEQ ID NO: 2307748 - RNA, 19 nt, Human
aacuagaauuuauucaauu

SEQ ID NO: 2307749 - RNA, 22 nt, Human
aacuagaauuuauucaauuccu

SEQ ID NO: 2307750 - RNA, 17 nt, Human
aacuagaauuuauucaa

SEQ ID NO: 2307751 - RNA, 15 nt, Human
aacuaauaaaagcau

SEQ ID NO: 2307752 - RNA, 14 nt, Human
aacuaauaaaagca

SEQ ID NO: 2307753 - RNA, 17 nt, Human
aacuaagcccccgcugu

SEQ ID NO: 2307754 - RNA, 19 nt, Human
aacuaagcccccgcuguaa

SEQ ID NO: 2307755 - RNA, 17 nt, Human
aacuacuguguuccugg

SEQ ID NO: 2307756 - RNA, 16 nt, Human
aacuacuguguuccug

SEQ ID NO: 2307757 - RNA, 14 nt, Human
gucuuuucaucugg

SEQ ID NO: 2307758 - RNA, 16 nt, Human
aacguugcugugggaa

SEQ ID NO: 2307759 - RNA, 14 nt, Human
aacguugcucccca

SEQ ID NO: 2307760 - RNA, 13 nt, Human
aacguugcugugg

SEQ ID NO: 2307761 - RNA, 14 nt, Human
aacguugcuguggg

SEQ ID NO: 2307762 - RNA, 16 nt, Human
aacuaacacuauuuua

SEQ ID NO: 2307763 - RNA, 23 nt, Human
aacuaagaaauaugcacaauagc

SEQ ID NO: 2307764 - RNA, 12 nt, Human
aacuaacacuau

SEQ ID NO: 2307765 - RNA, 22 nt, Human
aacguggggcagcacagagagg

SEQ ID NO: 2307766 - RNA, 17 nt, Human
aacguggggcagcacag

SEQ ID NO: 2307767 - RNA, 18 nt, Human
aacguggggcagcacaga

SEQ ID NO: 2307768 - RNA, 19 nt, Human
aacguguugccuugaacca

SEQ ID NO: 2307769 - RNA, 23 nt, Human
aacguggcugcuucaaggauccu

SEQ ID NO: 2307770 - RNA, 23 nt, Human
aaccuugucucuaugccagcuca

SEQ ID NO: 2307771 - RNA, 19 nt, Human
aaccuugucucuaugccag

SEQ ID NO: 2307772 - RNA, 18 nt, Human
aaccuuguuauuucucag

SEQ ID NO: 2307773 - RNA, 15 nt, Human
aaccuugugccuggc

SEQ ID NO: 2307774 - RNA, 21 nt, Human
aaccuugugccuggcucagag

SEQ ID NO: 2307775 - RNA, 23 nt, Human
aaccuuagauguucuaagucuuu

SEQ ID NO: 2307776 - RNA, 22 nt, Human
aaccuugguguaguugaacuga

SEQ ID NO: 2307777 - RNA, 14 nt, Human
aaccuuucaaauuu

SEQ ID NO: 2307778 - RNA, 16 nt, Human
aaccuuuagggcagcu

SEQ ID NO: 2307779 - RNA, 19 nt, Human
aaccuuuagggcagcuugc

SEQ ID NO: 2307780 - RNA, 18 nt, Human
aaccuuucaaauuucaca

SEQ ID NO: 2307781 - RNA, 17 nt, Human
aaccuuguuauuucuca

SEQ ID NO: 2307782 - RNA, 14 nt, Human
aaccuuuagggcag

SEQ ID NO: 2307783 - RNA, 15 nt, Human
aaccuuuagggcagc

SEQ ID NO: 2307784 - RNA, 14 nt, Human
gugaaggcuucucu

SEQ ID NO: 2307785 - RNA, 22 nt, Human
gugaaggcuucucucuguggga

SEQ ID NO: 2307786 - RNA, 17 nt, Human
gugaaggcuucucucug

SEQ ID NO: 2307787 - RNA, 17 nt, Human
gugaagguccugcuauu

SEQ ID NO: 2307788 - RNA, 20 nt, Human
gugaagguccugcuauuacu

SEQ ID NO: 2307789 - RNA, 19 nt, Human
gugaaguauacuguauuuu

SEQ ID NO: 2307790 - RNA, 17 nt, Human
gugaaguauacuguauu

SEQ ID NO: 2307791 - RNA, 16 nt, Human
gugaagugaaugaaac

SEQ ID NO: 2307792 - RNA, 14 nt, Human
gugaagugaagaca

SEQ ID NO: 2307793 - RNA, 20 nt, Human
gugaaggccgagaagcaaga

SEQ ID NO: 2307794 - RNA, 13 nt, Human
gugaaggacccuu

SEQ ID NO: 2307795 - RNA, 12 nt, Human
gugaaggacccu

SEQ ID NO: 2307796 - RNA, 15 nt, Human
gugaaggaauauaug

SEQ ID NO: 2307797 - RNA, 22 nt, Human
gugaagccaauucagacaggca

SEQ ID NO: 2307798 - RNA, 20 nt, Human
gugaagccaauucagacagg

SEQ ID NO: 2307799 - RNA, 10 nt, Human
gugaagccaa

SEQ ID NO: 2307800 - RNA, 17 nt, Human
gugaagcaccaagcuca

SEQ ID NO: 2307801 - RNA, 18 nt, Human
gugaagcaccaagcucaa

SEQ ID NO: 2307802 - RNA, 16 nt, Human
aacuagaaccuggagg

SEQ ID NO: 2307803 - RNA, 15 nt, Human
aacuagaauuugauu

SEQ ID NO: 2307804 - RNA, 16 nt, Human
aacuagaauuugauua

SEQ ID NO: 2307805 - RNA, 13 nt, Human
aacuauauuguuu

SEQ ID NO: 2307806 - RNA, 20 nt, Human
aacuaucucauuuccaagca

SEQ ID NO: 2307807 - RNA, 23 nt, Human
aacuaucucauuuccaagcaagu

SEQ ID NO: 2307808 - RNA, 19 nt, Human
gugaagagggagaagcaug

SEQ ID NO: 2307809 - RNA, 12 nt, Human
gugaagaggggc

SEQ ID NO: 2307810 - RNA, 13 nt, Human
gugaagaggggca

SEQ ID NO: 2307811 - RNA, 14 nt, Human
gugaagaggggcag

SEQ ID NO: 2307812 - RNA, 15 nt, Human
gugaagaggggcagc

SEQ ID NO: 2307813 - RNA, 16 nt, Human
gugaagaggggcagcc

SEQ ID NO: 2307814 - RNA, 17 nt, Human
gugaagaggggcagccc

SEQ ID NO: 2307815 - RNA, 19 nt, Human
gugaagaggggcagcccuu

SEQ ID NO: 2307816 - RNA, 23 nt, Human
gugaagacaaugacuuacuguac

SEQ ID NO: 2307817 - RNA, 16 nt, Human
aacuagacauucuguc

SEQ ID NO: 2307818 - RNA, 18 nt, Human
aacuagacauucugucgc

SEQ ID NO: 2307819 - RNA, 13 nt, Human
aacuauauuuucu

SEQ ID NO: 2307820 - RNA, 16 nt, Human
aacuauauuuucuuua

SEQ ID NO: 2307821 - RNA, 16 nt, Human
gugaaguccuucaccu

SEQ ID NO: 2307822 - RNA, 14 nt, Human
gugaaguuagaauu

SEQ ID NO: 2307823 - RNA, 17 nt, Human
gugaaguuagaauuccu

SEQ ID NO: 2307824 - RNA, 18 nt, Human
gugaaguuagaauuccuu

SEQ ID NO: 2307825 - RNA, 16 nt, Human
gugacagaggcagccc

SEQ ID NO: 2307826 - RNA, 18 nt, Human
gugacagaggcagcccca

SEQ ID NO: 2307827 - RNA, 19 nt, Human
gugacagaggcagccccau

SEQ ID NO: 2307828 - RNA, 16 nt, Human
gugacaugcgggcugg

SEQ ID NO: 2307829 - RNA, 20 nt, Human
gugacaugcgggcugggcag

SEQ ID NO: 2307830 - RNA, 21 nt, Human
gugacaugcgggcugggcagc

SEQ ID NO: 2307831 - RNA, 18 nt, Human
gugacaucaguggcaugg

SEQ ID NO: 2307832 - RNA, 22 nt, Human
gugacaugcgggcugggcagcu

SEQ ID NO: 2307833 - RNA, 14 nt, Human
gugacaucucuuac

SEQ ID NO: 2307834 - RNA, 15 nt, Human
gugacauggugccug

SEQ ID NO: 2307835 - RNA, 16 nt, Human
gugacauggugccuga

SEQ ID NO: 2307836 - RNA, 19 nt, Human
gugacauggugccugagag

SEQ ID NO: 2307837 - RNA, 20 nt, Human
gugacauggugccugagagg

SEQ ID NO: 2307838 - RNA, 22 nt, Human
gugacauggugccugagaggca

SEQ ID NO: 2307839 - RNA, 14 nt, Human
gugacaugucuuuu

SEQ ID NO: 2307840 - RNA, 19 nt, Human
gugaccaaguuauaaauca

SEQ ID NO: 2307841 - RNA, 23 nt, Human
gugaccaacuagacauucugucg

SEQ ID NO: 2307842 - RNA, 16 nt, Human
gugaccaaugucuuga

SEQ ID NO: 2307843 - RNA, 15 nt, Human
gugaccaaugucuug

SEQ ID NO: 2307844 - RNA, 17 nt, Human
gugaccaaugaugguca

SEQ ID NO: 2307845 - RNA, 13 nt, Human
gugacauguaaca

SEQ ID NO: 2307846 - RNA, 23 nt, Human
gugacauggugccugagaggcag

SEQ ID NO: 2307847 - RNA, 24 nt, Human
gugacauggugccugagaggcagg

SEQ ID NO: 2307848 - RNA, 16 nt, Human
gugaccaaaauccccu

SEQ ID NO: 2307849 - RNA, 19 nt, Human
gugaccaacuagacauucu

SEQ ID NO: 2307850 - RNA, 22 nt, Human
gugaccaacuagacauucuguc

SEQ ID NO: 2307851 - RNA, 14 nt, Human
gugacccaaugauu

SEQ ID NO: 2307852 - RNA, 14 nt, Human
gugaccagggguga

SEQ ID NO: 2307853 - RNA, 17 nt, Human
gugaccaggcauccucc

SEQ ID NO: 2307854 - RNA, 17 nt, Human
gugaccacucugucuug

SEQ ID NO: 2307855 - RNA, 18 nt, Human
gugaccauguuuuguuua

SEQ ID NO: 2307856 - RNA, 18 nt, Human
gugaccagcaccaucucu

SEQ ID NO: 2307857 - RNA, 21 nt, Human
gugaccagcaccaucucuccu

SEQ ID NO: 2307858 - RNA, 15 nt, Human
gugaguccauucucc

SEQ ID NO: 2307859 - RNA, 17 nt, Human
gugaguccuggcauggg

SEQ ID NO: 2307860 - RNA, 16 nt, Human
gugaguaagagcuggu

SEQ ID NO: 2307861 - RNA, 15 nt, Human
gugaguaagagcugg

SEQ ID NO: 2307862 - RNA, 14 nt, Human
gugaguaagagcug

SEQ ID NO: 2307863 - RNA, 20 nt, Human
gugagguggguuuucuuccc

SEQ ID NO: 2307864 - RNA, 21 nt, Human
gugaguacuacaguccuccca

SEQ ID NO: 2307865 - RNA, 19 nt, Human
gugaguacuacaguccucc

SEQ ID NO: 2307866 - RNA, 15 nt, Human
gugagucgaggacag

SEQ ID NO: 2307867 - RNA, 15 nt, Human
aacucugcacuacuc

SEQ ID NO: 2307868 - RNA, 20 nt, Human
gugaguccuggcaugggaau

SEQ ID NO: 2307869 - RNA, 14 nt, Human
aacucugccagcca

SEQ ID NO: 2307870 - RNA, 16 nt, Human
aacucugcauucuagu

SEQ ID NO: 2307871 - RNA, 11 nt, Human
aacucugcugu

SEQ ID NO: 2307872 - RNA, 16 nt, Human
aacucugcuugauuuu

SEQ ID NO: 2307873 - RNA, 22 nt, Human
aacucugcugucuaaccuguga

SEQ ID NO: 2307874 - RNA, 16 nt, Human
aacucuggcuuccagg

SEQ ID NO: 2307875 - RNA, 17 nt, Human
aacucuggcuuccaggu

SEQ ID NO: 2307876 - RNA, 18 nt, Human
aacucuggcuuccaggua

SEQ ID NO: 2307877 - RNA, 20 nt, Human
aacucuggcuuccagguauc

SEQ ID NO: 2307878 - RNA, 14 nt, Human
aacugcaggcccug

SEQ ID NO: 2307879 - RNA, 16 nt, Human
aacugcaggcccuggc

SEQ ID NO: 2307880 - RNA, 17 nt, Human
aacugcaggcccuggcc

SEQ ID NO: 2307881 - RNA, 18 nt, Human
aacugcaggcccuggccu

SEQ ID NO: 2307882 - RNA, 19 nt, Human
aacugcaggcccuggccuc

SEQ ID NO: 2307883 - RNA, 20 nt, Human
aacugcaggcccuggccucc

SEQ ID NO: 2307884 - RNA, 21 nt, Human
aacugcaggcccuggccuccc

SEQ ID NO: 2307885 - RNA, 20 nt, Human
gugagacaguccagccugga

SEQ ID NO: 2307886 - RNA, 15 nt, Human
aacugaacauuccag

SEQ ID NO: 2307887 - RNA, 22 nt, Human
aacucugggcugcuacccagaa

SEQ ID NO: 2307888 - RNA, 21 nt, Human
aacucugggcugcuacccaga

SEQ ID NO: 2307889 - RNA, 16 nt, Human
aacucuguggcauuau

SEQ ID NO: 2307890 - RNA, 23 nt, Human
aacucugucuucaccugauucaa

SEQ ID NO: 2307891 - RNA, 20 nt, Human
aacucuguguugugaauguc

SEQ ID NO: 2307892 - RNA, 20 nt, Human
aacucugucuucaccugauu

SEQ ID NO: 2307893 - RNA, 17 nt, Human
aacucugucuucaccug

SEQ ID NO: 2307894 - RNA, 13 nt, Human
aacugaaaucaua

SEQ ID NO: 2307895 - RNA, 20 nt, Human
aacugaaaucauacuucuua

SEQ ID NO: 2307896 - RNA, 12 nt, Human
gugagagcuggg

SEQ ID NO: 2307897 - RNA, 17 nt, Human
gugagaauaggcagccc

SEQ ID NO: 2307898 - RNA, 14 nt, Human
gugagaauaagaga

SEQ ID NO: 2307899 - RNA, 21 nt, Human
gugagaagugaaugcugggac

SEQ ID NO: 2307900 - RNA, 22 nt, Human
gugagaagugaaugcugggacu

SEQ ID NO: 2307901 - RNA, 20 nt, Human
gugagaagugaaugcuggga

SEQ ID NO: 2307902 - RNA, 15 nt, Human
gugagaacuacucag

SEQ ID NO: 2307903 - RNA, 17 nt, Human
gugagaaaaagcuccug

SEQ ID NO: 2307904 - RNA, 22 nt, Human
gugagaaaaagcuccuguccuc

SEQ ID NO: 2307905 - RNA, 15 nt, Human
gugacccagucagag

SEQ ID NO: 2307906 - RNA, 14 nt, Human
gugacccagguccu

SEQ ID NO: 2307907 - RNA, 12 nt, Human
gugaccccaggu

SEQ ID NO: 2307908 - RNA, 20 nt, Human
gugacuuuggcugcaugcga

SEQ ID NO: 2307909 - RNA, 22 nt, Human
gugaccccuuuucagcuucugc

SEQ ID NO: 2307910 - RNA, 23 nt, Human
gugaccccuuuucagcuucugcu

SEQ ID NO: 2307911 - RNA, 16 nt, Human
gugacccccagcuccg

SEQ ID NO: 2307912 - RNA, 19 nt, Human
gugaccccuuuucagcuuc

SEQ ID NO: 2307913 - RNA, 20 nt, Human
gugaccccuuuucagcuucu

SEQ ID NO: 2307914 - RNA, 17 nt, Human
gugacccccagcuccgg

SEQ ID NO: 2307915 - RNA, 15 nt, Human
gugacccccagcucc

SEQ ID NO: 2307916 - RNA, 15 nt, Human
gugagcaggcuguga

SEQ ID NO: 2307917 - RNA, 17 nt, Human
gugaguacuacaguccu

SEQ ID NO: 2307918 - RNA, 17 nt, Human
gugagcagacugguggg

SEQ ID NO: 2307919 - RNA, 20 nt, Human
gugagcagaaguggagcugg

SEQ ID NO: 2307920 - RNA, 21 nt, Human
gugagcacggccaacaaagcu

SEQ ID NO: 2307921 - RNA, 16 nt, Human
gugagcacucccaagu

SEQ ID NO: 2307922 - RNA, 19 nt, Human
gugagcacucccaagucua

SEQ ID NO: 2307923 - RNA, 19 nt, Human
gugagcagaaguggagcug

SEQ ID NO: 2307924 - RNA, 21 nt, Human
gugagcacuaaggugugcucu

SEQ ID NO: 2307925 - RNA, 13 nt, Human
gugagagugagcu

SEQ ID NO: 2307926 - RNA, 14 nt, Human
gugagcacagccua

SEQ ID NO: 2307927 - RNA, 15 nt, Human
gugagcaauccugca

SEQ ID NO: 2307928 - RNA, 23 nt, Human
gugagagggcaugcgcacaaggc

SEQ ID NO: 2307929 - RNA, 18 nt, Human
gugagacaguccagccug

SEQ ID NO: 2307930 - RNA, 19 nt, Human
gugagacaguccagccugg

SEQ ID NO: 2307931 - RNA, 22 nt, Human
gugagaauaagagagucauaaa

SEQ ID NO: 2307932 - RNA, 18 nt, Human
gugagaaucccuggcaaa

SEQ ID NO: 2307933 - RNA, 13 nt, Human
gugagagcugggu

SEQ ID NO: 2307934 - RNA, 16 nt, Human
gugagaggggaacaga

SEQ ID NO: 2307935 - RNA, 17 nt, Human
aaaaacagcauugcuuu

SEQ ID NO: 2307936 - RNA, 15 nt, Human
aaaaacagcauugcu

SEQ ID NO: 2307937 - RNA, 14 nt, Human
aaaaacagaggcca

SEQ ID NO: 2307938 - RNA, 13 nt, Human
aaaaacuacacau

SEQ ID NO: 2307939 - RNA, 14 nt, Human
aaaaacuaaauugu

SEQ ID NO: 2307940 - RNA, 20 nt, Human
aaaaacuaaaucucuaauau

SEQ ID NO: 2307941 - RNA, 22 nt, Human
aaaaaccuuguauaucuuguuu

SEQ ID NO: 2307942 - RNA, 22 nt, Human
aaaaaauuagaaauuggcugga

SEQ ID NO: 2307943 - RNA, 13 nt, Human
aaaaacacagcaa

SEQ ID NO: 2307944 - RNA, 18 nt, Human
aaaaacacagcaagggug

SEQ ID NO: 2307945 - RNA, 15 nt, Human
aaaaacaccuagcuu

SEQ ID NO: 2307946 - RNA, 17 nt, Human
aaaaacaccuagcuuua

SEQ ID NO: 2307947 - RNA, 18 nt, Human
aaaaacaccuagcuuuau

SEQ ID NO: 2307948 - RNA, 12 nt, Human
aaaaacacuagu

SEQ ID NO: 2307949 - RNA, 15 nt, Human
aaaaaaucugcagaa

SEQ ID NO: 2307950 - RNA, 13 nt, Human
aaaaaaucugcag

SEQ ID NO: 2307951 - RNA, 11 nt, Human
aaaaaaugucc

SEQ ID NO: 2307952 - RNA, 16 nt, Human
aaaaaauguauaugca

SEQ ID NO: 2307953 - RNA, 22 nt, Human
aaaaaaugcugaacauugcaua

SEQ ID NO: 2307954 - RNA, 20 nt, Human
aaaaaaugcugaacauugca

SEQ ID NO: 2307955 - RNA, 15 nt, Human
aaaaaauauuuuccu

SEQ ID NO: 2307956 - RNA, 22 nt, Human
aucagcuggucaaacaaacucu

SEQ ID NO: 2307957 - RNA, 17 nt, Human
aucagcuccuuccugga

SEQ ID NO: 2307958 - RNA, 15 nt, Human
aucaugugaaaucau

SEQ ID NO: 2307959 - RNA, 23 nt, Human
aucagcugcugaaacaacaaaua

SEQ ID NO: 2307960 - RNA, 22 nt, Human
aucagcugcugaaacaacaaau

SEQ ID NO: 2307961 - RNA, 21 nt, Human
aucauguguaaucaauaaacg

SEQ ID NO: 2307962 - RNA, 13 nt, Human
aucauguguaauc

SEQ ID NO: 2307963 - RNA, 15 nt, Human
aucauguguaaucaa

SEQ ID NO: 2307964 - RNA, 19 nt, Human
aucauguguaaucaauaaa

SEQ ID NO: 2307965 - RNA, 20 nt, Human
aucauguguaaucaauaaac

SEQ ID NO: 2307966 - RNA, 21 nt, Human
aucaugugaacccgggacgca

SEQ ID NO: 2307967 - RNA, 14 nt, Human
aucaugugaaauca

SEQ ID NO: 2307968 - RNA, 16 nt, Human
aucaugugaaaucauu

SEQ ID NO: 2307969 - RNA, 18 nt, Human
aucagcuccacuuucagu

SEQ ID NO: 2307970 - RNA, 15 nt, Human
aucagcuccuuccug

SEQ ID NO: 2307971 - RNA, 13 nt, Human
aucagcuccuucc

SEQ ID NO: 2307972 - RNA, 21 nt, Human
aucagcugcugaaacaacaaa

SEQ ID NO: 2307973 - RNA, 14 nt, Human
aucagcuauuuacu

SEQ ID NO: 2307974 - RNA, 15 nt, Human
aucagcuauuuacug

SEQ ID NO: 2307975 - RNA, 23 nt, Human
aucagcggccccuugacucuggg

SEQ ID NO: 2307976 - RNA, 14 nt, Human
aucagccugugcca

SEQ ID NO: 2307977 - RNA, 18 nt, Human
aucagccugcuccagcug

SEQ ID NO: 2307978 - RNA, 17 nt, Human
aucagccugcuccagcu

SEQ ID NO: 2307979 - RNA, 19 nt, Human
aucagccugcuccagcugu

SEQ ID NO: 2307980 - RNA, 20 nt, Human
aucagccugcuccagcuguu

SEQ ID NO: 2307981 - RNA, 18 nt, Human
aucagccugucucuucca

SEQ ID NO: 2307982 - RNA, 19 nt, Human
aucagccugucucuuccau

SEQ ID NO: 2307983 - RNA, 21 nt, Human
aucagccugucucuuccauau

SEQ ID NO: 2307984 - RNA, 16 nt, Human
aucacauuauuugcau

SEQ ID NO: 2307985 - RNA, 15 nt, Human
aucacauuauuugca

SEQ ID NO: 2307986 - RNA, 16 nt, Human
aucacauguauguuuu

SEQ ID NO: 2307987 - RNA, 17 nt, Human
aucacauguauguuuug

SEQ ID NO: 2307988 - RNA, 22 nt, Human
aucacauuauuugcauguuacc

SEQ ID NO: 2307989 - RNA, 14 nt, Human
aucaccgaaaacgu

SEQ ID NO: 2307990 - RNA, 19 nt, Human
aucaccgaaaacguggcug

SEQ ID NO: 2307991 - RNA, 21 nt, Human
aucaccgaaaacguggcugcu

SEQ ID NO: 2307992 - RNA, 23 nt, Human
aucagcacgauuucuguuuagau

SEQ ID NO: 2307993 - RNA, 12 nt, Human
aucagccaauua

SEQ ID NO: 2307994 - RNA, 23 nt, Human
aucacccuuaccaugugccugau

SEQ ID NO: 2307995 - RNA, 19 nt, Human
aucacccuuaccaugugcc

SEQ ID NO: 2307996 - RNA, 20 nt, Human
aucagcacgauuucuguuua

SEQ ID NO: 2307997 - RNA, 19 nt, Human
aucagcacgauuucuguuu

SEQ ID NO: 2307998 - RNA, 22 nt, Human
auauuuauuguuuauuuaucag

SEQ ID NO: 2307999 - RNA, 14 nt, Human
auauuuauugugcu

SEQ ID NO: 2308000 - RNA, 18 nt, Human
auauuuauugcuuuauaa

SEQ ID NO: 2308001 - RNA, 21 nt, Human
auauuuauugcuuuauaaaua

SEQ ID NO: 2308002 - RNA, 23 nt, Human
auauuuauuguuuauuuaucagu

SEQ ID NO: 2308003 - RNA, 17 nt, Human
auauuuauuuuaauaau

SEQ ID NO: 2308004 - RNA, 14 nt, Human
auauuuauuuuaau

SEQ ID NO: 2308005 - RNA, 15 nt, Human
auauuuauuuuaaua

SEQ ID NO: 2308006 - RNA, 17 nt, Human
auauuuauuuauuuauu

SEQ ID NO: 2308007 - RNA, 20 nt, Human
aucacagggcagagccggga

SEQ ID NO: 2308008 - RNA, 14 nt, Human
aucacauguauguu

SEQ ID NO: 2308009 - RNA, 19 nt, Human
aucacagggcagagccggg

SEQ ID NO: 2308010 - RNA, 15 nt, Human
aucacauguggacuu

SEQ ID NO: 2308011 - RNA, 18 nt, Human
aucaccaacgucugugcc

SEQ ID NO: 2308012 - RNA, 19 nt, Human
aucaccaacgucugugcca

SEQ ID NO: 2308013 - RNA, 23 nt, Human
aucacccgcuaagagggagggag

SEQ ID NO: 2308014 - RNA, 14 nt, Human
aucacagcuucagc

SEQ ID NO: 2308015 - RNA, 18 nt, Human
aucacagcuucagccagg

SEQ ID NO: 2308016 - RNA, 12 nt, Human
aucacagcugcu

SEQ ID NO: 2308017 - RNA, 21 nt, Human
aucacagccucugaaaaccaa

SEQ ID NO: 2308018 - RNA, 21 nt, Human
aucacagcuucagccaggagc

SEQ ID NO: 2308019 - RNA, 22 nt, Human
aucacagcuucagccaggagcu

SEQ ID NO: 2308020 - RNA, 16 nt, Human
aucacagcugcuuucu

SEQ ID NO: 2308021 - RNA, 15 nt, Human
aucacagggcagagc

SEQ ID NO: 2308022 - RNA, 12 nt, Human
aucacagggcag

SEQ ID NO: 2308023 - RNA, 23 nt, Human
auccccucuccccccccccucca

SEQ ID NO: 2308024 - RNA, 19 nt, Human
auccccucccugucaaagc

SEQ ID NO: 2308025 - RNA, 14 nt, Human
auccccuccuuggg

SEQ ID NO: 2308026 - RNA, 15 nt, Human
auccccuccuugggc

SEQ ID NO: 2308027 - RNA, 15 nt, Human
auccccucucccccc

SEQ ID NO: 2308028 - RNA, 15 nt, Human
auccccuguagagug

SEQ ID NO: 2308029 - RNA, 13 nt, Human
auccccucaggac

SEQ ID NO: 2308030 - RNA, 13 nt, Human
auccccucccagu

SEQ ID NO: 2308031 - RNA, 15 nt, Human
auccccucccuguca

SEQ ID NO: 2308032 - RNA, 16 nt, Human
auccccaagccuggca

SEQ ID NO: 2308033 - RNA, 18 nt, Human
auccccgcagugugcacu

SEQ ID NO: 2308034 - RNA, 22 nt, Human
auccccgcagugugcacuaagg

SEQ ID NO: 2308035 - RNA, 20 nt, Human
auccuauucucaccaggaag

SEQ ID NO: 2308036 - RNA, 15 nt, Human
auccucaaacacugc

SEQ ID NO: 2308037 - RNA, 16 nt, Human
auccucaaacacugca

SEQ ID NO: 2308038 - RNA, 17 nt, Human
auccucaaacacugcag

SEQ ID NO: 2308039 - RNA, 19 nt, Human
auccucaaacacugcaggc

SEQ ID NO: 2308040 - RNA, 21 nt, Human
auccccuucucaucacucccc

SEQ ID NO: 2308041 - RNA, 14 nt, Human
auccuaugugauuu

SEQ ID NO: 2308042 - RNA, 12 nt, Human
auccuaugugau

SEQ ID NO: 2308043 - RNA, 18 nt, Human
auccccuggacugggagg

SEQ ID NO: 2308044 - RNA, 23 nt, Human
auccuaugugauuuuaacucugu

SEQ ID NO: 2308045 - RNA, 18 nt, Human
auccuauucucaccagga

SEQ ID NO: 2308046 - RNA, 20 nt, Human
auccuauguuuuuguucaaa

SEQ ID NO: 2308047 - RNA, 17 nt, Human
auccuaugugauuuuaa

SEQ ID NO: 2308048 - RNA, 16 nt, Human
auccuaugugauuuua

SEQ ID NO: 2308049 - RNA, 12 nt, Human
auccuauguuuu

SEQ ID NO: 2308050 - RNA, 23 nt, Human
auccucauuugggguagcuagag

SEQ ID NO: 2308051 - RNA, 19 nt, Human
auccuccacguucugcuca

SEQ ID NO: 2308052 - RNA, 21 nt, Human
auccucaaacacugcaggcau

SEQ ID NO: 2308053 - RNA, 16 nt, Human
auccucauauggccca

SEQ ID NO: 2308054 - RNA, 20 nt, Human
auccucauauggcccagugu

SEQ ID NO: 2308055 - RNA, 21 nt, Human
auccucauauggcccaguguc

SEQ ID NO: 2308056 - RNA, 23 nt, Human
auccuccaacuucauuugaugcu

SEQ ID NO: 2308057 - RNA, 11 nt, Human
auccuccagca

SEQ ID NO: 2308058 - RNA, 15 nt, Human
auccuccagcaggga

SEQ ID NO: 2308059 - RNA, 13 nt, Human
auccuccagcagg

SEQ ID NO: 2308060 - RNA, 11 nt, Human
auccuccagcu

SEQ ID NO: 2308061 - RNA, 12 nt, Human
auccuccagcuu

SEQ ID NO: 2308062 - RNA, 13 nt, Human
auccuccagcuuc

SEQ ID NO: 2308063 - RNA, 14 nt, Human
auccuccagcuucu

SEQ ID NO: 2308064 - RNA, 11 nt, Human
auccuccaggu

SEQ ID NO: 2308065 - RNA, 15 nt, Human
auccucccaccucag

SEQ ID NO: 2308066 - RNA, 15 nt, Human
auccuccagguuuuu

SEQ ID NO: 2308067 - RNA, 16 nt, Human
auccuccagguuuuuc

SEQ ID NO: 2308068 - RNA, 17 nt, Human
auccuccagguuuuuca

SEQ ID NO: 2308069 - RNA, 18 nt, Human
auccuccagguuuuucaa

SEQ ID NO: 2308070 - RNA, 19 nt, Human
auccuccagguuuuucaau

SEQ ID NO: 2308071 - RNA, 20 nt, Human
auccuccagguuuuucaauu

SEQ ID NO: 2308072 - RNA, 21 nt, Human
auccuccagguuuuucaauua

SEQ ID NO: 2308073 - RNA, 22 nt, Human
auccuccagguuuuucaauuaa

SEQ ID NO: 2308074 - RNA, 12 nt, Human
auccuccagguu

SEQ ID NO: 2308075 - RNA, 13 nt, Human
auccuccagguuu

SEQ ID NO: 2308076 - RNA, 14 nt, Human
auccuccagguuuu

SEQ ID NO: 2308077 - RNA, 23 nt, Human
auccuccagcuucugguacucuc

SEQ ID NO: 2308078 - RNA, 23 nt, Human
auccuccaggugcacaagcucca

SEQ ID NO: 2308079 - RNA, 15 nt, Human
auccagacccggcug

SEQ ID NO: 2308080 - RNA, 18 nt, Human
auccagaaagaaaacuug

SEQ ID NO: 2308081 - RNA, 16 nt, Human
auccagaaagaaaacu

SEQ ID NO: 2308082 - RNA, 13 nt, Human
auccaggacucug

SEQ ID NO: 2308083 - RNA, 15 nt, Human
auccaggacucuguc

SEQ ID NO: 2308084 - RNA, 23 nt, Human
auccaggacuauauuugggccug

SEQ ID NO: 2308085 - RNA, 22 nt, Human
auccaggacuauauuugggccu

SEQ ID NO: 2308086 - RNA, 20 nt, Human
auccagaauugaccuuuuga

SEQ ID NO: 2308087 - RNA, 15 nt, Human
auccagcuauguuau

SEQ ID NO: 2308088 - RNA, 15 nt, Human
auccagaaagaaaaa

SEQ ID NO: 2308089 - RNA, 14 nt, Human
auccagaaagaaaa

SEQ ID NO: 2308090 - RNA, 13 nt, Human
auccagaaagaaa

SEQ ID NO: 2308091 - RNA, 22 nt, Human
auccagcuccccuucugaauca

SEQ ID NO: 2308092 - RNA, 14 nt, Human
auccagcuggugag

SEQ ID NO: 2308093 - RNA, 15 nt, Human
aucccauuuaaaaaa

SEQ ID NO: 2308094 - RNA, 17 nt, Human
aucccauugcccugguu

SEQ ID NO: 2308095 - RNA, 16 nt, Human
aucccauugcccuggu

SEQ ID NO: 2308096 - RNA, 14 nt, Human
aucccauugcccug

SEQ ID NO: 2308097 - RNA, 13 nt, Human
auccccaagccug

SEQ ID NO: 2308098 - RNA, 14 nt, Human
auccaggcagaucc

SEQ ID NO: 2308099 - RNA, 16 nt, Human
auccaggcagauccag

SEQ ID NO: 2308100 - RNA, 15 nt, Human
auccaggcagaucca

SEQ ID NO: 2308101 - RNA, 14 nt, Human
aucccauuuaaaaa

SEQ ID NO: 2308102 - RNA, 22 nt, Human
aucggaagcagugccuuccaua

SEQ ID NO: 2308103 - RNA, 14 nt, Human
aucggaagcagugc

SEQ ID NO: 2308104 - RNA, 13 nt, Human
aucggagacagug

SEQ ID NO: 2308105 - RNA, 18 nt, Human
aucggaagcagugccuuc

SEQ ID NO: 2308106 - RNA, 16 nt, Human
aucggagccuccucuc

SEQ ID NO: 2308107 - RNA, 15 nt, Human
aucggagccuccucu

SEQ ID NO: 2308108 - RNA, 17 nt, Human
aucgcuucauguaacua

SEQ ID NO: 2308109 - RNA, 23 nt, Human
aucgcuguguguuaguucccaac

SEQ ID NO: 2308110 - RNA, 22 nt, Human
aucgcuguguguuaguucccaa

SEQ ID NO: 2308111 - RNA, 22 nt, Human
aucggaggcuugucagagcugg

SEQ ID NO: 2308112 - RNA, 21 nt, Human
aucggaggcuugucagagcug

SEQ ID NO: 2308113 - RNA, 20 nt, Human
aucggaggcuugucagagcu

SEQ ID NO: 2308114 - RNA, 18 nt, Human
aucggaggcuugucagag

SEQ ID NO: 2308115 - RNA, 23 nt, Human
aucggaggcuugucagagcuggg

SEQ ID NO: 2308116 - RNA, 21 nt, Human
aucggaucuggggcucuggga

SEQ ID NO: 2308117 - RNA, 23 nt, Human
aucggcccacagcucccacccca

SEQ ID NO: 2308118 - RNA, 20 nt, Human
aucggcccacagcucccacc

SEQ ID NO: 2308119 - RNA, 19 nt, Human
aucggcccacagcucccac

SEQ ID NO: 2308120 - RNA, 20 nt, Human
auccucccaccucagccucc

SEQ ID NO: 2308121 - RNA, 23 nt, Human
auccuccagguuuuucaauuaaa

SEQ ID NO: 2308122 - RNA, 18 nt, Human
auccucccaccucagccu

SEQ ID NO: 2308123 - RNA, 19 nt, Human
auccucccaccucagccuc

SEQ ID NO: 2308124 - RNA, 18 nt, Human
aucuccugugcaugggug

SEQ ID NO: 2308125 - RNA, 15 nt, Human
aucuccugugcaugg

SEQ ID NO: 2308126 - RNA, 14 nt, Human
aucuccugugcaug

SEQ ID NO: 2308127 - RNA, 21 nt, Human
aucucgccaccccuccuuccu

SEQ ID NO: 2308128 - RNA, 20 nt, Human
aucucgccaccccuccuucc

SEQ ID NO: 2308129 - RNA, 15 nt, Human
aucuccuuucaggga

SEQ ID NO: 2308130 - RNA, 19 nt, Human
aucuccugugcauggguga

SEQ ID NO: 2308131 - RNA, 15 nt, Human
aucucggcucacugc

SEQ ID NO: 2308132 - RNA, 14 nt, Human
aucucggcucacug

SEQ ID NO: 2308133 - RNA, 14 nt, Human
aucucgugggagag

SEQ ID NO: 2308134 - RNA, 16 nt, Human
aucucggcucacugca

SEQ ID NO: 2308135 - RNA, 17 nt, Human
aucucugcuuuggaaau

SEQ ID NO: 2308136 - RNA, 15 nt, Human
aucucgugggagagc

SEQ ID NO: 2308137 - RNA, 13 nt, Human
aucucguuucaaa

SEQ ID NO: 2308138 - RNA, 19 nt, Human
aucucugugugcacaaaua

SEQ ID NO: 2308139 - RNA, 17 nt, Human
aucucugugugcacaaa

SEQ ID NO: 2308140 - RNA, 15 nt, Human
aucucugugugcaca

SEQ ID NO: 2308141 - RNA, 13 nt, Human
aucucugugccuu

SEQ ID NO: 2308142 - RNA, 14 nt, Human
aucucugugccuuc

SEQ ID NO: 2308143 - RNA, 15 nt, Human
aucucugugccuucg

SEQ ID NO: 2308144 - RNA, 18 nt, Human
aucucugugccuucgucu

SEQ ID NO: 2308145 - RNA, 22 nt, Human
aucugcuuuuuaaagaaugcuc

SEQ ID NO: 2308146 - RNA, 15 nt, Human
aucugcuuaugcagu

SEQ ID NO: 2308147 - RNA, 19 nt, Human
aucugcuuacaauucccug

SEQ ID NO: 2308148 - RNA, 21 nt, Human
aucugcuuacaauucccugcu

SEQ ID NO: 2308149 - RNA, 14 nt, Human
aucugcuucagugg

SEQ ID NO: 2308150 - RNA, 12 nt, Human
aucugcuucagu

SEQ ID NO: 2308151 - RNA, 22 nt, Human
aucuggaccccaucugugaaua

SEQ ID NO: 2308152 - RNA, 18 nt, Human
aucuggaacccagacuca

SEQ ID NO: 2308153 - RNA, 17 nt, Human
aucuggaacccagacuc

SEQ ID NO: 2308154 - RNA, 16 nt, Human
aucuggaacccagacu

SEQ ID NO: 2308155 - RNA, 15 nt, Human
aucuggaacccagac

SEQ ID NO: 2308156 - RNA, 14 nt, Human
aucuggaacccaga

SEQ ID NO: 2308157 - RNA, 11 nt, Human
aucuggaaccc

SEQ ID NO: 2308158 - RNA, 18 nt, Human
aucuggaaccaucagaaa

SEQ ID NO: 2308159 - RNA, 15 nt, Human
aucuggacuccucug

SEQ ID NO: 2308160 - RNA, 16 nt, Human
aucuggacuccucugu

SEQ ID NO: 2308161 - RNA, 17 nt, Human
aucuggacuccucuguc

SEQ ID NO: 2308162 - RNA, 18 nt, Human
aucuggacuccucugucc

SEQ ID NO: 2308163 - RNA, 12 nt, Human
aucuggcagggu

SEQ ID NO: 2308164 - RNA, 21 nt, Human
aucuggaccccaucugugaau

SEQ ID NO: 2308165 - RNA, 23 nt, Human
aucuggccguugauguuggcugg

SEQ ID NO: 2308166 - RNA, 19 nt, Human
aucuggacuccucugucca

SEQ ID NO: 2308167 - RNA, 17 nt, Human
aucuggcaacaucuuua

SEQ ID NO: 2308168 - RNA, 21 nt, Human
aucuaugccaaagaucacuug

SEQ ID NO: 2308169 - RNA, 14 nt, Human
aucuauuauacugu

SEQ ID NO: 2308170 - RNA, 16 nt, Human
aucuauuauacuguau

SEQ ID NO: 2308171 - RNA, 19 nt, Human
aucuauuccugguagaaua

SEQ ID NO: 2308172 - RNA, 21 nt, Human
aucuauucagacaagcaacag

SEQ ID NO: 2308173 - RNA, 22 nt, Human
aucuauucagacaagcaacagg

SEQ ID NO: 2308174 - RNA, 17 nt, Human
aucuauuauacuguauu

SEQ ID NO: 2308175 - RNA, 18 nt, Human
aucuauuauacuguauua

SEQ ID NO: 2308176 - RNA, 15 nt, Human
aucuauucagacaag

SEQ ID NO: 2308177 - RNA, 17 nt, Human
aucuauucagacaagca

SEQ ID NO: 2308178 - RNA, 18 nt, Human
aucuaucuuauauaguuu

SEQ ID NO: 2308179 - RNA, 15 nt, Human
aucuaugaaguauau

SEQ ID NO: 2308180 - RNA, 18 nt, Human
aucuaugaaguauauaau

SEQ ID NO: 2308181 - RNA, 19 nt, Human
aucuaugaaguauauaaug

SEQ ID NO: 2308182 - RNA, 20 nt, Human
aucuaugaaguauauaaugg

SEQ ID NO: 2308183 - RNA, 18 nt, Human
aucuaugcauuuucugga

SEQ ID NO: 2308184 - RNA, 16 nt, Human
aucuaugcauuuucug

SEQ ID NO: 2308185 - RNA, 17 nt, Human
aucuauggucgggagac

SEQ ID NO: 2308186 - RNA, 17 nt, Human
aucuaugccaaagauca

SEQ ID NO: 2308187 - RNA, 19 nt, Human
aucuaugccaaagaucacu

SEQ ID NO: 2308188 - RNA, 14 nt, Human
aucucccucccaca

SEQ ID NO: 2308189 - RNA, 12 nt, Human
aucucccugccg

SEQ ID NO: 2308190 - RNA, 19 nt, Human
aucucccugccgccucaau

SEQ ID NO: 2308191 - RNA, 15 nt, Human
aucucccugccgccu

SEQ ID NO: 2308192 - RNA, 23 nt, Human
aucuauugcuggcaaagacagaa

SEQ ID NO: 2308193 - RNA, 23 nt, Human
aucuccccuugcacuaaaguaug

SEQ ID NO: 2308194 - RNA, 15 nt, Human
aucucccgcugcugc

SEQ ID NO: 2308195 - RNA, 21 nt, Human
aucucccucacugaaaccagg

SEQ ID NO: 2308196 - RNA, 21 nt, Human
aucucccccagccccauccuc

SEQ ID NO: 2308197 - RNA, 23 nt, Human
aucuauucucuccaaaaaugcac

SEQ ID NO: 2308198 - RNA, 15 nt, Human
aucuaucaauaguca

SEQ ID NO: 2308199 - RNA, 17 nt, Human
aucuaucaauagucaag

SEQ ID NO: 2308200 - RNA, 20 nt, Human
aucuaucaauagucaagaaa

SEQ ID NO: 2308201 - RNA, 22 nt, Human
aucuaucaauagucaagaaaaa

SEQ ID NO: 2308202 - RNA, 19 nt, Human
aucuaucucaucuaucuca

SEQ ID NO: 2308203 - RNA, 19 nt, Human
aucuaucugcuuaugcagu

SEQ ID NO: 2308204 - RNA, 20 nt, Human
aucuaucugcuuaugcaguu

SEQ ID NO: 2308205 - RNA, 14 nt, Human
aucuucuuuauaau

SEQ ID NO: 2308206 - RNA, 17 nt, Human
aucuucuuaugcaauuu

SEQ ID NO: 2308207 - RNA, 18 nt, Human
aucuucuggagucuccag

SEQ ID NO: 2308208 - RNA, 20 nt, Human
aucuucuggagucuccagug

SEQ ID NO: 2308209 - RNA, 18 nt, Human
aucuucugccuucucaug

SEQ ID NO: 2308210 - RNA, 16 nt, Human
aucuucugccuucuca

SEQ ID NO: 2308211 - RNA, 12 nt, Human
aucuugaaggaa

SEQ ID NO: 2308212 - RNA, 14 nt, Human
aucuucuucaccau

SEQ ID NO: 2308213 - RNA, 20 nt, Human
aucuucuuaugcaauuuccu

SEQ ID NO: 2308214 - RNA, 18 nt, Human
aucuugaagacuuuucuu

SEQ ID NO: 2308215 - RNA, 22 nt, Human
aucugggaaaauaccccaucau

SEQ ID NO: 2308216 - RNA, 16 nt, Human
aucugggacccuuucc

SEQ ID NO: 2308217 - RNA, 14 nt, Human
aucugggaaagaca

SEQ ID NO: 2308218 - RNA, 17 nt, Human
aucuucugcaauugcuu

SEQ ID NO: 2308219 - RNA, 14 nt, Human
aucuucugccuucu

SEQ ID NO: 2308220 - RNA, 21 nt, Human
aucuucugccuuagucucagu

SEQ ID NO: 2308221 - RNA, 16 nt, Human
aucugggaagauuucu

SEQ ID NO: 2308222 - RNA, 11 nt, Human
aucugggaaag

SEQ ID NO: 2308223 - RNA, 22 nt, Human
aucuucugaacuuggcgcugcc

SEQ ID NO: 2308224 - RNA, 18 nt, Human
aucuugaauaauguaaga

SEQ ID NO: 2308225 - RNA, 16 nt, Human
aucuugaauuguaacu

SEQ ID NO: 2308226 - RNA, 17 nt, Human
aucuugaauuguaagga

SEQ ID NO: 2308227 - RNA, 19 nt, Human
augaagguuucugaaaauu

SEQ ID NO: 2308228 - RNA, 17 nt, Human
augaagguuucugaaaa

SEQ ID NO: 2308229 - RNA, 21 nt, Human
augaagguuaggauuuaacag

SEQ ID NO: 2308230 - RNA, 22 nt, Human
augaagguuaggauuuaacagu

SEQ ID NO: 2308231 - RNA, 17 nt, Human
augaagggaaaggauau

SEQ ID NO: 2308232 - RNA, 18 nt, Human
augaaggugucauacaga

SEQ ID NO: 2308233 - RNA, 16 nt, Human
augaagguuaggauuu

SEQ ID NO: 2308234 - RNA, 20 nt, Human
augaagguuaggauuuaaca

SEQ ID NO: 2308235 - RNA, 16 nt, Human
augaaggcaaaaaaau

SEQ ID NO: 2308236 - RNA, 21 nt, Human
augaaaaauuuaagcauuguu

SEQ ID NO: 2308237 - RNA, 22 nt, Human
augaaggcagaaaaaugucauu

SEQ ID NO: 2308238 - RNA, 20 nt, Human
augaaaaauuuaagcauugu

SEQ ID NO: 2308239 - RNA, 19 nt, Human
augaaaaauuuaagcauug

SEQ ID NO: 2308240 - RNA, 21 nt, Human
augaaggagaggcaacaucca

SEQ ID NO: 2308241 - RNA, 22 nt, Human
augaagcuuuuaugugaaacau

SEQ ID NO: 2308242 - RNA, 23 nt, Human
augaaguuuccuuggcuggugca

SEQ ID NO: 2308243 - RNA, 13 nt, Human
augaaguuugaau

SEQ ID NO: 2308244 - RNA, 18 nt, Human
augaaguuugaacuucau

SEQ ID NO: 2308245 - RNA, 19 nt, Human
augaaguuugaacuucaua

SEQ ID NO: 2308246 - RNA, 14 nt, Human
augaaguuugaaug

SEQ ID NO: 2308247 - RNA, 15 nt, Human
augaaguuugaaugu

SEQ ID NO: 2308248 - RNA, 16 nt, Human
augaaguuugaauguu

SEQ ID NO: 2308249 - RNA, 18 nt, Human
augaaguuugaauguuaa

SEQ ID NO: 2308250 - RNA, 19 nt, Human
augaaguuuuuuuuauaca

SEQ ID NO: 2308251 - RNA, 16 nt, Human
augaaguuuuacauug

SEQ ID NO: 2308252 - RNA, 14 nt, Human
augaaguuuuacau

SEQ ID NO: 2308253 - RNA, 19 nt, Human
augaaguuugaauguuaaa

SEQ ID NO: 2308254 - RNA, 20 nt, Human
augaaguuugaauguuaaau

SEQ ID NO: 2308255 - RNA, 13 nt, Human
augaaaaauucuc

SEQ ID NO: 2308256 - RNA, 13 nt, Human
augaaaaauauga

SEQ ID NO: 2308257 - RNA, 18 nt, Human
augaaaaauuuaagcauu

SEQ ID NO: 2308258 - RNA, 17 nt, Human
augaaaaauuuaagcau

SEQ ID NO: 2308259 - RNA, 16 nt, Human
augaaaaauuuaagca

SEQ ID NO: 2308260 - RNA, 13 nt, Human
augaaaaauagca

SEQ ID NO: 2308261 - RNA, 19 nt, Human
augaaaaagcauguacagu

SEQ ID NO: 2308262 - RNA, 21 nt, Human
augaaaaagcauguacagugu

SEQ ID NO: 2308263 - RNA, 15 nt, Human
augaaaaagcaugua

SEQ ID NO: 2308264 - RNA, 16 nt, Human
augaaaaagcauguac

SEQ ID NO: 2308265 - RNA, 18 nt, Human
augaaaaagcauguacag

SEQ ID NO: 2308266 - RNA, 23 nt, Human
augaaaaaauauauaucaaauau

SEQ ID NO: 2308267 - RNA, 16 nt, Human
augaaaaaauguauau

SEQ ID NO: 2308268 - RNA, 20 nt, Human
augaaaaacaaaaauaacau

SEQ ID NO: 2308269 - RNA, 14 nt, Human
augaaaaagcaugu

SEQ ID NO: 2308270 - RNA, 19 nt, Human
augaaagacuguacaaagu

SEQ ID NO: 2308271 - RNA, 17 nt, Human
augaaagacuguacaaa

SEQ ID NO: 2308272 - RNA, 16 nt, Human
augaaagacuguacaa

SEQ ID NO: 2308273 - RNA, 13 nt, Human
augaaagacugua

SEQ ID NO: 2308274 - RNA, 20 nt, Human
augagcuccagacccccagc

SEQ ID NO: 2308275 - RNA, 17 nt, Human
augagcuccagaccccc

SEQ ID NO: 2308276 - RNA, 16 nt, Human
augagcuccagacccc

SEQ ID NO: 2308277 - RNA, 15 nt, Human
augagcuccagaccc

SEQ ID NO: 2308278 - RNA, 15 nt, Human
augacggaagaacau

SEQ ID NO: 2308279 - RNA, 22 nt, Human
augagcuccucuuccuggcuuc

SEQ ID NO: 2308280 - RNA, 14 nt, Human
augagcuccucuuc

SEQ ID NO: 2308281 - RNA, 22 nt, Human
augagcuccagacccccagcaa

SEQ ID NO: 2308282 - RNA, 21 nt, Human
augagcuccagacccccagca

SEQ ID NO: 2308283 - RNA, 22 nt, Human
augagcucgcauuugucaauga

SEQ ID NO: 2308284 - RNA, 21 nt, Human
augagcucgcauuugucaaug

SEQ ID NO: 2308285 - RNA, 19 nt, Human
augagcucuacccagggcc

SEQ ID NO: 2308286 - RNA, 18 nt, Human
augagcucuacccagggc

SEQ ID NO: 2308287 - RNA, 16 nt, Human
augagcucuacccagg

SEQ ID NO: 2308288 - RNA, 15 nt, Human
augagcucuacccag

SEQ ID NO: 2308289 - RNA, 21 nt, Human
augaccuuucaauaggaaaaa

SEQ ID NO: 2308290 - RNA, 22 nt, Human
augaccuuucaauaggaaaaac

SEQ ID NO: 2308291 - RNA, 23 nt, Human
augaccuuucaauaggaaaaacu

SEQ ID NO: 2308292 - RNA, 14 nt, Human
augaggaggaagga

SEQ ID NO: 2308293 - RNA, 15 nt, Human
augaggaauguauau

SEQ ID NO: 2308294 - RNA, 17 nt, Human
augaggaauguauaugu

SEQ ID NO: 2308295 - RNA, 22 nt, Human
augagcucuacccagggccugc

SEQ ID NO: 2308296 - RNA, 14 nt, Human
augaggaauaauua

SEQ ID NO: 2308297 - RNA, 23 nt, Human
augaggaauaauuauuuauuuaa

SEQ ID NO: 2308298 - RNA, 12 nt, Human
augaggaaugua

SEQ ID NO: 2308299 - RNA, 21 nt, Human
augaggaugcagagucagcag

SEQ ID NO: 2308300 - RNA, 20 nt, Human
augaggaugcagagucagca

SEQ ID NO: 2308301 - RNA, 14 nt, Human
augaggaguugcug

SEQ ID NO: 2308302 - RNA, 13 nt, Human
augaggacauguu

SEQ ID NO: 2308303 - RNA, 18 nt, Human
augaggcaaugucaggaa

SEQ ID NO: 2308304 - RNA, 22 nt, Human
augaggaugcagagucagcaga

SEQ ID NO: 2308305 - RNA, 21 nt, Human
augaggcaaugucaggaacag

SEQ ID NO: 2308306 - RNA, 13 nt, Human
augaggcagagga

SEQ ID NO: 2308307 - RNA, 14 nt, Human
augaggcauuuggc

SEQ ID NO: 2308308 - RNA, 17 nt, Human
auguauuuuuguacccu

SEQ ID NO: 2308309 - RNA, 13 nt, Human
auguauuggccug

SEQ ID NO: 2308310 - RNA, 15 nt, Human
auguauuggccugga

SEQ ID NO: 2308311 - RNA, 16 nt, Human
auguauuggccuggag

SEQ ID NO: 2308312 - RNA, 14 nt, Human
auguauuuguuugc

SEQ ID NO: 2308313 - RNA, 14 nt, Human
auguauuuuauugu

SEQ ID NO: 2308314 - RNA, 15 nt, Human
auguauuuuauugua

SEQ ID NO: 2308315 - RNA, 16 nt, Human
auguauuuuauuguaa

SEQ ID NO: 2308316 - RNA, 20 nt, Human
auguauuuuauuguaacaga

SEQ ID NO: 2308317 - RNA, 23 nt, Human
auguauuuuauuguaacagacau

SEQ ID NO: 2308318 - RNA, 23 nt, Human
auguaauuaaguacuauguauca

SEQ ID NO: 2308319 - RNA, 20 nt, Human
auguauuauucugcagcaug

SEQ ID NO: 2308320 - RNA, 19 nt, Human
auguauucuagcuaaugua

SEQ ID NO: 2308321 - RNA, 15 nt, Human
auguauuauuucauu

SEQ ID NO: 2308322 - RNA, 22 nt, Human
auguauuauuucauuauguaaa

SEQ ID NO: 2308323 - RNA, 24 nt, Human
auguauucagcuuuaguagauauu

SEQ ID NO: 2308324 - RNA, 20 nt, Human
auguauucuagcuaauguaa

SEQ ID NO: 2308325 - RNA, 14 nt, Human
auguauugauaaga

SEQ ID NO: 2308326 - RNA, 16 nt, Human
auguauugcacauugu

SEQ ID NO: 2308327 - RNA, 17 nt, Human
auguauugcacauugua

SEQ ID NO: 2308328 - RNA, 22 nt, Human
auguauugcacauuguaaaaag

SEQ ID NO: 2308329 - RNA, 17 nt, Human
auguaauuaaguacuau

SEQ ID NO: 2308330 - RNA, 15 nt, Human
auguaauuaaguacu

SEQ ID NO: 2308331 - RNA, 19 nt, Human
auguaagggaaacugccag

SEQ ID NO: 2308332 - RNA, 22 nt, Human
auguaagcuguuuauuuuauau

SEQ ID NO: 2308333 - RNA, 14 nt, Human
auguaagcuguuua

SEQ ID NO: 2308334 - RNA, 15 nt, Human
auguaagcuguuuau

SEQ ID NO: 2308335 - RNA, 17 nt, Human
auguaagcugaaaauau

SEQ ID NO: 2308336 - RNA, 16 nt, Human
auguaagcugaaaaua

SEQ ID NO: 2308337 - RNA, 16 nt, Human
auggucgcccaggaga

SEQ ID NO: 2308338 - RNA, 15 nt, Human
auggucgcccaggag

SEQ ID NO: 2308339 - RNA, 15 nt, Human
auggucggaaaacau

SEQ ID NO: 2308340 - RNA, 16 nt, Human
auguaagggaaacugc

SEQ ID NO: 2308341 - RNA, 14 nt, Human
auguaagggaaacu

SEQ ID NO: 2308342 - RNA, 19 nt, Human
augguauaaugguugacug

SEQ ID NO: 2308343 - RNA, 20 nt, Human
auggucaacacuuaaggguu

SEQ ID NO: 2308344 - RNA, 14 nt, Human
auggucacacacug

SEQ ID NO: 2308345 - RNA, 14 nt, Human
augguaugagcuga

SEQ ID NO: 2308346 - RNA, 20 nt, Human
augguaugagcugagggggg

SEQ ID NO: 2308347 - RNA, 21 nt, Human
augguauauuugguacuguau

SEQ ID NO: 2308348 - RNA, 19 nt, Human
augguauagcaaauguuuu

SEQ ID NO: 2308349 - RNA, 16 nt, Human
auggucagcguugcau

SEQ ID NO: 2308350 - RNA, 18 nt, Human
auggucagcguugcaugu

SEQ ID NO: 2308351 - RNA, 19 nt, Human
auggucagcguugcauguc

SEQ ID NO: 2308352 - RNA, 18 nt, Human
auggucagcccuagggug

SEQ ID NO: 2308353 - RNA, 20 nt, Human
auggucacacacugaugcuu

SEQ ID NO: 2308354 - RNA, 17 nt, Human
auggucacgcaccuggg

SEQ ID NO: 2308355 - RNA, 19 nt, Human
auggucaccaaaucagcug

SEQ ID NO: 2308356 - RNA, 19 nt, Human
auggucacacacugaugcu

SEQ ID NO: 2308357 - RNA, 18 nt, Human
auggucacacacugaugc

SEQ ID NO: 2308358 - RNA, 16 nt, Human
auggucacacacugau

SEQ ID NO: 2308359 - RNA, 15 nt, Human
auggucacacacuga

SEQ ID NO: 2308360 - RNA, 14 nt, Human
auggucgcccagga

SEQ ID NO: 2308361 - RNA, 20 nt, Human
augguccuggggcucugugc

SEQ ID NO: 2308362 - RNA, 19 nt, Human
augguccuggggcucugug

SEQ ID NO: 2308363 - RNA, 17 nt, Human
augguccuggggcucug

SEQ ID NO: 2308364 - RNA, 14 nt, Human
augguccuggggcu

SEQ ID NO: 2308365 - RNA, 12 nt, Human
augguccugggg

SEQ ID NO: 2308366 - RNA, 22 nt, Human
auggucaucuuuuucucuaaaa

SEQ ID NO: 2308367 - RNA, 22 nt, Human
auggucaucuuggagggaccaa

SEQ ID NO: 2308368 - RNA, 20 nt, Human
auggucagcucccuucucug

SEQ ID NO: 2308369 - RNA, 12 nt, Human
auggucagcucc

SEQ ID NO: 2308370 - RNA, 13 nt, Human
auggucagcuccc

SEQ ID NO: 2308371 - RNA, 17 nt, Human
augugaacuuuauuaaa

SEQ ID NO: 2308372 - RNA, 16 nt, Human
augugaacccgggacg

SEQ ID NO: 2308373 - RNA, 15 nt, Human
augugaacuuuauua

SEQ ID NO: 2308374 - RNA, 22 nt, Human
augugaagccaauucagacagg

SEQ ID NO: 2308375 - RNA, 21 nt, Human
augugaagccaauucagacag

SEQ ID NO: 2308376 - RNA, 12 nt, Human
augugaagccaa

SEQ ID NO: 2308377 - RNA, 13 nt, Human
augugaacccggg

SEQ ID NO: 2308378 - RNA, 12 nt, Human
augugaaagcac

SEQ ID NO: 2308379 - RNA, 20 nt, Human
augucuuuguuggaaaagaa

SEQ ID NO: 2308380 - RNA, 15 nt, Human
augugaaacauguuu

SEQ ID NO: 2308381 - RNA, 15 nt, Human
augucuuuugaauau

SEQ ID NO: 2308382 - RNA, 12 nt, Human
augugaaaccuu

SEQ ID NO: 2308383 - RNA, 13 nt, Human
augugaaaccuuu

SEQ ID NO: 2308384 - RNA, 15 nt, Human
augugaaaccuuuuu

SEQ ID NO: 2308385 - RNA, 18 nt, Human
augugaaaccuuuuuuaa

SEQ ID NO: 2308386 - RNA, 19 nt, Human
augugaaaccuuuuuuaag

SEQ ID NO: 2308387 - RNA, 22 nt, Human
augugaaacuggauuaaacuua

SEQ ID NO: 2308388 - RNA, 20 nt, Human
augugaaaccuuuuuuaaga

SEQ ID NO: 2308389 - RNA, 21 nt, Human
augugaaaccuuuuuuaagau

SEQ ID NO: 2308390 - RNA, 22 nt, Human
augugaaaccuuuuuuaagauu

SEQ ID NO: 2308391 - RNA, 23 nt, Human
augugaaaccuuuuuuaagauuu

SEQ ID NO: 2308392 - RNA, 22 nt, Human
augucuuuaggcagcagcuuuu

SEQ ID NO: 2308393 - RNA, 11 nt, Human
augucuugugu

SEQ ID NO: 2308394 - RNA, 10 nt, Human
augucuugug

SEQ ID NO: 2308395 - RNA, 20 nt, Human
augucuucguacaguucuuc

SEQ ID NO: 2308396 - RNA, 22 nt, Human
augucuucguacaguucuucgg

SEQ ID NO: 2308397 - RNA, 23 nt, Human
augucuuuguuggaaaagaauac

SEQ ID NO: 2308398 - RNA, 14 nt, Human
augucuuuucuugc

SEQ ID NO: 2308399 - RNA, 20 nt, Human
augucuuaaugaaguuugaa

SEQ ID NO: 2308400 - RNA, 21 nt, Human
augucuuaaugaaguuugaau

SEQ ID NO: 2308401 - RNA, 19 nt, Human
augucuuaaugaaguuuga

SEQ ID NO: 2308402 - RNA, 13 nt, Human
augucuuccugga

SEQ ID NO: 2308403 - RNA, 20 nt, Human
augucuucauuucauuguau

SEQ ID NO: 2308404 - RNA, 19 nt, Human
augucuucauuucauugua

SEQ ID NO: 2308405 - RNA, 17 nt, Human
augucuucguacaguuc

SEQ ID NO: 2308406 - RNA, 23 nt, Human
augucuuaaugaaguuugaaugu

SEQ ID NO: 2308407 - RNA, 21 nt, Human
augucuucauaccuacaugua

SEQ ID NO: 2308408 - RNA, 22 nt, Human
augucuucauaccuacauguau

SEQ ID NO: 2308409 - RNA, 17 nt, Human
augucuucauuucauug

SEQ ID NO: 2308410 - RNA, 18 nt, Human
augucuucauuucauugu

SEQ ID NO: 2308411 - RNA, 20 nt, Human
augugaaugaucucucugaa

SEQ ID NO: 2308412 - RNA, 16 nt, Human
augugaaugggaaaag

SEQ ID NO: 2308413 - RNA, 18 nt, Human
augugaauugccugcaga

SEQ ID NO: 2308414 - RNA, 21 nt, Human
augugaaucagacccuacccc

SEQ ID NO: 2308415 - RNA, 16 nt, Human
augugaaucagacccu

SEQ ID NO: 2308416 - RNA, 15 nt, Human
augugaaucagaccc

SEQ ID NO: 2308417 - RNA, 12 nt, Human
augugaaucaga

SEQ ID NO: 2308418 - RNA, 16 nt, Human
augugaaguguuaaua

SEQ ID NO: 2308419 - RNA, 19 nt, Human
augugaaguguuaauacua

SEQ ID NO: 2308420 - RNA, 20 nt, Human
augugaaguguuaauacuag

SEQ ID NO: 2308421 - RNA, 21 nt, Human
augugaauaaaauuauuuugg

SEQ ID NO: 2308422 - RNA, 13 nt, Human
augugaaguguua

SEQ ID NO: 2308423 - RNA, 14 nt, Human
augugaaguguuaa

SEQ ID NO: 2308424 - RNA, 23 nt, Human
auguuccugaauucuauuugcug

SEQ ID NO: 2308425 - RNA, 20 nt, Human
auguuccuucaagaucaugu

SEQ ID NO: 2308426 - RNA, 17 nt, Human
auguucuaagaagugaa

SEQ ID NO: 2308427 - RNA, 19 nt, Human
augugugcgagugugugca

SEQ ID NO: 2308428 - RNA, 18 nt, Human
augugugcgagugugugc

SEQ ID NO: 2308429 - RNA, 17 nt, Human
augugugcucuucuucu

SEQ ID NO: 2308430 - RNA, 19 nt, Human
auguuccugaauucuauuu

SEQ ID NO: 2308431 - RNA, 15 nt, Human
augugugcgagugug

SEQ ID NO: 2308432 - RNA, 12 nt, Human
augugugcaugu

SEQ ID NO: 2308433 - RNA, 15 nt, Human
augugugcaugugug

SEQ ID NO: 2308434 - RNA, 11 nt, Human
augugugccau

SEQ ID NO: 2308435 - RNA, 18 nt, Human
augugugccauagaguuu

SEQ ID NO: 2308436 - RNA, 20 nt, Human
augugugccauagaguuuaa

SEQ ID NO: 2308437 - RNA, 22 nt, Human
augugugccauagaguuuaaca

SEQ ID NO: 2308438 - RNA, 20 nt, Human
augugggcuaguugggcuuc

SEQ ID NO: 2308439 - RNA, 18 nt, Human
augugggcagugauguca

SEQ ID NO: 2308440 - RNA, 19 nt, Human
augugugaggagcugcugg

SEQ ID NO: 2308441 - RNA, 15 nt, Human
augugugaggagcug

SEQ ID NO: 2308442 - RNA, 17 nt, Human
augugugagugugugca

SEQ ID NO: 2308443 - RNA, 16 nt, Human
augugugagugugugc

SEQ ID NO: 2308444 - RNA, 22 nt, Human
augugugcaacaggguauggac

SEQ ID NO: 2308445 - RNA, 22 nt, Human
augugugaggagcugcuggcuu

SEQ ID NO: 2308446 - RNA, 13 nt, Human
augugugagugug

SEQ ID NO: 2308447 - RNA, 13 nt, Human
auguucugcuuuc

SEQ ID NO: 2308448 - RNA, 13 nt, Human
auguucuggcccu

SEQ ID NO: 2308449 - RNA, 18 nt, Human
auguucucuaucauuuaa

SEQ ID NO: 2308450 - RNA, 19 nt, Human
auguucucuaucauuuaau

SEQ ID NO: 2308451 - RNA, 20 nt, Human
auguucucuaucauuuaaua

SEQ ID NO: 2308452 - RNA, 21 nt, Human
auguucucuaucauuuaauaa

SEQ ID NO: 2308453 - RNA, 11 nt, Human
auguucuggga

SEQ ID NO: 2308454 - RNA, 12 nt, Human
auguucugggac

SEQ ID NO: 2308455 - RNA, 14 nt, Human
auguucucuaucau

SEQ ID NO: 2308456 - RNA, 15 nt, Human
auguucucuaucauu

SEQ ID NO: 2308457 - RNA, 16 nt, Human
auguucucuaucauuu

SEQ ID NO: 2308458 - RNA, 22 nt, Human
auguucuauuucagugccaaua

SEQ ID NO: 2308459 - RNA, 19 nt, Human
auguucuaagucuuuccau

SEQ ID NO: 2308460 - RNA, 18 nt, Human
auguucuaagucuuucca

SEQ ID NO: 2308461 - RNA, 15 nt, Human
auuaaauauaauaug

SEQ ID NO: 2308462 - RNA, 20 nt, Human
auuaaauauguuagcaaaga

SEQ ID NO: 2308463 - RNA, 22 nt, Human
auuaaauauguuagcaaagagu

SEQ ID NO: 2308464 - RNA, 18 nt, Human
auuaaaucuaugaaguau

SEQ ID NO: 2308465 - RNA, 16 nt, Human
auuaaauacaaaacuu

SEQ ID NO: 2308466 - RNA, 19 nt, Human
auuaaauacaaaacuucca

SEQ ID NO: 2308467 - RNA, 17 nt, Human
auuaaauacaaaacuuc

SEQ ID NO: 2308468 - RNA, 12 nt, Human
auuaaauacaga

SEQ ID NO: 2308469 - RNA, 14 nt, Human
auuaaauacagaca

SEQ ID NO: 2308470 - RNA, 17 nt, Human
auuaaauacagacacua

SEQ ID NO: 2308471 - RNA, 19 nt, Human
auuaaauacagacacuaag

SEQ ID NO: 2308472 - RNA, 20 nt, Human
auuaaauacagacacuaagu

SEQ ID NO: 2308473 - RNA, 18 nt, Human
auguuugcuucauaaaug

SEQ ID NO: 2308474 - RNA, 20 nt, Human
auguuugcuucauaaaugaa

SEQ ID NO: 2308475 - RNA, 19 nt, Human
auguuuuaauuccaugaau

SEQ ID NO: 2308476 - RNA, 19 nt, Human
auguuuuagaguuaacaau

SEQ ID NO: 2308477 - RNA, 23 nt, Human
auguuuuagacaaauacucaugu

SEQ ID NO: 2308478 - RNA, 14 nt, Human
auguuuuagaguua

SEQ ID NO: 2308479 - RNA, 20 nt, Human
auguuuuaccguaauaauua

SEQ ID NO: 2308480 - RNA, 16 nt, Human
auguuuuacugugaaa

SEQ ID NO: 2308481 - RNA, 19 nt, Human
auguuuuagacaaauacuc

SEQ ID NO: 2308482 - RNA, 22 nt, Human
auguuuuagacaaauacucaug

SEQ ID NO: 2308483 - RNA, 12 nt, Human
auguuuuagcau

SEQ ID NO: 2308484 - RNA, 22 nt, Human
auguuugccucugccucugaca

SEQ ID NO: 2308485 - RNA, 16 nt, Human
auguuugcuauugaca

SEQ ID NO: 2308486 - RNA, 22 nt, Human
auguuucauguuuugugacuau

SEQ ID NO: 2308487 - RNA, 19 nt, Human
auguuucacgaaguuuguu

SEQ ID NO: 2308488 - RNA, 15 nt, Human
auguuuccagacuuc

SEQ ID NO: 2308489 - RNA, 21 nt, Human
auguuucacauaaaaccucau

SEQ ID NO: 2308490 - RNA, 13 nt, Human
auguuuccaaccu

SEQ ID NO: 2308491 - RNA, 19 nt, Human
auguuugccucugccucug

SEQ ID NO: 2308492 - RNA, 13 nt, Human
auguucugggaca

SEQ ID NO: 2308493 - RNA, 10 nt, Human
augugggagg

SEQ ID NO: 2308494 - RNA, 11 nt, Human
augugggaggg

SEQ ID NO: 2308495 - RNA, 21 nt, Human
auguggcuugagaaauaugga

SEQ ID NO: 2308496 - RNA, 16 nt, Human
auguggcuugagaaau

SEQ ID NO: 2308497 - RNA, 17 nt, Human
augauggagcgcaccug

SEQ ID NO: 2308498 - RNA, 17 nt, Human
augaugccaaccucugg

SEQ ID NO: 2308499 - RNA, 18 nt, Human
augaugccaaccucugga

SEQ ID NO: 2308500 - RNA, 12 nt, Human
augaugccacac

SEQ ID NO: 2308501 - RNA, 18 nt, Human
augaugccacaccaagcu

SEQ ID NO: 2308502 - RNA, 22 nt, Human
augaugccacaccaagcugugc

SEQ ID NO: 2308503 - RNA, 24 nt, Human
augaugccacaccaagcugugcca

SEQ ID NO: 2308504 - RNA, 14 nt, Human
augauguguuguga

SEQ ID NO: 2308505 - RNA, 15 nt, Human
augauguguugugau

SEQ ID NO: 2308506 - RNA, 24 nt, Human
augauguuuuccaugaguccccug

SEQ ID NO: 2308507 - RNA, 20 nt, Human
augcaauuuugcauuugaau

SEQ ID NO: 2308508 - RNA, 17 nt, Human
augcaauuuccuuuuuu

SEQ ID NO: 2308509 - RNA, 16 nt, Human
augcacaaaaagaugc

SEQ ID NO: 2308510 - RNA, 15 nt, Human
augcacaaacagagg

SEQ ID NO: 2308511 - RNA, 21 nt, Human
augauguuucgugaaguauac

SEQ ID NO: 2308512 - RNA, 15 nt, Human
augauguuucacaua

SEQ ID NO: 2308513 - RNA, 16 nt, Human
augaugccaugaggaa

SEQ ID NO: 2308514 - RNA, 17 nt, Human
augaugccaugaggaac

SEQ ID NO: 2308515 - RNA, 22 nt, Human
augcauaguucccauguuaaau

SEQ ID NO: 2308516 - RNA, 11 nt, Human
augcauauacu

SEQ ID NO: 2308517 - RNA, 18 nt, Human
augcacagaguuguuaca

SEQ ID NO: 2308518 - RNA, 17 nt, Human
augcacagaguuguuac

SEQ ID NO: 2308519 - RNA, 22 nt, Human
augcacacuagccucuccagga

SEQ ID NO: 2308520 - RNA, 20 nt, Human
augcacacuagccucuccag

SEQ ID NO: 2308521 - RNA, 16 nt, Human
augcacaccucccccu

SEQ ID NO: 2308522 - RNA, 16 nt, Human
augcacagaguuguua

SEQ ID NO: 2308523 - RNA, 16 nt, Human
augcacaaacagaggc

SEQ ID NO: 2308524 - RNA, 17 nt, Human
augcacaaacagaggcc

SEQ ID NO: 2308525 - RNA, 18 nt, Human
augcauauccugagccau

SEQ ID NO: 2308526 - RNA, 17 nt, Human
augcauauccugagcca

SEQ ID NO: 2308527 - RNA, 22 nt, Human
augcaucucacuggaugcaaag

SEQ ID NO: 2308528 - RNA, 16 nt, Human
augcauauuauuuuau

SEQ ID NO: 2308529 - RNA, 16 nt, Human
augcaucuuacugaag

SEQ ID NO: 2308530 - RNA, 14 nt, Human
augcaucuuacuga

SEQ ID NO: 2308531 - RNA, 18 nt, Human
augcaucuuacugaaggu

SEQ ID NO: 2308532 - RNA, 14 nt, Human
augcaucuccaccu

SEQ ID NO: 2308533 - RNA, 17 nt, Human
augcaucuccaccugcu

SEQ ID NO: 2308534 - RNA, 20 nt, Human
augcaucuggcucaccgggu

SEQ ID NO: 2308535 - RNA, 19 nt, Human
augcaucuccaccugcucc

SEQ ID NO: 2308536 - RNA, 15 nt, Human
augcaucuguccuca

SEQ ID NO: 2308537 - RNA, 17 nt, Human
augccucucucaggcca

SEQ ID NO: 2308538 - RNA, 16 nt, Human
augcaugaaguaauau

SEQ ID NO: 2308539 - RNA, 19 nt, Human
augccucucucaggccaaa

SEQ ID NO: 2308540 - RNA, 18 nt, Human
augccucugccaaaggau

SEQ ID NO: 2308541 - RNA, 22 nt, Human
augccucugccaaaggauguga

SEQ ID NO: 2308542 - RNA, 15 nt, Human
augccugagggugga

SEQ ID NO: 2308543 - RNA, 12 nt, Human
augccugagggu

SEQ ID NO: 2308544 - RNA, 14 nt, Human
augccugagggugg

SEQ ID NO: 2308545 - RNA, 13 nt, Human
auggaaacugaau

SEQ ID NO: 2308546 - RNA, 23 nt, Human
auggaaaccugaaaaaaaguuua

SEQ ID NO: 2308547 - RNA, 13 nt, Human
auggaaacgguga

SEQ ID NO: 2308548 - RNA, 20 nt, Human
auggaaacuguugccagaga

SEQ ID NO: 2308549 - RNA, 16 nt, Human
auggaaacugaaugcu

SEQ ID NO: 2308550 - RNA, 14 nt, Human
auggaaacugaaug

SEQ ID NO: 2308551 - RNA, 15 nt, Human
auggaaacugaaugc

SEQ ID NO: 2308552 - RNA, 22 nt, Human
auggaaacuguugccagagaug

SEQ ID NO: 2308553 - RNA, 11 nt, Human
auggaaagaau

SEQ ID NO: 2308554 - RNA, 17 nt, Human
auggaaagaaucuaaua

SEQ ID NO: 2308555 - RNA, 15 nt, Human
auggaaaggagagga

SEQ ID NO: 2308556 - RNA, 19 nt, Human
auggaaaggagaggaaaga

SEQ ID NO: 2308557 - RNA, 22 nt, Human
auggaaaggagaggaaagaacu

SEQ ID NO: 2308558 - RNA, 14 nt, Human
auggaaaaggaaga

SEQ ID NO: 2308559 - RNA, 20 nt, Human
auggaaaaggaagacuagag

SEQ ID NO: 2308560 - RNA, 16 nt, Human
auggaaaccugaaaaa

SEQ ID NO: 2308561 - RNA, 15 nt, Human
augcuuggcuucuca

SEQ ID NO: 2308562 - RNA, 12 nt, Human
augcugcccugu

SEQ ID NO: 2308563 - RNA, 12 nt, Human
augcuuguacau

SEQ ID NO: 2308564 - RNA, 14 nt, Human
augcuuguacauaa

SEQ ID NO: 2308565 - RNA, 13 nt, Human
augcuuguacaua

SEQ ID NO: 2308566 - RNA, 16 nt, Human
auggaggaaaaccaag

SEQ ID NO: 2308567 - RNA, 22 nt, Human
auggaggaaaaccaagccgugg

SEQ ID NO: 2308568 - RNA, 13 nt, Human
auggaggaauaug

SEQ ID NO: 2308569 - RNA, 12 nt, Human
auggaggcacac

SEQ ID NO: 2308570 - RNA, 16 nt, Human
auggaggauggagaga

SEQ ID NO: 2308571 - RNA, 15 nt, Human
auggaggaggaggca

SEQ ID NO: 2308572 - RNA, 16 nt, Human
auggaggaggaggcaa

SEQ ID NO: 2308573 - RNA, 14 nt, Human
auggaggaggaggc

SEQ ID NO: 2308574 - RNA, 17 nt, Human
auggaggagaagaauuu

SEQ ID NO: 2308575 - RNA, 15 nt, Human
auggaggagaagaau

SEQ ID NO: 2308576 - RNA, 13 nt, Human
auggaggagaaga

SEQ ID NO: 2308577 - RNA, 11 nt, Human
auggaggagaa

SEQ ID NO: 2308578 - RNA, 18 nt, Human
auggaggauggagagagg

SEQ ID NO: 2308579 - RNA, 16 nt, Human
auggauucucagauau

SEQ ID NO: 2308580 - RNA, 14 nt, Human
auggauucucagau

SEQ ID NO: 2308581 - RNA, 22 nt, Human
auggauucucagauauuuauau

SEQ ID NO: 2308582 - RNA, 19 nt, Human
auggauucucagauauuua

SEQ ID NO: 2308583 - RNA, 18 nt, Human
auggauucucagauauuu

SEQ ID NO: 2308584 - RNA, 17 nt, Human
auggauucucagauauu

SEQ ID NO: 2308585 - RNA, 19 nt, Human
auggauucuccacucaguu

SEQ ID NO: 2308586 - RNA, 18 nt, Human
auggauugauaauugcau

SEQ ID NO: 2308587 - RNA, 20 nt, Human
auggauugauaauugcauuc

SEQ ID NO: 2308588 - RNA, 15 nt, Human
auggauuggauuauu

SEQ ID NO: 2308589 - RNA, 15 nt, Human
auggauuuccagcca

SEQ ID NO: 2308590 - RNA, 18 nt, Human
auggcugugccucugccu

SEQ ID NO: 2308591 - RNA, 20 nt, Human
auggauuggauuauuuaaua

SEQ ID NO: 2308592 - RNA, 22 nt, Human
auggauuggauuauuuaauaac

SEQ ID NO: 2308593 - RNA, 16 nt, Human
augcucuuuacuucau

SEQ ID NO: 2308594 - RNA, 15 nt, Human
augcugaaacaggag

SEQ ID NO: 2308595 - RNA, 17 nt, Human
augcugaaaaaacaccu

SEQ ID NO: 2308596 - RNA, 18 nt, Human
augcugaaacaggagaga

SEQ ID NO: 2308597 - RNA, 16 nt, Human
augcugaaacaggaga

SEQ ID NO: 2308598 - RNA, 17 nt, Human
augcugaacauugcaua

SEQ ID NO: 2308599 - RNA, 23 nt, Human
augcugaacauugcauauaacuu

SEQ ID NO: 2308600 - RNA, 14 nt, Human
augcugaaaccaag

SEQ ID NO: 2308601 - RNA, 19 nt, Human
augcugaagccaaagccaa

SEQ ID NO: 2308602 - RNA, 15 nt, Human
augcucuucugugga

SEQ ID NO: 2308603 - RNA, 14 nt, Human
augcugccaaauuu

SEQ ID NO: 2308604 - RNA, 19 nt, Human
augcugcaggacuugagaa

SEQ ID NO: 2308605 - RNA, 24 nt, Human
augcugauguucaguguaauuucu

SEQ ID NO: 2308606 - RNA, 23 nt, Human
augcugcauuuuaauuuuaacca

SEQ ID NO: 2308607 - RNA, 18 nt, Human
augcugcaggacuugaga

SEQ ID NO: 2308608 - RNA, 20 nt, Human
augcugcagauuugggcugg

SEQ ID NO: 2308609 - RNA, 12 nt, Human
augcugaaggga

SEQ ID NO: 2308610 - RNA, 21 nt, Human
augcugauguucaguguaauu

SEQ ID NO: 2308611 - RNA, 22 nt, Human
augcugauguucaguguaauuu

SEQ ID NO: 2308612 - RNA, 11 nt, Human
augcugcccug

SEQ ID NO: 2308613 - RNA, 12 nt, Human
augcugccccuc

SEQ ID NO: 2308614 - RNA, 15 nt, Human
augcugcccaugcca

SEQ ID NO: 2308615 - RNA, 17 nt, Human
augcugcccaugccacc

SEQ ID NO: 2308616 - RNA, 22 nt, Human
augcugcccaugccaccgcuuc

SEQ ID NO: 2308617 - RNA, 16 nt, Human
auggcuuaguuuucau

SEQ ID NO: 2308618 - RNA, 21 nt, Human
auggcuuaauguuuauuccug

SEQ ID NO: 2308619 - RNA, 17 nt, Human
auggcuuauccagcugg

SEQ ID NO: 2308620 - RNA, 18 nt, Human
auggcuuauccagcuggu

SEQ ID NO: 2308621 - RNA, 19 nt, Human
auggcuuauccagcuggug

SEQ ID NO: 2308622 - RNA, 16 nt, Human
auggcuuccaaggugg

SEQ ID NO: 2308623 - RNA, 21 nt, Human
auggcuuccaagguggucugc

SEQ ID NO: 2308624 - RNA, 12 nt, Human
auggcuuccucc

SEQ ID NO: 2308625 - RNA, 17 nt, Human
auggcuuccuccucccu

SEQ ID NO: 2308626 - RNA, 15 nt, Human
auggcuuccuccucc

SEQ ID NO: 2308627 - RNA, 16 nt, Human
auggcuuccuccuccc

SEQ ID NO: 2308628 - RNA, 19 nt, Human
auggcugugccucugccug

SEQ ID NO: 2308629 - RNA, 20 nt, Human
auggcugugccucugccugu

SEQ ID NO: 2308630 - RNA, 16 nt, Human
auggcuguggagugug

SEQ ID NO: 2308631 - RNA, 14 nt, Human
auggcuuaauguuu

SEQ ID NO: 2308632 - RNA, 16 nt, Human
auggcuuaauguuuau

SEQ ID NO: 2308633 - RNA, 16 nt, Human
agucugcuauauuuuc

SEQ ID NO: 2308634 - RNA, 17 nt, Human
agucugcuauauuuuca

SEQ ID NO: 2308635 - RNA, 17 nt, Human
agucugcugcccuccau

SEQ ID NO: 2308636 - RNA, 16 nt, Human
agucugcugcccucca

SEQ ID NO: 2308637 - RNA, 15 nt, Human
agucugcugcccucc

SEQ ID NO: 2308638 - RNA, 13 nt, Human
agucugcugcccu

SEQ ID NO: 2308639 - RNA, 17 nt, Human
agucuggaaugcagugg

SEQ ID NO: 2308640 - RNA, 20 nt, Human
agugaacuugggccacugug

SEQ ID NO: 2308641 - RNA, 18 nt, Human
agucugcugcccuccauc

SEQ ID NO: 2308642 - RNA, 20 nt, Human
agucugcugcccuccauccc

SEQ ID NO: 2308643 - RNA, 18 nt, Human
agucuggaaugcaguggu

SEQ ID NO: 2308644 - RNA, 19 nt, Human
agucugaugauuucuugaa

SEQ ID NO: 2308645 - RNA, 22 nt, Human
agucugaucgugacgcugaaua

SEQ ID NO: 2308646 - RNA, 23 nt, Human
agucugaucgugacgcugaauaa

SEQ ID NO: 2308647 - RNA, 15 nt, Human
aguccugggaugugg

SEQ ID NO: 2308648 - RNA, 18 nt, Human
agucugaucgugacgcug

SEQ ID NO: 2308649 - RNA, 20 nt, Human
agucugaucgugacgcugaa

SEQ ID NO: 2308650 - RNA, 21 nt, Human
agucugaucgugacgcugaau

SEQ ID NO: 2308651 - RNA, 16 nt, Human
agucugauucccaagc

SEQ ID NO: 2308652 - RNA, 18 nt, Human
agucugauucccaagcuc

SEQ ID NO: 2308653 - RNA, 23 nt, Human
agugaagguuuacaauuuacaaa

SEQ ID NO: 2308654 - RNA, 15 nt, Human
agugaagguuuacaa

SEQ ID NO: 2308655 - RNA, 21 nt, Human
agugaagaggggcagcccuug

SEQ ID NO: 2308656 - RNA, 18 nt, Human
agugaagguuuacaauuu

SEQ ID NO: 2308657 - RNA, 16 nt, Human
agugacagggaagcua

SEQ ID NO: 2308658 - RNA, 13 nt, Human
agugacagggaag

SEQ ID NO: 2308659 - RNA, 19 nt, Human
agugaagagggagaaggga

SEQ ID NO: 2308660 - RNA, 16 nt, Human
agugaagacuggaagc

SEQ ID NO: 2308661 - RNA, 13 nt, Human
agugaagaggggc

SEQ ID NO: 2308662 - RNA, 14 nt, Human
agugaagaggggca

SEQ ID NO: 2308663 - RNA, 15 nt, Human
agugaagaggggcag

SEQ ID NO: 2308664 - RNA, 21 nt, Human
agugaaggcuucucucugugg

SEQ ID NO: 2308665 - RNA, 15 nt, Human
agugaaggcuucucu

SEQ ID NO: 2308666 - RNA, 16 nt, Human
agugaagaggggcagc

SEQ ID NO: 2308667 - RNA, 17 nt, Human
agugaagaggggcagcc

SEQ ID NO: 2308668 - RNA, 19 nt, Human
agugaagaggggcagcccu

SEQ ID NO: 2308669 - RNA, 20 nt, Human
agugaagaggggcagcccuu

SEQ ID NO: 2308670 - RNA, 16 nt, Human
agugaagacaaugacu

SEQ ID NO: 2308671 - RNA, 14 nt, Human
agugaagacaauga

SEQ ID NO: 2308672 - RNA, 16 nt, Human
agugaagaaaagugaa

SEQ ID NO: 2308673 - RNA, 19 nt, Human
agugaagaaaagugaaugc

SEQ ID NO: 2308674 - RNA, 22 nt, Human
agugaagaaaagugaaugcuca

SEQ ID NO: 2308675 - RNA, 23 nt, Human
agugaagaaaagugaaugcucaa

SEQ ID NO: 2308676 - RNA, 21 nt, Human
aguccugggagaaccucaggc

SEQ ID NO: 2308677 - RNA, 18 nt, Human
aguccuggccuggcuucu

SEQ ID NO: 2308678 - RNA, 20 nt, Human
aguccuggccuggcuucucc

SEQ ID NO: 2308679 - RNA, 13 nt, Human
aguccuggccugg

SEQ ID NO: 2308680 - RNA, 14 nt, Human
aguccuggccuggc

SEQ ID NO: 2308681 - RNA, 22 nt, Human
aguccuggcaugggaaugaaug

SEQ ID NO: 2308682 - RNA, 20 nt, Human
aguccuggcaugggaaugaa

SEQ ID NO: 2308683 - RNA, 21 nt, Human
aguccuggcaugggaaugaau

SEQ ID NO: 2308684 - RNA, 22 nt, Human
aguccugggagaaccucaggcu

SEQ ID NO: 2308685 - RNA, 13 nt, Human
aguccugugaaug

SEQ ID NO: 2308686 - RNA, 18 nt, Human
aguccugugaaugccacu

SEQ ID NO: 2308687 - RNA, 19 nt, Human
aguccugugaaugccacug

SEQ ID NO: 2308688 - RNA, 20 nt, Human
aguccugugaaugccacugc

SEQ ID NO: 2308689 - RNA, 12 nt, Human
aguccuguaaug

SEQ ID NO: 2308690 - RNA, 17 nt, Human
agucugaaggcuggguu

SEQ ID NO: 2308691 - RNA, 16 nt, Human
agucugaaggcugggu

SEQ ID NO: 2308692 - RNA, 13 nt, Human
agucugaaggcug

SEQ ID NO: 2308693 - RNA, 15 nt, Human
agucugaaggcuggg

SEQ ID NO: 2308694 - RNA, 19 nt, Human
agugacaguggauugcauu

SEQ ID NO: 2308695 - RNA, 20 nt, Human
agugacaguggauugcauuu

SEQ ID NO: 2308696 - RNA, 19 nt, Human
agugacagggaagcuacag

SEQ ID NO: 2308697 - RNA, 20 nt, Human
agugacagggaagcuacagg

SEQ ID NO: 2308698 - RNA, 22 nt, Human
agugacagggaagcuacagguu

SEQ ID NO: 2308699 - RNA, 23 nt, Human
agugacagggaagcuacagguua

SEQ ID NO: 2308700 - RNA, 22 nt, Human
agugacaucucuuugaugucau

SEQ ID NO: 2308701 - RNA, 18 nt, Human
agugaccauacuaauuau

SEQ ID NO: 2308702 - RNA, 15 nt, Human
agugacaguauuuug

SEQ ID NO: 2308703 - RNA, 15 nt, Human
agugacccggaggcc

SEQ ID NO: 2308704 - RNA, 16 nt, Human
agugacccggaggcca

SEQ ID NO: 2308705 - RNA, 17 nt, Human
agugacccggaggccac

SEQ ID NO: 2308706 - RNA, 18 nt, Human
agugacccggaggccaca

SEQ ID NO: 2308707 - RNA, 19 nt, Human
agugacccggaggccacau

SEQ ID NO: 2308708 - RNA, 23 nt, Human
agugacccggaggccacaugagu

SEQ ID NO: 2308709 - RNA, 15 nt, Human
aguaucucagggccu

SEQ ID NO: 2308710 - RNA, 19 nt, Human
aguaucuccucgcaagcug

SEQ ID NO: 2308711 - RNA, 18 nt, Human
aguaucuccucgcaagcu

SEQ ID NO: 2308712 - RNA, 22 nt, Human
aguaucucggaccuuucagcug

SEQ ID NO: 2308713 - RNA, 23 nt, Human
aguaucucggaccuuucagcugu

SEQ ID NO: 2308714 - RNA, 14 nt, Human
aguaucugggaacu

SEQ ID NO: 2308715 - RNA, 14 nt, Human
aguaucuucaugua

SEQ ID NO: 2308716 - RNA, 15 nt, Human
aguaucuguaucucu

SEQ ID NO: 2308717 - RNA, 18 nt, Human
aguaucuguaucucucuc

SEQ ID NO: 2308718 - RNA, 11 nt, Human
aguaucuugaa

SEQ ID NO: 2308719 - RNA, 12 nt, Human
aguaucuugaag

SEQ ID NO: 2308720 - RNA, 15 nt, Human
aguaucuugaagacu

SEQ ID NO: 2308721 - RNA, 16 nt, Human
aguaugaauaaagaca

SEQ ID NO: 2308722 - RNA, 13 nt, Human
aguaugaaaauaa

SEQ ID NO: 2308723 - RNA, 17 nt, Human
aguaucuuuuuucaaaa

SEQ ID NO: 2308724 - RNA, 13 nt, Human
aguaugaaucuau

SEQ ID NO: 2308725 - RNA, 15 nt, Human
aguaugaaucuaugc

SEQ ID NO: 2308726 - RNA, 16 nt, Human
aguaugaaucuaugcc

SEQ ID NO: 2308727 - RNA, 17 nt, Human
aguaugaaucuaugcca

SEQ ID NO: 2308728 - RNA, 18 nt, Human
aguaugaaucuaugccaa

SEQ ID NO: 2308729 - RNA, 16 nt, Human
aguaucuuuuuauuca

SEQ ID NO: 2308730 - RNA, 12 nt, Human
aguaugaaaaua

SEQ ID NO: 2308731 - RNA, 20 nt, Human
aguaugcuuggacugaaggg

SEQ ID NO: 2308732 - RNA, 14 nt, Human
aguauggagcucag

SEQ ID NO: 2308733 - RNA, 19 nt, Human
aguauggagcucagagagg

SEQ ID NO: 2308734 - RNA, 23 nt, Human
aguaugcuugaaaagauaaauua

SEQ ID NO: 2308735 - RNA, 16 nt, Human
aguaugaggcauuugu

SEQ ID NO: 2308736 - RNA, 15 nt, Human
aguaugaggcauuug

SEQ ID NO: 2308737 - RNA, 22 nt, Human
agucaaauuaauaaucuuauua

SEQ ID NO: 2308738 - RNA, 20 nt, Human
agucaaauuaauaaucuuau

SEQ ID NO: 2308739 - RNA, 22 nt, Human
agucaaauuugaaaauaauugu

SEQ ID NO: 2308740 - RNA, 16 nt, Human
agucaacaaacuauuu

SEQ ID NO: 2308741 - RNA, 21 nt, Human
agucaaaguaaaacuugcugc

SEQ ID NO: 2308742 - RNA, 12 nt, Human
agucaaaguaaa

SEQ ID NO: 2308743 - RNA, 22 nt, Human
agucaaaugguaggcauuuccu

SEQ ID NO: 2308744 - RNA, 15 nt, Human
agucaaacugugcca

SEQ ID NO: 2308745 - RNA, 23 nt, Human
agucaaaugguaggcauuuccua

SEQ ID NO: 2308746 - RNA, 14 nt, Human
agucaaauuaauaa

SEQ ID NO: 2308747 - RNA, 18 nt, Human
agucaaauuaauaaucuu

SEQ ID NO: 2308748 - RNA, 15 nt, Human
agucaaauuaauaau

SEQ ID NO: 2308749 - RNA, 23 nt, Human
agucaaauugugugaaagguacu

SEQ ID NO: 2308750 - RNA, 19 nt, Human
agucaaauugugugaaagg

SEQ ID NO: 2308751 - RNA, 21 nt, Human
agucaaaaggugccugugagg

SEQ ID NO: 2308752 - RNA, 13 nt, Human
agucaaagacauu

SEQ ID NO: 2308753 - RNA, 18 nt, Human
agucaaaccauaaacuuc

SEQ ID NO: 2308754 - RNA, 20 nt, Human
agucaaaccauaaacuucau

SEQ ID NO: 2308755 - RNA, 13 nt, Human
agucaaaccauaa

SEQ ID NO: 2308756 - RNA, 17 nt, Human
agucaaaccauaaacuu

SEQ ID NO: 2308757 - RNA, 20 nt, Human
aguaugggacuggccucugc

SEQ ID NO: 2308758 - RNA, 17 nt, Human
aguaugggacuggccuc

SEQ ID NO: 2308759 - RNA, 22 nt, Human
aguauggugagagaagccugug

SEQ ID NO: 2308760 - RNA, 18 nt, Human
aguauggguuagggaaaa

SEQ ID NO: 2308761 - RNA, 23 nt, Human
aguggcuguccagugcccauucc

SEQ ID NO: 2308762 - RNA, 15 nt, Human
aguggcuucaaaaua

SEQ ID NO: 2308763 - RNA, 17 nt, Human
aguggcuucaucuguca

SEQ ID NO: 2308764 - RNA, 19 nt, Human
aguggcuucauuagagcag

SEQ ID NO: 2308765 - RNA, 19 nt, Human
aguggcuuacuacaugugg

SEQ ID NO: 2308766 - RNA, 18 nt, Human
aguggcuguccagugccc

SEQ ID NO: 2308767 - RNA, 19 nt, Human
aguggcuguccagugccca

SEQ ID NO: 2308768 - RNA, 12 nt, Human
aguggcugucca

SEQ ID NO: 2308769 - RNA, 13 nt, Human
aguggcuguccag

SEQ ID NO: 2308770 - RNA, 17 nt, Human
aguggcuguccagugcc

SEQ ID NO: 2308771 - RNA, 17 nt, Human
aguggcugucaucagcc

SEQ ID NO: 2308772 - RNA, 16 nt, Human
aguggcugucaucagc

SEQ ID NO: 2308773 - RNA, 18 nt, Human
aguggcugguccagggcu

SEQ ID NO: 2308774 - RNA, 19 nt, Human
aguggcugguccagggcua

SEQ ID NO: 2308775 - RNA, 23 nt, Human
aguggcuuaaaacaacacucaca

SEQ ID NO: 2308776 - RNA, 13 nt, Human
aguggcuccuccc

SEQ ID NO: 2308777 - RNA, 17 nt, Human
aguggcuccucccggug

SEQ ID NO: 2308778 - RNA, 14 nt, Human
aguggcugcugacu

SEQ ID NO: 2308779 - RNA, 12 nt, Human
aguggcugcugc

SEQ ID NO: 2308780 - RNA, 11 nt, Human
aguggcugcug

SEQ ID NO: 2308781 - RNA, 21 nt, Human
aguggcuccucccggugccca

SEQ ID NO: 2308782 - RNA, 16 nt, Human
aguggcuggaucugug

SEQ ID NO: 2308783 - RNA, 13 nt, Human
aguggcugcugcc

SEQ ID NO: 2308784 - RNA, 14 nt, Human
aguggcugcugccc

SEQ ID NO: 2308785 - RNA, 16 nt, Human
aguggcugcugcccag

SEQ ID NO: 2308786 - RNA, 17 nt, Human
aguggcugcugcccagg

SEQ ID NO: 2308787 - RNA, 19 nt, Human
aguggcugcugcccaggcc

SEQ ID NO: 2308788 - RNA, 22 nt, Human
aguggcugcugcccaggcccag

SEQ ID NO: 2308789 - RNA, 15 nt, Human
aguggcugguccagg

SEQ ID NO: 2308790 - RNA, 17 nt, Human
aguggcugguccagggc

SEQ ID NO: 2308791 - RNA, 14 nt, Human
aguggcucacgccu

SEQ ID NO: 2308792 - RNA, 14 nt, Human
aguggcucaacauu

SEQ ID NO: 2308793 - RNA, 21 nt, Human
aguguccccuccacugucaca

SEQ ID NO: 2308794 - RNA, 15 nt, Human
agugucuuaauuaaa

SEQ ID NO: 2308795 - RNA, 21 nt, Human
aguguccaaagcagggucugg

SEQ ID NO: 2308796 - RNA, 20 nt, Human
aguguccauugacauguaca

SEQ ID NO: 2308797 - RNA, 21 nt, Human
aguguccauugacauguacag

SEQ ID NO: 2308798 - RNA, 22 nt, Human
aguguccauugacauguacaga

SEQ ID NO: 2308799 - RNA, 23 nt, Human
aguguccauugacauguacagag

SEQ ID NO: 2308800 - RNA, 13 nt, Human
aguguccccucca

SEQ ID NO: 2308801 - RNA, 14 nt, Human
aguguccccuccac

SEQ ID NO: 2308802 - RNA, 15 nt, Human
aguguccccuccacu

SEQ ID NO: 2308803 - RNA, 17 nt, Human
aguguccccuccacugu

SEQ ID NO: 2308804 - RNA, 19 nt, Human
aguguccccuccacuguca

SEQ ID NO: 2308805 - RNA, 16 nt, Human
aguguauuuuucaaua

SEQ ID NO: 2308806 - RNA, 14 nt, Human
aguguauuuguauu

SEQ ID NO: 2308807 - RNA, 21 nt, Human
aguguauuuuucaauaaagca

SEQ ID NO: 2308808 - RNA, 15 nt, Human
agugucaaauaaaca

SEQ ID NO: 2308809 - RNA, 17 nt, Human
agugucaaauaaacacu

SEQ ID NO: 2308810 - RNA, 19 nt, Human
agugucaaauaaacacugu

SEQ ID NO: 2308811 - RNA, 21 nt, Human
agugucaaauaaacacugugu

SEQ ID NO: 2308812 - RNA, 20 nt, Human
agugucaaauaaacacugug

SEQ ID NO: 2308813 - RNA, 14 nt, Human
agugucaaguugug

SEQ ID NO: 2308814 - RNA, 15 nt, Human
agugucaaguugugc

SEQ ID NO: 2308815 - RNA, 17 nt, Human
agugucaaguugugcuu

SEQ ID NO: 2308816 - RNA, 17 nt, Human
aguguccaaagcagggu

SEQ ID NO: 2308817 - RNA, 20 nt, Human
aguguccaaagcagggucug

SEQ ID NO: 2308818 - RNA, 18 nt, Human
aguguauuuuuuuacuaa

SEQ ID NO: 2308819 - RNA, 17 nt, Human
aguguauuuuuuuacua

SEQ ID NO: 2308820 - RNA, 14 nt, Human
agugggagaaaaca

SEQ ID NO: 2308821 - RNA, 14 nt, Human
aguguauaucagaa

SEQ ID NO: 2308822 - RNA, 14 nt, Human
agugggagccaggg

SEQ ID NO: 2308823 - RNA, 16 nt, Human
agugggagcugccugu

SEQ ID NO: 2308824 - RNA, 15 nt, Human
agugggagcugccug

SEQ ID NO: 2308825 - RNA, 17 nt, Human
agugggagaaaacacuu

SEQ ID NO: 2308826 - RNA, 13 nt, Human
agugggagaaaac

SEQ ID NO: 2308827 - RNA, 12 nt, Human
agugggagaaaa

SEQ ID NO: 2308828 - RNA, 20 nt, Human
aguggcuucauuagagcagg

SEQ ID NO: 2308829 - RNA, 21 nt, Human
aguggcuucauuagagcaggc

SEQ ID NO: 2308830 - RNA, 22 nt, Human
aguggcuucauuagagcaggcg

SEQ ID NO: 2308831 - RNA, 14 nt, Human
agugggagcugccu

SEQ ID NO: 2308832 - RNA, 17 nt, Human
aguguaugcacgugugc

SEQ ID NO: 2308833 - RNA, 22 nt, Human
aguguauggaaauaaauguauc

SEQ ID NO: 2308834 - RNA, 21 nt, Human
aguguauggaaauaaauguau

SEQ ID NO: 2308835 - RNA, 20 nt, Human
aguguauggaaauaaaugua

SEQ ID NO: 2308836 - RNA, 18 nt, Human
aguguaugacugcacaug

SEQ ID NO: 2308837 - RNA, 16 nt, Human
aguguauggaaauaaa

SEQ ID NO: 2308838 - RNA, 14 nt, Human
aguguccuuagaac

SEQ ID NO: 2308839 - RNA, 21 nt, Human
agugucuuaauuaaaagaaua

SEQ ID NO: 2308840 - RNA, 18 nt, Human
agugucuuaauuaaaaga

SEQ ID NO: 2308841 - RNA, 17 nt, Human
agugucuuaauuaaaag

SEQ ID NO: 2308842 - RNA, 17 nt, Human
aguucauguuugcuuca

SEQ ID NO: 2308843 - RNA, 19 nt, Human
aguucaguuuuaccagaug

SEQ ID NO: 2308844 - RNA, 23 nt, Human
aguucauguuugcuucauaaaug

SEQ ID NO: 2308845 - RNA, 21 nt, Human
aguucaugagaaucuauauuu

SEQ ID NO: 2308846 - RNA, 13 nt, Human
aguucaugagaau

SEQ ID NO: 2308847 - RNA, 21 nt, Human
aguugaaaagacuccaaagaa

SEQ ID NO: 2308848 - RNA, 22 nt, Human
aguugaaaaucuuauaauuuaa

SEQ ID NO: 2308849 - RNA, 14 nt, Human
aguucaguaccugg

SEQ ID NO: 2308850 - RNA, 15 nt, Human
aguucaguaccugga

SEQ ID NO: 2308851 - RNA, 16 nt, Human
aguucaguaccuggag

SEQ ID NO: 2308852 - RNA, 17 nt, Human
aguucaguaccuggagg

SEQ ID NO: 2308853 - RNA, 19 nt, Human
aguucaguaccuggaggag

SEQ ID NO: 2308854 - RNA, 20 nt, Human
aguucaguaccuggaggagg

SEQ ID NO: 2308855 - RNA, 11 nt, Human
aguucaguggc

SEQ ID NO: 2308856 - RNA, 19 nt, Human
aguucaguggcacucaaca

SEQ ID NO: 2308857 - RNA, 13 nt, Human
aguucaguggcag

SEQ ID NO: 2308858 - RNA, 18 nt, Human
aguucaguggcagggcuc

SEQ ID NO: 2308859 - RNA, 19 nt, Human
aguucaguggcagggcuca

SEQ ID NO: 2308860 - RNA, 21 nt, Human
aguucaguggcagggcucagg

SEQ ID NO: 2308861 - RNA, 22 nt, Human
aguucaguggcagggcucagga

SEQ ID NO: 2308862 - RNA, 23 nt, Human
aguucaguggcagggcucaggau

SEQ ID NO: 2308863 - RNA, 16 nt, Human
aguucaguuccucuuu

SEQ ID NO: 2308864 - RNA, 20 nt, Human
aguucaguuccucuuugcau

SEQ ID NO: 2308865 - RNA, 23 nt, Human
aguucaguuccucuuugcaugga

SEQ ID NO: 2308866 - RNA, 24 nt, Human
aguucaguuccucuuugcauggaa

SEQ ID NO: 2308867 - RNA, 18 nt, Human
aguucauaaauuuauggu

SEQ ID NO: 2308868 - RNA, 21 nt, Human
aguucagguagcugccccugg

SEQ ID NO: 2308869 - RNA, 20 nt, Human
aguucagguagcugccccug

SEQ ID NO: 2308870 - RNA, 19 nt, Human
aguucagguagcugccccu

SEQ ID NO: 2308871 - RNA, 12 nt, Human
aguuacagaaag

SEQ ID NO: 2308872 - RNA, 13 nt, Human
aguuacagaaagu

SEQ ID NO: 2308873 - RNA, 15 nt, Human
aguuacagaaagugg

SEQ ID NO: 2308874 - RNA, 16 nt, Human
aguuacagaaaguggu

SEQ ID NO: 2308875 - RNA, 20 nt, Human
aguucagguaacaggcagau

SEQ ID NO: 2308876 - RNA, 19 nt, Human
aguucagguaacaggcaga

SEQ ID NO: 2308877 - RNA, 17 nt, Human
aguuacagacaaagcgu

SEQ ID NO: 2308878 - RNA, 20 nt, Human
aguuaaugaugguugauggg

SEQ ID NO: 2308879 - RNA, 18 nt, Human
aguuacacuaaaagguga

SEQ ID NO: 2308880 - RNA, 14 nt, Human
aguuacagacaaag

SEQ ID NO: 2308881 - RNA, 16 nt, Human
aguuacagacaaagcg

SEQ ID NO: 2308882 - RNA, 12 nt, Human
aguuaaauaaau

SEQ ID NO: 2308883 - RNA, 16 nt, Human
aguuaaagugaauaac

SEQ ID NO: 2308884 - RNA, 13 nt, Human
aguuaagccuuug

SEQ ID NO: 2308885 - RNA, 15 nt, Human
aguuaauauugugaa

SEQ ID NO: 2308886 - RNA, 20 nt, Human
aguuaauauaucccagaaau

SEQ ID NO: 2308887 - RNA, 21 nt, Human
aguuaauauaucccagaaauu

SEQ ID NO: 2308888 - RNA, 15 nt, Human
aguuaagugaauguc

SEQ ID NO: 2308889 - RNA, 14 nt, Human
aguuaagccuuugg

SEQ ID NO: 2308890 - RNA, 18 nt, Human
aguguuuuuguaaagugu

SEQ ID NO: 2308891 - RNA, 14 nt, Human
aguguuuuuguaaa

SEQ ID NO: 2308892 - RNA, 15 nt, Human
aguguuuuuguaaag

SEQ ID NO: 2308893 - RNA, 13 nt, Human
aguuaaagcagug

SEQ ID NO: 2308894 - RNA, 14 nt, Human
aguuaaacauaaau

SEQ ID NO: 2308895 - RNA, 16 nt, Human
aguguuuuuaccucug

SEQ ID NO: 2308896 - RNA, 17 nt, Human
aguguuuuuaccucugu

SEQ ID NO: 2308897 - RNA, 21 nt, Human
aguguuuuuaccucugucuug

SEQ ID NO: 2308898 - RNA, 20 nt, Human
aguguuuuuguaaagugugg

SEQ ID NO: 2308899 - RNA, 13 nt, Human
aguugaacugaua

SEQ ID NO: 2308900 - RNA, 23 nt, Human
aguugaacugauaguuacuguug

SEQ ID NO: 2308901 - RNA, 22 nt, Human
aguugaaaagacuccaaagaaa

SEQ ID NO: 2308902 - RNA, 23 nt, Human
aguugaaaaucuuauaauuuaaa

SEQ ID NO: 2308903 - RNA, 20 nt, Human
aguuguggugcugacaaagc

SEQ ID NO: 2308904 - RNA, 20 nt, Human
aguuguggagagugcaacag

SEQ ID NO: 2308905 - RNA, 17 nt, Human
aguugugggugggagag

SEQ ID NO: 2308906 - RNA, 19 nt, Human
aguuguggugcugacaaag

SEQ ID NO: 2308907 - RNA, 21 nt, Human
aguuguggaaagccucugcug

SEQ ID NO: 2308908 - RNA, 20 nt, Human
aguuguggaaagccucugcu

SEQ ID NO: 2308909 - RNA, 19 nt, Human
aguuguggaaagccucugc

SEQ ID NO: 2308910 - RNA, 18 nt, Human
aguuguggaaagccucug

SEQ ID NO: 2308911 - RNA, 14 nt, Human
aguugaagacagag

SEQ ID NO: 2308912 - RNA, 15 nt, Human
aguuguugcccuggg

SEQ ID NO: 2308913 - RNA, 13 nt, Human
aguuguuggccuc

SEQ ID NO: 2308914 - RNA, 14 nt, Human
aguuguuggccucc

SEQ ID NO: 2308915 - RNA, 15 nt, Human
aguuguuggccuccg

SEQ ID NO: 2308916 - RNA, 15 nt, Human
aguuguuucauugac

SEQ ID NO: 2308917 - RNA, 13 nt, Human
aguuguuucauug

SEQ ID NO: 2308918 - RNA, 19 nt, Human
aguuguuggccuccggccu

SEQ ID NO: 2308919 - RNA, 19 nt, Human
aguuguuucauugacuauc

SEQ ID NO: 2308920 - RNA, 16 nt, Human
aguuguuucauugacu

SEQ ID NO: 2308921 - RNA, 13 nt, Human
aguuguuugaugc

SEQ ID NO: 2308922 - RNA, 11 nt, Human
aguuguuugau

SEQ ID NO: 2308923 - RNA, 20 nt, Human
aguuguuugauucagacagc

SEQ ID NO: 2308924 - RNA, 14 nt, Human
auauuuacguauga

SEQ ID NO: 2308925 - RNA, 21 nt, Human
auauuuacaugaauugcauuu

SEQ ID NO: 2308926 - RNA, 20 nt, Human
auauuuacauaugaaauuua

SEQ ID NO: 2308927 - RNA, 19 nt, Human
auauuuacauaugaaauuu

SEQ ID NO: 2308928 - RNA, 18 nt, Human
auauuuacauaugaaauu

SEQ ID NO: 2308929 - RNA, 16 nt, Human
auauuuacauaugaaa

SEQ ID NO: 2308930 - RNA, 14 nt, Human
auauuauuucuagg

SEQ ID NO: 2308931 - RNA, 20 nt, Human
auauuauuucuaggaagaau

SEQ ID NO: 2308932 - RNA, 22 nt, Human
auauuauuucuaggaagaauuu

SEQ ID NO: 2308933 - RNA, 23 nt, Human
auauuuauuauuuucaccuguuu

SEQ ID NO: 2308934 - RNA, 23 nt, Human
auauuuacuaagccacaagaaau

SEQ ID NO: 2308935 - RNA, 19 nt, Human
auauuuacuucuuauacau

SEQ ID NO: 2308936 - RNA, 12 nt, Human
auauuuauugcu

SEQ ID NO: 2308937 - RNA, 13 nt, Human
auauuuauugcuu

SEQ ID NO: 2308938 - RNA, 14 nt, Human
auauuuauugcuuu

SEQ ID NO: 2308939 - RNA, 13 nt, Human
auauuuauuuuaa

SEQ ID NO: 2308940 - RNA, 17 nt, Human
auauuauucauucauuu

SEQ ID NO: 2308941 - RNA, 13 nt, Human
auauuauuucuag

SEQ ID NO: 2308942 - RNA, 19 nt, Human
auauuauuaguuuugauuu

SEQ ID NO: 2308943 - RNA, 22 nt, Human
auauuauuaguuuugauuuaau

SEQ ID NO: 2308944 - RNA, 16 nt, Human
auauuauggaagauuu

SEQ ID NO: 2308945 - RNA, 13 nt, Human
auauuauguguuu

SEQ ID NO: 2308946 - RNA, 21 nt, Human
auauuauguauuuauauuuug

SEQ ID NO: 2308947 - RNA, 16 nt, Human
auauuauguuaaaacu

SEQ ID NO: 2308948 - RNA, 21 nt, Human
auauuaucaugcaaaugcugu

SEQ ID NO: 2308949 - RNA, 19 nt, Human
auauuaucaugcaaaugcu

SEQ ID NO: 2308950 - RNA, 23 nt, Human
auauuaugaagcuuuuaugugaa

SEQ ID NO: 2308951 - RNA, 14 nt, Human
auauuagaaguguu

SEQ ID NO: 2308952 - RNA, 15 nt, Human
auauuauauauauau

SEQ ID NO: 2308953 - RNA, 16 nt, Human
auauuacuagcauaug

SEQ ID NO: 2308954 - RNA, 22 nt, Human
auauuaccacagacauacuaac

SEQ ID NO: 2308955 - RNA, 19 nt, Human
auauuaccacagacauacu

SEQ ID NO: 2308956 - RNA, 21 nt, Human
auaugcuuauacacuuacacu

SEQ ID NO: 2308957 - RNA, 20 nt, Human
auaugcuucuguuuuauaau

SEQ ID NO: 2308958 - RNA, 22 nt, Human
auaugcuucuguuuuauaauuu

SEQ ID NO: 2308959 - RNA, 21 nt, Human
auaucauuuauuuuuuacauu

SEQ ID NO: 2308960 - RNA, 23 nt, Human
auaucauuuauuuuuuacauuau

SEQ ID NO: 2308961 - RNA, 14 nt, Human
auauccaccaccuc

SEQ ID NO: 2308962 - RNA, 19 nt, Human
auauccaaaagcuuuuuau

SEQ ID NO: 2308963 - RNA, 12 nt, Human
auauccaaaagc

SEQ ID NO: 2308964 - RNA, 23 nt, Human
auaucauuauaacugaaggagaa

SEQ ID NO: 2308965 - RNA, 21 nt, Human
auaucaugagugaauaaaugu

SEQ ID NO: 2308966 - RNA, 22 nt, Human
auaucaucaguauugaagcauu

SEQ ID NO: 2308967 - RNA, 17 nt, Human
auaucaucaguauugaa

SEQ ID NO: 2308968 - RNA, 21 nt, Human
auaucaacagauaguuguguu

SEQ ID NO: 2308969 - RNA, 16 nt, Human
auaucaaauauauuca

SEQ ID NO: 2308970 - RNA, 14 nt, Human
auaucaaaaagacu

SEQ ID NO: 2308971 - RNA, 15 nt, Human
auagccaaggccaaa

SEQ ID NO: 2308972 - RNA, 21 nt, Human
auagccaaggccaaaggaagc

SEQ ID NO: 2308973 - RNA, 22 nt, Human
auagccacauuuggaauacuuu

SEQ ID NO: 2308974 - RNA, 21 nt, Human
auagccacauuuggaauacuu

SEQ ID NO: 2308975 - RNA, 16 nt, Human
auagccacauuuggaa

SEQ ID NO: 2308976 - RNA, 13 nt, Human
auagccacauuug

SEQ ID NO: 2308977 - RNA, 23 nt, Human
auagccacuuaccuucaauaaag

SEQ ID NO: 2308978 - RNA, 21 nt, Human
auagccacuuaccuucaauaa

SEQ ID NO: 2308979 - RNA, 19 nt, Human
auagccacuuaccuucaau

SEQ ID NO: 2308980 - RNA, 16 nt, Human
auagccaccccagaaa

SEQ ID NO: 2308981 - RNA, 23 nt, Human
auagccacauuuggaauacuuuu

SEQ ID NO: 2308982 - RNA, 22 nt, Human
auagccacaucccuuugaaaca

SEQ ID NO: 2308983 - RNA, 14 nt, Human
auagcccagguccu

SEQ ID NO: 2308984 - RNA, 16 nt, Human
auagcccaucccugcc

SEQ ID NO: 2308985 - RNA, 14 nt, Human
auagcccagaucag

SEQ ID NO: 2308986 - RNA, 13 nt, Human
auagcccagacac

SEQ ID NO: 2308987 - RNA, 17 nt, Human
auagcccagacacagaa

SEQ ID NO: 2308988 - RNA, 12 nt, Human
auagcccagaca

SEQ ID NO: 2308989 - RNA, 18 nt, Human
auagcagcuuauucacaa

SEQ ID NO: 2308990 - RNA, 17 nt, Human
auaguaugguggcuggg

SEQ ID NO: 2308991 - RNA, 18 nt, Human
auaguaugguggcugggu

SEQ ID NO: 2308992 - RNA, 22 nt, Human
auaguauuccauugugugagug

SEQ ID NO: 2308993 - RNA, 21 nt, Human
auaguauuccauugugugagu

SEQ ID NO: 2308994 - RNA, 20 nt, Human
auaguauuugagaguucuaa

SEQ ID NO: 2308995 - RNA, 21 nt, Human
auaguauuugagaguucuaaa

SEQ ID NO: 2308996 - RNA, 18 nt, Human
auagguuguaaauguguu

SEQ ID NO: 2308997 - RNA, 20 nt, Human
auagguugccaauaauacac

SEQ ID NO: 2308998 - RNA, 15 nt, Human
auagguuuaauaauu

SEQ ID NO: 2308999 - RNA, 16 nt, Human
auaggucacuccuggg

SEQ ID NO: 2309000 - RNA, 15 nt, Human
auaggucacuccugg

SEQ ID NO: 2309001 - RNA, 15 nt, Human
auaggucacuggcuc

SEQ ID NO: 2309002 - RNA, 16 nt, Human
auaggucacuggcucu

SEQ ID NO: 2309003 - RNA, 17 nt, Human
auaggucacuggcucuc

SEQ ID NO: 2309004 - RNA, 19 nt, Human
auaggucacuggcucucca

SEQ ID NO: 2309005 - RNA, 20 nt, Human
auaggucacuggcucuccaa

SEQ ID NO: 2309006 - RNA, 21 nt, Human
auaggucacuggcucuccaag

SEQ ID NO: 2309007 - RNA, 17 nt, Human
auagcccaucccugccu

SEQ ID NO: 2309008 - RNA, 18 nt, Human
auagcccaucccugccug

SEQ ID NO: 2309009 - RNA, 21 nt, Human
auagguauaaguggugugugu

SEQ ID NO: 2309010 - RNA, 23 nt, Human
auaggucagugaggcccagggag

SEQ ID NO: 2309011 - RNA, 22 nt, Human
auaggucacuggcucuccaagu

SEQ ID NO: 2309012 - RNA, 14 nt, Human
auaggugcuacaaa

SEQ ID NO: 2309013 - RNA, 13 nt, Human
auagguggccucu

SEQ ID NO: 2309014 - RNA, 23 nt, Human
auaggugcuacaaaaacacagca

SEQ ID NO: 2309015 - RNA, 21 nt, Human
auaggugcuacaaaaacacag

SEQ ID NO: 2309016 - RNA, 15 nt, Human
auaggugcuacaaaa

SEQ ID NO: 2309017 - RNA, 13 nt, Human
auauagagauguu

SEQ ID NO: 2309018 - RNA, 14 nt, Human
auauagagauguuu

SEQ ID NO: 2309019 - RNA, 22 nt, Human
auauacuuuuuucuuauuuaac

SEQ ID NO: 2309020 - RNA, 15 nt, Human
auauagaacagugcu

SEQ ID NO: 2309021 - RNA, 11 nt, Human
auauacuuuuu

SEQ ID NO: 2309022 - RNA, 20 nt, Human
auauacuuuuuuuucuuuaa

SEQ ID NO: 2309023 - RNA, 22 nt, Human
auauagagauguuuuuaaaagu

SEQ ID NO: 2309024 - RNA, 15 nt, Human
auauagagauguuuu

SEQ ID NO: 2309025 - RNA, 16 nt, Human
auauagagauguuuuu

SEQ ID NO: 2309026 - RNA, 23 nt, Human
auauagaucaguuauaaguagca

SEQ ID NO: 2309027 - RNA, 23 nt, Human
auaguauuugagaguucuaaauu

SEQ ID NO: 2309028 - RNA, 14 nt, Human
auagucaaauugug

SEQ ID NO: 2309029 - RNA, 22 nt, Human
auauacucuagaugaaguuuua

SEQ ID NO: 2309030 - RNA, 19 nt, Human
auagucaaaccauaaacuu

SEQ ID NO: 2309031 - RNA, 20 nt, Human
auagucaaaccauaaacuuc

SEQ ID NO: 2309032 - RNA, 22 nt, Human
auagucaaaccauaaacuucau

SEQ ID NO: 2309033 - RNA, 13 nt, Human
auauacuguaaag

SEQ ID NO: 2309034 - RNA, 12 nt, Human
auauacuguaaa

SEQ ID NO: 2309035 - RNA, 11 nt, Human
auauacuguaa

SEQ ID NO: 2309036 - RNA, 10 nt, Human
auauacugua

SEQ ID NO: 2309037 - RNA, 21 nt, Human
auauacuuguggacuaaaaga

SEQ ID NO: 2309038 - RNA, 14 nt, Human
auauacuuguggac

SEQ ID NO: 2309039 - RNA, 15 nt, Human
auauacuuguggacu

SEQ ID NO: 2309040 - RNA, 24 nt, Human
auauacuguaaagaaagagagaaa

SEQ ID NO: 2309041 - RNA, 15 nt, Human
auauacuuaaaugga

SEQ ID NO: 2309042 - RNA, 23 nt, Human
auauacuguaaagaaagagagaa

SEQ ID NO: 2309043 - RNA, 22 nt, Human
auauacuguaaagaaagagaga

SEQ ID NO: 2309044 - RNA, 21 nt, Human
auauacuguaaagaaagagag

SEQ ID NO: 2309045 - RNA, 20 nt, Human
auauacuguaaagaaagaga

SEQ ID NO: 2309046 - RNA, 19 nt, Human
auauacuguaaagaaagag

SEQ ID NO: 2309047 - RNA, 18 nt, Human
auauacuguaaagaaaga

SEQ ID NO: 2309048 - RNA, 15 nt, Human
auauacuguaaagaa

SEQ ID NO: 2309049 - RNA, 14 nt, Human
auauacuguaaaga

SEQ ID NO: 2309050 - RNA, 14 nt, Human
auaaagcccuggga

SEQ ID NO: 2309051 - RNA, 20 nt, Human
auaaagcccugggaucacug

SEQ ID NO: 2309052 - RNA, 18 nt, Human
auaaagcauuuauaaauu

SEQ ID NO: 2309053 - RNA, 12 nt, Human
auaaagccacug

SEQ ID NO: 2309054 - RNA, 14 nt, Human
auaaagcauuuaua

SEQ ID NO: 2309055 - RNA, 14 nt, Human
auaaagccugcuuu

SEQ ID NO: 2309056 - RNA, 20 nt, Human
auaaagccuguuuugucuuu

SEQ ID NO: 2309057 - RNA, 16 nt, Human
auaaagccacugaaaa

SEQ ID NO: 2309058 - RNA, 23 nt, Human
auaaagcaauuuuccuugaagcc

SEQ ID NO: 2309059 - RNA, 15 nt, Human
auaaagcaggcagaa

SEQ ID NO: 2309060 - RNA, 20 nt, Human
auaaagccuuggauguauau

SEQ ID NO: 2309061 - RNA, 18 nt, Human
auaaagccuguauucuca

SEQ ID NO: 2309062 - RNA, 20 nt, Human
auaaaggaaaaaagagaagu

SEQ ID NO: 2309063 - RNA, 18 nt, Human
auaaagcuguguggcagu

SEQ ID NO: 2309064 - RNA, 13 nt, Human
auaaaggauguga

SEQ ID NO: 2309065 - RNA, 22 nt, Human
auaaaggaugugauuguggaau

SEQ ID NO: 2309066 - RNA, 21 nt, Human
auaaaggaugugauuguggaa

SEQ ID NO: 2309067 - RNA, 17 nt, Human
auaaaggaugugauugu

SEQ ID NO: 2309068 - RNA, 14 nt, Human
auaaaggaugugau

SEQ ID NO: 2309069 - RNA, 12 nt, Human
auaaagacaccu

SEQ ID NO: 2309070 - RNA, 23 nt, Human
auaaagaagcaauaaagaagagu

SEQ ID NO: 2309071 - RNA, 15 nt, Human
auaaagaacaaggua

SEQ ID NO: 2309072 - RNA, 17 nt, Human
auaaagaaauugcaaua

SEQ ID NO: 2309073 - RNA, 21 nt, Human
auaaagaacaagguaguuuuu

SEQ ID NO: 2309074 - RNA, 14 nt, Human
auaaagaagauguu

SEQ ID NO: 2309075 - RNA, 20 nt, Human
auaaagcaauuuuccuugaa

SEQ ID NO: 2309076 - RNA, 21 nt, Human
auaaagcaauuuuccuugaag

SEQ ID NO: 2309077 - RNA, 13 nt, Human
auaaagcagcguu

SEQ ID NO: 2309078 - RNA, 20 nt, Human
auaaagcagcguuucuauga

SEQ ID NO: 2309079 - RNA, 19 nt, Human
auaaagcagcguuucuaug

SEQ ID NO: 2309080 - RNA, 18 nt, Human
auaaagcagcguuucuau

SEQ ID NO: 2309081 - RNA, 14 nt, Human
auaaagcagcguuu

SEQ ID NO: 2309082 - RNA, 17 nt, Human
auaaaaagugacacagc

SEQ ID NO: 2309083 - RNA, 19 nt, Human
auaaaaagugacacagcag

SEQ ID NO: 2309084 - RNA, 20 nt, Human
auaaaaagugacacagcagc

SEQ ID NO: 2309085 - RNA, 10 nt, Human
auaaaaaguu

SEQ ID NO: 2309086 - RNA, 12 nt, Human
auaaaaaguuaa

SEQ ID NO: 2309087 - RNA, 11 nt, Human
auaaaaaguua

SEQ ID NO: 2309088 - RNA, 22 nt, Human
auaaaaauaaauuugguucuaa

SEQ ID NO: 2309089 - RNA, 14 nt, Human
auaaaaauauugug

SEQ ID NO: 2309090 - RNA, 13 nt, Human
auaaaaauaaauu

SEQ ID NO: 2309091 - RNA, 18 nt, Human
auaaaaaguuaaaaaguu

SEQ ID NO: 2309092 - RNA, 13 nt, Human
auaaaaaguuaaa

SEQ ID NO: 2309093 - RNA, 11 nt, Human
auaaaacuuuu

SEQ ID NO: 2309094 - RNA, 15 nt, Human
auaaaacuuuuuaaa

SEQ ID NO: 2309095 - RNA, 23 nt, Human
auaaacuuuuuuuugagaauggu

SEQ ID NO: 2309096 - RNA, 20 nt, Human
auaaacuuuuuucuuacugu

SEQ ID NO: 2309097 - RNA, 24 nt, Human
auaaacuuuaccuuuuuuauacau

SEQ ID NO: 2309098 - RNA, 16 nt, Human
auaaacuuuaccuuuu

SEQ ID NO: 2309099 - RNA, 21 nt, Human
auaaacuuuaccuuuuuuaua

SEQ ID NO: 2309100 - RNA, 17 nt, Human
auaaaacuuuuuaaaau

SEQ ID NO: 2309101 - RNA, 22 nt, Human
auaaaaauauuguguugugaau

SEQ ID NO: 2309102 - RNA, 16 nt, Human
auaaaaauauguacaa

SEQ ID NO: 2309103 - RNA, 15 nt, Human
auaaaagaaaaaaua

SEQ ID NO: 2309104 - RNA, 19 nt, Human
auaaauuuuuuuuguuuca

SEQ ID NO: 2309105 - RNA, 22 nt, Human
auaaauuuuuuuuguuucauau

SEQ ID NO: 2309106 - RNA, 18 nt, Human
auaaaggauuaaugucaa

SEQ ID NO: 2309107 - RNA, 20 nt, Human
auaacagugcauauuccuuu

SEQ ID NO: 2309108 - RNA, 16 nt, Human
auaacaagaucuuuca

SEQ ID NO: 2309109 - RNA, 14 nt, Human
auaacaagaucuuu

SEQ ID NO: 2309110 - RNA, 15 nt, Human
auaacaaccuggaga

SEQ ID NO: 2309111 - RNA, 19 nt, Human
auaaaggccccaaauacca

SEQ ID NO: 2309112 - RNA, 14 nt, Human
auaacaacuucaua

SEQ ID NO: 2309113 - RNA, 18 nt, Human
auaaggaaagcaauaaau

SEQ ID NO: 2309114 - RNA, 22 nt, Human
auaaggaucagaacagcagagg

SEQ ID NO: 2309115 - RNA, 20 nt, Human
auaaggaucagaacagcaga

SEQ ID NO: 2309116 - RNA, 14 nt, Human
auaaggaucagaac

SEQ ID NO: 2309117 - RNA, 19 nt, Human
auaaggccauaaaacaggu

SEQ ID NO: 2309118 - RNA, 18 nt, Human
auaaugcuguugccucau

SEQ ID NO: 2309119 - RNA, 15 nt, Human
auaaugcuacugucu

SEQ ID NO: 2309120 - RNA, 14 nt, Human
auaauguaagcucu

SEQ ID NO: 2309121 - RNA, 21 nt, Human
auaaugggauuuucuuuucuu

SEQ ID NO: 2309122 - RNA, 16 nt, Human
auaaggccuuaauaug

SEQ ID NO: 2309123 - RNA, 20 nt, Human
auaaugcgugcauaccacuu

SEQ ID NO: 2309124 - RNA, 21 nt, Human
auaaugcgugcauaccacuuu

SEQ ID NO: 2309125 - RNA, 14 nt, Human
auaauguuugcuau

SEQ ID NO: 2309126 - RNA, 12 nt, Human
auaauuaaagug

SEQ ID NO: 2309127 - RNA, 13 nt, Human
auaauuaaagugu

SEQ ID NO: 2309128 - RNA, 15 nt, Human
auaauuaaagugucc

SEQ ID NO: 2309129 - RNA, 13 nt, Human
auaauguuugcua

SEQ ID NO: 2309130 - RNA, 19 nt, Human
auaaugucucugugagacu

SEQ ID NO: 2309131 - RNA, 15 nt, Human
auaaugucucuguga

SEQ ID NO: 2309132 - RNA, 16 nt, Human
auaauuaaagugucca

SEQ ID NO: 2309133 - RNA, 20 nt, Human
auaauuaaaguguccauuga

SEQ ID NO: 2309134 - RNA, 20 nt, Human
auaauuaaauuuugaguucu

SEQ ID NO: 2309135 - RNA, 14 nt, Human
auacacacauaugu

SEQ ID NO: 2309136 - RNA, 13 nt, Human
auacacacaguua

SEQ ID NO: 2309137 - RNA, 23 nt, Human
auacacacacacacacagccaca

SEQ ID NO: 2309138 - RNA, 22 nt, Human
auacacacacacacacagccac

SEQ ID NO: 2309139 - RNA, 14 nt, Human
auaauguauuguug

SEQ ID NO: 2309140 - RNA, 11 nt, Human
auaaugucucu

SEQ ID NO: 2309141 - RNA, 23 nt, Human
auaauguuucaaacauauauaac

SEQ ID NO: 2309142 - RNA, 15 nt, Human
auaauguaagcucua

SEQ ID NO: 2309143 - RNA, 22 nt, Human
auaauguauaaagaacaaggua

SEQ ID NO: 2309144 - RNA, 18 nt, Human
auaaugggcuuagagcag

SEQ ID NO: 2309145 - RNA, 20 nt, Human
auacaccacuacauucuguu

SEQ ID NO: 2309146 - RNA, 19 nt, Human
auacaccacuacauucugu

SEQ ID NO: 2309147 - RNA, 21 nt, Human
auacaccacuacauucuguua

SEQ ID NO: 2309148 - RNA, 19 nt, Human
auacacacauaugucauau

SEQ ID NO: 2309149 - RNA, 20 nt, Human
auacacacucaaaucaagaa

SEQ ID NO: 2309150 - RNA, 18 nt, Human
auacaccacuacauucug

SEQ ID NO: 2309151 - RNA, 18 nt, Human
auacacacucaaaucaag

SEQ ID NO: 2309152 - RNA, 17 nt, Human
auacacacucaaaucaa

SEQ ID NO: 2309153 - RNA, 18 nt, Human
auaccucaaccuauggua

SEQ ID NO: 2309154 - RNA, 15 nt, Human
auaccucaaccuaug

SEQ ID NO: 2309155 - RNA, 15 nt, Human
auaccucacccugcu

SEQ ID NO: 2309156 - RNA, 17 nt, Human
auaccugucccccugac

SEQ ID NO: 2309157 - RNA, 12 nt, Human
auaccucugugu

SEQ ID NO: 2309158 - RNA, 13 nt, Human
auaccucugugug

SEQ ID NO: 2309159 - RNA, 18 nt, Human
auaccugucccccugaca

SEQ ID NO: 2309160 - RNA, 11 nt, Human
auacccacccc

SEQ ID NO: 2309161 - RNA, 18 nt, Human
auacccaaauccucucca

SEQ ID NO: 2309162 - RNA, 23 nt, Human
auacccaaauccucuccagcuau

SEQ ID NO: 2309163 - RNA, 20 nt, Human
auaccauuuuuuaaggaaac

SEQ ID NO: 2309164 - RNA, 22 nt, Human
auaccauuuuuuaaggaaacaa

SEQ ID NO: 2309165 - RNA, 14 nt, Human
auacccaaauccuc

SEQ ID NO: 2309166 - RNA, 12 nt, Human
auacccaccccc

SEQ ID NO: 2309167 - RNA, 21 nt, Human
auaccuacauguauuuguuug

SEQ ID NO: 2309168 - RNA, 17 nt, Human
auaccuacauguauuug

SEQ ID NO: 2309169 - RNA, 20 nt, Human
auaccuuccuucccugggcu

SEQ ID NO: 2309170 - RNA, 14 nt, Human
auaccucugugugc

SEQ ID NO: 2309171 - RNA, 16 nt, Human
auaccugugccucggc

SEQ ID NO: 2309172 - RNA, 15 nt, Human
agggaccuugaaggg

SEQ ID NO: 2309173 - RNA, 15 nt, Human
agggacgccuggggg

SEQ ID NO: 2309174 - RNA, 13 nt, Human
agggacgccuggg

SEQ ID NO: 2309175 - RNA, 22 nt, Human
agggacgccugggggugccagg

SEQ ID NO: 2309176 - RNA, 18 nt, Human
agggacgccugggggugc

SEQ ID NO: 2309177 - RNA, 23 nt, Human
agggacgccugggggugccagga

SEQ ID NO: 2309178 - RNA, 15 nt, Human
agggaccucucccag

SEQ ID NO: 2309179 - RNA, 13 nt, Human
agggaccucuccc

SEQ ID NO: 2309180 - RNA, 16 nt, Human
agggaccucucccagg

SEQ ID NO: 2309181 - RNA, 14 nt, Human
agggaccuugaagg

SEQ ID NO: 2309182 - RNA, 17 nt, Human
aggcugucuggccaggc

SEQ ID NO: 2309183 - RNA, 22 nt, Human
agggacagaugaaugccgugga

SEQ ID NO: 2309184 - RNA, 23 nt, Human
agggacagaggggguggccuccc

SEQ ID NO: 2309185 - RNA, 21 nt, Human
aggcuguccuuacccaucugc

SEQ ID NO: 2309186 - RNA, 19 nt, Human
aggcuguccuuacccaucu

SEQ ID NO: 2309187 - RNA, 21 nt, Human
aggcuguccuguacauugugg

SEQ ID NO: 2309188 - RNA, 15 nt, Human
aggcugucuggccag

SEQ ID NO: 2309189 - RNA, 22 nt, Human
agggacagaggggguggccucc

SEQ ID NO: 2309190 - RNA, 18 nt, Human
aggcuggugggaggggcg

SEQ ID NO: 2309191 - RNA, 15 nt, Human
aggcuguccuguaca

SEQ ID NO: 2309192 - RNA, 16 nt, Human
aggcuguccuguacau

SEQ ID NO: 2309193 - RNA, 21 nt, Human
aggcugucaauuacaggaagu

SEQ ID NO: 2309194 - RNA, 15 nt, Human
aggcuagaucaugaa

SEQ ID NO: 2309195 - RNA, 20 nt, Human
aggcuagagugcaguggcau

SEQ ID NO: 2309196 - RNA, 16 nt, Human
aggcugguggcccagg

SEQ ID NO: 2309197 - RNA, 17 nt, Human
aggcugguggcccagga

SEQ ID NO: 2309198 - RNA, 12 nt, Human
aggcugguggga

SEQ ID NO: 2309199 - RNA, 14 nt, Human
aggcuggugggagg

SEQ ID NO: 2309200 - RNA, 17 nt, Human
aggcuggugggaggggc

SEQ ID NO: 2309201 - RNA, 17 nt, Human
aggcuagauguauguac

SEQ ID NO: 2309202 - RNA, 15 nt, Human
aggcuagauguaugu

SEQ ID NO: 2309203 - RNA, 16 nt, Human
aggcuagauguaugua

SEQ ID NO: 2309204 - RNA, 13 nt, Human
aggcuguauccca

SEQ ID NO: 2309205 - RNA, 18 nt, Human
aggcuguaucccaugagc

SEQ ID NO: 2309206 - RNA, 20 nt, Human
aggcugucaauuacaggaag

SEQ ID NO: 2309207 - RNA, 22 nt, Human
aggcugguucggauuuggggug

SEQ ID NO: 2309208 - RNA, 13 nt, Human
aggcccuuccucu

SEQ ID NO: 2309209 - RNA, 15 nt, Human
aggcccuuccucucc

SEQ ID NO: 2309210 - RNA, 17 nt, Human
aggcccuuccucuccac

SEQ ID NO: 2309211 - RNA, 18 nt, Human
aggcccuuccucuccacu

SEQ ID NO: 2309212 - RNA, 20 nt, Human
aggcccuucucuccagcccc

SEQ ID NO: 2309213 - RNA, 21 nt, Human
aggcccuucucuccagccccu

SEQ ID NO: 2309214 - RNA, 22 nt, Human
aggcccuuauuuucaagaaacu

SEQ ID NO: 2309215 - RNA, 20 nt, Human
aggcccuuauuuucaagaaa

SEQ ID NO: 2309216 - RNA, 16 nt, Human
aggcccuuauuuucaa

SEQ ID NO: 2309217 - RNA, 19 nt, Human
aggccgagaagcaagaaag

SEQ ID NO: 2309218 - RNA, 15 nt, Human
aggccgagaagcaag

SEQ ID NO: 2309219 - RNA, 17 nt, Human
aggccgagaagccagug

SEQ ID NO: 2309220 - RNA, 16 nt, Human
aggccgagaagccagu

SEQ ID NO: 2309221 - RNA, 12 nt, Human
aggccgcagcuc

SEQ ID NO: 2309222 - RNA, 13 nt, Human
aggccgcagcucu

SEQ ID NO: 2309223 - RNA, 16 nt, Human
aggccgcagcucuugc

SEQ ID NO: 2309224 - RNA, 14 nt, Human
aggccgaagcucug

SEQ ID NO: 2309225 - RNA, 15 nt, Human
aggccgaagcucugg

SEQ ID NO: 2309226 - RNA, 16 nt, Human
aggccgaagcucuggc

SEQ ID NO: 2309227 - RNA, 17 nt, Human
aggccgaagcucuggcu

SEQ ID NO: 2309228 - RNA, 19 nt, Human
aggccgaagcucuggcuga

SEQ ID NO: 2309229 - RNA, 23 nt, Human
aggccgaagcucuggcugaaccc

SEQ ID NO: 2309230 - RNA, 24 nt, Human
aggccgaagcucuggcugaacccu

SEQ ID NO: 2309231 - RNA, 17 nt, Human
aggccgcagcucuugcc

SEQ ID NO: 2309232 - RNA, 18 nt, Human
aggccgcagcucuugccc

SEQ ID NO: 2309233 - RNA, 22 nt, Human
aggccgaagaaggguccuuccc

SEQ ID NO: 2309234 - RNA, 18 nt, Human
aggccgaagaaggguccu

SEQ ID NO: 2309235 - RNA, 17 nt, Human
aggccgaagaagggucc

SEQ ID NO: 2309236 - RNA, 16 nt, Human
aggcccuuuccucagg

SEQ ID NO: 2309237 - RNA, 17 nt, Human
aggcccuuuccucaggc

SEQ ID NO: 2309238 - RNA, 22 nt, Human
aggcccuucucuccagccccug

SEQ ID NO: 2309239 - RNA, 23 nt, Human
aggcccuucucuccagccccugg

SEQ ID NO: 2309240 - RNA, 13 nt, Human
aggcgugaggaug

SEQ ID NO: 2309241 - RNA, 14 nt, Human
aggcgugaggaugg

SEQ ID NO: 2309242 - RNA, 21 nt, Human
aggcgugagccaccgugccug

SEQ ID NO: 2309243 - RNA, 21 nt, Human
aggcgucuguauauuuuggga

SEQ ID NO: 2309244 - RNA, 18 nt, Human
aggcgucuguauauuuug

SEQ ID NO: 2309245 - RNA, 19 nt, Human
aggcguucuucgaggugga

SEQ ID NO: 2309246 - RNA, 15 nt, Human
aggcguggagcugcc

SEQ ID NO: 2309247 - RNA, 16 nt, Human
aggcguggagcugccu

SEQ ID NO: 2309248 - RNA, 17 nt, Human
aggcguggagcugccug

SEQ ID NO: 2309249 - RNA, 18 nt, Human
aggcguggagcugccuga

SEQ ID NO: 2309250 - RNA, 18 nt, Human
aggcguucuucgaggugg

SEQ ID NO: 2309251 - RNA, 23 nt, Human
aggcuacuguaaggcaaucaugg

SEQ ID NO: 2309252 - RNA, 17 nt, Human
aggcuacugucagcucc

SEQ ID NO: 2309253 - RNA, 21 nt, Human
aggcuagaaccaccugccuau

SEQ ID NO: 2309254 - RNA, 21 nt, Human
aggcuaaacauccaauauuuu

SEQ ID NO: 2309255 - RNA, 13 nt, Human
aggcuaaacaucc

SEQ ID NO: 2309256 - RNA, 19 nt, Human
aggcuagaaccuggcaagc

SEQ ID NO: 2309257 - RNA, 13 nt, Human
agggucaggaagg

SEQ ID NO: 2309258 - RNA, 22 nt, Human
agggucaggaaggaugagcauu

SEQ ID NO: 2309259 - RNA, 21 nt, Human
agggucaggaaggaugagcau

SEQ ID NO: 2309260 - RNA, 21 nt, Human
agggucagagaggagucagag

SEQ ID NO: 2309261 - RNA, 13 nt, Human
agggucagagagg

SEQ ID NO: 2309262 - RNA, 21 nt, Human
agggucagacgccugaggaac

SEQ ID NO: 2309263 - RNA, 22 nt, Human
agggucauaucacucaggcccu

SEQ ID NO: 2309264 - RNA, 15 nt, Human
agggucaggagaggg

SEQ ID NO: 2309265 - RNA, 14 nt, Human
agggucaggagagg

SEQ ID NO: 2309266 - RNA, 18 nt, Human
agggucaggagaggggca

SEQ ID NO: 2309267 - RNA, 19 nt, Human
aggguaucaggugcugcca

SEQ ID NO: 2309268 - RNA, 23 nt, Human
aggggccuaggccucagccagag

SEQ ID NO: 2309269 - RNA, 19 nt, Human
aggggccuaggccucagcc

SEQ ID NO: 2309270 - RNA, 16 nt, Human
aggggccuaggccuca

SEQ ID NO: 2309271 - RNA, 18 nt, Human
aggguaucaggugcugcc

SEQ ID NO: 2309272 - RNA, 21 nt, Human
aggguaucaggugcugccauc

SEQ ID NO: 2309273 - RNA, 15 nt, Human
aggguaucuggugac

SEQ ID NO: 2309274 - RNA, 19 nt, Human
aggggccucuuaugggcug

SEQ ID NO: 2309275 - RNA, 20 nt, Human
aggggccucuuaugggcugg

SEQ ID NO: 2309276 - RNA, 21 nt, Human
aggggccucuuaugggcuggg

SEQ ID NO: 2309277 - RNA, 23 nt, Human
aggguccacaggaagugaagaau

SEQ ID NO: 2309278 - RNA, 12 nt, Human
agggucccaagc

SEQ ID NO: 2309279 - RNA, 13 nt, Human
agggucccaagcu

SEQ ID NO: 2309280 - RNA, 17 nt, Human
agggucccaagcugggc

SEQ ID NO: 2309281 - RNA, 18 nt, Human
aggguccccaccugggac

SEQ ID NO: 2309282 - RNA, 12 nt, Human
agggucccucug

SEQ ID NO: 2309283 - RNA, 18 nt, Human
agggucccaagcugggcc

SEQ ID NO: 2309284 - RNA, 19 nt, Human
agggucccaagcugggccc

SEQ ID NO: 2309285 - RNA, 20 nt, Human
agggucccauuucucacuga

SEQ ID NO: 2309286 - RNA, 15 nt, Human
aggguccccaccugg

SEQ ID NO: 2309287 - RNA, 11 nt, Human
agggucccugg

SEQ ID NO: 2309288 - RNA, 14 nt, Human
agggucccucugug

SEQ ID NO: 2309289 - RNA, 15 nt, Human
agggucccucugugu

SEQ ID NO: 2309290 - RNA, 18 nt, Human
agggucccucuguguauu

SEQ ID NO: 2309291 - RNA, 20 nt, Human
agggucccucuguguauuug

SEQ ID NO: 2309292 - RNA, 12 nt, Human
agggucccuggg

SEQ ID NO: 2309293 - RNA, 17 nt, Human
aggguccuggcuccuga

SEQ ID NO: 2309294 - RNA, 20 nt, Human
aggguccuggcuccugaggg

SEQ ID NO: 2309295 - RNA, 19 nt, Human
aggguccuggcuccugagg

SEQ ID NO: 2309296 - RNA, 15 nt, Human
aggguccuggggaac

SEQ ID NO: 2309297 - RNA, 12 nt, Human
aggguccugggg

SEQ ID NO: 2309298 - RNA, 17 nt, Human
aggguccuucccucucc

SEQ ID NO: 2309299 - RNA, 16 nt, Human
aggguccuucccucuc

SEQ ID NO: 2309300 - RNA, 21 nt, Human
aggguccuggcuccugagggg

SEQ ID NO: 2309301 - RNA, 14 nt, Human
aggguccuucccuc

SEQ ID NO: 2309302 - RNA, 23 nt, Human
aggguccuggggaaccugacccc

SEQ ID NO: 2309303 - RNA, 21 nt, Human
aggguccuggggaaccugacc

SEQ ID NO: 2309304 - RNA, 20 nt, Human
agguggagguugcagugagc

SEQ ID NO: 2309305 - RNA, 20 nt, Human
agguggaggcugcagugagc

SEQ ID NO: 2309306 - RNA, 17 nt, Human
agguggaucaccugagg

SEQ ID NO: 2309307 - RNA, 16 nt, Human
agguggaucacagagg

SEQ ID NO: 2309308 - RNA, 14 nt, Human
agguggacacacaa

SEQ ID NO: 2309309 - RNA, 16 nt, Human
agguggacuggaaggg

SEQ ID NO: 2309310 - RNA, 11 nt, Human
agguggagcaa

SEQ ID NO: 2309311 - RNA, 18 nt, Human
agguggagcaaagugagg

SEQ ID NO: 2309312 - RNA, 12 nt, Human
agguguuuauac

SEQ ID NO: 2309313 - RNA, 14 nt, Human
agguguuuauacag

SEQ ID NO: 2309314 - RNA, 24 nt, Human
agguuaaggcugaggaaaggccag

SEQ ID NO: 2309315 - RNA, 17 nt, Human
agguuaaggcugaggaa

SEQ ID NO: 2309316 - RNA, 16 nt, Human
agguuaaggcugagga

SEQ ID NO: 2309317 - RNA, 16 nt, Human
agguuacaacagauuu

SEQ ID NO: 2309318 - RNA, 19 nt, Human
agguuacaacagauuugug

SEQ ID NO: 2309319 - RNA, 21 nt, Human
agguuacaagccugcacaaua

SEQ ID NO: 2309320 - RNA, 15 nt, Human
agguuacaagccugc

SEQ ID NO: 2309321 - RNA, 21 nt, Human
agguuacaacagauuugugaa

SEQ ID NO: 2309322 - RNA, 22 nt, Human
agguuacaacagauuugugaac

SEQ ID NO: 2309323 - RNA, 23 nt, Human
agguuacaacagauuugugaacu

SEQ ID NO: 2309324 - RNA, 24 nt, Human
agguuacaacagauuugugaacuc

SEQ ID NO: 2309325 - RNA, 22 nt, Human
agguuaaaaaaaggcauuguuu

SEQ ID NO: 2309326 - RNA, 21 nt, Human
agguggaagcccuccuuccac

SEQ ID NO: 2309327 - RNA, 20 nt, Human
agguggaagcccuccuucca

SEQ ID NO: 2309328 - RNA, 19 nt, Human
agguggaagcccuccuucc

SEQ ID NO: 2309329 - RNA, 17 nt, Human
agguggaagcccuccuu

SEQ ID NO: 2309330 - RNA, 15 nt, Human
aggugcucauuggcu

SEQ ID NO: 2309331 - RNA, 18 nt, Human
aggugcucacaccccauu

SEQ ID NO: 2309332 - RNA, 21 nt, Human
agguggaauuauuuuaaaaga

SEQ ID NO: 2309333 - RNA, 17 nt, Human
agguggaauuauuuuaa

SEQ ID NO: 2309334 - RNA, 16 nt, Human
aggucuucagccauca

SEQ ID NO: 2309335 - RNA, 20 nt, Human
aggugcuacacccuuuucca

SEQ ID NO: 2309336 - RNA, 22 nt, Human
agguaacagaacagcuucaggu

SEQ ID NO: 2309337 - RNA, 21 nt, Human
aggugcuacacccuuuuccag

SEQ ID NO: 2309338 - RNA, 23 nt, Human
aggugcuaggaacacuccuucac

SEQ ID NO: 2309339 - RNA, 19 nt, Human
aggugcuaggaacacuccu

SEQ ID NO: 2309340 - RNA, 22 nt, Human
aggugcuaggaacacuccuuca

SEQ ID NO: 2309341 - RNA, 24 nt, Human
aggugcuacaaaaacacagcaagg

SEQ ID NO: 2309342 - RNA, 23 nt, Human
aggugcuacaaaaacacagcaag

SEQ ID NO: 2309343 - RNA, 12 nt, Human
agguuccucugc

SEQ ID NO: 2309344 - RNA, 23 nt, Human
agguucccuuugacgccauccca

SEQ ID NO: 2309345 - RNA, 23 nt, Human
agguuccgcuuggagcagagggg

SEQ ID NO: 2309346 - RNA, 21 nt, Human
agguuccgcuuggagcagagg

SEQ ID NO: 2309347 - RNA, 18 nt, Human
agguuccgcuuggagcag

SEQ ID NO: 2309348 - RNA, 19 nt, Human
agguuauuuuaguuucugu

SEQ ID NO: 2309349 - RNA, 20 nt, Human
agguuauuuuaguuucuguu

SEQ ID NO: 2309350 - RNA, 19 nt, Human
agguuauaggucacuccug

SEQ ID NO: 2309351 - RNA, 14 nt, Human
agguuaucgaaaua

SEQ ID NO: 2309352 - RNA, 17 nt, Human
agguuauaggucacucc

SEQ ID NO: 2309353 - RNA, 14 nt, Human
agguuauaggucac

SEQ ID NO: 2309354 - RNA, 16 nt, Human
agguuaucugucccag

SEQ ID NO: 2309355 - RNA, 17 nt, Human
agguuaucgaaauaaca

SEQ ID NO: 2309356 - RNA, 18 nt, Human
agguuaucgaaauaacaa

SEQ ID NO: 2309357 - RNA, 19 nt, Human
agguuaucgaaauaacaau

SEQ ID NO: 2309358 - RNA, 20 nt, Human
agguuaucgaaauaacaaug

SEQ ID NO: 2309359 - RNA, 17 nt, Human
agguuacccuguaacau

SEQ ID NO: 2309360 - RNA, 15 nt, Human
agguuaccaagaagc

SEQ ID NO: 2309361 - RNA, 16 nt, Human
agguuaccaagaagcc

SEQ ID NO: 2309362 - RNA, 21 nt, Human
agguuacccuguaacaugcaa

SEQ ID NO: 2309363 - RNA, 21 nt, Human
agguuaggaguucgagaccag

SEQ ID NO: 2309364 - RNA, 18 nt, Human
agguuagaaccuagaagg

SEQ ID NO: 2309365 - RNA, 20 nt, Human
agguuagaaccuagaagggc

SEQ ID NO: 2309366 - RNA, 22 nt, Human
agguuagauuuuguauucaggg

SEQ ID NO: 2309367 - RNA, 18 nt, Human
agguuaggauuuaacagu

SEQ ID NO: 2309368 - RNA, 15 nt, Human
agguucaaagauauu

SEQ ID NO: 2309369 - RNA, 17 nt, Human
agguuaucugucccagg

SEQ ID NO: 2309370 - RNA, 15 nt, Human
agguuauuuauuuaa

SEQ ID NO: 2309371 - RNA, 16 nt, Human
agguuauuuauuuaaa

SEQ ID NO: 2309372 - RNA, 17 nt, Human
agguuauuuuaguuucu

SEQ ID NO: 2309373 - RNA, 14 nt, Human
agguucaaagauau

SEQ ID NO: 2309374 - RNA, 22 nt, Human
agguucccuuugacgccauccc

SEQ ID NO: 2309375 - RNA, 13 nt, Human
agguucccuuuga

SEQ ID NO: 2309376 - RNA, 14 nt, Human
aggucugcucggcc

SEQ ID NO: 2309377 - RNA, 22 nt, Human
aggucuggagaagcucccagga

SEQ ID NO: 2309378 - RNA, 18 nt, Human
aggugcuacaaaaacaca

SEQ ID NO: 2309379 - RNA, 23 nt, Human
aggucuguucuuuccaaaguaca

SEQ ID NO: 2309380 - RNA, 22 nt, Human
aggucuguucuuuccaaaguac

SEQ ID NO: 2309381 - RNA, 22 nt, Human
aggugcuacaaaaacacagcaa

SEQ ID NO: 2309382 - RNA, 21 nt, Human
aggugcuacaaaaacacagca

SEQ ID NO: 2309383 - RNA, 20 nt, Human
aggugcuacaaaaacacagc

SEQ ID NO: 2309384 - RNA, 19 nt, Human
aggugcuacaaaaacacag

SEQ ID NO: 2309385 - RNA, 21 nt, Human
aggucugaaauggagguccuu

SEQ ID NO: 2309386 - RNA, 15 nt, Human
aggucugaaauggag

SEQ ID NO: 2309387 - RNA, 13 nt, Human
aggucugaaaugg

SEQ ID NO: 2309388 - RNA, 16 nt, Human
aggucucuugagggag

SEQ ID NO: 2309389 - RNA, 15 nt, Human
aggucucuugaggga

SEQ ID NO: 2309390 - RNA, 15 nt, Human
aggucucuuccccuc

SEQ ID NO: 2309391 - RNA, 12 nt, Human
aggucucuuccc

SEQ ID NO: 2309392 - RNA, 13 nt, Human
aggucucuucccc

SEQ ID NO: 2309393 - RNA, 15 nt, Human
aggucucugccggcu

SEQ ID NO: 2309394 - RNA, 16 nt, Human
aggucucugccggcuc

SEQ ID NO: 2309395 - RNA, 19 nt, Human
aggucucugccggcucuuu

SEQ ID NO: 2309396 - RNA, 16 nt, Human
aggucucuuccccucu

SEQ ID NO: 2309397 - RNA, 20 nt, Human
aggucugacacgucugccua

SEQ ID NO: 2309398 - RNA, 18 nt, Human
aggucuguucuuuccaaa

SEQ ID NO: 2309399 - RNA, 12 nt, Human
agguacacucuu

SEQ ID NO: 2309400 - RNA, 16 nt, Human
agguacacagcucuag

SEQ ID NO: 2309401 - RNA, 16 nt, Human
aggucccuaauaaagc

SEQ ID NO: 2309402 - RNA, 17 nt, Human
aggucucgcugaugcug

SEQ ID NO: 2309403 - RNA, 19 nt, Human
aggucucgcugaugcuggg

SEQ ID NO: 2309404 - RNA, 20 nt, Human
aggucucgcugaugcugggc

SEQ ID NO: 2309405 - RNA, 21 nt, Human
aggucucgcugaugcugggcu

SEQ ID NO: 2309406 - RNA, 22 nt, Human
aggucucgcugaugcugggcug

SEQ ID NO: 2309407 - RNA, 23 nt, Human
aggucucgcugaugcugggcugg

SEQ ID NO: 2309408 - RNA, 21 nt, Human
aggucucggacuaagccuacc

SEQ ID NO: 2309409 - RNA, 13 nt, Human
aggucccuaauaa

SEQ ID NO: 2309410 - RNA, 15 nt, Human
aggucccuaauaaag

SEQ ID NO: 2309411 - RNA, 16 nt, Human
agguaaugugaauaaa

SEQ ID NO: 2309412 - RNA, 16 nt, Human
agguaauuucuugugc

SEQ ID NO: 2309413 - RNA, 17 nt, Human
agguaaugagggacugg

SEQ ID NO: 2309414 - RNA, 13 nt, Human
agguaaugaggga

SEQ ID NO: 2309415 - RNA, 14 nt, Human
agguaaugagggac

SEQ ID NO: 2309416 - RNA, 17 nt, Human
agguacaaccuguucug

SEQ ID NO: 2309417 - RNA, 19 nt, Human
agguaauuucuugugccuc

SEQ ID NO: 2309418 - RNA, 12 nt, Human
aggucccuaaua

SEQ ID NO: 2309419 - RNA, 11 nt, Human
aggucccuaau

SEQ ID NO: 2309420 - RNA, 21 nt, Human
agguaaucgaccugccucggc

SEQ ID NO: 2309421 - RNA, 18 nt, Human
agguaacagaacagcuuc

SEQ ID NO: 2309422 - RNA, 19 nt, Human
agguaacagaacagcuuca

SEQ ID NO: 2309423 - RNA, 21 nt, Human
agguaacagaacagcuucagg

SEQ ID NO: 2309424 - RNA, 19 nt, Human
agguaaucgaccugccucg

SEQ ID NO: 2309425 - RNA, 13 nt, Human
agguaacagaaca

SEQ ID NO: 2309426 - RNA, 14 nt, Human
agguaacagaacag

SEQ ID NO: 2309427 - RNA, 15 nt, Human
agguaacagaacagc

SEQ ID NO: 2309428 - RNA, 17 nt, Human
agguaacagaacagcuu

SEQ ID NO: 2309429 - RNA, 14 nt, Human
agguaaacaguucu

SEQ ID NO: 2309430 - RNA, 14 nt, Human
agguaaacuccugu

SEQ ID NO: 2309431 - RNA, 15 nt, Human
agguaaacuccuguc

SEQ ID NO: 2309432 - RNA, 23 nt, Human
agguaaaucagacuaugaaguuu

SEQ ID NO: 2309433 - RNA, 19 nt, Human
agguaaaauugaaaggcau

SEQ ID NO: 2309434 - RNA, 13 nt, Human
agguaaacaguuc

SEQ ID NO: 2309435 - RNA, 18 nt, Human
agguaaaucagacuauga

SEQ ID NO: 2309436 - RNA, 17 nt, Human
agguaaaagugugagca

SEQ ID NO: 2309437 - RNA, 20 nt, Human
agguaaaagcaucacaugaa

SEQ ID NO: 2309438 - RNA, 23 nt, Human
agcuuccauuccaagccugacca

SEQ ID NO: 2309439 - RNA, 17 nt, Human
agcuuccccucucuccu

SEQ ID NO: 2309440 - RNA, 22 nt, Human
agcuucccccccaccacaggcc

SEQ ID NO: 2309441 - RNA, 20 nt, Human
agcuucccccccaccacagg

SEQ ID NO: 2309442 - RNA, 22 nt, Human
agcuuccuacccacaccucugc

SEQ ID NO: 2309443 - RNA, 23 nt, Human
agcuucccucccguguguucucc

SEQ ID NO: 2309444 - RNA, 17 nt, Human
agcuuccaguccaaucu

SEQ ID NO: 2309445 - RNA, 22 nt, Human
agcuuccaugauucuauuuaua

SEQ ID NO: 2309446 - RNA, 19 nt, Human
agcuucuguugcugccuca

SEQ ID NO: 2309447 - RNA, 20 nt, Human
agcuucugguacucuccuag

SEQ ID NO: 2309448 - RNA, 21 nt, Human
agcuucugguacucuccuaga

SEQ ID NO: 2309449 - RNA, 23 nt, Human
agcuucugguacucuccuagaga

SEQ ID NO: 2309450 - RNA, 12 nt, Human
agcuucuguccu

SEQ ID NO: 2309451 - RNA, 22 nt, Human
agcuucuggugaccuuccaaga

SEQ ID NO: 2309452 - RNA, 21 nt, Human
agcuucuggugaccuuccaag

SEQ ID NO: 2309453 - RNA, 20 nt, Human
agcuucugcuuuucugcccu

SEQ ID NO: 2309454 - RNA, 21 nt, Human
agcuucugcuuuucugcccug

SEQ ID NO: 2309455 - RNA, 23 nt, Human
agcuucugcuuuucugcccuggc

SEQ ID NO: 2309456 - RNA, 22 nt, Human
agcuucugcuuuucugcccugg

SEQ ID NO: 2309457 - RNA, 14 nt, Human
agcuucugguacuc

SEQ ID NO: 2309458 - RNA, 15 nt, Human
agcuucugguacucu

SEQ ID NO: 2309459 - RNA, 16 nt, Human
agcuucugguacucuc

SEQ ID NO: 2309460 - RNA, 17 nt, Human
agcuucugguacucucc

SEQ ID NO: 2309461 - RNA, 19 nt, Human
agcuucugguacucuccua

SEQ ID NO: 2309462 - RNA, 21 nt, Human
agcugcucagggaaaagcagc

SEQ ID NO: 2309463 - RNA, 23 nt, Human
agcugcucacuaccuccucaggg

SEQ ID NO: 2309464 - RNA, 16 nt, Human
agcugcucagggaaaa

SEQ ID NO: 2309465 - RNA, 23 nt, Human
agcugcgguccacccaggagccc

SEQ ID NO: 2309466 - RNA, 11 nt, Human
agcugcuacaa

SEQ ID NO: 2309467 - RNA, 13 nt, Human
agcugcuacaaag

SEQ ID NO: 2309468 - RNA, 14 nt, Human
agcugcuacaaaga

SEQ ID NO: 2309469 - RNA, 15 nt, Human
agcugcuacaaagaa

SEQ ID NO: 2309470 - RNA, 22 nt, Human
agcugcuacaaagaagacaugu

SEQ ID NO: 2309471 - RNA, 20 nt, Human
agcugcuacaaagaagacau

SEQ ID NO: 2309472 - RNA, 21 nt, Human
agcugcuacaaagaagacaug

SEQ ID NO: 2309473 - RNA, 16 nt, Human
agcugcuacaaagaag

SEQ ID NO: 2309474 - RNA, 17 nt, Human
agcugcuacaaagaaga

SEQ ID NO: 2309475 - RNA, 18 nt, Human
agcugcuacaaagaagac

SEQ ID NO: 2309476 - RNA, 19 nt, Human
agcugcuacaaagaagaca

SEQ ID NO: 2309477 - RNA, 16 nt, Human
agcugcuauagccugg

SEQ ID NO: 2309478 - RNA, 15 nt, Human
agcugcuauagccug

SEQ ID NO: 2309479 - RNA, 21 nt, Human
agcugcuauagccuggggugg

SEQ ID NO: 2309480 - RNA, 18 nt, Human
agcugaaauaugcuggcu

SEQ ID NO: 2309481 - RNA, 12 nt, Human
agcugaaaauau

SEQ ID NO: 2309482 - RNA, 23 nt, Human
agcugaaaaaucacauccuggcc

SEQ ID NO: 2309483 - RNA, 22 nt, Human
agcugaaaaccuaaguccuuua

SEQ ID NO: 2309484 - RNA, 19 nt, Human
agcugaaaaaucacauccu

SEQ ID NO: 2309485 - RNA, 21 nt, Human
agcugaaaaaucacauccugg

SEQ ID NO: 2309486 - RNA, 22 nt, Human
agcugaaaaaucacauccuggc

SEQ ID NO: 2309487 - RNA, 20 nt, Human
agcugaaauaugcuggcugg

SEQ ID NO: 2309488 - RNA, 12 nt, Human
agcugaaauacu

SEQ ID NO: 2309489 - RNA, 13 nt, Human
agcugaaaugcug

SEQ ID NO: 2309490 - RNA, 20 nt, Human
agcugaaaugcugcauuuua

SEQ ID NO: 2309491 - RNA, 16 nt, Human
agcugaaaugcugcau

SEQ ID NO: 2309492 - RNA, 18 nt, Human
agcugaaaugcugcauuu

SEQ ID NO: 2309493 - RNA, 22 nt, Human
agcugaacaauaggcuguuccc

SEQ ID NO: 2309494 - RNA, 21 nt, Human
agcugaacaauaggcuguucc

SEQ ID NO: 2309495 - RNA, 15 nt, Human
agcugagcagggaga

SEQ ID NO: 2309496 - RNA, 13 nt, Human
agcugagcaggga

SEQ ID NO: 2309497 - RNA, 15 nt, Human
agcugagcaccaggg

SEQ ID NO: 2309498 - RNA, 14 nt, Human
agcugagagacuuu

SEQ ID NO: 2309499 - RNA, 21 nt, Human
agcugcgguccacccaggagc

SEQ ID NO: 2309500 - RNA, 14 nt, Human
agcugagcaggugu

SEQ ID NO: 2309501 - RNA, 23 nt, Human
agcugagauuauaggcaccuacc

SEQ ID NO: 2309502 - RNA, 16 nt, Human
agcugagagaaaauaa

SEQ ID NO: 2309503 - RNA, 15 nt, Human
agcugagagacuuuu

SEQ ID NO: 2309504 - RNA, 12 nt, Human
agcuccuucugu

SEQ ID NO: 2309505 - RNA, 15 nt, Human
agcuccuagcagaga

SEQ ID NO: 2309506 - RNA, 14 nt, Human
agcuccguggagca

SEQ ID NO: 2309507 - RNA, 15 nt, Human
agcuccguggagcag

SEQ ID NO: 2309508 - RNA, 13 nt, Human
agcuccuucuguc

SEQ ID NO: 2309509 - RNA, 19 nt, Human
agcuccuuccuggagacug

SEQ ID NO: 2309510 - RNA, 15 nt, Human
agcuccuuccuggag

SEQ ID NO: 2309511 - RNA, 13 nt, Human
agcuccuuccugg

SEQ ID NO: 2309512 - RNA, 20 nt, Human
agcuccgcuuucuacccagc

SEQ ID NO: 2309513 - RNA, 21 nt, Human
agcuccgcuuucuacccagcg

SEQ ID NO: 2309514 - RNA, 23 nt, Human
agcuccgcuuucuacccagcgag

SEQ ID NO: 2309515 - RNA, 17 nt, Human
agcuccgccucccgggu

SEQ ID NO: 2309516 - RNA, 17 nt, Human
agcuccuagcagagaga

SEQ ID NO: 2309517 - RNA, 14 nt, Human
agcucccucugccu

SEQ ID NO: 2309518 - RNA, 13 nt, Human
agcucccucugcc

SEQ ID NO: 2309519 - RNA, 16 nt, Human
agcucccuucucugua

SEQ ID NO: 2309520 - RNA, 23 nt, Human
agcucccuucucuguagggaacu

SEQ ID NO: 2309521 - RNA, 13 nt, Human
agcucccuucucu

SEQ ID NO: 2309522 - RNA, 14 nt, Human
agcucccuucucug

SEQ ID NO: 2309523 - RNA, 15 nt, Human
agcucccuaggagac

SEQ ID NO: 2309524 - RNA, 17 nt, Human
agcucccuaggagacca

SEQ ID NO: 2309525 - RNA, 22 nt, Human
agcuccccucggagaagagcug

SEQ ID NO: 2309526 - RNA, 13 nt, Human
aggacccagaccc

SEQ ID NO: 2309527 - RNA, 14 nt, Human
aggacccagaccca

SEQ ID NO: 2309528 - RNA, 15 nt, Human
aggacccagacccag

SEQ ID NO: 2309529 - RNA, 15 nt, Human
aggacccagaggaag

SEQ ID NO: 2309530 - RNA, 13 nt, Human
aggacccagagga

SEQ ID NO: 2309531 - RNA, 12 nt, Human
aggacccagacc

SEQ ID NO: 2309532 - RNA, 12 nt, Human
aggacccuuccc

SEQ ID NO: 2309533 - RNA, 13 nt, Human
aggacccuucccu

SEQ ID NO: 2309534 - RNA, 20 nt, Human
aggacccuucccuugagccc

SEQ ID NO: 2309535 - RNA, 18 nt, Human
aggacccaucacgccugu

SEQ ID NO: 2309536 - RNA, 20 nt, Human
aggacccaucacgccugugc

SEQ ID NO: 2309537 - RNA, 18 nt, Human
aggacccagacccagugg

SEQ ID NO: 2309538 - RNA, 13 nt, Human
agcuuuugcuuuu

SEQ ID NO: 2309539 - RNA, 14 nt, Human
agcuuuuuaauugu

SEQ ID NO: 2309540 - RNA, 15 nt, Human
agcuuuuuaauuguu

SEQ ID NO: 2309541 - RNA, 19 nt, Human
agcuuuuuccagaggcuau

SEQ ID NO: 2309542 - RNA, 22 nt, Human
agcuuuuuauuccuccugcuca

SEQ ID NO: 2309543 - RNA, 17 nt, Human
agcuuuuuaauuguugu

SEQ ID NO: 2309544 - RNA, 21 nt, Human
agcuuuuuaauuguuguuucu

SEQ ID NO: 2309545 - RNA, 21 nt, Human
agcuuuucccuuuuuuuaagu

SEQ ID NO: 2309546 - RNA, 18 nt, Human
agcuuuugaauaaaaacu

SEQ ID NO: 2309547 - RNA, 14 nt, Human
agcuuuuccucccu

SEQ ID NO: 2309548 - RNA, 13 nt, Human
agcuuuuugucuu

SEQ ID NO: 2309549 - RNA, 22 nt, Human
agcuuuuuaauuguuguuucuu

SEQ ID NO: 2309550 - RNA, 21 nt, Human
aggaauccacucccaggcagc

SEQ ID NO: 2309551 - RNA, 16 nt, Human
aggaauccacucccag

SEQ ID NO: 2309552 - RNA, 17 nt, Human
aggaauccacucccagg

SEQ ID NO: 2309553 - RNA, 20 nt, Human
aggaauccagacccggcugc

SEQ ID NO: 2309554 - RNA, 17 nt, Human
aggaauccagacccggc

SEQ ID NO: 2309555 - RNA, 21 nt, Human
aggaaucaugugccaagcaga

SEQ ID NO: 2309556 - RNA, 13 nt, Human
aggauggagagag

SEQ ID NO: 2309557 - RNA, 19 nt, Human
aggauggaacacggccaca

SEQ ID NO: 2309558 - RNA, 17 nt, Human
aggauggagagagggga

SEQ ID NO: 2309559 - RNA, 16 nt, Human
aggauggagagagggg

SEQ ID NO: 2309560 - RNA, 15 nt, Human
aggauggagagaggg

SEQ ID NO: 2309561 - RNA, 14 nt, Human
aggauggagagagg

SEQ ID NO: 2309562 - RNA, 14 nt, Human
aggauggaacacgg

SEQ ID NO: 2309563 - RNA, 17 nt, Human
aggaguucaaugaucua

SEQ ID NO: 2309564 - RNA, 18 nt, Human
aggaguucaaugaucuag

SEQ ID NO: 2309565 - RNA, 13 nt, Human
aggaguucaauga

SEQ ID NO: 2309566 - RNA, 14 nt, Human
aggaguucaaugau

SEQ ID NO: 2309567 - RNA, 15 nt, Human
aggaguucaaugauc

SEQ ID NO: 2309568 - RNA, 16 nt, Human
aggaguucaaugaucu

SEQ ID NO: 2309569 - RNA, 21 nt, Human
aggauguaaacagugccugcu

SEQ ID NO: 2309570 - RNA, 20 nt, Human
aggauguaaacagugccugc

SEQ ID NO: 2309571 - RNA, 22 nt, Human
aggauguaaacagugccugcug

SEQ ID NO: 2309572 - RNA, 19 nt, Human
aggauguaaacagugccug

SEQ ID NO: 2309573 - RNA, 18 nt, Human
aggauguaaacagugccu

SEQ ID NO: 2309574 - RNA, 19 nt, Human
aggauggagagaggggaau

SEQ ID NO: 2309575 - RNA, 17 nt, Human
aggauggagccagcucu

SEQ ID NO: 2309576 - RNA, 23 nt, Human
aggaugguucccuugaugaagaa

SEQ ID NO: 2309577 - RNA, 15 nt, Human
aggauguucugggac

SEQ ID NO: 2309578 - RNA, 16 nt, Human
aggauguucugggaca

SEQ ID NO: 2309579 - RNA, 22 nt, Human
aggauguacaaggacagccccu

SEQ ID NO: 2309580 - RNA, 22 nt, Human
aggauguucuagcauggcugcc

SEQ ID NO: 2309581 - RNA, 14 nt, Human
aggauuauuggaaa

SEQ ID NO: 2309582 - RNA, 16 nt, Human
aggauuacaugcaugu

SEQ ID NO: 2309583 - RNA, 18 nt, Human
aggaugucacagggccaa

SEQ ID NO: 2309584 - RNA, 14 nt, Human
aggauguuuuucau

SEQ ID NO: 2309585 - RNA, 20 nt, Human
aggauuaaauaauguaaaua

SEQ ID NO: 2309586 - RNA, 18 nt, Human
aggauguucugggacaca

SEQ ID NO: 2309587 - RNA, 14 nt, Human
aggauuaaauaaug

SEQ ID NO: 2309588 - RNA, 15 nt, Human
aggaugucacagggc

SEQ ID NO: 2309589 - RNA, 16 nt, Human
aggaugucacagggcc

SEQ ID NO: 2309590 - RNA, 17 nt, Human
aggaugucacagggcca

SEQ ID NO: 2309591 - RNA, 20 nt, Human
aggaguuagaggccagccug

SEQ ID NO: 2309592 - RNA, 12 nt, Human
aggaguucaaug

SEQ ID NO: 2309593 - RNA, 17 nt, Human
aggaguuagaggccagc

SEQ ID NO: 2309594 - RNA, 17 nt, Human
aggaguuaagaguagca

SEQ ID NO: 2309595 - RNA, 22 nt, Human
aggaguuaguggauuacugcca

SEQ ID NO: 2309596 - RNA, 16 nt, Human
aggagugugagaauca

SEQ ID NO: 2309597 - RNA, 16 nt, Human
aggaguguggccacgu

SEQ ID NO: 2309598 - RNA, 18 nt, Human
aggagugugugauuuuuu

SEQ ID NO: 2309599 - RNA, 16 nt, Human
aggaguuaagaguagc

SEQ ID NO: 2309600 - RNA, 23 nt, Human
aggaugcuuguacauaaugcgug

SEQ ID NO: 2309601 - RNA, 21 nt, Human
aggaugcuuguacauaaugcg

SEQ ID NO: 2309602 - RNA, 18 nt, Human
aggaguggguugauuuca

SEQ ID NO: 2309603 - RNA, 21 nt, Human
aggagugggaaaacacugcca

SEQ ID NO: 2309604 - RNA, 17 nt, Human
aggagucccaaggaaag

SEQ ID NO: 2309605 - RNA, 16 nt, Human
aggagucccaaggaaa

SEQ ID NO: 2309606 - RNA, 21 nt, Human
aggagucccugccaucauguu

SEQ ID NO: 2309607 - RNA, 12 nt, Human
aggagucccugg

SEQ ID NO: 2309608 - RNA, 22 nt, Human
aggacccuucccuugagcccuc

SEQ ID NO: 2309609 - RNA, 16 nt, Human
aggaccggcggcucgg

SEQ ID NO: 2309610 - RNA, 13 nt, Human
aggaccucaggug

SEQ ID NO: 2309611 - RNA, 22 nt, Human
aggaccuagggauguucuggcc

SEQ ID NO: 2309612 - RNA, 18 nt, Human
aggaccucagcugcuucu

SEQ ID NO: 2309613 - RNA, 15 nt, Human
aggaccucagcugcu

SEQ ID NO: 2309614 - RNA, 19 nt, Human
aggaccuagggauguucug

SEQ ID NO: 2309615 - RNA, 16 nt, Human
aggagaaggaaggaga

SEQ ID NO: 2309616 - RNA, 12 nt, Human
aggagaaggaag

SEQ ID NO: 2309617 - RNA, 14 nt, Human
aggagucagagaga

SEQ ID NO: 2309618 - RNA, 20 nt, Human
aggaguccacuuuguuucgu

SEQ ID NO: 2309619 - RNA, 14 nt, Human
aggagucccaagga

SEQ ID NO: 2309620 - RNA, 22 nt, Human
aggaguccaggccauggaggca

SEQ ID NO: 2309621 - RNA, 11 nt, Human
aggagacacaa

SEQ ID NO: 2309622 - RNA, 19 nt, Human
aggagacacaacaacuccu

SEQ ID NO: 2309623 - RNA, 20 nt, Human
aggagaauggcgugaacccg

SEQ ID NO: 2309624 - RNA, 20 nt, Human
aggagaauugcuugaaccug

SEQ ID NO: 2309625 - RNA, 18 nt, Human
aggagaauccaagcgagg

SEQ ID NO: 2309626 - RNA, 16 nt, Human
aggagaauccaagcga

SEQ ID NO: 2309627 - RNA, 15 nt, Human
aggagaaugagccuc

SEQ ID NO: 2309628 - RNA, 20 nt, Human
aggagaaucacuugaaccug

SEQ ID NO: 2309629 - RNA, 18 nt, Human
agccucccauccagggcc

SEQ ID NO: 2309630 - RNA, 18 nt, Human
agccucccugucggccug

SEQ ID NO: 2309631 - RNA, 14 nt, Human
agccuccgagaggg

SEQ ID NO: 2309632 - RNA, 16 nt, Human
agccuccgagagggag

SEQ ID NO: 2309633 - RNA, 17 nt, Human
agccuccgagagggaga

SEQ ID NO: 2309634 - RNA, 18 nt, Human
agccuccgagagggagag

SEQ ID NO: 2309635 - RNA, 14 nt, Human
agccuccuccagcc

SEQ ID NO: 2309636 - RNA, 18 nt, Human
agccuccguauuucagac

SEQ ID NO: 2309637 - RNA, 17 nt, Human
agccuccguauuucaga

SEQ ID NO: 2309638 - RNA, 20 nt, Human
agccuccucaucccguguuc

SEQ ID NO: 2309639 - RNA, 23 nt, Human
agccuccggaguagcugggacca

SEQ ID NO: 2309640 - RNA, 13 nt, Human
agccucccacccc

SEQ ID NO: 2309641 - RNA, 17 nt, Human
agccucccauccagggc

SEQ ID NO: 2309642 - RNA, 16 nt, Human
agccucccugaagccu

SEQ ID NO: 2309643 - RNA, 20 nt, Human
agccucccgaguagcuggga

SEQ ID NO: 2309644 - RNA, 18 nt, Human
agccucccgaguagcugg

SEQ ID NO: 2309645 - RNA, 19 nt, Human
agccucccgaguagcuggg

SEQ ID NO: 2309646 - RNA, 16 nt, Human
agccgugcccugcccc

SEQ ID NO: 2309647 - RNA, 17 nt, Human
agccucccaaguagcug

SEQ ID NO: 2309648 - RNA, 18 nt, Human
agccgugcucgccccagc

SEQ ID NO: 2309649 - RNA, 22 nt, Human
agccucccacgacugcccggca

SEQ ID NO: 2309650 - RNA, 21 nt, Human
agccucccaaagugcugggau

SEQ ID NO: 2309651 - RNA, 17 nt, Human
agccgugccuucagcuc

SEQ ID NO: 2309652 - RNA, 15 nt, Human
agccgugccuucagc

SEQ ID NO: 2309653 - RNA, 16 nt, Human
agccgugccuucagcu

SEQ ID NO: 2309654 - RNA, 17 nt, Human
agccgugaugcucaggc

SEQ ID NO: 2309655 - RNA, 18 nt, Human
agccgugaugcucaggcu

SEQ ID NO: 2309656 - RNA, 19 nt, Human
agccgugaugcucaggcuu

SEQ ID NO: 2309657 - RNA, 20 nt, Human
agccgugaugcucaggcuug

SEQ ID NO: 2309658 - RNA, 22 nt, Human
agccgggcgugguggcgggcac

SEQ ID NO: 2309659 - RNA, 20 nt, Human
agccgucagccaaauguaau

SEQ ID NO: 2309660 - RNA, 13 nt, Human
agccgggccuggg

SEQ ID NO: 2309661 - RNA, 19 nt, Human
agccgggccuggggcuccu

SEQ ID NO: 2309662 - RNA, 21 nt, Human
agccgggcgugguggugagug

SEQ ID NO: 2309663 - RNA, 20 nt, Human
agcccucccuguccuccucg

SEQ ID NO: 2309664 - RNA, 19 nt, Human
agcccucccuguccuccuc

SEQ ID NO: 2309665 - RNA, 17 nt, Human
agcccucccuguccucc

SEQ ID NO: 2309666 - RNA, 16 nt, Human
agcccucccuguccuc

SEQ ID NO: 2309667 - RNA, 15 nt, Human
agcccucccuguccu

SEQ ID NO: 2309668 - RNA, 17 nt, Human
agcccuccaaaagcacu

SEQ ID NO: 2309669 - RNA, 14 nt, Human
agcccucccugucc

SEQ ID NO: 2309670 - RNA, 22 nt, Human
agcccucccuguccuccucgga

SEQ ID NO: 2309671 - RNA, 21 nt, Human
agcccucccuguccuccucgg

SEQ ID NO: 2309672 - RNA, 23 nt, Human
agcccuccgccauucucaagccc

SEQ ID NO: 2309673 - RNA, 13 nt, Human
agcccuccucacc

SEQ ID NO: 2309674 - RNA, 12 nt, Human
agcccuccucac

SEQ ID NO: 2309675 - RNA, 24 nt, Human
agcccuccgccauucucaagcccu

SEQ ID NO: 2309676 - RNA, 23 nt, Human
agcccucaccccugguucucauc

SEQ ID NO: 2309677 - RNA, 14 nt, Human
agcccucagaaccc

SEQ ID NO: 2309678 - RNA, 18 nt, Human
agcccucagaacccuugg

SEQ ID NO: 2309679 - RNA, 15 nt, Human
agcccucagaacccu

SEQ ID NO: 2309680 - RNA, 24 nt, Human
agcccucagaacccuuggcuugcc

SEQ ID NO: 2309681 - RNA, 19 nt, Human
agcccucagaacccuuggc

SEQ ID NO: 2309682 - RNA, 16 nt, Human
agcccucaucccgagc

SEQ ID NO: 2309683 - RNA, 15 nt, Human
agcccuccaaaagca

SEQ ID NO: 2309684 - RNA, 21 nt, Human
agccgcaucuucuccaucugg

SEQ ID NO: 2309685 - RNA, 17 nt, Human
agccgcaucuucuccau

SEQ ID NO: 2309686 - RNA, 13 nt, Human
agcccucuuccau

SEQ ID NO: 2309687 - RNA, 15 nt, Human
agcccucuuccauca

SEQ ID NO: 2309688 - RNA, 11 nt, Human
agcccucuucc

SEQ ID NO: 2309689 - RNA, 12 nt, Human
agcccucuucca

SEQ ID NO: 2309690 - RNA, 11 nt, Human
agcccuccuuc

SEQ ID NO: 2309691 - RNA, 14 nt, Human
agcccuccucaccc

SEQ ID NO: 2309692 - RNA, 13 nt, Human
agcccuccuucca

SEQ ID NO: 2309693 - RNA, 12 nt, Human
agcccuccuucc

SEQ ID NO: 2309694 - RNA, 17 nt, Human
agcccuccuuccacgga

SEQ ID NO: 2309695 - RNA, 14 nt, Human
agcccucgucuccc

SEQ ID NO: 2309696 - RNA, 19 nt, Human
agccgccauugccaccagg

SEQ ID NO: 2309697 - RNA, 18 nt, Human
agccgccauugccaccag

SEQ ID NO: 2309698 - RNA, 17 nt, Human
agccgccauugccacca

SEQ ID NO: 2309699 - RNA, 21 nt, Human
agccgccaugcuccuggccca

SEQ ID NO: 2309700 - RNA, 23 nt, Human
agccgggaacagacaacagaagu

SEQ ID NO: 2309701 - RNA, 20 nt, Human
agccgggaaagaagagccgg

SEQ ID NO: 2309702 - RNA, 14 nt, Human
agccgggccccugg

SEQ ID NO: 2309703 - RNA, 18 nt, Human
agccgggccccugggcuu

SEQ ID NO: 2309704 - RNA, 16 nt, Human
agccgggccccugggc

SEQ ID NO: 2309705 - RNA, 17 nt, Human
agccgggccccugggcu

SEQ ID NO: 2309706 - RNA, 23 nt, Human
agccggccucucuggccucccac

SEQ ID NO: 2309707 - RNA, 13 nt, Human
agccggcggccca

SEQ ID NO: 2309708 - RNA, 18 nt, Human
agccggcggcccaagccc

SEQ ID NO: 2309709 - RNA, 12 nt, Human
agccgcugcugg

SEQ ID NO: 2309710 - RNA, 18 nt, Human
agccggccucucuggccu

SEQ ID NO: 2309711 - RNA, 19 nt, Human
agccggccucucuggccuc

SEQ ID NO: 2309712 - RNA, 22 nt, Human
agccggccucucuggccuccca

SEQ ID NO: 2309713 - RNA, 12 nt, Human
agccgcugcccg

SEQ ID NO: 2309714 - RNA, 17 nt, Human
agccgcugcccggcgcc

SEQ ID NO: 2309715 - RNA, 18 nt, Human
agccgcugcccggcgccc

SEQ ID NO: 2309716 - RNA, 22 nt, Human
agccgcugcccggcgcccucug

SEQ ID NO: 2309717 - RNA, 13 nt, Human
agccgcuggggcc

SEQ ID NO: 2309718 - RNA, 21 nt, Human
agccgcuccugucugccagcc

SEQ ID NO: 2309719 - RNA, 19 nt, Human
agccgcuccugucugccag

SEQ ID NO: 2309720 - RNA, 17 nt, Human
agccgcuccugucugcc

SEQ ID NO: 2309721 - RNA, 16 nt, Human
agccgcuccugucugc

SEQ ID NO: 2309722 - RNA, 22 nt, Human
agccgcuccugucugccagcca

SEQ ID NO: 2309723 - RNA, 12 nt, Human
agccgcucggag

SEQ ID NO: 2309724 - RNA, 19 nt, Human
agccgcugagcgaggagau

SEQ ID NO: 2309725 - RNA, 15 nt, Human
agccgcugagcgagg

SEQ ID NO: 2309726 - RNA, 22 nt, Human
agccgccauugccaccaggaga

SEQ ID NO: 2309727 - RNA, 21 nt, Human
agccgccauugccaccaggag

SEQ ID NO: 2309728 - RNA, 20 nt, Human
agccgccauugccaccagga

SEQ ID NO: 2309729 - RNA, 14 nt, Human
agccgcuccugucu

SEQ ID NO: 2309730 - RNA, 16 nt, Human
agccuccuccugacca

SEQ ID NO: 2309731 - RNA, 12 nt, Human
agccuccuccug

SEQ ID NO: 2309732 - RNA, 13 nt, Human
agccuccuccuga

SEQ ID NO: 2309733 - RNA, 13 nt, Human
agccccagugcca

SEQ ID NO: 2309734 - RNA, 13 nt, Human
agccccagugccc

SEQ ID NO: 2309735 - RNA, 14 nt, Human
agccccagugccca

SEQ ID NO: 2309736 - RNA, 15 nt, Human
agccccagugcccac

SEQ ID NO: 2309737 - RNA, 23 nt, Human
agccccagugccaagcacagugc

SEQ ID NO: 2309738 - RNA, 20 nt, Human
agccccagugccaagcacag

SEQ ID NO: 2309739 - RNA, 16 nt, Human
agccccaugcuggagc

SEQ ID NO: 2309740 - RNA, 17 nt, Human
agccccaugcuggagcc

SEQ ID NO: 2309741 - RNA, 18 nt, Human
agccccaugcuggagccu

SEQ ID NO: 2309742 - RNA, 19 nt, Human
agccccaugcuggagccug

SEQ ID NO: 2309743 - RNA, 13 nt, Human
agccccauuccug

SEQ ID NO: 2309744 - RNA, 20 nt, Human
agccccaugcuggagccugu

SEQ ID NO: 2309745 - RNA, 21 nt, Human
agccccaugcuggagccugug

SEQ ID NO: 2309746 - RNA, 22 nt, Human
agccccaugcuggagccugugu

SEQ ID NO: 2309747 - RNA, 23 nt, Human
agccccaugcuggagccugugua

SEQ ID NO: 2309748 - RNA, 16 nt, Human
agcccguguggccccu

SEQ ID NO: 2309749 - RNA, 15 nt, Human
agcccguguggcccc

SEQ ID NO: 2309750 - RNA, 15 nt, Human
agcccgucucagugu

SEQ ID NO: 2309751 - RNA, 14 nt, Human
agcccgucucagug

SEQ ID NO: 2309752 - RNA, 19 nt, Human
agcccguguggccccuuca

SEQ ID NO: 2309753 - RNA, 18 nt, Human
agcccguguggccccuuc

SEQ ID NO: 2309754 - RNA, 17 nt, Human
agcccguguggccccuu

SEQ ID NO: 2309755 - RNA, 22 nt, Human
agcccuaaaauuccacugcguu

SEQ ID NO: 2309756 - RNA, 17 nt, Human
agcccucacccuggggc

SEQ ID NO: 2309757 - RNA, 22 nt, Human
agcccucaccccugguucucau

SEQ ID NO: 2309758 - RNA, 13 nt, Human
agcccucaaagug

SEQ ID NO: 2309759 - RNA, 19 nt, Human
agcccuaaaucuagacuca

SEQ ID NO: 2309760 - RNA, 14 nt, Human
agcccucaaaguga

SEQ ID NO: 2309761 - RNA, 13 nt, Human
agccccauucugc

SEQ ID NO: 2309762 - RNA, 16 nt, Human
agccccauucugccug

SEQ ID NO: 2309763 - RNA, 16 nt, Human
agccccauuccuggga

SEQ ID NO: 2309764 - RNA, 12 nt, Human
agcccgggcugc

SEQ ID NO: 2309765 - RNA, 13 nt, Human
agcccgggcugcc

SEQ ID NO: 2309766 - RNA, 14 nt, Human
agcccgggcugccu

SEQ ID NO: 2309767 - RNA, 15 nt, Human
agcccgggcugccug

SEQ ID NO: 2309768 - RNA, 20 nt, Human
agcccgggcugccugggcug

SEQ ID NO: 2309769 - RNA, 21 nt, Human
agcccgggcugccugggcugu

SEQ ID NO: 2309770 - RNA, 16 nt, Human
agcccgggcugccugg

SEQ ID NO: 2309771 - RNA, 17 nt, Human
agcccgggcugccuggg

SEQ ID NO: 2309772 - RNA, 18 nt, Human
agcccgggcugccugggc

SEQ ID NO: 2309773 - RNA, 19 nt, Human
agcccgggcugccugggcu

SEQ ID NO: 2309774 - RNA, 18 nt, Human
agccagcaggcucucagg

SEQ ID NO: 2309775 - RNA, 19 nt, Human
agccagcaggcucucaggc

SEQ ID NO: 2309776 - RNA, 17 nt, Human
agccagcaggcucucag

SEQ ID NO: 2309777 - RNA, 16 nt, Human
agccagcagacauugu

SEQ ID NO: 2309778 - RNA, 14 nt, Human
agccagcagacauu

SEQ ID NO: 2309779 - RNA, 15 nt, Human
agccagcagacauug

SEQ ID NO: 2309780 - RNA, 20 nt, Human
agccagcaggcucucaggcc

SEQ ID NO: 2309781 - RNA, 17 nt, Human
agccagcagacauuguc

SEQ ID NO: 2309782 - RNA, 21 nt, Human
agcaugcugugauugugccua

SEQ ID NO: 2309783 - RNA, 23 nt, Human
agcaugaccugugaccagcacug

SEQ ID NO: 2309784 - RNA, 22 nt, Human
agcaugaccugugaccagcacu

SEQ ID NO: 2309785 - RNA, 19 nt, Human
agcaugagagaauuguauc

SEQ ID NO: 2309786 - RNA, 20 nt, Human
agcaugccuggauggggcug

SEQ ID NO: 2309787 - RNA, 23 nt, Human
agcaugccuggauggggcugcac

SEQ ID NO: 2309788 - RNA, 17 nt, Human
agccaaaucaaaauaug

SEQ ID NO: 2309789 - RNA, 14 nt, Human
agcauggagcuggc

SEQ ID NO: 2309790 - RNA, 13 nt, Human
agcauggagcugg

SEQ ID NO: 2309791 - RNA, 16 nt, Human
agcauggagcuggccg

SEQ ID NO: 2309792 - RNA, 20 nt, Human
agccaaauguaauugaauaa

SEQ ID NO: 2309793 - RNA, 15 nt, Human
agccaaaugguuuaa

SEQ ID NO: 2309794 - RNA, 19 nt, Human
agccaacacccaucuguuu

SEQ ID NO: 2309795 - RNA, 18 nt, Human
agccaacagaagcuucca

SEQ ID NO: 2309796 - RNA, 19 nt, Human
agccaacacgcaccugccu

SEQ ID NO: 2309797 - RNA, 18 nt, Human
agccaacacgcaccugcc

SEQ ID NO: 2309798 - RNA, 21 nt, Human
agccaacagucaaaacagaga

SEQ ID NO: 2309799 - RNA, 23 nt, Human
agccaacagguggcaggaccagg

SEQ ID NO: 2309800 - RNA, 17 nt, Human
agccaacagguggcagg

SEQ ID NO: 2309801 - RNA, 21 nt, Human
agccaacagguggcaggacca

SEQ ID NO: 2309802 - RNA, 22 nt, Human
agccaacacgcaccugccucag

SEQ ID NO: 2309803 - RNA, 23 nt, Human
agccaacacccugucuaaaaaac

SEQ ID NO: 2309804 - RNA, 15 nt, Human
agccaacagguggca

SEQ ID NO: 2309805 - RNA, 16 nt, Human
agccaaccccugugga

SEQ ID NO: 2309806 - RNA, 14 nt, Human
agccaaccccugug

SEQ ID NO: 2309807 - RNA, 23 nt, Human
agccaagucagcuuugccuucca

SEQ ID NO: 2309808 - RNA, 21 nt, Human
agccaagucagcuuugccuuc

SEQ ID NO: 2309809 - RNA, 13 nt, Human
agccaaguccaga

SEQ ID NO: 2309810 - RNA, 15 nt, Human
agccaaguccagauu

SEQ ID NO: 2309811 - RNA, 18 nt, Human
agccaaguccagauuuac

SEQ ID NO: 2309812 - RNA, 13 nt, Human
agccaaguggggu

SEQ ID NO: 2309813 - RNA, 16 nt, Human
agccaaguggggugcu

SEQ ID NO: 2309814 - RNA, 20 nt, Human
agccaaguggggugcuggga

SEQ ID NO: 2309815 - RNA, 23 nt, Human
agccaagugugguagagugugcc

SEQ ID NO: 2309816 - RNA, 14 nt, Human
agccaauauuuuuc

SEQ ID NO: 2309817 - RNA, 18 nt, Human
agccaauaacacacagcu

SEQ ID NO: 2309818 - RNA, 13 nt, Human
agccaauccccuc

SEQ ID NO: 2309819 - RNA, 14 nt, Human
agccaauccccucc

SEQ ID NO: 2309820 - RNA, 15 nt, Human
agccaauccccuccu

SEQ ID NO: 2309821 - RNA, 22 nt, Human
agccagcacuuguccagcugag

SEQ ID NO: 2309822 - RNA, 21 nt, Human
agccagcacuuguccagcuga

SEQ ID NO: 2309823 - RNA, 20 nt, Human
agccagcacuuguccagcug

SEQ ID NO: 2309824 - RNA, 15 nt, Human
agccagcacuuguau

SEQ ID NO: 2309825 - RNA, 13 nt, Human
agccagcaccugg

SEQ ID NO: 2309826 - RNA, 14 nt, Human
agccagcaccuggc

SEQ ID NO: 2309827 - RNA, 15 nt, Human
agccagcaccuggca

SEQ ID NO: 2309828 - RNA, 23 nt, Human
agccagcaccuggcaucgcacca

SEQ ID NO: 2309829 - RNA, 19 nt, Human
agccagcacacagggcagu

SEQ ID NO: 2309830 - RNA, 20 nt, Human
agccaauccccuccuugggc

SEQ ID NO: 2309831 - RNA, 18 nt, Human
agccagcacacagggcag

SEQ ID NO: 2309832 - RNA, 17 nt, Human
agccagcacacagggca

SEQ ID NO: 2309833 - RNA, 15 nt, Human
agccagcacacaggg

SEQ ID NO: 2309834 - RNA, 16 nt, Human
agccaauccccuccuu

SEQ ID NO: 2309835 - RNA, 18 nt, Human
agccaauccccuccuugg

SEQ ID NO: 2309836 - RNA, 18 nt, Human
agcaugaccugugaccag

SEQ ID NO: 2309837 - RNA, 15 nt, Human
agcaugacauuucuu

SEQ ID NO: 2309838 - RNA, 14 nt, Human
agcaugacauuucu

SEQ ID NO: 2309839 - RNA, 19 nt, Human
agcaugacaagccccaggc

SEQ ID NO: 2309840 - RNA, 18 nt, Human
agcaugacaagccccagg

SEQ ID NO: 2309841 - RNA, 17 nt, Human
agcaugacaagccccag

SEQ ID NO: 2309842 - RNA, 21 nt, Human
agcaugacaagccccaggcag

SEQ ID NO: 2309843 - RNA, 20 nt, Human
agcaugacaagccccaggca

SEQ ID NO: 2309844 - RNA, 22 nt, Human
agcaugacaagccccaggcagg

SEQ ID NO: 2309845 - RNA, 22 nt, Human
agcaugaaugguauggaacucu

SEQ ID NO: 2309846 - RNA, 20 nt, Human
agcaugaauuuuuuucaucu

SEQ ID NO: 2309847 - RNA, 21 nt, Human
agcauccuuuucugcagaggg

SEQ ID NO: 2309848 - RNA, 19 nt, Human
agcauccuuuucugcagag

SEQ ID NO: 2309849 - RNA, 18 nt, Human
agcauccuggcacccggc

SEQ ID NO: 2309850 - RNA, 22 nt, Human
agcauccuggcacccggccccu

SEQ ID NO: 2309851 - RNA, 23 nt, Human
agcauccuggcacccggccccug

SEQ ID NO: 2309852 - RNA, 22 nt, Human
agcagugucuuccauaauguau

SEQ ID NO: 2309853 - RNA, 17 nt, Human
agcagugucuuccauaa

SEQ ID NO: 2309854 - RNA, 16 nt, Human
agcagugucuuccaua

SEQ ID NO: 2309855 - RNA, 15 nt, Human
agcagugucuuccau

SEQ ID NO: 2309856 - RNA, 20 nt, Human
agcagugucaucagaagaua

SEQ ID NO: 2309857 - RNA, 15 nt, Human
agcagugucaucaga

SEQ ID NO: 2309858 - RNA, 19 nt, Human
agcagugucaucagaagau

SEQ ID NO: 2309859 - RNA, 19 nt, Human
agcagugccuuccauaauu

SEQ ID NO: 2309860 - RNA, 13 nt, Human
agcagugucauca

SEQ ID NO: 2309861 - RNA, 18 nt, Human
agcagugggccuggccag

SEQ ID NO: 2309862 - RNA, 20 nt, Human
agcagugucuuccauaaugu

SEQ ID NO: 2309863 - RNA, 21 nt, Human
agcagugugaggccagggcag

SEQ ID NO: 2309864 - RNA, 15 nt, Human
agcagugugaggcca

SEQ ID NO: 2309865 - RNA, 21 nt, Human
agcaguuacaaaaaccuuccc

SEQ ID NO: 2309866 - RNA, 21 nt, Human
agcaguguuccccaucugggu

SEQ ID NO: 2309867 - RNA, 15 nt, Human
agcaguuaacuuuaa

SEQ ID NO: 2309868 - RNA, 22 nt, Human
agcaguuaacuuuaagacugag

SEQ ID NO: 2309869 - RNA, 14 nt, Human
agcaguuccggauu

SEQ ID NO: 2309870 - RNA, 16 nt, Human
agcaguugaaaagacu

SEQ ID NO: 2309871 - RNA, 13 nt, Human
agcaguugaaaag

SEQ ID NO: 2309872 - RNA, 14 nt, Human
agcagcucuccccu

SEQ ID NO: 2309873 - RNA, 12 nt, Human
agcagcucuccc

SEQ ID NO: 2309874 - RNA, 13 nt, Human
agcagcucuugcu

SEQ ID NO: 2309875 - RNA, 15 nt, Human
agcagcucuugcuaa

SEQ ID NO: 2309876 - RNA, 16 nt, Human
agcagcucuugcuaau

SEQ ID NO: 2309877 - RNA, 17 nt, Human
agcagcucuugcuaauc

SEQ ID NO: 2309878 - RNA, 22 nt, Human
agcagcugaaauaugcuggcug

SEQ ID NO: 2309879 - RNA, 23 nt, Human
agcagcugaaauaugcuggcugg

SEQ ID NO: 2309880 - RNA, 23 nt, Human
agcagcucuugcuaaucaguguc

SEQ ID NO: 2309881 - RNA, 18 nt, Human
agcagcugaacagccaaa

SEQ ID NO: 2309882 - RNA, 18 nt, Human
agcagcuuagacuaaggc

SEQ ID NO: 2309883 - RNA, 10 nt, Human
agcagcugga

SEQ ID NO: 2309884 - RNA, 13 nt, Human
agcagcuggacua

SEQ ID NO: 2309885 - RNA, 18 nt, Human
agcagcuggacuacccac

SEQ ID NO: 2309886 - RNA, 20 nt, Human
agcagugccuuccauaauua

SEQ ID NO: 2309887 - RNA, 17 nt, Human
agcagugccuuccauaa

SEQ ID NO: 2309888 - RNA, 16 nt, Human
agcagugccuuccaua

SEQ ID NO: 2309889 - RNA, 18 nt, Human
agcagugcaugcuguccc

SEQ ID NO: 2309890 - RNA, 22 nt, Human
agcagcugguaaucuugcucug

SEQ ID NO: 2309891 - RNA, 15 nt, Human
agcagcuucaccaga

SEQ ID NO: 2309892 - RNA, 19 nt, Human
agcagugcaugcugucccu

SEQ ID NO: 2309893 - RNA, 20 nt, Human
agcagugcaugcugucccuu

SEQ ID NO: 2309894 - RNA, 20 nt, Human
agcacugucucaguuucacu

SEQ ID NO: 2309895 - RNA, 14 nt, Human
agcacugugcuaau

SEQ ID NO: 2309896 - RNA, 14 nt, Human
agcacugucucagu

SEQ ID NO: 2309897 - RNA, 19 nt, Human
agcacuggguugcagggga

SEQ ID NO: 2309898 - RNA, 19 nt, Human
agcacugucccuugccuca

SEQ ID NO: 2309899 - RNA, 22 nt, Human
agcacugucccuugccucaaug

SEQ ID NO: 2309900 - RNA, 12 nt, Human
agcacugucccu

SEQ ID NO: 2309901 - RNA, 13 nt, Human
agcacugucccuu

SEQ ID NO: 2309902 - RNA, 15 nt, Human
agcacugucccuugc

SEQ ID NO: 2309903 - RNA, 16 nt, Human
agcacugucccuugcc

SEQ ID NO: 2309904 - RNA, 18 nt, Human
agcagcgaccaccccugc

SEQ ID NO: 2309905 - RNA, 20 nt, Human
agcacuguuccagccugccc

SEQ ID NO: 2309906 - RNA, 15 nt, Human
agcacugugcuaaua

SEQ ID NO: 2309907 - RNA, 23 nt, Human
agcacugugcuaauaacagugca

SEQ ID NO: 2309908 - RNA, 14 nt, Human
agcacugugcucag

SEQ ID NO: 2309909 - RNA, 15 nt, Human
agcacugugcucagg

SEQ ID NO: 2309910 - RNA, 18 nt, Human
agcacugugcucagggcu

SEQ ID NO: 2309911 - RNA, 19 nt, Human
agcacugugcucagggcua

SEQ ID NO: 2309912 - RNA, 16 nt, Human
agcacuguuccagccu

SEQ ID NO: 2309913 - RNA, 17 nt, Human
agcacuguuccagccug

SEQ ID NO: 2309914 - RNA, 17 nt, Human
agcagcgguuuggggag

SEQ ID NO: 2309915 - RNA, 16 nt, Human
agcagcgguggccucu

SEQ ID NO: 2309916 - RNA, 21 nt, Human
agcagcggggcgaagcccagg

SEQ ID NO: 2309917 - RNA, 15 nt, Human
agcagcgguggccuc

SEQ ID NO: 2309918 - RNA, 15 nt, Human
agcagcgccuuuccc

SEQ ID NO: 2309919 - RNA, 14 nt, Human
agcagcgccuuucc

SEQ ID NO: 2309920 - RNA, 18 nt, Human
agcagcgaccgcccccuc

SEQ ID NO: 2309921 - RNA, 20 nt, Human
agcagcgaccaccccugccu

SEQ ID NO: 2309922 - RNA, 21 nt, Human
agcagcgaccaccccugccuc

SEQ ID NO: 2309923 - RNA, 23 nt, Human
agcagcgaccgcccccuccucua

SEQ ID NO: 2309924 - RNA, 22 nt, Human
agcagcgaccaccccugccucc

SEQ ID NO: 2309925 - RNA, 23 nt, Human
agcagcgguuuggggagcagaga

SEQ ID NO: 2309926 - RNA, 22 nt, Human
agcagcgguuuggggagcagag

SEQ ID NO: 2309927 - RNA, 13 nt, Human
agcagcguuucua

SEQ ID NO: 2309928 - RNA, 14 nt, Human
agcacacucauccc

SEQ ID NO: 2309929 - RNA, 20 nt, Human
agcacacucauccccucacu

SEQ ID NO: 2309930 - RNA, 23 nt, Human
agcacacuugacaucaacugcau

SEQ ID NO: 2309931 - RNA, 13 nt, Human
agcacagaaggag

SEQ ID NO: 2309932 - RNA, 19 nt, Human
agcacagaaacagaggaga

SEQ ID NO: 2309933 - RNA, 19 nt, Human
agcacacuguagcauuaca

SEQ ID NO: 2309934 - RNA, 14 nt, Human
agcacacuguagca

SEQ ID NO: 2309935 - RNA, 17 nt, Human
agcacagacccugcccu

SEQ ID NO: 2309936 - RNA, 14 nt, Human
agcacacagggcag

SEQ ID NO: 2309937 - RNA, 16 nt, Human
agcacagaaggaggag

SEQ ID NO: 2309938 - RNA, 20 nt, Human
agcacagacccugcccugug

SEQ ID NO: 2309939 - RNA, 18 nt, Human
agcacagacccugcccug

SEQ ID NO: 2309940 - RNA, 19 nt, Human
agcacagacccugcccugu

SEQ ID NO: 2309941 - RNA, 17 nt, Human
agcacuggguugacuuu

SEQ ID NO: 2309942 - RNA, 13 nt, Human
agcacugaccugu

SEQ ID NO: 2309943 - RNA, 20 nt, Human
agcacugaccugucaugccc

SEQ ID NO: 2309944 - RNA, 22 nt, Human
agcacugaccugucaugccccc

SEQ ID NO: 2309945 - RNA, 23 nt, Human
agcacugacuagggaaaugauca

SEQ ID NO: 2309946 - RNA, 16 nt, Human
agcacugacuucuaag

SEQ ID NO: 2309947 - RNA, 12 nt, Human
agcacugaccug

SEQ ID NO: 2309948 - RNA, 19 nt, Human
agaugggcuuguuuucuug

SEQ ID NO: 2309949 - RNA, 18 nt, Human
agaugggcuuguuuucuu

SEQ ID NO: 2309950 - RNA, 15 nt, Human
agaugggggaaagca

SEQ ID NO: 2309951 - RNA, 14 nt, Human
agauggggccucug

SEQ ID NO: 2309952 - RNA, 15 nt, Human
agauggggccucugu

SEQ ID NO: 2309953 - RNA, 18 nt, Human
agaugggggaaagcacag

SEQ ID NO: 2309954 - RNA, 15 nt, Human
agaugggggcaagaa

SEQ ID NO: 2309955 - RNA, 16 nt, Human
agaugggggcaagaag

SEQ ID NO: 2309956 - RNA, 17 nt, Human
agaugggggcaagaaga

SEQ ID NO: 2309957 - RNA, 18 nt, Human
agaugggggcaagaagau

SEQ ID NO: 2309958 - RNA, 17 nt, Human
agaguguggccuucgga

SEQ ID NO: 2309959 - RNA, 20 nt, Human
agagugugggaagggagagc

SEQ ID NO: 2309960 - RNA, 19 nt, Human
agagugugggaagggagag

SEQ ID NO: 2309961 - RNA, 19 nt, Human
agagugugaaauagacauu

SEQ ID NO: 2309962 - RNA, 22 nt, Human
agagugucuucacggcaggaca

SEQ ID NO: 2309963 - RNA, 15 nt, Human
agagugucuuuccac

SEQ ID NO: 2309964 - RNA, 14 nt, Human
agagugucuuucca

SEQ ID NO: 2309965 - RNA, 14 nt, Human
agagugugccugaa

SEQ ID NO: 2309966 - RNA, 19 nt, Human
agaguggggauaugauuua

SEQ ID NO: 2309967 - RNA, 20 nt, Human
agagugucuucacggcagga

SEQ ID NO: 2309968 - RNA, 18 nt, Human
agagugggcugcaucugg

SEQ ID NO: 2309969 - RNA, 23 nt, Human
agaguggcuccucccggugccca

SEQ ID NO: 2309970 - RNA, 11 nt, Human
agagugggagc

SEQ ID NO: 2309971 - RNA, 19 nt, Human
agaguggcuccucccggug

SEQ ID NO: 2309972 - RNA, 23 nt, Human
agagggcccugguguuucuagca

SEQ ID NO: 2309973 - RNA, 21 nt, Human
agagggcccaggcaggccacc

SEQ ID NO: 2309974 - RNA, 13 nt, Human
agagggcccuggu

SEQ ID NO: 2309975 - RNA, 18 nt, Human
agagggcccugguguuuc

SEQ ID NO: 2309976 - RNA, 19 nt, Human
agaggguggugaccucugc

SEQ ID NO: 2309977 - RNA, 20 nt, Human
agaggguggugaccucugcc

SEQ ID NO: 2309978 - RNA, 22 nt, Human
agaggguggugaccucugccug

SEQ ID NO: 2309979 - RNA, 14 nt, Human
agagggcagaggcu

SEQ ID NO: 2309980 - RNA, 16 nt, Human
agagggcacacacugu

SEQ ID NO: 2309981 - RNA, 18 nt, Human
agagggccaagacuuggc

SEQ ID NO: 2309982 - RNA, 16 nt, Human
agagggcacucugcuu

SEQ ID NO: 2309983 - RNA, 17 nt, Human
agaggagagaggcagag

SEQ ID NO: 2309984 - RNA, 12 nt, Human
agaggagagcca

SEQ ID NO: 2309985 - RNA, 17 nt, Human
agagggcccaggcaggc

SEQ ID NO: 2309986 - RNA, 16 nt, Human
agagggcccaggcagg

SEQ ID NO: 2309987 - RNA, 14 nt, Human
agagggcccaggca

SEQ ID NO: 2309988 - RNA, 23 nt, Human
agagggcaugcgcacaaggcuga

SEQ ID NO: 2309989 - RNA, 12 nt, Human
agagggcacaga

SEQ ID NO: 2309990 - RNA, 17 nt, Human
agagggaugcauggaga

SEQ ID NO: 2309991 - RNA, 11 nt, Human
agaggagagag

SEQ ID NO: 2309992 - RNA, 12 nt, Human
agaggagagagg

SEQ ID NO: 2309993 - RNA, 13 nt, Human
agaggagagaggc

SEQ ID NO: 2309994 - RNA, 15 nt, Human
agaggagagaggcag

SEQ ID NO: 2309995 - RNA, 16 nt, Human
agaggacaagggaaau

SEQ ID NO: 2309996 - RNA, 15 nt, Human
agaggaaggggccag

SEQ ID NO: 2309997 - RNA, 20 nt, Human
agaggaacuguccagagagc

SEQ ID NO: 2309998 - RNA, 21 nt, Human
agaggaacuguccagagagca

SEQ ID NO: 2309999 - RNA, 22 nt, Human
agaggaagaauuuguuaucagu

SEQ ID NO: 2310000 - RNA, 13 nt, Human
agaggaagagcag

SEQ ID NO: 2310001 - RNA, 23 nt, Human
agaggacagaucaauggcgcagu

SEQ ID NO: 2310002 - RNA, 18 nt, Human
agaggacagaucaauggc

SEQ ID NO: 2310003 - RNA, 20 nt, Human
agaggacaguauuugugggg

SEQ ID NO: 2310004 - RNA, 14 nt, Human
agaggacgugggcg

SEQ ID NO: 2310005 - RNA, 16 nt, Human
agaggacgugggcggc

SEQ ID NO: 2310006 - RNA, 19 nt, Human
agaggacucacuugcccac

SEQ ID NO: 2310007 - RNA, 15 nt, Human
agaggaccggcggcu

SEQ ID NO: 2310008 - RNA, 14 nt, Human
agaggagaaacaca

SEQ ID NO: 2310009 - RNA, 22 nt, Human
agaggacgagcgauugaggugu

SEQ ID NO: 2310010 - RNA, 22 nt, Human
agaggacuguagggagggcggc

SEQ ID NO: 2310011 - RNA, 15 nt, Human
agaggagaaacacau

SEQ ID NO: 2310012 - RNA, 10 nt, Human
agaggagaga

SEQ ID NO: 2310013 - RNA, 15 nt, Human
agaggagagaggacc

SEQ ID NO: 2310014 - RNA, 16 nt, Human
agaggagagaggaccc

SEQ ID NO: 2310015 - RNA, 14 nt, Human
agaggaaccaaccc

SEQ ID NO: 2310016 - RNA, 16 nt, Human
agaggaaggagaggag

SEQ ID NO: 2310017 - RNA, 12 nt, Human
agaggaacuguc

SEQ ID NO: 2310018 - RNA, 15 nt, Human
agaggaacuguccag

SEQ ID NO: 2310019 - RNA, 17 nt, Human
agaggaacuguccagag

SEQ ID NO: 2310020 - RNA, 18 nt, Human
agaggaacuguccagaga

SEQ ID NO: 2310021 - RNA, 19 nt, Human
agaggaacuguccagagag

SEQ ID NO: 2310022 - RNA, 14 nt, Human
agagccccacacgg

SEQ ID NO: 2310023 - RNA, 15 nt, Human
agagcccaggccucc

SEQ ID NO: 2310024 - RNA, 13 nt, Human
agagcccaggccu

SEQ ID NO: 2310025 - RNA, 14 nt, Human
agagcccaggccuc

SEQ ID NO: 2310026 - RNA, 19 nt, Human
agauggccugagaagagag

SEQ ID NO: 2310027 - RNA, 19 nt, Human
agauggcauccugugaagu

SEQ ID NO: 2310028 - RNA, 17 nt, Human
agauggcauccugugaa

SEQ ID NO: 2310029 - RNA, 19 nt, Human
agauggcccagcuccccaa

SEQ ID NO: 2310030 - RNA, 14 nt, Human
agauggcagucacu

SEQ ID NO: 2310031 - RNA, 17 nt, Human
agaugaaagaggagguu

SEQ ID NO: 2310032 - RNA, 23 nt, Human
agaugaaagaggagguuuggggu

SEQ ID NO: 2310033 - RNA, 14 nt, Human
agauggcacuuuga

SEQ ID NO: 2310034 - RNA, 20 nt, Human
agaugaaaucuuacagcugg

SEQ ID NO: 2310035 - RNA, 23 nt, Human
agaugaaaucuuacagcugggug

SEQ ID NO: 2310036 - RNA, 17 nt, Human
agaugaaacacaaacaa

SEQ ID NO: 2310037 - RNA, 13 nt, Human
agaugaaagagga

SEQ ID NO: 2310038 - RNA, 20 nt, Human
agaugaaaaagcauguacag

SEQ ID NO: 2310039 - RNA, 21 nt, Human
agaugaaaaagcauguacagu

SEQ ID NO: 2310040 - RNA, 22 nt, Human
agaugaaaaagcauguacagug

SEQ ID NO: 2310041 - RNA, 14 nt, Human
agaugaaacacaaa

SEQ ID NO: 2310042 - RNA, 20 nt, Human
agauggcgagcauccuggcc

SEQ ID NO: 2310043 - RNA, 15 nt, Human
agauggcuccucuca

SEQ ID NO: 2310044 - RNA, 14 nt, Human
agauggcuccucuc

SEQ ID NO: 2310045 - RNA, 22 nt, Human
agauggcugacuuugcucuuuc

SEQ ID NO: 2310046 - RNA, 13 nt, Human
agaugggagcucc

SEQ ID NO: 2310047 - RNA, 14 nt, Human
agauggcugugccu

SEQ ID NO: 2310048 - RNA, 17 nt, Human
agaugggcuuguuuucu

SEQ ID NO: 2310049 - RNA, 16 nt, Human
agaugggcuuguuuuc

SEQ ID NO: 2310050 - RNA, 22 nt, Human
agaugggcauggggugggccuc

SEQ ID NO: 2310051 - RNA, 16 nt, Human
agaugggaugcuugcc

SEQ ID NO: 2310052 - RNA, 18 nt, Human
agaugggagcuccucucc

SEQ ID NO: 2310053 - RNA, 23 nt, Human
agaugggagcuccucuccuggag

SEQ ID NO: 2310054 - RNA, 21 nt, Human
agaucuuucaggaaagacgga

SEQ ID NO: 2310055 - RNA, 13 nt, Human
agaucuuucagga

SEQ ID NO: 2310056 - RNA, 12 nt, Human
agaucuuucagg

SEQ ID NO: 2310057 - RNA, 19 nt, Human
agaugaaaaagcauguaca

SEQ ID NO: 2310058 - RNA, 17 nt, Human
agaugaaaaagcaugua

SEQ ID NO: 2310059 - RNA, 14 nt, Human
agaucuucuguggg

SEQ ID NO: 2310060 - RNA, 19 nt, Human
agauauaugcucugcaugu

SEQ ID NO: 2310061 - RNA, 14 nt, Human
agaguucugcucua

SEQ ID NO: 2310062 - RNA, 22 nt, Human
agaguuccugcggagugaagag

SEQ ID NO: 2310063 - RNA, 13 nt, Human
agauauauuaaaa

SEQ ID NO: 2310064 - RNA, 17 nt, Human
agauauauuaaaaauau

SEQ ID NO: 2310065 - RNA, 15 nt, Human
agauauauuuuucac

SEQ ID NO: 2310066 - RNA, 14 nt, Human
agauauauuuuuca

SEQ ID NO: 2310067 - RNA, 21 nt, Human
agauauauuuuuaagauaaua

SEQ ID NO: 2310068 - RNA, 23 nt, Human
agauauauuuuuaagauaauaau

SEQ ID NO: 2310069 - RNA, 16 nt, Human
agauauauuuuucaca

SEQ ID NO: 2310070 - RNA, 17 nt, Human
agauauauuuuuaagau

SEQ ID NO: 2310071 - RNA, 20 nt, Human
agauauauuaagugacuguu

SEQ ID NO: 2310072 - RNA, 20 nt, Human
agauauauuuuuaagauaau

SEQ ID NO: 2310073 - RNA, 18 nt, Human
agauauauuaaaaauaua

SEQ ID NO: 2310074 - RNA, 19 nt, Human
agauauauuaaaaauauaa

SEQ ID NO: 2310075 - RNA, 20 nt, Human
agauauauuaaaaauauaaa

SEQ ID NO: 2310076 - RNA, 21 nt, Human
agauauauuaaaaauauaaaa

SEQ ID NO: 2310077 - RNA, 19 nt, Human
agaguuaguuucuuuggga

SEQ ID NO: 2310078 - RNA, 15 nt, Human
agaguuagacuguug

SEQ ID NO: 2310079 - RNA, 17 nt, Human
agaguuagacuguuggg

SEQ ID NO: 2310080 - RNA, 12 nt, Human
agaguuagacug

SEQ ID NO: 2310081 - RNA, 13 nt, Human
agaguuagacugu

SEQ ID NO: 2310082 - RNA, 14 nt, Human
agaguuagacuguu

SEQ ID NO: 2310083 - RNA, 19 nt, Human
agaguuccccaugcagaca

SEQ ID NO: 2310084 - RNA, 16 nt, Human
agaguuccugcggagu

SEQ ID NO: 2310085 - RNA, 16 nt, Human
agaguucacuauaaau

SEQ ID NO: 2310086 - RNA, 21 nt, Human
agaguucaauggcugcugaag

SEQ ID NO: 2310087 - RNA, 17 nt, Human
agaguucaauggcugcu

SEQ ID NO: 2310088 - RNA, 18 nt, Human
agaguucaauggcugcug

SEQ ID NO: 2310089 - RNA, 20 nt, Human
agaguucaauggcugcugaa

SEQ ID NO: 2310090 - RNA, 17 nt, Human
agaguuauuuaggcuuu

SEQ ID NO: 2310091 - RNA, 16 nt, Human
agauaucgacuuguuu

SEQ ID NO: 2310092 - RNA, 17 nt, Human
agauaucugagggagga

SEQ ID NO: 2310093 - RNA, 11 nt, Human
agagaaaagaa

SEQ ID NO: 2310094 - RNA, 10 nt, Human
agagaaaaga

SEQ ID NO: 2310095 - RNA, 18 nt, Human
agagaaaacuuauuugag

SEQ ID NO: 2310096 - RNA, 19 nt, Human
agagaaaacuuauuugagu

SEQ ID NO: 2310097 - RNA, 20 nt, Human
agagaaaacuuauuugagug

SEQ ID NO: 2310098 - RNA, 15 nt, Human
agagaaaagaaaaaa

SEQ ID NO: 2310099 - RNA, 14 nt, Human
agagaaaagaaaaa

SEQ ID NO: 2310100 - RNA, 13 nt, Human
agagaaaagaaaa

SEQ ID NO: 2310101 - RNA, 12 nt, Human
agagaaaagaaa

SEQ ID NO: 2310102 - RNA, 21 nt, Human
agagaaaagaaaaaaaaagaa

SEQ ID NO: 2310103 - RNA, 12 nt, Human
agagaaaauaaa

SEQ ID NO: 2310104 - RNA, 14 nt, Human
agagaaaauaaaaa

SEQ ID NO: 2310105 - RNA, 13 nt, Human
agagaaaauaaaa

SEQ ID NO: 2310106 - RNA, 15 nt, Human
agacugcugggacug

SEQ ID NO: 2310107 - RNA, 14 nt, Human
agacugcugggacu

SEQ ID NO: 2310108 - RNA, 19 nt, Human
agacuggaagcuaauuugc

SEQ ID NO: 2310109 - RNA, 14 nt, Human
agacuggaagcuaa

SEQ ID NO: 2310110 - RNA, 19 nt, Human
agacuggaagcacagcuuc

SEQ ID NO: 2310111 - RNA, 17 nt, Human
agacuggaagcacagcu

SEQ ID NO: 2310112 - RNA, 16 nt, Human
agacuggaagcacagc

SEQ ID NO: 2310113 - RNA, 22 nt, Human
agacugcgggaugguccugggg

SEQ ID NO: 2310114 - RNA, 20 nt, Human
agacugcgggaugguccugg

SEQ ID NO: 2310115 - RNA, 23 nt, Human
agacugcgauuugucccaggucc

SEQ ID NO: 2310116 - RNA, 23 nt, Human
agacugcgggaugguccuggggc

SEQ ID NO: 2310117 - RNA, 21 nt, Human
agacugcauuauauuuauuac

SEQ ID NO: 2310118 - RNA, 19 nt, Human
agagcccaccuuggcucaa

SEQ ID NO: 2310119 - RNA, 13 nt, Human
agagcccacgccc

SEQ ID NO: 2310120 - RNA, 15 nt, Human
agagcccagcuccaa

SEQ ID NO: 2310121 - RNA, 16 nt, Human
agagcccacgccccca

SEQ ID NO: 2310122 - RNA, 12 nt, Human
agagagcuggua

SEQ ID NO: 2310123 - RNA, 11 nt, Human
agagagcuggu

SEQ ID NO: 2310124 - RNA, 23 nt, Human
agagagcugguaguuaguagcau

SEQ ID NO: 2310125 - RNA, 22 nt, Human
agagaggguggugaccucugcc

SEQ ID NO: 2310126 - RNA, 20 nt, Human
agagaggguggugaccucug

SEQ ID NO: 2310127 - RNA, 21 nt, Human
agagaggguggugaccucugc

SEQ ID NO: 2310128 - RNA, 14 nt, Human
agagaacgcagccc

SEQ ID NO: 2310129 - RNA, 15 nt, Human
agagaacgcagcccu

SEQ ID NO: 2310130 - RNA, 16 nt, Human
agagaacuaacacuau

SEQ ID NO: 2310131 - RNA, 22 nt, Human
agagaacuaacacuauuuuaug

SEQ ID NO: 2310132 - RNA, 14 nt, Human
agagaacuguggcc

SEQ ID NO: 2310133 - RNA, 12 nt, Human
agagaagaauga

SEQ ID NO: 2310134 - RNA, 15 nt, Human
agagaagaaugagcc

SEQ ID NO: 2310135 - RNA, 11 nt, Human
agagaagacaa

SEQ ID NO: 2310136 - RNA, 17 nt, Human
agagaacuuccagaucc

SEQ ID NO: 2310137 - RNA, 20 nt, Human
agagaaccuggaguuccuga

SEQ ID NO: 2310138 - RNA, 17 nt, Human
agagaaaauaaaaaguu

SEQ ID NO: 2310139 - RNA, 16 nt, Human
agagaaaauaaaaagu

SEQ ID NO: 2310140 - RNA, 15 nt, Human
agagaaaauaaaaag

SEQ ID NO: 2310141 - RNA, 18 nt, Human
agagagcgagcgcuaccc

SEQ ID NO: 2310142 - RNA, 18 nt, Human
agagagccauuuugugaa

SEQ ID NO: 2310143 - RNA, 19 nt, Human
agagagccauuuugugaau

SEQ ID NO: 2310144 - RNA, 21 nt, Human
agagagcggucucaggcuggu

SEQ ID NO: 2310145 - RNA, 16 nt, Human
agagagcggucucagg

SEQ ID NO: 2310146 - RNA, 16 nt, Human
agagaagacccuucuc

SEQ ID NO: 2310147 - RNA, 18 nt, Human
agagagcaccccucucug

SEQ ID NO: 2310148 - RNA, 17 nt, Human
agagagcagcuucugcc

SEQ ID NO: 2310149 - RNA, 19 nt, Human
agagagcagcuucugccac

SEQ ID NO: 2310150 - RNA, 23 nt, Human
agagagcagcuucugccacuucc

SEQ ID NO: 2310151 - RNA, 13 nt, Human
agagagccauuuu

SEQ ID NO: 2310152 - RNA, 15 nt, Human
agagagccauuuugu

SEQ ID NO: 2310153 - RNA, 17 nt, Human
agagagccauuuuguga

SEQ ID NO: 2310154 - RNA, 17 nt, Human
agacgugauuuugcugu

SEQ ID NO: 2310155 - RNA, 14 nt, Human
agacgucccuccac

SEQ ID NO: 2310156 - RNA, 19 nt, Human
agacguaugcuuauuuuaa

SEQ ID NO: 2310157 - RNA, 18 nt, Human
agacguaugcuuauuuua

SEQ ID NO: 2310158 - RNA, 13 nt, Human
agacguguacaua

SEQ ID NO: 2310159 - RNA, 20 nt, Human
agacccccagcaacccuccu

SEQ ID NO: 2310160 - RNA, 13 nt, Human
agacccccacucu

SEQ ID NO: 2310161 - RNA, 21 nt, Human
agacggaggccuacucuucca

SEQ ID NO: 2310162 - RNA, 22 nt, Human
agacgcugugcugcccugccca

SEQ ID NO: 2310163 - RNA, 16 nt, Human
agacguaugcuuauuu

SEQ ID NO: 2310164 - RNA, 17 nt, Human
agacguaggggaggggu

SEQ ID NO: 2310165 - RNA, 20 nt, Human
agacguacguaucagcggcc

SEQ ID NO: 2310166 - RNA, 19 nt, Human
agacgguucaccagccucu

SEQ ID NO: 2310167 - RNA, 18 nt, Human
agacggagucccaccuug

SEQ ID NO: 2310168 - RNA, 15 nt, Human
agacccauuccuauu

SEQ ID NO: 2310169 - RNA, 20 nt, Human
agacagcucccucugccuga

SEQ ID NO: 2310170 - RNA, 16 nt, Human
agacccauuccuauuu

SEQ ID NO: 2310171 - RNA, 12 nt, Human
agacagcugccu

SEQ ID NO: 2310172 - RNA, 11 nt, Human
agacagcucuu

SEQ ID NO: 2310173 - RNA, 12 nt, Human
agacagcucuua

SEQ ID NO: 2310174 - RNA, 12 nt, Human
agacccccaccc

SEQ ID NO: 2310175 - RNA, 11 nt, Human
agacccccacc

SEQ ID NO: 2310176 - RNA, 15 nt, Human
agacccccacaccuc

SEQ ID NO: 2310177 - RNA, 14 nt, Human
agacccccacaccu

SEQ ID NO: 2310178 - RNA, 13 nt, Human
agacccccacacc

SEQ ID NO: 2310179 - RNA, 12 nt, Human
agaccccaccca

SEQ ID NO: 2310180 - RNA, 15 nt, Human
agaccccacccaagc

SEQ ID NO: 2310181 - RNA, 16 nt, Human
agaccccacccaagcu

SEQ ID NO: 2310182 - RNA, 20 nt, Human
agaccccacccaagcuuggc

SEQ ID NO: 2310183 - RNA, 23 nt, Human
agaccccacccaagcuuggcagc

SEQ ID NO: 2310184 - RNA, 12 nt, Human
agacccccacuc

SEQ ID NO: 2310185 - RNA, 21 nt, Human
agacccccaccccuuccccac

SEQ ID NO: 2310186 - RNA, 20 nt, Human
agacccccaccccuucccca

SEQ ID NO: 2310187 - RNA, 19 nt, Human
agacccccaccccuucccc

SEQ ID NO: 2310188 - RNA, 17 nt, Human
agacccccaccccuucc

SEQ ID NO: 2310189 - RNA, 16 nt, Human
agacccccaccccuuc

SEQ ID NO: 2310190 - RNA, 14 nt, Human
agacccccaccccu

SEQ ID NO: 2310191 - RNA, 13 nt, Human
agacccccacccc

SEQ ID NO: 2310192 - RNA, 21 nt, Human
agacgcugugcugcccugccc

SEQ ID NO: 2310193 - RNA, 21 nt, Human
agacaaauucuguuucuugag

SEQ ID NO: 2310194 - RNA, 19 nt, Human
agacaaauucuguuucuug

SEQ ID NO: 2310195 - RNA, 18 nt, Human
agacaaauucuguuucuu

SEQ ID NO: 2310196 - RNA, 17 nt, Human
agacaaauucuguuucu

SEQ ID NO: 2310197 - RNA, 15 nt, Human
agacaagacuucagu

SEQ ID NO: 2310198 - RNA, 18 nt, Human
agacaagaaaucccuguu

SEQ ID NO: 2310199 - RNA, 19 nt, Human
agacaagacuucaguaugu

SEQ ID NO: 2310200 - RNA, 21 nt, Human
agacaagacuucaguauguug

SEQ ID NO: 2310201 - RNA, 13 nt, Human
agacaagaaaucc

SEQ ID NO: 2310202 - RNA, 17 nt, Human
agacaagaaaucccugu

SEQ ID NO: 2310203 - RNA, 23 nt, Human
agacagagucucacuguugccca

SEQ ID NO: 2310204 - RNA, 15 nt, Human
agacaagagauggga

SEQ ID NO: 2310205 - RNA, 14 nt, Human
agacaacagaaguc

SEQ ID NO: 2310206 - RNA, 13 nt, Human
agacaacagaagu

SEQ ID NO: 2310207 - RNA, 15 nt, Human
agacaacagaaguca

SEQ ID NO: 2310208 - RNA, 21 nt, Human
agacaacccugcaaaggacug

SEQ ID NO: 2310209 - RNA, 20 nt, Human
agacaacccugcaaaggacu

SEQ ID NO: 2310210 - RNA, 14 nt, Human
agacaacccugcaa

SEQ ID NO: 2310211 - RNA, 19 nt, Human
agacagcucccucugccug

SEQ ID NO: 2310212 - RNA, 18 nt, Human
agacagcucccucugccu

SEQ ID NO: 2310213 - RNA, 15 nt, Human
agacagcucccucug

SEQ ID NO: 2310214 - RNA, 21 nt, Human
agacagcuccacccuggccga

SEQ ID NO: 2310215 - RNA, 19 nt, Human
agacagccccagagcaggg

SEQ ID NO: 2310216 - RNA, 20 nt, Human
agacagccccagagcagggu

SEQ ID NO: 2310217 - RNA, 17 nt, Human
agacagcuccacccugg

SEQ ID NO: 2310218 - RNA, 13 nt, Human
agacagccccaga

SEQ ID NO: 2310219 - RNA, 15 nt, Human
agacagccccagagc

SEQ ID NO: 2310220 - RNA, 17 nt, Human
agacagccccagagcag

SEQ ID NO: 2310221 - RNA, 18 nt, Human
agacagccccagagcagg

SEQ ID NO: 2310222 - RNA, 14 nt, Human
agacagcccgggcu

SEQ ID NO: 2310223 - RNA, 15 nt, Human
agacagcccgggcuc

SEQ ID NO: 2310224 - RNA, 15 nt, Human
agacagauacuccuc

SEQ ID NO: 2310225 - RNA, 21 nt, Human
agacagauacuccuccaaggu

SEQ ID NO: 2310226 - RNA, 12 nt, Human
agacagccccag

SEQ ID NO: 2310227 - RNA, 21 nt, Human
aauacuauauuuauacuguau

SEQ ID NO: 2310228 - RNA, 15 nt, Human
aauacuacuccugua

SEQ ID NO: 2310229 - RNA, 14 nt, Human
aauacuaguuguga

SEQ ID NO: 2310230 - RNA, 17 nt, Human
aauacuaguugugaccu

SEQ ID NO: 2310231 - RNA, 15 nt, Human
aauacuauuuuuacu

SEQ ID NO: 2310232 - RNA, 19 nt, Human
aauacuagggagaagguuu

SEQ ID NO: 2310233 - RNA, 21 nt, Human
aauacuaccuugaaaauaaga

SEQ ID NO: 2310234 - RNA, 18 nt, Human
aauacuaccuugaaaaua

SEQ ID NO: 2310235 - RNA, 17 nt, Human
aauacuaccuugaaaau

SEQ ID NO: 2310236 - RNA, 16 nt, Human
aauacucauaauguga

SEQ ID NO: 2310237 - RNA, 17 nt, Human
aauacucauaaugugaa

SEQ ID NO: 2310238 - RNA, 16 nt, Human
aauacuauuuuuacug

SEQ ID NO: 2310239 - RNA, 17 nt, Human
aauacuauuuuuacugc

SEQ ID NO: 2310240 - RNA, 19 nt, Human
aauacuauuuuuacugcca

SEQ ID NO: 2310241 - RNA, 21 nt, Human
aauacuauuuuuacugccacu

SEQ ID NO: 2310242 - RNA, 18 nt, Human
aauacucauaaugugaag

SEQ ID NO: 2310243 - RNA, 19 nt, Human
aauacucauaaugugaagu

SEQ ID NO: 2310244 - RNA, 23 nt, Human
aauacucauaaugugaaguguua

SEQ ID NO: 2310245 - RNA, 12 nt, Human
aauacucaugug

SEQ ID NO: 2310246 - RNA, 13 nt, Human
aauacucaugugu

SEQ ID NO: 2310247 - RNA, 14 nt, Human
aauacucaugugua

SEQ ID NO: 2310248 - RNA, 15 nt, Human
aauacucauguguau

SEQ ID NO: 2310249 - RNA, 16 nt, Human
aauacucauguguaug

SEQ ID NO: 2310250 - RNA, 23 nt, Human
aauacucuuaggaagagaaacca

SEQ ID NO: 2310251 - RNA, 22 nt, Human
aauacucuacccucuuagaaaa

SEQ ID NO: 2310252 - RNA, 20 nt, Human
aauacucuacccucuuagaa

SEQ ID NO: 2310253 - RNA, 13 nt, Human
aauagaaaacuga

SEQ ID NO: 2310254 - RNA, 10 nt, Human
aauacuuuuu

SEQ ID NO: 2310255 - RNA, 20 nt, Human
aauagaaaacugaaaaucua

SEQ ID NO: 2310256 - RNA, 19 nt, Human
aauagaaaacugaaaaucu

SEQ ID NO: 2310257 - RNA, 17 nt, Human
aauagaaaacugaaaau

SEQ ID NO: 2310258 - RNA, 18 nt, Human
aauagaaaacugaaaauc

SEQ ID NO: 2310259 - RNA, 15 nt, Human
aauacuuuuuacaau

SEQ ID NO: 2310260 - RNA, 11 nt, Human
aauacuuuugc

SEQ ID NO: 2310261 - RNA, 14 nt, Human
aauacuuuaaagga

SEQ ID NO: 2310262 - RNA, 15 nt, Human
aauacuuuaaaggaa

SEQ ID NO: 2310263 - RNA, 16 nt, Human
aauacuuuaaaggaaa

SEQ ID NO: 2310264 - RNA, 17 nt, Human
aauacuuuaaaggaaaa

SEQ ID NO: 2310265 - RNA, 16 nt, Human
aauacugccagaugcu

SEQ ID NO: 2310266 - RNA, 17 nt, Human
aauacugccagaugcug

SEQ ID NO: 2310267 - RNA, 23 nt, Human
aauacugccagaugcugauguuc

SEQ ID NO: 2310268 - RNA, 24 nt, Human
aauacugccagaugcugauguuca

SEQ ID NO: 2310269 - RNA, 18 nt, Human
aauacugccagaugcuga

SEQ ID NO: 2310270 - RNA, 19 nt, Human
aauacugccagaugcugau

SEQ ID NO: 2310271 - RNA, 20 nt, Human
aauacugccagaugcugaug

SEQ ID NO: 2310272 - RNA, 22 nt, Human
aauacugccagaugcugauguu

SEQ ID NO: 2310273 - RNA, 17 nt, Human
aauacuugucaauauuu

SEQ ID NO: 2310274 - RNA, 18 nt, Human
aauacuugucaauauuua

SEQ ID NO: 2310275 - RNA, 20 nt, Human
aauacuugucaauauuuaaa

SEQ ID NO: 2310276 - RNA, 22 nt, Human
aauacuguacaaugacuuuauu

SEQ ID NO: 2310277 - RNA, 16 nt, Human
aauacuguauuuugua

SEQ ID NO: 2310278 - RNA, 16 nt, Human
aauauaucccagaaau

SEQ ID NO: 2310279 - RNA, 22 nt, Human
aauauaucccagaaauuagaaa

SEQ ID NO: 2310280 - RNA, 17 nt, Human
aauauaucuaaauugaa

SEQ ID NO: 2310281 - RNA, 18 nt, Human
aauauaucuaaauugaau

SEQ ID NO: 2310282 - RNA, 17 nt, Human
aauauauaucugcuguc

SEQ ID NO: 2310283 - RNA, 19 nt, Human
aauauaccccuuaguguuu

SEQ ID NO: 2310284 - RNA, 16 nt, Human
aauauacuuguggacu

SEQ ID NO: 2310285 - RNA, 16 nt, Human
aauauauaucaaauau

SEQ ID NO: 2310286 - RNA, 13 nt, Human
aauauacuugugg

SEQ ID NO: 2310287 - RNA, 15 nt, Human
aauauacuuguggac

SEQ ID NO: 2310288 - RNA, 20 nt, Human
aauauaucuaaauugaauaa

SEQ ID NO: 2310289 - RNA, 21 nt, Human
aauauaucuaaauugaauaau

SEQ ID NO: 2310290 - RNA, 14 nt, Human
aauauauggcagag

SEQ ID NO: 2310291 - RNA, 19 nt, Human
aauauauggcagaguugua

SEQ ID NO: 2310292 - RNA, 20 nt, Human
aauauauggcagaguuguaa

SEQ ID NO: 2310293 - RNA, 21 nt, Human
aauauguuuuuuagaucaaau

SEQ ID NO: 2310294 - RNA, 22 nt, Human
aauauguuuuuuagaucaaaua

SEQ ID NO: 2310295 - RNA, 20 nt, Human
aauagaaggauguacauuuc

SEQ ID NO: 2310296 - RNA, 19 nt, Human
aauagaaggauguacauuu

SEQ ID NO: 2310297 - RNA, 22 nt, Human
aauagaaggauguacauuucca

SEQ ID NO: 2310298 - RNA, 17 nt, Human
aauagaauauaauuauc

SEQ ID NO: 2310299 - RNA, 20 nt, Human
aauagaauauaauuaucgga

SEQ ID NO: 2310300 - RNA, 13 nt, Human
aauagacaauuua

SEQ ID NO: 2310301 - RNA, 19 nt, Human
aauauacauucaaacuuaa

SEQ ID NO: 2310302 - RNA, 18 nt, Human
aauauacauucaaacuua

SEQ ID NO: 2310303 - RNA, 17 nt, Human
aauauacuauauuuaug

SEQ ID NO: 2310304 - RNA, 11 nt, Human
aauauacugua

SEQ ID NO: 2310305 - RNA, 13 nt, Human
aauauacuguaaa

SEQ ID NO: 2310306 - RNA, 12 nt, Human
aauauacuguaa

SEQ ID NO: 2310307 - RNA, 23 nt, Human
aauauacuguaaagaaagagaga

SEQ ID NO: 2310308 - RNA, 22 nt, Human
aauauacuguaaagaaagagag

SEQ ID NO: 2310309 - RNA, 21 nt, Human
aauauacuguaaagaaagaga

SEQ ID NO: 2310310 - RNA, 18 nt, Human
aauauacuguaaagaaag

SEQ ID NO: 2310311 - RNA, 17 nt, Human
aauauacuguaaagaaa

SEQ ID NO: 2310312 - RNA, 16 nt, Human
aauauacuguaaagaa

SEQ ID NO: 2310313 - RNA, 15 nt, Human
aauauacuguaaaga

SEQ ID NO: 2310314 - RNA, 14 nt, Human
aauauacuguaaag

SEQ ID NO: 2310315 - RNA, 19 nt, Human
aaucacauucgaguguuuc

SEQ ID NO: 2310316 - RNA, 14 nt, Human
aaucaccgaaaacg

SEQ ID NO: 2310317 - RNA, 15 nt, Human
aaucaccaaaggcuc

SEQ ID NO: 2310318 - RNA, 20 nt, Human
aaucaccacaccaaaccucu

SEQ ID NO: 2310319 - RNA, 15 nt, Human
aaucaccgaaaacgu

SEQ ID NO: 2310320 - RNA, 16 nt, Human
aaucaagagcugcccu

SEQ ID NO: 2310321 - RNA, 17 nt, Human
aaucaagagcugcccuc

SEQ ID NO: 2310322 - RNA, 13 nt, Human
aaucaagagcugc

SEQ ID NO: 2310323 - RNA, 14 nt, Human
aaucaagagcugcc

SEQ ID NO: 2310324 - RNA, 20 nt, Human
aaucaagauuuaauccuaga

SEQ ID NO: 2310325 - RNA, 13 nt, Human
aaucaagccucug

SEQ ID NO: 2310326 - RNA, 23 nt, Human
aaucaagccucuggucacauggc

SEQ ID NO: 2310327 - RNA, 15 nt, Human
aaucaagcuucaguu

SEQ ID NO: 2310328 - RNA, 23 nt, Human
aaucaagggcaaaaagucuacau

SEQ ID NO: 2310329 - RNA, 16 nt, Human
aauauuauacuaagaa

SEQ ID NO: 2310330 - RNA, 20 nt, Human
aauauuagaugugauuuaau

SEQ ID NO: 2310331 - RNA, 15 nt, Human
aauauuauacuaaga

SEQ ID NO: 2310332 - RNA, 22 nt, Human
aauauuauacuaagaaaagaua

SEQ ID NO: 2310333 - RNA, 18 nt, Human
aauauuagcuuuacuguu

SEQ ID NO: 2310334 - RNA, 15 nt, Human
aauauuagcuuuacu

SEQ ID NO: 2310335 - RNA, 16 nt, Human
aauauuagaugugauu

SEQ ID NO: 2310336 - RNA, 17 nt, Human
aauauuagaugugauuu

SEQ ID NO: 2310337 - RNA, 18 nt, Human
aauauuagaugugauuua

SEQ ID NO: 2310338 - RNA, 19 nt, Human
aauauuagaugugauuuaa

SEQ ID NO: 2310339 - RNA, 21 nt, Human
aauauuagcuuuacuguuugu

SEQ ID NO: 2310340 - RNA, 19 nt, Human
aauauuagcuuuacuguuu

SEQ ID NO: 2310341 - RNA, 21 nt, Human
aauauuagugaccucagcuuu

SEQ ID NO: 2310342 - RNA, 17 nt, Human
aauauuaaacccuggau

SEQ ID NO: 2310343 - RNA, 13 nt, Human
aauauuagaaaca

SEQ ID NO: 2310344 - RNA, 12 nt, Human
aauauuagaugu

SEQ ID NO: 2310345 - RNA, 13 nt, Human
aauauuagaugug

SEQ ID NO: 2310346 - RNA, 14 nt, Human
aauauuagauguga

SEQ ID NO: 2310347 - RNA, 15 nt, Human
aauauuagaugugau

SEQ ID NO: 2310348 - RNA, 17 nt, Human
aaugaaguuguagguaa

SEQ ID NO: 2310349 - RNA, 23 nt, Human
aaugaagucucugaagugaaacu

SEQ ID NO: 2310350 - RNA, 16 nt, Human
aaugaaguauuucuca

SEQ ID NO: 2310351 - RNA, 16 nt, Human
aaugaagucucugaag

SEQ ID NO: 2310352 - RNA, 14 nt, Human
aaugaagucucuga

SEQ ID NO: 2310353 - RNA, 16 nt, Human
aaugauccccagcugu

SEQ ID NO: 2310354 - RNA, 20 nt, Human
aaugauccccaagugugaac

SEQ ID NO: 2310355 - RNA, 16 nt, Human
aaugaaguuugaaugu

SEQ ID NO: 2310356 - RNA, 12 nt, Human
aaugaaguuuga

SEQ ID NO: 2310357 - RNA, 13 nt, Human
aaugaaguuugaa

SEQ ID NO: 2310358 - RNA, 14 nt, Human
aaugaaguuugaau

SEQ ID NO: 2310359 - RNA, 15 nt, Human
aaugaaguuugaaug

SEQ ID NO: 2310360 - RNA, 21 nt, Human
aaugaaauaauguacaucugg

SEQ ID NO: 2310361 - RNA, 15 nt, Human
aaugaaaguuugcac

SEQ ID NO: 2310362 - RNA, 13 nt, Human
aaugaaauacugu

SEQ ID NO: 2310363 - RNA, 14 nt, Human
aaugaaauacacaa

SEQ ID NO: 2310364 - RNA, 12 nt, Human
aaugaaauaucu

SEQ ID NO: 2310365 - RNA, 22 nt, Human
aaugaaauaucuguauuuaauu

SEQ ID NO: 2310366 - RNA, 18 nt, Human
aaugaaaugcucuccuuu

SEQ ID NO: 2310367 - RNA, 17 nt, Human
aaugaaaugcucuccuu

SEQ ID NO: 2310368 - RNA, 21 nt, Human
aaugaaauccugcuucagugu

SEQ ID NO: 2310369 - RNA, 14 nt, Human
aaugaaauaucugu

SEQ ID NO: 2310370 - RNA, 22 nt, Human
aaugaaggcgggccugcaagcc

SEQ ID NO: 2310371 - RNA, 19 nt, Human
aaugaaaugcucuccuuuc

SEQ ID NO: 2310372 - RNA, 22 nt, Human
aaugaaggugucagaauaauaa

SEQ ID NO: 2310373 - RNA, 21 nt, Human
aaugaagguuaggauuuaaca

SEQ ID NO: 2310374 - RNA, 22 nt, Human
aaugaagguuaggauuuaacag

SEQ ID NO: 2310375 - RNA, 22 nt, Human
aaugauccccagcuguuuaugc

SEQ ID NO: 2310376 - RNA, 19 nt, Human
aaugauccccagcuguuua

SEQ ID NO: 2310377 - RNA, 20 nt, Human
aaugauccccagcuguuuau

SEQ ID NO: 2310378 - RNA, 15 nt, Human
aaugauuaugaauua

SEQ ID NO: 2310379 - RNA, 13 nt, Human
aaugaucuagguu

SEQ ID NO: 2310380 - RNA, 14 nt, Human
aaugaucuagguuu

SEQ ID NO: 2310381 - RNA, 16 nt, Human
aaugaucuagguuuaa

SEQ ID NO: 2310382 - RNA, 17 nt, Human
aaugaucuagguuuaac

SEQ ID NO: 2310383 - RNA, 18 nt, Human
aaugaucuagguuuaacu

SEQ ID NO: 2310384 - RNA, 19 nt, Human
aaugaucuagguuuaacuc

SEQ ID NO: 2310385 - RNA, 22 nt, Human
aaugaucuagguuuaacucaga

SEQ ID NO: 2310386 - RNA, 23 nt, Human
aaugaucuagguuuaacucagau

SEQ ID NO: 2310387 - RNA, 22 nt, Human
aaugaucucucugaauccuaag

SEQ ID NO: 2310388 - RNA, 16 nt, Human
aaugauuaauuaaaac

SEQ ID NO: 2310389 - RNA, 23 nt, Human
aaugauuaugaauuacauuugua

SEQ ID NO: 2310390 - RNA, 21 nt, Human
aaugauuaugaauuacauuug

SEQ ID NO: 2310391 - RNA, 16 nt, Human
aaucucuccauucccg

SEQ ID NO: 2310392 - RNA, 17 nt, Human
aauccaggcagauccag

SEQ ID NO: 2310393 - RNA, 18 nt, Human
aauccaggcagauccagg

SEQ ID NO: 2310394 - RNA, 18 nt, Human
aaucucaaauuucuaaau

SEQ ID NO: 2310395 - RNA, 17 nt, Human
aaucucaaauuucuaaa

SEQ ID NO: 2310396 - RNA, 20 nt, Human
aaucucucgguuccacgucc

SEQ ID NO: 2310397 - RNA, 13 nt, Human
aaucucugugccu

SEQ ID NO: 2310398 - RNA, 17 nt, Human
aaugaaaguauaacuga

SEQ ID NO: 2310399 - RNA, 22 nt, Human
aaugaaagcauguggcauguuc

SEQ ID NO: 2310400 - RNA, 19 nt, Human
aaugaaaguauaacugagu

SEQ ID NO: 2310401 - RNA, 15 nt, Human
aaucucuuuuugacu

SEQ ID NO: 2310402 - RNA, 20 nt, Human
aaucucuuuuugcuuucgaa

SEQ ID NO: 2310403 - RNA, 23 nt, Human
aauccaagcgaggucaacagaga

SEQ ID NO: 2310404 - RNA, 13 nt, Human
aauccagccugcu

SEQ ID NO: 2310405 - RNA, 15 nt, Human
aaucucaaauuucua

SEQ ID NO: 2310406 - RNA, 16 nt, Human
aaucucaaauuucuaa

SEQ ID NO: 2310407 - RNA, 19 nt, Human
aauccagacccggcugcgu

SEQ ID NO: 2310408 - RNA, 17 nt, Human
aauccagacccggcugc

SEQ ID NO: 2310409 - RNA, 15 nt, Human
aauccaaugaaauga

SEQ ID NO: 2310410 - RNA, 17 nt, Human
aauccaagcaaauguga

SEQ ID NO: 2310411 - RNA, 18 nt, Human
aauccaagcaaaugugaa

SEQ ID NO: 2310412 - RNA, 18 nt, Human
aaugguugccuuaaagaa

SEQ ID NO: 2310413 - RNA, 15 nt, Human
aaugguuguauuaga

SEQ ID NO: 2310414 - RNA, 16 nt, Human
aaugguuguauuagau

SEQ ID NO: 2310415 - RNA, 17 nt, Human
aaugucacuuaaaggcu

SEQ ID NO: 2310416 - RNA, 15 nt, Human
aaugucagauacaau

SEQ ID NO: 2310417 - RNA, 19 nt, Human
aaugucagaaaccaguuau

SEQ ID NO: 2310418 - RNA, 17 nt, Human
aaugguugacuggguuu

SEQ ID NO: 2310419 - RNA, 21 nt, Human
aaugguuccaugccugagggu

SEQ ID NO: 2310420 - RNA, 15 nt, Human
aaugguugccuuaaa

SEQ ID NO: 2310421 - RNA, 12 nt, Human
aaugguuguauu

SEQ ID NO: 2310422 - RNA, 13 nt, Human
aaugguuguauua

SEQ ID NO: 2310423 - RNA, 14 nt, Human
aaugguuccaugcc

SEQ ID NO: 2310424 - RNA, 19 nt, Human
aaugguuccaugccugagg

SEQ ID NO: 2310425 - RNA, 15 nt, Human
aaugguuauaaaagu

SEQ ID NO: 2310426 - RNA, 16 nt, Human
aaugguuauaaaagug

SEQ ID NO: 2310427 - RNA, 17 nt, Human
aaugguuauaaaaguga

SEQ ID NO: 2310428 - RNA, 19 nt, Human
aaugguuauaaaagugauu

SEQ ID NO: 2310429 - RNA, 20 nt, Human
aaugucaggaacagaaggau

SEQ ID NO: 2310430 - RNA, 18 nt, Human
aaugucaggaacagaagg

SEQ ID NO: 2310431 - RNA, 16 nt, Human
aaugucagauacaaug

SEQ ID NO: 2310432 - RNA, 17 nt, Human
aaugucagauacaaugu

SEQ ID NO: 2310433 - RNA, 18 nt, Human
aaugucagauacaaugua

SEQ ID NO: 2310434 - RNA, 21 nt, Human
aaugucagauacaauguauuu

SEQ ID NO: 2310435 - RNA, 15 nt, Human
aaugucaguaugugg

SEQ ID NO: 2310436 - RNA, 13 nt, Human
aaugucaguaugu

SEQ ID NO: 2310437 - RNA, 19 nt, Human
aaugucauuaaaauaaaua

SEQ ID NO: 2310438 - RNA, 17 nt, Human
aaugucaucagaacuuu

SEQ ID NO: 2310439 - RNA, 23 nt, Human
aaugcuauaacuauguugauaaa

SEQ ID NO: 2310440 - RNA, 21 nt, Human
aaugcuagguuaauuccaauu

SEQ ID NO: 2310441 - RNA, 18 nt, Human
aaugcugaacauugcaua

SEQ ID NO: 2310442 - RNA, 18 nt, Human
aaugcugaaaaaacaccu

SEQ ID NO: 2310443 - RNA, 19 nt, Human
aaugcugcgcccuucccca

SEQ ID NO: 2310444 - RNA, 15 nt, Human
aaugcugccugccug

SEQ ID NO: 2310445 - RNA, 12 nt, Human
aaugcugccugc

SEQ ID NO: 2310446 - RNA, 14 nt, Human
aaugcugccugccu

SEQ ID NO: 2310447 - RNA, 18 nt, Human
aaugcugccugccugucu

SEQ ID NO: 2310448 - RNA, 12 nt, Human
aaugcugcagau

SEQ ID NO: 2310449 - RNA, 20 nt, Human
aaugcugcagauuugggcug

SEQ ID NO: 2310450 - RNA, 14 nt, Human
aaugcugcauuuua

SEQ ID NO: 2310451 - RNA, 16 nt, Human
aaugcugcauuuuaau

SEQ ID NO: 2310452 - RNA, 21 nt, Human
aaugcugcauuuuaauuuuaa

SEQ ID NO: 2310453 - RNA, 22 nt, Human
aaugcugcccaugccaccgcuu

SEQ ID NO: 2310454 - RNA, 23 nt, Human
aaugcugcccaugccaccgcuuc

SEQ ID NO: 2310455 - RNA, 17 nt, Human
aaugguguuuuuuuaau

SEQ ID NO: 2310456 - RNA, 14 nt, Human
aaugguuauaaaag

SEQ ID NO: 2310457 - RNA, 13 nt, Human
aaugguuaaaaga

SEQ ID NO: 2310458 - RNA, 19 nt, Human
aaugguguuguaugccuuu

SEQ ID NO: 2310459 - RNA, 13 nt, Human
aauguuuccuuua

SEQ ID NO: 2310460 - RNA, 20 nt, Human
aauguuuccaaccuggagua

SEQ ID NO: 2310461 - RNA, 15 nt, Human
aauguuuauuccuug

SEQ ID NO: 2310462 - RNA, 16 nt, Human
aauguuuauuccuuga

SEQ ID NO: 2310463 - RNA, 22 nt, Human
aauguuucuucuagguucuaaa

SEQ ID NO: 2310464 - RNA, 15 nt, Human
aauguuucugcagua

SEQ ID NO: 2310465 - RNA, 23 nt, Human
aauguuucuucuagguucuaaaa

SEQ ID NO: 2310466 - RNA, 15 nt, Human
aauguuugccucugc

SEQ ID NO: 2310467 - RNA, 16 nt, Human
aauguuugccucugcc

SEQ ID NO: 2310468 - RNA, 12 nt, Human
aauguuuccuuu

SEQ ID NO: 2310469 - RNA, 22 nt, Human
aauguuuaugagccagacaaau

SEQ ID NO: 2310470 - RNA, 20 nt, Human
aauguuuauuccugauaaua

SEQ ID NO: 2310471 - RNA, 23 nt, Human
aauguuuaugcaaggaaggaaag

SEQ ID NO: 2310472 - RNA, 23 nt, Human
aauguuucaaacauauauaacaa

SEQ ID NO: 2310473 - RNA, 22 nt, Human
aauguuuaugcaaggaaggaaa

SEQ ID NO: 2310474 - RNA, 21 nt, Human
aauguuuaugcaaggaaggaa

SEQ ID NO: 2310475 - RNA, 18 nt, Human
aauguuuaugagccagac

SEQ ID NO: 2310476 - RNA, 17 nt, Human
aauguuuaugagccaga

SEQ ID NO: 2310477 - RNA, 16 nt, Human
aauguuuaugagccag

SEQ ID NO: 2310478 - RNA, 15 nt, Human
aauguuuaugagcca

SEQ ID NO: 2310479 - RNA, 21 nt, Human
aauguuuacagggagccuccu

SEQ ID NO: 2310480 - RNA, 22 nt, Human
aauguuuacagggagccuccug

SEQ ID NO: 2310481 - RNA, 20 nt, Human
aauguuuagcaaauacauau

SEQ ID NO: 2310482 - RNA, 22 nt, Human
aauguuuacagauccccaagcc

SEQ ID NO: 2310483 - RNA, 15 nt, Human
aaugugaaaagaaaa

SEQ ID NO: 2310484 - RNA, 17 nt, Human
aaugugaaaagaaaaau

SEQ ID NO: 2310485 - RNA, 17 nt, Human
aaugucuuuugaauauu

SEQ ID NO: 2310486 - RNA, 14 nt, Human
aauguuuaaugcug

SEQ ID NO: 2310487 - RNA, 20 nt, Human
aauguuuacacucuuuguaa

SEQ ID NO: 2310488 - RNA, 23 nt, Human
aauguuuacacucuuuguaagag

SEQ ID NO: 2310489 - RNA, 22 nt, Human
aaugucuuuguuggaaaagaau

SEQ ID NO: 2310490 - RNA, 18 nt, Human
aaugucuuuguuggaaaa

SEQ ID NO: 2310491 - RNA, 13 nt, Human
aaugucuuuugaa

SEQ ID NO: 2310492 - RNA, 15 nt, Human
aaugucuuuugaaua

SEQ ID NO: 2310493 - RNA, 21 nt, Human
aaugucuuuuuuuuaaugugc

SEQ ID NO: 2310494 - RNA, 22 nt, Human
aaugucuuuuuuuuaaugugcu

SEQ ID NO: 2310495 - RNA, 23 nt, Human
aauguccuccagaagccucuggc

SEQ ID NO: 2310496 - RNA, 21 nt, Human
aauguccuccagaagccucug

SEQ ID NO: 2310497 - RNA, 12 nt, Human
aaugucuaaaug

SEQ ID NO: 2310498 - RNA, 15 nt, Human
aaugucuaaaugcug

SEQ ID NO: 2310499 - RNA, 17 nt, Human
aaugucuaaaugcugaa

SEQ ID NO: 2310500 - RNA, 18 nt, Human
aaugucuaaaugcugaaa

SEQ ID NO: 2310501 - RNA, 18 nt, Human
aauguccuccagaagccu

SEQ ID NO: 2310502 - RNA, 17 nt, Human
aauguccuccagaagcc

SEQ ID NO: 2310503 - RNA, 18 nt, Human
aauguccaugauggaaua

SEQ ID NO: 2310504 - RNA, 20 nt, Human
aaugcggccgcauucccuga

SEQ ID NO: 2310505 - RNA, 14 nt, Human
aaugcguaauuaaa

SEQ ID NO: 2310506 - RNA, 18 nt, Human
aaugcgugcauaccacuu

SEQ ID NO: 2310507 - RNA, 19 nt, Human
aaugcgugcauaccacuuu

SEQ ID NO: 2310508 - RNA, 18 nt, Human
aaugcuagguuaauucca

SEQ ID NO: 2310509 - RNA, 19 nt, Human
aaugcuagguuaauuccaa

SEQ ID NO: 2310510 - RNA, 12 nt, Human
aaugccuuuaaa

SEQ ID NO: 2310511 - RNA, 12 nt, Human
aaugccuuugag

SEQ ID NO: 2310512 - RNA, 13 nt, Human
aaugccuuugaga

SEQ ID NO: 2310513 - RNA, 14 nt, Human
aaugccuuugagac

SEQ ID NO: 2310514 - RNA, 16 nt, Human
aaugccuuugagacag

SEQ ID NO: 2310515 - RNA, 17 nt, Human
aaugccuuugagacagu

SEQ ID NO: 2310516 - RNA, 18 nt, Human
aaugccuuugagacaguu

SEQ ID NO: 2310517 - RNA, 19 nt, Human
aaugccuuugagacaguuu

SEQ ID NO: 2310518 - RNA, 20 nt, Human
aaugccuuugagacaguuuc

SEQ ID NO: 2310519 - RNA, 22 nt, Human
aaugccuuugagacaguuucuu

SEQ ID NO: 2310520 - RNA, 23 nt, Human
aaugccuuugagacaguuucuua

SEQ ID NO: 2310521 - RNA, 21 nt, Human
aaugcgcaggcuggcccugcc

SEQ ID NO: 2310522 - RNA, 22 nt, Human
aaugcgcaggcuggcccugccc

SEQ ID NO: 2310523 - RNA, 23 nt, Human
aaugccuuacccucauguucuua

SEQ ID NO: 2310524 - RNA, 15 nt, Human
aauguuuuuuuuuaa

SEQ ID NO: 2310525 - RNA, 20 nt, Human
aauguuuuuuuuuaaagacu

SEQ ID NO: 2310526 - RNA, 22 nt, Human
aauguuuuuuuuuaaagacuuu

SEQ ID NO: 2310527 - RNA, 21 nt, Human
aauuaaaaaaaaagaucuguu

SEQ ID NO: 2310528 - RNA, 20 nt, Human
aauuaaaaaaaaaaaacuuu

SEQ ID NO: 2310529 - RNA, 22 nt, Human
aagcagcggucagcagacaagg

SEQ ID NO: 2310530 - RNA, 17 nt, Human
aagcagcccuuggccag

SEQ ID NO: 2310531 - RNA, 19 nt, Human
aagcagcgaccgcccccuc

SEQ ID NO: 2310532 - RNA, 20 nt, Human
aagcagcgaccgcccccucc

SEQ ID NO: 2310533 - RNA, 19 nt, Human
aagcagcucaaaggcacag

SEQ ID NO: 2310534 - RNA, 18 nt, Human
aagcagcucaaaggcaca

SEQ ID NO: 2310535 - RNA, 16 nt, Human
aagcagcucaaaggca

SEQ ID NO: 2310536 - RNA, 13 nt, Human
aagcagcucaaag

SEQ ID NO: 2310537 - RNA, 17 nt, Human
aagccaauucagacagg

SEQ ID NO: 2310538 - RNA, 11 nt, Human
aagccaauuuu

SEQ ID NO: 2310539 - RNA, 22 nt, Human
aagcagcguuucuaugacacau

SEQ ID NO: 2310540 - RNA, 21 nt, Human
aagcagcguuucuaugacaca

SEQ ID NO: 2310541 - RNA, 14 nt, Human
aagccacagcuggu

SEQ ID NO: 2310542 - RNA, 16 nt, Human
aagccacaagaaauuu

SEQ ID NO: 2310543 - RNA, 11 nt, Human
aagccacagaa

SEQ ID NO: 2310544 - RNA, 22 nt, Human
aagccaauuuuucugcacugag

SEQ ID NO: 2310545 - RNA, 15 nt, Human
aagccacaagaaauu

SEQ ID NO: 2310546 - RNA, 18 nt, Human
aagccacaagaaauuuga

SEQ ID NO: 2310547 - RNA, 13 nt, Human
aagccaauuuuuc

SEQ ID NO: 2310548 - RNA, 14 nt, Human
aagccaauuuuucu

SEQ ID NO: 2310549 - RNA, 16 nt, Human
aagccaauuuuucugc

SEQ ID NO: 2310550 - RNA, 17 nt, Human
aagccaauuuuucugca

SEQ ID NO: 2310551 - RNA, 18 nt, Human
aagccaauuuuucugcac

SEQ ID NO: 2310552 - RNA, 20 nt, Human
aagccaauuuuucugcacug

SEQ ID NO: 2310553 - RNA, 21 nt, Human
aagccaauuuuucugcacuga

SEQ ID NO: 2310554 - RNA, 19 nt, Human
aagccagcaggcucucagg

SEQ ID NO: 2310555 - RNA, 22 nt, Human
aagccacaggccugagauuuca

SEQ ID NO: 2310556 - RNA, 23 nt, Human
aagccacaggccugagauuucau

SEQ ID NO: 2310557 - RNA, 14 nt, Human
aagccacaggccug

SEQ ID NO: 2310558 - RNA, 15 nt, Human
aagccacaggccuga

SEQ ID NO: 2310559 - RNA, 17 nt, Human
aagccacaggccugaga

SEQ ID NO: 2310560 - RNA, 19 nt, Human
aagccacaggccugagauu

SEQ ID NO: 2310561 - RNA, 21 nt, Human
aagcagccaagcuccuuggga

SEQ ID NO: 2310562 - RNA, 16 nt, Human
aagcagcccuuggcca

SEQ ID NO: 2310563 - RNA, 16 nt, Human
aagcagccucucccca

SEQ ID NO: 2310564 - RNA, 17 nt, Human
aagcagccucuccccag

SEQ ID NO: 2310565 - RNA, 22 nt, Human
aagcagccucuccccaggucca

SEQ ID NO: 2310566 - RNA, 14 nt, Human
aagcagcguuucua

SEQ ID NO: 2310567 - RNA, 20 nt, Human
aagcagcguuucuaugacac

SEQ ID NO: 2310568 - RNA, 17 nt, Human
aagcagcguuucuauga

SEQ ID NO: 2310569 - RNA, 20 nt, Human
aagcagauggaaugcugugu

SEQ ID NO: 2310570 - RNA, 16 nt, Human
aagcagccaagcuccu

SEQ ID NO: 2310571 - RNA, 14 nt, Human
aagcagccaagcuc

SEQ ID NO: 2310572 - RNA, 13 nt, Human
aagcagcccuugg

SEQ ID NO: 2310573 - RNA, 23 nt, Human
aagcagaugcaaagaggcaagag

SEQ ID NO: 2310574 - RNA, 21 nt, Human
aagcagaugcaaagaggcaag

SEQ ID NO: 2310575 - RNA, 19 nt, Human
aagcagaugcaaagaggca

SEQ ID NO: 2310576 - RNA, 17 nt, Human
aagcagauggaaugcug

SEQ ID NO: 2310577 - RNA, 19 nt, Human
aagcagauggaaugcugug

SEQ ID NO: 2310578 - RNA, 17 nt, Human
aagccagcguccuccuc

SEQ ID NO: 2310579 - RNA, 14 nt, Human
aagccagcguccuc

SEQ ID NO: 2310580 - RNA, 19 nt, Human
aagccagcguccuccucug

SEQ ID NO: 2310581 - RNA, 11 nt, Human
aagccagccuu

SEQ ID NO: 2310582 - RNA, 20 nt, Human
aagccagcaggcucucaggc

SEQ ID NO: 2310583 - RNA, 23 nt, Human
aagccagcaggcucucaggccag

SEQ ID NO: 2310584 - RNA, 14 nt, Human
aacuuuccucgccu

SEQ ID NO: 2310585 - RNA, 18 nt, Human
aacuuucucuucauacuu

SEQ ID NO: 2310586 - RNA, 21 nt, Human
aacuuuauuaaauacaaaacu

SEQ ID NO: 2310587 - RNA, 23 nt, Human
aacuuuauuaaauacaaaacuuc

SEQ ID NO: 2310588 - RNA, 19 nt, Human
aacuuuauuaaauacaaaa

SEQ ID NO: 2310589 - RNA, 17 nt, Human
aacuuuauuaaauacaa

SEQ ID NO: 2310590 - RNA, 11 nt, Human
aacuuucauuu

SEQ ID NO: 2310591 - RNA, 14 nt, Human
aacuuucauuuuuu

SEQ ID NO: 2310592 - RNA, 17 nt, Human
aacuuucauuuuuuucc

SEQ ID NO: 2310593 - RNA, 22 nt, Human
aagagugacaguggauugcauu

SEQ ID NO: 2310594 - RNA, 14 nt, Human
aagagugcauuuuc

SEQ ID NO: 2310595 - RNA, 15 nt, Human
aagagugaaaaauga

SEQ ID NO: 2310596 - RNA, 23 nt, Human
aagagugauagucuuuugcuuuu

SEQ ID NO: 2310597 - RNA, 16 nt, Human
aagagugggcugcauc

SEQ ID NO: 2310598 - RNA, 19 nt, Human
aagagugggggagagcagg

SEQ ID NO: 2310599 - RNA, 20 nt, Human
aagagugggggagagcaggc

SEQ ID NO: 2310600 - RNA, 20 nt, Human
aagagugcgccgagucuguc

SEQ ID NO: 2310601 - RNA, 17 nt, Human
aagauaaagaugaucua

SEQ ID NO: 2310602 - RNA, 22 nt, Human
aagauaccuaaaagagauuuca

SEQ ID NO: 2310603 - RNA, 13 nt, Human
aagauaccuaaaa

SEQ ID NO: 2310604 - RNA, 12 nt, Human
aagauaaagaug

SEQ ID NO: 2310605 - RNA, 14 nt, Human
aagauaaagaugau

SEQ ID NO: 2310606 - RNA, 21 nt, Human
aagauacgacuuuauuuucug

SEQ ID NO: 2310607 - RNA, 18 nt, Human
aagauacgacuuuauuuu

SEQ ID NO: 2310608 - RNA, 15 nt, Human
aagauacgacuuuau

SEQ ID NO: 2310609 - RNA, 14 nt, Human
aagauacgacuuua

SEQ ID NO: 2310610 - RNA, 13 nt, Human
aagauaaaugugc

SEQ ID NO: 2310611 - RNA, 23 nt, Human
aagauacaguuacucagaauucu

SEQ ID NO: 2310612 - RNA, 12 nt, Human
aagauaaaugug

SEQ ID NO: 2310613 - RNA, 12 nt, Human
aagaguguacug

SEQ ID NO: 2310614 - RNA, 20 nt, Human
aagauucccagagacaggaa

SEQ ID NO: 2310615 - RNA, 20 nt, Human
aagauuacuuagaggaaaua

SEQ ID NO: 2310616 - RNA, 19 nt, Human
aagauucccagagacagga

SEQ ID NO: 2310617 - RNA, 18 nt, Human
aagauuacuuagaggaaa

SEQ ID NO: 2310618 - RNA, 14 nt, Human
aagauguuuaacuu

SEQ ID NO: 2310619 - RNA, 18 nt, Human
aagauguuuaacuuaauc

SEQ ID NO: 2310620 - RNA, 16 nt, Human
aagauguuugucagau

SEQ ID NO: 2310621 - RNA, 19 nt, Human
aagcugggccccagcccac

SEQ ID NO: 2310622 - RNA, 17 nt, Human
aagcugggccccagccc

SEQ ID NO: 2310623 - RNA, 18 nt, Human
aagcugggccccagccca

SEQ ID NO: 2310624 - RNA, 15 nt, Human
aagcugggcagguug

SEQ ID NO: 2310625 - RNA, 19 nt, Human
aagcuaccucaaacuucca

SEQ ID NO: 2310626 - RNA, 20 nt, Human
aagcuacagguuacaacaga

SEQ ID NO: 2310627 - RNA, 21 nt, Human
aagcuacagguuacaacagau

SEQ ID NO: 2310628 - RNA, 22 nt, Human
aagcuacagguuacaacagauu

SEQ ID NO: 2310629 - RNA, 18 nt, Human
aagcuggucccacucagu

SEQ ID NO: 2310630 - RNA, 21 nt, Human
aagcuggucccacucagucca

SEQ ID NO: 2310631 - RNA, 17 nt, Human
aagcugguaaacuauuu

SEQ ID NO: 2310632 - RNA, 17 nt, Human
aagcuguaaaaagagag

SEQ ID NO: 2310633 - RNA, 18 nt, Human
aagcuguaaaaagagaga

SEQ ID NO: 2310634 - RNA, 22 nt, Human
aagcuguaguagcccuuucugu

SEQ ID NO: 2310635 - RNA, 19 nt, Human
aagcugugacuucuccagg

SEQ ID NO: 2310636 - RNA, 23 nt, Human
aagcuguaguagcccuuucugug

SEQ ID NO: 2310637 - RNA, 13 nt, Human
aagcugugagaca

SEQ ID NO: 2310638 - RNA, 22 nt, Human
aagcugugagacagugggaaau

SEQ ID NO: 2310639 - RNA, 14 nt, Human
aagcugugccaccc

SEQ ID NO: 2310640 - RNA, 22 nt, Human
aagcuguguccuugcaccugca

SEQ ID NO: 2310641 - RNA, 12 nt, Human
aagcuguguccu

SEQ ID NO: 2310642 - RNA, 21 nt, Human
aagcugugccacccugggcuc

SEQ ID NO: 2310643 - RNA, 13 nt, Human
aagcuguggccag

SEQ ID NO: 2310644 - RNA, 16 nt, Human
aagcugugccacccug

SEQ ID NO: 2310645 - RNA, 20 nt, Human
aagcugugccacccugggcu

SEQ ID NO: 2310646 - RNA, 18 nt, Human
aagcuguguggcagucug

SEQ ID NO: 2310647 - RNA, 23 nt, Human
aaggacuguuuuuuccugagcuu

SEQ ID NO: 2310648 - RNA, 22 nt, Human
aaggacuuccuguccagcucca

SEQ ID NO: 2310649 - RNA, 21 nt, Human
aaggacuuccuguccagcucc

SEQ ID NO: 2310650 - RNA, 20 nt, Human
aaggacuuccuguccagcuc

SEQ ID NO: 2310651 - RNA, 17 nt, Human
aaggacuuccuguccag

SEQ ID NO: 2310652 - RNA, 20 nt, Human
aagcuguguccuugcaccug

SEQ ID NO: 2310653 - RNA, 14 nt, Human
aaggacacuuccug

SEQ ID NO: 2310654 - RNA, 16 nt, Human
aaggacacuuccugcc

SEQ ID NO: 2310655 - RNA, 17 nt, Human
aaggacacuuccugccu

SEQ ID NO: 2310656 - RNA, 21 nt, Human
aagcugugugcucuccaagcc

SEQ ID NO: 2310657 - RNA, 13 nt, Human
aaggacacuagaa

SEQ ID NO: 2310658 - RNA, 18 nt, Human
aaggacacuuccugccua

SEQ ID NO: 2310659 - RNA, 17 nt, Human
aaggacagaguaugaac

SEQ ID NO: 2310660 - RNA, 19 nt, Human
aaggacagccccuccucca

SEQ ID NO: 2310661 - RNA, 13 nt, Human
aaggacagccccu

SEQ ID NO: 2310662 - RNA, 20 nt, Human
aaggcagggagcgagggaga

SEQ ID NO: 2310663 - RNA, 18 nt, Human
aaggcagggaaaggcucu

SEQ ID NO: 2310664 - RNA, 12 nt, Human
aaggcagggagg

SEQ ID NO: 2310665 - RNA, 19 nt, Human
aaggcaggaauguguggca

SEQ ID NO: 2310666 - RNA, 16 nt, Human
aaggcaggaaugugug

SEQ ID NO: 2310667 - RNA, 23 nt, Human
aaggauuguaaaaaaaaaugccu

SEQ ID NO: 2310668 - RNA, 12 nt, Human
aaggcaggaaga

SEQ ID NO: 2310669 - RNA, 13 nt, Human
aaggcaggaagag

SEQ ID NO: 2310670 - RNA, 14 nt, Human
aaggcaggaagaga

SEQ ID NO: 2310671 - RNA, 20 nt, Human
aaggcagcucuaaaugucaa

SEQ ID NO: 2310672 - RNA, 16 nt, Human
aaggauucauguggaa

SEQ ID NO: 2310673 - RNA, 15 nt, Human
aaggauguugguguu

SEQ ID NO: 2310674 - RNA, 23 nt, Human
aaggacuuccuguccagcuccaa

SEQ ID NO: 2310675 - RNA, 15 nt, Human
aaggauguucuagca

SEQ ID NO: 2310676 - RNA, 15 nt, Human
aaggauugcuacugu

SEQ ID NO: 2310677 - RNA, 12 nt, Human
aaggauuguaaa

SEQ ID NO: 2310678 - RNA, 13 nt, Human
aaggauuguaaaa

SEQ ID NO: 2310679 - RNA, 14 nt, Human
aaggauuguaaaaa

SEQ ID NO: 2310680 - RNA, 21 nt, Human
aaggauuguaaaaaaaaaugc

SEQ ID NO: 2310681 - RNA, 23 nt, Human
aagcggaaaagguuuuauuuugu

SEQ ID NO: 2310682 - RNA, 23 nt, Human
aagcuaauuugcauuaaauucac

SEQ ID NO: 2310683 - RNA, 22 nt, Human
aagcuaauuugcauuaaauuca

SEQ ID NO: 2310684 - RNA, 15 nt, Human
aagcuaauuugcauu

SEQ ID NO: 2310685 - RNA, 13 nt, Human
aagcuacagguua

SEQ ID NO: 2310686 - RNA, 14 nt, Human
aagcuacagguuac

SEQ ID NO: 2310687 - RNA, 15 nt, Human
aagcuacagguuaca

SEQ ID NO: 2310688 - RNA, 18 nt, Human
aagcuacagguuacaaca

SEQ ID NO: 2310689 - RNA, 19 nt, Human
aagcuacagguuacaacag

SEQ ID NO: 2310690 - RNA, 14 nt, Human
aagcuaauuugcau

SEQ ID NO: 2310691 - RNA, 21 nt, Human
aagcggagguugcagggagcc

SEQ ID NO: 2310692 - RNA, 21 nt, Human
aagcgauucuucugcuucagc

SEQ ID NO: 2310693 - RNA, 17 nt, Human
aagcgauucuucugcuu

SEQ ID NO: 2310694 - RNA, 18 nt, Human
aagggagcuaucaggaac

SEQ ID NO: 2310695 - RNA, 17 nt, Human
aagggagagcggggcag

SEQ ID NO: 2310696 - RNA, 17 nt, Human
aagggagcagaacugaa

SEQ ID NO: 2310697 - RNA, 24 nt, Human
aagggagcacuggguugacuuuca

SEQ ID NO: 2310698 - RNA, 16 nt, Human
aagggagagagagagg

SEQ ID NO: 2310699 - RNA, 17 nt, Human
aagggagagaccucauc

SEQ ID NO: 2310700 - RNA, 16 nt, Human
aagggagaagaaaggu

SEQ ID NO: 2310701 - RNA, 18 nt, Human
aagggacgcuacccggga

SEQ ID NO: 2310702 - RNA, 19 nt, Human
aagggacauguuuugauaa

SEQ ID NO: 2310703 - RNA, 20 nt, Human
aagggacauguuuugauaaa

SEQ ID NO: 2310704 - RNA, 13 nt, Human
aagggaccaaggc

SEQ ID NO: 2310705 - RNA, 13 nt, Human
aagggaaauauca

SEQ ID NO: 2310706 - RNA, 12 nt, Human
aagggaaauaga

SEQ ID NO: 2310707 - RNA, 14 nt, Human
aagggaaauaucau

SEQ ID NO: 2310708 - RNA, 15 nt, Human
aagggaaauaucauu

SEQ ID NO: 2310709 - RNA, 23 nt, Human
aagggaaacugccagcaacgcag

SEQ ID NO: 2310710 - RNA, 23 nt, Human
aagggaacagugaggugcccagc

SEQ ID NO: 2310711 - RNA, 16 nt, Human
aagggaaauaucauuu

SEQ ID NO: 2310712 - RNA, 15 nt, Human
aagggaaccuguguc

SEQ ID NO: 2310713 - RNA, 23 nt, Human
aagggaaggccccacagacaagg

SEQ ID NO: 2310714 - RNA, 18 nt, Human
aagggaaggaacucuggc

SEQ ID NO: 2310715 - RNA, 17 nt, Human
aagggaaguugugccuu

SEQ ID NO: 2310716 - RNA, 16 nt, Human
aagggacauguuuuga

SEQ ID NO: 2310717 - RNA, 22 nt, Human
aagggccaguccugccuggcca

SEQ ID NO: 2310718 - RNA, 9 nt, Human
aagggccag

SEQ ID NO: 2310719 - RNA, 14 nt, Human
aagggccagucugg

SEQ ID NO: 2310720 - RNA, 18 nt, Human
aagggccagucugggcug

SEQ ID NO: 2310721 - RNA, 16 nt, Human
aagggccaugcugaag

SEQ ID NO: 2310722 - RNA, 17 nt, Human
aagggccaugcugaagg

SEQ ID NO: 2310723 - RNA, 19 nt, Human
aagggccaugcugaaggga

SEQ ID NO: 2310724 - RNA, 16 nt, Human
aagggccaguccugcc

SEQ ID NO: 2310725 - RNA, 14 nt, Human
aagggccaguccug

SEQ ID NO: 2310726 - RNA, 17 nt, Human
aagggccagagccaggg

SEQ ID NO: 2310727 - RNA, 19 nt, Human
aaggucauuuuuuuuaaga

SEQ ID NO: 2310728 - RNA, 18 nt, Human
aaggucauuuuuuuuaag

SEQ ID NO: 2310729 - RNA, 16 nt, Human
aagggccagagccagg

SEQ ID NO: 2310730 - RNA, 15 nt, Human
aagggccagagccag

SEQ ID NO: 2310731 - RNA, 14 nt, Human
aagggccagagcca

SEQ ID NO: 2310732 - RNA, 13 nt, Human
aagggccagagcc

SEQ ID NO: 2310733 - RNA, 12 nt, Human
aagggccagagc

SEQ ID NO: 2310734 - RNA, 11 nt, Human
aagggccagag

SEQ ID NO: 2310735 - RNA, 23 nt, Human
aagggcauuggccauucuauugu

SEQ ID NO: 2310736 - RNA, 16 nt, Human
aagggaaaagucucuu

SEQ ID NO: 2310737 - RNA, 17 nt, Human
aagggaaacugccagca

SEQ ID NO: 2310738 - RNA, 16 nt, Human
aagggaaacugccagc

SEQ ID NO: 2310739 - RNA, 19 nt, Human
aaguccagauuuacacugg

SEQ ID NO: 2310740 - RNA, 22 nt, Human
aaguccagauuuacacugggag

SEQ ID NO: 2310741 - RNA, 22 nt, Human
aagucccuguaauuguuguuug

SEQ ID NO: 2310742 - RNA, 21 nt, Human
aagucccuguuuucugagccc

SEQ ID NO: 2310743 - RNA, 22 nt, Human
aagucccuguuuucugagcccg

SEQ ID NO: 2310744 - RNA, 18 nt, Human
aaguccucuuuucugaga

SEQ ID NO: 2310745 - RNA, 17 nt, Human
aaguccuacaagcuaaa

SEQ ID NO: 2310746 - RNA, 18 nt, Human
aaguauccugcuucugau

SEQ ID NO: 2310747 - RNA, 17 nt, Human
aaguaguguaucacagu

SEQ ID NO: 2310748 - RNA, 19 nt, Human
aaguaguaaaaauuaaaaa

SEQ ID NO: 2310749 - RNA, 17 nt, Human
aaguccaagcauaccaa

SEQ ID NO: 2310750 - RNA, 17 nt, Human
aaguaucuacaugcggu

SEQ ID NO: 2310751 - RNA, 12 nt, Human
aaguccaaugug

SEQ ID NO: 2310752 - RNA, 18 nt, Human
aaguccaagcauuuagau

SEQ ID NO: 2310753 - RNA, 16 nt, Human
aagucuaaauauuucc

SEQ ID NO: 2310754 - RNA, 21 nt, Human
aagucuaaaguuuacaguaaa

SEQ ID NO: 2310755 - RNA, 19 nt, Human
aagucuaaaguuuacagua

SEQ ID NO: 2310756 - RNA, 20 nt, Human
aagucuaaaguuuacaguaa

SEQ ID NO: 2310757 - RNA, 22 nt, Human
aagucuaggagcugggaggaaa

SEQ ID NO: 2310758 - RNA, 19 nt, Human
aagucuaggagcugggagg

SEQ ID NO: 2310759 - RNA, 15 nt, Human
aagucguugugaggg

SEQ ID NO: 2310760 - RNA, 11 nt, Human
aagucuaaagu

SEQ ID NO: 2310761 - RNA, 13 nt, Human
aagucuaaaguuu

SEQ ID NO: 2310762 - RNA, 14 nt, Human
aagucuaaaguuua

SEQ ID NO: 2310763 - RNA, 15 nt, Human
aagucuaaaguuuac

SEQ ID NO: 2310764 - RNA, 17 nt, Human
aagucuaaaguuuacag

SEQ ID NO: 2310765 - RNA, 21 nt, Human
aagucucacuggcugucagua

SEQ ID NO: 2310766 - RNA, 17 nt, Human
aagucuaaauauuuccu

SEQ ID NO: 2310767 - RNA, 17 nt, Human
aagucuaugaugcuguu

SEQ ID NO: 2310768 - RNA, 14 nt, Human
aagucuccaaaguc

SEQ ID NO: 2310769 - RNA, 15 nt, Human
aagucgaauuaauag

SEQ ID NO: 2310770 - RNA, 16 nt, Human
aaguccuuuaugugga

SEQ ID NO: 2310771 - RNA, 13 nt, Human
aaguccuuuaugu

SEQ ID NO: 2310772 - RNA, 21 nt, Human
aaguccuuuuuuuccaucuuu

SEQ ID NO: 2310773 - RNA, 18 nt, Human
aaguccuuaccucuuccg

SEQ ID NO: 2310774 - RNA, 22 nt, Human
aaguccugaagaggcgggccag

SEQ ID NO: 2310775 - RNA, 13 nt, Human
aaguccugaagag

SEQ ID NO: 2310776 - RNA, 17 nt, Human
aaguccugaagaggcgg

SEQ ID NO: 2310777 - RNA, 23 nt, Human
aaguccugaagaggcgggccagc

SEQ ID NO: 2310778 - RNA, 22 nt, Human
aaguccucuuuucugagaggac

SEQ ID NO: 2310779 - RNA, 14 nt, Human
aaguaguccuguga

SEQ ID NO: 2310780 - RNA, 17 nt, Human
aaguaucccuacuguaa

SEQ ID NO: 2310781 - RNA, 23 nt, Human
aaguaucccuacuguaauuugug

SEQ ID NO: 2310782 - RNA, 18 nt, Human
aaguaucccuacuguaau

SEQ ID NO: 2310783 - RNA, 21 nt, Human
aaguagaagucuuagauguau

SEQ ID NO: 2310784 - RNA, 15 nt, Human
aaguaggcaugaggg

SEQ ID NO: 2310785 - RNA, 15 nt, Human
aaguaggcaggacca

SEQ ID NO: 2310786 - RNA, 23 nt, Human
aaguaggacuuuccuaaauguuu

SEQ ID NO: 2310787 - RNA, 14 nt, Human
aaguaggcaggacc

SEQ ID NO: 2310788 - RNA, 22 nt, Human
aaguaggacuuuccuaaauguu

SEQ ID NO: 2310789 - RNA, 19 nt, Human
aaguagggguuguggguga

SEQ ID NO: 2310790 - RNA, 13 nt, Human
aaguaguaaaaau

SEQ ID NO: 2310791 - RNA, 15 nt, Human
aaguaguaaaaauua

SEQ ID NO: 2310792 - RNA, 18 nt, Human
aaguaguaaaaauuaaaa

SEQ ID NO: 2310793 - RNA, 15 nt, Human
aaguagggggucuaa

SEQ ID NO: 2310794 - RNA, 21 nt, Human
aaguagggacuucugucuuca

SEQ ID NO: 2310795 - RNA, 17 nt, Human
aaggugacccaaugauu

SEQ ID NO: 2310796 - RNA, 20 nt, Human
aaggucggaggcuugggacc

SEQ ID NO: 2310797 - RNA, 22 nt, Human
aaggucggaggcuugggaccgc

SEQ ID NO: 2310798 - RNA, 20 nt, Human
aagguccucugucagucaca

SEQ ID NO: 2310799 - RNA, 14 nt, Human
aaggucggaccagc

SEQ ID NO: 2310800 - RNA, 18 nt, Human
aaggucggaggcuuggga

SEQ ID NO: 2310801 - RNA, 20 nt, Human
aaggugaggagcuugaaacc

SEQ ID NO: 2310802 - RNA, 22 nt, Human
aaggugaguuugagcugccuuc

SEQ ID NO: 2310803 - RNA, 17 nt, Human
aaggugauauauuuaaa

SEQ ID NO: 2310804 - RNA, 20 nt, Human
aaggugaguuugagcugccu

SEQ ID NO: 2310805 - RNA, 21 nt, Human
aaggugaguuugagcugccuu

SEQ ID NO: 2310806 - RNA, 20 nt, Human
aaguagaagucuuagaugua

SEQ ID NO: 2310807 - RNA, 19 nt, Human
aaguagaagucuuagaugu

SEQ ID NO: 2310808 - RNA, 20 nt, Human
aaggugccugugaggcaggg

SEQ ID NO: 2310809 - RNA, 11 nt, Human
aaggugccugu

SEQ ID NO: 2310810 - RNA, 18 nt, Human
aaggugccugugaggcag

SEQ ID NO: 2310811 - RNA, 14 nt, Human
aaggugcaguuccc

SEQ ID NO: 2310812 - RNA, 23 nt, Human
aaggugcaguucccccaaccuca

SEQ ID NO: 2310813 - RNA, 22 nt, Human
aaguugcagugagcugauauca

SEQ ID NO: 2310814 - RNA, 20 nt, Human
aaguugauauagaacagugc

SEQ ID NO: 2310815 - RNA, 21 nt, Human
aaguugauauagaacagugcu

SEQ ID NO: 2310816 - RNA, 17 nt, Human
aaguugauauagaacag

SEQ ID NO: 2310817 - RNA, 19 nt, Human
aaguguaagaaacacacug

SEQ ID NO: 2310818 - RNA, 12 nt, Human
aaguguaacugg

SEQ ID NO: 2310819 - RNA, 11 nt, Human
aaguguaacug

SEQ ID NO: 2310820 - RNA, 21 nt, Human
aaguguaacagcugaggucuc

SEQ ID NO: 2310821 - RNA, 16 nt, Human
aaguguaauagauuau

SEQ ID NO: 2310822 - RNA, 14 nt, Human
aaguguacauaugu

SEQ ID NO: 2310823 - RNA, 20 nt, Human
aaguguaggcagacacaggg

SEQ ID NO: 2310824 - RNA, 23 nt, Human
aaguguauaucagaaaagggaag

SEQ ID NO: 2310825 - RNA, 13 nt, Human
aaguguaggcaga

SEQ ID NO: 2310826 - RNA, 14 nt, Human
aaguguaggcagac

SEQ ID NO: 2310827 - RNA, 15 nt, Human
aaguguaggcagaca

SEQ ID NO: 2310828 - RNA, 16 nt, Human
aaguguaggcagacac

SEQ ID NO: 2310829 - RNA, 17 nt, Human
aaguguaggcagacaca

SEQ ID NO: 2310830 - RNA, 19 nt, Human
aaguguaggcagacacagg

SEQ ID NO: 2310831 - RNA, 21 nt, Human
aaguguaggcagacacaggga

SEQ ID NO: 2310832 - RNA, 19 nt, Human
aaguggaaaaauagccugc

SEQ ID NO: 2310833 - RNA, 17 nt, Human
aaguguaacagcugagg

SEQ ID NO: 2310834 - RNA, 16 nt, Human
aaguguaacagcugag

SEQ ID NO: 2310835 - RNA, 15 nt, Human
aaguguaacagcuga

SEQ ID NO: 2310836 - RNA, 14 nt, Human
aaguguaacagcug

SEQ ID NO: 2310837 - RNA, 19 nt, Human
aaguggaccaggacaggac

SEQ ID NO: 2310838 - RNA, 21 nt, Human
aaguguaaagcauuccaacaa

SEQ ID NO: 2310839 - RNA, 22 nt, Human
aaguguaaagcauuccaacaaa

SEQ ID NO: 2310840 - RNA, 16 nt, Human
aaguggaccaggacag

SEQ ID NO: 2310841 - RNA, 13 nt, Human
aaguggaaauguu

SEQ ID NO: 2310842 - RNA, 21 nt, Human
aaguggaaaaauagccugccu

SEQ ID NO: 2310843 - RNA, 15 nt, Human
aagucuccaaagucu

SEQ ID NO: 2310844 - RNA, 22 nt, Human
aagucugugugaugaacuuucu

SEQ ID NO: 2310845 - RNA, 23 nt, Human
aagucugugugaugaacuuucuc

SEQ ID NO: 2310846 - RNA, 22 nt, Human
aagucugugagauucauucaug

SEQ ID NO: 2310847 - RNA, 18 nt, Human
aagucuggaucugggacc

SEQ ID NO: 2310848 - RNA, 23 nt, Human
aaguccagauuuacacugggaga

SEQ ID NO: 2310849 - RNA, 21 nt, Human
aagucugcaacuuuaagcagc

SEQ ID NO: 2310850 - RNA, 12 nt, Human
aagucuguuuua

SEQ ID NO: 2310851 - RNA, 14 nt, Human
aagucuguuuuaug

SEQ ID NO: 2310852 - RNA, 13 nt, Human
aagucuguuuuau

SEQ ID NO: 2310853 - RNA, 20 nt, Human
aaaccauuaugaagaagaga

SEQ ID NO: 2310854 - RNA, 16 nt, Human
aaacccgacagaggga

SEQ ID NO: 2310855 - RNA, 13 nt, Human
aaaccauguagaa

SEQ ID NO: 2310856 - RNA, 15 nt, Human
aaaccaugcaaaugc

SEQ ID NO: 2310857 - RNA, 18 nt, Human
aaacccgacagagggaag

SEQ ID NO: 2310858 - RNA, 19 nt, Human
aaacccgacagagggaaga

SEQ ID NO: 2310859 - RNA, 16 nt, Human
aaacccuauugguaaa

SEQ ID NO: 2310860 - RNA, 13 nt, Human
aaacucucugaac

SEQ ID NO: 2310861 - RNA, 12 nt, Human
aaacucucugaa

SEQ ID NO: 2310862 - RNA, 17 nt, Human
aaacucucuuugggaau

SEQ ID NO: 2310863 - RNA, 22 nt, Human
aaacucucuuugggaauguuug

SEQ ID NO: 2310864 - RNA, 23 nt, Human
aaacucucuuugggaauguuugu

SEQ ID NO: 2310865 - RNA, 18 nt, Human
aaacucuccucugcugcu

SEQ ID NO: 2310866 - RNA, 24 nt, Human
aaacccucgaggcggaucuuugga

SEQ ID NO: 2310867 - RNA, 13 nt, Human
aaacccucgaggc

SEQ ID NO: 2310868 - RNA, 18 nt, Human
aaaccaucauugaaaucu

SEQ ID NO: 2310869 - RNA, 23 nt, Human
aaaccaugaagagauuuuucaug

SEQ ID NO: 2310870 - RNA, 17 nt, Human
aaagaaauauaccuaaa

SEQ ID NO: 2310871 - RNA, 23 nt, Human
aaacugagacucagacaggaaag

SEQ ID NO: 2310872 - RNA, 14 nt, Human
aaacugaggaauuu

SEQ ID NO: 2310873 - RNA, 18 nt, Human
aaacugaggaauuuucuu

SEQ ID NO: 2310874 - RNA, 19 nt, Human
aaacugaggaauuucaccu

SEQ ID NO: 2310875 - RNA, 15 nt, Human
aaagaaauauaccua

SEQ ID NO: 2310876 - RNA, 22 nt, Human
aaacugagauccuuccuuuuga

SEQ ID NO: 2310877 - RNA, 21 nt, Human
aaacugagacucagacaggaa

SEQ ID NO: 2310878 - RNA, 22 nt, Human
aaacucugggaaauaagagaga

SEQ ID NO: 2310879 - RNA, 14 nt, Human
aaacucugggaaau

SEQ ID NO: 2310880 - RNA, 12 nt, Human
aaacucugcugu

SEQ ID NO: 2310881 - RNA, 11 nt, Human
aaacucugcug

SEQ ID NO: 2310882 - RNA, 14 nt, Human
aaacucugccagcc

SEQ ID NO: 2310883 - RNA, 23 nt, Human
aaacugagaugugaacacaucag

SEQ ID NO: 2310884 - RNA, 21 nt, Human
aaacugagaugugaacacauc

SEQ ID NO: 2310885 - RNA, 18 nt, Human
aaagaagacauguuuuag

SEQ ID NO: 2310886 - RNA, 15 nt, Human
aaagaaauguaaggg

SEQ ID NO: 2310887 - RNA, 20 nt, Human
aaagaagcccaauauuauaa

SEQ ID NO: 2310888 - RNA, 13 nt, Human
aaagaagauguuu

SEQ ID NO: 2310889 - RNA, 15 nt, Human
aaagaagauguuuaa

SEQ ID NO: 2310890 - RNA, 21 nt, Human
aaagaagacauguuuuagaca

SEQ ID NO: 2310891 - RNA, 12 nt, Human
aaagaagagaca

SEQ ID NO: 2310892 - RNA, 21 nt, Human
aaagaagagccggagccucca

SEQ ID NO: 2310893 - RNA, 12 nt, Human
aaagaaggaagu

SEQ ID NO: 2310894 - RNA, 16 nt, Human
aaagaagcccccagcu

SEQ ID NO: 2310895 - RNA, 20 nt, Human
aaagaagguuucagaaagaa

SEQ ID NO: 2310896 - RNA, 14 nt, Human
aaagaguaggaaga

SEQ ID NO: 2310897 - RNA, 18 nt, Human
aaagaaggaaaaugaucu

SEQ ID NO: 2310898 - RNA, 22 nt, Human
aaagaagguuuguguuuuucug

SEQ ID NO: 2310899 - RNA, 12 nt, Human
aaagaguuagaa

SEQ ID NO: 2310900 - RNA, 17 nt, Human
aaagauauuuugcuuug

SEQ ID NO: 2310901 - RNA, 13 nt, Human
aaagauaaagaug

SEQ ID NO: 2310902 - RNA, 15 nt, Human
aaagauaaagaugau

SEQ ID NO: 2310903 - RNA, 16 nt, Human
aaagaguucuuaagga

SEQ ID NO: 2310904 - RNA, 22 nt, Human
aaagagugggcugcaucuggga

SEQ ID NO: 2310905 - RNA, 16 nt, Human
aaagauauuuugcuuu

SEQ ID NO: 2310906 - RNA, 12 nt, Human
aaagauauuuug

SEQ ID NO: 2310907 - RNA, 21 nt, Human
aaacacgcacuuagucucuaa

SEQ ID NO: 2310908 - RNA, 13 nt, Human
aaacaccuucucu

SEQ ID NO: 2310909 - RNA, 14 nt, Human
aaacaccuucucug

SEQ ID NO: 2310910 - RNA, 21 nt, Human
aaacacugggagaaaugaaaa

SEQ ID NO: 2310911 - RNA, 24 nt, Human
aaacacucaguuguucaauaauaa

SEQ ID NO: 2310912 - RNA, 17 nt, Human
aaacacucggcauuuca

SEQ ID NO: 2310913 - RNA, 19 nt, Human
aaacacuggggcuggcaca

SEQ ID NO: 2310914 - RNA, 22 nt, Human
aaacacugggagaaaugaaaaa

SEQ ID NO: 2310915 - RNA, 15 nt, Human
aaacacuguguaagc

SEQ ID NO: 2310916 - RNA, 13 nt, Human
aaacacugugcac

SEQ ID NO: 2310917 - RNA, 16 nt, Human
aaacacuguucucugc

SEQ ID NO: 2310918 - RNA, 16 nt, Human
aaaaucucaauauuuc

SEQ ID NO: 2310919 - RNA, 22 nt, Human
aaaaucucaaauuucuaaaucu

SEQ ID NO: 2310920 - RNA, 19 nt, Human
aaaaucucaaauuucuaaa

SEQ ID NO: 2310921 - RNA, 23 nt, Human
aaaauugauauacuuuuuucuua

SEQ ID NO: 2310922 - RNA, 23 nt, Human
aaaaucuaauauuaaaaauaugg

SEQ ID NO: 2310923 - RNA, 15 nt, Human
aaaauugcaaaucuu

SEQ ID NO: 2310924 - RNA, 21 nt, Human
aaaauugauguguuuauuuau

SEQ ID NO: 2310925 - RNA, 12 nt, Human
aaaauugccaua

SEQ ID NO: 2310926 - RNA, 22 nt, Human
aaacaccuuccagcuccuguaa

SEQ ID NO: 2310927 - RNA, 15 nt, Human
aaacaccuucucugg

SEQ ID NO: 2310928 - RNA, 21 nt, Human
aaaauugaugggauuugguca

SEQ ID NO: 2310929 - RNA, 12 nt, Human
aaaauugaugug

SEQ ID NO: 2310930 - RNA, 14 nt, Human
aaaauugauguguu

SEQ ID NO: 2310931 - RNA, 22 nt, Human
aaacagacaaaaacagccucac

SEQ ID NO: 2310932 - RNA, 13 nt, Human
aaacagaacauca

SEQ ID NO: 2310933 - RNA, 22 nt, Human
aaacagaccuaaugcuccuugu

SEQ ID NO: 2310934 - RNA, 21 nt, Human
aaacagaacaucauuagaaca

SEQ ID NO: 2310935 - RNA, 13 nt, Human
aaacagacuauuu

SEQ ID NO: 2310936 - RNA, 12 nt, Human
aaacagaagccu

SEQ ID NO: 2310937 - RNA, 12 nt, Human
aaacagacacug

SEQ ID NO: 2310938 - RNA, 13 nt, Human
aaacagaaacaaa

SEQ ID NO: 2310939 - RNA, 21 nt, Human
aaacagaaacaaaaacacuaa

SEQ ID NO: 2310940 - RNA, 19 nt, Human
aaacagaaacaaaaacacu

SEQ ID NO: 2310941 - RNA, 15 nt, Human
aaaaagaaaggaggg

SEQ ID NO: 2310942 - RNA, 16 nt, Human
aaaaagaaacauuugg

SEQ ID NO: 2310943 - RNA, 20 nt, Human
aaaaacucugggaaauaaga

SEQ ID NO: 2310944 - RNA, 21 nt, Human
aaaaacucgaggacuguauuu

SEQ ID NO: 2310945 - RNA, 17 nt, Human
aaaaacucgaggacugu

SEQ ID NO: 2310946 - RNA, 11 nt, Human
aaaaagaaaaa

SEQ ID NO: 2310947 - RNA, 13 nt, Human
aaaaagaaaaaag

SEQ ID NO: 2310948 - RNA, 14 nt, Human
aaaaagaaaagaua

SEQ ID NO: 2310949 - RNA, 14 nt, Human
aaaaagaaacaaga

SEQ ID NO: 2310950 - RNA, 23 nt, Human
aaaagugaucaauaaaaugugau

SEQ ID NO: 2310951 - RNA, 16 nt, Human
aaaaguggccucuuug

SEQ ID NO: 2310952 - RNA, 21 nt, Human
aaaagugggccagugugggaa

SEQ ID NO: 2310953 - RNA, 17 nt, Human
aaaaguggccucuuugu

SEQ ID NO: 2310954 - RNA, 17 nt, Human
aaaagugauuguuggca

SEQ ID NO: 2310955 - RNA, 18 nt, Human
aaaagugggcuugauucu

SEQ ID NO: 2310956 - RNA, 17 nt, Human
aaaagugggcuugauuc

SEQ ID NO: 2310957 - RNA, 17 nt, Human
aaaaguuauuaauauuu

SEQ ID NO: 2310958 - RNA, 12 nt, Human
aaaaguugaaau

SEQ ID NO: 2310959 - RNA, 18 nt, Human
aaaaguucugcagauaaa

SEQ ID NO: 2310960 - RNA, 14 nt, Human
aaaaguuagcugag

SEQ ID NO: 2310961 - RNA, 12 nt, Human
aaaaguuauuaa

SEQ ID NO: 2310962 - RNA, 14 nt, Human
aaaaguuaaaaagu

SEQ ID NO: 2310963 - RNA, 13 nt, Human
aaaaguguuuauu

SEQ ID NO: 2310964 - RNA, 21 nt, Human
aaaaguguuuauuuuucauau

SEQ ID NO: 2310965 - RNA, 19 nt, Human
aaaauaaaauuaaagcuga

SEQ ID NO: 2310966 - RNA, 14 nt, Human
aaaauaaacaaaua

SEQ ID NO: 2310967 - RNA, 12 nt, Human
aaaauaaacaaa

SEQ ID NO: 2310968 - RNA, 14 nt, Human
aaaaguugaaauua

SEQ ID NO: 2310969 - RNA, 17 nt, Human
aaaaguucugacuugac

SEQ ID NO: 2310970 - RNA, 17 nt, Human
aaaauaaaacuuuuuaa

SEQ ID NO: 2310971 - RNA, 16 nt, Human
aaaauccucuuccucu

SEQ ID NO: 2310972 - RNA, 22 nt, Human
aaaaucauugauugucagcuac

SEQ ID NO: 2310973 - RNA, 12 nt, Human
aaaaucauugau

SEQ ID NO: 2310974 - RNA, 18 nt, Human
aaaaucauguacauuucu

SEQ ID NO: 2310975 - RNA, 15 nt, Human
aaaaucauguuugcu

SEQ ID NO: 2310976 - RNA, 17 nt, Human
aaaaucauguacauuuc

SEQ ID NO: 2310977 - RNA, 16 nt, Human
aaaaucauguacauuu

SEQ ID NO: 2310978 - RNA, 22 nt, Human
aaaaucccuuaccucggugccu

SEQ ID NO: 2310979 - RNA, 13 nt, Human
aaaauccuugcuu

SEQ ID NO: 2310980 - RNA, 20 nt, Human
aaaauccuugcuuaugacau

SEQ ID NO: 2310981 - RNA, 15 nt, Human
aaaaucuaauauuaa

SEQ ID NO: 2310982 - RNA, 21 nt, Human
aaaaucuacacuccagugaga

SEQ ID NO: 2310983 - RNA, 15 nt, Human
aaaaucauguacauu

SEQ ID NO: 2310984 - RNA, 22 nt, Human
aaaaucauggaaugguuauaaa

SEQ ID NO: 2310985 - RNA, 17 nt, Human
aaaaucauggaaugguu

SEQ ID NO: 2310986 - RNA, 19 nt, Human
aaaaucauggaaugguuau

SEQ ID NO: 2310987 - RNA, 12 nt, Human
aaaaucaugaga

SEQ ID NO: 2310988 - RNA, 13 nt, Human
aaaaucauggaau

SEQ ID NO: 2310989 - RNA, 22 nt, Human
aaaaucauaaacugugugcaga

SEQ ID NO: 2310990 - RNA, 13 nt, Human
aaaaucauaaacu

SEQ ID NO: 2310991 - RNA, 13 nt, Human
aaaaucauauugc

SEQ ID NO: 2310992 - RNA, 14 nt, Human
aaaaucauauugcu

SEQ ID NO: 2310993 - RNA, 18 nt, Human
aaaaucauauugcuucuu

SEQ ID NO: 2310994 - RNA, 15 nt, Human
aaauagcuuguauag

SEQ ID NO: 2310995 - RNA, 19 nt, Human
aaauagcuauauccaugua

SEQ ID NO: 2310996 - RNA, 16 nt, Human
aaauagcuauauccau

SEQ ID NO: 2310997 - RNA, 19 nt, Human
aaauagcuccguggagcag

SEQ ID NO: 2310998 - RNA, 13 nt, Human
aaauagcucuuuc

SEQ ID NO: 2310999 - RNA, 12 nt, Human
aaauagcuauau

SEQ ID NO: 2311000 - RNA, 16 nt, Human
aaauagcuuguauagu

SEQ ID NO: 2311001 - RNA, 14 nt, Human
aaauaggagaggau

SEQ ID NO: 2311002 - RNA, 16 nt, Human
aaauaggagaggauga

SEQ ID NO: 2311003 - RNA, 24 nt, Human
aaauaggagaggaugagagcccag

SEQ ID NO: 2311004 - RNA, 23 nt, Human
aaauaggagaggaugagagccca

SEQ ID NO: 2311005 - RNA, 20 nt, Human
aaauaguguggaaauuaaga

SEQ ID NO: 2311006 - RNA, 19 nt, Human
aaauaguggugugauuugg

SEQ ID NO: 2311007 - RNA, 19 nt, Human
aaauaguugagccagcaga

SEQ ID NO: 2311008 - RNA, 20 nt, Human
aaauaguugagccagcagac

SEQ ID NO: 2311009 - RNA, 23 nt, Human
aaauaguugagccagcagacauu

SEQ ID NO: 2311010 - RNA, 21 nt, Human
aaauaguguggaaauuaagaa

SEQ ID NO: 2311011 - RNA, 22 nt, Human
aaauaguuaagacaugauuucc

SEQ ID NO: 2311012 - RNA, 17 nt, Human
aaauaguuaagacauga

SEQ ID NO: 2311013 - RNA, 21 nt, Human
aaauagccgggcaugguggcg

SEQ ID NO: 2311014 - RNA, 23 nt, Human
aaauagccacuuaccuucaauaa

SEQ ID NO: 2311015 - RNA, 21 nt, Human
aaauagccacuuaccuucaau

SEQ ID NO: 2311016 - RNA, 13 nt, Human
aaauagcauuugu

SEQ ID NO: 2311017 - RNA, 23 nt, Human
aaauagccaacacccaucuguuu

SEQ ID NO: 2311018 - RNA, 24 nt, Human
aaauagcucaggugucccugcacu

SEQ ID NO: 2311019 - RNA, 18 nt, Human
aaaucaaguauuugggaa

SEQ ID NO: 2311020 - RNA, 23 nt, Human
aaaucaaguauuugggaagugaa

SEQ ID NO: 2311021 - RNA, 15 nt, Human
aaaucaauacacuag

SEQ ID NO: 2311022 - RNA, 22 nt, Human
aaaucaauacacuaguuguuuc

SEQ ID NO: 2311023 - RNA, 17 nt, Human
aaaucaauacacuaguu

SEQ ID NO: 2311024 - RNA, 19 nt, Human
aaaucaaugcuauaacuau

SEQ ID NO: 2311025 - RNA, 13 nt, Human
aaaucaaugucac

SEQ ID NO: 2311026 - RNA, 19 nt, Human
aaaucaauuacugguccaa

SEQ ID NO: 2311027 - RNA, 23 nt, Human
aaaucaauuacugguccaaaaga

SEQ ID NO: 2311028 - RNA, 12 nt, Human
aaaucacauccu

SEQ ID NO: 2311029 - RNA, 21 nt, Human
aaaucuguccaaaggaggcug

SEQ ID NO: 2311030 - RNA, 22 nt, Human
aaaucuguccaaaggaggcugg

SEQ ID NO: 2311031 - RNA, 12 nt, Human
aaaucuggaagc

SEQ ID NO: 2311032 - RNA, 16 nt, Human
aaaucaaauaugcaaa

SEQ ID NO: 2311033 - RNA, 15 nt, Human
aaaucaaauaugcaa

SEQ ID NO: 2311034 - RNA, 14 nt, Human
aaaucaaauaugca

SEQ ID NO: 2311035 - RNA, 12 nt, Human
aaaucaaauaug

SEQ ID NO: 2311036 - RNA, 20 nt, Human
aaauauuuauuuuaauaaug

SEQ ID NO: 2311037 - RNA, 15 nt, Human
aaauauuuauuuuaa

SEQ ID NO: 2311038 - RNA, 13 nt, Human
aaauauuuauuuu

SEQ ID NO: 2311039 - RNA, 19 nt, Human
aaauaaaguaucaugcauu

SEQ ID NO: 2311040 - RNA, 15 nt, Human
aaauaaaguaucaug

SEQ ID NO: 2311041 - RNA, 18 nt, Human
aaauaaaguaucaugcau

SEQ ID NO: 2311042 - RNA, 20 nt, Human
aaauaaaguauauauagaau

SEQ ID NO: 2311043 - RNA, 16 nt, Human
aaauaaaguauauaua

SEQ ID NO: 2311044 - RNA, 18 nt, Human
aaauaaaguuggugacag

SEQ ID NO: 2311045 - RNA, 20 nt, Human
aaauaaaguuugcuuagaaa

SEQ ID NO: 2311046 - RNA, 11 nt, Human
aaauaaaagca

SEQ ID NO: 2311047 - RNA, 17 nt, Human
aaauaaaaccuuucaaa

SEQ ID NO: 2311048 - RNA, 19 nt, Human
aaauaaaagcagcaucugc

SEQ ID NO: 2311049 - RNA, 13 nt, Human
aaauaaaagcagc

SEQ ID NO: 2311050 - RNA, 19 nt, Human
aaauaaaacuuuuuaaaau

SEQ ID NO: 2311051 - RNA, 19 nt, Human
aaagucuaaaguuuacagu

SEQ ID NO: 2311052 - RNA, 17 nt, Human
aaaguggccaugccacc

SEQ ID NO: 2311053 - RNA, 14 nt, Human
aaaguggccucuuu

SEQ ID NO: 2311054 - RNA, 18 nt, Human
aaaguggccucuuugucu

SEQ ID NO: 2311055 - RNA, 16 nt, Human
aaaguggccucuuugu

SEQ ID NO: 2311056 - RNA, 16 nt, Human
aaauaaaacuuuuuaa

SEQ ID NO: 2311057 - RNA, 13 nt, Human
aaauaaaacuuuu

SEQ ID NO: 2311058 - RNA, 23 nt, Human
aaagucauuggcuuuauccucuu

SEQ ID NO: 2311059 - RNA, 18 nt, Human
aaaguccuuuuuuuccau

SEQ ID NO: 2311060 - RNA, 16 nt, Human
aaaguccuuuuuuucc

SEQ ID NO: 2311061 - RNA, 22 nt, Human
aaaguccuuuuuuuccaucuuu

SEQ ID NO: 2311062 - RNA, 15 nt, Human
aaagucgaauuaaua

SEQ ID NO: 2311063 - RNA, 12 nt, Human
aaagucuaaagu

SEQ ID NO: 2311064 - RNA, 16 nt, Human
aaagucuaaaguuuac

SEQ ID NO: 2311065 - RNA, 22 nt, Human
aaagucuaaaguuuacaguaaa

SEQ ID NO: 2311066 - RNA, 20 nt, Human
aaaguggaaaacaaggaagu

SEQ ID NO: 2311067 - RNA, 19 nt, Human
aaaguggaaaacaaggaag

SEQ ID NO: 2311068 - RNA, 13 nt, Human
aaaguggaaaaau

SEQ ID NO: 2311069 - RNA, 20 nt, Human
aaagucaugcaaaggcuggg

SEQ ID NO: 2311070 - RNA, 21 nt, Human
aaaggcgcagugcuucucuac

SEQ ID NO: 2311071 - RNA, 13 nt, Human
aaagucauuggcu

SEQ ID NO: 2311072 - RNA, 21 nt, Human
aaagucaugcaaaggcuggga

SEQ ID NO: 2311073 - RNA, 14 nt, Human
aaagucauuggcuu

SEQ ID NO: 2311074 - RNA, 15 nt, Human
aaagucauuggcuuu

SEQ ID NO: 2311075 - RNA, 17 nt, Human
aaagucauuggcuuuau

SEQ ID NO: 2311076 - RNA, 21 nt, Human
aaagucauuggcuuuauccuc

SEQ ID NO: 2311077 - RNA, 19 nt, Human
aaaggcuccaggagcagcc

SEQ ID NO: 2311078 - RNA, 20 nt, Human
aaaggcuccaggagcagcca

SEQ ID NO: 2311079 - RNA, 16 nt, Human
aaauaaauagcuauau

SEQ ID NO: 2311080 - RNA, 11 nt, Human
aaauaaauaua

SEQ ID NO: 2311081 - RNA, 12 nt, Human
aaauaaauauau

SEQ ID NO: 2311082 - RNA, 13 nt, Human
aaauaaauauaua

SEQ ID NO: 2311083 - RNA, 20 nt, Human
aaauaaauagcuauauccau

SEQ ID NO: 2311084 - RNA, 22 nt, Human
aaauaaaugagcuauguauuaa

SEQ ID NO: 2311085 - RNA, 13 nt, Human
aaauaaaugcaau

SEQ ID NO: 2311086 - RNA, 20 nt, Human
aaauaaaugagcuauguauu

SEQ ID NO: 2311087 - RNA, 14 nt, Human
aaauaaauauauau

SEQ ID NO: 2311088 - RNA, 15 nt, Human
aaauaaauauauaua

SEQ ID NO: 2311089 - RNA, 12 nt, Human
aaaggccagcug

SEQ ID NO: 2311090 - RNA, 18 nt, Human
aaaggccagcuggcagca

SEQ ID NO: 2311091 - RNA, 14 nt, Human
aaaggccagcuggc

SEQ ID NO: 2311092 - RNA, 20 nt, Human
aaaggccagcuggcagcaga

SEQ ID NO: 2311093 - RNA, 14 nt, Human
aaaggccauggaga

SEQ ID NO: 2311094 - RNA, 19 nt, Human
aaaggccauggagagcugg

SEQ ID NO: 2311095 - RNA, 21 nt, Human
aaaggcaccuauaaaacaggu

SEQ ID NO: 2311096 - RNA, 20 nt, Human
aaaggccaaaccucuguuca

SEQ ID NO: 2311097 - RNA, 18 nt, Human
aaaggccaaaccucuguu

SEQ ID NO: 2311098 - RNA, 20 nt, Human
aaaggcaccuauaaaacagg

SEQ ID NO: 2311099 - RNA, 17 nt, Human
aaaggcaccaucuaaua

SEQ ID NO: 2311100 - RNA, 17 nt, Human
aaaggcaccuauaaaac

SEQ ID NO: 2311101 - RNA, 12 nt, Human
aaaggcacagug

SEQ ID NO: 2311102 - RNA, 17 nt, Human
aaaggcaaauguguaca

SEQ ID NO: 2311103 - RNA, 14 nt, Human
aaaggcagaagcaa

SEQ ID NO: 2311104 - RNA, 11 nt, Human
aaaggccucuu

SEQ ID NO: 2311105 - RNA, 12 nt, Human
aaaggccuuuaa

SEQ ID NO: 2311106 - RNA, 17 nt, Human
aaaggccuuuaaaauuu

SEQ ID NO: 2311107 - RNA, 14 nt, Human
aaaggccucuuccu

SEQ ID NO: 2311108 - RNA, 12 nt, Human
aaaggcccccua

SEQ ID NO: 2311109 - RNA, 15 nt, Human
aaaggcuccaggagc

SEQ ID NO: 2311110 - RNA, 16 nt, Human
aaaggcuccaggagca

SEQ ID NO: 2311111 - RNA, 19 nt, Human
aaagccaauaacacacagc

SEQ ID NO: 2311112 - RNA, 12 nt, Human
aaagccaccucu

SEQ ID NO: 2311113 - RNA, 18 nt, Human
aaagccacguuccuuacu

SEQ ID NO: 2311114 - RNA, 17 nt, Human
aaagccaccucucccuc

SEQ ID NO: 2311115 - RNA, 17 nt, Human
aaagccaaugugaacag

SEQ ID NO: 2311116 - RNA, 15 nt, Human
aaagccaaugugaac

SEQ ID NO: 2311117 - RNA, 19 nt, Human
aaagcccuuaggaagaauu

SEQ ID NO: 2311118 - RNA, 16 nt, Human
aaagccagugacucca

SEQ ID NO: 2311119 - RNA, 19 nt, Human
aaagccagcugccgaccag

SEQ ID NO: 2311120 - RNA, 14 nt, Human
aaagccagaagcug

SEQ ID NO: 2311121 - RNA, 20 nt, Human
aaagccagaaccagaugagu

SEQ ID NO: 2311122 - RNA, 21 nt, Human
aaagccagcguccuccucugu

SEQ ID NO: 2311123 - RNA, 16 nt, Human
aaagccuccuccagcc

SEQ ID NO: 2311124 - RNA, 22 nt, Human
aaagcccuuccaugucgccucu

SEQ ID NO: 2311125 - RNA, 23 nt, Human
aaagcccuuccaugucgccucug

SEQ ID NO: 2311126 - RNA, 23 nt, Human
aaagccguuguuuacuuaaagau

SEQ ID NO: 2311127 - RNA, 21 nt, Human
aaagccguuguuuacuuaaag

SEQ ID NO: 2311128 - RNA, 13 nt, Human
aaaggcaaggucc

SEQ ID NO: 2311129 - RNA, 14 nt, Human
aaaggcaagcacuu

SEQ ID NO: 2311130 - RNA, 16 nt, Human
aaaggcaaauguguac

SEQ ID NO: 2311131 - RNA, 23 nt, Human
aaagccaaguuuauauacaauua

SEQ ID NO: 2311132 - RNA, 21 nt, Human
aacucagaaacaucaguuacu

SEQ ID NO: 2311133 - RNA, 22 nt, Human
aacucacugcucaagaagacau

SEQ ID NO: 2311134 - RNA, 14 nt, Human
aacucagagccucc

SEQ ID NO: 2311135 - RNA, 14 nt, Human
aacucagaucacua

SEQ ID NO: 2311136 - RNA, 14 nt, Human
aacucacuuuccuc

SEQ ID NO: 2311137 - RNA, 14 nt, Human
aacucacugcucaa

SEQ ID NO: 2311138 - RNA, 21 nt, Human
aacucacugcucaagaagaca

SEQ ID NO: 2311139 - RNA, 23 nt, Human
aacuauuuaucuguguuuuugaa

SEQ ID NO: 2311140 - RNA, 17 nt, Human
aacuauuucuuauauau

SEQ ID NO: 2311141 - RNA, 18 nt, Human
aacuauuucuuauauaug

SEQ ID NO: 2311142 - RNA, 19 nt, Human
aacuauuugucuuucagga

SEQ ID NO: 2311143 - RNA, 20 nt, Human
aacuauuucuuauauaugug

SEQ ID NO: 2311144 - RNA, 18 nt, Human
aacuauuugucuuucagg

SEQ ID NO: 2311145 - RNA, 19 nt, Human
aacucaaaacuuaacauau

SEQ ID NO: 2311146 - RNA, 15 nt, Human
aacgggcugcccugc

SEQ ID NO: 2311147 - RNA, 14 nt, Human
aacuauugcccagg

SEQ ID NO: 2311148 - RNA, 20 nt, Human
aacuauuuaucuguguuuuu

SEQ ID NO: 2311149 - RNA, 13 nt, Human
aacuauuuaucug

SEQ ID NO: 2311150 - RNA, 16 nt, Human
aacuauuuaacuugag

SEQ ID NO: 2311151 - RNA, 23 nt, Human
aacuauuuaacuugagcuuuaaa

SEQ ID NO: 2311152 - RNA, 14 nt, Human
aacggcuccaggau

SEQ ID NO: 2311153 - RNA, 22 nt, Human
aacggauuauuuuuucagaccg

SEQ ID NO: 2311154 - RNA, 15 nt, Human
aacggauuccaaaga

SEQ ID NO: 2311155 - RNA, 18 nt, Human
aacggaucagaaauacag

SEQ ID NO: 2311156 - RNA, 16 nt, Human
aacggauuauuuuuuc

SEQ ID NO: 2311157 - RNA, 17 nt, Human
aacggauuauuuuuuca

SEQ ID NO: 2311158 - RNA, 18 nt, Human
aacggauuauuuuuucag

SEQ ID NO: 2311159 - RNA, 19 nt, Human
aacggauuauuuuuucaga

SEQ ID NO: 2311160 - RNA, 20 nt, Human
aacggauuauuuuuucagac

SEQ ID NO: 2311161 - RNA, 21 nt, Human
aacggauuauuuuuucagacc

SEQ ID NO: 2311162 - RNA, 13 nt, Human
aacgcagcccuag

SEQ ID NO: 2311163 - RNA, 21 nt, Human
aacgcagcccuagagccugcc

SEQ ID NO: 2311164 - RNA, 22 nt, Human
aacgcagcccuagagccugccu

SEQ ID NO: 2311165 - RNA, 23 nt, Human
aacgcagcccuagagccugccug

SEQ ID NO: 2311166 - RNA, 18 nt, Human
aacgcagaugauccauga

SEQ ID NO: 2311167 - RNA, 11 nt, Human
aacgcagcccu

SEQ ID NO: 2311168 - RNA, 11 nt, Human
aacgcugccug

SEQ ID NO: 2311169 - RNA, 13 nt, Human
aacgcugccugcc

SEQ ID NO: 2311170 - RNA, 12 nt, Human
aacgcugccugc

SEQ ID NO: 2311171 - RNA, 15 nt, Human
aacgcugccugcccg

SEQ ID NO: 2311172 - RNA, 21 nt, Human
aacgcuuaaaggugucuuccu

SEQ ID NO: 2311173 - RNA, 15 nt, Human
aacgcugccugccca

SEQ ID NO: 2311174 - RNA, 14 nt, Human
aacgcugccugccc

SEQ ID NO: 2311175 - RNA, 19 nt, Human
aacggagagcgccugcccc

SEQ ID NO: 2311176 - RNA, 14 nt, Human
aacggagaaaggug

SEQ ID NO: 2311177 - RNA, 13 nt, Human
aacggaucagaaa

SEQ ID NO: 2311178 - RNA, 17 nt, Human
aacggaucagaaauaca

SEQ ID NO: 2311179 - RNA, 20 nt, Human
aacggagccccaggccucug

SEQ ID NO: 2311180 - RNA, 13 nt, Human
aacgauuuagaaa

SEQ ID NO: 2311181 - RNA, 18 nt, Human
aacgcaaagggcugaaag

SEQ ID NO: 2311182 - RNA, 20 nt, Human
aacgcaaagggcugaaagcc

SEQ ID NO: 2311183 - RNA, 17 nt, Human
aacgauuuaauucucuu

SEQ ID NO: 2311184 - RNA, 18 nt, Human
aacgauuuaauucucuug

SEQ ID NO: 2311185 - RNA, 12 nt, Human
aacgauuuagaa

SEQ ID NO: 2311186 - RNA, 20 nt, Human
aacgauuuaauucucuugaa

SEQ ID NO: 2311187 - RNA, 18 nt, Human
aacugagauccuuccuuu

SEQ ID NO: 2311188 - RNA, 18 nt, Human
aacugacuuuauccucag

SEQ ID NO: 2311189 - RNA, 20 nt, Human
aacugaggaauuuucuuugu

SEQ ID NO: 2311190 - RNA, 18 nt, Human
aacugaggaauuuucuuu

SEQ ID NO: 2311191 - RNA, 20 nt, Human
aacugaggcagacagcagcu

SEQ ID NO: 2311192 - RNA, 12 nt, Human
aacugaggcaga

SEQ ID NO: 2311193 - RNA, 16 nt, Human
aacugagugccuuuug

SEQ ID NO: 2311194 - RNA, 14 nt, Human
aacugauaaagaug

SEQ ID NO: 2311195 - RNA, 17 nt, Human
aacugaguccuuaaaca

SEQ ID NO: 2311196 - RNA, 15 nt, Human
aacugauaguuacug

SEQ ID NO: 2311197 - RNA, 16 nt, Human
aacugauaguuacugu

SEQ ID NO: 2311198 - RNA, 17 nt, Human
aacugauaguuacuguu

SEQ ID NO: 2311199 - RNA, 19 nt, Human
aacugauaguuacuguugu

SEQ ID NO: 2311200 - RNA, 23 nt, Human
aacugauaguuacuguugugacc

SEQ ID NO: 2311201 - RNA, 17 nt, Human
aacuuaacauucuguaa

SEQ ID NO: 2311202 - RNA, 16 nt, Human
aacuuaacauucugua

SEQ ID NO: 2311203 - RNA, 21 nt, Human
aacuuaacauucuguaaaaug

SEQ ID NO: 2311204 - RNA, 21 nt, Human
aacuuaaguugguccuuuaca

SEQ ID NO: 2311205 - RNA, 17 nt, Human
aacuuaaguuaaacaua

SEQ ID NO: 2311206 - RNA, 19 nt, Human
aacuuaaauuuuaauuuau

SEQ ID NO: 2311207 - RNA, 16 nt, Human
aacuuaaauuuuaauu

SEQ ID NO: 2311208 - RNA, 14 nt, Human
aacuuaacauauuu

SEQ ID NO: 2311209 - RNA, 16 nt, Human
aacuuaacauauuuac

SEQ ID NO: 2311210 - RNA, 22 nt, Human
aacugauaguuacuguugugac

SEQ ID NO: 2311211 - RNA, 13 nt, Human
aacugacuuuauc

SEQ ID NO: 2311212 - RNA, 20 nt, Human
aacugagaugugaacacauc

SEQ ID NO: 2311213 - RNA, 19 nt, Human
aacugacucuuaagaagac

SEQ ID NO: 2311214 - RNA, 20 nt, Human
aacugacucuuaagaagacu

SEQ ID NO: 2311215 - RNA, 22 nt, Human
aacucagauccagggacagagg

SEQ ID NO: 2311216 - RNA, 21 nt, Human
aacucagaucacuacugcagu

SEQ ID NO: 2311217 - RNA, 13 nt, Human
aacucagaucugu

SEQ ID NO: 2311218 - RNA, 15 nt, Human
aacucagauccaggg

SEQ ID NO: 2311219 - RNA, 14 nt, Human
aacucagauccagg

SEQ ID NO: 2311220 - RNA, 13 nt, Human
aacucagauccag

SEQ ID NO: 2311221 - RNA, 12 nt, Human
aacucagaucca

SEQ ID NO: 2311222 - RNA, 15 nt, Human
aacucagaucacuac

SEQ ID NO: 2311223 - RNA, 18 nt, Human
aacucagaucacuacugc

SEQ ID NO: 2311224 - RNA, 19 nt, Human
aacucagaucacuacugca

SEQ ID NO: 2311225 - RNA, 20 nt, Human
aacucagaucacuacugcag

SEQ ID NO: 2311226 - RNA, 15 nt, Human
aacugacucuuaaga

SEQ ID NO: 2311227 - RNA, 18 nt, Human
aacugacucuuaagaaga

SEQ ID NO: 2311228 - RNA, 12 nt, Human
aacuuacacaca

SEQ ID NO: 2311229 - RNA, 18 nt, Human
aacuuaauaguauuuaug

SEQ ID NO: 2311230 - RNA, 20 nt, Human
aacuuaauguucugaauaau

SEQ ID NO: 2311231 - RNA, 18 nt, Human
aacuuaaucuaaauggaa

SEQ ID NO: 2311232 - RNA, 16 nt, Human
aacuuaaucuaaaugg

SEQ ID NO: 2311233 - RNA, 15 nt, Human
aacuuaaucuaaaug

SEQ ID NO: 2311234 - RNA, 21 nt, Human
aacuuuaucacauuauuugca

SEQ ID NO: 2311235 - RNA, 14 nt, Human
aacuuuauuaaaua

SEQ ID NO: 2311236 - RNA, 17 nt, Human
aacuuuauguguaaaua

SEQ ID NO: 2311237 - RNA, 13 nt, Human
aacuuuaugugua

SEQ ID NO: 2311238 - RNA, 14 nt, Human
aacuuuauguguaa

SEQ ID NO: 2311239 - RNA, 21 nt, Human
aacuuuaugcuaagugaaaua

SEQ ID NO: 2311240 - RNA, 20 nt, Human
aacuuuaugcuaagugaaau

SEQ ID NO: 2311241 - RNA, 23 nt, Human
aacccuucuccucuuguaaauaa

SEQ ID NO: 2311242 - RNA, 14 nt, Human
aacccuugaaaaga

SEQ ID NO: 2311243 - RNA, 21 nt, Human
aacccuuggagccaauggaga

SEQ ID NO: 2311244 - RNA, 15 nt, Human
aacccuauugguaaa

SEQ ID NO: 2311245 - RNA, 15 nt, Human
aacccuugaaaagac

SEQ ID NO: 2311246 - RNA, 13 nt, Human
aacccuugucagu

SEQ ID NO: 2311247 - RNA, 21 nt, Human
aacccuugucagugacaguau

SEQ ID NO: 2311248 - RNA, 21 nt, Human
aacccuaaaaagcagagcuuu

SEQ ID NO: 2311249 - RNA, 19 nt, Human
aaccuaggagugccccauu

SEQ ID NO: 2311250 - RNA, 12 nt, Human
aaccuagccccu

SEQ ID NO: 2311251 - RNA, 22 nt, Human
aaccuacuuucauacugaagau

SEQ ID NO: 2311252 - RNA, 15 nt, Human
aaccuaaccccuuuc

SEQ ID NO: 2311253 - RNA, 22 nt, Human
aacccuuuuggcccccgagcug

SEQ ID NO: 2311254 - RNA, 16 nt, Human
aacccuuuuggccccc

SEQ ID NO: 2311255 - RNA, 19 nt, Human
aacccuuuugucugccucu

SEQ ID NO: 2311256 - RNA, 15 nt, Human
aaccgagcaaagauc

SEQ ID NO: 2311257 - RNA, 17 nt, Human
aaccgagcaaagaucaa

SEQ ID NO: 2311258 - RNA, 22 nt, Human
aaccuaaauuugguucuaggcc

SEQ ID NO: 2311259 - RNA, 18 nt, Human
aaccuaccaccccuuccu

SEQ ID NO: 2311260 - RNA, 21 nt, Human
aaccuaccuucauuucaggag

SEQ ID NO: 2311261 - RNA, 19 nt, Human
aaccuaccaccccuuccug

SEQ ID NO: 2311262 - RNA, 20 nt, Human
aaccuaccaccccuuccugu

SEQ ID NO: 2311263 - RNA, 23 nt, Human
aaccuaccuucauuucaggaggg

SEQ ID NO: 2311264 - RNA, 20 nt, Human
aaccuacuuucauacugaag

SEQ ID NO: 2311265 - RNA, 14 nt, Human
aaccuagaagggcu

SEQ ID NO: 2311266 - RNA, 17 nt, Human
aaccuagggugauauua

SEQ ID NO: 2311267 - RNA, 19 nt, Human
aacauccaaggagaaacag

SEQ ID NO: 2311268 - RNA, 17 nt, Human
aacauccaaccuuccca

SEQ ID NO: 2311269 - RNA, 16 nt, Human
aacauccaaccuuccc

SEQ ID NO: 2311270 - RNA, 11 nt, Human
aacauccaaaa

SEQ ID NO: 2311271 - RNA, 15 nt, Human
aacauccaauauuuu

SEQ ID NO: 2311272 - RNA, 22 nt, Human
aacauccaaggagaaacagaga

SEQ ID NO: 2311273 - RNA, 16 nt, Human
aacagcuucucaauuu

SEQ ID NO: 2311274 - RNA, 13 nt, Human
aacagcuguggcu

SEQ ID NO: 2311275 - RNA, 14 nt, Human
aacagcuucagguu

SEQ ID NO: 2311276 - RNA, 15 nt, Human
aacagcuucagguua

SEQ ID NO: 2311277 - RNA, 16 nt, Human
aacagcuucagguuau

SEQ ID NO: 2311278 - RNA, 16 nt, Human
aacaucccauugcccu

SEQ ID NO: 2311279 - RNA, 19 nt, Human
aaccaccagaagcccagaa

SEQ ID NO: 2311280 - RNA, 18 nt, Human
aaccaccagaagcccaga

SEQ ID NO: 2311281 - RNA, 18 nt, Human
aaccaccgcuccccagcc

SEQ ID NO: 2311282 - RNA, 17 nt, Human
aaccaccgcuccccagc

SEQ ID NO: 2311283 - RNA, 16 nt, Human
aaccaccgcuccccag

SEQ ID NO: 2311284 - RNA, 15 nt, Human
aaccaccgcucccca

SEQ ID NO: 2311285 - RNA, 19 nt, Human
aacaucccauugcccuggu

SEQ ID NO: 2311286 - RNA, 18 nt, Human
aacaucccauugcccugg

SEQ ID NO: 2311287 - RNA, 13 nt, Human
aaccacgcuggac

SEQ ID NO: 2311288 - RNA, 19 nt, Human
aaccacuuaaaaaaugucc

SEQ ID NO: 2311289 - RNA, 13 nt, Human
aaccacuuaaaaa

SEQ ID NO: 2311290 - RNA, 16 nt, Human
aaccacuguaaaauga

SEQ ID NO: 2311291 - RNA, 20 nt, Human
aaccacuguaaaaugaaauu

SEQ ID NO: 2311292 - RNA, 15 nt, Human
aaccacuguaaaaug

SEQ ID NO: 2311293 - RNA, 18 nt, Human
aaccacgucugucuucac

SEQ ID NO: 2311294 - RNA, 15 nt, Human
aaccacuucagcuga

SEQ ID NO: 2311295 - RNA, 20 nt, Human
aaccaccgcuccccagccca

SEQ ID NO: 2311296 - RNA, 19 nt, Human
aaccaccgcuccccagccc

SEQ ID NO: 2311297 - RNA, 19 nt, Human
aaccaccuaaucaggcuga

SEQ ID NO: 2311298 - RNA, 14 nt, Human
aaccacggaaaaga

SEQ ID NO: 2311299 - RNA, 22 nt, Human
aaccacuggaaaguuuaugguu

SEQ ID NO: 2311300 - RNA, 18 nt, Human
aaccagaauaaaguucug

SEQ ID NO: 2311301 - RNA, 22 nt, Human
aaccagaagcaacagaaaaaau

SEQ ID NO: 2311302 - RNA, 21 nt, Human
aaccagaagcaacagaaaaaa

SEQ ID NO: 2311303 - RNA, 17 nt, Human
aaccagaagcaacagaa

SEQ ID NO: 2311304 - RNA, 18 nt, Human
aaccagagccauggacuc

SEQ ID NO: 2311305 - RNA, 21 nt, Human
aaccacuucccucaucucucc

SEQ ID NO: 2311306 - RNA, 12 nt, Human
aaccacuucccu

SEQ ID NO: 2311307 - RNA, 13 nt, Human
aaccacuucccuc

SEQ ID NO: 2311308 - RNA, 15 nt, Human
aacagcauugcuuuc

SEQ ID NO: 2311309 - RNA, 14 nt, Human
aacagcauugcuuu

SEQ ID NO: 2311310 - RNA, 12 nt, Human
aacagcauugcu

SEQ ID NO: 2311311 - RNA, 15 nt, Human
aacagcaguguuccc

SEQ ID NO: 2311312 - RNA, 21 nt, Human
aacagcaggguagucugguuu

SEQ ID NO: 2311313 - RNA, 11 nt, Human
aacagcagugu

SEQ ID NO: 2311314 - RNA, 13 nt, Human
aacagcaguguuc

SEQ ID NO: 2311315 - RNA, 21 nt, Human
aacagcagagguucuuuuaaa

SEQ ID NO: 2311316 - RNA, 17 nt, Human
aacagcagagguucuuu

SEQ ID NO: 2311317 - RNA, 16 nt, Human
aacagcagagguucuu

SEQ ID NO: 2311318 - RNA, 18 nt, Human
aacagcacuggcucucuc

SEQ ID NO: 2311319 - RNA, 14 nt, Human
aacagcacuggcuc

SEQ ID NO: 2311320 - RNA, 23 nt, Human
aacagcacuggcucucuccagga

SEQ ID NO: 2311321 - RNA, 20 nt, Human
aacagcacuggcucucucca

SEQ ID NO: 2311322 - RNA, 21 nt, Human
aacagcacuggcucucuccag

SEQ ID NO: 2311323 - RNA, 12 nt, Human
aaauuaacacug

SEQ ID NO: 2311324 - RNA, 13 nt, Human
aaauuaacacugc

SEQ ID NO: 2311325 - RNA, 17 nt, Human
aaauuaacaguccuaac

SEQ ID NO: 2311326 - RNA, 21 nt, Human
aaauuaacacugcuuguguuu

SEQ ID NO: 2311327 - RNA, 23 nt, Human
aaauguuucugcaguagucucug

SEQ ID NO: 2311328 - RNA, 13 nt, Human
aaauuaaagcuga

SEQ ID NO: 2311329 - RNA, 17 nt, Human
aaauuaaagcugaaaac

SEQ ID NO: 2311330 - RNA, 18 nt, Human
aaauuaacaguccuaacu

SEQ ID NO: 2311331 - RNA, 21 nt, Human
aaauucuugcaaaguaucccu

SEQ ID NO: 2311332 - RNA, 23 nt, Human
aaauugaaaggcauucucugaag

SEQ ID NO: 2311333 - RNA, 22 nt, Human
aaauugaaaggcauucucugaa

SEQ ID NO: 2311334 - RNA, 20 nt, Human
aaauugaaaggcauucucug

SEQ ID NO: 2311335 - RNA, 20 nt, Human
aaauugacacaaguggaccu

SEQ ID NO: 2311336 - RNA, 23 nt, Human
aaauugaaucaguauaaacaaag

SEQ ID NO: 2311337 - RNA, 13 nt, Human
aaauugaauaaug

SEQ ID NO: 2311338 - RNA, 23 nt, Human
aaauugaauaaugguaccagaua

SEQ ID NO: 2311339 - RNA, 19 nt, Human
aaauugacacuuaaaaaug

SEQ ID NO: 2311340 - RNA, 15 nt, Human
aaauugccauauugc

SEQ ID NO: 2311341 - RNA, 16 nt, Human
aaauugccauauugca

SEQ ID NO: 2311342 - RNA, 13 nt, Human
aaauugcuccuug

SEQ ID NO: 2311343 - RNA, 22 nt, Human
aaauugcuccuaagcuucaaau

SEQ ID NO: 2311344 - RNA, 14 nt, Human
aaauugcuccuuga

SEQ ID NO: 2311345 - RNA, 18 nt, Human
aaauugccauauugcaca

SEQ ID NO: 2311346 - RNA, 19 nt, Human
aaauugccauauugcacau

SEQ ID NO: 2311347 - RNA, 21 nt, Human
aaauugccauauugcacaugu

SEQ ID NO: 2311348 - RNA, 23 nt, Human
aaauugccauauugcacaugucu

SEQ ID NO: 2311349 - RNA, 13 nt, Human
aaaugccuuugag

SEQ ID NO: 2311350 - RNA, 14 nt, Human
aaaugccuuugaga

SEQ ID NO: 2311351 - RNA, 15 nt, Human
aaaugccuuuguacu

SEQ ID NO: 2311352 - RNA, 20 nt, Human
aaaugccuuugagacaguuu

SEQ ID NO: 2311353 - RNA, 16 nt, Human
aaaugccuuugagaca

SEQ ID NO: 2311354 - RNA, 17 nt, Human
aaaugccuuugagacag

SEQ ID NO: 2311355 - RNA, 18 nt, Human
aaaugccuuugagacagu

SEQ ID NO: 2311356 - RNA, 19 nt, Human
aaaugccuuugagacaguu

SEQ ID NO: 2311357 - RNA, 19 nt, Human
aaaucuuauauuccauaua

SEQ ID NO: 2311358 - RNA, 21 nt, Human
aaaucuuauauuccauauauu

SEQ ID NO: 2311359 - RNA, 23 nt, Human
aaaugccuuacccucauguucuu

SEQ ID NO: 2311360 - RNA, 17 nt, Human
aaaucuuauaauuuaaa

SEQ ID NO: 2311361 - RNA, 13 nt, Human
aaauguuucugca

SEQ ID NO: 2311362 - RNA, 15 nt, Human
aaauguuucugcagu

SEQ ID NO: 2311363 - RNA, 20 nt, Human
aaauguuuacagggagccuc

SEQ ID NO: 2311364 - RNA, 21 nt, Human
aaauguuuacagggagccucc

SEQ ID NO: 2311365 - RNA, 23 nt, Human
aaauguuggauuuauaaaugcua

SEQ ID NO: 2311366 - RNA, 23 nt, Human
aaauguuguucauuauuggaggg

SEQ ID NO: 2311367 - RNA, 19 nt, Human
aaauguuggucauuuuaug

SEQ ID NO: 2311368 - RNA, 17 nt, Human
aaauguuggucauuuua

SEQ ID NO: 2311369 - RNA, 22 nt, Human
aaauguuguucucuucuuuaaa

SEQ ID NO: 2311370 - RNA, 20 nt, Human
aacacgccugcaaacgcugc

SEQ ID NO: 2311371 - RNA, 15 nt, Human
aacacgccugcaaac

SEQ ID NO: 2311372 - RNA, 20 nt, Human
aacacccagucuguucccca

SEQ ID NO: 2311373 - RNA, 22 nt, Human
aacaccagccccugccccagcc

SEQ ID NO: 2311374 - RNA, 23 nt, Human
aacaccagccccugccccagccc

SEQ ID NO: 2311375 - RNA, 21 nt, Human
aacaccagguuuauggaaaau

SEQ ID NO: 2311376 - RNA, 19 nt, Human
aacaccacagacacacaca

SEQ ID NO: 2311377 - RNA, 23 nt, Human
aacaccacagacacacacacgca

SEQ ID NO: 2311378 - RNA, 13 nt, Human
aacaccagccccu

SEQ ID NO: 2311379 - RNA, 15 nt, Human
aacaccagccccugc

SEQ ID NO: 2311380 - RNA, 16 nt, Human
aacaccagccccugcc

SEQ ID NO: 2311381 - RNA, 17 nt, Human
aacaccagccccugccc

SEQ ID NO: 2311382 - RNA, 18 nt, Human
aacaccagccccugcccc

SEQ ID NO: 2311383 - RNA, 19 nt, Human
aacaccagccccugcccca

SEQ ID NO: 2311384 - RNA, 21 nt, Human
aacacauuaagccuuccacac

SEQ ID NO: 2311385 - RNA, 21 nt, Human
aacacauuaucgggagcagug

SEQ ID NO: 2311386 - RNA, 17 nt, Human
aacacaucuuuccuguc

SEQ ID NO: 2311387 - RNA, 20 nt, Human
aacacauuugauucugugug

SEQ ID NO: 2311388 - RNA, 13 nt, Human
aacaccacagaca

SEQ ID NO: 2311389 - RNA, 14 nt, Human
aacaccacagacac

SEQ ID NO: 2311390 - RNA, 15 nt, Human
aacaccacagacaca

SEQ ID NO: 2311391 - RNA, 16 nt, Human
aacaccacagacacac

SEQ ID NO: 2311392 - RNA, 17 nt, Human
aacaccacagacacaca

SEQ ID NO: 2311393 - RNA, 18 nt, Human
aacaccacagacacacac

SEQ ID NO: 2311394 - RNA, 18 nt, Human
aacacauuugauucugug

SEQ ID NO: 2311395 - RNA, 13 nt, Human
aacaacauguaua

SEQ ID NO: 2311396 - RNA, 16 nt, Human
aacaaauugaacucuu

SEQ ID NO: 2311397 - RNA, 18 nt, Human
aacaaauuuacagagaca

SEQ ID NO: 2311398 - RNA, 13 nt, Human
aacaaccuggaga

SEQ ID NO: 2311399 - RNA, 18 nt, Human
aacaaccucaacugccua

SEQ ID NO: 2311400 - RNA, 14 nt, Human
aacaaccucaacug

SEQ ID NO: 2311401 - RNA, 16 nt, Human
aacacaucagcuugcc

SEQ ID NO: 2311402 - RNA, 17 nt, Human
aaauuuuuuuuguuuca

SEQ ID NO: 2311403 - RNA, 18 nt, Human
aaauuuuuuuuguuucau

SEQ ID NO: 2311404 - RNA, 15 nt, Human
aaauuuuuuuucaug

SEQ ID NO: 2311405 - RNA, 20 nt, Human
aacaaauuauguuacaucug

SEQ ID NO: 2311406 - RNA, 11 nt, Human
aacaaaaagaa

SEQ ID NO: 2311407 - RNA, 12 nt, Human
aacaaaaagaac

SEQ ID NO: 2311408 - RNA, 18 nt, Human
aacaaauucauauucugu

SEQ ID NO: 2311409 - RNA, 22 nt, Human
aacaaauucaucaaauggaaga

SEQ ID NO: 2311410 - RNA, 13 nt, Human
aacaaaaaaaucu

SEQ ID NO: 2311411 - RNA, 19 nt, Human
aacaaaaacacuaaaaaua

SEQ ID NO: 2311412 - RNA, 23 nt, Human
aaauuuuuuuucauguuuuaaca

SEQ ID NO: 2311413 - RNA, 17 nt, Human
aaauuuuuuuuuuaaua

SEQ ID NO: 2311414 - RNA, 22 nt, Human
aaauuuuuuuucauguuuuaac

SEQ ID NO: 2311415 - RNA, 17 nt, Human
aaauuuuuuuucauguu

SEQ ID NO: 2311416 - RNA, 18 nt, Human
aacacuaacauauaaugu

SEQ ID NO: 2311417 - RNA, 19 nt, Human
aacacuaaacagacuauuu

SEQ ID NO: 2311418 - RNA, 15 nt, Human
aacacuaaaaauaaa

SEQ ID NO: 2311419 - RNA, 14 nt, Human
aacacuaaaaauaa

SEQ ID NO: 2311420 - RNA, 21 nt, Human
aacacccaugaaucaaagaca

SEQ ID NO: 2311421 - RNA, 21 nt, Human
aacacguccagaauuuuucau

SEQ ID NO: 2311422 - RNA, 21 nt, Human
aacacggccacaucaaagagg

SEQ ID NO: 2311423 - RNA, 13 nt, Human
aacacggccacau

SEQ ID NO: 2311424 - RNA, 18 nt, Human
accccuccccuaaugccu

SEQ ID NO: 2311425 - RNA, 12 nt, Human
accccuccccau

SEQ ID NO: 2311426 - RNA, 19 nt, Human
accccucccauuaggacaa

SEQ ID NO: 2311427 - RNA, 22 nt, Human
accccucccagcugacaguccu

SEQ ID NO: 2311428 - RNA, 11 nt, Human
accccucccau

SEQ ID NO: 2311429 - RNA, 17 nt, Human
accccucacucuggccu

SEQ ID NO: 2311430 - RNA, 12 nt, Human
accccucccagc

SEQ ID NO: 2311431 - RNA, 13 nt, Human
accccucccagcu

SEQ ID NO: 2311432 - RNA, 14 nt, Human
accccucccagcug

SEQ ID NO: 2311433 - RNA, 15 nt, Human
accccucccagcuga

SEQ ID NO: 2311434 - RNA, 16 nt, Human
accccucccagcugac

SEQ ID NO: 2311435 - RNA, 20 nt, Human
acccccuucagugcccacca

SEQ ID NO: 2311436 - RNA, 18 nt, Human
acccccuucagugcccac

SEQ ID NO: 2311437 - RNA, 11 nt, Human
acccccuuccc

SEQ ID NO: 2311438 - RNA, 19 nt, Human
acccccuuccuacucccag

SEQ ID NO: 2311439 - RNA, 16 nt, Human
acccccuucagugccc

SEQ ID NO: 2311440 - RNA, 22 nt, Human
acccaccuuguuggagccugca

SEQ ID NO: 2311441 - RNA, 15 nt, Human
acccccugcccugca

SEQ ID NO: 2311442 - RNA, 12 nt, Human
acccccuggaga

SEQ ID NO: 2311443 - RNA, 13 nt, Human
acccccugcccug

SEQ ID NO: 2311444 - RNA, 14 nt, Human
acccccugcccugc

SEQ ID NO: 2311445 - RNA, 20 nt, Human
accccucacaggagcuuacu

SEQ ID NO: 2311446 - RNA, 13 nt, Human
acccccuucucug

SEQ ID NO: 2311447 - RNA, 14 nt, Human
acccccuucucugc

SEQ ID NO: 2311448 - RNA, 19 nt, Human
acccccuucuacugagccu

SEQ ID NO: 2311449 - RNA, 18 nt, Human
acccccuucuacugagcc

SEQ ID NO: 2311450 - RNA, 19 nt, Human
acccccuucuccauccaca

SEQ ID NO: 2311451 - RNA, 18 nt, Human
acccccuucuccauccac

SEQ ID NO: 2311452 - RNA, 16 nt, Human
accccuccaugugggc

SEQ ID NO: 2311453 - RNA, 19 nt, Human
accccuccaugugggcuag

SEQ ID NO: 2311454 - RNA, 23 nt, Human
accccucaccuugcaacacacag

SEQ ID NO: 2311455 - RNA, 15 nt, Human
accccucacucuggc

SEQ ID NO: 2311456 - RNA, 18 nt, Human
accccucacucuggccuc

SEQ ID NO: 2311457 - RNA, 22 nt, Human
accccucaccuugcaacacaca

SEQ ID NO: 2311458 - RNA, 19 nt, Human
accccucaccuugcaacac

SEQ ID NO: 2311459 - RNA, 16 nt, Human
accccucaccuugcaa

SEQ ID NO: 2311460 - RNA, 15 nt, Human
accccucaccuugca

SEQ ID NO: 2311461 - RNA, 17 nt, Human
accccucauagcccuca

SEQ ID NO: 2311462 - RNA, 12 nt, Human
accccuccagga

SEQ ID NO: 2311463 - RNA, 21 nt, Human
accaucucaggccaccugccc

SEQ ID NO: 2311464 - RNA, 17 nt, Human
accaucucaggccaccu

SEQ ID NO: 2311465 - RNA, 16 nt, Human
accaucucaggccacc

SEQ ID NO: 2311466 - RNA, 15 nt, Human
accaucucaggccac

SEQ ID NO: 2311467 - RNA, 14 nt, Human
accaucucaggcca

SEQ ID NO: 2311468 - RNA, 13 nt, Human
accaucucaggcc

SEQ ID NO: 2311469 - RNA, 13 nt, Human
accaucuaauagc

SEQ ID NO: 2311470 - RNA, 18 nt, Human
acccaagggccuggccug

SEQ ID NO: 2311471 - RNA, 19 nt, Human
acccaagggccuggccuga

SEQ ID NO: 2311472 - RNA, 22 nt, Human
acccaagggccuggccugagcu

SEQ ID NO: 2311473 - RNA, 16 nt, Human
accauccuauuuaacu

SEQ ID NO: 2311474 - RNA, 17 nt, Human
accauccgccagggccc

SEQ ID NO: 2311475 - RNA, 16 nt, Human
accauccugcagccuc

SEQ ID NO: 2311476 - RNA, 13 nt, Human
accauccuauuua

SEQ ID NO: 2311477 - RNA, 20 nt, Human
accaucccuuuuugaagugu

SEQ ID NO: 2311478 - RNA, 21 nt, Human
accaucccuuuuugaagugua

SEQ ID NO: 2311479 - RNA, 17 nt, Human
accauccugcagccucc

SEQ ID NO: 2311480 - RNA, 15 nt, Human
accaucgcuuuauug

SEQ ID NO: 2311481 - RNA, 19 nt, Human
accaucccuuuuugaagug

SEQ ID NO: 2311482 - RNA, 19 nt, Human
accauauucagugcugugg

SEQ ID NO: 2311483 - RNA, 20 nt, Human
accauauuaccacagacaua

SEQ ID NO: 2311484 - RNA, 13 nt, Human
acccacaagugcc

SEQ ID NO: 2311485 - RNA, 21 nt, Human
acccacaagaaaugaaagcag

SEQ ID NO: 2311486 - RNA, 23 nt, Human
acccaagggccuggccugagcug

SEQ ID NO: 2311487 - RNA, 17 nt, Human
acccacaagaaaugaaa

SEQ ID NO: 2311488 - RNA, 17 nt, Human
acccacaagugccacug

SEQ ID NO: 2311489 - RNA, 16 nt, Human
acccacaccucugcca

SEQ ID NO: 2311490 - RNA, 15 nt, Human
acccacaccucugcc

SEQ ID NO: 2311491 - RNA, 17 nt, Human
acccaccguccgcccug

SEQ ID NO: 2311492 - RNA, 17 nt, Human
acccacaccucugccag

SEQ ID NO: 2311493 - RNA, 19 nt, Human
acccaccguccgcccugcu

SEQ ID NO: 2311494 - RNA, 13 nt, Human
acccaccucagcc

SEQ ID NO: 2311495 - RNA, 14 nt, Human
acccaccucagccu

SEQ ID NO: 2311496 - RNA, 15 nt, Human
acccaccucagccuc

SEQ ID NO: 2311497 - RNA, 19 nt, Human
acccaccugguggccucug

SEQ ID NO: 2311498 - RNA, 19 nt, Human
acccaccuuguuggagccu

SEQ ID NO: 2311499 - RNA, 22 nt, Human
acccaccugcugagagacccaa

SEQ ID NO: 2311500 - RNA, 17 nt, Human
acccaccugcugagaga

SEQ ID NO: 2311501 - RNA, 22 nt, Human
acccagugcccccacugaccag

SEQ ID NO: 2311502 - RNA, 20 nt, Human
acccaccuuguuggagccug

SEQ ID NO: 2311503 - RNA, 21 nt, Human
acccaccuuguuggagccugc

SEQ ID NO: 2311504 - RNA, 11 nt, Human
acccaccugcu

SEQ ID NO: 2311505 - RNA, 13 nt, Human
acccaccugcuga

SEQ ID NO: 2311506 - RNA, 18 nt, Human
acccaccucccugccucc

SEQ ID NO: 2311507 - RNA, 16 nt, Human
acccaccucccugccu

SEQ ID NO: 2311508 - RNA, 16 nt, Human
acccaccucagccucc

SEQ ID NO: 2311509 - RNA, 15 nt, Human
acccaccucccugcc

SEQ ID NO: 2311510 - RNA, 14 nt, Human
acccaccucccugc

SEQ ID NO: 2311511 - RNA, 13 nt, Human
acccaccucccug

SEQ ID NO: 2311512 - RNA, 15 nt, Human
acccaccguggagga

SEQ ID NO: 2311513 - RNA, 20 nt, Human
acccaccguccgcccugcuc

SEQ ID NO: 2311514 - RNA, 22 nt, Human
acccaccguccgcccugcuccu

SEQ ID NO: 2311515 - RNA, 22 nt, Human
acccaccguggaggaggaaggc

SEQ ID NO: 2311516 - RNA, 17 nt, Human
acccaguugccaucugc

SEQ ID NO: 2311517 - RNA, 18 nt, Human
acccaguugccaucugcg

SEQ ID NO: 2311518 - RNA, 22 nt, Human
acccauucguggugaucaauua

SEQ ID NO: 2311519 - RNA, 19 nt, Human
acccauucuacacagagca

SEQ ID NO: 2311520 - RNA, 17 nt, Human
acccauuccuauuucuu

SEQ ID NO: 2311521 - RNA, 20 nt, Human
acccauuuaaauuuuuuucc

SEQ ID NO: 2311522 - RNA, 23 nt, Human
acccauuuaaauuuuuuuccuua

SEQ ID NO: 2311523 - RNA, 13 nt, Human
acccauuccuauu

SEQ ID NO: 2311524 - RNA, 17 nt, Human
acccauuccauuuaucu

SEQ ID NO: 2311525 - RNA, 19 nt, Human
acccauuccauuuaucuuu

SEQ ID NO: 2311526 - RNA, 17 nt, Human
acccaugugccaaggug

SEQ ID NO: 2311527 - RNA, 14 nt, Human
acccaugggcucug

SEQ ID NO: 2311528 - RNA, 17 nt, Human
acccaugggcucugaca

SEQ ID NO: 2311529 - RNA, 16 nt, Human
acccaugggcucugac

SEQ ID NO: 2311530 - RNA, 14 nt, Human
acccaugugccaag

SEQ ID NO: 2311531 - RNA, 16 nt, Human
acccauguuucucugg

SEQ ID NO: 2311532 - RNA, 20 nt, Human
acccccugcaaagcccagcu

SEQ ID NO: 2311533 - RNA, 18 nt, Human
acccccugcaaagcccag

SEQ ID NO: 2311534 - RNA, 22 nt, Human
acccccugcaaagcccagcuug

SEQ ID NO: 2311535 - RNA, 17 nt, Human
acccccugcaaagccca

SEQ ID NO: 2311536 - RNA, 14 nt, Human
acccccugcaaagc

SEQ ID NO: 2311537 - RNA, 11 nt, Human
acccccugaau

SEQ ID NO: 2311538 - RNA, 16 nt, Human
accauauuaccacaga

SEQ ID NO: 2311539 - RNA, 14 nt, Human
accauauuaccaca

SEQ ID NO: 2311540 - RNA, 14 nt, Human
accagaggcugcag

SEQ ID NO: 2311541 - RNA, 15 nt, Human
accagaggcugcaga

SEQ ID NO: 2311542 - RNA, 19 nt, Human
accagaggcugcagaaggc

SEQ ID NO: 2311543 - RNA, 21 nt, Human
accagaggcugcagaaggcca

SEQ ID NO: 2311544 - RNA, 22 nt, Human
accagaggcugcagaaggccaa

SEQ ID NO: 2311545 - RNA, 14 nt, Human
accaccucccucac

SEQ ID NO: 2311546 - RNA, 17 nt, Human
accagagcuguggagag

SEQ ID NO: 2311547 - RNA, 18 nt, Human
accagaggaaucacucuu

SEQ ID NO: 2311548 - RNA, 15 nt, Human
accagaggaaucacu

SEQ ID NO: 2311549 - RNA, 21 nt, Human
accagauaagaaugcugguuu

SEQ ID NO: 2311550 - RNA, 20 nt, Human
accagauaagaaugcugguu

SEQ ID NO: 2311551 - RNA, 20 nt, Human
accagauaaaauuauagaug

SEQ ID NO: 2311552 - RNA, 13 nt, Human
accagaucauugu

SEQ ID NO: 2311553 - RNA, 18 nt, Human
accaccuaggccacuccu

SEQ ID NO: 2311554 - RNA, 17 nt, Human
accaccuaggccacucc

SEQ ID NO: 2311555 - RNA, 16 nt, Human
accaccuaggccacuc

SEQ ID NO: 2311556 - RNA, 19 nt, Human
accaccuaccuuacaguga

SEQ ID NO: 2311557 - RNA, 23 nt, Human
accaccgcuccccagcccagggu

SEQ ID NO: 2311558 - RNA, 18 nt, Human
accaccuaaucaggcuga

SEQ ID NO: 2311559 - RNA, 21 nt, Human
accaccgcuccccagcccagg

SEQ ID NO: 2311560 - RNA, 19 nt, Human
accaccgcuccccagccca

SEQ ID NO: 2311561 - RNA, 18 nt, Human
accaccgcuccccagccc

SEQ ID NO: 2311562 - RNA, 17 nt, Human
accaccgcuccccagcc

SEQ ID NO: 2311563 - RNA, 15 nt, Human
accaccgcuccccag

SEQ ID NO: 2311564 - RNA, 14 nt, Human
accaccgcucccca

SEQ ID NO: 2311565 - RNA, 13 nt, Human
accaccgcucccc

SEQ ID NO: 2311566 - RNA, 15 nt, Human
accaccucacuccug

SEQ ID NO: 2311567 - RNA, 16 nt, Human
accaccucacuccugu

SEQ ID NO: 2311568 - RNA, 21 nt, Human
accaccuaggccacuccucca

SEQ ID NO: 2311569 - RNA, 20 nt, Human
accaccuaggccacuccucc

SEQ ID NO: 2311570 - RNA, 19 nt, Human
accagagcugccaccugcc

SEQ ID NO: 2311571 - RNA, 14 nt, Human
accagcccagaugu

SEQ ID NO: 2311572 - RNA, 15 nt, Human
accagcccagauguu

SEQ ID NO: 2311573 - RNA, 22 nt, Human
accagccauacuuaucucucug

SEQ ID NO: 2311574 - RNA, 23 nt, Human
accagccaggcucugugcugacc

SEQ ID NO: 2311575 - RNA, 21 nt, Human
accagccauuggcuauuuaaa

SEQ ID NO: 2311576 - RNA, 16 nt, Human
accagcacugucucag

SEQ ID NO: 2311577 - RNA, 17 nt, Human
accagcauuccuuuuga

SEQ ID NO: 2311578 - RNA, 15 nt, Human
accagccagauccuc

SEQ ID NO: 2311579 - RNA, 14 nt, Human
accagccagauccu

SEQ ID NO: 2311580 - RNA, 17 nt, Human
accagccaggcucugug

SEQ ID NO: 2311581 - RNA, 19 nt, Human
accagccaggcucugugcu

SEQ ID NO: 2311582 - RNA, 20 nt, Human
accagccaggcucugugcug

SEQ ID NO: 2311583 - RNA, 17 nt, Human
accagccaguaaauggg

SEQ ID NO: 2311584 - RNA, 15 nt, Human
accagcacugucuca

SEQ ID NO: 2311585 - RNA, 15 nt, Human
accagcauuccuuuu

SEQ ID NO: 2311586 - RNA, 13 nt, Human
accagcagaaaug

SEQ ID NO: 2311587 - RNA, 23 nt, Human
accagcaacuugucuuuuucugg

SEQ ID NO: 2311588 - RNA, 17 nt, Human
accagcaauauaucuga

SEQ ID NO: 2311589 - RNA, 17 nt, Human
accagcaauauguaaau

SEQ ID NO: 2311590 - RNA, 17 nt, Human
accagaugaugggggag

SEQ ID NO: 2311591 - RNA, 18 nt, Human
accagaugaugggggagg

SEQ ID NO: 2311592 - RNA, 16 nt, Human
accaagcaggaagcuc

SEQ ID NO: 2311593 - RNA, 15 nt, Human
accaagcaggaagcu

SEQ ID NO: 2311594 - RNA, 14 nt, Human
accaagcaggaagc

SEQ ID NO: 2311595 - RNA, 13 nt, Human
accaagcaggaag

SEQ ID NO: 2311596 - RNA, 24 nt, Human
accaagcaggaagcucagacuggu

SEQ ID NO: 2311597 - RNA, 14 nt, Human
accaagcaucuugg

SEQ ID NO: 2311598 - RNA, 16 nt, Human
accaagcacagcagcc

SEQ ID NO: 2311599 - RNA, 14 nt, Human
accaagcacagcag

SEQ ID NO: 2311600 - RNA, 17 nt, Human
accaagcacagcagccu

SEQ ID NO: 2311601 - RNA, 13 nt, Human
accaagcaggaaa

SEQ ID NO: 2311602 - RNA, 12 nt, Human
accaagcccagu

SEQ ID NO: 2311603 - RNA, 17 nt, Human
accaagcaggaagcuca

SEQ ID NO: 2311604 - RNA, 20 nt, Human
accaagccaagggaaccugu

SEQ ID NO: 2311605 - RNA, 23 nt, Human
accaagccaagggaaccuguguc

SEQ ID NO: 2311606 - RNA, 20 nt, Human
accaauauuauacuaagaaa

SEQ ID NO: 2311607 - RNA, 23 nt, Human
accaauagggcugagcucucugu

SEQ ID NO: 2311608 - RNA, 13 nt, Human
accacccugaggc

SEQ ID NO: 2311609 - RNA, 13 nt, Human
accaauagauucc

SEQ ID NO: 2311610 - RNA, 14 nt, Human
accaauagauuccc

SEQ ID NO: 2311611 - RNA, 23 nt, Human
accaaguuucagguauuaagaaa

SEQ ID NO: 2311612 - RNA, 23 nt, Human
accaaguuauaaaucaaugucac

SEQ ID NO: 2311613 - RNA, 16 nt, Human
accaaguggaccuuga

SEQ ID NO: 2311614 - RNA, 15 nt, Human
accaaggucuucagc

SEQ ID NO: 2311615 - RNA, 19 nt, Human
accaaggucuucagccauc

SEQ ID NO: 2311616 - RNA, 15 nt, Human
accaaguauuuauua

SEQ ID NO: 2311617 - RNA, 15 nt, Human
acauuuuaaauggac

SEQ ID NO: 2311618 - RNA, 15 nt, Human
acauuuuaaauaaaa

SEQ ID NO: 2311619 - RNA, 17 nt, Human
acauuuuaaauaaaaga

SEQ ID NO: 2311620 - RNA, 20 nt, Human
acauuuuaaauaaaagaaaa

SEQ ID NO: 2311621 - RNA, 14 nt, Human
acauuuuaaauaaa

SEQ ID NO: 2311622 - RNA, 21 nt, Human
acauuuguguaaacaguguuu

SEQ ID NO: 2311623 - RNA, 19 nt, Human
acauuuguucuauagcuuu

SEQ ID NO: 2311624 - RNA, 15 nt, Human
acauuuauucugcuc

SEQ ID NO: 2311625 - RNA, 15 nt, Human
acauuuauuuuuaua

SEQ ID NO: 2311626 - RNA, 13 nt, Human
acauuucccaggg

SEQ ID NO: 2311627 - RNA, 21 nt, Human
acauuuccccagaccugagcu

SEQ ID NO: 2311628 - RNA, 12 nt, Human
acauuucccugu

SEQ ID NO: 2311629 - RNA, 14 nt, Human
acauuuauucugcu

SEQ ID NO: 2311630 - RNA, 22 nt, Human
acaggcaacugaggcagacagc

SEQ ID NO: 2311631 - RNA, 12 nt, Human
acaggcacaaaa

SEQ ID NO: 2311632 - RNA, 23 nt, Human
acagggucucuagugcugugaaa

SEQ ID NO: 2311633 - RNA, 14 nt, Human
acagggucugcucu

SEQ ID NO: 2311634 - RNA, 15 nt, Human
acagggucugcucuu

SEQ ID NO: 2311635 - RNA, 22 nt, Human
acagggucugcucuuucucugc

SEQ ID NO: 2311636 - RNA, 23 nt, Human
acagggucugcucuuucucugcc

SEQ ID NO: 2311637 - RNA, 19 nt, Human
acaggcaaugcuggcuguu

SEQ ID NO: 2311638 - RNA, 23 nt, Human
acaggcaaugcuggcuguuggcu

SEQ ID NO: 2311639 - RNA, 16 nt, Human
acaggguucaaaaugu

SEQ ID NO: 2311640 - RNA, 24 nt, Human
acagggucugcucuuucucugcca

SEQ ID NO: 2311641 - RNA, 14 nt, Human
acaggguugggccc

SEQ ID NO: 2311642 - RNA, 15 nt, Human
acaggguuucaccau

SEQ ID NO: 2311643 - RNA, 19 nt, Human
acaggguuuugccauguug

SEQ ID NO: 2311644 - RNA, 22 nt, Human
acaggguuuggcugugucuaaa

SEQ ID NO: 2311645 - RNA, 23 nt, Human
acaggguuuggcugugucuaaac

SEQ ID NO: 2311646 - RNA, 21 nt, Human
acauaaugcgugcauaccacu

SEQ ID NO: 2311647 - RNA, 22 nt, Human
acauaaugcgugcauaccacuu

SEQ ID NO: 2311648 - RNA, 23 nt, Human
acauaaugcgugcauaccacuuu

SEQ ID NO: 2311649 - RNA, 17 nt, Human
acauaaugggguccugg

SEQ ID NO: 2311650 - RNA, 20 nt, Human
acauaauguauuguugguaa

SEQ ID NO: 2311651 - RNA, 17 nt, Human
acaugcauuugagguca

SEQ ID NO: 2311652 - RNA, 21 nt, Human
acaugugacauuuauauauug

SEQ ID NO: 2311653 - RNA, 21 nt, Human
acauguuuauuuauucugcau

SEQ ID NO: 2311654 - RNA, 23 nt, Human
acauguuuauuuauucugcauuu

SEQ ID NO: 2311655 - RNA, 11 nt, Human
acauguuuccu

SEQ ID NO: 2311656 - RNA, 19 nt, Human
acauguuucuuuguaauga

SEQ ID NO: 2311657 - RNA, 22 nt, Human
acauguuucuuuguaaugaaaa

SEQ ID NO: 2311658 - RNA, 23 nt, Human
acauguuucuuuguaaugaaaac

SEQ ID NO: 2311659 - RNA, 16 nt, Human
acauguuuccucuagu

SEQ ID NO: 2311660 - RNA, 19 nt, Human
acaugaucuucuuuauaau

SEQ ID NO: 2311661 - RNA, 13 nt, Human
acaugauuccuuc

SEQ ID NO: 2311662 - RNA, 13 nt, Human
acaugauucauuu

SEQ ID NO: 2311663 - RNA, 13 nt, Human
acaugauuuccuu

SEQ ID NO: 2311664 - RNA, 14 nt, Human
acaugauuccuucc

SEQ ID NO: 2311665 - RNA, 22 nt, Human
acaugauuccuuccuguucuga

SEQ ID NO: 2311666 - RNA, 15 nt, Human
acaugauuccuuccu

SEQ ID NO: 2311667 - RNA, 18 nt, Human
acaucagcacgauuucug

SEQ ID NO: 2311668 - RNA, 16 nt, Human
acauaauuaaaguguc

SEQ ID NO: 2311669 - RNA, 13 nt, Human
acauaauuaaagu

SEQ ID NO: 2311670 - RNA, 15 nt, Human
acauaauuaaagugu

SEQ ID NO: 2311671 - RNA, 17 nt, Human
acaucagcacgauuucu

SEQ ID NO: 2311672 - RNA, 15 nt, Human
acaucagcacgauuu

SEQ ID NO: 2311673 - RNA, 16 nt, Human
acaugcauacuucaaa

SEQ ID NO: 2311674 - RNA, 17 nt, Human
acaugcauacuucaaaa

SEQ ID NO: 2311675 - RNA, 24 nt, Human
acaugcauacacacacacacacag

SEQ ID NO: 2311676 - RNA, 16 nt, Human
acaugcauuacugcau

SEQ ID NO: 2311677 - RNA, 21 nt, Human
acaugcauacuucaaaaguau

SEQ ID NO: 2311678 - RNA, 17 nt, Human
acaugcauacacacaca

SEQ ID NO: 2311679 - RNA, 16 nt, Human
acaugcauacacacac

SEQ ID NO: 2311680 - RNA, 15 nt, Human
acaugcauacacaca

SEQ ID NO: 2311681 - RNA, 14 nt, Human
acaugcauacacac

SEQ ID NO: 2311682 - RNA, 22 nt, Human
acaugcagcccaugcccaccug

SEQ ID NO: 2311683 - RNA, 20 nt, Human
acaugcagcccaugcccacc

SEQ ID NO: 2311684 - RNA, 23 nt, Human
acaugcagcugcacccucccucc

SEQ ID NO: 2311685 - RNA, 17 nt, Human
acaugauuuccuugaau

SEQ ID NO: 2311686 - RNA, 16 nt, Human
acaugauuuccuugaa

SEQ ID NO: 2311687 - RNA, 13 nt, Human
acaugcauacaca

SEQ ID NO: 2311688 - RNA, 12 nt, Human
acaugcauacac

SEQ ID NO: 2311689 - RNA, 12 nt, Human
acaugcauuuga

SEQ ID NO: 2311690 - RNA, 19 nt, Human
acaugcauacuucaaaagu

SEQ ID NO: 2311691 - RNA, 20 nt, Human
acaugcauuacugcaugcac

SEQ ID NO: 2311692 - RNA, 21 nt, Human
acaugcauuugaggucaagua

SEQ ID NO: 2311693 - RNA, 15 nt, Human
acaugugacacauau

SEQ ID NO: 2311694 - RNA, 21 nt, Human
acaugugacacauaugcaccu

SEQ ID NO: 2311695 - RNA, 13 nt, Human
acaugugacauuu

SEQ ID NO: 2311696 - RNA, 14 nt, Human
acaugugacauuua

SEQ ID NO: 2311697 - RNA, 15 nt, Human
acaugugacauuuau

SEQ ID NO: 2311698 - RNA, 16 nt, Human
acaugugacauuuaua

SEQ ID NO: 2311699 - RNA, 16 nt, Human
acaugugcacaugcac

SEQ ID NO: 2311700 - RNA, 18 nt, Human
acaugugcacaugcacgu

SEQ ID NO: 2311701 - RNA, 17 nt, Human
acagaggcuauuguccc

SEQ ID NO: 2311702 - RNA, 13 nt, Human
acagaggccugcc

SEQ ID NO: 2311703 - RNA, 20 nt, Human
acagagggaagaaaagagcu

SEQ ID NO: 2311704 - RNA, 15 nt, Human
acagagggaagaaaa

SEQ ID NO: 2311705 - RNA, 14 nt, Human
acagaggccugccc

SEQ ID NO: 2311706 - RNA, 23 nt, Human
acagagucucacuguugcccagg

SEQ ID NO: 2311707 - RNA, 13 nt, Human
acagagucugggu

SEQ ID NO: 2311708 - RNA, 16 nt, Human
acagagggaagaaaag

SEQ ID NO: 2311709 - RNA, 14 nt, Human
acagaggggguggc

SEQ ID NO: 2311710 - RNA, 15 nt, Human
acagagugagacucu

SEQ ID NO: 2311711 - RNA, 19 nt, Human
acagagugagacucugucu

SEQ ID NO: 2311712 - RNA, 21 nt, Human
acagcaguugaaaagacucca

SEQ ID NO: 2311713 - RNA, 23 nt, Human
acagcaguugaaaagacuccaaa

SEQ ID NO: 2311714 - RNA, 22 nt, Human
acagcaguugaaaagacuccaa

SEQ ID NO: 2311715 - RNA, 19 nt, Human
acagccaacuauggccugu

SEQ ID NO: 2311716 - RNA, 11 nt, Human
acagccacaca

SEQ ID NO: 2311717 - RNA, 10 nt, Human
acagccacac

SEQ ID NO: 2311718 - RNA, 19 nt, Human
acagccacacacacagaaa

SEQ ID NO: 2311719 - RNA, 18 nt, Human
acagccacacacacagaa

SEQ ID NO: 2311720 - RNA, 17 nt, Human
acagccacacacacaga

SEQ ID NO: 2311721 - RNA, 16 nt, Human
acagccacacacacag

SEQ ID NO: 2311722 - RNA, 15 nt, Human
acagccacacacaca

SEQ ID NO: 2311723 - RNA, 14 nt, Human
acagccacacacac

SEQ ID NO: 2311724 - RNA, 13 nt, Human
acagccacacaca

SEQ ID NO: 2311725 - RNA, 12 nt, Human
acagccacacac

SEQ ID NO: 2311726 - RNA, 17 nt, Human
acagccaacuauggccu

SEQ ID NO: 2311727 - RNA, 24 nt, Human
acagccaacacgcaccugccucag

SEQ ID NO: 2311728 - RNA, 13 nt, Human
acagccaacaggu

SEQ ID NO: 2311729 - RNA, 23 nt, Human
acagccaacagguggcaggacca

SEQ ID NO: 2311730 - RNA, 15 nt, Human
acagcauaacaaggu

SEQ ID NO: 2311731 - RNA, 13 nt, Human
acagcaucagggu

SEQ ID NO: 2311732 - RNA, 22 nt, Human
acagccaacacgcaccugccuc

SEQ ID NO: 2311733 - RNA, 21 nt, Human
acagccaacacgcaccugccu

SEQ ID NO: 2311734 - RNA, 20 nt, Human
acagccaacacgcaccugcc

SEQ ID NO: 2311735 - RNA, 22 nt, Human
acagcauaacaagguccaagau

SEQ ID NO: 2311736 - RNA, 23 nt, Human
acagaaucauaugauucugcuuu

SEQ ID NO: 2311737 - RNA, 15 nt, Human
acacuguacugcaau

SEQ ID NO: 2311738 - RNA, 21 nt, Human
acacugguauuccugccucca

SEQ ID NO: 2311739 - RNA, 14 nt, Human
acacuggugacugc

SEQ ID NO: 2311740 - RNA, 16 nt, Human
acacuggugugaccug

SEQ ID NO: 2311741 - RNA, 20 nt, Human
acacuggugugaccugaggg

SEQ ID NO: 2311742 - RNA, 21 nt, Human
acacuggugugaccugagggc

SEQ ID NO: 2311743 - RNA, 15 nt, Human
acagaauucugcuac

SEQ ID NO: 2311744 - RNA, 17 nt, Human
acagaauucugcuaccu

SEQ ID NO: 2311745 - RNA, 20 nt, Human
acagaauguuuuacugugaa

SEQ ID NO: 2311746 - RNA, 18 nt, Human
acagaauugugucugcag

SEQ ID NO: 2311747 - RNA, 20 nt, Human
acagacaaaaacagccucac

SEQ ID NO: 2311748 - RNA, 19 nt, Human
acagacaaaaacagccuca

SEQ ID NO: 2311749 - RNA, 18 nt, Human
acagacaaaaacagccuc

SEQ ID NO: 2311750 - RNA, 21 nt, Human
acagaauguuuuacugugaaa

SEQ ID NO: 2311751 - RNA, 13 nt, Human
acagacaaagcgu

SEQ ID NO: 2311752 - RNA, 11 nt, Human
acagacacagg

SEQ ID NO: 2311753 - RNA, 15 nt, Human
acagacacaggcccg

SEQ ID NO: 2311754 - RNA, 16 nt, Human
acagaggccccagccu

SEQ ID NO: 2311755 - RNA, 15 nt, Human
acagaggccccagcc

SEQ ID NO: 2311756 - RNA, 22 nt, Human
acagaggccccagccucccuga

SEQ ID NO: 2311757 - RNA, 12 nt, Human
acagaggccugc

SEQ ID NO: 2311758 - RNA, 18 nt, Human
acagaggccccagccucc

SEQ ID NO: 2311759 - RNA, 17 nt, Human
acagaggccccagccuc

SEQ ID NO: 2311760 - RNA, 19 nt, Human
acagaggcagccccauucu

SEQ ID NO: 2311761 - RNA, 23 nt, Human
acagaggcagccccauucugccu

SEQ ID NO: 2311762 - RNA, 13 nt, Human
acagacacaggcc

SEQ ID NO: 2311763 - RNA, 14 nt, Human
acagacacaggccc

SEQ ID NO: 2311764 - RNA, 14 nt, Human
acagaggcagcccc

SEQ ID NO: 2311765 - RNA, 15 nt, Human
acagaggcagcccca

SEQ ID NO: 2311766 - RNA, 19 nt, Human
acacugcuuguguuuuuaa

SEQ ID NO: 2311767 - RNA, 21 nt, Human
acacugcaggcaucacagcua

SEQ ID NO: 2311768 - RNA, 16 nt, Human
acacuggacuccggcc

SEQ ID NO: 2311769 - RNA, 23 nt, Human
acacugcuuguguuuuuaacuca

SEQ ID NO: 2311770 - RNA, 16 nt, Human
acacugcaggcaucac

SEQ ID NO: 2311771 - RNA, 20 nt, Human
acacugcaggcaucacagcu

SEQ ID NO: 2311772 - RNA, 15 nt, Human
acacugcauguuugu

SEQ ID NO: 2311773 - RNA, 14 nt, Human
acacugcauguuug

SEQ ID NO: 2311774 - RNA, 21 nt, Human
acacuggcucauauuccugca

SEQ ID NO: 2311775 - RNA, 14 nt, Human
acacuggcugccag

SEQ ID NO: 2311776 - RNA, 16 nt, Human
acacuggccccuagaa

SEQ ID NO: 2311777 - RNA, 21 nt, Human
acacuggggugccgccugccc

SEQ ID NO: 2311778 - RNA, 22 nt, Human
acacuggcugccagcuauuuuu

SEQ ID NO: 2311779 - RNA, 16 nt, Human
acacuggcugccagcu

SEQ ID NO: 2311780 - RNA, 21 nt, Human
acacuggcugccagcuauuuu

SEQ ID NO: 2311781 - RNA, 17 nt, Human
acacugggugcccaagc

SEQ ID NO: 2311782 - RNA, 18 nt, Human
acacugguauuccugccu

SEQ ID NO: 2311783 - RNA, 19 nt, Human
acacugguauuccugccuc

SEQ ID NO: 2311784 - RNA, 13 nt, Human
acacuggccccua

SEQ ID NO: 2311785 - RNA, 12 nt, Human
acacuggccccu

SEQ ID NO: 2311786 - RNA, 13 nt, Human
acacuggccccuc

SEQ ID NO: 2311787 - RNA, 14 nt, Human
acacuggccccuca

SEQ ID NO: 2311788 - RNA, 22 nt, Human
acacuggcguagaaguuuuugu

SEQ ID NO: 2311789 - RNA, 22 nt, Human
acacuggaggagagaagaauga

SEQ ID NO: 2311790 - RNA, 18 nt, Human
acacuggaggagagaaga

SEQ ID NO: 2311791 - RNA, 19 nt, Human
acacuggaggagagaagaa

SEQ ID NO: 2311792 - RNA, 20 nt, Human
acacuggaggagagaagaau

SEQ ID NO: 2311793 - RNA, 21 nt, Human
acacuggaggagagaagaaug

SEQ ID NO: 2311794 - RNA, 18 nt, Human
acacugcaagagccuugg

SEQ ID NO: 2311795 - RNA, 22 nt, Human
acacugcacucuuaagcuuccg

SEQ ID NO: 2311796 - RNA, 19 nt, Human
acaggaugggggcuggccu

SEQ ID NO: 2311797 - RNA, 18 nt, Human
acaggaugaccuggauaa

SEQ ID NO: 2311798 - RNA, 21 nt, Human
acaggauccuauucucaccag

SEQ ID NO: 2311799 - RNA, 22 nt, Human
acaggauccuauucucaccagg

SEQ ID NO: 2311800 - RNA, 14 nt, Human
acaggaugaaggca

SEQ ID NO: 2311801 - RNA, 14 nt, Human
acaggauuauugga

SEQ ID NO: 2311802 - RNA, 20 nt, Human
acagcucuguguugccaugu

SEQ ID NO: 2311803 - RNA, 21 nt, Human
acaggaugaugacuauggaaa

SEQ ID NO: 2311804 - RNA, 18 nt, Human
acaggcaaugcuggcugu

SEQ ID NO: 2311805 - RNA, 12 nt, Human
acaggcaagcac

SEQ ID NO: 2311806 - RNA, 20 nt, Human
acaggauuugaacucagauc

SEQ ID NO: 2311807 - RNA, 19 nt, Human
acaggcaaaauccuugcuu

SEQ ID NO: 2311808 - RNA, 19 nt, Human
acaggcaacugaggcagac

SEQ ID NO: 2311809 - RNA, 18 nt, Human
acaggcaacugaggcaga

SEQ ID NO: 2311810 - RNA, 16 nt, Human
acaggcaacugaggca

SEQ ID NO: 2311811 - RNA, 14 nt, Human
acaggcaaaugcau

SEQ ID NO: 2311812 - RNA, 16 nt, Human
acagcucuucuccagg

SEQ ID NO: 2311813 - RNA, 17 nt, Human
acagcucuucuccaggc

SEQ ID NO: 2311814 - RNA, 15 nt, Human
acaggaucagucuga

SEQ ID NO: 2311815 - RNA, 19 nt, Human
acagcucuguguugccaug

SEQ ID NO: 2311816 - RNA, 17 nt, Human
acagcucuguguugcca

SEQ ID NO: 2311817 - RNA, 18 nt, Human
acagcucuucuccaggcu

SEQ ID NO: 2311818 - RNA, 18 nt, Human
acagccacggccaggcca

SEQ ID NO: 2311819 - RNA, 15 nt, Human
acagccacggccagg

SEQ ID NO: 2311820 - RNA, 23 nt, Human
acagccacacacacagaaaauau

SEQ ID NO: 2311821 - RNA, 22 nt, Human
acagccacacacacagaaaaua

SEQ ID NO: 2311822 - RNA, 21 nt, Human
acagccacacacacagaaaau

SEQ ID NO: 2311823 - RNA, 20 nt, Human
acagccacacacacagaaaa

SEQ ID NO: 2311824 - RNA, 16 nt, Human
acagccacggccaggc

SEQ ID NO: 2311825 - RNA, 17 nt, Human
acagccacggccaggcc

SEQ ID NO: 2311826 - RNA, 16 nt, Human
acaacuaggcuucagc

SEQ ID NO: 2311827 - RNA, 16 nt, Human
acaagaaaaaaugaau

SEQ ID NO: 2311828 - RNA, 14 nt, Human
acaacgaggaagcc

SEQ ID NO: 2311829 - RNA, 17 nt, Human
acaaggauugcuacugu

SEQ ID NO: 2311830 - RNA, 15 nt, Human
acaagaaaucccugu

SEQ ID NO: 2311831 - RNA, 16 nt, Human
acaagaaaucccuguu

SEQ ID NO: 2311832 - RNA, 13 nt, Human
acaagaaaugaaa

SEQ ID NO: 2311833 - RNA, 12 nt, Human
acaaggcaaggc

SEQ ID NO: 2311834 - RNA, 14 nt, Human
acaaggcaaggcug

SEQ ID NO: 2311835 - RNA, 15 nt, Human
acaacgaggaagccc

SEQ ID NO: 2311836 - RNA, 18 nt, Human
acaaccuucuguggcuca

SEQ ID NO: 2311837 - RNA, 16 nt, Human
acaaacaaaauuucua

SEQ ID NO: 2311838 - RNA, 18 nt, Human
acaaacaaaauuucuauu

SEQ ID NO: 2311839 - RNA, 19 nt, Human
acaaacaaaauuucuauua

SEQ ID NO: 2311840 - RNA, 15 nt, Human
acaacgugcauugug

SEQ ID NO: 2311841 - RNA, 16 nt, Human
acaacgugcauugugc

SEQ ID NO: 2311842 - RNA, 17 nt, Human
acaacgugcauugugcu

SEQ ID NO: 2311843 - RNA, 18 nt, Human
acaacgugcauugugcuu

SEQ ID NO: 2311844 - RNA, 13 nt, Human
acaacgugcauug

SEQ ID NO: 2311845 - RNA, 14 nt, Human
acaacgugcauugu

SEQ ID NO: 2311846 - RNA, 22 nt, Human
acaaaauguaggguuauaauaa

SEQ ID NO: 2311847 - RNA, 20 nt, Human
acaaaauuuaguuuuuguuc

SEQ ID NO: 2311848 - RNA, 15 nt, Human
acaaaauuuaguuuu

SEQ ID NO: 2311849 - RNA, 14 nt, Human
acaaaauuucuauu

SEQ ID NO: 2311850 - RNA, 20 nt, Human
acaaaauucgaccugauuua

SEQ ID NO: 2311851 - RNA, 20 nt, Human
acaaggcugaccaagagaga

SEQ ID NO: 2311852 - RNA, 18 nt, Human
acaaggcugaccaagaga

SEQ ID NO: 2311853 - RNA, 13 nt, Human
acaaggcugacca

SEQ ID NO: 2311854 - RNA, 17 nt, Human
acaaggcuagaucauga

SEQ ID NO: 2311855 - RNA, 18 nt, Human
acaaggccccagagacuc

SEQ ID NO: 2311856 - RNA, 17 nt, Human
acaaggccccagagacu

SEQ ID NO: 2311857 - RNA, 16 nt, Human
acaaggccccagagac

SEQ ID NO: 2311858 - RNA, 15 nt, Human
acaaggccccagaga

SEQ ID NO: 2311859 - RNA, 23 nt, Human
acaaggcauucaaguguacagug

SEQ ID NO: 2311860 - RNA, 17 nt, Human
acaaggcauucaagugu

SEQ ID NO: 2311861 - RNA, 13 nt, Human
acaaggccccaga

SEQ ID NO: 2311862 - RNA, 11 nt, Human
acaaggcccca

SEQ ID NO: 2311863 - RNA, 18 nt, Human
acaaggccaucugggcuc

SEQ ID NO: 2311864 - RNA, 20 nt, Human
acaaggcaaggcugucaauu

SEQ ID NO: 2311865 - RNA, 21 nt, Human
acaagaaaucccuguuuaaua

SEQ ID NO: 2311866 - RNA, 23 nt, Human
acaagaaaucccuguuuaauauu

SEQ ID NO: 2311867 - RNA, 15 nt, Human
acaaggcaaggcugu

SEQ ID NO: 2311868 - RNA, 22 nt, Human
acaaggcugaccaagagagaaa

SEQ ID NO: 2311869 - RNA, 15 nt, Human
acaaggcuguugcau

SEQ ID NO: 2311870 - RNA, 22 nt, Human
aauuuucuucaugcaaugacau

SEQ ID NO: 2311871 - RNA, 19 nt, Human
aauuuucuucaugcaauga

SEQ ID NO: 2311872 - RNA, 20 nt, Human
aauuuugguuguauucuuug

SEQ ID NO: 2311873 - RNA, 22 nt, Human
aauuuugguuguauucuuugau

SEQ ID NO: 2311874 - RNA, 23 nt, Human
aauuuugguuguauucuuugaug

SEQ ID NO: 2311875 - RNA, 13 nt, Human
aauuuuguacaaa

SEQ ID NO: 2311876 - RNA, 15 nt, Human
aauuuuguaacgaag

SEQ ID NO: 2311877 - RNA, 14 nt, Human
aauuuuguacaaau

SEQ ID NO: 2311878 - RNA, 16 nt, Human
aauuuuguaugaaaaa

SEQ ID NO: 2311879 - RNA, 12 nt, Human
aauuuuguauuu

SEQ ID NO: 2311880 - RNA, 13 nt, Human
aauuuuguauuuu

SEQ ID NO: 2311881 - RNA, 21 nt, Human
aauuuuguauuuuccaagugu

SEQ ID NO: 2311882 - RNA, 23 nt, Human
aauuuuguauuuuccaagugugc

SEQ ID NO: 2311883 - RNA, 14 nt, Human
aauuuuguauuuuc

SEQ ID NO: 2311884 - RNA, 15 nt, Human
aauuuuguauuuucc

SEQ ID NO: 2311885 - RNA, 16 nt, Human
aauuuuguauuuucca

SEQ ID NO: 2311886 - RNA, 17 nt, Human
aauuuuguauuuuccaa

SEQ ID NO: 2311887 - RNA, 13 nt, Human
aauuuuguugcug

SEQ ID NO: 2311888 - RNA, 19 nt, Human
aauuuuguucuaguuuuca

SEQ ID NO: 2311889 - RNA, 20 nt, Human
aauuuuguucuaguuuucag

SEQ ID NO: 2311890 - RNA, 13 nt, Human
aauuuugugaagc

SEQ ID NO: 2311891 - RNA, 14 nt, Human
aauuuucuucaugc

SEQ ID NO: 2311892 - RNA, 21 nt, Human
aauuuucuguguucugaaguc

SEQ ID NO: 2311893 - RNA, 13 nt, Human
aauuuucuucaug

SEQ ID NO: 2311894 - RNA, 22 nt, Human
aauuuucuggaauacaugaaau

SEQ ID NO: 2311895 - RNA, 18 nt, Human
aauuuucuagacuuucug

SEQ ID NO: 2311896 - RNA, 18 nt, Human
aauuuucucccaggaagc

SEQ ID NO: 2311897 - RNA, 12 nt, Human
aauuuucuagac

SEQ ID NO: 2311898 - RNA, 15 nt, Human
aauuuucuagacuuu

SEQ ID NO: 2311899 - RNA, 17 nt, Human
aauuuucuagacuuucu

SEQ ID NO: 2311900 - RNA, 20 nt, Human
aauuuucuagacuuucuguu

SEQ ID NO: 2311901 - RNA, 16 nt, Human
aauuuuccuugaagcc

SEQ ID NO: 2311902 - RNA, 17 nt, Human
aauuuuccuugaagccg

SEQ ID NO: 2311903 - RNA, 14 nt, Human
aauuuuccuugaag

SEQ ID NO: 2311904 - RNA, 15 nt, Human
aauuuuccuugaagc

SEQ ID NO: 2311905 - RNA, 19 nt, Human
aauuuuccuaauaaaguuc

SEQ ID NO: 2311906 - RNA, 12 nt, Human
acacagaggaag

SEQ ID NO: 2311907 - RNA, 21 nt, Human
acacagaggaagagcaggcac

SEQ ID NO: 2311908 - RNA, 17 nt, Human
acacagaggaagagcag

SEQ ID NO: 2311909 - RNA, 13 nt, Human
acacagaggaaga

SEQ ID NO: 2311910 - RNA, 20 nt, Human
acaauuguaaaacugaggca

SEQ ID NO: 2311911 - RNA, 12 nt, Human
acaauuguaaua

SEQ ID NO: 2311912 - RNA, 12 nt, Human
acaauugaaaug

SEQ ID NO: 2311913 - RNA, 18 nt, Human
acaauucuuuauacaaca

SEQ ID NO: 2311914 - RNA, 19 nt, Human
acaauucuuuauacaacag

SEQ ID NO: 2311915 - RNA, 17 nt, Human
acaauugaacuuaaaua

SEQ ID NO: 2311916 - RNA, 21 nt, Human
acaauucuuuauacaacagug

SEQ ID NO: 2311917 - RNA, 19 nt, Human
acaauugaacuuaaauaaa

SEQ ID NO: 2311918 - RNA, 20 nt, Human
acacagcucuguccugggag

SEQ ID NO: 2311919 - RNA, 14 nt, Human
acacagcucugucc

SEQ ID NO: 2311920 - RNA, 17 nt, Human
acacagauuugagcuca

SEQ ID NO: 2311921 - RNA, 23 nt, Human
acacagaguggucuuucuggaga

SEQ ID NO: 2311922 - RNA, 21 nt, Human
acacagaguggucuuucugga

SEQ ID NO: 2311923 - RNA, 19 nt, Human
acacagaguggucuuucug

SEQ ID NO: 2311924 - RNA, 14 nt, Human
acacagaugaaaca

SEQ ID NO: 2311925 - RNA, 21 nt, Human
acacagaugaaacacaaacaa

SEQ ID NO: 2311926 - RNA, 19 nt, Human
acacagaggcugccucucc

SEQ ID NO: 2311927 - RNA, 14 nt, Human
acacauuuuucaga

SEQ ID NO: 2311928 - RNA, 13 nt, Human
acacauuuuguau

SEQ ID NO: 2311929 - RNA, 14 nt, Human
acacauuuuguaua

SEQ ID NO: 2311930 - RNA, 15 nt, Human
acacauuuuguauaa

SEQ ID NO: 2311931 - RNA, 16 nt, Human
acacauuuuguauaau

SEQ ID NO: 2311932 - RNA, 12 nt, Human
acacauuuuucu

SEQ ID NO: 2311933 - RNA, 22 nt, Human
acacauuuuuuaaaugcaccug

SEQ ID NO: 2311934 - RNA, 20 nt, Human
acacauuuuuuaaaugcacc

SEQ ID NO: 2311935 - RNA, 14 nt, Human
acacagcagcaguu

SEQ ID NO: 2311936 - RNA, 16 nt, Human
acacagaugaaacaca

SEQ ID NO: 2311937 - RNA, 12 nt, Human
acacauuuugua

SEQ ID NO: 2311938 - RNA, 21 nt, Human
acacauuuuauuuuauuaugc

SEQ ID NO: 2311939 - RNA, 22 nt, Human
acacauuuuauuuuauuaugca

SEQ ID NO: 2311940 - RNA, 11 nt, Human
acacagcucuu

SEQ ID NO: 2311941 - RNA, 13 nt, Human
acacagcucuucu

SEQ ID NO: 2311942 - RNA, 23 nt, Human
acacgcacacacacacacaggag

SEQ ID NO: 2311943 - RNA, 20 nt, Human
acacgcacacacacacacag

SEQ ID NO: 2311944 - RNA, 14 nt, Human
acacgcacacacac

SEQ ID NO: 2311945 - RNA, 13 nt, Human
acacgcacacaca

SEQ ID NO: 2311946 - RNA, 22 nt, Human
acacgagguaugaggucuagga

SEQ ID NO: 2311947 - RNA, 21 nt, Human
acacgagcaggcuacugucag

SEQ ID NO: 2311948 - RNA, 15 nt, Human
acacgcgugcacaca

SEQ ID NO: 2311949 - RNA, 17 nt, Human
acacgcgugcacacacc

SEQ ID NO: 2311950 - RNA, 14 nt, Human
acaccaaauaaaua

SEQ ID NO: 2311951 - RNA, 21 nt, Human
acacauuuuguauaauuguau

SEQ ID NO: 2311952 - RNA, 19 nt, Human
acacgagcaggcuacuguc

SEQ ID NO: 2311953 - RNA, 14 nt, Human
acacgagcaggcua

SEQ ID NO: 2311954 - RNA, 14 nt, Human
acacgcuccucccu

SEQ ID NO: 2311955 - RNA, 14 nt, Human
acacgcuccuuccu

SEQ ID NO: 2311956 - RNA, 16 nt, Human
acacgcuccuuccucu

SEQ ID NO: 2311957 - RNA, 22 nt, Human
acaauucuguuuuagguuaaaa

SEQ ID NO: 2311958 - RNA, 13 nt, Human
acaauucuuuaua

SEQ ID NO: 2311959 - RNA, 14 nt, Human
acaauucuuuauac

SEQ ID NO: 2311960 - RNA, 15 nt, Human
acaauucuuuauaca

SEQ ID NO: 2311961 - RNA, 16 nt, Human
acaauucuuuauacaa

SEQ ID NO: 2311962 - RNA, 17 nt, Human
acaauucuuuauacaac

SEQ ID NO: 2311963 - RNA, 20 nt, Human
acuuuauuuauacacugucu

SEQ ID NO: 2311964 - RNA, 15 nt, Human
acuuuaugccggaug

SEQ ID NO: 2311965 - RNA, 20 nt, Human
acuuuaugccggaugugcuu

SEQ ID NO: 2311966 - RNA, 21 nt, Human
acuuuaugccggaugugcuuu

SEQ ID NO: 2311967 - RNA, 20 nt, Human
acuuuauuaaauacaaaacu

SEQ ID NO: 2311968 - RNA, 13 nt, Human
acuuuauugcauc

SEQ ID NO: 2311969 - RNA, 22 nt, Human
acuuuaucuugaauaauguaag

SEQ ID NO: 2311970 - RNA, 23 nt, Human
acuuuaucuaauaccucugugug

SEQ ID NO: 2311971 - RNA, 22 nt, Human
acuuuauuuucuauaauuuaaa

SEQ ID NO: 2311972 - RNA, 16 nt, Human
acuuuguucuggcucu

SEQ ID NO: 2311973 - RNA, 17 nt, Human
acuuuguucuggcucuu

SEQ ID NO: 2311974 - RNA, 13 nt, Human
acuuuuauaaacu

SEQ ID NO: 2311975 - RNA, 12 nt, Human
acuuuuaugaua

SEQ ID NO: 2311976 - RNA, 16 nt, Human
acuuuuaugauacuug

SEQ ID NO: 2311977 - RNA, 13 nt, Human
acuuuauuuucug

SEQ ID NO: 2311978 - RNA, 20 nt, Human
acuuuguucuggcucuucca

SEQ ID NO: 2311979 - RNA, 19 nt, Human
acuuuguucuggcucuucc

SEQ ID NO: 2311980 - RNA, 24 nt, Human
acuuuauuuucugguagauagaaa

SEQ ID NO: 2311981 - RNA, 17 nt, Human
acuuuuaauaaacuuuu

SEQ ID NO: 2311982 - RNA, 14 nt, Human
acuuuuaaggcagu

SEQ ID NO: 2311983 - RNA, 20 nt, Human
acuuuuaaacuguguacaua

SEQ ID NO: 2311984 - RNA, 12 nt, Human
acuuuucaguga

SEQ ID NO: 2311985 - RNA, 17 nt, Human
acuuuuccauguaucua

SEQ ID NO: 2311986 - RNA, 16 nt, Human
acuuuucuuucagcca

SEQ ID NO: 2311987 - RNA, 20 nt, Human
acuuuuccguuucagcggaa

SEQ ID NO: 2311988 - RNA, 17 nt, Human
acuuuuccccuguccug

SEQ ID NO: 2311989 - RNA, 17 nt, Human
acuuuuccauucccaau

SEQ ID NO: 2311990 - RNA, 21 nt, Human
acuuuuccauguaucuaccuc

SEQ ID NO: 2311991 - RNA, 22 nt, Human
acuuuuccauguaucuaccuca

SEQ ID NO: 2311992 - RNA, 20 nt, Human
acuuuucauaaccuagccuu

SEQ ID NO: 2311993 - RNA, 19 nt, Human
acuuuuaugauguauauuu

SEQ ID NO: 2311994 - RNA, 20 nt, Human
acuuuuaugauguauauuua

SEQ ID NO: 2311995 - RNA, 23 nt, Human
acuuuuauuuccagugaaaucag

SEQ ID NO: 2311996 - RNA, 23 nt, Human
acuuuuaugauacuugaaaauua

SEQ ID NO: 2311997 - RNA, 17 nt, Human
agaaaauaaucauucuu

SEQ ID NO: 2311998 - RNA, 14 nt, Human
agaaaauaacaaua

SEQ ID NO: 2311999 - RNA, 12 nt, Human
acuuuugacaaa

SEQ ID NO: 2312000 - RNA, 15 nt, Human
acuuuugcccuuuga

SEQ ID NO: 2312001 - RNA, 14 nt, Human
acuuuucuuugugg

SEQ ID NO: 2312002 - RNA, 10 nt, Human
agaaaauaua

SEQ ID NO: 2312003 - RNA, 16 nt, Human
agaaaauauuuugucu

SEQ ID NO: 2312004 - RNA, 18 nt, Human
agaaaauauuuugucuaa

SEQ ID NO: 2312005 - RNA, 16 nt, Human
agaaaaucaggcuggc

SEQ ID NO: 2312006 - RNA, 19 nt, Human
agaaaauaguggugugauu

SEQ ID NO: 2312007 - RNA, 15 nt, Human
agaaaauaccaagga

SEQ ID NO: 2312008 - RNA, 21 nt, Human
acuuuaucacauuauuugcau

SEQ ID NO: 2312009 - RNA, 14 nt, Human
acuuuaucacauua

SEQ ID NO: 2312010 - RNA, 13 nt, Human
acuuuaucacauu

SEQ ID NO: 2312011 - RNA, 19 nt, Human
agaaaaucauauugcuucu

SEQ ID NO: 2312012 - RNA, 13 nt, Human
agaaaaucacuua

SEQ ID NO: 2312013 - RNA, 19 nt, Human
agaaaauauuuugucuaaa

SEQ ID NO: 2312014 - RNA, 20 nt, Human
agaaaauauuuugucuaaaa

SEQ ID NO: 2312015 - RNA, 21 nt, Human
agaaaauauuuugucuaaaau

SEQ ID NO: 2312016 - RNA, 22 nt, Human
agaaaauauuuugucuaaaaug

SEQ ID NO: 2312017 - RNA, 16 nt, Human
agaaaggauaaaguug

SEQ ID NO: 2312018 - RNA, 14 nt, Human
agaaaggccuuuaa

SEQ ID NO: 2312019 - RNA, 15 nt, Human
agaaaggccuuuaaa

SEQ ID NO: 2312020 - RNA, 16 nt, Human
agaaaggccuuuaaaa

SEQ ID NO: 2312021 - RNA, 17 nt, Human
agaaaggccuuuaaaau

SEQ ID NO: 2312022 - RNA, 19 nt, Human
agaaaggccuuuaaaauuu

SEQ ID NO: 2312023 - RNA, 17 nt, Human
agaaaggggagcccacu

SEQ ID NO: 2312024 - RNA, 16 nt, Human
agaaaggggagcccac

SEQ ID NO: 2312025 - RNA, 15 nt, Human
agaaaggggagccca

SEQ ID NO: 2312026 - RNA, 14 nt, Human
agaaaggggagccc

SEQ ID NO: 2312027 - RNA, 20 nt, Human
agaaagggcaacaauaaaau

SEQ ID NO: 2312028 - RNA, 14 nt, Human
agaaaggguguuuu

SEQ ID NO: 2312029 - RNA, 17 nt, Human
agaaaggguguuuuucu

SEQ ID NO: 2312030 - RNA, 22 nt, Human
agaaaggugaguuugagcugcc

SEQ ID NO: 2312031 - RNA, 23 nt, Human
agaaaggugaguuugagcugccu

SEQ ID NO: 2312032 - RNA, 22 nt, Human
agaaaguacuucuccacccugc

SEQ ID NO: 2312033 - RNA, 20 nt, Human
agaaagucgaauuaauagcu

SEQ ID NO: 2312034 - RNA, 20 nt, Human
agaaagguggacuggaaggg

SEQ ID NO: 2312035 - RNA, 16 nt, Human
agaaagguucugcccg

SEQ ID NO: 2312036 - RNA, 23 nt, Human
agaaaguacuucuccacccugcu

SEQ ID NO: 2312037 - RNA, 15 nt, Human
agaaagugaagcaaa

SEQ ID NO: 2312038 - RNA, 22 nt, Human
agaaagucuuauuuauucauau

SEQ ID NO: 2312039 - RNA, 19 nt, Human
agaaagucuuauuuauuca

SEQ ID NO: 2312040 - RNA, 21 nt, Human
agaaagucgaauuaauagcuu

SEQ ID NO: 2312041 - RNA, 23 nt, Human
agaaagugaagcaaaucagaaac

SEQ ID NO: 2312042 - RNA, 15 nt, Human
agaaagugauuucua

SEQ ID NO: 2312043 - RNA, 21 nt, Human
agaaaguggccaugccacccu

SEQ ID NO: 2312044 - RNA, 23 nt, Human
agaaaguggaaaacaaggaaguc

SEQ ID NO: 2312045 - RNA, 20 nt, Human
agaaaguggaaaacaaggaa

SEQ ID NO: 2312046 - RNA, 19 nt, Human
agaaaguggaaaacaagga

SEQ ID NO: 2312047 - RNA, 16 nt, Human
agaaagugugagcaaa

SEQ ID NO: 2312048 - RNA, 20 nt, Human
agaaagugggugagaugcug

SEQ ID NO: 2312049 - RNA, 21 nt, Human
agaaagugggugagaugcugg

SEQ ID NO: 2312050 - RNA, 14 nt, Human
agaaaguggugcuc

SEQ ID NO: 2312051 - RNA, 17 nt, Human
agaaaguggugcucagu

SEQ ID NO: 2312052 - RNA, 23 nt, Human
agaaagugugagcaaacuaacuu

SEQ ID NO: 2312053 - RNA, 17 nt, Human
agaaagugugagcaaac

SEQ ID NO: 2312054 - RNA, 22 nt, Human
agaaagugugcuuuaugcugaa

SEQ ID NO: 2312055 - RNA, 16 nt, Human
agaaagugugcuuuau

SEQ ID NO: 2312056 - RNA, 15 nt, Human
agaaagugugcuuua

SEQ ID NO: 2312057 - RNA, 21 nt, Human
agaaaguggugcucaguugua

SEQ ID NO: 2312058 - RNA, 23 nt, Human
agaaagugugcuuuaugcugaaa

SEQ ID NO: 2312059 - RNA, 17 nt, Human
agaaaguugcacggcug

SEQ ID NO: 2312060 - RNA, 19 nt, Human
agaaaguugcacggcugcu

SEQ ID NO: 2312061 - RNA, 20 nt, Human
agaaaguugcacggcugcug

SEQ ID NO: 2312062 - RNA, 21 nt, Human
agaaaguugcacggcugcuga

SEQ ID NO: 2312063 - RNA, 15 nt, Human
agaaauaaaacuguu

SEQ ID NO: 2312064 - RNA, 14 nt, Human
agaaauaaaacugu

SEQ ID NO: 2312065 - RNA, 17 nt, Human
agaaauaaaaggaagcc

SEQ ID NO: 2312066 - RNA, 18 nt, Human
agaaauaaauagcuauau

SEQ ID NO: 2312067 - RNA, 15 nt, Human
agaaauaaauagcua

SEQ ID NO: 2312068 - RNA, 21 nt, Human
agaaauaaaguuugcuuagaa

SEQ ID NO: 2312069 - RNA, 22 nt, Human
agaaauaaauagcuauauccau

SEQ ID NO: 2312070 - RNA, 19 nt, Human
agaaauaaauagcuauauc

SEQ ID NO: 2312071 - RNA, 15 nt, Human
agaaauaauaugcau

SEQ ID NO: 2312072 - RNA, 16 nt, Human
agaaauaauaugcauu

SEQ ID NO: 2312073 - RNA, 14 nt, Human
agaaauaauaugca

SEQ ID NO: 2312074 - RNA, 22 nt, Human
agaaauaagugguuauuucuca

SEQ ID NO: 2312075 - RNA, 17 nt, Human
agaaauaagugguuauu

SEQ ID NO: 2312076 - RNA, 21 nt, Human
agaaauaagugguuauuucuc

SEQ ID NO: 2312077 - RNA, 18 nt, Human
acucugucucaguccaug

SEQ ID NO: 2312078 - RNA, 20 nt, Human
acucugucucaguccaugaa

SEQ ID NO: 2312079 - RNA, 22 nt, Human
acucugucuucaccugauucaa

SEQ ID NO: 2312080 - RNA, 15 nt, Human
acucugucuuguguu

SEQ ID NO: 2312081 - RNA, 18 nt, Human
acucugucuucaccugau

SEQ ID NO: 2312082 - RNA, 17 nt, Human
acucugucuucaccuga

SEQ ID NO: 2312083 - RNA, 16 nt, Human
acucugucuucaccug

SEQ ID NO: 2312084 - RNA, 13 nt, Human
acugccagcaacg

SEQ ID NO: 2312085 - RNA, 15 nt, Human
acugccagaugcuga

SEQ ID NO: 2312086 - RNA, 17 nt, Human
acugccagaugcugaug

SEQ ID NO: 2312087 - RNA, 19 nt, Human
acugccagaugcugauguu

SEQ ID NO: 2312088 - RNA, 22 nt, Human
acugccagaugcugauguucag

SEQ ID NO: 2312089 - RNA, 23 nt, Human
acugccagaugcugauguucagu

SEQ ID NO: 2312090 - RNA, 15 nt, Human
acugguaggaccaag

SEQ ID NO: 2312091 - RNA, 14 nt, Human
acuggagcccagga

SEQ ID NO: 2312092 - RNA, 13 nt, Human
acuggagcccagg

SEQ ID NO: 2312093 - RNA, 18 nt, Human
acugguaggaaacuaggu

SEQ ID NO: 2312094 - RNA, 14 nt, Human
acugguccugugug

SEQ ID NO: 2312095 - RNA, 15 nt, Human
acugguccugugugc

SEQ ID NO: 2312096 - RNA, 20 nt, Human
acugguccugugugcaguga

SEQ ID NO: 2312097 - RNA, 15 nt, Human
acuggucuguaggga

SEQ ID NO: 2312098 - RNA, 14 nt, Human
acugguauuuuauc

SEQ ID NO: 2312099 - RNA, 18 nt, Human
acugguauuccugccucc

SEQ ID NO: 2312100 - RNA, 22 nt, Human
acugguccaaaagauugcugaa

SEQ ID NO: 2312101 - RNA, 21 nt, Human
acugguccaaaagauugcuga

SEQ ID NO: 2312102 - RNA, 18 nt, Human
acuggagcaucugacuca

SEQ ID NO: 2312103 - RNA, 12 nt, Human
acuggagcccag

SEQ ID NO: 2312104 - RNA, 19 nt, Human
acuggagcaccaggcacga

SEQ ID NO: 2312105 - RNA, 14 nt, Human
acuggagcaucuga

SEQ ID NO: 2312106 - RNA, 16 nt, Human
acuggagcaucugacu

SEQ ID NO: 2312107 - RNA, 17 nt, Human
acuggagcaucugacuc

SEQ ID NO: 2312108 - RNA, 16 nt, Human
acuggagcaccaggca

SEQ ID NO: 2312109 - RNA, 15 nt, Human
acuggagcaccaggc

SEQ ID NO: 2312110 - RNA, 13 nt, Human
acuggagcaucug

SEQ ID NO: 2312111 - RNA, 13 nt, Human
acuggagcaccag

SEQ ID NO: 2312112 - RNA, 17 nt, Human
acuggagaggcuagaac

SEQ ID NO: 2312113 - RNA, 17 nt, Human
acuggagaagucuuaga

SEQ ID NO: 2312114 - RNA, 21 nt, Human
acuggaagcauguaggagaau

SEQ ID NO: 2312115 - RNA, 19 nt, Human
acuggaagcuaauuugcau

SEQ ID NO: 2312116 - RNA, 15 nt, Human
acuggagaaaaugga

SEQ ID NO: 2312117 - RNA, 17 nt, Human
acugccccaacuccugg

SEQ ID NO: 2312118 - RNA, 15 nt, Human
acugccccaacuccu

SEQ ID NO: 2312119 - RNA, 21 nt, Human
acugcccauggacaggcuggc

SEQ ID NO: 2312120 - RNA, 21 nt, Human
acugccccaacuccuggaagc

SEQ ID NO: 2312121 - RNA, 18 nt, Human
acugccccaacuccugga

SEQ ID NO: 2312122 - RNA, 15 nt, Human
acugcccccucugcc

SEQ ID NO: 2312123 - RNA, 14 nt, Human
acugcccccucugc

SEQ ID NO: 2312124 - RNA, 19 nt, Human
acugcccauggacaggcug

SEQ ID NO: 2312125 - RNA, 17 nt, Human
acugccaggccagccuc

SEQ ID NO: 2312126 - RNA, 15 nt, Human
acugccaggccagcc

SEQ ID NO: 2312127 - RNA, 16 nt, Human
acugccaggccagccu

SEQ ID NO: 2312128 - RNA, 20 nt, Human
acuggaagcauguaggagaa

SEQ ID NO: 2312129 - RNA, 19 nt, Human
acuggaagcauguaggaga

SEQ ID NO: 2312130 - RNA, 16 nt, Human
acuggaagcuaauuug

SEQ ID NO: 2312131 - RNA, 19 nt, Human
acuggaagcacagcuucau

SEQ ID NO: 2312132 - RNA, 17 nt, Human
acuggaagcacagcuuc

SEQ ID NO: 2312133 - RNA, 17 nt, Human
acugcccccucugcccu

SEQ ID NO: 2312134 - RNA, 16 nt, Human
acugcccccucugccc

SEQ ID NO: 2312135 - RNA, 20 nt, Human
acugguuguugccaaacagc

SEQ ID NO: 2312136 - RNA, 20 nt, Human
acugguuuauccacccacaa

SEQ ID NO: 2312137 - RNA, 18 nt, Human
acugguuccauggccucu

SEQ ID NO: 2312138 - RNA, 22 nt, Human
acugguuuguugcagccaaaga

SEQ ID NO: 2312139 - RNA, 19 nt, Human
acugucucaagagggcacu

SEQ ID NO: 2312140 - RNA, 22 nt, Human
acuguaagaaaauaucacuugu

SEQ ID NO: 2312141 - RNA, 19 nt, Human
acuguaagaaaauaucacu

SEQ ID NO: 2312142 - RNA, 13 nt, Human
acuguaagaaaau

SEQ ID NO: 2312143 - RNA, 20 nt, Human
acugucucaagagggcacug

SEQ ID NO: 2312144 - RNA, 21 nt, Human
acugucucaagagggcacugg

SEQ ID NO: 2312145 - RNA, 18 nt, Human
acugucucaguuucacuu

SEQ ID NO: 2312146 - RNA, 12 nt, Human
acugucucacug

SEQ ID NO: 2312147 - RNA, 22 nt, Human
acugguuuauccacccacaaca

SEQ ID NO: 2312148 - RNA, 23 nt, Human
acugucucaagagggcacuggug

SEQ ID NO: 2312149 - RNA, 15 nt, Human
acugugaaggacccu

SEQ ID NO: 2312150 - RNA, 18 nt, Human
acugucucucaugaaccu

SEQ ID NO: 2312151 - RNA, 22 nt, Human
acugucuccauggcccugcaaa

SEQ ID NO: 2312152 - RNA, 21 nt, Human
acugucucgaugcaaugaaca

SEQ ID NO: 2312153 - RNA, 17 nt, Human
acugucucucaugaacc

SEQ ID NO: 2312154 - RNA, 15 nt, Human
acugucucucaugaa

SEQ ID NO: 2312155 - RNA, 12 nt, Human
acugugaccugu

SEQ ID NO: 2312156 - RNA, 23 nt, Human
acugugacucuuuuuagggccag

SEQ ID NO: 2312157 - RNA, 11 nt, Human
acugugacuga

SEQ ID NO: 2312158 - RNA, 21 nt, Human
acugugacccccagcuccggc

SEQ ID NO: 2312159 - RNA, 19 nt, Human
acugugacccccagcuccg

SEQ ID NO: 2312160 - RNA, 11 nt, Human
acugugccuuu

SEQ ID NO: 2312161 - RNA, 23 nt, Human
acugugccuuugaguuuccucag

SEQ ID NO: 2312162 - RNA, 18 nt, Human
acugugacaggcagcaga

SEQ ID NO: 2312163 - RNA, 19 nt, Human
acugugacaggcagcagag

SEQ ID NO: 2312164 - RNA, 14 nt, Human
acugugacaggcag

SEQ ID NO: 2312165 - RNA, 15 nt, Human
acugugacaggcagc

SEQ ID NO: 2312166 - RNA, 16 nt, Human
acugugacaggcagca

SEQ ID NO: 2312167 - RNA, 17 nt, Human
acugugacaggcagcag

SEQ ID NO: 2312168 - RNA, 16 nt, Human
acugugaaggacccuu

SEQ ID NO: 2312169 - RNA, 13 nt, Human
acugugacaggca

SEQ ID NO: 2312170 - RNA, 22 nt, Human
acugugaaguuuacauuguaaa

SEQ ID NO: 2312171 - RNA, 19 nt, Human
acuucacugucaggaagaa

SEQ ID NO: 2312172 - RNA, 21 nt, Human
acuucacugucaggaagaaau

SEQ ID NO: 2312173 - RNA, 23 nt, Human
acuucacugucaggaagaaauca

SEQ ID NO: 2312174 - RNA, 17 nt, Human
acuucacuuuaauucuc

SEQ ID NO: 2312175 - RNA, 19 nt, Human
acuuauuuuuuucugauug

SEQ ID NO: 2312176 - RNA, 21 nt, Human
acuuauuuuuuucugauugua

SEQ ID NO: 2312177 - RNA, 15 nt, Human
acuucaaaaguauuu

SEQ ID NO: 2312178 - RNA, 16 nt, Human
acuucaaaaguauuuu

SEQ ID NO: 2312179 - RNA, 17 nt, Human
acuucaaaaguauuuuc

SEQ ID NO: 2312180 - RNA, 18 nt, Human
acuucaaaaguauuuucc

SEQ ID NO: 2312181 - RNA, 19 nt, Human
acuucaaaaguauuuuccu

SEQ ID NO: 2312182 - RNA, 21 nt, Human
acuucaaaaguauuuuccugu

SEQ ID NO: 2312183 - RNA, 12 nt, Human
acuucagacaua

SEQ ID NO: 2312184 - RNA, 22 nt, Human
acuucugggcuucaucuggcaa

SEQ ID NO: 2312185 - RNA, 19 nt, Human
acuucugggcuucaucugg

SEQ ID NO: 2312186 - RNA, 17 nt, Human
acuucugggcuucaucu

SEQ ID NO: 2312187 - RNA, 15 nt, Human
acuucuggcuccuca

SEQ ID NO: 2312188 - RNA, 16 nt, Human
acuucuggguggggca

SEQ ID NO: 2312189 - RNA, 17 nt, Human
acuucuggguggggcag

SEQ ID NO: 2312190 - RNA, 16 nt, Human
acuucuggcuccucaa

SEQ ID NO: 2312191 - RNA, 21 nt, Human
acuucugucuucacaacagau

SEQ ID NO: 2312192 - RNA, 15 nt, Human
acuuauuuauauaaa

SEQ ID NO: 2312193 - RNA, 11 nt, Human
acuuauuugag

SEQ ID NO: 2312194 - RNA, 21 nt, Human
acuguuugccuucuacuuuua

SEQ ID NO: 2312195 - RNA, 22 nt, Human
acuguuugccuucuacuuuuaa

SEQ ID NO: 2312196 - RNA, 23 nt, Human
acuguuugagguuuuuaagccuu

SEQ ID NO: 2312197 - RNA, 15 nt, Human
acuuauuuucucugu

SEQ ID NO: 2312198 - RNA, 12 nt, Human
acuuauuugagu

SEQ ID NO: 2312199 - RNA, 22 nt, Human
acuuauuugagugauuauuugu

SEQ ID NO: 2312200 - RNA, 16 nt, Human
acuuauuuuugacagu

SEQ ID NO: 2312201 - RNA, 14 nt, Human
acuuauuuuugaca

SEQ ID NO: 2312202 - RNA, 22 nt, Human
acuuauuuuugacaguguugaa

SEQ ID NO: 2312203 - RNA, 19 nt, Human
acuuauuuuugacaguguu

SEQ ID NO: 2312204 - RNA, 15 nt, Human
acuuauuuuuuucug

SEQ ID NO: 2312205 - RNA, 16 nt, Human
acuuauuuuuuucuga

SEQ ID NO: 2312206 - RNA, 17 nt, Human
acuuauuuuuuucugau

SEQ ID NO: 2312207 - RNA, 18 nt, Human
acuuauuuuuuucugauu

SEQ ID NO: 2312208 - RNA, 14 nt, Human
acuguuucucugcu

SEQ ID NO: 2312209 - RNA, 13 nt, Human
acuguuucucugc

SEQ ID NO: 2312210 - RNA, 15 nt, Human
acuguuucucugcug

SEQ ID NO: 2312211 - RNA, 18 nt, Human
acuguuugagguuuuuaa

SEQ ID NO: 2312212 - RNA, 15 nt, Human
acuguuucugucagg

SEQ ID NO: 2312213 - RNA, 16 nt, Human
acuguuucugucagga

SEQ ID NO: 2312214 - RNA, 14 nt, Human
acuguuucugucag

SEQ ID NO: 2312215 - RNA, 18 nt, Human
acuugguuggguccucac

SEQ ID NO: 2312216 - RNA, 22 nt, Human
acuugguguccuuucccuccac

SEQ ID NO: 2312217 - RNA, 21 nt, Human
acuugguguccuuucccucca

SEQ ID NO: 2312218 - RNA, 23 nt, Human
acuuggggaguuaagaccuggca

SEQ ID NO: 2312219 - RNA, 18 nt, Human
acuugggccauagcuccu

SEQ ID NO: 2312220 - RNA, 16 nt, Human
acuugguuuuuaaaaa

SEQ ID NO: 2312221 - RNA, 14 nt, Human
acuugggccacugu

SEQ ID NO: 2312222 - RNA, 16 nt, Human
acuucuugaaggugcu

SEQ ID NO: 2312223 - RNA, 13 nt, Human
acuucuugaaggu

SEQ ID NO: 2312224 - RNA, 15 nt, Human
acuugggccacugug

SEQ ID NO: 2312225 - RNA, 21 nt, Human
acuuggggaguuaagaccugg

SEQ ID NO: 2312226 - RNA, 20 nt, Human
acuuggggagauggaguucu

SEQ ID NO: 2312227 - RNA, 17 nt, Human
acuugggccauagcucc

SEQ ID NO: 2312228 - RNA, 12 nt, Human
acuucuugaagg

SEQ ID NO: 2312229 - RNA, 20 nt, Human
acuucuucagagcugacaca

SEQ ID NO: 2312230 - RNA, 23 nt, Human
acuucuuauggaauugauuugca

SEQ ID NO: 2312231 - RNA, 21 nt, Human
acuucuuauggaauugauuug

SEQ ID NO: 2312232 - RNA, 13 nt, Human
acuucuucagagc

SEQ ID NO: 2312233 - RNA, 16 nt, Human
acuucuucagagcuga

SEQ ID NO: 2312234 - RNA, 21 nt, Human
acuucuucagagcugacacag

SEQ ID NO: 2312235 - RNA, 20 nt, Human
acuucuuauggaauugauuu

SEQ ID NO: 2312236 - RNA, 17 nt, Human
acuucuuauggaauuga

SEQ ID NO: 2312237 - RNA, 16 nt, Human
acuucuuauggaauug

SEQ ID NO: 2312238 - RNA, 22 nt, Human
acuucugucuucacaacagauu

SEQ ID NO: 2312239 - RNA, 22 nt, Human
acugugcugagucugaaggcug

SEQ ID NO: 2312240 - RNA, 12 nt, Human
acugugcuaaua

SEQ ID NO: 2312241 - RNA, 18 nt, Human
acugugcuaauaacagug

SEQ ID NO: 2312242 - RNA, 21 nt, Human
acugugcuaauaacagugcau

SEQ ID NO: 2312243 - RNA, 14 nt, Human
acugugcucagggc

SEQ ID NO: 2312244 - RNA, 20 nt, Human
acugugcugagucugaaggc

SEQ ID NO: 2312245 - RNA, 23 nt, Human
acgcugucuccagacccccaccc

SEQ ID NO: 2312246 - RNA, 18 nt, Human
acgcuuuccugaauccaa

SEQ ID NO: 2312247 - RNA, 17 nt, Human
acgcuuucuagcuguug

SEQ ID NO: 2312248 - RNA, 11 nt, Human
acgcuuugauu

SEQ ID NO: 2312249 - RNA, 22 nt, Human
acgcugucuccagacccccacc

SEQ ID NO: 2312250 - RNA, 21 nt, Human
acgcugucuccagacccccac

SEQ ID NO: 2312251 - RNA, 20 nt, Human
acgcugucuccagaccccca

SEQ ID NO: 2312252 - RNA, 13 nt, Human
acgccaccucgcc

SEQ ID NO: 2312253 - RNA, 19 nt, Human
acgcugucuccagaccccc

SEQ ID NO: 2312254 - RNA, 16 nt, Human
acgcuuugauucauag

SEQ ID NO: 2312255 - RNA, 14 nt, Human
acgcuuugauucau

SEQ ID NO: 2312256 - RNA, 13 nt, Human
acgcuuugauuca

SEQ ID NO: 2312257 - RNA, 12 nt, Human
acgcuuugauuc

SEQ ID NO: 2312258 - RNA, 20 nt, Human
acguccugccaccuggggca

SEQ ID NO: 2312259 - RNA, 15 nt, Human
acguccugucagugc

SEQ ID NO: 2312260 - RNA, 18 nt, Human
acguccugucagugccgc

SEQ ID NO: 2312261 - RNA, 13 nt, Human
acgucugacaggc

SEQ ID NO: 2312262 - RNA, 14 nt, Human
acgucugacaggca

SEQ ID NO: 2312263 - RNA, 19 nt, Human
acgucgucuucuguauacu

SEQ ID NO: 2312264 - RNA, 21 nt, Human
acguccugucagugccgccgc

SEQ ID NO: 2312265 - RNA, 22 nt, Human
acgcauggaguguguauuguuc

SEQ ID NO: 2312266 - RNA, 14 nt, Human
acgcaguggccuuc

SEQ ID NO: 2312267 - RNA, 17 nt, Human
acgcagggguugcagug

SEQ ID NO: 2312268 - RNA, 22 nt, Human
acgcaggcccccaggugccagu

SEQ ID NO: 2312269 - RNA, 19 nt, Human
acgcaggcccccaggugcc

SEQ ID NO: 2312270 - RNA, 13 nt, Human
acgccaccauucc

SEQ ID NO: 2312271 - RNA, 18 nt, Human
acgccaccauuccuggaa

SEQ ID NO: 2312272 - RNA, 12 nt, Human
acgccacccagc

SEQ ID NO: 2312273 - RNA, 11 nt, Human
acgcugugcug

SEQ ID NO: 2312274 - RNA, 12 nt, Human
acgcugugcugc

SEQ ID NO: 2312275 - RNA, 14 nt, Human
acgcugugcugccc

SEQ ID NO: 2312276 - RNA, 23 nt, Human
acuaauuccacaccuuuuauuga

SEQ ID NO: 2312277 - RNA, 20 nt, Human
acuaauuggccucuuuaaga

SEQ ID NO: 2312278 - RNA, 14 nt, Human
acuaauuguauaac

SEQ ID NO: 2312279 - RNA, 15 nt, Human
acuaauuguauaaca

SEQ ID NO: 2312280 - RNA, 14 nt, Human
acuaauuucaaaau

SEQ ID NO: 2312281 - RNA, 20 nt, Human
acuaauuguauaacagguua

SEQ ID NO: 2312282 - RNA, 22 nt, Human
acuaauuguauaacagguuauu

SEQ ID NO: 2312283 - RNA, 16 nt, Human
acuaauuguauaacag

SEQ ID NO: 2312284 - RNA, 17 nt, Human
acuaauuguauaacagg

SEQ ID NO: 2312285 - RNA, 18 nt, Human
acuaauuguauaacaggu

SEQ ID NO: 2312286 - RNA, 19 nt, Human
acuaauuguauaacagguu

SEQ ID NO: 2312287 - RNA, 19 nt, Human
acuaauuucaaaaugcuuu

SEQ ID NO: 2312288 - RNA, 16 nt, Human
acuaauuucaaaaugc

SEQ ID NO: 2312289 - RNA, 20 nt, Human
acuaauuucaaaaugcuuuu

SEQ ID NO: 2312290 - RNA, 15 nt, Human
acuaauuuaaaaaau

SEQ ID NO: 2312291 - RNA, 21 nt, Human
acuaaggggcccggccagcca

SEQ ID NO: 2312292 - RNA, 22 nt, Human
acuaaggggcccggccagccau

SEQ ID NO: 2312293 - RNA, 17 nt, Human
acuaaguuauaguauau

SEQ ID NO: 2312294 - RNA, 18 nt, Human
acuaaguuauaguauauc

SEQ ID NO: 2312295 - RNA, 15 nt, Human
acuaauuccacaccu

SEQ ID NO: 2312296 - RNA, 13 nt, Human
acuaauuccacac

SEQ ID NO: 2312297 - RNA, 12 nt, Human
acuaaggggccc

SEQ ID NO: 2312298 - RNA, 20 nt, Human
acuaaggaguaaucugugua

SEQ ID NO: 2312299 - RNA, 20 nt, Human
acuaagcuuugccagcugcu

SEQ ID NO: 2312300 - RNA, 21 nt, Human
acuaagcuuugccagcugcug

SEQ ID NO: 2312301 - RNA, 22 nt, Human
acuaagcccugucgagacacuu

SEQ ID NO: 2312302 - RNA, 14 nt, Human
acuaagccuaccug

SEQ ID NO: 2312303 - RNA, 18 nt, Human
acuaagccuaccugcucu

SEQ ID NO: 2312304 - RNA, 19 nt, Human
acuaagccuaccugcucuc

SEQ ID NO: 2312305 - RNA, 19 nt, Human
acuaagcagaggaggggcc

SEQ ID NO: 2312306 - RNA, 15 nt, Human
acuaagccacaagaa

SEQ ID NO: 2312307 - RNA, 16 nt, Human
acuaagccacaagaaa

SEQ ID NO: 2312308 - RNA, 18 nt, Human
acuaagccacaagaaauu

SEQ ID NO: 2312309 - RNA, 13 nt, Human
acuaagcccuguc

SEQ ID NO: 2312310 - RNA, 16 nt, Human
acuaagcccugucgag

SEQ ID NO: 2312311 - RNA, 18 nt, Human
acuaagcccugucgagac

SEQ ID NO: 2312312 - RNA, 17 nt, Human
acuaacuugacuuuuaa

SEQ ID NO: 2312313 - RNA, 13 nt, Human
acuaagaagaaaa

SEQ ID NO: 2312314 - RNA, 14 nt, Human
acuaagaagaaaau

SEQ ID NO: 2312315 - RNA, 18 nt, Human
acuaagaauucaaacugg

SEQ ID NO: 2312316 - RNA, 16 nt, Human
acuaagaauucaaacu

SEQ ID NO: 2312317 - RNA, 14 nt, Human
acuaagaaaagaua

SEQ ID NO: 2312318 - RNA, 22 nt, Human
acuaagcagaggaggggccgcu

SEQ ID NO: 2312319 - RNA, 13 nt, Human
acuaagagagaau

SEQ ID NO: 2312320 - RNA, 23 nt, Human
acgugagagugucuucacggcag

SEQ ID NO: 2312321 - RNA, 15 nt, Human
acgugagagugucuu

SEQ ID NO: 2312322 - RNA, 16 nt, Human
acgugagaucauucac

SEQ ID NO: 2312323 - RNA, 14 nt, Human
acgugagccaggua

SEQ ID NO: 2312324 - RNA, 15 nt, Human
acgugagccagguaa

SEQ ID NO: 2312325 - RNA, 22 nt, Human
acgugagccagguaaugaggga

SEQ ID NO: 2312326 - RNA, 23 nt, Human
acgugagccagguaaugagggac

SEQ ID NO: 2312327 - RNA, 18 nt, Human
acgugauggucugagacu

SEQ ID NO: 2312328 - RNA, 11 nt, Human
acgugaguccu

SEQ ID NO: 2312329 - RNA, 14 nt, Human
acgugagagugucu

SEQ ID NO: 2312330 - RNA, 21 nt, Human
acgugacuguggcacacgccu

SEQ ID NO: 2312331 - RNA, 20 nt, Human
acgugacugccccaacuccu

SEQ ID NO: 2312332 - RNA, 18 nt, Human
acgugacugccccaacuc

SEQ ID NO: 2312333 - RNA, 14 nt, Human
acgugacugcccca

SEQ ID NO: 2312334 - RNA, 17 nt, Human
acgugacagugccuggg

SEQ ID NO: 2312335 - RNA, 21 nt, Human
acgugaccggacuuuucugca

SEQ ID NO: 2312336 - RNA, 19 nt, Human
acgugacagugccugggaa

SEQ ID NO: 2312337 - RNA, 16 nt, Human
acgugacagugccugg

SEQ ID NO: 2312338 - RNA, 20 nt, Human
accuuucauaaucuuugcuu

SEQ ID NO: 2312339 - RNA, 21 nt, Human
accuuucauaaucuuugcuuu

SEQ ID NO: 2312340 - RNA, 19 nt, Human
accuuucauaaucuuugcu

SEQ ID NO: 2312341 - RNA, 20 nt, Human
accuuuauuaaaaucuuaaa

SEQ ID NO: 2312342 - RNA, 18 nt, Human
accuuuauuaaaaucuua

SEQ ID NO: 2312343 - RNA, 17 nt, Human
accuuuauuaaaaucuu

SEQ ID NO: 2312344 - RNA, 16 nt, Human
accuuuauuaaaaucu

SEQ ID NO: 2312345 - RNA, 15 nt, Human
accuuuauuaaaauc

SEQ ID NO: 2312346 - RNA, 14 nt, Human
accuuuauuaaaau

SEQ ID NO: 2312347 - RNA, 15 nt, Human
accuuuaugguuucu

SEQ ID NO: 2312348 - RNA, 20 nt, Human
accuuuagugguggccauuu

SEQ ID NO: 2312349 - RNA, 21 nt, Human
accuuuagggcagcuugcccc

SEQ ID NO: 2312350 - RNA, 18 nt, Human
accuuguuguuguuaaau

SEQ ID NO: 2312351 - RNA, 14 nt, Human
accuuuagggcagc

SEQ ID NO: 2312352 - RNA, 15 nt, Human
accuuuagggcagcu

SEQ ID NO: 2312353 - RNA, 15 nt, Human
accuuuaagagaaau

SEQ ID NO: 2312354 - RNA, 23 nt, Human
accuuuccaaaguuaacagauuu

SEQ ID NO: 2312355 - RNA, 18 nt, Human
accuuuccaccacagcca

SEQ ID NO: 2312356 - RNA, 18 nt, Human
accuuucccaucuuccaa

SEQ ID NO: 2312357 - RNA, 13 nt, Human
accuuucccaucu

SEQ ID NO: 2312358 - RNA, 17 nt, Human
accuuggcugcagggag

SEQ ID NO: 2312359 - RNA, 15 nt, Human
accuguugcuuacaa

SEQ ID NO: 2312360 - RNA, 16 nt, Human
accuguugcuuacaau

SEQ ID NO: 2312361 - RNA, 18 nt, Human
accuguugcuuacaauuu

SEQ ID NO: 2312362 - RNA, 19 nt, Human
accuguugcuuacaauuuu

SEQ ID NO: 2312363 - RNA, 20 nt, Human
accuguugcuuacaauuuuu

SEQ ID NO: 2312364 - RNA, 21 nt, Human
accuguugcuuacaauuuuuu

SEQ ID NO: 2312365 - RNA, 14 nt, Human
accuguugguucca

SEQ ID NO: 2312366 - RNA, 17 nt, Human
accuguuagcagacagg

SEQ ID NO: 2312367 - RNA, 17 nt, Human
accuguucagugucccg

SEQ ID NO: 2312368 - RNA, 18 nt, Human
accuguucagugucccgg

SEQ ID NO: 2312369 - RNA, 18 nt, Human
accuguuaccuacuuuga

SEQ ID NO: 2312370 - RNA, 17 nt, Human
accuguuaccuacuuug

SEQ ID NO: 2312371 - RNA, 22 nt, Human
accuguucagugucccgggccc

SEQ ID NO: 2312372 - RNA, 19 nt, Human
accuguucagugucccggg

SEQ ID NO: 2312373 - RNA, 20 nt, Human
accuguucagugucccgggc

SEQ ID NO: 2312374 - RNA, 18 nt, Human
accuuggcugcagggagu

SEQ ID NO: 2312375 - RNA, 16 nt, Human
accuguugguuccaag

SEQ ID NO: 2312376 - RNA, 14 nt, Human
accuguuuaaauau

SEQ ID NO: 2312377 - RNA, 16 nt, Human
accuguuuaaauauuu

SEQ ID NO: 2312378 - RNA, 17 nt, Human
accuuggggcuugacuu

SEQ ID NO: 2312379 - RNA, 23 nt, Human
accuugguguaguugaacugaua

SEQ ID NO: 2312380 - RNA, 15 nt, Human
accuuguuggagccu

SEQ ID NO: 2312381 - RNA, 16 nt, Human
accuuguuggagccug

SEQ ID NO: 2312382 - RNA, 17 nt, Human
accuuguuggagccugc

SEQ ID NO: 2312383 - RNA, 18 nt, Human
accuuguuggagccugca

SEQ ID NO: 2312384 - RNA, 19 nt, Human
accuuguuggagccugcag

SEQ ID NO: 2312385 - RNA, 12 nt, Human
accugucuccuu

SEQ ID NO: 2312386 - RNA, 22 nt, Human
accugucuccuuucaccccagg

SEQ ID NO: 2312387 - RNA, 17 nt, Human
accugucuccuuucuca

SEQ ID NO: 2312388 - RNA, 14 nt, Human
accugucucagccu

SEQ ID NO: 2312389 - RNA, 14 nt, Human
accuguccuugcac

SEQ ID NO: 2312390 - RNA, 18 nt, Human
accuguccuccugguggg

SEQ ID NO: 2312391 - RNA, 13 nt, Human
accugucucacca

SEQ ID NO: 2312392 - RNA, 20 nt, Human
accugucaugccccccucaa

SEQ ID NO: 2312393 - RNA, 14 nt, Human
accuguccuccugg

SEQ ID NO: 2312394 - RNA, 15 nt, Human
accuguccuccuggu

SEQ ID NO: 2312395 - RNA, 16 nt, Human
accugucccccugaca

SEQ ID NO: 2312396 - RNA, 12 nt, Human
accugucccccu

SEQ ID NO: 2312397 - RNA, 15 nt, Human
accugucccccugac

SEQ ID NO: 2312398 - RNA, 20 nt, Human
accugccgaccucguccucc

SEQ ID NO: 2312399 - RNA, 18 nt, Human
accugccgaccucguccu

SEQ ID NO: 2312400 - RNA, 17 nt, Human
accugccgaccucgucc

SEQ ID NO: 2312401 - RNA, 13 nt, Human
accugccgaccuc

SEQ ID NO: 2312402 - RNA, 12 nt, Human
accugccgaccu

SEQ ID NO: 2312403 - RNA, 19 nt, Human
accugcccugccugagggc

SEQ ID NO: 2312404 - RNA, 20 nt, Human
accugcccugccugagggcc

SEQ ID NO: 2312405 - RNA, 19 nt, Human
accugucaccgugagcagc

SEQ ID NO: 2312406 - RNA, 23 nt, Human
accugucacgauugucaucagga

SEQ ID NO: 2312407 - RNA, 18 nt, Human
accugucaccgugagcag

SEQ ID NO: 2312408 - RNA, 17 nt, Human
accugccucacagcugg

SEQ ID NO: 2312409 - RNA, 15 nt, Human
accugucaugccccc

SEQ ID NO: 2312410 - RNA, 17 nt, Human
accugucaugccccccu

SEQ ID NO: 2312411 - RNA, 18 nt, Human
accugucaugccccccuc

SEQ ID NO: 2312412 - RNA, 19 nt, Human
accugucaugccccccuca

SEQ ID NO: 2312413 - RNA, 19 nt, Human
accucuggacuggcuagag

SEQ ID NO: 2312414 - RNA, 16 nt, Human
accucuggacuggcua

SEQ ID NO: 2312415 - RNA, 15 nt, Human
accucuggacuggcu

SEQ ID NO: 2312416 - RNA, 14 nt, Human
accucuggacuggc

SEQ ID NO: 2312417 - RNA, 20 nt, Human
accucugcggaccccagcug

SEQ ID NO: 2312418 - RNA, 12 nt, Human
accucugcucug

SEQ ID NO: 2312419 - RNA, 14 nt, Human
accucugcucugag

SEQ ID NO: 2312420 - RNA, 22 nt, Human
accucugcucugaggcuuccag

SEQ ID NO: 2312421 - RNA, 23 nt, Human
accucuggacuggcuagaguccu

SEQ ID NO: 2312422 - RNA, 23 nt, Human
accucugcucugaggcuuccaga

SEQ ID NO: 2312423 - RNA, 18 nt, Human
accugcccugccugaggg

SEQ ID NO: 2312424 - RNA, 17 nt, Human
accugcccugccugagg

SEQ ID NO: 2312425 - RNA, 20 nt, Human
accugcccugcugaguccca

SEQ ID NO: 2312426 - RNA, 15 nt, Human
accucugcagcaaua

SEQ ID NO: 2312427 - RNA, 20 nt, Human
accucugcagcaauaaagca

SEQ ID NO: 2312428 - RNA, 18 nt, Human
accucugcagcaauaaag

SEQ ID NO: 2312429 - RNA, 12 nt, Human
accucugccaga

SEQ ID NO: 2312430 - RNA, 14 nt, Human
accucugcggaccc

SEQ ID NO: 2312431 - RNA, 17 nt, Human
accucugcggaccccag

SEQ ID NO: 2312432 - RNA, 18 nt, Human
accucugcggaccccagc

SEQ ID NO: 2312433 - RNA, 19 nt, Human
accucugcggaccccagcu

SEQ ID NO: 2312434 - RNA, 21 nt, Human
accucugcagcaauaaagcag

SEQ ID NO: 2312435 - RNA, 22 nt, Human
acucauauccccuauuuaacag

SEQ ID NO: 2312436 - RNA, 21 nt, Human
acucauacugugcuggagcca

SEQ ID NO: 2312437 - RNA, 23 nt, Human
acucauacugugcuggagccacu

SEQ ID NO: 2312438 - RNA, 14 nt, Human
acucauacaucugg

SEQ ID NO: 2312439 - RNA, 15 nt, Human
acucauacaucuggc

SEQ ID NO: 2312440 - RNA, 17 nt, Human
acucauaccuuuaaagg

SEQ ID NO: 2312441 - RNA, 15 nt, Human
acucauacugugcug

SEQ ID NO: 2312442 - RNA, 17 nt, Human
acucauacugugcugga

SEQ ID NO: 2312443 - RNA, 19 nt, Human
acucauacugugcuggagc

SEQ ID NO: 2312444 - RNA, 20 nt, Human
acucauacugugcuggagcc

SEQ ID NO: 2312445 - RNA, 17 nt, Human
acucuagggaaaaacca

SEQ ID NO: 2312446 - RNA, 15 nt, Human
acucuagggaaaaac

SEQ ID NO: 2312447 - RNA, 14 nt, Human
acucuagauuuugu

SEQ ID NO: 2312448 - RNA, 19 nt, Human
acucuagauuuuguuuugc

SEQ ID NO: 2312449 - RNA, 20 nt, Human
acucuagauuuuguuuugcu

SEQ ID NO: 2312450 - RNA, 21 nt, Human
acucuagauuuuguuuugcuu

SEQ ID NO: 2312451 - RNA, 17 nt, Human
acucuaggugcccuugg

SEQ ID NO: 2312452 - RNA, 21 nt, Human
acucuaggggucaggcuccau

SEQ ID NO: 2312453 - RNA, 20 nt, Human
acucuagcugggggugggcc

SEQ ID NO: 2312454 - RNA, 23 nt, Human
acucuagauuuuguuuugcuuuu

SEQ ID NO: 2312455 - RNA, 13 nt, Human
acucuagggcagu

SEQ ID NO: 2312456 - RNA, 23 nt, Human
acucuaucaaguauuauaccuuu

SEQ ID NO: 2312457 - RNA, 17 nt, Human
acucuauguucuaagaa

SEQ ID NO: 2312458 - RNA, 21 nt, Human
acucuaucaaguauuauaccu

SEQ ID NO: 2312459 - RNA, 16 nt, Human
acucugucagauggga

SEQ ID NO: 2312460 - RNA, 14 nt, Human
acucugucagaugg

SEQ ID NO: 2312461 - RNA, 23 nt, Human
acucugucaauuucccugacucc

SEQ ID NO: 2312462 - RNA, 19 nt, Human
acucugucgcccagucugg

SEQ ID NO: 2312463 - RNA, 15 nt, Human
acucugguucuuugu

SEQ ID NO: 2312464 - RNA, 23 nt, Human
acucaaaugcucagaccagcucu

SEQ ID NO: 2312465 - RNA, 12 nt, Human
acucaaaugcuu

SEQ ID NO: 2312466 - RNA, 17 nt, Human
acucaaauggggccaga

SEQ ID NO: 2312467 - RNA, 19 nt, Human
acucaaaugcuuggcuucu

SEQ ID NO: 2312468 - RNA, 22 nt, Human
acucaaaugcuuggcuucucau

SEQ ID NO: 2312469 - RNA, 23 nt, Human
acucaaauggggccagauccagc

SEQ ID NO: 2312470 - RNA, 22 nt, Human
acucaaauggggccagauccag

SEQ ID NO: 2312471 - RNA, 21 nt, Human
acucaaauggggccagaucca

SEQ ID NO: 2312472 - RNA, 20 nt, Human
acucaaauggggccagaucc

SEQ ID NO: 2312473 - RNA, 21 nt, Human
acucaaaugcucagaccagcu

SEQ ID NO: 2312474 - RNA, 18 nt, Human
acucaaaugcucagacca

SEQ ID NO: 2312475 - RNA, 15 nt, Human
acucaaaacuuaaca

SEQ ID NO: 2312476 - RNA, 20 nt, Human
acucaaaacccaucugggcu

SEQ ID NO: 2312477 - RNA, 21 nt, Human
acucagcagcccuccucaccc

SEQ ID NO: 2312478 - RNA, 20 nt, Human
acucagcagcccuccucacc

SEQ ID NO: 2312479 - RNA, 19 nt, Human
acucagcagcccuccucac

SEQ ID NO: 2312480 - RNA, 18 nt, Human
acucagcagcccuccuca

SEQ ID NO: 2312481 - RNA, 23 nt, Human
acucagcagcccuccucaccccg

SEQ ID NO: 2312482 - RNA, 22 nt, Human
acucagcagcccuccucacccc

SEQ ID NO: 2312483 - RNA, 14 nt, Human
acucagccaagcac

SEQ ID NO: 2312484 - RNA, 15 nt, Human
acucagccaagcaca

SEQ ID NO: 2312485 - RNA, 16 nt, Human
acucagccaagcacag

SEQ ID NO: 2312486 - RNA, 17 nt, Human
acucagccaagcacagu

SEQ ID NO: 2312487 - RNA, 18 nt, Human
acucagccaagcacagug

SEQ ID NO: 2312488 - RNA, 14 nt, Human
acucagcccugagg

SEQ ID NO: 2312489 - RNA, 11 nt, Human
acucagcccug

SEQ ID NO: 2312490 - RNA, 21 nt, Human
acucagcccucauuggcucuu

SEQ ID NO: 2312491 - RNA, 17 nt, Human
acucagcccucauuggc

SEQ ID NO: 2312492 - RNA, 22 nt, Human
acucagccaagcacaguggugg

SEQ ID NO: 2312493 - RNA, 23 nt, Human
acucagccaagcacagugguggc

SEQ ID NO: 2312494 - RNA, 19 nt, Human
acucaggaggcugaggcag

SEQ ID NO: 2312495 - RNA, 18 nt, Human
acucaggaggcugaggca

SEQ ID NO: 2312496 - RNA, 17 nt, Human
acucaggaggcugaggc

SEQ ID NO: 2312497 - RNA, 16 nt, Human
acucaggaggcugagg

SEQ ID NO: 2312498 - RNA, 14 nt, Human
acucaggaggcuga

SEQ ID NO: 2312499 - RNA, 13 nt, Human
acucaggaggcug

SEQ ID NO: 2312500 - RNA, 13 nt, Human
acucaggaagaac

SEQ ID NO: 2312501 - RNA, 14 nt, Human
acucaggaugccca

SEQ ID NO: 2312502 - RNA, 18 nt, Human
acucaggauccagucccu

SEQ ID NO: 2312503 - RNA, 18 nt, Human
acucaggaggcugagggg

SEQ ID NO: 2312504 - RNA, 17 nt, Human
acucaggaggcugaggg

SEQ ID NO: 2312505 - RNA, 20 nt, Human
acucaggaggcugaggcaga

SEQ ID NO: 2312506 - RNA, 17 nt, Human
acucagcuuccuaccca

SEQ ID NO: 2312507 - RNA, 18 nt, Human
acucaggaugcccagggc

SEQ ID NO: 2312508 - RNA, 16 nt, Human
acucaggaugcccagg

SEQ ID NO: 2312509 - RNA, 15 nt, Human
acucaggaugcccag

SEQ ID NO: 2312510 - RNA, 15 nt, Human
acucagggccccagc

SEQ ID NO: 2312511 - RNA, 16 nt, Human
acucaggcccaaagcc

SEQ ID NO: 2312512 - RNA, 23 nt, Human
acucagguuguaguaaagaaauu

SEQ ID NO: 2312513 - RNA, 22 nt, Human
acucagguuguaguaaagaaau

SEQ ID NO: 2312514 - RNA, 21 nt, Human
acucagguuguaguaaagaaa

SEQ ID NO: 2312515 - RNA, 20 nt, Human
acucagguuguaguaaagaa

SEQ ID NO: 2312516 - RNA, 17 nt, Human
acucaggaugcccaggg

SEQ ID NO: 2312517 - RNA, 22 nt, Human
acucagggccccagcacuaaag

SEQ ID NO: 2312518 - RNA, 18 nt, Human
acucagggccccagcacu

SEQ ID NO: 2312519 - RNA, 16 nt, Human
acucagggcuccuggg

SEQ ID NO: 2312520 - RNA, 19 nt, Human
acucaguccauagcagaga

SEQ ID NO: 2312521 - RNA, 14 nt, Human
acucauaaugugaa

SEQ ID NO: 2312522 - RNA, 15 nt, Human
acucauaaugugaag

SEQ ID NO: 2312523 - RNA, 16 nt, Human
acucauaaugugaagu

SEQ ID NO: 2312524 - RNA, 19 nt, Human
acucauaaugugaaguguu

SEQ ID NO: 2312525 - RNA, 14 nt, Human
acuauuuuucagaa

SEQ ID NO: 2312526 - RNA, 15 nt, Human
acuauuuaucugugu

SEQ ID NO: 2312527 - RNA, 18 nt, Human
acuauuuuucagaaucuc

SEQ ID NO: 2312528 - RNA, 13 nt, Human
acucaaaagcugg

SEQ ID NO: 2312529 - RNA, 12 nt, Human
acuauuuaucug

SEQ ID NO: 2312530 - RNA, 23 nt, Human
acuauuuaguuuuuguaauuuau

SEQ ID NO: 2312531 - RNA, 21 nt, Human
acuauuuaguuuuuguaauuu

SEQ ID NO: 2312532 - RNA, 20 nt, Human
acuauuuaguuuuuguaauu

SEQ ID NO: 2312533 - RNA, 14 nt, Human
acuauuuaacuuga

SEQ ID NO: 2312534 - RNA, 15 nt, Human
acuauuuaacuugag

SEQ ID NO: 2312535 - RNA, 22 nt, Human
acuauuuaacuugagcuuuaaa

SEQ ID NO: 2312536 - RNA, 18 nt, Human
acuauuuaacuugagggu

SEQ ID NO: 2312537 - RNA, 23 nt, Human
acuauucugauuacacaaaacaa

SEQ ID NO: 2312538 - RNA, 20 nt, Human
acuauuuaaagccuccucau

SEQ ID NO: 2312539 - RNA, 11 nt, Human
acuauuuaaag

SEQ ID NO: 2312540 - RNA, 20 nt, Human
acuauuccccagcagggucu

SEQ ID NO: 2312541 - RNA, 15 nt, Human
acuauucugauuaca

SEQ ID NO: 2312542 - RNA, 21 nt, Human
acuauucugauuacacaaaac

SEQ ID NO: 2312543 - RNA, 22 nt, Human
acuauucugauuacacaaaaca

SEQ ID NO: 2312544 - RNA, 15 nt, Human
acuaguguugcuugg

SEQ ID NO: 2312545 - RNA, 13 nt, Human
acuauucaaguau

SEQ ID NO: 2312546 - RNA, 22 nt, Human
acuauucaggagaguagaacag

SEQ ID NO: 2312547 - RNA, 21 nt, Human
acuauuccccagcagggucuu

SEQ ID NO: 2312548 - RNA, 13 nt, Human
acuaguuacacau

SEQ ID NO: 2312549 - RNA, 21 nt, Human
acuauucaaacagucucagga

SEQ ID NO: 2312550 - RNA, 23 nt, Human
acuagugacaagcuccuggucuu

SEQ ID NO: 2312551 - RNA, 16 nt, Human
acuagugcaaaucaua

SEQ ID NO: 2312552 - RNA, 16 nt, Human
acuagugaggaaagau

SEQ ID NO: 2312553 - RNA, 13 nt, Human
acuagugcaaauc

SEQ ID NO: 2312554 - RNA, 15 nt, Human
acuagcauaucugcc

SEQ ID NO: 2312555 - RNA, 17 nt, Human
acuagcauaucugccuu

SEQ ID NO: 2312556 - RNA, 19 nt, Human
acuagcauaucugccuuua

SEQ ID NO: 2312557 - RNA, 20 nt, Human
acuaguauuucuaugaaaua

SEQ ID NO: 2312558 - RNA, 18 nt, Human
acuagauuacauucaguu

SEQ ID NO: 2312559 - RNA, 13 nt, Human
acuagauuacauu

SEQ ID NO: 2312560 - RNA, 13 nt, Human
acuagcauaucug

SEQ ID NO: 2312561 - RNA, 18 nt, Human
acuagauggugcugagaa

SEQ ID NO: 2312562 - RNA, 16 nt, Human
acuagauggugcugag

SEQ ID NO: 2312563 - RNA, 15 nt, Human
acuagauggugcuga

SEQ ID NO: 2312564 - RNA, 15 nt, Human
acuagauggcgagca

SEQ ID NO: 2312565 - RNA, 13 nt, Human
acuagaugaugga

SEQ ID NO: 2312566 - RNA, 13 nt, Human
cacccacccuggg

SEQ ID NO: 2312567 - RNA, 14 nt, Human
cacccacccuggga

SEQ ID NO: 2312568 - RNA, 14 nt, Human
cacccacccagcac

SEQ ID NO: 2312569 - RNA, 20 nt, Human
cacccaccguccgcccugcu

SEQ ID NO: 2312570 - RNA, 22 nt, Human
cacccaccguccgcccugcucc

SEQ ID NO: 2312571 - RNA, 23 nt, Human
cacccaccguccgcccugcuccu

SEQ ID NO: 2312572 - RNA, 13 nt, Human
cacccaccgugga

SEQ ID NO: 2312573 - RNA, 20 nt, Human
cacccaccaucaugucuggc

SEQ ID NO: 2312574 - RNA, 22 nt, Human
cacccaccaucaugucuggcua

SEQ ID NO: 2312575 - RNA, 12 nt, Human
cacccaccucag

SEQ ID NO: 2312576 - RNA, 13 nt, Human
cacccaccucagc

SEQ ID NO: 2312577 - RNA, 14 nt, Human
cacccaccucagcc

SEQ ID NO: 2312578 - RNA, 16 nt, Human
cacccaccucagccuc

SEQ ID NO: 2312579 - RNA, 20 nt, Human
caccccagcugcuccccucc

SEQ ID NO: 2312580 - RNA, 19 nt, Human
caccccagcugcuccccuc

SEQ ID NO: 2312581 - RNA, 18 nt, Human
caccccagcugcuccccu

SEQ ID NO: 2312582 - RNA, 16 nt, Human
caccccagcugcuccc

SEQ ID NO: 2312583 - RNA, 13 nt, Human
caccccagcugcu

SEQ ID NO: 2312584 - RNA, 19 nt, Human
caccccagccuaagaugaa

SEQ ID NO: 2312585 - RNA, 11 nt, Human
caccccagccu

SEQ ID NO: 2312586 - RNA, 16 nt, Human
cacccaccguggagga

SEQ ID NO: 2312587 - RNA, 22 nt, Human
caccccagcugcuccccucccu

SEQ ID NO: 2312588 - RNA, 13 nt, Human
caccccaggacuc

SEQ ID NO: 2312589 - RNA, 15 nt, Human
caccccagggccuga

SEQ ID NO: 2312590 - RNA, 12 nt, Human
caccccagcccc

SEQ ID NO: 2312591 - RNA, 13 nt, Human
caccccagcccca

SEQ ID NO: 2312592 - RNA, 21 nt, Human
caccccaucccacacccugga

SEQ ID NO: 2312593 - RNA, 15 nt, Human
caccccaucccacac

SEQ ID NO: 2312594 - RNA, 12 nt, Human
caccccauccca

SEQ ID NO: 2312595 - RNA, 20 nt, Human
caccccagugcacccacucu

SEQ ID NO: 2312596 - RNA, 18 nt, Human
caccccagugcacccacu

SEQ ID NO: 2312597 - RNA, 17 nt, Human
caccccagugcacccac

SEQ ID NO: 2312598 - RNA, 22 nt, Human
caccccagggccugagccuggc

SEQ ID NO: 2312599 - RNA, 17 nt, Human
caccccagggccugagc

SEQ ID NO: 2312600 - RNA, 16 nt, Human
caccccagggccugag

SEQ ID NO: 2312601 - RNA, 17 nt, Human
caccccaugccaaagcu

SEQ ID NO: 2312602 - RNA, 15 nt, Human
caccccaugccaaag

SEQ ID NO: 2312603 - RNA, 12 nt, Human
caccccaugcca

SEQ ID NO: 2312604 - RNA, 22 nt, Human
caccccauagugaccggcugcu

SEQ ID NO: 2312605 - RNA, 16 nt, Human
caccccaugcuguuga

SEQ ID NO: 2312606 - RNA, 12 nt, Human
caccccaugcug

SEQ ID NO: 2312607 - RNA, 22 nt, Human
caccccaugcuguugauugcua

SEQ ID NO: 2312608 - RNA, 18 nt, Human
caccacugcacuccagcc

SEQ ID NO: 2312609 - RNA, 13 nt, Human
caccacugcacuc

SEQ ID NO: 2312610 - RNA, 13 nt, Human
caccacuggccac

SEQ ID NO: 2312611 - RNA, 14 nt, Human
caccacuggccacc

SEQ ID NO: 2312612 - RNA, 15 nt, Human
caccacuggccacca

SEQ ID NO: 2312613 - RNA, 15 nt, Human
caccagaagcccaga

SEQ ID NO: 2312614 - RNA, 14 nt, Human
caccagaagcccag

SEQ ID NO: 2312615 - RNA, 13 nt, Human
caccagaagccca

SEQ ID NO: 2312616 - RNA, 16 nt, Human
caccacuggccaccag

SEQ ID NO: 2312617 - RNA, 18 nt, Human
caccacuggccaccaggc

SEQ ID NO: 2312618 - RNA, 19 nt, Human
caccacuggccaccaggcu

SEQ ID NO: 2312619 - RNA, 20 nt, Human
caccacuggccaccaggcug

SEQ ID NO: 2312620 - RNA, 16 nt, Human
cacccaagggccuggc

SEQ ID NO: 2312621 - RNA, 17 nt, Human
caccagaagcccagaau

SEQ ID NO: 2312622 - RNA, 16 nt, Human
caccagaagcccagaa

SEQ ID NO: 2312623 - RNA, 17 nt, Human
cacccaagggccuggcc

SEQ ID NO: 2312624 - RNA, 18 nt, Human
cacccaagggccuggccu

SEQ ID NO: 2312625 - RNA, 20 nt, Human
cacccacaagugccacugcc

SEQ ID NO: 2312626 - RNA, 15 nt, Human
cacccacacacucgc

SEQ ID NO: 2312627 - RNA, 17 nt, Human
cacccacacacucgccc

SEQ ID NO: 2312628 - RNA, 21 nt, Human
cacccacacacucgcccgccc

SEQ ID NO: 2312629 - RNA, 23 nt, Human
cacccacacacucgcccgcccac

SEQ ID NO: 2312630 - RNA, 16 nt, Human
caccacuucuuuuaua

SEQ ID NO: 2312631 - RNA, 21 nt, Human
caccacuggccaccaggcugg

SEQ ID NO: 2312632 - RNA, 12 nt, Human
caccagaauaaa

SEQ ID NO: 2312633 - RNA, 23 nt, Human
cacccaauaaacauuaagauuga

SEQ ID NO: 2312634 - RNA, 15 nt, Human
cacccaccagggcga

SEQ ID NO: 2312635 - RNA, 13 nt, Human
cacccacagggcu

SEQ ID NO: 2312636 - RNA, 21 nt, Human
cacccacaugugacacauaug

SEQ ID NO: 2312637 - RNA, 12 nt, Human
cacccacaugug

SEQ ID NO: 2312638 - RNA, 13 nt, Human
cacccacauguga

SEQ ID NO: 2312639 - RNA, 19 nt, Human
cacccacaugugacacaua

SEQ ID NO: 2312640 - RNA, 19 nt, Human
cacccaagggccuggccug

SEQ ID NO: 2312641 - RNA, 20 nt, Human
cacccaagggccuggccuga

SEQ ID NO: 2312642 - RNA, 21 nt, Human
cacccaagggccuggccugag

SEQ ID NO: 2312643 - RNA, 23 nt, Human
cacccaagggccuggccugagcu

SEQ ID NO: 2312644 - RNA, 22 nt, Human
caccccgucugggguucagccc

SEQ ID NO: 2312645 - RNA, 15 nt, Human
caccccguagauucc

SEQ ID NO: 2312646 - RNA, 19 nt, Human
caccccggggacccuguga

SEQ ID NO: 2312647 - RNA, 20 nt, Human
caccccggggacccugugac

SEQ ID NO: 2312648 - RNA, 18 nt, Human
caccccgggcucucugcu

SEQ ID NO: 2312649 - RNA, 17 nt, Human
caccccggggacccugu

SEQ ID NO: 2312650 - RNA, 18 nt, Human
caccccggggacccugug

SEQ ID NO: 2312651 - RNA, 15 nt, Human
caccccgggcucucu

SEQ ID NO: 2312652 - RNA, 15 nt, Human
caccccgcucugcau

SEQ ID NO: 2312653 - RNA, 23 nt, Human
caccccgucugggguucagcccc

SEQ ID NO: 2312654 - RNA, 14 nt, Human
caccccuaaagaga

SEQ ID NO: 2312655 - RNA, 14 nt, Human
caccccggccaccu

SEQ ID NO: 2312656 - RNA, 15 nt, Human
caccccggccaccug

SEQ ID NO: 2312657 - RNA, 16 nt, Human
caccccggccaccugc

SEQ ID NO: 2312658 - RNA, 17 nt, Human
caccccggccaccugcg

SEQ ID NO: 2312659 - RNA, 22 nt, Human
cacccccuucucugcuccacca

SEQ ID NO: 2312660 - RNA, 18 nt, Human
cacccccuucucugcucc

SEQ ID NO: 2312661 - RNA, 17 nt, Human
cacccccuucucugcuc

SEQ ID NO: 2312662 - RNA, 16 nt, Human
cacccccuucucugcu

SEQ ID NO: 2312663 - RNA, 21 nt, Human
cacccccuucagugcccacca

SEQ ID NO: 2312664 - RNA, 20 nt, Human
cacccccuucagugcccacc

SEQ ID NO: 2312665 - RNA, 17 nt, Human
cacccccuucagugccc

SEQ ID NO: 2312666 - RNA, 13 nt, Human
cacccccuucucu

SEQ ID NO: 2312667 - RNA, 18 nt, Human
cacccccuucuccaucca

SEQ ID NO: 2312668 - RNA, 16 nt, Human
caccccgccugcccuc

SEQ ID NO: 2312669 - RNA, 13 nt, Human
caccccgcucugc

SEQ ID NO: 2312670 - RNA, 14 nt, Human
caccccgcucugca

SEQ ID NO: 2312671 - RNA, 12 nt, Human
cacccccuuucc

SEQ ID NO: 2312672 - RNA, 14 nt, Human
cacccccuuuccug

SEQ ID NO: 2312673 - RNA, 16 nt, Human
cacccccuucagugcc

SEQ ID NO: 2312674 - RNA, 17 nt, Human
cacccccugcccugcac

SEQ ID NO: 2312675 - RNA, 14 nt, Human
cacccccugcccug

SEQ ID NO: 2312676 - RNA, 16 nt, Human
cacccccugcccugca

SEQ ID NO: 2312677 - RNA, 13 nt, Human
cacccccugcccu

SEQ ID NO: 2312678 - RNA, 23 nt, Human
cacccccucccuggccuguucug

SEQ ID NO: 2312679 - RNA, 14 nt, Human
cacccccuccugcu

SEQ ID NO: 2312680 - RNA, 16 nt, Human
cacccccucccuggcc

SEQ ID NO: 2312681 - RNA, 14 nt, Human
cacccccucccugg

SEQ ID NO: 2312682 - RNA, 17 nt, Human
cacccccuccugcugca

SEQ ID NO: 2312683 - RNA, 15 nt, Human
cacccccuccugcug

SEQ ID NO: 2312684 - RNA, 16 nt, Human
cacccccuccugcugc

SEQ ID NO: 2312685 - RNA, 11 nt, Human
cacccccuccc

SEQ ID NO: 2312686 - RNA, 20 nt, Human
cacccccucaagccaauccc

SEQ ID NO: 2312687 - RNA, 17 nt, Human
cacccccuccccagggg

SEQ ID NO: 2312688 - RNA, 16 nt, Human
cacccccuccccaggg

SEQ ID NO: 2312689 - RNA, 15 nt, Human
cacccccuccccagg

SEQ ID NO: 2312690 - RNA, 14 nt, Human
cacccccuccccag

SEQ ID NO: 2312691 - RNA, 13 nt, Human
cacccccucccug

SEQ ID NO: 2312692 - RNA, 18 nt, Human
cacccccuccccagggga

SEQ ID NO: 2312693 - RNA, 16 nt, Human
cacccccuccccgccc

SEQ ID NO: 2312694 - RNA, 13 nt, Human
cacccccaucucu

SEQ ID NO: 2312695 - RNA, 12 nt, Human
cacccccagcuu

SEQ ID NO: 2312696 - RNA, 17 nt, Human
cacccccaucucucccu

SEQ ID NO: 2312697 - RNA, 14 nt, Human
caccccccaagcug

SEQ ID NO: 2312698 - RNA, 12 nt, Human
cacccccagcuc

SEQ ID NO: 2312699 - RNA, 13 nt, Human
cacccccagcuca

SEQ ID NO: 2312700 - RNA, 14 nt, Human
cacccccagcucaa

SEQ ID NO: 2312701 - RNA, 13 nt, Human
cacccccagcugc

SEQ ID NO: 2312702 - RNA, 17 nt, Human
cacccccagcugcuugu

SEQ ID NO: 2312703 - RNA, 12 nt, Human
caccccccucau

SEQ ID NO: 2312704 - RNA, 13 nt, Human
caccccccugggc

SEQ ID NO: 2312705 - RNA, 21 nt, Human
caccccccagaaccuguccuu

SEQ ID NO: 2312706 - RNA, 20 nt, Human
caccccccagaaccuguccu

SEQ ID NO: 2312707 - RNA, 19 nt, Human
caccccccagaaccugucc

SEQ ID NO: 2312708 - RNA, 18 nt, Human
caccccccagaaccuguc

SEQ ID NO: 2312709 - RNA, 13 nt, Human
caccccccagaac

SEQ ID NO: 2312710 - RNA, 23 nt, Human
caccccccacacucacuccugag

SEQ ID NO: 2312711 - RNA, 16 nt, Human
caccccccacucugug

SEQ ID NO: 2312712 - RNA, 15 nt, Human
caccccccaagcugu

SEQ ID NO: 2312713 - RNA, 13 nt, Human
caccccccacacu

SEQ ID NO: 2312714 - RNA, 18 nt, Human
caccccccacacucacuc

SEQ ID NO: 2312715 - RNA, 11 nt, Human
cacccccaccc

SEQ ID NO: 2312716 - RNA, 14 nt, Human
cacccccaccccca

SEQ ID NO: 2312717 - RNA, 17 nt, Human
cacccccacccccagcu

SEQ ID NO: 2312718 - RNA, 14 nt, Human
cacccccaccccuu

SEQ ID NO: 2312719 - RNA, 19 nt, Human
cacccccaaggggcagucu

SEQ ID NO: 2312720 - RNA, 12 nt, Human
cacccccaaggg

SEQ ID NO: 2312721 - RNA, 17 nt, Human
caccccauuuucugugg

SEQ ID NO: 2312722 - RNA, 12 nt, Human
cacccccacacc

SEQ ID NO: 2312723 - RNA, 11 nt, Human
cacccccacca

SEQ ID NO: 2312724 - RNA, 15 nt, Human
cacccccaccaaggg

SEQ ID NO: 2312725 - RNA, 22 nt, Human
cacccccacccaagggccuggc

SEQ ID NO: 2312726 - RNA, 15 nt, Human
caccccuaaagagau

SEQ ID NO: 2312727 - RNA, 15 nt, Human
caaauagcauaaguu

SEQ ID NO: 2312728 - RNA, 19 nt, Human
caaauacuuuaaaggaaaa

SEQ ID NO: 2312729 - RNA, 20 nt, Human
caaauaguuuauaaauguga

SEQ ID NO: 2312730 - RNA, 15 nt, Human
caaauagugcucgcu

SEQ ID NO: 2312731 - RNA, 14 nt, Human
caaauauaagaaua

SEQ ID NO: 2312732 - RNA, 18 nt, Human
caaauauaagaauaaaau

SEQ ID NO: 2312733 - RNA, 12 nt, Human
caaauauauuca

SEQ ID NO: 2312734 - RNA, 14 nt, Human
caaauaauaagcaa

SEQ ID NO: 2312735 - RNA, 13 nt, Human
caaauaaugucuc

SEQ ID NO: 2312736 - RNA, 16 nt, Human
caaauaaugucucugu

SEQ ID NO: 2312737 - RNA, 20 nt, Human
caaauaaugucucugugaga

SEQ ID NO: 2312738 - RNA, 23 nt, Human
caaauaaugucucugugagacuc

SEQ ID NO: 2312739 - RNA, 16 nt, Human
caaauacuuuaaagga

SEQ ID NO: 2312740 - RNA, 12 nt, Human
caaauacuuuaa

SEQ ID NO: 2312741 - RNA, 17 nt, Human
caaaguuggggcaggcu

SEQ ID NO: 2312742 - RNA, 15 nt, Human
caaaggcaagcacuu

SEQ ID NO: 2312743 - RNA, 21 nt, Human
caaaggaugugauauauaagu

SEQ ID NO: 2312744 - RNA, 14 nt, Human
caaaggaugugaua

SEQ ID NO: 2312745 - RNA, 17 nt, Human
caaaggaugugauauau

SEQ ID NO: 2312746 - RNA, 21 nt, Human
caaaggaugcccaaagaugca

SEQ ID NO: 2312747 - RNA, 13 nt, Human
caaaggaugugau

SEQ ID NO: 2312748 - RNA, 13 nt, Human
caaaggauacugu

SEQ ID NO: 2312749 - RNA, 13 nt, Human
caaaguuuugaaa

SEQ ID NO: 2312750 - RNA, 14 nt, Human
caaaguuuugaaaa

SEQ ID NO: 2312751 - RNA, 17 nt, Human
caaaguuuugaaaagcu

SEQ ID NO: 2312752 - RNA, 18 nt, Human
caaaguuuugaaaagcua

SEQ ID NO: 2312753 - RNA, 19 nt, Human
caaaguuuugaaaagcuau

SEQ ID NO: 2312754 - RNA, 20 nt, Human
caaaguuuugaaaagcuauu

SEQ ID NO: 2312755 - RNA, 21 nt, Human
caaaguuuugaaaagcuauua

SEQ ID NO: 2312756 - RNA, 17 nt, Human
caaauaaaaacuaaauu

SEQ ID NO: 2312757 - RNA, 22 nt, Human
caaauaaaaacuaaauuguaaa

SEQ ID NO: 2312758 - RNA, 19 nt, Human
caaauaaaaacuaaauugu

SEQ ID NO: 2312759 - RNA, 21 nt, Human
caaauaaaaacuaaauuguaa

SEQ ID NO: 2312760 - RNA, 16 nt, Human
caaaucagcugcuacu

SEQ ID NO: 2312761 - RNA, 18 nt, Human
caaaugucuuccuggauu

SEQ ID NO: 2312762 - RNA, 15 nt, Human
caaaugucuuccugg

SEQ ID NO: 2312763 - RNA, 13 nt, Human
caaaucagcugcu

SEQ ID NO: 2312764 - RNA, 15 nt, Human
caaaucacugaacuu

SEQ ID NO: 2312765 - RNA, 17 nt, Human
caaauaugcaaagcacu

SEQ ID NO: 2312766 - RNA, 16 nt, Human
caaauaugcaaagcac

SEQ ID NO: 2312767 - RNA, 18 nt, Human
caaauaugcaaagcacug

SEQ ID NO: 2312768 - RNA, 22 nt, Human
caaauauaagaauaaaauguug

SEQ ID NO: 2312769 - RNA, 14 nt, Human
caaaucacugaacu

SEQ ID NO: 2312770 - RNA, 14 nt, Human
caaaugugaccugu

SEQ ID NO: 2312771 - RNA, 13 nt, Human
caaaucagccaug

SEQ ID NO: 2312772 - RNA, 17 nt, Human
caaaugugaccuguguc

SEQ ID NO: 2312773 - RNA, 20 nt, Human
caaauguguaucggaugcuu

SEQ ID NO: 2312774 - RNA, 20 nt, Human
caaauguguacauggcagag

SEQ ID NO: 2312775 - RNA, 23 nt, Human
caaauguguacauggcagaguuu

SEQ ID NO: 2312776 - RNA, 14 nt, Human
caaauguggcuccu

SEQ ID NO: 2312777 - RNA, 20 nt, Human
caaauguucaucaaugaaug

SEQ ID NO: 2312778 - RNA, 21 nt, Human
caaauguucaucaaugaauga

SEQ ID NO: 2312779 - RNA, 14 nt, Human
caaauucauuuuuu

SEQ ID NO: 2312780 - RNA, 16 nt, Human
caaauucauauucugu

SEQ ID NO: 2312781 - RNA, 22 nt, Human
caaauucugcuugcuugcuuuu

SEQ ID NO: 2312782 - RNA, 23 nt, Human
caaacuuccagugcaacacugaa

SEQ ID NO: 2312783 - RNA, 13 nt, Human
caaacuugcuuua

SEQ ID NO: 2312784 - RNA, 12 nt, Human
caaaaaaugagc

SEQ ID NO: 2312785 - RNA, 15 nt, Human
caaaaaacugcagug

SEQ ID NO: 2312786 - RNA, 14 nt, Human
caaaaaaauuaaau

SEQ ID NO: 2312787 - RNA, 15 nt, Human
caaaaaacucgagga

SEQ ID NO: 2312788 - RNA, 21 nt, Human
caaaaaacucgaggacuguau

SEQ ID NO: 2312789 - RNA, 14 nt, Human
caaaaaacugcagu

SEQ ID NO: 2312790 - RNA, 16 nt, Human
caaaaaaaucugcaga

SEQ ID NO: 2312791 - RNA, 17 nt, Human
caaaaaaaucugcagaa

SEQ ID NO: 2312792 - RNA, 21 nt, Human
caaaaaaaucugcagaaggaa

SEQ ID NO: 2312793 - RNA, 15 nt, Human
auuuuuuucaauauu

SEQ ID NO: 2312794 - RNA, 14 nt, Human
auuuuuuucaccuc

SEQ ID NO: 2312795 - RNA, 21 nt, Human
auuuuuuucacuggaguuaca

SEQ ID NO: 2312796 - RNA, 23 nt, Human
caaaaaaauauauuuaaugauaa

SEQ ID NO: 2312797 - RNA, 17 nt, Human
auuuuuuuagaaagcau

SEQ ID NO: 2312798 - RNA, 23 nt, Human
auuuuuuuagaaagcauuugaau

SEQ ID NO: 2312799 - RNA, 21 nt, Human
auuuuuuuaucuugggacugg

SEQ ID NO: 2312800 - RNA, 16 nt, Human
auuuuuuuauuacuga

SEQ ID NO: 2312801 - RNA, 18 nt, Human
auuuuuuuauuguuuaaa

SEQ ID NO: 2312802 - RNA, 22 nt, Human
auuuuuuuauuguuuaaagcaa

SEQ ID NO: 2312803 - RNA, 18 nt, Human
auuuuuuuaagcuguaaa

SEQ ID NO: 2312804 - RNA, 12 nt, Human
auuuuuuuaagc

SEQ ID NO: 2312805 - RNA, 13 nt, Human
auuuuuuuaagcu

SEQ ID NO: 2312806 - RNA, 18 nt, Human
auuuuuuuaauuuacaaa

SEQ ID NO: 2312807 - RNA, 16 nt, Human
auuuuuuuaauuuugu

SEQ ID NO: 2312808 - RNA, 17 nt, Human
auuuuuuuaauuuugua

SEQ ID NO: 2312809 - RNA, 18 nt, Human
auuuuuuuacuaauagac

SEQ ID NO: 2312810 - RNA, 14 nt, Human
caaagagggcuucc

SEQ ID NO: 2312811 - RNA, 13 nt, Human
caaagagguauuu

SEQ ID NO: 2312812 - RNA, 15 nt, Human
caaagagggcuuccu

SEQ ID NO: 2312813 - RNA, 16 nt, Human
caaagagggcuuccuc

SEQ ID NO: 2312814 - RNA, 18 nt, Human
caaagagggcuuccucua

SEQ ID NO: 2312815 - RNA, 22 nt, Human
caaagagggcuuccucuagaag

SEQ ID NO: 2312816 - RNA, 20 nt, Human
caaagaggcaagaggcugga

SEQ ID NO: 2312817 - RNA, 15 nt, Human
caaagaggcaagagg

SEQ ID NO: 2312818 - RNA, 22 nt, Human
caaagaggcugaggcuggcaca

SEQ ID NO: 2312819 - RNA, 20 nt, Human
caaagaggcugaggcuggca

SEQ ID NO: 2312820 - RNA, 14 nt, Human
caaagaggcaagag

SEQ ID NO: 2312821 - RNA, 13 nt, Human
caaagaggcaaga

SEQ ID NO: 2312822 - RNA, 13 nt, Human
caaagaaacccaa

SEQ ID NO: 2312823 - RNA, 19 nt, Human
caaacuuuuccccuguccu

SEQ ID NO: 2312824 - RNA, 15 nt, Human
caaacuucagacuga

SEQ ID NO: 2312825 - RNA, 22 nt, Human
caaacuuggaauuuguaaccuc

SEQ ID NO: 2312826 - RNA, 12 nt, Human
caaacuuuauuu

SEQ ID NO: 2312827 - RNA, 17 nt, Human
caaacuuggauuuuuga

SEQ ID NO: 2312828 - RNA, 18 nt, Human
caaacuuuuauacucuuu

SEQ ID NO: 2312829 - RNA, 16 nt, Human
caaaggaguagaaaga

SEQ ID NO: 2312830 - RNA, 20 nt, Human
caaaggagggucaggaagga

SEQ ID NO: 2312831 - RNA, 17 nt, Human
caaaggaggcuggcagg

SEQ ID NO: 2312832 - RNA, 22 nt, Human
caaaggaaaaagcacaagaagc

SEQ ID NO: 2312833 - RNA, 22 nt, Human
caaaggaaaauaguaauguuuu

SEQ ID NO: 2312834 - RNA, 16 nt, Human
caaagcuuuuagaaau

SEQ ID NO: 2312835 - RNA, 18 nt, Human
caaaggaaaaagcacaag

SEQ ID NO: 2312836 - RNA, 21 nt, Human
caaaggaaaaagcacaagaag

SEQ ID NO: 2312837 - RNA, 21 nt, Human
caaagcuuggaagagccugca

SEQ ID NO: 2312838 - RNA, 23 nt, Human
caaagcuuuccugccccaggccu

SEQ ID NO: 2312839 - RNA, 18 nt, Human
caaagcuuuccugcccca

SEQ ID NO: 2312840 - RNA, 22 nt, Human
caaagcuuuccugccccaggcc

SEQ ID NO: 2312841 - RNA, 20 nt, Human
caaagcuuuuagaaauacug

SEQ ID NO: 2312842 - RNA, 16 nt, Human
caaagcuuuuuccaga

SEQ ID NO: 2312843 - RNA, 16 nt, Human
caaagcuuguuaagau

SEQ ID NO: 2312844 - RNA, 13 nt, Human
caaagcuuuccug

SEQ ID NO: 2312845 - RNA, 22 nt, Human
caaagcuuggaagagccugcag

SEQ ID NO: 2312846 - RNA, 14 nt, Human
caaagcuuuccugc

SEQ ID NO: 2312847 - RNA, 16 nt, Human
caaagcuuuccugccc

SEQ ID NO: 2312848 - RNA, 22 nt, Human
caaagcuuagcaggagaggaga

SEQ ID NO: 2312849 - RNA, 17 nt, Human
caaagcuuagcaggaga

SEQ ID NO: 2312850 - RNA, 18 nt, Human
caaagcuuagcaggagag

SEQ ID NO: 2312851 - RNA, 14 nt, Human
caaagcuuagcagg

SEQ ID NO: 2312852 - RNA, 15 nt, Human
caaagcuuagcagga

SEQ ID NO: 2312853 - RNA, 16 nt, Human
caaagcuuagcaggag

SEQ ID NO: 2312854 - RNA, 19 nt, Human
caaagcuugaagaucguua

SEQ ID NO: 2312855 - RNA, 19 nt, Human
caaagcuuggaagagccug

SEQ ID NO: 2312856 - RNA, 14 nt, Human
caaagcuugaagau

SEQ ID NO: 2312857 - RNA, 21 nt, Human
caaagcuucuaucccaggagg

SEQ ID NO: 2312858 - RNA, 18 nt, Human
caaagcuucuaucccagg

SEQ ID NO: 2312859 - RNA, 19 nt, Human
caaagcuucuaucccagga

SEQ ID NO: 2312860 - RNA, 20 nt, Human
caaagcuucuaucccaggag

SEQ ID NO: 2312861 - RNA, 20 nt, Human
caaagccaaagcuaggccug

SEQ ID NO: 2312862 - RNA, 22 nt, Human
caaagccaaacucugccagcca

SEQ ID NO: 2312863 - RNA, 18 nt, Human
caaagccaaacucugcca

SEQ ID NO: 2312864 - RNA, 17 nt, Human
caaagccaaacucugcc

SEQ ID NO: 2312865 - RNA, 17 nt, Human
caaagcauugagcaaag

SEQ ID NO: 2312866 - RNA, 21 nt, Human
caaagccaaagcuaggccugg

SEQ ID NO: 2312867 - RNA, 15 nt, Human
caaagcuaggccugg

SEQ ID NO: 2312868 - RNA, 16 nt, Human
caaagcuaggccuggc

SEQ ID NO: 2312869 - RNA, 17 nt, Human
caaagcuaggccuggcc

SEQ ID NO: 2312870 - RNA, 18 nt, Human
caaagcuaggccuggcca

SEQ ID NO: 2312871 - RNA, 17 nt, Human
caacuucuacuucugcc

SEQ ID NO: 2312872 - RNA, 15 nt, Human
caaauucucaccaaa

SEQ ID NO: 2312873 - RNA, 21 nt, Human
caaauucucaaccuaccaccc

SEQ ID NO: 2312874 - RNA, 22 nt, Human
caaauucucaaccuaccacccc

SEQ ID NO: 2312875 - RNA, 16 nt, Human
caaauucgcaaacuuu

SEQ ID NO: 2312876 - RNA, 14 nt, Human
caaauuuacagaga

SEQ ID NO: 2312877 - RNA, 15 nt, Human
caaauucugucucug

SEQ ID NO: 2312878 - RNA, 23 nt, Human
caacaggcugggcuucaguggca

SEQ ID NO: 2312879 - RNA, 15 nt, Human
caaauuuacagagac

SEQ ID NO: 2312880 - RNA, 24 nt, Human
caacaggcugggcuucaguggcag

SEQ ID NO: 2312881 - RNA, 17 nt, Human
caacaucaauguucauu

SEQ ID NO: 2312882 - RNA, 16 nt, Human
caacaucaauguucau

SEQ ID NO: 2312883 - RNA, 15 nt, Human
caacaucaauguuca

SEQ ID NO: 2312884 - RNA, 13 nt, Human
caacaucaauguu

SEQ ID NO: 2312885 - RNA, 22 nt, Human
caacaucaauguucauuguaau

SEQ ID NO: 2312886 - RNA, 18 nt, Human
caacaucaauguucauug

SEQ ID NO: 2312887 - RNA, 14 nt, Human
caacagucaaaaca

SEQ ID NO: 2312888 - RNA, 20 nt, Human
caacaguagcauaggacccu

SEQ ID NO: 2312889 - RNA, 18 nt, Human
caacagucaaaacagaga

SEQ ID NO: 2312890 - RNA, 22 nt, Human
caacaucuuggucagauuugaa

SEQ ID NO: 2312891 - RNA, 17 nt, Human
caacaucccauugcccu

SEQ ID NO: 2312892 - RNA, 15 nt, Human
caacaucccauugcc

SEQ ID NO: 2312893 - RNA, 18 nt, Human
caacagguggcaggacca

SEQ ID NO: 2312894 - RNA, 21 nt, Human
caacagguggcaggaccagga

SEQ ID NO: 2312895 - RNA, 13 nt, Human
caacagguuuuau

SEQ ID NO: 2312896 - RNA, 22 nt, Human
caacagguggcaggaccaggac

SEQ ID NO: 2312897 - RNA, 23 nt, Human
caacagguggcaggaccaggacu

SEQ ID NO: 2312898 - RNA, 19 nt, Human
caacagguuuuccugaaga

SEQ ID NO: 2312899 - RNA, 18 nt, Human
caacaggguuuuuuucca

SEQ ID NO: 2312900 - RNA, 15 nt, Human
caacagguuuuccug

SEQ ID NO: 2312901 - RNA, 16 nt, Human
caaccaauguagaaag

SEQ ID NO: 2312902 - RNA, 18 nt, Human
caaccaagucaugugcau

SEQ ID NO: 2312903 - RNA, 20 nt, Human
caaccaagucaugugcauuu

SEQ ID NO: 2312904 - RNA, 16 nt, Human
caacauuucucaauaa

SEQ ID NO: 2312905 - RNA, 17 nt, Human
caacauuucucaauaau

SEQ ID NO: 2312906 - RNA, 14 nt, Human
caacauuucucaau

SEQ ID NO: 2312907 - RNA, 21 nt, Human
caaccccuucgcuccuguguc

SEQ ID NO: 2312908 - RNA, 21 nt, Human
caacccucagagccaccccua

SEQ ID NO: 2312909 - RNA, 18 nt, Human
caacccucagagccaccc

SEQ ID NO: 2312910 - RNA, 18 nt, Human
caaccccuucgcuccugu

SEQ ID NO: 2312911 - RNA, 19 nt, Human
caaccccuucgcuccugug

SEQ ID NO: 2312912 - RNA, 13 nt, Human
caacauguauaau

SEQ ID NO: 2312913 - RNA, 15 nt, Human
caacauggugucugg

SEQ ID NO: 2312914 - RNA, 16 nt, Human
caacauggugucugga

SEQ ID NO: 2312915 - RNA, 18 nt, Human
caacauggugaaaccccg

SEQ ID NO: 2312916 - RNA, 13 nt, Human
caacauggagaaa

SEQ ID NO: 2312917 - RNA, 23 nt, Human
caacaugccugccccaaacaaau

SEQ ID NO: 2312918 - RNA, 22 nt, Human
caacauggagaaacccugucuc

SEQ ID NO: 2312919 - RNA, 23 nt, Human
caacauggagaaacccugucucu

SEQ ID NO: 2312920 - RNA, 20 nt, Human
caacaucccauugcccuggu

SEQ ID NO: 2312921 - RNA, 19 nt, Human
caacaucccauugcccugg

SEQ ID NO: 2312922 - RNA, 18 nt, Human
caacaucccauugcccug

SEQ ID NO: 2312923 - RNA, 13 nt, Human
caacaucuagcaa

SEQ ID NO: 2312924 - RNA, 13 nt, Human
caacaucuuuucu

SEQ ID NO: 2312925 - RNA, 14 nt, Human
caacaucugagugc

SEQ ID NO: 2312926 - RNA, 15 nt, Human
caacaugagucaaga

SEQ ID NO: 2312927 - RNA, 15 nt, Human
caacauugccuauuu

SEQ ID NO: 2312928 - RNA, 22 nt, Human
caacauugcuggcuggaaggga

SEQ ID NO: 2312929 - RNA, 17 nt, Human
caacauugcuugugcca

SEQ ID NO: 2312930 - RNA, 21 nt, Human
caacauuacagggaaugccug

SEQ ID NO: 2312931 - RNA, 20 nt, Human
caacauuaaaacaauauugu

SEQ ID NO: 2312932 - RNA, 23 nt, Human
caacauguugggaaacuuggcuc

SEQ ID NO: 2312933 - RNA, 19 nt, Human
caacauguugggaaacuug

SEQ ID NO: 2312934 - RNA, 22 nt, Human
caacauguugggaaacuuggcu

SEQ ID NO: 2312935 - RNA, 17 nt, Human
caacauguauaauauuu

SEQ ID NO: 2312936 - RNA, 18 nt, Human
caacauguauaauauuuu

SEQ ID NO: 2312937 - RNA, 19 nt, Human
caacauguauaauauuuuu

SEQ ID NO: 2312938 - RNA, 23 nt, Human
caacauguauaauauuuuuaauu

SEQ ID NO: 2312939 - RNA, 20 nt, Human
caacauguuacugaccagca

SEQ ID NO: 2312940 - RNA, 18 nt, Human
caacauguuacugaccag

SEQ ID NO: 2312941 - RNA, 17 nt, Human
caacauguuacugacca

SEQ ID NO: 2312942 - RNA, 20 nt, Human
caacauguagcugaguuuaa

SEQ ID NO: 2312943 - RNA, 21 nt, Human
caacauguguacuuaauuucu

SEQ ID NO: 2312944 - RNA, 15 nt, Human
caacuuaauguucug

SEQ ID NO: 2312945 - RNA, 19 nt, Human
caacuguuguaacuaggcu

SEQ ID NO: 2312946 - RNA, 19 nt, Human
caacuguugauugcaggaa

SEQ ID NO: 2312947 - RNA, 19 nt, Human
caacuguuaugaaauaaag

SEQ ID NO: 2312948 - RNA, 12 nt, Human
caacugcugcuu

SEQ ID NO: 2312949 - RNA, 14 nt, Human
caacugcugcuuuu

SEQ ID NO: 2312950 - RNA, 23 nt, Human
caacugccucgaaacacagaaac

SEQ ID NO: 2312951 - RNA, 21 nt, Human
caacugccucgaaacacagaa

SEQ ID NO: 2312952 - RNA, 22 nt, Human
caacugccuacuccaaaauguu

SEQ ID NO: 2312953 - RNA, 18 nt, Human
caacugccuacuccaaaa

SEQ ID NO: 2312954 - RNA, 16 nt, Human
caacugcauuggcuuu

SEQ ID NO: 2312955 - RNA, 15 nt, Human
caacugccuacucca

SEQ ID NO: 2312956 - RNA, 14 nt, Human
caacugccuacucc

SEQ ID NO: 2312957 - RNA, 20 nt, Human
caacucuccuccagagucag

SEQ ID NO: 2312958 - RNA, 23 nt, Human
caacuucccaguucaggaguccc

SEQ ID NO: 2312959 - RNA, 19 nt, Human
caacuucaugucaacuucu

SEQ ID NO: 2312960 - RNA, 16 nt, Human
caacuuuaagaggaca

SEQ ID NO: 2312961 - RNA, 18 nt, Human
caacuuuaagcagcucuu

SEQ ID NO: 2312962 - RNA, 21 nt, Human
caacuuuaagcagcucuugcu

SEQ ID NO: 2312963 - RNA, 22 nt, Human
caacuuuaagcagcucuugcua

SEQ ID NO: 2312964 - RNA, 22 nt, Human
caacuucaagugcaugcucucu

SEQ ID NO: 2312965 - RNA, 18 nt, Human
caacuucagcaguaccua

SEQ ID NO: 2312966 - RNA, 18 nt, Human
caacuucaagugcaugcu

SEQ ID NO: 2312967 - RNA, 17 nt, Human
caacuucaagugcaugc

SEQ ID NO: 2312968 - RNA, 16 nt, Human
caacuucaagugcaug

SEQ ID NO: 2312969 - RNA, 21 nt, Human
caacuuaauguucugaauaau

SEQ ID NO: 2312970 - RNA, 18 nt, Human
caacuuagaucuccagga

SEQ ID NO: 2312971 - RNA, 14 nt, Human
caacuuacuacuga

SEQ ID NO: 2312972 - RNA, 11 nt, Human
caacuuucugu

SEQ ID NO: 2312973 - RNA, 12 nt, Human
caacuuucugua

SEQ ID NO: 2312974 - RNA, 16 nt, Human
caacuuucuguaaacu

SEQ ID NO: 2312975 - RNA, 11 nt, Human
caacuuuguau

SEQ ID NO: 2312976 - RNA, 12 nt, Human
caacuuuguaua

SEQ ID NO: 2312977 - RNA, 23 nt, Human
caacuuucuguaaacucaaaacu

SEQ ID NO: 2312978 - RNA, 10 nt, Human
caacccuucu

SEQ ID NO: 2312979 - RNA, 18 nt, Human
caacccuucccucaccuu

SEQ ID NO: 2312980 - RNA, 20 nt, Human
caacccuucuccucuuguaa

SEQ ID NO: 2312981 - RNA, 21 nt, Human
caacccuucuccucuuguaaa

SEQ ID NO: 2312982 - RNA, 23 nt, Human
caacccuucuccucuuguaaaua

SEQ ID NO: 2312983 - RNA, 19 nt, Human
caacccuuuugucugccuc

SEQ ID NO: 2312984 - RNA, 16 nt, Human
caaccucuucuggcuc

SEQ ID NO: 2312985 - RNA, 20 nt, Human
caacccuuaccccuuagccu

SEQ ID NO: 2312986 - RNA, 19 nt, Human
caacccuuaccccuuagcc

SEQ ID NO: 2312987 - RNA, 15 nt, Human
caacccuuaccccuu

SEQ ID NO: 2312988 - RNA, 17 nt, Human
caacccuguuuuauacu

SEQ ID NO: 2312989 - RNA, 17 nt, Human
caacccuguuuccugag

SEQ ID NO: 2312990 - RNA, 19 nt, Human
caacccuguuuuauacugu

SEQ ID NO: 2312991 - RNA, 11 nt, Human
caacccuuccc

SEQ ID NO: 2312992 - RNA, 22 nt, Human
caacccuuaccccuuagccucc

SEQ ID NO: 2312993 - RNA, 17 nt, Human
caacccuucccucaccu

SEQ ID NO: 2312994 - RNA, 12 nt, Human
caacccuucccc

SEQ ID NO: 2312995 - RNA, 13 nt, Human
caacccuucccca

SEQ ID NO: 2312996 - RNA, 14 nt, Human
caacccucccucag

SEQ ID NO: 2312997 - RNA, 14 nt, Human
caaccaccgcuccc

SEQ ID NO: 2312998 - RNA, 18 nt, Human
caacccucccucagcccc

SEQ ID NO: 2312999 - RNA, 17 nt, Human
caacccucccucagccc

SEQ ID NO: 2313000 - RNA, 11 nt, Human
caacccugucu

SEQ ID NO: 2313001 - RNA, 12 nt, Human
caacccugucug

SEQ ID NO: 2313002 - RNA, 13 nt, Human
caacccuguuucc

SEQ ID NO: 2313003 - RNA, 15 nt, Human
caacccuguuuccug

SEQ ID NO: 2313004 - RNA, 16 nt, Human
caacccuguuuccuga

SEQ ID NO: 2313005 - RNA, 12 nt, Human
caacccucauca

SEQ ID NO: 2313006 - RNA, 15 nt, Human
caacccucaucacca

SEQ ID NO: 2313007 - RNA, 12 nt, Human
caaccugaaccu

SEQ ID NO: 2313008 - RNA, 13 nt, Human
caaccugaaccua

SEQ ID NO: 2313009 - RNA, 16 nt, Human
caaccugaaccuagga

SEQ ID NO: 2313010 - RNA, 15 nt, Human
caaccugaccaacau

SEQ ID NO: 2313011 - RNA, 18 nt, Human
caaccucuucuggcucaa

SEQ ID NO: 2313012 - RNA, 17 nt, Human
caaccucuucuggcuca

SEQ ID NO: 2313013 - RNA, 15 nt, Human
caaccucuuggccug

SEQ ID NO: 2313014 - RNA, 13 nt, Human
caaccucuuggcc

SEQ ID NO: 2313015 - RNA, 23 nt, Human
caaccugaccaacauggagaaac

SEQ ID NO: 2313016 - RNA, 20 nt, Human
caaccugaccaacauggaga

SEQ ID NO: 2313017 - RNA, 13 nt, Human
caacgaggaagcc

SEQ ID NO: 2313018 - RNA, 12 nt, Human
caacgaggaagc

SEQ ID NO: 2313019 - RNA, 21 nt, Human
caaccugaccaacauggagaa

SEQ ID NO: 2313020 - RNA, 16 nt, Human
caaccugauugugucu

SEQ ID NO: 2313021 - RNA, 18 nt, Human
caacgcagcccugcuuug

SEQ ID NO: 2313022 - RNA, 19 nt, Human
caacucuccuccagaguca

SEQ ID NO: 2313023 - RNA, 12 nt, Human
caacgcagcccu

SEQ ID NO: 2313024 - RNA, 15 nt, Human
caacgaggaagcccu

SEQ ID NO: 2313025 - RNA, 13 nt, Human
caacgcagcccug

SEQ ID NO: 2313026 - RNA, 15 nt, Human
caacgcagcccugcu

SEQ ID NO: 2313027 - RNA, 18 nt, Human
caagcccccccuuccacu

SEQ ID NO: 2313028 - RNA, 13 nt, Human
caagccccugccc

SEQ ID NO: 2313029 - RNA, 21 nt, Human
caagccccugcuccagaagau

SEQ ID NO: 2313030 - RNA, 17 nt, Human
caagccccugcccaucu

SEQ ID NO: 2313031 - RNA, 18 nt, Human
caagccccugcccaucug

SEQ ID NO: 2313032 - RNA, 21 nt, Human
caagccaccaacauacuccca

SEQ ID NO: 2313033 - RNA, 21 nt, Human
caagccaagggaaccuguguc

SEQ ID NO: 2313034 - RNA, 22 nt, Human
caagccaagggaaccugugucc

SEQ ID NO: 2313035 - RNA, 23 nt, Human
caagccaagggaaccuguguccg

SEQ ID NO: 2313036 - RNA, 14 nt, Human
caagccaauccccu

SEQ ID NO: 2313037 - RNA, 15 nt, Human
caagccaauccccuc

SEQ ID NO: 2313038 - RNA, 22 nt, Human
caagccaauccccuccuugggc

SEQ ID NO: 2313039 - RNA, 17 nt, Human
caagccaauccccuccu

SEQ ID NO: 2313040 - RNA, 11 nt, Human
caagccacaga

SEQ ID NO: 2313041 - RNA, 13 nt, Human
caagccacagaag

SEQ ID NO: 2313042 - RNA, 14 nt, Human
caagccacagaagc

SEQ ID NO: 2313043 - RNA, 19 nt, Human
caagccacagaagccagga

SEQ ID NO: 2313044 - RNA, 22 nt, Human
caagccacagaagccaggagca

SEQ ID NO: 2313045 - RNA, 16 nt, Human
caagcgugagccacug

SEQ ID NO: 2313046 - RNA, 21 nt, Human
caagcccuggagccaacugcu

SEQ ID NO: 2313047 - RNA, 21 nt, Human
caagcccuccccaucccaugu

SEQ ID NO: 2313048 - RNA, 21 nt, Human
caagcccgacuugcuguuuug

SEQ ID NO: 2313049 - RNA, 14 nt, Human
caagccguggcuuc

SEQ ID NO: 2313050 - RNA, 15 nt, Human
caagccguggcuucc

SEQ ID NO: 2313051 - RNA, 16 nt, Human
caagccguggcuuccc

SEQ ID NO: 2313052 - RNA, 16 nt, Human
caagaaagcugguaaa

SEQ ID NO: 2313053 - RNA, 22 nt, Human
caagaaagaaacccgacagagg

SEQ ID NO: 2313054 - RNA, 19 nt, Human
caagaaacugaggaauuuu

SEQ ID NO: 2313055 - RNA, 18 nt, Human
caagcaccuccugccucg

SEQ ID NO: 2313056 - RNA, 17 nt, Human
caagaaacucaccccca

SEQ ID NO: 2313057 - RNA, 15 nt, Human
caagaaacucacccc

SEQ ID NO: 2313058 - RNA, 18 nt, Human
caagaaacugaggaauuu

SEQ ID NO: 2313059 - RNA, 15 nt, Human
caagaaagaaacccg

SEQ ID NO: 2313060 - RNA, 18 nt, Human
caagcacugcuaggcgag

SEQ ID NO: 2313061 - RNA, 23 nt, Human
caagcacugcuaggcgagugcca

SEQ ID NO: 2313062 - RNA, 12 nt, Human
caagcacugugc

SEQ ID NO: 2313063 - RNA, 13 nt, Human
caagcacugugcu

SEQ ID NO: 2313064 - RNA, 21 nt, Human
caagccaagcagccaagcucc

SEQ ID NO: 2313065 - RNA, 19 nt, Human
caagccaagcagccaagcu

SEQ ID NO: 2313066 - RNA, 18 nt, Human
caagccaagggaaccugu

SEQ ID NO: 2313067 - RNA, 17 nt, Human
caagcacugugcucagg

SEQ ID NO: 2313068 - RNA, 17 nt, Human
caagcacuaaacaaaga

SEQ ID NO: 2313069 - RNA, 18 nt, Human
caaggacagccccuccuc

SEQ ID NO: 2313070 - RNA, 22 nt, Human
caaggaaagggggucccagugg

SEQ ID NO: 2313071 - RNA, 20 nt, Human
caaggaaagccccagcacua

SEQ ID NO: 2313072 - RNA, 14 nt, Human
caaggaaaggccug

SEQ ID NO: 2313073 - RNA, 15 nt, Human
caaggaaaggcaaau

SEQ ID NO: 2313074 - RNA, 20 nt, Human
caaggaaagggggucccagu

SEQ ID NO: 2313075 - RNA, 23 nt, Human
caaggaaagggggucccaguggg

SEQ ID NO: 2313076 - RNA, 21 nt, Human
caaggaccaggacucccuccu

SEQ ID NO: 2313077 - RNA, 20 nt, Human
caaggaccaggacucccucc

SEQ ID NO: 2313078 - RNA, 18 nt, Human
caaggaccaggacucccu

SEQ ID NO: 2313079 - RNA, 16 nt, Human
caaggaccaggacucc

SEQ ID NO: 2313080 - RNA, 15 nt, Human
caaggaccaggacuc

SEQ ID NO: 2313081 - RNA, 14 nt, Human
caaggaccaggacu

SEQ ID NO: 2313082 - RNA, 13 nt, Human
caaggaccaggac

SEQ ID NO: 2313083 - RNA, 17 nt, Human
caaggaaagccccagca

SEQ ID NO: 2313084 - RNA, 22 nt, Human
caaggaaaccacagcugcugga

SEQ ID NO: 2313085 - RNA, 17 nt, Human
caaggaaaccacagcug

SEQ ID NO: 2313086 - RNA, 18 nt, Human
caaggaaaccacagcugc

SEQ ID NO: 2313087 - RNA, 20 nt, Human
caaggaaaccacagcugcug

SEQ ID NO: 2313088 - RNA, 21 nt, Human
caaggaaaccacagcugcugg

SEQ ID NO: 2313089 - RNA, 15 nt, Human
caaggaaaaacaggu

SEQ ID NO: 2313090 - RNA, 14 nt, Human
caaggaaaccacag

SEQ ID NO: 2313091 - RNA, 17 nt, Human
caagcgugagccacugc

SEQ ID NO: 2313092 - RNA, 18 nt, Human
caagcgugagccacugca

SEQ ID NO: 2313093 - RNA, 20 nt, Human
caaggaccccucaccuugca

SEQ ID NO: 2313094 - RNA, 17 nt, Human
caaggaccccucaccuu

SEQ ID NO: 2313095 - RNA, 15 nt, Human
caaggaccccucacc

SEQ ID NO: 2313096 - RNA, 14 nt, Human
caaggaccccucac

SEQ ID NO: 2313097 - RNA, 13 nt, Human
caaggaccccuca

SEQ ID NO: 2313098 - RNA, 22 nt, Human
caaggacccagccugagauggu

SEQ ID NO: 2313099 - RNA, 20 nt, Human
caaggacuacguuaagggaa

SEQ ID NO: 2313100 - RNA, 17 nt, Human
caaggauagaugcuggc

SEQ ID NO: 2313101 - RNA, 16 nt, Human
caaggauagaugcugg

SEQ ID NO: 2313102 - RNA, 15 nt, Human
caaggauagaugcug

SEQ ID NO: 2313103 - RNA, 17 nt, Human
caaggauagaaguauac

SEQ ID NO: 2313104 - RNA, 21 nt, Human
caaggacuacguuaagggaag

SEQ ID NO: 2313105 - RNA, 16 nt, Human
caaggagucagacauu

SEQ ID NO: 2313106 - RNA, 19 nt, Human
caaggaguuccaugaagac

SEQ ID NO: 2313107 - RNA, 21 nt, Human
caaggaguuccaugaagacca

SEQ ID NO: 2313108 - RNA, 13 nt, Human
caaggauccugag

SEQ ID NO: 2313109 - RNA, 23 nt, Human
caaggauagaugcuggcccaggg

SEQ ID NO: 2313110 - RNA, 22 nt, Human
caaggauagaugcuggcccagg

SEQ ID NO: 2313111 - RNA, 21 nt, Human
caaggauagaugcuggcccag

SEQ ID NO: 2313112 - RNA, 20 nt, Human
caaggauagaugcuggccca

SEQ ID NO: 2313113 - RNA, 19 nt, Human
caaggaugccccguccccc

SEQ ID NO: 2313114 - RNA, 21 nt, Human
caaggaugaucuaggaagacu

SEQ ID NO: 2313115 - RNA, 16 nt, Human
caagugauucuccugc

SEQ ID NO: 2313116 - RNA, 17 nt, Human
caagugauucuccugcc

SEQ ID NO: 2313117 - RNA, 19 nt, Human
caagugaaaaaggaggaag

SEQ ID NO: 2313118 - RNA, 22 nt, Human
caagugauucucaugccucagc

SEQ ID NO: 2313119 - RNA, 22 nt, Human
caagucucugcuggcccagcca

SEQ ID NO: 2313120 - RNA, 19 nt, Human
caagucucugcuggcccag

SEQ ID NO: 2313121 - RNA, 18 nt, Human
caagucucugcuggccca

SEQ ID NO: 2313122 - RNA, 17 nt, Human
caagucuccuuccccuu

SEQ ID NO: 2313123 - RNA, 14 nt, Human
caagucuccuuccc

SEQ ID NO: 2313124 - RNA, 18 nt, Human
caagucuaugaugcuguu

SEQ ID NO: 2313125 - RNA, 16 nt, Human
caagucuacagaguga

SEQ ID NO: 2313126 - RNA, 19 nt, Human
caagucuacagagugauag

SEQ ID NO: 2313127 - RNA, 20 nt, Human
caagucuaugaugcuguugc

SEQ ID NO: 2313128 - RNA, 21 nt, Human
caagucuaugaugcuguugcc

SEQ ID NO: 2313129 - RNA, 16 nt, Human
caagucucaguggcuu

SEQ ID NO: 2313130 - RNA, 23 nt, Human
caagucucaguggcuucaucugu

SEQ ID NO: 2313131 - RNA, 19 nt, Human
caagucuggaucugggacc

SEQ ID NO: 2313132 - RNA, 18 nt, Human
caagucuggaucugggac

SEQ ID NO: 2313133 - RNA, 13 nt, Human
caagucuggaucu

SEQ ID NO: 2313134 - RNA, 17 nt, Human
caagucugcaggugcac

SEQ ID NO: 2313135 - RNA, 23 nt, Human
caagucucugcuggcccagccaa

SEQ ID NO: 2313136 - RNA, 13 nt, Human
caagucugcagcc

SEQ ID NO: 2313137 - RNA, 12 nt, Human
caagucugcagg

SEQ ID NO: 2313138 - RNA, 15 nt, Human
caagucuucccugau

SEQ ID NO: 2313139 - RNA, 14 nt, Human
caagucuucccuga

SEQ ID NO: 2313140 - RNA, 22 nt, Human
caagugauucuccugccucagc

SEQ ID NO: 2313141 - RNA, 21 nt, Human
caagugauucuccugccucag

SEQ ID NO: 2313142 - RNA, 14 nt, Human
caagugauucuccu

SEQ ID NO: 2313143 - RNA, 15 nt, Human
caagugauugaaaau

SEQ ID NO: 2313144 - RNA, 19 nt, Human
caagugauugaaaauagua

SEQ ID NO: 2313145 - RNA, 13 nt, Human
caagugcaggcug

SEQ ID NO: 2313146 - RNA, 18 nt, Human
caagugauugggacagag

SEQ ID NO: 2313147 - RNA, 19 nt, Human
caagugauugggacagagg

SEQ ID NO: 2313148 - RNA, 17 nt, Human
caagugcaugcucucug

SEQ ID NO: 2313149 - RNA, 17 nt, Human
caagugggaucugucac

SEQ ID NO: 2313150 - RNA, 13 nt, Human
caagugggggcag

SEQ ID NO: 2313151 - RNA, 21 nt, Human
caaguggggcucgccaugccg

SEQ ID NO: 2313152 - RNA, 16 nt, Human
caaguggggcucgcca

SEQ ID NO: 2313153 - RNA, 17 nt, Human
caaguggggcucgccau

SEQ ID NO: 2313154 - RNA, 20 nt, Human
caagugcaggcuggcaccgc

SEQ ID NO: 2313155 - RNA, 14 nt, Human
caagugcaggcugg

SEQ ID NO: 2313156 - RNA, 20 nt, Human
caagugggaucugucacacc

SEQ ID NO: 2313157 - RNA, 22 nt, Human
caagugggaucugucacaccag

SEQ ID NO: 2313158 - RNA, 20 nt, Human
caagugggggcagagggcag

SEQ ID NO: 2313159 - RNA, 14 nt, Human
caagugggggcaga

SEQ ID NO: 2313160 - RNA, 15 nt, Human
caaguggggugcugg

SEQ ID NO: 2313161 - RNA, 17 nt, Human
caaguggggugcuggga

SEQ ID NO: 2313162 - RNA, 21 nt, Human
caaguggggugcugggaggag

SEQ ID NO: 2313163 - RNA, 18 nt, Human
caaguggggugcugggag

SEQ ID NO: 2313164 - RNA, 19 nt, Human
caaguggggugcugggagg

SEQ ID NO: 2313165 - RNA, 22 nt, Human
caagugugguagagugugccug

SEQ ID NO: 2313166 - RNA, 22 nt, Human
caaguggugguaacccuggugg

SEQ ID NO: 2313167 - RNA, 20 nt, Human
caaguggugguaacccuggu

SEQ ID NO: 2313168 - RNA, 19 nt, Human
caaguggugguaacccugg

SEQ ID NO: 2313169 - RNA, 18 nt, Human
caaguggugguaacccug

SEQ ID NO: 2313170 - RNA, 13 nt, Human
caaguggugccua

SEQ ID NO: 2313171 - RNA, 20 nt, Human
caagugguagcaagaaguga

SEQ ID NO: 2313172 - RNA, 24 nt, Human
caaggugggcugagcccuggcagg

SEQ ID NO: 2313173 - RNA, 23 nt, Human
caaggugggcugagcccuggcag

SEQ ID NO: 2313174 - RNA, 22 nt, Human
caagguggggggaucacaaggu

SEQ ID NO: 2313175 - RNA, 20 nt, Human
caagguggucugcucgggcc

SEQ ID NO: 2313176 - RNA, 23 nt, Human
caagguggucugcucgggcccag

SEQ ID NO: 2313177 - RNA, 21 nt, Human
caaggugggcugagcccuggc

SEQ ID NO: 2313178 - RNA, 20 nt, Human
caaggugggcugagcccugg

SEQ ID NO: 2313179 - RNA, 19 nt, Human
caaggugggcugagcccug

SEQ ID NO: 2313180 - RNA, 18 nt, Human
caaggugggcugagcccu

SEQ ID NO: 2313181 - RNA, 22 nt, Human
caaguccuuaccucuuccggag

SEQ ID NO: 2313182 - RNA, 15 nt, Human
caagucuacagagug

SEQ ID NO: 2313183 - RNA, 17 nt, Human
caagucgaugaacuauu

SEQ ID NO: 2313184 - RNA, 23 nt, Human
caaguccuuaccucuuccggaga

SEQ ID NO: 2313185 - RNA, 18 nt, Human
caaguccuuaccucuucc

SEQ ID NO: 2313186 - RNA, 15 nt, Human
caaguccuuaccucu

SEQ ID NO: 2313187 - RNA, 20 nt, Human
caaguccugaagaggcgggc

SEQ ID NO: 2313188 - RNA, 23 nt, Human
caaguccugaagaggcgggccag

SEQ ID NO: 2313189 - RNA, 15 nt, Human
caaguccugugaauu

SEQ ID NO: 2313190 - RNA, 17 nt, Human
caaguccugugaauuuc

SEQ ID NO: 2313191 - RNA, 18 nt, Human
caaguccugugaauuucu

SEQ ID NO: 2313192 - RNA, 17 nt, Human
caaggugggcugagccc

SEQ ID NO: 2313193 - RNA, 16 nt, Human
caaggugggcugagcc

SEQ ID NO: 2313194 - RNA, 12 nt, Human
caaggugggcug

SEQ ID NO: 2313195 - RNA, 22 nt, Human
caaggugggccuugcuaccuca

SEQ ID NO: 2313196 - RNA, 23 nt, Human
caaggugggaggauugcuugagc

SEQ ID NO: 2313197 - RNA, 12 nt, Human
caaggugggagg

SEQ ID NO: 2313198 - RNA, 17 nt, Human
caagguggccaaauuau

SEQ ID NO: 2313199 - RNA, 13 nt, Human
caaggugcucaca

SEQ ID NO: 2313200 - RNA, 19 nt, Human
caagguggccaaauuauuu

SEQ ID NO: 2313201 - RNA, 19 nt, Human
caagguggcuccagcacca

SEQ ID NO: 2313202 - RNA, 15 nt, Human
caaggauugcuacug

SEQ ID NO: 2313203 - RNA, 16 nt, Human
caagggccuggccuga

SEQ ID NO: 2313204 - RNA, 14 nt, Human
caagggcuccccac

SEQ ID NO: 2313205 - RNA, 17 nt, Human
caagggcuccccacugc

SEQ ID NO: 2313206 - RNA, 16 nt, Human
caagggcgcaagagua

SEQ ID NO: 2313207 - RNA, 23 nt, Human
caaggaguuccaugaagaccaca

SEQ ID NO: 2313208 - RNA, 19 nt, Human
caagggccuggccugagcu

SEQ ID NO: 2313209 - RNA, 22 nt, Human
caagggcuuacacguggaggaa

SEQ ID NO: 2313210 - RNA, 21 nt, Human
caagggcuuacacguggagga

SEQ ID NO: 2313211 - RNA, 19 nt, Human
caagggcuccccacugccu

SEQ ID NO: 2313212 - RNA, 18 nt, Human
caagggcuucugcacccu

SEQ ID NO: 2313213 - RNA, 19 nt, Human
caagggcuucugcacccuc

SEQ ID NO: 2313214 - RNA, 20 nt, Human
caagggcuucugcacccucc

SEQ ID NO: 2313215 - RNA, 21 nt, Human
caagggcuucugcacccucca

SEQ ID NO: 2313216 - RNA, 23 nt, Human
caagggcuucugcacccuccacc

SEQ ID NO: 2313217 - RNA, 20 nt, Human
caagggcuuuguuuugcaca

SEQ ID NO: 2313218 - RNA, 13 nt, Human
caaggucuggccu

SEQ ID NO: 2313219 - RNA, 15 nt, Human
caaggugcaaaucaa

SEQ ID NO: 2313220 - RNA, 14 nt, Human
caaggucuuugguu

SEQ ID NO: 2313221 - RNA, 23 nt, Human
caaggugaagaugggaacgcaga

SEQ ID NO: 2313222 - RNA, 18 nt, Human
caaggucuggccucaggu

SEQ ID NO: 2313223 - RNA, 16 nt, Human
caaggucuucagccau

SEQ ID NO: 2313224 - RNA, 23 nt, Human
cacauuaagccuuccacacucac

SEQ ID NO: 2313225 - RNA, 18 nt, Human
cacauuaauauuugcuga

SEQ ID NO: 2313226 - RNA, 19 nt, Human
cacauuaauauuugcugac

SEQ ID NO: 2313227 - RNA, 20 nt, Human
cacauuaucgggagcagugu

SEQ ID NO: 2313228 - RNA, 17 nt, Human
cacauuaucgggagcag

SEQ ID NO: 2313229 - RNA, 16 nt, Human
cacauuaucgggagca

SEQ ID NO: 2313230 - RNA, 15 nt, Human
cacauguuuucucug

SEQ ID NO: 2313231 - RNA, 22 nt, Human
cacauuaucgggagcagugucu

SEQ ID NO: 2313232 - RNA, 23 nt, Human
cacauuaucgggagcagugucuu

SEQ ID NO: 2313233 - RNA, 14 nt, Human
cacauuauuugcau

SEQ ID NO: 2313234 - RNA, 13 nt, Human
cacauuauuugca

SEQ ID NO: 2313235 - RNA, 17 nt, Human
cacauucaacccuggag

SEQ ID NO: 2313236 - RNA, 16 nt, Human
cacauucaauaagcau

SEQ ID NO: 2313237 - RNA, 20 nt, Human
cacauucaacccuggagagu

SEQ ID NO: 2313238 - RNA, 15 nt, Human
cacauuauuugcaug

SEQ ID NO: 2313239 - RNA, 19 nt, Human
cacauucaacccuggagag

SEQ ID NO: 2313240 - RNA, 12 nt, Human
cacauucaggaa

SEQ ID NO: 2313241 - RNA, 14 nt, Human
cacauucaggaaga

SEQ ID NO: 2313242 - RNA, 16 nt, Human
cacauuccugaugcuu

SEQ ID NO: 2313243 - RNA, 17 nt, Human
cacauucaggaagauga

SEQ ID NO: 2313244 - RNA, 18 nt, Human
cacauuccuugccugcac

SEQ ID NO: 2313245 - RNA, 19 nt, Human
cacauuccuugccugcaca

SEQ ID NO: 2313246 - RNA, 16 nt, Human
cacauucggcucccug

SEQ ID NO: 2313247 - RNA, 14 nt, Human
cacaugugcacaug

SEQ ID NO: 2313248 - RNA, 15 nt, Human
cacaugugcacaugc

SEQ ID NO: 2313249 - RNA, 15 nt, Human
cacaugucuuguaca

SEQ ID NO: 2313250 - RNA, 23 nt, Human
cacaugucuuaaugaaguuugaa

SEQ ID NO: 2313251 - RNA, 20 nt, Human
cacaugucuuguacaugugu

SEQ ID NO: 2313252 - RNA, 13 nt, Human
cacaugugacaca

SEQ ID NO: 2313253 - RNA, 16 nt, Human
cacaugucuuaaugaa

SEQ ID NO: 2313254 - RNA, 17 nt, Human
cacaugucuuaaugaag

SEQ ID NO: 2313255 - RNA, 18 nt, Human
cacaugucuuaaugaagu

SEQ ID NO: 2313256 - RNA, 22 nt, Human
cacaugucuuaaugaaguuuga

SEQ ID NO: 2313257 - RNA, 17 nt, Human
cacaugugcacaugcac

SEQ ID NO: 2313258 - RNA, 13 nt, Human
cacauguggacuu

SEQ ID NO: 2313259 - RNA, 15 nt, Human
cacaugugacacaua

SEQ ID NO: 2313260 - RNA, 11 nt, Human
cacaugugugc

SEQ ID NO: 2313261 - RNA, 12 nt, Human
cacauguuuccu

SEQ ID NO: 2313262 - RNA, 18 nt, Human
cacauguuuagaguugca

SEQ ID NO: 2313263 - RNA, 21 nt, Human
cacauguuuagaguugcaauc

SEQ ID NO: 2313264 - RNA, 14 nt, Human
cacauguuuccucu

SEQ ID NO: 2313265 - RNA, 15 nt, Human
cacauguuuccucua

SEQ ID NO: 2313266 - RNA, 18 nt, Human
cacauggcuauguuuuag

SEQ ID NO: 2313267 - RNA, 15 nt, Human
cacauggccuaugca

SEQ ID NO: 2313268 - RNA, 23 nt, Human
cacauggccccucccccugccag

SEQ ID NO: 2313269 - RNA, 19 nt, Human
cacaucacccuuaccaugu

SEQ ID NO: 2313270 - RNA, 15 nt, Human
cacaucagaaaggaa

SEQ ID NO: 2313271 - RNA, 12 nt, Human
cacauggcuucc

SEQ ID NO: 2313272 - RNA, 14 nt, Human
cacauggcuuccuc

SEQ ID NO: 2313273 - RNA, 18 nt, Human
cacauggcuuccuccugc

SEQ ID NO: 2313274 - RNA, 20 nt, Human
cacauggcuuccuccugcgc

SEQ ID NO: 2313275 - RNA, 19 nt, Human
cacauggcuuccuccugcg

SEQ ID NO: 2313276 - RNA, 19 nt, Human
cacauggggcugggcagcu

SEQ ID NO: 2313277 - RNA, 13 nt, Human
cacaucaaagagg

SEQ ID NO: 2313278 - RNA, 19 nt, Human
cacaugccucucucaggcc

SEQ ID NO: 2313279 - RNA, 20 nt, Human
cacauggggcugggcagcua

SEQ ID NO: 2313280 - RNA, 22 nt, Human
cacauggugacuuuugaaaaga

SEQ ID NO: 2313281 - RNA, 20 nt, Human
cacauggugcuacgccugca

SEQ ID NO: 2313282 - RNA, 22 nt, Human
cacauggugcuacgccugcaug

SEQ ID NO: 2313283 - RNA, 17 nt, Human
cacauguaucuaugcau

SEQ ID NO: 2313284 - RNA, 23 nt, Human
cacauguccaagaagcccaggaa

SEQ ID NO: 2313285 - RNA, 14 nt, Human
cacauguauguuuu

SEQ ID NO: 2313286 - RNA, 17 nt, Human
cacauguccuugugugu

SEQ ID NO: 2313287 - RNA, 12 nt, Human
cacaugucuuaa

SEQ ID NO: 2313288 - RNA, 13 nt, Human
cacaugucuuaau

SEQ ID NO: 2313289 - RNA, 14 nt, Human
cacaugucuuaaug

SEQ ID NO: 2313290 - RNA, 15 nt, Human
cacaugucuuaauga

SEQ ID NO: 2313291 - RNA, 12 nt, Human
cacauaucuguc

SEQ ID NO: 2313292 - RNA, 15 nt, Human
cacauauuugauagu

SEQ ID NO: 2313293 - RNA, 18 nt, Human
cacaucagcacgauuucu

SEQ ID NO: 2313294 - RNA, 19 nt, Human
cacaucagcacgauuucug

SEQ ID NO: 2313295 - RNA, 13 nt, Human
cacaugccucucu

SEQ ID NO: 2313296 - RNA, 17 nt, Human
cacaugccucucucagg

SEQ ID NO: 2313297 - RNA, 18 nt, Human
cacaugccucucucaggc

SEQ ID NO: 2313298 - RNA, 20 nt, Human
caccacuaggacucugaggc

SEQ ID NO: 2313299 - RNA, 17 nt, Human
caccacgguagugccug

SEQ ID NO: 2313300 - RNA, 15 nt, Human
caccacguccagcug

SEQ ID NO: 2313301 - RNA, 15 nt, Human
caccacgguggucac

SEQ ID NO: 2313302 - RNA, 20 nt, Human
caccacuacauucuguuaau

SEQ ID NO: 2313303 - RNA, 19 nt, Human
caccacuacauucuguuaa

SEQ ID NO: 2313304 - RNA, 18 nt, Human
caccacuacauucuguua

SEQ ID NO: 2313305 - RNA, 17 nt, Human
caccacuacauucuguu

SEQ ID NO: 2313306 - RNA, 16 nt, Human
caccacuacauucugu

SEQ ID NO: 2313307 - RNA, 14 nt, Human
caccaccucuuugg

SEQ ID NO: 2313308 - RNA, 19 nt, Human
caccacaugugcacaugca

SEQ ID NO: 2313309 - RNA, 14 nt, Human
caccacaucuaagc

SEQ ID NO: 2313310 - RNA, 13 nt, Human
caccaccaagcca

SEQ ID NO: 2313311 - RNA, 18 nt, Human
caccaccacgguggucac

SEQ ID NO: 2313312 - RNA, 13 nt, Human
caccaccacuggc

SEQ ID NO: 2313313 - RNA, 15 nt, Human
caccaccacuggcca

SEQ ID NO: 2313314 - RNA, 15 nt, Human
caccacaugugcaca

SEQ ID NO: 2313315 - RNA, 18 nt, Human
caccacaugugcacaugc

SEQ ID NO: 2313316 - RNA, 21 nt, Human
caccaccccagcugcuccccu

SEQ ID NO: 2313317 - RNA, 14 nt, Human
caccaccccccacu

SEQ ID NO: 2313318 - RNA, 15 nt, Human
caccaccccccacuc

SEQ ID NO: 2313319 - RNA, 16 nt, Human
caccaccccccacucu

SEQ ID NO: 2313320 - RNA, 18 nt, Human
caccaccccccacucugu

SEQ ID NO: 2313321 - RNA, 20 nt, Human
caccaccccccacucugugc

SEQ ID NO: 2313322 - RNA, 22 nt, Human
caccaccccccacucugugccu

SEQ ID NO: 2313323 - RNA, 14 nt, Human
caccaccccagcug

SEQ ID NO: 2313324 - RNA, 23 nt, Human
caccaccacuggccaccaggcug

SEQ ID NO: 2313325 - RNA, 16 nt, Human
caccaccacuggccac

SEQ ID NO: 2313326 - RNA, 18 nt, Human
caccaccacuggccacca

SEQ ID NO: 2313327 - RNA, 11 nt, Human
caccacccaaa

SEQ ID NO: 2313328 - RNA, 12 nt, Human
caccaccucucc

SEQ ID NO: 2313329 - RNA, 13 nt, Human
caccaccucccuc

SEQ ID NO: 2313330 - RNA, 14 nt, Human
caccaccucccuca

SEQ ID NO: 2313331 - RNA, 17 nt, Human
caccaccucacuccugu

SEQ ID NO: 2313332 - RNA, 18 nt, Human
caccaccucacuccuguu

SEQ ID NO: 2313333 - RNA, 13 nt, Human
caccaccucagag

SEQ ID NO: 2313334 - RNA, 14 nt, Human
caccaccucagagu

SEQ ID NO: 2313335 - RNA, 23 nt, Human
caccaccuaggccacuccuccaa

SEQ ID NO: 2313336 - RNA, 16 nt, Human
caccaccucacuccug

SEQ ID NO: 2313337 - RNA, 22 nt, Human
caccaccuaggccacuccucca

SEQ ID NO: 2313338 - RNA, 22 nt, Human
caccacccuagucccuuccccu

SEQ ID NO: 2313339 - RNA, 23 nt, Human
caccacccgcuuucuugcugguu

SEQ ID NO: 2313340 - RNA, 19 nt, Human
caccaagcucacaguuccu

SEQ ID NO: 2313341 - RNA, 15 nt, Human
caccaagcucacagu

SEQ ID NO: 2313342 - RNA, 14 nt, Human
caccaagcucacag

SEQ ID NO: 2313343 - RNA, 16 nt, Human
caccaagcucaaagcg

SEQ ID NO: 2313344 - RNA, 13 nt, Human
caccaagcucaaa

SEQ ID NO: 2313345 - RNA, 23 nt, Human
cacauugggcagcgcccuuccuc

SEQ ID NO: 2313346 - RNA, 22 nt, Human
caccaagccuggucagcccaaa

SEQ ID NO: 2313347 - RNA, 13 nt, Human
caccacacccagc

SEQ ID NO: 2313348 - RNA, 15 nt, Human
caccacacccagccc

SEQ ID NO: 2313349 - RNA, 21 nt, Human
caccacauccuccguccagcc

SEQ ID NO: 2313350 - RNA, 18 nt, Human
caccacauccuccgucca

SEQ ID NO: 2313351 - RNA, 13 nt, Human
caccacagcaggu

SEQ ID NO: 2313352 - RNA, 21 nt, Human
caccacaggcccuuuccucag

SEQ ID NO: 2313353 - RNA, 23 nt, Human
caccacaggcccuuuccucaggc

SEQ ID NO: 2313354 - RNA, 17 nt, Human
caccacaguaaguuccu

SEQ ID NO: 2313355 - RNA, 13 nt, Human
caccacagccagc

SEQ ID NO: 2313356 - RNA, 20 nt, Human
caccacagacacacacacgc

SEQ ID NO: 2313357 - RNA, 21 nt, Human
caccacagacacacacacgca

SEQ ID NO: 2313358 - RNA, 17 nt, Human
caccacagccagcaccu

SEQ ID NO: 2313359 - RNA, 19 nt, Human
caccacagccagcaccugg

SEQ ID NO: 2313360 - RNA, 20 nt, Human
caccaagcucacaguuccuc

SEQ ID NO: 2313361 - RNA, 14 nt, Human
caccacacccagcc

SEQ ID NO: 2313362 - RNA, 16 nt, Human
caccacagacacacac

SEQ ID NO: 2313363 - RNA, 19 nt, Human
caccacagacacacacacg

SEQ ID NO: 2313364 - RNA, 17 nt, Human
caccacacccagcccac

SEQ ID NO: 2313365 - RNA, 19 nt, Human
caccaagccuggucagccc

SEQ ID NO: 2313366 - RNA, 21 nt, Human
caccaagccuggucagcccaa

SEQ ID NO: 2313367 - RNA, 20 nt, Human
caccaagccuggucagccca

SEQ ID NO: 2313368 - RNA, 18 nt, Human
cacauugggcagcgcccu

SEQ ID NO: 2313369 - RNA, 22 nt, Human
cacauugggcagcgcccuuccu

SEQ ID NO: 2313370 - RNA, 15 nt, Human
caccaagcccaguua

SEQ ID NO: 2313371 - RNA, 18 nt, Human
cacauuggagauguuuag

SEQ ID NO: 2313372 - RNA, 19 nt, Human
cacauucuuauaaauauga

SEQ ID NO: 2313373 - RNA, 17 nt, Human
cacauucuuauaaauau

SEQ ID NO: 2313374 - RNA, 18 nt, Human
cacauucuuauaaauaug

SEQ ID NO: 2313375 - RNA, 17 nt, Human
cacauucggcucccugg

SEQ ID NO: 2313376 - RNA, 21 nt, Human
cacauucggcucccuggagcc

SEQ ID NO: 2313377 - RNA, 16 nt, Human
cacauucuggcucagg

SEQ ID NO: 2313378 - RNA, 20 nt, Human
cacauucuggcucagggagg

SEQ ID NO: 2313379 - RNA, 21 nt, Human
cacauucuggcucagggaggu

SEQ ID NO: 2313380 - RNA, 22 nt, Human
cacauucuuaacacauguccuu

SEQ ID NO: 2313381 - RNA, 15 nt, Human
cacauucuuauaaau

SEQ ID NO: 2313382 - RNA, 16 nt, Human
cacauucuuauaaaua

SEQ ID NO: 2313383 - RNA, 23 nt, Human
cacauucuuauaaauaugaagcu

SEQ ID NO: 2313384 - RNA, 16 nt, Human
caccaccccagcugcu

SEQ ID NO: 2313385 - RNA, 14 nt, Human
cacauaauuuuucu

SEQ ID NO: 2313386 - RNA, 15 nt, Human
cacauacacacauau

SEQ ID NO: 2313387 - RNA, 17 nt, Human
cacauacacacacacgc

SEQ ID NO: 2313388 - RNA, 21 nt, Human
cacauagugaugguuccccug

SEQ ID NO: 2313389 - RNA, 21 nt, Human
cacauauaaacaucacacaca

SEQ ID NO: 2313390 - RNA, 22 nt, Human
cacauaguuuuuaagguuauuu

SEQ ID NO: 2313391 - RNA, 12 nt, Human
cacaguuugaac

SEQ ID NO: 2313392 - RNA, 22 nt, Human
cacauaauucaggaagcagcuu

SEQ ID NO: 2313393 - RNA, 19 nt, Human
cacauaagcucagaaucca

SEQ ID NO: 2313394 - RNA, 18 nt, Human
cacauaauuaaagugucc

SEQ ID NO: 2313395 - RNA, 22 nt, Human
cacauaauuaaaguguccauug

SEQ ID NO: 2313396 - RNA, 14 nt, Human
cacaguuuucugag

SEQ ID NO: 2313397 - RNA, 15 nt, Human
cacaguuuucugaga

SEQ ID NO: 2313398 - RNA, 21 nt, Human
cacaguuuccucaucugucca

SEQ ID NO: 2313399 - RNA, 22 nt, Human
cacaguuggcuggaugaaauuu

SEQ ID NO: 2313400 - RNA, 19 nt, Human
cacagugagucgaggacag

SEQ ID NO: 2313401 - RNA, 20 nt, Human
cacagugagucgaggacagg

SEQ ID NO: 2313402 - RNA, 13 nt, Human
cacaggcccuccc

SEQ ID NO: 2313403 - RNA, 23 nt, Human
cacaguucuuugggccagacaug

SEQ ID NO: 2313404 - RNA, 12 nt, Human
cacaguuggccu

SEQ ID NO: 2313405 - RNA, 15 nt, Human
cacaguuggccuuca

SEQ ID NO: 2313406 - RNA, 23 nt, Human
cacaguuggccuucagaaccauc

SEQ ID NO: 2313407 - RNA, 17 nt, Human
cacaguuggcuggauga

SEQ ID NO: 2313408 - RNA, 18 nt, Human
cacagugagucgaggaca

SEQ ID NO: 2313409 - RNA, 20 nt, Human
cacaggcccggcuccaggcu

SEQ ID NO: 2313410 - RNA, 23 nt, Human
cacaggcccggcuccaggcuccu

SEQ ID NO: 2313411 - RNA, 15 nt, Human
cacaggcagcauuua

SEQ ID NO: 2313412 - RNA, 14 nt, Human
cacaggcagcauuu

SEQ ID NO: 2313413 - RNA, 23 nt, Human
cacaggcaacugaggcagacagc

SEQ ID NO: 2313414 - RNA, 22 nt, Human
cacaggcaacugaggcagacag

SEQ ID NO: 2313415 - RNA, 10 nt, Human
cacaggcagg

SEQ ID NO: 2313416 - RNA, 11 nt, Human
cacaggcagcu

SEQ ID NO: 2313417 - RNA, 16 nt, Human
cacaggcagcuggaug

SEQ ID NO: 2313418 - RNA, 21 nt, Human
cacaggcagcuggaugagacu

SEQ ID NO: 2313419 - RNA, 12 nt, Human
cacaggcagcuu

SEQ ID NO: 2313420 - RNA, 16 nt, Human
cacaggcccggcucca

SEQ ID NO: 2313421 - RNA, 17 nt, Human
cacaggcccggcuccag

SEQ ID NO: 2313422 - RNA, 18 nt, Human
cacaggcccggcuccagg

SEQ ID NO: 2313423 - RNA, 19 nt, Human
cacaggcccggcuccaggc

SEQ ID NO: 2313424 - RNA, 12 nt, Human
cacaggaucagu

SEQ ID NO: 2313425 - RNA, 22 nt, Human
cacaggaagccugcaguccugg

SEQ ID NO: 2313426 - RNA, 10 nt, Human
cacagccucu

SEQ ID NO: 2313427 - RNA, 19 nt, Human
cacagccuccucugucugc

SEQ ID NO: 2313428 - RNA, 20 nt, Human
cacagccuccucugucugcc

SEQ ID NO: 2313429 - RNA, 21 nt, Human
cacagccuccucugucugccc

SEQ ID NO: 2313430 - RNA, 23 nt, Human
cacagccuccucugucugcccuu

SEQ ID NO: 2313431 - RNA, 15 nt, Human
cacaggaucagucug

SEQ ID NO: 2313432 - RNA, 16 nt, Human
cacaggaucagucuga

SEQ ID NO: 2313433 - RNA, 15 nt, Human
cacaggaaguagagg

SEQ ID NO: 2313434 - RNA, 20 nt, Human
cacaggaaccacaagacugc

SEQ ID NO: 2313435 - RNA, 23 nt, Human
cacagccuccccugccagggcag

SEQ ID NO: 2313436 - RNA, 14 nt, Human
cacagccuccucug

SEQ ID NO: 2313437 - RNA, 15 nt, Human
cacagccuccucugu

SEQ ID NO: 2313438 - RNA, 21 nt, Human
cacagccuccccugccagggc

SEQ ID NO: 2313439 - RNA, 20 nt, Human
cacagccuccccugccaggg

SEQ ID NO: 2313440 - RNA, 19 nt, Human
cacaggaaccacaagacug

SEQ ID NO: 2313441 - RNA, 22 nt, Human
cacagccgcagccucccucuga

SEQ ID NO: 2313442 - RNA, 21 nt, Human
cacagccgcagccucccucug

SEQ ID NO: 2313443 - RNA, 23 nt, Human
cacagccgcagccucccucugac

SEQ ID NO: 2313444 - RNA, 14 nt, Human
cacagccuccccug

SEQ ID NO: 2313445 - RNA, 19 nt, Human
cacagccuccccugccagg

SEQ ID NO: 2313446 - RNA, 17 nt, Human
cacagccuccccugcca

SEQ ID NO: 2313447 - RNA, 14 nt, Human
cacagccgcagccu

SEQ ID NO: 2313448 - RNA, 15 nt, Human
cacagccacacacac

SEQ ID NO: 2313449 - RNA, 14 nt, Human
cacagccaaggacu

SEQ ID NO: 2313450 - RNA, 14 nt, Human
cacagccacacaca

SEQ ID NO: 2313451 - RNA, 13 nt, Human
cacagccacacac

SEQ ID NO: 2313452 - RNA, 22 nt, Human
cacagccaacacgcaccugccu

SEQ ID NO: 2313453 - RNA, 10 nt, Human
cacagccaca

SEQ ID NO: 2313454 - RNA, 12 nt, Human
cacagccacaca

SEQ ID NO: 2313455 - RNA, 11 nt, Human
cacagccacac

SEQ ID NO: 2313456 - RNA, 16 nt, Human
cacagcagcugaacag

SEQ ID NO: 2313457 - RNA, 19 nt, Human
cacagcagcugaacagcca

SEQ ID NO: 2313458 - RNA, 13 nt, Human
cacagcagcuuca

SEQ ID NO: 2313459 - RNA, 14 nt, Human
cacagcagccuggg

SEQ ID NO: 2313460 - RNA, 18 nt, Human
cacagcagcaucuucaaa

SEQ ID NO: 2313461 - RNA, 22 nt, Human
cacagcaguugaaaagacucca

SEQ ID NO: 2313462 - RNA, 13 nt, Human
cacagcaugugua

SEQ ID NO: 2313463 - RNA, 23 nt, Human
cacagcaucauuuugcauucaaa

SEQ ID NO: 2313464 - RNA, 15 nt, Human
cacagcagcuucacc

SEQ ID NO: 2313465 - RNA, 18 nt, Human
cacagcagcuucaccaga

SEQ ID NO: 2313466 - RNA, 19 nt, Human
cacagcagcuucaccagag

SEQ ID NO: 2313467 - RNA, 20 nt, Human
cacagcaucauuuugcauuc

SEQ ID NO: 2313468 - RNA, 22 nt, Human
cacagaguggucuuucuggaga

SEQ ID NO: 2313469 - RNA, 21 nt, Human
cacagagcaggacugcacagc

SEQ ID NO: 2313470 - RNA, 13 nt, Human
cacagagcgggga

SEQ ID NO: 2313471 - RNA, 19 nt, Human
cacagauggauuugccugu

SEQ ID NO: 2313472 - RNA, 20 nt, Human
cacagaguuguuacauuuuu

SEQ ID NO: 2313473 - RNA, 14 nt, Human
cacagaugggugcu

SEQ ID NO: 2313474 - RNA, 18 nt, Human
cacagaugggugcuugga

SEQ ID NO: 2313475 - RNA, 23 nt, Human
cacagauggauuugccugugcca

SEQ ID NO: 2313476 - RNA, 20 nt, Human
cacagauggauuugccugug

SEQ ID NO: 2313477 - RNA, 14 nt, Human
cacagagcggggac

SEQ ID NO: 2313478 - RNA, 19 nt, Human
cacagagugugcuggagga

SEQ ID NO: 2313479 - RNA, 20 nt, Human
cacagaugggugcuuggagg

SEQ ID NO: 2313480 - RNA, 16 nt, Human
cacagcagccccugca

SEQ ID NO: 2313481 - RNA, 12 nt, Human
cacagcagccug

SEQ ID NO: 2313482 - RNA, 20 nt, Human
cacagcacgggggccaagga

SEQ ID NO: 2313483 - RNA, 22 nt, Human
cacaccuguaaucccagcacuu

SEQ ID NO: 2313484 - RNA, 16 nt, Human
cacaccugacucugaa

SEQ ID NO: 2313485 - RNA, 11 nt, Human
cacaccugagc

SEQ ID NO: 2313486 - RNA, 20 nt, Human
cacaccgagggcgaccccgu

SEQ ID NO: 2313487 - RNA, 12 nt, Human
cacaccucugcc

SEQ ID NO: 2313488 - RNA, 13 nt, Human
cacaccucugcca

SEQ ID NO: 2313489 - RNA, 14 nt, Human
cacaccucugccag

SEQ ID NO: 2313490 - RNA, 15 nt, Human
cacacgcacacacac

SEQ ID NO: 2313491 - RNA, 20 nt, Human
cacaccuguagucccagcua

SEQ ID NO: 2313492 - RNA, 14 nt, Human
cacacgcacacaca

SEQ ID NO: 2313493 - RNA, 23 nt, Human
cacaccuuuuauugacacagaaa

SEQ ID NO: 2313494 - RNA, 19 nt, Human
cacaccuguagucccagcu

SEQ ID NO: 2313495 - RNA, 16 nt, Human
cacaccuguaguccca

SEQ ID NO: 2313496 - RNA, 22 nt, Human
cacaccuuuuauugacacagaa

SEQ ID NO: 2313497 - RNA, 17 nt, Human
cacaccugagccagccu

SEQ ID NO: 2313498 - RNA, 16 nt, Human
cacaccuguagcacuu

SEQ ID NO: 2313499 - RNA, 17 nt, Human
cacaccgggcacucaga

SEQ ID NO: 2313500 - RNA, 17 nt, Human
cacacccucucccagga

SEQ ID NO: 2313501 - RNA, 21 nt, Human
cacacccucccccgccacucc

SEQ ID NO: 2313502 - RNA, 21 nt, Human
cacacccuguacuguucugug

SEQ ID NO: 2313503 - RNA, 14 nt, Human
cacacccuguuuua

SEQ ID NO: 2313504 - RNA, 18 nt, Human
cacacccucucccaggac

SEQ ID NO: 2313505 - RNA, 13 nt, Human
cacacccccaccc

SEQ ID NO: 2313506 - RNA, 23 nt, Human
cacacccccaccccuugcucuca

SEQ ID NO: 2313507 - RNA, 21 nt, Human
cacaccaggcuugccugcagg

SEQ ID NO: 2313508 - RNA, 22 nt, Human
cacaccaggcuugccugcaggc

SEQ ID NO: 2313509 - RNA, 22 nt, Human
cacaccaggcugugggccucaa

SEQ ID NO: 2313510 - RNA, 13 nt, Human
cacacccagccca

SEQ ID NO: 2313511 - RNA, 16 nt, Human
cacacccacucagcuc

SEQ ID NO: 2313512 - RNA, 22 nt, Human
cacacccaccguccgcccugcu

SEQ ID NO: 2313513 - RNA, 15 nt, Human
cacacccacucagcu

SEQ ID NO: 2313514 - RNA, 14 nt, Human
cacacccacucagc

SEQ ID NO: 2313515 - RNA, 14 nt, Human
cacacccaccgucc

SEQ ID NO: 2313516 - RNA, 21 nt, Human
cacacccaccguccgcccugc

SEQ ID NO: 2313517 - RNA, 21 nt, Human
cacaccaggcugugggccuca

SEQ ID NO: 2313518 - RNA, 16 nt, Human
cacaccacaucuaagc

SEQ ID NO: 2313519 - RNA, 13 nt, Human
cacacagcuccca

SEQ ID NO: 2313520 - RNA, 15 nt, Human
cacaccagagcccac

SEQ ID NO: 2313521 - RNA, 12 nt, Human
cacaccagagcc

SEQ ID NO: 2313522 - RNA, 13 nt, Human
cacaccagagccc

SEQ ID NO: 2313523 - RNA, 14 nt, Human
cacaaccugaaccu

SEQ ID NO: 2313524 - RNA, 14 nt, Human
cacaacgugcauug

SEQ ID NO: 2313525 - RNA, 17 nt, Human
cacaacgugcauugugc

SEQ ID NO: 2313526 - RNA, 19 nt, Human
cacaacgugcauugugcuu

SEQ ID NO: 2313527 - RNA, 13 nt, Human
cacaacuauauug

SEQ ID NO: 2313528 - RNA, 12 nt, Human
cacacacaggag

SEQ ID NO: 2313529 - RNA, 15 nt, Human
cacacacagcugggc

SEQ ID NO: 2313530 - RNA, 13 nt, Human
cacacacaggagc

SEQ ID NO: 2313531 - RNA, 17 nt, Human
cacaacccuguuuuaua

SEQ ID NO: 2313532 - RNA, 14 nt, Human
cacaacuauuuuuc

SEQ ID NO: 2313533 - RNA, 19 nt, Human
cacaacuauuuuuccaaaa

SEQ ID NO: 2313534 - RNA, 21 nt, Human
cacacacaggcaacugaggca

SEQ ID NO: 2313535 - RNA, 13 nt, Human
cacacacaggcaa

SEQ ID NO: 2313536 - RNA, 15 nt, Human
cacacacaggagcau

SEQ ID NO: 2313537 - RNA, 19 nt, Human
cacacacauacacacauau

SEQ ID NO: 2313538 - RNA, 18 nt, Human
cacacacaugcauacaca

SEQ ID NO: 2313539 - RNA, 17 nt, Human
cacacacaugcauacac

SEQ ID NO: 2313540 - RNA, 16 nt, Human
cacacacaugcauaca

SEQ ID NO: 2313541 - RNA, 12 nt, Human
cacacacaugca

SEQ ID NO: 2313542 - RNA, 14 nt, Human
cacacaccagagcc

SEQ ID NO: 2313543 - RNA, 20 nt, Human
cacacagaaaauauacugua

SEQ ID NO: 2313544 - RNA, 23 nt, Human
cacacagaaaauauacuguaaag

SEQ ID NO: 2313545 - RNA, 22 nt, Human
cacacagaaaauauacuguaaa

SEQ ID NO: 2313546 - RNA, 21 nt, Human
cacacagaaaauauacuguaa

SEQ ID NO: 2313547 - RNA, 15 nt, Human
cacacagaaacucuu

SEQ ID NO: 2313548 - RNA, 12 nt, Human
cacacagaggaa

SEQ ID NO: 2313549 - RNA, 22 nt, Human
cacacagaggaagagcaggcac

SEQ ID NO: 2313550 - RNA, 18 nt, Human
cacacagaggaagagcag

SEQ ID NO: 2313551 - RNA, 11 nt, Human
cacacagccac

SEQ ID NO: 2313552 - RNA, 19 nt, Human
cacacagaggcugccucuc

SEQ ID NO: 2313553 - RNA, 12 nt, Human
cacacagcucug

SEQ ID NO: 2313554 - RNA, 22 nt, Human
cacacagccacacacacagaaa

SEQ ID NO: 2313555 - RNA, 21 nt, Human
cacacagccacacacacagaa

SEQ ID NO: 2313556 - RNA, 14 nt, Human
cacacagccaggug

SEQ ID NO: 2313557 - RNA, 15 nt, Human
cacacagccaggugc

SEQ ID NO: 2313558 - RNA, 19 nt, Human
cacacagccaggugccuug

SEQ ID NO: 2313559 - RNA, 21 nt, Human
cacacagccaggugccuugga

SEQ ID NO: 2313560 - RNA, 20 nt, Human
cacacagccacacacacaga

SEQ ID NO: 2313561 - RNA, 19 nt, Human
cacacagccacacacacag

SEQ ID NO: 2313562 - RNA, 17 nt, Human
cacacagccacacacac

SEQ ID NO: 2313563 - RNA, 16 nt, Human
cacacagccacacaca

SEQ ID NO: 2313564 - RNA, 15 nt, Human
cacacagccacacac

SEQ ID NO: 2313565 - RNA, 14 nt, Human
cacacagccacaca

SEQ ID NO: 2313566 - RNA, 13 nt, Human
cacacagccacac

SEQ ID NO: 2313567 - RNA, 12 nt, Human
cacacagccaca

SEQ ID NO: 2313568 - RNA, 14 nt, Human
cacacucauccccu

SEQ ID NO: 2313569 - RNA, 14 nt, Human
cacacugaggcagg

SEQ ID NO: 2313570 - RNA, 13 nt, Human
cacacugaggcag

SEQ ID NO: 2313571 - RNA, 12 nt, Human
cacacucacugc

SEQ ID NO: 2313572 - RNA, 18 nt, Human
cacacugaggcagggaag

SEQ ID NO: 2313573 - RNA, 17 nt, Human
cacacugaggcagggaa

SEQ ID NO: 2313574 - RNA, 16 nt, Human
cacacugaggcaggga

SEQ ID NO: 2313575 - RNA, 15 nt, Human
cacacugaggcaggg

SEQ ID NO: 2313576 - RNA, 18 nt, Human
cacacugaugcuuagaug

SEQ ID NO: 2313577 - RNA, 14 nt, Human
cacacugaugcuua

SEQ ID NO: 2313578 - RNA, 13 nt, Human
cacacuggacucc

SEQ ID NO: 2313579 - RNA, 19 nt, Human
cacacuggacuccggcccu

SEQ ID NO: 2313580 - RNA, 20 nt, Human
cacacuggacuccggcccuc

SEQ ID NO: 2313581 - RNA, 18 nt, Human
cacacugcaagagccuug

SEQ ID NO: 2313582 - RNA, 17 nt, Human
cacacugcaagagccuu

SEQ ID NO: 2313583 - RNA, 16 nt, Human
cacacugcaagagccu

SEQ ID NO: 2313584 - RNA, 20 nt, Human
cacacugcaagagccuuggu

SEQ ID NO: 2313585 - RNA, 19 nt, Human
cacacugcaagagccuugg

SEQ ID NO: 2313586 - RNA, 21 nt, Human
cacacugcaagagccuuggug

SEQ ID NO: 2313587 - RNA, 19 nt, Human
cacacuagccucuccagga

SEQ ID NO: 2313588 - RNA, 18 nt, Human
cacacuagccucuccagg

SEQ ID NO: 2313589 - RNA, 17 nt, Human
cacacuagccucuccag

SEQ ID NO: 2313590 - RNA, 19 nt, Human
cacacucaaaucaagaaac

SEQ ID NO: 2313591 - RNA, 14 nt, Human
cacacugaagaagc

SEQ ID NO: 2313592 - RNA, 17 nt, Human
cacacuauuaccaugag

SEQ ID NO: 2313593 - RNA, 18 nt, Human
cacacuauuaccaugaga

SEQ ID NO: 2313594 - RNA, 20 nt, Human
cacacuauuaccaugagaag

SEQ ID NO: 2313595 - RNA, 19 nt, Human
cacacuauuaccaugagaa

SEQ ID NO: 2313596 - RNA, 17 nt, Human
cacacucacuccugaga

SEQ ID NO: 2313597 - RNA, 18 nt, Human
cacacucacuccugagac

SEQ ID NO: 2313598 - RNA, 19 nt, Human
cacacucacuccugagacc

SEQ ID NO: 2313599 - RNA, 23 nt, Human
cacacuguagcauuacagugggu

SEQ ID NO: 2313600 - RNA, 14 nt, Human
cacacugugcuuuc

SEQ ID NO: 2313601 - RNA, 15 nt, Human
cacacugugcuuucu

SEQ ID NO: 2313602 - RNA, 16 nt, Human
cacacugugcuuucua

SEQ ID NO: 2313603 - RNA, 20 nt, Human
cacacugugcuuucuauugu

SEQ ID NO: 2313604 - RNA, 22 nt, Human
cacacugugcuuucuauuguac

SEQ ID NO: 2313605 - RNA, 23 nt, Human
cacacugugcuuucuauuguaca

SEQ ID NO: 2313606 - RNA, 16 nt, Human
cacacuguguccuggu

SEQ ID NO: 2313607 - RNA, 23 nt, Human
cacacugcuaggugggccagccc

SEQ ID NO: 2313608 - RNA, 19 nt, Human
cacacugggacuugcaaaa

SEQ ID NO: 2313609 - RNA, 19 nt, Human
cacacuggggugccgccug

SEQ ID NO: 2313610 - RNA, 22 nt, Human
cacacuggggugccgccugccc

SEQ ID NO: 2313611 - RNA, 21 nt, Human
cacacugggugcccaagcuca

SEQ ID NO: 2313612 - RNA, 15 nt, Human
cacacuggugacugc

SEQ ID NO: 2313613 - RNA, 23 nt, Human
cacacugguguggauuaaccugc

SEQ ID NO: 2313614 - RNA, 18 nt, Human
cacacuucaggcucuucu

SEQ ID NO: 2313615 - RNA, 20 nt, Human
cacacuucaggcucuucucc

SEQ ID NO: 2313616 - RNA, 21 nt, Human
cacacuucaggcucuucuccu

SEQ ID NO: 2313617 - RNA, 22 nt, Human
cacacuucaggcucuucuccuu

SEQ ID NO: 2313618 - RNA, 14 nt, Human
cacacuucaggcuc

SEQ ID NO: 2313619 - RNA, 17 nt, Human
cacacuucaggcucuuc

SEQ ID NO: 2313620 - RNA, 19 nt, Human
cacacuguguccuggugcu

SEQ ID NO: 2313621 - RNA, 20 nt, Human
cacacuguguccuggugcuc

SEQ ID NO: 2313622 - RNA, 23 nt, Human
cacacuguguccuggugcucucu

SEQ ID NO: 2313623 - RNA, 24 nt, Human
cacacuguguccuggugcucucug

SEQ ID NO: 2313624 - RNA, 14 nt, Human
cacagagaagacaa

SEQ ID NO: 2313625 - RNA, 14 nt, Human
cacagagacccccg

SEQ ID NO: 2313626 - RNA, 21 nt, Human
cacagagacauuccuccgagc

SEQ ID NO: 2313627 - RNA, 16 nt, Human
cacagagacauuccuc

SEQ ID NO: 2313628 - RNA, 15 nt, Human
cacagagaagacaaa

SEQ ID NO: 2313629 - RNA, 17 nt, Human
cacagagaagacaaaau

SEQ ID NO: 2313630 - RNA, 22 nt, Human
cacagagaagacaaaauuagca

SEQ ID NO: 2313631 - RNA, 18 nt, Human
cacagacucaaaugcuca

SEQ ID NO: 2313632 - RNA, 16 nt, Human
cacagacgucccucca

SEQ ID NO: 2313633 - RNA, 23 nt, Human
cacagaccuggagccccugggug

SEQ ID NO: 2313634 - RNA, 24 nt, Human
cacagaccuggagccccugggugg

SEQ ID NO: 2313635 - RNA, 22 nt, Human
cacagagagggggccaccuccc

SEQ ID NO: 2313636 - RNA, 23 nt, Human
cacagagacccccggaacaagcc

SEQ ID NO: 2313637 - RNA, 22 nt, Human
cacagagacccccggaacaagc

SEQ ID NO: 2313638 - RNA, 14 nt, Human
cacagagagaguca

SEQ ID NO: 2313639 - RNA, 12 nt, Human
cacagagagucc

SEQ ID NO: 2313640 - RNA, 16 nt, Human
cacagagagucccacu

SEQ ID NO: 2313641 - RNA, 18 nt, Human
cacagagagucccacugc

SEQ ID NO: 2313642 - RNA, 19 nt, Human
cacagagagucccacugcc

SEQ ID NO: 2313643 - RNA, 14 nt, Human
cacagagcaggacu

SEQ ID NO: 2313644 - RNA, 17 nt, Human
cacagaguuguuacauu

SEQ ID NO: 2313645 - RNA, 16 nt, Human
cacagaguuguuacau

SEQ ID NO: 2313646 - RNA, 16 nt, Human
cacacuuccuguccag

SEQ ID NO: 2313647 - RNA, 15 nt, Human
cacacuuccugucca

SEQ ID NO: 2313648 - RNA, 14 nt, Human
cacacuuccugucc

SEQ ID NO: 2313649 - RNA, 13 nt, Human
cacacuuccuguc

SEQ ID NO: 2313650 - RNA, 20 nt, Human
cacacuuccuguccagagag

SEQ ID NO: 2313651 - RNA, 19 nt, Human
cacacuuccuguccagaga

SEQ ID NO: 2313652 - RNA, 23 nt, Human
cacacuuccuguccagagagaga

SEQ ID NO: 2313653 - RNA, 19 nt, Human
cacacuuccaccagccugc

SEQ ID NO: 2313654 - RNA, 18 nt, Human
cacacuuccaccagccug

SEQ ID NO: 2313655 - RNA, 16 nt, Human
cacacuuccaccagcc

SEQ ID NO: 2313656 - RNA, 22 nt, Human
cacacuucugugagacccccac

SEQ ID NO: 2313657 - RNA, 15 nt, Human
cacacuucugugaga

SEQ ID NO: 2313658 - RNA, 17 nt, Human
cacacuugagaggauga

SEQ ID NO: 2313659 - RNA, 18 nt, Human
cacacuugagaggaugaa

SEQ ID NO: 2313660 - RNA, 21 nt, Human
cacacuugacaucaacugcau

SEQ ID NO: 2313661 - RNA, 22 nt, Human
cacagacccugcccugugggcc

SEQ ID NO: 2313662 - RNA, 17 nt, Human
cacacuuguuccagcuc

SEQ ID NO: 2313663 - RNA, 16 nt, Human
cacacuuguuccagcu

SEQ ID NO: 2313664 - RNA, 14 nt, Human
cacagaccuggagc

SEQ ID NO: 2313665 - RNA, 15 nt, Human
cacagaccuggagcc

SEQ ID NO: 2313666 - RNA, 16 nt, Human
cacagaccuggagccc

SEQ ID NO: 2313667 - RNA, 18 nt, Human
cacagaccuggagccccu

SEQ ID NO: 2313668 - RNA, 19 nt, Human
cacagaccuggagccccug

SEQ ID NO: 2313669 - RNA, 20 nt, Human
cacagaccuggagccccugg

SEQ ID NO: 2313670 - RNA, 21 nt, Human
cacagaccuggagccccuggg

SEQ ID NO: 2313671 - RNA, 22 nt, Human
cacagaccuggagccccugggu

SEQ ID NO: 2313672 - RNA, 22 nt, Human
cacacuugguuggguccucaca

SEQ ID NO: 2313673 - RNA, 19 nt, Human
cacacuugagaggaugaau

SEQ ID NO: 2313674 - RNA, 21 nt, Human
cacacuugagaggaugaaugu

SEQ ID NO: 2313675 - RNA, 21 nt, Human
cacacuuggcccaaguggcag

SEQ ID NO: 2313676 - RNA, 15 nt, Human
cacacuuguuccagc

SEQ ID NO: 2313677 - RNA, 23 nt, Human
cacacuugugugugggcugugag

SEQ ID NO: 2313678 - RNA, 21 nt, Human
cacacuugugugugggcugug

SEQ ID NO: 2313679 - RNA, 19 nt, Human
cacacuugugugugggcug

SEQ ID NO: 2313680 - RNA, 13 nt, Human
cacacuugugugu

SEQ ID NO: 2313681 - RNA, 17 nt, Human
caauuuucucccaggaa

SEQ ID NO: 2313682 - RNA, 12 nt, Human
cacaaaaaugaa

SEQ ID NO: 2313683 - RNA, 22 nt, Human
cacaaaacaaaugccacacauc

SEQ ID NO: 2313684 - RNA, 19 nt, Human
caauuuucuggaauacaug

SEQ ID NO: 2313685 - RNA, 18 nt, Human
caauuuuccuugaagccg

SEQ ID NO: 2313686 - RNA, 13 nt, Human
caauuuucuccca

SEQ ID NO: 2313687 - RNA, 16 nt, Human
caauuuuccuugaagc

SEQ ID NO: 2313688 - RNA, 17 nt, Human
caauuuuccuugaagcc

SEQ ID NO: 2313689 - RNA, 19 nt, Human
caauuuuccuugaagccga

SEQ ID NO: 2313690 - RNA, 16 nt, Human
cacaaaaguuucucuu

SEQ ID NO: 2313691 - RNA, 18 nt, Human
cacaaaaguuucucuuuu

SEQ ID NO: 2313692 - RNA, 19 nt, Human
cacaaacuuuuauacucuu

SEQ ID NO: 2313693 - RNA, 18 nt, Human
cacaaagcacaguuugaa

SEQ ID NO: 2313694 - RNA, 22 nt, Human
cacaaagcacaguuugaacaaa

SEQ ID NO: 2313695 - RNA, 18 nt, Human
cacaaaaguuagcugagc

SEQ ID NO: 2313696 - RNA, 15 nt, Human
cacaaaacaacccua

SEQ ID NO: 2313697 - RNA, 14 nt, Human
cacaaacuguaaau

SEQ ID NO: 2313698 - RNA, 16 nt, Human
cacaaaacccagaccu

SEQ ID NO: 2313699 - RNA, 23 nt, Human
cacaaacuguaaauaaaaagaaa

SEQ ID NO: 2313700 - RNA, 15 nt, Human
cacaaacuguaaaua

SEQ ID NO: 2313701 - RNA, 11 nt, Human
cacaaagccca

SEQ ID NO: 2313702 - RNA, 14 nt, Human
cacaaagcccaagg

SEQ ID NO: 2313703 - RNA, 12 nt, Human
cacaaagcccaa

SEQ ID NO: 2313704 - RNA, 17 nt, Human
cacaaauuauuaaugaa

SEQ ID NO: 2313705 - RNA, 21 nt, Human
cacaaauucugucucuggauu

SEQ ID NO: 2313706 - RNA, 16 nt, Human
cacaacacacacacuc

SEQ ID NO: 2313707 - RNA, 20 nt, Human
cacaaauuauuaaugaaaau

SEQ ID NO: 2313708 - RNA, 11 nt, Human
cacaacagauu

SEQ ID NO: 2313709 - RNA, 17 nt, Human
cacaaccuucuguggcu

SEQ ID NO: 2313710 - RNA, 18 nt, Human
cacaaccuucuguggcuc

SEQ ID NO: 2313711 - RNA, 19 nt, Human
cacaaccuucuguggcuca

SEQ ID NO: 2313712 - RNA, 23 nt, Human
cacaaccuucuguggcucacaga

SEQ ID NO: 2313713 - RNA, 23 nt, Human
cacaaccaucugucccugccuca

SEQ ID NO: 2313714 - RNA, 22 nt, Human
cacaacacacagauuugagcuc

SEQ ID NO: 2313715 - RNA, 22 nt, Human
caaugccaaaaaaagacagggc

SEQ ID NO: 2313716 - RNA, 21 nt, Human
caaugcauuuuggaaagcucc

SEQ ID NO: 2313717 - RNA, 16 nt, Human
caaugcaugcagccac

SEQ ID NO: 2313718 - RNA, 20 nt, Human
caaugcaugcagccacugug

SEQ ID NO: 2313719 - RNA, 12 nt, Human
caaugcauuuug

SEQ ID NO: 2313720 - RNA, 13 nt, Human
caaugcauuuugg

SEQ ID NO: 2313721 - RNA, 21 nt, Human
caaugucaggaacagaaggau

SEQ ID NO: 2313722 - RNA, 16 nt, Human
caaugucugagugaac

SEQ ID NO: 2313723 - RNA, 15 nt, Human
caaugucugagugaa

SEQ ID NO: 2313724 - RNA, 20 nt, Human
caaugucugagugaaccugu

SEQ ID NO: 2313725 - RNA, 12 nt, Human
caaugucugugc

SEQ ID NO: 2313726 - RNA, 13 nt, Human
caaugucugugcu

SEQ ID NO: 2313727 - RNA, 14 nt, Human
caauuaaacggauu

SEQ ID NO: 2313728 - RNA, 15 nt, Human
caauuaaacggauua

SEQ ID NO: 2313729 - RNA, 16 nt, Human
caauuaaacggauuau

SEQ ID NO: 2313730 - RNA, 17 nt, Human
caauuaaacggauuauu

SEQ ID NO: 2313731 - RNA, 18 nt, Human
caauuaaacggauuauuu

SEQ ID NO: 2313732 - RNA, 19 nt, Human
caauuaaacggauuauuuu

SEQ ID NO: 2313733 - RNA, 23 nt, Human
caaugucuugaugcaugcacugu

SEQ ID NO: 2313734 - RNA, 21 nt, Human
caaugucuugaugcaugcacu

SEQ ID NO: 2313735 - RNA, 11 nt, Human
caaugucuuga

SEQ ID NO: 2313736 - RNA, 14 nt, Human
caaugucugugcua

SEQ ID NO: 2313737 - RNA, 20 nt, Human
caaugucugugcuagggaaa

SEQ ID NO: 2313738 - RNA, 14 nt, Human
caauuaaauguagg

SEQ ID NO: 2313739 - RNA, 13 nt, Human
caauuaaauguag

SEQ ID NO: 2313740 - RNA, 13 nt, Human
caauuaaggauuu

SEQ ID NO: 2313741 - RNA, 20 nt, Human
caauuaaggauuuuaugcuu

SEQ ID NO: 2313742 - RNA, 15 nt, Human
caauuaaggauuuua

SEQ ID NO: 2313743 - RNA, 12 nt, Human
caauuaaaugua

SEQ ID NO: 2313744 - RNA, 20 nt, Human
caauuaaacggauuauuuuu

SEQ ID NO: 2313745 - RNA, 23 nt, Human
caauuaaacggauuauuuuuuca

SEQ ID NO: 2313746 - RNA, 22 nt, Human
caauuaaauguagguaugaaua

SEQ ID NO: 2313747 - RNA, 22 nt, Human
caauuaaggauuuuaugcuuua

SEQ ID NO: 2313748 - RNA, 21 nt, Human
caauuaaggauuuuaugcuuu

SEQ ID NO: 2313749 - RNA, 17 nt, Human
caauucaacccuuugcc

SEQ ID NO: 2313750 - RNA, 14 nt, Human
caauucaacacucc

SEQ ID NO: 2313751 - RNA, 13 nt, Human
caauucagacagg

SEQ ID NO: 2313752 - RNA, 20 nt, Human
caauucacaucuaaccucau

SEQ ID NO: 2313753 - RNA, 15 nt, Human
caauuccaaaggaau

SEQ ID NO: 2313754 - RNA, 21 nt, Human
caauucaugaacuucgcauca

SEQ ID NO: 2313755 - RNA, 14 nt, Human
caauucaugaacuu

SEQ ID NO: 2313756 - RNA, 15 nt, Human
caauucaugaacuuc

SEQ ID NO: 2313757 - RNA, 14 nt, Human
caauucaacccuuu

SEQ ID NO: 2313758 - RNA, 13 nt, Human
caauucaugaacu

SEQ ID NO: 2313759 - RNA, 21 nt, Human
caauucagugcuguacuugau

SEQ ID NO: 2313760 - RNA, 23 nt, Human
caauucagacaggcaaauaaaag

SEQ ID NO: 2313761 - RNA, 15 nt, Human
caauucagacaggca

SEQ ID NO: 2313762 - RNA, 14 nt, Human
caauucagacaggc

SEQ ID NO: 2313763 - RNA, 21 nt, Human
caauuuuaucccucaccugua

SEQ ID NO: 2313764 - RNA, 17 nt, Human
caauuuuaaugcuauuu

SEQ ID NO: 2313765 - RNA, 13 nt, Human
caauuuuccuuga

SEQ ID NO: 2313766 - RNA, 14 nt, Human
caauuuuccuugaa

SEQ ID NO: 2313767 - RNA, 15 nt, Human
caauuuuccuugaag

SEQ ID NO: 2313768 - RNA, 11 nt, Human
caauuuuccuu

SEQ ID NO: 2313769 - RNA, 10 nt, Human
caauuuuccu

SEQ ID NO: 2313770 - RNA, 24 nt, Human
caaugaucuagguuuaacucagau

SEQ ID NO: 2313771 - RNA, 21 nt, Human
caaugaugaaugagaaucuac

SEQ ID NO: 2313772 - RNA, 16 nt, Human
caaugauggcaauuuu

SEQ ID NO: 2313773 - RNA, 13 nt, Human
caaugauggcaau

SEQ ID NO: 2313774 - RNA, 17 nt, Human
caaugcaaaccaucauu

SEQ ID NO: 2313775 - RNA, 18 nt, Human
caaugcaaaccaucauug

SEQ ID NO: 2313776 - RNA, 23 nt, Human
caaugcacuuuguucuggcucuu

SEQ ID NO: 2313777 - RNA, 19 nt, Human
caaugcaaaccaucauuga

SEQ ID NO: 2313778 - RNA, 20 nt, Human
caaugcaaaccaucauugaa

SEQ ID NO: 2313779 - RNA, 14 nt, Human
caaugacacagucu

SEQ ID NO: 2313780 - RNA, 19 nt, Human
caaugacacagucuuggcu

SEQ ID NO: 2313781 - RNA, 21 nt, Human
caaugacacagucuuggcuca

SEQ ID NO: 2313782 - RNA, 13 nt, Human
caaugaaccccca

SEQ ID NO: 2313783 - RNA, 20 nt, Human
caaugaacccccaugaugua

SEQ ID NO: 2313784 - RNA, 22 nt, Human
caaugaaugaaugaauggcuaa

SEQ ID NO: 2313785 - RNA, 19 nt, Human
caaugacaucuucaaagcu

SEQ ID NO: 2313786 - RNA, 15 nt, Human
caaugacaucuucaa

SEQ ID NO: 2313787 - RNA, 16 nt, Human
caaugacaucucaggg

SEQ ID NO: 2313788 - RNA, 17 nt, Human
caaugacaucucagggg

SEQ ID NO: 2313789 - RNA, 19 nt, Human
caaugacaucucaggggcc

SEQ ID NO: 2313790 - RNA, 22 nt, Human
caaugacaucucaggggccaga

SEQ ID NO: 2313791 - RNA, 19 nt, Human
caaugaggucugaaaugga

SEQ ID NO: 2313792 - RNA, 18 nt, Human
caaugauaguaagaaaag

SEQ ID NO: 2313793 - RNA, 14 nt, Human
caaugaugaaugag

SEQ ID NO: 2313794 - RNA, 22 nt, Human
caaugaucuagguuuaacucag

SEQ ID NO: 2313795 - RNA, 23 nt, Human
caaugaucuagguuuaacucaga

SEQ ID NO: 2313796 - RNA, 17 nt, Human
caaugaucuagguuuaa

SEQ ID NO: 2313797 - RNA, 18 nt, Human
caaugaucuagguuuaac

SEQ ID NO: 2313798 - RNA, 20 nt, Human
caaugaucuagguuuaacuc

SEQ ID NO: 2313799 - RNA, 21 nt, Human
caaugaucuagguuuaacuca

SEQ ID NO: 2313800 - RNA, 20 nt, Human
caaugauaguaagaaaagug

SEQ ID NO: 2313801 - RNA, 14 nt, Human
caaugaucuagguu

SEQ ID NO: 2313802 - RNA, 20 nt, Human
caaugauauauggauaaugc

SEQ ID NO: 2313803 - RNA, 16 nt, Human
caaugaucuagguuua

SEQ ID NO: 2313804 - RNA, 18 nt, Human
caauccucacuggguggg

SEQ ID NO: 2313805 - RNA, 11 nt, Human
caauccugccc

SEQ ID NO: 2313806 - RNA, 12 nt, Human
caauccugcccc

SEQ ID NO: 2313807 - RNA, 13 nt, Human
caauccucuaagc

SEQ ID NO: 2313808 - RNA, 17 nt, Human
caauccucacugggugg

SEQ ID NO: 2313809 - RNA, 16 nt, Human
caauccucacugggug

SEQ ID NO: 2313810 - RNA, 14 nt, Human
caauccucacuggg

SEQ ID NO: 2313811 - RNA, 21 nt, Human
caaugaaaugcucuccuuucc

SEQ ID NO: 2313812 - RNA, 19 nt, Human
caaugaaaugcucuccuuu

SEQ ID NO: 2313813 - RNA, 19 nt, Human
caaugaaaugaauuaaagu

SEQ ID NO: 2313814 - RNA, 13 nt, Human
caauccugccccc

SEQ ID NO: 2313815 - RNA, 11 nt, Human
caauccuggac

SEQ ID NO: 2313816 - RNA, 23 nt, Human
caaugaaaugaauuaaaguggac

SEQ ID NO: 2313817 - RNA, 21 nt, Human
caaugaaaugaauuaaagugg

SEQ ID NO: 2313818 - RNA, 22 nt, Human
caauauguauuaauauucauug

SEQ ID NO: 2313819 - RNA, 16 nt, Human
caauauguauuaauau

SEQ ID NO: 2313820 - RNA, 13 nt, Human
caauauguauugu

SEQ ID NO: 2313821 - RNA, 14 nt, Human
caauauguauugua

SEQ ID NO: 2313822 - RNA, 15 nt, Human
caauauguauuguaa

SEQ ID NO: 2313823 - RNA, 16 nt, Human
caauauguauuguaaa

SEQ ID NO: 2313824 - RNA, 21 nt, Human
caauauguauuguaaacaugu

SEQ ID NO: 2313825 - RNA, 22 nt, Human
caauauguauuguaaacaugug

SEQ ID NO: 2313826 - RNA, 23 nt, Human
caauauguauuguaaacaugugu

SEQ ID NO: 2313827 - RNA, 12 nt, Human
caauauuaaaua

SEQ ID NO: 2313828 - RNA, 14 nt, Human
caauauuaaauaca

SEQ ID NO: 2313829 - RNA, 15 nt, Human
caauauuaaauacag

SEQ ID NO: 2313830 - RNA, 20 nt, Human
caauauuaaauacagacacu

SEQ ID NO: 2313831 - RNA, 20 nt, Human
caauccuauguuuuuguuca

SEQ ID NO: 2313832 - RNA, 14 nt, Human
caauccuauguuuu

SEQ ID NO: 2313833 - RNA, 15 nt, Human
caauccuagugcuuu

SEQ ID NO: 2313834 - RNA, 21 nt, Human
caauccuaauuucuccucccu

SEQ ID NO: 2313835 - RNA, 17 nt, Human
caauccuagguaggguu

SEQ ID NO: 2313836 - RNA, 21 nt, Human
caauauuaaauacagacacua

SEQ ID NO: 2313837 - RNA, 22 nt, Human
caauauuaaauacagacacuaa

SEQ ID NO: 2313838 - RNA, 17 nt, Human
caagugugugcaugugu

SEQ ID NO: 2313839 - RNA, 16 nt, Human
caagugugugcaugug

SEQ ID NO: 2313840 - RNA, 22 nt, Human
caagugugugcacaugugugcg

SEQ ID NO: 2313841 - RNA, 21 nt, Human
caagugugugcacaugugugc

SEQ ID NO: 2313842 - RNA, 20 nt, Human
caagugugugcacaugugug

SEQ ID NO: 2313843 - RNA, 19 nt, Human
caagugugugcacaugugu

SEQ ID NO: 2313844 - RNA, 14 nt, Human
caagugugugcaca

SEQ ID NO: 2313845 - RNA, 11 nt, Human
caagugugugc

SEQ ID NO: 2313846 - RNA, 23 nt, Human
caaguguguaugugcgugugugc

SEQ ID NO: 2313847 - RNA, 23 nt, Human
caagugugguagggacuuaaaaa

SEQ ID NO: 2313848 - RNA, 22 nt, Human
caagugugguagggacuuaaaa

SEQ ID NO: 2313849 - RNA, 15 nt, Human
caaguguaaaauauu

SEQ ID NO: 2313850 - RNA, 16 nt, Human
caaguguaaaauauuu

SEQ ID NO: 2313851 - RNA, 17 nt, Human
caagugugugugcgugu

SEQ ID NO: 2313852 - RNA, 20 nt, Human
caagugugugcaugugugcg

SEQ ID NO: 2313853 - RNA, 20 nt, Human
caauaggaaaaacugauuuu

SEQ ID NO: 2313854 - RNA, 18 nt, Human
caaguuaaagugaauaac

SEQ ID NO: 2313855 - RNA, 11 nt, Human
caagugugugu

SEQ ID NO: 2313856 - RNA, 19 nt, Human
caaguguuguuuuuuaagu

SEQ ID NO: 2313857 - RNA, 23 nt, Human
caauaggcaaaggggggaaggga

SEQ ID NO: 2313858 - RNA, 22 nt, Human
caauaggcagacuggguuucua

SEQ ID NO: 2313859 - RNA, 21 nt, Human
caauaggaaaaacugauuuuu

SEQ ID NO: 2313860 - RNA, 15 nt, Human
caauaggcuguuccc

SEQ ID NO: 2313861 - RNA, 15 nt, Human
caauauguaaauagu

SEQ ID NO: 2313862 - RNA, 12 nt, Human
caauaugcuuac

SEQ ID NO: 2313863 - RNA, 21 nt, Human
caauauguaaauagugcagaa

SEQ ID NO: 2313864 - RNA, 18 nt, Human
caauaguaauucucaggc

SEQ ID NO: 2313865 - RNA, 15 nt, Human
caauaugcaguucug

SEQ ID NO: 2313866 - RNA, 11 nt, Human
caauaugcuua

SEQ ID NO: 2313867 - RNA, 19 nt, Human
caaugugaaaagaaaaaug

SEQ ID NO: 2313868 - RNA, 13 nt, Human
uugggauuaauau

SEQ ID NO: 2313869 - RNA, 16 nt, Human
uugggauuccugaccc

SEQ ID NO: 2313870 - RNA, 18 nt, Human
uugggauuccugacccag

SEQ ID NO: 2313871 - RNA, 21 nt, Human
uugggauuccugacccaggcc

SEQ ID NO: 2313872 - RNA, 14 nt, Human
uugggauugggggc

SEQ ID NO: 2313873 - RNA, 16 nt, Human
uugggauugggggcug

SEQ ID NO: 2313874 - RNA, 21 nt, Human
uugggauugggggcuggugcc

SEQ ID NO: 2313875 - RNA, 18 nt, Human
uugggaugaugccucaug

SEQ ID NO: 2313876 - RNA, 16 nt, Human
uugggauacugcaggg

SEQ ID NO: 2313877 - RNA, 15 nt, Human
uugggaggcugaggc

SEQ ID NO: 2313878 - RNA, 19 nt, Human
uugggagcuugggaaugga

SEQ ID NO: 2313879 - RNA, 15 nt, Human
uugggagugagaugc

SEQ ID NO: 2313880 - RNA, 19 nt, Human
uugggagugagaugccugc

SEQ ID NO: 2313881 - RNA, 17 nt, Human
uugggagcuugggaaug

SEQ ID NO: 2313882 - RNA, 22 nt, Human
uugggagcacuggagugcaggg

SEQ ID NO: 2313883 - RNA, 11 nt, Human
uugggagcacu

SEQ ID NO: 2313884 - RNA, 15 nt, Human
uugggagcacuggag

SEQ ID NO: 2313885 - RNA, 16 nt, Human
uugggagcacuggagu

SEQ ID NO: 2313886 - RNA, 22 nt, Human
uugggauugggggcuggugcca

SEQ ID NO: 2313887 - RNA, 23 nt, Human
uugguaaauuuccccaacagugu

SEQ ID NO: 2313888 - RNA, 19 nt, Human
uugguaacacaaauuuuca

SEQ ID NO: 2313889 - RNA, 21 nt, Human
uugguaacauccuuucuauug

SEQ ID NO: 2313890 - RNA, 20 nt, Human
uugguaaggggaauugagga

SEQ ID NO: 2313891 - RNA, 16 nt, Human
uugguaacauccuuuc

SEQ ID NO: 2313892 - RNA, 19 nt, Human
uugguaacauccuuucuau

SEQ ID NO: 2313893 - RNA, 20 nt, Human
uuggucugacccacugcuuu

SEQ ID NO: 2313894 - RNA, 17 nt, Human
uuggucugggacuuccu

SEQ ID NO: 2313895 - RNA, 20 nt, Human
uugguacauggccaguguga

SEQ ID NO: 2313896 - RNA, 15 nt, Human
uugguaauuauuuug

SEQ ID NO: 2313897 - RNA, 14 nt, Human
uugguccuuuacac

SEQ ID NO: 2313898 - RNA, 13 nt, Human
uuguaaaauggug

SEQ ID NO: 2313899 - RNA, 12 nt, Human
uuguaaaauggu

SEQ ID NO: 2313900 - RNA, 15 nt, Human
uuggucugugagaug

SEQ ID NO: 2313901 - RNA, 13 nt, Human
uuguaaaauauag

SEQ ID NO: 2313902 - RNA, 14 nt, Human
uuguaaaauauagc

SEQ ID NO: 2313903 - RNA, 18 nt, Human
uuguaaaauauagcugua

SEQ ID NO: 2313904 - RNA, 20 nt, Human
uuguaaaauauagcuguaca

SEQ ID NO: 2313905 - RNA, 21 nt, Human
uugggaaggggacccccgccc

SEQ ID NO: 2313906 - RNA, 21 nt, Human
uuggcuuuauccucuuuagag

SEQ ID NO: 2313907 - RNA, 22 nt, Human
uuggcuuuauccucuuuagagu

SEQ ID NO: 2313908 - RNA, 14 nt, Human
uugggaauaaauau

SEQ ID NO: 2313909 - RNA, 15 nt, Human
uugggaauaaauaug

SEQ ID NO: 2313910 - RNA, 17 nt, Human
uugggaauaaauaugcc

SEQ ID NO: 2313911 - RNA, 15 nt, Human
uugggaauauuugaa

SEQ ID NO: 2313912 - RNA, 16 nt, Human
uugggaauauuugaau

SEQ ID NO: 2313913 - RNA, 11 nt, Human
uugggaauguu

SEQ ID NO: 2313914 - RNA, 14 nt, Human
uugggaauguuugu

SEQ ID NO: 2313915 - RNA, 17 nt, Human
uugggaauauuugaauc

SEQ ID NO: 2313916 - RNA, 19 nt, Human
uugggaauauuugaaucuu

SEQ ID NO: 2313917 - RNA, 18 nt, Human
uugggaauggauccugga

SEQ ID NO: 2313918 - RNA, 16 nt, Human
uugggaaugaggcuug

SEQ ID NO: 2313919 - RNA, 19 nt, Human
uugggaaugaggcuugcug

SEQ ID NO: 2313920 - RNA, 20 nt, Human
uugggaccccuggugguuca

SEQ ID NO: 2313921 - RNA, 16 nt, Human
uugggaccccuggugg

SEQ ID NO: 2313922 - RNA, 15 nt, Human
uugggaccccuggug

SEQ ID NO: 2313923 - RNA, 14 nt, Human
uugggaccccuggu

SEQ ID NO: 2313924 - RNA, 16 nt, Human
uugggagauauauuuu

SEQ ID NO: 2313925 - RNA, 23 nt, Human
uugggacuggguuuggaccccag

SEQ ID NO: 2313926 - RNA, 17 nt, Human
uugggagacaugugaca

SEQ ID NO: 2313927 - RNA, 22 nt, Human
uugggacugcuaaauaaaauuu

SEQ ID NO: 2313928 - RNA, 16 nt, Human
uugggaccgccagaug

SEQ ID NO: 2313929 - RNA, 14 nt, Human
uugggagacaugug

SEQ ID NO: 2313930 - RNA, 22 nt, Human
uugggaccgccagauggggccu

SEQ ID NO: 2313931 - RNA, 18 nt, Human
uugggacuggggcugaag

SEQ ID NO: 2313932 - RNA, 23 nt, Human
uuggcuucacggaagagccuugc

SEQ ID NO: 2313933 - RNA, 23 nt, Human
uuggcagugagugagccuggcuc

SEQ ID NO: 2313934 - RNA, 17 nt, Human
uuggcuuuaaacacccu

SEQ ID NO: 2313935 - RNA, 22 nt, Human
uuggcuuuaaacacccuucaca

SEQ ID NO: 2313936 - RNA, 14 nt, Human
uuggcuuuauccuc

SEQ ID NO: 2313937 - RNA, 20 nt, Human
uuggcuuuauccucuuuaga

SEQ ID NO: 2313938 - RNA, 19 nt, Human
uuggcuucuucuuuaggau

SEQ ID NO: 2313939 - RNA, 21 nt, Human
uuggcuuccaugaugguuauu

SEQ ID NO: 2313940 - RNA, 17 nt, Human
uuggcuuccuuucuugg

SEQ ID NO: 2313941 - RNA, 22 nt, Human
uuggcuuccuuucuugguucau

SEQ ID NO: 2313942 - RNA, 14 nt, Human
uuggcagucugaau

SEQ ID NO: 2313943 - RNA, 13 nt, Human
uuggcaggcuggc

SEQ ID NO: 2313944 - RNA, 14 nt, Human
uuggcaggcuggcc

SEQ ID NO: 2313945 - RNA, 20 nt, Human
uuggcagugagugagccugg

SEQ ID NO: 2313946 - RNA, 17 nt, Human
uuguagcauccucuuua

SEQ ID NO: 2313947 - RNA, 20 nt, Human
uuguaucucuuuugaaucca

SEQ ID NO: 2313948 - RNA, 21 nt, Human
uuguaucugcaggcagacacg

SEQ ID NO: 2313949 - RNA, 22 nt, Human
uuguagaaguaggaagugaaaa

SEQ ID NO: 2313950 - RNA, 22 nt, Human
uuguagaaggguuauauuuuac

SEQ ID NO: 2313951 - RNA, 16 nt, Human
uuguagaauguauugu

SEQ ID NO: 2313952 - RNA, 17 nt, Human
uuguagaauguauugua

SEQ ID NO: 2313953 - RNA, 21 nt, Human
uuguaccccccaaccccugag

SEQ ID NO: 2313954 - RNA, 18 nt, Human
uuguacuuuagggaagua

SEQ ID NO: 2313955 - RNA, 20 nt, Human
uuguaaaauggugugaccac

SEQ ID NO: 2313956 - RNA, 14 nt, Human
uuguaaacaugugu

SEQ ID NO: 2313957 - RNA, 15 nt, Human
uuguaaacauguguu

SEQ ID NO: 2313958 - RNA, 16 nt, Human
uuguaaacucaaaaua

SEQ ID NO: 2313959 - RNA, 22 nt, Human
uuguaaacucaaaauauuugua

SEQ ID NO: 2313960 - RNA, 11 nt, Human
uuguaccucuc

SEQ ID NO: 2313961 - RNA, 13 nt, Human
uuguaccugguga

SEQ ID NO: 2313962 - RNA, 15 nt, Human
uuguaccccccaacc

SEQ ID NO: 2313963 - RNA, 23 nt, Human
uuguacauuuaugauuuaauaaa

SEQ ID NO: 2313964 - RNA, 20 nt, Human
uuguaccccccaaccccuga

SEQ ID NO: 2313965 - RNA, 16 nt, Human
uuguaccgcaauguga

SEQ ID NO: 2313966 - RNA, 12 nt, Human
uugucucugggc

SEQ ID NO: 2313967 - RNA, 17 nt, Human
uugucugaagucacugc

SEQ ID NO: 2313968 - RNA, 18 nt, Human
uugucugaagucacugca

SEQ ID NO: 2313969 - RNA, 22 nt, Human
uugucuuaaaaaguggaaaaau

SEQ ID NO: 2313970 - RNA, 20 nt, Human
uugucuaugggacucaaugc

SEQ ID NO: 2313971 - RNA, 18 nt, Human
uugucuauuaccuguuag

SEQ ID NO: 2313972 - RNA, 19 nt, Human
uugucucuaugccagcuca

SEQ ID NO: 2313973 - RNA, 19 nt, Human
uugucucccuggcccucaa

SEQ ID NO: 2313974 - RNA, 15 nt, Human
uugucuauucuccag

SEQ ID NO: 2313975 - RNA, 16 nt, Human
uugucuauuuuugucu

SEQ ID NO: 2313976 - RNA, 17 nt, Human
uugucuauuuuugucuu

SEQ ID NO: 2313977 - RNA, 18 nt, Human
uugucuauuuuugucuua

SEQ ID NO: 2313978 - RNA, 14 nt, Human
uugucuaugggacu

SEQ ID NO: 2313979 - RNA, 22 nt, Human
uugucaaaguggugagaggcau

SEQ ID NO: 2313980 - RNA, 22 nt, Human
uugucaaacuguagaaaugaug

SEQ ID NO: 2313981 - RNA, 22 nt, Human
uuguauuuuuuugcaagugaag

SEQ ID NO: 2313982 - RNA, 13 nt, Human
uugucaaagagag

SEQ ID NO: 2313983 - RNA, 20 nt, Human
uuguauuuuuuugcaaguga

SEQ ID NO: 2313984 - RNA, 21 nt, Human
uuguauuuuuuugcaagugaa

SEQ ID NO: 2313985 - RNA, 15 nt, Human
uuguauuuuuaaugg

SEQ ID NO: 2313986 - RNA, 21 nt, Human
uuguauuuuccaagugugcau

SEQ ID NO: 2313987 - RNA, 14 nt, Human
uuguauuuuuaaug

SEQ ID NO: 2313988 - RNA, 12 nt, Human
uuguaugccuuu

SEQ ID NO: 2313989 - RNA, 12 nt, Human
uuguauuuucca

SEQ ID NO: 2313990 - RNA, 23 nt, Human
uuguauuuuccaagugugcauau

SEQ ID NO: 2313991 - RNA, 22 nt, Human
uuguaugaaagauggcugugcc

SEQ ID NO: 2313992 - RNA, 20 nt, Human
uuguaugauccuaaugaaug

SEQ ID NO: 2313993 - RNA, 20 nt, Human
uuguaugccuuuaaaucugu

SEQ ID NO: 2313994 - RNA, 20 nt, Human
uuguaugauguguugugaua

SEQ ID NO: 2313995 - RNA, 21 nt, Human
uuguaugauguguugugauag

SEQ ID NO: 2313996 - RNA, 13 nt, Human
uuguaugaugugu

SEQ ID NO: 2313997 - RNA, 14 nt, Human
uuguaugauguguu

SEQ ID NO: 2313998 - RNA, 16 nt, Human
uuguaugauguguugu

SEQ ID NO: 2313999 - RNA, 18 nt, Human
uuguaugauguguuguga

SEQ ID NO: 2314000 - RNA, 22 nt, Human
uuggcagcaggugcugcuaccc

SEQ ID NO: 2314001 - RNA, 14 nt, Human
uuggcagcagauuu

SEQ ID NO: 2314002 - RNA, 12 nt, Human
uuggcagcaggu

SEQ ID NO: 2314003 - RNA, 18 nt, Human
uuggcagcaggugcugcu

SEQ ID NO: 2314004 - RNA, 21 nt, Human
uuggcagcaggugcugcuacc

SEQ ID NO: 2314005 - RNA, 16 nt, Human
uuggcagcucuacucu

SEQ ID NO: 2314006 - RNA, 12 nt, Human
uuggcaggcugg

SEQ ID NO: 2314007 - RNA, 22 nt, Human
uuggcacugagauauuuauugu

SEQ ID NO: 2314008 - RNA, 14 nt, Human
uuggcacucacaga

SEQ ID NO: 2314009 - RNA, 22 nt, Human
uuggcacucacagaccuggagc

SEQ ID NO: 2314010 - RNA, 21 nt, Human
uuggcaccuaauccaggcaga

SEQ ID NO: 2314011 - RNA, 23 nt, Human
uuggcacucacagaccuggagcc

SEQ ID NO: 2314012 - RNA, 12 nt, Human
uuggcagcagau

SEQ ID NO: 2314013 - RNA, 15 nt, Human
uuggcagcaccuguc

SEQ ID NO: 2314014 - RNA, 23 nt, Human
uuggcacagaaacacaauauuuu

SEQ ID NO: 2314015 - RNA, 13 nt, Human
uuggcaccagaca

SEQ ID NO: 2314016 - RNA, 20 nt, Human
uuggcaccagacacccagga

SEQ ID NO: 2314017 - RNA, 17 nt, Human
uuggcaccagacaccca

SEQ ID NO: 2314018 - RNA, 19 nt, Human
uuggcaccuaauccaggca

SEQ ID NO: 2314019 - RNA, 23 nt, Human
uuggcaccagacacccaggacuu

SEQ ID NO: 2314020 - RNA, 21 nt, Human
uuggcaccagacacccaggac

SEQ ID NO: 2314021 - RNA, 16 nt, Human
uuggcacagaaacaca

SEQ ID NO: 2314022 - RNA, 15 nt, Human
uuggcacagaaacac

SEQ ID NO: 2314023 - RNA, 17 nt, Human
uuggcaaugccaucauc

SEQ ID NO: 2314024 - RNA, 16 nt, Human
uuggcaauaguuugca

SEQ ID NO: 2314025 - RNA, 20 nt, Human
uuggcaauaguuugcauaga

SEQ ID NO: 2314026 - RNA, 15 nt, Human
uuggauuguccccga

SEQ ID NO: 2314027 - RNA, 14 nt, Human
uuggauuuguuuaa

SEQ ID NO: 2314028 - RNA, 18 nt, Human
uuggauuuguuuaaaagg

SEQ ID NO: 2314029 - RNA, 22 nt, Human
uuggauuugacauugcguuuga

SEQ ID NO: 2314030 - RNA, 14 nt, Human
uuggauuugacauu

SEQ ID NO: 2314031 - RNA, 15 nt, Human
uuggacccugaggcc

SEQ ID NO: 2314032 - RNA, 18 nt, Human
uuggacccugaggcccag

SEQ ID NO: 2314033 - RNA, 19 nt, Human
uuggacccugaggcccaga

SEQ ID NO: 2314034 - RNA, 21 nt, Human
uuggacccugaggcccagagg

SEQ ID NO: 2314035 - RNA, 19 nt, Human
uuggaagcuccgcuuucua

SEQ ID NO: 2314036 - RNA, 17 nt, Human
uuggaagcucugaaguc

SEQ ID NO: 2314037 - RNA, 22 nt, Human
uuggaagcuagcuccccuccuc

SEQ ID NO: 2314038 - RNA, 23 nt, Human
uuggaagcuagcuccccuccucu

SEQ ID NO: 2314039 - RNA, 21 nt, Human
uuggaagcuagcuccccuccu

SEQ ID NO: 2314040 - RNA, 13 nt, Human
uuggaagagaaag

SEQ ID NO: 2314041 - RNA, 15 nt, Human
uugcuguuuccuuuu

SEQ ID NO: 2314042 - RNA, 20 nt, Human
uuggaagaccccacccaagc

SEQ ID NO: 2314043 - RNA, 19 nt, Human
uugcuguuguuucuaaaca

SEQ ID NO: 2314044 - RNA, 13 nt, Human
uugcuguuuccuu

SEQ ID NO: 2314045 - RNA, 19 nt, Human
uugcuguugucccucugcu

SEQ ID NO: 2314046 - RNA, 20 nt, Human
uugcugugucauaccaggcc

SEQ ID NO: 2314047 - RNA, 15 nt, Human
uugcugugggaacga

SEQ ID NO: 2314048 - RNA, 23 nt, Human
uugcugugggaacgagaggggaa

SEQ ID NO: 2314049 - RNA, 21 nt, Human
uugcuguugaugaggccucuu

SEQ ID NO: 2314050 - RNA, 20 nt, Human
uugcuguugauuucuuucca

SEQ ID NO: 2314051 - RNA, 14 nt, Human
uugcugugccuccc

SEQ ID NO: 2314052 - RNA, 20 nt, Human
uugcugugaggcuguccugu

SEQ ID NO: 2314053 - RNA, 16 nt, Human
uugcugugccucccaa

SEQ ID NO: 2314054 - RNA, 19 nt, Human
uugcugugccucccaaaau

SEQ ID NO: 2314055 - RNA, 12 nt, Human
uugcugugggaa

SEQ ID NO: 2314056 - RNA, 13 nt, Human
uugcugugggaac

SEQ ID NO: 2314057 - RNA, 23 nt, Human
uuggacaaucaugaaauaugcau

SEQ ID NO: 2314058 - RNA, 15 nt, Human
uuggacacuguacaa

SEQ ID NO: 2314059 - RNA, 16 nt, Human
uuggacaacugcaugg

SEQ ID NO: 2314060 - RNA, 14 nt, Human
uuggacauccuccu

SEQ ID NO: 2314061 - RNA, 19 nt, Human
uuggacagaagcagcucuu

SEQ ID NO: 2314062 - RNA, 16 nt, Human
uuggacagaagcagcu

SEQ ID NO: 2314063 - RNA, 18 nt, Human
uuggaauuaaccuggugc

SEQ ID NO: 2314064 - RNA, 18 nt, Human
uuggaaugggcagcucau

SEQ ID NO: 2314065 - RNA, 16 nt, Human
uuggaaugcuucuucu

SEQ ID NO: 2314066 - RNA, 17 nt, Human
uuggaaugggcagcuca

SEQ ID NO: 2314067 - RNA, 20 nt, Human
uuggaauuaaccuggugcug

SEQ ID NO: 2314068 - RNA, 19 nt, Human
uuggaauuaaccuggugcu

SEQ ID NO: 2314069 - RNA, 19 nt, Human
uuggaauuuguaaccucag

SEQ ID NO: 2314070 - RNA, 21 nt, Human
uuggaauuuguaaccucagcu

SEQ ID NO: 2314071 - RNA, 22 nt, Human
uuggaauuuguaaccucagcuc

SEQ ID NO: 2314072 - RNA, 17 nt, Human
uuggaauuaaccuggug

SEQ ID NO: 2314073 - RNA, 13 nt, Human
uuggaauacuuuu

SEQ ID NO: 2314074 - RNA, 23 nt, Human
uuggaauauuguccauuguccaa

SEQ ID NO: 2314075 - RNA, 11 nt, Human
uugcuguccua

SEQ ID NO: 2314076 - RNA, 23 nt, Human
uugcuggggacggggggccccag

SEQ ID NO: 2314077 - RNA, 20 nt, Human
uugcugugaauuagcucacu

SEQ ID NO: 2314078 - RNA, 20 nt, Human
uugcugugagcaagaaguca

SEQ ID NO: 2314079 - RNA, 14 nt, Human
uugcugugaggcug

SEQ ID NO: 2314080 - RNA, 15 nt, Human
uugcugugaggcugu

SEQ ID NO: 2314081 - RNA, 17 nt, Human
uugcugugaggcugucc

SEQ ID NO: 2314082 - RNA, 18 nt, Human
uugcugugaggcuguccu

SEQ ID NO: 2314083 - RNA, 19 nt, Human
uugcugugaggcuguccug

SEQ ID NO: 2314084 - RNA, 15 nt, Human
uugcuguccuaggcc

SEQ ID NO: 2314085 - RNA, 21 nt, Human
uugcugucauaagaaugaaua

SEQ ID NO: 2314086 - RNA, 20 nt, Human
uugcugggcaguuuuucugu

SEQ ID NO: 2314087 - RNA, 12 nt, Human
uugcugggcuuu

SEQ ID NO: 2314088 - RNA, 18 nt, Human
uugcugucccuuuuccuu

SEQ ID NO: 2314089 - RNA, 16 nt, Human
uugcuggcaaagacag

SEQ ID NO: 2314090 - RNA, 12 nt, Human
uugcuggcugga

SEQ ID NO: 2314091 - RNA, 15 nt, Human
uugcugggagcugaa

SEQ ID NO: 2314092 - RNA, 21 nt, Human
uugcugggagcugaaaaauca

SEQ ID NO: 2314093 - RNA, 22 nt, Human
uugcugggagcugaaaaaucac

SEQ ID NO: 2314094 - RNA, 16 nt, Human
uugcugucccuuuucc

SEQ ID NO: 2314095 - RNA, 23 nt, Human
uugcugcuuuuccuuggggcagg

SEQ ID NO: 2314096 - RNA, 18 nt, Human
uugcugcuuuuccuuggg

SEQ ID NO: 2314097 - RNA, 21 nt, Human
uugcuggaauaaguucaaauu

SEQ ID NO: 2314098 - RNA, 23 nt, Human
uugcuggacugucauagaaauua

SEQ ID NO: 2314099 - RNA, 21 nt, Human
uugcuggacggggacugggga

SEQ ID NO: 2314100 - RNA, 23 nt, Human
uugcuggacggggacuggggaug

SEQ ID NO: 2314101 - RNA, 13 nt, Human
uugcugcugaagg

SEQ ID NO: 2314102 - RNA, 16 nt, Human
uugcugcuugaggcaa

SEQ ID NO: 2314103 - RNA, 14 nt, Human
uugcugcuugaggc

SEQ ID NO: 2314104 - RNA, 21 nt, Human
uugcuaagccccagcaagcaa

SEQ ID NO: 2314105 - RNA, 20 nt, Human
uugcuaagaugcucuaucuu

SEQ ID NO: 2314106 - RNA, 13 nt, Human
uugcuaagaugcu

SEQ ID NO: 2314107 - RNA, 14 nt, Human
uugcuaagaugcuc

SEQ ID NO: 2314108 - RNA, 16 nt, Human
uugcuaagaugcucua

SEQ ID NO: 2314109 - RNA, 18 nt, Human
uugcuaagcauuccaacu

SEQ ID NO: 2314110 - RNA, 16 nt, Human
uugcuaagcauuccaa

SEQ ID NO: 2314111 - RNA, 13 nt, Human
uugcgcuguugcg

SEQ ID NO: 2314112 - RNA, 20 nt, Human
uugccauguuggccaggcug

SEQ ID NO: 2314113 - RNA, 21 nt, Human
uugccauguuggccaggcugg

SEQ ID NO: 2314114 - RNA, 18 nt, Human
uugcccacaccgagggcg

SEQ ID NO: 2314115 - RNA, 20 nt, Human
uugcccaacaccagccccug

SEQ ID NO: 2314116 - RNA, 21 nt, Human
uugcccaacaccagccccugc

SEQ ID NO: 2314117 - RNA, 13 nt, Human
uugcccaacacca

SEQ ID NO: 2314118 - RNA, 18 nt, Human
uugcccaacaccagcccc

SEQ ID NO: 2314119 - RNA, 19 nt, Human
uugcccaacaccagccccu

SEQ ID NO: 2314120 - RNA, 20 nt, Human
uugccaugggcuucacugua

SEQ ID NO: 2314121 - RNA, 21 nt, Human
uugccaugggcuucacuguau

SEQ ID NO: 2314122 - RNA, 22 nt, Human
uugccaugggcuucacuguaua

SEQ ID NO: 2314123 - RNA, 12 nt, Human
uugccugugcca

SEQ ID NO: 2314124 - RNA, 13 nt, Human
uugccuguucagu

SEQ ID NO: 2314125 - RNA, 16 nt, Human
uugccuguucaguuac

SEQ ID NO: 2314126 - RNA, 20 nt, Human
uugccuguucaguuacagaa

SEQ ID NO: 2314127 - RNA, 22 nt, Human
uugccuguucaguuacagaaag

SEQ ID NO: 2314128 - RNA, 16 nt, Human
uugccuuaacuggagc

SEQ ID NO: 2314129 - RNA, 17 nt, Human
uugccuuauuaaaguuc

SEQ ID NO: 2314130 - RNA, 14 nt, Human
uugccuucaacuaa

SEQ ID NO: 2314131 - RNA, 23 nt, Human
uugccuguucaguuacagaaagu

SEQ ID NO: 2314132 - RNA, 16 nt, Human
uugccuuaaagaaagu

SEQ ID NO: 2314133 - RNA, 21 nt, Human
uugccuuccacgcugucucca

SEQ ID NO: 2314134 - RNA, 18 nt, Human
uugccuugaaccacuucc

SEQ ID NO: 2314135 - RNA, 17 nt, Human
uugccuucuacuuuuaa

SEQ ID NO: 2314136 - RNA, 19 nt, Human
uugccuucuucacccagcu

SEQ ID NO: 2314137 - RNA, 20 nt, Human
uugccuugggcugcuccuca

SEQ ID NO: 2314138 - RNA, 21 nt, Human
uugccuugaaccacuucccuc

SEQ ID NO: 2314139 - RNA, 22 nt, Human
uugccuuuagugaucacagcag

SEQ ID NO: 2314140 - RNA, 11 nt, Human
uugccuuucuc

SEQ ID NO: 2314141 - RNA, 23 nt, Human
uugccuuuagugaucacagcagc

SEQ ID NO: 2314142 - RNA, 13 nt, Human
uugccuuucucga

SEQ ID NO: 2314143 - RNA, 17 nt, Human
uugccuuuguuuugaug

SEQ ID NO: 2314144 - RNA, 18 nt, Human
uugccuuuucuagcccga

SEQ ID NO: 2314145 - RNA, 13 nt, Human
uugccuuuugcaa

SEQ ID NO: 2314146 - RNA, 17 nt, Human
uugcgaaugguuccauu

SEQ ID NO: 2314147 - RNA, 18 nt, Human
uugccuuuugcaaacuuu

SEQ ID NO: 2314148 - RNA, 21 nt, Human
uucuuucccugcuuaaugaaa

SEQ ID NO: 2314149 - RNA, 22 nt, Human
uucuuuccucuuccccuugccc

SEQ ID NO: 2314150 - RNA, 18 nt, Human
uucuuucuaguggucuuu

SEQ ID NO: 2314151 - RNA, 13 nt, Human
uucuuuccugccu

SEQ ID NO: 2314152 - RNA, 21 nt, Human
uugaaaauaagaauagaaaua

SEQ ID NO: 2314153 - RNA, 18 nt, Human
uugaaaauuaacaugaau

SEQ ID NO: 2314154 - RNA, 15 nt, Human
uugaaaauuauuuua

SEQ ID NO: 2314155 - RNA, 19 nt, Human
uugaaaauuauuuuaaaca

SEQ ID NO: 2314156 - RNA, 20 nt, Human
uugaaaauuauuuuaaacaa

SEQ ID NO: 2314157 - RNA, 22 nt, Human
uugaaaauuauuuuaaacaaaa

SEQ ID NO: 2314158 - RNA, 18 nt, Human
uugaaaauucaaaaagug

SEQ ID NO: 2314159 - RNA, 20 nt, Human
uugaaaauucaaaaaguguu

SEQ ID NO: 2314160 - RNA, 21 nt, Human
uugaaaauucaaaaaguguuu

SEQ ID NO: 2314161 - RNA, 19 nt, Human
uugaaaccaccuuuuauua

SEQ ID NO: 2314162 - RNA, 13 nt, Human
uugaaacagaacc

SEQ ID NO: 2314163 - RNA, 16 nt, Human
uugaaacaaagaaggu

SEQ ID NO: 2314164 - RNA, 15 nt, Human
uugaaacaauacuca

SEQ ID NO: 2314165 - RNA, 23 nt, Human
uugaaacaauacucauaauguga

SEQ ID NO: 2314166 - RNA, 15 nt, Human
uugaacuuugaccuc

SEQ ID NO: 2314167 - RNA, 17 nt, Human
uucuuuccauuaugauu

SEQ ID NO: 2314168 - RNA, 14 nt, Human
uucuuuccauuaug

SEQ ID NO: 2314169 - RNA, 20 nt, Human
uucuuuaccugagaccaguu

SEQ ID NO: 2314170 - RNA, 12 nt, Human
uucuuuccagag

SEQ ID NO: 2314171 - RNA, 20 nt, Human
uucuuuccauuaugauucuu

SEQ ID NO: 2314172 - RNA, 21 nt, Human
uucuuuccugaggcugggcuc

SEQ ID NO: 2314173 - RNA, 21 nt, Human
uugaaaaucuuauaauuuaaa

SEQ ID NO: 2314174 - RNA, 14 nt, Human
uucuuuaccugaga

SEQ ID NO: 2314175 - RNA, 18 nt, Human
uucuuuccacagaagcuc

SEQ ID NO: 2314176 - RNA, 18 nt, Human
uucuuuaaugcuuuuaua

SEQ ID NO: 2314177 - RNA, 12 nt, Human
uucuuuaaugcu

SEQ ID NO: 2314178 - RNA, 21 nt, Human
uucuuuaagaauuacagguug

SEQ ID NO: 2314179 - RNA, 22 nt, Human
uugaagauaucuugaaaugaaa

SEQ ID NO: 2314180 - RNA, 15 nt, Human
uugaagaggugagca

SEQ ID NO: 2314181 - RNA, 18 nt, Human
uugaagaugcugaaacag

SEQ ID NO: 2314182 - RNA, 20 nt, Human
uugaagaucguuaguaucua

SEQ ID NO: 2314183 - RNA, 14 nt, Human
uugaagcacguaca

SEQ ID NO: 2314184 - RNA, 18 nt, Human
uugaagcacguacauuuu

SEQ ID NO: 2314185 - RNA, 15 nt, Human
uugaagcaguugugu

SEQ ID NO: 2314186 - RNA, 18 nt, Human
uugaacuuugaccucugc

SEQ ID NO: 2314187 - RNA, 17 nt, Human
uugaacuuugaccucug

SEQ ID NO: 2314188 - RNA, 20 nt, Human
uugaacuuugaccucugcag

SEQ ID NO: 2314189 - RNA, 13 nt, Human
uugaagaggaaaa

SEQ ID NO: 2314190 - RNA, 21 nt, Human
uugaagaggaaaaugaauaau

SEQ ID NO: 2314191 - RNA, 22 nt, Human
uugaagaggaaaaugaauaaua

SEQ ID NO: 2314192 - RNA, 23 nt, Human
uugaaugaaaaauuuaagcauug

SEQ ID NO: 2314193 - RNA, 22 nt, Human
uugaaugaaaaauuuaagcauu

SEQ ID NO: 2314194 - RNA, 17 nt, Human
uugaaugacaacagaag

SEQ ID NO: 2314195 - RNA, 18 nt, Human
uugaaugacaacagaagc

SEQ ID NO: 2314196 - RNA, 21 nt, Human
uugaaugaaaaauuuaagcau

SEQ ID NO: 2314197 - RNA, 20 nt, Human
uugaaugaaaaauuuaagca

SEQ ID NO: 2314198 - RNA, 22 nt, Human
uugaagcauuuuauaaaucgcu

SEQ ID NO: 2314199 - RNA, 17 nt, Human
uugaagcauuuuauaaa

SEQ ID NO: 2314200 - RNA, 15 nt, Human
uugaagcauuuuaua

SEQ ID NO: 2314201 - RNA, 14 nt, Human
uugaagcauuuuau

SEQ ID NO: 2314202 - RNA, 13 nt, Human
uugaagcauuuua

SEQ ID NO: 2314203 - RNA, 12 nt, Human
uugaaugaugcc

SEQ ID NO: 2314204 - RNA, 16 nt, Human
uugaaugaugccauga

SEQ ID NO: 2314205 - RNA, 20 nt, Human
uugaaugagaugauucagaa

SEQ ID NO: 2314206 - RNA, 20 nt, Human
uugaaugacaacagaagcuu

SEQ ID NO: 2314207 - RNA, 21 nt, Human
uugaaugacaacagaagcuuc

SEQ ID NO: 2314208 - RNA, 22 nt, Human
uugaaugagaugauucagaagg

SEQ ID NO: 2314209 - RNA, 23 nt, Human
uugaaugagaugauucagaaggg

SEQ ID NO: 2314210 - RNA, 22 nt, Human
uugaauguggcuugagaaauau

SEQ ID NO: 2314211 - RNA, 21 nt, Human
uugaauguggcuugagaaaua

SEQ ID NO: 2314212 - RNA, 19 nt, Human
uugaauguggcuugagaaa

SEQ ID NO: 2314213 - RNA, 13 nt, Human
uugaauguuaaau

SEQ ID NO: 2314214 - RNA, 15 nt, Human
uugaauguuaaauaa

SEQ ID NO: 2314215 - RNA, 18 nt, Human
uugaauguuaaauaaauu

SEQ ID NO: 2314216 - RNA, 14 nt, Human
uugaauguuaagca

SEQ ID NO: 2314217 - RNA, 17 nt, Human
uugaauguuaagcagau

SEQ ID NO: 2314218 - RNA, 16 nt, Human
uucuuauauaugugaa

SEQ ID NO: 2314219 - RNA, 16 nt, Human
uucuuaucuucugcaa

SEQ ID NO: 2314220 - RNA, 15 nt, Human
uucuuaguagauuuu

SEQ ID NO: 2314221 - RNA, 13 nt, Human
uucuuaguucuca

SEQ ID NO: 2314222 - RNA, 13 nt, Human
uucuuagugucac

SEQ ID NO: 2314223 - RNA, 23 nt, Human
uucuuagcucuuaauuguucauu

SEQ ID NO: 2314224 - RNA, 15 nt, Human
uucuuagcuuuuuaa

SEQ ID NO: 2314225 - RNA, 13 nt, Human
uucuuagugacuu

SEQ ID NO: 2314226 - RNA, 19 nt, Human
uucuuagcuuuuuaauugu

SEQ ID NO: 2314227 - RNA, 20 nt, Human
uucuuagcuuuuuaauuguu

SEQ ID NO: 2314228 - RNA, 17 nt, Human
uucuuagggaaggauac

SEQ ID NO: 2314229 - RNA, 19 nt, Human
uucuuaggguuaugauuaa

SEQ ID NO: 2314230 - RNA, 21 nt, Human
uucuuauguaugugaaaguua

SEQ ID NO: 2314231 - RNA, 22 nt, Human
uucuuauggaauugauuugcau

SEQ ID NO: 2314232 - RNA, 18 nt, Human
uucuuauggaauugauuu

SEQ ID NO: 2314233 - RNA, 17 nt, Human
uucuuauggaauugauu

SEQ ID NO: 2314234 - RNA, 15 nt, Human
uucuuauggaauuga

SEQ ID NO: 2314235 - RNA, 23 nt, Human
uucuuaugccauguuaauuucau

SEQ ID NO: 2314236 - RNA, 17 nt, Human
uucuuauguugcccagu

SEQ ID NO: 2314237 - RNA, 19 nt, Human
uucuuauucucacuccacc

SEQ ID NO: 2314238 - RNA, 15 nt, Human
uucuuaucuucugca

SEQ ID NO: 2314239 - RNA, 13 nt, Human
uucuucagagacu

SEQ ID NO: 2314240 - RNA, 13 nt, Human
uucuugucaaaaa

SEQ ID NO: 2314241 - RNA, 14 nt, Human
uucuugucaaaaaa

SEQ ID NO: 2314242 - RNA, 19 nt, Human
uucuugucugauuggcuca

SEQ ID NO: 2314243 - RNA, 14 nt, Human
uucuuuaacuuaau

SEQ ID NO: 2314244 - RNA, 22 nt, Human
uucuugugacagauuauacaga

SEQ ID NO: 2314245 - RNA, 22 nt, Human
uucuugugccauagucacaugg

SEQ ID NO: 2314246 - RNA, 14 nt, Human
uucuuguguguuua

SEQ ID NO: 2314247 - RNA, 18 nt, Human
uucuucaugcaaugacau

SEQ ID NO: 2314248 - RNA, 17 nt, Human
uucuucaugcaaugaca

SEQ ID NO: 2314249 - RNA, 15 nt, Human
uucuucaugcaauga

SEQ ID NO: 2314250 - RNA, 14 nt, Human
uucuucaugcaaug

SEQ ID NO: 2314251 - RNA, 21 nt, Human
uucuucauccggcagccugga

SEQ ID NO: 2314252 - RNA, 20 nt, Human
uucuucauucaauacaagug

SEQ ID NO: 2314253 - RNA, 18 nt, Human
uucuuguauuaagaauga

SEQ ID NO: 2314254 - RNA, 19 nt, Human
uucuuguauuaagaaugaa

SEQ ID NO: 2314255 - RNA, 14 nt, Human
uucuucagccaccu

SEQ ID NO: 2314256 - RNA, 18 nt, Human
uucuucauaacaauuuua

SEQ ID NO: 2314257 - RNA, 21 nt, Human
uucuucauaacaauuuuagga

SEQ ID NO: 2314258 - RNA, 23 nt, Human
uucuucagccaccucucuuuuuc

SEQ ID NO: 2314259 - RNA, 17 nt, Human
uucuucagaucagugcu

SEQ ID NO: 2314260 - RNA, 15 nt, Human
uucuuauugcuuuua

SEQ ID NO: 2314261 - RNA, 14 nt, Human
uucuggccucccac

SEQ ID NO: 2314262 - RNA, 15 nt, Human
uucuggccucccaca

SEQ ID NO: 2314263 - RNA, 16 nt, Human
uucuggcuaugcauuu

SEQ ID NO: 2314264 - RNA, 15 nt, Human
uucuggcagaggagg

SEQ ID NO: 2314265 - RNA, 20 nt, Human
uucuggcagaguugaagaca

SEQ ID NO: 2314266 - RNA, 15 nt, Human
uucuaagucuuucca

SEQ ID NO: 2314267 - RNA, 12 nt, Human
uucuaagucuuu

SEQ ID NO: 2314268 - RNA, 17 nt, Human
uucuaagucuuuccauu

SEQ ID NO: 2314269 - RNA, 24 nt, Human
uucuaaguaaaaccacagcaguug

SEQ ID NO: 2314270 - RNA, 17 nt, Human
uucuguauauacuuuuu

SEQ ID NO: 2314271 - RNA, 16 nt, Human
uucuguauauacuuuu

SEQ ID NO: 2314272 - RNA, 15 nt, Human
uucuguauauacuuu

SEQ ID NO: 2314273 - RNA, 23 nt, Human
uucuguauacaacccuggcauua

SEQ ID NO: 2314274 - RNA, 24 nt, Human
uucuguauacaacccuggcauuau

SEQ ID NO: 2314275 - RNA, 13 nt, Human
uucuguauacaac

SEQ ID NO: 2314276 - RNA, 21 nt, Human
uucuguauacaacccuggcau

SEQ ID NO: 2314277 - RNA, 19 nt, Human
uucugugagacccccacac

SEQ ID NO: 2314278 - RNA, 13 nt, Human
uucugugccugaa

SEQ ID NO: 2314279 - RNA, 17 nt, Human
uucugugccugaauauu

SEQ ID NO: 2314280 - RNA, 16 nt, Human
uucugugccugaauau

SEQ ID NO: 2314281 - RNA, 15 nt, Human
uucugugccugaaua

SEQ ID NO: 2314282 - RNA, 20 nt, Human
uucuguggaaaguguaaagc

SEQ ID NO: 2314283 - RNA, 18 nt, Human
uucuguggaaaguguaaa

SEQ ID NO: 2314284 - RNA, 19 nt, Human
uucuguggaaaguguaaag

SEQ ID NO: 2314285 - RNA, 13 nt, Human
uucuguggaaagu

SEQ ID NO: 2314286 - RNA, 15 nt, Human
uucuguggaaagugu

SEQ ID NO: 2314287 - RNA, 16 nt, Human
uucuguggaaagugua

SEQ ID NO: 2314288 - RNA, 17 nt, Human
uucuguggaaaguguaa

SEQ ID NO: 2314289 - RNA, 14 nt, Human
uugaauuagaaaca

SEQ ID NO: 2314290 - RNA, 23 nt, Human
uugaauuagaaacauaaauaaaa

SEQ ID NO: 2314291 - RNA, 23 nt, Human
uugaauuaaauuaggaauaaaua

SEQ ID NO: 2314292 - RNA, 23 nt, Human
uugaauuaauaucccuacaugua

SEQ ID NO: 2314293 - RNA, 22 nt, Human
uugaauuaaauuaggaauaaau

SEQ ID NO: 2314294 - RNA, 17 nt, Human
uugaauuaaauuaggaa

SEQ ID NO: 2314295 - RNA, 20 nt, Human
uugaauguuaaauaaauugu

SEQ ID NO: 2314296 - RNA, 23 nt, Human
uugaauguuauuuguuauuuuca

SEQ ID NO: 2314297 - RNA, 20 nt, Human
uugaauugaggggauuaaua

SEQ ID NO: 2314298 - RNA, 15 nt, Human
uugaauuguaacugu

SEQ ID NO: 2314299 - RNA, 21 nt, Human
uugaauucuugguugaggaaa

SEQ ID NO: 2314300 - RNA, 22 nt, Human
uugaauuaucuugguugaaaau

SEQ ID NO: 2314301 - RNA, 20 nt, Human
uugaauuaucuugguugaaa

SEQ ID NO: 2314302 - RNA, 18 nt, Human
uugaauuaucuugguuga

SEQ ID NO: 2314303 - RNA, 13 nt, Human
uugaauuaucuug

SEQ ID NO: 2314304 - RNA, 14 nt, Human
uugagccugggagg

SEQ ID NO: 2314305 - RNA, 14 nt, Human
uugagccuugaacu

SEQ ID NO: 2314306 - RNA, 16 nt, Human
uugagccuugaacuuu

SEQ ID NO: 2314307 - RNA, 15 nt, Human
uugagccuugaacuu

SEQ ID NO: 2314308 - RNA, 23 nt, Human
uugagcucagacccccacucuca

SEQ ID NO: 2314309 - RNA, 18 nt, Human
uugagcucucucauuguc

SEQ ID NO: 2314310 - RNA, 19 nt, Human
uugagcucugcagcccagg

SEQ ID NO: 2314311 - RNA, 13 nt, Human
uugagcucagccc

SEQ ID NO: 2314312 - RNA, 15 nt, Human
uugagcuauugcugu

SEQ ID NO: 2314313 - RNA, 18 nt, Human
uugaauuguaacuguucu

SEQ ID NO: 2314314 - RNA, 19 nt, Human
uugagccuugaacuuugac

SEQ ID NO: 2314315 - RNA, 14 nt, Human
uugagcugagaugg

SEQ ID NO: 2314316 - RNA, 14 nt, Human
uugagcugaaaugc

SEQ ID NO: 2314317 - RNA, 22 nt, Human
uugagcugaaaugcugcauuuu

SEQ ID NO: 2314318 - RNA, 11 nt, Human
uugagcugccu

SEQ ID NO: 2314319 - RNA, 17 nt, Human
uugaggacuauggaaau

SEQ ID NO: 2314320 - RNA, 12 nt, Human
uugaggagcccc

SEQ ID NO: 2314321 - RNA, 19 nt, Human
uugaggagcagcuucaguu

SEQ ID NO: 2314322 - RNA, 16 nt, Human
uugaggagccccagcu

SEQ ID NO: 2314323 - RNA, 19 nt, Human
uugaggaggggcagguaaa

SEQ ID NO: 2314324 - RNA, 13 nt, Human
uugaggccaggag

SEQ ID NO: 2314325 - RNA, 17 nt, Human
uugaggauuuugaguau

SEQ ID NO: 2314326 - RNA, 15 nt, Human
uugaggauuuugagu

SEQ ID NO: 2314327 - RNA, 16 nt, Human
uugaggauuuugagua

SEQ ID NO: 2314328 - RNA, 18 nt, Human
uugaggauauauuuucac

SEQ ID NO: 2314329 - RNA, 13 nt, Human
uugaggaguguga

SEQ ID NO: 2314330 - RNA, 21 nt, Human
uugaggauauauuuucacuuu

SEQ ID NO: 2314331 - RNA, 22 nt, Human
uugaggauauauuuucacuuug

SEQ ID NO: 2314332 - RNA, 22 nt, Human
uugauauuuucaacgcagcccu

SEQ ID NO: 2314333 - RNA, 22 nt, Human
uugauaugaaaaauaugauauu

SEQ ID NO: 2314334 - RNA, 14 nt, Human
uugaucaguauaau

SEQ ID NO: 2314335 - RNA, 18 nt, Human
uugaucagaucugacaug

SEQ ID NO: 2314336 - RNA, 18 nt, Human
uugaucaacaucuuuucu

SEQ ID NO: 2314337 - RNA, 22 nt, Human
uugaucaacaucuuuucuugcc

SEQ ID NO: 2314338 - RNA, 17 nt, Human
uugaucaacaucuuuuc

SEQ ID NO: 2314339 - RNA, 17 nt, Human
uugaucaaauucauuuu

SEQ ID NO: 2314340 - RNA, 21 nt, Human
uugauaugaaaaauaugauau

SEQ ID NO: 2314341 - RNA, 16 nt, Human
uugauaugaaaaauau

SEQ ID NO: 2314342 - RNA, 16 nt, Human
uugauaugcuuauaca

SEQ ID NO: 2314343 - RNA, 13 nt, Human
uugauaugaaaaa

SEQ ID NO: 2314344 - RNA, 15 nt, Human
uugaggcuuucaggu

SEQ ID NO: 2314345 - RNA, 14 nt, Human
uugaggcugcagcg

SEQ ID NO: 2314346 - RNA, 19 nt, Human
uugaggccugcccucaggg

SEQ ID NO: 2314347 - RNA, 20 nt, Human
uugauaugccuuuucccaac

SEQ ID NO: 2314348 - RNA, 16 nt, Human
uugauucagcucugca

SEQ ID NO: 2314349 - RNA, 23 nt, Human
uugauucagacagcugccuggga

SEQ ID NO: 2314350 - RNA, 17 nt, Human
uugauucagacagcugc

SEQ ID NO: 2314351 - RNA, 21 nt, Human
uugauucagacagcugccugg

SEQ ID NO: 2314352 - RNA, 22 nt, Human
uugaucauuuuccccccacucu

SEQ ID NO: 2314353 - RNA, 19 nt, Human
uugaucauuuuccccccac

SEQ ID NO: 2314354 - RNA, 18 nt, Human
uugaucauuuucccccca

SEQ ID NO: 2314355 - RNA, 17 nt, Human
uugauccagaaagaaaa

SEQ ID NO: 2314356 - RNA, 17 nt, Human
uugaucugcucagcccu

SEQ ID NO: 2314357 - RNA, 18 nt, Human
uugaucugcucagcccug

SEQ ID NO: 2314358 - RNA, 19 nt, Human
uugaucugcucagcccugg

SEQ ID NO: 2314359 - RNA, 19 nt, Human
uugaucgccuuucccaggu

SEQ ID NO: 2314360 - RNA, 21 nt, Human
uugaucccuguuacccagaga

SEQ ID NO: 2314361 - RNA, 15 nt, Human
uugccagaaagcaua

SEQ ID NO: 2314362 - RNA, 20 nt, Human
uugcauaauaagcuaaagag

SEQ ID NO: 2314363 - RNA, 15 nt, Human
uugcauaauaagcua

SEQ ID NO: 2314364 - RNA, 22 nt, Human
uugccagacauguggugggaca

SEQ ID NO: 2314365 - RNA, 20 nt, Human
uugccagaaagcauaaaauu

SEQ ID NO: 2314366 - RNA, 14 nt, Human
uugccagagaugga

SEQ ID NO: 2314367 - RNA, 19 nt, Human
uugccagagauccaaaaga

SEQ ID NO: 2314368 - RNA, 16 nt, Human
uugcauaacguauaaa

SEQ ID NO: 2314369 - RNA, 19 nt, Human
uugcauaacaauuccucua

SEQ ID NO: 2314370 - RNA, 23 nt, Human
uugcaguuuaucauucaagugua

SEQ ID NO: 2314371 - RNA, 19 nt, Human
uugcaguuuaucauucaag

SEQ ID NO: 2314372 - RNA, 20 nt, Human
uugcaguuuaucauucaagu

SEQ ID NO: 2314373 - RNA, 17 nt, Human
uugccagaaagcauaaa

SEQ ID NO: 2314374 - RNA, 15 nt, Human
uugccagcugcugcu

SEQ ID NO: 2314375 - RNA, 19 nt, Human
uugccagcugcugcuggau

SEQ ID NO: 2314376 - RNA, 12 nt, Human
uugccagcuuuu

SEQ ID NO: 2314377 - RNA, 18 nt, Human
uugccagcuuuuccuccc

SEQ ID NO: 2314378 - RNA, 19 nt, Human
uugccagcuuuuccucccu

SEQ ID NO: 2314379 - RNA, 20 nt, Human
uugccagcuuuuccucccuu

SEQ ID NO: 2314380 - RNA, 22 nt, Human
uugccagcuuuuccucccuugg

SEQ ID NO: 2314381 - RNA, 19 nt, Human
uugccauauuuucaccauu

SEQ ID NO: 2314382 - RNA, 16 nt, Human
uugccauguuggccag

SEQ ID NO: 2314383 - RNA, 17 nt, Human
uugccauguuggccagg

SEQ ID NO: 2314384 - RNA, 18 nt, Human
uugccauguuggccaggc

SEQ ID NO: 2314385 - RNA, 19 nt, Human
uugccauguuggccaggcu

SEQ ID NO: 2314386 - RNA, 23 nt, Human
uugccaucugcgugacaauaaaa

SEQ ID NO: 2314387 - RNA, 12 nt, Human
uugccaggcuag

SEQ ID NO: 2314388 - RNA, 19 nt, Human
uugcagcgauuaauaacag

SEQ ID NO: 2314389 - RNA, 18 nt, Human
uugcagcgauuaauaaca

SEQ ID NO: 2314390 - RNA, 18 nt, Human
uugcagccggcacagggu

SEQ ID NO: 2314391 - RNA, 20 nt, Human
uugcagccggcacagggucu

SEQ ID NO: 2314392 - RNA, 16 nt, Human
uugcaguucagcacca

SEQ ID NO: 2314393 - RNA, 13 nt, Human
uugcaguucaccu

SEQ ID NO: 2314394 - RNA, 13 nt, Human
uugcaguuuauca

SEQ ID NO: 2314395 - RNA, 18 nt, Human
uugcaguuuaucauucaa

SEQ ID NO: 2314396 - RNA, 20 nt, Human
uugcaguguggugagaucau

SEQ ID NO: 2314397 - RNA, 14 nt, Human
uugcagagacagga

SEQ ID NO: 2314398 - RNA, 19 nt, Human
uugcagacucaguuuguca

SEQ ID NO: 2314399 - RNA, 20 nt, Human
uugcagacuagaauucuagu

SEQ ID NO: 2314400 - RNA, 21 nt, Human
uugcagaaaagcaccugccga

SEQ ID NO: 2314401 - RNA, 13 nt, Human
uugcagacuagaa

SEQ ID NO: 2314402 - RNA, 23 nt, Human
uugcagacaggcaagcaccuccu

SEQ ID NO: 2314403 - RNA, 14 nt, Human
uugcagcagugagu

SEQ ID NO: 2314404 - RNA, 12 nt, Human
uugcagcaguga

SEQ ID NO: 2314405 - RNA, 18 nt, Human
uugcagcacucacacagg

SEQ ID NO: 2314406 - RNA, 23 nt, Human
uugcagcagugagucucuucaga

SEQ ID NO: 2314407 - RNA, 19 nt, Human
uugcagagacaggaccuga

SEQ ID NO: 2314408 - RNA, 14 nt, Human
uugcagaugacaaa

SEQ ID NO: 2314409 - RNA, 19 nt, Human
uugcagaugacaaaaauuc

SEQ ID NO: 2314410 - RNA, 18 nt, Human
uugcagauucauuuuucu

SEQ ID NO: 2314411 - RNA, 19 nt, Human
uugcacucuaaaagguuca

SEQ ID NO: 2314412 - RNA, 16 nt, Human
uugcacuccagccugg

SEQ ID NO: 2314413 - RNA, 22 nt, Human
uugcacucuaaaagguucaggg

SEQ ID NO: 2314414 - RNA, 17 nt, Human
uugcacucuagccuggg

SEQ ID NO: 2314415 - RNA, 12 nt, Human
uugcacugaggg

SEQ ID NO: 2314416 - RNA, 13 nt, Human
uugcacugagggc

SEQ ID NO: 2314417 - RNA, 17 nt, Human
uugcacuugugauuauu

SEQ ID NO: 2314418 - RNA, 16 nt, Human
uugcacugagggccac

SEQ ID NO: 2314419 - RNA, 21 nt, Human
uugcacugagggccacacuau

SEQ ID NO: 2314420 - RNA, 20 nt, Human
uugcagaaaagcaccugccg

SEQ ID NO: 2314421 - RNA, 19 nt, Human
uugcagaaaagcaccugcc

SEQ ID NO: 2314422 - RNA, 18 nt, Human
uugcagaaaagcaccugc

SEQ ID NO: 2314423 - RNA, 17 nt, Human
uugcagaaaagcaccug

SEQ ID NO: 2314424 - RNA, 15 nt, Human
uugcagaaacauuuu

SEQ ID NO: 2314425 - RNA, 17 nt, Human
uugcacuggaguucuau

SEQ ID NO: 2314426 - RNA, 20 nt, Human
uugcacuugugauuauuuau

SEQ ID NO: 2314427 - RNA, 13 nt, Human
uugauucauaaug

SEQ ID NO: 2314428 - RNA, 17 nt, Human
uugauucauaaugacuu

SEQ ID NO: 2314429 - RNA, 19 nt, Human
uugauucauaguaacuucu

SEQ ID NO: 2314430 - RNA, 23 nt, Human
uugauucgguauccccccaucuu

SEQ ID NO: 2314431 - RNA, 22 nt, Human
uugaucugcucagcccuggagg

SEQ ID NO: 2314432 - RNA, 20 nt, Human
uugaucugcucagcccugga

SEQ ID NO: 2314433 - RNA, 21 nt, Human
uugaucugcucagcccuggag

SEQ ID NO: 2314434 - RNA, 12 nt, Human
uugauucuccuu

SEQ ID NO: 2314435 - RNA, 13 nt, Human
uugauucuccuuc

SEQ ID NO: 2314436 - RNA, 17 nt, Human
uugauucuccuucagcc

SEQ ID NO: 2314437 - RNA, 20 nt, Human
uugauucuccuucagcccuc

SEQ ID NO: 2314438 - RNA, 19 nt, Human
uuuacccacacacagauaa

SEQ ID NO: 2314439 - RNA, 18 nt, Human
uuuacccaaaaacuaaau

SEQ ID NO: 2314440 - RNA, 20 nt, Human
uuuaccaugccccugagcaa

SEQ ID NO: 2314441 - RNA, 23 nt, Human
uuuaccagccuccguauuucaga

SEQ ID NO: 2314442 - RNA, 20 nt, Human
uuuacaugcaauuuauuaaa

SEQ ID NO: 2314443 - RNA, 20 nt, Human
uuuacagccucacuugaaug

SEQ ID NO: 2314444 - RNA, 21 nt, Human
uuuacagcacuacucugugcc

SEQ ID NO: 2314445 - RNA, 17 nt, Human
uuuacagaugaauguau

SEQ ID NO: 2314446 - RNA, 15 nt, Human
uuuacagcacuacuc

SEQ ID NO: 2314447 - RNA, 16 nt, Human
uuuacagcacuacucu

SEQ ID NO: 2314448 - RNA, 13 nt, Human
uuuacagcugccu

SEQ ID NO: 2314449 - RNA, 15 nt, Human
uuuacauacugcugu

SEQ ID NO: 2314450 - RNA, 18 nt, Human
uuuacagcacuacucugu

SEQ ID NO: 2314451 - RNA, 21 nt, Human
uuuacaguuucaaaaacugua

SEQ ID NO: 2314452 - RNA, 18 nt, Human
uuuacaugaauugcauuu

SEQ ID NO: 2314453 - RNA, 12 nt, Human
uuuaauauuuaa

SEQ ID NO: 2314454 - RNA, 22 nt, Human
uuuaauauugagaaagaaacua

SEQ ID NO: 2314455 - RNA, 15 nt, Human
uuuaauauugagaaa

SEQ ID NO: 2314456 - RNA, 18 nt, Human
uuuaauauuuaaacagca

SEQ ID NO: 2314457 - RNA, 14 nt, Human
uuuaauauuuugca

SEQ ID NO: 2314458 - RNA, 13 nt, Human
uuuaauauuuaaa

SEQ ID NO: 2314459 - RNA, 15 nt, Human
uuuaauauuuaaaca

SEQ ID NO: 2314460 - RNA, 13 nt, Human
uuuacagagacag

SEQ ID NO: 2314461 - RNA, 20 nt, Human
uuuacagaggacaguauuug

SEQ ID NO: 2314462 - RNA, 14 nt, Human
uuuaauauagcuau

SEQ ID NO: 2314463 - RNA, 16 nt, Human
uuuaauauagcuauuu

SEQ ID NO: 2314464 - RNA, 15 nt, Human
uuuaauauagcuauu

SEQ ID NO: 2314465 - RNA, 18 nt, Human
uuuaauauggguucuuuu

SEQ ID NO: 2314466 - RNA, 17 nt, Human
uuuaaccauuaaaacug

SEQ ID NO: 2314467 - RNA, 23 nt, Human
uuuaaccaaaggugaaggaauau

SEQ ID NO: 2314468 - RNA, 20 nt, Human
uuuaaccauuaaaacugaag

SEQ ID NO: 2314469 - RNA, 22 nt, Human
uuuaaccauugucuuguucugu

SEQ ID NO: 2314470 - RNA, 14 nt, Human
uuuaauaaacacuc

SEQ ID NO: 2314471 - RNA, 15 nt, Human
uuuaauaaacacucu

SEQ ID NO: 2314472 - RNA, 15 nt, Human
uuuaacagaaaugua

SEQ ID NO: 2314473 - RNA, 14 nt, Human
uuuaacagaaaugu

SEQ ID NO: 2314474 - RNA, 14 nt, Human
uuuaaccaaaacau

SEQ ID NO: 2314475 - RNA, 19 nt, Human
uuuaaccaaaacaugucuc

SEQ ID NO: 2314476 - RNA, 12 nt, Human
uuuaaccaaagg

SEQ ID NO: 2314477 - RNA, 13 nt, Human
uuuaaccaaaggu

SEQ ID NO: 2314478 - RNA, 15 nt, Human
uuuaaccaaagguga

SEQ ID NO: 2314479 - RNA, 21 nt, Human
uuuaaccaaaggugaaggaau

SEQ ID NO: 2314480 - RNA, 21 nt, Human
uuuaacaccugauguguacau

SEQ ID NO: 2314481 - RNA, 16 nt, Human
uuuaaccuaugauauu

SEQ ID NO: 2314482 - RNA, 19 nt, Human
uuuaauaauguuucaaaca

SEQ ID NO: 2314483 - RNA, 15 nt, Human
uuuaauauaaagccu

SEQ ID NO: 2314484 - RNA, 18 nt, Human
uuuaauaguguuaaucaa

SEQ ID NO: 2314485 - RNA, 22 nt, Human
uuuaauaguguuaaucaauuua

SEQ ID NO: 2314486 - RNA, 12 nt, Human
uuuaauaguguu

SEQ ID NO: 2314487 - RNA, 14 nt, Human
uuuaauaguguuaa

SEQ ID NO: 2314488 - RNA, 17 nt, Human
uuuaauaguguuaauca

SEQ ID NO: 2314489 - RNA, 23 nt, Human
uuuaauauaaaguaguccuguga

SEQ ID NO: 2314490 - RNA, 22 nt, Human
uuuaauaaacacucuugaaaaa

SEQ ID NO: 2314491 - RNA, 13 nt, Human
uuuaauaaaccau

SEQ ID NO: 2314492 - RNA, 14 nt, Human
uuuaauaauguuuc

SEQ ID NO: 2314493 - RNA, 15 nt, Human
uuuaauaauguuuca

SEQ ID NO: 2314494 - RNA, 17 nt, Human
uuuauacguguagcuau

SEQ ID NO: 2314495 - RNA, 16 nt, Human
uuuauacugaaggaaa

SEQ ID NO: 2314496 - RNA, 20 nt, Human
uuuauacucuuucuguauau

SEQ ID NO: 2314497 - RNA, 18 nt, Human
uuuauacucuuucuguau

SEQ ID NO: 2314498 - RNA, 13 nt, Human
uuuauacuguaua

SEQ ID NO: 2314499 - RNA, 16 nt, Human
uuuauacuguuuacug

SEQ ID NO: 2314500 - RNA, 12 nt, Human
uuuaucauuuuc

SEQ ID NO: 2314501 - RNA, 21 nt, Human
uuuauccauucaacugaaaau

SEQ ID NO: 2314502 - RNA, 16 nt, Human
uuuaucccucaccugu

SEQ ID NO: 2314503 - RNA, 16 nt, Human
uuuauacucuuucugu

SEQ ID NO: 2314504 - RNA, 15 nt, Human
uuuauacguguagcu

SEQ ID NO: 2314505 - RNA, 16 nt, Human
uuuauacguguagcua

SEQ ID NO: 2314506 - RNA, 20 nt, Human
uuuauacauaaacaagacca

SEQ ID NO: 2314507 - RNA, 12 nt, Human
uuuauacauaaa

SEQ ID NO: 2314508 - RNA, 17 nt, Human
uuuaucugggauuaugg

SEQ ID NO: 2314509 - RNA, 14 nt, Human
uuuaucucuauuua

SEQ ID NO: 2314510 - RNA, 17 nt, Human
uuuaucucuauuuaaua

SEQ ID NO: 2314511 - RNA, 13 nt, Human
uuuaucugauuaa

SEQ ID NO: 2314512 - RNA, 13 nt, Human
uuuaucucuauuu

SEQ ID NO: 2314513 - RNA, 18 nt, Human
uuuauccucuuuagaguu

SEQ ID NO: 2314514 - RNA, 18 nt, Human
uuuauccugaaauuucag

SEQ ID NO: 2314515 - RNA, 19 nt, Human
uuuauccugaaauuucaga

SEQ ID NO: 2314516 - RNA, 20 nt, Human
uuuaugaaugaaaaaacagu

SEQ ID NO: 2314517 - RNA, 12 nt, Human
uuuaucuuuaua

SEQ ID NO: 2314518 - RNA, 18 nt, Human
uuuaugaauuaaaguaau

SEQ ID NO: 2314519 - RNA, 16 nt, Human
uuuaugaauuaaagua

SEQ ID NO: 2314520 - RNA, 20 nt, Human
uuuaugacuucauuaauaau

SEQ ID NO: 2314521 - RNA, 19 nt, Human
uuuaucuguaguaaacuau

SEQ ID NO: 2314522 - RNA, 16 nt, Human
uuuaucuguaguaaac

SEQ ID NO: 2314523 - RNA, 21 nt, Human
uuuaucuuggacugacauuua

SEQ ID NO: 2314524 - RNA, 15 nt, Human
uuuaucuugggacug

SEQ ID NO: 2314525 - RNA, 14 nt, Human
uuuaucuugucucu

SEQ ID NO: 2314526 - RNA, 13 nt, Human
uuuaucuguucuu

SEQ ID NO: 2314527 - RNA, 17 nt, Human
uuuaguuguaucucuuu

SEQ ID NO: 2314528 - RNA, 19 nt, Human
uuuaguugcagacucaguu

SEQ ID NO: 2314529 - RNA, 20 nt, Human
uuuaguuguaucucuuuuga

SEQ ID NO: 2314530 - RNA, 22 nt, Human
uuuauaaaucgcuuuugauaau

SEQ ID NO: 2314531 - RNA, 18 nt, Human
uuuauaaaucgcuuuuga

SEQ ID NO: 2314532 - RNA, 15 nt, Human
uuuauaaaucgcuuu

SEQ ID NO: 2314533 - RNA, 19 nt, Human
uuuaguugcagaaacauuu

SEQ ID NO: 2314534 - RNA, 11 nt, Human
uuuaguucuuu

SEQ ID NO: 2314535 - RNA, 17 nt, Human
uuuaguucuuuggaaau

SEQ ID NO: 2314536 - RNA, 18 nt, Human
uuuauaaacuuuaccuuu

SEQ ID NO: 2314537 - RNA, 14 nt, Human
uuuauaaaugcuau

SEQ ID NO: 2314538 - RNA, 15 nt, Human
uuuauaaaugcuauu

SEQ ID NO: 2314539 - RNA, 19 nt, Human
uuuauaaaucgcuuuugau

SEQ ID NO: 2314540 - RNA, 12 nt, Human
uuuauaaaugcu

SEQ ID NO: 2314541 - RNA, 13 nt, Human
uuuauaaaugcua

SEQ ID NO: 2314542 - RNA, 16 nt, Human
uuuauaaaugcuauuu

SEQ ID NO: 2314543 - RNA, 14 nt, Human
uuuaguuuacucaa

SEQ ID NO: 2314544 - RNA, 15 nt, Human
uuuauacaacagugc

SEQ ID NO: 2314545 - RNA, 16 nt, Human
uuuauacaacagugcu

SEQ ID NO: 2314546 - RNA, 17 nt, Human
uuuauacaacagugcua

SEQ ID NO: 2314547 - RNA, 18 nt, Human
uuuauacaacagugcuaa

SEQ ID NO: 2314548 - RNA, 16 nt, Human
uuuauacaauaucauc

SEQ ID NO: 2314549 - RNA, 19 nt, Human
uuuauacaacagugcuaaa

SEQ ID NO: 2314550 - RNA, 23 nt, Human
uuuauacaacagugcuaaaaaug

SEQ ID NO: 2314551 - RNA, 11 nt, Human
uuuauacacau

SEQ ID NO: 2314552 - RNA, 12 nt, Human
uuuauacacaua

SEQ ID NO: 2314553 - RNA, 15 nt, Human
uuuauacacauaauu

SEQ ID NO: 2314554 - RNA, 19 nt, Human
uuuauacaccaauugauuu

SEQ ID NO: 2314555 - RNA, 22 nt, Human
uuuagacccuauugcugcuuga

SEQ ID NO: 2314556 - RNA, 14 nt, Human
uuuaguuauaguuu

SEQ ID NO: 2314557 - RNA, 15 nt, Human
uuuaguuauaguuuc

SEQ ID NO: 2314558 - RNA, 15 nt, Human
uuuagacuguagccu

SEQ ID NO: 2314559 - RNA, 17 nt, Human
uuuaguugcaacuuugu

SEQ ID NO: 2314560 - RNA, 18 nt, Human
uuuaguugcaacuuugua

SEQ ID NO: 2314561 - RNA, 15 nt, Human
uuuagaccauuuauc

SEQ ID NO: 2314562 - RNA, 20 nt, Human
uuuagacagucucacuuugu

SEQ ID NO: 2314563 - RNA, 16 nt, Human
uuuagacagucucacu

SEQ ID NO: 2314564 - RNA, 19 nt, Human
uuuagacccuauugcugcu

SEQ ID NO: 2314565 - RNA, 14 nt, Human
uuuacccauauccc

SEQ ID NO: 2314566 - RNA, 17 nt, Human
uuuacccauauccccuc

SEQ ID NO: 2314567 - RNA, 18 nt, Human
uuuacccauauccccucu

SEQ ID NO: 2314568 - RNA, 21 nt, Human
uuuacccauauccccucuccc

SEQ ID NO: 2314569 - RNA, 11 nt, Human
uuuagacagua

SEQ ID NO: 2314570 - RNA, 19 nt, Human
uuuaaaaguuauuaauauu

SEQ ID NO: 2314571 - RNA, 17 nt, Human
uuuaaaaguuucaaugu

SEQ ID NO: 2314572 - RNA, 15 nt, Human
uuuaaaaguuauuaa

SEQ ID NO: 2314573 - RNA, 20 nt, Human
uuuaaaaggauuuuuaucuu

SEQ ID NO: 2314574 - RNA, 20 nt, Human
uuuaaaaguuucaaugugau

SEQ ID NO: 2314575 - RNA, 19 nt, Human
uuuaaaauacacacucaaa

SEQ ID NO: 2314576 - RNA, 16 nt, Human
uuuaaaauauuuaucu

SEQ ID NO: 2314577 - RNA, 16 nt, Human
uuuaaaaucuuuucua

SEQ ID NO: 2314578 - RNA, 15 nt, Human
uuuaaaaucugucac

SEQ ID NO: 2314579 - RNA, 16 nt, Human
uuuaaaaucauuucug

SEQ ID NO: 2314580 - RNA, 14 nt, Human
uuuaaaagauucau

SEQ ID NO: 2314581 - RNA, 18 nt, Human
uuuaaaagaugcaaugua

SEQ ID NO: 2314582 - RNA, 16 nt, Human
uuuaaaagauucauuu

SEQ ID NO: 2314583 - RNA, 14 nt, Human
uuuaaaagacacug

SEQ ID NO: 2314584 - RNA, 20 nt, Human
uuuaaaagauaaauauuaua

SEQ ID NO: 2314585 - RNA, 13 nt, Human
uuuaaaagauaca

SEQ ID NO: 2314586 - RNA, 21 nt, Human
uuuaaaacccauuuaaauuuu

SEQ ID NO: 2314587 - RNA, 14 nt, Human
uuuaaaacccauuu

SEQ ID NO: 2314588 - RNA, 14 nt, Human
uuuaaaagaaugau

SEQ ID NO: 2314589 - RNA, 17 nt, Human
uuuaaaagaaugauuau

SEQ ID NO: 2314590 - RNA, 11 nt, Human
uuuaaaacuug

SEQ ID NO: 2314591 - RNA, 17 nt, Human
uuuaaaagaaugggcag

SEQ ID NO: 2314592 - RNA, 18 nt, Human
uuuaaaagaaugggcagu

SEQ ID NO: 2314593 - RNA, 23 nt, Human
uuuaaaagaaugggcaguuacau

SEQ ID NO: 2314594 - RNA, 16 nt, Human
uuuaaaagacaagacu

SEQ ID NO: 2314595 - RNA, 19 nt, Human
uuuaaaagacaagacuuca

SEQ ID NO: 2314596 - RNA, 17 nt, Human
uuuaacaccugaugugu

SEQ ID NO: 2314597 - RNA, 18 nt, Human
uuuaacaccugaugugua

SEQ ID NO: 2314598 - RNA, 19 nt, Human
uuuaacacaaguccuguga

SEQ ID NO: 2314599 - RNA, 14 nt, Human
uuuaaacuguguac

SEQ ID NO: 2314600 - RNA, 23 nt, Human
uuuaacaauuuccuuuauauuua

SEQ ID NO: 2314601 - RNA, 13 nt, Human
uuuaacagaaaug

SEQ ID NO: 2314602 - RNA, 22 nt, Human
uuuaaaccucaccuuugugggg

SEQ ID NO: 2314603 - RNA, 15 nt, Human
uuuaaacugauucau

SEQ ID NO: 2314604 - RNA, 16 nt, Human
uuuaaacaggcccagc

SEQ ID NO: 2314605 - RNA, 16 nt, Human
uuuaaacauagaaagu

SEQ ID NO: 2314606 - RNA, 13 nt, Human
uuuaaacagcagu

SEQ ID NO: 2314607 - RNA, 14 nt, Human
uuuaaacaccuccu

SEQ ID NO: 2314608 - RNA, 14 nt, Human
uuuaaacaaauuca

SEQ ID NO: 2314609 - RNA, 23 nt, Human
uuuaaacaaauucauauucuguc

SEQ ID NO: 2314610 - RNA, 21 nt, Human
uuuaaacccauuuuagucacu

SEQ ID NO: 2314611 - RNA, 17 nt, Human
uuuaaacccauuuuagu

SEQ ID NO: 2314612 - RNA, 15 nt, Human
uuuaaacccauuuua

SEQ ID NO: 2314613 - RNA, 21 nt, Human
uuuaaacaggcccagcauugc

SEQ ID NO: 2314614 - RNA, 20 nt, Human
uuuaaacaugguuacaauca

SEQ ID NO: 2314615 - RNA, 16 nt, Human
uuuaaaauugugaugu

SEQ ID NO: 2314616 - RNA, 19 nt, Human
uuuaaaauuuaaguaucuu

SEQ ID NO: 2314617 - RNA, 17 nt, Human
uuuaaaauuuuaucucu

SEQ ID NO: 2314618 - RNA, 18 nt, Human
uuuaaaauuuuuuuagaa

SEQ ID NO: 2314619 - RNA, 19 nt, Human
uuuaaaauuuuuuuagaaa

SEQ ID NO: 2314620 - RNA, 20 nt, Human
uuuaaacaaaauagaagcug

SEQ ID NO: 2314621 - RNA, 12 nt, Human
uuuaaacaaauu

SEQ ID NO: 2314622 - RNA, 12 nt, Human
uuuaaaaugauu

SEQ ID NO: 2314623 - RNA, 14 nt, Human
uuuaaaaugauuag

SEQ ID NO: 2314624 - RNA, 16 nt, Human
uuuaaaaugagaaauc

SEQ ID NO: 2314625 - RNA, 12 nt, Human
uuuaaaaugucu

SEQ ID NO: 2314626 - RNA, 18 nt, Human
uuguuuuaaaauuaaagc

SEQ ID NO: 2314627 - RNA, 20 nt, Human
uuguuuuaaaauuaaagcua

SEQ ID NO: 2314628 - RNA, 21 nt, Human
uuguuuguuucucccccuggg

SEQ ID NO: 2314629 - RNA, 13 nt, Human
uuguuuguuucaa

SEQ ID NO: 2314630 - RNA, 12 nt, Human
uuguuuguuuca

SEQ ID NO: 2314631 - RNA, 14 nt, Human
uuuaaaacauguaa

SEQ ID NO: 2314632 - RNA, 15 nt, Human
uuuaaaacauguaau

SEQ ID NO: 2314633 - RNA, 16 nt, Human
uuuaaaacauguaaua

SEQ ID NO: 2314634 - RNA, 15 nt, Human
uuuaaaacagacacu

SEQ ID NO: 2314635 - RNA, 13 nt, Human
uuguuugucuuua

SEQ ID NO: 2314636 - RNA, 11 nt, Human
uuguuugugcu

SEQ ID NO: 2314637 - RNA, 12 nt, Human
uuguuugugcuu

SEQ ID NO: 2314638 - RNA, 22 nt, Human
uuguuuguauguauaauucaaa

SEQ ID NO: 2314639 - RNA, 16 nt, Human
uuguuugguauuguau

SEQ ID NO: 2314640 - RNA, 19 nt, Human
uuguuugguauuguauuua

SEQ ID NO: 2314641 - RNA, 19 nt, Human
uuguuuguauguauaauuc

SEQ ID NO: 2314642 - RNA, 13 nt, Human
uuguuuguaugua

SEQ ID NO: 2314643 - RNA, 15 nt, Human
uuguuucuuucuagu

SEQ ID NO: 2314644 - RNA, 21 nt, Human
uuguuugguauuguauuuauu

SEQ ID NO: 2314645 - RNA, 13 nt, Human
uuguuucuuccaa

SEQ ID NO: 2314646 - RNA, 19 nt, Human
uuguuucuuccaaagcaca

SEQ ID NO: 2314647 - RNA, 15 nt, Human
uuguuucuuccaaag

SEQ ID NO: 2314648 - RNA, 15 nt, Human
uuguuugguauugua

SEQ ID NO: 2314649 - RNA, 20 nt, Human
uuguuuggggaugagaaagg

SEQ ID NO: 2314650 - RNA, 20 nt, Human
uuguuuauucuuuuuaaagu

SEQ ID NO: 2314651 - RNA, 18 nt, Human
uuguuuauaccuuugccu

SEQ ID NO: 2314652 - RNA, 23 nt, Human
uuguuuacuuaaagauuuaucaa

SEQ ID NO: 2314653 - RNA, 21 nt, Human
uuguuuagaaagaauauucau

SEQ ID NO: 2314654 - RNA, 17 nt, Human
uuguuucucccccuggg

SEQ ID NO: 2314655 - RNA, 20 nt, Human
uuguucaaaauauguucuuu

SEQ ID NO: 2314656 - RNA, 22 nt, Human
uuguuauuuugcaaccucgcug

SEQ ID NO: 2314657 - RNA, 15 nt, Human
uuguuauuuugcaac

SEQ ID NO: 2314658 - RNA, 14 nt, Human
uuguuauuuauaac

SEQ ID NO: 2314659 - RNA, 15 nt, Human
uuguuauuuguacag

SEQ ID NO: 2314660 - RNA, 17 nt, Human
uuguuuaaaaucauuuc

SEQ ID NO: 2314661 - RNA, 18 nt, Human
uuguuuaaaaucauuucu

SEQ ID NO: 2314662 - RNA, 21 nt, Human
uuguuuacagcacuacucugu

SEQ ID NO: 2314663 - RNA, 19 nt, Human
uuguucaauaauaaauauu

SEQ ID NO: 2314664 - RNA, 13 nt, Human
uuguuauuuucag

SEQ ID NO: 2314665 - RNA, 13 nt, Human
uuguuuaaagcaa

SEQ ID NO: 2314666 - RNA, 17 nt, Human
uuguuuaaagcaacugu

SEQ ID NO: 2314667 - RNA, 18 nt, Human
uuguuuagaagaagugug

SEQ ID NO: 2314668 - RNA, 15 nt, Human
uuguuuagaagaagu

SEQ ID NO: 2314669 - RNA, 22 nt, Human
uuguuuacagcacuacucugug

SEQ ID NO: 2314670 - RNA, 16 nt, Human
uuguuuacuuaaagau

SEQ ID NO: 2314671 - RNA, 18 nt, Human
uuguuuacuuaaagauuu

SEQ ID NO: 2314672 - RNA, 23 nt, Human
uuguuauuauauaauuacauauu

SEQ ID NO: 2314673 - RNA, 23 nt, Human
uuguuauugggcaagugauugaa

SEQ ID NO: 2314674 - RNA, 14 nt, Human
uuguuauuauauaa

SEQ ID NO: 2314675 - RNA, 23 nt, Human
uugucuuuguaaugucaccaccu

SEQ ID NO: 2314676 - RNA, 20 nt, Human
uugucuuuggacccugaggc

SEQ ID NO: 2314677 - RNA, 24 nt, Human
uugucuuuggacccugaggcccag

SEQ ID NO: 2314678 - RNA, 14 nt, Human
uugucuuguucugu

SEQ ID NO: 2314679 - RNA, 14 nt, Human
uugucuuuaacugu

SEQ ID NO: 2314680 - RNA, 13 nt, Human
uugucuuucagga

SEQ ID NO: 2314681 - RNA, 15 nt, Human
uugucuuuggacccu

SEQ ID NO: 2314682 - RNA, 15 nt, Human
uugucuucuccccag

SEQ ID NO: 2314683 - RNA, 16 nt, Human
uugucuucuccccagg

SEQ ID NO: 2314684 - RNA, 13 nt, Human
uugucuugaaaga

SEQ ID NO: 2314685 - RNA, 14 nt, Human
uugucuugaaagau

SEQ ID NO: 2314686 - RNA, 15 nt, Human
uugucuugaaugucu

SEQ ID NO: 2314687 - RNA, 22 nt, Human
uugucuugaaugucuuuugaau

SEQ ID NO: 2314688 - RNA, 18 nt, Human
uugucuugccuuauuaaa

SEQ ID NO: 2314689 - RNA, 15 nt, Human
uugucuuauauauau

SEQ ID NO: 2314690 - RNA, 13 nt, Human
uugucuuauauau

SEQ ID NO: 2314691 - RNA, 16 nt, Human
uuucuccuuuguacuu

SEQ ID NO: 2314692 - RNA, 22 nt, Human
uuucucuaacuucaaggcccau

SEQ ID NO: 2314693 - RNA, 17 nt, Human
uuucucgauuuuaucuu

SEQ ID NO: 2314694 - RNA, 16 nt, Human
uuucuaccuugagguc

SEQ ID NO: 2314695 - RNA, 13 nt, Human
uuucuaccuccca

SEQ ID NO: 2314696 - RNA, 14 nt, Human
uuucuaccucccag

SEQ ID NO: 2314697 - RNA, 15 nt, Human
uuucuaccucccaga

SEQ ID NO: 2314698 - RNA, 20 nt, Human
uuucucuccagccugacuug

SEQ ID NO: 2314699 - RNA, 12 nt, Human
uuucucuaggaa

SEQ ID NO: 2314700 - RNA, 22 nt, Human
uuucuacccagcgagcccuggu

SEQ ID NO: 2314701 - RNA, 21 nt, Human
uuucuacaaugugaacuuuau

SEQ ID NO: 2314702 - RNA, 15 nt, Human
uuucuacccuagcca

SEQ ID NO: 2314703 - RNA, 17 nt, Human
uuucuacccuagccauu

SEQ ID NO: 2314704 - RNA, 20 nt, Human
uuucuacccuagccauuccu

SEQ ID NO: 2314705 - RNA, 16 nt, Human
uuucuaccauuucaga

SEQ ID NO: 2314706 - RNA, 19 nt, Human
uuucuacagugguuuuaua

SEQ ID NO: 2314707 - RNA, 15 nt, Human
uuucuacccagcgag

SEQ ID NO: 2314708 - RNA, 18 nt, Human
uuucuacccagcgagccc

SEQ ID NO: 2314709 - RNA, 19 nt, Human
uuucugaaaauuaacacug

SEQ ID NO: 2314710 - RNA, 16 nt, Human
uuucugaaaauauaac

SEQ ID NO: 2314711 - RNA, 20 nt, Human
uuucugaaaauuaacacugc

SEQ ID NO: 2314712 - RNA, 14 nt, Human
uuucugaaauaaca

SEQ ID NO: 2314713 - RNA, 23 nt, Human
uuucugauaacuagauggugcug

SEQ ID NO: 2314714 - RNA, 22 nt, Human
uuuccucucuuuguucucagcu

SEQ ID NO: 2314715 - RNA, 23 nt, Human
uuuccucucuuuguucucagcuc

SEQ ID NO: 2314716 - RNA, 19 nt, Human
uuuccucucuuuguucuca

SEQ ID NO: 2314717 - RNA, 19 nt, Human
uuuccuggcacugcuucca

SEQ ID NO: 2314718 - RNA, 22 nt, Human
uuuccucuuagucgagccaagu

SEQ ID NO: 2314719 - RNA, 23 nt, Human
uuuccuggcacugcuuccaguga

SEQ ID NO: 2314720 - RNA, 19 nt, Human
uuuccucccuucugcuacu

SEQ ID NO: 2314721 - RNA, 24 nt, Human
uuuccuaauaaaguucuguacuca

SEQ ID NO: 2314722 - RNA, 17 nt, Human
uuuccuaaggcugcaag

SEQ ID NO: 2314723 - RNA, 15 nt, Human
uuuccuaaggcugca

SEQ ID NO: 2314724 - RNA, 19 nt, Human
uuuccuaagugauuguaug

SEQ ID NO: 2314725 - RNA, 23 nt, Human
uuuccuaauaaaguucuguacuc

SEQ ID NO: 2314726 - RNA, 21 nt, Human
uuuccuaauaaaguucuguac

SEQ ID NO: 2314727 - RNA, 20 nt, Human
uuuccucccuucugcuacug

SEQ ID NO: 2314728 - RNA, 15 nt, Human
uuuccucccuugggu

SEQ ID NO: 2314729 - RNA, 22 nt, Human
uuuccuccgucaccucagagac

SEQ ID NO: 2314730 - RNA, 21 nt, Human
uuuccuccugaggcuuuggau

SEQ ID NO: 2314731 - RNA, 22 nt, Human
uuuccucccuuggguucugaua

SEQ ID NO: 2314732 - RNA, 14 nt, Human
uuuccuccuuccau

SEQ ID NO: 2314733 - RNA, 22 nt, Human
uuuccuccugaggcuuuggauu

SEQ ID NO: 2314734 - RNA, 19 nt, Human
uuuccucuauugauguaca

SEQ ID NO: 2314735 - RNA, 20 nt, Human
uuuccucuauugauguacag

SEQ ID NO: 2314736 - RNA, 18 nt, Human
uuucuacaguauuaugua

SEQ ID NO: 2314737 - RNA, 22 nt, Human
uuucuacaaugugaacuuuauu

SEQ ID NO: 2314738 - RNA, 18 nt, Human
uuucuacaaugugaacuu

SEQ ID NO: 2314739 - RNA, 17 nt, Human
uuucuacaaugugaacu

SEQ ID NO: 2314740 - RNA, 13 nt, Human
uuucuaaauguuu

SEQ ID NO: 2314741 - RNA, 23 nt, Human
uuuccuguaaaaaaaaaaaaguu

SEQ ID NO: 2314742 - RNA, 19 nt, Human
uuuccuguagccuucugua

SEQ ID NO: 2314743 - RNA, 15 nt, Human
uuucuaaugugugaa

SEQ ID NO: 2314744 - RNA, 21 nt, Human
uuucuaacaaaaaaauauauu

SEQ ID NO: 2314745 - RNA, 17 nt, Human
uuucuaaaguaaaaaca

SEQ ID NO: 2314746 - RNA, 22 nt, Human
uuuccuggugccaauuucaagu

SEQ ID NO: 2314747 - RNA, 19 nt, Human
uuuccuggugccaauuuca

SEQ ID NO: 2314748 - RNA, 16 nt, Human
uuuccuggugccaauu

SEQ ID NO: 2314749 - RNA, 14 nt, Human
uuuccuggugccaa

SEQ ID NO: 2314750 - RNA, 22 nt, Human
uuucuaaaguaaaaacaaagaa

SEQ ID NO: 2314751 - RNA, 19 nt, Human
uuucuaaaucuccaaaaua

SEQ ID NO: 2314752 - RNA, 14 nt, Human
uuucaauuuccaag

SEQ ID NO: 2314753 - RNA, 20 nt, Human
uuucaauugcaucucccaga

SEQ ID NO: 2314754 - RNA, 22 nt, Human
uuucaauuccaccugcaaucaa

SEQ ID NO: 2314755 - RNA, 21 nt, Human
uuucaauuaaacggauuauuu

SEQ ID NO: 2314756 - RNA, 14 nt, Human
uuucaauucucaaa

SEQ ID NO: 2314757 - RNA, 18 nt, Human
uuucaauugcaucuccca

SEQ ID NO: 2314758 - RNA, 15 nt, Human
uuucaauucucaaaa

SEQ ID NO: 2314759 - RNA, 19 nt, Human
uuucacaguguguuuguga

SEQ ID NO: 2314760 - RNA, 13 nt, Human
uuucacagcuccu

SEQ ID NO: 2314761 - RNA, 15 nt, Human
uuucacaguuuuucc

SEQ ID NO: 2314762 - RNA, 14 nt, Human
uuucacauagaugu

SEQ ID NO: 2314763 - RNA, 13 nt, Human
uuucacaguuuuu

SEQ ID NO: 2314764 - RNA, 17 nt, Human
uuucagcgauguaugca

SEQ ID NO: 2314765 - RNA, 22 nt, Human
uuucagcgauguaugcagcuau

SEQ ID NO: 2314766 - RNA, 18 nt, Human
uuucagcgacuccguugg

SEQ ID NO: 2314767 - RNA, 23 nt, Human
uuucagcgacuccguuggccacu

SEQ ID NO: 2314768 - RNA, 17 nt, Human
uuucagccaagaauucu

SEQ ID NO: 2314769 - RNA, 16 nt, Human
uuucacauagcugucu

SEQ ID NO: 2314770 - RNA, 18 nt, Human
uuucacauagcugucuag

SEQ ID NO: 2314771 - RNA, 20 nt, Human
uuuaugccuuuuauuucuua

SEQ ID NO: 2314772 - RNA, 16 nt, Human
uuuaugcucaauccau

SEQ ID NO: 2314773 - RNA, 12 nt, Human
uuuaugcuuuaa

SEQ ID NO: 2314774 - RNA, 20 nt, Human
uuuaugcauuugcauuugcu

SEQ ID NO: 2314775 - RNA, 18 nt, Human
uuuaugccggaugugcuu

SEQ ID NO: 2314776 - RNA, 21 nt, Human
uuuaugccggaugugcuuuuc

SEQ ID NO: 2314777 - RNA, 19 nt, Human
uuuaugccuucuuauugcu

SEQ ID NO: 2314778 - RNA, 17 nt, Human
uuuaugagccagacaaa

SEQ ID NO: 2314779 - RNA, 12 nt, Human
uuuaugagccag

SEQ ID NO: 2314780 - RNA, 19 nt, Human
uuuaugagccagacaaaug

SEQ ID NO: 2314781 - RNA, 21 nt, Human
uuucaaugguuugcaaggaag

SEQ ID NO: 2314782 - RNA, 23 nt, Human
uuuauggaggauggagagagggg

SEQ ID NO: 2314783 - RNA, 21 nt, Human
uuuaugcugaaacagaauacu

SEQ ID NO: 2314784 - RNA, 17 nt, Human
uuuauggaaucuaccaa

SEQ ID NO: 2314785 - RNA, 16 nt, Human
uuuaugcuuuaaacau

SEQ ID NO: 2314786 - RNA, 15 nt, Human
uuuaugcuuuaaaca

SEQ ID NO: 2314787 - RNA, 18 nt, Human
uuucaauuaaacggauua

SEQ ID NO: 2314788 - RNA, 19 nt, Human
uuucaauuaaacggauuau

SEQ ID NO: 2314789 - RNA, 14 nt, Human
uuucaauuaaacgg

SEQ ID NO: 2314790 - RNA, 15 nt, Human
uuucaauuaaacgga

SEQ ID NO: 2314791 - RNA, 16 nt, Human
uuucaauuaaacggau

SEQ ID NO: 2314792 - RNA, 17 nt, Human
uuucaauuaaacggauu

SEQ ID NO: 2314793 - RNA, 13 nt, Human
uuucaaugugauu

SEQ ID NO: 2314794 - RNA, 14 nt, Human
uuucaaugugauuc

SEQ ID NO: 2314795 - RNA, 20 nt, Human
uuucaaugugauucuaaugu

SEQ ID NO: 2314796 - RNA, 12 nt, Human
uuucaauuaaac

SEQ ID NO: 2314797 - RNA, 13 nt, Human
uuucaauuaaacg

SEQ ID NO: 2314798 - RNA, 22 nt, Human
uuucaaugugauucuaaugucu

SEQ ID NO: 2314799 - RNA, 19 nt, Human
uuucauuugguucauuaau

SEQ ID NO: 2314800 - RNA, 22 nt, Human
uuucauuugccuauucccacac

SEQ ID NO: 2314801 - RNA, 14 nt, Human
uuucauuucaacug

SEQ ID NO: 2314802 - RNA, 12 nt, Human
uuucauuucuug

SEQ ID NO: 2314803 - RNA, 13 nt, Human
uuucauuugccua

SEQ ID NO: 2314804 - RNA, 14 nt, Human
uuucauuugccuau

SEQ ID NO: 2314805 - RNA, 17 nt, Human
uuucagugaaagcauca

SEQ ID NO: 2314806 - RNA, 21 nt, Human
uuucagucauauaaaagcuau

SEQ ID NO: 2314807 - RNA, 21 nt, Human
uuucaguauuuuggagaaauu

SEQ ID NO: 2314808 - RNA, 20 nt, Human
uuucaguauuagugauguca

SEQ ID NO: 2314809 - RNA, 19 nt, Human
uuucagguuuuguaaagau

SEQ ID NO: 2314810 - RNA, 18 nt, Human
uuucagguuuuguaaaga

SEQ ID NO: 2314811 - RNA, 18 nt, Human
uuucagguguuuaguugc

SEQ ID NO: 2314812 - RNA, 14 nt, Human
uuucagguuuuagu

SEQ ID NO: 2314813 - RNA, 19 nt, Human
uuucagguuuuaguuuuua

SEQ ID NO: 2314814 - RNA, 16 nt, Human
uuucaggugacaugug

SEQ ID NO: 2314815 - RNA, 19 nt, Human
uuucaggugacaugugaaa

SEQ ID NO: 2314816 - RNA, 20 nt, Human
uuucaggugacaugugaaac

SEQ ID NO: 2314817 - RNA, 22 nt, Human
uuucaggugacaugugaaaccu

SEQ ID NO: 2314818 - RNA, 21 nt, Human
uuucagcgauguaugcagcua

SEQ ID NO: 2314819 - RNA, 14 nt, Human
uuucagcugugaac

SEQ ID NO: 2314820 - RNA, 21 nt, Human
uuucagcugugaacauggacu

SEQ ID NO: 2314821 - RNA, 15 nt, Human
uuucaggugacaugu

SEQ ID NO: 2314822 - RNA, 15 nt, Human
uuucauuuuuuucca

SEQ ID NO: 2314823 - RNA, 20 nt, Human
uuucauuuuuuuccaggcug

SEQ ID NO: 2314824 - RNA, 17 nt, Human
uuuccaaaaaaauacug

SEQ ID NO: 2314825 - RNA, 18 nt, Human
uuucauuuucugcaagcc

SEQ ID NO: 2314826 - RNA, 14 nt, Human
uuucauuuucugca

SEQ ID NO: 2314827 - RNA, 15 nt, Human
uuucauuuucugcaa

SEQ ID NO: 2314828 - RNA, 22 nt, Human
uuuccacccccucccuggccug

SEQ ID NO: 2314829 - RNA, 15 nt, Human
uuuccacccccuccc

SEQ ID NO: 2314830 - RNA, 18 nt, Human
uuuccaaaaguggccucu

SEQ ID NO: 2314831 - RNA, 23 nt, Human
uuuccaccacagccagcaccugg

SEQ ID NO: 2314832 - RNA, 15 nt, Human
uuuccacuacugcua

SEQ ID NO: 2314833 - RNA, 14 nt, Human
uuuccacuacugcu

SEQ ID NO: 2314834 - RNA, 13 nt, Human
uuuccacuacugc

SEQ ID NO: 2314835 - RNA, 23 nt, Human
uuuccacggagccacuccucuga

SEQ ID NO: 2314836 - RNA, 18 nt, Human
uuuccacuccuccuagcc

SEQ ID NO: 2314837 - RNA, 19 nt, Human
uuuccacgaugaaaaacuu

SEQ ID NO: 2314838 - RNA, 12 nt, Human
uuuccacugaag

SEQ ID NO: 2314839 - RNA, 19 nt, Human
uuuccacuccuccuagcca

SEQ ID NO: 2314840 - RNA, 18 nt, Human
uuuccuaacaggauuaga

SEQ ID NO: 2314841 - RNA, 22 nt, Human
uuuccuaacaggauuagacagu

SEQ ID NO: 2314842 - RNA, 13 nt, Human
uuuccuaaauguu

SEQ ID NO: 2314843 - RNA, 17 nt, Human
uuuccuaaaugcaguga

SEQ ID NO: 2314844 - RNA, 14 nt, Human
uuuccuaaauguuu

SEQ ID NO: 2314845 - RNA, 15 nt, Human
uuuccuaaaugcagu

SEQ ID NO: 2314846 - RNA, 12 nt, Human
uuuccacuuugu

SEQ ID NO: 2314847 - RNA, 20 nt, Human
uuuccuaaauauauuuuaag

SEQ ID NO: 2314848 - RNA, 18 nt, Human
uuuguauguuuuuuuucu

SEQ ID NO: 2314849 - RNA, 10 nt, Human
uuuguauguu

SEQ ID NO: 2314850 - RNA, 12 nt, Human
uuuguauguuuu

SEQ ID NO: 2314851 - RNA, 15 nt, Human
uuuguauucucuccu

SEQ ID NO: 2314852 - RNA, 22 nt, Human
uuuguaugccaagugagaagau

SEQ ID NO: 2314853 - RNA, 12 nt, Human
uuuguauguaaa

SEQ ID NO: 2314854 - RNA, 14 nt, Human
uuuguauguaaaug

SEQ ID NO: 2314855 - RNA, 16 nt, Human
uuuguaugcacuuugu

SEQ ID NO: 2314856 - RNA, 13 nt, Human
uuuguaugugugu

SEQ ID NO: 2314857 - RNA, 15 nt, Human
uuuguauguauaauu

SEQ ID NO: 2314858 - RNA, 14 nt, Human
uuuguauguauaau

SEQ ID NO: 2314859 - RNA, 16 nt, Human
uuuguauguaaaugug

SEQ ID NO: 2314860 - RNA, 17 nt, Human
uuuguauguaaaugugc

SEQ ID NO: 2314861 - RNA, 12 nt, Human
uuuguaaagugu

SEQ ID NO: 2314862 - RNA, 17 nt, Human
uuuguaaaguguggucc

SEQ ID NO: 2314863 - RNA, 22 nt, Human
uuuguaaaguguggucccaaca

SEQ ID NO: 2314864 - RNA, 22 nt, Human
uuuguaaacucaaaauauuugu

SEQ ID NO: 2314865 - RNA, 17 nt, Human
uuuguaaacucaaaaua

SEQ ID NO: 2314866 - RNA, 16 nt, Human
uuuguaaacucaaaau

SEQ ID NO: 2314867 - RNA, 13 nt, Human
uuugguucuaaua

SEQ ID NO: 2314868 - RNA, 13 nt, Human
uuugguucugggg

SEQ ID NO: 2314869 - RNA, 14 nt, Human
uuugguucuggggc

SEQ ID NO: 2314870 - RNA, 12 nt, Human
uuugguucugug

SEQ ID NO: 2314871 - RNA, 20 nt, Human
uuugguucauuaauucuaua

SEQ ID NO: 2314872 - RNA, 17 nt, Human
uuugguugaauaaacua

SEQ ID NO: 2314873 - RNA, 18 nt, Human
uuugguuguauucuuuga

SEQ ID NO: 2314874 - RNA, 21 nt, Human
uuugguucuuaguucucacug

SEQ ID NO: 2314875 - RNA, 15 nt, Human
uuugguugaauaaac

SEQ ID NO: 2314876 - RNA, 14 nt, Human
uuugguugaauaaa

SEQ ID NO: 2314877 - RNA, 17 nt, Human
uuugguugcuuuaauau

SEQ ID NO: 2314878 - RNA, 16 nt, Human
uuuggguucugccugc

SEQ ID NO: 2314879 - RNA, 22 nt, Human
uuuggguuaauauggcucuuca

SEQ ID NO: 2314880 - RNA, 22 nt, Human
uuuggagaaauuauuuaauaaa

SEQ ID NO: 2314881 - RNA, 15 nt, Human
uuuggguucugccug

SEQ ID NO: 2314882 - RNA, 14 nt, Human
uuuggguucugccu

SEQ ID NO: 2314883 - RNA, 20 nt, Human
uuugguaaaauacuucuuga

SEQ ID NO: 2314884 - RNA, 18 nt, Human
uuugguacuuauuacugc

SEQ ID NO: 2314885 - RNA, 18 nt, Human
uuugguaaggggaauuga

SEQ ID NO: 2314886 - RNA, 16 nt, Human
uuugcuucucucucua

SEQ ID NO: 2314887 - RNA, 20 nt, Human
uuugccagcugcugcuggau

SEQ ID NO: 2314888 - RNA, 17 nt, Human
uuugcuugcaguagauu

SEQ ID NO: 2314889 - RNA, 20 nt, Human
uuugcuugcaguagauuuuc

SEQ ID NO: 2314890 - RNA, 21 nt, Human
uuugcuugcaguagauuuucu

SEQ ID NO: 2314891 - RNA, 16 nt, Human
uuugcuugaaagaaaa

SEQ ID NO: 2314892 - RNA, 14 nt, Human
uuugcuugaaagaa

SEQ ID NO: 2314893 - RNA, 16 nt, Human
uuuggaccuaauccaa

SEQ ID NO: 2314894 - RNA, 19 nt, Human
uuuggagacucuguggggc

SEQ ID NO: 2314895 - RNA, 19 nt, Human
uuuggaccuaaauggccuc

SEQ ID NO: 2314896 - RNA, 15 nt, Human
uuuggacccugaggc

SEQ ID NO: 2314897 - RNA, 19 nt, Human
uuuggacccugaggcccag

SEQ ID NO: 2314898 - RNA, 14 nt, Human
uuugccaacauugc

SEQ ID NO: 2314899 - RNA, 21 nt, Human
uuugccagaacaguuuguaca

SEQ ID NO: 2314900 - RNA, 18 nt, Human
uuugccacccucaugcug

SEQ ID NO: 2314901 - RNA, 13 nt, Human
uuugccagcugcu

SEQ ID NO: 2314902 - RNA, 14 nt, Human
uuugccagcugcug

SEQ ID NO: 2314903 - RNA, 16 nt, Human
uuugccagcugcugcu

SEQ ID NO: 2314904 - RNA, 19 nt, Human
uuugccacccucaugcugu

SEQ ID NO: 2314905 - RNA, 23 nt, Human
uuugauauccaaagcugaauaca

SEQ ID NO: 2314906 - RNA, 17 nt, Human
uuugauauccaaagcug

SEQ ID NO: 2314907 - RNA, 18 nt, Human
uuugauaaucaacugggc

SEQ ID NO: 2314908 - RNA, 12 nt, Human
uuugauaauguu

SEQ ID NO: 2314909 - RNA, 14 nt, Human
uuugauaauguuaa

SEQ ID NO: 2314910 - RNA, 15 nt, Human
uuugauaauguuaaa

SEQ ID NO: 2314911 - RNA, 18 nt, Human
uuugaucagguggggagu

SEQ ID NO: 2314912 - RNA, 19 nt, Human
uuugauauuaaaggaguua

SEQ ID NO: 2314913 - RNA, 17 nt, Human
uuugaauauaaacacua

SEQ ID NO: 2314914 - RNA, 18 nt, Human
uuugaauauaaacacuau

SEQ ID NO: 2314915 - RNA, 16 nt, Human
uuugagaguucuaaau

SEQ ID NO: 2314916 - RNA, 17 nt, Human
uuugagaucagccuggg

SEQ ID NO: 2314917 - RNA, 16 nt, Human
uuugagaucagccugg

SEQ ID NO: 2314918 - RNA, 19 nt, Human
uuugaaggaggugagggau

SEQ ID NO: 2314919 - RNA, 23 nt, Human
uuugaaguaguuuguauaacuuc

SEQ ID NO: 2314920 - RNA, 22 nt, Human
uuugaaguaaucccgccaccua

SEQ ID NO: 2314921 - RNA, 16 nt, Human
uuugaaguacaauugu

SEQ ID NO: 2314922 - RNA, 22 nt, Human
uuugaagucauaccaaugaaaa

SEQ ID NO: 2314923 - RNA, 22 nt, Human
uuugaaguguaggcagacacag

SEQ ID NO: 2314924 - RNA, 11 nt, Human
uuugaagugua

SEQ ID NO: 2314925 - RNA, 18 nt, Human
uuugaaguguaggcagac

SEQ ID NO: 2314926 - RNA, 20 nt, Human
uuugaaguguaggcagacac

SEQ ID NO: 2314927 - RNA, 21 nt, Human
uuugaaguguaggcagacaca

SEQ ID NO: 2314928 - RNA, 23 nt, Human
uuugaggucaaguaagaagacau

SEQ ID NO: 2314929 - RNA, 20 nt, Human
uuugaggucaaguaagaaga

SEQ ID NO: 2314930 - RNA, 13 nt, Human
uuugaguucuaca

SEQ ID NO: 2314931 - RNA, 16 nt, Human
uuugauaaaauaaaug

SEQ ID NO: 2314932 - RNA, 14 nt, Human
uuugauaaaguagu

SEQ ID NO: 2314933 - RNA, 19 nt, Human
uuugauaaaguaguaaaaa

SEQ ID NO: 2314934 - RNA, 18 nt, Human
uuugauaaaguuucucag

SEQ ID NO: 2314935 - RNA, 19 nt, Human
uuugauaaaguuucucaga

SEQ ID NO: 2314936 - RNA, 20 nt, Human
uuugauaaaguaguaaaaau

SEQ ID NO: 2314937 - RNA, 21 nt, Human
uuugauaaaguaguaaaaauu

SEQ ID NO: 2314938 - RNA, 13 nt, Human
uuugauaaaguuu

SEQ ID NO: 2314939 - RNA, 15 nt, Human
uuugauaaaguuucu

SEQ ID NO: 2314940 - RNA, 20 nt, Human
uuugauaaucaacugggcug

SEQ ID NO: 2314941 - RNA, 15 nt, Human
uuugaggcugcagcg

SEQ ID NO: 2314942 - RNA, 16 nt, Human
uuugaggggaaaacac

SEQ ID NO: 2314943 - RNA, 20 nt, Human
uuugaggcuuucagguuuua

SEQ ID NO: 2314944 - RNA, 11 nt, Human
uuugaggggcu

SEQ ID NO: 2314945 - RNA, 22 nt, Human
uuugaggauauauuuucacuuu

SEQ ID NO: 2314946 - RNA, 20 nt, Human
uuugaggauauauuuucacu

SEQ ID NO: 2314947 - RNA, 21 nt, Human
uuugaggauauauuuucacuu

SEQ ID NO: 2314948 - RNA, 22 nt, Human
uuugaggagcagcuucaguugu

SEQ ID NO: 2314949 - RNA, 21 nt, Human
uuugaggagcagcuucaguug

SEQ ID NO: 2314950 - RNA, 15 nt, Human
uuugaggauauauuu

SEQ ID NO: 2314951 - RNA, 20 nt, Human
uuugaggagcagcuucaguu

SEQ ID NO: 2314952 - RNA, 15 nt, Human
uuucuuaaaugggcu

SEQ ID NO: 2314953 - RNA, 13 nt, Human
uuucuuaaauaau

SEQ ID NO: 2314954 - RNA, 18 nt, Human
uuucuuaaccagaucauu

SEQ ID NO: 2314955 - RNA, 18 nt, Human
uuucuuaaaccuucaguu

SEQ ID NO: 2314956 - RNA, 23 nt, Human
uuucugaucugaugcaagcaaga

SEQ ID NO: 2314957 - RNA, 12 nt, Human
uuucuuaaauaa

SEQ ID NO: 2314958 - RNA, 11 nt, Human
uuucuugcugg

SEQ ID NO: 2314959 - RNA, 18 nt, Human
uuucuugccucugucccc

SEQ ID NO: 2314960 - RNA, 21 nt, Human
uuucuugccucuguccccuuc

SEQ ID NO: 2314961 - RNA, 15 nt, Human
uuucuuaaccaucuu

SEQ ID NO: 2314962 - RNA, 14 nt, Human
uuucuuaaccaucu

SEQ ID NO: 2314963 - RNA, 21 nt, Human
uuucuugcugguugucauuuu

SEQ ID NO: 2314964 - RNA, 17 nt, Human
uuucuugguucauaaau

SEQ ID NO: 2314965 - RNA, 18 nt, Human
uuucuugguucauaaaug

SEQ ID NO: 2314966 - RNA, 19 nt, Human
uuucuugguucauaaauga

SEQ ID NO: 2314967 - RNA, 19 nt, Human
uuucuuguguguuuauugu

SEQ ID NO: 2314968 - RNA, 16 nt, Human
uuugaagcuacugugu

SEQ ID NO: 2314969 - RNA, 18 nt, Human
uuugaagcuacugugugu

SEQ ID NO: 2314970 - RNA, 13 nt, Human
uuugaaggcaaaa

SEQ ID NO: 2314971 - RNA, 12 nt, Human
uuugaaggcaaa

SEQ ID NO: 2314972 - RNA, 22 nt, Human
uuugaagccugcccuugucuga

SEQ ID NO: 2314973 - RNA, 13 nt, Human
uuugaaggaaaca

SEQ ID NO: 2314974 - RNA, 20 nt, Human
uuugaaggaaacaguuaaua

SEQ ID NO: 2314975 - RNA, 15 nt, Human
uuugaacuaauaaaa

SEQ ID NO: 2314976 - RNA, 15 nt, Human
uuugaacucagaucu

SEQ ID NO: 2314977 - RNA, 16 nt, Human
uuugaagcaguugugu

SEQ ID NO: 2314978 - RNA, 18 nt, Human
uuugaagcaguuguguca

SEQ ID NO: 2314979 - RNA, 15 nt, Human
uuugaagccugcccu

SEQ ID NO: 2314980 - RNA, 22 nt, Human
uuugaacaacuaggcuucagca

SEQ ID NO: 2314981 - RNA, 23 nt, Human
uuucuugguucauaaaugaauuu

SEQ ID NO: 2314982 - RNA, 19 nt, Human
uuucuuguaauuuaaacag

SEQ ID NO: 2314983 - RNA, 21 nt, Human
uuugaaauuguauuacaaauc

SEQ ID NO: 2314984 - RNA, 13 nt, Human
uucacggaaguuu

SEQ ID NO: 2314985 - RNA, 22 nt, Human
uucacggaaguuuucaaugaug

SEQ ID NO: 2314986 - RNA, 22 nt, Human
uucaccuugggaugaugccuca

SEQ ID NO: 2314987 - RNA, 16 nt, Human
uucaccuugggaugau

SEQ ID NO: 2314988 - RNA, 21 nt, Human
uucaccugauucaacuaaaaa

SEQ ID NO: 2314989 - RNA, 18 nt, Human
uucacggaagagccuugc

SEQ ID NO: 2314990 - RNA, 14 nt, Human
uucacuaaagcagu

SEQ ID NO: 2314991 - RNA, 13 nt, Human
uucacuaaagcag

SEQ ID NO: 2314992 - RNA, 14 nt, Human
uucacgugcagcuc

SEQ ID NO: 2314993 - RNA, 15 nt, Human
uucacgugguccuaa

SEQ ID NO: 2314994 - RNA, 16 nt, Human
uucaccugauucaacu

SEQ ID NO: 2314995 - RNA, 18 nt, Human
uucaccugccccaacucu

SEQ ID NO: 2314996 - RNA, 15 nt, Human
uucacaaacuuuuau

SEQ ID NO: 2314997 - RNA, 12 nt, Human
uucaccugagca

SEQ ID NO: 2314998 - RNA, 16 nt, Human
uucaccuguaaaccug

SEQ ID NO: 2314999 - RNA, 13 nt, Human
uucaccuguaaac

SEQ ID NO: 2315000 - RNA, 14 nt, Human
uucaccuugaagaa

SEQ ID NO: 2315001 - RNA, 23 nt, Human
uucaccuucguuuacuaugccug

SEQ ID NO: 2315002 - RNA, 22 nt, Human
uucaccuguuuuuaagcuguuu

SEQ ID NO: 2315003 - RNA, 23 nt, Human
uucaccuguuuuuaagcuguuuc

SEQ ID NO: 2315004 - RNA, 19 nt, Human
uucaccuguuuuuaagcug

SEQ ID NO: 2315005 - RNA, 21 nt, Human
uucaccuguuuuuaagcuguu

SEQ ID NO: 2315006 - RNA, 18 nt, Human
uucaccuguaaaccugag

SEQ ID NO: 2315007 - RNA, 17 nt, Human
uucaccuguaaaccuga

SEQ ID NO: 2315008 - RNA, 17 nt, Human
uucaauuuccaagagcu

SEQ ID NO: 2315009 - RNA, 19 nt, Human
uucaauuuccaagagcuga

SEQ ID NO: 2315010 - RNA, 17 nt, Human
uucaauuuauucaagaa

SEQ ID NO: 2315011 - RNA, 19 nt, Human
uucaauuuauucaagaaaa

SEQ ID NO: 2315012 - RNA, 15 nt, Human
uucacaaaauuucca

SEQ ID NO: 2315013 - RNA, 14 nt, Human
uucaacugaaaaga

SEQ ID NO: 2315014 - RNA, 21 nt, Human
uucaacugccaaaaugcucua

SEQ ID NO: 2315015 - RNA, 13 nt, Human
uucaacucagacu

SEQ ID NO: 2315016 - RNA, 16 nt, Human
uucaacucagacuagu

SEQ ID NO: 2315017 - RNA, 17 nt, Human
uucaauugcaucuccca

SEQ ID NO: 2315018 - RNA, 15 nt, Human
uucaauugcaucucc

SEQ ID NO: 2315019 - RNA, 16 nt, Human
uucaauuuauucaaga

SEQ ID NO: 2315020 - RNA, 14 nt, Human
uucaauuguaaauu

SEQ ID NO: 2315021 - RNA, 12 nt, Human
uucaauuguaaa

SEQ ID NO: 2315022 - RNA, 19 nt, Human
uucaauugcaucucccaga

SEQ ID NO: 2315023 - RNA, 13 nt, Human
uucaauaggaaaa

SEQ ID NO: 2315024 - RNA, 15 nt, Human
uucaauaggaaaaac

SEQ ID NO: 2315025 - RNA, 18 nt, Human
uucaauaggaaaaacuga

SEQ ID NO: 2315026 - RNA, 20 nt, Human
uucaauaggaaaaacugauu

SEQ ID NO: 2315027 - RNA, 24 nt, Human
uucacuccggugugccugcagccc

SEQ ID NO: 2315028 - RNA, 23 nt, Human
uucacuccggugugccugcagcc

SEQ ID NO: 2315029 - RNA, 13 nt, Human
uucacucuccuug

SEQ ID NO: 2315030 - RNA, 22 nt, Human
uucacuccggugugccugcagc

SEQ ID NO: 2315031 - RNA, 21 nt, Human
uucacuccggugugccugcag

SEQ ID NO: 2315032 - RNA, 13 nt, Human
uucacuccagccu

SEQ ID NO: 2315033 - RNA, 19 nt, Human
uucacuauuuccuuuauaa

SEQ ID NO: 2315034 - RNA, 20 nt, Human
uucacuauuuuuauuuauau

SEQ ID NO: 2315035 - RNA, 13 nt, Human
uucacuauuuccu

SEQ ID NO: 2315036 - RNA, 14 nt, Human
uucacuauuuccuu

SEQ ID NO: 2315037 - RNA, 18 nt, Human
uucacuauaaaugguguu

SEQ ID NO: 2315038 - RNA, 19 nt, Human
uucagagacuccugcaggc

SEQ ID NO: 2315039 - RNA, 20 nt, Human
uucagacauagaauuaacac

SEQ ID NO: 2315040 - RNA, 21 nt, Human
uucagacagcugccugggauc

SEQ ID NO: 2315041 - RNA, 16 nt, Human
uucagacauagaauua

SEQ ID NO: 2315042 - RNA, 23 nt, Human
uucagagcugacacaggaugaag

SEQ ID NO: 2315043 - RNA, 15 nt, Human
uucagagaggccuuu

SEQ ID NO: 2315044 - RNA, 20 nt, Human
uucagagagggcagaggggu

SEQ ID NO: 2315045 - RNA, 15 nt, Human
uucagagagcuggua

SEQ ID NO: 2315046 - RNA, 14 nt, Human
uucagagagcuggu

SEQ ID NO: 2315047 - RNA, 13 nt, Human
uucagagagcugg

SEQ ID NO: 2315048 - RNA, 19 nt, Human
uucagagagcuaaauuaca

SEQ ID NO: 2315049 - RNA, 21 nt, Human
uucagaguugaugguuguaca

SEQ ID NO: 2315050 - RNA, 22 nt, Human
uucagaguugaugguuguacau

SEQ ID NO: 2315051 - RNA, 23 nt, Human
uucagauaacuguuauuuauaau

SEQ ID NO: 2315052 - RNA, 18 nt, Human
uucaggaaaagccucugu

SEQ ID NO: 2315053 - RNA, 18 nt, Human
uucagauaacuguuauuu

SEQ ID NO: 2315054 - RNA, 17 nt, Human
uucagauaacuguuauu

SEQ ID NO: 2315055 - RNA, 20 nt, Human
uucagauaaucacaauacau

SEQ ID NO: 2315056 - RNA, 12 nt, Human
uuauuuuaagac

SEQ ID NO: 2315057 - RNA, 17 nt, Human
uuauuuuaauucaguug

SEQ ID NO: 2315058 - RNA, 17 nt, Human
uuauuuuaauaauguuu

SEQ ID NO: 2315059 - RNA, 16 nt, Human
uuauuuuaguuucugu

SEQ ID NO: 2315060 - RNA, 20 nt, Human
uuauuuuauguugcauagaa

SEQ ID NO: 2315061 - RNA, 23 nt, Human
uucaaagccagcguccuccucug

SEQ ID NO: 2315062 - RNA, 16 nt, Human
uuauuuuauccucugg

SEQ ID NO: 2315063 - RNA, 16 nt, Human
uucaaagcuugaagau

SEQ ID NO: 2315064 - RNA, 22 nt, Human
uucaaagcuuuuuccagaggcu

SEQ ID NO: 2315065 - RNA, 17 nt, Human
uucaacugaccagccuc

SEQ ID NO: 2315066 - RNA, 12 nt, Human
uucaacucagac

SEQ ID NO: 2315067 - RNA, 20 nt, Human
uucaacgcagcccugcuuug

SEQ ID NO: 2315068 - RNA, 16 nt, Human
uucaacgcagcccugc

SEQ ID NO: 2315069 - RNA, 19 nt, Human
uucaacgcagcccugcuuu

SEQ ID NO: 2315070 - RNA, 17 nt, Human
uucaaauccuugaagau

SEQ ID NO: 2315071 - RNA, 19 nt, Human
uucaaauagggucuaacuc

SEQ ID NO: 2315072 - RNA, 18 nt, Human
uucaaauagggucuaacu

SEQ ID NO: 2315073 - RNA, 16 nt, Human
uuauuggaauuaaccu

SEQ ID NO: 2315074 - RNA, 19 nt, Human
uuauugggcaagugauuga

SEQ ID NO: 2315075 - RNA, 22 nt, Human
uuauuggcugagauaugaacau

SEQ ID NO: 2315076 - RNA, 12 nt, Human
uuauuguaccuc

SEQ ID NO: 2315077 - RNA, 14 nt, Human
uuauuguaccucuc

SEQ ID NO: 2315078 - RNA, 18 nt, Human
uuauuguaacagacauug

SEQ ID NO: 2315079 - RNA, 19 nt, Human
uuauuguaacagacauugu

SEQ ID NO: 2315080 - RNA, 20 nt, Human
uuauuguaacagacauuguu

SEQ ID NO: 2315081 - RNA, 19 nt, Human
uuauuguacagcuguuuaa

SEQ ID NO: 2315082 - RNA, 20 nt, Human
uuauugggcaagugauugaa

SEQ ID NO: 2315083 - RNA, 16 nt, Human
uuauuguaacagacau

SEQ ID NO: 2315084 - RNA, 17 nt, Human
uuauuguaacagacauu

SEQ ID NO: 2315085 - RNA, 13 nt, Human
uuauuggaauuaa

SEQ ID NO: 2315086 - RNA, 13 nt, Human
uuauugcuuuuau

SEQ ID NO: 2315087 - RNA, 23 nt, Human
uuauugcuugauacuuuugacaa

SEQ ID NO: 2315088 - RNA, 22 nt, Human
uuauuggaauuaaccuggugcu

SEQ ID NO: 2315089 - RNA, 14 nt, Human
uuauuggcugagau

SEQ ID NO: 2315090 - RNA, 16 nt, Human
uuauuggcugagauau

SEQ ID NO: 2315091 - RNA, 15 nt, Human
uuauuggcugagaua

SEQ ID NO: 2315092 - RNA, 12 nt, Human
uuauugcuguug

SEQ ID NO: 2315093 - RNA, 12 nt, Human
uuauugcauuug

SEQ ID NO: 2315094 - RNA, 22 nt, Human
uuauuguauaaacuaucaguuu

SEQ ID NO: 2315095 - RNA, 16 nt, Human
uuauugugauuucccg

SEQ ID NO: 2315096 - RNA, 15 nt, Human
uuauuguguuuguca

SEQ ID NO: 2315097 - RNA, 16 nt, Human
uuauuguguuugucau

SEQ ID NO: 2315098 - RNA, 17 nt, Human
uuauuguguuugucauu

SEQ ID NO: 2315099 - RNA, 18 nt, Human
uuauuguguuugucauua

SEQ ID NO: 2315100 - RNA, 15 nt, Human
uuauuuuaauaaugu

SEQ ID NO: 2315101 - RNA, 16 nt, Human
uuauuuuaauaauguu

SEQ ID NO: 2315102 - RNA, 15 nt, Human
uuauuguaccucucu

SEQ ID NO: 2315103 - RNA, 17 nt, Human
uuauuguaccucucuua

SEQ ID NO: 2315104 - RNA, 12 nt, Human
uuauuguacuug

SEQ ID NO: 2315105 - RNA, 14 nt, Human
uuauuguauaaacu

SEQ ID NO: 2315106 - RNA, 21 nt, Human
uuauuguauaaacuaucaguu

SEQ ID NO: 2315107 - RNA, 17 nt, Human
uuauugucaaaguggug

SEQ ID NO: 2315108 - RNA, 18 nt, Human
uuauugucaaagugguga

SEQ ID NO: 2315109 - RNA, 15 nt, Human
uuauugucuagugaa

SEQ ID NO: 2315110 - RNA, 15 nt, Human
uuaugccuuuuauuu

SEQ ID NO: 2315111 - RNA, 17 nt, Human
uuaugccggaugugcuu

SEQ ID NO: 2315112 - RNA, 20 nt, Human
uuaugccggaugugcuuuuc

SEQ ID NO: 2315113 - RNA, 17 nt, Human
uuaugccuuuuuugauc

SEQ ID NO: 2315114 - RNA, 17 nt, Human
uuaugcccagcguuuga

SEQ ID NO: 2315115 - RNA, 21 nt, Human
uuaugcccaguuucugccucu

SEQ ID NO: 2315116 - RNA, 14 nt, Human
uuaugcucaggguc

SEQ ID NO: 2315117 - RNA, 13 nt, Human
uuaugcugaaaca

SEQ ID NO: 2315118 - RNA, 16 nt, Human
uuaugcggucuaggga

SEQ ID NO: 2315119 - RNA, 14 nt, Human
uuaugcugaguaug

SEQ ID NO: 2315120 - RNA, 17 nt, Human
uuaugcugugacacaug

SEQ ID NO: 2315121 - RNA, 11 nt, Human
uuaugcuucuu

SEQ ID NO: 2315122 - RNA, 14 nt, Human
uuaugcuuuaaaca

SEQ ID NO: 2315123 - RNA, 13 nt, Human
uuaugcuuuaaac

SEQ ID NO: 2315124 - RNA, 16 nt, Human
uuauggaacacucuga

SEQ ID NO: 2315125 - RNA, 21 nt, Human
uuauggcacuaguauuucuau

SEQ ID NO: 2315126 - RNA, 22 nt, Human
uuaugcaugaaguaauaugcac

SEQ ID NO: 2315127 - RNA, 14 nt, Human
uuaugcauagauaa

SEQ ID NO: 2315128 - RNA, 20 nt, Human
uuaugcaagggacugugugu

SEQ ID NO: 2315129 - RNA, 16 nt, Human
uuaugcaugaaguaau

SEQ ID NO: 2315130 - RNA, 16 nt, Human
uuaucuugucucuggg

SEQ ID NO: 2315131 - RNA, 17 nt, Human
uuaucuugucucugggc

SEQ ID NO: 2315132 - RNA, 12 nt, Human
uuaucuuuauau

SEQ ID NO: 2315133 - RNA, 16 nt, Human
uuaucuuuacuuuuaa

SEQ ID NO: 2315134 - RNA, 17 nt, Human
uuaucuuggacugacau

SEQ ID NO: 2315135 - RNA, 16 nt, Human
uuaucuuggacugaca

SEQ ID NO: 2315136 - RNA, 14 nt, Human
uuaucuugggacug

SEQ ID NO: 2315137 - RNA, 17 nt, Human
uuaucuugguugaaaau

SEQ ID NO: 2315138 - RNA, 22 nt, Human
uuaugcaaggaaggaaagaaag

SEQ ID NO: 2315139 - RNA, 18 nt, Human
uuaugcaaggaaggaaag

SEQ ID NO: 2315140 - RNA, 17 nt, Human
uuaugcaaggaaggaaa

SEQ ID NO: 2315141 - RNA, 19 nt, Human
uuaucuugggacuggguuu

SEQ ID NO: 2315142 - RNA, 15 nt, Human
uuaucuuucgcacag

SEQ ID NO: 2315143 - RNA, 17 nt, Human
uuaucuuucgugauaaa

SEQ ID NO: 2315144 - RNA, 24 nt, Human
uuaucuuucgugauaaacuuugcu

SEQ ID NO: 2315145 - RNA, 13 nt, Human
uuaguugcuguau

SEQ ID NO: 2315146 - RNA, 15 nt, Human
uuaguugcuguaugu

SEQ ID NO: 2315147 - RNA, 20 nt, Human
uuaguugcaacuuuguauaa

SEQ ID NO: 2315148 - RNA, 17 nt, Human
uuaguuuacaaucagcc

SEQ ID NO: 2315149 - RNA, 20 nt, Human
uuaguuguaucucuuuugaa

SEQ ID NO: 2315150 - RNA, 16 nt, Human
uuaucuagauacugua

SEQ ID NO: 2315151 - RNA, 15 nt, Human
uuaguucuuuguuau

SEQ ID NO: 2315152 - RNA, 16 nt, Human
uuaguucuuuggaaau

SEQ ID NO: 2315153 - RNA, 21 nt, Human
uuaguucucacuguucccucu

SEQ ID NO: 2315154 - RNA, 12 nt, Human
uuaguucccaac

SEQ ID NO: 2315155 - RNA, 13 nt, Human
uuaguugcaacuu

SEQ ID NO: 2315156 - RNA, 14 nt, Human
uuaguuccuugagu

SEQ ID NO: 2315157 - RNA, 16 nt, Human
uuaguuccucauuagc

SEQ ID NO: 2315158 - RNA, 23 nt, Human
uuaucugggauuaugguuuugug

SEQ ID NO: 2315159 - RNA, 20 nt, Human
uuaucugggcauagaugcag

SEQ ID NO: 2315160 - RNA, 18 nt, Human
uuaucuguguuuuugaaa

SEQ ID NO: 2315161 - RNA, 19 nt, Human
uuaucugugcgugaaacac

SEQ ID NO: 2315162 - RNA, 18 nt, Human
uuaucugugcgugaaaca

SEQ ID NO: 2315163 - RNA, 17 nt, Human
uuaucugugaauucaga

SEQ ID NO: 2315164 - RNA, 12 nt, Human
uuaucuguccca

SEQ ID NO: 2315165 - RNA, 12 nt, Human
uuaucugugaau

SEQ ID NO: 2315166 - RNA, 20 nt, Human
uuaucuugaauaauguaaga

SEQ ID NO: 2315167 - RNA, 17 nt, Human
uuaucuagauacuguau

SEQ ID NO: 2315168 - RNA, 14 nt, Human
uuaucucucugugc

SEQ ID NO: 2315169 - RNA, 12 nt, Human
uuaucucugugu

SEQ ID NO: 2315170 - RNA, 17 nt, Human
uuaucuauacauaucuu

SEQ ID NO: 2315171 - RNA, 19 nt, Human
uuaucucuauuuaauauuu

SEQ ID NO: 2315172 - RNA, 14 nt, Human
uuaugcuucuugga

SEQ ID NO: 2315173 - RNA, 11 nt, Human
uuauggccuca

SEQ ID NO: 2315174 - RNA, 18 nt, Human
uuauggccucagcugccu

SEQ ID NO: 2315175 - RNA, 15 nt, Human
uuauggccucagcug

SEQ ID NO: 2315176 - RNA, 13 nt, Human
uuauggccucagc

SEQ ID NO: 2315177 - RNA, 12 nt, Human
uuauggccucag

SEQ ID NO: 2315178 - RNA, 16 nt, Human
uuauuaaaaucuuaaa

SEQ ID NO: 2315179 - RNA, 12 nt, Human
uuauuaaaaucu

SEQ ID NO: 2315180 - RNA, 14 nt, Human
uuauuaaaaugauu

SEQ ID NO: 2315181 - RNA, 19 nt, Human
uuauuaaaaugauuguaaa

SEQ ID NO: 2315182 - RNA, 20 nt, Human
uuauuaaaaugauuguaaaa

SEQ ID NO: 2315183 - RNA, 21 nt, Human
uuauuaaaaugauuguaaaau

SEQ ID NO: 2315184 - RNA, 17 nt, Human
uuauggcuauaggugcu

SEQ ID NO: 2315185 - RNA, 21 nt, Human
uuauuaaacagauuuuuacaa

SEQ ID NO: 2315186 - RNA, 18 nt, Human
uuauuaaacguaugcaug

SEQ ID NO: 2315187 - RNA, 20 nt, Human
uuauuaaacguaugcaugug

SEQ ID NO: 2315188 - RNA, 22 nt, Human
uuauuaaacguaugcaugugaa

SEQ ID NO: 2315189 - RNA, 17 nt, Human
uuauuaaaguucuguaa

SEQ ID NO: 2315190 - RNA, 11 nt, Human
uuauuaaugca

SEQ ID NO: 2315191 - RNA, 18 nt, Human
uuauuaaugcacuuucua

SEQ ID NO: 2315192 - RNA, 13 nt, Human
uuauuaaugcacu

SEQ ID NO: 2315193 - RNA, 17 nt, Human
uuauuaaugcacuuucu

SEQ ID NO: 2315194 - RNA, 15 nt, Human
uuauuaauugcuuug

SEQ ID NO: 2315195 - RNA, 14 nt, Human
uuauuaauugcuuu

SEQ ID NO: 2315196 - RNA, 16 nt, Human
uuauuacuguaagaaa

SEQ ID NO: 2315197 - RNA, 17 nt, Human
uuauucucacuccacca

SEQ ID NO: 2315198 - RNA, 13 nt, Human
uuauucuagauua

SEQ ID NO: 2315199 - RNA, 17 nt, Human
uuauuccuguauguugu

SEQ ID NO: 2315200 - RNA, 22 nt, Human
uuauuaauuguuuugcacuuuu

SEQ ID NO: 2315201 - RNA, 18 nt, Human
uuauuacuguuugucuuc

SEQ ID NO: 2315202 - RNA, 13 nt, Human
uuauuccuguaug

SEQ ID NO: 2315203 - RNA, 15 nt, Human
uuauuccuguauguu

SEQ ID NO: 2315204 - RNA, 19 nt, Human
uuauuccuguauguugucc

SEQ ID NO: 2315205 - RNA, 17 nt, Human
uuauuacuguaagaaaa

SEQ ID NO: 2315206 - RNA, 18 nt, Human
uuauuacuguaagaaaau

SEQ ID NO: 2315207 - RNA, 18 nt, Human
uuauugaaucuauuuaag

SEQ ID NO: 2315208 - RNA, 20 nt, Human
uuauugaaucuauuuaagua

SEQ ID NO: 2315209 - RNA, 18 nt, Human
uuauugacaauaauuuca

SEQ ID NO: 2315210 - RNA, 14 nt, Human
uuauugacaauaau

SEQ ID NO: 2315211 - RNA, 22 nt, Human
uuauugacaauaauuucagguu

SEQ ID NO: 2315212 - RNA, 14 nt, Human
uuauugacacagaa

SEQ ID NO: 2315213 - RNA, 23 nt, Human
uuauugacacagaaaauguugag

SEQ ID NO: 2315214 - RNA, 19 nt, Human
uuauugacacagaaaaugu

SEQ ID NO: 2315215 - RNA, 11 nt, Human
uuauucugcuc

SEQ ID NO: 2315216 - RNA, 13 nt, Human
uuauucuggaguu

SEQ ID NO: 2315217 - RNA, 20 nt, Human
uuauucuguagauucugugg

SEQ ID NO: 2315218 - RNA, 16 nt, Human
uuauucuuuuuaaagu

SEQ ID NO: 2315219 - RNA, 13 nt, Human
uuauucuuuuuaa

SEQ ID NO: 2315220 - RNA, 19 nt, Human
uuauugcagcgauuaauaa

SEQ ID NO: 2315221 - RNA, 14 nt, Human
uuauugcaguuuau

SEQ ID NO: 2315222 - RNA, 16 nt, Human
uuauugcaguuuauca

SEQ ID NO: 2315223 - RNA, 20 nt, Human
uuauugcaauaaaagugcuu

SEQ ID NO: 2315224 - RNA, 21 nt, Human
uuauugcaaaauagcauuugu

SEQ ID NO: 2315225 - RNA, 13 nt, Human
uuauugcauuaua

SEQ ID NO: 2315226 - RNA, 22 nt, Human
uuauugcaguuuaucauucaag

SEQ ID NO: 2315227 - RNA, 18 nt, Human
uuauugcaguuuaucauu

SEQ ID NO: 2315228 - RNA, 21 nt, Human
uuauugcaguuuaucauucaa

SEQ ID NO: 2315229 - RNA, 15 nt, Human
uuauugcccacgcug

SEQ ID NO: 2315230 - RNA, 19 nt, Human
uuauugagaauuuuaaauu

SEQ ID NO: 2315231 - RNA, 13 nt, Human
uuauugagaauuu

SEQ ID NO: 2315232 - RNA, 14 nt, Human
uuauugagaaagag

SEQ ID NO: 2315233 - RNA, 16 nt, Human
uuauugagaaagagca

SEQ ID NO: 2315234 - RNA, 18 nt, Human
uuauugagaaagagcacu

SEQ ID NO: 2315235 - RNA, 23 nt, Human
uuauugagaaagagcacuuaaga

SEQ ID NO: 2315236 - RNA, 13 nt, Human
uuccauguugcug

SEQ ID NO: 2315237 - RNA, 14 nt, Human
uuccauguggagaa

SEQ ID NO: 2315238 - RNA, 15 nt, Human
uuccauuaugauucu

SEQ ID NO: 2315239 - RNA, 14 nt, Human
uuccauuaugauuc

SEQ ID NO: 2315240 - RNA, 15 nt, Human
uuccauguugcugcc

SEQ ID NO: 2315241 - RNA, 16 nt, Human
uuccauguugcugcca

SEQ ID NO: 2315242 - RNA, 23 nt, Human
uuccagcaauucuccugccucag

SEQ ID NO: 2315243 - RNA, 22 nt, Human
uuccagcaauucuccugccuca

SEQ ID NO: 2315244 - RNA, 21 nt, Human
uuccagcaauucuccugccuc

SEQ ID NO: 2315245 - RNA, 20 nt, Human
uuccagcaauucuccugccu

SEQ ID NO: 2315246 - RNA, 20 nt, Human
uuccauucuggauuuuguca

SEQ ID NO: 2315247 - RNA, 16 nt, Human
uuccauuggaucucau

SEQ ID NO: 2315248 - RNA, 17 nt, Human
uuccauuggaucucauu

SEQ ID NO: 2315249 - RNA, 16 nt, Human
uuccauuaugauucuu

SEQ ID NO: 2315250 - RNA, 13 nt, Human
uuccauuccagaa

SEQ ID NO: 2315251 - RNA, 16 nt, Human
uuccauuccagaauau

SEQ ID NO: 2315252 - RNA, 15 nt, Human
uuccauucuggaagu

SEQ ID NO: 2315253 - RNA, 13 nt, Human
uuccauucuggaa

SEQ ID NO: 2315254 - RNA, 23 nt, Human
uucccaucacuggagcaccaggc

SEQ ID NO: 2315255 - RNA, 21 nt, Human
uucccauaccacccaaugcug

SEQ ID NO: 2315256 - RNA, 18 nt, Human
uucccauaauuuucuuca

SEQ ID NO: 2315257 - RNA, 16 nt, Human
uucccauaauuuucuu

SEQ ID NO: 2315258 - RNA, 15 nt, Human
uucccauaauuuucu

SEQ ID NO: 2315259 - RNA, 11 nt, Human
uucccauaauu

SEQ ID NO: 2315260 - RNA, 13 nt, Human
uucccauccuacc

SEQ ID NO: 2315261 - RNA, 14 nt, Human
uucccauccuaccc

SEQ ID NO: 2315262 - RNA, 14 nt, Human
uucccaucgcuguc

SEQ ID NO: 2315263 - RNA, 15 nt, Human
uucccaucgcuguca

SEQ ID NO: 2315264 - RNA, 12 nt, Human
uucccaucugca

SEQ ID NO: 2315265 - RNA, 14 nt, Human
uucccaucugcacc

SEQ ID NO: 2315266 - RNA, 20 nt, Human
uucccaugacccaggcuggg

SEQ ID NO: 2315267 - RNA, 18 nt, Human
uucccaugacccaggcug

SEQ ID NO: 2315268 - RNA, 19 nt, Human
uucccaugacccaggcugg

SEQ ID NO: 2315269 - RNA, 14 nt, Human
uucccauucuugca

SEQ ID NO: 2315270 - RNA, 17 nt, Human
uucccauuguggcuccu

SEQ ID NO: 2315271 - RNA, 13 nt, Human
uucccauguuaaa

SEQ ID NO: 2315272 - RNA, 17 nt, Human
uucccauguagcccccu

SEQ ID NO: 2315273 - RNA, 23 nt, Human
uucccauggggagggauucuggu

SEQ ID NO: 2315274 - RNA, 14 nt, Human
uucccauggggagg

SEQ ID NO: 2315275 - RNA, 15 nt, Human
uucccauggggaggg

SEQ ID NO: 2315276 - RNA, 15 nt, Human
uucccauuucagcug

SEQ ID NO: 2315277 - RNA, 14 nt, Human
uucccauuucagcu

SEQ ID NO: 2315278 - RNA, 16 nt, Human
uucccauuugcuccuu

SEQ ID NO: 2315279 - RNA, 15 nt, Human
uuccccaggaggcca

SEQ ID NO: 2315280 - RNA, 16 nt, Human
uuccccaggaggccag

SEQ ID NO: 2315281 - RNA, 17 nt, Human
uucccccaaccucagac

SEQ ID NO: 2315282 - RNA, 18 nt, Human
uucccccaaccucagacu

SEQ ID NO: 2315283 - RNA, 16 nt, Human
uuccccauugccuccu

SEQ ID NO: 2315284 - RNA, 23 nt, Human
uuccccaugguuuuaaucuguau

SEQ ID NO: 2315285 - RNA, 18 nt, Human
uucccccaccagcuaagg

SEQ ID NO: 2315286 - RNA, 17 nt, Human
uucccccauagccaccc

SEQ ID NO: 2315287 - RNA, 15 nt, Human
uucccccauagccac

SEQ ID NO: 2315288 - RNA, 18 nt, Human
uucccccauagccacccc

SEQ ID NO: 2315289 - RNA, 12 nt, Human
uuccccccacuc

SEQ ID NO: 2315290 - RNA, 14 nt, Human
uucccccauagcca

SEQ ID NO: 2315291 - RNA, 20 nt, Human
uucccccagcccuguggaag

SEQ ID NO: 2315292 - RNA, 15 nt, Human
uucccccagcccugu

SEQ ID NO: 2315293 - RNA, 14 nt, Human
uucccccagcccug

SEQ ID NO: 2315294 - RNA, 13 nt, Human
uucccccagcccu

SEQ ID NO: 2315295 - RNA, 15 nt, Human
uucccccacugauca

SEQ ID NO: 2315296 - RNA, 20 nt, Human
uucccucccuuccucuuucc

SEQ ID NO: 2315297 - RNA, 17 nt, Human
uucccucccuuccucuu

SEQ ID NO: 2315298 - RNA, 21 nt, Human
uuccccccacucuccccacac

SEQ ID NO: 2315299 - RNA, 13 nt, Human
uucccccgccgcu

SEQ ID NO: 2315300 - RNA, 23 nt, Human
uucccccgccgcuuuucuccucu

SEQ ID NO: 2315301 - RNA, 19 nt, Human
uuccccccacucuccccac

SEQ ID NO: 2315302 - RNA, 18 nt, Human
uuccccccacucucccca

SEQ ID NO: 2315303 - RNA, 11 nt, Human
uucccucccuu

SEQ ID NO: 2315304 - RNA, 15 nt, Human
uuccccaucuggguc

SEQ ID NO: 2315305 - RNA, 18 nt, Human
uuccccaggggaaaauga

SEQ ID NO: 2315306 - RNA, 21 nt, Human
uuccccaggaggccagccuug

SEQ ID NO: 2315307 - RNA, 11 nt, Human
uuccccauggg

SEQ ID NO: 2315308 - RNA, 18 nt, Human
uuccccaucuucuaaacc

SEQ ID NO: 2315309 - RNA, 17 nt, Human
uuccccaucuucuaaac

SEQ ID NO: 2315310 - RNA, 19 nt, Human
uuccccaugucucgacuca

SEQ ID NO: 2315311 - RNA, 12 nt, Human
uuccccauggga

SEQ ID NO: 2315312 - RNA, 23 nt, Human
uuccccaugggaagacgaggccc

SEQ ID NO: 2315313 - RNA, 17 nt, Human
uuccccaggaggccagc

SEQ ID NO: 2315314 - RNA, 18 nt, Human
uuccccaggaggccagcc

SEQ ID NO: 2315315 - RNA, 19 nt, Human
uuccccaggaggccagccu

SEQ ID NO: 2315316 - RNA, 20 nt, Human
uuccccaggaggccagccuu

SEQ ID NO: 2315317 - RNA, 17 nt, Human
uuccacuacaccuggcu

SEQ ID NO: 2315318 - RNA, 18 nt, Human
uuccacuacaccuggcug

SEQ ID NO: 2315319 - RNA, 19 nt, Human
uuccacuacaccuggcuga

SEQ ID NO: 2315320 - RNA, 22 nt, Human
uuccacuacaccuggcugaggu

SEQ ID NO: 2315321 - RNA, 18 nt, Human
uuccacuccuccuagcca

SEQ ID NO: 2315322 - RNA, 16 nt, Human
uuccacuccuccuagc

SEQ ID NO: 2315323 - RNA, 15 nt, Human
uuccacuacugcuac

SEQ ID NO: 2315324 - RNA, 16 nt, Human
uuccacugaaguagug

SEQ ID NO: 2315325 - RNA, 17 nt, Human
uuccagagaguccucug

SEQ ID NO: 2315326 - RNA, 21 nt, Human
uuccacuccuccuagccaccc

SEQ ID NO: 2315327 - RNA, 17 nt, Human
uuccagagaguggcucc

SEQ ID NO: 2315328 - RNA, 18 nt, Human
uuccagagaguggcuccu

SEQ ID NO: 2315329 - RNA, 19 nt, Human
uuccagagaguggcuccuc

SEQ ID NO: 2315330 - RNA, 20 nt, Human
uuccagagaguggcuccucc

SEQ ID NO: 2315331 - RNA, 21 nt, Human
uuccagagaguggcuccuccc

SEQ ID NO: 2315332 - RNA, 20 nt, Human
uuccagaugccuucuccaga

SEQ ID NO: 2315333 - RNA, 20 nt, Human
uuccagagaguccucuggau

SEQ ID NO: 2315334 - RNA, 19 nt, Human
uuccagauccuggaaauca

SEQ ID NO: 2315335 - RNA, 15 nt, Human
uuccaaauucugcuu

SEQ ID NO: 2315336 - RNA, 15 nt, Human
uuccaaauucacaag

SEQ ID NO: 2315337 - RNA, 21 nt, Human
uuccaaaugaauguugucugu

SEQ ID NO: 2315338 - RNA, 21 nt, Human
uuccaaauguaauaaacuuua

SEQ ID NO: 2315339 - RNA, 23 nt, Human
uuccaaauucacaaguuguguuu

SEQ ID NO: 2315340 - RNA, 14 nt, Human
uuccaacaaagggu

SEQ ID NO: 2315341 - RNA, 15 nt, Human
uuccacuacaccugg

SEQ ID NO: 2315342 - RNA, 12 nt, Human
uuccacuaaccc

SEQ ID NO: 2315343 - RNA, 16 nt, Human
uuccacuacaccuggc

SEQ ID NO: 2315344 - RNA, 15 nt, Human
uuccaacaaaggguu

SEQ ID NO: 2315345 - RNA, 16 nt, Human
uuccaacaaaggguuu

SEQ ID NO: 2315346 - RNA, 21 nt, Human
uuccaacaaaggguuuuaaug

SEQ ID NO: 2315347 - RNA, 22 nt, Human
uuccaacaaaggguuuuaaugu

SEQ ID NO: 2315348 - RNA, 13 nt, Human
uuccaaaauaauu

SEQ ID NO: 2315349 - RNA, 21 nt, Human
uuccaaaauaauuuuaagaaa

SEQ ID NO: 2315350 - RNA, 16 nt, Human
uuccaaaccugacaga

SEQ ID NO: 2315351 - RNA, 17 nt, Human
uuccaaaugaauguugu

SEQ ID NO: 2315352 - RNA, 21 nt, Human
uuccaaagaguagaauugcau

SEQ ID NO: 2315353 - RNA, 22 nt, Human
uucaugaaaauagcucuuucag

SEQ ID NO: 2315354 - RNA, 16 nt, Human
uucaucuuuuguauag

SEQ ID NO: 2315355 - RNA, 15 nt, Human
uucaugauuuugaaa

SEQ ID NO: 2315356 - RNA, 22 nt, Human
uucaucuuggucacauacaauu

SEQ ID NO: 2315357 - RNA, 14 nt, Human
uucaggaagaugaa

SEQ ID NO: 2315358 - RNA, 21 nt, Human
uucaucuugaauuguaaggaa

SEQ ID NO: 2315359 - RNA, 19 nt, Human
uucaggaaaagccucugug

SEQ ID NO: 2315360 - RNA, 20 nt, Human
uucaggaaaagccucugugu

SEQ ID NO: 2315361 - RNA, 11 nt, Human
uucaggaagcu

SEQ ID NO: 2315362 - RNA, 13 nt, Human
uucaggaagcuca

SEQ ID NO: 2315363 - RNA, 17 nt, Human
uucaucuugaauuguaa

SEQ ID NO: 2315364 - RNA, 21 nt, Human
uucaugcaaugacaucuucaa

SEQ ID NO: 2315365 - RNA, 15 nt, Human
uucaugcaaugacau

SEQ ID NO: 2315366 - RNA, 12 nt, Human
uucauuuccugc

SEQ ID NO: 2315367 - RNA, 13 nt, Human
uucaugcauggaa

SEQ ID NO: 2315368 - RNA, 20 nt, Human
uucaugcaaggggaaaaucu

SEQ ID NO: 2315369 - RNA, 14 nt, Human
uucaugcaaugaca

SEQ ID NO: 2315370 - RNA, 17 nt, Human
uucaugauuuugaaauc

SEQ ID NO: 2315371 - RNA, 17 nt, Human
uucaugcaaacuuuauu

SEQ ID NO: 2315372 - RNA, 15 nt, Human
uucauuuccuguguc

SEQ ID NO: 2315373 - RNA, 16 nt, Human
uucauuuccugugucu

SEQ ID NO: 2315374 - RNA, 13 nt, Human
uucauuuccugcc

SEQ ID NO: 2315375 - RNA, 14 nt, Human
uucauuuccugccc

SEQ ID NO: 2315376 - RNA, 16 nt, Human
uucauuugaugcuaaa

SEQ ID NO: 2315377 - RNA, 18 nt, Human
uucauuugagaaguaaac

SEQ ID NO: 2315378 - RNA, 20 nt, Human
uucauuugaguuauuuuaau

SEQ ID NO: 2315379 - RNA, 12 nt, Human
uuccaaaauaau

SEQ ID NO: 2315380 - RNA, 21 nt, Human
uuccucacaccaggcuugccu

SEQ ID NO: 2315381 - RNA, 17 nt, Human
uuccuauuuucagccca

SEQ ID NO: 2315382 - RNA, 13 nt, Human
uuccucacuucca

SEQ ID NO: 2315383 - RNA, 13 nt, Human
uuccucauuagca

SEQ ID NO: 2315384 - RNA, 16 nt, Human
uuccucauuccugaaa

SEQ ID NO: 2315385 - RNA, 14 nt, Human
uuccuccacauccu

SEQ ID NO: 2315386 - RNA, 15 nt, Human
uuccuccacauccuu

SEQ ID NO: 2315387 - RNA, 17 nt, Human
uuccuccacauccuuuc

SEQ ID NO: 2315388 - RNA, 14 nt, Human
uuccucaugaauua

SEQ ID NO: 2315389 - RNA, 23 nt, Human
uuccuccaucuccaagaaugcug

SEQ ID NO: 2315390 - RNA, 20 nt, Human
uuccucccaaguggugccua

SEQ ID NO: 2315391 - RNA, 23 nt, Human
uuccuccacauccuuucuaaaca

SEQ ID NO: 2315392 - RNA, 15 nt, Human
uuccuauuucuuaua

SEQ ID NO: 2315393 - RNA, 18 nt, Human
uuccuauuugccaugggc

SEQ ID NO: 2315394 - RNA, 20 nt, Human
uuccuauuugccaugggcuu

SEQ ID NO: 2315395 - RNA, 22 nt, Human
uuccuauuugccaugggcuuca

SEQ ID NO: 2315396 - RNA, 23 nt, Human
uuccuauuugccaugggcuucac

SEQ ID NO: 2315397 - RNA, 19 nt, Human
uuccuauuuguuuucaugg

SEQ ID NO: 2315398 - RNA, 21 nt, Human
uuccuauuuguuuucauggug

SEQ ID NO: 2315399 - RNA, 14 nt, Human
uuccuauguaacug

SEQ ID NO: 2315400 - RNA, 20 nt, Human
uuccuauggcuggccacugc

SEQ ID NO: 2315401 - RNA, 13 nt, Human
uuccuauugucau

SEQ ID NO: 2315402 - RNA, 17 nt, Human
uuccuauugucauuaaa

SEQ ID NO: 2315403 - RNA, 18 nt, Human
uuccuauugucauuaaag

SEQ ID NO: 2315404 - RNA, 21 nt, Human
uuccuauugugauuugacugu

SEQ ID NO: 2315405 - RNA, 22 nt, Human
uuccuauugugauuugacuguu

SEQ ID NO: 2315406 - RNA, 20 nt, Human
uuccuauugucauuaaaggu

SEQ ID NO: 2315407 - RNA, 12 nt, Human
uuccuauuguga

SEQ ID NO: 2315408 - RNA, 14 nt, Human
uuccuauugugauu

SEQ ID NO: 2315409 - RNA, 20 nt, Human
uuccuauugugauuugacug

SEQ ID NO: 2315410 - RNA, 14 nt, Human
uucccuugagcccu

SEQ ID NO: 2315411 - RNA, 15 nt, Human
uucccuugagcccuc

SEQ ID NO: 2315412 - RNA, 20 nt, Human
uucccuuugacgccauccca

SEQ ID NO: 2315413 - RNA, 21 nt, Human
uucccuuugacgccaucccag

SEQ ID NO: 2315414 - RNA, 22 nt, Human
uucccuuugacgccaucccagc

SEQ ID NO: 2315415 - RNA, 20 nt, Human
uuccuauaauauaauaaaua

SEQ ID NO: 2315416 - RNA, 15 nt, Human
uucccuuugugcaca

SEQ ID NO: 2315417 - RNA, 23 nt, Human
uucccuugaaauuuuaaacuaua

SEQ ID NO: 2315418 - RNA, 19 nt, Human
uuccuauauaguuuauuga

SEQ ID NO: 2315419 - RNA, 19 nt, Human
uuccuauacgcagcgugcu

SEQ ID NO: 2315420 - RNA, 13 nt, Human
uuccuauacgcag

SEQ ID NO: 2315421 - RNA, 22 nt, Human
uuccuauauaguuuauugacaa

SEQ ID NO: 2315422 - RNA, 21 nt, Human
uuccuauauaguuuauugaca

SEQ ID NO: 2315423 - RNA, 12 nt, Human
uuccuauaugca

SEQ ID NO: 2315424 - RNA, 12 nt, Human
uucccuucucca

SEQ ID NO: 2315425 - RNA, 20 nt, Human
uucccuucuccaucucucug

SEQ ID NO: 2315426 - RNA, 22 nt, Human
uucccuucuccaucucucuggc

SEQ ID NO: 2315427 - RNA, 22 nt, Human
uucccuucuugguuuccaaagg

SEQ ID NO: 2315428 - RNA, 17 nt, Human
uucccuugaugaagaag

SEQ ID NO: 2315429 - RNA, 23 nt, Human
uucccuggcuuguaacuccacca

SEQ ID NO: 2315430 - RNA, 16 nt, Human
uucccuggccuuucau

SEQ ID NO: 2315431 - RNA, 17 nt, Human
uucccuggccuuucaua

SEQ ID NO: 2315432 - RNA, 16 nt, Human
uucccugcuuccagga

SEQ ID NO: 2315433 - RNA, 17 nt, Human
uucccugggcugugcua

SEQ ID NO: 2315434 - RNA, 20 nt, Human
uucccugggcugugcuaccu

SEQ ID NO: 2315435 - RNA, 17 nt, Human
uucccugcuuaaugaaa

SEQ ID NO: 2315436 - RNA, 23 nt, Human
uucccugccucucaucaacugaa

SEQ ID NO: 2315437 - RNA, 14 nt, Human
uucccugccucuca

SEQ ID NO: 2315438 - RNA, 10 nt, Human
uucccugcaa

SEQ ID NO: 2315439 - RNA, 19 nt, Human
uucccugagucaccaggaa

SEQ ID NO: 2315440 - RNA, 18 nt, Human
uucccugagucaccagga

SEQ ID NO: 2315441 - RNA, 16 nt, Human
uucccugagucaccag

SEQ ID NO: 2315442 - RNA, 17 nt, Human
uucccugacacugcggg

SEQ ID NO: 2315443 - RNA, 18 nt, Human
uucccugacuccucuaag

SEQ ID NO: 2315444 - RNA, 12 nt, Human
uucccuggccuu

SEQ ID NO: 2315445 - RNA, 14 nt, Human
uucccugcuuccag

SEQ ID NO: 2315446 - RNA, 15 nt, Human
uucccugcuuccagg

SEQ ID NO: 2315447 - RNA, 19 nt, Human
uucccugcauuucugaguu

SEQ ID NO: 2315448 - RNA, 12 nt, Human
uucccugccugg

SEQ ID NO: 2315449 - RNA, 22 nt, Human
uucccugcugucgucuuagcaa

SEQ ID NO: 2315450 - RNA, 13 nt, Human
uucccugcuucca

SEQ ID NO: 2315451 - RNA, 19 nt, Human
uucccugaaaacccagaga

SEQ ID NO: 2315452 - RNA, 17 nt, Human
uucccugaaaacccaga

SEQ ID NO: 2315453 - RNA, 20 nt, Human
uucccucuuuggcuccccug

SEQ ID NO: 2315454 - RNA, 21 nt, Human
uucccucugccugucccucuc

SEQ ID NO: 2315455 - RNA, 15 nt, Human
uucccucugcuccug

SEQ ID NO: 2315456 - RNA, 19 nt, Human
uucccucugcuccuggagc

SEQ ID NO: 2315457 - RNA, 14 nt, Human
uucccucuuuggcu

SEQ ID NO: 2315458 - RNA, 16 nt, Human
uucccucuuuggcucc

SEQ ID NO: 2315459 - RNA, 15 nt, Human
uucccugaauguauu

SEQ ID NO: 2315460 - RNA, 20 nt, Human
uucccugaaaacccagagag

SEQ ID NO: 2315461 - RNA, 16 nt, Human
uucccugaaggaacca

SEQ ID NO: 2315462 - RNA, 12 nt, Human
uucccugaggug

SEQ ID NO: 2315463 - RNA, 16 nt, Human
uucccugacucauucu

SEQ ID NO: 2315464 - RNA, 13 nt, Human
uucccugacucau

SEQ ID NO: 2315465 - RNA, 18 nt, Human
uucccucugccugucccu

SEQ ID NO: 2315466 - RNA, 17 nt, Human
uucccucugccuguccc

SEQ ID NO: 2315467 - RNA, 14 nt, Human
uucccucugccugu

SEQ ID NO: 2315468 - RNA, 13 nt, Human
uucccucugccug

SEQ ID NO: 2315469 - RNA, 11 nt, Human
uucccucugag

SEQ ID NO: 2315470 - RNA, 22 nt, Human
uucccucugagaauuccaagga

SEQ ID NO: 2315471 - RNA, 23 nt, Human
uucccucugagaauuccaaggag

SEQ ID NO: 2315472 - RNA, 14 nt, Human
uucccucucccugu

SEQ ID NO: 2315473 - RNA, 14 nt, Human
uucccucucucuga

SEQ ID NO: 2315474 - RNA, 15 nt, Human
uucccucucucugac

SEQ ID NO: 2315475 - RNA, 15 nt, Human
uucccuccugcuacu

SEQ ID NO: 2315476 - RNA, 14 nt, Human
uucgggcccugccu

SEQ ID NO: 2315477 - RNA, 23 nt, Human
uucgggaagagaggaguucaaug

SEQ ID NO: 2315478 - RNA, 14 nt, Human
uucgggaagagagg

SEQ ID NO: 2315479 - RNA, 22 nt, Human
uucgggaagagaggaguucaau

SEQ ID NO: 2315480 - RNA, 13 nt, Human
uucgggcugugcc

SEQ ID NO: 2315481 - RNA, 12 nt, Human
uucgggcugugc

SEQ ID NO: 2315482 - RNA, 13 nt, Human
uucggcugucuca

SEQ ID NO: 2315483 - RNA, 20 nt, Human
uucgggaggucgaggcagga

SEQ ID NO: 2315484 - RNA, 17 nt, Human
uuccuuggggcaggcag

SEQ ID NO: 2315485 - RNA, 18 nt, Human
uuccuuggggcaggcagu

SEQ ID NO: 2315486 - RNA, 15 nt, Human
uuccuuggggcaggc

SEQ ID NO: 2315487 - RNA, 15 nt, Human
uuccuuggcuggugc

SEQ ID NO: 2315488 - RNA, 14 nt, Human
uuccuuggggcagg

SEQ ID NO: 2315489 - RNA, 21 nt, Human
uuccuuggcaugccuuccagc

SEQ ID NO: 2315490 - RNA, 18 nt, Human
uuccuuggcaugccuucc

SEQ ID NO: 2315491 - RNA, 23 nt, Human
uuccuuggauaggcuuuuuagua

SEQ ID NO: 2315492 - RNA, 15 nt, Human
uuccuuggcucccau

SEQ ID NO: 2315493 - RNA, 21 nt, Human
uuccuuggcucccauucacuc

SEQ ID NO: 2315494 - RNA, 23 nt, Human
uuccuuggcucccauucacucuu

SEQ ID NO: 2315495 - RNA, 13 nt, Human
uuccuuggcuggu

SEQ ID NO: 2315496 - RNA, 24 nt, Human
uuccuugagacacggagcccagcc

SEQ ID NO: 2315497 - RNA, 20 nt, Human
uuccuuggacucauuuuaaa

SEQ ID NO: 2315498 - RNA, 15 nt, Human
uucuaaagauggaaa

SEQ ID NO: 2315499 - RNA, 18 nt, Human
uucuaaagccuuaagucu

SEQ ID NO: 2315500 - RNA, 13 nt, Human
uucuaaagcugcc

SEQ ID NO: 2315501 - RNA, 17 nt, Human
uucuaaagcugccagcc

SEQ ID NO: 2315502 - RNA, 12 nt, Human
uucguucugugg

SEQ ID NO: 2315503 - RNA, 14 nt, Human
uucgggcugugccc

SEQ ID NO: 2315504 - RNA, 17 nt, Human
uucguuuguuuguuuca

SEQ ID NO: 2315505 - RNA, 14 nt, Human
uucguuucuguaua

SEQ ID NO: 2315506 - RNA, 16 nt, Human
uucguuucuguauaca

SEQ ID NO: 2315507 - RNA, 13 nt, Human
uucguucuguuua

SEQ ID NO: 2315508 - RNA, 15 nt, Human
uucguuuauuuucaa

SEQ ID NO: 2315509 - RNA, 13 nt, Human
uucuaaaaaacag

SEQ ID NO: 2315510 - RNA, 14 nt, Human
uucuaaaaaaagaa

SEQ ID NO: 2315511 - RNA, 18 nt, Human
uucuaaaaauugugauca

SEQ ID NO: 2315512 - RNA, 18 nt, Human
uucuaaaacuaaauagca

SEQ ID NO: 2315513 - RNA, 19 nt, Human
uucuaaaacuaaauagcau

SEQ ID NO: 2315514 - RNA, 22 nt, Human
uucuaaaacuaaauagcaugua

SEQ ID NO: 2315515 - RNA, 23 nt, Human
uuccuccccauuagagucagccu

SEQ ID NO: 2315516 - RNA, 21 nt, Human
uuccuccccauuagagucagc

SEQ ID NO: 2315517 - RNA, 13 nt, Human
uuccuccccagca

SEQ ID NO: 2315518 - RNA, 12 nt, Human
uuccuccccagc

SEQ ID NO: 2315519 - RNA, 11 nt, Human
uuccuccccag

SEQ ID NO: 2315520 - RNA, 15 nt, Human
uuccugaugcuucuu

SEQ ID NO: 2315521 - RNA, 18 nt, Human
uuccugaugcuucuucag

SEQ ID NO: 2315522 - RNA, 19 nt, Human
uuccugaugcuucuucaga

SEQ ID NO: 2315523 - RNA, 15 nt, Human
uuccugcauuuguga

SEQ ID NO: 2315524 - RNA, 16 nt, Human
uuccugcauuugugaa

SEQ ID NO: 2315525 - RNA, 18 nt, Human
uuccugcauuugugaaau

SEQ ID NO: 2315526 - RNA, 14 nt, Human
uuccuccccagcag

SEQ ID NO: 2315527 - RNA, 12 nt, Human
uuccugccacca

SEQ ID NO: 2315528 - RNA, 18 nt, Human
uuccugccaccagucacu

SEQ ID NO: 2315529 - RNA, 15 nt, Human
uuccugccaccaguc

SEQ ID NO: 2315530 - RNA, 17 nt, Human
uuccugccaccagucac

SEQ ID NO: 2315531 - RNA, 17 nt, Human
uuccugccaggcauggu

SEQ ID NO: 2315532 - RNA, 24 nt, Human
uuccuggacauccucuucugcuua

SEQ ID NO: 2315533 - RNA, 15 nt, Human
uuccuggcaauagug

SEQ ID NO: 2315534 - RNA, 15 nt, Human
uuccuggagcccaga

SEQ ID NO: 2315535 - RNA, 16 nt, Human
uuccuggagcccagag

SEQ ID NO: 2315536 - RNA, 14 nt, Human
uuccuggcacugcu

SEQ ID NO: 2315537 - RNA, 12 nt, Human
uuccuggacauc

SEQ ID NO: 2315538 - RNA, 20 nt, Human
uuccuggacauccucuucug

SEQ ID NO: 2315539 - RNA, 13 nt, Human
uuccugccccagg

SEQ ID NO: 2315540 - RNA, 16 nt, Human
uuccugccccaggccu

SEQ ID NO: 2315541 - RNA, 19 nt, Human
uuccuggacacucagaccu

SEQ ID NO: 2315542 - RNA, 15 nt, Human
uuccuugaccagcag

SEQ ID NO: 2315543 - RNA, 13 nt, Human
uuccuugaccagc

SEQ ID NO: 2315544 - RNA, 17 nt, Human
uuccuugagaaaaacaa

SEQ ID NO: 2315545 - RNA, 22 nt, Human
uuccuugagacacggagcccag

SEQ ID NO: 2315546 - RNA, 20 nt, Human
uuccuugaguugauucagcu

SEQ ID NO: 2315547 - RNA, 23 nt, Human
uuccuggcaauaguguguucuga

SEQ ID NO: 2315548 - RNA, 22 nt, Human
uuccuggcaauaguguguucug

SEQ ID NO: 2315549 - RNA, 20 nt, Human
uuccuggcaauaguguguuc

SEQ ID NO: 2315550 - RNA, 18 nt, Human
uuccuggcaauagugugu

SEQ ID NO: 2315551 - RNA, 17 nt, Human
uuccuucuugccuucag

SEQ ID NO: 2315552 - RNA, 12 nt, Human
uuccuucuuuga

SEQ ID NO: 2315553 - RNA, 13 nt, Human
uuccuugaagccg

SEQ ID NO: 2315554 - RNA, 14 nt, Human
uuccuugaagccga

SEQ ID NO: 2315555 - RNA, 13 nt, Human
uuccuucuuugau

SEQ ID NO: 2315556 - RNA, 14 nt, Human
uuccuucuuugaua

SEQ ID NO: 2315557 - RNA, 19 nt, Human
uuccuucuuugauaauguu

SEQ ID NO: 2315558 - RNA, 22 nt, Human
uuccuucuuugauaauguuaaa

SEQ ID NO: 2315559 - RNA, 22 nt, Human
uuacuuuuauaauaaaaggaaa

SEQ ID NO: 2315560 - RNA, 14 nt, Human
uuacuuuuuaaaau

SEQ ID NO: 2315561 - RNA, 15 nt, Human
uuacuuuuaaauguc

SEQ ID NO: 2315562 - RNA, 23 nt, Human
uuacuuuuauaauaaaaggaaaa

SEQ ID NO: 2315563 - RNA, 19 nt, Human
uuacuuuuaaacuguguac

SEQ ID NO: 2315564 - RNA, 16 nt, Human
uuacuuuuaaacugug

SEQ ID NO: 2315565 - RNA, 14 nt, Human
uuacuuuguguuca

SEQ ID NO: 2315566 - RNA, 15 nt, Human
uuacuuuuaaacugu

SEQ ID NO: 2315567 - RNA, 14 nt, Human
uuacuuuuaaacug

SEQ ID NO: 2315568 - RNA, 17 nt, Human
uuacuuuuaaacaguga

SEQ ID NO: 2315569 - RNA, 13 nt, Human
uuacuuugugaau

SEQ ID NO: 2315570 - RNA, 20 nt, Human
uuagaaaagcaaagggugcu

SEQ ID NO: 2315571 - RNA, 21 nt, Human
uuagaaaacauaaucuucugc

SEQ ID NO: 2315572 - RNA, 15 nt, Human
uuagacagucccugc

SEQ ID NO: 2315573 - RNA, 19 nt, Human
uuagaaacacaacuauauu

SEQ ID NO: 2315574 - RNA, 17 nt, Human
uuacuuuaaaaggagcc

SEQ ID NO: 2315575 - RNA, 18 nt, Human
uuacuuuaaaaggagcca

SEQ ID NO: 2315576 - RNA, 19 nt, Human
uuacuugcauugaauauau

SEQ ID NO: 2315577 - RNA, 14 nt, Human
uuacuugaccuccu

SEQ ID NO: 2315578 - RNA, 11 nt, Human
uuacuuucugu

SEQ ID NO: 2315579 - RNA, 18 nt, Human
uuacuuucuguugccaca

SEQ ID NO: 2315580 - RNA, 21 nt, Human
uuacuuuccuuuccccagccc

SEQ ID NO: 2315581 - RNA, 15 nt, Human
uuacuuuaccacccc

SEQ ID NO: 2315582 - RNA, 20 nt, Human
uuacuuuaccacccccacac

SEQ ID NO: 2315583 - RNA, 16 nt, Human
uuacuuuauguuacua

SEQ ID NO: 2315584 - RNA, 23 nt, Human
uuagagacaguugggugagaaca

SEQ ID NO: 2315585 - RNA, 21 nt, Human
uuagagaaguauacauaaguu

SEQ ID NO: 2315586 - RNA, 17 nt, Human
uuagacuugaaauacua

SEQ ID NO: 2315587 - RNA, 19 nt, Human
uuagacucaucuuacugua

SEQ ID NO: 2315588 - RNA, 14 nt, Human
uuagacuacauuua

SEQ ID NO: 2315589 - RNA, 18 nt, Human
uuagacuacauuuagaga

SEQ ID NO: 2315590 - RNA, 13 nt, Human
uuagacuccuccu

SEQ ID NO: 2315591 - RNA, 21 nt, Human
uuagacuucgacucaggaucc

SEQ ID NO: 2315592 - RNA, 20 nt, Human
uuagacuguuggggugggua

SEQ ID NO: 2315593 - RNA, 14 nt, Human
uuagacuguagccu

SEQ ID NO: 2315594 - RNA, 20 nt, Human
uuagacuguagccuggauau

SEQ ID NO: 2315595 - RNA, 23 nt, Human
uuagacuguaggaagaguagcau

SEQ ID NO: 2315596 - RNA, 13 nt, Human
uuagaccucagcc

SEQ ID NO: 2315597 - RNA, 12 nt, Human
uuagaccucagc

SEQ ID NO: 2315598 - RNA, 11 nt, Human
uuagaccucag

SEQ ID NO: 2315599 - RNA, 15 nt, Human
uuagaccucagccug

SEQ ID NO: 2315600 - RNA, 14 nt, Human
uuagaccucagccu

SEQ ID NO: 2315601 - RNA, 16 nt, Human
uuagaccucagccugu

SEQ ID NO: 2315602 - RNA, 18 nt, Human
uuagacuaaggccauuau

SEQ ID NO: 2315603 - RNA, 15 nt, Human
uuagaccacaaauag

SEQ ID NO: 2315604 - RNA, 13 nt, Human
uuagacccugggu

SEQ ID NO: 2315605 - RNA, 16 nt, Human
uuagacagucccugcc

SEQ ID NO: 2315606 - RNA, 17 nt, Human
uuagacagucccugcca

SEQ ID NO: 2315607 - RNA, 18 nt, Human
uuagacagucccugccaa

SEQ ID NO: 2315608 - RNA, 14 nt, Human
uuagacagucccug

SEQ ID NO: 2315609 - RNA, 19 nt, Human
uuagaaaauguuauuuaac

SEQ ID NO: 2315610 - RNA, 13 nt, Human
uuagacauaacaa

SEQ ID NO: 2315611 - RNA, 23 nt, Human
uuacuguggaggaaggauuguaa

SEQ ID NO: 2315612 - RNA, 18 nt, Human
uuacuguuagucauuugc

SEQ ID NO: 2315613 - RNA, 23 nt, Human
uuacuguuaccugaucaaugaca

SEQ ID NO: 2315614 - RNA, 21 nt, Human
uuacuuaaaccgccaaggcug

SEQ ID NO: 2315615 - RNA, 14 nt, Human
uuacuguugugacc

SEQ ID NO: 2315616 - RNA, 15 nt, Human
uuacuguugugaccu

SEQ ID NO: 2315617 - RNA, 14 nt, Human
uuacuguuucuguc

SEQ ID NO: 2315618 - RNA, 15 nt, Human
uuacuguuucuguca

SEQ ID NO: 2315619 - RNA, 16 nt, Human
uuacuguuucugucag

SEQ ID NO: 2315620 - RNA, 17 nt, Human
uuacugucuuuuuucua

SEQ ID NO: 2315621 - RNA, 14 nt, Human
uuacugugaaacug

SEQ ID NO: 2315622 - RNA, 14 nt, Human
uuacuguggaggaa

SEQ ID NO: 2315623 - RNA, 16 nt, Human
uuacuguggcuucuua

SEQ ID NO: 2315624 - RNA, 16 nt, Human
uuacuguggaggaagg

SEQ ID NO: 2315625 - RNA, 17 nt, Human
uuacuguggaggaagga

SEQ ID NO: 2315626 - RNA, 18 nt, Human
uuacuguggaggaaggau

SEQ ID NO: 2315627 - RNA, 20 nt, Human
uuacuguggaggaaggauug

SEQ ID NO: 2315628 - RNA, 19 nt, Human
uuacuauggcccuggccua

SEQ ID NO: 2315629 - RNA, 18 nt, Human
uuacuaugccugugucuu

SEQ ID NO: 2315630 - RNA, 14 nt, Human
uuacuaugccugug

SEQ ID NO: 2315631 - RNA, 19 nt, Human
uuacugucuuuuuucuaaa

SEQ ID NO: 2315632 - RNA, 15 nt, Human
uuacuuccuaucaag

SEQ ID NO: 2315633 - RNA, 22 nt, Human
uuacuucguguccgacucuucu

SEQ ID NO: 2315634 - RNA, 16 nt, Human
uuacuuaucuuaugcc

SEQ ID NO: 2315635 - RNA, 19 nt, Human
uuacuucacuuuaauucuc

SEQ ID NO: 2315636 - RNA, 11 nt, Human
uuacuucugcu

SEQ ID NO: 2315637 - RNA, 23 nt, Human
uuacuucuuauacauuugauaaa

SEQ ID NO: 2315638 - RNA, 12 nt, Human
uuacuucugcua

SEQ ID NO: 2315639 - RNA, 15 nt, Human
uuacuguuuguuaug

SEQ ID NO: 2315640 - RNA, 21 nt, Human
uuacuguuugucuucucccca

SEQ ID NO: 2315641 - RNA, 22 nt, Human
uuacuguuugucuucuccccag

SEQ ID NO: 2315642 - RNA, 13 nt, Human
uuacuuaaagauu

SEQ ID NO: 2315643 - RNA, 14 nt, Human
uuacuuaaagauuu

SEQ ID NO: 2315644 - RNA, 19 nt, Human
uuacuuaaagauuuaucaa

SEQ ID NO: 2315645 - RNA, 20 nt, Human
uuacuuaaagauuuaucaaa

SEQ ID NO: 2315646 - RNA, 15 nt, Human
uuacuuagaggaaau

SEQ ID NO: 2315647 - RNA, 20 nt, Human
uuacuuagaggaaauaagaa

SEQ ID NO: 2315648 - RNA, 13 nt, Human
uuacuuaccuaaa

SEQ ID NO: 2315649 - RNA, 22 nt, Human
uuacuuaaagauuuaucaaauc

SEQ ID NO: 2315650 - RNA, 23 nt, Human
uuacuuaucauccacauuguuuu

SEQ ID NO: 2315651 - RNA, 17 nt, Human
uuacuuaucauccacau

SEQ ID NO: 2315652 - RNA, 18 nt, Human
uuacuuagguguggggga

SEQ ID NO: 2315653 - RNA, 18 nt, Human
uuacuacaugugggagcu

SEQ ID NO: 2315654 - RNA, 13 nt, Human
uuacuacaguugu

SEQ ID NO: 2315655 - RNA, 13 nt, Human
uuacuacugugga

SEQ ID NO: 2315656 - RNA, 13 nt, Human
uuacuagaacaca

SEQ ID NO: 2315657 - RNA, 23 nt, Human
uuacuagggaucccucaucuguc

SEQ ID NO: 2315658 - RNA, 20 nt, Human
uuacuagggaucccucaucu

SEQ ID NO: 2315659 - RNA, 16 nt, Human
uuacuagggaucccuc

SEQ ID NO: 2315660 - RNA, 20 nt, Human
uuacuagaacacagaaagcc

SEQ ID NO: 2315661 - RNA, 15 nt, Human
uuacuacaguuguuu

SEQ ID NO: 2315662 - RNA, 14 nt, Human
uuacuacaugcacu

SEQ ID NO: 2315663 - RNA, 13 nt, Human
uuacuacaugcac

SEQ ID NO: 2315664 - RNA, 20 nt, Human
uuacuacaaaauuugaaauu

SEQ ID NO: 2315665 - RNA, 14 nt, Human
uuacuacaaaauuu

SEQ ID NO: 2315666 - RNA, 21 nt, Human
uuacuaagccacaagaaauuu

SEQ ID NO: 2315667 - RNA, 22 nt, Human
uuacuaagccacaagaaauuug

SEQ ID NO: 2315668 - RNA, 14 nt, Human
uuacuaagcuuugc

SEQ ID NO: 2315669 - RNA, 22 nt, Human
uuacuaagcuuugccagcugcu

SEQ ID NO: 2315670 - RNA, 16 nt, Human
uuacuaugcacaauuu

SEQ ID NO: 2315671 - RNA, 13 nt, Human
uuacuaugccugu

SEQ ID NO: 2315672 - RNA, 21 nt, Human
uuacuaucaugucaaacguga

SEQ ID NO: 2315673 - RNA, 19 nt, Human
uuacuaucaugucaaacgu

SEQ ID NO: 2315674 - RNA, 17 nt, Human
uuacuaguuucccuugc

SEQ ID NO: 2315675 - RNA, 21 nt, Human
uuacuaggugcccagaaugag

SEQ ID NO: 2315676 - RNA, 19 nt, Human
uuacuagguaacuucauau

SEQ ID NO: 2315677 - RNA, 17 nt, Human
uuacuagguaacuucau

SEQ ID NO: 2315678 - RNA, 16 nt, Human
uuacuagguaacuuca

SEQ ID NO: 2315679 - RNA, 14 nt, Human
uuacuagguaacuu

SEQ ID NO: 2315680 - RNA, 16 nt, Human
uuacacaaaacaaaug

SEQ ID NO: 2315681 - RNA, 18 nt, Human
uuacacaaaacaaaugcc

SEQ ID NO: 2315682 - RNA, 21 nt, Human
uuacaauuuuuuuaauuuugu

SEQ ID NO: 2315683 - RNA, 22 nt, Human
uuacaauuuuuuuaauuuugua

SEQ ID NO: 2315684 - RNA, 23 nt, Human
uuacaauuuuuuuaauuuuguau

SEQ ID NO: 2315685 - RNA, 20 nt, Human
uuacaauuuuuuaucaugca

SEQ ID NO: 2315686 - RNA, 18 nt, Human
uuacaauuuuuuaucaug

SEQ ID NO: 2315687 - RNA, 17 nt, Human
uuacaauuuuuuaucau

SEQ ID NO: 2315688 - RNA, 15 nt, Human
uuacaauuuuuuauc

SEQ ID NO: 2315689 - RNA, 13 nt, Human
uuacuaagaagaa

SEQ ID NO: 2315690 - RNA, 15 nt, Human
uuacuaagaagaaaa

SEQ ID NO: 2315691 - RNA, 21 nt, Human
uuacacaaaacaaaugccaca

SEQ ID NO: 2315692 - RNA, 23 nt, Human
uuacuaaagaaaauaucugaaau

SEQ ID NO: 2315693 - RNA, 15 nt, Human
uuacuaaagaaagau

SEQ ID NO: 2315694 - RNA, 18 nt, Human
uuacuaaagaaagauuac

SEQ ID NO: 2315695 - RNA, 22 nt, Human
uuacuaaagaaagauuacuuag

SEQ ID NO: 2315696 - RNA, 15 nt, Human
uuacuaacuaaacuc

SEQ ID NO: 2315697 - RNA, 20 nt, Human
uuacuaacuaaacucucuuu

SEQ ID NO: 2315698 - RNA, 16 nt, Human
uuacuaauagacaauu

SEQ ID NO: 2315699 - RNA, 14 nt, Human
uuacuaaguuuuua

SEQ ID NO: 2315700 - RNA, 13 nt, Human
uuacuaaguuuuu

SEQ ID NO: 2315701 - RNA, 22 nt, Human
uuacuaagaagaaaauugcugu

SEQ ID NO: 2315702 - RNA, 21 nt, Human
uuacuaagaugacauugcuaa

SEQ ID NO: 2315703 - RNA, 22 nt, Human
uuacuaagaugacauugcuaag

SEQ ID NO: 2315704 - RNA, 23 nt, Human
uuacuaagaugacauugcuaaga

SEQ ID NO: 2315705 - RNA, 21 nt, Human
uuacuaagcauagcaaacaga

SEQ ID NO: 2315706 - RNA, 17 nt, Human
uuacuaagccacaagaa

SEQ ID NO: 2315707 - RNA, 18 nt, Human
uuacuaagccacaagaaa

SEQ ID NO: 2315708 - RNA, 20 nt, Human
uuacuaagccacaagaaauu

SEQ ID NO: 2315709 - RNA, 16 nt, Human
uuagcuggcauuacag

SEQ ID NO: 2315710 - RNA, 12 nt, Human
uuagcugggaga

SEQ ID NO: 2315711 - RNA, 15 nt, Human
uuagcugucugcuca

SEQ ID NO: 2315712 - RNA, 15 nt, Human
uuagcugugugaaau

SEQ ID NO: 2315713 - RNA, 17 nt, Human
uuagcugucugcucaga

SEQ ID NO: 2315714 - RNA, 12 nt, Human
uuagcuggaaaa

SEQ ID NO: 2315715 - RNA, 13 nt, Human
uuagcuggaaaag

SEQ ID NO: 2315716 - RNA, 13 nt, Human
uuagcugcagaac

SEQ ID NO: 2315717 - RNA, 23 nt, Human
uuagcugaugaacuuauucugua

SEQ ID NO: 2315718 - RNA, 10 nt, Human
uuagcugagc

SEQ ID NO: 2315719 - RNA, 23 nt, Human
uuagcucuuaauuguucauuuug

SEQ ID NO: 2315720 - RNA, 14 nt, Human
uuagcuccuguggc

SEQ ID NO: 2315721 - RNA, 19 nt, Human
uuagcucuggaccagccug

SEQ ID NO: 2315722 - RNA, 12 nt, Human
uuagcucuuaau

SEQ ID NO: 2315723 - RNA, 22 nt, Human
uuagcucuuaauuguucauuuu

SEQ ID NO: 2315724 - RNA, 13 nt, Human
uuagcuccccucc

SEQ ID NO: 2315725 - RNA, 14 nt, Human
uuagcuccccucca

SEQ ID NO: 2315726 - RNA, 18 nt, Human
uuagcuccccuccaaccu

SEQ ID NO: 2315727 - RNA, 20 nt, Human
uuagcucccuguucuugggu

SEQ ID NO: 2315728 - RNA, 13 nt, Human
uuagcuccugugg

SEQ ID NO: 2315729 - RNA, 19 nt, Human
uuaggaaauaaaaccuuuc

SEQ ID NO: 2315730 - RNA, 18 nt, Human
uuaggaaauaaaaccuuu

SEQ ID NO: 2315731 - RNA, 17 nt, Human
uuaggaaauaaaaccuu

SEQ ID NO: 2315732 - RNA, 15 nt, Human
uuaggaaauaaaacc

SEQ ID NO: 2315733 - RNA, 21 nt, Human
uuaggaaauaaaaccuuucaa

SEQ ID NO: 2315734 - RNA, 20 nt, Human
uuaggaaauaaaaccuuuca

SEQ ID NO: 2315735 - RNA, 19 nt, Human
uuaggaaaugaaugugugu

SEQ ID NO: 2315736 - RNA, 15 nt, Human
uuaggaaaugaaugu

SEQ ID NO: 2315737 - RNA, 17 nt, Human
uuaggaaaugaaugugu

SEQ ID NO: 2315738 - RNA, 12 nt, Human
uuaggaaauaaa

SEQ ID NO: 2315739 - RNA, 11 nt, Human
uuaggaaauaa

SEQ ID NO: 2315740 - RNA, 18 nt, Human
uuagcuuuuuaauuguug

SEQ ID NO: 2315741 - RNA, 19 nt, Human
uuagcuuugcucugccaac

SEQ ID NO: 2315742 - RNA, 16 nt, Human
uuagcuuuuuaauugu

SEQ ID NO: 2315743 - RNA, 17 nt, Human
uuagcuuuuuaauuguu

SEQ ID NO: 2315744 - RNA, 21 nt, Human
uuagcuugaaggaucuguuuu

SEQ ID NO: 2315745 - RNA, 16 nt, Human
uuagcuuuacuguuug

SEQ ID NO: 2315746 - RNA, 15 nt, Human
uuagcuuuacuguuu

SEQ ID NO: 2315747 - RNA, 17 nt, Human
uuagcuuuacuguuugu

SEQ ID NO: 2315748 - RNA, 15 nt, Human
uuagcuuugcucugc

SEQ ID NO: 2315749 - RNA, 21 nt, Human
uuagcuuagaccucagccugu

SEQ ID NO: 2315750 - RNA, 18 nt, Human
uuagcuuagaccucagcc

SEQ ID NO: 2315751 - RNA, 17 nt, Human
uuagcuuagaccucagc

SEQ ID NO: 2315752 - RNA, 16 nt, Human
uuagcuuagaccucag

SEQ ID NO: 2315753 - RNA, 21 nt, Human
uuagcuguuauuucuauuuuu

SEQ ID NO: 2315754 - RNA, 19 nt, Human
uuagcuguuauuucuauuu

SEQ ID NO: 2315755 - RNA, 17 nt, Human
uuagcuguuauuucuau

SEQ ID NO: 2315756 - RNA, 16 nt, Human
uuagcuguuauuucua

SEQ ID NO: 2315757 - RNA, 16 nt, Human
uuagcugugugaaaua

SEQ ID NO: 2315758 - RNA, 21 nt, Human
uuagagcagaugaccccuccc

SEQ ID NO: 2315759 - RNA, 13 nt, Human
uuagagaugaauu

SEQ ID NO: 2315760 - RNA, 20 nt, Human
uuagagcaguuucuguccug

SEQ ID NO: 2315761 - RNA, 15 nt, Human
uuagagcauugccau

SEQ ID NO: 2315762 - RNA, 16 nt, Human
uuagagccaggcacac

SEQ ID NO: 2315763 - RNA, 21 nt, Human
uuagagccaggcacacacugu

SEQ ID NO: 2315764 - RNA, 12 nt, Human
uuagaggccagc

SEQ ID NO: 2315765 - RNA, 18 nt, Human
uuagagggagguguuuaa

SEQ ID NO: 2315766 - RNA, 18 nt, Human
uuagagggaggagaauga

SEQ ID NO: 2315767 - RNA, 19 nt, Human
uuagaggaaaaaaaugacu

SEQ ID NO: 2315768 - RNA, 20 nt, Human
uuagaggaaauaagaaaaau

SEQ ID NO: 2315769 - RNA, 22 nt, Human
uuagaggaaauaagaaaaauca

SEQ ID NO: 2315770 - RNA, 23 nt, Human
uuagaggaaauaagaaaaaucau

SEQ ID NO: 2315771 - RNA, 18 nt, Human
uuagaggaaaaaaaugac

SEQ ID NO: 2315772 - RNA, 17 nt, Human
uuagaggaaaaaaauga

SEQ ID NO: 2315773 - RNA, 14 nt, Human
uuagagccucccuc

SEQ ID NO: 2315774 - RNA, 22 nt, Human
uuagagccaggcacacacugug

SEQ ID NO: 2315775 - RNA, 13 nt, Human
uuagagccucccu

SEQ ID NO: 2315776 - RNA, 21 nt, Human
uuagagcugacacaaaccugc

SEQ ID NO: 2315777 - RNA, 14 nt, Human
uuagagucagccuu

SEQ ID NO: 2315778 - RNA, 20 nt, Human
uuagagguuuuaaagugauu

SEQ ID NO: 2315779 - RNA, 13 nt, Human
uuagagguuuuaa

SEQ ID NO: 2315780 - RNA, 19 nt, Human
uuagagguuuuaaagugau

SEQ ID NO: 2315781 - RNA, 21 nt, Human
uuagagguuuuaaagugauua

SEQ ID NO: 2315782 - RNA, 17 nt, Human
uuagagugucuuuccac

SEQ ID NO: 2315783 - RNA, 16 nt, Human
uuagagugucuuucca

SEQ ID NO: 2315784 - RNA, 12 nt, Human
uuagaguuagac

SEQ ID NO: 2315785 - RNA, 13 nt, Human
uuagaguuagacu

SEQ ID NO: 2315786 - RNA, 14 nt, Human
uuagaguugauacu

SEQ ID NO: 2315787 - RNA, 14 nt, Human
uuagaguuagacug

SEQ ID NO: 2315788 - RNA, 17 nt, Human
uuagaguuagacuguug

SEQ ID NO: 2315789 - RNA, 18 nt, Human
uuagaguuagacuguugg

SEQ ID NO: 2315790 - RNA, 21 nt, Human
uuagcguagcuaagugaaaag

SEQ ID NO: 2315791 - RNA, 12 nt, Human
uuagcuaaagga

SEQ ID NO: 2315792 - RNA, 16 nt, Human
uuagcuacuauauaug

SEQ ID NO: 2315793 - RNA, 21 nt, Human
uuagcuaaacggauuccaaag

SEQ ID NO: 2315794 - RNA, 20 nt, Human
uuagaugcaguucugaagaa

SEQ ID NO: 2315795 - RNA, 21 nt, Human
uuagaugcaguucugaagaag

SEQ ID NO: 2315796 - RNA, 13 nt, Human
uuagaucaaauac

SEQ ID NO: 2315797 - RNA, 14 nt, Human
uuagauauaacacu

SEQ ID NO: 2315798 - RNA, 17 nt, Human
uuagauauaacacuaug

SEQ ID NO: 2315799 - RNA, 23 nt, Human
uuagaucaaauacuuuaaaggaa

SEQ ID NO: 2315800 - RNA, 16 nt, Human
uuagaguuaacaauga

SEQ ID NO: 2315801 - RNA, 22 nt, Human
uuagauaauacaccacuacauu

SEQ ID NO: 2315802 - RNA, 18 nt, Human
uuagucucuaaagaguuu

SEQ ID NO: 2315803 - RNA, 22 nt, Human
uuagucucuuguauuaaacucu

SEQ ID NO: 2315804 - RNA, 22 nt, Human
uuagucucaguuugugugucuu

SEQ ID NO: 2315805 - RNA, 23 nt, Human
uuagucucaguuugugugucuua

SEQ ID NO: 2315806 - RNA, 12 nt, Human
uuagucucaguu

SEQ ID NO: 2315807 - RNA, 21 nt, Human
uuagucucaguuugugugucu

SEQ ID NO: 2315808 - RNA, 19 nt, Human
uuagucuacucuuaagcca

SEQ ID NO: 2315809 - RNA, 20 nt, Human
uuagucuacucuuaagccau

SEQ ID NO: 2315810 - RNA, 21 nt, Human
uuagucuacucuuaagccauc

SEQ ID NO: 2315811 - RNA, 22 nt, Human
uuagucuacucuuaagccaucu

SEQ ID NO: 2315812 - RNA, 12 nt, Human
uuaguguuucug

SEQ ID NO: 2315813 - RNA, 16 nt, Human
uuaguguuucugugca

SEQ ID NO: 2315814 - RNA, 14 nt, Human
uuaguguucauaaa

SEQ ID NO: 2315815 - RNA, 21 nt, Human
uuaguguuuggguauauucau

SEQ ID NO: 2315816 - RNA, 17 nt, Human
uuaguguuucugugcau

SEQ ID NO: 2315817 - RNA, 18 nt, Human
uuaguguuucugugcaug

SEQ ID NO: 2315818 - RNA, 13 nt, Human
uuaguuaauauau

SEQ ID NO: 2315819 - RNA, 16 nt, Human
uuaguuauagaugucu

SEQ ID NO: 2315820 - RNA, 13 nt, Human
uuaguuauaguuu

SEQ ID NO: 2315821 - RNA, 15 nt, Human
uuaguuauaguuuca

SEQ ID NO: 2315822 - RNA, 18 nt, Human
uuaguuauaguuucagau

SEQ ID NO: 2315823 - RNA, 22 nt, Human
uuaguuauaguuucagauauau

SEQ ID NO: 2315824 - RNA, 22 nt, Human
uuagucacuuuuuuuuuccaaa

SEQ ID NO: 2315825 - RNA, 23 nt, Human
uuagucacugccugcagaggucu

SEQ ID NO: 2315826 - RNA, 13 nt, Human
uuagucacuuuuu

SEQ ID NO: 2315827 - RNA, 13 nt, Human
uuagucaugugac

SEQ ID NO: 2315828 - RNA, 14 nt, Human
uuagucaugugacc

SEQ ID NO: 2315829 - RNA, 16 nt, Human
uuaguauuugcauauu

SEQ ID NO: 2315830 - RNA, 13 nt, Human
uuaguauuugcau

SEQ ID NO: 2315831 - RNA, 22 nt, Human
uuaguauuuauuuaauguuaug

SEQ ID NO: 2315832 - RNA, 17 nt, Human
uuagucccucaugcaaa

SEQ ID NO: 2315833 - RNA, 13 nt, Human
uuagucgugagcu

SEQ ID NO: 2315834 - RNA, 13 nt, Human
uuaguccuugcuu

SEQ ID NO: 2315835 - RNA, 16 nt, Human
uuagucgugagcucuu

SEQ ID NO: 2315836 - RNA, 19 nt, Human
uuagucgugagcucuugug

SEQ ID NO: 2315837 - RNA, 21 nt, Human
uuagucgugagcucuugugag

SEQ ID NO: 2315838 - RNA, 24 nt, Human
uuagucgugagcucuugugaggaa

SEQ ID NO: 2315839 - RNA, 23 nt, Human
uuaguaucuaacauguaucccaa

SEQ ID NO: 2315840 - RNA, 18 nt, Human
uuaguaugaggcauuugu

SEQ ID NO: 2315841 - RNA, 18 nt, Human
uuaguaucuaacauguau

SEQ ID NO: 2315842 - RNA, 17 nt, Human
uuaguaucuaacaugua

SEQ ID NO: 2315843 - RNA, 15 nt, Human
uuaguaucuaacaug

SEQ ID NO: 2315844 - RNA, 16 nt, Human
uuaguaugaggcauuu

SEQ ID NO: 2315845 - RNA, 16 nt, Human
uuaggaugugugcaug

SEQ ID NO: 2315846 - RNA, 14 nt, Human
uuaggauuuaacag

SEQ ID NO: 2315847 - RNA, 21 nt, Human
uuaggauuuaacagucauuua

SEQ ID NO: 2315848 - RNA, 15 nt, Human
uuaggcagauugaaa

SEQ ID NO: 2315849 - RNA, 22 nt, Human
uuaggauuuaacagucauuuaa

SEQ ID NO: 2315850 - RNA, 14 nt, Human
uuaggcagggaagu

SEQ ID NO: 2315851 - RNA, 23 nt, Human
uuaggcagcagcuuuuaauacag

SEQ ID NO: 2315852 - RNA, 13 nt, Human
uuaggcagcagcu

SEQ ID NO: 2315853 - RNA, 21 nt, Human
uuaggaguucgagaccagccu

SEQ ID NO: 2315854 - RNA, 19 nt, Human
uuaggagggaguuaucuaa

SEQ ID NO: 2315855 - RNA, 18 nt, Human
uuaggauguugaaaaagu

SEQ ID NO: 2315856 - RNA, 21 nt, Human
uuaggaaguguaacagcugag

SEQ ID NO: 2315857 - RNA, 20 nt, Human
uuaggaaguguaacagcuga

SEQ ID NO: 2315858 - RNA, 19 nt, Human
uuaggaaguguaacagcug

SEQ ID NO: 2315859 - RNA, 13 nt, Human
uuaggaaguguaa

SEQ ID NO: 2315860 - RNA, 15 nt, Human
uuaggaagagaaacc

SEQ ID NO: 2315861 - RNA, 23 nt, Human
uuaggagauuuuagguguugauu

SEQ ID NO: 2315862 - RNA, 17 nt, Human
uuaggagaagccaggaa

SEQ ID NO: 2315863 - RNA, 16 nt, Human
uuaggagaagccagga

SEQ ID NO: 2315864 - RNA, 21 nt, Human
uuaggacaaucaguccccucc

SEQ ID NO: 2315865 - RNA, 19 nt, Human
uuaggaauuaaguuaucuu

SEQ ID NO: 2315866 - RNA, 23 nt, Human
uuaggaauuaaguuaucuuuaaa

SEQ ID NO: 2315867 - RNA, 13 nt, Human
uuaggagaagcca

SEQ ID NO: 2315868 - RNA, 12 nt, Human
uuaggagaagcc

SEQ ID NO: 2315869 - RNA, 22 nt, Human
uuaggccaaaaaaauguaagau

SEQ ID NO: 2315870 - RNA, 19 nt, Human
uuaggcagggauuugagga

SEQ ID NO: 2315871 - RNA, 12 nt, Human
uuaggcagggau

SEQ ID NO: 2315872 - RNA, 18 nt, Human
uuaggcagggauuugagg

SEQ ID NO: 2315873 - RNA, 16 nt, Human
uuaggcuauucacaac

SEQ ID NO: 2315874 - RNA, 15 nt, Human
uuaggcuauucacaa

SEQ ID NO: 2315875 - RNA, 16 nt, Human
uuaggccuuccucucu

SEQ ID NO: 2315876 - RNA, 17 nt, Human
uuaggccuggcacagug

SEQ ID NO: 2315877 - RNA, 18 nt, Human
uuaggccuggcacagugu

SEQ ID NO: 2315878 - RNA, 12 nt, Human
uuaggccuggca

SEQ ID NO: 2315879 - RNA, 14 nt, Human
uuaggccuggcaca

SEQ ID NO: 2315880 - RNA, 15 nt, Human
uuaggccuggcacag

SEQ ID NO: 2315881 - RNA, 16 nt, Human
uuaggcugguggccca

SEQ ID NO: 2315882 - RNA, 18 nt, Human
uuaggcugguggcccagg

SEQ ID NO: 2315883 - RNA, 17 nt, Human
uuaggcugguggcccag

SEQ ID NO: 2315884 - RNA, 19 nt, Human
uuaggcugguggcccagga

SEQ ID NO: 2315885 - RNA, 14 nt, Human
uuagggaaaacauu

SEQ ID NO: 2315886 - RNA, 17 nt, Human
uuaguagagacaggguu

SEQ ID NO: 2315887 - RNA, 13 nt, Human
uuaguagcauguu

SEQ ID NO: 2315888 - RNA, 12 nt, Human
uuaguagcaugu

SEQ ID NO: 2315889 - RNA, 16 nt, Human
uguuuuguucuguggu

SEQ ID NO: 2315890 - RNA, 22 nt, Human
uguuuuaagaggcagggucuca

SEQ ID NO: 2315891 - RNA, 18 nt, Human
uguuuuaaggaugcuugu

SEQ ID NO: 2315892 - RNA, 16 nt, Human
uguuuuuaaaaaucau

SEQ ID NO: 2315893 - RNA, 14 nt, Human
uguuuuuuggucuu

SEQ ID NO: 2315894 - RNA, 17 nt, Human
uguuuuguucuuuaaag

SEQ ID NO: 2315895 - RNA, 17 nt, Human
uguuuuguuuggagaca

SEQ ID NO: 2315896 - RNA, 18 nt, Human
uguuuuuuuuuuccacuu

SEQ ID NO: 2315897 - RNA, 19 nt, Human
uguuuuuuuuuuccacuua

SEQ ID NO: 2315898 - RNA, 20 nt, Human
uuaaaagaaagccucagaga

SEQ ID NO: 2315899 - RNA, 23 nt, Human
uuaaaagaaaauaaaaaaaagaa

SEQ ID NO: 2315900 - RNA, 22 nt, Human
uuaaaagaaaauaaaaaaaaga

SEQ ID NO: 2315901 - RNA, 18 nt, Human
uguuuuuuuuuaaagacu

SEQ ID NO: 2315902 - RNA, 16 nt, Human
uguuuuuuggucuuuu

SEQ ID NO: 2315903 - RNA, 17 nt, Human
uuaaaagauacaguuac

SEQ ID NO: 2315904 - RNA, 14 nt, Human
uuaaaagauacagu

SEQ ID NO: 2315905 - RNA, 22 nt, Human
uuaaaagaauauuuuaacuucc

SEQ ID NO: 2315906 - RNA, 21 nt, Human
uuaaaagaauauuuuaacuuc

SEQ ID NO: 2315907 - RNA, 20 nt, Human
uuaaacuguguggacuguga

SEQ ID NO: 2315908 - RNA, 11 nt, Human
uuaaagaaagu

SEQ ID NO: 2315909 - RNA, 21 nt, Human
uuaaacuguguggacugugau

SEQ ID NO: 2315910 - RNA, 19 nt, Human
uuaaacuguguacauaacu

SEQ ID NO: 2315911 - RNA, 12 nt, Human
uuaaacugugua

SEQ ID NO: 2315912 - RNA, 22 nt, Human
uuaaacugguauuuuaucuuug

SEQ ID NO: 2315913 - RNA, 13 nt, Human
uuaaacugguauu

SEQ ID NO: 2315914 - RNA, 19 nt, Human
uuaaacugguauuuuaucu

SEQ ID NO: 2315915 - RNA, 17 nt, Human
uuaaaaguugaauuuuu

SEQ ID NO: 2315916 - RNA, 22 nt, Human
uuaaaauagcaacacucuauau

SEQ ID NO: 2315917 - RNA, 15 nt, Human
uuaaaauagaaauaa

SEQ ID NO: 2315918 - RNA, 19 nt, Human
uuaaacucuucacaaaauc

SEQ ID NO: 2315919 - RNA, 22 nt, Human
uuaaacucuguugcaagugcaa

SEQ ID NO: 2315920 - RNA, 20 nt, Human
uuaaacucagggacagagcc

SEQ ID NO: 2315921 - RNA, 22 nt, Human
uuaaacucagggacagagccau

SEQ ID NO: 2315922 - RNA, 17 nt, Human
uuaaaaggauuuuuauc

SEQ ID NO: 2315923 - RNA, 20 nt, Human
uuaaaaggauuuuuaucuuu

SEQ ID NO: 2315924 - RNA, 22 nt, Human
uuaaaaggauuuuuaucuuucg

SEQ ID NO: 2315925 - RNA, 21 nt, Human
uuaaaagggauuacccaagca

SEQ ID NO: 2315926 - RNA, 23 nt, Human
uuaaaagggauuacccaagcaaa

SEQ ID NO: 2315927 - RNA, 21 nt, Human
uuaaaauaccagccaguaaau

SEQ ID NO: 2315928 - RNA, 19 nt, Human
uuaaaauacacacucaaau

SEQ ID NO: 2315929 - RNA, 21 nt, Human
uuaaaagaugcaauguagagg

SEQ ID NO: 2315930 - RNA, 16 nt, Human
uuaaaagauucauuuu

SEQ ID NO: 2315931 - RNA, 17 nt, Human
uuaaaagauucauuuuu

SEQ ID NO: 2315932 - RNA, 21 nt, Human
uuaaaagauucauuuuuaauc

SEQ ID NO: 2315933 - RNA, 18 nt, Human
uuaaaagaugaaaauauu

SEQ ID NO: 2315934 - RNA, 15 nt, Human
uuaaaagaugaaaau

SEQ ID NO: 2315935 - RNA, 15 nt, Human
uguuuguauguauaa

SEQ ID NO: 2315936 - RNA, 19 nt, Human
uguuuguauaaugaaugag

SEQ ID NO: 2315937 - RNA, 15 nt, Human
uguuugucauuagcc

SEQ ID NO: 2315938 - RNA, 17 nt, Human
uguuugucauuagccug

SEQ ID NO: 2315939 - RNA, 22 nt, Human
uguuugguauuguauuuauuca

SEQ ID NO: 2315940 - RNA, 16 nt, Human
uguuugguauuguauu

SEQ ID NO: 2315941 - RNA, 17 nt, Human
uguuugguauuguauuu

SEQ ID NO: 2315942 - RNA, 20 nt, Human
uguuugguucuggggccccu

SEQ ID NO: 2315943 - RNA, 16 nt, Human
uguuugguucuggggc

SEQ ID NO: 2315944 - RNA, 17 nt, Human
uguuugucugucuucau

SEQ ID NO: 2315945 - RNA, 19 nt, Human
uguuugucugucuucauag

SEQ ID NO: 2315946 - RNA, 16 nt, Human
uguuugucagauauga

SEQ ID NO: 2315947 - RNA, 16 nt, Human
uguuugucucauccca

SEQ ID NO: 2315948 - RNA, 13 nt, Human
uguuugugauuga

SEQ ID NO: 2315949 - RNA, 20 nt, Human
uguuuuaagaggcagggucu

SEQ ID NO: 2315950 - RNA, 17 nt, Human
uguuugucuucucccca

SEQ ID NO: 2315951 - RNA, 16 nt, Human
uguuugucuucucccc

SEQ ID NO: 2315952 - RNA, 14 nt, Human
uguuugugcugugg

SEQ ID NO: 2315953 - RNA, 13 nt, Human
uguuugugcugug

SEQ ID NO: 2315954 - RNA, 15 nt, Human
uguuuccuucagugc

SEQ ID NO: 2315955 - RNA, 12 nt, Human
uguuuccuucag

SEQ ID NO: 2315956 - RNA, 23 nt, Human
uguuuccuggcacugcuuccagu

SEQ ID NO: 2315957 - RNA, 20 nt, Human
uguuuccagacuuccuugag

SEQ ID NO: 2315958 - RNA, 23 nt, Human
uguuuccaauguuuagcaaauac

SEQ ID NO: 2315959 - RNA, 22 nt, Human
uguuucauguuuugugacuaua

SEQ ID NO: 2315960 - RNA, 19 nt, Human
uguuucauguuuugugacu

SEQ ID NO: 2315961 - RNA, 21 nt, Human
uguuucauguuuugugacuau

SEQ ID NO: 2315962 - RNA, 13 nt, Human
uguuucauguuuu

SEQ ID NO: 2315963 - RNA, 14 nt, Human
uguuucauguuuug

SEQ ID NO: 2315964 - RNA, 23 nt, Human
uguuuccagacuuccuugagaca

SEQ ID NO: 2315965 - RNA, 18 nt, Human
uguuuccaaccuggagua

SEQ ID NO: 2315966 - RNA, 15 nt, Human
uguuuccaauguuua

SEQ ID NO: 2315967 - RNA, 21 nt, Human
uguuuccaauguuuagcaaau

SEQ ID NO: 2315968 - RNA, 22 nt, Human
uguuuccaauguuuagcaaaua

SEQ ID NO: 2315969 - RNA, 19 nt, Human
uguuucgugaaguauacug

SEQ ID NO: 2315970 - RNA, 15 nt, Human
uguuucgugaaguau

SEQ ID NO: 2315971 - RNA, 20 nt, Human
uguuucgugaaguauacugu

SEQ ID NO: 2315972 - RNA, 15 nt, Human
uguuucguggggagg

SEQ ID NO: 2315973 - RNA, 21 nt, Human
uguuucgcugauauauguguu

SEQ ID NO: 2315974 - RNA, 22 nt, Human
uguuucggagacgggaccgggc

SEQ ID NO: 2315975 - RNA, 11 nt, Human
uguuuccuuuu

SEQ ID NO: 2315976 - RNA, 21 nt, Human
uguuucuaauaaagaaagcag

SEQ ID NO: 2315977 - RNA, 21 nt, Human
uguuucuagcacuggccugca

SEQ ID NO: 2315978 - RNA, 20 nt, Human
uguuucauauugaugugugu

SEQ ID NO: 2315979 - RNA, 18 nt, Human
uguuucacgaaguuuguu

SEQ ID NO: 2315980 - RNA, 16 nt, Human
uguuucaauugcaucu

SEQ ID NO: 2315981 - RNA, 17 nt, Human
uguuucaaguggggcuc

SEQ ID NO: 2315982 - RNA, 21 nt, Human
uguuucaaguggggcucgcca

SEQ ID NO: 2315983 - RNA, 15 nt, Human
uguuucaaacuuuac

SEQ ID NO: 2315984 - RNA, 17 nt, Human
uguuuagaguugcaauc

SEQ ID NO: 2315985 - RNA, 21 nt, Human
uguuucaaacauauauaacaa

SEQ ID NO: 2315986 - RNA, 22 nt, Human
uguuucaaacauauauaacaau

SEQ ID NO: 2315987 - RNA, 16 nt, Human
uguuuagauaauacac

SEQ ID NO: 2315988 - RNA, 19 nt, Human
uguuucaaacauauauaac

SEQ ID NO: 2315989 - RNA, 16 nt, Human
uguuuagaguugcaau

SEQ ID NO: 2315990 - RNA, 23 nt, Human
uggugccccaggaccagcucagg

SEQ ID NO: 2315991 - RNA, 19 nt, Human
uguuuagaagaaguguguc

SEQ ID NO: 2315992 - RNA, 16 nt, Human
uguuuagaagaagugu

SEQ ID NO: 2315993 - RNA, 21 nt, Human
uggugccccaggaccagcuca

SEQ ID NO: 2315994 - RNA, 20 nt, Human
uggugccccaggaccagcuc

SEQ ID NO: 2315995 - RNA, 19 nt, Human
uggugccccaggaccagcu

SEQ ID NO: 2315996 - RNA, 18 nt, Human
uggugccccaggaccagc

SEQ ID NO: 2315997 - RNA, 17 nt, Human
uggugccccaggaccag

SEQ ID NO: 2315998 - RNA, 16 nt, Human
uggugccccaggacca

SEQ ID NO: 2315999 - RNA, 14 nt, Human
uggugccccaggac

SEQ ID NO: 2316000 - RNA, 13 nt, Human
uggugccccagga

SEQ ID NO: 2316001 - RNA, 14 nt, Human
uggugccagccuuc

SEQ ID NO: 2316002 - RNA, 13 nt, Human
uggugccagccuu

SEQ ID NO: 2316003 - RNA, 21 nt, Human
uggugccagccuuccucugca

SEQ ID NO: 2316004 - RNA, 22 nt, Human
uggugccaauggaaccuccuuu

SEQ ID NO: 2316005 - RNA, 17 nt, Human
uggugccacaaauaaaa

SEQ ID NO: 2316006 - RNA, 18 nt, Human
uggugccacaaauaaaau

SEQ ID NO: 2316007 - RNA, 20 nt, Human
uggugccacaaauaaaaugg

SEQ ID NO: 2316008 - RNA, 17 nt, Human
uuacaagcccccccuuc

SEQ ID NO: 2316009 - RNA, 19 nt, Human
uuacaagcccccccuucca

SEQ ID NO: 2316010 - RNA, 20 nt, Human
uuacaagcccccccuuccac

SEQ ID NO: 2316011 - RNA, 20 nt, Human
uuacaagcgugagccacugc

SEQ ID NO: 2316012 - RNA, 17 nt, Human
uuaauguuuauuccuga

SEQ ID NO: 2316013 - RNA, 15 nt, Human
uuaauguuuauuccu

SEQ ID NO: 2316014 - RNA, 22 nt, Human
uuaauguucugaauaauuucuu

SEQ ID NO: 2316015 - RNA, 23 nt, Human
uuaauguucugaauaauuucuua

SEQ ID NO: 2316016 - RNA, 17 nt, Human
uuacaauugaaaugacu

SEQ ID NO: 2316017 - RNA, 13 nt, Human
uuacaauugucau

SEQ ID NO: 2316018 - RNA, 12 nt, Human
uuacaauuuaca

SEQ ID NO: 2316019 - RNA, 13 nt, Human
uuacaauuuacaa

SEQ ID NO: 2316020 - RNA, 16 nt, Human
uuacaauuuacaaagu

SEQ ID NO: 2316021 - RNA, 18 nt, Human
uuacaauuuacaaagugu

SEQ ID NO: 2316022 - RNA, 19 nt, Human
uuacaauuuacaaagugug

SEQ ID NO: 2316023 - RNA, 15 nt, Human
uuacaauugaaauga

SEQ ID NO: 2316024 - RNA, 14 nt, Human
uuacaauugaaaug

SEQ ID NO: 2316025 - RNA, 13 nt, Human
uuacaauugaaau

SEQ ID NO: 2316026 - RNA, 18 nt, Human
uuacaauucccugcuguc

SEQ ID NO: 2316027 - RNA, 19 nt, Human
uuacaauucccugcugucg

SEQ ID NO: 2316028 - RNA, 21 nt, Human
uuacaagcgugagccacugca

SEQ ID NO: 2316029 - RNA, 16 nt, Human
uuacaauguucauccc

SEQ ID NO: 2316030 - RNA, 20 nt, Human
uuaaugcauguuaggaaaau

SEQ ID NO: 2316031 - RNA, 18 nt, Human
uuaaugcaucuagauuau

SEQ ID NO: 2316032 - RNA, 19 nt, Human
uuaaugccauuaucccuga

SEQ ID NO: 2316033 - RNA, 15 nt, Human
uuaaugcacuuucua

SEQ ID NO: 2316034 - RNA, 11 nt, Human
uuaaugcacuu

SEQ ID NO: 2316035 - RNA, 12 nt, Human
uuaaugcacuuu

SEQ ID NO: 2316036 - RNA, 13 nt, Human
uuaaugcacuuuc

SEQ ID NO: 2316037 - RNA, 14 nt, Human
uuaaugcacuuucu

SEQ ID NO: 2316038 - RNA, 21 nt, Human
uuaauggggguagcagcugga

SEQ ID NO: 2316039 - RNA, 23 nt, Human
uuaaugccgauauacucuagaug

SEQ ID NO: 2316040 - RNA, 19 nt, Human
uuaauggggguagcagcug

SEQ ID NO: 2316041 - RNA, 18 nt, Human
uuaauguaaucugauggc

SEQ ID NO: 2316042 - RNA, 20 nt, Human
uuaauggugccuucauuugg

SEQ ID NO: 2316043 - RNA, 19 nt, Human
uuaauggugccuucauuug

SEQ ID NO: 2316044 - RNA, 17 nt, Human
uuaauggugccuucauu

SEQ ID NO: 2316045 - RNA, 15 nt, Human
uuaauguagauuuuu

SEQ ID NO: 2316046 - RNA, 13 nt, Human
uuaauguguauua

SEQ ID NO: 2316047 - RNA, 21 nt, Human
uuaaugugcuguguaaaguua

SEQ ID NO: 2316048 - RNA, 22 nt, Human
uuaaugugcuguguaaaguuag

SEQ ID NO: 2316049 - RNA, 16 nt, Human
uuaaugugcuguguaa

SEQ ID NO: 2316050 - RNA, 17 nt, Human
uuaaugugcuguguaaa

SEQ ID NO: 2316051 - RNA, 18 nt, Human
uuaaugugcuguguaaag

SEQ ID NO: 2316052 - RNA, 19 nt, Human
uuaaugugcuguguaaagu

SEQ ID NO: 2316053 - RNA, 15 nt, Human
uuaauguagccaugg

SEQ ID NO: 2316054 - RNA, 14 nt, Human
uuaaugugcugugu

SEQ ID NO: 2316055 - RNA, 15 nt, Human
uuaaugugcugugua

SEQ ID NO: 2316056 - RNA, 15 nt, Human
uuaauauaacugccu

SEQ ID NO: 2316057 - RNA, 17 nt, Human
uuaagcuguuacugucu

SEQ ID NO: 2316058 - RNA, 20 nt, Human
uuaagcagcucuugcuaauc

SEQ ID NO: 2316059 - RNA, 22 nt, Human
uuaagccucauauuuaaagaca

SEQ ID NO: 2316060 - RNA, 16 nt, Human
uuaagccuuuggaaac

SEQ ID NO: 2316061 - RNA, 15 nt, Human
uuaagccuuuggaaa

SEQ ID NO: 2316062 - RNA, 12 nt, Human
uuaagcagcucu

SEQ ID NO: 2316063 - RNA, 13 nt, Human
uuaagcagcucuu

SEQ ID NO: 2316064 - RNA, 17 nt, Human
uuaagcagcucuugcua

SEQ ID NO: 2316065 - RNA, 18 nt, Human
uuaagcagcucuugcuaa

SEQ ID NO: 2316066 - RNA, 23 nt, Human
uuaauauaacugccuuaaaacuu

SEQ ID NO: 2316067 - RNA, 15 nt, Human
uuaauauagcuauuu

SEQ ID NO: 2316068 - RNA, 17 nt, Human
uuaauauagcuauuuuu

SEQ ID NO: 2316069 - RNA, 20 nt, Human
uuaauauaucccagaaauua

SEQ ID NO: 2316070 - RNA, 19 nt, Human
uuaauauaucccagaaauu

SEQ ID NO: 2316071 - RNA, 22 nt, Human
uuaauauugauaugcuuauaca

SEQ ID NO: 2316072 - RNA, 18 nt, Human
uuaauauugauaugcuua

SEQ ID NO: 2316073 - RNA, 22 nt, Human
uuaauauucauuguauaaaaau

SEQ ID NO: 2316074 - RNA, 15 nt, Human
uuaauauucuauuaa

SEQ ID NO: 2316075 - RNA, 21 nt, Human
uuaaugauaaguaaaugcuag

SEQ ID NO: 2316076 - RNA, 12 nt, Human
uuaacucaauau

SEQ ID NO: 2316077 - RNA, 23 nt, Human
uuaacuaauaugggcauuguagu

SEQ ID NO: 2316078 - RNA, 14 nt, Human
uuaacucagaucac

SEQ ID NO: 2316079 - RNA, 15 nt, Human
uuaacucagaucacu

SEQ ID NO: 2316080 - RNA, 22 nt, Human
uuaacucagaucacuacugcag

SEQ ID NO: 2316081 - RNA, 12 nt, Human
uuaacucagucu

SEQ ID NO: 2316082 - RNA, 19 nt, Human
uuaacuauuuuauuuucua

SEQ ID NO: 2316083 - RNA, 15 nt, Human
uuaacuagaauuuau

SEQ ID NO: 2316084 - RNA, 16 nt, Human
uuaacuagaauuuauu

SEQ ID NO: 2316085 - RNA, 21 nt, Human
uuaacuagaauuuauucaauu

SEQ ID NO: 2316086 - RNA, 12 nt, Human
uuaacucugucu

SEQ ID NO: 2316087 - RNA, 13 nt, Human
uuaacucugucuu

SEQ ID NO: 2316088 - RNA, 22 nt, Human
uuaacuuaaauuuuaauuuauu

SEQ ID NO: 2316089 - RNA, 22 nt, Human
uuaacuucagagggaaaguaaa

SEQ ID NO: 2316090 - RNA, 14 nt, Human
uuaacuucucugga

SEQ ID NO: 2316091 - RNA, 15 nt, Human
uuaacuuuuauaaac

SEQ ID NO: 2316092 - RNA, 18 nt, Human
uuaacuuaacauucugua

SEQ ID NO: 2316093 - RNA, 18 nt, Human
uuaacuuagcuugaagga

SEQ ID NO: 2316094 - RNA, 16 nt, Human
uuaacuucacauauug

SEQ ID NO: 2316095 - RNA, 17 nt, Human
uuaacuuuuauaaacuu

SEQ ID NO: 2316096 - RNA, 16 nt, Human
uuaacuuuuauaaacu

SEQ ID NO: 2316097 - RNA, 22 nt, Human
uuaacuugaggguaauaaacuu

SEQ ID NO: 2316098 - RNA, 21 nt, Human
uuaagcagauggaaugcugug

SEQ ID NO: 2316099 - RNA, 18 nt, Human
uuaacuuuuauaaacuuu

SEQ ID NO: 2316100 - RNA, 12 nt, Human
uuaacuucugcc

SEQ ID NO: 2316101 - RNA, 17 nt, Human
uuaacuugagcuuuaaa

SEQ ID NO: 2316102 - RNA, 19 nt, Human
uuaaccauugucuuguucu

SEQ ID NO: 2316103 - RNA, 13 nt, Human
uuaaccagaauaa

SEQ ID NO: 2316104 - RNA, 16 nt, Human
uuaaccauuaaaacug

SEQ ID NO: 2316105 - RNA, 17 nt, Human
uuaaccauuaaaacuga

SEQ ID NO: 2316106 - RNA, 18 nt, Human
uuaaccauuaaaacugaa

SEQ ID NO: 2316107 - RNA, 13 nt, Human
uuaaccauugucu

SEQ ID NO: 2316108 - RNA, 14 nt, Human
uuaacauuucaagg

SEQ ID NO: 2316109 - RNA, 19 nt, Human
uuaaccaaaaagaccagac

SEQ ID NO: 2316110 - RNA, 12 nt, Human
uuaaccaaaggu

SEQ ID NO: 2316111 - RNA, 13 nt, Human
uuaaccaaaggug

SEQ ID NO: 2316112 - RNA, 14 nt, Human
uuaaccaaagguga

SEQ ID NO: 2316113 - RNA, 18 nt, Human
uuaaccaaaggugaagga

SEQ ID NO: 2316114 - RNA, 17 nt, Human
uuaaccacuucagcuga

SEQ ID NO: 2316115 - RNA, 20 nt, Human
uuaaccuaugauauuuucug

SEQ ID NO: 2316116 - RNA, 15 nt, Human
uuaaccucaguguca

SEQ ID NO: 2316117 - RNA, 21 nt, Human
uuaaccuaugauauuuucugu

SEQ ID NO: 2316118 - RNA, 13 nt, Human
uuaaccuggugcu

SEQ ID NO: 2316119 - RNA, 19 nt, Human
uuaaccucagugucauuua

SEQ ID NO: 2316120 - RNA, 13 nt, Human
uuaaccugaugca

SEQ ID NO: 2316121 - RNA, 12 nt, Human
uuaaccucugca

SEQ ID NO: 2316122 - RNA, 15 nt, Human
uuaaccucugcacua

SEQ ID NO: 2316123 - RNA, 17 nt, Human
uuaaccuggugcuggau

SEQ ID NO: 2316124 - RNA, 17 nt, Human
uuaacggcuccaggauu

SEQ ID NO: 2316125 - RNA, 19 nt, Human
uuaacggcuccaggauuuu

SEQ ID NO: 2316126 - RNA, 23 nt, Human
uuaacuaaucuauuggguucauu

SEQ ID NO: 2316127 - RNA, 12 nt, Human
uuaacuagaauu

SEQ ID NO: 2316128 - RNA, 14 nt, Human
uuaacuagaauuua

SEQ ID NO: 2316129 - RNA, 11 nt, Human
uuaaagacaga

SEQ ID NO: 2316130 - RNA, 12 nt, Human
uuaaagacagag

SEQ ID NO: 2316131 - RNA, 21 nt, Human
uuaaagacaaagacaaauucu

SEQ ID NO: 2316132 - RNA, 21 nt, Human
uuaaauguuuuuuuuuaaaga

SEQ ID NO: 2316133 - RNA, 23 nt, Human
uuaaauguuuuuuuuuaaagacu

SEQ ID NO: 2316134 - RNA, 14 nt, Human
uuuguguacagugu

SEQ ID NO: 2316135 - RNA, 19 nt, Human
uuuguguaauagaaaacug

SEQ ID NO: 2316136 - RNA, 12 nt, Human
uuuguggcuggg

SEQ ID NO: 2316137 - RNA, 11 nt, Human
uuuguggggag

SEQ ID NO: 2316138 - RNA, 22 nt, Human
uuugugguacgaccuuuagauu

SEQ ID NO: 2316139 - RNA, 14 nt, Human
ugggauguuucugu

SEQ ID NO: 2316140 - RNA, 13 nt, Human
ugggcagagccca

SEQ ID NO: 2316141 - RNA, 14 nt, Human
ugggcagagcccaa

SEQ ID NO: 2316142 - RNA, 12 nt, Human
ugggcagagcug

SEQ ID NO: 2316143 - RNA, 23 nt, Human
ugggcagagcagagaccaucccu

SEQ ID NO: 2316144 - RNA, 16 nt, Human
ugggcagagcuggcuc

SEQ ID NO: 2316145 - RNA, 13 nt, Human
ugggcagggagcg

SEQ ID NO: 2316146 - RNA, 14 nt, Human
ugggcagagcuggc

SEQ ID NO: 2316147 - RNA, 23 nt, Human
ugggcaggacucagcuccccaga

SEQ ID NO: 2316148 - RNA, 13 nt, Human
ugggcccugccuc

SEQ ID NO: 2316149 - RNA, 18 nt, Human
ugggcccugccucuguuu

SEQ ID NO: 2316150 - RNA, 14 nt, Human
ugggccuggcuccc

SEQ ID NO: 2316151 - RNA, 11 nt, Human
ugggccuucag

SEQ ID NO: 2316152 - RNA, 11 nt, Human
ugggcccuccu

SEQ ID NO: 2316153 - RNA, 18 nt, Human
ugggcccucucugcucug

SEQ ID NO: 2316154 - RNA, 16 nt, Human
ugggcccucucugcuc

SEQ ID NO: 2316155 - RNA, 13 nt, Human
ugggcccucucug

SEQ ID NO: 2316156 - RNA, 15 nt, Human
ugggcaggugggagc

SEQ ID NO: 2316157 - RNA, 14 nt, Human
ugggcagguggugg

SEQ ID NO: 2316158 - RNA, 15 nt, Human
ugggcaggugguggc

SEQ ID NO: 2316159 - RNA, 16 nt, Human
ugggcaggugguggca

SEQ ID NO: 2316160 - RNA, 21 nt, Human
ugggcaggugguggcacugag

SEQ ID NO: 2316161 - RNA, 20 nt, Human
ugggccccugccucucugca

SEQ ID NO: 2316162 - RNA, 17 nt, Human
ugggcaggugguggcac

SEQ ID NO: 2316163 - RNA, 21 nt, Human
ugggccccugccucucugcag

SEQ ID NO: 2316164 - RNA, 23 nt, Human
ugggccccugccucucugcaggu

SEQ ID NO: 2316165 - RNA, 23 nt, Human
ugggauguggcugcagcagcggu

SEQ ID NO: 2316166 - RNA, 19 nt, Human
ugggauguccacagaugcc

SEQ ID NO: 2316167 - RNA, 20 nt, Human
ugggaucccucugggcacug

SEQ ID NO: 2316168 - RNA, 18 nt, Human
ugggaugguggagggcca

SEQ ID NO: 2316169 - RNA, 14 nt, Human
ugggauccuccagg

SEQ ID NO: 2316170 - RNA, 12 nt, Human
ugggauccucca

SEQ ID NO: 2316171 - RNA, 13 nt, Human
ugggauccuccag

SEQ ID NO: 2316172 - RNA, 22 nt, Human
ugggauuacaagcgugagccac

SEQ ID NO: 2316173 - RNA, 16 nt, Human
ugggauguucagcacu

SEQ ID NO: 2316174 - RNA, 20 nt, Human
ugggauguucagcacugucc

SEQ ID NO: 2316175 - RNA, 21 nt, Human
ugggauguucagcacuguccc

SEQ ID NO: 2316176 - RNA, 22 nt, Human
ugggauguucagcacugucccu

SEQ ID NO: 2316177 - RNA, 18 nt, Human
ugggcagagcagagacca

SEQ ID NO: 2316178 - RNA, 17 nt, Human
ugggauuacaggcguga

SEQ ID NO: 2316179 - RNA, 22 nt, Human
ugggcagagcagagaccauccc

SEQ ID NO: 2316180 - RNA, 16 nt, Human
uggcugggggccucag

SEQ ID NO: 2316181 - RNA, 17 nt, Human
uggcugggggccucagu

SEQ ID NO: 2316182 - RNA, 20 nt, Human
uggcugggggccucagugcc

SEQ ID NO: 2316183 - RNA, 22 nt, Human
ugggagugaggaugucugggcc

SEQ ID NO: 2316184 - RNA, 14 nt, Human
uggcugcugcccag

SEQ ID NO: 2316185 - RNA, 15 nt, Human
uggcugcugccccca

SEQ ID NO: 2316186 - RNA, 16 nt, Human
uggcugcugcccccac

SEQ ID NO: 2316187 - RNA, 20 nt, Human
uggcugcugcccccaccccg

SEQ ID NO: 2316188 - RNA, 19 nt, Human
ugggaucacauguggacuu

SEQ ID NO: 2316189 - RNA, 13 nt, Human
ugggaguguguaa

SEQ ID NO: 2316190 - RNA, 11 nt, Human
ugggagugugu

SEQ ID NO: 2316191 - RNA, 14 nt, Human
ugggagugggccca

SEQ ID NO: 2316192 - RNA, 16 nt, Human
ugggagugggcccaau

SEQ ID NO: 2316193 - RNA, 15 nt, Human
uggggauauaauacu

SEQ ID NO: 2316194 - RNA, 17 nt, Human
uggggauaaaggagaag

SEQ ID NO: 2316195 - RNA, 13 nt, Human
uggggauaugcuu

SEQ ID NO: 2316196 - RNA, 21 nt, Human
uggggaucacagagacauucc

SEQ ID NO: 2316197 - RNA, 15 nt, Human
uggggaugagaaagg

SEQ ID NO: 2316198 - RNA, 23 nt, Human
uggggaugagaaagguugaagca

SEQ ID NO: 2316199 - RNA, 20 nt, Human
uggggccaggcugggucgcc

SEQ ID NO: 2316200 - RNA, 20 nt, Human
uggggaucccucccccccau

SEQ ID NO: 2316201 - RNA, 15 nt, Human
uggggaucacagaga

SEQ ID NO: 2316202 - RNA, 14 nt, Human
uggggaucucaggg

SEQ ID NO: 2316203 - RNA, 15 nt, Human
ugggggaagcccugg

SEQ ID NO: 2316204 - RNA, 14 nt, Human
uggggaugugggag

SEQ ID NO: 2316205 - RNA, 18 nt, Human
uggggaucucaggggcug

SEQ ID NO: 2316206 - RNA, 15 nt, Human
uggggccaggucacc

SEQ ID NO: 2316207 - RNA, 20 nt, Human
uggggccaguuggucccccu

SEQ ID NO: 2316208 - RNA, 21 nt, Human
uggggccaggcugggucgccc

SEQ ID NO: 2316209 - RNA, 22 nt, Human
uggggccaggcugggucgcccu

SEQ ID NO: 2316210 - RNA, 23 nt, Human
ugggcuuccauuugugugugugc

SEQ ID NO: 2316211 - RNA, 19 nt, Human
ugggcuuccauuugugugu

SEQ ID NO: 2316212 - RNA, 12 nt, Human
ugggcuucccag

SEQ ID NO: 2316213 - RNA, 19 nt, Human
ugggcuucccaguggcugc

SEQ ID NO: 2316214 - RNA, 21 nt, Human
ugggcuucccaguggcugcug

SEQ ID NO: 2316215 - RNA, 22 nt, Human
ugggcuucccaguggcugcugc

SEQ ID NO: 2316216 - RNA, 23 nt, Human
ugggcuucccaguggcugcugcc

SEQ ID NO: 2316217 - RNA, 12 nt, Human
ugggccuucagg

SEQ ID NO: 2316218 - RNA, 13 nt, Human
ugggcuucaucug

SEQ ID NO: 2316219 - RNA, 14 nt, Human
ugggcuuggccugc

SEQ ID NO: 2316220 - RNA, 13 nt, Human
ugggcuugauucu

SEQ ID NO: 2316221 - RNA, 14 nt, Human
ugggcuugauucug

SEQ ID NO: 2316222 - RNA, 20 nt, Human
uggggauagauguguggaca

SEQ ID NO: 2316223 - RNA, 18 nt, Human
uggggauagaugugugga

SEQ ID NO: 2316224 - RNA, 17 nt, Human
uggggauagaugugugg

SEQ ID NO: 2316225 - RNA, 16 nt, Human
uggggauagaugugug

SEQ ID NO: 2316226 - RNA, 19 nt, Human
ugggggagucugaagcaga

SEQ ID NO: 2316227 - RNA, 12 nt, Human
ugggggagugga

SEQ ID NO: 2316228 - RNA, 13 nt, Human
uggggggguggcc

SEQ ID NO: 2316229 - RNA, 14 nt, Human
uggggggguggccg

SEQ ID NO: 2316230 - RNA, 23 nt, Human
uggggggguggccgcugaguggc

SEQ ID NO: 2316231 - RNA, 15 nt, Human
uggggguagagcuga

SEQ ID NO: 2316232 - RNA, 15 nt, Human
ugggggaguggaaua

SEQ ID NO: 2316233 - RNA, 14 nt, Human
ugggggucugugug

SEQ ID NO: 2316234 - RNA, 17 nt, Human
uggggguagcagcugga

SEQ ID NO: 2316235 - RNA, 18 nt, Human
uggggguagcagcuggac

SEQ ID NO: 2316236 - RNA, 18 nt, Human
uggggguagagcugaucc

SEQ ID NO: 2316237 - RNA, 21 nt, Human
uggggguagagcugauccaga

SEQ ID NO: 2316238 - RNA, 15 nt, Human
uggggguagcagcug

SEQ ID NO: 2316239 - RNA, 16 nt, Human
uggggguagcagcugg

SEQ ID NO: 2316240 - RNA, 16 nt, Human
ugggggaagcccugga

SEQ ID NO: 2316241 - RNA, 15 nt, Human
ugggggacagggcug

SEQ ID NO: 2316242 - RNA, 22 nt, Human
ugggggacagggcuggcccagc

SEQ ID NO: 2316243 - RNA, 16 nt, Human
ugggggacagggcugg

SEQ ID NO: 2316244 - RNA, 18 nt, Human
ugggggacagggcuggcc

SEQ ID NO: 2316245 - RNA, 21 nt, Human
ugggggacuuacaugauucau

SEQ ID NO: 2316246 - RNA, 14 nt, Human
ugggggacuuacau

SEQ ID NO: 2316247 - RNA, 13 nt, Human
ugggggagagcag

SEQ ID NO: 2316248 - RNA, 14 nt, Human
ugggggagagcagg

SEQ ID NO: 2316249 - RNA, 17 nt, Human
ugggggagagcaggcug

SEQ ID NO: 2316250 - RNA, 19 nt, Human
ugggggagagcaggcuggc

SEQ ID NO: 2316251 - RNA, 21 nt, Human
ugggggaguagaucuuucuag

SEQ ID NO: 2316252 - RNA, 13 nt, Human
uggggggggugcu

SEQ ID NO: 2316253 - RNA, 16 nt, Human
ugggggaguggccaca

SEQ ID NO: 2316254 - RNA, 15 nt, Human
uggggguucuuucuu

SEQ ID NO: 2316255 - RNA, 19 nt, Human
uggggguucuuucuuccuc

SEQ ID NO: 2316256 - RNA, 16 nt, Human
ugggggugggccaggc

SEQ ID NO: 2316257 - RNA, 19 nt, Human
uggggguggaggcuuccug

SEQ ID NO: 2316258 - RNA, 13 nt, Human
ugggggugggcca

SEQ ID NO: 2316259 - RNA, 15 nt, Human
uggguacagagaggu

SEQ ID NO: 2316260 - RNA, 18 nt, Human
uggguaaucgauggggga

SEQ ID NO: 2316261 - RNA, 15 nt, Human
uggguaccuauuuuc

SEQ ID NO: 2316262 - RNA, 20 nt, Human
uggggguucuuucuuccucu

SEQ ID NO: 2316263 - RNA, 22 nt, Human
uggggguucuuucuuccucugc

SEQ ID NO: 2316264 - RNA, 15 nt, Human
uggguauauucauuu

SEQ ID NO: 2316265 - RNA, 17 nt, Human
uggguauaaaagauggg

SEQ ID NO: 2316266 - RNA, 19 nt, Human
uggguacuucuugaaggug

SEQ ID NO: 2316267 - RNA, 16 nt, Human
uggguacuucuugaag

SEQ ID NO: 2316268 - RNA, 14 nt, Human
uggguauaaaagau

SEQ ID NO: 2316269 - RNA, 15 nt, Human
uggguauaaaagaug

SEQ ID NO: 2316270 - RNA, 17 nt, Human
uggguacuuguggacac

SEQ ID NO: 2316271 - RNA, 18 nt, Human
uggguacuuguggacaca

SEQ ID NO: 2316272 - RNA, 15 nt, Human
uggugcagugugaaa

SEQ ID NO: 2316273 - RNA, 19 nt, Human
uggugcauuacagagagga

SEQ ID NO: 2316274 - RNA, 16 nt, Human
uggugcauuacagaga

SEQ ID NO: 2316275 - RNA, 13 nt, Human
uggugcauuacag

SEQ ID NO: 2316276 - RNA, 10 nt, Human
uggugcauua

SEQ ID NO: 2316277 - RNA, 15 nt, Human
uggugccaauuucaa

SEQ ID NO: 2316278 - RNA, 17 nt, Human
uggugccaauggaaccu

SEQ ID NO: 2316279 - RNA, 20 nt, Human
uggugccaauggaaccuccu

SEQ ID NO: 2316280 - RNA, 21 nt, Human
uggugcaaugaccuuucaaua

SEQ ID NO: 2316281 - RNA, 20 nt, Human
uggugauggagguuucauac

SEQ ID NO: 2316282 - RNA, 15 nt, Human
uggugcacagugauu

SEQ ID NO: 2316283 - RNA, 18 nt, Human
uggugaucaauuaaaugu

SEQ ID NO: 2316284 - RNA, 17 nt, Human
uggugaucaauuaaaug

SEQ ID NO: 2316285 - RNA, 20 nt, Human
uggugagucuuggcggcagc

SEQ ID NO: 2316286 - RNA, 22 nt, Human
uggugagucuuggcggcagcag

SEQ ID NO: 2316287 - RNA, 18 nt, Human
uggugagucuuggcggca

SEQ ID NO: 2316288 - RNA, 18 nt, Human
uggugaggcaggcuuugu

SEQ ID NO: 2316289 - RNA, 17 nt, Human
uggugaggccuugcucc

SEQ ID NO: 2316290 - RNA, 20 nt, Human
uggugagaugcagcuggaaa

SEQ ID NO: 2316291 - RNA, 16 nt, Human
uggugagaugcagcug

SEQ ID NO: 2316292 - RNA, 17 nt, Human
uggugagaugcagcugg

SEQ ID NO: 2316293 - RNA, 22 nt, Human
uggugaccccuuuucagcuucu

SEQ ID NO: 2316294 - RNA, 17 nt, Human
uggugacccagucagag

SEQ ID NO: 2316295 - RNA, 18 nt, Human
uggugacugcgaucuuca

SEQ ID NO: 2316296 - RNA, 19 nt, Human
uggugacuuuccucuuugg

SEQ ID NO: 2316297 - RNA, 22 nt, Human
uggugaccuuccaagagccuga

SEQ ID NO: 2316298 - RNA, 21 nt, Human
uggugaccuuccaagagccug

SEQ ID NO: 2316299 - RNA, 15 nt, Human
uggugaccucugccu

SEQ ID NO: 2316300 - RNA, 16 nt, Human
uggugaccucugccug

SEQ ID NO: 2316301 - RNA, 17 nt, Human
uggugaccucugccuga

SEQ ID NO: 2316302 - RNA, 22 nt, Human
uggugaccucugccugaaguca

SEQ ID NO: 2316303 - RNA, 15 nt, Human
uggucgcccaggaga

SEQ ID NO: 2316304 - RNA, 13 nt, Human
uggucgcuccugc

SEQ ID NO: 2316305 - RNA, 15 nt, Human
uggucgcuccugccc

SEQ ID NO: 2316306 - RNA, 14 nt, Human
uggucggaaaacau

SEQ ID NO: 2316307 - RNA, 17 nt, Human
uggucggaaaacaugcu

SEQ ID NO: 2316308 - RNA, 23 nt, Human
ugguccuuccaggcccccaccac

SEQ ID NO: 2316309 - RNA, 20 nt, Human
ugguccugugugcagugaag

SEQ ID NO: 2316310 - RNA, 14 nt, Human
ugguccuuuacacu

SEQ ID NO: 2316311 - RNA, 12 nt, Human
ugguccuuuggg

SEQ ID NO: 2316312 - RNA, 20 nt, Human
ugguccuuuacacucaggcu

SEQ ID NO: 2316313 - RNA, 21 nt, Human
ugguccuuuacacucaggcuu

SEQ ID NO: 2316314 - RNA, 14 nt, Human
uggucgcccaggag

SEQ ID NO: 2316315 - RNA, 13 nt, Human
uggucgcccagga

SEQ ID NO: 2316316 - RNA, 14 nt, Human
ugguccuggggcuc

SEQ ID NO: 2316317 - RNA, 11 nt, Human
ugguccugggg

SEQ ID NO: 2316318 - RNA, 22 nt, Human
ugguccugacucaacauguuac

SEQ ID NO: 2316319 - RNA, 14 nt, Human
ugguccugagaccu

SEQ ID NO: 2316320 - RNA, 20 nt, Human
ugguccugaggguccccacc

SEQ ID NO: 2316321 - RNA, 19 nt, Human
ugguccuggggcucugugc

SEQ ID NO: 2316322 - RNA, 16 nt, Human
ugguccuggggcucug

SEQ ID NO: 2316323 - RNA, 18 nt, Human
uggugacaccagccuuuc

SEQ ID NO: 2316324 - RNA, 16 nt, Human
uggugacaccagccuu

SEQ ID NO: 2316325 - RNA, 19 nt, Human
uggucuacacugugcugag

SEQ ID NO: 2316326 - RNA, 13 nt, Human
uggugaccucugc

SEQ ID NO: 2316327 - RNA, 14 nt, Human
uggugaccucugcc

SEQ ID NO: 2316328 - RNA, 15 nt, Human
uggucuacacugugc

SEQ ID NO: 2316329 - RNA, 16 nt, Human
uggucuacacugugcu

SEQ ID NO: 2316330 - RNA, 17 nt, Human
uggucuacacugugcug

SEQ ID NO: 2316331 - RNA, 18 nt, Human
uggucuacacugugcuga

SEQ ID NO: 2316332 - RNA, 22 nt, Human
uggucaaacaaacucucugaac

SEQ ID NO: 2316333 - RNA, 17 nt, Human
uggucaaaagcuggauu

SEQ ID NO: 2316334 - RNA, 14 nt, Human
uggucaaaccgcac

SEQ ID NO: 2316335 - RNA, 14 nt, Human
uggucaacacuuaa

SEQ ID NO: 2316336 - RNA, 21 nt, Human
uggucaaaccgcacucaccca

SEQ ID NO: 2316337 - RNA, 17 nt, Human
uggucaaaccgcacuca

SEQ ID NO: 2316338 - RNA, 20 nt, Human
uggucaaaccgcacucaccc

SEQ ID NO: 2316339 - RNA, 17 nt, Human
uggucacaggaaguaga

SEQ ID NO: 2316340 - RNA, 18 nt, Human
uggucacaggacucugcc

SEQ ID NO: 2316341 - RNA, 14 nt, Human
uggucaaccuccug

SEQ ID NO: 2316342 - RNA, 16 nt, Human
uggucaaccuccugga

SEQ ID NO: 2316343 - RNA, 22 nt, Human
uggucacaggaaguagaggagg

SEQ ID NO: 2316344 - RNA, 15 nt, Human
uggucaagauuuuga

SEQ ID NO: 2316345 - RNA, 18 nt, Human
uggucaaccuccuggaca

SEQ ID NO: 2316346 - RNA, 13 nt, Human
uggucccauccag

SEQ ID NO: 2316347 - RNA, 15 nt, Human
uggucccauccaggc

SEQ ID NO: 2316348 - RNA, 16 nt, Human
uggucccauccaggca

SEQ ID NO: 2316349 - RNA, 17 nt, Human
uggucccauccaggcag

SEQ ID NO: 2316350 - RNA, 18 nt, Human
uggucccauccaggcagu

SEQ ID NO: 2316351 - RNA, 14 nt, Human
uggucccccuucca

SEQ ID NO: 2316352 - RNA, 19 nt, Human
uggucacaggacucugccu

SEQ ID NO: 2316353 - RNA, 13 nt, Human
uggucccacucag

SEQ ID NO: 2316354 - RNA, 21 nt, Human
uggucaaacaaacucucugaa

SEQ ID NO: 2316355 - RNA, 16 nt, Human
uggucaaacaaacucu

SEQ ID NO: 2316356 - RNA, 21 nt, Human
ugguauguguguguaugcuac

SEQ ID NO: 2316357 - RNA, 23 nt, Human
ugguauuguauuuauucaauaaa

SEQ ID NO: 2316358 - RNA, 19 nt, Human
ugguauguguguguaugcu

SEQ ID NO: 2316359 - RNA, 17 nt, Human
ugguauguguguguaug

SEQ ID NO: 2316360 - RNA, 15 nt, Human
ugguaugugugugua

SEQ ID NO: 2316361 - RNA, 12 nt, Human
ugguaugugugu

SEQ ID NO: 2316362 - RNA, 21 nt, Human
ugguauguuuucaggcuagau

SEQ ID NO: 2316363 - RNA, 13 nt, Human
ugguauguuuuca

SEQ ID NO: 2316364 - RNA, 13 nt, Human
ugggucaaggaau

SEQ ID NO: 2316365 - RNA, 19 nt, Human
uggguauauucauuucaaa

SEQ ID NO: 2316366 - RNA, 21 nt, Human
uggguaccuauuuucauugua

SEQ ID NO: 2316367 - RNA, 21 nt, Human
ugguaugugacaugcgggcug

SEQ ID NO: 2316368 - RNA, 19 nt, Human
ugguauggaacucucucca

SEQ ID NO: 2316369 - RNA, 19 nt, Human
ugguccugacucaacaugu

SEQ ID NO: 2316370 - RNA, 12 nt, Human
ugguccugacuc

SEQ ID NO: 2316371 - RNA, 20 nt, Human
ugguccucuugccuccugga

SEQ ID NO: 2316372 - RNA, 15 nt, Human
ugguccucuugccuc

SEQ ID NO: 2316373 - RNA, 13 nt, Human
ugguccugcugca

SEQ ID NO: 2316374 - RNA, 15 nt, Human
ugguccugcugcagu

SEQ ID NO: 2316375 - RNA, 23 nt, Human
ugguccugcugcaguugccaguc

SEQ ID NO: 2316376 - RNA, 15 nt, Human
ugguccgguguccuu

SEQ ID NO: 2316377 - RNA, 12 nt, Human
ugguccuaccca

SEQ ID NO: 2316378 - RNA, 20 nt, Human
ugguccgugggacggugccc

SEQ ID NO: 2316379 - RNA, 14 nt, Human
ugguccucacacuc

SEQ ID NO: 2316380 - RNA, 17 nt, Human
ugguccuaaucuucuga

SEQ ID NO: 2316381 - RNA, 19 nt, Human
ugguccuaaucuucugaac

SEQ ID NO: 2316382 - RNA, 19 nt, Human
uggucccugggaggaaauu

SEQ ID NO: 2316383 - RNA, 12 nt, Human
uggucccugggg

SEQ ID NO: 2316384 - RNA, 16 nt, Human
ugguccggacacuccu

SEQ ID NO: 2316385 - RNA, 19 nt, Human
ugguccggacacuccuaga

SEQ ID NO: 2316386 - RNA, 14 nt, Human
uggucccugggagg

SEQ ID NO: 2316387 - RNA, 13 nt, Human
uggucccugggag

SEQ ID NO: 2316388 - RNA, 17 nt, Human
uggucccugcccucauc

SEQ ID NO: 2316389 - RNA, 15 nt, Human
uggucccccuuccau

SEQ ID NO: 2316390 - RNA, 16 nt, Human
uggucccccuuccaug

SEQ ID NO: 2316391 - RNA, 18 nt, Human
uggucccccuuccaugga

SEQ ID NO: 2316392 - RNA, 23 nt, Human
uggucccccuuccauggacuuug

SEQ ID NO: 2316393 - RNA, 14 nt, Human
uggacuccggcccu

SEQ ID NO: 2316394 - RNA, 22 nt, Human
uggacuccagccugccuggcag

SEQ ID NO: 2316395 - RNA, 23 nt, Human
uggacuccagccugccuggcagg

SEQ ID NO: 2316396 - RNA, 13 nt, Human
uggacuccucugu

SEQ ID NO: 2316397 - RNA, 19 nt, Human
uggacugaagccugcagga

SEQ ID NO: 2316398 - RNA, 17 nt, Human
uggacugaagccugcag

SEQ ID NO: 2316399 - RNA, 17 nt, Human
uggacuccggcccuccu

SEQ ID NO: 2316400 - RNA, 13 nt, Human
uggacugacauuu

SEQ ID NO: 2316401 - RNA, 18 nt, Human
uggacugaagccugcagg

SEQ ID NO: 2316402 - RNA, 11 nt, Human
uggacugaggc

SEQ ID NO: 2316403 - RNA, 14 nt, Human
uggacugaggccug

SEQ ID NO: 2316404 - RNA, 15 nt, Human
uggacugaggccuga

SEQ ID NO: 2316405 - RNA, 16 nt, Human
uggacugaggccugag

SEQ ID NO: 2316406 - RNA, 16 nt, Human
uggacucaggaugccc

SEQ ID NO: 2316407 - RNA, 19 nt, Human
uggaccacugggcaaugau

SEQ ID NO: 2316408 - RNA, 15 nt, Human
uggaccacugggcaa

SEQ ID NO: 2316409 - RNA, 12 nt, Human
uggaccacugca

SEQ ID NO: 2316410 - RNA, 20 nt, Human
uggaccacugcaugagcuuu

SEQ ID NO: 2316411 - RNA, 14 nt, Human
uggacuccagccug

SEQ ID NO: 2316412 - RNA, 20 nt, Human
uggacuccagccugccuggc

SEQ ID NO: 2316413 - RNA, 21 nt, Human
uggacuccagccugccuggca

SEQ ID NO: 2316414 - RNA, 18 nt, Human
uggacucaggaugcccag

SEQ ID NO: 2316415 - RNA, 18 nt, Human
uggacuccagacucucug

SEQ ID NO: 2316416 - RNA, 19 nt, Human
uggacuccagacucucugu

SEQ ID NO: 2316417 - RNA, 21 nt, Human
uggacuccagacucucuguga

SEQ ID NO: 2316418 - RNA, 20 nt, Human
uggacucagggcagcgccag

SEQ ID NO: 2316419 - RNA, 18 nt, Human
uggacucagggcagcgcc

SEQ ID NO: 2316420 - RNA, 15 nt, Human
uggacucagggcagc

SEQ ID NO: 2316421 - RNA, 14 nt, Human
uggacucagggcag

SEQ ID NO: 2316422 - RNA, 22 nt, Human
uggagaagucuuagacuugaaa

SEQ ID NO: 2316423 - RNA, 16 nt, Human
uggacuggaguggagc

SEQ ID NO: 2316424 - RNA, 21 nt, Human
uggagaagcucccugaaguaa

SEQ ID NO: 2316425 - RNA, 14 nt, Human
uggacuggaagggg

SEQ ID NO: 2316426 - RNA, 18 nt, Human
uggacuggaaaaucucuu

SEQ ID NO: 2316427 - RNA, 15 nt, Human
uggacugaugcuuuu

SEQ ID NO: 2316428 - RNA, 14 nt, Human
uggagaauuauaua

SEQ ID NO: 2316429 - RNA, 19 nt, Human
uggagacucuguggggccu

SEQ ID NO: 2316430 - RNA, 14 nt, Human
uggagacucugugg

SEQ ID NO: 2316431 - RNA, 19 nt, Human
uggagacuccugcccuguu

SEQ ID NO: 2316432 - RNA, 18 nt, Human
uggagacuaagcccuguc

SEQ ID NO: 2316433 - RNA, 18 nt, Human
uggagacuccuaggcagg

SEQ ID NO: 2316434 - RNA, 19 nt, Human
uggagacuccuaggcagga

SEQ ID NO: 2316435 - RNA, 22 nt, Human
uggagacuccuaggcaggacau

SEQ ID NO: 2316436 - RNA, 13 nt, Human
uggagacuccugc

SEQ ID NO: 2316437 - RNA, 14 nt, Human
uggagacuccugcc

SEQ ID NO: 2316438 - RNA, 18 nt, Human
uggagacuccugcccugu

SEQ ID NO: 2316439 - RNA, 14 nt, Human
uggacaggcuggcu

SEQ ID NO: 2316440 - RNA, 20 nt, Human
uggacacuuugaaauguguu

SEQ ID NO: 2316441 - RNA, 14 nt, Human
uggacaguccuggg

SEQ ID NO: 2316442 - RNA, 13 nt, Human
uggacaguccugg

SEQ ID NO: 2316443 - RNA, 12 nt, Human
uggacaguccug

SEQ ID NO: 2316444 - RNA, 23 nt, Human
uggacaguaucacugucuuuccu

SEQ ID NO: 2316445 - RNA, 23 nt, Human
uggacacuuaauacuaccuugaa

SEQ ID NO: 2316446 - RNA, 14 nt, Human
uggacacuguacaa

SEQ ID NO: 2316447 - RNA, 21 nt, Human
uggacacuccagugccagcaa

SEQ ID NO: 2316448 - RNA, 14 nt, Human
uggacacuuugaaa

SEQ ID NO: 2316449 - RNA, 16 nt, Human
uggacacucagaccug

SEQ ID NO: 2316450 - RNA, 17 nt, Human
uggacacuccagugcca

SEQ ID NO: 2316451 - RNA, 19 nt, Human
uggacacuccagugccagc

SEQ ID NO: 2316452 - RNA, 21 nt, Human
uggaccaacccuguuuccuga

SEQ ID NO: 2316453 - RNA, 20 nt, Human
uggaccaauagggcugagcu

SEQ ID NO: 2316454 - RNA, 21 nt, Human
uggaccaauagggcugagcuc

SEQ ID NO: 2316455 - RNA, 17 nt, Human
uggacaguccugggaga

SEQ ID NO: 2316456 - RNA, 16 nt, Human
uggacaguccugggag

SEQ ID NO: 2316457 - RNA, 15 nt, Human
uggacaguccuggga

SEQ ID NO: 2316458 - RNA, 21 nt, Human
uggacaguaucacugucuuuc

SEQ ID NO: 2316459 - RNA, 14 nt, Human
uggacauagagagg

SEQ ID NO: 2316460 - RNA, 19 nt, Human
uggacauagagagggagaa

SEQ ID NO: 2316461 - RNA, 14 nt, Human
uggacauccuccuc

SEQ ID NO: 2316462 - RNA, 23 nt, Human
uggacauagagagggagaagaag

SEQ ID NO: 2316463 - RNA, 14 nt, Human
ugcuguugccucau

SEQ ID NO: 2316464 - RNA, 21 nt, Human
ugcuguugauuucuuuccaga

SEQ ID NO: 2316465 - RNA, 19 nt, Human
ugcuguugauugcuaaaug

SEQ ID NO: 2316466 - RNA, 20 nt, Human
ugcuguugauugcuaaaugu

SEQ ID NO: 2316467 - RNA, 22 nt, Human
ugcuguugauugcuaaauguaa

SEQ ID NO: 2316468 - RNA, 19 nt, Human
ugcuguugauuucuuucca

SEQ ID NO: 2316469 - RNA, 17 nt, Human
ugcuguugauguuuugu

SEQ ID NO: 2316470 - RNA, 12 nt, Human
ugcuguugauug

SEQ ID NO: 2316471 - RNA, 15 nt, Human
ugcuguugauugcua

SEQ ID NO: 2316472 - RNA, 16 nt, Human
ugcuguugauugcuaa

SEQ ID NO: 2316473 - RNA, 17 nt, Human
ugcuguugauugcuaaa

SEQ ID NO: 2316474 - RNA, 18 nt, Human
ugcuguugauugcuaaau

SEQ ID NO: 2316475 - RNA, 12 nt, Human
ugcuguuguccc

SEQ ID NO: 2316476 - RNA, 13 nt, Human
ugcuguuguuucu

SEQ ID NO: 2316477 - RNA, 12 nt, Human
ugcuguuuccuu

SEQ ID NO: 2316478 - RNA, 11 nt, Human
ugcuguuuccu

SEQ ID NO: 2316479 - RNA, 14 nt, Human
ugcuguuuccuuuu

SEQ ID NO: 2316480 - RNA, 13 nt, Human
ugcuguuugacaa

SEQ ID NO: 2316481 - RNA, 15 nt, Human
uggacacucagaccu

SEQ ID NO: 2316482 - RNA, 20 nt, Human
uggaggagcucaggacacua

SEQ ID NO: 2316483 - RNA, 22 nt, Human
uggaggagcucaggacacuaau

SEQ ID NO: 2316484 - RNA, 22 nt, Human
uggaggaaugcucccccauccu

SEQ ID NO: 2316485 - RNA, 19 nt, Human
uggaggagcucaggacacu

SEQ ID NO: 2316486 - RNA, 17 nt, Human
uggaggaaugcuccccc

SEQ ID NO: 2316487 - RNA, 16 nt, Human
uggaggaaugcucccc

SEQ ID NO: 2316488 - RNA, 15 nt, Human
uggaggaaugcuccc

SEQ ID NO: 2316489 - RNA, 13 nt, Human
uggaggaaggauu

SEQ ID NO: 2316490 - RNA, 18 nt, Human
uggaggaaggauuguaaa

SEQ ID NO: 2316491 - RNA, 19 nt, Human
uggaggaaggauuguaaaa

SEQ ID NO: 2316492 - RNA, 20 nt, Human
uggaggaaggauuguaaaaa

SEQ ID NO: 2316493 - RNA, 16 nt, Human
uggaggaggaggcaau

SEQ ID NO: 2316494 - RNA, 15 nt, Human
uggaggaggaggcaa

SEQ ID NO: 2316495 - RNA, 15 nt, Human
uggaggaggccuggg

SEQ ID NO: 2316496 - RNA, 18 nt, Human
uggaggaggccugggggc

SEQ ID NO: 2316497 - RNA, 14 nt, Human
uggaggaggaggca

SEQ ID NO: 2316498 - RNA, 13 nt, Human
uggaggaggaggc

SEQ ID NO: 2316499 - RNA, 12 nt, Human
uggaggaggagg

SEQ ID NO: 2316500 - RNA, 16 nt, Human
uggaggaggagcaggg

SEQ ID NO: 2316501 - RNA, 22 nt, Human
uggaggagcuugggggaugacu

SEQ ID NO: 2316502 - RNA, 13 nt, Human
uggaggaggaagg

SEQ ID NO: 2316503 - RNA, 14 nt, Human
uggaggaggaaggc

SEQ ID NO: 2316504 - RNA, 15 nt, Human
uggaggaggaaggca

SEQ ID NO: 2316505 - RNA, 16 nt, Human
uggaggaggaaggcaa

SEQ ID NO: 2316506 - RNA, 17 nt, Human
uggaggaggaaggcaag

SEQ ID NO: 2316507 - RNA, 21 nt, Human
uggaggaggaaggcaagaggg

SEQ ID NO: 2316508 - RNA, 14 nt, Human
uggagacugucuca

SEQ ID NO: 2316509 - RNA, 12 nt, Human
uggagacugcuu

SEQ ID NO: 2316510 - RNA, 14 nt, Human
uggagacugcuucc

SEQ ID NO: 2316511 - RNA, 17 nt, Human
uggagacugcuucccau

SEQ ID NO: 2316512 - RNA, 19 nt, Human
uggagacugcuucccaucc

SEQ ID NO: 2316513 - RNA, 20 nt, Human
uggagacugcuucccauccu

SEQ ID NO: 2316514 - RNA, 20 nt, Human
uggagacuggggggcuugaa

SEQ ID NO: 2316515 - RNA, 19 nt, Human
uggagacugguccugugug

SEQ ID NO: 2316516 - RNA, 20 nt, Human
uggagacugguccugugugc

SEQ ID NO: 2316517 - RNA, 21 nt, Human
uggaggaaggaaacccagcuc

SEQ ID NO: 2316518 - RNA, 23 nt, Human
uggaggaaggaaacccagcucug

SEQ ID NO: 2316519 - RNA, 17 nt, Human
uggaggcacacagcugc

SEQ ID NO: 2316520 - RNA, 15 nt, Human
uggaggauggagaga

SEQ ID NO: 2316521 - RNA, 20 nt, Human
uggaggauggagagagggga

SEQ ID NO: 2316522 - RNA, 23 nt, Human
uggaggaggccugggggcaggga

SEQ ID NO: 2316523 - RNA, 21 nt, Human
uggaguuucauguacaagaug

SEQ ID NO: 2316524 - RNA, 17 nt, Human
uggaguuuuaacuguaa

SEQ ID NO: 2316525 - RNA, 21 nt, Human
uggaguuuuuguuuggagagc

SEQ ID NO: 2316526 - RNA, 22 nt, Human
uggaguuuuuguuuggagagca

SEQ ID NO: 2316527 - RNA, 23 nt, Human
uggaguuuuuguuuggagagcac

SEQ ID NO: 2316528 - RNA, 16 nt, Human
uggauaaagccacuga

SEQ ID NO: 2316529 - RNA, 15 nt, Human
uggaucuccccacuc

SEQ ID NO: 2316530 - RNA, 19 nt, Human
uggaucuccccacucuagg

SEQ ID NO: 2316531 - RNA, 21 nt, Human
uggaucuccaaggaccagguu

SEQ ID NO: 2316532 - RNA, 15 nt, Human
uggauaaagccacug

SEQ ID NO: 2316533 - RNA, 21 nt, Human
uggauaacuuagguggcaagc

SEQ ID NO: 2316534 - RNA, 23 nt, Human
uggaucugggacccuuuccuucc

SEQ ID NO: 2316535 - RNA, 19 nt, Human
uggaucugggacccuuucc

SEQ ID NO: 2316536 - RNA, 20 nt, Human
uggaucugggacccuuuccu

SEQ ID NO: 2316537 - RNA, 21 nt, Human
uggaucugggacccuuuccuu

SEQ ID NO: 2316538 - RNA, 16 nt, Human
uggaucuguccaagga

SEQ ID NO: 2316539 - RNA, 18 nt, Human
uggaucuguccaaggaaa

SEQ ID NO: 2316540 - RNA, 20 nt, Human
uggaucuguccaaggaaacu

SEQ ID NO: 2316541 - RNA, 15 nt, Human
uggaucugugagggg

SEQ ID NO: 2316542 - RNA, 22 nt, Human
uggcagaauggggugcaugaag

SEQ ID NO: 2316543 - RNA, 18 nt, Human
uggcagaaugcuagcucu

SEQ ID NO: 2316544 - RNA, 20 nt, Human
uggcagaauaaucuuugggu

SEQ ID NO: 2316545 - RNA, 19 nt, Human
uggcagaauaaucuuuggg

SEQ ID NO: 2316546 - RNA, 18 nt, Human
uggcaauaguguguucug

SEQ ID NO: 2316547 - RNA, 17 nt, Human
uggcaauaguguguucu

SEQ ID NO: 2316548 - RNA, 16 nt, Human
uggcacgucaucuagu

SEQ ID NO: 2316549 - RNA, 18 nt, Human
uggcacgucaucuaguuu

SEQ ID NO: 2316550 - RNA, 22 nt, Human
uggcacuaacguugagccccug

SEQ ID NO: 2316551 - RNA, 23 nt, Human
uggcagaagacaccagagcagau

SEQ ID NO: 2316552 - RNA, 16 nt, Human
uggcacuauaauguaa

SEQ ID NO: 2316553 - RNA, 15 nt, Human
uggcacuauaaugua

SEQ ID NO: 2316554 - RNA, 17 nt, Human
uggcaaggguucaccug

SEQ ID NO: 2316555 - RNA, 23 nt, Human
uggcaaggcugugcucccugguu

SEQ ID NO: 2316556 - RNA, 20 nt, Human
uggcaauagucaaauugugu

SEQ ID NO: 2316557 - RNA, 16 nt, Human
uggcaauaguguguuc

SEQ ID NO: 2316558 - RNA, 15 nt, Human
uggcaauaguguguu

SEQ ID NO: 2316559 - RNA, 18 nt, Human
uggcaauagugggcccuc

SEQ ID NO: 2316560 - RNA, 20 nt, Human
uggcaauagugggcccuccg

SEQ ID NO: 2316561 - RNA, 15 nt, Human
uggcacuaguauuuc

SEQ ID NO: 2316562 - RNA, 17 nt, Human
uggauuuuugucuugug

SEQ ID NO: 2316563 - RNA, 19 nt, Human
uggaucugugaggggcucu

SEQ ID NO: 2316564 - RNA, 12 nt, Human
uggcaaaaaggc

SEQ ID NO: 2316565 - RNA, 16 nt, Human
uggcaaaaaggcagga

SEQ ID NO: 2316566 - RNA, 19 nt, Human
uggauuuuugacucuggca

SEQ ID NO: 2316567 - RNA, 20 nt, Human
uggauuuuugacucuggcaa

SEQ ID NO: 2316568 - RNA, 20 nt, Human
uggcaaaacucuacuuaauc

SEQ ID NO: 2316569 - RNA, 17 nt, Human
uggcaaagacagaagcc

SEQ ID NO: 2316570 - RNA, 13 nt, Human
uggcaaagacaga

SEQ ID NO: 2316571 - RNA, 17 nt, Human
uggcaaacuucagacug

SEQ ID NO: 2316572 - RNA, 21 nt, Human
uggcaaagccuucauugccuu

SEQ ID NO: 2316573 - RNA, 16 nt, Human
uggcaaagcuuuuaga

SEQ ID NO: 2316574 - RNA, 18 nt, Human
uggcaaagcuuuuagaaa

SEQ ID NO: 2316575 - RNA, 17 nt, Human
uggcaaagcuuuuagaa

SEQ ID NO: 2316576 - RNA, 20 nt, Human
uggcaaggcugugcucccug

SEQ ID NO: 2316577 - RNA, 19 nt, Human
uggcaaacucuccaccaca

SEQ ID NO: 2316578 - RNA, 17 nt, Human
uggcaaacgcuaaagag

SEQ ID NO: 2316579 - RNA, 24 nt, Human
uggcaaacgcuaaagagcccuugc

SEQ ID NO: 2316580 - RNA, 21 nt, Human
uggcaaaaggaucuuuguggc

SEQ ID NO: 2316581 - RNA, 20 nt, Human
uggcaaaaggaucuuugugg

SEQ ID NO: 2316582 - RNA, 17 nt, Human
uggcaaaaauggcuaga

SEQ ID NO: 2316583 - RNA, 18 nt, Human
uggccucccacagacuca

SEQ ID NO: 2316584 - RNA, 22 nt, Human
uggccucauuacuuuaccaccc

SEQ ID NO: 2316585 - RNA, 11 nt, Human
uggccucccac

SEQ ID NO: 2316586 - RNA, 13 nt, Human
uggccucccaccc

SEQ ID NO: 2316587 - RNA, 14 nt, Human
uggccucccacccg

SEQ ID NO: 2316588 - RNA, 15 nt, Human
uggccucccacccga

SEQ ID NO: 2316589 - RNA, 21 nt, Human
uggccucccacccgaugcugc

SEQ ID NO: 2316590 - RNA, 22 nt, Human
uggccucccacccgaugcugcu

SEQ ID NO: 2316591 - RNA, 14 nt, Human
uggccuccccugcc

SEQ ID NO: 2316592 - RNA, 15 nt, Human
uggccuccccugcca

SEQ ID NO: 2316593 - RNA, 17 nt, Human
uggccuccccugccacc

SEQ ID NO: 2316594 - RNA, 23 nt, Human
uggccucccaacucaccccagcc

SEQ ID NO: 2316595 - RNA, 18 nt, Human
uggccucauguggcugga

SEQ ID NO: 2316596 - RNA, 19 nt, Human
uggccucauguggcuggaa

SEQ ID NO: 2316597 - RNA, 20 nt, Human
uggccucauguggcuggaag

SEQ ID NO: 2316598 - RNA, 21 nt, Human
uggccucauguggcuggaaga

SEQ ID NO: 2316599 - RNA, 18 nt, Human
uggccucagcugccucac

SEQ ID NO: 2316600 - RNA, 17 nt, Human
uggccucagcugccuca

SEQ ID NO: 2316601 - RNA, 16 nt, Human
uggccucagcugccuc

SEQ ID NO: 2316602 - RNA, 14 nt, Human
uggccucagcugcc

SEQ ID NO: 2316603 - RNA, 19 nt, Human
uggccucagcugccucacu

SEQ ID NO: 2316604 - RNA, 13 nt, Human
uggccucaugugg

SEQ ID NO: 2316605 - RNA, 15 nt, Human
uggccucauguggcu

SEQ ID NO: 2316606 - RNA, 17 nt, Human
uggccucauguggcugg

SEQ ID NO: 2316607 - RNA, 20 nt, Human
uggccucaacccucccucag

SEQ ID NO: 2316608 - RNA, 16 nt, Human
uggccucaacccuccc

SEQ ID NO: 2316609 - RNA, 15 nt, Human
uggccucaacccucc

SEQ ID NO: 2316610 - RNA, 14 nt, Human
uggccucaacccuc

SEQ ID NO: 2316611 - RNA, 21 nt, Human
uggccuauuauauuaaaauau

SEQ ID NO: 2316612 - RNA, 13 nt, Human
uggccucagcugc

SEQ ID NO: 2316613 - RNA, 18 nt, Human
uggccucaacccucccuc

SEQ ID NO: 2316614 - RNA, 17 nt, Human
uggccucaacccucccu

SEQ ID NO: 2316615 - RNA, 19 nt, Human
uggccucaacccucccuca

SEQ ID NO: 2316616 - RNA, 14 nt, Human
uggcgcaagccugu

SEQ ID NO: 2316617 - RNA, 16 nt, Human
uggccuccccugcuga

SEQ ID NO: 2316618 - RNA, 15 nt, Human
uggccuccccugcug

SEQ ID NO: 2316619 - RNA, 19 nt, Human
uggccuccccugccaccag

SEQ ID NO: 2316620 - RNA, 20 nt, Human
uggccuccccugccaccagg

SEQ ID NO: 2316621 - RNA, 21 nt, Human
uggccuccccugccaccaggc

SEQ ID NO: 2316622 - RNA, 23 nt, Human
uggccuccccugccaccaggcca

SEQ ID NO: 2316623 - RNA, 22 nt, Human
uggcgcagcauauucaggaagc

SEQ ID NO: 2316624 - RNA, 23 nt, Human
uggcgcagcauauucaggaagcu

SEQ ID NO: 2316625 - RNA, 16 nt, Human
uggcgcugccccuggc

SEQ ID NO: 2316626 - RNA, 13 nt, Human
uggcgcacccucc

SEQ ID NO: 2316627 - RNA, 14 nt, Human
uggcgcacccuccc

SEQ ID NO: 2316628 - RNA, 15 nt, Human
uggcgcacccucccc

SEQ ID NO: 2316629 - RNA, 16 nt, Human
uggcgcacccuccccu

SEQ ID NO: 2316630 - RNA, 18 nt, Human
uggcgcacccuccccucc

SEQ ID NO: 2316631 - RNA, 12 nt, Human
uggcgcagccaa

SEQ ID NO: 2316632 - RNA, 13 nt, Human
uggcgcagccaag

SEQ ID NO: 2316633 - RNA, 23 nt, Human
uggcgcugccccuggcagccccu

SEQ ID NO: 2316634 - RNA, 16 nt, Human
uggcgcagccaaggcc

SEQ ID NO: 2316635 - RNA, 14 nt, Human
uggcggcagcagcc

SEQ ID NO: 2316636 - RNA, 23 nt, Human
uggcggcagcagccaucauagga

SEQ ID NO: 2316637 - RNA, 23 nt, Human
uggcggcuacucagcagcccucc

SEQ ID NO: 2316638 - RNA, 22 nt, Human
uggcggcuacucagcagcccuc

SEQ ID NO: 2316639 - RNA, 21 nt, Human
uggcggcuacucagcagcccu

SEQ ID NO: 2316640 - RNA, 17 nt, Human
uggcggcuacucagcag

SEQ ID NO: 2316641 - RNA, 16 nt, Human
uggcggcuacucagca

SEQ ID NO: 2316642 - RNA, 15 nt, Human
uggcggcuacucagc

SEQ ID NO: 2316643 - RNA, 15 nt, Human
uggcggcagcagcca

SEQ ID NO: 2316644 - RNA, 17 nt, Human
uggcgggccaaggacug

SEQ ID NO: 2316645 - RNA, 13 nt, Human
uggcgggccaagg

SEQ ID NO: 2316646 - RNA, 14 nt, Human
uggcgggcgccugu

SEQ ID NO: 2316647 - RNA, 17 nt, Human
uggcgggcgccuguagu

SEQ ID NO: 2316648 - RNA, 16 nt, Human
uggcgggaugggccac

SEQ ID NO: 2316649 - RNA, 19 nt, Human
uggcgggaugggccaccgc

SEQ ID NO: 2316650 - RNA, 13 nt, Human
uggcggugccugg

SEQ ID NO: 2316651 - RNA, 15 nt, Human
uggcgggugggggug

SEQ ID NO: 2316652 - RNA, 12 nt, Human
uggcgggugggg

SEQ ID NO: 2316653 - RNA, 15 nt, Human
uggcgggguggggug

SEQ ID NO: 2316654 - RNA, 20 nt, Human
uggcguagaaguuuuuguac

SEQ ID NO: 2316655 - RNA, 14 nt, Human
uggcucccacaggc

SEQ ID NO: 2316656 - RNA, 16 nt, Human
uggcucccacaggagu

SEQ ID NO: 2316657 - RNA, 17 nt, Human
uggcucccacaggcagc

SEQ ID NO: 2316658 - RNA, 18 nt, Human
uggcucccacaggcagcu

SEQ ID NO: 2316659 - RNA, 19 nt, Human
uggcucccacaggcagcuu

SEQ ID NO: 2316660 - RNA, 17 nt, Human
uggcucccacaggcccu

SEQ ID NO: 2316661 - RNA, 20 nt, Human
uggcucccacaggcccuucc

SEQ ID NO: 2316662 - RNA, 20 nt, Human
uggcuccugaggggcaucug

SEQ ID NO: 2316663 - RNA, 14 nt, Human
uggcugcugacuga

SEQ ID NO: 2316664 - RNA, 13 nt, Human
uggcuccucucag

SEQ ID NO: 2316665 - RNA, 11 nt, Human
uggcugcugcc

SEQ ID NO: 2316666 - RNA, 12 nt, Human
uggcugcugccc

SEQ ID NO: 2316667 - RNA, 11 nt, Human
uggcugcuuca

SEQ ID NO: 2316668 - RNA, 15 nt, Human
uggcugcuucaagga

SEQ ID NO: 2316669 - RNA, 20 nt, Human
uggcucccaugaccauacug

SEQ ID NO: 2316670 - RNA, 22 nt, Human
uggcuccucaaacaguagguug

SEQ ID NO: 2316671 - RNA, 12 nt, Human
uggcuccucuca

SEQ ID NO: 2316672 - RNA, 14 nt, Human
uggcuccugagggg

SEQ ID NO: 2316673 - RNA, 14 nt, Human
uggcuccucucagu

SEQ ID NO: 2316674 - RNA, 18 nt, Human
uggcuccucccggugccc

SEQ ID NO: 2316675 - RNA, 19 nt, Human
uggcuccucccggugccca

SEQ ID NO: 2316676 - RNA, 14 nt, Human
uggcucccaugacc

SEQ ID NO: 2316677 - RNA, 14 nt, Human
uggcuccucccggu

SEQ ID NO: 2316678 - RNA, 16 nt, Human
uggcuccucccggugc

SEQ ID NO: 2316679 - RNA, 21 nt, Human
uggccccgccgccugguacuc

SEQ ID NO: 2316680 - RNA, 15 nt, Human
uggccccguuucugg

SEQ ID NO: 2316681 - RNA, 19 nt, Human
uggccccuagaaucagccu

SEQ ID NO: 2316682 - RNA, 19 nt, Human
uggcccccgagcugggggc

SEQ ID NO: 2316683 - RNA, 16 nt, Human
uggccccguuucuggu

SEQ ID NO: 2316684 - RNA, 14 nt, Human
uggccccugcccgg

SEQ ID NO: 2316685 - RNA, 15 nt, Human
uggccccugcccggc

SEQ ID NO: 2316686 - RNA, 16 nt, Human
uggccccugcccggcu

SEQ ID NO: 2316687 - RNA, 13 nt, Human
uggccucaacccu

SEQ ID NO: 2316688 - RNA, 20 nt, Human
uggccuauuauauuaaaaua

SEQ ID NO: 2316689 - RNA, 20 nt, Human
uggccuaugcacauauggac

SEQ ID NO: 2316690 - RNA, 17 nt, Human
uggccuauuauauuaaa

SEQ ID NO: 2316691 - RNA, 13 nt, Human
uggccuaugcaca

SEQ ID NO: 2316692 - RNA, 14 nt, Human
uggccuaugcacau

SEQ ID NO: 2316693 - RNA, 15 nt, Human
uggccuaugcacaua

SEQ ID NO: 2316694 - RNA, 17 nt, Human
uggccuaugcacauaug

SEQ ID NO: 2316695 - RNA, 21 nt, Human
uggccuaggagauaucugagg

SEQ ID NO: 2316696 - RNA, 21 nt, Human
uggccccucaaaucguccagc

SEQ ID NO: 2316697 - RNA, 22 nt, Human
uggccuaggagauaucugaggg

SEQ ID NO: 2316698 - RNA, 20 nt, Human
uggccccugcccggcugcgg

SEQ ID NO: 2316699 - RNA, 13 nt, Human
uggccccgccgcc

SEQ ID NO: 2316700 - RNA, 14 nt, Human
uggcccccuguccu

SEQ ID NO: 2316701 - RNA, 15 nt, Human
uggccccgccgccug

SEQ ID NO: 2316702 - RNA, 20 nt, Human
uggccccgccgccugguacu

SEQ ID NO: 2316703 - RNA, 15 nt, Human
uggcccccgagcugg

SEQ ID NO: 2316704 - RNA, 14 nt, Human
uggcccccgagcug

SEQ ID NO: 2316705 - RNA, 17 nt, Human
uggcccccgagcugggg

SEQ ID NO: 2316706 - RNA, 16 nt, Human
uggcccccgagcuggg

SEQ ID NO: 2316707 - RNA, 13 nt, Human
uggcccccugucc

SEQ ID NO: 2316708 - RNA, 13 nt, Human
uggcccaguguca

SEQ ID NO: 2316709 - RNA, 12 nt, Human
uggcccaguguc

SEQ ID NO: 2316710 - RNA, 12 nt, Human
uggcccaucagu

SEQ ID NO: 2316711 - RNA, 16 nt, Human
uggcccauccccccuc

SEQ ID NO: 2316712 - RNA, 17 nt, Human
uggcccauccccccuca

SEQ ID NO: 2316713 - RNA, 22 nt, Human
uggcccaucaguguacccccgc

SEQ ID NO: 2316714 - RNA, 23 nt, Human
uggcccaucaguguacccccgcc

SEQ ID NO: 2316715 - RNA, 12 nt, Human
uggcccaucccc

SEQ ID NO: 2316716 - RNA, 15 nt, Human
uggcccauccccccu

SEQ ID NO: 2316717 - RNA, 13 nt, Human
uggccaggcuggu

SEQ ID NO: 2316718 - RNA, 20 nt, Human
uggccaggcugcucuugaac

SEQ ID NO: 2316719 - RNA, 17 nt, Human
uggcccagggcccagag

SEQ ID NO: 2316720 - RNA, 23 nt, Human
uggcccagggcccagagcccagc

SEQ ID NO: 2316721 - RNA, 22 nt, Human
uggcccagggcccagagcccag

SEQ ID NO: 2316722 - RNA, 21 nt, Human
uggcccagggcccagagccca

SEQ ID NO: 2316723 - RNA, 20 nt, Human
uggcccagggcccagagccc

SEQ ID NO: 2316724 - RNA, 18 nt, Human
uggcccagggcccagagc

SEQ ID NO: 2316725 - RNA, 19 nt, Human
uggccagaugcaccagccc

SEQ ID NO: 2316726 - RNA, 18 nt, Human
uggccagccccacagccc

SEQ ID NO: 2316727 - RNA, 19 nt, Human
uggccagccccacagccca

SEQ ID NO: 2316728 - RNA, 20 nt, Human
uggccagccccacagcccac

SEQ ID NO: 2316729 - RNA, 23 nt, Human
uggccagccccacagcccacguc

SEQ ID NO: 2316730 - RNA, 11 nt, Human
uggccagcccg

SEQ ID NO: 2316731 - RNA, 12 nt, Human
uggccagcccgg

SEQ ID NO: 2316732 - RNA, 13 nt, Human
uggccagcccggc

SEQ ID NO: 2316733 - RNA, 14 nt, Human
uggccagcccggcu

SEQ ID NO: 2316734 - RNA, 15 nt, Human
uggccagcccggcug

SEQ ID NO: 2316735 - RNA, 20 nt, Human
uggccagcccggcugguuuu

SEQ ID NO: 2316736 - RNA, 19 nt, Human
uggccagcccggcugguuu

SEQ ID NO: 2316737 - RNA, 14 nt, Human
uggccagccuggau

SEQ ID NO: 2316738 - RNA, 13 nt, Human
uggccagccuaca

SEQ ID NO: 2316739 - RNA, 16 nt, Human
uggccagcccggcugg

SEQ ID NO: 2316740 - RNA, 17 nt, Human
uggccagcccggcuggu

SEQ ID NO: 2316741 - RNA, 16 nt, Human
uggccagccuggaucu

SEQ ID NO: 2316742 - RNA, 19 nt, Human
uggccaggccucuuggcag

SEQ ID NO: 2316743 - RNA, 17 nt, Human
uggccaggcugcucuug

SEQ ID NO: 2316744 - RNA, 16 nt, Human
uggccaggcugcucuu

SEQ ID NO: 2316745 - RNA, 17 nt, Human
uggccagaugcaccagc

SEQ ID NO: 2316746 - RNA, 18 nt, Human
uggccagaugcaccagcc

SEQ ID NO: 2316747 - RNA, 17 nt, Human
uggcagaguugaagaca

SEQ ID NO: 2316748 - RNA, 19 nt, Human
uggcagaguugaagacaga

SEQ ID NO: 2316749 - RNA, 21 nt, Human
uggcagaguggauucuugaac

SEQ ID NO: 2316750 - RNA, 13 nt, Human
uggcagagcuucu

SEQ ID NO: 2316751 - RNA, 22 nt, Human
uggcagagcuuggacuggaugc

SEQ ID NO: 2316752 - RNA, 12 nt, Human
uggcagacagac

SEQ ID NO: 2316753 - RNA, 12 nt, Human
uggcagaggagg

SEQ ID NO: 2316754 - RNA, 15 nt, Human
uggcagaguugaaga

SEQ ID NO: 2316755 - RNA, 14 nt, Human
ugcagggagccgag

SEQ ID NO: 2316756 - RNA, 13 nt, Human
ugcagggaguccg

SEQ ID NO: 2316757 - RNA, 23 nt, Human
ugcaggcuggcaccgccuucucu

SEQ ID NO: 2316758 - RNA, 22 nt, Human
ugcaggcuggcaccgccuucuc

SEQ ID NO: 2316759 - RNA, 21 nt, Human
ugcaggcuggcaccgccuucu

SEQ ID NO: 2316760 - RNA, 18 nt, Human
ugcaggcuggcaccgccu

SEQ ID NO: 2316761 - RNA, 22 nt, Human
ugcagggaaaauuauuugcaua

SEQ ID NO: 2316762 - RNA, 21 nt, Human
ugcagggaaaauuauuugcau

SEQ ID NO: 2316763 - RNA, 20 nt, Human
ugcagggaaaauuauuugca

SEQ ID NO: 2316764 - RNA, 15 nt, Human
ugcagggaaaauuau

SEQ ID NO: 2316765 - RNA, 13 nt, Human
ugauuuaauagug

SEQ ID NO: 2316766 - RNA, 22 nt, Human
ugauuuaauaaaauaauucuaa

SEQ ID NO: 2316767 - RNA, 23 nt, Human
ugauuuaauaaaauaauucuaaa

SEQ ID NO: 2316768 - RNA, 17 nt, Human
ugauuuaauaguguuaa

SEQ ID NO: 2316769 - RNA, 18 nt, Human
ugauuuaauaguguuaau

SEQ ID NO: 2316770 - RNA, 20 nt, Human
ugauuuaauaguguuaauca

SEQ ID NO: 2316771 - RNA, 21 nt, Human
ugauuuaauaguguuaaucaa

SEQ ID NO: 2316772 - RNA, 18 nt, Human
ugauuuaagacacuuuuu

SEQ ID NO: 2316773 - RNA, 13 nt, Human
ugauuuaauaaaa

SEQ ID NO: 2316774 - RNA, 14 nt, Human
ugauuuaauaaaau

SEQ ID NO: 2316775 - RNA, 15 nt, Human
ugauuuaauaaaaua

SEQ ID NO: 2316776 - RNA, 17 nt, Human
ugauuuaauaaaauaau

SEQ ID NO: 2316777 - RNA, 19 nt, Human
ugauuuaauaaaauaauuc

SEQ ID NO: 2316778 - RNA, 20 nt, Human
ugauuuaauaaaauaauucu

SEQ ID NO: 2316779 - RNA, 21 nt, Human
ugauuuaauaaaauaauucua

SEQ ID NO: 2316780 - RNA, 21 nt, Human
ugcaggccugcucagggacug

SEQ ID NO: 2316781 - RNA, 16 nt, Human
ugcaggccugcucagg

SEQ ID NO: 2316782 - RNA, 13 nt, Human
ugauuuaauguuu

SEQ ID NO: 2316783 - RNA, 16 nt, Human
ugauuuaauguuuuca

SEQ ID NO: 2316784 - RNA, 22 nt, Human
ugauuuaauaguguuaaucaau

SEQ ID NO: 2316785 - RNA, 21 nt, Human
ugcaguuacacuaaaagguga

SEQ ID NO: 2316786 - RNA, 14 nt, Human
ugcagugugaaaag

SEQ ID NO: 2316787 - RNA, 13 nt, Human
ugcagggccagga

SEQ ID NO: 2316788 - RNA, 15 nt, Human
ugcagggccaggacu

SEQ ID NO: 2316789 - RNA, 23 nt, Human
ugcagggccaggacugagccccg

SEQ ID NO: 2316790 - RNA, 19 nt, Human
ugcaguucagcaccacccu

SEQ ID NO: 2316791 - RNA, 18 nt, Human
ugcaguucagcaccaccc

SEQ ID NO: 2316792 - RNA, 15 nt, Human
ugcaguucagcacca

SEQ ID NO: 2316793 - RNA, 21 nt, Human
ugcaguucccccaaccucaga

SEQ ID NO: 2316794 - RNA, 17 nt, Human
ugcaguucuaguuugca

SEQ ID NO: 2316795 - RNA, 20 nt, Human
ugcaguucccccaaccucag

SEQ ID NO: 2316796 - RNA, 24 nt, Human
ugcagggaggagguggcagcccug

SEQ ID NO: 2316797 - RNA, 23 nt, Human
ugcagggagcauggcugugagga

SEQ ID NO: 2316798 - RNA, 14 nt, Human
ugcagggcagucau

SEQ ID NO: 2316799 - RNA, 13 nt, Human
ugcagggcaguca

SEQ ID NO: 2316800 - RNA, 19 nt, Human
ugcagggauugcugccacu

SEQ ID NO: 2316801 - RNA, 20 nt, Human
ugcaguggugcgaucugggu

SEQ ID NO: 2316802 - RNA, 21 nt, Human
ugcagggcagucauuggcugu

SEQ ID NO: 2316803 - RNA, 21 nt, Human
ugcagggccagaccugccugc

SEQ ID NO: 2316804 - RNA, 12 nt, Human
ugcagggccagg

SEQ ID NO: 2316805 - RNA, 21 nt, Human
ugcaguggugcgaucuggguu

SEQ ID NO: 2316806 - RNA, 19 nt, Human
ugcaguuugagacaggaga

SEQ ID NO: 2316807 - RNA, 10 nt, Human
ugcaguuuau

SEQ ID NO: 2316808 - RNA, 12 nt, Human
ugcaguuuauca

SEQ ID NO: 2316809 - RNA, 16 nt, Human
ugcaguuuaucauuca

SEQ ID NO: 2316810 - RNA, 17 nt, Human
ugcaguuuaucauucaa

SEQ ID NO: 2316811 - RNA, 12 nt, Human
ugcaguuuccaa

SEQ ID NO: 2316812 - RNA, 19 nt, Human
ugcaguuuaucauucaagu

SEQ ID NO: 2316813 - RNA, 20 nt, Human
ugcauaggugaucucauuua

SEQ ID NO: 2316814 - RNA, 20 nt, Human
ugcauaguaccaaucauuuu

SEQ ID NO: 2316815 - RNA, 21 nt, Human
ugcauaguaccaaucauuuua

SEQ ID NO: 2316816 - RNA, 16 nt, Human
ugcaguugccagucac

SEQ ID NO: 2316817 - RNA, 20 nt, Human
ugcaguucuaguuugcauuc

SEQ ID NO: 2316818 - RNA, 18 nt, Human
ugcaguucuaguuugcau

SEQ ID NO: 2316819 - RNA, 19 nt, Human
ugcaguucuaguuugcauu

SEQ ID NO: 2316820 - RNA, 12 nt, Human
ugcaguucugaa

SEQ ID NO: 2316821 - RNA, 14 nt, Human
ugcaguucugaaga

SEQ ID NO: 2316822 - RNA, 21 nt, Human
ugcauaguauuccauugugug

SEQ ID NO: 2316823 - RNA, 18 nt, Human
ugcauauaacuuauauug

SEQ ID NO: 2316824 - RNA, 19 nt, Human
ugcauauguugaauacuuu

SEQ ID NO: 2316825 - RNA, 13 nt, Human
ugcauauguuucg

SEQ ID NO: 2316826 - RNA, 18 nt, Human
ugcauauuauuuuauguu

SEQ ID NO: 2316827 - RNA, 19 nt, Human
ugcauaguucccauguuaa

SEQ ID NO: 2316828 - RNA, 22 nt, Human
ugcauaguaccaaucauuuuaa

SEQ ID NO: 2316829 - RNA, 16 nt, Human
ugcauauaacuuauau

SEQ ID NO: 2316830 - RNA, 15 nt, Human
ugcauauaacuuaua

SEQ ID NO: 2316831 - RNA, 14 nt, Human
ugcauauaacuuau

SEQ ID NO: 2316832 - RNA, 20 nt, Human
ugcauauuguauuacuagaa

SEQ ID NO: 2316833 - RNA, 17 nt, Human
ugcauauuguacacuuu

SEQ ID NO: 2316834 - RNA, 19 nt, Human
ugcauauuguacacuuuuu

SEQ ID NO: 2316835 - RNA, 15 nt, Human
ugcauauuguauuac

SEQ ID NO: 2316836 - RNA, 16 nt, Human
ugcauauuguauuacu

SEQ ID NO: 2316837 - RNA, 22 nt, Human
ugcaucaauuuuucuuauuuca

SEQ ID NO: 2316838 - RNA, 23 nt, Human
ugcauauucuuauguaugugaaa

SEQ ID NO: 2316839 - RNA, 13 nt, Human
ugcauauuccuuu

SEQ ID NO: 2316840 - RNA, 16 nt, Human
ugcauauuccuuucua

SEQ ID NO: 2316841 - RNA, 22 nt, Human
ugcauauuccuuucuaucauuu

SEQ ID NO: 2316842 - RNA, 13 nt, Human
ugcauauuguaca

SEQ ID NO: 2316843 - RNA, 14 nt, Human
ugcauauuguacac

SEQ ID NO: 2316844 - RNA, 15 nt, Human
ugcauauuguacacu

SEQ ID NO: 2316845 - RNA, 16 nt, Human
ugcauauuguacacuu

SEQ ID NO: 2316846 - RNA, 15 nt, Human
ugcauuugucuauuc

SEQ ID NO: 2316847 - RNA, 19 nt, Human
ugccaaaaucauuuuaaug

SEQ ID NO: 2316848 - RNA, 18 nt, Human
ugccaaaaugcucuagug

SEQ ID NO: 2316849 - RNA, 17 nt, Human
ugccaaacaaaaagguu

SEQ ID NO: 2316850 - RNA, 17 nt, Human
ugccaaaaugcucuagu

SEQ ID NO: 2316851 - RNA, 23 nt, Human
ugccaaacaaaaagguucucagg

SEQ ID NO: 2316852 - RNA, 16 nt, Human
ugcauuuggucaagau

SEQ ID NO: 2316853 - RNA, 23 nt, Human
ugcauuuggugguuucagaaaug

SEQ ID NO: 2316854 - RNA, 22 nt, Human
ugccaaagcuaggguggcccuu

SEQ ID NO: 2316855 - RNA, 21 nt, Human
ugccaaagcuaggguggcccu

SEQ ID NO: 2316856 - RNA, 20 nt, Human
ugccaaagcuaggguggccc

SEQ ID NO: 2316857 - RNA, 14 nt, Human
ugccaaagaucacu

SEQ ID NO: 2316858 - RNA, 21 nt, Human
ugccaaagaucacuuguuguu

SEQ ID NO: 2316859 - RNA, 15 nt, Human
ugccaaaggauguga

SEQ ID NO: 2316860 - RNA, 16 nt, Human
ugccaaaggaugugau

SEQ ID NO: 2316861 - RNA, 17 nt, Human
ugccaaaggaugugaua

SEQ ID NO: 2316862 - RNA, 19 nt, Human
ugccaaaggaugugauaua

SEQ ID NO: 2316863 - RNA, 18 nt, Human
ugccaaagggaaauauca

SEQ ID NO: 2316864 - RNA, 14 nt, Human
ugccaaagggaaau

SEQ ID NO: 2316865 - RNA, 16 nt, Human
ugcauuugucuauucu

SEQ ID NO: 2316866 - RNA, 16 nt, Human
ugccaaauaauaaaaa

SEQ ID NO: 2316867 - RNA, 17 nt, Human
ugccaaauauguccugg

SEQ ID NO: 2316868 - RNA, 18 nt, Human
ugccaaauauguccuggg

SEQ ID NO: 2316869 - RNA, 13 nt, Human
ugcaucagcugcu

SEQ ID NO: 2316870 - RNA, 23 nt, Human
ugcauggugcaguugacagcagg

SEQ ID NO: 2316871 - RNA, 16 nt, Human
ugcaugggugaaggga

SEQ ID NO: 2316872 - RNA, 19 nt, Human
ugcaugggcuaaugaagau

SEQ ID NO: 2316873 - RNA, 23 nt, Human
ugcauggggugggguagggcuga

SEQ ID NO: 2316874 - RNA, 19 nt, Human
ugcaucagcugcugaaaca

SEQ ID NO: 2316875 - RNA, 20 nt, Human
ugcauggcuccagaaauguc

SEQ ID NO: 2316876 - RNA, 22 nt, Human
ugcauggcuccagaaaugucua

SEQ ID NO: 2316877 - RNA, 12 nt, Human
ugcaugggagca

SEQ ID NO: 2316878 - RNA, 17 nt, Human
ugcaugggugaagggag

SEQ ID NO: 2316879 - RNA, 16 nt, Human
ugcaugguggcaccag

SEQ ID NO: 2316880 - RNA, 21 nt, Human
ugcauuuggugguuucagaaa

SEQ ID NO: 2316881 - RNA, 20 nt, Human
ugcauggugccccaggacca

SEQ ID NO: 2316882 - RNA, 19 nt, Human
ugcauggugccccaggacc

SEQ ID NO: 2316883 - RNA, 18 nt, Human
ugcauggugccccaggac

SEQ ID NO: 2316884 - RNA, 17 nt, Human
ugcauggugccccagga

SEQ ID NO: 2316885 - RNA, 22 nt, Human
ugcauggugccccaggaccagc

SEQ ID NO: 2316886 - RNA, 21 nt, Human
ugcauggugccccaggaccag

SEQ ID NO: 2316887 - RNA, 22 nt, Human
ugccacguuggagaagcccgug

SEQ ID NO: 2316888 - RNA, 13 nt, Human
ugccaggacacgc

SEQ ID NO: 2316889 - RNA, 20 nt, Human
ugccaggaccagucaaccug

SEQ ID NO: 2316890 - RNA, 12 nt, Human
ugccaggacucc

SEQ ID NO: 2316891 - RNA, 16 nt, Human
ugccaggacuccccag

SEQ ID NO: 2316892 - RNA, 23 nt, Human
ugccaggacuccccaggccaggc

SEQ ID NO: 2316893 - RNA, 21 nt, Human
ugccaggacuccccaggccag

SEQ ID NO: 2316894 - RNA, 22 nt, Human
ugccaggacuccccaggccagg

SEQ ID NO: 2316895 - RNA, 14 nt, Human
ugccaggcauggug

SEQ ID NO: 2316896 - RNA, 16 nt, Human
ugccacuaaauugaca

SEQ ID NO: 2316897 - RNA, 20 nt, Human
ugccaggaagccagcaggcu

SEQ ID NO: 2316898 - RNA, 22 nt, Human
ugccaggaagccagcaggcucu

SEQ ID NO: 2316899 - RNA, 23 nt, Human
ugccaaauuuuggccaaaguguu

SEQ ID NO: 2316900 - RNA, 15 nt, Human
ugccaacaauccuag

SEQ ID NO: 2316901 - RNA, 18 nt, Human
ugccaaauuguaguucuu

SEQ ID NO: 2316902 - RNA, 20 nt, Human
ugccaacaauccuagugcuu

SEQ ID NO: 2316903 - RNA, 20 nt, Human
ugccaacacucaagaagcag

SEQ ID NO: 2316904 - RNA, 21 nt, Human
ugccaacaauccuagugcuuu

SEQ ID NO: 2316905 - RNA, 21 nt, Human
ugccaacacucaagaagcagg

SEQ ID NO: 2316906 - RNA, 22 nt, Human
ugccaacacucaagaagcaggc

SEQ ID NO: 2316907 - RNA, 23 nt, Human
ugccaacacucaagaagcaggcu

SEQ ID NO: 2316908 - RNA, 21 nt, Human
ugccaacaguguuaggccugg

SEQ ID NO: 2316909 - RNA, 20 nt, Human
ugccacccuggggagaaagu

SEQ ID NO: 2316910 - RNA, 13 nt, Human
ugccaccuccccu

SEQ ID NO: 2316911 - RNA, 19 nt, Human
ugccaaccauaccuuccuu

SEQ ID NO: 2316912 - RNA, 22 nt, Human
ugccaaccauaccuuccuuccc

SEQ ID NO: 2316913 - RNA, 12 nt, Human
ugccaacauugc

SEQ ID NO: 2316914 - RNA, 13 nt, Human
ugccaacauugcc

SEQ ID NO: 2316915 - RNA, 14 nt, Human
ugccaacauugccu

SEQ ID NO: 2316916 - RNA, 22 nt, Human
ugccaacauugccuauuucagu

SEQ ID NO: 2316917 - RNA, 19 nt, Human
ugccaccuggggcagucac

SEQ ID NO: 2316918 - RNA, 17 nt, Human
ugccaccuggggcaguc

SEQ ID NO: 2316919 - RNA, 16 nt, Human
ugccaccuggggcagu

SEQ ID NO: 2316920 - RNA, 10 nt, Human
ugccaccugc

SEQ ID NO: 2316921 - RNA, 14 nt, Human
ugccaccucccuga

SEQ ID NO: 2316922 - RNA, 22 nt, Human
ugccaccuccccuauccaccca

SEQ ID NO: 2316923 - RNA, 21 nt, Human
ugccaccuccccuauccaccc

SEQ ID NO: 2316924 - RNA, 18 nt, Human
ugccaccuccccuaucca

SEQ ID NO: 2316925 - RNA, 17 nt, Human
ugccaccuccccuaucc

SEQ ID NO: 2316926 - RNA, 13 nt, Human
ugcccugggccac

SEQ ID NO: 2316927 - RNA, 23 nt, Human
ugcccugguuuccugcccuggga

SEQ ID NO: 2316928 - RNA, 20 nt, Human
ugcccugguuuccugcccug

SEQ ID NO: 2316929 - RNA, 19 nt, Human
ugcccugguuuccugcccu

SEQ ID NO: 2316930 - RNA, 18 nt, Human
ugcccugguccagggaag

SEQ ID NO: 2316931 - RNA, 17 nt, Human
ugcccugguagggcagu

SEQ ID NO: 2316932 - RNA, 12 nt, Human
ugcccuggugcu

SEQ ID NO: 2316933 - RNA, 14 nt, Human
ugcccuggugcugc

SEQ ID NO: 2316934 - RNA, 16 nt, Human
ugcccuggugcugcca

SEQ ID NO: 2316935 - RNA, 21 nt, Human
ugcccugguccagggaagcug

SEQ ID NO: 2316936 - RNA, 17 nt, Human
ugcccuggugcugccac

SEQ ID NO: 2316937 - RNA, 18 nt, Human
ugcccugguuuccugccc

SEQ ID NO: 2316938 - RNA, 17 nt, Human
ugcccugguuuccugcc

SEQ ID NO: 2316939 - RNA, 16 nt, Human
ugcccugggaugucca

SEQ ID NO: 2316940 - RNA, 18 nt, Human
ugcccuggcugcugcccc

SEQ ID NO: 2316941 - RNA, 20 nt, Human
ugcccuggcugcugccccca

SEQ ID NO: 2316942 - RNA, 18 nt, Human
ugcccugggaggcaguga

SEQ ID NO: 2316943 - RNA, 17 nt, Human
ugcccugggaggcagug

SEQ ID NO: 2316944 - RNA, 15 nt, Human
ugcccugggaggcag

SEQ ID NO: 2316945 - RNA, 13 nt, Human
ugcccugggaggc

SEQ ID NO: 2316946 - RNA, 14 nt, Human
ugcccuggcugcug

SEQ ID NO: 2316947 - RNA, 15 nt, Human
ugcccuggcugcugc

SEQ ID NO: 2316948 - RNA, 16 nt, Human
ugcccuggcugcugcc

SEQ ID NO: 2316949 - RNA, 17 nt, Human
ugcccuggcugcugccc

SEQ ID NO: 2316950 - RNA, 11 nt, Human
ugcccuggcug

SEQ ID NO: 2316951 - RNA, 22 nt, Human
ugcccuggcccugagguguggg

SEQ ID NO: 2316952 - RNA, 12 nt, Human
ugcccuggcugc

SEQ ID NO: 2316953 - RNA, 21 nt, Human
ugcccgggaaggucaccagca

SEQ ID NO: 2316954 - RNA, 18 nt, Human
ugcccuggcccugaggug

SEQ ID NO: 2316955 - RNA, 15 nt, Human
ugcccugcccaccug

SEQ ID NO: 2316956 - RNA, 14 nt, Human
ugcccugcccaccu

SEQ ID NO: 2316957 - RNA, 20 nt, Human
ugcccggcuaauuuuuguaa

SEQ ID NO: 2316958 - RNA, 21 nt, Human
ugcccggcgcccucuguccug

SEQ ID NO: 2316959 - RNA, 22 nt, Human
ugcccggcgcccucuguccuga

SEQ ID NO: 2316960 - RNA, 16 nt, Human
ugcccugcccaccugg

SEQ ID NO: 2316961 - RNA, 20 nt, Human
ugcccugcccaccuggccuc

SEQ ID NO: 2316962 - RNA, 23 nt, Human
ugccucaaugugaaucagacccu

SEQ ID NO: 2316963 - RNA, 22 nt, Human
ugccucaaugugaaucagaccc

SEQ ID NO: 2316964 - RNA, 16 nt, Human
ugccucaaugccagua

SEQ ID NO: 2316965 - RNA, 13 nt, Human
ugccucaaugcca

SEQ ID NO: 2316966 - RNA, 15 nt, Human
ugccucaaugccagu

SEQ ID NO: 2316967 - RNA, 24 nt, Human
ugccucaaugugaaucagacccua

SEQ ID NO: 2316968 - RNA, 18 nt, Human
ugccucaaugugaccagg

SEQ ID NO: 2316969 - RNA, 19 nt, Human
ugccucaaugugaccaggg

SEQ ID NO: 2316970 - RNA, 23 nt, Human
ugccucaaugugaccagggguga

SEQ ID NO: 2316971 - RNA, 14 nt, Human
ugccucacagcugg

SEQ ID NO: 2316972 - RNA, 12 nt, Human
ugccuccuccuu

SEQ ID NO: 2316973 - RNA, 13 nt, Human
ugccuccugugua

SEQ ID NO: 2316974 - RNA, 20 nt, Human
ugccucggccucccaaagug

SEQ ID NO: 2316975 - RNA, 13 nt, Human
ugccucggcuccu

SEQ ID NO: 2316976 - RNA, 14 nt, Human
ugccucggcuccug

SEQ ID NO: 2316977 - RNA, 15 nt, Human
ugccucggcuccugc

SEQ ID NO: 2316978 - RNA, 16 nt, Human
ugccucggcuccugcu

SEQ ID NO: 2316979 - RNA, 17 nt, Human
ugccucggcuccugcug

SEQ ID NO: 2316980 - RNA, 18 nt, Human
ugccucggcuccugcugc

SEQ ID NO: 2316981 - RNA, 19 nt, Human
ugccucggcuccugcugca

SEQ ID NO: 2316982 - RNA, 14 nt, Human
ugccuccucuucaa

SEQ ID NO: 2316983 - RNA, 16 nt, Human
ugccuccucuucaacu

SEQ ID NO: 2316984 - RNA, 14 nt, Human
ugccuccugccugc

SEQ ID NO: 2316985 - RNA, 18 nt, Human
ugccuccugccugccccu

SEQ ID NO: 2316986 - RNA, 20 nt, Human
ugccuccuccuucccaaagg

SEQ ID NO: 2316987 - RNA, 13 nt, Human
ugccuauucccac

SEQ ID NO: 2316988 - RNA, 22 nt, Human
ugccuauucccacaccuccaca

SEQ ID NO: 2316989 - RNA, 14 nt, Human
ugccucaagagaag

SEQ ID NO: 2316990 - RNA, 15 nt, Human
ugccucaagagaagg

SEQ ID NO: 2316991 - RNA, 19 nt, Human
ugccucaagccccagagug

SEQ ID NO: 2316992 - RNA, 14 nt, Human
ugccuaacaccagc

SEQ ID NO: 2316993 - RNA, 15 nt, Human
ugccuaacaccagcg

SEQ ID NO: 2316994 - RNA, 14 nt, Human
ugccaggcccgggg

SEQ ID NO: 2316995 - RNA, 11 nt, Human
ugccaggcccg

SEQ ID NO: 2316996 - RNA, 20 nt, Human
ugccaggcuagagugcagug

SEQ ID NO: 2316997 - RNA, 14 nt, Human
ugccaggccagccu

SEQ ID NO: 2316998 - RNA, 15 nt, Human
ugccaggccagccuc

SEQ ID NO: 2316999 - RNA, 16 nt, Human
ugccaggccagccucc

SEQ ID NO: 2317000 - RNA, 17 nt, Human
ugccaggccagccuccg

SEQ ID NO: 2317001 - RNA, 18 nt, Human
ugccaggccagccuccga

SEQ ID NO: 2317002 - RNA, 22 nt, Human
ugcccagaccccucuggccagg

SEQ ID NO: 2317003 - RNA, 19 nt, Human
ugcccagaccccucuggcc

SEQ ID NO: 2317004 - RNA, 18 nt, Human
ugcccagaccccucuggc

SEQ ID NO: 2317005 - RNA, 15 nt, Human
ugcccagaccacacg

SEQ ID NO: 2317006 - RNA, 19 nt, Human
ugcccagaaugaggcugcu

SEQ ID NO: 2317007 - RNA, 18 nt, Human
ugcccagagggcccaggc

SEQ ID NO: 2317008 - RNA, 15 nt, Human
ugcccagagauggga

SEQ ID NO: 2317009 - RNA, 22 nt, Human
ugcccagagaugccuccaccgc

SEQ ID NO: 2317010 - RNA, 21 nt, Human
ugcccagagaugccuccaccg

SEQ ID NO: 2317011 - RNA, 20 nt, Human
ugcccagagaugccuccacc

SEQ ID NO: 2317012 - RNA, 19 nt, Human
ugcccagagaugccuccac

SEQ ID NO: 2317013 - RNA, 18 nt, Human
ugcccagagaugccucca

SEQ ID NO: 2317014 - RNA, 17 nt, Human
ugcccagagaugccucc

SEQ ID NO: 2317015 - RNA, 16 nt, Human
ugcccagagaugccuc

SEQ ID NO: 2317016 - RNA, 12 nt, Human
ugcccagagaug

SEQ ID NO: 2317017 - RNA, 11 nt, Human
ugcccagagau

SEQ ID NO: 2317018 - RNA, 18 nt, Human
ugcccaggcuggcgugca

SEQ ID NO: 2317019 - RNA, 19 nt, Human
ugcccaggcuggcgugcag

SEQ ID NO: 2317020 - RNA, 19 nt, Human
ugcccagagggcccaggca

SEQ ID NO: 2317021 - RNA, 21 nt, Human
ugcccaugucgcgcucagcau

SEQ ID NO: 2317022 - RNA, 23 nt, Human
ugcccaugggcacugcugggugg

SEQ ID NO: 2317023 - RNA, 20 nt, Human
ugcccaggcuggcgugcagu

SEQ ID NO: 2317024 - RNA, 20 nt, Human
ugccccaaacaaauaugcaa

SEQ ID NO: 2317025 - RNA, 15 nt, Human
ugccccaacccccag

SEQ ID NO: 2317026 - RNA, 16 nt, Human
ugccccaacccccagc

SEQ ID NO: 2317027 - RNA, 15 nt, Human
ugcccauuccucacc

SEQ ID NO: 2317028 - RNA, 14 nt, Human
ugccccaaacaaau

SEQ ID NO: 2317029 - RNA, 17 nt, Human
ugcccauuccucaccuu

SEQ ID NO: 2317030 - RNA, 23 nt, Human
ugccccagagcuguuuauggccu

SEQ ID NO: 2317031 - RNA, 17 nt, Human
ugccccagagcuguuua

SEQ ID NO: 2317032 - RNA, 15 nt, Human
ugccccagagcuguu

SEQ ID NO: 2317033 - RNA, 14 nt, Human
ugccccagagcugu

SEQ ID NO: 2317034 - RNA, 13 nt, Human
ugccccagagcug

SEQ ID NO: 2317035 - RNA, 21 nt, Human
ugccccaccuuuauuaaaauc

SEQ ID NO: 2317036 - RNA, 20 nt, Human
ugccccaccccuccccauua

SEQ ID NO: 2317037 - RNA, 15 nt, Human
ugccccaacuccugg

SEQ ID NO: 2317038 - RNA, 13 nt, Human
ugccccaacuccu

SEQ ID NO: 2317039 - RNA, 16 nt, Human
ugccccaacuccugga

SEQ ID NO: 2317040 - RNA, 20 nt, Human
ugccccaacccccagcaccc

SEQ ID NO: 2317041 - RNA, 17 nt, Human
ugccccaacccccagca

SEQ ID NO: 2317042 - RNA, 16 nt, Human
ugccccaaccugcuga

SEQ ID NO: 2317043 - RNA, 19 nt, Human
ugccccaccuuuauuaaaa

SEQ ID NO: 2317044 - RNA, 17 nt, Human
ugcccggauucugggag

SEQ ID NO: 2317045 - RNA, 16 nt, Human
ugcccggauucuggga

SEQ ID NO: 2317046 - RNA, 15 nt, Human
ugcccggauucuggg

SEQ ID NO: 2317047 - RNA, 23 nt, Human
ugcccggagauuggacggccuga

SEQ ID NO: 2317048 - RNA, 22 nt, Human
ugcccggauucugggaggaagc

SEQ ID NO: 2317049 - RNA, 18 nt, Human
ugcccggauucugggagg

SEQ ID NO: 2317050 - RNA, 15 nt, Human
ugcccggcgcccucu

SEQ ID NO: 2317051 - RNA, 17 nt, Human
ugcccgcucccaguguc

SEQ ID NO: 2317052 - RNA, 16 nt, Human
ugcccggcgcccucug

SEQ ID NO: 2317053 - RNA, 18 nt, Human
ugcccggcgcccucuguc

SEQ ID NO: 2317054 - RNA, 12 nt, Human
ugcccggcugcg

SEQ ID NO: 2317055 - RNA, 14 nt, Human
ugcccggcugcgga

SEQ ID NO: 2317056 - RNA, 17 nt, Human
ugccccugcugccuccc

SEQ ID NO: 2317057 - RNA, 16 nt, Human
ugccccugcugccucc

SEQ ID NO: 2317058 - RNA, 14 nt, Human
ugccccugcugccu

SEQ ID NO: 2317059 - RNA, 13 nt, Human
ugccccugcugcc

SEQ ID NO: 2317060 - RNA, 23 nt, Human
ugccccugcugccuccccaaccc

SEQ ID NO: 2317061 - RNA, 13 nt, Human
ugcccgagcuggu

SEQ ID NO: 2317062 - RNA, 14 nt, Human
ugcccgagcuggug

SEQ ID NO: 2317063 - RNA, 21 nt, Human
ugcccggagauuggacggccu

SEQ ID NO: 2317064 - RNA, 14 nt, Human
ugcccgcucccagu

SEQ ID NO: 2317065 - RNA, 15 nt, Human
ugcccgcucccagug

SEQ ID NO: 2317066 - RNA, 13 nt, Human
ugcccgcucccag

SEQ ID NO: 2317067 - RNA, 19 nt, Human
ugcccgagcuggugcauua

SEQ ID NO: 2317068 - RNA, 16 nt, Human
ugcccgagcuggugca

SEQ ID NO: 2317069 - RNA, 20 nt, Human
ugcccgagcuggugcauuac

SEQ ID NO: 2317070 - RNA, 23 nt, Human
ugccccugagcaaugucugugcu

SEQ ID NO: 2317071 - RNA, 16 nt, Human
ugccccuggcagcccc

SEQ ID NO: 2317072 - RNA, 20 nt, Human
ugccccuccucucugcccua

SEQ ID NO: 2317073 - RNA, 19 nt, Human
ugccccuccucucugcccu

SEQ ID NO: 2317074 - RNA, 17 nt, Human
ugccccagcccaagucc

SEQ ID NO: 2317075 - RNA, 20 nt, Human
ugccccucuccaggcgccgg

SEQ ID NO: 2317076 - RNA, 19 nt, Human
ugccccagcucuggcuucc

SEQ ID NO: 2317077 - RNA, 18 nt, Human
ugccccagcucuggcuuc

SEQ ID NO: 2317078 - RNA, 16 nt, Human
ugccccagcucuggcu

SEQ ID NO: 2317079 - RNA, 14 nt, Human
ugccccagcucugg

SEQ ID NO: 2317080 - RNA, 13 nt, Human
ugccccagcucug

SEQ ID NO: 2317081 - RNA, 13 nt, Human
ugccccagcccaa

SEQ ID NO: 2317082 - RNA, 16 nt, Human
ugccccagcccaaguc

SEQ ID NO: 2317083 - RNA, 13 nt, Human
ugccccagaggcc

SEQ ID NO: 2317084 - RNA, 16 nt, Human
ugccccagaggccucu

SEQ ID NO: 2317085 - RNA, 12 nt, Human
ugccccagccag

SEQ ID NO: 2317086 - RNA, 13 nt, Human
ugccccagccaga

SEQ ID NO: 2317087 - RNA, 15 nt, Human
ugccccucccuucaa

SEQ ID NO: 2317088 - RNA, 16 nt, Human
ugccccucccuucaac

SEQ ID NO: 2317089 - RNA, 18 nt, Human
ugccccuccucucugccc

SEQ ID NO: 2317090 - RNA, 17 nt, Human
ugccccuccucucugcc

SEQ ID NO: 2317091 - RNA, 17 nt, Human
ugcuaggcgagugccag

SEQ ID NO: 2317092 - RNA, 18 nt, Human
ugcuaggcgagugccagg

SEQ ID NO: 2317093 - RNA, 22 nt, Human
ugcuaggaacacuccuucacag

SEQ ID NO: 2317094 - RNA, 21 nt, Human
ugcuaggaacacuccuucaca

SEQ ID NO: 2317095 - RNA, 20 nt, Human
ugcuaggaacacuccuucac

SEQ ID NO: 2317096 - RNA, 17 nt, Human
ugcuagaacucccuuuc

SEQ ID NO: 2317097 - RNA, 15 nt, Human
ugcuagaacucccuu

SEQ ID NO: 2317098 - RNA, 14 nt, Human
ugcuagaacucccu

SEQ ID NO: 2317099 - RNA, 13 nt, Human
ugcuagaacuccc

SEQ ID NO: 2317100 - RNA, 19 nt, Human
ugcucagggaaaagcagcu

SEQ ID NO: 2317101 - RNA, 14 nt, Human
ugcucagaccagcu

SEQ ID NO: 2317102 - RNA, 20 nt, Human
ugcucaggagcccugggagg

SEQ ID NO: 2317103 - RNA, 18 nt, Human
ugcucaggagcccuggga

SEQ ID NO: 2317104 - RNA, 19 nt, Human
ugcucaggagcccugggag

SEQ ID NO: 2317105 - RNA, 22 nt, Human
ugcucaccuggggugugggagg

SEQ ID NO: 2317106 - RNA, 14 nt, Human
ugcucaccuggggu

SEQ ID NO: 2317107 - RNA, 13 nt, Human
ugcucaccugggg

SEQ ID NO: 2317108 - RNA, 12 nt, Human
ugcucaccuggg

SEQ ID NO: 2317109 - RNA, 19 nt, Human
ugcuaggcgagugccagga

SEQ ID NO: 2317110 - RNA, 17 nt, Human
ugcucacauaucuguca

SEQ ID NO: 2317111 - RNA, 23 nt, Human
ugcucaccuggggugugggaggc

SEQ ID NO: 2317112 - RNA, 13 nt, Human
ugcucacuaccuc

SEQ ID NO: 2317113 - RNA, 17 nt, Human
ugcucacuaccuccuca

SEQ ID NO: 2317114 - RNA, 18 nt, Human
ugcucacuaccuccucag

SEQ ID NO: 2317115 - RNA, 20 nt, Human
ugcucacuaccuccucaggg

SEQ ID NO: 2317116 - RNA, 21 nt, Human
ugcucacuaccuccucaggga

SEQ ID NO: 2317117 - RNA, 15 nt, Human
ugcucaggagcccug

SEQ ID NO: 2317118 - RNA, 13 nt, Human
ugcucagacagaa

SEQ ID NO: 2317119 - RNA, 13 nt, Human
ugcucuagugccu

SEQ ID NO: 2317120 - RNA, 15 nt, Human
ugcucggccgucuuc

SEQ ID NO: 2317121 - RNA, 19 nt, Human
ugcucgcuguugcugaaua

SEQ ID NO: 2317122 - RNA, 14 nt, Human
ugcucgggcccagg

SEQ ID NO: 2317123 - RNA, 15 nt, Human
ugcucgggcccaggc

SEQ ID NO: 2317124 - RNA, 16 nt, Human
ugcucgggcccaggcc

SEQ ID NO: 2317125 - RNA, 23 nt, Human
ugcucgggcccaggccaucuucc

SEQ ID NO: 2317126 - RNA, 19 nt, Human
ugcucaggcuugaaaugca

SEQ ID NO: 2317127 - RNA, 23 nt, Human
ugcucaguucagaaucacuucug

SEQ ID NO: 2317128 - RNA, 17 nt, Human
ugcucaguucagaauca

SEQ ID NO: 2317129 - RNA, 18 nt, Human
ugcucaguucagaaucac

SEQ ID NO: 2317130 - RNA, 13 nt, Human
ugcucaguuguag

SEQ ID NO: 2317131 - RNA, 15 nt, Human
ugcucaguuguagaa

SEQ ID NO: 2317132 - RNA, 16 nt, Human
ugcucaguuguagaau

SEQ ID NO: 2317133 - RNA, 17 nt, Human
ugcucaguuguagaaug

SEQ ID NO: 2317134 - RNA, 18 nt, Human
ugcucaguuguagaaugu

SEQ ID NO: 2317135 - RNA, 19 nt, Human
ugcucaguuguagaaugua

SEQ ID NO: 2317136 - RNA, 14 nt, Human
ugcucauaacggau

SEQ ID NO: 2317137 - RNA, 20 nt, Human
ugcucaguuguagaauguau

SEQ ID NO: 2317138 - RNA, 21 nt, Human
ugcucaguuguagaauguauu

SEQ ID NO: 2317139 - RNA, 16 nt, Human
ugcucauaacggauca

SEQ ID NO: 2317140 - RNA, 21 nt, Human
ugcucauauugugauucugcc

SEQ ID NO: 2317141 - RNA, 22 nt, Human
ugcucaguuguagaauguauug

SEQ ID NO: 2317142 - RNA, 23 nt, Human
ugcucauauugugauucugccuu

SEQ ID NO: 2317143 - RNA, 22 nt, Human
ugcucauauugugauucugccu

SEQ ID NO: 2317144 - RNA, 19 nt, Human
ugcucuuguccuagcuugg

SEQ ID NO: 2317145 - RNA, 18 nt, Human
ugcucuuguccuagcuug

SEQ ID NO: 2317146 - RNA, 18 nt, Human
ugcucuuucaucucugcu

SEQ ID NO: 2317147 - RNA, 17 nt, Human
ugcucuugaugccuggc

SEQ ID NO: 2317148 - RNA, 17 nt, Human
ugcucuccccugcccug

SEQ ID NO: 2317149 - RNA, 16 nt, Human
ugcucuccccugcccu

SEQ ID NO: 2317150 - RNA, 14 nt, Human
ugcucuagugccuu

SEQ ID NO: 2317151 - RNA, 16 nt, Human
ugcucuagugccuucu

SEQ ID NO: 2317152 - RNA, 23 nt, Human
ugcucuccgaccagacaccuuga

SEQ ID NO: 2317153 - RNA, 20 nt, Human
ugcucuccccugcccugcug

SEQ ID NO: 2317154 - RNA, 20 nt, Human
ugcucucccgguucuuccag

SEQ ID NO: 2317155 - RNA, 21 nt, Human
ugcucucccucuucucaagug

SEQ ID NO: 2317156 - RNA, 22 nt, Human
ugcucucccucuucucaagugc

SEQ ID NO: 2317157 - RNA, 12 nt, Human
ugcucuccucuu

SEQ ID NO: 2317158 - RNA, 14 nt, Human
ugcuacugauuguu

SEQ ID NO: 2317159 - RNA, 20 nt, Human
ugcuacugauuguuucauug

SEQ ID NO: 2317160 - RNA, 14 nt, Human
ugcuacugccaacc

SEQ ID NO: 2317161 - RNA, 15 nt, Human
ugcuacugccaaccu

SEQ ID NO: 2317162 - RNA, 16 nt, Human
ugcuacucuguuccuu

SEQ ID NO: 2317163 - RNA, 15 nt, Human
ugcuacucuguuccu

SEQ ID NO: 2317164 - RNA, 14 nt, Human
ugcuacuacaaaaa

SEQ ID NO: 2317165 - RNA, 22 nt, Human
ugcuaagaauauuugaauguau

SEQ ID NO: 2317166 - RNA, 19 nt, Human
ugcuacgugugauuuuucu

SEQ ID NO: 2317167 - RNA, 21 nt, Human
ugcuaagaauauuugaaugua

SEQ ID NO: 2317168 - RNA, 17 nt, Human
ugcuaagaauauuugaa

SEQ ID NO: 2317169 - RNA, 21 nt, Human
ugcuacuguccuacccacccu

SEQ ID NO: 2317170 - RNA, 22 nt, Human
ugcuacuguccuacccacccuc

SEQ ID NO: 2317171 - RNA, 13 nt, Human
ugcuacuuugccu

SEQ ID NO: 2317172 - RNA, 22 nt, Human
ugcuacuuaauuccuuucucau

SEQ ID NO: 2317173 - RNA, 17 nt, Human
ugcuacuuugccuuuug

SEQ ID NO: 2317174 - RNA, 18 nt, Human
ugcuacuuugccuuuugc

SEQ ID NO: 2317175 - RNA, 22 nt, Human
ugcuacugucucacugaaacau

SEQ ID NO: 2317176 - RNA, 19 nt, Human
ugcuacuuaauuccuuucu

SEQ ID NO: 2317177 - RNA, 22 nt, Human
ugcuaacuagcuuggaaacugg

SEQ ID NO: 2317178 - RNA, 19 nt, Human
ugcuaacuuggagccccag

SEQ ID NO: 2317179 - RNA, 17 nt, Human
ugcuaacuuggagcccc

SEQ ID NO: 2317180 - RNA, 22 nt, Human
ugcuaagaagcgagcacugacc

SEQ ID NO: 2317181 - RNA, 20 nt, Human
ugcuaacuagcuuggaaacu

SEQ ID NO: 2317182 - RNA, 23 nt, Human
ugcuaaccacgucugucuucaca

SEQ ID NO: 2317183 - RNA, 19 nt, Human
ugcguuagaaugaggagga

SEQ ID NO: 2317184 - RNA, 12 nt, Human
ugcuaaaaaugg

SEQ ID NO: 2317185 - RNA, 15 nt, Human
ugcuaaaaaugggac

SEQ ID NO: 2317186 - RNA, 17 nt, Human
ugcuaaaaaugggacuu

SEQ ID NO: 2317187 - RNA, 13 nt, Human
ugcguuuuggaag

SEQ ID NO: 2317188 - RNA, 17 nt, Human
ugcguuccaugaugcug

SEQ ID NO: 2317189 - RNA, 19 nt, Human
ugcuaaaccuuaguacuga

SEQ ID NO: 2317190 - RNA, 21 nt, Human
ugcuaaaccuuaguacugagu

SEQ ID NO: 2317191 - RNA, 13 nt, Human
ugcuaaaccuuag

SEQ ID NO: 2317192 - RNA, 14 nt, Human
ugcuaaaccuuagu

SEQ ID NO: 2317193 - RNA, 17 nt, Human
ugcgcuuuugcugguca

SEQ ID NO: 2317194 - RNA, 18 nt, Human
ugcgcuuuugcuggucac

SEQ ID NO: 2317195 - RNA, 14 nt, Human
ugcgcuugcuuuuc

SEQ ID NO: 2317196 - RNA, 14 nt, Human
ugcggaaucagcuu

SEQ ID NO: 2317197 - RNA, 15 nt, Human
ugcggacaaguuuua

SEQ ID NO: 2317198 - RNA, 12 nt, Human
ugcguguguaga

SEQ ID NO: 2317199 - RNA, 15 nt, Human
ugcggaaucagcuuc

SEQ ID NO: 2317200 - RNA, 14 nt, Human
ugcguguguagagu

SEQ ID NO: 2317201 - RNA, 19 nt, Human
ugcguguguagaguuaaga

SEQ ID NO: 2317202 - RNA, 20 nt, Human
ugcguguguagaguuaagaa

SEQ ID NO: 2317203 - RNA, 21 nt, Human
ugcguguguagaguuaagaag

SEQ ID NO: 2317204 - RNA, 13 nt, Human
ugcguuacuaauu

SEQ ID NO: 2317205 - RNA, 14 nt, Human
ugcguguuugcacg

SEQ ID NO: 2317206 - RNA, 16 nt, Human
ugcguguuugcacguu

SEQ ID NO: 2317207 - RNA, 17 nt, Human
ugcguguguccaugugu

SEQ ID NO: 2317208 - RNA, 24 nt, Human
ugcguguguagaguuaagaagcug

SEQ ID NO: 2317209 - RNA, 19 nt, Human
ugcguguguccaugugugu

SEQ ID NO: 2317210 - RNA, 20 nt, Human
ugcgccacuacacuccagcc

SEQ ID NO: 2317211 - RNA, 23 nt, Human
ugcgcgugcacguggagagcugg

SEQ ID NO: 2317212 - RNA, 13 nt, Human
ugccuuggcuuca

SEQ ID NO: 2317213 - RNA, 19 nt, Human
ugcgcaggcuggcccugcc

SEQ ID NO: 2317214 - RNA, 13 nt, Human
ugcgcauucucau

SEQ ID NO: 2317215 - RNA, 17 nt, Human
ugcgccaccgcccagag

SEQ ID NO: 2317216 - RNA, 17 nt, Human
ugcgcauucucauggag

SEQ ID NO: 2317217 - RNA, 19 nt, Human
ugcgcauucucauggagaa

SEQ ID NO: 2317218 - RNA, 23 nt, Human
ugcgcauucucauggagaaguua

SEQ ID NO: 2317219 - RNA, 20 nt, Human
ugcgcucuagccugggcaac

SEQ ID NO: 2317220 - RNA, 23 nt, Human
ugcgcucagggccaugcugaggc

SEQ ID NO: 2317221 - RNA, 17 nt, Human
ugcgcgcacaauaguaa

SEQ ID NO: 2317222 - RNA, 23 nt, Human
ugcgcugacaaccaccgcucccc

SEQ ID NO: 2317223 - RNA, 17 nt, Human
ugcgcugacaaccaccg

SEQ ID NO: 2317224 - RNA, 13 nt, Human
ugcgcucagggcc

SEQ ID NO: 2317225 - RNA, 14 nt, Human
ugcgcucagggcca

SEQ ID NO: 2317226 - RNA, 15 nt, Human
ugcgcucagggccau

SEQ ID NO: 2317227 - RNA, 19 nt, Human
ugcgcucagggccaugcug

SEQ ID NO: 2317228 - RNA, 21 nt, Human
ugcgcucagggccaugcugag

SEQ ID NO: 2317229 - RNA, 22 nt, Human
ugcgcucagggccaugcugagg

SEQ ID NO: 2317230 - RNA, 15 nt, Human
ugccuugggcugcuc

SEQ ID NO: 2317231 - RNA, 11 nt, Human
ugccuugggcu

SEQ ID NO: 2317232 - RNA, 21 nt, Human
ugcgcaggcuggcccugcccu

SEQ ID NO: 2317233 - RNA, 23 nt, Human
ugcgcaggcuggcccugcccugg

SEQ ID NO: 2317234 - RNA, 22 nt, Human
ugcgcaggcuggcccugcccug

SEQ ID NO: 2317235 - RNA, 18 nt, Human
ugccuuggaaguugcaug

SEQ ID NO: 2317236 - RNA, 21 nt, Human
ugccuuggagggucccaagcu

SEQ ID NO: 2317237 - RNA, 19 nt, Human
ugccuuggagggucccaag

SEQ ID NO: 2317238 - RNA, 20 nt, Human
ugccuuggagggucccaagc

SEQ ID NO: 2317239 - RNA, 19 nt, Human
ugccuuggcucagacaugu

SEQ ID NO: 2317240 - RNA, 17 nt, Human
ugccuuggcucagacau

SEQ ID NO: 2317241 - RNA, 16 nt, Human
ugccuuggcucagaca

SEQ ID NO: 2317242 - RNA, 13 nt, Human
ugccuuggcucag

SEQ ID NO: 2317243 - RNA, 23 nt, Human
ugccucuaccugacacucccuug

SEQ ID NO: 2317244 - RNA, 24 nt, Human
ugccucgggaaccucacucuugcc

SEQ ID NO: 2317245 - RNA, 20 nt, Human
ugccuugcauaauggucaga

SEQ ID NO: 2317246 - RNA, 21 nt, Human
ugccucggcuuuucucagcug

SEQ ID NO: 2317247 - RNA, 20 nt, Human
ugccucggcuuuucucagcu

SEQ ID NO: 2317248 - RNA, 20 nt, Human
ugccucggcuccugcugcac

SEQ ID NO: 2317249 - RNA, 21 nt, Human
ugccucggcuccugcugcacc

SEQ ID NO: 2317250 - RNA, 22 nt, Human
ugccucggcuccugcugcacca

SEQ ID NO: 2317251 - RNA, 24 nt, Human
ugccucggcuuuucucagcuggau

SEQ ID NO: 2317252 - RNA, 18 nt, Human
ugccucgggaaccucacu

SEQ ID NO: 2317253 - RNA, 23 nt, Human
ugccucgggaaccucacucuugc

SEQ ID NO: 2317254 - RNA, 17 nt, Human
ugccucuaccugacacu

SEQ ID NO: 2317255 - RNA, 15 nt, Human
ugccucuaccugaca

SEQ ID NO: 2317256 - RNA, 15 nt, Human
ugcugguuuuccuaa

SEQ ID NO: 2317257 - RNA, 22 nt, Human
ugcugguuuuccuaaaugcagu

SEQ ID NO: 2317258 - RNA, 14 nt, Human
ugcugguuuuccua

SEQ ID NO: 2317259 - RNA, 12 nt, Human
ugcugguuuuuc

SEQ ID NO: 2317260 - RNA, 15 nt, Human
ugcugguuuuucagu

SEQ ID NO: 2317261 - RNA, 23 nt, Human
ugcugguugucauuuuugcagua

SEQ ID NO: 2317262 - RNA, 16 nt, Human
ugcugguugcugugug

SEQ ID NO: 2317263 - RNA, 17 nt, Human
ugcugguugcugugugg

SEQ ID NO: 2317264 - RNA, 22 nt, Human
ugcugguguccugaccacccuc

SEQ ID NO: 2317265 - RNA, 13 nt, Human
ugcugguugcugu

SEQ ID NO: 2317266 - RNA, 14 nt, Human
ugcugguugcugug

SEQ ID NO: 2317267 - RNA, 15 nt, Human
ugcugguugcugugu

SEQ ID NO: 2317268 - RNA, 13 nt, Human
ugcugguuuuagu

SEQ ID NO: 2317269 - RNA, 17 nt, Human
ugcuguaaaaacugugg

SEQ ID NO: 2317270 - RNA, 20 nt, Human
ugcugguuuuccuaaaugca

SEQ ID NO: 2317271 - RNA, 20 nt, Human
ugcuguaaauaaaugcuuua

SEQ ID NO: 2317272 - RNA, 16 nt, Human
ugcugguuuuucaguu

SEQ ID NO: 2317273 - RNA, 18 nt, Human
ugcugguuuuucaguuuu

SEQ ID NO: 2317274 - RNA, 12 nt, Human
ugcugugggaac

SEQ ID NO: 2317275 - RNA, 14 nt, Human
ugcugugggaacga

SEQ ID NO: 2317276 - RNA, 17 nt, Human
ugcugugggaacgagag

SEQ ID NO: 2317277 - RNA, 19 nt, Human
ugcugugggaacgagaggg

SEQ ID NO: 2317278 - RNA, 22 nt, Human
ugcugugggaacgagaggggaa

SEQ ID NO: 2317279 - RNA, 16 nt, Human
ugcugugguguguccc

SEQ ID NO: 2317280 - RNA, 15 nt, Human
ugcuguggugugucc

SEQ ID NO: 2317281 - RNA, 16 nt, Human
ugcuguggggcuggua

SEQ ID NO: 2317282 - RNA, 18 nt, Human
ugcuguggggcugguagc

SEQ ID NO: 2317283 - RNA, 23 nt, Human
ugcuguggggcugguagcucagg

SEQ ID NO: 2317284 - RNA, 21 nt, Human
ugcugugggugauauggacag

SEQ ID NO: 2317285 - RNA, 21 nt, Human
ugcuguguaucugauagcucu

SEQ ID NO: 2317286 - RNA, 13 nt, Human
ugcugugugccuu

SEQ ID NO: 2317287 - RNA, 11 nt, Human
ugcuguguggu

SEQ ID NO: 2317288 - RNA, 14 nt, Human
ugcugugugguuug

SEQ ID NO: 2317289 - RNA, 11 nt, Human
ugcuguguuaa

SEQ ID NO: 2317290 - RNA, 18 nt, Human
ugcuguguuaaauaaacc

SEQ ID NO: 2317291 - RNA, 15 nt, Human
ugcuguguaucugau

SEQ ID NO: 2317292 - RNA, 16 nt, Human
ugcuguguaucugaua

SEQ ID NO: 2317293 - RNA, 13 nt, Human
ugcuguguaaagu

SEQ ID NO: 2317294 - RNA, 14 nt, Human
ugcuguguaaaguu

SEQ ID NO: 2317295 - RNA, 15 nt, Human
ugcuguguaaaguua

SEQ ID NO: 2317296 - RNA, 17 nt, Human
ugcuguguaaaguuagu

SEQ ID NO: 2317297 - RNA, 12 nt, Human
ugcuguguaaag

SEQ ID NO: 2317298 - RNA, 23 nt, Human
ugcuguggugugucccccucugu

SEQ ID NO: 2317299 - RNA, 17 nt, Human
ugcuguggugugucccc

SEQ ID NO: 2317300 - RNA, 22 nt, Human
ugcuguucucuugggaacugaa

SEQ ID NO: 2317301 - RNA, 15 nt, Human
ugcuguguuugagcu

SEQ ID NO: 2317302 - RNA, 21 nt, Human
ugcuguguuugagcucugcag

SEQ ID NO: 2317303 - RNA, 16 nt, Human
ugcuguuaucccugcc

SEQ ID NO: 2317304 - RNA, 16 nt, Human
ugcuggucacugccau

SEQ ID NO: 2317305 - RNA, 19 nt, Human
ugcuggucacagccuccuc

SEQ ID NO: 2317306 - RNA, 20 nt, Human
ugcuggucacagccuccucu

SEQ ID NO: 2317307 - RNA, 13 nt, Human
ugcugguccgugg

SEQ ID NO: 2317308 - RNA, 16 nt, Human
ugcugguccgugggac

SEQ ID NO: 2317309 - RNA, 22 nt, Human
ugcugguaauuuguaucugaag

SEQ ID NO: 2317310 - RNA, 16 nt, Human
ugcuggucacagccuc

SEQ ID NO: 2317311 - RNA, 17 nt, Human
ugcuggucacagccucc

SEQ ID NO: 2317312 - RNA, 14 nt, Human
ugcugguguccuga

SEQ ID NO: 2317313 - RNA, 15 nt, Human
ugcugguguccugac

SEQ ID NO: 2317314 - RNA, 16 nt, Human
ugcugguguccugacc

SEQ ID NO: 2317315 - RNA, 17 nt, Human
ugcugguguccugacca

SEQ ID NO: 2317316 - RNA, 16 nt, Human
ugcuggguaaacugug

SEQ ID NO: 2317317 - RNA, 13 nt, Human
ugcuggguggccc

SEQ ID NO: 2317318 - RNA, 14 nt, Human
ugcuggguggccca

SEQ ID NO: 2317319 - RNA, 15 nt, Human
ugcuggguggcccau

SEQ ID NO: 2317320 - RNA, 16 nt, Human
ugcuggguggcccauc

SEQ ID NO: 2317321 - RNA, 20 nt, Human
ugcuggguggcccauccccc

SEQ ID NO: 2317322 - RNA, 13 nt, Human
ugcuggguguggc

SEQ ID NO: 2317323 - RNA, 22 nt, Human
ugcuggguggcccauccccccu

SEQ ID NO: 2317324 - RNA, 14 nt, Human
ugcuggguuggugc

SEQ ID NO: 2317325 - RNA, 16 nt, Human
ugcuggguuggugcac

SEQ ID NO: 2317326 - RNA, 17 nt, Human
ugcuggguuggugcaca

SEQ ID NO: 2317327 - RNA, 18 nt, Human
ugcuggguuggugcacag

SEQ ID NO: 2317328 - RNA, 19 nt, Human
ugcuggguuggugcacagu

SEQ ID NO: 2317329 - RNA, 21 nt, Human
ugcuggguuggugcacaguga

SEQ ID NO: 2317330 - RNA, 23 nt, Human
ugcuggguuggugcacagugauu

SEQ ID NO: 2317331 - RNA, 18 nt, Human
ugcuggggcaagucccug

SEQ ID NO: 2317332 - RNA, 22 nt, Human
ugcuggggacggggggccccag

SEQ ID NO: 2317333 - RNA, 23 nt, Human
ugcuggggacggggggccccagu

SEQ ID NO: 2317334 - RNA, 23 nt, Human
ugcuggggcaagucccugacucu

SEQ ID NO: 2317335 - RNA, 20 nt, Human
ugcuggggacggggggcccc

SEQ ID NO: 2317336 - RNA, 17 nt, Human
ugcugggcuggggccug

SEQ ID NO: 2317337 - RNA, 14 nt, Human
ugcugggcugggug

SEQ ID NO: 2317338 - RNA, 15 nt, Human
ugcugggcugggugc

SEQ ID NO: 2317339 - RNA, 16 nt, Human
ugcugggcugggugcg

SEQ ID NO: 2317340 - RNA, 20 nt, Human
ugcugggggggauuguaaaa

SEQ ID NO: 2317341 - RNA, 22 nt, Human
ugcugggcucuccaccucagcc

SEQ ID NO: 2317342 - RNA, 20 nt, Human
ugcugggcucuccaccucag

SEQ ID NO: 2317343 - RNA, 18 nt, Human
ugcugggcucuccaccuc

SEQ ID NO: 2317344 - RNA, 17 nt, Human
ugcugggcucuccaccu

SEQ ID NO: 2317345 - RNA, 16 nt, Human
ugcugggcucuccacc

SEQ ID NO: 2317346 - RNA, 15 nt, Human
ugcugggcucuccac

SEQ ID NO: 2317347 - RNA, 14 nt, Human
ugcugggcucucca

SEQ ID NO: 2317348 - RNA, 19 nt, Human
ugcugggcauuuucccaga

SEQ ID NO: 2317349 - RNA, 23 nt, Human
ugcugggcucuccaccucagccu

SEQ ID NO: 2317350 - RNA, 10 nt, Human
ugcugggcug

SEQ ID NO: 2317351 - RNA, 19 nt, Human
ugcugggcugacggugcag

SEQ ID NO: 2317352 - RNA, 21 nt, Human
ugcugggcugacggugcaguc

SEQ ID NO: 2317353 - RNA, 24 nt, Human
ugcugggcugacggugcagucugg

SEQ ID NO: 2317354 - RNA, 11 nt, Human
ugcugggcugg

SEQ ID NO: 2317355 - RNA, 13 nt, Human
ugcugggcugggg

SEQ ID NO: 2317356 - RNA, 14 nt, Human
ugcugggcuggggc

SEQ ID NO: 2317357 - RNA, 17 nt, Human
ugcugggcuugucugua

SEQ ID NO: 2317358 - RNA, 19 nt, Human
ugcugcuauccugccaaaa

SEQ ID NO: 2317359 - RNA, 13 nt, Human
ugcugccuucugg

SEQ ID NO: 2317360 - RNA, 17 nt, Human
ugcugccuucuggauuc

SEQ ID NO: 2317361 - RNA, 13 nt, Human
ugcugccugccug

SEQ ID NO: 2317362 - RNA, 14 nt, Human
ugcugccugccugu

SEQ ID NO: 2317363 - RNA, 15 nt, Human
ugcugccugccuguc

SEQ ID NO: 2317364 - RNA, 16 nt, Human
ugcugccugccugucu

SEQ ID NO: 2317365 - RNA, 14 nt, Human
ugcugccugaguca

SEQ ID NO: 2317366 - RNA, 15 nt, Human
ugcucuuucucugcc

SEQ ID NO: 2317367 - RNA, 23 nt, Human
ugcugcauuuuaauuuuaaccaa

SEQ ID NO: 2317368 - RNA, 17 nt, Human
ugcugccaaccauaccu

SEQ ID NO: 2317369 - RNA, 15 nt, Human
ugcugccugcuuuuu

SEQ ID NO: 2317370 - RNA, 17 nt, Human
ugcugccugcuuuuuau

SEQ ID NO: 2317371 - RNA, 14 nt, Human
ugcugcauuuaaaa

SEQ ID NO: 2317372 - RNA, 21 nt, Human
ugcugccaaccauaccuuccu

SEQ ID NO: 2317373 - RNA, 23 nt, Human
ugcugcauuuaaaagauacaguu

SEQ ID NO: 2317374 - RNA, 19 nt, Human
ugcugcauuuaaaagauac

SEQ ID NO: 2317375 - RNA, 18 nt, Human
ugcugcauuuaaaagaua

SEQ ID NO: 2317376 - RNA, 17 nt, Human
ugcugcauuuaaaagau

SEQ ID NO: 2317377 - RNA, 12 nt, Human
ugcucuuucucu

SEQ ID NO: 2317378 - RNA, 16 nt, Human
ugcucuuucuacucug

SEQ ID NO: 2317379 - RNA, 13 nt, Human
ugcucuuucucug

SEQ ID NO: 2317380 - RNA, 14 nt, Human
ugcucuuucucugc

SEQ ID NO: 2317381 - RNA, 21 nt, Human
ugcugcuucccucugccuguc

SEQ ID NO: 2317382 - RNA, 14 nt, Human
ugcugggccccugc

SEQ ID NO: 2317383 - RNA, 19 nt, Human
ugcugcuugaggcaacuca

SEQ ID NO: 2317384 - RNA, 20 nt, Human
ugcugggauuacagguguga

SEQ ID NO: 2317385 - RNA, 12 nt, Human
ugcugcugcugc

SEQ ID NO: 2317386 - RNA, 15 nt, Human
ugcugcugcgcccuu

SEQ ID NO: 2317387 - RNA, 16 nt, Human
ugcugcugcugcgccc

SEQ ID NO: 2317388 - RNA, 12 nt, Human
ugcugcuugagg

SEQ ID NO: 2317389 - RNA, 20 nt, Human
ugcugcuucccucugccugu

SEQ ID NO: 2317390 - RNA, 17 nt, Human
ugcugcuucccucugcc

SEQ ID NO: 2317391 - RNA, 16 nt, Human
ugcugcuucccucugc

SEQ ID NO: 2317392 - RNA, 15 nt, Human
ugcugcuucccucug

SEQ ID NO: 2317393 - RNA, 17 nt, Human
ugcugcugcugcgcccu

SEQ ID NO: 2317394 - RNA, 16 nt, Human
ugcugggccccugccu

SEQ ID NO: 2317395 - RNA, 17 nt, Human
ugcugggccccugccuc

SEQ ID NO: 2317396 - RNA, 18 nt, Human
ugcugggccccugccucu

SEQ ID NO: 2317397 - RNA, 19 nt, Human
ugcugggccccugccucuc

SEQ ID NO: 2317398 - RNA, 21 nt, Human
ugcugggccccugccucucug

SEQ ID NO: 2317399 - RNA, 22 nt, Human
ugcugggccccugccucucugc

SEQ ID NO: 2317400 - RNA, 23 nt, Human
ugcugggccccugccucucugca

SEQ ID NO: 2317401 - RNA, 24 nt, Human
ugcugggccccugccucucugcag

SEQ ID NO: 2317402 - RNA, 14 nt, Human
ugagggagccuggc

SEQ ID NO: 2317403 - RNA, 18 nt, Human
ugagggacuggaaccagg

SEQ ID NO: 2317404 - RNA, 18 nt, Human
ugagggaccagccaagag

SEQ ID NO: 2317405 - RNA, 13 nt, Human
ugagggacucuga

SEQ ID NO: 2317406 - RNA, 13 nt, Human
ugagggaccagcc

SEQ ID NO: 2317407 - RNA, 22 nt, Human
ugagggaacagacaggagaaau

SEQ ID NO: 2317408 - RNA, 20 nt, Human
ugagggaacagacaggagaa

SEQ ID NO: 2317409 - RNA, 21 nt, Human
ugaggcucugacccagugaga

SEQ ID NO: 2317410 - RNA, 15 nt, Human
ugaggcuccugugcu

SEQ ID NO: 2317411 - RNA, 16 nt, Human
ugaggcuccugugcua

SEQ ID NO: 2317412 - RNA, 17 nt, Human
ugagggaacagacagga

SEQ ID NO: 2317413 - RNA, 17 nt, Human
ugagggaacagagaggu

SEQ ID NO: 2317414 - RNA, 13 nt, Human
ugaggcucugccc

SEQ ID NO: 2317415 - RNA, 14 nt, Human
ugaggcucugcccu

SEQ ID NO: 2317416 - RNA, 20 nt, Human
ugaggcuccacuuggucugu

SEQ ID NO: 2317417 - RNA, 18 nt, Human
ugaggcuccacuuggucu

SEQ ID NO: 2317418 - RNA, 23 nt, Human
ugaggucuaggaacauacuucag

SEQ ID NO: 2317419 - RNA, 14 nt, Human
ugaggucucgcuga

SEQ ID NO: 2317420 - RNA, 15 nt, Human
ugaggucccaggcag

SEQ ID NO: 2317421 - RNA, 13 nt, Human
ugagggaggaggc

SEQ ID NO: 2317422 - RNA, 13 nt, Human
ugaggucccaggc

SEQ ID NO: 2317423 - RNA, 16 nt, Human
ugagggagcuuagcca

SEQ ID NO: 2317424 - RNA, 19 nt, Human
ugaggucccaggcagagaa

SEQ ID NO: 2317425 - RNA, 17 nt, Human
ugaggucccaggcagag

SEQ ID NO: 2317426 - RNA, 14 nt, Human
ugagggagcuuagc

SEQ ID NO: 2317427 - RNA, 16 nt, Human
ugaggucugcucggcc

SEQ ID NO: 2317428 - RNA, 15 nt, Human
ugaggucugcucggc

SEQ ID NO: 2317429 - RNA, 15 nt, Human
ugaggucugaaaugg

SEQ ID NO: 2317430 - RNA, 18 nt, Human
ugaggucucuugagggag

SEQ ID NO: 2317431 - RNA, 17 nt, Human
ugaggucucuugaggga

SEQ ID NO: 2317432 - RNA, 23 nt, Human
ugaggucucgcugaugcugggcu

SEQ ID NO: 2317433 - RNA, 18 nt, Human
ugaggucucgcugaugcu

SEQ ID NO: 2317434 - RNA, 23 nt, Human
ugaggucugcucggccgucuuca

SEQ ID NO: 2317435 - RNA, 15 nt, Human
ugaggucuggcugcu

SEQ ID NO: 2317436 - RNA, 18 nt, Human
ugagguggcacuuuuuca

SEQ ID NO: 2317437 - RNA, 20 nt, Human
ugagguggcacuuuuucauu

SEQ ID NO: 2317438 - RNA, 14 nt, Human
ugaggugggagaug

SEQ ID NO: 2317439 - RNA, 13 nt, Human
ugaggugggagga

SEQ ID NO: 2317440 - RNA, 12 nt, Human
ugaggugggagg

SEQ ID NO: 2317441 - RNA, 21 nt, Human
ugaggcucaggggugugccug

SEQ ID NO: 2317442 - RNA, 17 nt, Human
ugaggcauugcacaggg

SEQ ID NO: 2317443 - RNA, 18 nt, Human
ugaggcauugcacaggga

SEQ ID NO: 2317444 - RNA, 23 nt, Human
ugaggcauuuguuugaacugaua

SEQ ID NO: 2317445 - RNA, 23 nt, Human
ugaggcuagugugguguuuccug

SEQ ID NO: 2317446 - RNA, 21 nt, Human
ugaggcauuuguuugaacuga

SEQ ID NO: 2317447 - RNA, 17 nt, Human
ugaggcuaguguggugu

SEQ ID NO: 2317448 - RNA, 20 nt, Human
ugaggcauuuguuugaacug

SEQ ID NO: 2317449 - RNA, 19 nt, Human
ugaggcauuuguuugaacu

SEQ ID NO: 2317450 - RNA, 22 nt, Human
ugaggcagugggucccacuucc

SEQ ID NO: 2317451 - RNA, 23 nt, Human
ugaggcagugggucccacuuccc

SEQ ID NO: 2317452 - RNA, 23 nt, Human
ugaggcaucgcaauguaagacuc

SEQ ID NO: 2317453 - RNA, 12 nt, Human
ugaggcauuugu

SEQ ID NO: 2317454 - RNA, 16 nt, Human
ugaggagcugcuggcu

SEQ ID NO: 2317455 - RNA, 15 nt, Human
ugaggagcugcuggc

SEQ ID NO: 2317456 - RNA, 14 nt, Human
ugaggagcugcugg

SEQ ID NO: 2317457 - RNA, 13 nt, Human
ugaggagcugcug

SEQ ID NO: 2317458 - RNA, 17 nt, Human
ugaggagcugcuggcuu

SEQ ID NO: 2317459 - RNA, 12 nt, Human
ugaggagcuggg

SEQ ID NO: 2317460 - RNA, 20 nt, Human
ugaggagcuggggaucccuc

SEQ ID NO: 2317461 - RNA, 13 nt, Human
ugaggagcugggg

SEQ ID NO: 2317462 - RNA, 13 nt, Human
ugagcugggauga

SEQ ID NO: 2317463 - RNA, 20 nt, Human
ugagcuggggaugucucuca

SEQ ID NO: 2317464 - RNA, 22 nt, Human
ugagcuggggaccugguacccu

SEQ ID NO: 2317465 - RNA, 19 nt, Human
ugaggcagugggucccacu

SEQ ID NO: 2317466 - RNA, 17 nt, Human
ugaggaggccuccaucu

SEQ ID NO: 2317467 - RNA, 21 nt, Human
ugaggcagugggucccacuuc

SEQ ID NO: 2317468 - RNA, 17 nt, Human
ugaggcagguccccaga

SEQ ID NO: 2317469 - RNA, 16 nt, Human
ugaggcagguccccag

SEQ ID NO: 2317470 - RNA, 14 nt, Human
ugaggcaggucccc

SEQ ID NO: 2317471 - RNA, 18 nt, Human
ugaggaggaaggagagaa

SEQ ID NO: 2317472 - RNA, 16 nt, Human
ugaggaggccuccauc

SEQ ID NO: 2317473 - RNA, 14 nt, Human
ugaggaggccucca

SEQ ID NO: 2317474 - RNA, 21 nt, Human
ugaggaggaaggagagaaggg

SEQ ID NO: 2317475 - RNA, 13 nt, Human
ugaggaggaagga

SEQ ID NO: 2317476 - RNA, 12 nt, Human
ugaggaggaagg

SEQ ID NO: 2317477 - RNA, 16 nt, Human
ugaggagcuugaaacc

SEQ ID NO: 2317478 - RNA, 23 nt, Human
ugaguugacuugacagaacacug

SEQ ID NO: 2317479 - RNA, 19 nt, Human
ugaguuucucucacauuac

SEQ ID NO: 2317480 - RNA, 16 nt, Human
ugaguuugagcugccu

SEQ ID NO: 2317481 - RNA, 17 nt, Human
ugaguuugagcugccuu

SEQ ID NO: 2317482 - RNA, 18 nt, Human
ugaguuugagcugccuuc

SEQ ID NO: 2317483 - RNA, 19 nt, Human
ugaguuugagcugccuucc

SEQ ID NO: 2317484 - RNA, 21 nt, Human
ugaguuugagcugccuucccu

SEQ ID NO: 2317485 - RNA, 22 nt, Human
ugaguuugcccugguuucacug

SEQ ID NO: 2317486 - RNA, 14 nt, Human
ugaguuugcccugg

SEQ ID NO: 2317487 - RNA, 22 nt, Human
ugaguuugggccccagaggcug

SEQ ID NO: 2317488 - RNA, 23 nt, Human
ugaguuugggccccagaggcugg

SEQ ID NO: 2317489 - RNA, 13 nt, Human
ugaguuugcuuau

SEQ ID NO: 2317490 - RNA, 22 nt, Human
ugaguuugcuuauguaaucuca

SEQ ID NO: 2317491 - RNA, 14 nt, Human
ugagugagcaugcc

SEQ ID NO: 2317492 - RNA, 13 nt, Human
ugaguucucaggg

SEQ ID NO: 2317493 - RNA, 16 nt, Human
ugaguucucagggcuc

SEQ ID NO: 2317494 - RNA, 17 nt, Human
ugaguucucagggcucc

SEQ ID NO: 2317495 - RNA, 18 nt, Human
ugaguucucagggcuccu

SEQ ID NO: 2317496 - RNA, 19 nt, Human
ugaguucucagggcuccug

SEQ ID NO: 2317497 - RNA, 22 nt, Human
ugaguucucagggcuccugccu

SEQ ID NO: 2317498 - RNA, 16 nt, Human
ugaguugauagcacag

SEQ ID NO: 2317499 - RNA, 20 nt, Human
ugaguugauagcacagaccc

SEQ ID NO: 2317500 - RNA, 18 nt, Human
ugaguuuuauugagaauu

SEQ ID NO: 2317501 - RNA, 17 nt, Human
ugaguuuucuucuguga

SEQ ID NO: 2317502 - RNA, 19 nt, Human
ugaguuugucgcucaugug

SEQ ID NO: 2317503 - RNA, 20 nt, Human
ugaguuugucgcucaugugu

SEQ ID NO: 2317504 - RNA, 17 nt, Human
ugaguuuuuucucuugg

SEQ ID NO: 2317505 - RNA, 19 nt, Human
ugaguuuuuauggggcuga

SEQ ID NO: 2317506 - RNA, 19 nt, Human
ugaguuuuugauagcuuua

SEQ ID NO: 2317507 - RNA, 18 nt, Human
ugaguuuuugauagcuuu

SEQ ID NO: 2317508 - RNA, 13 nt, Human
ugaguuuuugaua

SEQ ID NO: 2317509 - RNA, 18 nt, Human
ugaguuuuuauggggcug

SEQ ID NO: 2317510 - RNA, 20 nt, Human
ugaguuuuguuuuaaaauua

SEQ ID NO: 2317511 - RNA, 18 nt, Human
ugaguuuucuucugugau

SEQ ID NO: 2317512 - RNA, 19 nt, Human
ugaguuuuuucucuugggc

SEQ ID NO: 2317513 - RNA, 18 nt, Human
ugaguuuuuucucuuggg

SEQ ID NO: 2317514 - RNA, 17 nt, Human
ugauaacaaccuggaga

SEQ ID NO: 2317515 - RNA, 18 nt, Human
ugauaacaaccuggagac

SEQ ID NO: 2317516 - RNA, 23 nt, Human
ugauaacuagauggugcugagaa

SEQ ID NO: 2317517 - RNA, 22 nt, Human
ugauaacuagauggugcugaga

SEQ ID NO: 2317518 - RNA, 21 nt, Human
ugauaacuagauggugcugag

SEQ ID NO: 2317519 - RNA, 18 nt, Human
ugauaacuagauggugcu

SEQ ID NO: 2317520 - RNA, 19 nt, Human
ugauaacugcaauuuuaau

SEQ ID NO: 2317521 - RNA, 14 nt, Human
ugauaacuuugcuu

SEQ ID NO: 2317522 - RNA, 15 nt, Human
ugauaacuuugcuug

SEQ ID NO: 2317523 - RNA, 16 nt, Human
ugauaacuggaaacuu

SEQ ID NO: 2317524 - RNA, 15 nt, Human
ugagucuuggcggca

SEQ ID NO: 2317525 - RNA, 16 nt, Human
ugagucuuggcggcag

SEQ ID NO: 2317526 - RNA, 17 nt, Human
ugagucuuggcggcagc

SEQ ID NO: 2317527 - RNA, 18 nt, Human
ugagucuuggcggcagca

SEQ ID NO: 2317528 - RNA, 21 nt, Human
ugagucuuggcggcagcagcc

SEQ ID NO: 2317529 - RNA, 15 nt, Human
ugagucucuucagaa

SEQ ID NO: 2317530 - RNA, 23 nt, Human
ugagucuuggcggcagcagccau

SEQ ID NO: 2317531 - RNA, 17 nt, Human
ugagugaaccuguauaa

SEQ ID NO: 2317532 - RNA, 15 nt, Human
ugagugaauaaaugu

SEQ ID NO: 2317533 - RNA, 13 nt, Human
ugagucugaaggc

SEQ ID NO: 2317534 - RNA, 15 nt, Human
ugagucugaaggcug

SEQ ID NO: 2317535 - RNA, 17 nt, Human
ugagucugaaggcuggg

SEQ ID NO: 2317536 - RNA, 18 nt, Human
ugagucugaaggcugggu

SEQ ID NO: 2317537 - RNA, 18 nt, Human
ugagucgucaucacuuuu

SEQ ID NO: 2317538 - RNA, 19 nt, Human
ugagucguacagaaagcug

SEQ ID NO: 2317539 - RNA, 17 nt, Human
ugagucguacagaaagc

SEQ ID NO: 2317540 - RNA, 20 nt, Human
ugagucccaggagcugccca

SEQ ID NO: 2317541 - RNA, 21 nt, Human
ugagucccaggagcugcccag

SEQ ID NO: 2317542 - RNA, 14 nt, Human
ugagucucuucaga

SEQ ID NO: 2317543 - RNA, 23 nt, Human
ugagucucccaaggcugcgucug

SEQ ID NO: 2317544 - RNA, 15 nt, Human
ugagucucccaaggc

SEQ ID NO: 2317545 - RNA, 16 nt, Human
ugagucucccaaggcu

SEQ ID NO: 2317546 - RNA, 19 nt, Human
ugagucgaggacagggagg

SEQ ID NO: 2317547 - RNA, 19 nt, Human
ugaguccagaaguuugaga

SEQ ID NO: 2317548 - RNA, 13 nt, Human
ugaguccagaagu

SEQ ID NO: 2317549 - RNA, 21 nt, Human
ugaggugggaggaucucuuga

SEQ ID NO: 2317550 - RNA, 17 nt, Human
ugaguccauucucccag

SEQ ID NO: 2317551 - RNA, 21 nt, Human
ugagguggcacuuuuucauuu

SEQ ID NO: 2317552 - RNA, 23 nt, Human
ugagguggcacuuuuucauuugc

SEQ ID NO: 2317553 - RNA, 15 nt, Human
ugagucccaggcuga

SEQ ID NO: 2317554 - RNA, 19 nt, Human
ugaguccauucucccaggu

SEQ ID NO: 2317555 - RNA, 20 nt, Human
ugaguccauucucccaggua

SEQ ID NO: 2317556 - RNA, 22 nt, Human
ugaguccauucucccagguacc

SEQ ID NO: 2317557 - RNA, 16 nt, Human
ugagucccaggagcug

SEQ ID NO: 2317558 - RNA, 21 nt, Human
ugagcucgguggacccaggga

SEQ ID NO: 2317559 - RNA, 20 nt, Human
ugagcucgguggacccaggg

SEQ ID NO: 2317560 - RNA, 14 nt, Human
ugagcucgguggac

SEQ ID NO: 2317561 - RNA, 22 nt, Human
ugagcucuacccagggccugca

SEQ ID NO: 2317562 - RNA, 19 nt, Human
ugagcucuacccagggccu

SEQ ID NO: 2317563 - RNA, 18 nt, Human
ugagcucuacccagggcc

SEQ ID NO: 2317564 - RNA, 17 nt, Human
ugagcucuacccagggc

SEQ ID NO: 2317565 - RNA, 21 nt, Human
ugagcuggaaggagugagagg

SEQ ID NO: 2317566 - RNA, 12 nt, Human
ugagcuggaagg

SEQ ID NO: 2317567 - RNA, 15 nt, Human
ugagcugccuucccu

SEQ ID NO: 2317568 - RNA, 16 nt, Human
ugagcucucggaacug

SEQ ID NO: 2317569 - RNA, 16 nt, Human
ugagcugccuucccua

SEQ ID NO: 2317570 - RNA, 17 nt, Human
ugagcugccuucccuag

SEQ ID NO: 2317571 - RNA, 19 nt, Human
ugagcugccuucccuagcu

SEQ ID NO: 2317572 - RNA, 14 nt, Human
ugagccugagcaga

SEQ ID NO: 2317573 - RNA, 18 nt, Human
ugagccucugcuccccag

SEQ ID NO: 2317574 - RNA, 17 nt, Human
ugagccucugcucccca

SEQ ID NO: 2317575 - RNA, 16 nt, Human
ugagccucugcucccc

SEQ ID NO: 2317576 - RNA, 14 nt, Human
ugagccucugcucc

SEQ ID NO: 2317577 - RNA, 12 nt, Human
ugagccucugcu

SEQ ID NO: 2317578 - RNA, 13 nt, Human
ugagccucucacc

SEQ ID NO: 2317579 - RNA, 15 nt, Human
ugagccucucaccug

SEQ ID NO: 2317580 - RNA, 19 nt, Human
ugagcuccucugggcagga

SEQ ID NO: 2317581 - RNA, 19 nt, Human
ugagccucucaccuguacu

SEQ ID NO: 2317582 - RNA, 19 nt, Human
ugagccgagaucacgccac

SEQ ID NO: 2317583 - RNA, 18 nt, Human
ugagcccuguccugccua

SEQ ID NO: 2317584 - RNA, 22 nt, Human
ugagcccucagaacccuuggcu

SEQ ID NO: 2317585 - RNA, 15 nt, Human
ugagccccuggaggc

SEQ ID NO: 2317586 - RNA, 20 nt, Human
ugagcccucagaacccuugg

SEQ ID NO: 2317587 - RNA, 21 nt, Human
ugagccgagaucacgccacug

SEQ ID NO: 2317588 - RNA, 17 nt, Human
ugagccucagcauccug

SEQ ID NO: 2317589 - RNA, 22 nt, Human
ugagccucagcauccuggcacc

SEQ ID NO: 2317590 - RNA, 14 nt, Human
ugagccucagucuc

SEQ ID NO: 2317591 - RNA, 18 nt, Human
ugagccucagcauccugg

SEQ ID NO: 2317592 - RNA, 21 nt, Human
ugagccucagcauccuggcac

SEQ ID NO: 2317593 - RNA, 19 nt, Human
ugagcagggcucagcgggg

SEQ ID NO: 2317594 - RNA, 20 nt, Human
ugagauauuuauuguuuauu

SEQ ID NO: 2317595 - RNA, 23 nt, Human
ugagcagugaguuacagcgagag

SEQ ID NO: 2317596 - RNA, 16 nt, Human
ugagcagggcucagcg

SEQ ID NO: 2317597 - RNA, 17 nt, Human
ugagcagggcucagcgg

SEQ ID NO: 2317598 - RNA, 18 nt, Human
ugagcaguggcuggucca

SEQ ID NO: 2317599 - RNA, 22 nt, Human
ugagcaguggcugguccagggc

SEQ ID NO: 2317600 - RNA, 12 nt, Human
ugagcaguggcu

SEQ ID NO: 2317601 - RNA, 13 nt, Human
ugagcaguggcug

SEQ ID NO: 2317602 - RNA, 14 nt, Human
ugagcaguggcugg

SEQ ID NO: 2317603 - RNA, 15 nt, Human
ugagcaguggcuggu

SEQ ID NO: 2317604 - RNA, 16 nt, Human
ugagcaucaggccagg

SEQ ID NO: 2317605 - RNA, 14 nt, Human
ugagcaucacaguu

SEQ ID NO: 2317606 - RNA, 20 nt, Human
ugagcccccccaacacugug

SEQ ID NO: 2317607 - RNA, 22 nt, Human
ugagcccccccaacacugugcc

SEQ ID NO: 2317608 - RNA, 23 nt, Human
ugagcccccccaacacugugccc

SEQ ID NO: 2317609 - RNA, 16 nt, Human
ugagccccgcagaccu

SEQ ID NO: 2317610 - RNA, 17 nt, Human
ugagccccgcagaccuc

SEQ ID NO: 2317611 - RNA, 23 nt, Human
ugagccccgcagaccuccccagc

SEQ ID NO: 2317612 - RNA, 22 nt, Human
ugagccccgcagaccuccccag

SEQ ID NO: 2317613 - RNA, 19 nt, Human
ugagccccuaccccacacc

SEQ ID NO: 2317614 - RNA, 21 nt, Human
ugagccccuaccccacaccag

SEQ ID NO: 2317615 - RNA, 22 nt, Human
ugagccccuaccccacaccagg

SEQ ID NO: 2317616 - RNA, 22 nt, Human
ugagccccaaguccugaagagg

SEQ ID NO: 2317617 - RNA, 23 nt, Human
ugagccccaaguccugaagaggc

SEQ ID NO: 2317618 - RNA, 15 nt, Human
ugagcaucacaguuu

SEQ ID NO: 2317619 - RNA, 14 nt, Human
ugagccccaagucc

SEQ ID NO: 2317620 - RNA, 17 nt, Human
ugagccccaaguccuga

SEQ ID NO: 2317621 - RNA, 21 nt, Human
ugagccccaaguccugaagag

SEQ ID NO: 2317622 - RNA, 18 nt, Human
ugagcaucaggccaggcc

SEQ ID NO: 2317623 - RNA, 19 nt, Human
ugagcaucaggccaggccc

SEQ ID NO: 2317624 - RNA, 20 nt, Human
ugagcaucaggccaggcccu

SEQ ID NO: 2317625 - RNA, 15 nt, Human
ugagaucagccuggg

SEQ ID NO: 2317626 - RNA, 14 nt, Human
ugagaucagccugg

SEQ ID NO: 2317627 - RNA, 15 nt, Human
ugagauauuuauugu

SEQ ID NO: 2317628 - RNA, 15 nt, Human
ugagaucaaaacggu

SEQ ID NO: 2317629 - RNA, 12 nt, Human
ugagcagggcuc

SEQ ID NO: 2317630 - RNA, 13 nt, Human
ugagcagggcuca

SEQ ID NO: 2317631 - RNA, 14 nt, Human
ugagcagggcucag

SEQ ID NO: 2317632 - RNA, 15 nt, Human
ugagcagggcucagc

SEQ ID NO: 2317633 - RNA, 22 nt, Human
ugagagugucuucacggcagga

SEQ ID NO: 2317634 - RNA, 24 nt, Human
ugagagugucuucacggcaggaca

SEQ ID NO: 2317635 - RNA, 20 nt, Human
ugagagucugcacuuaacaa

SEQ ID NO: 2317636 - RNA, 15 nt, Human
ugagaguuuuggaug

SEQ ID NO: 2317637 - RNA, 16 nt, Human
ugagaguuuaguugua

SEQ ID NO: 2317638 - RNA, 17 nt, Human
ugagaguuuuggaugca

SEQ ID NO: 2317639 - RNA, 19 nt, Human
ugagaguuuuggaugcagu

SEQ ID NO: 2317640 - RNA, 16 nt, Human
ugagagugaacaaauu

SEQ ID NO: 2317641 - RNA, 17 nt, Human
ugagacucgagaacuuu

SEQ ID NO: 2317642 - RNA, 20 nt, Human
ugagacucgcgacaaugcaa

SEQ ID NO: 2317643 - RNA, 21 nt, Human
ugagacucgcgacaaugcaaa

SEQ ID NO: 2317644 - RNA, 22 nt, Human
ugagacucgcgacaaugcaaac

SEQ ID NO: 2317645 - RNA, 23 nt, Human
ugagacucgcgacaaugcaaacc

SEQ ID NO: 2317646 - RNA, 16 nt, Human
ugagaacccugcgugg

SEQ ID NO: 2317647 - RNA, 16 nt, Human
ugagaacacugugaaa

SEQ ID NO: 2317648 - RNA, 12 nt, Human
ugagaacacugu

SEQ ID NO: 2317649 - RNA, 14 nt, Human
ugagaacacuguga

SEQ ID NO: 2317650 - RNA, 22 nt, Human
ugagaacccugcguggggacag

SEQ ID NO: 2317651 - RNA, 18 nt, Human
ugagaacccugcgugggg

SEQ ID NO: 2317652 - RNA, 21 nt, Human
ugagaacccugcguggggaca

SEQ ID NO: 2317653 - RNA, 17 nt, Human
ugagaaauuuauaaacu

SEQ ID NO: 2317654 - RNA, 19 nt, Human
ugagaacaaccaaaaucuu

SEQ ID NO: 2317655 - RNA, 19 nt, Human
ugaccucaggcacuagccu

SEQ ID NO: 2317656 - RNA, 20 nt, Human
ugaccucaggugauccaccc

SEQ ID NO: 2317657 - RNA, 21 nt, Human
ugaccucaggugauccaccca

SEQ ID NO: 2317658 - RNA, 16 nt, Human
ugaccucagcuuugau

SEQ ID NO: 2317659 - RNA, 18 nt, Human
ugaccucaggcacuagcc

SEQ ID NO: 2317660 - RNA, 22 nt, Human
ugaccucagcuuugauauuuca

SEQ ID NO: 2317661 - RNA, 16 nt, Human
ugaccgugggcggggc

SEQ ID NO: 2317662 - RNA, 19 nt, Human
ugaccggacuuuucugcaa

SEQ ID NO: 2317663 - RNA, 19 nt, Human
ugaccgcgacuaauuucaa

SEQ ID NO: 2317664 - RNA, 16 nt, Human
ugaccggacuuuucug

SEQ ID NO: 2317665 - RNA, 17 nt, Human
ugagaccagccugggca

SEQ ID NO: 2317666 - RNA, 18 nt, Human
ugagacccagcccucauc

SEQ ID NO: 2317667 - RNA, 12 nt, Human
ugagaccaguug

SEQ ID NO: 2317668 - RNA, 21 nt, Human
ugagaccaguugggagcacug

SEQ ID NO: 2317669 - RNA, 13 nt, Human
ugagacccccaca

SEQ ID NO: 2317670 - RNA, 21 nt, Human
ugagacccauuccuauuucuu

SEQ ID NO: 2317671 - RNA, 20 nt, Human
ugagacccagcccucauccc

SEQ ID NO: 2317672 - RNA, 14 nt, Human
ugagaccacuguua

SEQ ID NO: 2317673 - RNA, 21 nt, Human
ugagaccacagagagagggga

SEQ ID NO: 2317674 - RNA, 13 nt, Human
ugagaccacagag

SEQ ID NO: 2317675 - RNA, 17 nt, Human
ugagacccccacaccuc

SEQ ID NO: 2317676 - RNA, 23 nt, Human
ugagaccaguugggagcacugga

SEQ ID NO: 2317677 - RNA, 16 nt, Human
ugagacccccacaccu

SEQ ID NO: 2317678 - RNA, 15 nt, Human
ugagacccccacacc

SEQ ID NO: 2317679 - RNA, 14 nt, Human
ugagacccccacac

SEQ ID NO: 2317680 - RNA, 23 nt, Human
ugagacguuuuuggaagaguagu

SEQ ID NO: 2317681 - RNA, 18 nt, Human
ugagacuaugcguuuuua

SEQ ID NO: 2317682 - RNA, 20 nt, Human
ugagacucagacaggaaagg

SEQ ID NO: 2317683 - RNA, 12 nt, Human
ugagacucgaga

SEQ ID NO: 2317684 - RNA, 15 nt, Human
ugagacucgagaacu

SEQ ID NO: 2317685 - RNA, 16 nt, Human
ugagacucgagaacuu

SEQ ID NO: 2317686 - RNA, 19 nt, Human
ugagacucgcgacaaugca

SEQ ID NO: 2317687 - RNA, 14 nt, Human
ugauccaacuaaug

SEQ ID NO: 2317688 - RNA, 22 nt, Human
ugaucauuuuccccccacucuc

SEQ ID NO: 2317689 - RNA, 13 nt, Human
ugauccaacuaau

SEQ ID NO: 2317690 - RNA, 21 nt, Human
ugaucauuuuccccccacucu

SEQ ID NO: 2317691 - RNA, 20 nt, Human
ugaucauuuuccccccacuc

SEQ ID NO: 2317692 - RNA, 19 nt, Human
ugaucauuuuccccccacu

SEQ ID NO: 2317693 - RNA, 18 nt, Human
ugaucauuuuccccccac

SEQ ID NO: 2317694 - RNA, 23 nt, Human
ugaucaugcauuguugagguggu

SEQ ID NO: 2317695 - RNA, 17 nt, Human
ugaucaugcauuguuga

SEQ ID NO: 2317696 - RNA, 16 nt, Human
ugaucaugcauuguug

SEQ ID NO: 2317697 - RNA, 15 nt, Human
ugaucaugcauuguu

SEQ ID NO: 2317698 - RNA, 14 nt, Human
ugaucaugcauugu

SEQ ID NO: 2317699 - RNA, 13 nt, Human
ugaucaugcauug

SEQ ID NO: 2317700 - RNA, 17 nt, Human
ugaucauuuucccccca

SEQ ID NO: 2317701 - RNA, 16 nt, Human
ugaucauuuucccccc

SEQ ID NO: 2317702 - RNA, 13 nt, Human
ugauccaagcugg

SEQ ID NO: 2317703 - RNA, 14 nt, Human
ugauccaagcuggu

SEQ ID NO: 2317704 - RNA, 15 nt, Human
ugauccaagcugguc

SEQ ID NO: 2317705 - RNA, 16 nt, Human
ugauccacccaccuca

SEQ ID NO: 2317706 - RNA, 18 nt, Human
ugaucagcuguuugucau

SEQ ID NO: 2317707 - RNA, 24 nt, Human
ugaucagcuuauugucuagugaaa

SEQ ID NO: 2317708 - RNA, 23 nt, Human
ugauagcaagugaauuuuucucu

SEQ ID NO: 2317709 - RNA, 16 nt, Human
ugaucagcuguuuguc

SEQ ID NO: 2317710 - RNA, 17 nt, Human
ugaucagcuguuuguca

SEQ ID NO: 2317711 - RNA, 17 nt, Human
ugaucagcuuauugucu

SEQ ID NO: 2317712 - RNA, 13 nt, Human
ugauagcacagac

SEQ ID NO: 2317713 - RNA, 14 nt, Human
ugauagcacagacc

SEQ ID NO: 2317714 - RNA, 17 nt, Human
ugauaacuuugcuugca

SEQ ID NO: 2317715 - RNA, 19 nt, Human
ugauagacacauaugaggg

SEQ ID NO: 2317716 - RNA, 13 nt, Human
ugauagcaaagcg

SEQ ID NO: 2317717 - RNA, 22 nt, Human
ugauagacacauaugaggggga

SEQ ID NO: 2317718 - RNA, 21 nt, Human
ugauagacacauaugaggggg

SEQ ID NO: 2317719 - RNA, 22 nt, Human
ugaucuguauauacaauaacau

SEQ ID NO: 2317720 - RNA, 19 nt, Human
ugaucuguauauacaauaa

SEQ ID NO: 2317721 - RNA, 15 nt, Human
ugaucuguauauaca

SEQ ID NO: 2317722 - RNA, 13 nt, Human
ugaucuguauaua

SEQ ID NO: 2317723 - RNA, 15 nt, Human
ugaucugugggcaca

SEQ ID NO: 2317724 - RNA, 11 nt, Human
ugaucugugcu

SEQ ID NO: 2317725 - RNA, 12 nt, Human
ugaucugugcuu

SEQ ID NO: 2317726 - RNA, 19 nt, Human
ugaucugugcuuuccagcu

SEQ ID NO: 2317727 - RNA, 20 nt, Human
ugaucugugcuuuccagcuc

SEQ ID NO: 2317728 - RNA, 21 nt, Human
ugaucugugcuuuccagcuca

SEQ ID NO: 2317729 - RNA, 22 nt, Human
ugaucugugcuuuccagcucac

SEQ ID NO: 2317730 - RNA, 20 nt, Human
ugaucuucuuuauaauucua

SEQ ID NO: 2317731 - RNA, 15 nt, Human
ugaucuugugacaua

SEQ ID NO: 2317732 - RNA, 14 nt, Human
ugaucuugugacau

SEQ ID NO: 2317733 - RNA, 21 nt, Human
ugaucuuggcuuacugcagcc

SEQ ID NO: 2317734 - RNA, 14 nt, Human
ugaucuuuaaaaua

SEQ ID NO: 2317735 - RNA, 17 nt, Human
ugaucucccugccgccu

SEQ ID NO: 2317736 - RNA, 16 nt, Human
ugaucucccugccgcc

SEQ ID NO: 2317737 - RNA, 15 nt, Human
ugaucucccugccgc

SEQ ID NO: 2317738 - RNA, 14 nt, Human
ugaucucccugccg

SEQ ID NO: 2317739 - RNA, 18 nt, Human
ugaucucggcucacugca

SEQ ID NO: 2317740 - RNA, 13 nt, Human
ugaucucccugcc

SEQ ID NO: 2317741 - RNA, 20 nt, Human
ugaucuccauggcuuccucc

SEQ ID NO: 2317742 - RNA, 21 nt, Human
ugaucuccauauguuacacua

SEQ ID NO: 2317743 - RNA, 17 nt, Human
ugaucuccauggcuucc

SEQ ID NO: 2317744 - RNA, 19 nt, Human
ugaucuccauauguuacac

SEQ ID NO: 2317745 - RNA, 16 nt, Human
ugaucuccauauguua

SEQ ID NO: 2317746 - RNA, 22 nt, Human
ugaucucauuuaauccucucaa

SEQ ID NO: 2317747 - RNA, 17 nt, Human
ugaucugguuugacucc

SEQ ID NO: 2317748 - RNA, 21 nt, Human
ugaucucggcucacugcaacc

SEQ ID NO: 2317749 - RNA, 19 nt, Human
ugaucuggaacccagacuc

SEQ ID NO: 2317750 - RNA, 18 nt, Human
ugaucuggaacccagacu

SEQ ID NO: 2317751 - RNA, 17 nt, Human
ugaucucucgugauuga

SEQ ID NO: 2317752 - RNA, 17 nt, Human
ugaucuggaacccagac

SEQ ID NO: 2317753 - RNA, 15 nt, Human
ugaucuggaacccag

SEQ ID NO: 2317754 - RNA, 17 nt, Human
ugauccacccaccucag

SEQ ID NO: 2317755 - RNA, 18 nt, Human
ugauccacccaccucagc

SEQ ID NO: 2317756 - RNA, 19 nt, Human
ugauccacccaccucagcc

SEQ ID NO: 2317757 - RNA, 14 nt, Human
ugaucucagguucu

SEQ ID NO: 2317758 - RNA, 15 nt, Human
ugaucucauuuaauc

SEQ ID NO: 2317759 - RNA, 14 nt, Human
ugaugccucccugu

SEQ ID NO: 2317760 - RNA, 21 nt, Human
ugaugcauuaaaagaaaauaa

SEQ ID NO: 2317761 - RNA, 19 nt, Human
ugaugcauuaaaagaaaau

SEQ ID NO: 2317762 - RNA, 18 nt, Human
ugaugcauuaaaagaaaa

SEQ ID NO: 2317763 - RNA, 17 nt, Human
ugaugcauuaaaagaaa

SEQ ID NO: 2317764 - RNA, 23 nt, Human
ugaugcaugcacuguucccccug

SEQ ID NO: 2317765 - RNA, 18 nt, Human
ugaugcaugcacuguucc

SEQ ID NO: 2317766 - RNA, 17 nt, Human
ugaugcaugcacuguuc

SEQ ID NO: 2317767 - RNA, 18 nt, Human
ugaucuuugcagacaggc

SEQ ID NO: 2317768 - RNA, 16 nt, Human
ugaugaugugccuggg

SEQ ID NO: 2317769 - RNA, 19 nt, Human
ugaucuuucuuuccuuucu

SEQ ID NO: 2317770 - RNA, 16 nt, Human
ugaucuuugcagacag

SEQ ID NO: 2317771 - RNA, 17 nt, Human
ugaucuuuaaaauacac

SEQ ID NO: 2317772 - RNA, 16 nt, Human
ugaugcuaaauaggag

SEQ ID NO: 2317773 - RNA, 11 nt, Human
ugaugcuaaau

SEQ ID NO: 2317774 - RNA, 12 nt, Human
ugaugcugggau

SEQ ID NO: 2317775 - RNA, 13 nt, Human
ugaugcugggcug

SEQ ID NO: 2317776 - RNA, 14 nt, Human
ugaugcugggcugg

SEQ ID NO: 2317777 - RNA, 15 nt, Human
ugaugcugggcuggg

SEQ ID NO: 2317778 - RNA, 21 nt, Human
ugaugccugugaacugaacuc

SEQ ID NO: 2317779 - RNA, 23 nt, Human
ugaugcuacaggauuugaaauug

SEQ ID NO: 2317780 - RNA, 20 nt, Human
ugaugcuacaggauuugaaa

SEQ ID NO: 2317781 - RNA, 20 nt, Human
ugaugccugugaacugaacu

SEQ ID NO: 2317782 - RNA, 15 nt, Human
ugaugccugugaacu

SEQ ID NO: 2317783 - RNA, 11 nt, Human
ugaugccuggc

SEQ ID NO: 2317784 - RNA, 18 nt, Human
ugaugugggucaaggaau

SEQ ID NO: 2317785 - RNA, 15 nt, Human
ugauguccagaagaa

SEQ ID NO: 2317786 - RNA, 23 nt, Human
ugauguccagaagaauauucagg

SEQ ID NO: 2317787 - RNA, 19 nt, Human
ugaugucccaacuuguaaa

SEQ ID NO: 2317788 - RNA, 17 nt, Human
ugaugucaucugucacu

SEQ ID NO: 2317789 - RNA, 12 nt, Human
ugauguccagaa

SEQ ID NO: 2317790 - RNA, 13 nt, Human
ugauguccagaag

SEQ ID NO: 2317791 - RNA, 23 nt, Human
ugaugucaauuucuguguugcca

SEQ ID NO: 2317792 - RNA, 18 nt, Human
ugaugucaauuucugugu

SEQ ID NO: 2317793 - RNA, 19 nt, Human
ugaugucaauuucuguguu

SEQ ID NO: 2317794 - RNA, 16 nt, Human
ugauguguuaucucuu

SEQ ID NO: 2317795 - RNA, 15 nt, Human
ugauguggugccuga

SEQ ID NO: 2317796 - RNA, 20 nt, Human
ugauguggugaggcaggcuu

SEQ ID NO: 2317797 - RNA, 16 nt, Human
ugauguggugccugag

SEQ ID NO: 2317798 - RNA, 13 nt, Human
ugauguguacauc

SEQ ID NO: 2317799 - RNA, 14 nt, Human
ugauguuaaaauuc

SEQ ID NO: 2317800 - RNA, 23 nt, Human
ugauguguugugauagcuaacau

SEQ ID NO: 2317801 - RNA, 14 nt, Human
ugauguguuuauuu

SEQ ID NO: 2317802 - RNA, 18 nt, Human
ugauguguuuauuuauag

SEQ ID NO: 2317803 - RNA, 20 nt, Human
ugaugcugugcuaugaauuu

SEQ ID NO: 2317804 - RNA, 22 nt, Human
ugaugguguuuuggggaugaga

SEQ ID NO: 2317805 - RNA, 14 nt, Human
ugaugguuccccug

SEQ ID NO: 2317806 - RNA, 13 nt, Human
ugaugguuguaca

SEQ ID NO: 2317807 - RNA, 17 nt, Human
ugaugguucguucuguu

SEQ ID NO: 2317808 - RNA, 17 nt, Human
ugaugucaauuucugug

SEQ ID NO: 2317809 - RNA, 14 nt, Human
ugaugguuguacau

SEQ ID NO: 2317810 - RNA, 16 nt, Human
ugaugcuucuucagag

SEQ ID NO: 2317811 - RNA, 17 nt, Human
ugaugcuucuucagaga

SEQ ID NO: 2317812 - RNA, 20 nt, Human
ugaugcugggcugggugcga

SEQ ID NO: 2317813 - RNA, 16 nt, Human
ugaugcugggcugggu

SEQ ID NO: 2317814 - RNA, 18 nt, Human
ugaugcugggcugggugc

SEQ ID NO: 2317815 - RNA, 18 nt, Human
ugaugcuucuucagagac

SEQ ID NO: 2317816 - RNA, 15 nt, Human
ugauggugguauguu

SEQ ID NO: 2317817 - RNA, 17 nt, Human
ugauucacugcauggcu

SEQ ID NO: 2317818 - RNA, 14 nt, Human
ugauucagaaauug

SEQ ID NO: 2317819 - RNA, 22 nt, Human
ugauucacccccaaacagugac

SEQ ID NO: 2317820 - RNA, 12 nt, Human
ugauucacugca

SEQ ID NO: 2317821 - RNA, 13 nt, Human
ugauucacugcau

SEQ ID NO: 2317822 - RNA, 12 nt, Human
ugauucacagug

SEQ ID NO: 2317823 - RNA, 21 nt, Human
ugauucaauucaacacucccu

SEQ ID NO: 2317824 - RNA, 13 nt, Human
ugauucagacagc

SEQ ID NO: 2317825 - RNA, 14 nt, Human
ugauucagacagcu

SEQ ID NO: 2317826 - RNA, 15 nt, Human
ugauucagacagcug

SEQ ID NO: 2317827 - RNA, 16 nt, Human
ugauucagacagcugc

SEQ ID NO: 2317828 - RNA, 18 nt, Human
ugauuauucugauuccac

SEQ ID NO: 2317829 - RNA, 13 nt, Human
ugauuauuguauu

SEQ ID NO: 2317830 - RNA, 15 nt, Human
ugauuauuguauuua

SEQ ID NO: 2317831 - RNA, 18 nt, Human
ugauuauuguauuuauuc

SEQ ID NO: 2317832 - RNA, 16 nt, Human
ugauuauuuauuauuu

SEQ ID NO: 2317833 - RNA, 16 nt, Human
ugauuauucaguguca

SEQ ID NO: 2317834 - RNA, 14 nt, Human
ugauuauucagugu

SEQ ID NO: 2317835 - RNA, 16 nt, Human
ugauuauuacuggcaa

SEQ ID NO: 2317836 - RNA, 21 nt, Human
ugauuaugaauuacauuugua

SEQ ID NO: 2317837 - RNA, 22 nt, Human
ugauuaugaauuacauuuguau

SEQ ID NO: 2317838 - RNA, 20 nt, Human
ugauucaacagguuuuccug

SEQ ID NO: 2317839 - RNA, 15 nt, Human
ugauuauuucacuuu

SEQ ID NO: 2317840 - RNA, 16 nt, Human
ugauuauuucacuuua

SEQ ID NO: 2317841 - RNA, 23 nt, Human
ugauuauuucacuuuagaugcug

SEQ ID NO: 2317842 - RNA, 23 nt, Human
ugauucaacuaaaaaaaaaaaag

SEQ ID NO: 2317843 - RNA, 14 nt, Human
ugauucaacuaaaa

SEQ ID NO: 2317844 - RNA, 14 nt, Human
ugauuauuuucaag

SEQ ID NO: 2317845 - RNA, 17 nt, Human
ugauucaaucuguaaac

SEQ ID NO: 2317846 - RNA, 16 nt, Human
ugauucaaucuguaaa

SEQ ID NO: 2317847 - RNA, 12 nt, Human
ugauucaauuca

SEQ ID NO: 2317848 - RNA, 23 nt, Human
ugauucaaucuguaaacugugua

SEQ ID NO: 2317849 - RNA, 22 nt, Human
ugauucaaucuguaaacugugu

SEQ ID NO: 2317850 - RNA, 21 nt, Human
ugauucaaucuguaaacugug

SEQ ID NO: 2317851 - RNA, 16 nt, Human
ugauuacucuuugaga

SEQ ID NO: 2317852 - RNA, 14 nt, Human
ugauuacucuuuga

SEQ ID NO: 2317853 - RNA, 15 nt, Human
ugauguuggcuggga

SEQ ID NO: 2317854 - RNA, 16 nt, Human
ugauguuggcugggaa

SEQ ID NO: 2317855 - RNA, 13 nt, Human
ugauguuggaaga

SEQ ID NO: 2317856 - RNA, 14 nt, Human
ugauguuggcuggg

SEQ ID NO: 2317857 - RNA, 16 nt, Human
ugauuaccagggacug

SEQ ID NO: 2317858 - RNA, 17 nt, Human
ugauguugagggaacag

SEQ ID NO: 2317859 - RNA, 22 nt, Human
ugauguuuagaaacacaacuau

SEQ ID NO: 2317860 - RNA, 13 nt, Human
ugauguucagugu

SEQ ID NO: 2317861 - RNA, 14 nt, Human
ugauguucagugua

SEQ ID NO: 2317862 - RNA, 15 nt, Human
ugauguucaguguaa

SEQ ID NO: 2317863 - RNA, 16 nt, Human
ugauguucaguguaau

SEQ ID NO: 2317864 - RNA, 22 nt, Human
ugauguuaaccagaauaaaguu

SEQ ID NO: 2317865 - RNA, 22 nt, Human
ugauguuaacacauuuuguaua

SEQ ID NO: 2317866 - RNA, 20 nt, Human
ugauguuaacacauuuugua

SEQ ID NO: 2317867 - RNA, 21 nt, Human
ugauguuaacacauuuuguau

SEQ ID NO: 2317868 - RNA, 10 nt, Human
ugauguuaac

SEQ ID NO: 2317869 - RNA, 11 nt, Human
ugauguuaaca

SEQ ID NO: 2317870 - RNA, 17 nt, Human
ugauguuaaaauuccau

SEQ ID NO: 2317871 - RNA, 16 nt, Human
ugauguuaaaauucca

SEQ ID NO: 2317872 - RNA, 15 nt, Human
ugauguuaacacauu

SEQ ID NO: 2317873 - RNA, 16 nt, Human
ugauguuaacacauuu

SEQ ID NO: 2317874 - RNA, 17 nt, Human
ugauguuaacacauuuu

SEQ ID NO: 2317875 - RNA, 18 nt, Human
ugauguuaacacauuuug

SEQ ID NO: 2317876 - RNA, 20 nt, Human
ugauguucuuucacccuuuu

SEQ ID NO: 2317877 - RNA, 21 nt, Human
ugauguucaguguaauuucuu

SEQ ID NO: 2317878 - RNA, 18 nt, Human
ugauguucaguguaauuu

SEQ ID NO: 2317879 - RNA, 20 nt, Human
ugauguucaguguaauuucu

SEQ ID NO: 2317880 - RNA, 13 nt, Human
ugauuacugucaa

SEQ ID NO: 2317881 - RNA, 24 nt, Human
ugauuacugucaaggcugcuuaga

SEQ ID NO: 2317882 - RNA, 21 nt, Human
ugauuagaaggcaaguuucua

SEQ ID NO: 2317883 - RNA, 13 nt, Human
ugauuagcaaguu

SEQ ID NO: 2317884 - RNA, 11 nt, Human
ugauuagauga

SEQ ID NO: 2317885 - RNA, 17 nt, Human
ugauuaguaaagaaaug

SEQ ID NO: 2317886 - RNA, 16 nt, Human
ugauuaguaaagaaau

SEQ ID NO: 2317887 - RNA, 18 nt, Human
ugauuagcaaguuacagu

SEQ ID NO: 2317888 - RNA, 13 nt, Human
ugauuauauguca

SEQ ID NO: 2317889 - RNA, 17 nt, Human
ugauuaugaauuacauu

SEQ ID NO: 2317890 - RNA, 19 nt, Human
ugauuaugaauuacauuug

SEQ ID NO: 2317891 - RNA, 20 nt, Human
ugauuggcaggaguuggaag

SEQ ID NO: 2317892 - RNA, 16 nt, Human
ugauuggauuauucau

SEQ ID NO: 2317893 - RNA, 17 nt, Human
ugauuggauuauucauu

SEQ ID NO: 2317894 - RNA, 18 nt, Human
ugauuggauuauucauuu

SEQ ID NO: 2317895 - RNA, 19 nt, Human
ugauuggauuauucauuua

SEQ ID NO: 2317896 - RNA, 12 nt, Human
ugauuggcucac

SEQ ID NO: 2317897 - RNA, 21 nt, Human
ugauuggauuauucauuuaaa

SEQ ID NO: 2317898 - RNA, 16 nt, Human
ugauuggcauauaaug

SEQ ID NO: 2317899 - RNA, 12 nt, Human
ugauugggaaua

SEQ ID NO: 2317900 - RNA, 16 nt, Human
ugauugggaauaaaua

SEQ ID NO: 2317901 - RNA, 17 nt, Human
ugauugggaauaaauau

SEQ ID NO: 2317902 - RNA, 18 nt, Human
ugauugggaauaaauaug

SEQ ID NO: 2317903 - RNA, 20 nt, Human
ugauugggaauaaauaugcc

SEQ ID NO: 2317904 - RNA, 21 nt, Human
ugauugggaauaaauaugccu

SEQ ID NO: 2317905 - RNA, 22 nt, Human
ugauugggacuggggcugaagg

SEQ ID NO: 2317906 - RNA, 15 nt, Human
ugauugggacagagg

SEQ ID NO: 2317907 - RNA, 17 nt, Human
ugauugggacagagguu

SEQ ID NO: 2317908 - RNA, 13 nt, Human
ugauuggaggggg

SEQ ID NO: 2317909 - RNA, 23 nt, Human
ugauuggacauuuucuucagaga

SEQ ID NO: 2317910 - RNA, 14 nt, Human
ugauuggauuauuc

SEQ ID NO: 2317911 - RNA, 15 nt, Human
ugauuggauuauuca

SEQ ID NO: 2317912 - RNA, 21 nt, Human
ugauuggaggggggagguggg

SEQ ID NO: 2317913 - RNA, 22 nt, Human
ugauuguaacguugcuguggga

SEQ ID NO: 2317914 - RNA, 23 nt, Human
ugauuguaacguugcugugggaa

SEQ ID NO: 2317915 - RNA, 18 nt, Human
ugauuguaacguugcugu

SEQ ID NO: 2317916 - RNA, 19 nt, Human
ugauuguaacguugcugug

SEQ ID NO: 2317917 - RNA, 20 nt, Human
ugauuguaacguugcugugg

SEQ ID NO: 2317918 - RNA, 21 nt, Human
ugauuguaacguugcuguggg

SEQ ID NO: 2317919 - RNA, 14 nt, Human
ugauugucagcuac

SEQ ID NO: 2317920 - RNA, 18 nt, Human
ugauuguggaauggagau

SEQ ID NO: 2317921 - RNA, 14 nt, Human
ugauuguggaaugg

SEQ ID NO: 2317922 - RNA, 21 nt, Human
ugauuggugcaacccuuaccc

SEQ ID NO: 2317923 - RNA, 19 nt, Human
ugauuggugcaacccuuac

SEQ ID NO: 2317924 - RNA, 17 nt, Human
ugauuggugcaacccuu

SEQ ID NO: 2317925 - RNA, 12 nt, Human
ugauuguaaaau

SEQ ID NO: 2317926 - RNA, 14 nt, Human
ugauuguaaaauag

SEQ ID NO: 2317927 - RNA, 17 nt, Human
ugauuguaaaauagcuu

SEQ ID NO: 2317928 - RNA, 23 nt, Human
ugauuguaaaauagcuuguauag

SEQ ID NO: 2317929 - RNA, 17 nt, Human
ugauuguaacguugcug

SEQ ID NO: 2317930 - RNA, 19 nt, Human
ugauuguuaauuuacagcu

SEQ ID NO: 2317931 - RNA, 21 nt, Human
ugauuguggaauggagauuca

SEQ ID NO: 2317932 - RNA, 19 nt, Human
ugauuguucgggugugcaa

SEQ ID NO: 2317933 - RNA, 14 nt, Human
ugauuguuggcaca

SEQ ID NO: 2317934 - RNA, 18 nt, Human
ugauuguucgggugugca

SEQ ID NO: 2317935 - RNA, 16 nt, Human
ugauugugucucuugg

SEQ ID NO: 2317936 - RNA, 16 nt, Human
ugauuguuugcucuga

SEQ ID NO: 2317937 - RNA, 14 nt, Human
ugauuuaaaacaug

SEQ ID NO: 2317938 - RNA, 15 nt, Human
ugauuuaaaacaugu

SEQ ID NO: 2317939 - RNA, 16 nt, Human
ugauuuaaaacaugua

SEQ ID NO: 2317940 - RNA, 13 nt, Human
ugauucugugugu

SEQ ID NO: 2317941 - RNA, 19 nt, Human
ugauucugcuuuuaccaug

SEQ ID NO: 2317942 - RNA, 13 nt, Human
ugauucugccuuu

SEQ ID NO: 2317943 - RNA, 12 nt, Human
ugauucugccuu

SEQ ID NO: 2317944 - RNA, 16 nt, Human
ugauucagaaauugga

SEQ ID NO: 2317945 - RNA, 23 nt, Human
ugauucuccuucagcccucaccc

SEQ ID NO: 2317946 - RNA, 22 nt, Human
ugauucugcaguaaaucuuuua

SEQ ID NO: 2317947 - RNA, 16 nt, Human
ugauucugcaguaaau

SEQ ID NO: 2317948 - RNA, 15 nt, Human
ugauucuugaguuua

SEQ ID NO: 2317949 - RNA, 17 nt, Human
ugauucugcuuuuacca

SEQ ID NO: 2317950 - RNA, 15 nt, Human
ugauucuguguguuu

SEQ ID NO: 2317951 - RNA, 19 nt, Human
ugauucuuuguuacaggca

SEQ ID NO: 2317952 - RNA, 18 nt, Human
ugauucuuuuuaaagugu

SEQ ID NO: 2317953 - RNA, 14 nt, Human
ugauucuuuguuac

SEQ ID NO: 2317954 - RNA, 20 nt, Human
ugauucuugaguuuagugau

SEQ ID NO: 2317955 - RNA, 23 nt, Human
ugauucuuuuuaaaguguuucug

SEQ ID NO: 2317956 - RNA, 22 nt, Human
ugauugaaaauaguaaaugcuu

SEQ ID NO: 2317957 - RNA, 22 nt, Human
ugauugcuaaauguaacagucu

SEQ ID NO: 2317958 - RNA, 19 nt, Human
ugauugcuaaauguaacag

SEQ ID NO: 2317959 - RNA, 20 nt, Human
ugauugcuaaauguaacagu

SEQ ID NO: 2317960 - RNA, 13 nt, Human
ugauugcuaaaug

SEQ ID NO: 2317961 - RNA, 14 nt, Human
ugauugcuaaaugu

SEQ ID NO: 2317962 - RNA, 15 nt, Human
ugauugcuaaaugua

SEQ ID NO: 2317963 - RNA, 16 nt, Human
ugauugcuaaauguaa

SEQ ID NO: 2317964 - RNA, 18 nt, Human
ugauugccaagcucagga

SEQ ID NO: 2317965 - RNA, 22 nt, Human
ugauugaaucugauuggacauu

SEQ ID NO: 2317966 - RNA, 13 nt, Human
ugauugacagcuu

SEQ ID NO: 2317967 - RNA, 12 nt, Human
ugauugacagcu

SEQ ID NO: 2317968 - RNA, 19 nt, Human
ugauugacagcuuugcugc

SEQ ID NO: 2317969 - RNA, 17 nt, Human
ugauugacagcuuugcu

SEQ ID NO: 2317970 - RNA, 14 nt, Human
ugauugauuugaag

SEQ ID NO: 2317971 - RNA, 21 nt, Human
ugauugacagcuuugcugcug

SEQ ID NO: 2317972 - RNA, 17 nt, Human
ugauugagaguaacuua

SEQ ID NO: 2317973 - RNA, 12 nt, Human
ugauugauuuga

SEQ ID NO: 2317974 - RNA, 21 nt, Human
ugauucuccugccucagccuc

SEQ ID NO: 2317975 - RNA, 23 nt, Human
ugauucagacagcugccugggau

SEQ ID NO: 2317976 - RNA, 12 nt, Human
ugauucuccuuc

SEQ ID NO: 2317977 - RNA, 13 nt, Human
ugauucuccuuca

SEQ ID NO: 2317978 - RNA, 14 nt, Human
ugauucuccuucag

SEQ ID NO: 2317979 - RNA, 16 nt, Human
ugauucuccuucagcc

SEQ ID NO: 2317980 - RNA, 18 nt, Human
ugauucuccuucagcccu

SEQ ID NO: 2317981 - RNA, 19 nt, Human
ugauucuccuucagcccuc

SEQ ID NO: 2317982 - RNA, 21 nt, Human
ugauucuccuucagcccucac

SEQ ID NO: 2317983 - RNA, 18 nt, Human
ugauucagacagcugccu

SEQ ID NO: 2317984 - RNA, 19 nt, Human
ugauucagacagcugccug

SEQ ID NO: 2317985 - RNA, 20 nt, Human
ugauucagacagcugccugg

SEQ ID NO: 2317986 - RNA, 21 nt, Human
ugauucagacagcugccuggg

SEQ ID NO: 2317987 - RNA, 19 nt, Human
ugaaucuuuccaauaaacc

SEQ ID NO: 2317988 - RNA, 24 nt, Human
ugaaucuugucucaaugcucauaa

SEQ ID NO: 2317989 - RNA, 17 nt, Human
ugaauccaugcuugggu

SEQ ID NO: 2317990 - RNA, 14 nt, Human
ugaauccaugcuug

SEQ ID NO: 2317991 - RNA, 20 nt, Human
ugaaucccacccacauguga

SEQ ID NO: 2317992 - RNA, 16 nt, Human
ugaauccaaacuaauc

SEQ ID NO: 2317993 - RNA, 15 nt, Human
ugaauccaaacuaau

SEQ ID NO: 2317994 - RNA, 22 nt, Human
ugaaugaaaaauuuaagcauug

SEQ ID NO: 2317995 - RNA, 21 nt, Human
ugaaugaaaaauuuaagcauu

SEQ ID NO: 2317996 - RNA, 20 nt, Human
ugaaugaaaaauuuaagcau

SEQ ID NO: 2317997 - RNA, 19 nt, Human
ugaaugaaaaauuuaagca

SEQ ID NO: 2317998 - RNA, 18 nt, Human
ugaaugaaaaauuuaagc

SEQ ID NO: 2317999 - RNA, 17 nt, Human
ugaaugaaaaauuuaag

SEQ ID NO: 2318000 - RNA, 16 nt, Human
ugaaugaaaaauuuaa

SEQ ID NO: 2318001 - RNA, 11 nt, Human
ugaaugaaaaa

SEQ ID NO: 2318002 - RNA, 20 nt, Human
ugaaugaaacccccacacac

SEQ ID NO: 2318003 - RNA, 19 nt, Human
ugaaugaaacccccacaca

SEQ ID NO: 2318004 - RNA, 18 nt, Human
ugaaugaaacccccacac

SEQ ID NO: 2318005 - RNA, 16 nt, Human
ugaaugaaacccccac

SEQ ID NO: 2318006 - RNA, 14 nt, Human
ugaauaaagacacc

SEQ ID NO: 2318007 - RNA, 15 nt, Human
ugaauaaagacaccu

SEQ ID NO: 2318008 - RNA, 21 nt, Human
ugaaucauguaguaucaaaua

SEQ ID NO: 2318009 - RNA, 18 nt, Human
ugaaucauguaguaucaa

SEQ ID NO: 2318010 - RNA, 19 nt, Human
ugaaucauguaguaucaaa

SEQ ID NO: 2318011 - RNA, 12 nt, Human
ugaaucauguag

SEQ ID NO: 2318012 - RNA, 14 nt, Human
ugaaucauguagua

SEQ ID NO: 2318013 - RNA, 22 nt, Human
ugaaucauuuuaccuuugacaa

SEQ ID NO: 2318014 - RNA, 23 nt, Human
ugaaucauuuuaccuuugacaaa

SEQ ID NO: 2318015 - RNA, 12 nt, Human
ugaauguucuga

SEQ ID NO: 2318016 - RNA, 23 nt, Human
ugaauguuauuuguuauuuucag

SEQ ID NO: 2318017 - RNA, 14 nt, Human
ugaauguuauuugu

SEQ ID NO: 2318018 - RNA, 15 nt, Human
ugaauguuauuuguu

SEQ ID NO: 2318019 - RNA, 20 nt, Human
ugaauguuaaauaaauugua

SEQ ID NO: 2318020 - RNA, 21 nt, Human
ugaauguuaaauaaauuguau

SEQ ID NO: 2318021 - RNA, 13 nt, Human
ugaauguuaaaua

SEQ ID NO: 2318022 - RNA, 15 nt, Human
ugaauguuaaauaaa

SEQ ID NO: 2318023 - RNA, 16 nt, Human
ugaauguuaaauaaau

SEQ ID NO: 2318024 - RNA, 18 nt, Human
ugaauguuaaauaaauug

SEQ ID NO: 2318025 - RNA, 18 nt, Human
ugaaugaucucucugaau

SEQ ID NO: 2318026 - RNA, 15 nt, Human
ugaaugaucucucug

SEQ ID NO: 2318027 - RNA, 22 nt, Human
ugaaugaggucccaggcagaga

SEQ ID NO: 2318028 - RNA, 11 nt, Human
ugaauguuaaa

SEQ ID NO: 2318029 - RNA, 14 nt, Human
ugaaugaaauauca

SEQ ID NO: 2318030 - RNA, 22 nt, Human
ugaaugaaacccccacacacac

SEQ ID NO: 2318031 - RNA, 21 nt, Human
ugaaugaaacccccacacaca

SEQ ID NO: 2318032 - RNA, 19 nt, Human
ugaaugaggucccaggcag

SEQ ID NO: 2318033 - RNA, 18 nt, Human
ugaaugaggucccaggca

SEQ ID NO: 2318034 - RNA, 17 nt, Human
ugaaugaggucccaggc

SEQ ID NO: 2318035 - RNA, 22 nt, Human
ugaaugaggucagcaugucuau

SEQ ID NO: 2318036 - RNA, 17 nt, Human
ugaaugacaacagaagc

SEQ ID NO: 2318037 - RNA, 15 nt, Human
ugaaugacaaagagu

SEQ ID NO: 2318038 - RNA, 15 nt, Human
ugaaugacaacagaa

SEQ ID NO: 2318039 - RNA, 14 nt, Human
ugaaugagaaucua

SEQ ID NO: 2318040 - RNA, 20 nt, Human
ugaauugaggggauuaauau

SEQ ID NO: 2318041 - RNA, 17 nt, Human
ugaauucuuaugcuuau

SEQ ID NO: 2318042 - RNA, 21 nt, Human
ugaauucuugguugaggaaac

SEQ ID NO: 2318043 - RNA, 22 nt, Human
ugaauucuugguugaggaaaca

SEQ ID NO: 2318044 - RNA, 12 nt, Human
ugaauucagauu

SEQ ID NO: 2318045 - RNA, 17 nt, Human
ugaauucagauuuuaaa

SEQ ID NO: 2318046 - RNA, 19 nt, Human
ugaauucugcaauguuuuc

SEQ ID NO: 2318047 - RNA, 20 nt, Human
ugaauucuugguugaggaaa

SEQ ID NO: 2318048 - RNA, 15 nt, Human
ugaauuaucuauaca

SEQ ID NO: 2318049 - RNA, 21 nt, Human
ugaauuaucuugguugaaaau

SEQ ID NO: 2318050 - RNA, 16 nt, Human
ugaauuauuuucucuc

SEQ ID NO: 2318051 - RNA, 23 nt, Human
ugaauguucugacauuaacaguu

SEQ ID NO: 2318052 - RNA, 20 nt, Human
ugaauguucugacauuaaca

SEQ ID NO: 2318053 - RNA, 18 nt, Human
ugaauguucugacauuaa

SEQ ID NO: 2318054 - RNA, 17 nt, Human
ugaauguucugacauua

SEQ ID NO: 2318055 - RNA, 16 nt, Human
ugaauguucugacauu

SEQ ID NO: 2318056 - RNA, 15 nt, Human
ugaauguucugacau

SEQ ID NO: 2318057 - RNA, 14 nt, Human
ugaauguucugaca

SEQ ID NO: 2318058 - RNA, 15 nt, Human
ugaauuacauuugua

SEQ ID NO: 2318059 - RNA, 16 nt, Human
ugaauuacauuuguau

SEQ ID NO: 2318060 - RNA, 18 nt, Human
ugaauuacauuuguauaa

SEQ ID NO: 2318061 - RNA, 21 nt, Human
ugaauguucugacauuaacag

SEQ ID NO: 2318062 - RNA, 21 nt, Human
ugaauguugucuguuuguucu

SEQ ID NO: 2318063 - RNA, 19 nt, Human
ugaauuagaaacauaaaua

SEQ ID NO: 2318064 - RNA, 21 nt, Human
ugaauuagaaacauaaauaaa

SEQ ID NO: 2318065 - RNA, 23 nt, Human
ugaauuagaaacauaaauaaaau

SEQ ID NO: 2318066 - RNA, 14 nt, Human
ugaauuagcucacu

SEQ ID NO: 2318067 - RNA, 16 nt, Human
ugaauuaguccuugcu

SEQ ID NO: 2318068 - RNA, 15 nt, Human
ugaaguuguuacuaa

SEQ ID NO: 2318069 - RNA, 20 nt, Human
ugaauaaaaacuuugcuaaa

SEQ ID NO: 2318070 - RNA, 14 nt, Human
ugaauaaaaacuuu

SEQ ID NO: 2318071 - RNA, 18 nt, Human
ugaaguuguuacuaacua

SEQ ID NO: 2318072 - RNA, 20 nt, Human
ugaaguuguuacuaacuaaa

SEQ ID NO: 2318073 - RNA, 22 nt, Human
ugaaguuguuacuaacuaaacu

SEQ ID NO: 2318074 - RNA, 13 nt, Human
ugaauaaaauuau

SEQ ID NO: 2318075 - RNA, 19 nt, Human
ugaauaaaauuauuccuuu

SEQ ID NO: 2318076 - RNA, 21 nt, Human
ugaauaaaaacuuugcuaaau

SEQ ID NO: 2318077 - RNA, 19 nt, Human
ugaauaaaaauauguacaa

SEQ ID NO: 2318078 - RNA, 14 nt, Human
ugaauaaaaaugca

SEQ ID NO: 2318079 - RNA, 15 nt, Human
ugaauaaaaaugcac

SEQ ID NO: 2318080 - RNA, 20 nt, Human
ugaauaaacuagauuacauu

SEQ ID NO: 2318081 - RNA, 15 nt, Human
ugaauaaaauuauuu

SEQ ID NO: 2318082 - RNA, 20 nt, Human
ugaauaaaauuauuuuggau

SEQ ID NO: 2318083 - RNA, 14 nt, Human
ugaaguuaacagag

SEQ ID NO: 2318084 - RNA, 14 nt, Human
ugaaguuagaauuc

SEQ ID NO: 2318085 - RNA, 15 nt, Human
ugaaguuagaauucc

SEQ ID NO: 2318086 - RNA, 16 nt, Human
ugaaguucaccauuaa

SEQ ID NO: 2318087 - RNA, 19 nt, Human
ugaaguuagaauuccuuca

SEQ ID NO: 2318088 - RNA, 21 nt, Human
ugaaguuagaauuccuucagg

SEQ ID NO: 2318089 - RNA, 16 nt, Human
ugaaguguguuuccuu

SEQ ID NO: 2318090 - RNA, 19 nt, Human
ugaaguguaggcagacaca

SEQ ID NO: 2318091 - RNA, 16 nt, Human
ugaaguguaggcagac

SEQ ID NO: 2318092 - RNA, 17 nt, Human
ugaaguguaggcagaca

SEQ ID NO: 2318093 - RNA, 18 nt, Human
ugaaguguaggcagacac

SEQ ID NO: 2318094 - RNA, 22 nt, Human
ugaaguguguuuccuucagugc

SEQ ID NO: 2318095 - RNA, 18 nt, Human
ugaaguguguuuccuuca

SEQ ID NO: 2318096 - RNA, 20 nt, Human
ugaaguguuuuguucuuucu

SEQ ID NO: 2318097 - RNA, 17 nt, Human
ugaaguguuaauacuag

SEQ ID NO: 2318098 - RNA, 23 nt, Human
ugaaguguuaauacuaguuguga

SEQ ID NO: 2318099 - RNA, 16 nt, Human
ugaagugcauccaaag

SEQ ID NO: 2318100 - RNA, 18 nt, Human
ugaagugcauccaaaggu

SEQ ID NO: 2318101 - RNA, 18 nt, Human
ugaagugagcacagccua

SEQ ID NO: 2318102 - RNA, 23 nt, Human
ugaagugagcugagauugcacca

SEQ ID NO: 2318103 - RNA, 12 nt, Human
ugaagugaaacu

SEQ ID NO: 2318104 - RNA, 13 nt, Human
ugaagugaaacug

SEQ ID NO: 2318105 - RNA, 14 nt, Human
ugaagugaaacugc

SEQ ID NO: 2318106 - RNA, 17 nt, Human
ugaagugagcacagccu

SEQ ID NO: 2318107 - RNA, 13 nt, Human
ugaaguccaagca

SEQ ID NO: 2318108 - RNA, 16 nt, Human
ugaagucagauguggu

SEQ ID NO: 2318109 - RNA, 14 nt, Human
ugaagucagaugug

SEQ ID NO: 2318110 - RNA, 11 nt, Human
ugaaguccaag

SEQ ID NO: 2318111 - RNA, 18 nt, Human
ugaaggcagaaagcaaaa

SEQ ID NO: 2318112 - RNA, 17 nt, Human
ugaaggccccgcccagg

SEQ ID NO: 2318113 - RNA, 16 nt, Human
ugaaggagagcccuuc

SEQ ID NO: 2318114 - RNA, 10 nt, Human
ugaaggacug

SEQ ID NO: 2318115 - RNA, 12 nt, Human
ugaaggacugug

SEQ ID NO: 2318116 - RNA, 14 nt, Human
ugaaggacugugac

SEQ ID NO: 2318117 - RNA, 15 nt, Human
ugaaggcagaaagca

SEQ ID NO: 2318118 - RNA, 23 nt, Human
ugaaggacugugacaggcagcag

SEQ ID NO: 2318119 - RNA, 14 nt, Human
ugaaggcaaugcca

SEQ ID NO: 2318120 - RNA, 18 nt, Human
ugaaggcaaaauugcaaa

SEQ ID NO: 2318121 - RNA, 15 nt, Human
ugaaggccccgccca

SEQ ID NO: 2318122 - RNA, 16 nt, Human
ugaaggccccgcccag

SEQ ID NO: 2318123 - RNA, 22 nt, Human
ugaaggacauugcggacagcca

SEQ ID NO: 2318124 - RNA, 20 nt, Human
ugaaggacacuuccugccua

SEQ ID NO: 2318125 - RNA, 12 nt, Human
ugaaggacccuu

SEQ ID NO: 2318126 - RNA, 18 nt, Human
ugaaggacacuuccugcc

SEQ ID NO: 2318127 - RNA, 19 nt, Human
ugaaggacacuuccugccu

SEQ ID NO: 2318128 - RNA, 19 nt, Human
ugaaggacauugcggacag

SEQ ID NO: 2318129 - RNA, 20 nt, Human
ugaaggacauugcggacagc

SEQ ID NO: 2318130 - RNA, 20 nt, Human
ugaaggaauaaauugcuccu

SEQ ID NO: 2318131 - RNA, 13 nt, Human
ugaaggaauauau

SEQ ID NO: 2318132 - RNA, 14 nt, Human
ugaaggaauauaug

SEQ ID NO: 2318133 - RNA, 15 nt, Human
ugaaggaauauaugg

SEQ ID NO: 2318134 - RNA, 20 nt, Human
ugaaggaauauauggcagag

SEQ ID NO: 2318135 - RNA, 21 nt, Human
ugaaggaauauauggcagagu

SEQ ID NO: 2318136 - RNA, 22 nt, Human
ugaaggaauauauggcagaguu

SEQ ID NO: 2318137 - RNA, 23 nt, Human
ugaaggaauauauggcagaguug

SEQ ID NO: 2318138 - RNA, 17 nt, Human
ugaacuccuggccucaa

SEQ ID NO: 2318139 - RNA, 16 nt, Human
ugaacucugacaacag

SEQ ID NO: 2318140 - RNA, 14 nt, Human
ugaacuccugggcu

SEQ ID NO: 2318141 - RNA, 14 nt, Human
ugaacucuuaauca

SEQ ID NO: 2318142 - RNA, 23 nt, Human
ugaagauaaguguauuuuucaau

SEQ ID NO: 2318143 - RNA, 21 nt, Human
ugaagauaaguguauuuuuca

SEQ ID NO: 2318144 - RNA, 15 nt, Human
ugaacucuuaaucaa

SEQ ID NO: 2318145 - RNA, 17 nt, Human
ugacccuguauauagcc

SEQ ID NO: 2318146 - RNA, 23 nt, Human
ugacccugcgaaggggcccuggu

SEQ ID NO: 2318147 - RNA, 22 nt, Human
ugacccugcgaaggggcccugg

SEQ ID NO: 2318148 - RNA, 19 nt, Human
ugaccauucuccaccugcc

SEQ ID NO: 2318149 - RNA, 18 nt, Human
ugacccuguauauagccc

SEQ ID NO: 2318150 - RNA, 19 nt, Human
ugacccuguauauagccca

SEQ ID NO: 2318151 - RNA, 20 nt, Human
ugacccuguauauagcccag

SEQ ID NO: 2318152 - RNA, 21 nt, Human
ugacccugcgaaggggcccug

SEQ ID NO: 2318153 - RNA, 20 nt, Human
ugacccuuacagccucugac

SEQ ID NO: 2318154 - RNA, 19 nt, Human
ugaccgaaacagcgcuggg

SEQ ID NO: 2318155 - RNA, 22 nt, Human
ugacccuuacagccucugacuu

SEQ ID NO: 2318156 - RNA, 13 nt, Human
ugaccgugaggcc

SEQ ID NO: 2318157 - RNA, 14 nt, Human
ugaccgugaggcca

SEQ ID NO: 2318158 - RNA, 16 nt, Human
ugaccgugaggccaga

SEQ ID NO: 2318159 - RNA, 20 nt, Human
ugaccgugaggccagagaca

SEQ ID NO: 2318160 - RNA, 16 nt, Human
ugaccauacugaggga

SEQ ID NO: 2318161 - RNA, 21 nt, Human
ugaccaguuuaaccugaugca

SEQ ID NO: 2318162 - RNA, 23 nt, Human
ugaccaguuuaaccugaugcagu

SEQ ID NO: 2318163 - RNA, 20 nt, Human
ugaccaguugcacuuggccu

SEQ ID NO: 2318164 - RNA, 20 nt, Human
ugaccaguuuaaccugaugc

SEQ ID NO: 2318165 - RNA, 16 nt, Human
ugaccauucuccaccu

SEQ ID NO: 2318166 - RNA, 17 nt, Human
ugaccauucuccaccug

SEQ ID NO: 2318167 - RNA, 18 nt, Human
ugaccauucuccaccugc

SEQ ID NO: 2318168 - RNA, 23 nt, Human
ugaccagccuccaugcugccucc

SEQ ID NO: 2318169 - RNA, 19 nt, Human
ugaccagcaacuugucuuu

SEQ ID NO: 2318170 - RNA, 20 nt, Human
ugaccagcaccaucucuccu

SEQ ID NO: 2318171 - RNA, 16 nt, Human
ugaccagucugacccu

SEQ ID NO: 2318172 - RNA, 22 nt, Human
ugaccaggggugauuucagaga

SEQ ID NO: 2318173 - RNA, 15 nt, Human
ugaccagucugaccc

SEQ ID NO: 2318174 - RNA, 20 nt, Human
ugaccaggccugggccagag

SEQ ID NO: 2318175 - RNA, 13 nt, Human
ugaccaggccugg

SEQ ID NO: 2318176 - RNA, 15 nt, Human
ugaccaggccugggc

SEQ ID NO: 2318177 - RNA, 12 nt, Human
ugaccaggccug

SEQ ID NO: 2318178 - RNA, 16 nt, Human
ugaccaggcauccucc

SEQ ID NO: 2318179 - RNA, 22 nt, Human
ugaccacgcuuucuagcuguug

SEQ ID NO: 2318180 - RNA, 20 nt, Human
ugaccacggacguuuccauc

SEQ ID NO: 2318181 - RNA, 21 nt, Human
ugaccacggacguuuccauca

SEQ ID NO: 2318182 - RNA, 22 nt, Human
ugaccacggacguuuccaucag

SEQ ID NO: 2318183 - RNA, 23 nt, Human
ugaccacggacguuuccaucagg

SEQ ID NO: 2318184 - RNA, 15 nt, Human
ugaccacucugucuu

SEQ ID NO: 2318185 - RNA, 19 nt, Human
ugaccagcaccaucucucc

SEQ ID NO: 2318186 - RNA, 20 nt, Human
ugaccacugcagaagacagu

SEQ ID NO: 2318187 - RNA, 21 nt, Human
ugaccacgcuuucuagcuguu

SEQ ID NO: 2318188 - RNA, 18 nt, Human
ugaccacccuccccucuc

SEQ ID NO: 2318189 - RNA, 19 nt, Human
ugaccacccuccccucucu

SEQ ID NO: 2318190 - RNA, 12 nt, Human
ugaccacccucc

SEQ ID NO: 2318191 - RNA, 13 nt, Human
ugaccacccuccc

SEQ ID NO: 2318192 - RNA, 15 nt, Human
ugaccacccuccccu

SEQ ID NO: 2318193 - RNA, 16 nt, Human
ugaccacccuccccuc

SEQ ID NO: 2318194 - RNA, 19 nt, Human
ugaccacagcacagccaac

SEQ ID NO: 2318195 - RNA, 14 nt, Human
ugaccacagcacag

SEQ ID NO: 2318196 - RNA, 22 nt, Human
ugaccacagcaucauuuugcau

SEQ ID NO: 2318197 - RNA, 13 nt, Human
ugaccacaggcag

SEQ ID NO: 2318198 - RNA, 18 nt, Human
ugaccacaggcaguuacu

SEQ ID NO: 2318199 - RNA, 18 nt, Human
ugaccacauagcaugagg

SEQ ID NO: 2318200 - RNA, 21 nt, Human
ugaccacauagcaugaggcca

SEQ ID NO: 2318201 - RNA, 15 nt, Human
ugacaugucuuuucu

SEQ ID NO: 2318202 - RNA, 17 nt, Human
ugaccacagcacagcca

SEQ ID NO: 2318203 - RNA, 16 nt, Human
ugaccacagcacagcc

SEQ ID NO: 2318204 - RNA, 15 nt, Human
ugaccacagcacagc

SEQ ID NO: 2318205 - RNA, 12 nt, Human
ugacaugugaaa

SEQ ID NO: 2318206 - RNA, 13 nt, Human
ugacaugugaaac

SEQ ID NO: 2318207 - RNA, 16 nt, Human
ugacauauuaugucuu

SEQ ID NO: 2318208 - RNA, 16 nt, Human
ugacaugggacauuug

SEQ ID NO: 2318209 - RNA, 17 nt, Human
ugacaugggacauuugc

SEQ ID NO: 2318210 - RNA, 16 nt, Human
ugacaugucccuacac

SEQ ID NO: 2318211 - RNA, 17 nt, Human
ugacauguacagagaac

SEQ ID NO: 2318212 - RNA, 13 nt, Human
ugacauguacaga

SEQ ID NO: 2318213 - RNA, 15 nt, Human
ugacauguacagaga

SEQ ID NO: 2318214 - RNA, 13 nt, Human
ugacaugucuuuu

SEQ ID NO: 2318215 - RNA, 15 nt, Human
ugacauggugccuga

SEQ ID NO: 2318216 - RNA, 16 nt, Human
ugacauggugccugag

SEQ ID NO: 2318217 - RNA, 17 nt, Human
ugacauggugccugaga

SEQ ID NO: 2318218 - RNA, 18 nt, Human
ugacauggugccugagag

SEQ ID NO: 2318219 - RNA, 21 nt, Human
ugacauggugccugagaggca

SEQ ID NO: 2318220 - RNA, 13 nt, Human
ugacauguaacag

SEQ ID NO: 2318221 - RNA, 12 nt, Human
ugacauguacag

SEQ ID NO: 2318222 - RNA, 18 nt, Human
ugacaugggacauuugcu

SEQ ID NO: 2318223 - RNA, 13 nt, Human
ugacagaacacug

SEQ ID NO: 2318224 - RNA, 14 nt, Human
ugacagaacacugu

SEQ ID NO: 2318225 - RNA, 15 nt, Human
ugacagaacacuguc

SEQ ID NO: 2318226 - RNA, 22 nt, Human
ugacacuuuaauuaccaaccug

SEQ ID NO: 2318227 - RNA, 20 nt, Human
ugacacuuugccagaaagca

SEQ ID NO: 2318228 - RNA, 16 nt, Human
ugacagaacacugucu

SEQ ID NO: 2318229 - RNA, 17 nt, Human
ugacagaacacugucuu

SEQ ID NO: 2318230 - RNA, 21 nt, Human
ugacagaacacugucuugaag

SEQ ID NO: 2318231 - RNA, 13 nt, Human
ugacagaaagcag

SEQ ID NO: 2318232 - RNA, 15 nt, Human
ugacaaucaacucua

SEQ ID NO: 2318233 - RNA, 17 nt, Human
ugacaauaauuucaggu

SEQ ID NO: 2318234 - RNA, 18 nt, Human
ugacaaucaacucuaaua

SEQ ID NO: 2318235 - RNA, 14 nt, Human
ugacaauaauuuca

SEQ ID NO: 2318236 - RNA, 14 nt, Human
ugacaauaaaugug

SEQ ID NO: 2318237 - RNA, 17 nt, Human
ugacaauaaaacauuaa

SEQ ID NO: 2318238 - RNA, 22 nt, Human
ugacaauuuuguacaaauuugu

SEQ ID NO: 2318239 - RNA, 18 nt, Human
ugacaauuuuguacaaau

SEQ ID NO: 2318240 - RNA, 16 nt, Human
ugacacaaaccugccu

SEQ ID NO: 2318241 - RNA, 16 nt, Human
ugacaauuuuguacaa

SEQ ID NO: 2318242 - RNA, 18 nt, Human
ugacaaggauugcuacug

SEQ ID NO: 2318243 - RNA, 21 nt, Human
ugacaagccccaggcaggcug

SEQ ID NO: 2318244 - RNA, 17 nt, Human
ugacaagccccaggcag

SEQ ID NO: 2318245 - RNA, 22 nt, Human
ugacaagcuccuggucuugaga

SEQ ID NO: 2318246 - RNA, 15 nt, Human
ugacaagcucacaga

SEQ ID NO: 2318247 - RNA, 20 nt, Human
ugacaagcucacagaccuuu

SEQ ID NO: 2318248 - RNA, 15 nt, Human
ugacaagccccaggc

SEQ ID NO: 2318249 - RNA, 13 nt, Human
ugacaagccccag

SEQ ID NO: 2318250 - RNA, 15 nt, Human
ugacaagcacugcua

SEQ ID NO: 2318251 - RNA, 12 nt, Human
ugacaagcucac

SEQ ID NO: 2318252 - RNA, 19 nt, Human
ugacaacuuugccagcuuu

SEQ ID NO: 2318253 - RNA, 18 nt, Human
ugaauuguaacuguucuu

SEQ ID NO: 2318254 - RNA, 16 nt, Human
ugaauugccugcagag

SEQ ID NO: 2318255 - RNA, 22 nt, Human
ugaauugccugcagagagaagc

SEQ ID NO: 2318256 - RNA, 13 nt, Human
ugacagaggcagc

SEQ ID NO: 2318257 - RNA, 16 nt, Human
ugacagacagcccucc

SEQ ID NO: 2318258 - RNA, 14 nt, Human
ugacagacaggcuc

SEQ ID NO: 2318259 - RNA, 15 nt, Human
ugacagacaggcucu

SEQ ID NO: 2318260 - RNA, 20 nt, Human
ugacagacacaggcccggcu

SEQ ID NO: 2318261 - RNA, 23 nt, Human
ugacagacacaggcccggcucca

SEQ ID NO: 2318262 - RNA, 14 nt, Human
ugacagaggcagcc

SEQ ID NO: 2318263 - RNA, 15 nt, Human
ugacagaggcagccc

SEQ ID NO: 2318264 - RNA, 16 nt, Human
ugacagaggcagcccc

SEQ ID NO: 2318265 - RNA, 17 nt, Human
ugacagaggcagcccca

SEQ ID NO: 2318266 - RNA, 18 nt, Human
ugacagaggcagccccau

SEQ ID NO: 2318267 - RNA, 23 nt, Human
ugacagaggcagccccauucugc

SEQ ID NO: 2318268 - RNA, 14 nt, Human
ugacagagugagac

SEQ ID NO: 2318269 - RNA, 17 nt, Human
ugacagagugagacucu

SEQ ID NO: 2318270 - RNA, 21 nt, Human
ugacauaacacuauaaagguu

SEQ ID NO: 2318271 - RNA, 17 nt, Human
ugacauaacacuauaaa

SEQ ID NO: 2318272 - RNA, 17 nt, Human
ugacauacauccaacau

SEQ ID NO: 2318273 - RNA, 23 nt, Human
ugacauaaguauuuaauucaugu

SEQ ID NO: 2318274 - RNA, 19 nt, Human
ugacagagugagacucugu

SEQ ID NO: 2318275 - RNA, 18 nt, Human
ugacagaccacaucuuua

SEQ ID NO: 2318276 - RNA, 17 nt, Human
ugacagaccacaucuuu

SEQ ID NO: 2318277 - RNA, 19 nt, Human
ugacagacaggcucuuagc

SEQ ID NO: 2318278 - RNA, 16 nt, Human
ugaaacccccacacac

SEQ ID NO: 2318279 - RNA, 18 nt, Human
ugaaacccccacacacac

SEQ ID NO: 2318280 - RNA, 17 nt, Human
ugaaacccccacacaca

SEQ ID NO: 2318281 - RNA, 20 nt, Human
ugaaaccaguguuagggaag

SEQ ID NO: 2318282 - RNA, 14 nt, Human
ugaaacauuuuguc

SEQ ID NO: 2318283 - RNA, 22 nt, Human
ugaaacacaccaggcugugggc

SEQ ID NO: 2318284 - RNA, 19 nt, Human
ugaaacacaccaggcugug

SEQ ID NO: 2318285 - RNA, 16 nt, Human
ugaaacaccuucucug

SEQ ID NO: 2318286 - RNA, 14 nt, Human
ugaaacaaagcugc

SEQ ID NO: 2318287 - RNA, 17 nt, Human
ugaaaagcuauuagcca

SEQ ID NO: 2318288 - RNA, 19 nt, Human
ugaaaagcuauuagccagg

SEQ ID NO: 2318289 - RNA, 20 nt, Human
ugaaaagcuauuagccagga

SEQ ID NO: 2318290 - RNA, 23 nt, Human
ugaaaagcuauuagccaggauca

SEQ ID NO: 2318291 - RNA, 22 nt, Human
ugaaacaacaaauaggaauugu

SEQ ID NO: 2318292 - RNA, 18 nt, Human
ugaaacacaccaggcugu

SEQ ID NO: 2318293 - RNA, 17 nt, Human
ugaaacacaccaggcug

SEQ ID NO: 2318294 - RNA, 16 nt, Human
ugaaacacaccaggcu

SEQ ID NO: 2318295 - RNA, 20 nt, Human
ugaaacacaaacaauaguaa

SEQ ID NO: 2318296 - RNA, 21 nt, Human
ugaaacaagauaacugagaau

SEQ ID NO: 2318297 - RNA, 23 nt, Human
ugaaacaauacucauaaugugaa

SEQ ID NO: 2318298 - RNA, 13 nt, Human
ugaaacacaaaca

SEQ ID NO: 2318299 - RNA, 15 nt, Human
ugaaacaacuuggaa

SEQ ID NO: 2318300 - RNA, 14 nt, Human
ugaaacaaagaagg

SEQ ID NO: 2318301 - RNA, 16 nt, Human
ugaaacaacuuggaaa

SEQ ID NO: 2318302 - RNA, 17 nt, Human
ugaaacaagaagccaca

SEQ ID NO: 2318303 - RNA, 14 nt, Human
ucuuuucacauucu

SEQ ID NO: 2318304 - RNA, 13 nt, Human
ugaaaagcuauua

SEQ ID NO: 2318305 - RNA, 12 nt, Human
ucuuuucacaaa

SEQ ID NO: 2318306 - RNA, 13 nt, Human
ucuuuucacaaau

SEQ ID NO: 2318307 - RNA, 14 nt, Human
ucuuuucacaaaua

SEQ ID NO: 2318308 - RNA, 15 nt, Human
ucuuuucacaaauaa

SEQ ID NO: 2318309 - RNA, 16 nt, Human
ucuuuucacaaauaaa

SEQ ID NO: 2318310 - RNA, 22 nt, Human
ucuuuucacauagcugucuaga

SEQ ID NO: 2318311 - RNA, 13 nt, Human
ucuuuucacauuc

SEQ ID NO: 2318312 - RNA, 16 nt, Human
ucuuuucacauucuua

SEQ ID NO: 2318313 - RNA, 20 nt, Human
ugaaaagcuccauuuuuagu

SEQ ID NO: 2318314 - RNA, 13 nt, Human
ugaaaauuuugau

SEQ ID NO: 2318315 - RNA, 21 nt, Human
ugaaaauuuugauguuuuaag

SEQ ID NO: 2318316 - RNA, 19 nt, Human
ugaaaauuuugauguuuua

SEQ ID NO: 2318317 - RNA, 13 nt, Human
ugaaagcccaagu

SEQ ID NO: 2318318 - RNA, 14 nt, Human
ugaaagccauuugu

SEQ ID NO: 2318319 - RNA, 18 nt, Human
ugaaagcccugagcuuuc

SEQ ID NO: 2318320 - RNA, 19 nt, Human
ugaaagauggcugugccuc

SEQ ID NO: 2318321 - RNA, 17 nt, Human
ugaaagcauccaugugu

SEQ ID NO: 2318322 - RNA, 15 nt, Human
ugaaagcauccaugu

SEQ ID NO: 2318323 - RNA, 23 nt, Human
ugaaagccagcugccgaccagag

SEQ ID NO: 2318324 - RNA, 18 nt, Human
ugaaagauggcugugccu

SEQ ID NO: 2318325 - RNA, 17 nt, Human
ugaaagaguaaaggaaa

SEQ ID NO: 2318326 - RNA, 20 nt, Human
ugaaagaguaaaggaaauga

SEQ ID NO: 2318327 - RNA, 16 nt, Human
ugaaagaguaaaggaa

SEQ ID NO: 2318328 - RNA, 21 nt, Human
ugaaagaggcugaggccugga

SEQ ID NO: 2318329 - RNA, 21 nt, Human
ugaaacccuggaccagugguc

SEQ ID NO: 2318330 - RNA, 19 nt, Human
ugaaagaggcugaggccug

SEQ ID NO: 2318331 - RNA, 15 nt, Human
ugaaacccuggacca

SEQ ID NO: 2318332 - RNA, 18 nt, Human
ugaaagaggcagcuugaa

SEQ ID NO: 2318333 - RNA, 22 nt, Human
ugaaagggagcuaucaggaaca

SEQ ID NO: 2318334 - RNA, 20 nt, Human
ugaaagggagcuaucaggaa

SEQ ID NO: 2318335 - RNA, 15 nt, Human
ugaaagguacuucaa

SEQ ID NO: 2318336 - RNA, 19 nt, Human
ugaaagguuacccuguaac

SEQ ID NO: 2318337 - RNA, 16 nt, Human
ugaaagguaauuugag

SEQ ID NO: 2318338 - RNA, 16 nt, Human
ugaaagguacuucaaa

SEQ ID NO: 2318339 - RNA, 13 nt, Human
ugaaagggcccag

SEQ ID NO: 2318340 - RNA, 23 nt, Human
ugaaagggaguauuacaaaaaca

SEQ ID NO: 2318341 - RNA, 13 nt, Human
ugaaagcuagaga

SEQ ID NO: 2318342 - RNA, 22 nt, Human
ugaaagcuccucgagggcaggg

SEQ ID NO: 2318343 - RNA, 19 nt, Human
ugaaaggcauucucugaag

SEQ ID NO: 2318344 - RNA, 17 nt, Human
ugaaaggcauucucuga

SEQ ID NO: 2318345 - RNA, 16 nt, Human
ugaaauauugacuuuu

SEQ ID NO: 2318346 - RNA, 17 nt, Human
ugaaaucaguuacucuu

SEQ ID NO: 2318347 - RNA, 16 nt, Human
ugaaaucaguuacucu

SEQ ID NO: 2318348 - RNA, 16 nt, Human
ugaaauggagguccuu

SEQ ID NO: 2318349 - RNA, 13 nt, Human
ugaaauguguuuc

SEQ ID NO: 2318350 - RNA, 19 nt, Human
ugaaauguguuucuguaua

SEQ ID NO: 2318351 - RNA, 18 nt, Human
ugaaauuaaccauagaug

SEQ ID NO: 2318352 - RNA, 22 nt, Human
ugaaauuaaccauagauguaga

SEQ ID NO: 2318353 - RNA, 14 nt, Human
ugaaauuaaccucu

SEQ ID NO: 2318354 - RNA, 21 nt, Human
ugaaauuaagaaggcaaaaau

SEQ ID NO: 2318355 - RNA, 19 nt, Human
ugaaauuaagaaggcaaaa

SEQ ID NO: 2318356 - RNA, 17 nt, Human
ugaaauuaaccucucac

SEQ ID NO: 2318357 - RNA, 15 nt, Human
ugaaauguguuucug

SEQ ID NO: 2318358 - RNA, 23 nt, Human
ugaaauuagggcccaauuaauaa

SEQ ID NO: 2318359 - RNA, 17 nt, Human
ugaaauuauguauguuu

SEQ ID NO: 2318360 - RNA, 18 nt, Human
ugaaauuauguauguuua

SEQ ID NO: 2318361 - RNA, 23 nt, Human
ugaaauuacuacaaaauuugaaa

SEQ ID NO: 2318362 - RNA, 20 nt, Human
ugaaauuacuacaaaauuug

SEQ ID NO: 2318363 - RNA, 19 nt, Human
ugaaauuacuuaucaucca

SEQ ID NO: 2318364 - RNA, 22 nt, Human
ugaaauuacuuaucauccacau

SEQ ID NO: 2318365 - RNA, 23 nt, Human
ugaaauuaagaaggcaaaaaugu

SEQ ID NO: 2318366 - RNA, 14 nt, Human
ugaaauucuccugg

SEQ ID NO: 2318367 - RNA, 15 nt, Human
ugaaauucuccugga

SEQ ID NO: 2318368 - RNA, 16 nt, Human
ugaaauucuccuggag

SEQ ID NO: 2318369 - RNA, 23 nt, Human
ugaaauuauguauguuuacauau

SEQ ID NO: 2318370 - RNA, 19 nt, Human
ugaaauuauguauguuuac

SEQ ID NO: 2318371 - RNA, 21 nt, Human
ugaaauuauguauguuuacau

SEQ ID NO: 2318372 - RNA, 12 nt, Human
ugaaauuauuca

SEQ ID NO: 2318373 - RNA, 18 nt, Human
ugaacaagaauuggaagc

SEQ ID NO: 2318374 - RNA, 11 nt, Human
ugaacaagaau

SEQ ID NO: 2318375 - RNA, 14 nt, Human
ugaacaagaauugg

SEQ ID NO: 2318376 - RNA, 12 nt, Human
ugaacaagaauu

SEQ ID NO: 2318377 - RNA, 22 nt, Human
ugaacaaguuguuucauugacu

SEQ ID NO: 2318378 - RNA, 18 nt, Human
ugaacacaaacuguaaau

SEQ ID NO: 2318379 - RNA, 16 nt, Human
ugaacaaucaaagcac

SEQ ID NO: 2318380 - RNA, 20 nt, Human
ugaacaaguuguuucauuga

SEQ ID NO: 2318381 - RNA, 19 nt, Human
ugaacaaguuguuucauug

SEQ ID NO: 2318382 - RNA, 15 nt, Human
ugaacaagucccugu

SEQ ID NO: 2318383 - RNA, 22 nt, Human
ugaacagcggcuggacuuggag

SEQ ID NO: 2318384 - RNA, 21 nt, Human
ugaacagcggcuggacuugga

SEQ ID NO: 2318385 - RNA, 13 nt, Human
ugaacaauucucu

SEQ ID NO: 2318386 - RNA, 15 nt, Human
ugaacagcggcugga

SEQ ID NO: 2318387 - RNA, 14 nt, Human
ugaacauuuaucaa

SEQ ID NO: 2318388 - RNA, 22 nt, Human
ugaacauuuaucaaucaguaua

SEQ ID NO: 2318389 - RNA, 12 nt, Human
ugaacaguggag

SEQ ID NO: 2318390 - RNA, 22 nt, Human
ugaacauugcauauaacuuaua

SEQ ID NO: 2318391 - RNA, 12 nt, Human
ugaacauugcau

SEQ ID NO: 2318392 - RNA, 19 nt, Human
ugaaccacaucuugcucug

SEQ ID NO: 2318393 - RNA, 22 nt, Human
ugaaccaagaacuuuccaggaa

SEQ ID NO: 2318394 - RNA, 23 nt, Human
ugaaccacaucuugcucugcuga

SEQ ID NO: 2318395 - RNA, 17 nt, Human
ugaaccaccacacccag

SEQ ID NO: 2318396 - RNA, 20 nt, Human
ugaaccaccacacccagccc

SEQ ID NO: 2318397 - RNA, 16 nt, Human
ugaacuccuggccuca

SEQ ID NO: 2318398 - RNA, 21 nt, Human
ucuuugaaauagucuguguga

SEQ ID NO: 2318399 - RNA, 22 nt, Human
ucuuugaaauagucugugugaa

SEQ ID NO: 2318400 - RNA, 12 nt, Human
ucuuugauguua

SEQ ID NO: 2318401 - RNA, 15 nt, Human
ucuuugauguuaaca

SEQ ID NO: 2318402 - RNA, 20 nt, Human
ucuuugauacuuguucaaaa

SEQ ID NO: 2318403 - RNA, 21 nt, Human
ucuuugauaauguuaaauuug

SEQ ID NO: 2318404 - RNA, 16 nt, Human
ucuuugauaauguuaa

SEQ ID NO: 2318405 - RNA, 17 nt, Human
ucuuugauaauguuaaa

SEQ ID NO: 2318406 - RNA, 13 nt, Human
ucuuugauaaugu

SEQ ID NO: 2318407 - RNA, 14 nt, Human
ucuuugauaauguu

SEQ ID NO: 2318408 - RNA, 12 nt, Human
ucuuugccaagu

SEQ ID NO: 2318409 - RNA, 17 nt, Human
ucuuugauguuaacaca

SEQ ID NO: 2318410 - RNA, 20 nt, Human
ucuuugauucuccuucagcc

SEQ ID NO: 2318411 - RNA, 23 nt, Human
ucuuugauucuccuucagcccuc

SEQ ID NO: 2318412 - RNA, 15 nt, Human
ucuuugauucuccuu

SEQ ID NO: 2318413 - RNA, 19 nt, Human
ucuuugauguuaacacauu

SEQ ID NO: 2318414 - RNA, 16 nt, Human
ucuuugauucuccuuc

SEQ ID NO: 2318415 - RNA, 19 nt, Human
ucuuugauucuccuucagc

SEQ ID NO: 2318416 - RNA, 15 nt, Human
ucuuugcauggaauu

SEQ ID NO: 2318417 - RNA, 12 nt, Human
ucuuugcaugga

SEQ ID NO: 2318418 - RNA, 16 nt, Human
ucuuugccacccucau

SEQ ID NO: 2318419 - RNA, 14 nt, Human
ucuuugccacccuc

SEQ ID NO: 2318420 - RNA, 20 nt, Human
ucuuugccacccucaugcug

SEQ ID NO: 2318421 - RNA, 18 nt, Human
ucuuugccacccucaugc

SEQ ID NO: 2318422 - RNA, 17 nt, Human
ucuuugccacccucaug

SEQ ID NO: 2318423 - RNA, 17 nt, Human
ucuuuggacacucacac

SEQ ID NO: 2318424 - RNA, 18 nt, Human
ucuuugcuuugcuuucug

SEQ ID NO: 2318425 - RNA, 23 nt, Human
ucuuugcuuugcuuucugcucag

SEQ ID NO: 2318426 - RNA, 13 nt, Human
ucuuugcuuugcu

SEQ ID NO: 2318427 - RNA, 17 nt, Human
ucuuugcuuugcccagc

SEQ ID NO: 2318428 - RNA, 12 nt, Human
ucuuugcuuugc

SEQ ID NO: 2318429 - RNA, 13 nt, Human
ucuuugcuuugcc

SEQ ID NO: 2318430 - RNA, 19 nt, Human
ucuuuuauaacuaguccuu

SEQ ID NO: 2318431 - RNA, 16 nt, Human
ucuuuuaguuuuaguu

SEQ ID NO: 2318432 - RNA, 22 nt, Human
ucuuuuauaacuaguccuuuac

SEQ ID NO: 2318433 - RNA, 18 nt, Human
ucuuuuaguuuuaguugc

SEQ ID NO: 2318434 - RNA, 19 nt, Human
ucuuuggacagaagcagcu

SEQ ID NO: 2318435 - RNA, 17 nt, Human
ucuuuggaaggagugag

SEQ ID NO: 2318436 - RNA, 18 nt, Human
ucuuuggaaggagugaga

SEQ ID NO: 2318437 - RNA, 24 nt, Human
ucuuuggaaggagugagaucauuu

SEQ ID NO: 2318438 - RNA, 17 nt, Human
ucuuuuagcugaugaac

SEQ ID NO: 2318439 - RNA, 21 nt, Human
ucuuuggacagaagcagcucu

SEQ ID NO: 2318440 - RNA, 12 nt, Human
ucuuucaugagu

SEQ ID NO: 2318441 - RNA, 14 nt, Human
ucuuucaugaguuu

SEQ ID NO: 2318442 - RNA, 17 nt, Human
ucuuuccaaaguacacu

SEQ ID NO: 2318443 - RNA, 19 nt, Human
ucuuuccacagaagcucca

SEQ ID NO: 2318444 - RNA, 19 nt, Human
ucuuuccacggagccacuc

SEQ ID NO: 2318445 - RNA, 23 nt, Human
ucuuuccacggagccacuccucu

SEQ ID NO: 2318446 - RNA, 22 nt, Human
ucuuuccacggagccacuccuc

SEQ ID NO: 2318447 - RNA, 22 nt, Human
ucuuuccacuccuccuagccac

SEQ ID NO: 2318448 - RNA, 21 nt, Human
ucuuuccacuccuccuagcca

SEQ ID NO: 2318449 - RNA, 19 nt, Human
ucuuuccauuaugauucuu

SEQ ID NO: 2318450 - RNA, 10 nt, Human
ucuuuccaga

SEQ ID NO: 2318451 - RNA, 20 nt, Human
ucuuuccauuggaucucauu

SEQ ID NO: 2318452 - RNA, 22 nt, Human
ucuuucuuuugauucuuccuaa

SEQ ID NO: 2318453 - RNA, 23 nt, Human
ucuuucuuugggaauauuugaau

SEQ ID NO: 2318454 - RNA, 15 nt, Human
ucuuucuuucuuaga

SEQ ID NO: 2318455 - RNA, 22 nt, Human
ucuuucuuugggaauauuugaa

SEQ ID NO: 2318456 - RNA, 17 nt, Human
ucuuucuuuaccugaga

SEQ ID NO: 2318457 - RNA, 21 nt, Human
ucuuucuuuaccugagaccag

SEQ ID NO: 2318458 - RNA, 20 nt, Human
ucuuucagggggguugugag

SEQ ID NO: 2318459 - RNA, 23 nt, Human
ucuuucaucaaucauuguacagu

SEQ ID NO: 2318460 - RNA, 13 nt, Human
ucuuucauccacu

SEQ ID NO: 2318461 - RNA, 21 nt, Human
ucuuucauccacuagugcaaa

SEQ ID NO: 2318462 - RNA, 23 nt, Human
ucuuucauccacuagugcaaauc

SEQ ID NO: 2318463 - RNA, 14 nt, Human
ucuuuccaaaguac

SEQ ID NO: 2318464 - RNA, 13 nt, Human
ucuuuccaaagua

SEQ ID NO: 2318465 - RNA, 16 nt, Human
ucuuucagccaagaau

SEQ ID NO: 2318466 - RNA, 19 nt, Human
ucuuucagccaagaauucu

SEQ ID NO: 2318467 - RNA, 20 nt, Human
ucuuucagccaagaauucuu

SEQ ID NO: 2318468 - RNA, 21 nt, Human
ucuuucagccaagaauucuua

SEQ ID NO: 2318469 - RNA, 15 nt, Human
ucuugcaugaggcua

SEQ ID NO: 2318470 - RNA, 15 nt, Human
ucuugcuaaucagug

SEQ ID NO: 2318471 - RNA, 16 nt, Human
ucuugcuaaucagugu

SEQ ID NO: 2318472 - RNA, 22 nt, Human
ucuugcuaaucagugucucaca

SEQ ID NO: 2318473 - RNA, 23 nt, Human
ucuugcuaaucagugucucacac

SEQ ID NO: 2318474 - RNA, 17 nt, Human
ucuugcuaaucaguguc

SEQ ID NO: 2318475 - RNA, 19 nt, Human
ucuugcuaaucagugucuc

SEQ ID NO: 2318476 - RNA, 20 nt, Human
ucuugcuaaucagugucuca

SEQ ID NO: 2318477 - RNA, 21 nt, Human
ucuugcuaaucagugucucac

SEQ ID NO: 2318478 - RNA, 22 nt, Human
ucuugcugguugucauuuuugc

SEQ ID NO: 2318479 - RNA, 18 nt, Human
ucuugcuucccuaaucua

SEQ ID NO: 2318480 - RNA, 22 nt, Human
ucuugcuucccuaaucuauggu

SEQ ID NO: 2318481 - RNA, 23 nt, Human
ucuugcuucccuaaucuaugguc

SEQ ID NO: 2318482 - RNA, 19 nt, Human
ucuugcucuuucuacucug

SEQ ID NO: 2318483 - RNA, 21 nt, Human
ucuugcucuuucuacucugaa

SEQ ID NO: 2318484 - RNA, 20 nt, Human
ucuugcuaccucagucagua

SEQ ID NO: 2318485 - RNA, 17 nt, Human
ucuugcuaccucaguca

SEQ ID NO: 2318486 - RNA, 18 nt, Human
ucuugcucaaaaaucugu

SEQ ID NO: 2318487 - RNA, 14 nt, Human
ucuugcaggucuca

SEQ ID NO: 2318488 - RNA, 20 nt, Human
ucuugcaggucucaacccuu

SEQ ID NO: 2318489 - RNA, 13 nt, Human
ucuugcaggucuc

SEQ ID NO: 2318490 - RNA, 19 nt, Human
ucuugcacccgccucuccc

SEQ ID NO: 2318491 - RNA, 20 nt, Human
ucuugcacccgccucucccg

SEQ ID NO: 2318492 - RNA, 22 nt, Human
ucuugcaccccaaagcuuuccu

SEQ ID NO: 2318493 - RNA, 23 nt, Human
ucuugcaccccaaagcuuuccug

SEQ ID NO: 2318494 - RNA, 14 nt, Human
ucuugcacccgccu

SEQ ID NO: 2318495 - RNA, 15 nt, Human
ucuugcacccgccuc

SEQ ID NO: 2318496 - RNA, 18 nt, Human
ucuugcacccgccucucc

SEQ ID NO: 2318497 - RNA, 23 nt, Human
ucuugcaauggcagccuuggcaa

SEQ ID NO: 2318498 - RNA, 23 nt, Human
ucuccucuuaaaaaauaaaaacu

SEQ ID NO: 2318499 - RNA, 22 nt, Human
ucuccucuuaaaaaauaaaaac

SEQ ID NO: 2318500 - RNA, 17 nt, Human
ucuccucuugccacugc

SEQ ID NO: 2318501 - RNA, 14 nt, Human
ucuccucuuaaaaa

SEQ ID NO: 2318502 - RNA, 12 nt, Human
ucuccucuuaaa

SEQ ID NO: 2318503 - RNA, 13 nt, Human
ucucccuggcccu

SEQ ID NO: 2318504 - RNA, 13 nt, Human
ucuccucuugcca

SEQ ID NO: 2318505 - RNA, 16 nt, Human
ucuccucuugccacug

SEQ ID NO: 2318506 - RNA, 16 nt, Human
ucucccuucauccuuc

SEQ ID NO: 2318507 - RNA, 20 nt, Human
ucuccucugcugcuggcugg

SEQ ID NO: 2318508 - RNA, 12 nt, Human
ucuuguguuucu

SEQ ID NO: 2318509 - RNA, 21 nt, Human
ucuuguguguuuauugucaaa

SEQ ID NO: 2318510 - RNA, 13 nt, Human
ucuugcuugggaa

SEQ ID NO: 2318511 - RNA, 16 nt, Human
ucuuguguguuuauug

SEQ ID NO: 2318512 - RNA, 22 nt, Human
ucuuguugcucaaaaaaugagc

SEQ ID NO: 2318513 - RNA, 16 nt, Human
ucuuguuaagugcagu

SEQ ID NO: 2318514 - RNA, 22 nt, Human
ucuuguguuuccacagccugca

SEQ ID NO: 2318515 - RNA, 21 nt, Human
ucuuguugcucaaaaaaugag

SEQ ID NO: 2318516 - RNA, 14 nt, Human
ucuuguuucaauuc

SEQ ID NO: 2318517 - RNA, 20 nt, Human
ucuuguuuauaccuuugccu

SEQ ID NO: 2318518 - RNA, 14 nt, Human
ucuuguuuucaguu

SEQ ID NO: 2318519 - RNA, 22 nt, Human
ucuuguuucuuuucacauagcu

SEQ ID NO: 2318520 - RNA, 20 nt, Human
ucuuucaagugaaucuaaaa

SEQ ID NO: 2318521 - RNA, 19 nt, Human
ucuuucaagugaaucuaaa

SEQ ID NO: 2318522 - RNA, 16 nt, Human
ucuuucaagugaaucu

SEQ ID NO: 2318523 - RNA, 15 nt, Human
ucuuucaacuugcau

SEQ ID NO: 2318524 - RNA, 23 nt, Human
ucuuucacccuuuucuguuugcu

SEQ ID NO: 2318525 - RNA, 18 nt, Human
ucuuucaacuugcaucca

SEQ ID NO: 2318526 - RNA, 20 nt, Human
ucuuucaagcagucgugccu

SEQ ID NO: 2318527 - RNA, 21 nt, Human
ucuuucaagcagucgugccug

SEQ ID NO: 2318528 - RNA, 17 nt, Human
ucuuucacauuuaaaua

SEQ ID NO: 2318529 - RNA, 22 nt, Human
ucuuucaaagguagccaucaug

SEQ ID NO: 2318530 - RNA, 20 nt, Human
ucuuucaaagguagccauca

SEQ ID NO: 2318531 - RNA, 22 nt, Human
ucuuucaaauugagagaaugga

SEQ ID NO: 2318532 - RNA, 19 nt, Human
ucuuucaaauugagagaau

SEQ ID NO: 2318533 - RNA, 18 nt, Human
ucuuucaaauugagagaa

SEQ ID NO: 2318534 - RNA, 23 nt, Human
ucuuucaaaaccuuuugaaauua

SEQ ID NO: 2318535 - RNA, 21 nt, Human
ucuuucaaaaccuuuugaaau

SEQ ID NO: 2318536 - RNA, 20 nt, Human
ucuuucaaaaccuuuugaaa

SEQ ID NO: 2318537 - RNA, 11 nt, Human
ucuuucaaaac

SEQ ID NO: 2318538 - RNA, 20 nt, Human
ucuuguuuuuccacuacugc

SEQ ID NO: 2318539 - RNA, 13 nt, Human
ucuuguuuuucca

SEQ ID NO: 2318540 - RNA, 21 nt, Human
ucuuguuuuuccacuacugcu

SEQ ID NO: 2318541 - RNA, 12 nt, Human
ucauuuagaacu

SEQ ID NO: 2318542 - RNA, 16 nt, Human
ucauuuagaacuugca

SEQ ID NO: 2318543 - RNA, 22 nt, Human
ucauuuagaacuugcagcugau

SEQ ID NO: 2318544 - RNA, 19 nt, Human
ucauuuagauugaaaacuu

SEQ ID NO: 2318545 - RNA, 22 nt, Human
ucauuuauaaagcuaaaauaac

SEQ ID NO: 2318546 - RNA, 21 nt, Human
ucauuuauaaaaccaucaaaa

SEQ ID NO: 2318547 - RNA, 19 nt, Human
ucauuuaguuugauuauuc

SEQ ID NO: 2318548 - RNA, 18 nt, Human
ucauuuagucaugugacc

SEQ ID NO: 2318549 - RNA, 13 nt, Human
ucauuuacugugg

SEQ ID NO: 2318550 - RNA, 15 nt, Human
ucauuuacuguggcu

SEQ ID NO: 2318551 - RNA, 20 nt, Human
ucauuuacuguggcuucuua

SEQ ID NO: 2318552 - RNA, 21 nt, Human
ucauuuaauaauauacuugug

SEQ ID NO: 2318553 - RNA, 18 nt, Human
ucauuuaauaauauacuu

SEQ ID NO: 2318554 - RNA, 20 nt, Human
ucauuuaauaauauacuugu

SEQ ID NO: 2318555 - RNA, 23 nt, Human
ucauuguuuauuaacaaauuaug

SEQ ID NO: 2318556 - RNA, 23 nt, Human
ucauuuaaaaaaaaaauuuguuu

SEQ ID NO: 2318557 - RNA, 13 nt, Human
ucauuuaaaauga

SEQ ID NO: 2318558 - RNA, 14 nt, Human
ucauuuaaaaugau

SEQ ID NO: 2318559 - RNA, 15 nt, Human
ucauuuaaaaugauu

SEQ ID NO: 2318560 - RNA, 11 nt, Human
ucauuuaauaa

SEQ ID NO: 2318561 - RNA, 14 nt, Human
ucauuuaauaauau

SEQ ID NO: 2318562 - RNA, 16 nt, Human
ucauuuaaaaugauua

SEQ ID NO: 2318563 - RNA, 17 nt, Human
ucauuuaaaaugauuag

SEQ ID NO: 2318564 - RNA, 23 nt, Human
ucauuguaugauguguugugaua

SEQ ID NO: 2318565 - RNA, 18 nt, Human
ucauugucuguguagagu

SEQ ID NO: 2318566 - RNA, 16 nt, Human
ucauuguauauaugug

SEQ ID NO: 2318567 - RNA, 17 nt, Human
ucauuguauauaugugu

SEQ ID NO: 2318568 - RNA, 21 nt, Human
ucauuguauauauguguguuu

SEQ ID NO: 2318569 - RNA, 22 nt, Human
ucauuguauauauguguguuua

SEQ ID NO: 2318570 - RNA, 14 nt, Human
ucauuguaugaugu

SEQ ID NO: 2318571 - RNA, 15 nt, Human
ucauuguaugaugug

SEQ ID NO: 2318572 - RNA, 17 nt, Human
ucauuguaugauguguu

SEQ ID NO: 2318573 - RNA, 18 nt, Human
ucauuguaugauguguug

SEQ ID NO: 2318574 - RNA, 23 nt, Human
ucaugguggguucaggggacuca

SEQ ID NO: 2318575 - RNA, 13 nt, Human
ucaugguguaaua

SEQ ID NO: 2318576 - RNA, 14 nt, Human
ucaugguguaauaa

SEQ ID NO: 2318577 - RNA, 19 nt, Human
ucauggugaaaauguacug

SEQ ID NO: 2318578 - RNA, 16 nt, Human
ucauggucucagucau

SEQ ID NO: 2318579 - RNA, 14 nt, Human
ucauggugaaaaug

SEQ ID NO: 2318580 - RNA, 14 nt, Human
ucauggugcucaga

SEQ ID NO: 2318581 - RNA, 19 nt, Human
ucaugguguaauaagacau

SEQ ID NO: 2318582 - RNA, 10 nt, Human
ucauuagaac

SEQ ID NO: 2318583 - RNA, 15 nt, Human
ucaugguguaauaag

SEQ ID NO: 2318584 - RNA, 16 nt, Human
ucaugguguaauaaga

SEQ ID NO: 2318585 - RNA, 17 nt, Human
ucaugguguaauaagac

SEQ ID NO: 2318586 - RNA, 18 nt, Human
ucaugguguaauaagaca

SEQ ID NO: 2318587 - RNA, 13 nt, Human
ucauuagagcagg

SEQ ID NO: 2318588 - RNA, 15 nt, Human
ucauuagagcaggcg

SEQ ID NO: 2318589 - RNA, 12 nt, Human
ucauuagagcag

SEQ ID NO: 2318590 - RNA, 13 nt, Human
ucauuagacuccu

SEQ ID NO: 2318591 - RNA, 18 nt, Human
ucauuagacuccuccucc

SEQ ID NO: 2318592 - RNA, 17 nt, Human
ucauuguauaaaaauag

SEQ ID NO: 2318593 - RNA, 15 nt, Human
ucauuguauauaugu

SEQ ID NO: 2318594 - RNA, 16 nt, Human
ucauuguauaaaaaua

SEQ ID NO: 2318595 - RNA, 15 nt, Human
ucauuguauaaaaau

SEQ ID NO: 2318596 - RNA, 14 nt, Human
ucauuguauaaaaa

SEQ ID NO: 2318597 - RNA, 19 nt, Human
ucauuguacaguuuguuua

SEQ ID NO: 2318598 - RNA, 14 nt, Human
ucauuguagaaaag

SEQ ID NO: 2318599 - RNA, 19 nt, Human
ucauuguaauguuacugau

SEQ ID NO: 2318600 - RNA, 17 nt, Human
ucauuguaauguuacug

SEQ ID NO: 2318601 - RNA, 20 nt, Human
ucauuagccugaguagaaag

SEQ ID NO: 2318602 - RNA, 20 nt, Human
ucauuguaauguuacugauc

SEQ ID NO: 2318603 - RNA, 14 nt, Human
ucauuguacaguuu

SEQ ID NO: 2318604 - RNA, 17 nt, Human
ucauuguacaguuuguu

SEQ ID NO: 2318605 - RNA, 18 nt, Human
ucauuagccugaguagaa

SEQ ID NO: 2318606 - RNA, 19 nt, Human
ucauuagccugaguagaaa

SEQ ID NO: 2318607 - RNA, 16 nt, Human
ucauuaggauggcuag

SEQ ID NO: 2318608 - RNA, 21 nt, Human
uccaaaccuccuguuagcugu

SEQ ID NO: 2318609 - RNA, 17 nt, Human
uccaaagaaauguaagg

SEQ ID NO: 2318610 - RNA, 14 nt, Human
uccaaagaaaugua

SEQ ID NO: 2318611 - RNA, 13 nt, Human
uccaaagagaaaa

SEQ ID NO: 2318612 - RNA, 22 nt, Human
uccaaaggccauggagagcugg

SEQ ID NO: 2318613 - RNA, 23 nt, Human
uccaaaggccauggagagcugga

SEQ ID NO: 2318614 - RNA, 14 nt, Human
uccaaaggcccccu

SEQ ID NO: 2318615 - RNA, 20 nt, Human
uccaaagaguagaauugcau

SEQ ID NO: 2318616 - RNA, 13 nt, Human
uccaaaguacacu

SEQ ID NO: 2318617 - RNA, 15 nt, Human
ucauuuaugaaaaga

SEQ ID NO: 2318618 - RNA, 14 nt, Human
ucauuuaugaaaag

SEQ ID NO: 2318619 - RNA, 15 nt, Human
ucauuuaucccucaa

SEQ ID NO: 2318620 - RNA, 17 nt, Human
ucauuuauauagauuau

SEQ ID NO: 2318621 - RNA, 22 nt, Human
ucauuuauauagauuauaacuu

SEQ ID NO: 2318622 - RNA, 19 nt, Human
ucauuucaaauacaucuuu

SEQ ID NO: 2318623 - RNA, 22 nt, Human
uccaaaaagauuuucagaaaau

SEQ ID NO: 2318624 - RNA, 15 nt, Human
uccaaaacuccugcc

SEQ ID NO: 2318625 - RNA, 13 nt, Human
uccaaaacugccu

SEQ ID NO: 2318626 - RNA, 12 nt, Human
uccaaaacugcc

SEQ ID NO: 2318627 - RNA, 14 nt, Human
uccaaaagaagccc

SEQ ID NO: 2318628 - RNA, 18 nt, Human
uccaaaagaagcccccag

SEQ ID NO: 2318629 - RNA, 15 nt, Human
uccaaaagaagcccc

SEQ ID NO: 2318630 - RNA, 23 nt, Human
uccaaaauuugaaauauuaaaau

SEQ ID NO: 2318631 - RNA, 16 nt, Human
uccaaaccaaauaaaa

SEQ ID NO: 2318632 - RNA, 21 nt, Human
uccaaaagaagcccccagcua

SEQ ID NO: 2318633 - RNA, 18 nt, Human
ucauagcagauuuuaauu

SEQ ID NO: 2318634 - RNA, 14 nt, Human
ucauagcacuuccc

SEQ ID NO: 2318635 - RNA, 12 nt, Human
ucauagcagcuu

SEQ ID NO: 2318636 - RNA, 14 nt, Human
ucaguguauuugua

SEQ ID NO: 2318637 - RNA, 15 nt, Human
ucaguguauuuguau

SEQ ID NO: 2318638 - RNA, 16 nt, Human
ucauagacccucucaa

SEQ ID NO: 2318639 - RNA, 11 nt, Human
ucauagcagcu

SEQ ID NO: 2318640 - RNA, 15 nt, Human
ucagugcagcccgug

SEQ ID NO: 2318641 - RNA, 17 nt, Human
ucaguguacccccgccc

SEQ ID NO: 2318642 - RNA, 20 nt, Human
ucaguguacccccgcccagg

SEQ ID NO: 2318643 - RNA, 21 nt, Human
ucaguguacccccgcccaggc

SEQ ID NO: 2318644 - RNA, 22 nt, Human
ucaguguauggaaauaaaugua

SEQ ID NO: 2318645 - RNA, 21 nt, Human
ucaguguauggaaauaaaugu

SEQ ID NO: 2318646 - RNA, 22 nt, Human
ucaguguacccccgcccaggcu

SEQ ID NO: 2318647 - RNA, 23 nt, Human
ucaguguacccccgcccaggcug

SEQ ID NO: 2318648 - RNA, 20 nt, Human
ucaguguacauggaauaaca

SEQ ID NO: 2318649 - RNA, 19 nt, Human
ucaguguaccauuugccuc

SEQ ID NO: 2318650 - RNA, 18 nt, Human
ucaguguaccauuugccu

SEQ ID NO: 2318651 - RNA, 14 nt, Human
ucaucauccuaagc

SEQ ID NO: 2318652 - RNA, 24 nt, Human
ucaucaauugaauggucagcguug

SEQ ID NO: 2318653 - RNA, 23 nt, Human
ucaucaauugaauggucagcguu

SEQ ID NO: 2318654 - RNA, 14 nt, Human
ucaucaaucauugu

SEQ ID NO: 2318655 - RNA, 15 nt, Human
ucaucaaucauugua

SEQ ID NO: 2318656 - RNA, 16 nt, Human
ucaucaaucauuguac

SEQ ID NO: 2318657 - RNA, 19 nt, Human
ucaucaaucauuguacagu

SEQ ID NO: 2318658 - RNA, 17 nt, Human
ucaucaaugaaugaaug

SEQ ID NO: 2318659 - RNA, 18 nt, Human
ucaucaaggcacugccug

SEQ ID NO: 2318660 - RNA, 19 nt, Human
ucaucaaggcacugccuga

SEQ ID NO: 2318661 - RNA, 21 nt, Human
ucaucaaggcacugccugaug

SEQ ID NO: 2318662 - RNA, 17 nt, Human
ucaucauuccuugagaa

SEQ ID NO: 2318663 - RNA, 14 nt, Human
ucaucauuccuuga

SEQ ID NO: 2318664 - RNA, 14 nt, Human
ucaucauucucugu

SEQ ID NO: 2318665 - RNA, 13 nt, Human
ucaucauucucug

SEQ ID NO: 2318666 - RNA, 18 nt, Human
ucaucauucucugucuca

SEQ ID NO: 2318667 - RNA, 20 nt, Human
ucauccaccccaucccuccc

SEQ ID NO: 2318668 - RNA, 19 nt, Human
ucauccacuagugcaaauc

SEQ ID NO: 2318669 - RNA, 20 nt, Human
ucauccacuagugcaaauca

SEQ ID NO: 2318670 - RNA, 22 nt, Human
ucaucauguaucgcuucaugua

SEQ ID NO: 2318671 - RNA, 18 nt, Human
ucaugcuuguguuauaac

SEQ ID NO: 2318672 - RNA, 17 nt, Human
ucaugcuucuuccuuac

SEQ ID NO: 2318673 - RNA, 12 nt, Human
ucauggaauggu

SEQ ID NO: 2318674 - RNA, 21 nt, Human
ucauggaaugguuauaaaagu

SEQ ID NO: 2318675 - RNA, 21 nt, Human
ucauggggugaugcugggcug

SEQ ID NO: 2318676 - RNA, 22 nt, Human
ucauggaaugguuauaaaagug

SEQ ID NO: 2318677 - RNA, 14 nt, Human
ucaugggguccaag

SEQ ID NO: 2318678 - RNA, 22 nt, Human
ucaugguagagaccgagccucu

SEQ ID NO: 2318679 - RNA, 13 nt, Human
ucauggucucagu

SEQ ID NO: 2318680 - RNA, 23 nt, Human
ucaugguagagaccgagccucug

SEQ ID NO: 2318681 - RNA, 23 nt, Human
ucaucuugaccaagcaggaagcu

SEQ ID NO: 2318682 - RNA, 15 nt, Human
ucaucuuguguuuua

SEQ ID NO: 2318683 - RNA, 22 nt, Human
ucaucuugguacuacuagaugu

SEQ ID NO: 2318684 - RNA, 22 nt, Human
ucaucuugaccaagcaggaagc

SEQ ID NO: 2318685 - RNA, 21 nt, Human
ucaucuugaccaagcaggaag

SEQ ID NO: 2318686 - RNA, 22 nt, Human
ucaucuuucauuaaaggcuucu

SEQ ID NO: 2318687 - RNA, 17 nt, Human
ucaucuccaucagcugu

SEQ ID NO: 2318688 - RNA, 16 nt, Human
ucaucuccaucagcug

SEQ ID NO: 2318689 - RNA, 12 nt, Human
ucaucucccacc

SEQ ID NO: 2318690 - RNA, 22 nt, Human
ucaucucccaccuagcagcacc

SEQ ID NO: 2318691 - RNA, 15 nt, Human
ucaucuccugccuuc

SEQ ID NO: 2318692 - RNA, 19 nt, Human
ucaucuugaccaagcagga

SEQ ID NO: 2318693 - RNA, 16 nt, Human
ucaucuugaccaagca

SEQ ID NO: 2318694 - RNA, 18 nt, Human
ucaucuccugccuuccuc

SEQ ID NO: 2318695 - RNA, 13 nt, Human
ucaucuccaucag

SEQ ID NO: 2318696 - RNA, 23 nt, Human
ucaucuccagggaguccccuccc

SEQ ID NO: 2318697 - RNA, 22 nt, Human
ucaucuccagggaguccccucc

SEQ ID NO: 2318698 - RNA, 16 nt, Human
ucaucuccccaucauu

SEQ ID NO: 2318699 - RNA, 20 nt, Human
ucaucucaggccucccucaa

SEQ ID NO: 2318700 - RNA, 16 nt, Human
ucaucucauucaaacc

SEQ ID NO: 2318701 - RNA, 21 nt, Human
ucauccacuagugcaaaucau

SEQ ID NO: 2318702 - RNA, 22 nt, Human
ucauccacuagugcaaaucaua

SEQ ID NO: 2318703 - RNA, 18 nt, Human
ucauccacugugccaugu

SEQ ID NO: 2318704 - RNA, 14 nt, Human
ucauccacugugcc

SEQ ID NO: 2318705 - RNA, 17 nt, Human
ucauccacugugccaug

SEQ ID NO: 2318706 - RNA, 13 nt, Human
ucaggccugugug

SEQ ID NO: 2318707 - RNA, 20 nt, Human
ucaggcgauccaccugucuc

SEQ ID NO: 2318708 - RNA, 18 nt, Human
ucaggccucccucucucu

SEQ ID NO: 2318709 - RNA, 17 nt, Human
ucaggccucccucucuc

SEQ ID NO: 2318710 - RNA, 21 nt, Human
ucaggcgauccaccugucuca

SEQ ID NO: 2318711 - RNA, 23 nt, Human
ucaggcguagaucaccagaauaa

SEQ ID NO: 2318712 - RNA, 15 nt, Human
ucaggcucuucuccu

SEQ ID NO: 2318713 - RNA, 22 nt, Human
ucaggccuauaaccccagcucc

SEQ ID NO: 2318714 - RNA, 18 nt, Human
ucaggccuauaaccccag

SEQ ID NO: 2318715 - RNA, 21 nt, Human
ucaggccugggggcugggcag

SEQ ID NO: 2318716 - RNA, 17 nt, Human
ucaggaugaacccagga

SEQ ID NO: 2318717 - RNA, 15 nt, Human
ucaggaugaacccag

SEQ ID NO: 2318718 - RNA, 16 nt, Human
ucaggaugaacccagg

SEQ ID NO: 2318719 - RNA, 17 nt, Human
ucaggaucaagaaagug

SEQ ID NO: 2318720 - RNA, 16 nt, Human
ucaggaucaagaaagu

SEQ ID NO: 2318721 - RNA, 20 nt, Human
ucaggauacucugucagaug

SEQ ID NO: 2318722 - RNA, 23 nt, Human
ucaggaucucuuagcauuuuaau

SEQ ID NO: 2318723 - RNA, 19 nt, Human
ucaggaguuagaggccagc

SEQ ID NO: 2318724 - RNA, 17 nt, Human
ucaggaguuagaggcca

SEQ ID NO: 2318725 - RNA, 22 nt, Human
ucaggaguuagaggccagccug

SEQ ID NO: 2318726 - RNA, 20 nt, Human
ucaggaguuagaggccagcc

SEQ ID NO: 2318727 - RNA, 12 nt, Human
ucaggaguuccu

SEQ ID NO: 2318728 - RNA, 18 nt, Human
ucaggauacucugucaga

SEQ ID NO: 2318729 - RNA, 16 nt, Human
ucaggauacaugugcc

SEQ ID NO: 2318730 - RNA, 14 nt, Human
ucaggauacaugug

SEQ ID NO: 2318731 - RNA, 15 nt, Human
ucaggauacaugugc

SEQ ID NO: 2318732 - RNA, 20 nt, Human
ucaggaucaaaccccgacca

SEQ ID NO: 2318733 - RNA, 12 nt, Human
ucaggacacuaa

SEQ ID NO: 2318734 - RNA, 10 nt, Human
ucaggagcag

SEQ ID NO: 2318735 - RNA, 21 nt, Human
ucaggagcagccucagaacaa

SEQ ID NO: 2318736 - RNA, 22 nt, Human
ucaggagcagccucagaacaaa

SEQ ID NO: 2318737 - RNA, 20 nt, Human
ucaggaaggaugagcauuua

SEQ ID NO: 2318738 - RNA, 18 nt, Human
ucaggaaggaugagcauu

SEQ ID NO: 2318739 - RNA, 17 nt, Human
ucaggaaggaugagcau

SEQ ID NO: 2318740 - RNA, 16 nt, Human
ucaggaaggaugagca

SEQ ID NO: 2318741 - RNA, 15 nt, Human
ucagcuuccuaccca

SEQ ID NO: 2318742 - RNA, 19 nt, Human
ucagcuuccuacccacacc

SEQ ID NO: 2318743 - RNA, 14 nt, Human
ucaggaaugggcug

SEQ ID NO: 2318744 - RNA, 17 nt, Human
ucaggaauauuuuccaa

SEQ ID NO: 2318745 - RNA, 18 nt, Human
ucaggaauauuuuccaaa

SEQ ID NO: 2318746 - RNA, 11 nt, Human
ucaggagcccu

SEQ ID NO: 2318747 - RNA, 12 nt, Human
ucaggagcccug

SEQ ID NO: 2318748 - RNA, 14 nt, Human
ucaggagcccuggg

SEQ ID NO: 2318749 - RNA, 15 nt, Human
ucaggagcccuggga

SEQ ID NO: 2318750 - RNA, 18 nt, Human
ucagcucugggagaggau

SEQ ID NO: 2318751 - RNA, 23 nt, Human
ucagcuguaagaagagacuggga

SEQ ID NO: 2318752 - RNA, 12 nt, Human
ucagcuguacuu

SEQ ID NO: 2318753 - RNA, 22 nt, Human
ucagcucuucugacuuaagugu

SEQ ID NO: 2318754 - RNA, 19 nt, Human
ucagcucugggccauucuc

SEQ ID NO: 2318755 - RNA, 11 nt, Human
ucagcucuggg

SEQ ID NO: 2318756 - RNA, 12 nt, Human
ucagcucuggga

SEQ ID NO: 2318757 - RNA, 16 nt, Human
ucagcucugggagagg

SEQ ID NO: 2318758 - RNA, 17 nt, Human
ucagcucugggagagga

SEQ ID NO: 2318759 - RNA, 23 nt, Human
ucagcucugcaagaauugaagca

SEQ ID NO: 2318760 - RNA, 16 nt, Human
ucagcuguuugucaua

SEQ ID NO: 2318761 - RNA, 15 nt, Human
ucagcuguuugucau

SEQ ID NO: 2318762 - RNA, 21 nt, Human
ucagcugugaacauggacucu

SEQ ID NO: 2318763 - RNA, 12 nt, Human
ucagcugugaac

SEQ ID NO: 2318764 - RNA, 16 nt, Human
ucagcuguaguccuca

SEQ ID NO: 2318765 - RNA, 17 nt, Human
ucagcuguacuucgucu

SEQ ID NO: 2318766 - RNA, 18 nt, Human
ucagcuuaggggcugcug

SEQ ID NO: 2318767 - RNA, 23 nt, Human
ucagcuucagaauggcauuguac

SEQ ID NO: 2318768 - RNA, 16 nt, Human
ucagcuucauuugugu

SEQ ID NO: 2318769 - RNA, 18 nt, Human
ucagcuucauuuguguca

SEQ ID NO: 2318770 - RNA, 21 nt, Human
ucagcuucauuugugucaaug

SEQ ID NO: 2318771 - RNA, 23 nt, Human
ucaggaagcucagggccuggcuc

SEQ ID NO: 2318772 - RNA, 14 nt, Human
ucaccggagcuuuc

SEQ ID NO: 2318773 - RNA, 22 nt, Human
ucaccgcagucgucgcacaguc

SEQ ID NO: 2318774 - RNA, 23 nt, Human
ucaccgcagucgucgcacagucu

SEQ ID NO: 2318775 - RNA, 15 nt, Human
ucaccggauccuggg

SEQ ID NO: 2318776 - RNA, 23 nt, Human
ucaccggagcuuucaaagaagga

SEQ ID NO: 2318777 - RNA, 18 nt, Human
ucaccggggugguuuagu

SEQ ID NO: 2318778 - RNA, 17 nt, Human
ucaccguggaccuuccu

SEQ ID NO: 2318779 - RNA, 18 nt, Human
ucaccguggaccuuccug

SEQ ID NO: 2318780 - RNA, 19 nt, Human
ucaccguggaccuuccugc

SEQ ID NO: 2318781 - RNA, 20 nt, Human
ucaccguggaccuuccugcc

SEQ ID NO: 2318782 - RNA, 21 nt, Human
ucaccguggaccuuccugcca

SEQ ID NO: 2318783 - RNA, 14 nt, Human
ucaccuaacucaua

SEQ ID NO: 2318784 - RNA, 22 nt, Human
ucaccuaacucauacugugcug

SEQ ID NO: 2318785 - RNA, 19 nt, Human
ucaccgugggcucccugac

SEQ ID NO: 2318786 - RNA, 18 nt, Human
ucaccgugggcucccuga

SEQ ID NO: 2318787 - RNA, 17 nt, Human
ucaccgugggcucccug

SEQ ID NO: 2318788 - RNA, 16 nt, Human
ucaccgugggcucccu

SEQ ID NO: 2318789 - RNA, 15 nt, Human
ucaccgugggcuccc

SEQ ID NO: 2318790 - RNA, 13 nt, Human
ucaccgugggcuc

SEQ ID NO: 2318791 - RNA, 23 nt, Human
ucagcuccagcucaccagcccca

SEQ ID NO: 2318792 - RNA, 24 nt, Human
ucagcuccagcucaccagccccag

SEQ ID NO: 2318793 - RNA, 22 nt, Human
ucaccuaauguuuaugagccag

SEQ ID NO: 2318794 - RNA, 21 nt, Human
ucaccuaauguuuaugagcca

SEQ ID NO: 2318795 - RNA, 14 nt, Human
ucaccuaauguuua

SEQ ID NO: 2318796 - RNA, 13 nt, Human
ucagcuccagcug

SEQ ID NO: 2318797 - RNA, 14 nt, Human
ucagcuccaggugg

SEQ ID NO: 2318798 - RNA, 19 nt, Human
ucagcuccagguggcucug

SEQ ID NO: 2318799 - RNA, 16 nt, Human
ucaggucaggaguucg

SEQ ID NO: 2318800 - RNA, 16 nt, Human
ucagggaccccugccc

SEQ ID NO: 2318801 - RNA, 15 nt, Human
ucagguauuaagaaa

SEQ ID NO: 2318802 - RNA, 17 nt, Human
ucagguauuaagaaaau

SEQ ID NO: 2318803 - RNA, 17 nt, Human
ucagggaccccugcccu

SEQ ID NO: 2318804 - RNA, 21 nt, Human
ucagguauguugccuuuaugg

SEQ ID NO: 2318805 - RNA, 14 nt, Human
ucagggaccccugc

SEQ ID NO: 2318806 - RNA, 12 nt, Human
ucagggaccccu

SEQ ID NO: 2318807 - RNA, 16 nt, Human
ucagggaccacagcaa

SEQ ID NO: 2318808 - RNA, 14 nt, Human
ucagggaccacagc

SEQ ID NO: 2318809 - RNA, 15 nt, Human
ucagggaccacagca

SEQ ID NO: 2318810 - RNA, 23 nt, Human
ucagggaccaaggaccccucacc

SEQ ID NO: 2318811 - RNA, 13 nt, Human
ucagggaccacag

SEQ ID NO: 2318812 - RNA, 20 nt, Human
ucagggaccaaggaccccuc

SEQ ID NO: 2318813 - RNA, 15 nt, Human
ucagggaccaaggac

SEQ ID NO: 2318814 - RNA, 14 nt, Human
ucagggaccaagga

SEQ ID NO: 2318815 - RNA, 15 nt, Human
ucagggacaggauga

SEQ ID NO: 2318816 - RNA, 14 nt, Human
ucagggacagagcc

SEQ ID NO: 2318817 - RNA, 15 nt, Human
ucagggacagagcca

SEQ ID NO: 2318818 - RNA, 23 nt, Human
ucagggacagagacaccugcacc

SEQ ID NO: 2318819 - RNA, 21 nt, Human
ucagggacagagacaccugca

SEQ ID NO: 2318820 - RNA, 18 nt, Human
ucagggacagagacaccu

SEQ ID NO: 2318821 - RNA, 22 nt, Human
ucagggaauuucaggaacuaga

SEQ ID NO: 2318822 - RNA, 16 nt, Human
ucaggcucuucuccuu

SEQ ID NO: 2318823 - RNA, 21 nt, Human
ucaggcucuucuccuuucaca

SEQ ID NO: 2318824 - RNA, 13 nt, Human
ucaggcugaggug

SEQ ID NO: 2318825 - RNA, 19 nt, Human
ucaggcugcuggaggaaaa

SEQ ID NO: 2318826 - RNA, 17 nt, Human
ucaggcugcuggaggaa

SEQ ID NO: 2318827 - RNA, 13 nt, Human
ucaggcugcuggc

SEQ ID NO: 2318828 - RNA, 14 nt, Human
ucaggcugcuggcg

SEQ ID NO: 2318829 - RNA, 16 nt, Human
ucaggcugcuggagga

SEQ ID NO: 2318830 - RNA, 15 nt, Human
ucaggcugcuggagg

SEQ ID NO: 2318831 - RNA, 12 nt, Human
ucaggcugcugg

SEQ ID NO: 2318832 - RNA, 17 nt, Human
ucaggcugcuggcgccu

SEQ ID NO: 2318833 - RNA, 19 nt, Human
ucaggcugcuggcgccucu

SEQ ID NO: 2318834 - RNA, 23 nt, Human
ucaggugagaagcagaggaagga

SEQ ID NO: 2318835 - RNA, 16 nt, Human
ucaggugauccaccca

SEQ ID NO: 2318836 - RNA, 15 nt, Human
ucaggucagggugag

SEQ ID NO: 2318837 - RNA, 16 nt, Human
ucagguccucagagaa

SEQ ID NO: 2318838 - RNA, 12 nt, Human
ucaggucccugc

SEQ ID NO: 2318839 - RNA, 18 nt, Human
ucaggucagggugaggau

SEQ ID NO: 2318840 - RNA, 21 nt, Human
ucaggucucccacgugggaga

SEQ ID NO: 2318841 - RNA, 23 nt, Human
ucaggugauccacccaccucagc

SEQ ID NO: 2318842 - RNA, 15 nt, Human
ucaggugacauguga

SEQ ID NO: 2318843 - RNA, 19 nt, Human
ucaggucucccacguggga

SEQ ID NO: 2318844 - RNA, 16 nt, Human
ucaggugacaugugaa

SEQ ID NO: 2318845 - RNA, 18 nt, Human
ucagguggggcagcuuga

SEQ ID NO: 2318846 - RNA, 19 nt, Human
ucagguggggcagcuugag

SEQ ID NO: 2318847 - RNA, 21 nt, Human
ucagucugauucccaagcucu

SEQ ID NO: 2318848 - RNA, 22 nt, Human
ucagucugauucccaagcucug

SEQ ID NO: 2318849 - RNA, 23 nt, Human
ucagucugauucccaagcucugc

SEQ ID NO: 2318850 - RNA, 23 nt, Human
ucagugcagcccguguggccccu

SEQ ID NO: 2318851 - RNA, 14 nt, Human
ucagugcaaagauu

SEQ ID NO: 2318852 - RNA, 19 nt, Human
ucagugauguaccaugaaa

SEQ ID NO: 2318853 - RNA, 18 nt, Human
ucagugaggcccagggag

SEQ ID NO: 2318854 - RNA, 17 nt, Human
ucagugaggcccaggga

SEQ ID NO: 2318855 - RNA, 14 nt, Human
ucagugaggcccag

SEQ ID NO: 2318856 - RNA, 19 nt, Human
ucagugacagaguucacua

SEQ ID NO: 2318857 - RNA, 15 nt, Human
ucagugacagaguuc

SEQ ID NO: 2318858 - RNA, 11 nt, Human
ucagugacaga

SEQ ID NO: 2318859 - RNA, 22 nt, Human
ucagucuuuaaucugagaggcc

SEQ ID NO: 2318860 - RNA, 23 nt, Human
ucagucucccuuucccuucuugg

SEQ ID NO: 2318861 - RNA, 22 nt, Human
ucagucuuucuuagugccugug

SEQ ID NO: 2318862 - RNA, 15 nt, Human
ucaguccuuugauca

SEQ ID NO: 2318863 - RNA, 23 nt, Human
ucaguccuccccucacagccucu

SEQ ID NO: 2318864 - RNA, 15 nt, Human
ucagucacagccacc

SEQ ID NO: 2318865 - RNA, 23 nt, Human
ucaguauuuuggagaaauuauuu

SEQ ID NO: 2318866 - RNA, 22 nt, Human
ucaguccuccccucacagccuc

SEQ ID NO: 2318867 - RNA, 14 nt, Human
ucagucacagccac

SEQ ID NO: 2318868 - RNA, 13 nt, Human
ucagucacagcca

SEQ ID NO: 2318869 - RNA, 16 nt, Human
ucagucaauauuuuua

SEQ ID NO: 2318870 - RNA, 14 nt, Human
ucagucucaggagc

SEQ ID NO: 2318871 - RNA, 19 nt, Human
ucagucucccuucucccau

SEQ ID NO: 2318872 - RNA, 20 nt, Human
ucagucucccuucucccaug

SEQ ID NO: 2318873 - RNA, 23 nt, Human
ucagucucccuucucccaugagg

SEQ ID NO: 2318874 - RNA, 14 nt, Human
ucagucucccuuuc

SEQ ID NO: 2318875 - RNA, 17 nt, Human
ucagucucccuuucccu

SEQ ID NO: 2318876 - RNA, 20 nt, Human
ucagucucccuuucccuucu

SEQ ID NO: 2318877 - RNA, 16 nt, Human
ucagucucccucccuu

SEQ ID NO: 2318878 - RNA, 18 nt, Human
ucagucuauccacagaga

SEQ ID NO: 2318879 - RNA, 15 nt, Human
ucagucuauccacag

SEQ ID NO: 2318880 - RNA, 16 nt, Human
ucagucuauccacaga

SEQ ID NO: 2318881 - RNA, 20 nt, Human
ucagguggggcagcuugagg

SEQ ID NO: 2318882 - RNA, 22 nt, Human
ucaguauugaagcauuuuauaa

SEQ ID NO: 2318883 - RNA, 23 nt, Human
ucaguauugaagcauuuuauaaa

SEQ ID NO: 2318884 - RNA, 21 nt, Human
ucaggcugcuggcgccucugc

SEQ ID NO: 2318885 - RNA, 17 nt, Human
ucaggugacaugugaaa

SEQ ID NO: 2318886 - RNA, 22 nt, Human
ucaguauuguuuugguuugcua

SEQ ID NO: 2318887 - RNA, 24 nt, Human
ucaguauuguuuugguuugcuacu

SEQ ID NO: 2318888 - RNA, 21 nt, Human
ucaggugcccaucccuggaag

SEQ ID NO: 2318889 - RNA, 14 nt, Human
ucaguauuguuuug

SEQ ID NO: 2318890 - RNA, 15 nt, Human
ucaguauuguuuugg

SEQ ID NO: 2318891 - RNA, 17 nt, Human
ucaguauuguuuugguu

SEQ ID NO: 2318892 - RNA, 16 nt, Human
ucaguauuuucccugc

SEQ ID NO: 2318893 - RNA, 18 nt, Human
ucaguauuuucccugcua

SEQ ID NO: 2318894 - RNA, 19 nt, Human
ucaguauuuuggagaaauu

SEQ ID NO: 2318895 - RNA, 20 nt, Human
ucaguauuuuggagaaauua

SEQ ID NO: 2318896 - RNA, 22 nt, Human
ucaguauuuuggagaaauuauu

SEQ ID NO: 2318897 - RNA, 20 nt, Human
uccacuuuuuuuuguauguu

SEQ ID NO: 2318898 - RNA, 20 nt, Human
uccacuuuguuggaaagcag

SEQ ID NO: 2318899 - RNA, 22 nt, Human
uccacuuuguuucguggggagg

SEQ ID NO: 2318900 - RNA, 23 nt, Human
uccacuuuguuucguggggaggu

SEQ ID NO: 2318901 - RNA, 15 nt, Human
uccacuuuguuucgu

SEQ ID NO: 2318902 - RNA, 13 nt, Human
uccacuuuguucu

SEQ ID NO: 2318903 - RNA, 16 nt, Human
uccacuuuguucuuua

SEQ ID NO: 2318904 - RNA, 18 nt, Human
uccacuuuguuucguggg

SEQ ID NO: 2318905 - RNA, 19 nt, Human
uccacuuuguuucgugggg

SEQ ID NO: 2318906 - RNA, 18 nt, Human
uccagaaaaccccagcau

SEQ ID NO: 2318907 - RNA, 21 nt, Human
uccagaaacggccauucagca

SEQ ID NO: 2318908 - RNA, 23 nt, Human
uccagaaagaaaacuuguauuau

SEQ ID NO: 2318909 - RNA, 11 nt, Human
uccagaaagaa

SEQ ID NO: 2318910 - RNA, 20 nt, Human
uccacuuucuagccagagga

SEQ ID NO: 2318911 - RNA, 21 nt, Human
uccacuuucuagccagaggag

SEQ ID NO: 2318912 - RNA, 23 nt, Human
uccacuuggucugugagaugcua

SEQ ID NO: 2318913 - RNA, 19 nt, Human
uccacuuucuagccagagg

SEQ ID NO: 2318914 - RNA, 16 nt, Human
uccaaaguacacuguu

SEQ ID NO: 2318915 - RNA, 14 nt, Human
uccaaaguacacug

SEQ ID NO: 2318916 - RNA, 17 nt, Human
uccacuuggucugugag

SEQ ID NO: 2318917 - RNA, 21 nt, Human
uccacuuggucugugagaugc

SEQ ID NO: 2318918 - RNA, 21 nt, Human
uccagcaauucuccugccuca

SEQ ID NO: 2318919 - RNA, 14 nt, Human
uccagcaccacacu

SEQ ID NO: 2318920 - RNA, 22 nt, Human
uccagcaauucuccugccucag

SEQ ID NO: 2318921 - RNA, 23 nt, Human
uccagcaccauccgccagggccc

SEQ ID NO: 2318922 - RNA, 21 nt, Human
uccagcuccuccgugcuuccu

SEQ ID NO: 2318923 - RNA, 13 nt, Human
uccagcuccugua

SEQ ID NO: 2318924 - RNA, 12 nt, Human
uccagcucugga

SEQ ID NO: 2318925 - RNA, 13 nt, Human
uccagcucuggag

SEQ ID NO: 2318926 - RNA, 15 nt, Human
uccagcucuggaggg

SEQ ID NO: 2318927 - RNA, 20 nt, Human
uccagcucuggaggggaggg

SEQ ID NO: 2318928 - RNA, 21 nt, Human
uccagcucuuuccuccuucca

SEQ ID NO: 2318929 - RNA, 23 nt, Human
uccagcugacccugguucucucu

SEQ ID NO: 2318930 - RNA, 18 nt, Human
uccagcucuuuccuccuu

SEQ ID NO: 2318931 - RNA, 15 nt, Human
uccagcucuuuccuc

SEQ ID NO: 2318932 - RNA, 16 nt, Human
uccagcugagcgccag

SEQ ID NO: 2318933 - RNA, 19 nt, Human
uccaggggugggacacccu

SEQ ID NO: 2318934 - RNA, 20 nt, Human
uccaggggugggacacccug

SEQ ID NO: 2318935 - RNA, 19 nt, Human
uccaggggccccuccagcu

SEQ ID NO: 2318936 - RNA, 23 nt, Human
uccaggggcugcuuccuccugga

SEQ ID NO: 2318937 - RNA, 21 nt, Human
uccaggggcugcuuccuccug

SEQ ID NO: 2318938 - RNA, 22 nt, Human
uccaggggcugcuuccuccugg

SEQ ID NO: 2318939 - RNA, 16 nt, Human
uccagcugccccgggg

SEQ ID NO: 2318940 - RNA, 18 nt, Human
uccaggggccccuccagc

SEQ ID NO: 2318941 - RNA, 12 nt, Human
uccaggagcagc

SEQ ID NO: 2318942 - RNA, 13 nt, Human
uccaggagcagcc

SEQ ID NO: 2318943 - RNA, 14 nt, Human
uccaggagcagcca

SEQ ID NO: 2318944 - RNA, 15 nt, Human
uccaggagcagccac

SEQ ID NO: 2318945 - RNA, 13 nt, Human
uccauacucagga

SEQ ID NO: 2318946 - RNA, 21 nt, Human
uccauaaucuggacuccucug

SEQ ID NO: 2318947 - RNA, 15 nt, Human
uccauacauuugugu

SEQ ID NO: 2318948 - RNA, 14 nt, Human
uccauagagagcaa

SEQ ID NO: 2318949 - RNA, 15 nt, Human
uccauagagagcaag

SEQ ID NO: 2318950 - RNA, 22 nt, Human
uccaucagcuuaggggcugcug

SEQ ID NO: 2318951 - RNA, 18 nt, Human
uccaucagguuccauccc

SEQ ID NO: 2318952 - RNA, 19 nt, Human
uccaucagguuccaucccg

SEQ ID NO: 2318953 - RNA, 17 nt, Human
uccaucaguuagagcug

SEQ ID NO: 2318954 - RNA, 13 nt, Human
uccaucaucaugu

SEQ ID NO: 2318955 - RNA, 18 nt, Human
uccaucaguuagagcuga

SEQ ID NO: 2318956 - RNA, 12 nt, Human
uccaucaugucc

SEQ ID NO: 2318957 - RNA, 14 nt, Human
uccaucaggccacu

SEQ ID NO: 2318958 - RNA, 15 nt, Human
uccaucagaaugaaa

SEQ ID NO: 2318959 - RNA, 14 nt, Human
uccaucaugucccc

SEQ ID NO: 2318960 - RNA, 13 nt, Human
uccaucauguccc

SEQ ID NO: 2318961 - RNA, 21 nt, Human
uccaugcguguuucugacucu

SEQ ID NO: 2318962 - RNA, 22 nt, Human
uccaugcguguuucugacucug

SEQ ID NO: 2318963 - RNA, 14 nt, Human
uccaugcugccucc

SEQ ID NO: 2318964 - RNA, 15 nt, Human
uccaugcugccucca

SEQ ID NO: 2318965 - RNA, 16 nt, Human
uccauggaaugcuuga

SEQ ID NO: 2318966 - RNA, 17 nt, Human
uccauggaaugcuugaa

SEQ ID NO: 2318967 - RNA, 18 nt, Human
uccauggaaugcuugaaa

SEQ ID NO: 2318968 - RNA, 21 nt, Human
uccauggaaugcuugaaaaau

SEQ ID NO: 2318969 - RNA, 19 nt, Human
uccaugcuuagucacugcc

SEQ ID NO: 2318970 - RNA, 20 nt, Human
uccaugcuuagucacugccu

SEQ ID NO: 2318971 - RNA, 22 nt, Human
uccaugcuuagucacugccugc

SEQ ID NO: 2318972 - RNA, 23 nt, Human
uccaugcuuagucacugccugca

SEQ ID NO: 2318973 - RNA, 15 nt, Human
uccauggaaugcuug

SEQ ID NO: 2318974 - RNA, 20 nt, Human
uccaugggccauaugaaaag

SEQ ID NO: 2318975 - RNA, 22 nt, Human
uccaugggcagagcccaaggga

SEQ ID NO: 2318976 - RNA, 18 nt, Human
uccaugggcagagcccaa

SEQ ID NO: 2318977 - RNA, 17 nt, Human
uccaugggcagagccca

SEQ ID NO: 2318978 - RNA, 16 nt, Human
uccaugggcagagccc

SEQ ID NO: 2318979 - RNA, 15 nt, Human
uccaugggcagagcc

SEQ ID NO: 2318980 - RNA, 18 nt, Human
uccaugggagaaaauaga

SEQ ID NO: 2318981 - RNA, 22 nt, Human
uccauggaaugcuugaaaaaug

SEQ ID NO: 2318982 - RNA, 23 nt, Human
uccauggaaugcuugaaaaaugu

SEQ ID NO: 2318983 - RNA, 15 nt, Human
uccauggcuuccucc

SEQ ID NO: 2318984 - RNA, 16 nt, Human
uccauggcuuccuccu

SEQ ID NO: 2318985 - RNA, 16 nt, Human
uccaggucucacgggc

SEQ ID NO: 2318986 - RNA, 15 nt, Human
uccagguaucuccag

SEQ ID NO: 2318987 - RNA, 17 nt, Human
uccagggugugugcucg

SEQ ID NO: 2318988 - RNA, 22 nt, Human
uccaggggugggacacccugug

SEQ ID NO: 2318989 - RNA, 18 nt, Human
uccaggguugaucacacu

SEQ ID NO: 2318990 - RNA, 19 nt, Human
uccagguagagggugugua

SEQ ID NO: 2318991 - RNA, 20 nt, Human
uccagguuuaagcuguuacu

SEQ ID NO: 2318992 - RNA, 18 nt, Human
uccagguaucuccaggau

SEQ ID NO: 2318993 - RNA, 16 nt, Human
uccagguaucuccagg

SEQ ID NO: 2318994 - RNA, 17 nt, Human
uccagguaucuccagga

SEQ ID NO: 2318995 - RNA, 13 nt, Human
uccagguuuuuca

SEQ ID NO: 2318996 - RNA, 14 nt, Human
uccagguuuuucaa

SEQ ID NO: 2318997 - RNA, 15 nt, Human
uccagguuuuucaau

SEQ ID NO: 2318998 - RNA, 24 nt, Human
uccagguuuuucaauuaaacggau

SEQ ID NO: 2318999 - RNA, 16 nt, Human
uccagguuuuucaauu

SEQ ID NO: 2319000 - RNA, 17 nt, Human
uccagguuuuucaauua

SEQ ID NO: 2319001 - RNA, 18 nt, Human
uccagguuuuucaauuaa

SEQ ID NO: 2319002 - RNA, 19 nt, Human
uccagguuuuucaauuaaa

SEQ ID NO: 2319003 - RNA, 20 nt, Human
uccagguuuuucaauuaaac

SEQ ID NO: 2319004 - RNA, 21 nt, Human
uccagguuuuucaauuaaacg

SEQ ID NO: 2319005 - RNA, 22 nt, Human
uccagguuuuucaauuaaacgg

SEQ ID NO: 2319006 - RNA, 23 nt, Human
uccagguuuuucaauuaaacgga

SEQ ID NO: 2319007 - RNA, 16 nt, Human
uccauaaggaauguag

SEQ ID NO: 2319008 - RNA, 12 nt, Human
uccauaaucacu

SEQ ID NO: 2319009 - RNA, 14 nt, Human
uccauaaccccacc

SEQ ID NO: 2319010 - RNA, 17 nt, Human
uccauaaccccacccuu

SEQ ID NO: 2319011 - RNA, 22 nt, Human
uccauaaucuggacuccucugu

SEQ ID NO: 2319012 - RNA, 20 nt, Human
uccaguuuuuuguuauauag

SEQ ID NO: 2319013 - RNA, 17 nt, Human
uccauaaagaagauguu

SEQ ID NO: 2319014 - RNA, 21 nt, Human
uccauaaagaagauguuuaac

SEQ ID NO: 2319015 - RNA, 13 nt, Human
uccauaaagaagc

SEQ ID NO: 2319016 - RNA, 18 nt, Human
uccauaaagaagcaauaa

SEQ ID NO: 2319017 - RNA, 20 nt, Human
uccauaaagaagcaauaaag

SEQ ID NO: 2319018 - RNA, 13 nt, Human
uccaguucccacu

SEQ ID NO: 2319019 - RNA, 18 nt, Human
uccaguuaauuacauccu

SEQ ID NO: 2319020 - RNA, 21 nt, Human
uccaguuaaaaaaaauuuuaa

SEQ ID NO: 2319021 - RNA, 22 nt, Human
uccaguuaaaaaaaauuuuaau

SEQ ID NO: 2319022 - RNA, 19 nt, Human
uccaguucaugagaaucua

SEQ ID NO: 2319023 - RNA, 18 nt, Human
uccaguucccagaaggca

SEQ ID NO: 2319024 - RNA, 16 nt, Human
uccaguucaugagaau

SEQ ID NO: 2319025 - RNA, 14 nt, Human
uccaguuaguucuc

SEQ ID NO: 2319026 - RNA, 12 nt, Human
uccccagcccag

SEQ ID NO: 2319027 - RNA, 13 nt, Human
uccccagcccaga

SEQ ID NO: 2319028 - RNA, 10 nt, Human
uccccagccc

SEQ ID NO: 2319029 - RNA, 17 nt, Human
uccccagcccagagaca

SEQ ID NO: 2319030 - RNA, 16 nt, Human
uccccagcccagagac

SEQ ID NO: 2319031 - RNA, 15 nt, Human
uccccagcccagaga

SEQ ID NO: 2319032 - RNA, 14 nt, Human
uccccagcccagag

SEQ ID NO: 2319033 - RNA, 19 nt, Human
uccccagcagguggggagg

SEQ ID NO: 2319034 - RNA, 22 nt, Human
uccccagcagggucuuuucauc

SEQ ID NO: 2319035 - RNA, 23 nt, Human
uccccagcagggucuuuucaucu

SEQ ID NO: 2319036 - RNA, 15 nt, Human
uccccagcagguggg

SEQ ID NO: 2319037 - RNA, 20 nt, Human
uccccagcauuccagccccu

SEQ ID NO: 2319038 - RNA, 13 nt, Human
uccccagcccugg

SEQ ID NO: 2319039 - RNA, 19 nt, Human
uccccagccccuagcccag

SEQ ID NO: 2319040 - RNA, 20 nt, Human
uccccagccccuagcccagg

SEQ ID NO: 2319041 - RNA, 11 nt, Human
uccccagcccc

SEQ ID NO: 2319042 - RNA, 13 nt, Human
uccccagccccua

SEQ ID NO: 2319043 - RNA, 15 nt, Human
uccccagccccuagc

SEQ ID NO: 2319044 - RNA, 16 nt, Human
uccccagccccuagcc

SEQ ID NO: 2319045 - RNA, 23 nt, Human
uccccagcccaggguucccccag

SEQ ID NO: 2319046 - RNA, 22 nt, Human
uccccagcccaggguuccccca

SEQ ID NO: 2319047 - RNA, 15 nt, Human
uccccagcccagggu

SEQ ID NO: 2319048 - RNA, 14 nt, Human
uccccagcccaggg

SEQ ID NO: 2319049 - RNA, 13 nt, Human
uccccagcccagg

SEQ ID NO: 2319050 - RNA, 21 nt, Human
uccccagccccuagcccagga

SEQ ID NO: 2319051 - RNA, 15 nt, Human
uccccagcccuggcu

SEQ ID NO: 2319052 - RNA, 18 nt, Human
uccccagcccuggcucug

SEQ ID NO: 2319053 - RNA, 14 nt, Human
uccccaggaggcca

SEQ ID NO: 2319054 - RNA, 17 nt, Human
uccccaggaggccagcc

SEQ ID NO: 2319055 - RNA, 17 nt, Human
ucccccagccccauccu

SEQ ID NO: 2319056 - RNA, 15 nt, Human
uccccaggaggccag

SEQ ID NO: 2319057 - RNA, 16 nt, Human
uccccaggaggccagc

SEQ ID NO: 2319058 - RNA, 21 nt, Human
uccccccacucuccccacacu

SEQ ID NO: 2319059 - RNA, 12 nt, Human
uccccccacucu

SEQ ID NO: 2319060 - RNA, 22 nt, Human
ucccccagccccauccucugua

SEQ ID NO: 2319061 - RNA, 20 nt, Human
ucccccagccccauccucug

SEQ ID NO: 2319062 - RNA, 21 nt, Human
ucccccagccccauccucugu

SEQ ID NO: 2319063 - RNA, 19 nt, Human
uccccagauugcaacaggc

SEQ ID NO: 2319064 - RNA, 20 nt, Human
uccccagauugcaacaggcu

SEQ ID NO: 2319065 - RNA, 22 nt, Human
uccccagauugcaacaggcugg

SEQ ID NO: 2319066 - RNA, 23 nt, Human
uccccagauugcaacaggcuggg

SEQ ID NO: 2319067 - RNA, 20 nt, Human
uccccagcaagugagagcug

SEQ ID NO: 2319068 - RNA, 21 nt, Human
uccccagcaagugagagcugg

SEQ ID NO: 2319069 - RNA, 10 nt, Human
uccccagcag

SEQ ID NO: 2319070 - RNA, 21 nt, Human
uccccagcagggucuuuucau

SEQ ID NO: 2319071 - RNA, 18 nt, Human
uccccagaguuccccaug

SEQ ID NO: 2319072 - RNA, 20 nt, Human
uccccagaguuccccaugca

SEQ ID NO: 2319073 - RNA, 12 nt, Human
uccccagagcac

SEQ ID NO: 2319074 - RNA, 21 nt, Human
uccccagagcacuggguugca

SEQ ID NO: 2319075 - RNA, 19 nt, Human
uccccagaguccucuauga

SEQ ID NO: 2319076 - RNA, 17 nt, Human
uccccagaguuccccau

SEQ ID NO: 2319077 - RNA, 22 nt, Human
uccccagcaagugagagcuggg

SEQ ID NO: 2319078 - RNA, 20 nt, Human
ucccaugagccucagcaucc

SEQ ID NO: 2319079 - RNA, 14 nt, Human
ucccaugacccagg

SEQ ID NO: 2319080 - RNA, 22 nt, Human
ucccauguagcccccuggccuc

SEQ ID NO: 2319081 - RNA, 22 nt, Human
ucccauguauuuaucucuauuu

SEQ ID NO: 2319082 - RNA, 16 nt, Human
ucccauuagcaaaaau

SEQ ID NO: 2319083 - RNA, 21 nt, Human
ucccauuaggacaaucagucc

SEQ ID NO: 2319084 - RNA, 23 nt, Human
ucccauuaggacaaucagucccc

SEQ ID NO: 2319085 - RNA, 10 nt, Human
ucccaugugg

SEQ ID NO: 2319086 - RNA, 13 nt, Human
uccccagauugca

SEQ ID NO: 2319087 - RNA, 18 nt, Human
uccccagauugcaacagg

SEQ ID NO: 2319088 - RNA, 23 nt, Human
uccccagagaaaggggagcccac

SEQ ID NO: 2319089 - RNA, 22 nt, Human
uccccagagaaaggggagccca

SEQ ID NO: 2319090 - RNA, 20 nt, Human
uccauuaacuuagcaugugu

SEQ ID NO: 2319091 - RNA, 13 nt, Human
uccauuaucaugu

SEQ ID NO: 2319092 - RNA, 14 nt, Human
uccauuaggauuug

SEQ ID NO: 2319093 - RNA, 14 nt, Human
uccauuaucaugug

SEQ ID NO: 2319094 - RNA, 15 nt, Human
uccauuaucaugugu

SEQ ID NO: 2319095 - RNA, 16 nt, Human
uccauuaucaugugua

SEQ ID NO: 2319096 - RNA, 17 nt, Human
uccauuaucauguguaa

SEQ ID NO: 2319097 - RNA, 22 nt, Human
uccauuaacuuagcauguguug

SEQ ID NO: 2319098 - RNA, 19 nt, Human
uccauguuuguaaaacuac

SEQ ID NO: 2319099 - RNA, 13 nt, Human
uccauguuuguaa

SEQ ID NO: 2319100 - RNA, 16 nt, Human
uccauguuuguaaaac

SEQ ID NO: 2319101 - RNA, 14 nt, Human
uccauuauuuauau

SEQ ID NO: 2319102 - RNA, 12 nt, Human
uccauuauuuau

SEQ ID NO: 2319103 - RNA, 11 nt, Human
uccauuauuua

SEQ ID NO: 2319104 - RNA, 15 nt, Human
uccauuaugauucuu

SEQ ID NO: 2319105 - RNA, 20 nt, Human
uccauuaucauguguaauca

SEQ ID NO: 2319106 - RNA, 22 nt, Human
ucccaccucucucacuccuuga

SEQ ID NO: 2319107 - RNA, 20 nt, Human
uccaugugggcuaguugggc

SEQ ID NO: 2319108 - RNA, 14 nt, Human
uccaugugcccccu

SEQ ID NO: 2319109 - RNA, 20 nt, Human
uccauggcuuccuccucccu

SEQ ID NO: 2319110 - RNA, 23 nt, Human
uccaugggcagagcccaagggaa

SEQ ID NO: 2319111 - RNA, 19 nt, Human
uccaugugcccccucuacc

SEQ ID NO: 2319112 - RNA, 19 nt, Human
uccauguuaguuuuuacuu

SEQ ID NO: 2319113 - RNA, 12 nt, Human
uccauguugcug

SEQ ID NO: 2319114 - RNA, 18 nt, Human
uccauguuaguuuuuacu

SEQ ID NO: 2319115 - RNA, 18 nt, Human
uccaugugugugcaagug

SEQ ID NO: 2319116 - RNA, 14 nt, Human
uccauguugcugcc

SEQ ID NO: 2319117 - RNA, 15 nt, Human
uccauguugcugcca

SEQ ID NO: 2319118 - RNA, 17 nt, Human
uccauguugcugccaac

SEQ ID NO: 2319119 - RNA, 14 nt, Human
uccaugugugugca

SEQ ID NO: 2319120 - RNA, 13 nt, Human
uccaugugugugc

SEQ ID NO: 2319121 - RNA, 11 nt, Human
uccaugugugu

SEQ ID NO: 2319122 - RNA, 17 nt, Human
uccauguguggacucaa

SEQ ID NO: 2319123 - RNA, 13 nt, Human
uccauguggagaa

SEQ ID NO: 2319124 - RNA, 22 nt, Human
uccauguggagaaaggagugaa

SEQ ID NO: 2319125 - RNA, 18 nt, Human
uccaugugguucuucaaa

SEQ ID NO: 2319126 - RNA, 12 nt, Human
uccauuccagaa

SEQ ID NO: 2319127 - RNA, 11 nt, Human
ucccaccucug

SEQ ID NO: 2319128 - RNA, 13 nt, Human
ucccaccucugug

SEQ ID NO: 2319129 - RNA, 15 nt, Human
uccauuauuuauauu

SEQ ID NO: 2319130 - RNA, 22 nt, Human
uccauucacaguucuuugggcc

SEQ ID NO: 2319131 - RNA, 18 nt, Human
ucccaccucugugaccuc

SEQ ID NO: 2319132 - RNA, 20 nt, Human
ucccaccucugugaccucag

SEQ ID NO: 2319133 - RNA, 21 nt, Human
ucccaccucugugaccucagg

SEQ ID NO: 2319134 - RNA, 22 nt, Human
ucccaccucugugaccucaggc

SEQ ID NO: 2319135 - RNA, 13 nt, Human
ucccaccuuggcu

SEQ ID NO: 2319136 - RNA, 22 nt, Human
ucccaccucuucucuuccugua

SEQ ID NO: 2319137 - RNA, 16 nt, Human
ucccaccuuggcugca

SEQ ID NO: 2319138 - RNA, 17 nt, Human
ucccaccuuggcugcag

SEQ ID NO: 2319139 - RNA, 20 nt, Human
ucccagcugugcucuggaca

SEQ ID NO: 2319140 - RNA, 18 nt, Human
ucccaccuuggcugcagg

SEQ ID NO: 2319141 - RNA, 15 nt, Human
ucccaucuuccaagg

SEQ ID NO: 2319142 - RNA, 16 nt, Human
ucccaggcgccccuuc

SEQ ID NO: 2319143 - RNA, 21 nt, Human
ucccaucugugaaaggaaaga

SEQ ID NO: 2319144 - RNA, 18 nt, Human
ucccaggccaguaaggga

SEQ ID NO: 2319145 - RNA, 18 nt, Human
ucccaugagccucagcau

SEQ ID NO: 2319146 - RNA, 19 nt, Human
ucccaugagccucagcauc

SEQ ID NO: 2319147 - RNA, 14 nt, Human
ucccaugaacacac

SEQ ID NO: 2319148 - RNA, 16 nt, Human
ucccaugaacacacug

SEQ ID NO: 2319149 - RNA, 17 nt, Human
ucccaugaacacacugu

SEQ ID NO: 2319150 - RNA, 19 nt, Human
ucccaugaacacacugugu

SEQ ID NO: 2319151 - RNA, 14 nt, Human
ucccaugacccacc

SEQ ID NO: 2319152 - RNA, 16 nt, Human
ucccaugacccacccc

SEQ ID NO: 2319153 - RNA, 17 nt, Human
ucccaugacccaccccu

SEQ ID NO: 2319154 - RNA, 18 nt, Human
ucccaugacccaccccug

SEQ ID NO: 2319155 - RNA, 20 nt, Human
ucccaugacccaccccugug

SEQ ID NO: 2319156 - RNA, 21 nt, Human
ucccaugacccaccccugugc

SEQ ID NO: 2319157 - RNA, 22 nt, Human
ucccaugacccaccccugugcu

SEQ ID NO: 2319158 - RNA, 24 nt, Human
ucccaugacccaccccugugcucc

SEQ ID NO: 2319159 - RNA, 23 nt, Human
ucccagcugugcucuggacaggc

SEQ ID NO: 2319160 - RNA, 16 nt, Human
ucccaggaacugggcc

SEQ ID NO: 2319161 - RNA, 11 nt, Human
ucccaggaacu

SEQ ID NO: 2319162 - RNA, 21 nt, Human
ucccagcugugcucuggacag

SEQ ID NO: 2319163 - RNA, 22 nt, Human
ucccagcugugcucuggacagg

SEQ ID NO: 2319164 - RNA, 21 nt, Human
ucccaggccaggcuccuuccu

SEQ ID NO: 2319165 - RNA, 15 nt, Human
ucccaggccaggcuc

SEQ ID NO: 2319166 - RNA, 12 nt, Human
ucccaggacccu

SEQ ID NO: 2319167 - RNA, 23 nt, Human
ucccaggcauuccccaggaggcc

SEQ ID NO: 2319168 - RNA, 24 nt, Human
ucccaggcauuccccaggaggcca

SEQ ID NO: 2319169 - RNA, 11 nt, Human
ucccaggaccc

SEQ ID NO: 2319170 - RNA, 23 nt, Human
ucccaggacaccacacccagccu

SEQ ID NO: 2319171 - RNA, 15 nt, Human
ucccaggacaccaca

SEQ ID NO: 2319172 - RNA, 23 nt, Human
ucccaggaacaaucgauggccuu

SEQ ID NO: 2319173 - RNA, 18 nt, Human
ucccaggacaccacaccc

SEQ ID NO: 2319174 - RNA, 19 nt, Human
ucccaggacaccacaccca

SEQ ID NO: 2319175 - RNA, 21 nt, Human
ucccaggacaccacacccagc

SEQ ID NO: 2319176 - RNA, 22 nt, Human
ucccaggacaccacacccagcc

SEQ ID NO: 2319177 - RNA, 23 nt, Human
uccugagccagugucaggaggaa

SEQ ID NO: 2319178 - RNA, 23 nt, Human
uccugagaauaagaaaguuucac

SEQ ID NO: 2319179 - RNA, 16 nt, Human
uccugagaccacagag

SEQ ID NO: 2319180 - RNA, 22 nt, Human
uccugagcuuggccagaagggg

SEQ ID NO: 2319181 - RNA, 16 nt, Human
uccugaggacagcugu

SEQ ID NO: 2319182 - RNA, 18 nt, Human
uccugaggacagcugucc

SEQ ID NO: 2319183 - RNA, 20 nt, Human
uccugagcuuggccagaagg

SEQ ID NO: 2319184 - RNA, 19 nt, Human
uccugagcuuggccagaag

SEQ ID NO: 2319185 - RNA, 16 nt, Human
uccugagcuuggccag

SEQ ID NO: 2319186 - RNA, 15 nt, Human
uccugagcuuggcca

SEQ ID NO: 2319187 - RNA, 12 nt, Human
uccugagcuugg

SEQ ID NO: 2319188 - RNA, 16 nt, Human
uccugacucugccccc

SEQ ID NO: 2319189 - RNA, 17 nt, Human
uccugacucugcccccu

SEQ ID NO: 2319190 - RNA, 22 nt, Human
uccugacucugcccccugcugg

SEQ ID NO: 2319191 - RNA, 23 nt, Human
uccugacucugcccccugcuggc

SEQ ID NO: 2319192 - RNA, 19 nt, Human
uccugacucaacauguuac

SEQ ID NO: 2319193 - RNA, 14 nt, Human
uccugacucugccc

SEQ ID NO: 2319194 - RNA, 15 nt, Human
uccugacucugcccc

SEQ ID NO: 2319195 - RNA, 20 nt, Human
uccucuuaaaaaauaaaaac

SEQ ID NO: 2319196 - RNA, 13 nt, Human
uccucuuauuugc

SEQ ID NO: 2319197 - RNA, 24 nt, Human
uccugagaaaaaagguuccgcuug

SEQ ID NO: 2319198 - RNA, 19 nt, Human
uccugagaaaaaagguucc

SEQ ID NO: 2319199 - RNA, 16 nt, Human
uccugacuucaggggc

SEQ ID NO: 2319200 - RNA, 19 nt, Human
uccugacuucaggggcugc

SEQ ID NO: 2319201 - RNA, 22 nt, Human
uccugacuucaggggcugcccg

SEQ ID NO: 2319202 - RNA, 21 nt, Human
uccugacuucaggggcugccc

SEQ ID NO: 2319203 - RNA, 15 nt, Human
uccuccucccccaga

SEQ ID NO: 2319204 - RNA, 14 nt, Human
uccuccucccugca

SEQ ID NO: 2319205 - RNA, 13 nt, Human
uccuccucccugc

SEQ ID NO: 2319206 - RNA, 18 nt, Human
uccuccucccugcaucug

SEQ ID NO: 2319207 - RNA, 17 nt, Human
uccuccucccugcaucu

SEQ ID NO: 2319208 - RNA, 13 nt, Human
uccuccucuguga

SEQ ID NO: 2319209 - RNA, 11 nt, Human
uccuccucugu

SEQ ID NO: 2319210 - RNA, 20 nt, Human
uccucccacccggcugcaga

SEQ ID NO: 2319211 - RNA, 21 nt, Human
uccucccacccggcugcagag

SEQ ID NO: 2319212 - RNA, 19 nt, Human
uccucccaaguggugccua

SEQ ID NO: 2319213 - RNA, 14 nt, Human
uccuccucccaccc

SEQ ID NO: 2319214 - RNA, 20 nt, Human
uccuccucccacccggcugc

SEQ ID NO: 2319215 - RNA, 16 nt, Human
uccucuguccagggcc

SEQ ID NO: 2319216 - RNA, 14 nt, Human
uccucuguccaggg

SEQ ID NO: 2319217 - RNA, 22 nt, Human
uccucuguccaggcacugcugc

SEQ ID NO: 2319218 - RNA, 12 nt, Human
uccuccucugug

SEQ ID NO: 2319219 - RNA, 23 nt, Human
uccucuguccagggcccugagcu

SEQ ID NO: 2319220 - RNA, 12 nt, Human
uccucugucugc

SEQ ID NO: 2319221 - RNA, 14 nt, Human
uccucugucugccc

SEQ ID NO: 2319222 - RNA, 22 nt, Human
uccucuguuucuccuucugaaa

SEQ ID NO: 2319223 - RNA, 12 nt, Human
uccucugugaag

SEQ ID NO: 2319224 - RNA, 20 nt, Human
uccucugugaccaaugucuu

SEQ ID NO: 2319225 - RNA, 21 nt, Human
uccucugugaccaaugucuug

SEQ ID NO: 2319226 - RNA, 19 nt, Human
uccucugugaccaaugucu

SEQ ID NO: 2319227 - RNA, 15 nt, Human
uccucugucugcccu

SEQ ID NO: 2319228 - RNA, 18 nt, Human
uccucugucugcccuuca

SEQ ID NO: 2319229 - RNA, 17 nt, Human
uccugcccaguccccca

SEQ ID NO: 2319230 - RNA, 21 nt, Human
uccugcccagucccccaaccc

SEQ ID NO: 2319231 - RNA, 13 nt, Human
uccugcccagucc

SEQ ID NO: 2319232 - RNA, 14 nt, Human
uccugcccaguccc

SEQ ID NO: 2319233 - RNA, 15 nt, Human
uccugcccagucccc

SEQ ID NO: 2319234 - RNA, 16 nt, Human
uccugcccaguccccc

SEQ ID NO: 2319235 - RNA, 15 nt, Human
uccugcccccugaaa

SEQ ID NO: 2319236 - RNA, 14 nt, Human
uccugccccaggcc

SEQ ID NO: 2319237 - RNA, 15 nt, Human
uccugccccaggccu

SEQ ID NO: 2319238 - RNA, 23 nt, Human
uccugcccaggagagccagcccu

SEQ ID NO: 2319239 - RNA, 22 nt, Human
uccugcccaggagagccagccc

SEQ ID NO: 2319240 - RNA, 19 nt, Human
uccugcccaggagagccag

SEQ ID NO: 2319241 - RNA, 18 nt, Human
uccugcccaggagagcca

SEQ ID NO: 2319242 - RNA, 16 nt, Human
uccugcccaggagagc

SEQ ID NO: 2319243 - RNA, 14 nt, Human
uccugcccaggaga

SEQ ID NO: 2319244 - RNA, 13 nt, Human
uccugcccaggag

SEQ ID NO: 2319245 - RNA, 12 nt, Human
uccugcccagga

SEQ ID NO: 2319246 - RNA, 20 nt, Human
uccugccaccuggggcaguc

SEQ ID NO: 2319247 - RNA, 18 nt, Human
uccugccaccuggggcag

SEQ ID NO: 2319248 - RNA, 17 nt, Human
uccugccaguguggaac

SEQ ID NO: 2319249 - RNA, 10 nt, Human
uccugcccug

SEQ ID NO: 2319250 - RNA, 16 nt, Human
uccugccccuguucuc

SEQ ID NO: 2319251 - RNA, 14 nt, Human
uccugccccuguuc

SEQ ID NO: 2319252 - RNA, 12 nt, Human
uccugcccuaca

SEQ ID NO: 2319253 - RNA, 18 nt, Human
uccugccccugagcccau

SEQ ID NO: 2319254 - RNA, 17 nt, Human
uccugccccugagccca

SEQ ID NO: 2319255 - RNA, 17 nt, Human
uccugcccccugaaacu

SEQ ID NO: 2319256 - RNA, 19 nt, Human
uccugcccccugaaacuua

SEQ ID NO: 2319257 - RNA, 21 nt, Human
uccugcccccugaaacuuauu

SEQ ID NO: 2319258 - RNA, 22 nt, Human
uccugcccccugaaacuuauuu

SEQ ID NO: 2319259 - RNA, 14 nt, Human
uccugccaggcaug

SEQ ID NO: 2319260 - RNA, 13 nt, Human
uccugccaggcau

SEQ ID NO: 2319261 - RNA, 13 nt, Human
uccugccaccugc

SEQ ID NO: 2319262 - RNA, 14 nt, Human
uccugccaccaguc

SEQ ID NO: 2319263 - RNA, 16 nt, Human
uccugccaccagucac

SEQ ID NO: 2319264 - RNA, 17 nt, Human
uccugccaccagucacu

SEQ ID NO: 2319265 - RNA, 22 nt, Human
uccugccaccagucacuguccc

SEQ ID NO: 2319266 - RNA, 16 nt, Human
uccugccaccacgccc

SEQ ID NO: 2319267 - RNA, 11 nt, Human
uccugccacca

SEQ ID NO: 2319268 - RNA, 11 nt, Human
uccugccaaaa

SEQ ID NO: 2319269 - RNA, 16 nt, Human
uccugcauuugugaaa

SEQ ID NO: 2319270 - RNA, 21 nt, Human
uccugaggcuccacuuggucu

SEQ ID NO: 2319271 - RNA, 19 nt, Human
uccugaggacagcuguccu

SEQ ID NO: 2319272 - RNA, 20 nt, Human
uccugaggcuccacuugguc

SEQ ID NO: 2319273 - RNA, 19 nt, Human
uccugaggcuccacuuggu

SEQ ID NO: 2319274 - RNA, 18 nt, Human
uccugccgcagagcuggc

SEQ ID NO: 2319275 - RNA, 20 nt, Human
uccugccgcagagcuggccg

SEQ ID NO: 2319276 - RNA, 13 nt, Human
uccugccgcagag

SEQ ID NO: 2319277 - RNA, 15 nt, Human
uccugccgcagagcu

SEQ ID NO: 2319278 - RNA, 16 nt, Human
uccugccgcagagcug

SEQ ID NO: 2319279 - RNA, 17 nt, Human
uccugccgcagagcugg

SEQ ID NO: 2319280 - RNA, 20 nt, Human
uccugcccuuaccugccagg

SEQ ID NO: 2319281 - RNA, 18 nt, Human
uccugcccuguuguguau

SEQ ID NO: 2319282 - RNA, 15 nt, Human
uccugcccuuccuca

SEQ ID NO: 2319283 - RNA, 16 nt, Human
uccugcccuuccucag

SEQ ID NO: 2319284 - RNA, 17 nt, Human
uccugcccuuccucagu

SEQ ID NO: 2319285 - RNA, 19 nt, Human
uccugcccuuccucaguuu

SEQ ID NO: 2319286 - RNA, 14 nt, Human
uccugccgacuccu

SEQ ID NO: 2319287 - RNA, 15 nt, Human
uccugccgacuccug

SEQ ID NO: 2319288 - RNA, 16 nt, Human
uccugccgacuccugg

SEQ ID NO: 2319289 - RNA, 15 nt, Human
uccugcccugggagg

SEQ ID NO: 2319290 - RNA, 14 nt, Human
uccugcccugggag

SEQ ID NO: 2319291 - RNA, 12 nt, Human
uccugcccuggg

SEQ ID NO: 2319292 - RNA, 11 nt, Human
uccugcccugg

SEQ ID NO: 2319293 - RNA, 12 nt, Human
uccugcccuguu

SEQ ID NO: 2319294 - RNA, 14 nt, Human
uccugcccuacaga

SEQ ID NO: 2319295 - RNA, 23 nt, Human
uccugcccuacagaggucucugc

SEQ ID NO: 2319296 - RNA, 21 nt, Human
uccugcccugggaggcaguga

SEQ ID NO: 2319297 - RNA, 17 nt, Human
uccugcccuuaccugcc

SEQ ID NO: 2319298 - RNA, 18 nt, Human
uccuggagccuuugaaua

SEQ ID NO: 2319299 - RNA, 22 nt, Human
uccuggagcccagaggagggca

SEQ ID NO: 2319300 - RNA, 14 nt, Human
uccuggaggcccag

SEQ ID NO: 2319301 - RNA, 13 nt, Human
uccuggaggccca

SEQ ID NO: 2319302 - RNA, 15 nt, Human
uccuggagcccagag

SEQ ID NO: 2319303 - RNA, 18 nt, Human
uccuggagcccagaggag

SEQ ID NO: 2319304 - RNA, 18 nt, Human
uccuggagcagaccaccc

SEQ ID NO: 2319305 - RNA, 19 nt, Human
uccuggagcagaccacccc

SEQ ID NO: 2319306 - RNA, 14 nt, Human
uccuggaguucugg

SEQ ID NO: 2319307 - RNA, 21 nt, Human
uccuggagggaagcacugccu

SEQ ID NO: 2319308 - RNA, 18 nt, Human
uccuggaggcccaguuca

SEQ ID NO: 2319309 - RNA, 15 nt, Human
uccuggaggcccagu

SEQ ID NO: 2319310 - RNA, 19 nt, Human
uccuggacauuuuuucagu

SEQ ID NO: 2319311 - RNA, 22 nt, Human
uccuggacaugaagauucuuuc

SEQ ID NO: 2319312 - RNA, 22 nt, Human
uccuggacauccucuucugcuu

SEQ ID NO: 2319313 - RNA, 14 nt, Human
uccuggacauuuuu

SEQ ID NO: 2319314 - RNA, 21 nt, Human
uccuggacauccucuucugcu

SEQ ID NO: 2319315 - RNA, 21 nt, Human
uccuggacaugaagauucuuu

SEQ ID NO: 2319316 - RNA, 19 nt, Human
uccugccuaaggcugaacu

SEQ ID NO: 2319317 - RNA, 16 nt, Human
uccugccuaaggcuga

SEQ ID NO: 2319318 - RNA, 17 nt, Human
uccuguagcaucuucug

SEQ ID NO: 2319319 - RNA, 19 nt, Human
uccuguagcaucuucugga

SEQ ID NO: 2319320 - RNA, 21 nt, Human
uccuguagcaucuucuggagu

SEQ ID NO: 2319321 - RNA, 22 nt, Human
uccuguagcaucuucuggaguc

SEQ ID NO: 2319322 - RNA, 16 nt, Human
uccuguagcucucccu

SEQ ID NO: 2319323 - RNA, 16 nt, Human
uccugucugccagcca

SEQ ID NO: 2319324 - RNA, 14 nt, Human
uccugucugccagc

SEQ ID NO: 2319325 - RNA, 13 nt, Human
uccugucugccag

SEQ ID NO: 2319326 - RNA, 12 nt, Human
uccugucugcca

SEQ ID NO: 2319327 - RNA, 21 nt, Human
uccuguagccuucuguaggaa

SEQ ID NO: 2319328 - RNA, 22 nt, Human
uccuguagccuucuguaggaau

SEQ ID NO: 2319329 - RNA, 15 nt, Human
uccugucuaacugcu

SEQ ID NO: 2319330 - RNA, 15 nt, Human
uccugucucuggccu

SEQ ID NO: 2319331 - RNA, 23 nt, Human
uccuguagaccuagggaggaccu

SEQ ID NO: 2319332 - RNA, 21 nt, Human
uccuguagagguuuuguuguu

SEQ ID NO: 2319333 - RNA, 14 nt, Human
uccuguagcaucuu

SEQ ID NO: 2319334 - RNA, 15 nt, Human
uccuguagcaucuuc

SEQ ID NO: 2319335 - RNA, 20 nt, Human
uccuguagaccuagggagga

SEQ ID NO: 2319336 - RNA, 16 nt, Human
uccuggccuggcuucu

SEQ ID NO: 2319337 - RNA, 16 nt, Human
uccuggcccucugugu

SEQ ID NO: 2319338 - RNA, 23 nt, Human
uccuggccuggcacaucagaaag

SEQ ID NO: 2319339 - RNA, 13 nt, Human
uccuggccuggca

SEQ ID NO: 2319340 - RNA, 13 nt, Human
uccuguagcccua

SEQ ID NO: 2319341 - RNA, 11 nt, Human
uccuguagccc

SEQ ID NO: 2319342 - RNA, 12 nt, Human
uccuggccucaa

SEQ ID NO: 2319343 - RNA, 18 nt, Human
uccuggcccaucagugua

SEQ ID NO: 2319344 - RNA, 17 nt, Human
uccuggcccaucagugu

SEQ ID NO: 2319345 - RNA, 13 nt, Human
uccuggcccucug

SEQ ID NO: 2319346 - RNA, 11 nt, Human
uccuggcccau

SEQ ID NO: 2319347 - RNA, 13 nt, Human
uccuggcccauca

SEQ ID NO: 2319348 - RNA, 14 nt, Human
uccuggcccaucag

SEQ ID NO: 2319349 - RNA, 23 nt, Human
uccuggcacccggccccugcugg

SEQ ID NO: 2319350 - RNA, 17 nt, Human
uccuggcaauagucaaa

SEQ ID NO: 2319351 - RNA, 13 nt, Human
uccuggcacugcu

SEQ ID NO: 2319352 - RNA, 16 nt, Human
uccuggcacugcuucc

SEQ ID NO: 2319353 - RNA, 15 nt, Human
uccuacccugcgccc

SEQ ID NO: 2319354 - RNA, 18 nt, Human
uccuaccccucccagcug

SEQ ID NO: 2319355 - RNA, 17 nt, Human
uccuacccucgggccca

SEQ ID NO: 2319356 - RNA, 21 nt, Human
uccuacccucgggcccaccug

SEQ ID NO: 2319357 - RNA, 18 nt, Human
uccuagucucccucacag

SEQ ID NO: 2319358 - RNA, 20 nt, Human
uccuacauuaauuaucuagu

SEQ ID NO: 2319359 - RNA, 21 nt, Human
uccuaccccaauuccuuguag

SEQ ID NO: 2319360 - RNA, 12 nt, Human
uccuaccccucc

SEQ ID NO: 2319361 - RNA, 13 nt, Human
uccuaccccuccc

SEQ ID NO: 2319362 - RNA, 14 nt, Human
uccuaccccuccca

SEQ ID NO: 2319363 - RNA, 15 nt, Human
uccuaccccucccag

SEQ ID NO: 2319364 - RNA, 16 nt, Human
uccuaccccucccagc

SEQ ID NO: 2319365 - RNA, 17 nt, Human
uccuaccccucccagcu

SEQ ID NO: 2319366 - RNA, 23 nt, Human
uccuagugaaagaggcagcuuga

SEQ ID NO: 2319367 - RNA, 14 nt, Human
uccuagugaaagag

SEQ ID NO: 2319368 - RNA, 22 nt, Human
uccuagugcuuuccuuuuuuaa

SEQ ID NO: 2319369 - RNA, 23 nt, Human
uccuagucucuaucauuaaaguu

SEQ ID NO: 2319370 - RNA, 12 nt, Human
uccuaguuccac

SEQ ID NO: 2319371 - RNA, 23 nt, Human
uccuauauuguuuucaguguaca

SEQ ID NO: 2319372 - RNA, 17 nt, Human
uccuaucaccuccccuc

SEQ ID NO: 2319373 - RNA, 16 nt, Human
uccuaucaccuccccu

SEQ ID NO: 2319374 - RNA, 14 nt, Human
uccuaucaccuccc

SEQ ID NO: 2319375 - RNA, 20 nt, Human
uccuaucaagccaguacgug

SEQ ID NO: 2319376 - RNA, 19 nt, Human
uccuaucaccuauuuccau

SEQ ID NO: 2319377 - RNA, 21 nt, Human
uccuauauuguuuucagugua

SEQ ID NO: 2319378 - RNA, 19 nt, Human
uccuacaagagcagccugu

SEQ ID NO: 2319379 - RNA, 18 nt, Human
uccuaaggacacacuaau

SEQ ID NO: 2319380 - RNA, 16 nt, Human
uccuaaggacacacua

SEQ ID NO: 2319381 - RNA, 17 nt, Human
uccuaaggacacacuaa

SEQ ID NO: 2319382 - RNA, 12 nt, Human
uccuaaggacac

SEQ ID NO: 2319383 - RNA, 23 nt, Human
uccuacaagagcagccuguggca

SEQ ID NO: 2319384 - RNA, 22 nt, Human
uccuacaagagcagccuguggc

SEQ ID NO: 2319385 - RNA, 20 nt, Human
uccuacaagagcagccugug

SEQ ID NO: 2319386 - RNA, 17 nt, Human
uccuacacccuuggacu

SEQ ID NO: 2319387 - RNA, 18 nt, Human
uccuacacccuuggacuu

SEQ ID NO: 2319388 - RNA, 20 nt, Human
uccuacacccuuggacuuga

SEQ ID NO: 2319389 - RNA, 15 nt, Human
uccuacaccuaacuc

SEQ ID NO: 2319390 - RNA, 16 nt, Human
uccuacaccuaacuca

SEQ ID NO: 2319391 - RNA, 16 nt, Human
uccuacagauagucaa

SEQ ID NO: 2319392 - RNA, 17 nt, Human
uccuacagccccuuuuu

SEQ ID NO: 2319393 - RNA, 13 nt, Human
uccuacagccccu

SEQ ID NO: 2319394 - RNA, 21 nt, Human
uccuacaguuggaaauccauc

SEQ ID NO: 2319395 - RNA, 23 nt, Human
uccuacaguuggaaauccaucca

SEQ ID NO: 2319396 - RNA, 14 nt, Human
uccuccaagccagc

SEQ ID NO: 2319397 - RNA, 12 nt, Human
uccuccaagcca

SEQ ID NO: 2319398 - RNA, 21 nt, Human
uccuccaagacacuguggacu

SEQ ID NO: 2319399 - RNA, 15 nt, Human
uccuccacauccuuu

SEQ ID NO: 2319400 - RNA, 16 nt, Human
uccuccacauccuuuc

SEQ ID NO: 2319401 - RNA, 22 nt, Human
uccuccaacaccaagcacagca

SEQ ID NO: 2319402 - RNA, 17 nt, Human
uccuccaagaaucuauc

SEQ ID NO: 2319403 - RNA, 20 nt, Human
uccuccaagacacuguggac

SEQ ID NO: 2319404 - RNA, 17 nt, Human
uccuccaacaccaagca

SEQ ID NO: 2319405 - RNA, 18 nt, Human
uccuccaaaggcccccua

SEQ ID NO: 2319406 - RNA, 23 nt, Human
uccuccaaaggcccccuacgcca

SEQ ID NO: 2319407 - RNA, 19 nt, Human
uccuccacguucugcucau

SEQ ID NO: 2319408 - RNA, 20 nt, Human
uccuccaccugccguggacu

SEQ ID NO: 2319409 - RNA, 18 nt, Human
uccuccaccgccauggcu

SEQ ID NO: 2319410 - RNA, 21 nt, Human
uccuccaccgccauggcuucc

SEQ ID NO: 2319411 - RNA, 22 nt, Human
uccuccaccgccauggcuucca

SEQ ID NO: 2319412 - RNA, 23 nt, Human
uccuccaccgccauggcuuccaa

SEQ ID NO: 2319413 - RNA, 23 nt, Human
uccuccacauccuuucuaaacaa

SEQ ID NO: 2319414 - RNA, 18 nt, Human
uccucauuagcauuuugc

SEQ ID NO: 2319415 - RNA, 17 nt, Human
uccuaucagaaguuucu

SEQ ID NO: 2319416 - RNA, 23 nt, Human
uccuccaaaggaagucuaggagc

SEQ ID NO: 2319417 - RNA, 17 nt, Human
uccuccaaaggcccccu

SEQ ID NO: 2319418 - RNA, 23 nt, Human
uccucauuugggguagcuagagg

SEQ ID NO: 2319419 - RNA, 21 nt, Human
uccucauuugggguagcuaga

SEQ ID NO: 2319420 - RNA, 19 nt, Human
uccucauuugggguagcua

SEQ ID NO: 2319421 - RNA, 14 nt, Human
uccucauuccugaa

SEQ ID NO: 2319422 - RNA, 19 nt, Human
uccuaucaccuccccuccu

SEQ ID NO: 2319423 - RNA, 17 nt, Human
uccuccaucgcaguguu

SEQ ID NO: 2319424 - RNA, 16 nt, Human
uccuccaucuccaaga

SEQ ID NO: 2319425 - RNA, 16 nt, Human
uccuccauacucagga

SEQ ID NO: 2319426 - RNA, 17 nt, Human
uccucccaaguggugcc

SEQ ID NO: 2319427 - RNA, 19 nt, Human
uccuccaucuccaagaaug

SEQ ID NO: 2319428 - RNA, 12 nt, Human
uccuccauggga

SEQ ID NO: 2319429 - RNA, 21 nt, Human
uccucccaauuucagacuccc

SEQ ID NO: 2319430 - RNA, 20 nt, Human
uccucccaauuucagacucc

SEQ ID NO: 2319431 - RNA, 12 nt, Human
uccucccaccuc

SEQ ID NO: 2319432 - RNA, 21 nt, Human
uccuccuccaaaggcccccua

SEQ ID NO: 2319433 - RNA, 21 nt, Human
uccuccagggaugaucaacag

SEQ ID NO: 2319434 - RNA, 14 nt, Human
uccuccagcuucug

SEQ ID NO: 2319435 - RNA, 13 nt, Human
uccuccagcuucu

SEQ ID NO: 2319436 - RNA, 10 nt, Human
uccuccagcu

SEQ ID NO: 2319437 - RNA, 23 nt, Human
uccuccagggccacgugccaggc

SEQ ID NO: 2319438 - RNA, 20 nt, Human
uccuccagggccacgugcca

SEQ ID NO: 2319439 - RNA, 19 nt, Human
uccuccagggccacgugcc

SEQ ID NO: 2319440 - RNA, 13 nt, Human
uccuccagggcca

SEQ ID NO: 2319441 - RNA, 10 nt, Human
uccuccaggu

SEQ ID NO: 2319442 - RNA, 22 nt, Human
ucccccugggcucugccccagc

SEQ ID NO: 2319443 - RNA, 20 nt, Human
ucccccugggcucugcccca

SEQ ID NO: 2319444 - RNA, 15 nt, Human
ucccccugggcucug

SEQ ID NO: 2319445 - RNA, 14 nt, Human
ucccccugggcucu

SEQ ID NO: 2319446 - RNA, 12 nt, Human
ucccccugggcu

SEQ ID NO: 2319447 - RNA, 14 nt, Human
ucccccccggggcu

SEQ ID NO: 2319448 - RNA, 18 nt, Human
ucccccccggggcugggu

SEQ ID NO: 2319449 - RNA, 23 nt, Human
uccccccacugcaggccccgcuu

SEQ ID NO: 2319450 - RNA, 16 nt, Human
uccccccccccuccaa

SEQ ID NO: 2319451 - RNA, 16 nt, Human
uccccccccuguauag

SEQ ID NO: 2319452 - RNA, 17 nt, Human
uccccccccuguauagu

SEQ ID NO: 2319453 - RNA, 19 nt, Human
uccccccacugcaggcccc

SEQ ID NO: 2319454 - RNA, 18 nt, Human
uccccccacugcaggccc

SEQ ID NO: 2319455 - RNA, 13 nt, Human
uccccccacugca

SEQ ID NO: 2319456 - RNA, 12 nt, Human
uccccccacugc

SEQ ID NO: 2319457 - RNA, 12 nt, Human
uccccccaucuu

SEQ ID NO: 2319458 - RNA, 15 nt, Human
uccccccaucuugcu

SEQ ID NO: 2319459 - RNA, 18 nt, Human
ucccccccaugcacugug

SEQ ID NO: 2319460 - RNA, 17 nt, Human
ucccccccaugcacugu

SEQ ID NO: 2319461 - RNA, 13 nt, Human
ucccccccaugca

SEQ ID NO: 2319462 - RNA, 22 nt, Human
uccccccaucuugcuucccuaa

SEQ ID NO: 2319463 - RNA, 23 nt, Human
ucccccugggcucugccccagcu

SEQ ID NO: 2319464 - RNA, 10 nt, Human
ucccccuggg

SEQ ID NO: 2319465 - RNA, 20 nt, Human
ucccccuggggcuucuccug

SEQ ID NO: 2319466 - RNA, 21 nt, Human
ucccccuggggcuucuccuga

SEQ ID NO: 2319467 - RNA, 15 nt, Human
ucccccuguccccuc

SEQ ID NO: 2319468 - RNA, 16 nt, Human
ucccccuguccccuca

SEQ ID NO: 2319469 - RNA, 19 nt, Human
ucccccuguccccucagcu

SEQ ID NO: 2319470 - RNA, 15 nt, Human
ucccccuuccaugga

SEQ ID NO: 2319471 - RNA, 19 nt, Human
ucccuucacauaguuuuua

SEQ ID NO: 2319472 - RNA, 22 nt, Human
ucccuucaaccauuccccaugg

SEQ ID NO: 2319473 - RNA, 15 nt, Human
ucccccuucacaaag

SEQ ID NO: 2319474 - RNA, 14 nt, Human
ucccccuucacaaa

SEQ ID NO: 2319475 - RNA, 20 nt, Human
ucccuuccccucccuggcuc

SEQ ID NO: 2319476 - RNA, 21 nt, Human
ucccuuccccucccuggcucc

SEQ ID NO: 2319477 - RNA, 12 nt, Human
ucccuuccccuc

SEQ ID NO: 2319478 - RNA, 17 nt, Human
ucccuucccccauaagc

SEQ ID NO: 2319479 - RNA, 13 nt, Human
ucccuucaucucc

SEQ ID NO: 2319480 - RNA, 18 nt, Human
ucccuucaucuccaggga

SEQ ID NO: 2319481 - RNA, 22 nt, Human
ucccccuucacaaagcccaagg

SEQ ID NO: 2319482 - RNA, 16 nt, Human
ucccuucaguacccuc

SEQ ID NO: 2319483 - RNA, 18 nt, Human
ucccuucaguacccucuc

SEQ ID NO: 2319484 - RNA, 19 nt, Human
ucccuucaguacccucuca

SEQ ID NO: 2319485 - RNA, 20 nt, Human
ucccuucaguacccucucag

SEQ ID NO: 2319486 - RNA, 21 nt, Human
ucccuucaguacccucucagc

SEQ ID NO: 2319487 - RNA, 23 nt, Human
ucccuucaguacccucucagcuc

SEQ ID NO: 2319488 - RNA, 14 nt, Human
ucccuucacauagu

SEQ ID NO: 2319489 - RNA, 16 nt, Human
ucccuuccucuuucca

SEQ ID NO: 2319490 - RNA, 15 nt, Human
ucccuuccucuuucc

SEQ ID NO: 2319491 - RNA, 12 nt, Human
ucccuugccuca

SEQ ID NO: 2319492 - RNA, 17 nt, Human
uccgccucugcuggcac

SEQ ID NO: 2319493 - RNA, 22 nt, Human
uccgcccugcuccucccuggcu

SEQ ID NO: 2319494 - RNA, 17 nt, Human
uccgccagccuccucug

SEQ ID NO: 2319495 - RNA, 18 nt, Human
uccgccagccuccucugg

SEQ ID NO: 2319496 - RNA, 20 nt, Human
uccgccagccuccucuggac

SEQ ID NO: 2319497 - RNA, 20 nt, Human
uccgcccugcuccucccugg

SEQ ID NO: 2319498 - RNA, 14 nt, Human
uccgccucuugggu

SEQ ID NO: 2319499 - RNA, 11 nt, Human
uccgccagccu

SEQ ID NO: 2319500 - RNA, 12 nt, Human
uccgccagccuc

SEQ ID NO: 2319501 - RNA, 13 nt, Human
uccgccagccucc

SEQ ID NO: 2319502 - RNA, 14 nt, Human
uccgccagccuccu

SEQ ID NO: 2319503 - RNA, 15 nt, Human
uccgccagccuccuc

SEQ ID NO: 2319504 - RNA, 16 nt, Human
uccgccagccuccucu

SEQ ID NO: 2319505 - RNA, 20 nt, Human
ucccuuggaaaccugcccug

SEQ ID NO: 2319506 - RNA, 23 nt, Human
ucccuuggaaaccugcccugccu

SEQ ID NO: 2319507 - RNA, 20 nt, Human
ucccuugccucaaugccagu

SEQ ID NO: 2319508 - RNA, 18 nt, Human
ucccuuggaaaccugccc

SEQ ID NO: 2319509 - RNA, 19 nt, Human
ucccuuggaaaccugcccu

SEQ ID NO: 2319510 - RNA, 14 nt, Human
uccgauccuuccuc

SEQ ID NO: 2319511 - RNA, 12 nt, Human
ucccuuggagcu

SEQ ID NO: 2319512 - RNA, 15 nt, Human
uccgaggggcgggac

SEQ ID NO: 2319513 - RNA, 20 nt, Human
uccgaggggcgggacccagg

SEQ ID NO: 2319514 - RNA, 23 nt, Human
uccgaggggcgggacccaggcac

SEQ ID NO: 2319515 - RNA, 15 nt, Human
uccgauccuuccucc

SEQ ID NO: 2319516 - RNA, 21 nt, Human
uccuaagcuauucaguaauaa

SEQ ID NO: 2319517 - RNA, 20 nt, Human
uccuaagcuauucaguaaua

SEQ ID NO: 2319518 - RNA, 18 nt, Human
uccgcuuucuacccagcg

SEQ ID NO: 2319519 - RNA, 20 nt, Human
uccgcuuucuacccagcgag

SEQ ID NO: 2319520 - RNA, 16 nt, Human
uccgcuuucuacccag

SEQ ID NO: 2319521 - RNA, 12 nt, Human
uccgcuggaggu

SEQ ID NO: 2319522 - RNA, 14 nt, Human
uccgcuggaggugg

SEQ ID NO: 2319523 - RNA, 17 nt, Human
uccgccuucacuccggu

SEQ ID NO: 2319524 - RNA, 20 nt, Human
uccgcucauacaggaaugaa

SEQ ID NO: 2319525 - RNA, 13 nt, Human
ucucauccugcag

SEQ ID NO: 2319526 - RNA, 15 nt, Human
ucucauccugcaggc

SEQ ID NO: 2319527 - RNA, 24 nt, Human
ucucauagcauuaacuaaucuauu

SEQ ID NO: 2319528 - RNA, 20 nt, Human
ucucauagcauuaacuaauc

SEQ ID NO: 2319529 - RNA, 13 nt, Human
ucucauagcauua

SEQ ID NO: 2319530 - RNA, 14 nt, Human
ucucauacguccac

SEQ ID NO: 2319531 - RNA, 15 nt, Human
ucucauacguccacc

SEQ ID NO: 2319532 - RNA, 17 nt, Human
ucucauacguccaccau

SEQ ID NO: 2319533 - RNA, 18 nt, Human
ucucauacucaccucacc

SEQ ID NO: 2319534 - RNA, 16 nt, Human
ucucauacucaccuca

SEQ ID NO: 2319535 - RNA, 17 nt, Human
ucucaucucuuagcucc

SEQ ID NO: 2319536 - RNA, 21 nt, Human
ucucauaggaaaaguacauuu

SEQ ID NO: 2319537 - RNA, 16 nt, Human
ucucauaggaaaagua

SEQ ID NO: 2319538 - RNA, 19 nt, Human
ucucauaggaaaaguacau

SEQ ID NO: 2319539 - RNA, 13 nt, Human
ucucaucugugau

SEQ ID NO: 2319540 - RNA, 20 nt, Human
ucucaucucuuagcuccccu

SEQ ID NO: 2319541 - RNA, 18 nt, Human
ucucaucucuucuuuuaa

SEQ ID NO: 2319542 - RNA, 17 nt, Human
ucucaucugugauuccc

SEQ ID NO: 2319543 - RNA, 12 nt, Human
ucucaucuuucu

SEQ ID NO: 2319544 - RNA, 13 nt, Human
ucucaucuuucuu

SEQ ID NO: 2319545 - RNA, 22 nt, Human
ucucaucuuucuugaucaacau

SEQ ID NO: 2319546 - RNA, 14 nt, Human
ucucaugaaccuca

SEQ ID NO: 2319547 - RNA, 13 nt, Human
ucucaugaaccuc

SEQ ID NO: 2319548 - RNA, 19 nt, Human
ucuaugggacucaaugcac

SEQ ID NO: 2319549 - RNA, 19 nt, Human
ucucagucaugcauaaaua

SEQ ID NO: 2319550 - RNA, 17 nt, Human
ucuaugagaaaagaggc

SEQ ID NO: 2319551 - RNA, 12 nt, Human
ucuaugggacuc

SEQ ID NO: 2319552 - RNA, 13 nt, Human
ucuaugggacuca

SEQ ID NO: 2319553 - RNA, 23 nt, Human
ucucagucaugcauaaauaugca

SEQ ID NO: 2319554 - RNA, 20 nt, Human
ucucagucaugcauaaauau

SEQ ID NO: 2319555 - RNA, 21 nt, Human
ucucagucaugcauaaauaug

SEQ ID NO: 2319556 - RNA, 13 nt, Human
ucucagucucuga

SEQ ID NO: 2319557 - RNA, 11 nt, Human
ucucagucucu

SEQ ID NO: 2319558 - RNA, 23 nt, Human
ucucaguccaugaagauguagag

SEQ ID NO: 2319559 - RNA, 17 nt, Human
ucucagucucugagcag

SEQ ID NO: 2319560 - RNA, 15 nt, Human
ucucagucucugagc

SEQ ID NO: 2319561 - RNA, 18 nt, Human
ucucagucucugagcagu

SEQ ID NO: 2319562 - RNA, 22 nt, Human
ucucaugaaccucaagcugcau

SEQ ID NO: 2319563 - RNA, 14 nt, Human
ucucaugaaucugc

SEQ ID NO: 2319564 - RNA, 18 nt, Human
ucucaugaaucugcaaug

SEQ ID NO: 2319565 - RNA, 13 nt, Human
ucucaugccucag

SEQ ID NO: 2319566 - RNA, 21 nt, Human
ucucaugccccuggcugggac

SEQ ID NO: 2319567 - RNA, 18 nt, Human
ucucaugccccuggcugg

SEQ ID NO: 2319568 - RNA, 13 nt, Human
ucuccacccugcu

SEQ ID NO: 2319569 - RNA, 19 nt, Human
ucucaugccucagccuccu

SEQ ID NO: 2319570 - RNA, 16 nt, Human
ucucaugccucagccu

SEQ ID NO: 2319571 - RNA, 17 nt, Human
ucuccacccugcucucc

SEQ ID NO: 2319572 - RNA, 14 nt, Human
ucuccaccuagugg

SEQ ID NO: 2319573 - RNA, 15 nt, Human
ucuccaccuaguggc

SEQ ID NO: 2319574 - RNA, 16 nt, Human
ucuccaccuaguggcu

SEQ ID NO: 2319575 - RNA, 21 nt, Human
ucuccaccuaguggcugucca

SEQ ID NO: 2319576 - RNA, 14 nt, Human
ucuccacccugcuc

SEQ ID NO: 2319577 - RNA, 16 nt, Human
ucuccacccugcucuc

SEQ ID NO: 2319578 - RNA, 16 nt, Human
ucuccaccucagccuu

SEQ ID NO: 2319579 - RNA, 15 nt, Human
ucuccaccucagccu

SEQ ID NO: 2319580 - RNA, 14 nt, Human
ucuccaccucagcc

SEQ ID NO: 2319581 - RNA, 13 nt, Human
ucuccaccucagc

SEQ ID NO: 2319582 - RNA, 12 nt, Human
ucuccaccucag

SEQ ID NO: 2319583 - RNA, 11 nt, Human
ucuccaccuca

SEQ ID NO: 2319584 - RNA, 22 nt, Human
ucuccaccuaguggcuguccag

SEQ ID NO: 2319585 - RNA, 23 nt, Human
ucuccaccuaguggcuguccagu

SEQ ID NO: 2319586 - RNA, 14 nt, Human
ucuccaccugccag

SEQ ID NO: 2319587 - RNA, 15 nt, Human
ucuccaccugccagg

SEQ ID NO: 2319588 - RNA, 16 nt, Human
ucuccaccugccaggg

SEQ ID NO: 2319589 - RNA, 19 nt, Human
ucuccaccucagccuugga

SEQ ID NO: 2319590 - RNA, 13 nt, Human
ucuccaccugcuc

SEQ ID NO: 2319591 - RNA, 18 nt, Human
ucuccaccucagccuugg

SEQ ID NO: 2319592 - RNA, 17 nt, Human
ucuccaccucagccuug

SEQ ID NO: 2319593 - RNA, 13 nt, Human
ucuccacuccaga

SEQ ID NO: 2319594 - RNA, 22 nt, Human
ucuccaccugccagggacagag

SEQ ID NO: 2319595 - RNA, 17 nt, Human
ucuccaccugccaggga

SEQ ID NO: 2319596 - RNA, 19 nt, Human
ucuccaccugccagggaca

SEQ ID NO: 2319597 - RNA, 13 nt, Human
ucuccccucagag

SEQ ID NO: 2319598 - RNA, 16 nt, Human
ucuccccucaaagucu

SEQ ID NO: 2319599 - RNA, 23 nt, Human
ucuccccucaaagucugcaacuu

SEQ ID NO: 2319600 - RNA, 18 nt, Human
ucuccccucagagugcaa

SEQ ID NO: 2319601 - RNA, 20 nt, Human
ucucccccugggcucugccc

SEQ ID NO: 2319602 - RNA, 11 nt, Human
ucuccccucaa

SEQ ID NO: 2319603 - RNA, 13 nt, Human
ucuccccucaaag

SEQ ID NO: 2319604 - RNA, 12 nt, Human
ucucccccagcc

SEQ ID NO: 2319605 - RNA, 19 nt, Human
ucucccccacccccucccc

SEQ ID NO: 2319606 - RNA, 20 nt, Human
ucucccccacccccuccccg

SEQ ID NO: 2319607 - RNA, 23 nt, Human
ucuccaggcacccuucuuuccuc

SEQ ID NO: 2319608 - RNA, 12 nt, Human
ucucccccaccc

SEQ ID NO: 2319609 - RNA, 15 nt, Human
ucucccccacccccu

SEQ ID NO: 2319610 - RNA, 15 nt, Human
ucuccaggcgccggc

SEQ ID NO: 2319611 - RNA, 19 nt, Human
ucuccccagguccagcucu

SEQ ID NO: 2319612 - RNA, 20 nt, Human
ucuccccagguccagcucug

SEQ ID NO: 2319613 - RNA, 22 nt, Human
ucuccccagguccagcucugga

SEQ ID NO: 2319614 - RNA, 11 nt, Human
ucuccaggcug

SEQ ID NO: 2319615 - RNA, 18 nt, Human
ucuccaggaaggcggggc

SEQ ID NO: 2319616 - RNA, 21 nt, Human
ucuccagcugggcucugcaau

SEQ ID NO: 2319617 - RNA, 19 nt, Human
ucuccaggauugaagagca

SEQ ID NO: 2319618 - RNA, 13 nt, Human
ucuccaggaucca

SEQ ID NO: 2319619 - RNA, 17 nt, Human
ucuccaggcacccuucu

SEQ ID NO: 2319620 - RNA, 15 nt, Human
ucucccugccgccuc

SEQ ID NO: 2319621 - RNA, 14 nt, Human
ucucccugccgccu

SEQ ID NO: 2319622 - RNA, 14 nt, Human
ucucccuggcccuc

SEQ ID NO: 2319623 - RNA, 13 nt, Human
ucucccugccgcc

SEQ ID NO: 2319624 - RNA, 12 nt, Human
ucucccugccgc

SEQ ID NO: 2319625 - RNA, 18 nt, Human
ucucccuccccugccauu

SEQ ID NO: 2319626 - RNA, 12 nt, Human
ucucccuccccu

SEQ ID NO: 2319627 - RNA, 23 nt, Human
ucucccucacagcacagagaaga

SEQ ID NO: 2319628 - RNA, 14 nt, Human
ucucccucccuugg

SEQ ID NO: 2319629 - RNA, 12 nt, Human
ucuccccugccc

SEQ ID NO: 2319630 - RNA, 14 nt, Human
ucuccccugccccc

SEQ ID NO: 2319631 - RNA, 15 nt, Human
ucuccccugccccca

SEQ ID NO: 2319632 - RNA, 23 nt, Human
ucucccucagucuggcccuuccu

SEQ ID NO: 2319633 - RNA, 18 nt, Human
ucucccucagucuggccc

SEQ ID NO: 2319634 - RNA, 20 nt, Human
ucuccagacccccaccccuu

SEQ ID NO: 2319635 - RNA, 19 nt, Human
ucuccagacccccaccccu

SEQ ID NO: 2319636 - RNA, 14 nt, Human
ucuccagauguuuc

SEQ ID NO: 2319637 - RNA, 18 nt, Human
ucuccagauguuuccaga

SEQ ID NO: 2319638 - RNA, 15 nt, Human
ucuccagauguuucc

SEQ ID NO: 2319639 - RNA, 12 nt, Human
ucuccagccagc

SEQ ID NO: 2319640 - RNA, 13 nt, Human
ucuccagccagca

SEQ ID NO: 2319641 - RNA, 19 nt, Human
ucuccagauguuuccagac

SEQ ID NO: 2319642 - RNA, 15 nt, Human
ucuccagacccccac

SEQ ID NO: 2319643 - RNA, 14 nt, Human
ucuccacugccuuc

SEQ ID NO: 2319644 - RNA, 17 nt, Human
ucuccacucaguugcaa

SEQ ID NO: 2319645 - RNA, 16 nt, Human
ucuccaccugcuccca

SEQ ID NO: 2319646 - RNA, 12 nt, Human
ucuccagccccu

SEQ ID NO: 2319647 - RNA, 13 nt, Human
ucuccagccccug

SEQ ID NO: 2319648 - RNA, 14 nt, Human
ucuccagccccugg

SEQ ID NO: 2319649 - RNA, 15 nt, Human
ucuccagccccugga

SEQ ID NO: 2319650 - RNA, 22 nt, Human
ucuccagccccuucucagaauc

SEQ ID NO: 2319651 - RNA, 15 nt, Human
ucuccagccagcaau

SEQ ID NO: 2319652 - RNA, 16 nt, Human
ucuccagccagcaaug

SEQ ID NO: 2319653 - RNA, 23 nt, Human
ucuccagccccuucucagaaucu

SEQ ID NO: 2319654 - RNA, 22 nt, Human
ucuccagccccuggaugcagcc

SEQ ID NO: 2319655 - RNA, 16 nt, Human
ucuccagccccuggau

SEQ ID NO: 2319656 - RNA, 18 nt, Human
ucuccagccccuggaugc

SEQ ID NO: 2319657 - RNA, 14 nt, Human
ucuccagccuggac

SEQ ID NO: 2319658 - RNA, 15 nt, Human
ucuccagccuggacc

SEQ ID NO: 2319659 - RNA, 19 nt, Human
ucuccagccuggaccccca

SEQ ID NO: 2319660 - RNA, 21 nt, Human
ucuccagccuggacccccagc

SEQ ID NO: 2319661 - RNA, 22 nt, Human
ucuccagccuggacccccagcu

SEQ ID NO: 2319662 - RNA, 23 nt, Human
ucuccagccuggacccccagcuu

SEQ ID NO: 2319663 - RNA, 22 nt, Human
ucuccagcuauaacaguaggga

SEQ ID NO: 2319664 - RNA, 14 nt, Human
ucuccagcuccaag

SEQ ID NO: 2319665 - RNA, 11 nt, Human
ucuccagcugg

SEQ ID NO: 2319666 - RNA, 17 nt, Human
ucuccagcugggcucug

SEQ ID NO: 2319667 - RNA, 19 nt, Human
ucuccagcugggcucugca

SEQ ID NO: 2319668 - RNA, 19 nt, Human
ucuagugcagcugauuuua

SEQ ID NO: 2319669 - RNA, 21 nt, Human
ucuaggaagacuuuggaaaga

SEQ ID NO: 2319670 - RNA, 19 nt, Human
ucuaggaagacuuuggaaa

SEQ ID NO: 2319671 - RNA, 15 nt, Human
ucuaggaagacuuug

SEQ ID NO: 2319672 - RNA, 16 nt, Human
ucuaggaagacuuugg

SEQ ID NO: 2319673 - RNA, 14 nt, Human
ucuagugcccucca

SEQ ID NO: 2319674 - RNA, 23 nt, Human
ucuagugcagcugauuuuaacaa

SEQ ID NO: 2319675 - RNA, 22 nt, Human
ucuagugcagcugauuuuaaca

SEQ ID NO: 2319676 - RNA, 20 nt, Human
ucuagugcccuccacagccg

SEQ ID NO: 2319677 - RNA, 18 nt, Human
ucuagugccuucuaaagg

SEQ ID NO: 2319678 - RNA, 14 nt, Human
ucuagugccuucua

SEQ ID NO: 2319679 - RNA, 15 nt, Human
ucuagugcugugaaa

SEQ ID NO: 2319680 - RNA, 14 nt, Human
ucuagugcugugaa

SEQ ID NO: 2319681 - RNA, 13 nt, Human
ucuagugcuguga

SEQ ID NO: 2319682 - RNA, 23 nt, Human
ucuagugccuucuaaagguguug

SEQ ID NO: 2319683 - RNA, 13 nt, Human
ucuagugcugcug

SEQ ID NO: 2319684 - RNA, 23 nt, Human
ucuagugcugugaaaaaaaaaau

SEQ ID NO: 2319685 - RNA, 12 nt, Human
ucuagugggaag

SEQ ID NO: 2319686 - RNA, 19 nt, Human
ucuagugcugugaaaaaaa

SEQ ID NO: 2319687 - RNA, 16 nt, Human
ucuagugcugugaaaa

SEQ ID NO: 2319688 - RNA, 17 nt, Human
ucuagugcugcugaaga

SEQ ID NO: 2319689 - RNA, 15 nt, Human
ucuaguggucuuugu

SEQ ID NO: 2319690 - RNA, 16 nt, Human
ucuaguggucuuugua

SEQ ID NO: 2319691 - RNA, 17 nt, Human
ucuaguggucuuuguaa

SEQ ID NO: 2319692 - RNA, 18 nt, Human
ucuaguggucuuuguaag

SEQ ID NO: 2319693 - RNA, 19 nt, Human
ucuaguggucuuuguaaga

SEQ ID NO: 2319694 - RNA, 21 nt, Human
ucuaguggucuuuguaagagu

SEQ ID NO: 2319695 - RNA, 14 nt, Human
ucuaucagagaaaa

SEQ ID NO: 2319696 - RNA, 14 nt, Human
ucuaucaccaagga

SEQ ID NO: 2319697 - RNA, 16 nt, Human
ucuaucauuaaaguuc

SEQ ID NO: 2319698 - RNA, 15 nt, Human
ucuaucaauagucaa

SEQ ID NO: 2319699 - RNA, 15 nt, Human
ucuaucauuaaaguu

SEQ ID NO: 2319700 - RNA, 14 nt, Human
ucuaucauuaaagu

SEQ ID NO: 2319701 - RNA, 12 nt, Human
ucuaucauuuaa

SEQ ID NO: 2319702 - RNA, 13 nt, Human
ucuaucauuuaau

SEQ ID NO: 2319703 - RNA, 14 nt, Human
ucuaucauuuaaua

SEQ ID NO: 2319704 - RNA, 15 nt, Human
ucuaucauuuaauaa

SEQ ID NO: 2319705 - RNA, 16 nt, Human
ucuaucauuuaauaau

SEQ ID NO: 2319706 - RNA, 17 nt, Human
ucuaucauuuaauaaua

SEQ ID NO: 2319707 - RNA, 18 nt, Human
ucuaucauuuaauaauau

SEQ ID NO: 2319708 - RNA, 22 nt, Human
ucuaucauuuaauaauauacuu

SEQ ID NO: 2319709 - RNA, 17 nt, Human
ucuaugacacaugcaag

SEQ ID NO: 2319710 - RNA, 23 nt, Human
ucuaugaacucuguuuucuuucu

SEQ ID NO: 2319711 - RNA, 15 nt, Human
ucuaucauuuuugua

SEQ ID NO: 2319712 - RNA, 16 nt, Human
ucuaucauuuuuguac

SEQ ID NO: 2319713 - RNA, 17 nt, Human
ucuaucauuuuuguaca

SEQ ID NO: 2319714 - RNA, 17 nt, Human
ucuaugaaguauauaau

SEQ ID NO: 2319715 - RNA, 18 nt, Human
ucuaugaaguauauaaug

SEQ ID NO: 2319716 - RNA, 12 nt, Human
ucuaugagaaaa

SEQ ID NO: 2319717 - RNA, 14 nt, Human
ucuaugacacaugc

SEQ ID NO: 2319718 - RNA, 18 nt, Human
ucuaugaaauauuauguu

SEQ ID NO: 2319719 - RNA, 16 nt, Human
ucuacacauacaugua

SEQ ID NO: 2319720 - RNA, 18 nt, Human
ucuacagacuucuccaga

SEQ ID NO: 2319721 - RNA, 17 nt, Human
ucuacagacuucuccag

SEQ ID NO: 2319722 - RNA, 16 nt, Human
ucuacagacuucucca

SEQ ID NO: 2319723 - RNA, 19 nt, Human
ucuacagagcuucccugac

SEQ ID NO: 2319724 - RNA, 18 nt, Human
ucuacagagcuucccuga

SEQ ID NO: 2319725 - RNA, 17 nt, Human
ucuacagagcuucccug

SEQ ID NO: 2319726 - RNA, 16 nt, Human
ucuacagagcuucccu

SEQ ID NO: 2319727 - RNA, 15 nt, Human
ucuacagaggccaug

SEQ ID NO: 2319728 - RNA, 16 nt, Human
ucuacagaggccaugg

SEQ ID NO: 2319729 - RNA, 17 nt, Human
ucuacaaugugaacuuu

SEQ ID NO: 2319730 - RNA, 15 nt, Human
ucuacaaugugaacu

SEQ ID NO: 2319731 - RNA, 20 nt, Human
ucuacaaugugaacuuuauu

SEQ ID NO: 2319732 - RNA, 19 nt, Human
ucuacaaugugaacuuuau

SEQ ID NO: 2319733 - RNA, 14 nt, Human
ucuacacagagcag

SEQ ID NO: 2319734 - RNA, 17 nt, Human
ucuacacuaagagagaa

SEQ ID NO: 2319735 - RNA, 18 nt, Human
ucuacaaaauccugauga

SEQ ID NO: 2319736 - RNA, 16 nt, Human
ucuaaaguuuacagua

SEQ ID NO: 2319737 - RNA, 17 nt, Human
ucuaaaguuuacaguaa

SEQ ID NO: 2319738 - RNA, 18 nt, Human
ucuaaaguuuacaguaaa

SEQ ID NO: 2319739 - RNA, 19 nt, Human
ucuaaaguuuacaguaaau

SEQ ID NO: 2319740 - RNA, 22 nt, Human
ucuaaaguuuacaguaaauaaa

SEQ ID NO: 2319741 - RNA, 16 nt, Human
ucuaauuuuuaagcaa

SEQ ID NO: 2319742 - RNA, 17 nt, Human
ucuaauuuuuauucaua

SEQ ID NO: 2319743 - RNA, 18 nt, Human
ucuaauuuuuauucauaa

SEQ ID NO: 2319744 - RNA, 19 nt, Human
ucuacuucugcccuugcca

SEQ ID NO: 2319745 - RNA, 21 nt, Human
ucuacuuaauccaauggguuu

SEQ ID NO: 2319746 - RNA, 21 nt, Human
ucuacuguauggaauacaaug

SEQ ID NO: 2319747 - RNA, 19 nt, Human
ucuacugggagccuaccca

SEQ ID NO: 2319748 - RNA, 16 nt, Human
ucuacugggagccuac

SEQ ID NO: 2319749 - RNA, 16 nt, Human
ucuacuggucuugugg

SEQ ID NO: 2319750 - RNA, 23 nt, Human
ucuacuggucuuguggaauuggg

SEQ ID NO: 2319751 - RNA, 20 nt, Human
ucuacuggucuuguggaauu

SEQ ID NO: 2319752 - RNA, 17 nt, Human
ucuacgcucuccuuucu

SEQ ID NO: 2319753 - RNA, 16 nt, Human
ucuacgcucuccuuuc

SEQ ID NO: 2319754 - RNA, 19 nt, Human
ucuacgguguaugguucug

SEQ ID NO: 2319755 - RNA, 14 nt, Human
ucuacuaaaaagaa

SEQ ID NO: 2319756 - RNA, 21 nt, Human
ucuacuaaaaagaaggaaaau

SEQ ID NO: 2319757 - RNA, 15 nt, Human
ucuacgcucuccuuu

SEQ ID NO: 2319758 - RNA, 17 nt, Human
ucuaccuugaggucuuu

SEQ ID NO: 2319759 - RNA, 16 nt, Human
ucuaccuugaggucuu

SEQ ID NO: 2319760 - RNA, 14 nt, Human
ucuaccuucuguag

SEQ ID NO: 2319761 - RNA, 16 nt, Human
ucuaccuucuguaguu

SEQ ID NO: 2319762 - RNA, 21 nt, Human
ucuaccuggucucuccuuguu

SEQ ID NO: 2319763 - RNA, 15 nt, Human
ucuaccuuccaguca

SEQ ID NO: 2319764 - RNA, 21 nt, Human
ucuaccuuccagucaggauga

SEQ ID NO: 2319765 - RNA, 14 nt, Human
ucuaccuuccugca

SEQ ID NO: 2319766 - RNA, 16 nt, Human
ucggcagauacugucu

SEQ ID NO: 2319767 - RNA, 16 nt, Human
ucggcauuucaaaugu

SEQ ID NO: 2319768 - RNA, 20 nt, Human
ucggaucuggggcucuggga

SEQ ID NO: 2319769 - RNA, 16 nt, Human
ucggauuuggggugga

SEQ ID NO: 2319770 - RNA, 19 nt, Human
ucggaguaucugggaacug

SEQ ID NO: 2319771 - RNA, 17 nt, Human
ucggaguaucugggaac

SEQ ID NO: 2319772 - RNA, 22 nt, Human
ucggagggaauugaggucugcu

SEQ ID NO: 2319773 - RNA, 20 nt, Human
ucggagggaauugaggucug

SEQ ID NO: 2319774 - RNA, 21 nt, Human
ucggagacagugaucuccaua

SEQ ID NO: 2319775 - RNA, 15 nt, Human
ucggagacagugauc

SEQ ID NO: 2319776 - RNA, 14 nt, Human
ucggagacagugau

SEQ ID NO: 2319777 - RNA, 13 nt, Human
ucgugacaacacu

SEQ ID NO: 2319778 - RNA, 17 nt, Human
ucgugaaguauacugua

SEQ ID NO: 2319779 - RNA, 10 nt, Human
ucgucuuugc

SEQ ID NO: 2319780 - RNA, 19 nt, Human
ucgugaaguauacuguauu

SEQ ID NO: 2319781 - RNA, 21 nt, Human
ucgugaccaacuagacauucu

SEQ ID NO: 2319782 - RNA, 23 nt, Human
ucggcccacagcucccaccccac

SEQ ID NO: 2319783 - RNA, 16 nt, Human
ucggcccacagcuccc

SEQ ID NO: 2319784 - RNA, 12 nt, Human
ucggcccacagc

SEQ ID NO: 2319785 - RNA, 19 nt, Human
ucggcccacagcucccacc

SEQ ID NO: 2319786 - RNA, 15 nt, Human
ucgucuuucccaugg

SEQ ID NO: 2319787 - RNA, 18 nt, Human
ucgucuuucccaugggga

SEQ ID NO: 2319788 - RNA, 20 nt, Human
ucgucuuucccauggggagg

SEQ ID NO: 2319789 - RNA, 14 nt, Human
ucgugaaacccugu

SEQ ID NO: 2319790 - RNA, 18 nt, Human
ucgugaaacccugucucu

SEQ ID NO: 2319791 - RNA, 17 nt, Human
uccuuagaccuuccaua

SEQ ID NO: 2319792 - RNA, 19 nt, Human
uccuuagagacaucaaaau

SEQ ID NO: 2319793 - RNA, 20 nt, Human
uccuuagaacauuuuaauuc

SEQ ID NO: 2319794 - RNA, 15 nt, Human
uccuuagaacauuuu

SEQ ID NO: 2319795 - RNA, 21 nt, Human
uccugucugccagccagcagc

SEQ ID NO: 2319796 - RNA, 17 nt, Human
uccugucugccagccag

SEQ ID NO: 2319797 - RNA, 22 nt, Human
uccugucugccagccagcagcc

SEQ ID NO: 2319798 - RNA, 20 nt, Human
uccuuagcuuagaccucagc

SEQ ID NO: 2319799 - RNA, 19 nt, Human
uccuuagcuuagaccucag

SEQ ID NO: 2319800 - RNA, 18 nt, Human
uccuuagcuuagaccuca

SEQ ID NO: 2319801 - RNA, 22 nt, Human
uccuuagcuuagaccucagccu

SEQ ID NO: 2319802 - RNA, 21 nt, Human
uccuuagcuuagaccucagcc

SEQ ID NO: 2319803 - RNA, 18 nt, Human
ucggacuuagcugggaga

SEQ ID NO: 2319804 - RNA, 12 nt, Human
ucggagaagagc

SEQ ID NO: 2319805 - RNA, 16 nt, Human
ucggagaagagcuguu

SEQ ID NO: 2319806 - RNA, 14 nt, Human
ucggagaagagcug

SEQ ID NO: 2319807 - RNA, 14 nt, Human
ucgugguaggacug

SEQ ID NO: 2319808 - RNA, 22 nt, Human
ucguggguguguguagccaagg

SEQ ID NO: 2319809 - RNA, 15 nt, Human
ucgugggugugugua

SEQ ID NO: 2319810 - RNA, 21 nt, Human
ucguggcagauaaucagccuc

SEQ ID NO: 2319811 - RNA, 20 nt, Human
ucguggcagauaaucagccu

SEQ ID NO: 2319812 - RNA, 16 nt, Human
ucguggagaugucuuc

SEQ ID NO: 2319813 - RNA, 17 nt, Human
ucguggagaugucuucg

SEQ ID NO: 2319814 - RNA, 19 nt, Human
ucguggagaugucuucgua

SEQ ID NO: 2319815 - RNA, 15 nt, Human
ucgugguaggacugu

SEQ ID NO: 2319816 - RNA, 20 nt, Human
ucgugguaggacuguagaaa

SEQ ID NO: 2319817 - RNA, 22 nt, Human
ucguggugaucaauuaaaugua

SEQ ID NO: 2319818 - RNA, 22 nt, Human
ucgugguccccaacagcgacau

SEQ ID NO: 2319819 - RNA, 13 nt, Human
ucguguauccugg

SEQ ID NO: 2319820 - RNA, 14 nt, Human
ucguguauccuggg

SEQ ID NO: 2319821 - RNA, 15 nt, Human
ucguguauccugggg

SEQ ID NO: 2319822 - RNA, 16 nt, Human
ucguguauccuggggc

SEQ ID NO: 2319823 - RNA, 18 nt, Human
ucguguauccuggggcuc

SEQ ID NO: 2319824 - RNA, 21 nt, Human
ucguggagacagggcauuuga

SEQ ID NO: 2319825 - RNA, 20 nt, Human
ucgugacgcugaauaaaugu

SEQ ID NO: 2319826 - RNA, 17 nt, Human
ucgugacgcugaauaaa

SEQ ID NO: 2319827 - RNA, 18 nt, Human
ucgugacgcugaauaaau

SEQ ID NO: 2319828 - RNA, 18 nt, Human
ucuaaagguggugaggca

SEQ ID NO: 2319829 - RNA, 22 nt, Human
ucguguauccuggggcucccuu

SEQ ID NO: 2319830 - RNA, 14 nt, Human
ucgugucucugguc

SEQ ID NO: 2319831 - RNA, 16 nt, Human
ucguguccccuauccu

SEQ ID NO: 2319832 - RNA, 19 nt, Human
ucuaaaguguguuguugcu

SEQ ID NO: 2319833 - RNA, 12 nt, Human
ucuaaaguuuac

SEQ ID NO: 2319834 - RNA, 13 nt, Human
ucuaaaguuuaca

SEQ ID NO: 2319835 - RNA, 15 nt, Human
ucuaaaguuuacagu

SEQ ID NO: 2319836 - RNA, 20 nt, Human
ucuaaaggcuaccuuuguau

SEQ ID NO: 2319837 - RNA, 19 nt, Human
ucuaaaggcuaccuuugua

SEQ ID NO: 2319838 - RNA, 17 nt, Human
ucuaaaggcuaccuuug

SEQ ID NO: 2319839 - RNA, 18 nt, Human
ucuaaaggcuaccuuugu

SEQ ID NO: 2319840 - RNA, 21 nt, Human
uauuugacaacguuucagcga

SEQ ID NO: 2319841 - RNA, 23 nt, Human
uauuugaauguaugcuucauaca

SEQ ID NO: 2319842 - RNA, 22 nt, Human
uauuugaauguaugcuucauac

SEQ ID NO: 2319843 - RNA, 16 nt, Human
uauuugcacuguagcc

SEQ ID NO: 2319844 - RNA, 16 nt, Human
uauuugcagacuagaa

SEQ ID NO: 2319845 - RNA, 18 nt, Human
uauuugcaguucaccugc

SEQ ID NO: 2319846 - RNA, 23 nt, Human
uauuugcaguucaccugcacuua

SEQ ID NO: 2319847 - RNA, 16 nt, Human
uauuugcauguuaccu

SEQ ID NO: 2319848 - RNA, 15 nt, Human
uauuugcauauguau

SEQ ID NO: 2319849 - RNA, 22 nt, Human
uauuugcauaacaauuccucua

SEQ ID NO: 2319850 - RNA, 21 nt, Human
uauuugcauaacaauuccucu

SEQ ID NO: 2319851 - RNA, 17 nt, Human
ucaaacauauauaacaa

SEQ ID NO: 2319852 - RNA, 22 nt, Human
ucaaacagucucaggaaaucaa

SEQ ID NO: 2319853 - RNA, 23 nt, Human
ucaaaccccgaccaccugcccaa

SEQ ID NO: 2319854 - RNA, 18 nt, Human
ucaaaccauaaacuucau

SEQ ID NO: 2319855 - RNA, 21 nt, Human
ucaaaccauaaacuucauggu

SEQ ID NO: 2319856 - RNA, 20 nt, Human
ucaaaccgcacucacccaug

SEQ ID NO: 2319857 - RNA, 17 nt, Human
ucaaaccuccucuucug

SEQ ID NO: 2319858 - RNA, 19 nt, Human
ucaaacugaggaauuucac

SEQ ID NO: 2319859 - RNA, 16 nt, Human
ucaaacuggggccucc

SEQ ID NO: 2319860 - RNA, 14 nt, Human
ucaaacuggggccu

SEQ ID NO: 2319861 - RNA, 23 nt, Human
ucaaacuggggccuccagaacuc

SEQ ID NO: 2319862 - RNA, 22 nt, Human
ucaaacuggggccuccagaacu

SEQ ID NO: 2319863 - RNA, 20 nt, Human
ucaaacuggggccuccagaa

SEQ ID NO: 2319864 - RNA, 19 nt, Human
ucaaacuggggccuccaga

SEQ ID NO: 2319865 - RNA, 15 nt, Human
ucaaaccauaaacuu

SEQ ID NO: 2319866 - RNA, 16 nt, Human
ucaaaccauaaacuuc

SEQ ID NO: 2319867 - RNA, 20 nt, Human
ucaaaccaaaucacugaacu

SEQ ID NO: 2319868 - RNA, 19 nt, Human
ucaaaccccgaccaccugc

SEQ ID NO: 2319869 - RNA, 20 nt, Human
ucaaaccccgaccaccugcc

SEQ ID NO: 2319870 - RNA, 15 nt, Human
uauuugcauguuacc

SEQ ID NO: 2319871 - RNA, 16 nt, Human
uauuugccaugggcuu

SEQ ID NO: 2319872 - RNA, 17 nt, Human
uauuugccaugggcuuc

SEQ ID NO: 2319873 - RNA, 22 nt, Human
ucaaacaugaaguguguuuccu

SEQ ID NO: 2319874 - RNA, 22 nt, Human
ucaaacuuccagugcaacacug

SEQ ID NO: 2319875 - RNA, 20 nt, Human
ucaaacugccuuggcuucag

SEQ ID NO: 2319876 - RNA, 14 nt, Human
ucaaacuuccaguc

SEQ ID NO: 2319877 - RNA, 17 nt, Human
ucaaacuguagaaauga

SEQ ID NO: 2319878 - RNA, 20 nt, Human
ucaaacuguagaaaugauga

SEQ ID NO: 2319879 - RNA, 14 nt, Human
ucaaacuguagaaa

SEQ ID NO: 2319880 - RNA, 19 nt, Human
ucaaacuggggccucccug

SEQ ID NO: 2319881 - RNA, 21 nt, Human
ucaaagaggcugaggcuggca

SEQ ID NO: 2319882 - RNA, 20 nt, Human
ucaaagagagaaaauaaaga

SEQ ID NO: 2319883 - RNA, 15 nt, Human
ucaaagagagaaaau

SEQ ID NO: 2319884 - RNA, 23 nt, Human
ucaaagagguuuuaaaaaaaucc

SEQ ID NO: 2319885 - RNA, 12 nt, Human
ucaaagagguuu

SEQ ID NO: 2319886 - RNA, 17 nt, Human
ucaaauaugcaaagcac

SEQ ID NO: 2319887 - RNA, 16 nt, Human
ucaaauaugcaaagca

SEQ ID NO: 2319888 - RNA, 16 nt, Human
ucaaaucuccaguauu

SEQ ID NO: 2319889 - RNA, 14 nt, Human
ucaaaucuauucag

SEQ ID NO: 2319890 - RNA, 13 nt, Human
ucaaaucuauuca

SEQ ID NO: 2319891 - RNA, 15 nt, Human
ucaaaucuauucaga

SEQ ID NO: 2319892 - RNA, 16 nt, Human
ucaaaucuauucagac

SEQ ID NO: 2319893 - RNA, 17 nt, Human
ucaaaucuauucagaca

SEQ ID NO: 2319894 - RNA, 18 nt, Human
ucaaaucuauucagacaa

SEQ ID NO: 2319895 - RNA, 21 nt, Human
ucaaaugguaggcauuuccua

SEQ ID NO: 2319896 - RNA, 20 nt, Human
ucaaaugguaggcauuuccu

SEQ ID NO: 2319897 - RNA, 20 nt, Human
ucaaauggggccagauccag

SEQ ID NO: 2319898 - RNA, 19 nt, Human
ucaaauggggccagaucca

SEQ ID NO: 2319899 - RNA, 16 nt, Human
ucaaauccuugaagau

SEQ ID NO: 2319900 - RNA, 14 nt, Human
ucaaauauuagaug

SEQ ID NO: 2319901 - RNA, 15 nt, Human
ucaaauccuugaaga

SEQ ID NO: 2319902 - RNA, 19 nt, Human
ucaaauaugcaaagcacug

SEQ ID NO: 2319903 - RNA, 18 nt, Human
ucaaauaugcaaagcacu

SEQ ID NO: 2319904 - RNA, 20 nt, Human
ucaagccaagcagccaagcu

SEQ ID NO: 2319905 - RNA, 16 nt, Human
ucaagccaauccccuc

SEQ ID NO: 2319906 - RNA, 24 nt, Human
ucaacugaccagccuccaugcugc

SEQ ID NO: 2319907 - RNA, 19 nt, Human
ucaagccaagcagccaagc

SEQ ID NO: 2319908 - RNA, 23 nt, Human
ucaacugaaaagacucaguguuc

SEQ ID NO: 2319909 - RNA, 18 nt, Human
ucaacugaccagccucca

SEQ ID NO: 2319910 - RNA, 20 nt, Human
ucaacucuccuccagaguca

SEQ ID NO: 2319911 - RNA, 22 nt, Human
ucaacucccugccccccagccc

SEQ ID NO: 2319912 - RNA, 21 nt, Human
ucaacucccugccccccagcc

SEQ ID NO: 2319913 - RNA, 15 nt, Human
ucaacucccugcccc

SEQ ID NO: 2319914 - RNA, 14 nt, Human
ucaacucccugccc

SEQ ID NO: 2319915 - RNA, 19 nt, Human
ucaaccucuucuggcucaa

SEQ ID NO: 2319916 - RNA, 13 nt, Human
ucaaccugccuga

SEQ ID NO: 2319917 - RNA, 17 nt, Human
ucaaccugggcaaagcc

SEQ ID NO: 2319918 - RNA, 22 nt, Human
ucaacuccaaacugacucuuaa

SEQ ID NO: 2319919 - RNA, 16 nt, Human
ucaaccuccugggcua

SEQ ID NO: 2319920 - RNA, 18 nt, Human
ucaaccucuucuggcuca

SEQ ID NO: 2319921 - RNA, 17 nt, Human
ucaaccucuucuggcuc

SEQ ID NO: 2319922 - RNA, 20 nt, Human
ucaaccccuucgcuccugug

SEQ ID NO: 2319923 - RNA, 15 nt, Human
ucaaccuccugggcu

SEQ ID NO: 2319924 - RNA, 18 nt, Human
ucaaccccuucgcuccug

SEQ ID NO: 2319925 - RNA, 19 nt, Human
ucaaccccuucgcuccugu

SEQ ID NO: 2319926 - RNA, 16 nt, Human
ucaagcccaggaggac

SEQ ID NO: 2319927 - RNA, 13 nt, Human
ucaagcccaggag

SEQ ID NO: 2319928 - RNA, 22 nt, Human
ucaagcccagccacguggagcc

SEQ ID NO: 2319929 - RNA, 21 nt, Human
ucaagcccagccacguggagc

SEQ ID NO: 2319930 - RNA, 17 nt, Human
ucaagccaauccccucc

SEQ ID NO: 2319931 - RNA, 18 nt, Human
ucaagccaauccccuccu

SEQ ID NO: 2319932 - RNA, 20 nt, Human
ucaagccaauccccuccuug

SEQ ID NO: 2319933 - RNA, 21 nt, Human
ucaagccaauccccuccuugg

SEQ ID NO: 2319934 - RNA, 12 nt, Human
ucaagccaccaa

SEQ ID NO: 2319935 - RNA, 20 nt, Human
ucaagccaccaacauacucc

SEQ ID NO: 2319936 - RNA, 21 nt, Human
ucaagcgauucuucugcuuca

SEQ ID NO: 2319937 - RNA, 19 nt, Human
ucaagcuucaguuuccugg

SEQ ID NO: 2319938 - RNA, 19 nt, Human
ucaaggaaaggggguccca

SEQ ID NO: 2319939 - RNA, 20 nt, Human
ucaaggaaagggggucccag

SEQ ID NO: 2319940 - RNA, 18 nt, Human
ucaaggaauaaugggcuu

SEQ ID NO: 2319941 - RNA, 21 nt, Human
ucaaggaaagggggucccagu

SEQ ID NO: 2319942 - RNA, 18 nt, Human
ucaagcgauucuucugcu

SEQ ID NO: 2319943 - RNA, 19 nt, Human
ucaagcgauucuucugcuu

SEQ ID NO: 2319944 - RNA, 19 nt, Human
ucaaggacuugaaagcauc

SEQ ID NO: 2319945 - RNA, 18 nt, Human
ucaaggacuugaaagcau

SEQ ID NO: 2319946 - RNA, 20 nt, Human
ucaaggacuuucugaagccu

SEQ ID NO: 2319947 - RNA, 13 nt, Human
ucaaggauccuga

SEQ ID NO: 2319948 - RNA, 14 nt, Human
ucaaggauccugag

SEQ ID NO: 2319949 - RNA, 15 nt, Human
ucaaggauccugagc

SEQ ID NO: 2319950 - RNA, 16 nt, Human
ucaaggauccugagcc

SEQ ID NO: 2319951 - RNA, 17 nt, Human
ucaaggauccugagcca

SEQ ID NO: 2319952 - RNA, 11 nt, Human
ucaauuaaacg

SEQ ID NO: 2319953 - RNA, 24 nt, Human
ucaauguucauuguaauguuacug

SEQ ID NO: 2319954 - RNA, 15 nt, Human
ucaauguuuucaguu

SEQ ID NO: 2319955 - RNA, 13 nt, Human
ucaauuaaacgga

SEQ ID NO: 2319956 - RNA, 14 nt, Human
ucaauuaaacggau

SEQ ID NO: 2319957 - RNA, 15 nt, Human
ucaauuaaacggauu

SEQ ID NO: 2319958 - RNA, 16 nt, Human
ucaauuaaacggauua

SEQ ID NO: 2319959 - RNA, 17 nt, Human
ucaauuaaacggauuau

SEQ ID NO: 2319960 - RNA, 18 nt, Human
ucaauuaaacggauuauu

SEQ ID NO: 2319961 - RNA, 19 nt, Human
ucaauuaaacggauuauuu

SEQ ID NO: 2319962 - RNA, 20 nt, Human
ucaauuaaacggauuauuuu

SEQ ID NO: 2319963 - RNA, 14 nt, Human
ucaauuaaauguag

SEQ ID NO: 2319964 - RNA, 19 nt, Human
ucaauuagaauaguguucu

SEQ ID NO: 2319965 - RNA, 12 nt, Human
ucaauuaaaugu

SEQ ID NO: 2319966 - RNA, 21 nt, Human
ucaauuaaacggauuauuuuu

SEQ ID NO: 2319967 - RNA, 13 nt, Human
ucaauuaaaugua

SEQ ID NO: 2319968 - RNA, 13 nt, Human
ucaauaaaaucau

SEQ ID NO: 2319969 - RNA, 14 nt, Human
ucaaggagaggagg

SEQ ID NO: 2319970 - RNA, 14 nt, Human
ucaauaaaauccau

SEQ ID NO: 2319971 - RNA, 18 nt, Human
ucaauguucauuguaaug

SEQ ID NO: 2319972 - RNA, 21 nt, Human
ucaauguuuaugcaaggaagg

SEQ ID NO: 2319973 - RNA, 21 nt, Human
ucaauaaaaucauguacauuu

SEQ ID NO: 2319974 - RNA, 18 nt, Human
ucaauaaaaucauguaca

SEQ ID NO: 2319975 - RNA, 16 nt, Human
ucaauaaaaucaugua

SEQ ID NO: 2319976 - RNA, 14 nt, Human
ucaauaaaaucaug

SEQ ID NO: 2319977 - RNA, 23 nt, Human
ucaauguuuaugcaaggaaggaa

SEQ ID NO: 2319978 - RNA, 22 nt, Human
ucaauguuuaugcaaggaagga

SEQ ID NO: 2319979 - RNA, 18 nt, Human
ucaauguuucuucuaggu

SEQ ID NO: 2319980 - RNA, 14 nt, Human
ucaauuccaccugc

SEQ ID NO: 2319981 - RNA, 13 nt, Human
ucaauucaacacu

SEQ ID NO: 2319982 - RNA, 17 nt, Human
ucaauucaacacucccu

SEQ ID NO: 2319983 - RNA, 14 nt, Human
ucaauuccucuggg

SEQ ID NO: 2319984 - RNA, 22 nt, Human
ucaauucccccuggccaccacc

SEQ ID NO: 2319985 - RNA, 22 nt, Human
ucacaagacccaaaaggcagaa

SEQ ID NO: 2319986 - RNA, 22 nt, Human
ucacaagugaaaaacauccaga

SEQ ID NO: 2319987 - RNA, 16 nt, Human
ucacaagugaaaaaca

SEQ ID NO: 2319988 - RNA, 21 nt, Human
ucacacacaggcaacugaggc

SEQ ID NO: 2319989 - RNA, 20 nt, Human
ucacacacaggcaacugagg

SEQ ID NO: 2319990 - RNA, 12 nt, Human
ucacacaccugu

SEQ ID NO: 2319991 - RNA, 22 nt, Human
ucacaagggcaaacuuuuuccu

SEQ ID NO: 2319992 - RNA, 22 nt, Human
ucacaaggcauucaaguguaca

SEQ ID NO: 2319993 - RNA, 17 nt, Human
ucacaagagcccagcag

SEQ ID NO: 2319994 - RNA, 22 nt, Human
ucaauuccguagccagcugcuc

SEQ ID NO: 2319995 - RNA, 19 nt, Human
ucaauuccguagccagcug

SEQ ID NO: 2319996 - RNA, 12 nt, Human
ucacaccagcca

SEQ ID NO: 2319997 - RNA, 16 nt, Human
ucacaggacucugccu

SEQ ID NO: 2319998 - RNA, 17 nt, Human
ucacaggacucugccuc

SEQ ID NO: 2319999 - RNA, 18 nt, Human
ucacaggacucugccucc

SEQ ID NO: 2320000 - RNA, 21 nt, Human
ucacaccaggcuugccugcag

SEQ ID NO: 2320001 - RNA, 22 nt, Human
ucacaccaggcuugccugcagg

SEQ ID NO: 2320002 - RNA, 11 nt, Human
ucacaccagcc

SEQ ID NO: 2320003 - RNA, 19 nt, Human
ucacacaggacccccuucc

SEQ ID NO: 2320004 - RNA, 20 nt, Human
ucacacaggacccccuuccc

SEQ ID NO: 2320005 - RNA, 21 nt, Human
ucacacaggacccccuucccc

SEQ ID NO: 2320006 - RNA, 22 nt, Human
ucacacaggacccccuuccccu

SEQ ID NO: 2320007 - RNA, 15 nt, Human
ucacacacuuuggcu

SEQ ID NO: 2320008 - RNA, 12 nt, Human
ucacacacugau

SEQ ID NO: 2320009 - RNA, 13 nt, Human
ucacacacgugag

SEQ ID NO: 2320010 - RNA, 18 nt, Human
ucacacagccaggugccu

SEQ ID NO: 2320011 - RNA, 19 nt, Human
ucacacagccaggugccuu

SEQ ID NO: 2320012 - RNA, 20 nt, Human
ucacacagccaggugccuug

SEQ ID NO: 2320013 - RNA, 22 nt, Human
ucacacagccaggugccuugga

SEQ ID NO: 2320014 - RNA, 23 nt, Human
ucacacagccaggugccuuggag

SEQ ID NO: 2320015 - RNA, 22 nt, Human
ucacacaugagcaucaggccag

SEQ ID NO: 2320016 - RNA, 23 nt, Human
ucacacaugagcaucaggccagg

SEQ ID NO: 2320017 - RNA, 13 nt, Human
ucacauucuuaua

SEQ ID NO: 2320018 - RNA, 15 nt, Human
ucacauucuuauaaa

SEQ ID NO: 2320019 - RNA, 17 nt, Human
ucacauucuuauaaaua

SEQ ID NO: 2320020 - RNA, 18 nt, Human
ucacauucuuauaaauau

SEQ ID NO: 2320021 - RNA, 19 nt, Human
ucacauucuuauaaauaug

SEQ ID NO: 2320022 - RNA, 21 nt, Human
ucacauucuuauaaauaugaa

SEQ ID NO: 2320023 - RNA, 17 nt, Human
ucacaggguugggccca

SEQ ID NO: 2320024 - RNA, 16 nt, Human
ucacaggguugggccc

SEQ ID NO: 2320025 - RNA, 14 nt, Human
ucacaggguugggc

SEQ ID NO: 2320026 - RNA, 13 nt, Human
ucacaccagccau

SEQ ID NO: 2320027 - RNA, 23 nt, Human
ucacaggguugggcccagaucug

SEQ ID NO: 2320028 - RNA, 19 nt, Human
ucacaggguugggcccaga

SEQ ID NO: 2320029 - RNA, 24 nt, Human
ucacaggguugggcccagaucugg

SEQ ID NO: 2320030 - RNA, 19 nt, Human
ucacaggacucugccuccu

SEQ ID NO: 2320031 - RNA, 23 nt, Human
ucacaggacucugccuccucuuc

SEQ ID NO: 2320032 - RNA, 23 nt, Human
ucacagggccccagaaggcaggg

SEQ ID NO: 2320033 - RNA, 19 nt, Human
ucacaggagggagggggaa

SEQ ID NO: 2320034 - RNA, 21 nt, Human
ucaccacuucaauagaucaaa

SEQ ID NO: 2320035 - RNA, 18 nt, Human
ucaccaccuucccagcuc

SEQ ID NO: 2320036 - RNA, 16 nt, Human
ucaccaccuucccagc

SEQ ID NO: 2320037 - RNA, 15 nt, Human
ucaccaccuucccag

SEQ ID NO: 2320038 - RNA, 14 nt, Human
ucaccaccuuccca

SEQ ID NO: 2320039 - RNA, 13 nt, Human
ucaccaccucucc

SEQ ID NO: 2320040 - RNA, 13 nt, Human
ucaccaagcccag

SEQ ID NO: 2320041 - RNA, 16 nt, Human
ucaccacaugugcaca

SEQ ID NO: 2320042 - RNA, 20 nt, Human
ucacauucuuauaaauauga

SEQ ID NO: 2320043 - RNA, 23 nt, Human
ucacauuguaacugaacuucagg

SEQ ID NO: 2320044 - RNA, 16 nt, Human
ucacccgaggcugccc

SEQ ID NO: 2320045 - RNA, 19 nt, Human
ucacccgaggcugcccacu

SEQ ID NO: 2320046 - RNA, 14 nt, Human
ucaccccuguccuc

SEQ ID NO: 2320047 - RNA, 16 nt, Human
ucaccccuguccucac

SEQ ID NO: 2320048 - RNA, 17 nt, Human
ucaccccuguccucacu

SEQ ID NO: 2320049 - RNA, 20 nt, Human
ucaccccuguccucacugcu

SEQ ID NO: 2320050 - RNA, 18 nt, Human
ucacccgcuaagagggag

SEQ ID NO: 2320051 - RNA, 21 nt, Human
ucaccccugguucucaucuuu

SEQ ID NO: 2320052 - RNA, 22 nt, Human
ucaccccugguucucaucuuuc

SEQ ID NO: 2320053 - RNA, 13 nt, Human
ucaccagaauaaa

SEQ ID NO: 2320054 - RNA, 13 nt, Human
ucaccccuguccu

SEQ ID NO: 2320055 - RNA, 21 nt, Human
ucaccaaaucagcugcuacua

SEQ ID NO: 2320056 - RNA, 14 nt, Human
ucacauuuauucug

SEQ ID NO: 2320057 - RNA, 17 nt, Human
ucaccaacgucugugcc

SEQ ID NO: 2320058 - RNA, 18 nt, Human
ucaccaacgucugugcca

SEQ ID NO: 2320059 - RNA, 12 nt, Human
ucacauuuaaau

SEQ ID NO: 2320060 - RNA, 22 nt, Human
ucacauuguauucagaguugau

SEQ ID NO: 2320061 - RNA, 21 nt, Human
ucacccuguccaaacugccua

SEQ ID NO: 2320062 - RNA, 19 nt, Human
ucacccuuaccaugugccu

SEQ ID NO: 2320063 - RNA, 18 nt, Human
ucacccuuaccaugugcc

SEQ ID NO: 2320064 - RNA, 13 nt, Human
ucacccuguccaa

SEQ ID NO: 2320065 - RNA, 20 nt, Human
ucacccuggggcuaggaaau

SEQ ID NO: 2320066 - RNA, 12 nt, Human
ucacccuuuucu

SEQ ID NO: 2320067 - RNA, 14 nt, Human
ucaccgaaaacgug

SEQ ID NO: 2320068 - RNA, 15 nt, Human
ucacccguccagacc

SEQ ID NO: 2320069 - RNA, 15 nt, Human
ucacccuaccugugc

SEQ ID NO: 2320070 - RNA, 17 nt, Human
ucacccuaccugugccu

SEQ ID NO: 2320071 - RNA, 19 nt, Human
ucacccgcuaagagggagg

SEQ ID NO: 2320072 - RNA, 23 nt, Human
ucacccugauuuaggagaagcca

SEQ ID NO: 2320073 - RNA, 19 nt, Human
ucacccugagccccuuccu

SEQ ID NO: 2320074 - RNA, 21 nt, Human
ucacccugagccccuuccuug

SEQ ID NO: 2320075 - RNA, 13 nt, Human
ucacccugccuua

SEQ ID NO: 2320076 - RNA, 15 nt, Human
ucacccugccuuauc

SEQ ID NO: 2320077 - RNA, 18 nt, Human
ucacccguccagaccuug

SEQ ID NO: 2320078 - RNA, 13 nt, Human
ucacccuccaccu

SEQ ID NO: 2320079 - RNA, 14 nt, Human
ucacccuccaccuc

SEQ ID NO: 2320080 - RNA, 15 nt, Human
ucacccuccaccucu

SEQ ID NO: 2320081 - RNA, 18 nt, Human
ucacccucguuuccagug

SEQ ID NO: 2320082 - RNA, 20 nt, Human
ucacccuccaccucuucacc

SEQ ID NO: 2320083 - RNA, 13 nt, Human
ucacccugagccc

SEQ ID NO: 2320084 - RNA, 23 nt, Human
ucaccgagaguagccgagagccu

SEQ ID NO: 2320085 - RNA, 20 nt, Human
ucaccgagaguagccgagag

SEQ ID NO: 2320086 - RNA, 16 nt, Human
ucaccgagugggggca

SEQ ID NO: 2320087 - RNA, 19 nt, Human
ucaccgcagucgucgcaca

SEQ ID NO: 2320088 - RNA, 20 nt, Human
ucaccgcagucgucgcacag

SEQ ID NO: 2320089 - RNA, 13 nt, Human
ucacccuuugcug

SEQ ID NO: 2320090 - RNA, 15 nt, Human
ucacccuuugcugug

SEQ ID NO: 2320091 - RNA, 22 nt, Human
ucacccuuugcugugaggcugu

SEQ ID NO: 2320092 - RNA, 15 nt, Human
ucaccgaagccacuu

SEQ ID NO: 2320093 - RNA, 17 nt, Human
ucaccgacgcgucuccu

SEQ ID NO: 2320094 - RNA, 22 nt, Human
ucaccgaaaacguggcugcuuc

SEQ ID NO: 2320095 - RNA, 23 nt, Human
ucaccgaaaacguggcugcuuca

SEQ ID NO: 2320096 - RNA, 15 nt, Human
ucaccgaaaacgugg

SEQ ID NO: 2320097 - RNA, 19 nt, Human
ucaccgaaaacguggcugc

SEQ ID NO: 2320098 - RNA, 20 nt, Human
ucaccgaaaacguggcugcu

SEQ ID NO: 2320099 - RNA, 21 nt, Human
ucaccgaaaacguggcugcuu

SEQ ID NO: 2320100 - RNA, 20 nt, Human
uauuuaugccucuguauuua

SEQ ID NO: 2320101 - RNA, 17 nt, Human
uauuuaugggauccugg

SEQ ID NO: 2320102 - RNA, 16 nt, Human
uauuuaucucuauuua

SEQ ID NO: 2320103 - RNA, 15 nt, Human
uauuuaucugauuaa

SEQ ID NO: 2320104 - RNA, 21 nt, Human
uauuuaucugauuaaguuguc

SEQ ID NO: 2320105 - RNA, 16 nt, Human
uauuuaucugauuaag

SEQ ID NO: 2320106 - RNA, 20 nt, Human
uauuuaucugugcaaauccu

SEQ ID NO: 2320107 - RNA, 21 nt, Human
uauuuaucuguaguaaacuau

SEQ ID NO: 2320108 - RNA, 17 nt, Human
uauuuaucucuauuuaa

SEQ ID NO: 2320109 - RNA, 22 nt, Human
uauuuaucuguguuuuugaaau

SEQ ID NO: 2320110 - RNA, 12 nt, Human
uauuuaucuuua

SEQ ID NO: 2320111 - RNA, 18 nt, Human
uauuuaucagugacagag

SEQ ID NO: 2320112 - RNA, 15 nt, Human
uauuuaucagugaca

SEQ ID NO: 2320113 - RNA, 21 nt, Human
uauuuauauuuuuauuuuauu

SEQ ID NO: 2320114 - RNA, 13 nt, Human
uauuuaucaguga

SEQ ID NO: 2320115 - RNA, 16 nt, Human
uauuuauauuucacua

SEQ ID NO: 2320116 - RNA, 15 nt, Human
uauuuauauuucacu

SEQ ID NO: 2320117 - RNA, 14 nt, Human
uauuuauauuucac

SEQ ID NO: 2320118 - RNA, 15 nt, Human
uauuuauauguacau

SEQ ID NO: 2320119 - RNA, 17 nt, Human
uauuuauauguacauga

SEQ ID NO: 2320120 - RNA, 18 nt, Human
uauuuaaagacaaagaca

SEQ ID NO: 2320121 - RNA, 17 nt, Human
uauuuaaagacaaagac

SEQ ID NO: 2320122 - RNA, 13 nt, Human
uauuuaaagacaa

SEQ ID NO: 2320123 - RNA, 12 nt, Human
uauuuaaagaca

SEQ ID NO: 2320124 - RNA, 18 nt, Human
uauuguuucaauugcauc

SEQ ID NO: 2320125 - RNA, 12 nt, Human
uauuguuucaau

SEQ ID NO: 2320126 - RNA, 22 nt, Human
uauuguuuaaagcaacugucua

SEQ ID NO: 2320127 - RNA, 22 nt, Human
uauuguuuauucuuuuuaaagu

SEQ ID NO: 2320128 - RNA, 24 nt, Human
uauuguuuauucuuuuuaaaguau

SEQ ID NO: 2320129 - RNA, 20 nt, Human
uauuguuuaaaaucauuucu

SEQ ID NO: 2320130 - RNA, 11 nt, Human
uauuguuuaaa

SEQ ID NO: 2320131 - RNA, 17 nt, Human
uauuguuuaaagcaacu

SEQ ID NO: 2320132 - RNA, 19 nt, Human
uauuuauauauuuauaacu

SEQ ID NO: 2320133 - RNA, 18 nt, Human
uauuuauauauuuauaac

SEQ ID NO: 2320134 - RNA, 17 nt, Human
uauuuauauauuuauaa

SEQ ID NO: 2320135 - RNA, 20 nt, Human
uauuuaaaugucuaauguau

SEQ ID NO: 2320136 - RNA, 15 nt, Human
uauuuaacaagaucu

SEQ ID NO: 2320137 - RNA, 19 nt, Human
uauuuaaaugucuaaugua

SEQ ID NO: 2320138 - RNA, 22 nt, Human
uauuuaaauauuaaauauguua

SEQ ID NO: 2320139 - RNA, 12 nt, Human
uauuuaaauguc

SEQ ID NO: 2320140 - RNA, 14 nt, Human
uauuuaaaugucua

SEQ ID NO: 2320141 - RNA, 11 nt, Human
uauuguuucua

SEQ ID NO: 2320142 - RNA, 14 nt, Human
uauuuaaagacagg

SEQ ID NO: 2320143 - RNA, 22 nt, Human
uauuuaaagacagggaagagca

SEQ ID NO: 2320144 - RNA, 13 nt, Human
uauuucuuuguua

SEQ ID NO: 2320145 - RNA, 21 nt, Human
uauuuauucagcuucauuugu

SEQ ID NO: 2320146 - RNA, 19 nt, Human
uauuugaaaacauauaaag

SEQ ID NO: 2320147 - RNA, 14 nt, Human
uauuucuuuguuau

SEQ ID NO: 2320148 - RNA, 14 nt, Human
uauuucuaugaaau

SEQ ID NO: 2320149 - RNA, 15 nt, Human
uauuucuaugaaaua

SEQ ID NO: 2320150 - RNA, 22 nt, Human
uauuugaaaacauauaaagcac

SEQ ID NO: 2320151 - RNA, 19 nt, Human
uauuugaaacugaauguuu

SEQ ID NO: 2320152 - RNA, 14 nt, Human
uauuugaaggccag

SEQ ID NO: 2320153 - RNA, 21 nt, Human
uauuugaauguaugcuucaua

SEQ ID NO: 2320154 - RNA, 19 nt, Human
uauuugaaucuugucucaa

SEQ ID NO: 2320155 - RNA, 20 nt, Human
uauuugaaucuugucucaau

SEQ ID NO: 2320156 - RNA, 12 nt, Human
uauuugaaucuu

SEQ ID NO: 2320157 - RNA, 14 nt, Human
uauuugaaucuugu

SEQ ID NO: 2320158 - RNA, 16 nt, Human
uauuugaaucuugucu

SEQ ID NO: 2320159 - RNA, 18 nt, Human
uauuugaaucuugucuca

SEQ ID NO: 2320160 - RNA, 19 nt, Human
uauuuauuauuuucaccug

SEQ ID NO: 2320161 - RNA, 12 nt, Human
uauuuauucaau

SEQ ID NO: 2320162 - RNA, 13 nt, Human
uauuuauucaaua

SEQ ID NO: 2320163 - RNA, 14 nt, Human
uauuuauucaauaa

SEQ ID NO: 2320164 - RNA, 14 nt, Human
uauuuauuauuuau

SEQ ID NO: 2320165 - RNA, 16 nt, Human
uauuuauucaauaaag

SEQ ID NO: 2320166 - RNA, 18 nt, Human
uauuuauucaauaaagua

SEQ ID NO: 2320167 - RNA, 19 nt, Human
uauuuauucaauaaaguau

SEQ ID NO: 2320168 - RNA, 20 nt, Human
uauuuauucaauaaaguauu

SEQ ID NO: 2320169 - RNA, 13 nt, Human
uauuucuaugaaa

SEQ ID NO: 2320170 - RNA, 14 nt, Human
uauuuaugugugag

SEQ ID NO: 2320171 - RNA, 21 nt, Human
uauuuaugucuauuuaagccu

SEQ ID NO: 2320172 - RNA, 13 nt, Human
uauuuauguuugc

SEQ ID NO: 2320173 - RNA, 23 nt, Human
uauuuauuaaacagauuuuuaca

SEQ ID NO: 2320174 - RNA, 22 nt, Human
uauuuauuaaaugcccagcccc

SEQ ID NO: 2320175 - RNA, 14 nt, Human
uauuuauuacugua

SEQ ID NO: 2320176 - RNA, 19 nt, Human
uauucauuuaaaaugauua

SEQ ID NO: 2320177 - RNA, 16 nt, Human
uauucauuuaaaauga

SEQ ID NO: 2320178 - RNA, 17 nt, Human
uauucauuuaaaaugau

SEQ ID NO: 2320179 - RNA, 12 nt, Human
uauucauuuaaa

SEQ ID NO: 2320180 - RNA, 13 nt, Human
uauucauuuaaaa

SEQ ID NO: 2320181 - RNA, 14 nt, Human
uauucauuuaaaau

SEQ ID NO: 2320182 - RNA, 15 nt, Human
uauucauuuaaaaug

SEQ ID NO: 2320183 - RNA, 13 nt, Human
uauucauguaaac

SEQ ID NO: 2320184 - RNA, 20 nt, Human
uauucauugaagucagaugu

SEQ ID NO: 2320185 - RNA, 13 nt, Human
uauuauuuuccaa

SEQ ID NO: 2320186 - RNA, 14 nt, Human
uauuauuuuccaaa

SEQ ID NO: 2320187 - RNA, 15 nt, Human
uauucaucucaagga

SEQ ID NO: 2320188 - RNA, 17 nt, Human
uauuauuuuuuccacau

SEQ ID NO: 2320189 - RNA, 14 nt, Human
uauucaugcuucuu

SEQ ID NO: 2320190 - RNA, 20 nt, Human
uauugauaugcuuauacacu

SEQ ID NO: 2320191 - RNA, 18 nt, Human
uauugauaacagcacuga

SEQ ID NO: 2320192 - RNA, 14 nt, Human
uauugauaacagca

SEQ ID NO: 2320193 - RNA, 22 nt, Human
uauugcagcgauuaauaacagg

SEQ ID NO: 2320194 - RNA, 23 nt, Human
uauugcacaugucuuaaugaagu

SEQ ID NO: 2320195 - RNA, 13 nt, Human
uauugcacauugu

SEQ ID NO: 2320196 - RNA, 17 nt, Human
uauugcacauuguaaaa

SEQ ID NO: 2320197 - RNA, 11 nt, Human
uauugcaguuu

SEQ ID NO: 2320198 - RNA, 13 nt, Human
uauugcaguuuau

SEQ ID NO: 2320199 - RNA, 15 nt, Human
uauugcaguuuauca

SEQ ID NO: 2320200 - RNA, 12 nt, Human
uauugcacaugu

SEQ ID NO: 2320201 - RNA, 14 nt, Human
uauugcacaugucu

SEQ ID NO: 2320202 - RNA, 16 nt, Human
uauugcacaugucuua

SEQ ID NO: 2320203 - RNA, 17 nt, Human
uauugcacaugucuuaa

SEQ ID NO: 2320204 - RNA, 20 nt, Human
uauugcacaugucuuaauga

SEQ ID NO: 2320205 - RNA, 22 nt, Human
uauugcacaugucuuaaugaag

SEQ ID NO: 2320206 - RNA, 15 nt, Human
uauugcauaugcaua

SEQ ID NO: 2320207 - RNA, 15 nt, Human
uauugcaguuauaga

SEQ ID NO: 2320208 - RNA, 22 nt, Human
uauugcaucuggguagcuguaa

SEQ ID NO: 2320209 - RNA, 14 nt, Human
uauugcaucuguau

SEQ ID NO: 2320210 - RNA, 15 nt, Human
uauugcaucuguaua

SEQ ID NO: 2320211 - RNA, 16 nt, Human
uauugcaucuguauaa

SEQ ID NO: 2320212 - RNA, 17 nt, Human
uauugcaucuguauaag

SEQ ID NO: 2320213 - RNA, 20 nt, Human
uauugcaguuuaucauucaa

SEQ ID NO: 2320214 - RNA, 19 nt, Human
uauugcaguuuaucauuca

SEQ ID NO: 2320215 - RNA, 22 nt, Human
uauugcauuuggauuggggucc

SEQ ID NO: 2320216 - RNA, 21 nt, Human
uauugcaucuguauaaguaag

SEQ ID NO: 2320217 - RNA, 15 nt, Human
uauugcauuaauuuu

SEQ ID NO: 2320218 - RNA, 15 nt, Human
uauugcuugcacaaa

SEQ ID NO: 2320219 - RNA, 21 nt, Human
uauugcuugauacuuuugaca

SEQ ID NO: 2320220 - RNA, 23 nt, Human
uauugcuucuucuccuaugugua

SEQ ID NO: 2320221 - RNA, 23 nt, Human
uauugcugauggugcaaugaccu

SEQ ID NO: 2320222 - RNA, 22 nt, Human
uauugcugauggugcaaugacc

SEQ ID NO: 2320223 - RNA, 22 nt, Human
uauugcugcugguaauuuguau

SEQ ID NO: 2320224 - RNA, 11 nt, Human
uauugcugggg

SEQ ID NO: 2320225 - RNA, 12 nt, Human
uauugcuggggu

SEQ ID NO: 2320226 - RNA, 13 nt, Human
uauugcccacgcu

SEQ ID NO: 2320227 - RNA, 14 nt, Human
uauugcccacgcug

SEQ ID NO: 2320228 - RNA, 15 nt, Human
uauugcccacgcugg

SEQ ID NO: 2320229 - RNA, 13 nt, Human
uauugcccagguu

SEQ ID NO: 2320230 - RNA, 19 nt, Human
uauuguguguuauuuaaau

SEQ ID NO: 2320231 - RNA, 19 nt, Human
uauugugucuuuugcauga

SEQ ID NO: 2320232 - RNA, 17 nt, Human
uauuguguguuauuuaa

SEQ ID NO: 2320233 - RNA, 16 nt, Human
uauugugucuuuugca

SEQ ID NO: 2320234 - RNA, 18 nt, Human
uauugugucuuuugcaug

SEQ ID NO: 2320235 - RNA, 21 nt, Human
uauuguucccagugacacuuc

SEQ ID NO: 2320236 - RNA, 17 nt, Human
uauuguucccagugaca

SEQ ID NO: 2320237 - RNA, 13 nt, Human
uauuguucccagu

SEQ ID NO: 2320238 - RNA, 23 nt, Human
uauuguuccagcaguuuucaagu

SEQ ID NO: 2320239 - RNA, 14 nt, Human
uauuguguugugaa

SEQ ID NO: 2320240 - RNA, 17 nt, Human
uauuguuuaaaaucauu

SEQ ID NO: 2320241 - RNA, 16 nt, Human
uauuguuuaaaaucau

SEQ ID NO: 2320242 - RNA, 15 nt, Human
uauuguuuaaaauca

SEQ ID NO: 2320243 - RNA, 13 nt, Human
uauuguugguaau

SEQ ID NO: 2320244 - RNA, 13 nt, Human
uauguucacuguc

SEQ ID NO: 2320245 - RNA, 22 nt, Human
uauguucuuaguggauguucug

SEQ ID NO: 2320246 - RNA, 14 nt, Human
uauguucacaccua

SEQ ID NO: 2320247 - RNA, 17 nt, Human
uauguucuaagaaguga

SEQ ID NO: 2320248 - RNA, 18 nt, Human
uauguugguagauucuaa

SEQ ID NO: 2320249 - RNA, 14 nt, Human
uauguugccuuuau

SEQ ID NO: 2320250 - RNA, 18 nt, Human
uauguugccuuuaugguu

SEQ ID NO: 2320251 - RNA, 20 nt, Human
uauguugccuuuaugguuuc

SEQ ID NO: 2320252 - RNA, 13 nt, Human
uauguugucaaag

SEQ ID NO: 2320253 - RNA, 14 nt, Human
uauguugcucaguc

SEQ ID NO: 2320254 - RNA, 17 nt, Human
uauguugcucagucucc

SEQ ID NO: 2320255 - RNA, 20 nt, Human
uauguugcucagucucccuu

SEQ ID NO: 2320256 - RNA, 16 nt, Human
uauguugucaaagaga

SEQ ID NO: 2320257 - RNA, 16 nt, Human
uauguuguccaauugu

SEQ ID NO: 2320258 - RNA, 21 nt, Human
uauguuguccaauuguugaca

SEQ ID NO: 2320259 - RNA, 21 nt, Human
uauguugcccaggcaggucuu

SEQ ID NO: 2320260 - RNA, 17 nt, Human
uauguugaagccuuugu

SEQ ID NO: 2320261 - RNA, 15 nt, Human
uauguugaauacuuu

SEQ ID NO: 2320262 - RNA, 12 nt, Human
uauguugaauac

SEQ ID NO: 2320263 - RNA, 16 nt, Human
uauguuguguucuaau

SEQ ID NO: 2320264 - RNA, 13 nt, Human
uauuaaauacaga

SEQ ID NO: 2320265 - RNA, 17 nt, Human
uauuaaauacagacacu

SEQ ID NO: 2320266 - RNA, 18 nt, Human
uauuaaauacagacacua

SEQ ID NO: 2320267 - RNA, 21 nt, Human
uauuaaauacagacacuaagu

SEQ ID NO: 2320268 - RNA, 15 nt, Human
uauuaaaugcccagc

SEQ ID NO: 2320269 - RNA, 17 nt, Human
uauuaaaugcccagccc

SEQ ID NO: 2320270 - RNA, 19 nt, Human
uauuaaaugcccagccccu

SEQ ID NO: 2320271 - RNA, 23 nt, Human
uauuaaauauaugauuagccagg

SEQ ID NO: 2320272 - RNA, 16 nt, Human
uauuaacaaauuaugu

SEQ ID NO: 2320273 - RNA, 23 nt, Human
uauuaacaaacaucacucugcug

SEQ ID NO: 2320274 - RNA, 18 nt, Human
uauuaacaaauuauguua

SEQ ID NO: 2320275 - RNA, 23 nt, Human
uauuaacaacaauaacacugucu

SEQ ID NO: 2320276 - RNA, 16 nt, Human
uauuaagaaagacuau

SEQ ID NO: 2320277 - RNA, 15 nt, Human
uauggaggauggaga

SEQ ID NO: 2320278 - RNA, 13 nt, Human
uauggauaaugcc

SEQ ID NO: 2320279 - RNA, 17 nt, Human
uauggagcucagagagg

SEQ ID NO: 2320280 - RNA, 18 nt, Human
uauggagcucagagaggg

SEQ ID NO: 2320281 - RNA, 19 nt, Human
uauggaggcuuugcauaga

SEQ ID NO: 2320282 - RNA, 13 nt, Human
uauguguguuuaa

SEQ ID NO: 2320283 - RNA, 14 nt, Human
uauguguguuuaaa

SEQ ID NO: 2320284 - RNA, 17 nt, Human
uauguguguuuaaauaa

SEQ ID NO: 2320285 - RNA, 20 nt, Human
uauguguguuuaaauaaagu

SEQ ID NO: 2320286 - RNA, 21 nt, Human
uauguguguuuaaauaaagua

SEQ ID NO: 2320287 - RNA, 13 nt, Human
uauguguguuuua

SEQ ID NO: 2320288 - RNA, 16 nt, Human
uauggacggugcucca

SEQ ID NO: 2320289 - RNA, 13 nt, Human
uauggacuaucug

SEQ ID NO: 2320290 - RNA, 17 nt, Human
uauggacuaucugucug

SEQ ID NO: 2320291 - RNA, 18 nt, Human
uauggacuaucugucugg

SEQ ID NO: 2320292 - RNA, 12 nt, Human
uauggacucugc

SEQ ID NO: 2320293 - RNA, 21 nt, Human
uauggacuaucugucuggugg

SEQ ID NO: 2320294 - RNA, 16 nt, Human
uauggacucugcacau

SEQ ID NO: 2320295 - RNA, 14 nt, Human
uauggaggcaggag

SEQ ID NO: 2320296 - RNA, 15 nt, Human
uauggagagaaaaca

SEQ ID NO: 2320297 - RNA, 21 nt, Human
uauggacggugcuccaggcag

SEQ ID NO: 2320298 - RNA, 15 nt, Human
uauggacucugcaca

SEQ ID NO: 2320299 - RNA, 18 nt, Human
uauggagcccuguaauuu

SEQ ID NO: 2320300 - RNA, 22 nt, Human
uauguuacaucuguuuuaaauu

SEQ ID NO: 2320301 - RNA, 19 nt, Human
uauguuacaucuguuuuaa

SEQ ID NO: 2320302 - RNA, 14 nt, Human
uauguuauaucaac

SEQ ID NO: 2320303 - RNA, 19 nt, Human
uauguuagugcaaauuguc

SEQ ID NO: 2320304 - RNA, 19 nt, Human
uauguuaagcucuuuauga

SEQ ID NO: 2320305 - RNA, 15 nt, Human
uauguuaaguuacuu

SEQ ID NO: 2320306 - RNA, 19 nt, Human
uauguuaagggaagaauuc

SEQ ID NO: 2320307 - RNA, 14 nt, Human
uauguuaagcucuu

SEQ ID NO: 2320308 - RNA, 18 nt, Human
uauguuaagcucuuuaug

SEQ ID NO: 2320309 - RNA, 18 nt, Human
uauguuacuacaugcacu

SEQ ID NO: 2320310 - RNA, 17 nt, Human
uauguguuuuucacauu

SEQ ID NO: 2320311 - RNA, 15 nt, Human
uauguguuugugugu

SEQ ID NO: 2320312 - RNA, 16 nt, Human
uauguguuuuucacau

SEQ ID NO: 2320313 - RNA, 15 nt, Human
uauguguuuuucaca

SEQ ID NO: 2320314 - RNA, 22 nt, Human
uauguuaaccucagugucauuu

SEQ ID NO: 2320315 - RNA, 20 nt, Human
uauguuaaccucagugucau

SEQ ID NO: 2320316 - RNA, 19 nt, Human
uauguuaaccucaguguca

SEQ ID NO: 2320317 - RNA, 20 nt, Human
uauguuaaacuagcauaucu

SEQ ID NO: 2320318 - RNA, 21 nt, Human
uauguuaaacuagcauaucug

SEQ ID NO: 2320319 - RNA, 14 nt, Human
uauguguuggcuug

SEQ ID NO: 2320320 - RNA, 12 nt, Human
uauguuaaaacu

SEQ ID NO: 2320321 - RNA, 15 nt, Human
uauuaaguuguuaau

SEQ ID NO: 2320322 - RNA, 14 nt, Human
uauuaaggaagaca

SEQ ID NO: 2320323 - RNA, 15 nt, Human
uauuaagauuuccaa

SEQ ID NO: 2320324 - RNA, 17 nt, Human
uauuaagauuuccaagu

SEQ ID NO: 2320325 - RNA, 16 nt, Human
uauuauaacuuaaaaa

SEQ ID NO: 2320326 - RNA, 19 nt, Human
uauuaauaaacauucuauc

SEQ ID NO: 2320327 - RNA, 15 nt, Human
uauuauaauuuaaug

SEQ ID NO: 2320328 - RNA, 12 nt, Human
uauuauaauuua

SEQ ID NO: 2320329 - RNA, 15 nt, Human
uauuauaacuuaaaa

SEQ ID NO: 2320330 - RNA, 13 nt, Human
uauuauaccuuuu

SEQ ID NO: 2320331 - RNA, 12 nt, Human
uauuauaccuuu

SEQ ID NO: 2320332 - RNA, 19 nt, Human
uauuauacuaagaaaagau

SEQ ID NO: 2320333 - RNA, 18 nt, Human
uauuauacuaagaaaaga

SEQ ID NO: 2320334 - RNA, 15 nt, Human
uauuauacuaagaaa

SEQ ID NO: 2320335 - RNA, 14 nt, Human
uauuauaauuguau

SEQ ID NO: 2320336 - RNA, 19 nt, Human
uauuauaauuuuuuucaau

SEQ ID NO: 2320337 - RNA, 14 nt, Human
uauuauaccuuuuu

SEQ ID NO: 2320338 - RNA, 13 nt, Human
uauuauacuguau

SEQ ID NO: 2320339 - RNA, 14 nt, Human
uauuauacuguauu

SEQ ID NO: 2320340 - RNA, 15 nt, Human
uauuauacuguauua

SEQ ID NO: 2320341 - RNA, 19 nt, Human
uauuauacuguauuaagag

SEQ ID NO: 2320342 - RNA, 17 nt, Human
uauuauauuuacaaaug

SEQ ID NO: 2320343 - RNA, 15 nt, Human
uauuauuguguguua

SEQ ID NO: 2320344 - RNA, 21 nt, Human
uauuaugucucuucugagcua

SEQ ID NO: 2320345 - RNA, 13 nt, Human
uauuauuuauaua

SEQ ID NO: 2320346 - RNA, 12 nt, Human
uauuauuguucu

SEQ ID NO: 2320347 - RNA, 12 nt, Human
uauuauguguuu

SEQ ID NO: 2320348 - RNA, 16 nt, Human
uauuauuuucaccugu

SEQ ID NO: 2320349 - RNA, 12 nt, Human
uauuauuuucca

SEQ ID NO: 2320350 - RNA, 15 nt, Human
uauuauuuucaccug

SEQ ID NO: 2320351 - RNA, 14 nt, Human
uauuauuuguguuu

SEQ ID NO: 2320352 - RNA, 16 nt, Human
uauuauuucaauguga

SEQ ID NO: 2320353 - RNA, 19 nt, Human
uauuauuucuaggaagaau

SEQ ID NO: 2320354 - RNA, 20 nt, Human
uauuauuucuaggaagaauu

SEQ ID NO: 2320355 - RNA, 22 nt, Human
uauuauuucuaggaagaauuuu

SEQ ID NO: 2320356 - RNA, 20 nt, Human
uauuauggaggcaggaguuu

SEQ ID NO: 2320357 - RNA, 17 nt, Human
uauuaugucucuucuga

SEQ ID NO: 2320358 - RNA, 16 nt, Human
uauuauguuaaaacug

SEQ ID NO: 2320359 - RNA, 21 nt, Human
uauuauggaagauuuuaaauu

SEQ ID NO: 2320360 - RNA, 13 nt, Human
uauuaugcuucuu

SEQ ID NO: 2320361 - RNA, 14 nt, Human
uauuaugcuucuug

SEQ ID NO: 2320362 - RNA, 24 nt, Human
uauuaugcccaguuucugccucug

SEQ ID NO: 2320363 - RNA, 16 nt, Human
uauuauccccauuucu

SEQ ID NO: 2320364 - RNA, 22 nt, Human
uauuaucaugcaaaugcuguau

SEQ ID NO: 2320365 - RNA, 18 nt, Human
uauuaucaugcaaaugcu

SEQ ID NO: 2320366 - RNA, 16 nt, Human
uauuaucaugcaaaug

SEQ ID NO: 2320367 - RNA, 15 nt, Human
uauuaucaacaauag

SEQ ID NO: 2320368 - RNA, 18 nt, Human
uaguaguaugaugauaca

SEQ ID NO: 2320369 - RNA, 19 nt, Human
uaggugcccuuggaggcca

SEQ ID NO: 2320370 - RNA, 18 nt, Human
uaggugcuacaaaaacac

SEQ ID NO: 2320371 - RNA, 21 nt, Human
uaggugaucucauuuaauccu

SEQ ID NO: 2320372 - RNA, 23 nt, Human
uaggugacagagugagacucugu

SEQ ID NO: 2320373 - RNA, 21 nt, Human
uaggugauccacucgccuuca

SEQ ID NO: 2320374 - RNA, 16 nt, Human
uaguauaucuggacaa

SEQ ID NO: 2320375 - RNA, 19 nt, Human
uaguauaucuggacaagcc

SEQ ID NO: 2320376 - RNA, 23 nt, Human
uaguaucaaauauuagaugugau

SEQ ID NO: 2320377 - RNA, 12 nt, Human
uaguauccucca

SEQ ID NO: 2320378 - RNA, 14 nt, Human
uaguaucaaauauu

SEQ ID NO: 2320379 - RNA, 20 nt, Human
uaguaucaaauauuagaugu

SEQ ID NO: 2320380 - RNA, 21 nt, Human
uaguaucaaauauuagaugug

SEQ ID NO: 2320381 - RNA, 13 nt, Human
uaguauccuccag

SEQ ID NO: 2320382 - RNA, 14 nt, Human
uaguauccuccagg

SEQ ID NO: 2320383 - RNA, 15 nt, Human
uaguauccuccaggu

SEQ ID NO: 2320384 - RNA, 19 nt, Human
uaguauacauugucucuaa

SEQ ID NO: 2320385 - RNA, 16 nt, Human
uaguauaaagaaaagu

SEQ ID NO: 2320386 - RNA, 14 nt, Human
uaguauaaagaaaa

SEQ ID NO: 2320387 - RNA, 19 nt, Human
uaguaguuccugcuacaac

SEQ ID NO: 2320388 - RNA, 13 nt, Human
uaguaucaaaaga

SEQ ID NO: 2320389 - RNA, 15 nt, Human
uaguaucuaacaugu

SEQ ID NO: 2320390 - RNA, 14 nt, Human
uaguaucuaacaug

SEQ ID NO: 2320391 - RNA, 19 nt, Human
uaguaucuagcaaucacaa

SEQ ID NO: 2320392 - RNA, 16 nt, Human
uaguauccuccagguu

SEQ ID NO: 2320393 - RNA, 17 nt, Human
uaguauccuccagguuu

SEQ ID NO: 2320394 - RNA, 18 nt, Human
uaguauccuccagguuuu

SEQ ID NO: 2320395 - RNA, 19 nt, Human
uaguauccuccagguuuuu

SEQ ID NO: 2320396 - RNA, 20 nt, Human
uaguauccuccagguuuuuc

SEQ ID NO: 2320397 - RNA, 21 nt, Human
uaguauccuccagguuuuuca

SEQ ID NO: 2320398 - RNA, 22 nt, Human
uaguauccuccagguuuuucaa

SEQ ID NO: 2320399 - RNA, 23 nt, Human
uaguauccuccagguuuuucaau

SEQ ID NO: 2320400 - RNA, 16 nt, Human
uaguauuucuaugaaa

SEQ ID NO: 2320401 - RNA, 16 nt, Human
uaguaucuagcaauca

SEQ ID NO: 2320402 - RNA, 18 nt, Human
uaguauuucuaugaaaua

SEQ ID NO: 2320403 - RNA, 19 nt, Human
uaguauuucuaugaaauau

SEQ ID NO: 2320404 - RNA, 17 nt, Human
uagugcccuccacagcc

SEQ ID NO: 2320405 - RNA, 22 nt, Human
uagugccugagaguauuuaggc

SEQ ID NO: 2320406 - RNA, 23 nt, Human
uagugcccuccacagccgcagcc

SEQ ID NO: 2320407 - RNA, 14 nt, Human
uagugcggacaagu

SEQ ID NO: 2320408 - RNA, 19 nt, Human
uagugccuucuaaaggugu

SEQ ID NO: 2320409 - RNA, 16 nt, Human
uagugccuucuaaagg

SEQ ID NO: 2320410 - RNA, 19 nt, Human
uagugcggacaaguuuuaa

SEQ ID NO: 2320411 - RNA, 17 nt, Human
uagugcggacaaguuuu

SEQ ID NO: 2320412 - RNA, 12 nt, Human
uagugucuauca

SEQ ID NO: 2320413 - RNA, 13 nt, Human
uagugcuaagugu

SEQ ID NO: 2320414 - RNA, 15 nt, Human
uaguguguucugauu

SEQ ID NO: 2320415 - RNA, 22 nt, Human
uaguguggaaauuaagaagaaa

SEQ ID NO: 2320416 - RNA, 18 nt, Human
uaguguggaaauuaagaa

SEQ ID NO: 2320417 - RNA, 19 nt, Human
uaguguguucugauuagaa

SEQ ID NO: 2320418 - RNA, 12 nt, Human
uaguguuaauca

SEQ ID NO: 2320419 - RNA, 20 nt, Human
uaguguguucugauuagaaa

SEQ ID NO: 2320420 - RNA, 14 nt, Human
uaguguuaaucaau

SEQ ID NO: 2320421 - RNA, 15 nt, Human
uaguguuaaucaauu

SEQ ID NO: 2320422 - RNA, 16 nt, Human
uaguguuaaucaauuu

SEQ ID NO: 2320423 - RNA, 23 nt, Human
uaguguuaaucaauuuaaaccca

SEQ ID NO: 2320424 - RNA, 17 nt, Human
uaguugagccagcagac

SEQ ID NO: 2320425 - RNA, 19 nt, Human
uaguugagccagcagacau

SEQ ID NO: 2320426 - RNA, 20 nt, Human
uaguugagccagcagacauu

SEQ ID NO: 2320427 - RNA, 21 nt, Human
uaguugagccagcagacauug

SEQ ID NO: 2320428 - RNA, 22 nt, Human
uaguugagccagcagacauugu

SEQ ID NO: 2320429 - RNA, 20 nt, Human
uaguugcaacuuuguauaaa

SEQ ID NO: 2320430 - RNA, 16 nt, Human
uagucaaauuauguau

SEQ ID NO: 2320431 - RNA, 18 nt, Human
uagucaaaccauaaacuu

SEQ ID NO: 2320432 - RNA, 22 nt, Human
uagugcagcugauuuuaacaau

SEQ ID NO: 2320433 - RNA, 20 nt, Human
uagugcagcugauuuuaaca

SEQ ID NO: 2320434 - RNA, 19 nt, Human
uagugcagcugauuuuaac

SEQ ID NO: 2320435 - RNA, 18 nt, Human
uagugcagcugauuuuaa

SEQ ID NO: 2320436 - RNA, 17 nt, Human
uagugcagcugauuuua

SEQ ID NO: 2320437 - RNA, 15 nt, Human
uagugcagcugauuu

SEQ ID NO: 2320438 - RNA, 14 nt, Human
uagugcagcugauu

SEQ ID NO: 2320439 - RNA, 13 nt, Human
uagugcagcugau

SEQ ID NO: 2320440 - RNA, 12 nt, Human
uagugcagcuga

SEQ ID NO: 2320441 - RNA, 13 nt, Human
uagucaaauugug

SEQ ID NO: 2320442 - RNA, 14 nt, Human
uagucaaauugugu

SEQ ID NO: 2320443 - RNA, 14 nt, Human
uagugcaaauuguc

SEQ ID NO: 2320444 - RNA, 15 nt, Human
uagugcaaauuguca

SEQ ID NO: 2320445 - RNA, 14 nt, Human
uaggucagugaggc

SEQ ID NO: 2320446 - RNA, 24 nt, Human
uaggucacuggcucuccaagugcc

SEQ ID NO: 2320447 - RNA, 14 nt, Human
uaggucacuggcuc

SEQ ID NO: 2320448 - RNA, 19 nt, Human
uaggucacuggcucuccaa

SEQ ID NO: 2320449 - RNA, 20 nt, Human
uaggucacuggcucuccaag

SEQ ID NO: 2320450 - RNA, 21 nt, Human
uaggucacuggcucuccaagu

SEQ ID NO: 2320451 - RNA, 16 nt, Human
uaggucagugcaaaua

SEQ ID NO: 2320452 - RNA, 18 nt, Human
uaggucaagaagaagaug

SEQ ID NO: 2320453 - RNA, 12 nt, Human
uaggucacuggc

SEQ ID NO: 2320454 - RNA, 15 nt, Human
uaggucacuccuggg

SEQ ID NO: 2320455 - RNA, 15 nt, Human
uagguaugaauaagu

SEQ ID NO: 2320456 - RNA, 14 nt, Human
uagguauuucaaaa

SEQ ID NO: 2320457 - RNA, 16 nt, Human
uaggucaagaagaaga

SEQ ID NO: 2320458 - RNA, 11 nt, Human
uagguauuuug

SEQ ID NO: 2320459 - RNA, 14 nt, Human
uagguauacagugg

SEQ ID NO: 2320460 - RNA, 20 nt, Human
uagguauaaguggugugugu

SEQ ID NO: 2320461 - RNA, 20 nt, Human
uaggcucugcacagauggau

SEQ ID NO: 2320462 - RNA, 14 nt, Human
uagguaggguuuaa

SEQ ID NO: 2320463 - RNA, 14 nt, Human
uagguagauguuca

SEQ ID NO: 2320464 - RNA, 15 nt, Human
uagguagauguucag

SEQ ID NO: 2320465 - RNA, 16 nt, Human
uagguaaauuacaguu

SEQ ID NO: 2320466 - RNA, 13 nt, Human
uagguaacuucau

SEQ ID NO: 2320467 - RNA, 14 nt, Human
uagguacacagcuc

SEQ ID NO: 2320468 - RNA, 22 nt, Human
uaggcuccgucaguaucaggcc

SEQ ID NO: 2320469 - RNA, 11 nt, Human
uaggcucugca

SEQ ID NO: 2320470 - RNA, 22 nt, Human
uaggcuccugccaguguggaac

SEQ ID NO: 2320471 - RNA, 15 nt, Human
uaggcuauucacaac

SEQ ID NO: 2320472 - RNA, 19 nt, Human
uaggcucagagaugugcac

SEQ ID NO: 2320473 - RNA, 14 nt, Human
uaggcuauucacaa

SEQ ID NO: 2320474 - RNA, 20 nt, Human
uaggccugggugcuggcugc

SEQ ID NO: 2320475 - RNA, 23 nt, Human
uaggccuuccucucuccagaugu

SEQ ID NO: 2320476 - RNA, 21 nt, Human
uagggaaaaaccagcguguga

SEQ ID NO: 2320477 - RNA, 20 nt, Human
uagggaaaaaccagcgugug

SEQ ID NO: 2320478 - RNA, 19 nt, Human
uagggaaaaaccagcgugu

SEQ ID NO: 2320479 - RNA, 21 nt, Human
uaggcucugcacagauggauu

SEQ ID NO: 2320480 - RNA, 18 nt, Human
uaggcucugcacagaugg

SEQ ID NO: 2320481 - RNA, 15 nt, Human
uaggcucugcacaga

SEQ ID NO: 2320482 - RNA, 13 nt, Human
uaggacccuuccc

SEQ ID NO: 2320483 - RNA, 18 nt, Human
uaggccaugggacaggga

SEQ ID NO: 2320484 - RNA, 16 nt, Human
uaggccaugggacagg

SEQ ID NO: 2320485 - RNA, 22 nt, Human
uaggaccaagcaucuugggggg

SEQ ID NO: 2320486 - RNA, 18 nt, Human
uaggaccaagcaucuugg

SEQ ID NO: 2320487 - RNA, 15 nt, Human
uaggccuggccagau

SEQ ID NO: 2320488 - RNA, 21 nt, Human
uaggcccccacuugccucuuc

SEQ ID NO: 2320489 - RNA, 14 nt, Human
uaggcccccacuug

SEQ ID NO: 2320490 - RNA, 19 nt, Human
uaggcccccacuugccucu

SEQ ID NO: 2320491 - RNA, 13 nt, Human
uaggccugggugc

SEQ ID NO: 2320492 - RNA, 19 nt, Human
uaggccugggugcuggcug

SEQ ID NO: 2320493 - RNA, 16 nt, Human
uaggccugggugcugg

SEQ ID NO: 2320494 - RNA, 21 nt, Human
uaggccuuccucucuccagau

SEQ ID NO: 2320495 - RNA, 18 nt, Human
uaggccuggccagaugca

SEQ ID NO: 2320496 - RNA, 12 nt, Human
uaggaaucagca

SEQ ID NO: 2320497 - RNA, 19 nt, Human
guggcugacccagucccug

SEQ ID NO: 2320498 - RNA, 17 nt, Human
guggcugacccaguccc

SEQ ID NO: 2320499 - RNA, 15 nt, Human
guggcugacccaguc

SEQ ID NO: 2320500 - RNA, 14 nt, Human
guggcugacccagu

SEQ ID NO: 2320501 - RNA, 15 nt, Human
guggcucugcuggcc

SEQ ID NO: 2320502 - RNA, 21 nt, Human
guggcucugaggugccugucc

SEQ ID NO: 2320503 - RNA, 15 nt, Human
guggcugagccccug

SEQ ID NO: 2320504 - RNA, 17 nt, Human
guggcugagccccuguc

SEQ ID NO: 2320505 - RNA, 17 nt, Human
guggcugaggaggccuc

SEQ ID NO: 2320506 - RNA, 18 nt, Human
guggcugaggaggccucc

SEQ ID NO: 2320507 - RNA, 15 nt, Human
guggcugcagcagcg

SEQ ID NO: 2320508 - RNA, 23 nt, Human
guggcugcagcagcgguggccuc

SEQ ID NO: 2320509 - RNA, 20 nt, Human
uaggacaaucaguccccucc

SEQ ID NO: 2320510 - RNA, 17 nt, Human
uaggaccaagcaucuug

SEQ ID NO: 2320511 - RNA, 20 nt, Human
uaggacauaaauuagagguc

SEQ ID NO: 2320512 - RNA, 18 nt, Human
uaggacaaucaguccccu

SEQ ID NO: 2320513 - RNA, 19 nt, Human
uaggaauucuuuuggggaa

SEQ ID NO: 2320514 - RNA, 16 nt, Human
uaggaauuguguuuau

SEQ ID NO: 2320515 - RNA, 21 nt, Human
uaggaauucccagcccaaagc

SEQ ID NO: 2320516 - RNA, 18 nt, Human
uaggaauuaaguuaucuu

SEQ ID NO: 2320517 - RNA, 17 nt, Human
uaggaaugugaaagcac

SEQ ID NO: 2320518 - RNA, 14 nt, Human
uaggaaucagcaag

SEQ ID NO: 2320519 - RNA, 15 nt, Human
uaggaaucagcaaga

SEQ ID NO: 2320520 - RNA, 12 nt, Human
uaggaauugacc

SEQ ID NO: 2320521 - RNA, 15 nt, Human
uauaauacuguauuu

SEQ ID NO: 2320522 - RNA, 17 nt, Human
uauaauauacuauauuu

SEQ ID NO: 2320523 - RNA, 21 nt, Human
uauaauaaaaggaaaagcaaa

SEQ ID NO: 2320524 - RNA, 16 nt, Human
uauaauaaauguacau

SEQ ID NO: 2320525 - RNA, 16 nt, Human
uauaauauauuugugu

SEQ ID NO: 2320526 - RNA, 22 nt, Human
uauaauauauuuguguauuuaa

SEQ ID NO: 2320527 - RNA, 22 nt, Human
uauaauauuuuuaauuaaauaa

SEQ ID NO: 2320528 - RNA, 15 nt, Human
uauaauauccuuugu

SEQ ID NO: 2320529 - RNA, 15 nt, Human
uauaauauauuugug

SEQ ID NO: 2320530 - RNA, 20 nt, Human
uauaauauacuauauuuaug

SEQ ID NO: 2320531 - RNA, 16 nt, Human
uauaaaugguguuuuu

SEQ ID NO: 2320532 - RNA, 16 nt, Human
uauaaaugcuauuuuu

SEQ ID NO: 2320533 - RNA, 20 nt, Human
uauaaauuccucuuugcuuu

SEQ ID NO: 2320534 - RNA, 22 nt, Human
uauaaauuauguuuauauaaau

SEQ ID NO: 2320535 - RNA, 13 nt, Human
uauaauaaaagga

SEQ ID NO: 2320536 - RNA, 14 nt, Human
uauaauaaaaggaa

SEQ ID NO: 2320537 - RNA, 14 nt, Human
uauaaauuccucuu

SEQ ID NO: 2320538 - RNA, 14 nt, Human
uauaaauuauguuu

SEQ ID NO: 2320539 - RNA, 16 nt, Human
uauaaauuauguuuau

SEQ ID NO: 2320540 - RNA, 22 nt, Human
uauaauaaaaggaaaagcaaau

SEQ ID NO: 2320541 - RNA, 22 nt, Human
uauaaagaacaagguaguuuuu

SEQ ID NO: 2320542 - RNA, 18 nt, Human
uauaaagaagaacuugca

SEQ ID NO: 2320543 - RNA, 15 nt, Human
uauaaagaacaaggu

SEQ ID NO: 2320544 - RNA, 21 nt, Human
uauaaacuuuagaguagcaug

SEQ ID NO: 2320545 - RNA, 22 nt, Human
uauaaacuuuagaguagcauga

SEQ ID NO: 2320546 - RNA, 15 nt, Human
uauaaacuuuagagu

SEQ ID NO: 2320547 - RNA, 13 nt, Human
uauaaacuuuaga

SEQ ID NO: 2320548 - RNA, 18 nt, Human
uauaaacuuuaccuuuuu

SEQ ID NO: 2320549 - RNA, 22 nt, Human
uaguugcguggacucugcacau

SEQ ID NO: 2320550 - RNA, 18 nt, Human
uaguugcagacucaguuu

SEQ ID NO: 2320551 - RNA, 23 nt, Human
uaguugcagacucaguuugucag

SEQ ID NO: 2320552 - RNA, 19 nt, Human
uaguugcagaaacauuuug

SEQ ID NO: 2320553 - RNA, 17 nt, Human
uaguugcagaaacauuu

SEQ ID NO: 2320554 - RNA, 16 nt, Human
uaguugcaauugaauu

SEQ ID NO: 2320555 - RNA, 14 nt, Human
uaguugcaauugaa

SEQ ID NO: 2320556 - RNA, 17 nt, Human
uaguugcaauagaacag

SEQ ID NO: 2320557 - RNA, 23 nt, Human
uaguugagccagcagacauuguc

SEQ ID NO: 2320558 - RNA, 12 nt, Human
uaguugagcccc

SEQ ID NO: 2320559 - RNA, 13 nt, Human
uaguugagcccca

SEQ ID NO: 2320560 - RNA, 17 nt, Human
uaguugagccccaaguc

SEQ ID NO: 2320561 - RNA, 21 nt, Human
uauaaaggaaaaaagagaagu

SEQ ID NO: 2320562 - RNA, 23 nt, Human
uauaaaucgcuuuugauaaucaa

SEQ ID NO: 2320563 - RNA, 20 nt, Human
uauaaaucgcuuuugauaau

SEQ ID NO: 2320564 - RNA, 15 nt, Human
uauaaaugcaauauu

SEQ ID NO: 2320565 - RNA, 18 nt, Human
uauaaaugccaaagucuu

SEQ ID NO: 2320566 - RNA, 14 nt, Human
uauaaaugcuauuu

SEQ ID NO: 2320567 - RNA, 17 nt, Human
uauaaagauggcugacu

SEQ ID NO: 2320568 - RNA, 21 nt, Human
uauaaagccuguauucucaaa

SEQ ID NO: 2320569 - RNA, 19 nt, Human
uauaaagaagaacuugcau

SEQ ID NO: 2320570 - RNA, 14 nt, Human
uauaauucuguaaa

SEQ ID NO: 2320571 - RNA, 15 nt, Human
uauaauucuguaaau

SEQ ID NO: 2320572 - RNA, 16 nt, Human
uauaauucuguaaaug

SEQ ID NO: 2320573 - RNA, 13 nt, Human
uauaauucuguac

SEQ ID NO: 2320574 - RNA, 14 nt, Human
uauaauucuguaca

SEQ ID NO: 2320575 - RNA, 15 nt, Human
uauaauucuguacau

SEQ ID NO: 2320576 - RNA, 19 nt, Human
uauaauucuguacauagcc

SEQ ID NO: 2320577 - RNA, 20 nt, Human
uauaauucuguacauagccu

SEQ ID NO: 2320578 - RNA, 21 nt, Human
uauaauucuguacauagccua

SEQ ID NO: 2320579 - RNA, 22 nt, Human
uauaauucuguacauagccuau

SEQ ID NO: 2320580 - RNA, 19 nt, Human
uauaauuaucggaagcagu

SEQ ID NO: 2320581 - RNA, 18 nt, Human
uauaauuacauauuugca

SEQ ID NO: 2320582 - RNA, 15 nt, Human
uauaauucacauugu

SEQ ID NO: 2320583 - RNA, 22 nt, Human
uauaauuguaucguauagcugu

SEQ ID NO: 2320584 - RNA, 12 nt, Human
uauaauuguauc

SEQ ID NO: 2320585 - RNA, 18 nt, Human
uauaauuguaucagaggc

SEQ ID NO: 2320586 - RNA, 13 nt, Human
uauaauuguaucg

SEQ ID NO: 2320587 - RNA, 14 nt, Human
uauaauuguaucgu

SEQ ID NO: 2320588 - RNA, 19 nt, Human
uauaccugugccucggcuu

SEQ ID NO: 2320589 - RNA, 15 nt, Human
uauaccugugccucg

SEQ ID NO: 2320590 - RNA, 18 nt, Human
uauaauucuguacugauu

SEQ ID NO: 2320591 - RNA, 20 nt, Human
uauaaucuuccauacuucuu

SEQ ID NO: 2320592 - RNA, 17 nt, Human
uauaauguuguuauuua

SEQ ID NO: 2320593 - RNA, 19 nt, Human
uauaauguuguuauuuaaa

SEQ ID NO: 2320594 - RNA, 20 nt, Human
uauaaucacuuuuuuccaca

SEQ ID NO: 2320595 - RNA, 18 nt, Human
uauaaucccagcacuuug

SEQ ID NO: 2320596 - RNA, 15 nt, Human
uauaauguuugcuau

SEQ ID NO: 2320597 - RNA, 18 nt, Human
uauaauguuguuauuuaa

SEQ ID NO: 2320598 - RNA, 20 nt, Human
uauacuguaaagaaagagag

SEQ ID NO: 2320599 - RNA, 21 nt, Human
uauaguguaaaauaagaauga

SEQ ID NO: 2320600 - RNA, 13 nt, Human
uauaguguaaaau

SEQ ID NO: 2320601 - RNA, 18 nt, Human
uauaguguaaaauaagaa

SEQ ID NO: 2320602 - RNA, 17 nt, Human
uauaguuaggauagcau

SEQ ID NO: 2320603 - RNA, 17 nt, Human
uauaguuuacuauuuua

SEQ ID NO: 2320604 - RNA, 13 nt, Human
uauaguuucagau

SEQ ID NO: 2320605 - RNA, 19 nt, Human
uauaguuuauugacaauaa

SEQ ID NO: 2320606 - RNA, 16 nt, Human
uauaguuuacuauuuu

SEQ ID NO: 2320607 - RNA, 21 nt, Human
uauaguuguggacauuuaaga

SEQ ID NO: 2320608 - RNA, 15 nt, Human
uauaguuuuacuuuu

SEQ ID NO: 2320609 - RNA, 15 nt, Human
uauaguuuguacaug

SEQ ID NO: 2320610 - RNA, 18 nt, Human
uauaguuuguacaugcau

SEQ ID NO: 2320611 - RNA, 22 nt, Human
uauaguuucagauauauaucau

SEQ ID NO: 2320612 - RNA, 18 nt, Human
uauaguuaggauagcauu

SEQ ID NO: 2320613 - RNA, 19 nt, Human
uauaguuaggauagcauuu

SEQ ID NO: 2320614 - RNA, 14 nt, Human
uauaguugcuugcc

SEQ ID NO: 2320615 - RNA, 22 nt, Human
uauaguugcuugccugauauaa

SEQ ID NO: 2320616 - RNA, 16 nt, Human
uauacuggagaagucu

SEQ ID NO: 2320617 - RNA, 10 nt, Human
uauacuguaa

SEQ ID NO: 2320618 - RNA, 17 nt, Human
uauacugcauacuuuuu

SEQ ID NO: 2320619 - RNA, 22 nt, Human
uauacugaaggaaaaacacaag

SEQ ID NO: 2320620 - RNA, 16 nt, Human
uauacugcauacuuuu

SEQ ID NO: 2320621 - RNA, 12 nt, Human
uauacugcauac

SEQ ID NO: 2320622 - RNA, 19 nt, Human
uauacuguaaagaaagaga

SEQ ID NO: 2320623 - RNA, 17 nt, Human
uauacuguaaagaaaga

SEQ ID NO: 2320624 - RNA, 16 nt, Human
uauacuguaaagaaag

SEQ ID NO: 2320625 - RNA, 15 nt, Human
uauacuguaaagaaa

SEQ ID NO: 2320626 - RNA, 14 nt, Human
uauacuguaaagaa

SEQ ID NO: 2320627 - RNA, 13 nt, Human
uauacuguaaaga

SEQ ID NO: 2320628 - RNA, 12 nt, Human
uauacuguaaag

SEQ ID NO: 2320629 - RNA, 11 nt, Human
uauacuguaaa

SEQ ID NO: 2320630 - RNA, 18 nt, Human
uauacgauaaauaacuuu

SEQ ID NO: 2320631 - RNA, 16 nt, Human
uauaccuuugccuugg

SEQ ID NO: 2320632 - RNA, 15 nt, Human
uauacuaagaaaaga

SEQ ID NO: 2320633 - RNA, 20 nt, Human
uauacugaaggaaaaacaca

SEQ ID NO: 2320634 - RNA, 12 nt, Human
uauacugaagga

SEQ ID NO: 2320635 - RNA, 20 nt, Human
uauacgcagcgugcuuuaaa

SEQ ID NO: 2320636 - RNA, 22 nt, Human
uauacgugaaaauuauuugaaa

SEQ ID NO: 2320637 - RNA, 13 nt, Human
uauacguguagcu

SEQ ID NO: 2320638 - RNA, 14 nt, Human
uauacguguagcua

SEQ ID NO: 2320639 - RNA, 15 nt, Human
uauacguguagcuau

SEQ ID NO: 2320640 - RNA, 17 nt, Human
uauacguguagcuauau

SEQ ID NO: 2320641 - RNA, 19 nt, Human
uauacguguagcuauaucu

SEQ ID NO: 2320642 - RNA, 12 nt, Human
uauaugucaaag

SEQ ID NO: 2320643 - RNA, 16 nt, Human
uauaugugaugaucua

SEQ ID NO: 2320644 - RNA, 22 nt, Human
uauaugugaauccucuucuuua

SEQ ID NO: 2320645 - RNA, 22 nt, Human
uauauguguguguauguuugca

SEQ ID NO: 2320646 - RNA, 19 nt, Human
uauauguguguguauguuu

SEQ ID NO: 2320647 - RNA, 13 nt, Human
uauaugugugugu

SEQ ID NO: 2320648 - RNA, 15 nt, Human
uauauguguguuuaa

SEQ ID NO: 2320649 - RNA, 16 nt, Human
uauauguguguuuaaa

SEQ ID NO: 2320650 - RNA, 19 nt, Human
uauauguguguuuaaauaa

SEQ ID NO: 2320651 - RNA, 22 nt, Human
uauauguguguuuaaauaaagu

SEQ ID NO: 2320652 - RNA, 18 nt, Human
uauaugugaacauuuauc

SEQ ID NO: 2320653 - RNA, 14 nt, Human
uauauguguaugua

SEQ ID NO: 2320654 - RNA, 21 nt, Human
uauaugcucugcauguuacau

SEQ ID NO: 2320655 - RNA, 14 nt, Human
uauaugcuuacuga

SEQ ID NO: 2320656 - RNA, 16 nt, Human
uauaucucucaugcau

SEQ ID NO: 2320657 - RNA, 20 nt, Human
uauaugcucugcauguuaca

SEQ ID NO: 2320658 - RNA, 21 nt, Human
uauaugcuuacugauauauuu

SEQ ID NO: 2320659 - RNA, 17 nt, Human
uauaugcuuacugauau

SEQ ID NO: 2320660 - RNA, 16 nt, Human
uauaugcuuacugaua

SEQ ID NO: 2320661 - RNA, 13 nt, Human
uauaugcuucugu

SEQ ID NO: 2320662 - RNA, 23 nt, Human
uauauaaauuuuuuuuguuucau

SEQ ID NO: 2320663 - RNA, 15 nt, Human
uauaucuaucuuaua

SEQ ID NO: 2320664 - RNA, 18 nt, Human
uauauaaaugguuaaaag

SEQ ID NO: 2320665 - RNA, 12 nt, Human
uauauaaaugcu

SEQ ID NO: 2320666 - RNA, 15 nt, Human
uauauaaaugcuuuu

SEQ ID NO: 2320667 - RNA, 13 nt, Human
uauauaacaaugc

SEQ ID NO: 2320668 - RNA, 17 nt, Human
uauaguuuuacuuuuaa

SEQ ID NO: 2320669 - RNA, 16 nt, Human
uauaguuuuacuuuua

SEQ ID NO: 2320670 - RNA, 11 nt, Human
uauauaaauaa

SEQ ID NO: 2320671 - RNA, 15 nt, Human
uauauaaauaaauau

SEQ ID NO: 2320672 - RNA, 16 nt, Human
uauauaaauaaauaua

SEQ ID NO: 2320673 - RNA, 18 nt, Human
uauauaaauaaauauaua

SEQ ID NO: 2320674 - RNA, 20 nt, Human
uauauaaauauauauaaaua

SEQ ID NO: 2320675 - RNA, 15 nt, Human
uauauaaauauauau

SEQ ID NO: 2320676 - RNA, 16 nt, Human
uauauaaauauauaua

SEQ ID NO: 2320677 - RNA, 19 nt, Human
uauauaaauaaauauauau

SEQ ID NO: 2320678 - RNA, 22 nt, Human
uauauaaauaaauauauauauc

SEQ ID NO: 2320679 - RNA, 12 nt, Human
uauauaaauaua

SEQ ID NO: 2320680 - RNA, 13 nt, Human
uauauaaauauau

SEQ ID NO: 2320681 - RNA, 13 nt, Human
uaugcuucuugga

SEQ ID NO: 2320682 - RNA, 17 nt, Human
uaugcuucauacaggga

SEQ ID NO: 2320683 - RNA, 15 nt, Human
uaugcuuugaaugua

SEQ ID NO: 2320684 - RNA, 16 nt, Human
uauggaaauaaaugua

SEQ ID NO: 2320685 - RNA, 12 nt, Human
uaugcuuugaau

SEQ ID NO: 2320686 - RNA, 15 nt, Human
uaugcuuuaaacauu

SEQ ID NO: 2320687 - RNA, 13 nt, Human
uauggaacacucu

SEQ ID NO: 2320688 - RNA, 16 nt, Human
uauggaacacucugag

SEQ ID NO: 2320689 - RNA, 17 nt, Human
uauggaacacucugaga

SEQ ID NO: 2320690 - RNA, 18 nt, Human
uauggaacacucugagac

SEQ ID NO: 2320691 - RNA, 21 nt, Human
uauggaaacuguugccagaga

SEQ ID NO: 2320692 - RNA, 17 nt, Human
uauggaaauaaauguau

SEQ ID NO: 2320693 - RNA, 13 nt, Human
uauggaacucucu

SEQ ID NO: 2320694 - RNA, 19 nt, Human
uauggaacacucugagacu

SEQ ID NO: 2320695 - RNA, 17 nt, Human
uauggaacucucuccac

SEQ ID NO: 2320696 - RNA, 13 nt, Human
uauggaacuucua

SEQ ID NO: 2320697 - RNA, 15 nt, Human
uauggaacuucuaau

SEQ ID NO: 2320698 - RNA, 17 nt, Human
uauggaacuucuaauau

SEQ ID NO: 2320699 - RNA, 20 nt, Human
uauggaacuucuaauauauu

SEQ ID NO: 2320700 - RNA, 19 nt, Human
uauggaaggguuuguggcu

SEQ ID NO: 2320701 - RNA, 22 nt, Human
uauggaagcauauuguuauuau

SEQ ID NO: 2320702 - RNA, 22 nt, Human
uauggaaggguuuguggcuggg

SEQ ID NO: 2320703 - RNA, 24 nt, Human
uauggaauacaguguuauuuucuu

SEQ ID NO: 2320704 - RNA, 17 nt, Human
uauggaauacaguguua

SEQ ID NO: 2320705 - RNA, 14 nt, Human
uauggaauacagug

SEQ ID NO: 2320706 - RNA, 14 nt, Human
uauggaauuacaug

SEQ ID NO: 2320707 - RNA, 18 nt, Human
uauggaauuacauguaaa

SEQ ID NO: 2320708 - RNA, 22 nt, Human
uauggaauuacauguaaaacau

SEQ ID NO: 2320709 - RNA, 11 nt, Human
uauggaauuga

SEQ ID NO: 2320710 - RNA, 19 nt, Human
uauggaauugauuugcauu

SEQ ID NO: 2320711 - RNA, 23 nt, Human
uauggaauacaguguuauuuucu

SEQ ID NO: 2320712 - RNA, 18 nt, Human
uauggaauugauuugcau

SEQ ID NO: 2320713 - RNA, 20 nt, Human
uauggaauuuuucauugaua

SEQ ID NO: 2320714 - RNA, 17 nt, Human
uauggacaaugacccag

SEQ ID NO: 2320715 - RNA, 19 nt, Human
uaugcuuauuuuaaaauuu

SEQ ID NO: 2320716 - RNA, 17 nt, Human
uaugcuuauuuuaaaau

SEQ ID NO: 2320717 - RNA, 14 nt, Human
uaugcuuauuuuaa

SEQ ID NO: 2320718 - RNA, 17 nt, Human
uaugcaucuaauaaaaa

SEQ ID NO: 2320719 - RNA, 16 nt, Human
uaugcaucuaauaaaa

SEQ ID NO: 2320720 - RNA, 13 nt, Human
uaugcuuauuuua

SEQ ID NO: 2320721 - RNA, 22 nt, Human
uaugcuuauacacuuacacuuu

SEQ ID NO: 2320722 - RNA, 18 nt, Human
uaugcaugaaguaauaug

SEQ ID NO: 2320723 - RNA, 13 nt, Human
uaugcaugaagua

SEQ ID NO: 2320724 - RNA, 16 nt, Human
uaugcuucauacaggg

SEQ ID NO: 2320725 - RNA, 14 nt, Human
uaugcuucauacag

SEQ ID NO: 2320726 - RNA, 13 nt, Human
uaugcuucauaca

SEQ ID NO: 2320727 - RNA, 12 nt, Human
uaugcuucauac

SEQ ID NO: 2320728 - RNA, 15 nt, Human
uaugcuucuguuuua

SEQ ID NO: 2320729 - RNA, 16 nt, Human
uaugcuucuguuuuau

SEQ ID NO: 2320730 - RNA, 17 nt, Human
uaugcaguuuuucagag

SEQ ID NO: 2320731 - RNA, 20 nt, Human
uaugcauauuauuuuauguu

SEQ ID NO: 2320732 - RNA, 15 nt, Human
uaugcauaaagucag

SEQ ID NO: 2320733 - RNA, 14 nt, Human
uaugcauaaaguca

SEQ ID NO: 2320734 - RNA, 19 nt, Human
uaugcaguauugagcacug

SEQ ID NO: 2320735 - RNA, 19 nt, Human
uaugcagugauauggcaga

SEQ ID NO: 2320736 - RNA, 22 nt, Human
uaugcagugauauggcagaaga

SEQ ID NO: 2320737 - RNA, 14 nt, Human
uaugcagaauguuu

SEQ ID NO: 2320738 - RNA, 18 nt, Human
uaugcagagguccacaac

SEQ ID NO: 2320739 - RNA, 14 nt, Human
uaugcaccuugugu

SEQ ID NO: 2320740 - RNA, 19 nt, Human
uaugcacauauggacucug

SEQ ID NO: 2320741 - RNA, 20 nt, Human
uaugcacauauggacucugc

SEQ ID NO: 2320742 - RNA, 18 nt, Human
uaugcaccuugugucugu

SEQ ID NO: 2320743 - RNA, 19 nt, Human
uaugcaccuugugucugua

SEQ ID NO: 2320744 - RNA, 20 nt, Human
uaugcaccuugugucuguac

SEQ ID NO: 2320745 - RNA, 22 nt, Human
uaugcaccuugugucuguacac

SEQ ID NO: 2320746 - RNA, 19 nt, Human
uaugcacuuauaauuuucc

SEQ ID NO: 2320747 - RNA, 15 nt, Human
uaugcacgaccuugg

SEQ ID NO: 2320748 - RNA, 17 nt, Human
uaugcacgaccuuggga

SEQ ID NO: 2320749 - RNA, 20 nt, Human
uaugcacuuauaauuuuccu

SEQ ID NO: 2320750 - RNA, 15 nt, Human
uaugcagaauacuuu

SEQ ID NO: 2320751 - RNA, 22 nt, Human
uaugcacuuauaauuuuccuaa

SEQ ID NO: 2320752 - RNA, 18 nt, Human
uaugaccuucuaggaagc

SEQ ID NO: 2320753 - RNA, 16 nt, Human
uaugaccuucuaggaa

SEQ ID NO: 2320754 - RNA, 16 nt, Human
uaugacggaagaacau

SEQ ID NO: 2320755 - RNA, 20 nt, Human
uaugacauucaugccuggcu

SEQ ID NO: 2320756 - RNA, 17 nt, Human
uaugacuaaagagagaa

SEQ ID NO: 2320757 - RNA, 16 nt, Human
uaugacuaaagagaga

SEQ ID NO: 2320758 - RNA, 15 nt, Human
uaugacuaaagagag

SEQ ID NO: 2320759 - RNA, 14 nt, Human
uaugacuaaagaga

SEQ ID NO: 2320760 - RNA, 13 nt, Human
uaugacuaaagag

SEQ ID NO: 2320761 - RNA, 12 nt, Human
uaugacuaaaga

SEQ ID NO: 2320762 - RNA, 20 nt, Human
uaugacggaagaacauagaa

SEQ ID NO: 2320763 - RNA, 19 nt, Human
uaugacggaagaacauaga

SEQ ID NO: 2320764 - RNA, 21 nt, Human
uaugacuaaagagagaaugua

SEQ ID NO: 2320765 - RNA, 20 nt, Human
uaugacuaaagagagaaugu

SEQ ID NO: 2320766 - RNA, 19 nt, Human
uaugacuaaagagagaaug

SEQ ID NO: 2320767 - RNA, 18 nt, Human
uaugacuaaagagagaau

SEQ ID NO: 2320768 - RNA, 16 nt, Human
uaugacuccagaauuu

SEQ ID NO: 2320769 - RNA, 16 nt, Human
uaugacucccaaauuu

SEQ ID NO: 2320770 - RNA, 17 nt, Human
uaugacugcuccccagc

SEQ ID NO: 2320771 - RNA, 18 nt, Human
uaugacugcuccccagcc

SEQ ID NO: 2320772 - RNA, 22 nt, Human
uaugacugcuccccagcccugg

SEQ ID NO: 2320773 - RNA, 17 nt, Human
uaugacugcuucaugac

SEQ ID NO: 2320774 - RNA, 23 nt, Human
uaugacugcuucaugacauuccu

SEQ ID NO: 2320775 - RNA, 20 nt, Human
uaugacuucauuaauaauaa

SEQ ID NO: 2320776 - RNA, 16 nt, Human
uaugacuucauuaaua

SEQ ID NO: 2320777 - RNA, 17 nt, Human
uaugacuccagaauuuc

SEQ ID NO: 2320778 - RNA, 23 nt, Human
uaugacuccagaauuucccaaag

SEQ ID NO: 2320779 - RNA, 16 nt, Human
uaugagccagacaaau

SEQ ID NO: 2320780 - RNA, 15 nt, Human
uaugagaggcaauga

SEQ ID NO: 2320781 - RNA, 19 nt, Human
uaugagccagacaaaugga

SEQ ID NO: 2320782 - RNA, 17 nt, Human
uaugagccagacaaaug

SEQ ID NO: 2320783 - RNA, 23 nt, Human
uaugagaaaagaggcgucuguau

SEQ ID NO: 2320784 - RNA, 23 nt, Human
uaugagcuggggaugucucucau

SEQ ID NO: 2320785 - RNA, 16 nt, Human
uaugagcugagggggg

SEQ ID NO: 2320786 - RNA, 16 nt, Human
uaugagcucuucaugu

SEQ ID NO: 2320787 - RNA, 12 nt, Human
uaugagcugagg

SEQ ID NO: 2320788 - RNA, 13 nt, Human
uaugagcugaggg

SEQ ID NO: 2320789 - RNA, 15 nt, Human
uaugagcucuucaug

SEQ ID NO: 2320790 - RNA, 14 nt, Human
uaugagcucuucau

SEQ ID NO: 2320791 - RNA, 16 nt, Human
uaugauuaguaaagaa

SEQ ID NO: 2320792 - RNA, 16 nt, Human
uaugauucccagccag

SEQ ID NO: 2320793 - RNA, 19 nt, Human
uaugauucugcuuuuacca

SEQ ID NO: 2320794 - RNA, 21 nt, Human
uaugauucagauuguuaucua

SEQ ID NO: 2320795 - RNA, 14 nt, Human
uaugauucugcuuu

SEQ ID NO: 2320796 - RNA, 18 nt, Human
uaugauuuggaaaauaaa

SEQ ID NO: 2320797 - RNA, 15 nt, Human
uaugauuuggaaaau

SEQ ID NO: 2320798 - RNA, 17 nt, Human
uaugauuuggaaaauaa

SEQ ID NO: 2320799 - RNA, 14 nt, Human
uaugauuuauaguu

SEQ ID NO: 2320800 - RNA, 15 nt, Human
uaugauuuauaguuu

SEQ ID NO: 2320801 - RNA, 18 nt, Human
uaugauuuauaguuugua

SEQ ID NO: 2320802 - RNA, 17 nt, Human
uaugauuuaauaaaaua

SEQ ID NO: 2320803 - RNA, 18 nt, Human
uaugauuuaauaaaauaa

SEQ ID NO: 2320804 - RNA, 14 nt, Human
uaugauuuaaaaca

SEQ ID NO: 2320805 - RNA, 17 nt, Human
uaugauuuaaaacaugu

SEQ ID NO: 2320806 - RNA, 18 nt, Human
uaugauuuaaaacaugua

SEQ ID NO: 2320807 - RNA, 14 nt, Human
uaugauuuaauaaa

SEQ ID NO: 2320808 - RNA, 17 nt, Human
uaugauuuuuuuuucau

SEQ ID NO: 2320809 - RNA, 16 nt, Human
uaugauuuuauuugac

SEQ ID NO: 2320810 - RNA, 12 nt, Human
uaugcaaagcac

SEQ ID NO: 2320811 - RNA, 14 nt, Human
uaugcaaagcacug

SEQ ID NO: 2320812 - RNA, 13 nt, Human
uaugcaaagcacu

SEQ ID NO: 2320813 - RNA, 19 nt, Human
uaugauuuuuuuuucauac

SEQ ID NO: 2320814 - RNA, 22 nt, Human
uaugcaaaaguucugacuugac

SEQ ID NO: 2320815 - RNA, 15 nt, Human
uaugcaaagcacuga

SEQ ID NO: 2320816 - RNA, 18 nt, Human
uaugcaaucaaaucugcu

SEQ ID NO: 2320817 - RNA, 14 nt, Human
uaugcaaauauuuu

SEQ ID NO: 2320818 - RNA, 20 nt, Human
uaugcaaauauuuuuuugua

SEQ ID NO: 2320819 - RNA, 20 nt, Human
uaugcaaggaaggaaagaaa

SEQ ID NO: 2320820 - RNA, 17 nt, Human
uaugcaaggaaggaaag

SEQ ID NO: 2320821 - RNA, 16 nt, Human
uaugcaauuuccuuuu

SEQ ID NO: 2320822 - RNA, 15 nt, Human
uaugcaauauaucua

SEQ ID NO: 2320823 - RNA, 13 nt, Human
uaugcacacauuu

SEQ ID NO: 2320824 - RNA, 13 nt, Human
uaugcacauaugg

SEQ ID NO: 2320825 - RNA, 14 nt, Human
uaugcacacauuuu

SEQ ID NO: 2320826 - RNA, 21 nt, Human
uaucuacaucuuuuuucacaa

SEQ ID NO: 2320827 - RNA, 16 nt, Human
uaucuacaucuuuuuu

SEQ ID NO: 2320828 - RNA, 20 nt, Human
uaucuaauaccucugugugc

SEQ ID NO: 2320829 - RNA, 13 nt, Human
uaucuacucuccu

SEQ ID NO: 2320830 - RNA, 16 nt, Human
uaucuacccagaauua

SEQ ID NO: 2320831 - RNA, 16 nt, Human
uaucuaaauugaauaa

SEQ ID NO: 2320832 - RNA, 17 nt, Human
uaucuaaauugaauaau

SEQ ID NO: 2320833 - RNA, 20 nt, Human
uaucuaaauugaauaauggu

SEQ ID NO: 2320834 - RNA, 21 nt, Human
uaucuaaauugaauaauggua

SEQ ID NO: 2320835 - RNA, 13 nt, Human
uaucuaaauugaa

SEQ ID NO: 2320836 - RNA, 14 nt, Human
uaucuaaauugaau

SEQ ID NO: 2320837 - RNA, 16 nt, Human
uaucgucacugcuuaa

SEQ ID NO: 2320838 - RNA, 21 nt, Human
uaucuaauauguaacaagcca

SEQ ID NO: 2320839 - RNA, 16 nt, Human
uaucuaauaccucugu

SEQ ID NO: 2320840 - RNA, 15 nt, Human
uaucuaauaccucug

SEQ ID NO: 2320841 - RNA, 17 nt, Human
uaucugagggaggaggc

SEQ ID NO: 2320842 - RNA, 18 nt, Human
uaucugagggaggaggcc

SEQ ID NO: 2320843 - RNA, 23 nt, Human
uaucugagggaggaggccaccuc

SEQ ID NO: 2320844 - RNA, 13 nt, Human
uaucugaggucac

SEQ ID NO: 2320845 - RNA, 16 nt, Human
uaucugcaggcagaca

SEQ ID NO: 2320846 - RNA, 17 nt, Human
uaucugcaggcagacac

SEQ ID NO: 2320847 - RNA, 18 nt, Human
uaucugcaggcagacacg

SEQ ID NO: 2320848 - RNA, 15 nt, Human
uaucugcaggcagac

SEQ ID NO: 2320849 - RNA, 23 nt, Human
uaucugggauuaugguuuuguga

SEQ ID NO: 2320850 - RNA, 18 nt, Human
uaucuggacaagccaacu

SEQ ID NO: 2320851 - RNA, 23 nt, Human
uaucugcuuuugguuauaaugug

SEQ ID NO: 2320852 - RNA, 19 nt, Human
uaucuggaaguaaccauuu

SEQ ID NO: 2320853 - RNA, 13 nt, Human
uaucugcugucca

SEQ ID NO: 2320854 - RNA, 17 nt, Human
uaucugcuguccagaca

SEQ ID NO: 2320855 - RNA, 22 nt, Human
uaucugcuguccagacagccug

SEQ ID NO: 2320856 - RNA, 20 nt, Human
uaucugcuucaguggagaau

SEQ ID NO: 2320857 - RNA, 11 nt, Human
uaucugcuguc

SEQ ID NO: 2320858 - RNA, 12 nt, Human
uaucugcugucc

SEQ ID NO: 2320859 - RNA, 20 nt, Human
uaucugccuuuauuguguuu

SEQ ID NO: 2320860 - RNA, 14 nt, Human
uaucugccuuuauu

SEQ ID NO: 2320861 - RNA, 18 nt, Human
uaucugccuuuauugugu

SEQ ID NO: 2320862 - RNA, 19 nt, Human
uaucugcaggcagacacgg

SEQ ID NO: 2320863 - RNA, 21 nt, Human
uaucugcaggcagacacggau

SEQ ID NO: 2320864 - RNA, 13 nt, Human
uaucugccuuuau

SEQ ID NO: 2320865 - RNA, 11 nt, Human
uauccucugau

SEQ ID NO: 2320866 - RNA, 14 nt, Human
uauccucugaucuc

SEQ ID NO: 2320867 - RNA, 20 nt, Human
uauccucugaucuccauggc

SEQ ID NO: 2320868 - RNA, 12 nt, Human
uauccucuguaa

SEQ ID NO: 2320869 - RNA, 14 nt, Human
uauccucuuuagag

SEQ ID NO: 2320870 - RNA, 16 nt, Human
uauccucuuuagaguu

SEQ ID NO: 2320871 - RNA, 17 nt, Human
uauccucuuuagaguua

SEQ ID NO: 2320872 - RNA, 22 nt, Human
uauccucuuuagaguuagacug

SEQ ID NO: 2320873 - RNA, 23 nt, Human
uauccucuuuagaguuagacugu

SEQ ID NO: 2320874 - RNA, 14 nt, Human
uauccugaaauuuc

SEQ ID NO: 2320875 - RNA, 17 nt, Human
uauccugaaauuucaga

SEQ ID NO: 2320876 - RNA, 16 nt, Human
uauccugaaauuucag

SEQ ID NO: 2320877 - RNA, 18 nt, Human
uauauguguuuuucacau

SEQ ID NO: 2320878 - RNA, 23 nt, Human
uauauguguguuuaaauaaagua

SEQ ID NO: 2320879 - RNA, 14 nt, Human
uauauguucacugu

SEQ ID NO: 2320880 - RNA, 20 nt, Human
uauauguucuaauuaauaaa

SEQ ID NO: 2320881 - RNA, 20 nt, Human
uauauguuuaccuuuuaauu

SEQ ID NO: 2320882 - RNA, 23 nt, Human
uauauguuuaccuuuuaauuaau

SEQ ID NO: 2320883 - RNA, 19 nt, Human
uauauguuuuaagaggcag

SEQ ID NO: 2320884 - RNA, 19 nt, Human
uauauguuuuugaaggcag

SEQ ID NO: 2320885 - RNA, 13 nt, Human
uauauuaaaaaua

SEQ ID NO: 2320886 - RNA, 15 nt, Human
uauauuaaaaauaua

SEQ ID NO: 2320887 - RNA, 17 nt, Human
uauauuaaaaauauaaa

SEQ ID NO: 2320888 - RNA, 18 nt, Human
uauauuaaaaauauaaaa

SEQ ID NO: 2320889 - RNA, 15 nt, Human
uauauuaaaauaagc

SEQ ID NO: 2320890 - RNA, 19 nt, Human
uauauuaaaaauauaaaac

SEQ ID NO: 2320891 - RNA, 20 nt, Human
uauauuaaaaauauaaaacu

SEQ ID NO: 2320892 - RNA, 21 nt, Human
uauauuaaaaauauaaaacug

SEQ ID NO: 2320893 - RNA, 23 nt, Human
uauauuaaaaauauaaaacugcg

SEQ ID NO: 2320894 - RNA, 16 nt, Human
uaucuaaauguugaaa

SEQ ID NO: 2320895 - RNA, 18 nt, Human
uaucgggagcagugucuu

SEQ ID NO: 2320896 - RNA, 15 nt, Human
uaucgggagcagugu

SEQ ID NO: 2320897 - RNA, 14 nt, Human
uaucgggagcagug

SEQ ID NO: 2320898 - RNA, 17 nt, Human
uaucgggagcagugucu

SEQ ID NO: 2320899 - RNA, 21 nt, Human
uaucguaaccagccagauccu

SEQ ID NO: 2320900 - RNA, 15 nt, Human
uaucguaaaauuaag

SEQ ID NO: 2320901 - RNA, 18 nt, Human
uaucguaaaauuaagaaa

SEQ ID NO: 2320902 - RNA, 17 nt, Human
uaucgggaacaguguuu

SEQ ID NO: 2320903 - RNA, 16 nt, Human
uaucgggaacaguguu

SEQ ID NO: 2320904 - RNA, 22 nt, Human
uauccuuuguggcaccuuuucu

SEQ ID NO: 2320905 - RNA, 17 nt, Human
uauccuuucuaacaaaa

SEQ ID NO: 2320906 - RNA, 13 nt, Human
uauccugagccau

SEQ ID NO: 2320907 - RNA, 14 nt, Human
uauccuucagccug

SEQ ID NO: 2320908 - RNA, 15 nt, Human
uauccuucagccuga

SEQ ID NO: 2320909 - RNA, 12 nt, Human
uaugaauaacau

SEQ ID NO: 2320910 - RNA, 14 nt, Human
uaucuucugauuug

SEQ ID NO: 2320911 - RNA, 16 nt, Human
uaugaauacagggcau

SEQ ID NO: 2320912 - RNA, 12 nt, Human
uaugaauacagg

SEQ ID NO: 2320913 - RNA, 21 nt, Human
uaugaaucuauuauacuguau

SEQ ID NO: 2320914 - RNA, 23 nt, Human
uaugaaucuauuauacuguauua

SEQ ID NO: 2320915 - RNA, 19 nt, Human
uaugaaugcccccagcugg

SEQ ID NO: 2320916 - RNA, 13 nt, Human
uaugaaucuaugc

SEQ ID NO: 2320917 - RNA, 15 nt, Human
uaugaaucuaugcca

SEQ ID NO: 2320918 - RNA, 20 nt, Human
uaugaaucuaugccaaagau

SEQ ID NO: 2320919 - RNA, 21 nt, Human
uaugaaucuaugccaaagauc

SEQ ID NO: 2320920 - RNA, 22 nt, Human
uaugaaucuaugccaaagauca

SEQ ID NO: 2320921 - RNA, 12 nt, Human
uaugaaucuauu

SEQ ID NO: 2320922 - RNA, 18 nt, Human
uaugaaucuauuauacug

SEQ ID NO: 2320923 - RNA, 15 nt, Human
uaugaauuuaaauau

SEQ ID NO: 2320924 - RNA, 18 nt, Human
uaugaauugaauuaucuu

SEQ ID NO: 2320925 - RNA, 23 nt, Human
uaugaauuacauuuguauaaaau

SEQ ID NO: 2320926 - RNA, 17 nt, Human
uaugaauuacauuugua

SEQ ID NO: 2320927 - RNA, 20 nt, Human
uaugaaugcccccagcuggc

SEQ ID NO: 2320928 - RNA, 21 nt, Human
uaugaaugcccccagcuggcc

SEQ ID NO: 2320929 - RNA, 22 nt, Human
uaugaaugggcaaaacugaauu

SEQ ID NO: 2320930 - RNA, 20 nt, Human
uaugacagcugucccuguca

SEQ ID NO: 2320931 - RNA, 16 nt, Human
uaugacagcugucccu

SEQ ID NO: 2320932 - RNA, 22 nt, Human
uaugacacaugcaaggucauuu

SEQ ID NO: 2320933 - RNA, 23 nt, Human
uaugaauuuaaauauaauucugu

SEQ ID NO: 2320934 - RNA, 17 nt, Human
uaugaauuuaaauauaa

SEQ ID NO: 2320935 - RNA, 19 nt, Human
uaugaauuuaaauauaauu

SEQ ID NO: 2320936 - RNA, 20 nt, Human
uaugaauuuaaauauaauuc

SEQ ID NO: 2320937 - RNA, 21 nt, Human
uaugaauuuaaauauaauucu

SEQ ID NO: 2320938 - RNA, 12 nt, Human
uaugacacaugc

SEQ ID NO: 2320939 - RNA, 15 nt, Human
uaugacaguuauacu

SEQ ID NO: 2320940 - RNA, 19 nt, Human
uaugacaucacuuguacaa

SEQ ID NO: 2320941 - RNA, 19 nt, Human
uaugaccacacuccagcug

SEQ ID NO: 2320942 - RNA, 14 nt, Human
uaugaccacacucc

SEQ ID NO: 2320943 - RNA, 24 nt, Human
uaugacaucacuuguacaaaauaa

SEQ ID NO: 2320944 - RNA, 14 nt, Human
uaugacauucaugc

SEQ ID NO: 2320945 - RNA, 19 nt, Human
uaugacauucaugccuggc

SEQ ID NO: 2320946 - RNA, 23 nt, Human
uaugacaucacuuguacaaaaua

SEQ ID NO: 2320947 - RNA, 20 nt, Human
uaugacaucacuuguacaaa

SEQ ID NO: 2320948 - RNA, 20 nt, Human
uaucuuaauuuugguuguau

SEQ ID NO: 2320949 - RNA, 13 nt, Human
uaucuuaauuuug

SEQ ID NO: 2320950 - RNA, 17 nt, Human
uaucuguguuuuugaaa

SEQ ID NO: 2320951 - RNA, 12 nt, Human
uaucuguucuug

SEQ ID NO: 2320952 - RNA, 16 nt, Human
uaucuguuuacagugu

SEQ ID NO: 2320953 - RNA, 17 nt, Human
uaucuguuuacaguguu

SEQ ID NO: 2320954 - RNA, 14 nt, Human
uaucuguucuuuaa

SEQ ID NO: 2320955 - RNA, 19 nt, Human
uaucuguucuuuaauuuau

SEQ ID NO: 2320956 - RNA, 20 nt, Human
uaucuguucuuuaauuuauu

SEQ ID NO: 2320957 - RNA, 18 nt, Human
uaugaauaaagacaccua

SEQ ID NO: 2320958 - RNA, 14 nt, Human
uaucuugaagacuu

SEQ ID NO: 2320959 - RNA, 20 nt, Human
uaugaaguuuuuuuuauaca

SEQ ID NO: 2320960 - RNA, 20 nt, Human
uaucugucauuugagcaggg

SEQ ID NO: 2320961 - RNA, 23 nt, Human
uaucuguagugagauagcauugu

SEQ ID NO: 2320962 - RNA, 16 nt, Human
uaucuguaucucucuc

SEQ ID NO: 2320963 - RNA, 11 nt, Human
uaucuguauuu

SEQ ID NO: 2320964 - RNA, 15 nt, Human
uaucuguauuuaauu

SEQ ID NO: 2320965 - RNA, 17 nt, Human
uaucuguauuuaauuuu

SEQ ID NO: 2320966 - RNA, 22 nt, Human
uaucuguauuuaauuuugacac

SEQ ID NO: 2320967 - RNA, 18 nt, Human
uaucugggaacugugccu

SEQ ID NO: 2320968 - RNA, 19 nt, Human
uaucugggauucuacuuua

SEQ ID NO: 2320969 - RNA, 21 nt, Human
uaucugggauucuacuuuaag

SEQ ID NO: 2320970 - RNA, 22 nt, Human
uaucuggucaaccuccuggaca

SEQ ID NO: 2320971 - RNA, 18 nt, Human
uaucuguaaguuuugaau

SEQ ID NO: 2320972 - RNA, 19 nt, Human
uaucugggugcaugaucuu

SEQ ID NO: 2320973 - RNA, 21 nt, Human
uaucugucauuugagcagggc

SEQ ID NO: 2320974 - RNA, 23 nt, Human
uaucugucauuugagcagggcuc

SEQ ID NO: 2320975 - RNA, 20 nt, Human
uaucugugcgugaaacacac

SEQ ID NO: 2320976 - RNA, 19 nt, Human
uaucugugcgugaaacaca

SEQ ID NO: 2320977 - RNA, 14 nt, Human
uaucugugcucagg

SEQ ID NO: 2320978 - RNA, 20 nt, Human
uaucuguguuuuugaaauau

SEQ ID NO: 2320979 - RNA, 22 nt, Human
uaucugugcucaggacucagaa

SEQ ID NO: 2320980 - RNA, 18 nt, Human
uaucugugcgugaaacac

SEQ ID NO: 2320981 - RNA, 17 nt, Human
uaucugugcgugaaaca

SEQ ID NO: 2320982 - RNA, 19 nt, Human
uaucugugaaaugcuggca

SEQ ID NO: 2320983 - RNA, 23 nt, Human
gugcugaguugguguugacaugu

SEQ ID NO: 2320984 - RNA, 22 nt, Human
gugcugaucgugcuaaauuuuc

SEQ ID NO: 2320985 - RNA, 22 nt, Human
gugcugaggccuuaucauucau

SEQ ID NO: 2320986 - RNA, 12 nt, Human
gugcugcauuua

SEQ ID NO: 2320987 - RNA, 20 nt, Human
gugcugcauuuaaaagauac

SEQ ID NO: 2320988 - RNA, 19 nt, Human
gugcugcauuuaaaagaua

SEQ ID NO: 2320989 - RNA, 15 nt, Human
gugcugccauccagg

SEQ ID NO: 2320990 - RNA, 12 nt, Human
gugcugccacac

SEQ ID NO: 2320991 - RNA, 20 nt, Human
gugcugaucgugcuaaauuu

SEQ ID NO: 2320992 - RNA, 18 nt, Human
gugcugccauccagguuc

SEQ ID NO: 2320993 - RNA, 19 nt, Human
gugcugccauccagguuca

SEQ ID NO: 2320994 - RNA, 12 nt, Human
gugcugagucug

SEQ ID NO: 2320995 - RNA, 14 nt, Human
gugcugagaagcuu

SEQ ID NO: 2320996 - RNA, 13 nt, Human
gugcugagaagcu

SEQ ID NO: 2320997 - RNA, 11 nt, Human
gugcugagaag

SEQ ID NO: 2320998 - RNA, 23 nt, Human
gugcugacggccagggagaagcu

SEQ ID NO: 2320999 - RNA, 21 nt, Human
gugcugacggccagggagaag

SEQ ID NO: 2321000 - RNA, 17 nt, Human
gugcugacagcugcucc

SEQ ID NO: 2321001 - RNA, 16 nt, Human
gugcugacagcugcuc

SEQ ID NO: 2321002 - RNA, 15 nt, Human
gugcugacagcugcu

SEQ ID NO: 2321003 - RNA, 14 nt, Human
gugcugacccuccu

SEQ ID NO: 2321004 - RNA, 16 nt, Human
gugcugacccuccugu

SEQ ID NO: 2321005 - RNA, 18 nt, Human
gugcugacccuccuguug

SEQ ID NO: 2321006 - RNA, 14 nt, Human
gugcugaccucugg

SEQ ID NO: 2321007 - RNA, 18 nt, Human
gugcugacggccagggag

SEQ ID NO: 2321008 - RNA, 16 nt, Human
gugcugacggccaggg

SEQ ID NO: 2321009 - RNA, 15 nt, Human
gugcugacggccagg

SEQ ID NO: 2321010 - RNA, 15 nt, Human
gugcugaccucuggu

SEQ ID NO: 2321011 - RNA, 15 nt, Human
gugcugacggaagcc

SEQ ID NO: 2321012 - RNA, 16 nt, Human
gugcugagucugaagg

SEQ ID NO: 2321013 - RNA, 17 nt, Human
gugcugagucugaaggc

SEQ ID NO: 2321014 - RNA, 18 nt, Human
gugcugagucugaaggcu

SEQ ID NO: 2321015 - RNA, 19 nt, Human
gugcugagucugaaggcug

SEQ ID NO: 2321016 - RNA, 12 nt, Human
gugcccugcccc

SEQ ID NO: 2321017 - RNA, 16 nt, Human
gugcccuuggaggcca

SEQ ID NO: 2321018 - RNA, 23 nt, Human
gugcccugguggagaaagcacug

SEQ ID NO: 2321019 - RNA, 15 nt, Human
gugcccugguggaga

SEQ ID NO: 2321020 - RNA, 22 nt, Human
gugccgagaaggaagccuccca

SEQ ID NO: 2321021 - RNA, 14 nt, Human
gugccgacagaagg

SEQ ID NO: 2321022 - RNA, 15 nt, Human
gugccgacagaagga

SEQ ID NO: 2321023 - RNA, 20 nt, Human
gugccuuggggaauuuccuc

SEQ ID NO: 2321024 - RNA, 21 nt, Human
gugccuuggggaauuuccucu

SEQ ID NO: 2321025 - RNA, 21 nt, Human
gugccuuggggacaagagcag

SEQ ID NO: 2321026 - RNA, 15 nt, Human
gugcucuggacaggc

SEQ ID NO: 2321027 - RNA, 16 nt, Human
gugcucuggacaggca

SEQ ID NO: 2321028 - RNA, 21 nt, Human
gugccuuugaguuuccucagg

SEQ ID NO: 2321029 - RNA, 14 nt, Human
gugccuuuuauagc

SEQ ID NO: 2321030 - RNA, 18 nt, Human
gugccuuuuauagcuauu

SEQ ID NO: 2321031 - RNA, 22 nt, Human
gugcugaacaaaaaauaaaaau

SEQ ID NO: 2321032 - RNA, 17 nt, Human
gugcucuucuucuuucu

SEQ ID NO: 2321033 - RNA, 15 nt, Human
gugccuuuugcaccc

SEQ ID NO: 2321034 - RNA, 16 nt, Human
gugccuuuugcacccc

SEQ ID NO: 2321035 - RNA, 17 nt, Human
gugccuuuugcaccccu

SEQ ID NO: 2321036 - RNA, 18 nt, Human
gugccuuuugcaccccuc

SEQ ID NO: 2321037 - RNA, 17 nt, Human
gugcucuggacaggcau

SEQ ID NO: 2321038 - RNA, 18 nt, Human
gugcucuggacaggcaug

SEQ ID NO: 2321039 - RNA, 20 nt, Human
gugcugaaugguuuucaaaa

SEQ ID NO: 2321040 - RNA, 19 nt, Human
gugcugaaugguuuucaaa

SEQ ID NO: 2321041 - RNA, 19 nt, Human
gugcugaauguugggacug

SEQ ID NO: 2321042 - RNA, 21 nt, Human
gugcugaacaguggaggaaga

SEQ ID NO: 2321043 - RNA, 23 nt, Human
gugcugaaugguuuucaaaauaa

SEQ ID NO: 2321044 - RNA, 15 nt, Human
gugcuucaauuaaua

SEQ ID NO: 2321045 - RNA, 18 nt, Human
gugcuuauguaugaggua

SEQ ID NO: 2321046 - RNA, 18 nt, Human
gugcuucagccugaggcu

SEQ ID NO: 2321047 - RNA, 15 nt, Human
gugcuucagccugag

SEQ ID NO: 2321048 - RNA, 13 nt, Human
gugcuucagccug

SEQ ID NO: 2321049 - RNA, 16 nt, Human
gugcuuccaaggcaga

SEQ ID NO: 2321050 - RNA, 14 nt, Human
gugcuucgggcccu

SEQ ID NO: 2321051 - RNA, 13 nt, Human
gugcuucuuucuu

SEQ ID NO: 2321052 - RNA, 17 nt, Human
gugcuucgggcccuucc

SEQ ID NO: 2321053 - RNA, 21 nt, Human
gugcuucuaauauuuauugcu

SEQ ID NO: 2321054 - RNA, 12 nt, Human
gugcuuggagga

SEQ ID NO: 2321055 - RNA, 13 nt, Human
gugcuuggaggaa

SEQ ID NO: 2321056 - RNA, 15 nt, Human
gugcuuggaggaagg

SEQ ID NO: 2321057 - RNA, 21 nt, Human
gugcugcccgucuucagccua

SEQ ID NO: 2321058 - RNA, 14 nt, Human
gugcuguggggcug

SEQ ID NO: 2321059 - RNA, 19 nt, Human
gugcuguggggcugguagc

SEQ ID NO: 2321060 - RNA, 23 nt, Human
gugcuguggggcugguagcucag

SEQ ID NO: 2321061 - RNA, 11 nt, Human
gugcugcccug

SEQ ID NO: 2321062 - RNA, 22 nt, Human
gugcugccauccagguucagcu

SEQ ID NO: 2321063 - RNA, 19 nt, Human
gugcugcccgucuucagcc

SEQ ID NO: 2321064 - RNA, 18 nt, Human
gugcugcccgucuucagc

SEQ ID NO: 2321065 - RNA, 21 nt, Human
gugcugccacacuucaggcuc

SEQ ID NO: 2321066 - RNA, 12 nt, Human
gugcuguguaaa

SEQ ID NO: 2321067 - RNA, 13 nt, Human
gugcuguguaaag

SEQ ID NO: 2321068 - RNA, 14 nt, Human
gugcuguguaaagu

SEQ ID NO: 2321069 - RNA, 15 nt, Human
gugcuguguaaaguu

SEQ ID NO: 2321070 - RNA, 16 nt, Human
gugcuguguaaaguua

SEQ ID NO: 2321071 - RNA, 18 nt, Human
gugcuguguaaaguuagu

SEQ ID NO: 2321072 - RNA, 22 nt, Human
gugcuguguaaaguuagucuac

SEQ ID NO: 2321073 - RNA, 11 nt, Human
gugcugugugu

SEQ ID NO: 2321074 - RNA, 21 nt, Human
gugcuuaucccauagccagga

SEQ ID NO: 2321075 - RNA, 22 nt, Human
gugcuuaagcagaagcauuaac

SEQ ID NO: 2321076 - RNA, 17 nt, Human
gugcuuaagcagaagca

SEQ ID NO: 2321077 - RNA, 23 nt, Human
guggaaaguguaaagcauuccaa

SEQ ID NO: 2321078 - RNA, 20 nt, Human
guggaaaguguaaagcauuc

SEQ ID NO: 2321079 - RNA, 21 nt, Human
guggaaaguguaaagcauucc

SEQ ID NO: 2321080 - RNA, 13 nt, Human
guggaaaguguaa

SEQ ID NO: 2321081 - RNA, 15 nt, Human
guggaaaguguaaag

SEQ ID NO: 2321082 - RNA, 16 nt, Human
guggaaaguguaaagc

SEQ ID NO: 2321083 - RNA, 18 nt, Human
guggaaaguguaaagcau

SEQ ID NO: 2321084 - RNA, 20 nt, Human
guggaaauuaagaagaaacu

SEQ ID NO: 2321085 - RNA, 19 nt, Human
guggaaauuaagaagaaac

SEQ ID NO: 2321086 - RNA, 18 nt, Human
guggaaauuaagaagaaa

SEQ ID NO: 2321087 - RNA, 17 nt, Human
guggaaauuaagaagaa

SEQ ID NO: 2321088 - RNA, 19 nt, Human
guggaaagugaauuugaau

SEQ ID NO: 2321089 - RNA, 16 nt, Human
guggaaagugaauuug

SEQ ID NO: 2321090 - RNA, 22 nt, Human
guggaaagggugcugcuucccu

SEQ ID NO: 2321091 - RNA, 20 nt, Human
guggaaagggugcugcuucc

SEQ ID NO: 2321092 - RNA, 23 nt, Human
guggaaagccucugcugccaugg

SEQ ID NO: 2321093 - RNA, 13 nt, Human
guggaaagggugc

SEQ ID NO: 2321094 - RNA, 15 nt, Human
guggaaagccucugc

SEQ ID NO: 2321095 - RNA, 14 nt, Human
guggaaagccucug

SEQ ID NO: 2321096 - RNA, 19 nt, Human
guggaaaaaugagagaagg

SEQ ID NO: 2321097 - RNA, 20 nt, Human
gugcuuucuauuguacagaa

SEQ ID NO: 2321098 - RNA, 22 nt, Human
gugcuuucuauuguacagaagc

SEQ ID NO: 2321099 - RNA, 15 nt, Human
gugcuuuuaaaugca

SEQ ID NO: 2321100 - RNA, 14 nt, Human
gugcuuuucuccaa

SEQ ID NO: 2321101 - RNA, 18 nt, Human
gugcuuuuauagaggcua

SEQ ID NO: 2321102 - RNA, 19 nt, Human
gugcuuuuauagaggcuag

SEQ ID NO: 2321103 - RNA, 17 nt, Human
gugcuuuuccuauuugu

SEQ ID NO: 2321104 - RNA, 19 nt, Human
gugcuuuuccuauuuguuu

SEQ ID NO: 2321105 - RNA, 15 nt, Human
guggaaaaauauuua

SEQ ID NO: 2321106 - RNA, 14 nt, Human
guggaaaaauauuu

SEQ ID NO: 2321107 - RNA, 13 nt, Human
guggaaaaauauu

SEQ ID NO: 2321108 - RNA, 12 nt, Human
guggaaaaauau

SEQ ID NO: 2321109 - RNA, 23 nt, Human
guggaaaagccaagaggcugcag

SEQ ID NO: 2321110 - RNA, 18 nt, Human
guggaaaaauagccugcc

SEQ ID NO: 2321111 - RNA, 14 nt, Human
gugcuuuaugcuga

SEQ ID NO: 2321112 - RNA, 23 nt, Human
gugcuuguuugcucaccuggggu

SEQ ID NO: 2321113 - RNA, 22 nt, Human
gugcuuguuugcucaccugggg

SEQ ID NO: 2321114 - RNA, 21 nt, Human
gugcuuguuugcucaccuggg

SEQ ID NO: 2321115 - RNA, 15 nt, Human
gugcuugugugugug

SEQ ID NO: 2321116 - RNA, 19 nt, Human
gugcuuguuuacagcacua

SEQ ID NO: 2321117 - RNA, 20 nt, Human
gugcuuguucccucucccug

SEQ ID NO: 2321118 - RNA, 16 nt, Human
gugcuugccacagagc

SEQ ID NO: 2321119 - RNA, 22 nt, Human
gugcuuuccguggcacugcaua

SEQ ID NO: 2321120 - RNA, 20 nt, Human
gugcuuuccuuuuuuaaaaa

SEQ ID NO: 2321121 - RNA, 19 nt, Human
gugcuuuccuuuuuuaaaa

SEQ ID NO: 2321122 - RNA, 12 nt, Human
gugcuuucuauu

SEQ ID NO: 2321123 - RNA, 13 nt, Human
gugcuuucuauug

SEQ ID NO: 2321124 - RNA, 17 nt, Human
gugcuuucuauuguaca

SEQ ID NO: 2321125 - RNA, 19 nt, Human
gugcuuucuauuguacaga

SEQ ID NO: 2321126 - RNA, 17 nt, Human
gugcuuuaugcugaaac

SEQ ID NO: 2321127 - RNA, 15 nt, Human
gugcuuuaugcugaa

SEQ ID NO: 2321128 - RNA, 13 nt, Human
gugcuuuccagcu

SEQ ID NO: 2321129 - RNA, 14 nt, Human
gugcuuuccagcuc

SEQ ID NO: 2321130 - RNA, 15 nt, Human
gugcuuuccagcuca

SEQ ID NO: 2321131 - RNA, 16 nt, Human
gugcuuuccagcucac

SEQ ID NO: 2321132 - RNA, 18 nt, Human
gugcuuuccagcucaccc

SEQ ID NO: 2321133 - RNA, 20 nt, Human
gugcuuuccagcucaccccc

SEQ ID NO: 2321134 - RNA, 14 nt, Human
gugcuucuuucuuu

SEQ ID NO: 2321135 - RNA, 19 nt, Human
guggagguugcagugagcu

SEQ ID NO: 2321136 - RNA, 23 nt, Human
guggagguugcagugagccaaga

SEQ ID NO: 2321137 - RNA, 22 nt, Human
guggagguugcagugagccaag

SEQ ID NO: 2321138 - RNA, 22 nt, Human
guggagguuaaggcugaggaaa

SEQ ID NO: 2321139 - RNA, 21 nt, Human
guggagguuaaggcugaggaa

SEQ ID NO: 2321140 - RNA, 22 nt, Human
guggaggugucaggcugcuggc

SEQ ID NO: 2321141 - RNA, 17 nt, Human
guggaggugucaggcug

SEQ ID NO: 2321142 - RNA, 18 nt, Human
guggaggugucaggcugc

SEQ ID NO: 2321143 - RNA, 15 nt, Human
guggagggguguggc

SEQ ID NO: 2321144 - RNA, 16 nt, Human
guggagggguguggca

SEQ ID NO: 2321145 - RNA, 23 nt, Human
guggagggguguggcagugguuu

SEQ ID NO: 2321146 - RNA, 23 nt, Human
guggagggacaaguggacucagg

SEQ ID NO: 2321147 - RNA, 13 nt, Human
guggaggcuuccu

SEQ ID NO: 2321148 - RNA, 12 nt, Human
guggagggccac

SEQ ID NO: 2321149 - RNA, 14 nt, Human
guggaggcuuccug

SEQ ID NO: 2321150 - RNA, 15 nt, Human
guggaggcuuccugc

SEQ ID NO: 2321151 - RNA, 12 nt, Human
guggaggggugu

SEQ ID NO: 2321152 - RNA, 23 nt, Human
guggagggcacauuccuugccug

SEQ ID NO: 2321153 - RNA, 16 nt, Human
guggagggcguggagg

SEQ ID NO: 2321154 - RNA, 16 nt, Human
guggaggagcucagga

SEQ ID NO: 2321155 - RNA, 23 nt, Human
guggaggaaugcucccccauccu

SEQ ID NO: 2321156 - RNA, 15 nt, Human
guggaggagcagugc

SEQ ID NO: 2321157 - RNA, 12 nt, Human
guggaggagcag

SEQ ID NO: 2321158 - RNA, 17 nt, Human
guggaggaaugcucccc

SEQ ID NO: 2321159 - RNA, 16 nt, Human
guggaggaaugcuccc

SEQ ID NO: 2321160 - RNA, 13 nt, Human
guggagcugccug

SEQ ID NO: 2321161 - RNA, 13 nt, Human
guggaggaaggau

SEQ ID NO: 2321162 - RNA, 14 nt, Human
guggaggaaggauu

SEQ ID NO: 2321163 - RNA, 15 nt, Human
guggaggaaggauug

SEQ ID NO: 2321164 - RNA, 16 nt, Human
guggaggaaggauugu

SEQ ID NO: 2321165 - RNA, 19 nt, Human
guggaggaaggauuguaaa

SEQ ID NO: 2321166 - RNA, 20 nt, Human
guggaggaaggauuguaaaa

SEQ ID NO: 2321167 - RNA, 20 nt, Human
guggaggagcucaggacacu

SEQ ID NO: 2321168 - RNA, 23 nt, Human
guggaggagcucaggacacuaau

SEQ ID NO: 2321169 - RNA, 17 nt, Human
guggaggagcagugcag

SEQ ID NO: 2321170 - RNA, 17 nt, Human
guggaggaggaaggcaa

SEQ ID NO: 2321171 - RNA, 19 nt, Human
guggaggaggaaggcaaga

SEQ ID NO: 2321172 - RNA, 14 nt, Human
guggaggaggccug

SEQ ID NO: 2321173 - RNA, 16 nt, Human
guggaggcugcaguga

SEQ ID NO: 2321174 - RNA, 14 nt, Human
guggaggcacuuua

SEQ ID NO: 2321175 - RNA, 13 nt, Human
guggaggcacuuu

SEQ ID NO: 2321176 - RNA, 17 nt, Human
guggaggaguccaggcc

SEQ ID NO: 2321177 - RNA, 15 nt, Human
guggaggaggccugg

SEQ ID NO: 2321178 - RNA, 16 nt, Human
guggaucacagaggcu

SEQ ID NO: 2321179 - RNA, 15 nt, Human
guggaucaccugagg

SEQ ID NO: 2321180 - RNA, 13 nt, Human
guggaucaccuga

SEQ ID NO: 2321181 - RNA, 15 nt, Human
guggaucacagaggc

SEQ ID NO: 2321182 - RNA, 14 nt, Human
guggaucacagagg

SEQ ID NO: 2321183 - RNA, 15 nt, Human
guggaguggggcagu

SEQ ID NO: 2321184 - RNA, 13 nt, Human
guggauauaaaua

SEQ ID NO: 2321185 - RNA, 15 nt, Human
guggauauaaauaua

SEQ ID NO: 2321186 - RNA, 16 nt, Human
guggauauaaauauau

SEQ ID NO: 2321187 - RNA, 13 nt, Human
guggaucacagag

SEQ ID NO: 2321188 - RNA, 20 nt, Human
guggagucccuuuugcauca

SEQ ID NO: 2321189 - RNA, 17 nt, Human
guggaguucaucuugaa

SEQ ID NO: 2321190 - RNA, 16 nt, Human
guggaugccugguggc

SEQ ID NO: 2321191 - RNA, 18 nt, Human
guggaugccugguggcag

SEQ ID NO: 2321192 - RNA, 15 nt, Human
guggaugauguuucg

SEQ ID NO: 2321193 - RNA, 23 nt, Human
guggaucuccaaggaccagguua

SEQ ID NO: 2321194 - RNA, 17 nt, Human
guggaucuguccaagga

SEQ ID NO: 2321195 - RNA, 18 nt, Human
guggaucuguccaaggaa

SEQ ID NO: 2321196 - RNA, 21 nt, Human
guggaucagagaugcaccacc

SEQ ID NO: 2321197 - RNA, 17 nt, Human
guggaucuccaaggacc

SEQ ID NO: 2321198 - RNA, 18 nt, Human
guggaucuccaaggacca

SEQ ID NO: 2321199 - RNA, 19 nt, Human
guggaucuccaaggaccag

SEQ ID NO: 2321200 - RNA, 22 nt, Human
guggaacguuuuuccuguucuu

SEQ ID NO: 2321201 - RNA, 15 nt, Human
guggaaccaggaacc

SEQ ID NO: 2321202 - RNA, 21 nt, Human
guggaaauuaagaagaaacua

SEQ ID NO: 2321203 - RNA, 21 nt, Human
guggaaccacugacuacuggc

SEQ ID NO: 2321204 - RNA, 17 nt, Human
guggacuggccccuggg

SEQ ID NO: 2321205 - RNA, 16 nt, Human
guggacuuagaaagca

SEQ ID NO: 2321206 - RNA, 18 nt, Human
guggacuuagaaagcagg

SEQ ID NO: 2321207 - RNA, 19 nt, Human
guggacuuagaaagcaggg

SEQ ID NO: 2321208 - RNA, 20 nt, Human
guggacuuagaaagcagggg

SEQ ID NO: 2321209 - RNA, 22 nt, Human
guggacuuagaaagcaggggcu

SEQ ID NO: 2321210 - RNA, 16 nt, Human
guggagaacuccuagg

SEQ ID NO: 2321211 - RNA, 17 nt, Human
guggagaagccacaggc

SEQ ID NO: 2321212 - RNA, 20 nt, Human
guggagaagccacaggccug

SEQ ID NO: 2321213 - RNA, 22 nt, Human
guggagaagccacaggccugag

SEQ ID NO: 2321214 - RNA, 20 nt, Human
guggagaagcggcuggcagc

SEQ ID NO: 2321215 - RNA, 22 nt, Human
guggagaaauuccuugauucac

SEQ ID NO: 2321216 - RNA, 22 nt, Human
guggagaaauaaaaauaccucu

SEQ ID NO: 2321217 - RNA, 23 nt, Human
guggagaaauaaaaauaccucuu

SEQ ID NO: 2321218 - RNA, 21 nt, Human
guggagaaacuguagucucag

SEQ ID NO: 2321219 - RNA, 20 nt, Human
guggagaaagcacugaccug

SEQ ID NO: 2321220 - RNA, 22 nt, Human
guggacuuuccacccccucccu

SEQ ID NO: 2321221 - RNA, 20 nt, Human
guggacuuuccacccccucc

SEQ ID NO: 2321222 - RNA, 17 nt, Human
guggacuuuccaccccc

SEQ ID NO: 2321223 - RNA, 16 nt, Human
guggacuuuccacccc

SEQ ID NO: 2321224 - RNA, 13 nt, Human
guggacuuuuauu

SEQ ID NO: 2321225 - RNA, 16 nt, Human
guggagagcuggugcc

SEQ ID NO: 2321226 - RNA, 14 nt, Human
guggagagcuggug

SEQ ID NO: 2321227 - RNA, 18 nt, Human
guggagaggcccggccuc

SEQ ID NO: 2321228 - RNA, 12 nt, Human
guggagagcugg

SEQ ID NO: 2321229 - RNA, 19 nt, Human
guggagacuggggggcuug

SEQ ID NO: 2321230 - RNA, 20 nt, Human
guggagacuggggggcuuga

SEQ ID NO: 2321231 - RNA, 16 nt, Human
guggagacugcuuccc

SEQ ID NO: 2321232 - RNA, 18 nt, Human
guggagacugcuucccau

SEQ ID NO: 2321233 - RNA, 11 nt, Human
guggagacugc

SEQ ID NO: 2321234 - RNA, 13 nt, Human
guggagacagggc

SEQ ID NO: 2321235 - RNA, 20 nt, Human
guggagaagccauugucuuc

SEQ ID NO: 2321236 - RNA, 18 nt, Human
guggagaagccauugucu

SEQ ID NO: 2321237 - RNA, 19 nt, Human
guggagaagccauugucuu

SEQ ID NO: 2321238 - RNA, 12 nt, Human
guggagaagcca

SEQ ID NO: 2321239 - RNA, 13 nt, Human
guggagaagccau

SEQ ID NO: 2321240 - RNA, 14 nt, Human
guggagaagccauu

SEQ ID NO: 2321241 - RNA, 15 nt, Human
guggagaagccauug

SEQ ID NO: 2321242 - RNA, 16 nt, Human
guggagcaugggccug

SEQ ID NO: 2321243 - RNA, 19 nt, Human
guggagaugucuucguaca

SEQ ID NO: 2321244 - RNA, 18 nt, Human
guggagcaaagugagggc

SEQ ID NO: 2321245 - RNA, 15 nt, Human
guggagaugucuucg

SEQ ID NO: 2321246 - RNA, 16 nt, Human
guggagaugucuucgu

SEQ ID NO: 2321247 - RNA, 17 nt, Human
guggagaugucuucgua

SEQ ID NO: 2321248 - RNA, 18 nt, Human
guggagaugucuucguac

SEQ ID NO: 2321249 - RNA, 17 nt, Human
guggagagcuggugccc

SEQ ID NO: 2321250 - RNA, 14 nt, Human
guggagagcccggc

SEQ ID NO: 2321251 - RNA, 22 nt, Human
guggagagggaugaggugcugg

SEQ ID NO: 2321252 - RNA, 19 nt, Human
guggagcaaagugagggcc

SEQ ID NO: 2321253 - RNA, 17 nt, Human
guggagcaugggccugg

SEQ ID NO: 2321254 - RNA, 14 nt, Human
guggagccccacac

SEQ ID NO: 2321255 - RNA, 18 nt, Human
guggagccccacacuggg

SEQ ID NO: 2321256 - RNA, 23 nt, Human
guggagcccgcacccccacccuu

SEQ ID NO: 2321257 - RNA, 14 nt, Human
guggccaaguucuu

SEQ ID NO: 2321258 - RNA, 15 nt, Human
guggccaaggagcug

SEQ ID NO: 2321259 - RNA, 16 nt, Human
guggccaaggagcugc

SEQ ID NO: 2321260 - RNA, 19 nt, Human
guggccaaauuauuugugu

SEQ ID NO: 2321261 - RNA, 19 nt, Human
guggcauguggccuguggc

SEQ ID NO: 2321262 - RNA, 16 nt, Human
guggcauuggcagcag

SEQ ID NO: 2321263 - RNA, 18 nt, Human
guggcauuggcagcaggu

SEQ ID NO: 2321264 - RNA, 22 nt, Human
guggcauuggcagcaggugcug

SEQ ID NO: 2321265 - RNA, 22 nt, Human
guggcauguucaucguauaaca

SEQ ID NO: 2321266 - RNA, 17 nt, Human
guggcauguggccugug

SEQ ID NO: 2321267 - RNA, 18 nt, Human
guggcauguggccugugg

SEQ ID NO: 2321268 - RNA, 14 nt, Human
guggcauguggccu

SEQ ID NO: 2321269 - RNA, 15 nt, Human
guggcauguggccug

SEQ ID NO: 2321270 - RNA, 16 nt, Human
guggcaucccaguggc

SEQ ID NO: 2321271 - RNA, 13 nt, Human
guggcauggccac

SEQ ID NO: 2321272 - RNA, 21 nt, Human
guggcaucuuugccuugggcu

SEQ ID NO: 2321273 - RNA, 20 nt, Human
guggcaucuuugccuugggc

SEQ ID NO: 2321274 - RNA, 18 nt, Human
guggcaucuuugccuugg

SEQ ID NO: 2321275 - RNA, 22 nt, Human
guggcaucaccuuaggcaggga

SEQ ID NO: 2321276 - RNA, 20 nt, Human
guggcaucaccuuaggcagg

SEQ ID NO: 2321277 - RNA, 14 nt, Human
guggcaucaccuua

SEQ ID NO: 2321278 - RNA, 17 nt, Human
guggcauagcccagaca

SEQ ID NO: 2321279 - RNA, 21 nt, Human
guggcagugguuuuggcaaac

SEQ ID NO: 2321280 - RNA, 15 nt, Human
guggcauagcccaga

SEQ ID NO: 2321281 - RNA, 15 nt, Human
guggcaguuuggcaa

SEQ ID NO: 2321282 - RNA, 19 nt, Human
guggcagugggagcugccu

SEQ ID NO: 2321283 - RNA, 21 nt, Human
guggcagugggagcugccugu

SEQ ID NO: 2321284 - RNA, 23 nt, Human
guggccagagcugggaggcaugg

SEQ ID NO: 2321285 - RNA, 17 nt, Human
guggccagagcugggag

SEQ ID NO: 2321286 - RNA, 21 nt, Human
guggccacuccagaccccugg

SEQ ID NO: 2321287 - RNA, 19 nt, Human
guggccaaggagcugcuau

SEQ ID NO: 2321288 - RNA, 18 nt, Human
guggccaaggagcugcua

SEQ ID NO: 2321289 - RNA, 17 nt, Human
guggccaaggagcugcu

SEQ ID NO: 2321290 - RNA, 13 nt, Human
guggccacucagc

SEQ ID NO: 2321291 - RNA, 14 nt, Human
guggccacucagcu

SEQ ID NO: 2321292 - RNA, 13 nt, Human
guggccaggguga

SEQ ID NO: 2321293 - RNA, 11 nt, Human
guggccagccc

SEQ ID NO: 2321294 - RNA, 13 nt, Human
guggccagcccgg

SEQ ID NO: 2321295 - RNA, 14 nt, Human
guggccagcccggc

SEQ ID NO: 2321296 - RNA, 15 nt, Human
guggccagcccggcu

SEQ ID NO: 2321297 - RNA, 16 nt, Human
guggccagcccggcug

SEQ ID NO: 2321298 - RNA, 14 nt, Human
guggccagccugga

SEQ ID NO: 2321299 - RNA, 15 nt, Human
guggccagccuggau

SEQ ID NO: 2321300 - RNA, 21 nt, Human
guggcccauccccccucacca

SEQ ID NO: 2321301 - RNA, 15 nt, Human
guggccccacccugg

SEQ ID NO: 2321302 - RNA, 13 nt, Human
guggcccaggacc

SEQ ID NO: 2321303 - RNA, 17 nt, Human
guggcccauccccccuc

SEQ ID NO: 2321304 - RNA, 20 nt, Human
guggcccauccccccucacc

SEQ ID NO: 2321305 - RNA, 23 nt, Human
guggccauuuagccaccaucuuu

SEQ ID NO: 2321306 - RNA, 18 nt, Human
guggccccacccugggcc

SEQ ID NO: 2321307 - RNA, 19 nt, Human
guggccccacccugggccc

SEQ ID NO: 2321308 - RNA, 20 nt, Human
guggccccacccugggcccu

SEQ ID NO: 2321309 - RNA, 21 nt, Human
guggcucuacaacugaguccu

SEQ ID NO: 2321310 - RNA, 13 nt, Human
guggcucuccagu

SEQ ID NO: 2321311 - RNA, 15 nt, Human
guggcagugggagcu

SEQ ID NO: 2321312 - RNA, 11 nt, Human
guggcagucug

SEQ ID NO: 2321313 - RNA, 16 nt, Human
guggcagugggagcug

SEQ ID NO: 2321314 - RNA, 17 nt, Human
guggcagugggagcugc

SEQ ID NO: 2321315 - RNA, 21 nt, Human
guggcaggugaccuucuggga

SEQ ID NO: 2321316 - RNA, 23 nt, Human
guggcagguggaggugucaggcu

SEQ ID NO: 2321317 - RNA, 20 nt, Human
guggcaggggacaggagucc

SEQ ID NO: 2321318 - RNA, 16 nt, Human
guggcaggggacagga

SEQ ID NO: 2321319 - RNA, 18 nt, Human
guggcaggggacaggagu

SEQ ID NO: 2321320 - RNA, 18 nt, Human
guggcagggccuagcugc

SEQ ID NO: 2321321 - RNA, 22 nt, Human
guggcagggccuagcugcuaca

SEQ ID NO: 2321322 - RNA, 23 nt, Human
guggcagggccuagcugcuacaa

SEQ ID NO: 2321323 - RNA, 12 nt, Human
guggcagggcuc

SEQ ID NO: 2321324 - RNA, 13 nt, Human
guggcagggcuca

SEQ ID NO: 2321325 - RNA, 16 nt, Human
guggcagggcucagga

SEQ ID NO: 2321326 - RNA, 17 nt, Human
guggcagggcucaggau

SEQ ID NO: 2321327 - RNA, 12 nt, Human
guggcaggcagc

SEQ ID NO: 2321328 - RNA, 19 nt, Human
guggcaggcagcgccaagc

SEQ ID NO: 2321329 - RNA, 13 nt, Human
guggcaggaccag

SEQ ID NO: 2321330 - RNA, 15 nt, Human
guggcaggaccagga

SEQ ID NO: 2321331 - RNA, 17 nt, Human
guggcaggaccaggacu

SEQ ID NO: 2321332 - RNA, 19 nt, Human
guggcagcugcgguccacc

SEQ ID NO: 2321333 - RNA, 20 nt, Human
guggaugccugguggcagcu

SEQ ID NO: 2321334 - RNA, 21 nt, Human
guggcagcugcgguccaccca

SEQ ID NO: 2321335 - RNA, 22 nt, Human
guggcagcugcgguccacccag

SEQ ID NO: 2321336 - RNA, 23 nt, Human
guggcagcugcgguccacccagg

SEQ ID NO: 2321337 - RNA, 12 nt, Human
guggcagcugcu

SEQ ID NO: 2321338 - RNA, 13 nt, Human
guggcagcugcuu

SEQ ID NO: 2321339 - RNA, 19 nt, Human
guggcagcugcuuuugucu

SEQ ID NO: 2321340 - RNA, 22 nt, Human
gugagcauuguggcugucagca

SEQ ID NO: 2321341 - RNA, 16 nt, Human
gugagcuccuaagcca

SEQ ID NO: 2321342 - RNA, 22 nt, Human
gugagccaccgugccuggccac

SEQ ID NO: 2321343 - RNA, 14 nt, Human
gugagcuacaaaug

SEQ ID NO: 2321344 - RNA, 16 nt, Human
gugagcuuugcugcua

SEQ ID NO: 2321345 - RNA, 15 nt, Human
gugagcuuugcugcu

SEQ ID NO: 2321346 - RNA, 15 nt, Human
gugaggaaagucauu

SEQ ID NO: 2321347 - RNA, 11 nt, Human
gugaggaagcc

SEQ ID NO: 2321348 - RNA, 16 nt, Human
gugaggaagccgcugg

SEQ ID NO: 2321349 - RNA, 19 nt, Human
gugaggaagccgcuggggc

SEQ ID NO: 2321350 - RNA, 16 nt, Human
gugacugccccaacuc

SEQ ID NO: 2321351 - RNA, 21 nt, Human
gugacugauguuacaucacag

SEQ ID NO: 2321352 - RNA, 16 nt, Human
gugacucuuuuuaggg

SEQ ID NO: 2321353 - RNA, 18 nt, Human
gugacucuuuuuagggcc

SEQ ID NO: 2321354 - RNA, 20 nt, Human
gugacucuuuuuagggccag

SEQ ID NO: 2321355 - RNA, 22 nt, Human
gugacucuuuuuagggccaggc

SEQ ID NO: 2321356 - RNA, 17 nt, Human
gugacugaucucucgug

SEQ ID NO: 2321357 - RNA, 23 nt, Human
gugacugccccaacuccuggaag

SEQ ID NO: 2321358 - RNA, 17 nt, Human
gugacugcgaucuucag

SEQ ID NO: 2321359 - RNA, 21 nt, Human
gugacugccccaacuccugga

SEQ ID NO: 2321360 - RNA, 20 nt, Human
gugacugccccaacuccugg

SEQ ID NO: 2321361 - RNA, 17 nt, Human
gugagcaggcugugagu

SEQ ID NO: 2321362 - RNA, 16 nt, Human
gugagcagucaggaaa

SEQ ID NO: 2321363 - RNA, 13 nt, Human
gugagccacugca

SEQ ID NO: 2321364 - RNA, 21 nt, Human
gugagccaccgugccuggcca

SEQ ID NO: 2321365 - RNA, 17 nt, Human
gugagccaccgugccug

SEQ ID NO: 2321366 - RNA, 15 nt, Human
gugacuguauauaaa

SEQ ID NO: 2321367 - RNA, 15 nt, Human
gugagccaccacgcc

SEQ ID NO: 2321368 - RNA, 15 nt, Human
gugagccaccgugcc

SEQ ID NO: 2321369 - RNA, 16 nt, Human
gugagccaccacgccc

SEQ ID NO: 2321370 - RNA, 23 nt, Human
gugaccuguggggauuucuccca

SEQ ID NO: 2321371 - RNA, 15 nt, Human
gugaccuuaguguuu

SEQ ID NO: 2321372 - RNA, 20 nt, Human
gugaccuuaguguuucugug

SEQ ID NO: 2321373 - RNA, 23 nt, Human
gugaccugccccgcccagcugca

SEQ ID NO: 2321374 - RNA, 17 nt, Human
gugacucgggcuccugu

SEQ ID NO: 2321375 - RNA, 18 nt, Human
gugacucgggcuccugug

SEQ ID NO: 2321376 - RNA, 19 nt, Human
gugacucgggcuccugugc

SEQ ID NO: 2321377 - RNA, 18 nt, Human
gugacucauccucuugaa

SEQ ID NO: 2321378 - RNA, 12 nt, Human
gugacuccagga

SEQ ID NO: 2321379 - RNA, 14 nt, Human
gugacuccaggaga

SEQ ID NO: 2321380 - RNA, 19 nt, Human
gugacuccaggagaggagc

SEQ ID NO: 2321381 - RNA, 20 nt, Human
gugaccuuccaagagccuga

SEQ ID NO: 2321382 - RNA, 22 nt, Human
gugaccuuaguguuucugugca

SEQ ID NO: 2321383 - RNA, 23 nt, Human
gugaccuuaguguuucugugcau

SEQ ID NO: 2321384 - RNA, 19 nt, Human
gugaccuuccaagagccug

SEQ ID NO: 2321385 - RNA, 15 nt, Human
gugacugaauuucuu

SEQ ID NO: 2321386 - RNA, 14 nt, Human
gugacucugaagcu

SEQ ID NO: 2321387 - RNA, 20 nt, Human
gugacucgggcuccugugcc

SEQ ID NO: 2321388 - RNA, 21 nt, Human
gugacucgggcuccugugccc

SEQ ID NO: 2321389 - RNA, 18 nt, Human
gugacugaauuucuuuug

SEQ ID NO: 2321390 - RNA, 16 nt, Human
gugacugaauuucuuu

SEQ ID NO: 2321391 - RNA, 16 nt, Human
gugaauuuuucucuaa

SEQ ID NO: 2321392 - RNA, 16 nt, Human
gugacaacacuugugu

SEQ ID NO: 2321393 - RNA, 16 nt, Human
gugacaagcucacaga

SEQ ID NO: 2321394 - RNA, 17 nt, Human
gugaauuuuuuuuuccu

SEQ ID NO: 2321395 - RNA, 15 nt, Human
gugacccggaggcca

SEQ ID NO: 2321396 - RNA, 18 nt, Human
gugacccggaggccacau

SEQ ID NO: 2321397 - RNA, 18 nt, Human
gugaccuccacagcuacc

SEQ ID NO: 2321398 - RNA, 19 nt, Human
gugaccucaggcacuagcc

SEQ ID NO: 2321399 - RNA, 23 nt, Human
gugaccugaggauuuaagggaug

SEQ ID NO: 2321400 - RNA, 13 nt, Human
gugaccugagggc

SEQ ID NO: 2321401 - RNA, 16 nt, Human
gugaccugaggaagcg

SEQ ID NO: 2321402 - RNA, 14 nt, Human
gugaccugaggaag

SEQ ID NO: 2321403 - RNA, 14 nt, Human
gugaccugaaguuc

SEQ ID NO: 2321404 - RNA, 19 nt, Human
gugaccugaaguucaccau

SEQ ID NO: 2321405 - RNA, 12 nt, Human
gugaccucaggc

SEQ ID NO: 2321406 - RNA, 21 nt, Human
gugaccggacuuuucugcaaa

SEQ ID NO: 2321407 - RNA, 16 nt, Human
gugaccucagcuuuga

SEQ ID NO: 2321408 - RNA, 13 nt, Human
gugacccucugaa

SEQ ID NO: 2321409 - RNA, 21 nt, Human
gugacccucugaaugguccag

SEQ ID NO: 2321410 - RNA, 15 nt, Human
gugaccggacuuuuc

SEQ ID NO: 2321411 - RNA, 19 nt, Human
gugaccggacuuuucugca

SEQ ID NO: 2321412 - RNA, 12 nt, Human
gugaaacccugu

SEQ ID NO: 2321413 - RNA, 21 nt, Human
gugaaacacaccaggcugugg

SEQ ID NO: 2321414 - RNA, 16 nt, Human
gugaaacccugucucu

SEQ ID NO: 2321415 - RNA, 23 nt, Human
gugaaacacaccaggcugugggc

SEQ ID NO: 2321416 - RNA, 20 nt, Human
gugaaacacaccaggcugug

SEQ ID NO: 2321417 - RNA, 18 nt, Human
gugaaacacaccaggcug

SEQ ID NO: 2321418 - RNA, 17 nt, Human
gugaaacacaccaggcu

SEQ ID NO: 2321419 - RNA, 16 nt, Human
gugaaacacaccaggc

SEQ ID NO: 2321420 - RNA, 19 nt, Human
gugaaaauagguauacagu

SEQ ID NO: 2321421 - RNA, 14 nt, Human
gugaaaauguacug

SEQ ID NO: 2321422 - RNA, 16 nt, Human
gugaaaaugugugugu

SEQ ID NO: 2321423 - RNA, 17 nt, Human
gugaaaaugguccagga

SEQ ID NO: 2321424 - RNA, 15 nt, Human
gugaaaaugguccag

SEQ ID NO: 2321425 - RNA, 16 nt, Human
gucugccagccagcag

SEQ ID NO: 2321426 - RNA, 20 nt, Human
gugaaaagagaggauauguu

SEQ ID NO: 2321427 - RNA, 19 nt, Human
gugaaaaguccuugauugu

SEQ ID NO: 2321428 - RNA, 21 nt, Human
gugaaaauagguauacagugg

SEQ ID NO: 2321429 - RNA, 15 nt, Human
gucugccagccagca

SEQ ID NO: 2321430 - RNA, 14 nt, Human
gucugccagccagc

SEQ ID NO: 2321431 - RNA, 15 nt, Human
gugaaaacggagcug

SEQ ID NO: 2321432 - RNA, 23 nt, Human
gugaaaagaaaaaugagccuggc

SEQ ID NO: 2321433 - RNA, 14 nt, Human
gugaaaagaaaaau

SEQ ID NO: 2321434 - RNA, 20 nt, Human
gugaaagcaucacuugggau

SEQ ID NO: 2321435 - RNA, 19 nt, Human
gugaaacuaacagauaagc

SEQ ID NO: 2321436 - RNA, 16 nt, Human
gugaaacuuccuaagu

SEQ ID NO: 2321437 - RNA, 23 nt, Human
gugaaacugcuuguuuccuagca

SEQ ID NO: 2321438 - RNA, 19 nt, Human
gugaaagaaaauaacaaua

SEQ ID NO: 2321439 - RNA, 12 nt, Human
gugaaacuggau

SEQ ID NO: 2321440 - RNA, 21 nt, Human
gugaaacugcuuguuuccuag

SEQ ID NO: 2321441 - RNA, 20 nt, Human
gugaaacugcuuguuuccua

SEQ ID NO: 2321442 - RNA, 18 nt, Human
gugaaaccuuuuuuaaga

SEQ ID NO: 2321443 - RNA, 19 nt, Human
gugaaaccuuuuuuaagau

SEQ ID NO: 2321444 - RNA, 21 nt, Human
gugaaaccuuuuuuaagauuu

SEQ ID NO: 2321445 - RNA, 22 nt, Human
gugaaaccuuuuuuaagauuuu

SEQ ID NO: 2321446 - RNA, 20 nt, Human
gugaaacucguuaauuugua

SEQ ID NO: 2321447 - RNA, 18 nt, Human
gugaaaccuuuagggcag

SEQ ID NO: 2321448 - RNA, 19 nt, Human
gugaaaccuuuagggcagc

SEQ ID NO: 2321449 - RNA, 20 nt, Human
gugaaaccuuuagggcagcu

SEQ ID NO: 2321450 - RNA, 22 nt, Human
gugaaaccuuuagggcagcuug

SEQ ID NO: 2321451 - RNA, 23 nt, Human
gugaaaccuuuagggcagcuugc

SEQ ID NO: 2321452 - RNA, 13 nt, Human
gugaaaccuuuuu

SEQ ID NO: 2321453 - RNA, 14 nt, Human
gugaaaccuuuuuu

SEQ ID NO: 2321454 - RNA, 17 nt, Human
gugaaaccuuuuuuaag

SEQ ID NO: 2321455 - RNA, 17 nt, Human
gugaaaucaaaggugcu

SEQ ID NO: 2321456 - RNA, 21 nt, Human
gugaaauuuauuaguuaauau

SEQ ID NO: 2321457 - RNA, 18 nt, Human
gugaaauuauucauaauu

SEQ ID NO: 2321458 - RNA, 20 nt, Human
gugaaauuauucauaauuau

SEQ ID NO: 2321459 - RNA, 21 nt, Human
gugaaagucagaugcccagag

SEQ ID NO: 2321460 - RNA, 21 nt, Human
gugaaagggagcuaucaggaa

SEQ ID NO: 2321461 - RNA, 17 nt, Human
gugaaaguacauuugga

SEQ ID NO: 2321462 - RNA, 19 nt, Human
gugaaaggaaagagggagg

SEQ ID NO: 2321463 - RNA, 21 nt, Human
gugaaauaguucaaagccaag

SEQ ID NO: 2321464 - RNA, 17 nt, Human
gugaaauaguucaaagc

SEQ ID NO: 2321465 - RNA, 17 nt, Human
gugaaauaccagugugg

SEQ ID NO: 2321466 - RNA, 13 nt, Human
gugaaaucauuca

SEQ ID NO: 2321467 - RNA, 16 nt, Human
gugaaucacguaaagc

SEQ ID NO: 2321468 - RNA, 22 nt, Human
gugaauauuuccauauggauuu

SEQ ID NO: 2321469 - RNA, 16 nt, Human
gugaauauuguucaua

SEQ ID NO: 2321470 - RNA, 18 nt, Human
gugaaucacguaaagcua

SEQ ID NO: 2321471 - RNA, 14 nt, Human
gugaaucagagcac

SEQ ID NO: 2321472 - RNA, 15 nt, Human
gugaaucagacccua

SEQ ID NO: 2321473 - RNA, 15 nt, Human
gugaaugggaaaaga

SEQ ID NO: 2321474 - RNA, 15 nt, Human
gugaauuuuucucua

SEQ ID NO: 2321475 - RNA, 14 nt, Human
gugaauuuuucucu

SEQ ID NO: 2321476 - RNA, 15 nt, Human
gugcagguggggaga

SEQ ID NO: 2321477 - RNA, 22 nt, Human
gugcaguaucaugcccugugca

SEQ ID NO: 2321478 - RNA, 14 nt, Human
gugcagucacugga

SEQ ID NO: 2321479 - RNA, 19 nt, Human
gugcaguggcccccacaga

SEQ ID NO: 2321480 - RNA, 16 nt, Human
gugcaguccugaucag

SEQ ID NO: 2321481 - RNA, 12 nt, Human
gugcaguccugg

SEQ ID NO: 2321482 - RNA, 22 nt, Human
gugcaguccugggauguggcug

SEQ ID NO: 2321483 - RNA, 19 nt, Human
gugcauaaguuaacuucca

SEQ ID NO: 2321484 - RNA, 23 nt, Human
gugcagggaggagguggcagccc

SEQ ID NO: 2321485 - RNA, 24 nt, Human
gugcaacaggguauggacuaucug

SEQ ID NO: 2321486 - RNA, 14 nt, Human
gugcaacaggguau

SEQ ID NO: 2321487 - RNA, 20 nt, Human
gugcaacagcacuggcucuc

SEQ ID NO: 2321488 - RNA, 23 nt, Human
gugcaacagcacuggcucucucc

SEQ ID NO: 2321489 - RNA, 12 nt, Human
gugcaacagcac

SEQ ID NO: 2321490 - RNA, 15 nt, Human
gugcaacagcacugg

SEQ ID NO: 2321491 - RNA, 22 nt, Human
gugcaacaagguccucugucag

SEQ ID NO: 2321492 - RNA, 19 nt, Human
gugauuuaauaguguuaau

SEQ ID NO: 2321493 - RNA, 19 nt, Human
gugcaaaugucagauacaa

SEQ ID NO: 2321494 - RNA, 23 nt, Human
gugcaaaugucagauacaaugua

SEQ ID NO: 2321495 - RNA, 22 nt, Human
gugcaaaguucccuacuuccug

SEQ ID NO: 2321496 - RNA, 18 nt, Human
gugcaaauugucacagga

SEQ ID NO: 2321497 - RNA, 22 nt, Human
gugcaugaagguuucugaaaau

SEQ ID NO: 2321498 - RNA, 14 nt, Human
gugcaucucagccc

SEQ ID NO: 2321499 - RNA, 18 nt, Human
gugcaucucagcccacau

SEQ ID NO: 2321500 - RNA, 13 nt, Human
gugcaugcucucu

SEQ ID NO: 2321501 - RNA, 18 nt, Human
gugcaugaucuugagcaa

SEQ ID NO: 2321502 - RNA, 18 nt, Human
gugcaugcagcaucuaag

SEQ ID NO: 2321503 - RNA, 20 nt, Human
gugccagguuuuuggucuga

SEQ ID NO: 2321504 - RNA, 22 nt, Human
gugccagguuuuuggucugacc

SEQ ID NO: 2321505 - RNA, 15 nt, Human
gugcaucucagccca

SEQ ID NO: 2321506 - RNA, 12 nt, Human
gugcagucuggg

SEQ ID NO: 2321507 - RNA, 14 nt, Human
gugcagucugggug

SEQ ID NO: 2321508 - RNA, 21 nt, Human
gugcauaccacuuuuguucuu

SEQ ID NO: 2321509 - RNA, 14 nt, Human
gugcauaccacuuu

SEQ ID NO: 2321510 - RNA, 13 nt, Human
gugcauaccacuu

SEQ ID NO: 2321511 - RNA, 12 nt, Human
gugcccccagac

SEQ ID NO: 2321512 - RNA, 19 nt, Human
gugcccccacugaccagaa

SEQ ID NO: 2321513 - RNA, 17 nt, Human
gugccccccauccuggc

SEQ ID NO: 2321514 - RNA, 21 nt, Human
gugccccaugccuguccagcc

SEQ ID NO: 2321515 - RNA, 13 nt, Human
gugcccccacuga

SEQ ID NO: 2321516 - RNA, 18 nt, Human
gugcccccacugaccaga

SEQ ID NO: 2321517 - RNA, 15 nt, Human
gugcccccacugacc

SEQ ID NO: 2321518 - RNA, 19 nt, Human
gugccccccauccuggccc

SEQ ID NO: 2321519 - RNA, 20 nt, Human
gugccccccauccuggccca

SEQ ID NO: 2321520 - RNA, 22 nt, Human
gugccccccauccuggcccauc

SEQ ID NO: 2321521 - RNA, 15 nt, Human
gugcccucgcugcuu

SEQ ID NO: 2321522 - RNA, 17 nt, Human
gugcccauuccucaccu

SEQ ID NO: 2321523 - RNA, 12 nt, Human
gugccccaggac

SEQ ID NO: 2321524 - RNA, 15 nt, Human
gugccccaggaccag

SEQ ID NO: 2321525 - RNA, 14 nt, Human
gugccccaggacca

SEQ ID NO: 2321526 - RNA, 18 nt, Human
gugccccaugccugucca

SEQ ID NO: 2321527 - RNA, 16 nt, Human
gugccccaugccuguc

SEQ ID NO: 2321528 - RNA, 21 nt, Human
gugccccaggaccagcucagg

SEQ ID NO: 2321529 - RNA, 19 nt, Human
gugccccaggaccagcuca

SEQ ID NO: 2321530 - RNA, 17 nt, Human
gugcccaucccuggaag

SEQ ID NO: 2321531 - RNA, 14 nt, Human
gugcccaugggcac

SEQ ID NO: 2321532 - RNA, 16 nt, Human
gugcccaugggcacug

SEQ ID NO: 2321533 - RNA, 19 nt, Human
gugcccaugggcacugcug

SEQ ID NO: 2321534 - RNA, 20 nt, Human
gugcccaugggcacugcugg

SEQ ID NO: 2321535 - RNA, 21 nt, Human
gugcccaugggcacugcuggg

SEQ ID NO: 2321536 - RNA, 16 nt, Human
gugcccauuccucacc

SEQ ID NO: 2321537 - RNA, 19 nt, Human
gugcccaggggcccacagg

SEQ ID NO: 2321538 - RNA, 23 nt, Human
gugcccagcuauaccugugccuc

SEQ ID NO: 2321539 - RNA, 22 nt, Human
gugcccagaacuggacucagga

SEQ ID NO: 2321540 - RNA, 23 nt, Human
gugcccaccaacaucccauugcc

SEQ ID NO: 2321541 - RNA, 20 nt, Human
gugcccagagaugggacugg

SEQ ID NO: 2321542 - RNA, 20 nt, Human
gugcccacaucccaggcuuc

SEQ ID NO: 2321543 - RNA, 16 nt, Human
gugcccagaauaaguu

SEQ ID NO: 2321544 - RNA, 22 nt, Human
gugcccagcuauaccugugccu

SEQ ID NO: 2321545 - RNA, 21 nt, Human
gugcccagcuauaccugugcc

SEQ ID NO: 2321546 - RNA, 20 nt, Human
gugcccagcuauaccugugc

SEQ ID NO: 2321547 - RNA, 18 nt, Human
gugcccagcccggaccuu

SEQ ID NO: 2321548 - RNA, 23 nt, Human
gugcccagcuagcugcagagcca

SEQ ID NO: 2321549 - RNA, 13 nt, Human
gugcccacaggcc

SEQ ID NO: 2321550 - RNA, 21 nt, Human
gugcccacaggccgcccugcg

SEQ ID NO: 2321551 - RNA, 15 nt, Human
gugcccacaucccag

SEQ ID NO: 2321552 - RNA, 20 nt, Human
gugcccacaggaucagucug

SEQ ID NO: 2321553 - RNA, 18 nt, Human
gugccagucuugugucug

SEQ ID NO: 2321554 - RNA, 21 nt, Human
gugccagucgcgcugccugug

SEQ ID NO: 2321555 - RNA, 22 nt, Human
gugccagucgcgcugccugugu

SEQ ID NO: 2321556 - RNA, 16 nt, Human
gugccagucgcgcugc

SEQ ID NO: 2321557 - RNA, 17 nt, Human
gugccagucgcgcugcc

SEQ ID NO: 2321558 - RNA, 18 nt, Human
gugccagucgcgcugccu

SEQ ID NO: 2321559 - RNA, 19 nt, Human
gugccagucgcgcugccug

SEQ ID NO: 2321560 - RNA, 19 nt, Human
gugcaugcucucugcagcc

SEQ ID NO: 2321561 - RNA, 18 nt, Human
gugcaugcucucugcagc

SEQ ID NO: 2321562 - RNA, 16 nt, Human
gugcaugcucucugca

SEQ ID NO: 2321563 - RNA, 15 nt, Human
gugcaugcucucugc

SEQ ID NO: 2321564 - RNA, 21 nt, Human
gugcaugcucucugcagccag

SEQ ID NO: 2321565 - RNA, 15 nt, Human
gugccagucgcgcug

SEQ ID NO: 2321566 - RNA, 23 nt, Human
gugcccaagaauagaugcugacu

SEQ ID NO: 2321567 - RNA, 17 nt, Human
gugccauagucacaugg

SEQ ID NO: 2321568 - RNA, 12 nt, Human
gugcccaagcca

SEQ ID NO: 2321569 - RNA, 19 nt, Human
gugcccaagccagaggcug

SEQ ID NO: 2321570 - RNA, 20 nt, Human
gugcccaagccagaggcugg

SEQ ID NO: 2321571 - RNA, 23 nt, Human
gugccauagaguuuaacacaagu

SEQ ID NO: 2321572 - RNA, 16 nt, Human
gugcccaagcucagaa

SEQ ID NO: 2321573 - RNA, 20 nt, Human
gugcccaagcucagaaggcu

SEQ ID NO: 2321574 - RNA, 23 nt, Human
gugcccaaguuguggugcugaca

SEQ ID NO: 2321575 - RNA, 13 nt, Human
gugauucuccugc

SEQ ID NO: 2321576 - RNA, 17 nt, Human
gugauugacagcuuugc

SEQ ID NO: 2321577 - RNA, 21 nt, Human
gugauuccuuugaagaggaaa

SEQ ID NO: 2321578 - RNA, 13 nt, Human
gugauucugccuu

SEQ ID NO: 2321579 - RNA, 23 nt, Human
gugauucuccugccucagccucc

SEQ ID NO: 2321580 - RNA, 23 nt, Human
gugauuguggaauggagauucag

SEQ ID NO: 2321581 - RNA, 19 nt, Human
gugauuguggaauggagau

SEQ ID NO: 2321582 - RNA, 14 nt, Human
gugauuguggaaug

SEQ ID NO: 2321583 - RNA, 20 nt, Human
gugauugggaauaaauaugc

SEQ ID NO: 2321584 - RNA, 16 nt, Human
gugauugggacagagg

SEQ ID NO: 2321585 - RNA, 23 nt, Human
gugauugacagcuuugcugcuga

SEQ ID NO: 2321586 - RNA, 22 nt, Human
gugauugacagcuuugcugcug

SEQ ID NO: 2321587 - RNA, 21 nt, Human
gugauugacagcuuugcugcu

SEQ ID NO: 2321588 - RNA, 17 nt, Human
gugauugggaauaaaua

SEQ ID NO: 2321589 - RNA, 16 nt, Human
gugauuuugcuguaga

SEQ ID NO: 2321590 - RNA, 19 nt, Human
gugauuuaagacacuuuuu

SEQ ID NO: 2321591 - RNA, 15 nt, Human
gugauuuaauagugu

SEQ ID NO: 2321592 - RNA, 20 nt, Human
gugauuuaauaguguuaauc

SEQ ID NO: 2321593 - RNA, 16 nt, Human
gugauuuaauaguguu

SEQ ID NO: 2321594 - RNA, 18 nt, Human
gugauuuaauaguguuaa

SEQ ID NO: 2321595 - RNA, 14 nt, Human
gugauucuccugcc

SEQ ID NO: 2321596 - RNA, 16 nt, Human
gugauucuaaugucuu

SEQ ID NO: 2321597 - RNA, 19 nt, Human
gugauuccuuugaagagga

SEQ ID NO: 2321598 - RNA, 20 nt, Human
gugauucucaugccucagcc

SEQ ID NO: 2321599 - RNA, 16 nt, Human
gugauucuccugccuc

SEQ ID NO: 2321600 - RNA, 17 nt, Human
gugauucuccugccuca

SEQ ID NO: 2321601 - RNA, 18 nt, Human
gugauucuccugccucag

SEQ ID NO: 2321602 - RNA, 19 nt, Human
gugauucuccugccucagc

SEQ ID NO: 2321603 - RNA, 20 nt, Human
gugauucuccugccucagcc

SEQ ID NO: 2321604 - RNA, 22 nt, Human
gugauucuccugccucagccuc

SEQ ID NO: 2321605 - RNA, 23 nt, Human
gugauccucccaccucagccucc

SEQ ID NO: 2321606 - RNA, 22 nt, Human
gugaucccuagcugugaccucu

SEQ ID NO: 2321607 - RNA, 21 nt, Human
gugaucccuagcugugaccuc

SEQ ID NO: 2321608 - RNA, 20 nt, Human
gugauucacagugugaaucu

SEQ ID NO: 2321609 - RNA, 22 nt, Human
gugauuccacuacaccuggcug

SEQ ID NO: 2321610 - RNA, 23 nt, Human
gugauuccacuacaccuggcuga

SEQ ID NO: 2321611 - RNA, 20 nt, Human
gugauccucccaccucagcc

SEQ ID NO: 2321612 - RNA, 22 nt, Human
gugauccucccaccucagccuc

SEQ ID NO: 2321613 - RNA, 14 nt, Human
gugauccucccacc

SEQ ID NO: 2321614 - RNA, 14 nt, Human
gugauccacucgcc

SEQ ID NO: 2321615 - RNA, 15 nt, Human
gugauccucccaccu

SEQ ID NO: 2321616 - RNA, 18 nt, Human
gugauccucccaccucag

SEQ ID NO: 2321617 - RNA, 13 nt, Human
gugaggcaguggg

SEQ ID NO: 2321618 - RNA, 17 nt, Human
gugaggcaggggcggag

SEQ ID NO: 2321619 - RNA, 12 nt, Human
gugaggcagggg

SEQ ID NO: 2321620 - RNA, 15 nt, Human
gugaggcaggcuuug

SEQ ID NO: 2321621 - RNA, 23 nt, Human
gugaggcagugggucccacuucc

SEQ ID NO: 2321622 - RNA, 11 nt, Human
gugaggccaga

SEQ ID NO: 2321623 - RNA, 11 nt, Human
gugaggagcug

SEQ ID NO: 2321624 - RNA, 23 nt, Human
gugaggcaaugggagcugaggcc

SEQ ID NO: 2321625 - RNA, 23 nt, Human
gugaggauuaaauaauguaaaua

SEQ ID NO: 2321626 - RNA, 14 nt, Human
gugaggagcugcug

SEQ ID NO: 2321627 - RNA, 18 nt, Human
gugaggaaggcaggaaga

SEQ ID NO: 2321628 - RNA, 20 nt, Human
gugaggaauaguugagcccc

SEQ ID NO: 2321629 - RNA, 16 nt, Human
gugaggaccacuccug

SEQ ID NO: 2321630 - RNA, 15 nt, Human
gugauccacccaccu

SEQ ID NO: 2321631 - RNA, 13 nt, Human
gugaggccagaga

SEQ ID NO: 2321632 - RNA, 18 nt, Human
gugauccacccaccucag

SEQ ID NO: 2321633 - RNA, 20 nt, Human
gugauccacccaccucagcc

SEQ ID NO: 2321634 - RNA, 16 nt, Human
guccucccauccccug

SEQ ID NO: 2321635 - RNA, 17 nt, Human
guccucccauccccugg

SEQ ID NO: 2321636 - RNA, 21 nt, Human
guccucccaauuucagacucc

SEQ ID NO: 2321637 - RNA, 12 nt, Human
guccucccaucu

SEQ ID NO: 2321638 - RNA, 13 nt, Human
guccucccaucuc

SEQ ID NO: 2321639 - RNA, 14 nt, Human
guccucccaucuca

SEQ ID NO: 2321640 - RNA, 15 nt, Human
guccuccccucacag

SEQ ID NO: 2321641 - RNA, 12 nt, Human
guccuccccuca

SEQ ID NO: 2321642 - RNA, 16 nt, Human
guccuccccucacagc

SEQ ID NO: 2321643 - RNA, 22 nt, Human
guccucccccugccagugccuu

SEQ ID NO: 2321644 - RNA, 11 nt, Human
guccuccccuc

SEQ ID NO: 2321645 - RNA, 21 nt, Human
guccucccccugccagugccu

SEQ ID NO: 2321646 - RNA, 20 nt, Human
guccucccccugccagugcc

SEQ ID NO: 2321647 - RNA, 13 nt, Human
guccuccccuugg

SEQ ID NO: 2321648 - RNA, 21 nt, Human
guccuccccucacagccucug

SEQ ID NO: 2321649 - RNA, 22 nt, Human
guccuccccucacagccucuga

SEQ ID NO: 2321650 - RNA, 17 nt, Human
guccuccccucacagcc

SEQ ID NO: 2321651 - RNA, 18 nt, Human
guccuccccucacagccu

SEQ ID NO: 2321652 - RNA, 19 nt, Human
guccuccccucacagccuc

SEQ ID NO: 2321653 - RNA, 20 nt, Human
guccuccccucacagccucu

SEQ ID NO: 2321654 - RNA, 19 nt, Human
guccucccccugccagugc

SEQ ID NO: 2321655 - RNA, 17 nt, Human
guccucccccugccagu

SEQ ID NO: 2321656 - RNA, 16 nt, Human
guccucccccugccag

SEQ ID NO: 2321657 - RNA, 15 nt, Human
guccucccccugcca

SEQ ID NO: 2321658 - RNA, 18 nt, Human
guccucccauccccugga

SEQ ID NO: 2321659 - RNA, 19 nt, Human
guccucccauccccuggac

SEQ ID NO: 2321660 - RNA, 20 nt, Human
guccucccauccccuggacu

SEQ ID NO: 2321661 - RNA, 21 nt, Human
guccucccauccccuggacug

SEQ ID NO: 2321662 - RNA, 23 nt, Human
guccucccaucucacacaugagc

SEQ ID NO: 2321663 - RNA, 21 nt, Human
guccugggagaaccucaggcu

SEQ ID NO: 2321664 - RNA, 20 nt, Human
guccugggagaaccucaggc

SEQ ID NO: 2321665 - RNA, 19 nt, Human
guccugggagaaccucagg

SEQ ID NO: 2321666 - RNA, 19 nt, Human
guccuggcuccugaggggc

SEQ ID NO: 2321667 - RNA, 17 nt, Human
guccuggcuccugaggg

SEQ ID NO: 2321668 - RNA, 14 nt, Human
guccuggcuccuga

SEQ ID NO: 2321669 - RNA, 11 nt, Human
guccuggcucc

SEQ ID NO: 2321670 - RNA, 20 nt, Human
guccuggccuggcuucuccu

SEQ ID NO: 2321671 - RNA, 15 nt, Human
guccugggagugagc

SEQ ID NO: 2321672 - RNA, 16 nt, Human
guccugggagugagcu

SEQ ID NO: 2321673 - RNA, 17 nt, Human
guccuggcaugggaaug

SEQ ID NO: 2321674 - RNA, 18 nt, Human
guccuggccaucccacaa

SEQ ID NO: 2321675 - RNA, 17 nt, Human
guccuggccaucccaca

SEQ ID NO: 2321676 - RNA, 14 nt, Human
guccuggccuggcu

SEQ ID NO: 2321677 - RNA, 17 nt, Human
guccuggccuggcuucu

SEQ ID NO: 2321678 - RNA, 16 nt, Human
guccuggccaucccac

SEQ ID NO: 2321679 - RNA, 15 nt, Human
guccuggccauccca

SEQ ID NO: 2321680 - RNA, 22 nt, Human
guccucccgggcccucccuugg

SEQ ID NO: 2321681 - RNA, 22 nt, Human
guccuccuaccgaaaccuugcc

SEQ ID NO: 2321682 - RNA, 15 nt, Human
guccucccgggcccu

SEQ ID NO: 2321683 - RNA, 16 nt, Human
guccucccgggcccuc

SEQ ID NO: 2321684 - RNA, 17 nt, Human
guccucccgggcccucc

SEQ ID NO: 2321685 - RNA, 21 nt, Human
guccucccgggcccucccuug

SEQ ID NO: 2321686 - RNA, 12 nt, Human
guccucccgggc

SEQ ID NO: 2321687 - RNA, 14 nt, Human
guccuccccuuggg

SEQ ID NO: 2321688 - RNA, 15 nt, Human
guccuccccuugggc

SEQ ID NO: 2321689 - RNA, 18 nt, Human
guccuccccuugggcggc

SEQ ID NO: 2321690 - RNA, 19 nt, Human
guccuccccuugggcggcu

SEQ ID NO: 2321691 - RNA, 19 nt, Human
guccugggagugagcuggu

SEQ ID NO: 2321692 - RNA, 17 nt, Human
guccugggccugcagaa

SEQ ID NO: 2321693 - RNA, 14 nt, Human
guccugggccugca

SEQ ID NO: 2321694 - RNA, 13 nt, Human
guccugggccugc

SEQ ID NO: 2321695 - RNA, 17 nt, Human
guccugggagugagcug

SEQ ID NO: 2321696 - RNA, 18 nt, Human
guccugggagugagcugg

SEQ ID NO: 2321697 - RNA, 17 nt, Human
guccuggggcucugugc

SEQ ID NO: 2321698 - RNA, 16 nt, Human
guccuggggcucugug

SEQ ID NO: 2321699 - RNA, 15 nt, Human
guccuggggcucugu

SEQ ID NO: 2321700 - RNA, 22 nt, Human
guccuggggccucggagccuca

SEQ ID NO: 2321701 - RNA, 14 nt, Human
guccuggggccucg

SEQ ID NO: 2321702 - RNA, 20 nt, Human
guccugggcgcccuggaagc

SEQ ID NO: 2321703 - RNA, 23 nt, Human
guccugggcgcccuggaagccgg

SEQ ID NO: 2321704 - RNA, 20 nt, Human
guccuggggaaccugacccc

SEQ ID NO: 2321705 - RNA, 19 nt, Human
guccuggggaaccugaccc

SEQ ID NO: 2321706 - RNA, 14 nt, Human
guccugggcgcccu

SEQ ID NO: 2321707 - RNA, 16 nt, Human
guccugggcgcccugg

SEQ ID NO: 2321708 - RNA, 17 nt, Human
guccugggcgcccugga

SEQ ID NO: 2321709 - RNA, 19 nt, Human
guccugggcgcccuggaag

SEQ ID NO: 2321710 - RNA, 18 nt, Human
guccugugaaugccacug

SEQ ID NO: 2321711 - RNA, 19 nt, Human
guccuguccacacccagcu

SEQ ID NO: 2321712 - RNA, 22 nt, Human
guccuguccacacccagcucag

SEQ ID NO: 2321713 - RNA, 19 nt, Human
guccugugaaugccacugc

SEQ ID NO: 2321714 - RNA, 15 nt, Human
guccugugaauuucu

SEQ ID NO: 2321715 - RNA, 18 nt, Human
guccuguccacacccagc

SEQ ID NO: 2321716 - RNA, 21 nt, Human
guccugucagugccgccgccu

SEQ ID NO: 2321717 - RNA, 22 nt, Human
guccugucagugccgccgccuc

SEQ ID NO: 2321718 - RNA, 14 nt, Human
guccugucagugcc

SEQ ID NO: 2321719 - RNA, 15 nt, Human
guccugucagugccg

SEQ ID NO: 2321720 - RNA, 16 nt, Human
guccugucagugccgc

SEQ ID NO: 2321721 - RNA, 19 nt, Human
guccugucagugccgccgc

SEQ ID NO: 2321722 - RNA, 13 nt, Human
guccugucagugc

SEQ ID NO: 2321723 - RNA, 21 nt, Human
guccuguaguugcguggacuc

SEQ ID NO: 2321724 - RNA, 23 nt, Human
guccuguaguugcguggacucug

SEQ ID NO: 2321725 - RNA, 11 nt, Human
guccugguguc

SEQ ID NO: 2321726 - RNA, 13 nt, Human
guccuggugucac

SEQ ID NO: 2321727 - RNA, 15 nt, Human
guccuguacauugug

SEQ ID NO: 2321728 - RNA, 16 nt, Human
guccuggugucacuua

SEQ ID NO: 2321729 - RNA, 11 nt, Human
guccuggugcu

SEQ ID NO: 2321730 - RNA, 12 nt, Human
guccugggcugg

SEQ ID NO: 2321731 - RNA, 14 nt, Human
guccuggugcucuc

SEQ ID NO: 2321732 - RNA, 15 nt, Human
guccuggugcucucu

SEQ ID NO: 2321733 - RNA, 16 nt, Human
guccuggugcucucug

SEQ ID NO: 2321734 - RNA, 19 nt, Human
guccuggugcucucugcca

SEQ ID NO: 2321735 - RNA, 17 nt, Human
guccuggugcucucugc

SEQ ID NO: 2321736 - RNA, 18 nt, Human
guccuggugcucucugcc

SEQ ID NO: 2321737 - RNA, 16 nt, Human
guccucagguggccau

SEQ ID NO: 2321738 - RNA, 17 nt, Human
guccucagguggccaug

SEQ ID NO: 2321739 - RNA, 23 nt, Human
guccucagguggccaugccucag

SEQ ID NO: 2321740 - RNA, 14 nt, Human
guccuccaagccag

SEQ ID NO: 2321741 - RNA, 14 nt, Human
guccuccacaauaa

SEQ ID NO: 2321742 - RNA, 22 nt, Human
guccuccaacaccaagcacagc

SEQ ID NO: 2321743 - RNA, 21 nt, Human
guccuccaacaccaagcacag

SEQ ID NO: 2321744 - RNA, 22 nt, Human
guccuccagaagccucuggcua

SEQ ID NO: 2321745 - RNA, 21 nt, Human
guccuccagaagccucuggcu

SEQ ID NO: 2321746 - RNA, 20 nt, Human
guccuccagaagccucuggc

SEQ ID NO: 2321747 - RNA, 19 nt, Human
guccuccagaagccucugg

SEQ ID NO: 2321748 - RNA, 18 nt, Human
guccuccagaagccucug

SEQ ID NO: 2321749 - RNA, 14 nt, Human
guccuccagaagcc

SEQ ID NO: 2321750 - RNA, 13 nt, Human
guccuccagaagc

SEQ ID NO: 2321751 - RNA, 14 nt, Human
guccucagguggcc

SEQ ID NO: 2321752 - RNA, 15 nt, Human
guccucagguggcca

SEQ ID NO: 2321753 - RNA, 17 nt, Human
guccucagcuucuuaau

SEQ ID NO: 2321754 - RNA, 13 nt, Human
guccucagcuucu

SEQ ID NO: 2321755 - RNA, 21 nt, Human
guccucagccuugccagagau

SEQ ID NO: 2321756 - RNA, 20 nt, Human
guccucagccuugccagaga

SEQ ID NO: 2321757 - RNA, 16 nt, Human
guccucagccuugcca

SEQ ID NO: 2321758 - RNA, 18 nt, Human
guccucacucccagucca

SEQ ID NO: 2321759 - RNA, 18 nt, Human
guccucacugcucccuga

SEQ ID NO: 2321760 - RNA, 19 nt, Human
guccucacugcucccugaa

SEQ ID NO: 2321761 - RNA, 20 nt, Human
guccucagagaauuucuacc

SEQ ID NO: 2321762 - RNA, 20 nt, Human
guccucacugcucccugaag

SEQ ID NO: 2321763 - RNA, 21 nt, Human
guccucacugcucccugaagc

SEQ ID NO: 2321764 - RNA, 14 nt, Human
guccucagccuugc

SEQ ID NO: 2321765 - RNA, 12 nt, Human
guccucagccuu

SEQ ID NO: 2321766 - RNA, 19 nt, Human
guccuagccacucaggagg

SEQ ID NO: 2321767 - RNA, 20 nt, Human
guccuagcugcacagggcag

SEQ ID NO: 2321768 - RNA, 18 nt, Human
guccuagccacucaggag

SEQ ID NO: 2321769 - RNA, 19 nt, Human
guccuaggaguauccucau

SEQ ID NO: 2321770 - RNA, 12 nt, Human
guccuaggagua

SEQ ID NO: 2321771 - RNA, 23 nt, Human
guccuagcuugggaggcuucccc

SEQ ID NO: 2321772 - RNA, 22 nt, Human
guccuaggccacaccaucuccu

SEQ ID NO: 2321773 - RNA, 17 nt, Human
guccucacucccagucc

SEQ ID NO: 2321774 - RNA, 16 nt, Human
guccucacucccaguc

SEQ ID NO: 2321775 - RNA, 14 nt, Human
guccucacucccag

SEQ ID NO: 2321776 - RNA, 23 nt, Human
guccucaccccuguccucacugc

SEQ ID NO: 2321777 - RNA, 18 nt, Human
guccucacggugccuuuu

SEQ ID NO: 2321778 - RNA, 18 nt, Human
guccucacaucuuucaca

SEQ ID NO: 2321779 - RNA, 13 nt, Human
guccucaccacau

SEQ ID NO: 2321780 - RNA, 14 nt, Human
guccucaccccugu

SEQ ID NO: 2321781 - RNA, 15 nt, Human
guccucaccccuguc

SEQ ID NO: 2321782 - RNA, 17 nt, Human
guccucaccccuguccu

SEQ ID NO: 2321783 - RNA, 20 nt, Human
guccucaccccuguccucac

SEQ ID NO: 2321784 - RNA, 21 nt, Human
guccucaccccuguccucacu

SEQ ID NO: 2321785 - RNA, 22 nt, Human
guccucaccccuguccucacug

SEQ ID NO: 2321786 - RNA, 19 nt, Human
guccucaaggggccauccu

SEQ ID NO: 2321787 - RNA, 20 nt, Human
guccucaaggggccauccug

SEQ ID NO: 2321788 - RNA, 13 nt, Human
guccucacacuca

SEQ ID NO: 2321789 - RNA, 23 nt, Human
guccuagaaauuccccacccuga

SEQ ID NO: 2321790 - RNA, 15 nt, Human
gucccugguaauaag

SEQ ID NO: 2321791 - RNA, 15 nt, Human
guccuacucuguguc

SEQ ID NO: 2321792 - RNA, 23 nt, Human
guccuacucugugucaggugggg

SEQ ID NO: 2321793 - RNA, 23 nt, Human
gucccugggggaagcccuggauu

SEQ ID NO: 2321794 - RNA, 22 nt, Human
gucccugggggaagcccuggau

SEQ ID NO: 2321795 - RNA, 21 nt, Human
gucccugggggaagcccugga

SEQ ID NO: 2321796 - RNA, 20 nt, Human
gucccugggggaagcccugg

SEQ ID NO: 2321797 - RNA, 19 nt, Human
gucccugggggaagcccug

SEQ ID NO: 2321798 - RNA, 22 nt, Human
gucccuggggcuagggggagcc

SEQ ID NO: 2321799 - RNA, 16 nt, Human
gucccugguggcagcu

SEQ ID NO: 2321800 - RNA, 13 nt, Human
guccuacucugug

SEQ ID NO: 2321801 - RNA, 17 nt, Human
gucccugguggcagcuc

SEQ ID NO: 2321802 - RNA, 15 nt, Human
gucccuggggcuagg

SEQ ID NO: 2321803 - RNA, 16 nt, Human
gucccauaggcccagu

SEQ ID NO: 2321804 - RNA, 23 nt, Human
gucccagugggaggggcaggcug

SEQ ID NO: 2321805 - RNA, 18 nt, Human
gucccauaggcccaguga

SEQ ID NO: 2321806 - RNA, 12 nt, Human
gucccagugccg

SEQ ID NO: 2321807 - RNA, 19 nt, Human
gucccaggagcugcccaga

SEQ ID NO: 2321808 - RNA, 17 nt, Human
gucccagguuaucuggg

SEQ ID NO: 2321809 - RNA, 17 nt, Human
gucccagucucuggcag

SEQ ID NO: 2321810 - RNA, 10 nt, Human
gucccagugg

SEQ ID NO: 2321811 - RNA, 11 nt, Human
gucccaguggg

SEQ ID NO: 2321812 - RNA, 14 nt, Human
gucccagugggagg

SEQ ID NO: 2321813 - RNA, 15 nt, Human
gucccagugggaggc

SEQ ID NO: 2321814 - RNA, 17 nt, Human
gucccagugggaggcgc

SEQ ID NO: 2321815 - RNA, 18 nt, Human
gucccagugggaggcgcg

SEQ ID NO: 2321816 - RNA, 18 nt, Human
gucccagugggaggggca

SEQ ID NO: 2321817 - RNA, 19 nt, Human
gucccagugggaggggcag

SEQ ID NO: 2321818 - RNA, 20 nt, Human
gucccagugggaggggcagg

SEQ ID NO: 2321819 - RNA, 21 nt, Human
gucccagugggaggggcaggc

SEQ ID NO: 2321820 - RNA, 22 nt, Human
gucccagugggaggggcaggcu

SEQ ID NO: 2321821 - RNA, 14 nt, Human
gucugagugaaccu

SEQ ID NO: 2321822 - RNA, 14 nt, Human
gucugagucauggc

SEQ ID NO: 2321823 - RNA, 21 nt, Human
gucugagucauggccgggugg

SEQ ID NO: 2321824 - RNA, 22 nt, Human
gucugaggggcaacugagucug

SEQ ID NO: 2321825 - RNA, 21 nt, Human
gucugaggaauccagacccgg

SEQ ID NO: 2321826 - RNA, 14 nt, Human
gucugacugugugu

SEQ ID NO: 2321827 - RNA, 17 nt, Human
gucugauucccaagcuc

SEQ ID NO: 2321828 - RNA, 14 nt, Human
gucugauauucaaa

SEQ ID NO: 2321829 - RNA, 19 nt, Human
gucugaucgugacgcugaa

SEQ ID NO: 2321830 - RNA, 20 nt, Human
gucugaucgugacgcugaau

SEQ ID NO: 2321831 - RNA, 21 nt, Human
gucugaucgugacgcugaaua

SEQ ID NO: 2321832 - RNA, 13 nt, Human
gucugaucugugc

SEQ ID NO: 2321833 - RNA, 15 nt, Human
gucugaucugugcuu

SEQ ID NO: 2321834 - RNA, 17 nt, Human
gucugaucugugcuuuc

SEQ ID NO: 2321835 - RNA, 18 nt, Human
gucugauucccaagcucu

SEQ ID NO: 2321836 - RNA, 19 nt, Human
gucugauucccaagcucug

SEQ ID NO: 2321837 - RNA, 18 nt, Human
gucugcagcccggcgcca

SEQ ID NO: 2321838 - RNA, 17 nt, Human
gucugcacccaggggug

SEQ ID NO: 2321839 - RNA, 22 nt, Human
gucugcacucuaacccuaggca

SEQ ID NO: 2321840 - RNA, 21 nt, Human
gucugcaagucagaggauggc

SEQ ID NO: 2321841 - RNA, 16 nt, Human
gucugcacaugcagcu

SEQ ID NO: 2321842 - RNA, 13 nt, Human
gucugcacccagg

SEQ ID NO: 2321843 - RNA, 15 nt, Human
gucugcacccagggg

SEQ ID NO: 2321844 - RNA, 22 nt, Human
gucugcaagauucugaaacauu

SEQ ID NO: 2321845 - RNA, 13 nt, Human
gucugcaagucag

SEQ ID NO: 2321846 - RNA, 14 nt, Human
gucugcaagucaga

SEQ ID NO: 2321847 - RNA, 15 nt, Human
gucugcaagucagag

SEQ ID NO: 2321848 - RNA, 16 nt, Human
gucugcaagucagagg

SEQ ID NO: 2321849 - RNA, 17 nt, Human
gucugcaagucagagga

SEQ ID NO: 2321850 - RNA, 18 nt, Human
gucugcaagucagaggau

SEQ ID NO: 2321851 - RNA, 19 nt, Human
gucugcaagucagaggaug

SEQ ID NO: 2321852 - RNA, 18 nt, Human
gucugccaauuuuugccu

SEQ ID NO: 2321853 - RNA, 18 nt, Human
gucugccaccauccugcu

SEQ ID NO: 2321854 - RNA, 21 nt, Human
gucugccaauuuuugccuuca

SEQ ID NO: 2321855 - RNA, 17 nt, Human
gucugccacacaaacgu

SEQ ID NO: 2321856 - RNA, 12 nt, Human
gucugcaggcag

SEQ ID NO: 2321857 - RNA, 22 nt, Human
gucugcaggauugauuaugcag

SEQ ID NO: 2321858 - RNA, 19 nt, Human
gucugcagcccggcgccac

SEQ ID NO: 2321859 - RNA, 13 nt, Human
gucugcaggcagg

SEQ ID NO: 2321860 - RNA, 16 nt, Human
gucugcaggugcacca

SEQ ID NO: 2321861 - RNA, 21 nt, Human
gucugcauuucgguggcuagu

SEQ ID NO: 2321862 - RNA, 20 nt, Human
gucugcauuucgguggcuag

SEQ ID NO: 2321863 - RNA, 22 nt, Human
gucugauuucaggauacucugu

SEQ ID NO: 2321864 - RNA, 20 nt, Human
gucugauuggcucacccaag

SEQ ID NO: 2321865 - RNA, 21 nt, Human
gucugaucugugcuuuccagc

SEQ ID NO: 2321866 - RNA, 22 nt, Human
gucugaucugugcuuuccagcu

SEQ ID NO: 2321867 - RNA, 23 nt, Human
gucugaucugugcuuuccagcuc

SEQ ID NO: 2321868 - RNA, 24 nt, Human
gucugaucugugcuuuccagcuca

SEQ ID NO: 2321869 - RNA, 16 nt, Human
gucugauuugugauga

SEQ ID NO: 2321870 - RNA, 21 nt, Human
gucugcaaaaugaggaaugua

SEQ ID NO: 2321871 - RNA, 23 nt, Human
gucugcaaaaugaggaauguaua

SEQ ID NO: 2321872 - RNA, 15 nt, Human
gucugcaacuuuaag

SEQ ID NO: 2321873 - RNA, 20 nt, Human
gucugcaacuuuaagcagcu

SEQ ID NO: 2321874 - RNA, 22 nt, Human
gucugcaacuuuaagcagcucu

SEQ ID NO: 2321875 - RNA, 23 nt, Human
gucugcaacuuuaagcagcucuu

SEQ ID NO: 2321876 - RNA, 15 nt, Human
gucugcaagaaccug

SEQ ID NO: 2321877 - RNA, 20 nt, Human
gucugauucccaagcucugc

SEQ ID NO: 2321878 - RNA, 21 nt, Human
gucugauucccaagcucugcu

SEQ ID NO: 2321879 - RNA, 16 nt, Human
gucucuaucauuaaag

SEQ ID NO: 2321880 - RNA, 23 nt, Human
gucucuaugccagcucaguccca

SEQ ID NO: 2321881 - RNA, 17 nt, Human
gucucuaugccagcuca

SEQ ID NO: 2321882 - RNA, 17 nt, Human
gucucuaucauuaaagu

SEQ ID NO: 2321883 - RNA, 18 nt, Human
gucucuaucauuaaaguu

SEQ ID NO: 2321884 - RNA, 19 nt, Human
gucucuaucauuaaaguuc

SEQ ID NO: 2321885 - RNA, 20 nt, Human
gucucuaucauuaaaguucu

SEQ ID NO: 2321886 - RNA, 23 nt, Human
gucucgcuuuguugcccaggcug

SEQ ID NO: 2321887 - RNA, 19 nt, Human
gucucgcuuuguugcccag

SEQ ID NO: 2321888 - RNA, 17 nt, Human
gucucgcuuuguugccc

SEQ ID NO: 2321889 - RNA, 16 nt, Human
gucucgcuuuguugcc

SEQ ID NO: 2321890 - RNA, 23 nt, Human
gucucggguggcuagucagagag

SEQ ID NO: 2321891 - RNA, 16 nt, Human
gucucggugguaccag

SEQ ID NO: 2321892 - RNA, 22 nt, Human
gucucggugguaccaggucucc

SEQ ID NO: 2321893 - RNA, 16 nt, Human
gucucggacuaagccu

SEQ ID NO: 2321894 - RNA, 12 nt, Human
gucucucuccca

SEQ ID NO: 2321895 - RNA, 15 nt, Human
gucucugugagacuc

SEQ ID NO: 2321896 - RNA, 14 nt, Human
gucucugugcuuug

SEQ ID NO: 2321897 - RNA, 12 nt, Human
gucucucagaau

SEQ ID NO: 2321898 - RNA, 15 nt, Human
gucucucaugaaccu

SEQ ID NO: 2321899 - RNA, 16 nt, Human
gucucucaugaaccuc

SEQ ID NO: 2321900 - RNA, 13 nt, Human
gucugacccacug

SEQ ID NO: 2321901 - RNA, 14 nt, Human
gucugacccacugc

SEQ ID NO: 2321902 - RNA, 15 nt, Human
gucucuucuccacug

SEQ ID NO: 2321903 - RNA, 16 nt, Human
gucucuucuccacugg

SEQ ID NO: 2321904 - RNA, 11 nt, Human
gucucuucaga

SEQ ID NO: 2321905 - RNA, 14 nt, Human
gucucuucuccacu

SEQ ID NO: 2321906 - RNA, 15 nt, Human
gucugacccacugcu

SEQ ID NO: 2321907 - RNA, 17 nt, Human
gucucuucuccacugga

SEQ ID NO: 2321908 - RNA, 14 nt, Human
gucugacccucucc

SEQ ID NO: 2321909 - RNA, 13 nt, Human
gucucuuccccuc

SEQ ID NO: 2321910 - RNA, 18 nt, Human
gucugaggaauccagacc

SEQ ID NO: 2321911 - RNA, 19 nt, Human
gucugaggaauccagaccc

SEQ ID NO: 2321912 - RNA, 13 nt, Human
gucuacccagaga

SEQ ID NO: 2321913 - RNA, 17 nt, Human
gucuacccagagaagcc

SEQ ID NO: 2321914 - RNA, 20 nt, Human
gucuacccagagaagccccu

SEQ ID NO: 2321915 - RNA, 21 nt, Human
gucuacccagagaagccccuu

SEQ ID NO: 2321916 - RNA, 15 nt, Human
gucuacacugugcug

SEQ ID NO: 2321917 - RNA, 23 nt, Human
gucuacacuaagagagaaugaga

SEQ ID NO: 2321918 - RNA, 20 nt, Human
gucuaaggaugcuaaaccuu

SEQ ID NO: 2321919 - RNA, 21 nt, Human
gucuaaucuagauaucgacuu

SEQ ID NO: 2321920 - RNA, 17 nt, Human
gucuacacuaagagaga

SEQ ID NO: 2321921 - RNA, 21 nt, Human
gucuaaacaaugcugauuugg

SEQ ID NO: 2321922 - RNA, 10 nt, Human
gucuaaacug

SEQ ID NO: 2321923 - RNA, 14 nt, Human
gucuaaagagcuuu

SEQ ID NO: 2321924 - RNA, 23 nt, Human
gucuaagauaguaacaaugaaga

SEQ ID NO: 2321925 - RNA, 20 nt, Human
gucuaaaauuuuuaaggacu

SEQ ID NO: 2321926 - RNA, 16 nt, Human
gucuaaacaaugcuga

SEQ ID NO: 2321927 - RNA, 14 nt, Human
gucuaaaacaauaa

SEQ ID NO: 2321928 - RNA, 13 nt, Human
gucuaaaacaaua

SEQ ID NO: 2321929 - RNA, 14 nt, Human
gucuaaaaauaaaa

SEQ ID NO: 2321930 - RNA, 12 nt, Human
gucuaaaaacac

SEQ ID NO: 2321931 - RNA, 17 nt, Human
gucguugacuuuaggga

SEQ ID NO: 2321932 - RNA, 19 nt, Human
gucguugacuuuagggacu

SEQ ID NO: 2321933 - RNA, 13 nt, Human
gucguugugaggg

SEQ ID NO: 2321934 - RNA, 14 nt, Human
gucgugggugugug

SEQ ID NO: 2321935 - RNA, 19 nt, Human
gucguggggugugcuggga

SEQ ID NO: 2321936 - RNA, 21 nt, Human
gucguggggugugcugggagc

SEQ ID NO: 2321937 - RNA, 20 nt, Human
guccuuaaugauccguucca

SEQ ID NO: 2321938 - RNA, 23 nt, Human
guccuuaaacagggcaucuccag

SEQ ID NO: 2321939 - RNA, 21 nt, Human
guccuguguuuuuucugccac

SEQ ID NO: 2321940 - RNA, 15 nt, Human
guccuguggcaggca

SEQ ID NO: 2321941 - RNA, 21 nt, Human
guccuguggcaggcagcgcca

SEQ ID NO: 2321942 - RNA, 16 nt, Human
guccuguggcaggcag

SEQ ID NO: 2321943 - RNA, 17 nt, Human
guccuguggcaggcagc

SEQ ID NO: 2321944 - RNA, 15 nt, Human
guccuuaccagcaga

SEQ ID NO: 2321945 - RNA, 16 nt, Human
guccuuaccagcagag

SEQ ID NO: 2321946 - RNA, 17 nt, Human
guccuuaccagcagagc

SEQ ID NO: 2321947 - RNA, 20 nt, Human
gucucacuauguugcccagg

SEQ ID NO: 2321948 - RNA, 21 nt, Human
gucucacuauguugcccaggc

SEQ ID NO: 2321949 - RNA, 13 nt, Human
gucucacuguugc

SEQ ID NO: 2321950 - RNA, 23 nt, Human
gucucacuauguugcccaggcag

SEQ ID NO: 2321951 - RNA, 16 nt, Human
gucucacuguugccca

SEQ ID NO: 2321952 - RNA, 17 nt, Human
gucucacuguugcccag

SEQ ID NO: 2321953 - RNA, 18 nt, Human
gucucacuguugcccagg

SEQ ID NO: 2321954 - RNA, 19 nt, Human
gucucacuguugcccaggc

SEQ ID NO: 2321955 - RNA, 20 nt, Human
gucucacuguugcccaggcu

SEQ ID NO: 2321956 - RNA, 21 nt, Human
gucucacuguugcccaggcug

SEQ ID NO: 2321957 - RNA, 22 nt, Human
gucucacuguugcccaggcugg

SEQ ID NO: 2321958 - RNA, 23 nt, Human
gucucacuguugcccaggcuggc

SEQ ID NO: 2321959 - RNA, 24 nt, Human
gucucagacucuuuuuguaccugg

SEQ ID NO: 2321960 - RNA, 22 nt, Human
gucucacuugugcaguguugac

SEQ ID NO: 2321961 - RNA, 17 nt, Human
gucucgcugaugcuggg

SEQ ID NO: 2321962 - RNA, 18 nt, Human
gucucgcucugucaccca

SEQ ID NO: 2321963 - RNA, 18 nt, Human
gucucgcugaugcugggc

SEQ ID NO: 2321964 - RNA, 19 nt, Human
gucucgcugaugcugggcu

SEQ ID NO: 2321965 - RNA, 20 nt, Human
gucucgcugaugcugggcug

SEQ ID NO: 2321966 - RNA, 21 nt, Human
gucucgcugaugcugggcugg

SEQ ID NO: 2321967 - RNA, 13 nt, Human
gucucgcucuguc

SEQ ID NO: 2321968 - RNA, 18 nt, Human
guauucaauauccuuugc

SEQ ID NO: 2321969 - RNA, 22 nt, Human
guauucagugagggucuucuua

SEQ ID NO: 2321970 - RNA, 19 nt, Human
guauuccagaccugaagaa

SEQ ID NO: 2321971 - RNA, 19 nt, Human
guauucccauuagaccaag

SEQ ID NO: 2321972 - RNA, 14 nt, Human
guauuccugccucc

SEQ ID NO: 2321973 - RNA, 18 nt, Human
guauuccuuaaauaaacu

SEQ ID NO: 2321974 - RNA, 23 nt, Human
guauuccuuuuguguacagugug

SEQ ID NO: 2321975 - RNA, 20 nt, Human
guauuccuuuuguguacagu

SEQ ID NO: 2321976 - RNA, 13 nt, Human
guauuuauucaau

SEQ ID NO: 2321977 - RNA, 14 nt, Human
guauuuauucaaua

SEQ ID NO: 2321978 - RNA, 16 nt, Human
guauuuauucaauaaa

SEQ ID NO: 2321979 - RNA, 22 nt, Human
guauucgugcagcauaugagga

SEQ ID NO: 2321980 - RNA, 13 nt, Human
guauuuauuccau

SEQ ID NO: 2321981 - RNA, 23 nt, Human
guauuuauucaauaaaguauuua

SEQ ID NO: 2321982 - RNA, 15 nt, Human
guauuuauuccauau

SEQ ID NO: 2321983 - RNA, 21 nt, Human
guauuuauuccauauucaugu

SEQ ID NO: 2321984 - RNA, 22 nt, Human
guauuuauuccauauucaugua

SEQ ID NO: 2321985 - RNA, 23 nt, Human
guauuuauuccauauucauguaa

SEQ ID NO: 2321986 - RNA, 17 nt, Human
guauuuauucaauaaag

SEQ ID NO: 2321987 - RNA, 19 nt, Human
guauuuauucaauaaagua

SEQ ID NO: 2321988 - RNA, 20 nt, Human
guauuuauucaauaaaguau

SEQ ID NO: 2321989 - RNA, 22 nt, Human
guauuuauucaauaaaguauuu

SEQ ID NO: 2321990 - RNA, 22 nt, Human
guauuuauuuuccuccccagca

SEQ ID NO: 2321991 - RNA, 20 nt, Human
guauuuauuuuccuccccag

SEQ ID NO: 2321992 - RNA, 19 nt, Human
guauuuauuuuccucccca

SEQ ID NO: 2321993 - RNA, 18 nt, Human
guauuuauuuuccucccc

SEQ ID NO: 2321994 - RNA, 17 nt, Human
guauuuauuuuccuccc

SEQ ID NO: 2321995 - RNA, 21 nt, Human
guauuuauuuaaaagauucau

SEQ ID NO: 2321996 - RNA, 13 nt, Human
guauuuauuuaaa

SEQ ID NO: 2321997 - RNA, 14 nt, Human
guauuuauuuaaaa

SEQ ID NO: 2321998 - RNA, 18 nt, Human
guauuuauuuaaaagauu

SEQ ID NO: 2321999 - RNA, 19 nt, Human
guauuuauuuaguauuuau

SEQ ID NO: 2322000 - RNA, 23 nt, Human
guauuuauuuuccuccccagcag

SEQ ID NO: 2322001 - RNA, 11 nt, Human
guauuucagac

SEQ ID NO: 2322002 - RNA, 13 nt, Human
guauuucaaauug

SEQ ID NO: 2322003 - RNA, 17 nt, Human
guauuucuaugaaauau

SEQ ID NO: 2322004 - RNA, 16 nt, Human
guauuuccagugcaau

SEQ ID NO: 2322005 - RNA, 12 nt, Human
guauuucccagc

SEQ ID NO: 2322006 - RNA, 22 nt, Human
guauuucuaugaaauauuaugu

SEQ ID NO: 2322007 - RNA, 14 nt, Human
guauuugaaacuga

SEQ ID NO: 2322008 - RNA, 19 nt, Human
guauuugagaguucuaaau

SEQ ID NO: 2322009 - RNA, 21 nt, Human
guauuugagaguucuaaauuu

SEQ ID NO: 2322010 - RNA, 13 nt, Human
guauuugcaguuc

SEQ ID NO: 2322011 - RNA, 12 nt, Human
guauuugcuuuu

SEQ ID NO: 2322012 - RNA, 22 nt, Human
guauuugcuuuuuuguuuuggc

SEQ ID NO: 2322013 - RNA, 19 nt, Human
guauuagggguaauauauu

SEQ ID NO: 2322014 - RNA, 22 nt, Human
guauuagggguaauauauugcu

SEQ ID NO: 2322015 - RNA, 12 nt, Human
guauuauaaauu

SEQ ID NO: 2322016 - RNA, 18 nt, Human
guauuauaaauuauguuu

SEQ ID NO: 2322017 - RNA, 19 nt, Human
guauuauaaauuauguuua

SEQ ID NO: 2322018 - RNA, 14 nt, Human
guauuauaccuuuu

SEQ ID NO: 2322019 - RNA, 12 nt, Human
guauuagauguu

SEQ ID NO: 2322020 - RNA, 13 nt, Human
guauuagauguuc

SEQ ID NO: 2322021 - RNA, 14 nt, Human
guauuagauguucu

SEQ ID NO: 2322022 - RNA, 15 nt, Human
guauuagauguucuc

SEQ ID NO: 2322023 - RNA, 17 nt, Human
guauuagauguucucua

SEQ ID NO: 2322024 - RNA, 18 nt, Human
guauuagauguucucuau

SEQ ID NO: 2322025 - RNA, 21 nt, Human
guauuagauguucucuaucau

SEQ ID NO: 2322026 - RNA, 22 nt, Human
guauuagauguucucuaucauu

SEQ ID NO: 2322027 - RNA, 16 nt, Human
guauuauucugcagca

SEQ ID NO: 2322028 - RNA, 21 nt, Human
guauuauguacucuacugaua

SEQ ID NO: 2322029 - RNA, 16 nt, Human
guauuaugucucuucu

SEQ ID NO: 2322030 - RNA, 15 nt, Human
guauuaugcuucuug

SEQ ID NO: 2322031 - RNA, 17 nt, Human
guauuaugcuucuugga

SEQ ID NO: 2322032 - RNA, 15 nt, Human
guauuauucugcagc

SEQ ID NO: 2322033 - RNA, 14 nt, Human
guauuauuuuccaa

SEQ ID NO: 2322034 - RNA, 19 nt, Human
guauuauaggccaaacugg

SEQ ID NO: 2322035 - RNA, 20 nt, Human
guauuauaaauuauguuuau

SEQ ID NO: 2322036 - RNA, 12 nt, Human
guauuaugcuuc

SEQ ID NO: 2322037 - RNA, 14 nt, Human
guauuaugcuucuu

SEQ ID NO: 2322038 - RNA, 15 nt, Human
guauuauguguguuu

SEQ ID NO: 2322039 - RNA, 13 nt, Human
guagagugggagc

SEQ ID NO: 2322040 - RNA, 15 nt, Human
guagagucaucucca

SEQ ID NO: 2322041 - RNA, 14 nt, Human
guagagguuuuguu

SEQ ID NO: 2322042 - RNA, 23 nt, Human
guagagucaucuccaucagcugu

SEQ ID NO: 2322043 - RNA, 15 nt, Human
guagagugggagcug

SEQ ID NO: 2322044 - RNA, 21 nt, Human
guauuacuagaagaugaauac

SEQ ID NO: 2322045 - RNA, 22 nt, Human
guauuacacuguauuuguaucu

SEQ ID NO: 2322046 - RNA, 13 nt, Human
guauuacuucugc

SEQ ID NO: 2322047 - RNA, 14 nt, Human
guauuacuucugcu

SEQ ID NO: 2322048 - RNA, 15 nt, Human
guauuacuucugcua

SEQ ID NO: 2322049 - RNA, 14 nt, Human
gucaaugugcagug

SEQ ID NO: 2322050 - RNA, 15 nt, Human
gucaauguuuucagu

SEQ ID NO: 2322051 - RNA, 18 nt, Human
gucaaugugcaguguagc

SEQ ID NO: 2322052 - RNA, 16 nt, Human
gucaauuacaggaagu

SEQ ID NO: 2322053 - RNA, 13 nt, Human
gucaauuacagga

SEQ ID NO: 2322054 - RNA, 15 nt, Human
gucaauuacaggaag

SEQ ID NO: 2322055 - RNA, 16 nt, Human
gucaaguugugcuugu

SEQ ID NO: 2322056 - RNA, 17 nt, Human
gucaaguugugcuuguu

SEQ ID NO: 2322057 - RNA, 18 nt, Human
gucaaguugugcuuguuu

SEQ ID NO: 2322058 - RNA, 21 nt, Human
gucaauaaaauccauacauuu

SEQ ID NO: 2322059 - RNA, 17 nt, Human
gucaaguuccuuugggu

SEQ ID NO: 2322060 - RNA, 16 nt, Human
gucaagugggaucugu

SEQ ID NO: 2322061 - RNA, 14 nt, Human
gucaagugggaucu

SEQ ID NO: 2322062 - RNA, 15 nt, Human
gucaauaaaauccau

SEQ ID NO: 2322063 - RNA, 19 nt, Human
gucaccggauccugggugg

SEQ ID NO: 2322064 - RNA, 17 nt, Human
gucaccggauccugggu

SEQ ID NO: 2322065 - RNA, 16 nt, Human
gucaccggauccuggg

SEQ ID NO: 2322066 - RNA, 16 nt, Human
gucacccuccaccucu

SEQ ID NO: 2322067 - RNA, 15 nt, Human
gucaccccggccacc

SEQ ID NO: 2322068 - RNA, 13 nt, Human
gucaccccggcca

SEQ ID NO: 2322069 - RNA, 21 nt, Human
gucaccaucucaggccaccug

SEQ ID NO: 2322070 - RNA, 20 nt, Human
gucaccaucucaggccaccu

SEQ ID NO: 2322071 - RNA, 17 nt, Human
gucaccaucucaggcca

SEQ ID NO: 2322072 - RNA, 16 nt, Human
gucaccaucucaggcc

SEQ ID NO: 2322073 - RNA, 23 nt, Human
gucaccaucuuaagagaugccuc

SEQ ID NO: 2322074 - RNA, 20 nt, Human
gucacccaggcuggaguaca

SEQ ID NO: 2322075 - RNA, 20 nt, Human
gucacccaggcuggagugca

SEQ ID NO: 2322076 - RNA, 20 nt, Human
gucaccugaagacucauucu

SEQ ID NO: 2322077 - RNA, 14 nt, Human
gucaccucauggaa

SEQ ID NO: 2322078 - RNA, 23 nt, Human
gucaccggauccuggguggucug

SEQ ID NO: 2322079 - RNA, 18 nt, Human
gucaccguggaccuuccu

SEQ ID NO: 2322080 - RNA, 19 nt, Human
gucaccguggaccuuccug

SEQ ID NO: 2322081 - RNA, 20 nt, Human
gucaccguggaccuuccugc

SEQ ID NO: 2322082 - RNA, 21 nt, Human
gucaccguggaccuuccugcc

SEQ ID NO: 2322083 - RNA, 16 nt, Human
gucaccucagagacau

SEQ ID NO: 2322084 - RNA, 14 nt, Human
guauuuguuaaugg

SEQ ID NO: 2322085 - RNA, 18 nt, Human
guauuugugacuaauugu

SEQ ID NO: 2322086 - RNA, 20 nt, Human
guauuugugacuaauuguau

SEQ ID NO: 2322087 - RNA, 21 nt, Human
guauuugugacuaauuguaua

SEQ ID NO: 2322088 - RNA, 20 nt, Human
guauuugggaagugaagacu

SEQ ID NO: 2322089 - RNA, 11 nt, Human
guauuugugac

SEQ ID NO: 2322090 - RNA, 16 nt, Human
guauuuuaaaagaaug

SEQ ID NO: 2322091 - RNA, 17 nt, Human
guauuuuaaaagaauga

SEQ ID NO: 2322092 - RNA, 15 nt, Human
gucaacuucuggcuc

SEQ ID NO: 2322093 - RNA, 17 nt, Human
gucaacuucuggcuccu

SEQ ID NO: 2322094 - RNA, 23 nt, Human
guauuuguuugcauaggugaucu

SEQ ID NO: 2322095 - RNA, 12 nt, Human
gucaacuucugg

SEQ ID NO: 2322096 - RNA, 12 nt, Human
guauuuguuugc

SEQ ID NO: 2322097 - RNA, 18 nt, Human
guauuuuaaaagaaugau

SEQ ID NO: 2322098 - RNA, 18 nt, Human
gucaagagggucugagga

SEQ ID NO: 2322099 - RNA, 19 nt, Human
gucaagagggucugaggaa

SEQ ID NO: 2322100 - RNA, 15 nt, Human
gucaaggaguggcuu

SEQ ID NO: 2322101 - RNA, 21 nt, Human
gucaagcuccuccucccugca

SEQ ID NO: 2322102 - RNA, 20 nt, Human
gucaagcuccuccucccugc

SEQ ID NO: 2322103 - RNA, 19 nt, Human
gucaagcuccuccucccug

SEQ ID NO: 2322104 - RNA, 17 nt, Human
gucaagcuccuccuccc

SEQ ID NO: 2322105 - RNA, 15 nt, Human
gucaagcuccuccuc

SEQ ID NO: 2322106 - RNA, 14 nt, Human
gucaagauuuugaa

SEQ ID NO: 2322107 - RNA, 11 nt, Human
gucaagcacuc

SEQ ID NO: 2322108 - RNA, 14 nt, Human
gucaagcccaggag

SEQ ID NO: 2322109 - RNA, 13 nt, Human
gucaagcuccucc

SEQ ID NO: 2322110 - RNA, 17 nt, Human
gucaagaagaagaugga

SEQ ID NO: 2322111 - RNA, 18 nt, Human
gucaagugaaaaaggagg

SEQ ID NO: 2322112 - RNA, 16 nt, Human
gucaagugaaaaagga

SEQ ID NO: 2322113 - RNA, 19 nt, Human
gucaagugaaaaaggagga

SEQ ID NO: 2322114 - RNA, 18 nt, Human
gucaaggcugcuuagaau

SEQ ID NO: 2322115 - RNA, 17 nt, Human
gucaagugcguccacga

SEQ ID NO: 2322116 - RNA, 15 nt, Human
guccagaagaauauu

SEQ ID NO: 2322117 - RNA, 17 nt, Human
guccagaagaauauuca

SEQ ID NO: 2322118 - RNA, 19 nt, Human
guccagaagaauauucagg

SEQ ID NO: 2322119 - RNA, 21 nt, Human
guccagaagaauauucaggac

SEQ ID NO: 2322120 - RNA, 23 nt, Human
guccacuguguauagaaguagau

SEQ ID NO: 2322121 - RNA, 20 nt, Human
guccacugucacuguuucuc

SEQ ID NO: 2322122 - RNA, 14 nt, Human
guccacuguguaua

SEQ ID NO: 2322123 - RNA, 17 nt, Human
guccagcuugcucuuca

SEQ ID NO: 2322124 - RNA, 16 nt, Human
guccagcuugcucuuc

SEQ ID NO: 2322125 - RNA, 14 nt, Human
guccagcuugcucu

SEQ ID NO: 2322126 - RNA, 13 nt, Human
guccaggagccug

SEQ ID NO: 2322127 - RNA, 18 nt, Human
guccaggaaaugugcaca

SEQ ID NO: 2322128 - RNA, 17 nt, Human
guccagcugagcgccag

SEQ ID NO: 2322129 - RNA, 14 nt, Human
guccagcuccaacc

SEQ ID NO: 2322130 - RNA, 15 nt, Human
guccagacagccugu

SEQ ID NO: 2322131 - RNA, 12 nt, Human
guccagcucugg

SEQ ID NO: 2322132 - RNA, 11 nt, Human
guccagacagc

SEQ ID NO: 2322133 - RNA, 22 nt, Human
guccagaagaauauucaggacu

SEQ ID NO: 2322134 - RNA, 12 nt, Human
guccagacagcc

SEQ ID NO: 2322135 - RNA, 14 nt, Human
guccagacagccug

SEQ ID NO: 2322136 - RNA, 13 nt, Human
guccagcucugga

SEQ ID NO: 2322137 - RNA, 14 nt, Human
guccagcucuggag

SEQ ID NO: 2322138 - RNA, 16 nt, Human
guccagcucuggaggg

SEQ ID NO: 2322139 - RNA, 21 nt, Human
guccagcucuggaggggaggg

SEQ ID NO: 2322140 - RNA, 20 nt, Human
gucauguaagcugaaaauau

SEQ ID NO: 2322141 - RNA, 20 nt, Human
gucauggcuuaauguuuauu

SEQ ID NO: 2322142 - RNA, 22 nt, Human
gucauggcugugcccucuugau

SEQ ID NO: 2322143 - RNA, 15 nt, Human
gucauggcuuaaugu

SEQ ID NO: 2322144 - RNA, 15 nt, Human
gucaugugacaggua

SEQ ID NO: 2322145 - RNA, 11 nt, Human
gucaugugacc

SEQ ID NO: 2322146 - RNA, 18 nt, Human
gucaugcccuccucuccc

SEQ ID NO: 2322147 - RNA, 17 nt, Human
gucaugcccuccucucc

SEQ ID NO: 2322148 - RNA, 16 nt, Human
gucaugcccuccucuc

SEQ ID NO: 2322149 - RNA, 15 nt, Human
gucaugcuuguguua

SEQ ID NO: 2322150 - RNA, 14 nt, Human
guccacccaggagc

SEQ ID NO: 2322151 - RNA, 15 nt, Human
gucauguuuaagaaa

SEQ ID NO: 2322152 - RNA, 17 nt, Human
gucauguuccuucaaga

SEQ ID NO: 2322153 - RNA, 23 nt, Human
gucauguuggucaaaagcuggau

SEQ ID NO: 2322154 - RNA, 15 nt, Human
guccacccaggagcc

SEQ ID NO: 2322155 - RNA, 16 nt, Human
guccacccaggagccc

SEQ ID NO: 2322156 - RNA, 21 nt, Human
guccaggaugcuaacaucuaa

SEQ ID NO: 2322157 - RNA, 17 nt, Human
guccaggccccaaaacc

SEQ ID NO: 2322158 - RNA, 15 nt, Human
guccaggcacugaga

SEQ ID NO: 2322159 - RNA, 13 nt, Human
guccaggcugccg

SEQ ID NO: 2322160 - RNA, 21 nt, Human
guccagggagcauuuuccucc

SEQ ID NO: 2322161 - RNA, 20 nt, Human
guccagggaagcuggccgag

SEQ ID NO: 2322162 - RNA, 15 nt, Human
guccagggaagcugg

SEQ ID NO: 2322163 - RNA, 13 nt, Human
guccagggaagcu

SEQ ID NO: 2322164 - RNA, 14 nt, Human
guccaggcugccgu

SEQ ID NO: 2322165 - RNA, 16 nt, Human
guccaggcugccgugg

SEQ ID NO: 2322166 - RNA, 20 nt, Human
guccaggcugccguggggcc

SEQ ID NO: 2322167 - RNA, 13 nt, Human
guccagggaagag

SEQ ID NO: 2322168 - RNA, 23 nt, Human
guccagggaagagaaagugauuu

SEQ ID NO: 2322169 - RNA, 12 nt, Human
gucccacucaag

SEQ ID NO: 2322170 - RNA, 17 nt, Human
guccagggcccugagcu

SEQ ID NO: 2322171 - RNA, 16 nt, Human
guccagggcccugagc

SEQ ID NO: 2322172 - RNA, 15 nt, Human
guccagggcccugag

SEQ ID NO: 2322173 - RNA, 14 nt, Human
guccagggcccuga

SEQ ID NO: 2322174 - RNA, 14 nt, Human
gucccacucagucc

SEQ ID NO: 2322175 - RNA, 15 nt, Human
gucccacucagucca

SEQ ID NO: 2322176 - RNA, 22 nt, Human
gucccacucaagccaagcagcc

SEQ ID NO: 2322177 - RNA, 21 nt, Human
gucccacucaagccaagcagc

SEQ ID NO: 2322178 - RNA, 18 nt, Human
gucccacucaagccaagc

SEQ ID NO: 2322179 - RNA, 16 nt, Human
gucccacucaagccaa

SEQ ID NO: 2322180 - RNA, 11 nt, Human
gucccacugcc

SEQ ID NO: 2322181 - RNA, 17 nt, Human
gucccacugccucaggu

SEQ ID NO: 2322182 - RNA, 17 nt, Human
gucccagauacuugggg

SEQ ID NO: 2322183 - RNA, 17 nt, Human
gucccagauuggcucac

SEQ ID NO: 2322184 - RNA, 18 nt, Human
gucccagagcaggaggcc

SEQ ID NO: 2322185 - RNA, 19 nt, Human
gucccagagcaggaggccc

SEQ ID NO: 2322186 - RNA, 21 nt, Human
gucccagauuggcucacacug

SEQ ID NO: 2322187 - RNA, 22 nt, Human
gucccagauuggcucacacuga

SEQ ID NO: 2322188 - RNA, 20 nt, Human
gucccagaaugccuccugca

SEQ ID NO: 2322189 - RNA, 19 nt, Human
gucccacuuggcaucagcu

SEQ ID NO: 2322190 - RNA, 16 nt, Human
gucccagagcaggagg

SEQ ID NO: 2322191 - RNA, 22 nt, Human
gucccagaaaaagcaucauggc

SEQ ID NO: 2322192 - RNA, 17 nt, Human
gucccacuuccccuccu

SEQ ID NO: 2322193 - RNA, 21 nt, Human
gucccacuuccccuccuaccc

SEQ ID NO: 2322194 - RNA, 19 nt, Human
gucccacugccucagguuc

SEQ ID NO: 2322195 - RNA, 18 nt, Human
gucccacugccucagguu

SEQ ID NO: 2322196 - RNA, 16 nt, Human
gucccacuuccccucc

SEQ ID NO: 2322197 - RNA, 22 nt, Human
gucccagcuacucagaagccug

SEQ ID NO: 2322198 - RNA, 23 nt, Human
gucccagccaccccgggcucucu

SEQ ID NO: 2322199 - RNA, 14 nt, Human
gucccagcuacucg

SEQ ID NO: 2322200 - RNA, 21 nt, Human
gucccagccaccccgggcucu

SEQ ID NO: 2322201 - RNA, 18 nt, Human
gucccagccaccccgggc

SEQ ID NO: 2322202 - RNA, 16 nt, Human
gucccagccaccccgg

SEQ ID NO: 2322203 - RNA, 15 nt, Human
gucccagccaccccg

SEQ ID NO: 2322204 - RNA, 14 nt, Human
gucccagccacccc

SEQ ID NO: 2322205 - RNA, 22 nt, Human
gucccagagcaggaggccccug

SEQ ID NO: 2322206 - RNA, 15 nt, Human
gucauagguuaauau

SEQ ID NO: 2322207 - RNA, 21 nt, Human
gucauauaagauucauauuua

SEQ ID NO: 2322208 - RNA, 18 nt, Human
gucauauguaggugucug

SEQ ID NO: 2322209 - RNA, 12 nt, Human
gucauauuuuga

SEQ ID NO: 2322210 - RNA, 20 nt, Human
gucauauuuugauuauugua

SEQ ID NO: 2322211 - RNA, 16 nt, Human
gucauauuuugauuau

SEQ ID NO: 2322212 - RNA, 15 nt, Human
gucaucacuuuucag

SEQ ID NO: 2322213 - RNA, 17 nt, Human
gucaucacuuuucagug

SEQ ID NO: 2322214 - RNA, 16 nt, Human
gucaucacuuuucagu

SEQ ID NO: 2322215 - RNA, 14 nt, Human
gucaucagccacca

SEQ ID NO: 2322216 - RNA, 19 nt, Human
gucaucuccaucagcugua

SEQ ID NO: 2322217 - RNA, 17 nt, Human
gucaucuccaucagcug

SEQ ID NO: 2322218 - RNA, 16 nt, Human
gucaucuaguuuuaaa

SEQ ID NO: 2322219 - RNA, 16 nt, Human
gucaucucagcuggau

SEQ ID NO: 2322220 - RNA, 12 nt, Human
gucaucuaguuu

SEQ ID NO: 2322221 - RNA, 15 nt, Human
gucaucuaguuuuaa

SEQ ID NO: 2322222 - RNA, 21 nt, Human
gucaucauuguauauaugugu

SEQ ID NO: 2322223 - RNA, 17 nt, Human
gucaucaggagaaaaag

SEQ ID NO: 2322224 - RNA, 13 nt, Human
gucaucauacaug

SEQ ID NO: 2322225 - RNA, 15 nt, Human
gucaugaucucccug

SEQ ID NO: 2322226 - RNA, 14 nt, Human
gucaugaucucccu

SEQ ID NO: 2322227 - RNA, 16 nt, Human
gucaugagcugagcag

SEQ ID NO: 2322228 - RNA, 20 nt, Human
gucaugaauucuuaugcuua

SEQ ID NO: 2322229 - RNA, 18 nt, Human
gucaugagcugagcaggg

SEQ ID NO: 2322230 - RNA, 14 nt, Human
gucaugaagcccaa

SEQ ID NO: 2322231 - RNA, 22 nt, Human
gucaucuuuuucucuaaaauag

SEQ ID NO: 2322232 - RNA, 18 nt, Human
gucaugaacauguuccug

SEQ ID NO: 2322233 - RNA, 18 nt, Human
gucaucuuuuucucuaaa

SEQ ID NO: 2322234 - RNA, 22 nt, Human
gucaucuugaccaagcaggaag

SEQ ID NO: 2322235 - RNA, 20 nt, Human
gucaucuugaccaagcagga

SEQ ID NO: 2322236 - RNA, 16 nt, Human
gucaucugguagauuu

SEQ ID NO: 2322237 - RNA, 18 nt, Human
gucaucuugaccaagcag

SEQ ID NO: 2322238 - RNA, 19 nt, Human
gucaugaucucccugccgc

SEQ ID NO: 2322239 - RNA, 18 nt, Human
gucaugaucucccugccg

SEQ ID NO: 2322240 - RNA, 17 nt, Human
gucaugaucucccugcc

SEQ ID NO: 2322241 - RNA, 16 nt, Human
gucaugaucucccugc

SEQ ID NO: 2322242 - RNA, 22 nt, Human
gucaugaucucccugccgccuc

SEQ ID NO: 2322243 - RNA, 20 nt, Human
gucaugaucucccugccgcc

SEQ ID NO: 2322244 - RNA, 15 nt, Human
gucaugauggcacca

SEQ ID NO: 2322245 - RNA, 16 nt, Human
gucaugcaaaggcugg

SEQ ID NO: 2322246 - RNA, 17 nt, Human
gucaugcaaaggcuggg

SEQ ID NO: 2322247 - RNA, 18 nt, Human
gucaugcaaaggcuggga

SEQ ID NO: 2322248 - RNA, 13 nt, Human
gucaugcauaaau

SEQ ID NO: 2322249 - RNA, 14 nt, Human
gucaugcauaaaua

SEQ ID NO: 2322250 - RNA, 17 nt, Human
gucaugcauaaauaugc

SEQ ID NO: 2322251 - RNA, 18 nt, Human
gucaugcauaaauaugca

SEQ ID NO: 2322252 - RNA, 19 nt, Human
gucaugcauaaauaugcag

SEQ ID NO: 2322253 - RNA, 15 nt, Human
gucaugccccccuca

SEQ ID NO: 2322254 - RNA, 16 nt, Human
gucaugccccccucaa

SEQ ID NO: 2322255 - RNA, 16 nt, Human
gucagccagggccagg

SEQ ID NO: 2322256 - RNA, 22 nt, Human
gucagcccaaaccaccagaagc

SEQ ID NO: 2322257 - RNA, 23 nt, Human
gucagcccaaaccaccagaagcc

SEQ ID NO: 2322258 - RNA, 22 nt, Human
gucagcccuaggguggagagcc

SEQ ID NO: 2322259 - RNA, 13 nt, Human
gucagcccuaggg

SEQ ID NO: 2322260 - RNA, 11 nt, Human
gucagccaggg

SEQ ID NO: 2322261 - RNA, 14 nt, Human
gucagccagggcca

SEQ ID NO: 2322262 - RNA, 12 nt, Human
gucagccagggc

SEQ ID NO: 2322263 - RNA, 15 nt, Human
gucagccagggccag

SEQ ID NO: 2322264 - RNA, 15 nt, Human
gucagccaaauguaa

SEQ ID NO: 2322265 - RNA, 13 nt, Human
gucagcaggaagc

SEQ ID NO: 2322266 - RNA, 23 nt, Human
gucagcagccucccugaagacca

SEQ ID NO: 2322267 - RNA, 20 nt, Human
gucagcagccucccugaaga

SEQ ID NO: 2322268 - RNA, 17 nt, Human
gucagcaaauuaauugg

SEQ ID NO: 2322269 - RNA, 22 nt, Human
gucagcaaauuaauuggcagca

SEQ ID NO: 2322270 - RNA, 22 nt, Human
gucacguggaggagcagugcag

SEQ ID NO: 2322271 - RNA, 13 nt, Human
gucaccugugcuu

SEQ ID NO: 2322272 - RNA, 23 nt, Human
gucaccugcccagaucccagaag

SEQ ID NO: 2322273 - RNA, 21 nt, Human
gucaccucagagacauacacc

SEQ ID NO: 2322274 - RNA, 14 nt, Human
gucagcuacuaaug

SEQ ID NO: 2322275 - RNA, 17 nt, Human
gucauacaauccauucu

SEQ ID NO: 2322276 - RNA, 16 nt, Human
gucauaccaggccgcc

SEQ ID NO: 2322277 - RNA, 21 nt, Human
gucauacuaucuacucuccuc

SEQ ID NO: 2322278 - RNA, 20 nt, Human
gucauacuaucuacucuccu

SEQ ID NO: 2322279 - RNA, 16 nt, Human
gucauaccaaugaaaa

SEQ ID NO: 2322280 - RNA, 15 nt, Human
gucauaccaaugaaa

SEQ ID NO: 2322281 - RNA, 22 nt, Human
gucauacuaucuacucuccuca

SEQ ID NO: 2322282 - RNA, 22 nt, Human
gucauagaaauuacacccaaag

SEQ ID NO: 2322283 - RNA, 13 nt, Human
gucauagaaauua

SEQ ID NO: 2322284 - RNA, 16 nt, Human
gucagcguugcauguc

SEQ ID NO: 2322285 - RNA, 18 nt, Human
gucagcguugcaugucgu

SEQ ID NO: 2322286 - RNA, 19 nt, Human
gucagcguugcaugucgug

SEQ ID NO: 2322287 - RNA, 22 nt, Human
gucagccuucccccucccaggg

SEQ ID NO: 2322288 - RNA, 20 nt, Human
gucagccucucucccagucu

SEQ ID NO: 2322289 - RNA, 21 nt, Human
gucagccucucucccagucua

SEQ ID NO: 2322290 - RNA, 21 nt, Human
gucagcgcagguuuaguuuac

SEQ ID NO: 2322291 - RNA, 20 nt, Human
gucagcgugcuuagccuccu

SEQ ID NO: 2322292 - RNA, 15 nt, Human
gucagcguugcaugu

SEQ ID NO: 2322293 - RNA, 11 nt, Human
gucagccucuc

SEQ ID NO: 2322294 - RNA, 16 nt, Human
gucagccucucuccca

SEQ ID NO: 2322295 - RNA, 15 nt, Human
gucagccuccagccu

SEQ ID NO: 2322296 - RNA, 16 nt, Human
gucagccuccagccuc

SEQ ID NO: 2322297 - RNA, 18 nt, Human
gucagccuccagccucug

SEQ ID NO: 2322298 - RNA, 19 nt, Human
gucagccuccagccucugu

SEQ ID NO: 2322299 - RNA, 16 nt, Human
gucagccgagccgggc

SEQ ID NO: 2322300 - RNA, 20 nt, Human
gucagccgagccgggccugg

SEQ ID NO: 2322301 - RNA, 21 nt, Human
gucagccgagccgggccuggg

SEQ ID NO: 2322302 - RNA, 15 nt, Human
gucagccgggcccug

SEQ ID NO: 2322303 - RNA, 16 nt, Human
gucagccgggcccuga

SEQ ID NO: 2322304 - RNA, 17 nt, Human
gucagccgggcccugag

SEQ ID NO: 2322305 - RNA, 12 nt, Human
gucagccuccag

SEQ ID NO: 2322306 - RNA, 14 nt, Human
gucagccuccagcc

SEQ ID NO: 2322307 - RNA, 20 nt, Human
gggccuggcgggaugggcca

SEQ ID NO: 2322308 - RNA, 19 nt, Human
gggccuggccugagcuggg

SEQ ID NO: 2322309 - RNA, 12 nt, Human
gggccuggcuca

SEQ ID NO: 2322310 - RNA, 22 nt, Human
gggccuggcagccgugccuuca

SEQ ID NO: 2322311 - RNA, 12 nt, Human
gggccuggccug

SEQ ID NO: 2322312 - RNA, 10 nt, Human
gggccuggca

SEQ ID NO: 2322313 - RNA, 18 nt, Human
gggccuggagcaggccuu

SEQ ID NO: 2322314 - RNA, 20 nt, Human
gggccuggauucauuuccug

SEQ ID NO: 2322315 - RNA, 21 nt, Human
gggccuggauucauuuccugc

SEQ ID NO: 2322316 - RNA, 19 nt, Human
gggccuggucccugggagg

SEQ ID NO: 2322317 - RNA, 22 nt, Human
gggccuggcgggaugggccacc

SEQ ID NO: 2322318 - RNA, 18 nt, Human
gggccuggucguuuucaa

SEQ ID NO: 2322319 - RNA, 14 nt, Human
gggccuggcucagg

SEQ ID NO: 2322320 - RNA, 16 nt, Human
gggccuggcucaggug

SEQ ID NO: 2322321 - RNA, 20 nt, Human
ggcucccacaggcccuuccu

SEQ ID NO: 2322322 - RNA, 21 nt, Human
ggcucccacaggcccuuccuc

SEQ ID NO: 2322323 - RNA, 17 nt, Human
ggcucccacaggcagcu

SEQ ID NO: 2322324 - RNA, 13 nt, Human
gggcccggccagc

SEQ ID NO: 2322325 - RNA, 23 nt, Human
gggcccgcuugccucggcuccug

SEQ ID NO: 2322326 - RNA, 16 nt, Human
gggcccggccagccau

SEQ ID NO: 2322327 - RNA, 20 nt, Human
gggcccggccauguccuuag

SEQ ID NO: 2322328 - RNA, 13 nt, Human
gggcccgcuugcc

SEQ ID NO: 2322329 - RNA, 14 nt, Human
gggcccgcuugccu

SEQ ID NO: 2322330 - RNA, 20 nt, Human
gggcccgcuugccucggcuc

SEQ ID NO: 2322331 - RNA, 21 nt, Human
gggcccgcuugccucggcucc

SEQ ID NO: 2322332 - RNA, 23 nt, Human
gggcccuccugaaacuuacacac

SEQ ID NO: 2322333 - RNA, 12 nt, Human
gggcccuccuga

SEQ ID NO: 2322334 - RNA, 16 nt, Human
gggcccucucugcucu

SEQ ID NO: 2322335 - RNA, 13 nt, Human
gggccuggaccug

SEQ ID NO: 2322336 - RNA, 14 nt, Human
gggccuggaccugc

SEQ ID NO: 2322337 - RNA, 16 nt, Human
gggccuggaccugccu

SEQ ID NO: 2322338 - RNA, 12 nt, Human
gggccuggagau

SEQ ID NO: 2322339 - RNA, 21 nt, Human
gggccuggagauccuccugca

SEQ ID NO: 2322340 - RNA, 23 nt, Human
gggcccuccgacagcccccucug

SEQ ID NO: 2322341 - RNA, 16 nt, Human
gggcccuccgacagcc

SEQ ID NO: 2322342 - RNA, 19 nt, Human
gggcccuccgacagccccc

SEQ ID NO: 2322343 - RNA, 21 nt, Human
gggcccguugucucccuggcc

SEQ ID NO: 2322344 - RNA, 22 nt, Human
gggcccguugucucccuggccc

SEQ ID NO: 2322345 - RNA, 23 nt, Human
gggcccguugucucccuggcccu

SEQ ID NO: 2322346 - RNA, 14 nt, Human
gggcccucccuugg

SEQ ID NO: 2322347 - RNA, 16 nt, Human
gggcccguugucuccc

SEQ ID NO: 2322348 - RNA, 18 nt, Human
gggcccguugucucccug

SEQ ID NO: 2322349 - RNA, 20 nt, Human
gggcccguugucucccuggc

SEQ ID NO: 2322350 - RNA, 17 nt, Human
gggcccguugaggauga

SEQ ID NO: 2322351 - RNA, 22 nt, Human
gggcgccgcaaaccacacugga

SEQ ID NO: 2322352 - RNA, 15 nt, Human
gggcgcggccagccc

SEQ ID NO: 2322353 - RNA, 15 nt, Human
gggcgcccuggaagc

SEQ ID NO: 2322354 - RNA, 22 nt, Human
gggcgccuguagucccagccac

SEQ ID NO: 2322355 - RNA, 22 nt, Human
gggcgaucgcggcggagcuggc

SEQ ID NO: 2322356 - RNA, 13 nt, Human
gggcgcccaccuc

SEQ ID NO: 2322357 - RNA, 18 nt, Human
gggcgagucacugccucu

SEQ ID NO: 2322358 - RNA, 14 nt, Human
gggcgcccuggaag

SEQ ID NO: 2322359 - RNA, 21 nt, Human
gggcgcccaccuccccacgcc

SEQ ID NO: 2322360 - RNA, 18 nt, Human
gggcgaucgcggcggagc

SEQ ID NO: 2322361 - RNA, 13 nt, Human
gggcgaggcagag

SEQ ID NO: 2322362 - RNA, 16 nt, Human
gggcgaggcagaggac

SEQ ID NO: 2322363 - RNA, 12 nt, Human
gggcgaggcaga

SEQ ID NO: 2322364 - RNA, 20 nt, Human
gggcgagacuccgucucaaa

SEQ ID NO: 2322365 - RNA, 19 nt, Human
gggcgaagcccaggccccu

SEQ ID NO: 2322366 - RNA, 20 nt, Human
gggcgaccccgucacagccu

SEQ ID NO: 2322367 - RNA, 16 nt, Human
gggccuuuggcaggug

SEQ ID NO: 2322368 - RNA, 23 nt, Human
gggccuugcuaccucaaggggga

SEQ ID NO: 2322369 - RNA, 22 nt, Human
gggccuuggccuccccugcuga

SEQ ID NO: 2322370 - RNA, 22 nt, Human
gggccuugcccagagaugccuc

SEQ ID NO: 2322371 - RNA, 21 nt, Human
gggccuugcgguauccgcccc

SEQ ID NO: 2322372 - RNA, 17 nt, Human
gggccuugcccagagau

SEQ ID NO: 2322373 - RNA, 15 nt, Human
gggccuugcccagag

SEQ ID NO: 2322374 - RNA, 14 nt, Human
gggccuugcccaga

SEQ ID NO: 2322375 - RNA, 12 nt, Human
gggccuugccca

SEQ ID NO: 2322376 - RNA, 20 nt, Human
gggcgcucgcuuccgcaucc

SEQ ID NO: 2322377 - RNA, 18 nt, Human
gggcgcggccagccccgg

SEQ ID NO: 2322378 - RNA, 23 nt, Human
gggcgcggccagccccggcccug

SEQ ID NO: 2322379 - RNA, 16 nt, Human
gggcgcgguggcucac

SEQ ID NO: 2322380 - RNA, 13 nt, Human
gggcucccuuccc

SEQ ID NO: 2322381 - RNA, 21 nt, Human
gggcucccuguaaccucuuca

SEQ ID NO: 2322382 - RNA, 18 nt, Human
gggcucccugacugggag

SEQ ID NO: 2322383 - RNA, 14 nt, Human
gggcucccugacug

SEQ ID NO: 2322384 - RNA, 12 nt, Human
gggcgcuggccc

SEQ ID NO: 2322385 - RNA, 13 nt, Human
gggcgcuggccca

SEQ ID NO: 2322386 - RNA, 14 nt, Human
gggcucccuuccca

SEQ ID NO: 2322387 - RNA, 17 nt, Human
gggcucccuucccaccu

SEQ ID NO: 2322388 - RNA, 18 nt, Human
gggcucccuucccaccuc

SEQ ID NO: 2322389 - RNA, 23 nt, Human
gggcucccuucccaccucucuca

SEQ ID NO: 2322390 - RNA, 14 nt, Human
gggcuuagagcagu

SEQ ID NO: 2322391 - RNA, 24 nt, Human
gggcuuagagcaguuucuguccug

SEQ ID NO: 2322392 - RNA, 21 nt, Human
gggcuucaaccuugagacagc

SEQ ID NO: 2322393 - RNA, 14 nt, Human
gggcuucaguggca

SEQ ID NO: 2322394 - RNA, 13 nt, Human
gggcuuagagcag

SEQ ID NO: 2322395 - RNA, 15 nt, Human
gggcuuaagaaaucu

SEQ ID NO: 2322396 - RNA, 11 nt, Human
gggcugugcua

SEQ ID NO: 2322397 - RNA, 16 nt, Human
gggcuguuggcacuca

SEQ ID NO: 2322398 - RNA, 12 nt, Human
gggcugugaucg

SEQ ID NO: 2322399 - RNA, 17 nt, Human
gggcugucaucugugca

SEQ ID NO: 2322400 - RNA, 19 nt, Human
gggcuguccaguucccaga

SEQ ID NO: 2322401 - RNA, 14 nt, Human
gggcugagggagcc

SEQ ID NO: 2322402 - RNA, 23 nt, Human
gggcugguucuguaauugugugu

SEQ ID NO: 2322403 - RNA, 16 nt, Human
gggcugucaucugugc

SEQ ID NO: 2322404 - RNA, 18 nt, Human
gggcuguaaaaugcauga

SEQ ID NO: 2322405 - RNA, 16 nt, Human
gggcugaggugggagg

SEQ ID NO: 2322406 - RNA, 14 nt, Human
gggcugcaccggcu

SEQ ID NO: 2322407 - RNA, 15 nt, Human
gggcugagcccuggc

SEQ ID NO: 2322408 - RNA, 13 nt, Human
gggcugagcccug

SEQ ID NO: 2322409 - RNA, 18 nt, Human
gggcugagagaaccucac

SEQ ID NO: 2322410 - RNA, 14 nt, Human
gggcugagccccua

SEQ ID NO: 2322411 - RNA, 15 nt, Human
gggcugagccccuac

SEQ ID NO: 2322412 - RNA, 23 nt, Human
gggcugagccccuaccccacacc

SEQ ID NO: 2322413 - RNA, 17 nt, Human
gggcugagcccuggcag

SEQ ID NO: 2322414 - RNA, 16 nt, Human
gggcugagcccuggca

SEQ ID NO: 2322415 - RNA, 18 nt, Human
gggcugagcccuggcagg

SEQ ID NO: 2322416 - RNA, 16 nt, Human
gggcugagcugccugu

SEQ ID NO: 2322417 - RNA, 23 nt, Human
gggcugagcuggggaccugguac

SEQ ID NO: 2322418 - RNA, 13 nt, Human
gggcugagggagc

SEQ ID NO: 2322419 - RNA, 12 nt, Human
gggcugagggag

SEQ ID NO: 2322420 - RNA, 13 nt, Human
gggcucuggagag

SEQ ID NO: 2322421 - RNA, 14 nt, Human
gggcucuggagaga

SEQ ID NO: 2322422 - RNA, 15 nt, Human
gggcucuggagagaa

SEQ ID NO: 2322423 - RNA, 21 nt, Human
gggcucugccccagcucuggc

SEQ ID NO: 2322424 - RNA, 20 nt, Human
gggcucugccccagcucugg

SEQ ID NO: 2322425 - RNA, 12 nt, Human
gggcucuucuca

SEQ ID NO: 2322426 - RNA, 14 nt, Human
gggcucugugggcu

SEQ ID NO: 2322427 - RNA, 16 nt, Human
gggcucugugggcugc

SEQ ID NO: 2322428 - RNA, 16 nt, Human
gggcucugugcaguca

SEQ ID NO: 2322429 - RNA, 16 nt, Human
gggcucuggagagaaa

SEQ ID NO: 2322430 - RNA, 11 nt, Human
gggcucugugg

SEQ ID NO: 2322431 - RNA, 18 nt, Human
gggcugaacggggagaaa

SEQ ID NO: 2322432 - RNA, 19 nt, Human
gggcucugugggcugcacu

SEQ ID NO: 2322433 - RNA, 15 nt, Human
gggcucuucucauuu

SEQ ID NO: 2322434 - RNA, 17 nt, Human
gggcugaagguugaaga

SEQ ID NO: 2322435 - RNA, 19 nt, Human
gggcugaagguugaagagg

SEQ ID NO: 2322436 - RNA, 16 nt, Human
gggcugaccuuccucg

SEQ ID NO: 2322437 - RNA, 20 nt, Human
gggcugaccuuccucgcaga

SEQ ID NO: 2322438 - RNA, 20 nt, Human
gggcugacuagaagggccag

SEQ ID NO: 2322439 - RNA, 21 nt, Human
gggcugaccuuccucgcagag

SEQ ID NO: 2322440 - RNA, 23 nt, Human
gggcugaccuuccucgcagagag

SEQ ID NO: 2322441 - RNA, 10 nt, Human
gggcugagac

SEQ ID NO: 2322442 - RNA, 14 nt, Human
gggcugacugggac

SEQ ID NO: 2322443 - RNA, 23 nt, Human
gggcuccuggaaaggcucagucu

SEQ ID NO: 2322444 - RNA, 20 nt, Human
gggcuccuggaaaggcucag

SEQ ID NO: 2322445 - RNA, 12 nt, Human
gggcuccuggaa

SEQ ID NO: 2322446 - RNA, 11 nt, Human
gggcuccugga

SEQ ID NO: 2322447 - RNA, 21 nt, Human
gggcuccugccuucuguccug

SEQ ID NO: 2322448 - RNA, 14 nt, Human
gggcuccugugccc

SEQ ID NO: 2322449 - RNA, 15 nt, Human
gggcuccugugcccu

SEQ ID NO: 2322450 - RNA, 14 nt, Human
gggcgcuggcccag

SEQ ID NO: 2322451 - RNA, 13 nt, Human
gggcucccuucau

SEQ ID NO: 2322452 - RNA, 11 nt, Human
gggcuccugca

SEQ ID NO: 2322453 - RNA, 18 nt, Human
gggcuccugcacuuacuu

SEQ ID NO: 2322454 - RNA, 22 nt, Human
gggcuccugcacuuacuugcuu

SEQ ID NO: 2322455 - RNA, 17 nt, Human
gggcuccugccuucugu

SEQ ID NO: 2322456 - RNA, 18 nt, Human
gggcuccugccuucuguc

SEQ ID NO: 2322457 - RNA, 21 nt, Human
gggcucuccaccucagccuug

SEQ ID NO: 2322458 - RNA, 19 nt, Human
gggcucuccaccucagccu

SEQ ID NO: 2322459 - RNA, 18 nt, Human
gggcucuccaccucagcc

SEQ ID NO: 2322460 - RNA, 17 nt, Human
gggcucuccaccucagc

SEQ ID NO: 2322461 - RNA, 14 nt, Human
gggcucuccaccuc

SEQ ID NO: 2322462 - RNA, 13 nt, Human
gggcucuccaccu

SEQ ID NO: 2322463 - RNA, 23 nt, Human
gggcucucauguuuucaacugcc

SEQ ID NO: 2322464 - RNA, 13 nt, Human
gggcucucagcuc

SEQ ID NO: 2322465 - RNA, 18 nt, Human
gggcuccuuucuccagcc

SEQ ID NO: 2322466 - RNA, 22 nt, Human
gggcuccuuucuccagccagca

SEQ ID NO: 2322467 - RNA, 20 nt, Human
gggcuccuuucuccagccag

SEQ ID NO: 2322468 - RNA, 21 nt, Human
gggcuccuuucuccagccagc

SEQ ID NO: 2322469 - RNA, 14 nt, Human
gggcucgccaugcc

SEQ ID NO: 2322470 - RNA, 20 nt, Human
gggcucgccaugccgggggu

SEQ ID NO: 2322471 - RNA, 14 nt, Human
gggcucggaggcug

SEQ ID NO: 2322472 - RNA, 17 nt, Human
gggcucgucuuugcaga

SEQ ID NO: 2322473 - RNA, 15 nt, Human
gggcucggaggcugc

SEQ ID NO: 2322474 - RNA, 14 nt, Human
gggcucgucuuugc

SEQ ID NO: 2322475 - RNA, 19 nt, Human
gggcucucugcuguacaua

SEQ ID NO: 2322476 - RNA, 20 nt, Human
gggcucugcaauuccccucu

SEQ ID NO: 2322477 - RNA, 21 nt, Human
gggcucugcaauuccccucug

SEQ ID NO: 2322478 - RNA, 23 nt, Human
gggcucugcaauuccccucugcu

SEQ ID NO: 2322479 - RNA, 19 nt, Human
gggcucugccccagcucug

SEQ ID NO: 2322480 - RNA, 15 nt, Human
gggcucugccacccu

SEQ ID NO: 2322481 - RNA, 23 nt, Human
gggcucugccccagaggccucuc

SEQ ID NO: 2322482 - RNA, 12 nt, Human
gggcucugcccc

SEQ ID NO: 2322483 - RNA, 11 nt, Human
gggcucugccc

SEQ ID NO: 2322484 - RNA, 13 nt, Human
gggcucugccucc

SEQ ID NO: 2322485 - RNA, 15 nt, Human
gggcucugccuccca

SEQ ID NO: 2322486 - RNA, 16 nt, Human
gggcucugccucccau

SEQ ID NO: 2322487 - RNA, 17 nt, Human
gggcucugccucccauc

SEQ ID NO: 2322488 - RNA, 20 nt, Human
gggcucugccucccaucacc

SEQ ID NO: 2322489 - RNA, 20 nt, Human
ggggagggugacaguggccg

SEQ ID NO: 2322490 - RNA, 12 nt, Human
ggggaggagggc

SEQ ID NO: 2322491 - RNA, 16 nt, Human
ggggagucugaagcag

SEQ ID NO: 2322492 - RNA, 14 nt, Human
ggggaguaugcaaa

SEQ ID NO: 2322493 - RNA, 18 nt, Human
ggggaggaaacucaccug

SEQ ID NO: 2322494 - RNA, 11 nt, Human
ggggagcccuc

SEQ ID NO: 2322495 - RNA, 22 nt, Human
ggggagccccuucugcucagcu

SEQ ID NO: 2322496 - RNA, 19 nt, Human
ggggagugggacagagucu

SEQ ID NO: 2322497 - RNA, 13 nt, Human
ggggaguggaaua

SEQ ID NO: 2322498 - RNA, 17 nt, Human
ggggagucugaagcaga

SEQ ID NO: 2322499 - RNA, 11 nt, Human
ggggaguggaa

SEQ ID NO: 2322500 - RNA, 21 nt, Human
ggggaguuaagaccuggcagc

SEQ ID NO: 2322501 - RNA, 17 nt, Human
ggggaguuaagaccugg

SEQ ID NO: 2322502 - RNA, 13 nt, Human
ggggaguggccac

SEQ ID NO: 2322503 - RNA, 14 nt, Human
ggggagcagagaca

SEQ ID NO: 2322504 - RNA, 11 nt, Human
ggggagcaggg

SEQ ID NO: 2322505 - RNA, 19 nt, Human
ggggagcccacuguccugg

SEQ ID NO: 2322506 - RNA, 11 nt, Human
ggggagcccac

SEQ ID NO: 2322507 - RNA, 18 nt, Human
ggggagacugggcugagg

SEQ ID NO: 2322508 - RNA, 18 nt, Human
ggggagagcaggcuggca

SEQ ID NO: 2322509 - RNA, 14 nt, Human
ggggagagccugcu

SEQ ID NO: 2322510 - RNA, 16 nt, Human
ggggagagccugcugg

SEQ ID NO: 2322511 - RNA, 18 nt, Human
ggggagagccugcuggca

SEQ ID NO: 2322512 - RNA, 19 nt, Human
ggggagaacuuacauugug

SEQ ID NO: 2322513 - RNA, 17 nt, Human
ggggagacugggcugag

SEQ ID NO: 2322514 - RNA, 21 nt, Human
gggcuuggggaccagagcugc

SEQ ID NO: 2322515 - RNA, 20 nt, Human
ggggagugggacagagucug

SEQ ID NO: 2322516 - RNA, 20 nt, Human
ggggaguuucuuuccugccu

SEQ ID NO: 2322517 - RNA, 13 nt, Human
ggggauaugcuua

SEQ ID NO: 2322518 - RNA, 13 nt, Human
ggggaucacagag

SEQ ID NO: 2322519 - RNA, 22 nt, Human
ggggaucaucugccgugccugg

SEQ ID NO: 2322520 - RNA, 21 nt, Human
ggggaucccucccccccaugc

SEQ ID NO: 2322521 - RNA, 14 nt, Human
ggggaugugggagg

SEQ ID NO: 2322522 - RNA, 21 nt, Human
ggggaugacuagaggcaggga

SEQ ID NO: 2322523 - RNA, 20 nt, Human
ggggaugagagggugcuauc

SEQ ID NO: 2322524 - RNA, 23 nt, Human
ggggaucccucccccccaugcac

SEQ ID NO: 2322525 - RNA, 13 nt, Human
ggggaucucaggg

SEQ ID NO: 2322526 - RNA, 17 nt, Human
ggggaucacagccucug

SEQ ID NO: 2322527 - RNA, 13 nt, Human
ggggauagaugug

SEQ ID NO: 2322528 - RNA, 21 nt, Human
ggggcagccaaacccaugagg

SEQ ID NO: 2322529 - RNA, 15 nt, Human
ggggcagcccuugcu

SEQ ID NO: 2322530 - RNA, 22 nt, Human
ggggcagagggcagaggcugga

SEQ ID NO: 2322531 - RNA, 18 nt, Human
ggggcagagggcagaggc

SEQ ID NO: 2322532 - RNA, 14 nt, Human
ggggcagcugccag

SEQ ID NO: 2322533 - RNA, 20 nt, Human
ggggcagcugauacaaauug

SEQ ID NO: 2322534 - RNA, 20 nt, Human
ggggcagcgggggccaggga

SEQ ID NO: 2322535 - RNA, 13 nt, Human
ggggcagcugacc

SEQ ID NO: 2322536 - RNA, 16 nt, Human
ggggcagagggcagag

SEQ ID NO: 2322537 - RNA, 18 nt, Human
ggggaugugggagggagc

SEQ ID NO: 2322538 - RNA, 19 nt, Human
gggcuugcaaguauguuuu

SEQ ID NO: 2322539 - RNA, 13 nt, Human
gggcuugacuuuu

SEQ ID NO: 2322540 - RNA, 16 nt, Human
gggcuugacuuuugua

SEQ ID NO: 2322541 - RNA, 13 nt, Human
gggcuugaagcca

SEQ ID NO: 2322542 - RNA, 15 nt, Human
gggcuugaagccaaa

SEQ ID NO: 2322543 - RNA, 17 nt, Human
gggcuugaagccaaaga

SEQ ID NO: 2322544 - RNA, 15 nt, Human
gggcuucugcacccu

SEQ ID NO: 2322545 - RNA, 16 nt, Human
gggcuucugcacccuc

SEQ ID NO: 2322546 - RNA, 17 nt, Human
gggcuucugcacccucc

SEQ ID NO: 2322547 - RNA, 18 nt, Human
gggcuucugcacccucca

SEQ ID NO: 2322548 - RNA, 19 nt, Human
gggcuucugcacccuccac

SEQ ID NO: 2322549 - RNA, 21 nt, Human
gggcuucugcacccuccaccc

SEQ ID NO: 2322550 - RNA, 23 nt, Human
gggcuucugcacccuccacccug

SEQ ID NO: 2322551 - RNA, 20 nt, Human
gggcuuggggaccagagcug

SEQ ID NO: 2322552 - RNA, 13 nt, Human
gggcuuggccugc

SEQ ID NO: 2322553 - RNA, 16 nt, Human
gggcuuggccugcugu

SEQ ID NO: 2322554 - RNA, 17 nt, Human
gggcuuggccugcugug

SEQ ID NO: 2322555 - RNA, 23 nt, Human
gggcuuccauuugugugugugca

SEQ ID NO: 2322556 - RNA, 20 nt, Human
gggcuucccaguggcugcug

SEQ ID NO: 2322557 - RNA, 19 nt, Human
gggcuucauacacaugaga

SEQ ID NO: 2322558 - RNA, 20 nt, Human
gggcuucauccuccucagau

SEQ ID NO: 2322559 - RNA, 19 nt, Human
gggcuuccucuagaagcca

SEQ ID NO: 2322560 - RNA, 21 nt, Human
gggcuucccaguggcugcugc

SEQ ID NO: 2322561 - RNA, 22 nt, Human
gggcuucccaguggcugcugcc

SEQ ID NO: 2322562 - RNA, 23 nt, Human
gggcuucccaguggcugcugccc

SEQ ID NO: 2322563 - RNA, 13 nt, Human
gggcuucuccuga

SEQ ID NO: 2322564 - RNA, 16 nt, Human
gggcuucuccugaccc

SEQ ID NO: 2322565 - RNA, 14 nt, Human
gggcuucugcaccc

SEQ ID NO: 2322566 - RNA, 19 nt, Human
gggcuucaguggcagcugc

SEQ ID NO: 2322567 - RNA, 20 nt, Human
gggcuucaguggcagcugcu

SEQ ID NO: 2322568 - RNA, 19 nt, Human
gggcuucauccuccucaga

SEQ ID NO: 2322569 - RNA, 13 nt, Human
gggcuucauacac

SEQ ID NO: 2322570 - RNA, 16 nt, Human
gggcuucacuguauaa

SEQ ID NO: 2322571 - RNA, 15 nt, Human
gggcuucaguggcag

SEQ ID NO: 2322572 - RNA, 16 nt, Human
gggcuucaguggcagc

SEQ ID NO: 2322573 - RNA, 17 nt, Human
gggcuucaguggcagcu

SEQ ID NO: 2322574 - RNA, 18 nt, Human
gggcuucaguggcagcug

SEQ ID NO: 2322575 - RNA, 13 nt, Human
ggggcugcccgcu

SEQ ID NO: 2322576 - RNA, 15 nt, Human
ggggcugcccgcucc

SEQ ID NO: 2322577 - RNA, 16 nt, Human
ggggcugcccgcuccc

SEQ ID NO: 2322578 - RNA, 23 nt, Human
ggggcugcccgcucccagugucu

SEQ ID NO: 2322579 - RNA, 11 nt, Human
ggggcagucug

SEQ ID NO: 2322580 - RNA, 13 nt, Human
ggggcugcagcau

SEQ ID NO: 2322581 - RNA, 21 nt, Human
ggggcagggaaggggaggcag

SEQ ID NO: 2322582 - RNA, 14 nt, Human
ggggcagucaccug

SEQ ID NO: 2322583 - RNA, 16 nt, Human
ggggcugcuccuccag

SEQ ID NO: 2322584 - RNA, 15 nt, Human
ggggcugcuccucca

SEQ ID NO: 2322585 - RNA, 14 nt, Human
ggggcugcuccucc

SEQ ID NO: 2322586 - RNA, 21 nt, Human
ggggcugcugaccuccacagc

SEQ ID NO: 2322587 - RNA, 20 nt, Human
ggggcugcuccuccagggcc

SEQ ID NO: 2322588 - RNA, 15 nt, Human
ggggcugcuggccug

SEQ ID NO: 2322589 - RNA, 16 nt, Human
ggggcugcuuccuccu

SEQ ID NO: 2322590 - RNA, 18 nt, Human
ggggcugcuuccuccugg

SEQ ID NO: 2322591 - RNA, 19 nt, Human
ggggcugcuuccuccugga

SEQ ID NO: 2322592 - RNA, 12 nt, Human
ggggcaggcagu

SEQ ID NO: 2322593 - RNA, 11 nt, Human
ggggcaggcag

SEQ ID NO: 2322594 - RNA, 15 nt, Human
ggggcaggcacagca

SEQ ID NO: 2322595 - RNA, 17 nt, Human
ggggcaggcacagcaca

SEQ ID NO: 2322596 - RNA, 10 nt, Human
ggggcaggca

SEQ ID NO: 2322597 - RNA, 13 nt, Human
ggggcaggcacag

SEQ ID NO: 2322598 - RNA, 14 nt, Human
ggggcaggcacagc

SEQ ID NO: 2322599 - RNA, 16 nt, Human
ggggcaggagggcccu

SEQ ID NO: 2322600 - RNA, 19 nt, Human
ggggcagcugccagagaag

SEQ ID NO: 2322601 - RNA, 23 nt, Human
ggggcagcuucuauuagccaguc

SEQ ID NO: 2322602 - RNA, 13 nt, Human
ggggcaggcccug

SEQ ID NO: 2322603 - RNA, 15 nt, Human
ggggcaggcccugca

SEQ ID NO: 2322604 - RNA, 16 nt, Human
ggggcaggcccugcac

SEQ ID NO: 2322605 - RNA, 18 nt, Human
ggggcaggcccugcacug

SEQ ID NO: 2322606 - RNA, 21 nt, Human
ggggcaggcccugcacugucc

SEQ ID NO: 2322607 - RNA, 22 nt, Human
ggggcaggcccugcacuguccu

SEQ ID NO: 2322608 - RNA, 23 nt, Human
ggggcaggcccugcacuguccug

SEQ ID NO: 2322609 - RNA, 12 nt, Human
ggggcaggcuga

SEQ ID NO: 2322610 - RNA, 10 nt, Human
ggggcugggu

SEQ ID NO: 2322611 - RNA, 13 nt, Human
ggggcuggguugg

SEQ ID NO: 2322612 - RNA, 19 nt, Human
ggggcuggguuggcgcacc

SEQ ID NO: 2322613 - RNA, 19 nt, Human
ggggcuggcggcuacucag

SEQ ID NO: 2322614 - RNA, 16 nt, Human
ggggcuggccuuccug

SEQ ID NO: 2322615 - RNA, 19 nt, Human
ggggcuggccuuccugccc

SEQ ID NO: 2322616 - RNA, 22 nt, Human
ggggcuuagggucggaacccaa

SEQ ID NO: 2322617 - RNA, 19 nt, Human
ggggcugguagcucaggug

SEQ ID NO: 2322618 - RNA, 22 nt, Human
ggggcuggguuggcgcacccuc

SEQ ID NO: 2322619 - RNA, 23 nt, Human
ggggcuggguuggcgcacccucc

SEQ ID NO: 2322620 - RNA, 15 nt, Human
ggggcuuucuggaga

SEQ ID NO: 2322621 - RNA, 12 nt, Human
gggggaaagcac

SEQ ID NO: 2322622 - RNA, 17 nt, Human
ggggcuugaagccaaag

SEQ ID NO: 2322623 - RNA, 17 nt, Human
gggggaacucagaucca

SEQ ID NO: 2322624 - RNA, 12 nt, Human
ggggcuuauuuu

SEQ ID NO: 2322625 - RNA, 22 nt, Human
ggggcuucaaccuugagacagc

SEQ ID NO: 2322626 - RNA, 17 nt, Human
ggggcuggcacugacug

SEQ ID NO: 2322627 - RNA, 12 nt, Human
ggggcuggccua

SEQ ID NO: 2322628 - RNA, 13 nt, Human
ggggcugggacau

SEQ ID NO: 2322629 - RNA, 16 nt, Human
ggggcugggcagagga

SEQ ID NO: 2322630 - RNA, 17 nt, Human
ggggcugggcagaggaa

SEQ ID NO: 2322631 - RNA, 16 nt, Human
ggggugcccacaggcc

SEQ ID NO: 2322632 - RNA, 13 nt, Human
ggggugcccccuc

SEQ ID NO: 2322633 - RNA, 20 nt, Human
ggggugcccccuccucuccc

SEQ ID NO: 2322634 - RNA, 23 nt, Human
ggggugcccccuccucucccauc

SEQ ID NO: 2322635 - RNA, 17 nt, Human
ggggugauuucagagag

SEQ ID NO: 2322636 - RNA, 18 nt, Human
ggggugauuucagagagg

SEQ ID NO: 2322637 - RNA, 13 nt, Human
ggggugaggacca

SEQ ID NO: 2322638 - RNA, 18 nt, Human
ggggugacgccugcccuc

SEQ ID NO: 2322639 - RNA, 15 nt, Human
ggggugaggagcugg

SEQ ID NO: 2322640 - RNA, 14 nt, Human
ggggugaggagcug

SEQ ID NO: 2322641 - RNA, 22 nt, Human
ggggucuuugugagagugagcu

SEQ ID NO: 2322642 - RNA, 17 nt, Human
gggggaagagcacagcc

SEQ ID NO: 2322643 - RNA, 19 nt, Human
gggggaagagcacagcccu

SEQ ID NO: 2322644 - RNA, 16 nt, Human
gggguucagccccucc

SEQ ID NO: 2322645 - RNA, 17 nt, Human
ggggugccgccugcccg

SEQ ID NO: 2322646 - RNA, 13 nt, Human
ggggugccgccug

SEQ ID NO: 2322647 - RNA, 14 nt, Human
ggggugccgccugc

SEQ ID NO: 2322648 - RNA, 23 nt, Human
gggguucccuuuuuuggcugcug

SEQ ID NO: 2322649 - RNA, 20 nt, Human
gggguucuuucuuccucugc

SEQ ID NO: 2322650 - RNA, 22 nt, Human
gggguucuuucuuccucugcug

SEQ ID NO: 2322651 - RNA, 22 nt, Human
gggguucagccccuccucugcc

SEQ ID NO: 2322652 - RNA, 17 nt, Human
gggguucagccccuccu

SEQ ID NO: 2322653 - RNA, 20 nt, Human
gggguucauaggucacuggc

SEQ ID NO: 2322654 - RNA, 23 nt, Human
gggguucagccccuccucugcca

SEQ ID NO: 2322655 - RNA, 21 nt, Human
gggguucgagaccagucuggc

SEQ ID NO: 2322656 - RNA, 18 nt, Human
ggguacccacugcucugg

SEQ ID NO: 2322657 - RNA, 23 nt, Human
ggguaccuugaacacugggggag

SEQ ID NO: 2322658 - RNA, 19 nt, Human
ggguacauuucccugugcu

SEQ ID NO: 2322659 - RNA, 20 nt, Human
gggguugccacaggccuccc

SEQ ID NO: 2322660 - RNA, 13 nt, Human
ggguacccacugc

SEQ ID NO: 2322661 - RNA, 15 nt, Human
ggguacccacugcuc

SEQ ID NO: 2322662 - RNA, 19 nt, Human
ggguacuuguggacacagc

SEQ ID NO: 2322663 - RNA, 22 nt, Human
ggguacuuguggacacagcucu

SEQ ID NO: 2322664 - RNA, 23 nt, Human
ggguacuuguggacacagcucuu

SEQ ID NO: 2322665 - RNA, 23 nt, Human
ggguagagcggagaaaggaaggg

SEQ ID NO: 2322666 - RNA, 22 nt, Human
gguagacacacaugaaguccaa

SEQ ID NO: 2322667 - RNA, 23 nt, Human
gguacuuuuaugauguauauuua

SEQ ID NO: 2322668 - RNA, 15 nt, Human
gguagacacacauga

SEQ ID NO: 2322669 - RNA, 17 nt, Human
ggucaagcccaggagga

SEQ ID NO: 2322670 - RNA, 19 nt, Human
ggucaagcccaggaggacu

SEQ ID NO: 2322671 - RNA, 15 nt, Human
ggucaagcccaggag

SEQ ID NO: 2322672 - RNA, 13 nt, Human
ggucaagcccagg

SEQ ID NO: 2322673 - RNA, 20 nt, Human
ggucaagauuuugaaugcuu

SEQ ID NO: 2322674 - RNA, 17 nt, Human
gguagagauggaggagg

SEQ ID NO: 2322675 - RNA, 20 nt, Human
ggucaauacaguacaggcag

SEQ ID NO: 2322676 - RNA, 17 nt, Human
ggucaauccugugggug

SEQ ID NO: 2322677 - RNA, 22 nt, Human
ggucacaaauccuaaaagaagc

SEQ ID NO: 2322678 - RNA, 20 nt, Human
ggucaaguaagaagacauga

SEQ ID NO: 2322679 - RNA, 14 nt, Human
ggucacacacugau

SEQ ID NO: 2322680 - RNA, 13 nt, Human
ggucacagccucc

SEQ ID NO: 2322681 - RNA, 15 nt, Human
ggucacagccuccuc

SEQ ID NO: 2322682 - RNA, 15 nt, Human
ggucacagcggaggu

SEQ ID NO: 2322683 - RNA, 16 nt, Human
ggucacagccuccucu

SEQ ID NO: 2322684 - RNA, 17 nt, Human
ggucacagccuccucug

SEQ ID NO: 2322685 - RNA, 12 nt, Human
ggucacucuggc

SEQ ID NO: 2322686 - RNA, 12 nt, Human
ggucagagccug

SEQ ID NO: 2322687 - RNA, 22 nt, Human
ggucacucuggcagcucagaga

SEQ ID NO: 2322688 - RNA, 16 nt, Human
ggucacucuggcagcu

SEQ ID NO: 2322689 - RNA, 20 nt, Human
ggucacucuggcagcucaga

SEQ ID NO: 2322690 - RNA, 13 nt, Human
ggucagagccugc

SEQ ID NO: 2322691 - RNA, 14 nt, Human
ggucagagccugca

SEQ ID NO: 2322692 - RNA, 15 nt, Human
ggucagagccugcag

SEQ ID NO: 2322693 - RNA, 16 nt, Human
ggucagagccugcagu

SEQ ID NO: 2322694 - RNA, 13 nt, Human
ggucagccagggc

SEQ ID NO: 2322695 - RNA, 21 nt, Human
ggucagcaugucuauucagcu

SEQ ID NO: 2322696 - RNA, 18 nt, Human
ggucagccagggccaggg

SEQ ID NO: 2322697 - RNA, 12 nt, Human
ggucagccaggg

SEQ ID NO: 2322698 - RNA, 15 nt, Human
ggucagccagggcca

SEQ ID NO: 2322699 - RNA, 21 nt, Human
ggucacucuuccugcaaggac

SEQ ID NO: 2322700 - RNA, 22 nt, Human
ggucacucuuccugcaaggacu

SEQ ID NO: 2322701 - RNA, 22 nt, Human
ggucccaccccacacacgccag

SEQ ID NO: 2322702 - RNA, 23 nt, Human
ggucagcccaaaccaccagaagc

SEQ ID NO: 2322703 - RNA, 16 nt, Human
ggucagcguugcaugu

SEQ ID NO: 2322704 - RNA, 22 nt, Human
ggucccacucaguccauagcag

SEQ ID NO: 2322705 - RNA, 14 nt, Human
ggucccagccaccc

SEQ ID NO: 2322706 - RNA, 17 nt, Human
ggucccacuuccccucc

SEQ ID NO: 2322707 - RNA, 22 nt, Human
ggucccacgaauuugcugggga

SEQ ID NO: 2322708 - RNA, 12 nt, Human
ggucccacuucc

SEQ ID NO: 2322709 - RNA, 13 nt, Human
ggucccacuuccc

SEQ ID NO: 2322710 - RNA, 12 nt, Human
ggucccacucag

SEQ ID NO: 2322711 - RNA, 14 nt, Human
ggucccacucaguc

SEQ ID NO: 2322712 - RNA, 15 nt, Human
ggucccagccacccc

SEQ ID NO: 2322713 - RNA, 14 nt, Human
ggucccaggcagag

SEQ ID NO: 2322714 - RNA, 11 nt, Human
ggucccagugg

SEQ ID NO: 2322715 - RNA, 15 nt, Human
ggucccagugggagg

SEQ ID NO: 2322716 - RNA, 18 nt, Human
ggucccagugggaggggc

SEQ ID NO: 2322717 - RNA, 16 nt, Human
gguccccaccugggac

SEQ ID NO: 2322718 - RNA, 17 nt, Human
ggucccauccaggcagu

SEQ ID NO: 2322719 - RNA, 17 nt, Human
ggucccauuucucacug

SEQ ID NO: 2322720 - RNA, 14 nt, Human
ggucccauccaggc

SEQ ID NO: 2322721 - RNA, 16 nt, Human
ggucccauccaggcag

SEQ ID NO: 2322722 - RNA, 20 nt, Human
ggucccaucugcagggcccc

SEQ ID NO: 2322723 - RNA, 11 nt, Human
ggucccaucca

SEQ ID NO: 2322724 - RNA, 23 nt, Human
ggucccagugggaggggcaggcu

SEQ ID NO: 2322725 - RNA, 12 nt, Human
ggucccauccag

SEQ ID NO: 2322726 - RNA, 13 nt, Human
ggucccauccagg

SEQ ID NO: 2322727 - RNA, 19 nt, Human
ggucccagugggaggggca

SEQ ID NO: 2322728 - RNA, 20 nt, Human
ggucccagugggaggggcag

SEQ ID NO: 2322729 - RNA, 21 nt, Human
ggucccagugggaggggcagg

SEQ ID NO: 2322730 - RNA, 22 nt, Human
ggucccagugggaggggcaggc

SEQ ID NO: 2322731 - RNA, 18 nt, Human
ggucagcucccuucucug

SEQ ID NO: 2322732 - RNA, 16 nt, Human
gguccccaucauccca

SEQ ID NO: 2322733 - RNA, 18 nt, Human
gguccccaucaucccagc

SEQ ID NO: 2322734 - RNA, 21 nt, Human
gguccccaucaucccagcugc

SEQ ID NO: 2322735 - RNA, 13 nt, Human
ggucccccuucca

SEQ ID NO: 2322736 - RNA, 18 nt, Human
ggucccccuuccauggac

SEQ ID NO: 2322737 - RNA, 23 nt, Human
ggucccccuuccauggacuuugu

SEQ ID NO: 2322738 - RNA, 20 nt, Human
ggguuucaccauguuggcca

SEQ ID NO: 2322739 - RNA, 20 nt, Human
ggguuucacuguguuagcca

SEQ ID NO: 2322740 - RNA, 23 nt, Human
ggguugugaggccuggccaggca

SEQ ID NO: 2322741 - RNA, 16 nt, Human
gguacccacugcucug

SEQ ID NO: 2322742 - RNA, 17 nt, Human
gguacccacugcucugg

SEQ ID NO: 2322743 - RNA, 19 nt, Human
gguaccccuuucuggcucu

SEQ ID NO: 2322744 - RNA, 12 nt, Human
gguacccagcca

SEQ ID NO: 2322745 - RNA, 20 nt, Human
gguacccagccaucugccca

SEQ ID NO: 2322746 - RNA, 21 nt, Human
gguacccagccaucugcccag

SEQ ID NO: 2322747 - RNA, 16 nt, Human
gguacccccuucuggg

SEQ ID NO: 2322748 - RNA, 15 nt, Human
ggguugggcuggugu

SEQ ID NO: 2322749 - RNA, 22 nt, Human
ggguugggcccagaucuggucc

SEQ ID NO: 2322750 - RNA, 14 nt, Human
ggguugggcccaga

SEQ ID NO: 2322751 - RNA, 12 nt, Human
ggguugggccca

SEQ ID NO: 2322752 - RNA, 22 nt, Human
ggguuuaauccccaguaaaauu

SEQ ID NO: 2322753 - RNA, 23 nt, Human
ggguuuaauccccaguaaaauug

SEQ ID NO: 2322754 - RNA, 19 nt, Human
ggguuuaauccccaguaaa

SEQ ID NO: 2322755 - RNA, 15 nt, Human
ggguugugugucugu

SEQ ID NO: 2322756 - RNA, 14 nt, Human
ggguugugaggccu

SEQ ID NO: 2322757 - RNA, 18 nt, Human
ggguugguccucuugccu

SEQ ID NO: 2322758 - RNA, 21 nt, Human
ggguugugaggccuggccagg

SEQ ID NO: 2322759 - RNA, 21 nt, Human
ggguuggguucaucugagcaa

SEQ ID NO: 2322760 - RNA, 19 nt, Human
ggguuggugcacagugauu

SEQ ID NO: 2322761 - RNA, 22 nt, Human
gguacuuguggacacagcucuu

SEQ ID NO: 2322762 - RNA, 20 nt, Human
gguacuuguggacacagcuc

SEQ ID NO: 2322763 - RNA, 20 nt, Human
gguacuucaggggcacuuca

SEQ ID NO: 2322764 - RNA, 21 nt, Human
gguacuuuuaugauguauauu

SEQ ID NO: 2322765 - RNA, 22 nt, Human
gguacuuuuaugauguauauuu

SEQ ID NO: 2322766 - RNA, 21 nt, Human
gguacuuguggacacagcucu

SEQ ID NO: 2322767 - RNA, 22 nt, Human
gguacuucaaauccuugaagau

SEQ ID NO: 2322768 - RNA, 12 nt, Human
gguaccuugaac

SEQ ID NO: 2322769 - RNA, 14 nt, Human
gguaccuauuuuca

SEQ ID NO: 2322770 - RNA, 14 nt, Human
gguacccuccuggc

SEQ ID NO: 2322771 - RNA, 13 nt, Human
gguacccucugga

SEQ ID NO: 2322772 - RNA, 18 nt, Human
gguaccuugaacacuggg

SEQ ID NO: 2322773 - RNA, 16 nt, Human
gguacucuccuagaga

SEQ ID NO: 2322774 - RNA, 19 nt, Human
gguacuauucugauuacac

SEQ ID NO: 2322775 - RNA, 12 nt, Human
gguacucuccua

SEQ ID NO: 2322776 - RNA, 14 nt, Human
gguacucuccuaga

SEQ ID NO: 2322777 - RNA, 16 nt, Human
ggguagcuagaggaac

SEQ ID NO: 2322778 - RNA, 22 nt, Human
ggguagcccgccugccaguccu

SEQ ID NO: 2322779 - RNA, 15 nt, Human
ggguagcuagaggaa

SEQ ID NO: 2322780 - RNA, 18 nt, Human
gggugcugggccccugcc

SEQ ID NO: 2322781 - RNA, 19 nt, Human
gggugcugggccccugccu

SEQ ID NO: 2322782 - RNA, 12 nt, Human
ggguagcccgcc

SEQ ID NO: 2322783 - RNA, 14 nt, Human
ggguagcccgccug

SEQ ID NO: 2322784 - RNA, 18 nt, Human
ggguagcccgccugccag

SEQ ID NO: 2322785 - RNA, 21 nt, Human
ggguagcccgccugccagucc

SEQ ID NO: 2322786 - RNA, 22 nt, Human
ggguagcagguaccacugauuu

SEQ ID NO: 2322787 - RNA, 22 nt, Human
ggguagcagcuggacuacccac

SEQ ID NO: 2322788 - RNA, 15 nt, Human
ggguagcagcuggac

SEQ ID NO: 2322789 - RNA, 17 nt, Human
ggguagcagcuggacua

SEQ ID NO: 2322790 - RNA, 14 nt, Human
ggguagagcugauc

SEQ ID NO: 2322791 - RNA, 13 nt, Human
ggguagcagcugg

SEQ ID NO: 2322792 - RNA, 14 nt, Human
ggguagcagcugga

SEQ ID NO: 2322793 - RNA, 15 nt, Human
ggguucccccagccc

SEQ ID NO: 2322794 - RNA, 14 nt, Human
ggguucauuugugu

SEQ ID NO: 2322795 - RNA, 19 nt, Human
ggguuccagcaccacacuc

SEQ ID NO: 2322796 - RNA, 22 nt, Human
ggguuccagcaauucuccugcc

SEQ ID NO: 2322797 - RNA, 13 nt, Human
ggguucauuugug

SEQ ID NO: 2322798 - RNA, 14 nt, Human
ggguggauauaaau

SEQ ID NO: 2322799 - RNA, 21 nt, Human
ggguggauauaaauauauaua

SEQ ID NO: 2322800 - RNA, 16 nt, Human
ggguggaggcuuccug

SEQ ID NO: 2322801 - RNA, 23 nt, Human
ggguggagacugcuucccauccu

SEQ ID NO: 2322802 - RNA, 14 nt, Human
ggguggaggggugu

SEQ ID NO: 2322803 - RNA, 14 nt, Human
ggguggagaagcca

SEQ ID NO: 2322804 - RNA, 15 nt, Human
ggguggagaagccau

SEQ ID NO: 2322805 - RNA, 16 nt, Human
ggguggagaagccauu

SEQ ID NO: 2322806 - RNA, 22 nt, Human
ggguggagacugcuucccaucc

SEQ ID NO: 2322807 - RNA, 20 nt, Human
ggguggagaacuccuagggu

SEQ ID NO: 2322808 - RNA, 12 nt, Human
ggguggagaagc

SEQ ID NO: 2322809 - RNA, 13 nt, Human
ggguggagaagcc

SEQ ID NO: 2322810 - RNA, 20 nt, Human
gggugcuuuuauagaggcua

SEQ ID NO: 2322811 - RNA, 21 nt, Human
gggugcuuuuauagaggcuag

SEQ ID NO: 2322812 - RNA, 22 nt, Human
gggugcuuuuauagaggcuagc

SEQ ID NO: 2322813 - RNA, 15 nt, Human
ggguucucacagugg

SEQ ID NO: 2322814 - RNA, 17 nt, Human
ggguucuacccaggugc

SEQ ID NO: 2322815 - RNA, 22 nt, Human
ggguucuacccaggugcuagga

SEQ ID NO: 2322816 - RNA, 21 nt, Human
ggguucccuuuccuuccaucc

SEQ ID NO: 2322817 - RNA, 18 nt, Human
ggguucccuuuccuucca

SEQ ID NO: 2322818 - RNA, 14 nt, Human
ggguucccccagcc

SEQ ID NO: 2322819 - RNA, 23 nt, Human
ggguucccuuuuuuggcugcuga

SEQ ID NO: 2322820 - RNA, 18 nt, Human
ggguucuccucuccccuc

SEQ ID NO: 2322821 - RNA, 16 nt, Human
ggguucuccucucccc

SEQ ID NO: 2322822 - RNA, 20 nt, Human
ggguucugccugccagcugc

SEQ ID NO: 2322823 - RNA, 21 nt, Human
ggguucugccugccagcugca

SEQ ID NO: 2322824 - RNA, 16 nt, Human
ggguuggccccugccc

SEQ ID NO: 2322825 - RNA, 19 nt, Human
ggguuggccccugcccggc

SEQ ID NO: 2322826 - RNA, 20 nt, Human
ggguuggcugggcccagaag

SEQ ID NO: 2322827 - RNA, 22 nt, Human
ggguuggcgcacccuccccucc

SEQ ID NO: 2322828 - RNA, 20 nt, Human
ggguuggcgcacccuccccu

SEQ ID NO: 2322829 - RNA, 14 nt, Human
ggguucuuucuucc

SEQ ID NO: 2322830 - RNA, 18 nt, Human
ggugaagggagagccagc

SEQ ID NO: 2322831 - RNA, 16 nt, Human
ggugaagggagagcca

SEQ ID NO: 2322832 - RNA, 18 nt, Human
ggugaagcuauuuaucug

SEQ ID NO: 2322833 - RNA, 14 nt, Human
ggugaaggaauaua

SEQ ID NO: 2322834 - RNA, 21 nt, Human
ggugaagcucacuucugggcu

SEQ ID NO: 2322835 - RNA, 18 nt, Human
ggugaagugaagacaaug

SEQ ID NO: 2322836 - RNA, 20 nt, Human
ggucucgcugaugcugggcu

SEQ ID NO: 2322837 - RNA, 21 nt, Human
ggucucgcugaugcugggcug

SEQ ID NO: 2322838 - RNA, 19 nt, Human
ggucugaggaauccagacc

SEQ ID NO: 2322839 - RNA, 17 nt, Human
ggugaagcuauuuaucu

SEQ ID NO: 2322840 - RNA, 20 nt, Human
ggugaagagaaccgagcaaa

SEQ ID NO: 2322841 - RNA, 19 nt, Human
ggugaagaugggaacgcag

SEQ ID NO: 2322842 - RNA, 22 nt, Human
ggucugaggggcaacugagucu

SEQ ID NO: 2322843 - RNA, 23 nt, Human
ggugaaccaugucagcaaaaagc

SEQ ID NO: 2322844 - RNA, 16 nt, Human
ggugaagaaaacuccu

SEQ ID NO: 2322845 - RNA, 16 nt, Human
ggugaacuugguuccc

SEQ ID NO: 2322846 - RNA, 22 nt, Human
ggucucccucuccugccuacuc

SEQ ID NO: 2322847 - RNA, 21 nt, Human
ggucucacuauguugcccagg

SEQ ID NO: 2322848 - RNA, 18 nt, Human
ggucucccucuccugccu

SEQ ID NO: 2322849 - RNA, 17 nt, Human
ggucucccucuccugcc

SEQ ID NO: 2322850 - RNA, 19 nt, Human
ggucucccucuccugccua

SEQ ID NO: 2322851 - RNA, 19 nt, Human
ggucuccucacucccuucu

SEQ ID NO: 2322852 - RNA, 12 nt, Human
ggucucacucug

SEQ ID NO: 2322853 - RNA, 16 nt, Human
ggucucacucugucgc

SEQ ID NO: 2322854 - RNA, 15 nt, Human
ggucugacccacugc

SEQ ID NO: 2322855 - RNA, 16 nt, Human
ggucugacccacugcu

SEQ ID NO: 2322856 - RNA, 16 nt, Human
ggucuccuuggaaauc

SEQ ID NO: 2322857 - RNA, 19 nt, Human
ggucucgcugaugcugggc

SEQ ID NO: 2322858 - RNA, 22 nt, Human
ggucuccuccaccgccauggcu

SEQ ID NO: 2322859 - RNA, 20 nt, Human
ggucucgaacuccugaccuu

SEQ ID NO: 2322860 - RNA, 14 nt, Human
ggucuccuccaccg

SEQ ID NO: 2322861 - RNA, 19 nt, Human
ggucucgaacuccugaccu

SEQ ID NO: 2322862 - RNA, 21 nt, Human
ggucccuugagaccucagcca

SEQ ID NO: 2322863 - RNA, 20 nt, Human
ggucccuugagaccucagcc

SEQ ID NO: 2322864 - RNA, 19 nt, Human
ggucccuugagaccucagc

SEQ ID NO: 2322865 - RNA, 21 nt, Human
ggucccuucuuacucacacac

SEQ ID NO: 2322866 - RNA, 23 nt, Human
ggucccugggaggaaauuugaau

SEQ ID NO: 2322867 - RNA, 13 nt, Human
ggucccugggagg

SEQ ID NO: 2322868 - RNA, 22 nt, Human
ggucccugguggcagcucaccu

SEQ ID NO: 2322869 - RNA, 17 nt, Human
gguccgguguccuuuuc

SEQ ID NO: 2322870 - RNA, 23 nt, Human
ggucccuugcagcuaguuuucua

SEQ ID NO: 2322871 - RNA, 17 nt, Human
gguccggacacuccuag

SEQ ID NO: 2322872 - RNA, 18 nt, Human
gguccggacacuccuaga

SEQ ID NO: 2322873 - RNA, 20 nt, Human
gguccggacacuccuagaga

SEQ ID NO: 2322874 - RNA, 21 nt, Human
gguccggacacuccuagagaa

SEQ ID NO: 2322875 - RNA, 22 nt, Human
gguccuaccaauagauucccca

SEQ ID NO: 2322876 - RNA, 20 nt, Human
gguccuacccauccccgcag

SEQ ID NO: 2322877 - RNA, 17 nt, Human
gguccuacccauccccg

SEQ ID NO: 2322878 - RNA, 13 nt, Human
gguccgugggacg

SEQ ID NO: 2322879 - RNA, 23 nt, Human
gguccuagaaauuccccacccug

SEQ ID NO: 2322880 - RNA, 22 nt, Human
ggucucacuauguugcccaggc

SEQ ID NO: 2322881 - RNA, 21 nt, Human
ggucccgugcagcuucugucc

SEQ ID NO: 2322882 - RNA, 18 nt, Human
ggucccuaauaaagcugu

SEQ ID NO: 2322883 - RNA, 14 nt, Human
ggucccugguggca

SEQ ID NO: 2322884 - RNA, 14 nt, Human
ggucccucugugua

SEQ ID NO: 2322885 - RNA, 20 nt, Human
ggucccugauaacaaccugg

SEQ ID NO: 2322886 - RNA, 23 nt, Human
ggucccugauaacaaccuggaga

SEQ ID NO: 2322887 - RNA, 22 nt, Human
ggucccugauaacaaccuggag

SEQ ID NO: 2322888 - RNA, 18 nt, Human
ggucccugcuguguuccc

SEQ ID NO: 2322889 - RNA, 12 nt, Human
ggucccuaauaa

SEQ ID NO: 2322890 - RNA, 13 nt, Human
ggucccuaauaaa

SEQ ID NO: 2322891 - RNA, 16 nt, Human
ggucccuaauaaagcu

SEQ ID NO: 2322892 - RNA, 17 nt, Human
ggucccuaauaaagcug

SEQ ID NO: 2322893 - RNA, 22 nt, Human
ggugcuaaauggucgcccagga

SEQ ID NO: 2322894 - RNA, 21 nt, Human
ggugcuaaauggucgcccagg

SEQ ID NO: 2322895 - RNA, 23 nt, Human
ggugcuaaauggucgcccaggag

SEQ ID NO: 2322896 - RNA, 21 nt, Human
ggugcuacaaaaacacagcaa

SEQ ID NO: 2322897 - RNA, 22 nt, Human
ggugcuaucucccccagcccca

SEQ ID NO: 2322898 - RNA, 15 nt, Human
ggugcucagggcuga

SEQ ID NO: 2322899 - RNA, 19 nt, Human
ggugcucacaccccauugg

SEQ ID NO: 2322900 - RNA, 21 nt, Human
ggugcuaucucccccagcccc

SEQ ID NO: 2322901 - RNA, 23 nt, Human
ggugcuaucucccccagccccau

SEQ ID NO: 2322902 - RNA, 20 nt, Human
ggugcuaaauggucgcccag

SEQ ID NO: 2322903 - RNA, 22 nt, Human
ggugcggcugugcagccugucc

SEQ ID NO: 2322904 - RNA, 12 nt, Human
ggugcggcugug

SEQ ID NO: 2322905 - RNA, 19 nt, Human
ggugcuacaaaaacacagc

SEQ ID NO: 2322906 - RNA, 15 nt, Human
ggugcgaucuggguu

SEQ ID NO: 2322907 - RNA, 13 nt, Human
ggugccuccaggu

SEQ ID NO: 2322908 - RNA, 14 nt, Human
ggugccuccaggug

SEQ ID NO: 2322909 - RNA, 16 nt, Human
ggugccuccaggugug

SEQ ID NO: 2322910 - RNA, 17 nt, Human
ggugccuccaggugugc

SEQ ID NO: 2322911 - RNA, 15 nt, Human
ggugccugagaggca

SEQ ID NO: 2322912 - RNA, 17 nt, Human
ggugccugagaggcagg

SEQ ID NO: 2322913 - RNA, 18 nt, Human
ggugccugagaggcaggc

SEQ ID NO: 2322914 - RNA, 16 nt, Human
ggugcucagggcugac

SEQ ID NO: 2322915 - RNA, 15 nt, Human
ggugcuccaggcagg

SEQ ID NO: 2322916 - RNA, 14 nt, Human
gguggcaggaccag

SEQ ID NO: 2322917 - RNA, 14 nt, Human
ggugcucucugcca

SEQ ID NO: 2322918 - RNA, 16 nt, Human
ggugcucucugccacu

SEQ ID NO: 2322919 - RNA, 18 nt, Human
gguggcaggaccaggacu

SEQ ID NO: 2322920 - RNA, 15 nt, Human
gguggcaggaccagg

SEQ ID NO: 2322921 - RNA, 17 nt, Human
gguggcaggaccaggac

SEQ ID NO: 2322922 - RNA, 16 nt, Human
gguggcagugggagcu

SEQ ID NO: 2322923 - RNA, 18 nt, Human
gguggccauuuagccacc

SEQ ID NO: 2322924 - RNA, 15 nt, Human
gguggcagcugcggu

SEQ ID NO: 2322925 - RNA, 23 nt, Human
gguggcagcugcgguccacccag

SEQ ID NO: 2322926 - RNA, 11 nt, Human
gguggcagcug

SEQ ID NO: 2322927 - RNA, 13 nt, Human
gguggcagcucac

SEQ ID NO: 2322928 - RNA, 12 nt, Human
gguggcagcugc

SEQ ID NO: 2322929 - RNA, 13 nt, Human
gguggcagcugcg

SEQ ID NO: 2322930 - RNA, 22 nt, Human
ggugcccuuggaggccagccag

SEQ ID NO: 2322931 - RNA, 18 nt, Human
ggugcccuuggaggccag

SEQ ID NO: 2322932 - RNA, 17 nt, Human
ggugcccuuggaggcca

SEQ ID NO: 2322933 - RNA, 14 nt, Human
ggugccgccugccc

SEQ ID NO: 2322934 - RNA, 21 nt, Human
ggugccuaggauugugccugu

SEQ ID NO: 2322935 - RNA, 19 nt, Human
ggugcccuguucucuacca

SEQ ID NO: 2322936 - RNA, 22 nt, Human
ggugccccccuugccagacaug

SEQ ID NO: 2322937 - RNA, 23 nt, Human
ggugccccaggaccagcucagga

SEQ ID NO: 2322938 - RNA, 12 nt, Human
ggugcccccucc

SEQ ID NO: 2322939 - RNA, 17 nt, Human
ggugcccccuccucucc

SEQ ID NO: 2322940 - RNA, 19 nt, Human
ggugcccccuccucuccca

SEQ ID NO: 2322941 - RNA, 20 nt, Human
ggugcccccuccucucccau

SEQ ID NO: 2322942 - RNA, 22 nt, Human
ggugcccccuccucucccaucc

SEQ ID NO: 2322943 - RNA, 23 nt, Human
ggugcccccuccucucccauccc

SEQ ID NO: 2322944 - RNA, 21 nt, Human
ggugaguuugagcugccuucc

SEQ ID NO: 2322945 - RNA, 22 nt, Human
ggugauagguauaaguggugug

SEQ ID NO: 2322946 - RNA, 15 nt, Human
ggugauauccauucu

SEQ ID NO: 2322947 - RNA, 22 nt, Human
ggugcccagcuauaccugugcc

SEQ ID NO: 2322948 - RNA, 22 nt, Human
ggugccccaggaccagcucagg

SEQ ID NO: 2322949 - RNA, 21 nt, Human
ggugccccaggaccagcucag

SEQ ID NO: 2322950 - RNA, 20 nt, Human
ggugccccaggaccagcuca

SEQ ID NO: 2322951 - RNA, 17 nt, Human
ggugccccaggaccagc

SEQ ID NO: 2322952 - RNA, 16 nt, Human
ggugccccaggaccag

SEQ ID NO: 2322953 - RNA, 15 nt, Human
ggugccccaggacca

SEQ ID NO: 2322954 - RNA, 14 nt, Human
ggugccccaggacc

SEQ ID NO: 2322955 - RNA, 13 nt, Human
ggugccccaggac

SEQ ID NO: 2322956 - RNA, 16 nt, Human
ggugacaccagccuuu

SEQ ID NO: 2322957 - RNA, 18 nt, Human
ggugacaagauagagagc

SEQ ID NO: 2322958 - RNA, 17 nt, Human
ggugacaagauagagag

SEQ ID NO: 2322959 - RNA, 13 nt, Human
ggugacaccagcc

SEQ ID NO: 2322960 - RNA, 14 nt, Human
ggugaccucugccu

SEQ ID NO: 2322961 - RNA, 21 nt, Human
ggugaccccuuuucagcuucu

SEQ ID NO: 2322962 - RNA, 16 nt, Human
ggugaccucugccuga

SEQ ID NO: 2322963 - RNA, 15 nt, Human
ggugaggcaauaaaa

SEQ ID NO: 2322964 - RNA, 14 nt, Human
ggugaggcaggcuu

SEQ ID NO: 2322965 - RNA, 20 nt, Human
ggugaggcagugggucccac

SEQ ID NO: 2322966 - RNA, 17 nt, Human
ggugaggggcuggcacu

SEQ ID NO: 2322967 - RNA, 15 nt, Human
ggugaggccuugcuc

SEQ ID NO: 2322968 - RNA, 12 nt, Human
ggugagggaugu

SEQ ID NO: 2322969 - RNA, 13 nt, Human
ggugagggaugug

SEQ ID NO: 2322970 - RNA, 18 nt, Human
ggugaguccauucuccca

SEQ ID NO: 2322971 - RNA, 17 nt, Human
ggugagucuuggcggca

SEQ ID NO: 2322972 - RNA, 20 nt, Human
ggugagucuuggcggcagca

SEQ ID NO: 2322973 - RNA, 19 nt, Human
ggugaguuugagcugccuu

SEQ ID NO: 2322974 - RNA, 23 nt, Human
ggugagucuuggcggcagcagcc

SEQ ID NO: 2322975 - RNA, 20 nt, Human
ggugaguuugagcugccuuc

SEQ ID NO: 2322976 - RNA, 14 nt, Human
guaaaauaaaauua

SEQ ID NO: 2322977 - RNA, 22 nt, Human
guaaaaggccaaaccucuguuc

SEQ ID NO: 2322978 - RNA, 15 nt, Human
guaaaagugugagca

SEQ ID NO: 2322979 - RNA, 16 nt, Human
guaaaauaaaaggucg

SEQ ID NO: 2322980 - RNA, 20 nt, Human
guaaaaggccaaaccucugu

SEQ ID NO: 2322981 - RNA, 17 nt, Human
guaaaagguauuaaauu

SEQ ID NO: 2322982 - RNA, 11 nt, Human
guaaagugugg

SEQ ID NO: 2322983 - RNA, 21 nt, Human
guaaaguguggucccaacagg

SEQ ID NO: 2322984 - RNA, 22 nt, Human
guaaaguguggucccaacagga

SEQ ID NO: 2322985 - RNA, 13 nt, Human
guaaauaaaaaga

SEQ ID NO: 2322986 - RNA, 14 nt, Human
guaaaguuagucua

SEQ ID NO: 2322987 - RNA, 18 nt, Human
guaaaguuagucuacucu

SEQ ID NO: 2322988 - RNA, 23 nt, Human
guaaagugauaauuucuggaauu

SEQ ID NO: 2322989 - RNA, 18 nt, Human
guaaagugauaauuucug

SEQ ID NO: 2322990 - RNA, 17 nt, Human
guaaagugauaauuucu

SEQ ID NO: 2322991 - RNA, 13 nt, Human
guaaauaaagccc

SEQ ID NO: 2322992 - RNA, 14 nt, Human
guaaauaaagcccu

SEQ ID NO: 2322993 - RNA, 15 nt, Human
guaaauaaagcccug

SEQ ID NO: 2322994 - RNA, 18 nt, Human
guaaauaaauuguuugac

SEQ ID NO: 2322995 - RNA, 14 nt, Human
guaaauaaauuguu

SEQ ID NO: 2322996 - RNA, 16 nt, Human
guaaauaaaggaacca

SEQ ID NO: 2322997 - RNA, 19 nt, Human
guaaauacacaacacacac

SEQ ID NO: 2322998 - RNA, 12 nt, Human
guaaauacacca

SEQ ID NO: 2322999 - RNA, 15 nt, Human
guaaauaguauuuga

SEQ ID NO: 2323000 - RNA, 16 nt, Human
guaaauaguauuugag

SEQ ID NO: 2323001 - RNA, 17 nt, Human
guaaauaguauuugaga

SEQ ID NO: 2323002 - RNA, 11 nt, Human
guaaauauuua

SEQ ID NO: 2323003 - RNA, 14 nt, Human
guaaauauucuaua

SEQ ID NO: 2323004 - RNA, 15 nt, Human
guaaauauucuauau

SEQ ID NO: 2323005 - RNA, 12 nt, Human
guaaauauuuau

SEQ ID NO: 2323006 - RNA, 20 nt, Human
guaaauaguuacuccagugc

SEQ ID NO: 2323007 - RNA, 16 nt, Human
guaaauauauaaauau

SEQ ID NO: 2323008 - RNA, 19 nt, Human
guaaauauauaaauauaua

SEQ ID NO: 2323009 - RNA, 13 nt, Human
guaaauauucuau

SEQ ID NO: 2323010 - RNA, 20 nt, Human
guaaauauauaaauauauau

SEQ ID NO: 2323011 - RNA, 17 nt, Human
guaaauguuuagguuuu

SEQ ID NO: 2323012 - RNA, 15 nt, Human
guaaauuaacuuuua

SEQ ID NO: 2323013 - RNA, 22 nt, Human
guaaauggcuuauccagcuggu

SEQ ID NO: 2323014 - RNA, 16 nt, Human
guaaaugguguacaua

SEQ ID NO: 2323015 - RNA, 20 nt, Human
guaaaugguguacauaaugu

SEQ ID NO: 2323016 - RNA, 12 nt, Human
guaaaugaugug

SEQ ID NO: 2323017 - RNA, 17 nt, Human
guaaaugcagcgugaag

SEQ ID NO: 2323018 - RNA, 24 nt, Human
guaaaugcaucuguccucaugugu

SEQ ID NO: 2323019 - RNA, 22 nt, Human
guaaauuaacuuuuauaaacuu

SEQ ID NO: 2323020 - RNA, 21 nt, Human
guaaauuaacuuuuauaaacu

SEQ ID NO: 2323021 - RNA, 17 nt, Human
guaaauuaacuuuuaua

SEQ ID NO: 2323022 - RNA, 16 nt, Human
guaaauuaacuuuuau

SEQ ID NO: 2323023 - RNA, 22 nt, Human
guaaauccuuuuucuuuauaaa

SEQ ID NO: 2323024 - RNA, 16 nt, Human
guaaauccuuuuucuu

SEQ ID NO: 2323025 - RNA, 15 nt, Human
guaaauccuuuuucu

SEQ ID NO: 2323026 - RNA, 20 nt, Human
guaaaugggggugcauuuga

SEQ ID NO: 2323027 - RNA, 19 nt, Human
guaaaugggggugcauuug

SEQ ID NO: 2323028 - RNA, 18 nt, Human
guaaaugggggugcauuu

SEQ ID NO: 2323029 - RNA, 14 nt, Human
guaaaucuuuuaca

SEQ ID NO: 2323030 - RNA, 19 nt, Human
guaagaucguucucugccu

SEQ ID NO: 2323031 - RNA, 18 nt, Human
guaagaguguagaagcau

SEQ ID NO: 2323032 - RNA, 22 nt, Human
guaagaguguagaagcauuccu

SEQ ID NO: 2323033 - RNA, 14 nt, Human
guaagaguguagaa

SEQ ID NO: 2323034 - RNA, 15 nt, Human
guaagaguguagaag

SEQ ID NO: 2323035 - RNA, 17 nt, Human
guaagaguguagaagca

SEQ ID NO: 2323036 - RNA, 16 nt, Human
guaagagcuggugucu

SEQ ID NO: 2323037 - RNA, 14 nt, Human
guaagagcuggugu

SEQ ID NO: 2323038 - RNA, 20 nt, Human
guaagagcaccuuccucacu

SEQ ID NO: 2323039 - RNA, 21 nt, Human
guaagagcaccuuccucacuu

SEQ ID NO: 2323040 - RNA, 11 nt, Human
guaagaugcug

SEQ ID NO: 2323041 - RNA, 20 nt, Human
guaagaugcuggguuggugc

SEQ ID NO: 2323042 - RNA, 12 nt, Human
guaagaugcugg

SEQ ID NO: 2323043 - RNA, 16 nt, Human
guaagaugcuggguug

SEQ ID NO: 2323044 - RNA, 15 nt, Human
guaagaagagacugg

SEQ ID NO: 2323045 - RNA, 11 nt, Human
guaagaagccg

SEQ ID NO: 2323046 - RNA, 13 nt, Human
guaagaagagacu

SEQ ID NO: 2323047 - RNA, 15 nt, Human
guaagaagacaugaa

SEQ ID NO: 2323048 - RNA, 16 nt, Human
guaagacaauccaugu

SEQ ID NO: 2323049 - RNA, 15 nt, Human
guaagacaaagguuu

SEQ ID NO: 2323050 - RNA, 17 nt, Human
guaagagcaccuuccuc

SEQ ID NO: 2323051 - RNA, 17 nt, Human
guaagaaauacuguaca

SEQ ID NO: 2323052 - RNA, 15 nt, Human
guaagaaccuugccu

SEQ ID NO: 2323053 - RNA, 16 nt, Human
guaagaaccuugccug

SEQ ID NO: 2323054 - RNA, 17 nt, Human
guaagaaccuugccuga

SEQ ID NO: 2323055 - RNA, 13 nt, Human
guaagaaauacug

SEQ ID NO: 2323056 - RNA, 12 nt, Human
guaagaaauacu

SEQ ID NO: 2323057 - RNA, 19 nt, Human
guaacuuuuguaaauacac

SEQ ID NO: 2323058 - RNA, 16 nt, Human
guaacuuuauguguaa

SEQ ID NO: 2323059 - RNA, 18 nt, Human
guaacuuggauguagcca

SEQ ID NO: 2323060 - RNA, 14 nt, Human
guaacuuuaugugu

SEQ ID NO: 2323061 - RNA, 15 nt, Human
guaacuuuaugugua

SEQ ID NO: 2323062 - RNA, 12 nt, Human
guaacuuuaugu

SEQ ID NO: 2323063 - RNA, 20 nt, Human
guaagaaacacacugaggca

SEQ ID NO: 2323064 - RNA, 23 nt, Human
guaagaaaauauuuugucuaaaa

SEQ ID NO: 2323065 - RNA, 20 nt, Human
guaagaaagugaagcaaauc

SEQ ID NO: 2323066 - RNA, 17 nt, Human
guaagaaaagugguugu

SEQ ID NO: 2323067 - RNA, 13 nt, Human
guaagaaaauauu

SEQ ID NO: 2323068 - RNA, 14 nt, Human
guaagaaaauauuu

SEQ ID NO: 2323069 - RNA, 22 nt, Human
guaagaaaauauuuugucuaaa

SEQ ID NO: 2323070 - RNA, 17 nt, Human
guaacuuuuguaagaca

SEQ ID NO: 2323071 - RNA, 15 nt, Human
guaacuuuuguaaga

SEQ ID NO: 2323072 - RNA, 14 nt, Human
guaacuuuuguaag

SEQ ID NO: 2323073 - RNA, 22 nt, Human
guaacuguuaaauugcugugua

SEQ ID NO: 2323074 - RNA, 14 nt, Human
guaacugugucaug

SEQ ID NO: 2323075 - RNA, 19 nt, Human
guaacuguuaaauugcugu

SEQ ID NO: 2323076 - RNA, 23 nt, Human
guaaauuaacuuuuauaaacuuu

SEQ ID NO: 2323077 - RNA, 13 nt, Human
guaacuguucuug

SEQ ID NO: 2323078 - RNA, 18 nt, Human
guaacuucuuauggaauu

SEQ ID NO: 2323079 - RNA, 21 nt, Human
guaacuucuuauggaauugau

SEQ ID NO: 2323080 - RNA, 20 nt, Human
guaacuucuuauggaauuga

SEQ ID NO: 2323081 - RNA, 22 nt, Human
guaaguauucuuauuuaaugaa

SEQ ID NO: 2323082 - RNA, 18 nt, Human
guaaguaccacucaggcc

SEQ ID NO: 2323083 - RNA, 12 nt, Human
guaagugccuuc

SEQ ID NO: 2323084 - RNA, 12 nt, Human
guaagucuuuuu

SEQ ID NO: 2323085 - RNA, 23 nt, Human
guaaguaauuaucgggaacagug

SEQ ID NO: 2323086 - RNA, 13 nt, Human
guaaguaauuauc

SEQ ID NO: 2323087 - RNA, 12 nt, Human
guaaggugccuu

SEQ ID NO: 2323088 - RNA, 14 nt, Human
guaaggugagggaa

SEQ ID NO: 2323089 - RNA, 13 nt, Human
guaaggugcaguu

SEQ ID NO: 2323090 - RNA, 16 nt, Human
guaaggugcaguuccc

SEQ ID NO: 2323091 - RNA, 14 nt, Human
guaaggcaugaagg

SEQ ID NO: 2323092 - RNA, 23 nt, Human
guaaggcagggucccauuucuca

SEQ ID NO: 2323093 - RNA, 17 nt, Human
guaagggaaacugccag

SEQ ID NO: 2323094 - RNA, 18 nt, Human
guaagggaaacugccagc

SEQ ID NO: 2323095 - RNA, 20 nt, Human
guaaggcuguguacacugac

SEQ ID NO: 2323096 - RNA, 15 nt, Human
guaagggaaauagaa

SEQ ID NO: 2323097 - RNA, 17 nt, Human
guaagcugcucuauugu

SEQ ID NO: 2323098 - RNA, 17 nt, Human
guaagcucuggcuuucu

SEQ ID NO: 2323099 - RNA, 12 nt, Human
guaagcuguuua

SEQ ID NO: 2323100 - RNA, 19 nt, Human
guaagcuguuuauuuuaua

SEQ ID NO: 2323101 - RNA, 18 nt, Human
guaaggaauaccuguccc

SEQ ID NO: 2323102 - RNA, 13 nt, Human
guaagcucuggcu

SEQ ID NO: 2323103 - RNA, 20 nt, Human
guaaggaauaccuguccccc

SEQ ID NO: 2323104 - RNA, 21 nt, Human
guaaggaauaccugucccccu

SEQ ID NO: 2323105 - RNA, 23 nt, Human
guaaggaauaccugucccccuga

SEQ ID NO: 2323106 - RNA, 13 nt, Human
guaaggaaugauu

SEQ ID NO: 2323107 - RNA, 18 nt, Human
gguuuucuuaaccaucuu

SEQ ID NO: 2323108 - RNA, 17 nt, Human
gguuuucuuaaccaucu

SEQ ID NO: 2323109 - RNA, 14 nt, Human
gguuuucuucccau

SEQ ID NO: 2323110 - RNA, 13 nt, Human
gguuuugacugga

SEQ ID NO: 2323111 - RNA, 15 nt, Human
gguuuucuguucuuu

SEQ ID NO: 2323112 - RNA, 13 nt, Human
gguuuucuguucu

SEQ ID NO: 2323113 - RNA, 12 nt, Human
gguuuucuguuc

SEQ ID NO: 2323114 - RNA, 13 nt, Human
gguuuuccccucc

SEQ ID NO: 2323115 - RNA, 18 nt, Human
gguuuuccccucccuggg

SEQ ID NO: 2323116 - RNA, 19 nt, Human
gguuuucgaagcucagccc

SEQ ID NO: 2323117 - RNA, 15 nt, Human
gguuuucuggguguc

SEQ ID NO: 2323118 - RNA, 14 nt, Human
gguuuucuggaugg

SEQ ID NO: 2323119 - RNA, 23 nt, Human
gguuuacucuguggccaaaggag

SEQ ID NO: 2323120 - RNA, 19 nt, Human
gguuuacauucaucucauu

SEQ ID NO: 2323121 - RNA, 22 nt, Human
gguuuacauucaucucauucca

SEQ ID NO: 2323122 - RNA, 19 nt, Human
gguuuaauccccaguaaaa

SEQ ID NO: 2323123 - RNA, 22 nt, Human
gguuuaauccccaguaaaauug

SEQ ID NO: 2323124 - RNA, 21 nt, Human
gguuuacaauuuacaaagugu

SEQ ID NO: 2323125 - RNA, 17 nt, Human
gguuuacaauuuacaaa

SEQ ID NO: 2323126 - RNA, 13 nt, Human
gguuuuguacaau

SEQ ID NO: 2323127 - RNA, 11 nt, Human
gguuuuguaca

SEQ ID NO: 2323128 - RNA, 19 nt, Human
gguuuuguaagaugcuggg

SEQ ID NO: 2323129 - RNA, 20 nt, Human
gguuuuguaagaugcugggu

SEQ ID NO: 2323130 - RNA, 21 nt, Human
gguuuuggcaaacgcuaaaga

SEQ ID NO: 2323131 - RNA, 19 nt, Human
gguuuugcuauuagacugu

SEQ ID NO: 2323132 - RNA, 17 nt, Human
gguuuuguaagaugcug

SEQ ID NO: 2323133 - RNA, 23 nt, Human
gguuuugccauguuggccaggcu

SEQ ID NO: 2323134 - RNA, 19 nt, Human
gguuuuguuccccuccucc

SEQ ID NO: 2323135 - RNA, 22 nt, Human
gguuuuguuccccuccuccacu

SEQ ID NO: 2323136 - RNA, 16 nt, Human
gguuuuuaaaacccag

SEQ ID NO: 2323137 - RNA, 14 nt, Human
gguuuuguuccccu

SEQ ID NO: 2323138 - RNA, 19 nt, Human
gguuuuguauucucugagc

SEQ ID NO: 2323139 - RNA, 18 nt, Human
gguuuuguauucucugag

SEQ ID NO: 2323140 - RNA, 17 nt, Human
gguuuuguauucucuga

SEQ ID NO: 2323141 - RNA, 12 nt, Human
gguuuuucaauu

SEQ ID NO: 2323142 - RNA, 13 nt, Human
gguuuuucaauua

SEQ ID NO: 2323143 - RNA, 14 nt, Human
gguuuuucaauuaa

SEQ ID NO: 2323144 - RNA, 15 nt, Human
gguuuuucaauuaaa

SEQ ID NO: 2323145 - RNA, 16 nt, Human
gguuuuucaauuaaac

SEQ ID NO: 2323146 - RNA, 15 nt, Human
gguuuuuauuaguac

SEQ ID NO: 2323147 - RNA, 14 nt, Human
gguuuuuacuguua

SEQ ID NO: 2323148 - RNA, 12 nt, Human
gguuuuguuugc

SEQ ID NO: 2323149 - RNA, 15 nt, Human
gguuuuguuugcuau

SEQ ID NO: 2323150 - RNA, 20 nt, Human
gguuuuuuguguacuuuuug

SEQ ID NO: 2323151 - RNA, 14 nt, Human
gguuuuuuaauaua

SEQ ID NO: 2323152 - RNA, 21 nt, Human
gguuuuuuuguacuuuguaca

SEQ ID NO: 2323153 - RNA, 16 nt, Human
guaaaaaaaaaaaagu

SEQ ID NO: 2323154 - RNA, 23 nt, Human
gguuuuuguuuguuuccuuuguu

SEQ ID NO: 2323155 - RNA, 12 nt, Human
gguuuuucccug

SEQ ID NO: 2323156 - RNA, 17 nt, Human
gguuuuucaauuaaacg

SEQ ID NO: 2323157 - RNA, 18 nt, Human
gguuuuucaauuaaacgg

SEQ ID NO: 2323158 - RNA, 19 nt, Human
gguuuuucaauuaaacgga

SEQ ID NO: 2323159 - RNA, 20 nt, Human
gguuuuucaauuaaacggau

SEQ ID NO: 2323160 - RNA, 12 nt, Human
guaaaaauacaa

SEQ ID NO: 2323161 - RNA, 14 nt, Human
guaaaaauaaaauu

SEQ ID NO: 2323162 - RNA, 20 nt, Human
guaaaacaaaaauguaauga

SEQ ID NO: 2323163 - RNA, 14 nt, Human
guaaaaauuaaaaa

SEQ ID NO: 2323164 - RNA, 13 nt, Human
guaaaaauaaaau

SEQ ID NO: 2323165 - RNA, 21 nt, Human
guaaaaacagcauugcuuucu

SEQ ID NO: 2323166 - RNA, 19 nt, Human
guaaaaacagcauugcuuu

SEQ ID NO: 2323167 - RNA, 23 nt, Human
guaaaaacagcauugcuuucuga

SEQ ID NO: 2323168 - RNA, 18 nt, Human
guaaaaacagcauugcuu

SEQ ID NO: 2323169 - RNA, 20 nt, Human
guaaaaaaaaaugccuuuga

SEQ ID NO: 2323170 - RNA, 23 nt, Human
guaaaaaaaaaugccuuugagac

SEQ ID NO: 2323171 - RNA, 20 nt, Human
guaaaaacaaagaaauuaug

SEQ ID NO: 2323172 - RNA, 18 nt, Human
guaaaaacaaagaaauua

SEQ ID NO: 2323173 - RNA, 18 nt, Human
guaaaaaaaaaaaaguua

SEQ ID NO: 2323174 - RNA, 13 nt, Human
guaaaaaaaaaug

SEQ ID NO: 2323175 - RNA, 19 nt, Human
guaaaaaaaaaugccuuug

SEQ ID NO: 2323176 - RNA, 18 nt, Human
guaaaagaacaguaaaca

SEQ ID NO: 2323177 - RNA, 15 nt, Human
guaaaacugaggcac

SEQ ID NO: 2323178 - RNA, 13 nt, Human
guaaaacugaggc

SEQ ID NO: 2323179 - RNA, 21 nt, Human
guaaaacuacacaucccuaau

SEQ ID NO: 2323180 - RNA, 15 nt, Human
guaaaagacuuuuuu

SEQ ID NO: 2323181 - RNA, 17 nt, Human
guaaaagauaacaagau

SEQ ID NO: 2323182 - RNA, 23 nt, Human
guaaaaccacagcaguugaaaag

SEQ ID NO: 2323183 - RNA, 18 nt, Human
guaaaaccacagcaguug

SEQ ID NO: 2323184 - RNA, 16 nt, Human
guaaaaccacagcagu

SEQ ID NO: 2323185 - RNA, 15 nt, Human
guaaaaccacagcag

SEQ ID NO: 2323186 - RNA, 14 nt, Human
guaaaaccacagca

SEQ ID NO: 2323187 - RNA, 20 nt, Human
gguugccacaggccucccug

SEQ ID NO: 2323188 - RNA, 16 nt, Human
gguugcggggggaggg

SEQ ID NO: 2323189 - RNA, 13 nt, Human
gguugccacaggc

SEQ ID NO: 2323190 - RNA, 14 nt, Human
gguugccacaggcc

SEQ ID NO: 2323191 - RNA, 18 nt, Human
gguugccacaggccuccc

SEQ ID NO: 2323192 - RNA, 18 nt, Human
gguugcuguuuuccuccc

SEQ ID NO: 2323193 - RNA, 22 nt, Human
gguugcuguugaugaggccucu

SEQ ID NO: 2323194 - RNA, 17 nt, Human
gguugcugguugcugug

SEQ ID NO: 2323195 - RNA, 18 nt, Human
gguugcugguugcugugu

SEQ ID NO: 2323196 - RNA, 16 nt, Human
gguugcugguugcugu

SEQ ID NO: 2323197 - RNA, 12 nt, Human
gguugccacagg

SEQ ID NO: 2323198 - RNA, 18 nt, Human
gguugcagugagccaaga

SEQ ID NO: 2323199 - RNA, 16 nt, Human
gguugaccccagagga

SEQ ID NO: 2323200 - RNA, 15 nt, Human
gguugaccccagagg

SEQ ID NO: 2323201 - RNA, 11 nt, Human
gguugaauaaa

SEQ ID NO: 2323202 - RNA, 15 nt, Human
gguucuuuguuuuaa

SEQ ID NO: 2323203 - RNA, 19 nt, Human
gguugaagaggugagcacg

SEQ ID NO: 2323204 - RNA, 17 nt, Human
gguugggcccagaucug

SEQ ID NO: 2323205 - RNA, 23 nt, Human
gguugggauugggggcuggugcc

SEQ ID NO: 2323206 - RNA, 15 nt, Human
gguuggagagcuaga

SEQ ID NO: 2323207 - RNA, 19 nt, Human
gguugguccucuugccucc

SEQ ID NO: 2323208 - RNA, 14 nt, Human
gguugggcuggugu

SEQ ID NO: 2323209 - RNA, 22 nt, Human
gguuggaagugagggucagaga

SEQ ID NO: 2323210 - RNA, 21 nt, Human
gguuggaagcuagcuccccuc

SEQ ID NO: 2323211 - RNA, 21 nt, Human
gguugcuguuuuccucccuuc

SEQ ID NO: 2323212 - RNA, 20 nt, Human
gguugcuguuuuccucccuu

SEQ ID NO: 2323213 - RNA, 19 nt, Human
gguugcuguuuuccucccu

SEQ ID NO: 2323214 - RNA, 18 nt, Human
gguuggcaaaaaggcagg

SEQ ID NO: 2323215 - RNA, 13 nt, Human
gguuuaagcuguu

SEQ ID NO: 2323216 - RNA, 14 nt, Human
gguuuaacucagau

SEQ ID NO: 2323217 - RNA, 17 nt, Human
gguuuaacucagaucac

SEQ ID NO: 2323218 - RNA, 18 nt, Human
gguuuaacucagaucacu

SEQ ID NO: 2323219 - RNA, 20 nt, Human
gguuuaacucagaucacuac

SEQ ID NO: 2323220 - RNA, 23 nt, Human
gguuuaacucagaucacuacugc

SEQ ID NO: 2323221 - RNA, 22 nt, Human
gguugugaggccuggccaggca

SEQ ID NO: 2323222 - RNA, 19 nt, Human
gguuuaaacuucucugaag

SEQ ID NO: 2323223 - RNA, 13 nt, Human
gguuuaacucaga

SEQ ID NO: 2323224 - RNA, 13 nt, Human
gguugucaauauu

SEQ ID NO: 2323225 - RNA, 22 nt, Human
gguuguauucuuugauguuaac

SEQ ID NO: 2323226 - RNA, 10 nt, Human
gguugucaau

SEQ ID NO: 2323227 - RNA, 15 nt, Human
gguuguauucuuuga

SEQ ID NO: 2323228 - RNA, 16 nt, Human
gguuguauucuuugau

SEQ ID NO: 2323229 - RNA, 19 nt, Human
gguuguauucuuugauguu

SEQ ID NO: 2323230 - RNA, 20 nt, Human
gguuguauucuuugauguua

SEQ ID NO: 2323231 - RNA, 21 nt, Human
gguugucuguuuuuguaacuu

SEQ ID NO: 2323232 - RNA, 13 nt, Human
gguugugaggccu

SEQ ID NO: 2323233 - RNA, 14 nt, Human
gguugugaggccug

SEQ ID NO: 2323234 - RNA, 16 nt, Human
gguugugaggccuggc

SEQ ID NO: 2323235 - RNA, 21 nt, Human
gguugugaggccuggccaggc

SEQ ID NO: 2323236 - RNA, 13 nt, Human
gguuggugggggc

SEQ ID NO: 2323237 - RNA, 18 nt, Human
gguuguauuagauguucu

SEQ ID NO: 2323238 - RNA, 14 nt, Human
gguuggugcacagu

SEQ ID NO: 2323239 - RNA, 16 nt, Human
gguuggugcacaguga

SEQ ID NO: 2323240 - RNA, 19 nt, Human
gguuguauuagauguucuc

SEQ ID NO: 2323241 - RNA, 17 nt, Human
gguuggugcacagugau

SEQ ID NO: 2323242 - RNA, 14 nt, Human
gguuguauucuuug

SEQ ID NO: 2323243 - RNA, 16 nt, Human
gguucagaaaugcugc

SEQ ID NO: 2323244 - RNA, 22 nt, Human
gguucagaaaugcugccugccu

SEQ ID NO: 2323245 - RNA, 18 nt, Human
gguucagaaaugcugccu

SEQ ID NO: 2323246 - RNA, 19 nt, Human
gguucagaaaugcugccug

SEQ ID NO: 2323247 - RNA, 20 nt, Human
gguucacugcaaccuccgcc

SEQ ID NO: 2323248 - RNA, 22 nt, Human
gguucaagcgauucuucugcuu

SEQ ID NO: 2323249 - RNA, 23 nt, Human
gguucaagcgauucuucugcuuc

SEQ ID NO: 2323250 - RNA, 20 nt, Human
gguucagccccuccucugcc

SEQ ID NO: 2323251 - RNA, 19 nt, Human
gguucagccccuccucugc

SEQ ID NO: 2323252 - RNA, 18 nt, Human
gguucagccccuccucug

SEQ ID NO: 2323253 - RNA, 17 nt, Human
gguucagccccuccucu

SEQ ID NO: 2323254 - RNA, 16 nt, Human
gguucagccccuccuc

SEQ ID NO: 2323255 - RNA, 14 nt, Human
gguucagccccucc

SEQ ID NO: 2323256 - RNA, 16 nt, Human
gguucagagacucagg

SEQ ID NO: 2323257 - RNA, 12 nt, Human
gguucagcuugu

SEQ ID NO: 2323258 - RNA, 17 nt, Human
gguucuuucuuccucug

SEQ ID NO: 2323259 - RNA, 14 nt, Human
gguugaagcaccaa

SEQ ID NO: 2323260 - RNA, 22 nt, Human
gguucagccccuccucugccac

SEQ ID NO: 2323261 - RNA, 21 nt, Human
gguucagccccuccucugcca

SEQ ID NO: 2323262 - RNA, 15 nt, Human
gguucuuuggaagga

SEQ ID NO: 2323263 - RNA, 17 nt, Human
gguucuuuggaaggagu

SEQ ID NO: 2323264 - RNA, 18 nt, Human
gguucuuucuuccucugc

SEQ ID NO: 2323265 - RNA, 21 nt, Human
gguucaagcgauucuucugcu

SEQ ID NO: 2323266 - RNA, 17 nt, Human
gguggccucccaacuca

SEQ ID NO: 2323267 - RNA, 13 nt, Human
gguggccucccaa

SEQ ID NO: 2323268 - RNA, 19 nt, Human
gguggccuaagaguugagc

SEQ ID NO: 2323269 - RNA, 21 nt, Human
gguggccgcugaguggcaggg

SEQ ID NO: 2323270 - RNA, 20 nt, Human
gguggccgcugaguggcagg

SEQ ID NO: 2323271 - RNA, 19 nt, Human
gguggcccacgccuguaau

SEQ ID NO: 2323272 - RNA, 13 nt, Human
gguggcccauccc

SEQ ID NO: 2323273 - RNA, 22 nt, Human
gguggcccauccccccucacca

SEQ ID NO: 2323274 - RNA, 16 nt, Human
gguggcccgacagccu

SEQ ID NO: 2323275 - RNA, 17 nt, Human
gguggcccgacagccug

SEQ ID NO: 2323276 - RNA, 18 nt, Human
gguggcccgacagccugg

SEQ ID NO: 2323277 - RNA, 19 nt, Human
gguggcccgacagccuggc

SEQ ID NO: 2323278 - RNA, 20 nt, Human
gguggcccgacagccuggca

SEQ ID NO: 2323279 - RNA, 13 nt, Human
gguggcccugucc

SEQ ID NO: 2323280 - RNA, 23 nt, Human
gguggcccugucccucccaccuc

SEQ ID NO: 2323281 - RNA, 15 nt, Human
guaauugaacuuauc

SEQ ID NO: 2323282 - RNA, 16 nt, Human
guaauugaauaaaguu

SEQ ID NO: 2323283 - RNA, 12 nt, Human
guaauugcuuac

SEQ ID NO: 2323284 - RNA, 15 nt, Human
guaauugacaugugc

SEQ ID NO: 2323285 - RNA, 15 nt, Human
guaauuggaaaggca

SEQ ID NO: 2323286 - RNA, 13 nt, Human
guaauugugaaaa

SEQ ID NO: 2323287 - RNA, 23 nt, Human
guaauugcuuacauuuuuacaau

SEQ ID NO: 2323288 - RNA, 15 nt, Human
guaauugcuuacauu

SEQ ID NO: 2323289 - RNA, 16 nt, Human
guaauugcuuacauuu

SEQ ID NO: 2323290 - RNA, 17 nt, Human
guaauugcuuacauuuu

SEQ ID NO: 2323291 - RNA, 22 nt, Human
guaauugcuuacauuuuuacaa

SEQ ID NO: 2323292 - RNA, 18 nt, Human
guacacuguuucaaacuu

SEQ ID NO: 2323293 - RNA, 21 nt, Human
guaauuaucgggaacaguguu

SEQ ID NO: 2323294 - RNA, 23 nt, Human
guaauuauugugauuucccgugg

SEQ ID NO: 2323295 - RNA, 17 nt, Human
guaauuauuuugguacu

SEQ ID NO: 2323296 - RNA, 13 nt, Human
guaauucaagaaa

SEQ ID NO: 2323297 - RNA, 14 nt, Human
guaauucaagaaaa

SEQ ID NO: 2323298 - RNA, 18 nt, Human
guaauucuaaaugaaugu

SEQ ID NO: 2323299 - RNA, 22 nt, Human
guaauucuaaaugaauguuuac

SEQ ID NO: 2323300 - RNA, 12 nt, Human
guaauucuaaau

SEQ ID NO: 2323301 - RNA, 21 nt, Human
guaauuccucucacuaaacuu

SEQ ID NO: 2323302 - RNA, 14 nt, Human
guaauucuaaauga

SEQ ID NO: 2323303 - RNA, 15 nt, Human
guaauucuaaaugaa

SEQ ID NO: 2323304 - RNA, 20 nt, Human
guaauuaaguacuauguauc

SEQ ID NO: 2323305 - RNA, 17 nt, Human
guaauuaaguacuaugu

SEQ ID NO: 2323306 - RNA, 14 nt, Human
guaauuaaguacua

SEQ ID NO: 2323307 - RNA, 23 nt, Human
guaauguuacugaucaugcauug

SEQ ID NO: 2323308 - RNA, 22 nt, Human
guaauguuacugaucaugcauu

SEQ ID NO: 2323309 - RNA, 21 nt, Human
guaauuaaguacuauguauca

SEQ ID NO: 2323310 - RNA, 15 nt, Human
guaauuaguaacaug

SEQ ID NO: 2323311 - RNA, 19 nt, Human
guaauuaaaagaauuuucc

SEQ ID NO: 2323312 - RNA, 22 nt, Human
guaauuaucgggaacaguguuu

SEQ ID NO: 2323313 - RNA, 12 nt, Human
guaauuauugug

SEQ ID NO: 2323314 - RNA, 20 nt, Human
guaauuaucgggaacagugu

SEQ ID NO: 2323315 - RNA, 23 nt, Human
guaauuaguaacauguguuaagu

SEQ ID NO: 2323316 - RNA, 16 nt, Human
guaaucucguuucaaa

SEQ ID NO: 2323317 - RNA, 18 nt, Human
guaaucucguuucaaaaa

SEQ ID NO: 2323318 - RNA, 20 nt, Human
guaaucucguuucaaaaaca

SEQ ID NO: 2323319 - RNA, 12 nt, Human
guaaucugugua

SEQ ID NO: 2323320 - RNA, 16 nt, Human
guaaucuguguacaaa

SEQ ID NO: 2323321 - RNA, 16 nt, Human
guaaucugauggcuuc

SEQ ID NO: 2323322 - RNA, 16 nt, Human
guaaucguuaugugug

SEQ ID NO: 2323323 - RNA, 17 nt, Human
guaaucgcuuaaagaug

SEQ ID NO: 2323324 - RNA, 22 nt, Human
guaagugggguugcaaccacug

SEQ ID NO: 2323325 - RNA, 18 nt, Human
guaaucguuaugugugua

SEQ ID NO: 2323326 - RNA, 22 nt, Human
guaaucuccacagucaaagaag

SEQ ID NO: 2323327 - RNA, 22 nt, Human
guaaucuaugaauucuaaguga

SEQ ID NO: 2323328 - RNA, 15 nt, Human
guaaucguguccccu

SEQ ID NO: 2323329 - RNA, 13 nt, Human
guaagugccuucc

SEQ ID NO: 2323330 - RNA, 14 nt, Human
guaagugccuucca

SEQ ID NO: 2323331 - RNA, 21 nt, Human
guaagugggguugcaaccacu

SEQ ID NO: 2323332 - RNA, 11 nt, Human
guaaugaaaac

SEQ ID NO: 2323333 - RNA, 13 nt, Human
guaaugaaaacca

SEQ ID NO: 2323334 - RNA, 16 nt, Human
guaaugaaacuuggau

SEQ ID NO: 2323335 - RNA, 10 nt, Human
guaaugaaac

SEQ ID NO: 2323336 - RNA, 22 nt, Human
guaaugaaacaccuucucugga

SEQ ID NO: 2323337 - RNA, 17 nt, Human
guaaugaaccgcugaau

SEQ ID NO: 2323338 - RNA, 19 nt, Human
guaaugaaccgcugaauau

SEQ ID NO: 2323339 - RNA, 20 nt, Human
guaaucuguguacaaagaaa

SEQ ID NO: 2323340 - RNA, 15 nt, Human
guaaugaaacuugga

SEQ ID NO: 2323341 - RNA, 21 nt, Human
guaaugaauuuuuaugauauu

SEQ ID NO: 2323342 - RNA, 14 nt, Human
guaaugagggacug

SEQ ID NO: 2323343 - RNA, 18 nt, Human
guaaugaugucguuugaa

SEQ ID NO: 2323344 - RNA, 19 nt, Human
guaaugauaacuggaaacu

SEQ ID NO: 2323345 - RNA, 22 nt, Human
guaaugcuacgugugauuuuuc

SEQ ID NO: 2323346 - RNA, 20 nt, Human
guaaugcuuagagaauguuc

SEQ ID NO: 2323347 - RNA, 16 nt, Human
guaaugcuucaaucag

SEQ ID NO: 2323348 - RNA, 18 nt, Human
guaaugcuacgugugauu

SEQ ID NO: 2323349 - RNA, 21 nt, Human
guaaugauauagccagaaaaa

SEQ ID NO: 2323350 - RNA, 20 nt, Human
guaaugcuacgugugauuuu

SEQ ID NO: 2323351 - RNA, 15 nt, Human
guaaugagggacugg

SEQ ID NO: 2323352 - RNA, 20 nt, Human
guaaugauauagccagaaaa

SEQ ID NO: 2323353 - RNA, 16 nt, Human
guaaugugaauaaauu

SEQ ID NO: 2323354 - RNA, 14 nt, Human
guaaugugaauaaa

SEQ ID NO: 2323355 - RNA, 21 nt, Human
guaauguuacugaucaugcau

SEQ ID NO: 2323356 - RNA, 20 nt, Human
guaauguuacugaucaugca

SEQ ID NO: 2323357 - RNA, 17 nt, Human
guaauguuacugaucau

SEQ ID NO: 2323358 - RNA, 14 nt, Human
guaauguuacugau

SEQ ID NO: 2323359 - RNA, 13 nt, Human
guaauguuacuga

SEQ ID NO: 2323360 - RNA, 22 nt, Human
guaaugucaccaccuucccagc

SEQ ID NO: 2323361 - RNA, 20 nt, Human
guaaugucaccaccuuccca

SEQ ID NO: 2323362 - RNA, 19 nt, Human
guaaugucaccaccuuccc

SEQ ID NO: 2323363 - RNA, 12 nt, Human
guaaugucacca

SEQ ID NO: 2323364 - RNA, 12 nt, Human
guacaggcagca

SEQ ID NO: 2323365 - RNA, 18 nt, Human
guacagcuguuuaagaug

SEQ ID NO: 2323366 - RNA, 19 nt, Human
guacagaugaaugauaaac

SEQ ID NO: 2323367 - RNA, 20 nt, Human
guacagcaaggagauuuaca

SEQ ID NO: 2323368 - RNA, 12 nt, Human
guacagagccca

SEQ ID NO: 2323369 - RNA, 18 nt, Human
guacagagcccacgcccc

SEQ ID NO: 2323370 - RNA, 22 nt, Human
guacagagcccacgcccccacu

SEQ ID NO: 2323371 - RNA, 14 nt, Human
guaauugugaaaaa

SEQ ID NO: 2323372 - RNA, 21 nt, Human
guacacuguuucaaacuuuac

SEQ ID NO: 2323373 - RNA, 20 nt, Human
guacacuguuucaaacuuua

SEQ ID NO: 2323374 - RNA, 19 nt, Human
guacacuguuucaaacuuu

SEQ ID NO: 2323375 - RNA, 17 nt, Human
guacagacguaugcuua

SEQ ID NO: 2323376 - RNA, 20 nt, Human
guacagagaacuaacacuau

SEQ ID NO: 2323377 - RNA, 21 nt, Human
guacagagaacuaacacuauu

SEQ ID NO: 2323378 - RNA, 14 nt, Human
guacagaaagcugc

SEQ ID NO: 2323379 - RNA, 12 nt, Human
guacacuuuuuu

SEQ ID NO: 2323380 - RNA, 15 nt, Human
guacagacagaaaaa

SEQ ID NO: 2323381 - RNA, 20 nt, Human
guacagaauucugcuaccuc

SEQ ID NO: 2323382 - RNA, 13 nt, Human
guacagaaagcug

SEQ ID NO: 2323383 - RNA, 16 nt, Human
guacagacaacaaacc

SEQ ID NO: 2323384 - RNA, 19 nt, Human
guacaguuuguuuacacac

SEQ ID NO: 2323385 - RNA, 16 nt, Human
guacaguuuguuuaca

SEQ ID NO: 2323386 - RNA, 18 nt, Human
guacaguuuguuuacaca

SEQ ID NO: 2323387 - RNA, 22 nt, Human
guacaguucuucgggaagagag

SEQ ID NO: 2323388 - RNA, 23 nt, Human
guacaguucuucgggaagagagg

SEQ ID NO: 2323389 - RNA, 15 nt, Human
guacaguuugcugua

SEQ ID NO: 2323390 - RNA, 16 nt, Human
guacaguuugcuguac

SEQ ID NO: 2323391 - RNA, 14 nt, Human
guacaguuugcugu

SEQ ID NO: 2323392 - RNA, 22 nt, Human
guacaguucaguuccucuuugc

SEQ ID NO: 2323393 - RNA, 23 nt, Human
guacaguucaguuccucuuugca

SEQ ID NO: 2323394 - RNA, 12 nt, Human
guacaguucuuc

SEQ ID NO: 2323395 - RNA, 16 nt, Human
guacaguucuucggga

SEQ ID NO: 2323396 - RNA, 16 nt, Human
guacaguguguaaagu

SEQ ID NO: 2323397 - RNA, 14 nt, Human
guacaguguucugu

SEQ ID NO: 2323398 - RNA, 16 nt, Human
guacaguguucuguuu

SEQ ID NO: 2323399 - RNA, 17 nt, Human
guacaguguucuguuua

SEQ ID NO: 2323400 - RNA, 21 nt, Human
guacaguuauuuaugccucug

SEQ ID NO: 2323401 - RNA, 14 nt, Human
guacaguucaguuc

SEQ ID NO: 2323402 - RNA, 16 nt, Human
guacaguucaguuccu

SEQ ID NO: 2323403 - RNA, 19 nt, Human
guacaguucaguuccucuu

SEQ ID NO: 2323404 - RNA, 16 nt, Human
guacagucuuguauua

SEQ ID NO: 2323405 - RNA, 12 nt, Human
guacagucuguc

SEQ ID NO: 2323406 - RNA, 19 nt, Human
guacagucuugcagcagga

SEQ ID NO: 2323407 - RNA, 13 nt, Human
guacagucuugua

SEQ ID NO: 2323408 - RNA, 14 nt, Human
guacagucuuguau

SEQ ID NO: 2323409 - RNA, 17 nt, Human
guacaggcagcacagag

SEQ ID NO: 2323410 - RNA, 15 nt, Human
guacaggcagcacag

SEQ ID NO: 2323411 - RNA, 15 nt, Human
guacagguaagguga

SEQ ID NO: 2323412 - RNA, 14 nt, Human
guacagucugucau

SEQ ID NO: 2323413 - RNA, 12 nt, Human
guacaguuuuua

SEQ ID NO: 2323414 - RNA, 13 nt, Human
guacaguuuuuau

SEQ ID NO: 2323415 - RNA, 23 nt, Human
guacauaaaggugguaugugugu

SEQ ID NO: 2323416 - RNA, 22 nt, Human
guacauaaaggugguaugugug

SEQ ID NO: 2323417 - RNA, 14 nt, Human
guacauaacugaaa

SEQ ID NO: 2323418 - RNA, 19 nt, Human
guacauacccuggccgccc

SEQ ID NO: 2323419 - RNA, 22 nt, Human
guacauacccuggccgcccccu

SEQ ID NO: 2323420 - RNA, 20 nt, Human
guacauaaugcgugcauacc

SEQ ID NO: 2323421 - RNA, 12 nt, Human
guacauagccua

SEQ ID NO: 2323422 - RNA, 18 nt, Human
guacauaguuauuuauuu

SEQ ID NO: 2323423 - RNA, 17 nt, Human
guacauaguuauuuauu

SEQ ID NO: 2323424 - RNA, 13 nt, Human
guacauagccuau

SEQ ID NO: 2323425 - RNA, 14 nt, Human
guacauagccuaua

SEQ ID NO: 2323426 - RNA, 15 nt, Human
guacauagccuauau

SEQ ID NO: 2323427 - RNA, 22 nt, Human
guacauagccuauauuuacagu

SEQ ID NO: 2323428 - RNA, 15 nt, Human
guacccacugcucug

SEQ ID NO: 2323429 - RNA, 18 nt, Human
guacauauguaaaauaaa

SEQ ID NO: 2323430 - RNA, 14 nt, Human
guacauaugugcug

SEQ ID NO: 2323431 - RNA, 16 nt, Human
guacauaugugcugga

SEQ ID NO: 2323432 - RNA, 23 nt, Human
guaccuugaacacugggggaggg

SEQ ID NO: 2323433 - RNA, 18 nt, Human
guaccuugaacacugggg

SEQ ID NO: 2323434 - RNA, 14 nt, Human
guaccuugaacacu

SEQ ID NO: 2323435 - RNA, 17 nt, Human
guaccuggugaccccuu

SEQ ID NO: 2323436 - RNA, 19 nt, Human
guaccuguuccuuagaccu

SEQ ID NO: 2323437 - RNA, 15 nt, Human
guaccuggaggagga

SEQ ID NO: 2323438 - RNA, 17 nt, Human
guaccugcccccaaucc

SEQ ID NO: 2323439 - RNA, 18 nt, Human
guaccugaaaaguaacuu

SEQ ID NO: 2323440 - RNA, 23 nt, Human
guaccugaaaaguaacuuggcuu

SEQ ID NO: 2323441 - RNA, 14 nt, Human
guaccuauaaagua

SEQ ID NO: 2323442 - RNA, 19 nt, Human
guaccuauaaaguaaagcu

SEQ ID NO: 2323443 - RNA, 20 nt, Human
guaccuauaaaguaaagcua

SEQ ID NO: 2323444 - RNA, 21 nt, Human
guaccuauaaaguaaagcuaa

SEQ ID NO: 2323445 - RNA, 14 nt, Human
guaccuauuuucau

SEQ ID NO: 2323446 - RNA, 12 nt, Human
guaccugaaaag

SEQ ID NO: 2323447 - RNA, 14 nt, Human
guaccugaaaagua

SEQ ID NO: 2323448 - RNA, 22 nt, Human
guaccucuugagccuugaacuu

SEQ ID NO: 2323449 - RNA, 21 nt, Human
guaccucuugagccuugaacu

SEQ ID NO: 2323450 - RNA, 13 nt, Human
guaccucuugagc

SEQ ID NO: 2323451 - RNA, 18 nt, Human
guaccuauuuucauugua

SEQ ID NO: 2323452 - RNA, 23 nt, Human
guaccccacccucagcaccccuu

SEQ ID NO: 2323453 - RNA, 19 nt, Human
guaccccacccucagcacc

SEQ ID NO: 2323454 - RNA, 22 nt, Human
guaccccacccucagcaccccu

SEQ ID NO: 2323455 - RNA, 21 nt, Human
guacccagccaucugcccagg

SEQ ID NO: 2323456 - RNA, 12 nt, Human
guaccccacccu

SEQ ID NO: 2323457 - RNA, 13 nt, Human
guaccccacccuc

SEQ ID NO: 2323458 - RNA, 14 nt, Human
guaccccacccuca

SEQ ID NO: 2323459 - RNA, 14 nt, Human
guaccccccaaccc

SEQ ID NO: 2323460 - RNA, 21 nt, Human
guaccccccaaccccugagga

SEQ ID NO: 2323461 - RNA, 13 nt, Human
guacccccgccca

SEQ ID NO: 2323462 - RNA, 17 nt, Human
guacccccgcccaggcu

SEQ ID NO: 2323463 - RNA, 19 nt, Human
guacauauuuguggaauaa

SEQ ID NO: 2323464 - RNA, 17 nt, Human
guacauauuuguggaau

SEQ ID NO: 2323465 - RNA, 12 nt, Human
guacccagccau

SEQ ID NO: 2323466 - RNA, 15 nt, Human
guacccagccaucug

SEQ ID NO: 2323467 - RNA, 18 nt, Human
guacccagccaucugccc

SEQ ID NO: 2323468 - RNA, 20 nt, Human
guacccagccaucugcccag

SEQ ID NO: 2323469 - RNA, 16 nt, Human
guacccacugcucugg

SEQ ID NO: 2323470 - RNA, 15 nt, Human
guaccgcaaugugac

SEQ ID NO: 2323471 - RNA, 15 nt, Human
guacccucuggaggg

SEQ ID NO: 2323472 - RNA, 13 nt, Human
guaccuauaaagu

SEQ ID NO: 2323473 - RNA, 23 nt, Human
guaccgccuugcacacucagaag

SEQ ID NO: 2323474 - RNA, 15 nt, Human
guacccccuucuggg

SEQ ID NO: 2323475 - RNA, 12 nt, Human
guacccccuucu

SEQ ID NO: 2323476 - RNA, 14 nt, Human
guacccccuucugg

SEQ ID NO: 2323477 - RNA, 18 nt, Human
guacccccgcccaggcug

SEQ ID NO: 2323478 - RNA, 19 nt, Human
guacccccgcccaggcugg

SEQ ID NO: 2323479 - RNA, 20 nt, Human
guacccccgcccaggcuggc

SEQ ID NO: 2323480 - RNA, 23 nt, Human
guacccccgcccaggcuggccag

SEQ ID NO: 2323481 - RNA, 17 nt, Human
guacccuccuggcucuu

SEQ ID NO: 2323482 - RNA, 17 nt, Human
guacccucucagcucca

SEQ ID NO: 2323483 - RNA, 18 nt, Human
guacccucucagcuccag

SEQ ID NO: 2323484 - RNA, 19 nt, Human
guacccucucagcuccagg

SEQ ID NO: 2323485 - RNA, 15 nt, Human
guacuacaauuuaaa

SEQ ID NO: 2323486 - RNA, 12 nt, Human
guacuacaauuu

SEQ ID NO: 2323487 - RNA, 22 nt, Human
guacuaacuccuaggaaaauac

SEQ ID NO: 2323488 - RNA, 14 nt, Human
guacuucuccaccc

SEQ ID NO: 2323489 - RNA, 15 nt, Human
guacuucuccacccu

SEQ ID NO: 2323490 - RNA, 23 nt, Human
guacuaaggaaucuuucugcuuu

SEQ ID NO: 2323491 - RNA, 15 nt, Human
guacuaaggaaucuu

SEQ ID NO: 2323492 - RNA, 15 nt, Human
guacguggagaggga

SEQ ID NO: 2323493 - RNA, 21 nt, Human
guacguuauuguugacuuauu

SEQ ID NO: 2323494 - RNA, 14 nt, Human
guacguuuguaugu

SEQ ID NO: 2323495 - RNA, 17 nt, Human
guacguuuguaugugug

SEQ ID NO: 2323496 - RNA, 17 nt, Human
guacguugugcauuugg

SEQ ID NO: 2323497 - RNA, 17 nt, Human
guacgucugacaggcaa

SEQ ID NO: 2323498 - RNA, 14 nt, Human
guacguugugcauu

SEQ ID NO: 2323499 - RNA, 16 nt, Human
guacguugugcauuug

SEQ ID NO: 2323500 - RNA, 15 nt, Human
guacguugugcauuu

SEQ ID NO: 2323501 - RNA, 14 nt, Human
guacgucugacagg

SEQ ID NO: 2323502 - RNA, 15 nt, Human
guacgucugacaggc

SEQ ID NO: 2323503 - RNA, 13 nt, Human
guaccuuugucac

SEQ ID NO: 2323504 - RNA, 13 nt, Human
guaccuuuuaaca

SEQ ID NO: 2323505 - RNA, 21 nt, Human
guaccuuuugaggagccccag

SEQ ID NO: 2323506 - RNA, 23 nt, Human
guaccuuuugaggagccccagcu

SEQ ID NO: 2323507 - RNA, 19 nt, Human
guaccuuuuaacaccugau

SEQ ID NO: 2323508 - RNA, 10 nt, Human
guacuuugug

SEQ ID NO: 2323509 - RNA, 20 nt, Human
guacuuuuaugauguauauu

SEQ ID NO: 2323510 - RNA, 14 nt, Human
guacuuuggaggcc

SEQ ID NO: 2323511 - RNA, 21 nt, Human
guacuuguggacacagcucuu

SEQ ID NO: 2323512 - RNA, 17 nt, Human
guacuugucaaagaagg

SEQ ID NO: 2323513 - RNA, 15 nt, Human
guacuugucaaagaa

SEQ ID NO: 2323514 - RNA, 16 nt, Human
guacuugucaaagaag

SEQ ID NO: 2323515 - RNA, 23 nt, Human
guacuuuauuuucuauaauuuaa

SEQ ID NO: 2323516 - RNA, 18 nt, Human
guagaaagacagagcugg

SEQ ID NO: 2323517 - RNA, 21 nt, Human
guagaaagacagagcugggau

SEQ ID NO: 2323518 - RNA, 19 nt, Human
guagaaacugcagggaaaa

SEQ ID NO: 2323519 - RNA, 15 nt, Human
guagaaacugcaggg

SEQ ID NO: 2323520 - RNA, 20 nt, Human
guagaaaagggaacugaaca

SEQ ID NO: 2323521 - RNA, 22 nt, Human
guacuuuuaugauguauauuua

SEQ ID NO: 2323522 - RNA, 13 nt, Human
guagaaaagcuau

SEQ ID NO: 2323523 - RNA, 21 nt, Human
guagagcuagaacauggagag

SEQ ID NO: 2323524 - RNA, 15 nt, Human
guagaggagaaacug

SEQ ID NO: 2323525 - RNA, 16 nt, Human
guagagcggagaaagg

SEQ ID NO: 2323526 - RNA, 14 nt, Human
guagaaaggccuuu

SEQ ID NO: 2323527 - RNA, 16 nt, Human
guagaaaggccuuuaa

SEQ ID NO: 2323528 - RNA, 17 nt, Human
guagaaaggccuuuaaa

SEQ ID NO: 2323529 - RNA, 14 nt, Human
guacuugucaaaga

SEQ ID NO: 2323530 - RNA, 11 nt, Human
guacuugucaa

SEQ ID NO: 2323531 - RNA, 21 nt, Human
guacuuggaguauuggggucu

SEQ ID NO: 2323532 - RNA, 22 nt, Human
guacuugcucuugaugccuggc

SEQ ID NO: 2323533 - RNA, 16 nt, Human
guacuuguggacacag

SEQ ID NO: 2323534 - RNA, 20 nt, Human
guacuuguggacacagcucu

SEQ ID NO: 2323535 - RNA, 15 nt, Human
guacuugcucuugau

SEQ ID NO: 2323536 - RNA, 16 nt, Human
guacuugcucuugaug

SEQ ID NO: 2323537 - RNA, 18 nt, Human
guacuugcucuugaugcc

SEQ ID NO: 2323538 - RNA, 19 nt, Human
guacuugcucuugaugccu

SEQ ID NO: 2323539 - RNA, 20 nt, Human
guacuucuccacccugcucu

SEQ ID NO: 2323540 - RNA, 21 nt, Human
guacuucuccacccugcucuc

SEQ ID NO: 2323541 - RNA, 14 nt, Human
guacuugcucuuga

SEQ ID NO: 2323542 - RNA, 22 nt, Human
guacuugccuuauuagaguguc

SEQ ID NO: 2323543 - RNA, 22 nt, Human
guacuugaaaucuaggauuauu

SEQ ID NO: 2323544 - RNA, 16 nt, Human
guacuucuccacccug

SEQ ID NO: 2323545 - RNA, 17 nt, Human
guacuucuccacccugc

SEQ ID NO: 2323546 - RNA, 18 nt, Human
guacuucuccacccugcu

SEQ ID NO: 2323547 - RNA, 19 nt, Human
guacuucuccacccugcuc

SEQ ID NO: 2323548 - RNA, 22 nt, Human
gcugcaucccccccaccucucc

SEQ ID NO: 2323549 - RNA, 18 nt, Human
gcugauguucaguguaau

SEQ ID NO: 2323550 - RNA, 22 nt, Human
gcugcaucugggauucccacca

SEQ ID NO: 2323551 - RNA, 18 nt, Human
gcugcauccuccaagaau

SEQ ID NO: 2323552 - RNA, 22 nt, Human
gcugcauggggugggguagggc

SEQ ID NO: 2323553 - RNA, 20 nt, Human
gcugcaugccuggucuuucc

SEQ ID NO: 2323554 - RNA, 14 nt, Human
gcugcaugccuggu

SEQ ID NO: 2323555 - RNA, 18 nt, Human
gcugcaugccuggucuuu

SEQ ID NO: 2323556 - RNA, 22 nt, Human
gcugcauccuccaagaaucuau

SEQ ID NO: 2323557 - RNA, 23 nt, Human
gcugccaaggccagaguggccug

SEQ ID NO: 2323558 - RNA, 22 nt, Human
gcugccaaggccagaguggccu

SEQ ID NO: 2323559 - RNA, 18 nt, Human
gcugccaaggccagagug

SEQ ID NO: 2323560 - RNA, 18 nt, Human
gcugauggugcaaugacc

SEQ ID NO: 2323561 - RNA, 21 nt, Human
gcugauggugcaaugaccuuu

SEQ ID NO: 2323562 - RNA, 23 nt, Human
gcugauggauaaccuauaugauu

SEQ ID NO: 2323563 - RNA, 17 nt, Human
gcugaugucaauuucug

SEQ ID NO: 2323564 - RNA, 20 nt, Human
gcugaugucaauuucugugu

SEQ ID NO: 2323565 - RNA, 23 nt, Human
gcugaugucaauuucuguguugc

SEQ ID NO: 2323566 - RNA, 20 nt, Human
gcugauguccucaccacaug

SEQ ID NO: 2323567 - RNA, 13 nt, Human
gcugauguucagu

SEQ ID NO: 2323568 - RNA, 14 nt, Human
gcugauguucagug

SEQ ID NO: 2323569 - RNA, 15 nt, Human
gcugauguucagugu

SEQ ID NO: 2323570 - RNA, 16 nt, Human
gcugauguucagugua

SEQ ID NO: 2323571 - RNA, 17 nt, Human
gcugauguucaguguaa

SEQ ID NO: 2323572 - RNA, 21 nt, Human
gcugcaguugccagucacccc

SEQ ID NO: 2323573 - RNA, 20 nt, Human
gcugauguucaguguaauuu

SEQ ID NO: 2323574 - RNA, 18 nt, Human
gcugcaguugccagucac

SEQ ID NO: 2323575 - RNA, 20 nt, Human
gcugcaguugccagucaccc

SEQ ID NO: 2323576 - RNA, 20 nt, Human
gcugaugauuuguuuuugua

SEQ ID NO: 2323577 - RNA, 14 nt, Human
gcugaugcugggcu

SEQ ID NO: 2323578 - RNA, 15 nt, Human
gcugaugcugggcug

SEQ ID NO: 2323579 - RNA, 16 nt, Human
gcugaugcugggcugg

SEQ ID NO: 2323580 - RNA, 19 nt, Human
gcugaugcugggcugggug

SEQ ID NO: 2323581 - RNA, 20 nt, Human
gcugaugcugggcugggugc

SEQ ID NO: 2323582 - RNA, 15 nt, Human
gcugauggugcaaug

SEQ ID NO: 2323583 - RNA, 16 nt, Human
gcugauggugcaauga

SEQ ID NO: 2323584 - RNA, 13 nt, Human
gcugaguuggugu

SEQ ID NO: 2323585 - RNA, 21 nt, Human
gcugaguggcaggggacagga

SEQ ID NO: 2323586 - RNA, 23 nt, Human
gcugagugggggaucacagccuc

SEQ ID NO: 2323587 - RNA, 22 nt, Human
gcugagugggggaucacagccu

SEQ ID NO: 2323588 - RNA, 17 nt, Human
gcugaguggcaggggac

SEQ ID NO: 2323589 - RNA, 19 nt, Human
gcugaguggcaggggacag

SEQ ID NO: 2323590 - RNA, 17 nt, Human
gcugagucucccaaggc

SEQ ID NO: 2323591 - RNA, 19 nt, Human
gcugagucugaaggcuggg

SEQ ID NO: 2323592 - RNA, 16 nt, Human
gcugagucugaaggcu

SEQ ID NO: 2323593 - RNA, 18 nt, Human
gcugagucugaaggcugg

SEQ ID NO: 2323594 - RNA, 18 nt, Human
gcugacugauguugaggg

SEQ ID NO: 2323595 - RNA, 13 nt, Human
gcugagucuccca

SEQ ID NO: 2323596 - RNA, 14 nt, Human
gcugagucucccaa

SEQ ID NO: 2323597 - RNA, 15 nt, Human
gcugagucucccaag

SEQ ID NO: 2323598 - RNA, 16 nt, Human
gcugagucucccaagg

SEQ ID NO: 2323599 - RNA, 15 nt, Human
gcugagucugaaggc

SEQ ID NO: 2323600 - RNA, 21 nt, Human
gcugacuguacuccucccagg

SEQ ID NO: 2323601 - RNA, 17 nt, Human
gcugagucccaggcuga

SEQ ID NO: 2323602 - RNA, 22 nt, Human
gcugagucccaggcugagccuc

SEQ ID NO: 2323603 - RNA, 21 nt, Human
gcugagucccaggcugagccu

SEQ ID NO: 2323604 - RNA, 20 nt, Human
gcucuuccgaaaaccaggcc

SEQ ID NO: 2323605 - RNA, 12 nt, Human
gcucuucucauu

SEQ ID NO: 2323606 - RNA, 22 nt, Human
gcucuuccaggcugggagagcc

SEQ ID NO: 2323607 - RNA, 12 nt, Human
gcucuucuccag

SEQ ID NO: 2323608 - RNA, 14 nt, Human
gcucuucucauuuc

SEQ ID NO: 2323609 - RNA, 15 nt, Human
gcucuucucauuuca

SEQ ID NO: 2323610 - RNA, 16 nt, Human
gcucuucucauuucac

SEQ ID NO: 2323611 - RNA, 20 nt, Human
gcucuucucauuucaccccu

SEQ ID NO: 2323612 - RNA, 17 nt, Human
gcucuggaccagccugu

SEQ ID NO: 2323613 - RNA, 15 nt, Human
gcucuggaagagagg

SEQ ID NO: 2323614 - RNA, 11 nt, Human
gcucuggacca

SEQ ID NO: 2323615 - RNA, 22 nt, Human
gcucuggaccaacccuguuucc

SEQ ID NO: 2323616 - RNA, 16 nt, Human
gcucuggaccagccug

SEQ ID NO: 2323617 - RNA, 22 nt, Human
gcucuggacagccccacccugg

SEQ ID NO: 2323618 - RNA, 20 nt, Human
gcucuggacagccccacccu

SEQ ID NO: 2323619 - RNA, 19 nt, Human
gcucuuccaggcugggaga

SEQ ID NO: 2323620 - RNA, 18 nt, Human
gcucuuccaggcugggag

SEQ ID NO: 2323621 - RNA, 23 nt, Human
gcucuucuccuuucacaaccuuc

SEQ ID NO: 2323622 - RNA, 13 nt, Human
gcucuucugacua

SEQ ID NO: 2323623 - RNA, 23 nt, Human
gcucuucugcccaauuggaggaa

SEQ ID NO: 2323624 - RNA, 14 nt, Human
gcucuugaugccug

SEQ ID NO: 2323625 - RNA, 15 nt, Human
gcucuugaugccugg

SEQ ID NO: 2323626 - RNA, 16 nt, Human
gcucuugaugccuggc

SEQ ID NO: 2323627 - RNA, 13 nt, Human
gcucuucuccuuu

SEQ ID NO: 2323628 - RNA, 22 nt, Human
gcucuucucauuucaccccucc

SEQ ID NO: 2323629 - RNA, 23 nt, Human
gcucuucucauuucaccccuccc

SEQ ID NO: 2323630 - RNA, 17 nt, Human
gcucuucuccuuucaca

SEQ ID NO: 2323631 - RNA, 21 nt, Human
gcucuucuccuuucacaaccu

SEQ ID NO: 2323632 - RNA, 14 nt, Human
gcucuucuccaggc

SEQ ID NO: 2323633 - RNA, 16 nt, Human
gcucuucuccaggcug

SEQ ID NO: 2323634 - RNA, 20 nt, Human
gcugacugauguugagggaa

SEQ ID NO: 2323635 - RNA, 23 nt, Human
gcugacucuaggugcccuuggag

SEQ ID NO: 2323636 - RNA, 18 nt, Human
gcugacuguacuccuccc

SEQ ID NO: 2323637 - RNA, 19 nt, Human
gcugacuguacuccuccca

SEQ ID NO: 2323638 - RNA, 13 nt, Human
gcugaccucuggu

SEQ ID NO: 2323639 - RNA, 17 nt, Human
gcugaccuccacagcuu

SEQ ID NO: 2323640 - RNA, 16 nt, Human
gcugaccuccacagcu

SEQ ID NO: 2323641 - RNA, 15 nt, Human
gcugaccuccacagc

SEQ ID NO: 2323642 - RNA, 14 nt, Human
gcugaccuccacag

SEQ ID NO: 2323643 - RNA, 15 nt, Human
gcugacccuccuguu

SEQ ID NO: 2323644 - RNA, 22 nt, Human
gcugacccuccuguugcaccca

SEQ ID NO: 2323645 - RNA, 23 nt, Human
gcugacuagaagggccaguccug

SEQ ID NO: 2323646 - RNA, 15 nt, Human
gcugacuagaagggc

SEQ ID NO: 2323647 - RNA, 18 nt, Human
gcugaccucuguuguccu

SEQ ID NO: 2323648 - RNA, 16 nt, Human
gcugaccucugguggc

SEQ ID NO: 2323649 - RNA, 14 nt, Human
gcugaccucuguug

SEQ ID NO: 2323650 - RNA, 22 nt, Human
gcugacccagccccuugagaaa

SEQ ID NO: 2323651 - RNA, 22 nt, Human
gcugaccaugcucaucugcugg

SEQ ID NO: 2323652 - RNA, 21 nt, Human
gcugaccaugcucaucugcug

SEQ ID NO: 2323653 - RNA, 16 nt, Human
gcugacaucuguguuu

SEQ ID NO: 2323654 - RNA, 19 nt, Human
gcugacaucuguguuucaa

SEQ ID NO: 2323655 - RNA, 18 nt, Human
gcugacagcugcuccuag

SEQ ID NO: 2323656 - RNA, 12 nt, Human
gcugacaguccu

SEQ ID NO: 2323657 - RNA, 17 nt, Human
gcugacagcugcuccua

SEQ ID NO: 2323658 - RNA, 15 nt, Human
gcugacagcugcucc

SEQ ID NO: 2323659 - RNA, 14 nt, Human
gcugacaguccucu

SEQ ID NO: 2323660 - RNA, 16 nt, Human
gcugacaguccucucc

SEQ ID NO: 2323661 - RNA, 19 nt, Human
gcugacaguccucuccacc

SEQ ID NO: 2323662 - RNA, 13 nt, Human
gcugacaucugug

SEQ ID NO: 2323663 - RNA, 16 nt, Human
gcugacccagucccug

SEQ ID NO: 2323664 - RNA, 15 nt, Human
gcugacccagucccu

SEQ ID NO: 2323665 - RNA, 13 nt, Human
gcugacccagucc

SEQ ID NO: 2323666 - RNA, 13 nt, Human
gcugacccagccu

SEQ ID NO: 2323667 - RNA, 19 nt, Human
gcugacccagucccugggg

SEQ ID NO: 2323668 - RNA, 17 nt, Human
gcugacccagucccugg

SEQ ID NO: 2323669 - RNA, 14 nt, Human
gcugacccuccugu

SEQ ID NO: 2323670 - RNA, 18 nt, Human
gcugaccccaaagagccu

SEQ ID NO: 2323671 - RNA, 19 nt, Human
gcugaccccaaagagccug

SEQ ID NO: 2323672 - RNA, 21 nt, Human
gcucuuuaugaaugaaaaaac

SEQ ID NO: 2323673 - RNA, 13 nt, Human
gcucuuucagggg

SEQ ID NO: 2323674 - RNA, 14 nt, Human
gcucuuuagccagu

SEQ ID NO: 2323675 - RNA, 12 nt, Human
gcucuuucaggg

SEQ ID NO: 2323676 - RNA, 17 nt, Human
gcucuugugaggaaagu

SEQ ID NO: 2323677 - RNA, 19 nt, Human
gcucuugugaggaaaguca

SEQ ID NO: 2323678 - RNA, 20 nt, Human
gcucuugugaggaaagucau

SEQ ID NO: 2323679 - RNA, 22 nt, Human
gcucuugugcuggauggagccc

SEQ ID NO: 2323680 - RNA, 22 nt, Human
gcucuugugguacacacagauu

SEQ ID NO: 2323681 - RNA, 17 nt, Human
gcucuugaugccuggcg

SEQ ID NO: 2323682 - RNA, 16 nt, Human
gcucuugugaggaaag

SEQ ID NO: 2323683 - RNA, 21 nt, Human
gcucuucugacuacugggcaa

SEQ ID NO: 2323684 - RNA, 22 nt, Human
gcucuugauaccccccucuguc

SEQ ID NO: 2323685 - RNA, 23 nt, Human
gcucuugauaccccccucugucu

SEQ ID NO: 2323686 - RNA, 21 nt, Human
gcugacagacacaggcccggc

SEQ ID NO: 2323687 - RNA, 17 nt, Human
gcugacagacagcccuc

SEQ ID NO: 2323688 - RNA, 14 nt, Human
gcugacagcugcuc

SEQ ID NO: 2323689 - RNA, 13 nt, Human
gcugacagcugcu

SEQ ID NO: 2323690 - RNA, 16 nt, Human
gcucuuucucugccag

SEQ ID NO: 2323691 - RNA, 14 nt, Human
gcucuuuccuccuu

SEQ ID NO: 2323692 - RNA, 17 nt, Human
gcucuuuccuccuucca

SEQ ID NO: 2323693 - RNA, 15 nt, Human
gcucuuuccuccuuc

SEQ ID NO: 2323694 - RNA, 15 nt, Human
gcucuuuccuugcuc

SEQ ID NO: 2323695 - RNA, 16 nt, Human
gcucuuuccuugcuca

SEQ ID NO: 2323696 - RNA, 18 nt, Human
gcucuuuccuugcucaac

SEQ ID NO: 2323697 - RNA, 17 nt, Human
gcucuuucuacucugaa

SEQ ID NO: 2323698 - RNA, 14 nt, Human
gcucuuucucugcc

SEQ ID NO: 2323699 - RNA, 15 nt, Human
gcucuuucucugcca

SEQ ID NO: 2323700 - RNA, 17 nt, Human
gcucuuucucugccagu

SEQ ID NO: 2323701 - RNA, 14 nt, Human
gcucuggaagagag

SEQ ID NO: 2323702 - RNA, 22 nt, Human
gcucuggaaaaugugacccaga

SEQ ID NO: 2323703 - RNA, 21 nt, Human
gcucuggaaaaugugacccag

SEQ ID NO: 2323704 - RNA, 19 nt, Human
gcucuggacagccccaccc

SEQ ID NO: 2323705 - RNA, 16 nt, Human
gcucuggacagcccca

SEQ ID NO: 2323706 - RNA, 14 nt, Human
gcucuggacaggca

SEQ ID NO: 2323707 - RNA, 13 nt, Human
gcucugcuggccu

SEQ ID NO: 2323708 - RNA, 22 nt, Human
gcucugcgugucaccugugcuu

SEQ ID NO: 2323709 - RNA, 21 nt, Human
gcucugcuggccuggccggca

SEQ ID NO: 2323710 - RNA, 21 nt, Human
gcucugcuugacaacaucuga

SEQ ID NO: 2323711 - RNA, 14 nt, Human
gcucugcuugacaa

SEQ ID NO: 2323712 - RNA, 15 nt, Human
gcucugcuggccugg

SEQ ID NO: 2323713 - RNA, 17 nt, Human
gcucugcuggccuggcc

SEQ ID NO: 2323714 - RNA, 18 nt, Human
gcucugcuggccuggccg

SEQ ID NO: 2323715 - RNA, 19 nt, Human
gcucugcuggccuggccgg

SEQ ID NO: 2323716 - RNA, 15 nt, Human
gcucuggacaggcau

SEQ ID NO: 2323717 - RNA, 16 nt, Human
gcucuggacaggcaug

SEQ ID NO: 2323718 - RNA, 21 nt, Human
gcucuggacaggcauguucuc

SEQ ID NO: 2323719 - RNA, 22 nt, Human
gcucuggacaggcauguucucu

SEQ ID NO: 2323720 - RNA, 19 nt, Human
gcucugcuccucuccccag

SEQ ID NO: 2323721 - RNA, 21 nt, Human
gcucugcuccucuccccagca

SEQ ID NO: 2323722 - RNA, 13 nt, Human
gcucugcugacag

SEQ ID NO: 2323723 - RNA, 14 nt, Human
gcucugcugacaga

SEQ ID NO: 2323724 - RNA, 18 nt, Human
gcucugcugacagacaca

SEQ ID NO: 2323725 - RNA, 19 nt, Human
gcucugcugacagacacag

SEQ ID NO: 2323726 - RNA, 20 nt, Human
gcucugcugacagacacagg

SEQ ID NO: 2323727 - RNA, 23 nt, Human
gcucugcugacagacacaggccc

SEQ ID NO: 2323728 - RNA, 13 nt, Human
gcucugcuccucu

SEQ ID NO: 2323729 - RNA, 14 nt, Human
gcucugcuccucuc

SEQ ID NO: 2323730 - RNA, 17 nt, Human
gcucugcgugucaccug

SEQ ID NO: 2323731 - RNA, 13 nt, Human
gcucucugcugua

SEQ ID NO: 2323732 - RNA, 21 nt, Human
gcucugcccuuguucccuagg

SEQ ID NO: 2323733 - RNA, 18 nt, Human
gcucugcccuuguucccu

SEQ ID NO: 2323734 - RNA, 13 nt, Human
gcucugccuccca

SEQ ID NO: 2323735 - RNA, 14 nt, Human
gcucugccucccau

SEQ ID NO: 2323736 - RNA, 15 nt, Human
gcucugccucccauc

SEQ ID NO: 2323737 - RNA, 22 nt, Human
gcucugccucccaucacccgcu

SEQ ID NO: 2323738 - RNA, 11 nt, Human
gcucucugcug

SEQ ID NO: 2323739 - RNA, 18 nt, Human
gcucucuggccuuuuccu

SEQ ID NO: 2323740 - RNA, 14 nt, Human
gcucugcccuuggu

SEQ ID NO: 2323741 - RNA, 23 nt, Human
gcucugcccuugguuaggcauug

SEQ ID NO: 2323742 - RNA, 11 nt, Human
gcucugccucc

SEQ ID NO: 2323743 - RNA, 20 nt, Human
gcucucuggccuucggccuc

SEQ ID NO: 2323744 - RNA, 19 nt, Human
gcucucuggccuucggccu

SEQ ID NO: 2323745 - RNA, 15 nt, Human
gcucucuggccuucg

SEQ ID NO: 2323746 - RNA, 14 nt, Human
gcucucuggccuuc

SEQ ID NO: 2323747 - RNA, 16 nt, Human
gcucuccuuucuuucu

SEQ ID NO: 2323748 - RNA, 22 nt, Human
gcucuccuuccuggagcccaga

SEQ ID NO: 2323749 - RNA, 11 nt, Human
gcucuccuucc

SEQ ID NO: 2323750 - RNA, 12 nt, Human
gcucuccuuccu

SEQ ID NO: 2323751 - RNA, 15 nt, Human
gcucucugcagccag

SEQ ID NO: 2323752 - RNA, 14 nt, Human
gcucucugcagcca

SEQ ID NO: 2323753 - RNA, 13 nt, Human
gcucucugcagcc

SEQ ID NO: 2323754 - RNA, 13 nt, Human
gcucucuccagga

SEQ ID NO: 2323755 - RNA, 21 nt, Human
gcucucggaacugcaugcugc

SEQ ID NO: 2323756 - RNA, 12 nt, Human
gcucucuccagg

SEQ ID NO: 2323757 - RNA, 19 nt, Human
gcucucucauugucugugu

SEQ ID NO: 2323758 - RNA, 19 nt, Human
gcucucggaacugcaugcu

SEQ ID NO: 2323759 - RNA, 19 nt, Human
gcucucggguugugugucu

SEQ ID NO: 2323760 - RNA, 22 nt, Human
gcucucugcagccagcccagcc

SEQ ID NO: 2323761 - RNA, 21 nt, Human
gcucucugcagccagcccagc

SEQ ID NO: 2323762 - RNA, 20 nt, Human
gcucucugcaucuacuccca

SEQ ID NO: 2323763 - RNA, 11 nt, Human
gcucucugcca

SEQ ID NO: 2323764 - RNA, 20 nt, Human
gcucucugcagccagcccag

SEQ ID NO: 2323765 - RNA, 19 nt, Human
gcucucugcagccagccca

SEQ ID NO: 2323766 - RNA, 18 nt, Human
gcucucugcagccagccc

SEQ ID NO: 2323767 - RNA, 17 nt, Human
gcucucugcagccagcc

SEQ ID NO: 2323768 - RNA, 11 nt, Human
gcucucuggcc

SEQ ID NO: 2323769 - RNA, 13 nt, Human
gcucucuggccuu

SEQ ID NO: 2323770 - RNA, 12 nt, Human
gcucucuggccu

SEQ ID NO: 2323771 - RNA, 19 nt, Human
gcucuccgaccagacaccu

SEQ ID NO: 2323772 - RNA, 19 nt, Human
gcucuccucagaagaaaga

SEQ ID NO: 2323773 - RNA, 24 nt, Human
gcucucccucuucucaagugccuu

SEQ ID NO: 2323774 - RNA, 15 nt, Human
gcucucccucuucuc

SEQ ID NO: 2323775 - RNA, 16 nt, Human
gcucucccucuucuca

SEQ ID NO: 2323776 - RNA, 21 nt, Human
gcucucccucuucucaagugc

SEQ ID NO: 2323777 - RNA, 23 nt, Human
gcucucccucuucucaagugccu

SEQ ID NO: 2323778 - RNA, 19 nt, Human
gcucuccucuugccacugc

SEQ ID NO: 2323779 - RNA, 22 nt, Human
gcucuccucuugccacugccuc

SEQ ID NO: 2323780 - RNA, 15 nt, Human
gcucuccucuugcca

SEQ ID NO: 2323781 - RNA, 23 nt, Human
gcucucccucuggcccugccuuc

SEQ ID NO: 2323782 - RNA, 14 nt, Human
gcucucccucuucu

SEQ ID NO: 2323783 - RNA, 21 nt, Human
gcucucccucuggcccugccu

SEQ ID NO: 2323784 - RNA, 20 nt, Human
gcucucccucuggcccugcc

SEQ ID NO: 2323785 - RNA, 19 nt, Human
gcucucccucuggcccugc

SEQ ID NO: 2323786 - RNA, 18 nt, Human
gcucucccucuggcccug

SEQ ID NO: 2323787 - RNA, 17 nt, Human
gcucucccucuggcccu

SEQ ID NO: 2323788 - RNA, 15 nt, Human
gcucucccucuggcc

SEQ ID NO: 2323789 - RNA, 14 nt, Human
gcucucccucuggc

SEQ ID NO: 2323790 - RNA, 11 nt, Human
gcucucccucu

SEQ ID NO: 2323791 - RNA, 19 nt, Human
gcucucccgguucuuccag

SEQ ID NO: 2323792 - RNA, 20 nt, Human
gcucucccgguucuuccagu

SEQ ID NO: 2323793 - RNA, 19 nt, Human
gcucuccccugcccugcug

SEQ ID NO: 2323794 - RNA, 18 nt, Human
gcucucccgguucuucca

SEQ ID NO: 2323795 - RNA, 13 nt, Human
gcucuccgaccag

SEQ ID NO: 2323796 - RNA, 17 nt, Human
gcucuccgaccagacac

SEQ ID NO: 2323797 - RNA, 15 nt, Human
gcuccuucuguccua

SEQ ID NO: 2323798 - RNA, 13 nt, Human
gcucccuggagcc

SEQ ID NO: 2323799 - RNA, 21 nt, Human
gcucccuucaucuccagggag

SEQ ID NO: 2323800 - RNA, 19 nt, Human
gcucccuucccaccucucu

SEQ ID NO: 2323801 - RNA, 13 nt, Human
gcuccuugggagg

SEQ ID NO: 2323802 - RNA, 16 nt, Human
gcuccuugggaggaag

SEQ ID NO: 2323803 - RNA, 18 nt, Human
gcucccuuccaccuguca

SEQ ID NO: 2323804 - RNA, 15 nt, Human
gcuccuugacuccuu

SEQ ID NO: 2323805 - RNA, 17 nt, Human
gcuccuugggaggaagc

SEQ ID NO: 2323806 - RNA, 18 nt, Human
gcuccuugggaggaagca

SEQ ID NO: 2323807 - RNA, 19 nt, Human
gcuccuugggaggaagcag

SEQ ID NO: 2323808 - RNA, 20 nt, Human
gcuccuugggaggaagcaga

SEQ ID NO: 2323809 - RNA, 21 nt, Human
gcuccuucuguccuacucugu

SEQ ID NO: 2323810 - RNA, 15 nt, Human
gcucccuucccaccu

SEQ ID NO: 2323811 - RNA, 21 nt, Human
gcucccuguaaccucuucaga

SEQ ID NO: 2323812 - RNA, 16 nt, Human
gcucccuucccaccuc

SEQ ID NO: 2323813 - RNA, 18 nt, Human
gcucccuucccaccucuc

SEQ ID NO: 2323814 - RNA, 17 nt, Human
gcucgagcaguccugcc

SEQ ID NO: 2323815 - RNA, 19 nt, Human
gcucgaaucucugugccuu

SEQ ID NO: 2323816 - RNA, 15 nt, Human
gcucgaaucucugug

SEQ ID NO: 2323817 - RNA, 16 nt, Human
gcucgaaucucugugc

SEQ ID NO: 2323818 - RNA, 16 nt, Human
gcucgagcaugccugg

SEQ ID NO: 2323819 - RNA, 14 nt, Human
gcuccuugggaggc

SEQ ID NO: 2323820 - RNA, 23 nt, Human
gcuccuugggaggaagcagaaua

SEQ ID NO: 2323821 - RNA, 21 nt, Human
gcuccuugggaggaagcagaa

SEQ ID NO: 2323822 - RNA, 22 nt, Human
gcuccuugggaggaagcagaau

SEQ ID NO: 2323823 - RNA, 22 nt, Human
gcuccuugggaggccccacugg

SEQ ID NO: 2323824 - RNA, 21 nt, Human
gcuccuugggaggccccacug

SEQ ID NO: 2323825 - RNA, 11 nt, Human
gcuccuugggc

SEQ ID NO: 2323826 - RNA, 14 nt, Human
gcuccuuuuucucc

SEQ ID NO: 2323827 - RNA, 16 nt, Human
gcuccuuuuucucccu

SEQ ID NO: 2323828 - RNA, 18 nt, Human
gcuccuuuuucucccucu

SEQ ID NO: 2323829 - RNA, 19 nt, Human
gcuccuuuuucucccucug

SEQ ID NO: 2323830 - RNA, 20 nt, Human
gcuccuuuuucucccucugg

SEQ ID NO: 2323831 - RNA, 14 nt, Human
gcucgaaaacaauu

SEQ ID NO: 2323832 - RNA, 20 nt, Human
gcucuccaccucagccuugg

SEQ ID NO: 2323833 - RNA, 13 nt, Human
gcucuccagcucc

SEQ ID NO: 2323834 - RNA, 21 nt, Human
gcucuccaccucagccuugga

SEQ ID NO: 2323835 - RNA, 20 nt, Human
gcucuccagucaggaggcau

SEQ ID NO: 2323836 - RNA, 15 nt, Human
gcucuccagcuccaa

SEQ ID NO: 2323837 - RNA, 19 nt, Human
gcucuccagucaggaggca

SEQ ID NO: 2323838 - RNA, 16 nt, Human
gcucuccccugcccug

SEQ ID NO: 2323839 - RNA, 17 nt, Human
gcucucccauuuccuga

SEQ ID NO: 2323840 - RNA, 19 nt, Human
gcucuccaccucagccuug

SEQ ID NO: 2323841 - RNA, 18 nt, Human
gcucuccaccucagccuu

SEQ ID NO: 2323842 - RNA, 17 nt, Human
gcucuccaccucagccu

SEQ ID NO: 2323843 - RNA, 16 nt, Human
gcucuccaccucagcc

SEQ ID NO: 2323844 - RNA, 15 nt, Human
gcucuccaccucagc

SEQ ID NO: 2323845 - RNA, 14 nt, Human
gcucuccaccucag

SEQ ID NO: 2323846 - RNA, 13 nt, Human
gcucuccaccuca

SEQ ID NO: 2323847 - RNA, 20 nt, Human
gcucuccaagugccagaggu

SEQ ID NO: 2323848 - RNA, 21 nt, Human
gcucgagcaguccugccucag

SEQ ID NO: 2323849 - RNA, 20 nt, Human
gcucgagcaguccugccuca

SEQ ID NO: 2323850 - RNA, 17 nt, Human
gcucgagcaugccugga

SEQ ID NO: 2323851 - RNA, 19 nt, Human
gcuccaaacccucgaggcg

SEQ ID NO: 2323852 - RNA, 16 nt, Human
gcuccaaaugcagcuu

SEQ ID NO: 2323853 - RNA, 16 nt, Human
gcuccaagaccuguug

SEQ ID NO: 2323854 - RNA, 18 nt, Human
gcuccaagaccuguuggu

SEQ ID NO: 2323855 - RNA, 22 nt, Human
gcuccaagaccuguugguucca

SEQ ID NO: 2323856 - RNA, 21 nt, Human
gcuccaaccugcaaagaucug

SEQ ID NO: 2323857 - RNA, 18 nt, Human
gcuccaaccugcaaagau

SEQ ID NO: 2323858 - RNA, 15 nt, Human
gcuccaaccugcaaa

SEQ ID NO: 2323859 - RNA, 13 nt, Human
gcuccaagcuccc

SEQ ID NO: 2323860 - RNA, 16 nt, Human
gcuccaagccccaucu

SEQ ID NO: 2323861 - RNA, 19 nt, Human
gcuccaagccccaucuucu

SEQ ID NO: 2323862 - RNA, 14 nt, Human
gcuccaagcuccca

SEQ ID NO: 2323863 - RNA, 15 nt, Human
gcuccaagcucccag

SEQ ID NO: 2323864 - RNA, 20 nt, Human
gcuccagcugcucugucuuc

SEQ ID NO: 2323865 - RNA, 19 nt, Human
gcuccacacccucucccag

SEQ ID NO: 2323866 - RNA, 16 nt, Human
gcuccacacccucucc

SEQ ID NO: 2323867 - RNA, 23 nt, Human
gcuccagcuggccgggagccuga

SEQ ID NO: 2323868 - RNA, 17 nt, Human
gcuccagcuggccggga

SEQ ID NO: 2323869 - RNA, 21 nt, Human
gcuccaagcucccaggcauuc

SEQ ID NO: 2323870 - RNA, 23 nt, Human
gcuccaaggggaaucagaacuca

SEQ ID NO: 2323871 - RNA, 21 nt, Human
gcuccaaggggaaucagaacu

SEQ ID NO: 2323872 - RNA, 20 nt, Human
gcuccaaggggaaucagaac

SEQ ID NO: 2323873 - RNA, 16 nt, Human
gcuccaagcucccagg

SEQ ID NO: 2323874 - RNA, 17 nt, Human
gcuccaagcucccaggc

SEQ ID NO: 2323875 - RNA, 18 nt, Human
gcuccaagcucccaggca

SEQ ID NO: 2323876 - RNA, 19 nt, Human
gcuccaagcucccaggcau

SEQ ID NO: 2323877 - RNA, 11 nt, Human
gcuccagcugu

SEQ ID NO: 2323878 - RNA, 13 nt, Human
gcuccaggcuccu

SEQ ID NO: 2323879 - RNA, 16 nt, Human
gcuccaggcuccuuua

SEQ ID NO: 2323880 - RNA, 23 nt, Human
gcuccaggcuccuuuagcgccca

SEQ ID NO: 2323881 - RNA, 20 nt, Human
gcuccagcuguucagcuggu

SEQ ID NO: 2323882 - RNA, 21 nt, Human
gcuccagcugcucugucuucu

SEQ ID NO: 2323883 - RNA, 14 nt, Human
gcuccaucuccacu

SEQ ID NO: 2323884 - RNA, 18 nt, Human
gcuccaugugcccccucu

SEQ ID NO: 2323885 - RNA, 20 nt, Human
gcuccaugugcccccucuac

SEQ ID NO: 2323886 - RNA, 20 nt, Human
gcucccuaccaccuccccag

SEQ ID NO: 2323887 - RNA, 16 nt, Human
gcucccuaccaccucc

SEQ ID NO: 2323888 - RNA, 20 nt, Human
gcuccauuuuuagugaaaua

SEQ ID NO: 2323889 - RNA, 17 nt, Human
gcucccuccccugcccu

SEQ ID NO: 2323890 - RNA, 16 nt, Human
gcucccucccaucccu

SEQ ID NO: 2323891 - RNA, 20 nt, Human
gcucccuccccugcccuggu

SEQ ID NO: 2323892 - RNA, 19 nt, Human
gcucccuccccugcccugg

SEQ ID NO: 2323893 - RNA, 23 nt, Human
gcucccuccccugcccuggucca

SEQ ID NO: 2323894 - RNA, 23 nt, Human
gcucccucugccugaaccuucca

SEQ ID NO: 2323895 - RNA, 13 nt, Human
gcucccucugccu

SEQ ID NO: 2323896 - RNA, 17 nt, Human
gcucccucuuggucuuc

SEQ ID NO: 2323897 - RNA, 19 nt, Human
gcucccucuuggucuuccc

SEQ ID NO: 2323898 - RNA, 24 nt, Human
gcucccugaagccagccuucuucc

SEQ ID NO: 2323899 - RNA, 16 nt, Human
gcucccugacugggag

SEQ ID NO: 2323900 - RNA, 18 nt, Human
gcucccugacugggaguu

SEQ ID NO: 2323901 - RNA, 12 nt, Human
gcucccugaagc

SEQ ID NO: 2323902 - RNA, 13 nt, Human
gcucccugaagcc

SEQ ID NO: 2323903 - RNA, 14 nt, Human
gcucccugaagcca

SEQ ID NO: 2323904 - RNA, 15 nt, Human
gcucccugaagccag

SEQ ID NO: 2323905 - RNA, 16 nt, Human
gcucccugaagccagc

SEQ ID NO: 2323906 - RNA, 17 nt, Human
gcucccugaagccagcc

SEQ ID NO: 2323907 - RNA, 18 nt, Human
gcucccugaagccagccu

SEQ ID NO: 2323908 - RNA, 20 nt, Human
gcucccugaagccagccuuc

SEQ ID NO: 2323909 - RNA, 11 nt, Human
gcucagccugg

SEQ ID NO: 2323910 - RNA, 16 nt, Human
gcucagcccuggaggu

SEQ ID NO: 2323911 - RNA, 20 nt, Human
gcucagcccuggaggugcca

SEQ ID NO: 2323912 - RNA, 14 nt, Human
gcucagccagcacu

SEQ ID NO: 2323913 - RNA, 14 nt, Human
gcucagcccuggag

SEQ ID NO: 2323914 - RNA, 15 nt, Human
gcucagcccuggagg

SEQ ID NO: 2323915 - RNA, 11 nt, Human
gcucagcagcu

SEQ ID NO: 2323916 - RNA, 13 nt, Human
gcucagccagcac

SEQ ID NO: 2323917 - RNA, 12 nt, Human
gcucagccagca

SEQ ID NO: 2323918 - RNA, 23 nt, Human
gcucagaggguuguucuccuaga

SEQ ID NO: 2323919 - RNA, 20 nt, Human
gcucaccccccacacucacu

SEQ ID NO: 2323920 - RNA, 23 nt, Human
gcucagcaaaagaugcuucucac

SEQ ID NO: 2323921 - RNA, 22 nt, Human
gcucagcaaaagaugcuucuca

SEQ ID NO: 2323922 - RNA, 20 nt, Human
gcucagcaaaagaugcuucu

SEQ ID NO: 2323923 - RNA, 17 nt, Human
gcucagcaaaagaugcu

SEQ ID NO: 2323924 - RNA, 20 nt, Human
gcucaccagccccagugccc

SEQ ID NO: 2323925 - RNA, 23 nt, Human
gcucaccagccccagugcccaca

SEQ ID NO: 2323926 - RNA, 18 nt, Human
gcucaccagccccagugc

SEQ ID NO: 2323927 - RNA, 17 nt, Human
gcuaugagcuggggaug

SEQ ID NO: 2323928 - RNA, 19 nt, Human
gcucaccagccccagugcc

SEQ ID NO: 2323929 - RNA, 20 nt, Human
gcucacccaauaaacauuaa

SEQ ID NO: 2323930 - RNA, 18 nt, Human
gcucacccagccccaggg

SEQ ID NO: 2323931 - RNA, 16 nt, Human
gcucacccccuucucc

SEQ ID NO: 2323932 - RNA, 17 nt, Human
gcucaccccccacacuc

SEQ ID NO: 2323933 - RNA, 19 nt, Human
gcucaccccccacacucac

SEQ ID NO: 2323934 - RNA, 16 nt, Human
gcucaccccccacacu

SEQ ID NO: 2323935 - RNA, 20 nt, Human
gcucacccccuucuccaucc

SEQ ID NO: 2323936 - RNA, 18 nt, Human
gcucacccccuucuccau

SEQ ID NO: 2323937 - RNA, 15 nt, Human
gcucaccccuggagg

SEQ ID NO: 2323938 - RNA, 22 nt, Human
gcucacccccuucuccauccac

SEQ ID NO: 2323939 - RNA, 16 nt, Human
gcucauauuccugcag

SEQ ID NO: 2323940 - RNA, 19 nt, Human
gcucauauggggcugggag

SEQ ID NO: 2323941 - RNA, 16 nt, Human
gcuccaaacccucgag

SEQ ID NO: 2323942 - RNA, 18 nt, Human
gcuccaaacccucgaggc

SEQ ID NO: 2323943 - RNA, 17 nt, Human
gcuccaaacccucgagg

SEQ ID NO: 2323944 - RNA, 16 nt, Human
gcucaguucagaauca

SEQ ID NO: 2323945 - RNA, 22 nt, Human
gcucagugucuggcugcagagc

SEQ ID NO: 2323946 - RNA, 18 nt, Human
gcucauaacggaucagaa

SEQ ID NO: 2323947 - RNA, 23 nt, Human
gcucaguuguagaauguauugua

SEQ ID NO: 2323948 - RNA, 20 nt, Human
gcucauacaggaaugaagcc

SEQ ID NO: 2323949 - RNA, 17 nt, Human
gcucaguucagaaucac

SEQ ID NO: 2323950 - RNA, 16 nt, Human
gcucaguucuagucuc

SEQ ID NO: 2323951 - RNA, 12 nt, Human
gcucaguuguag

SEQ ID NO: 2323952 - RNA, 17 nt, Human
gcucaguuguagaaugu

SEQ ID NO: 2323953 - RNA, 20 nt, Human
gcucagucucaggagcaugg

SEQ ID NO: 2323954 - RNA, 17 nt, Human
gcucagucucaggagca

SEQ ID NO: 2323955 - RNA, 14 nt, Human
gcucagucucagga

SEQ ID NO: 2323956 - RNA, 23 nt, Human
gcucagucccaucagagagcgag

SEQ ID NO: 2323957 - RNA, 21 nt, Human
gcucagucucaggagcauggg

SEQ ID NO: 2323958 - RNA, 14 nt, Human
gcucagucucccuu

SEQ ID NO: 2323959 - RNA, 16 nt, Human
gcucagucucccuuuc

SEQ ID NO: 2323960 - RNA, 19 nt, Human
gcucagucucccuuucccu

SEQ ID NO: 2323961 - RNA, 12 nt, Human
gcucagucccau

SEQ ID NO: 2323962 - RNA, 21 nt, Human
gcucaguaauuugaggacaac

SEQ ID NO: 2323963 - RNA, 16 nt, Human
gcucaguaauuugagg

SEQ ID NO: 2323964 - RNA, 15 nt, Human
gcucagcgccagccu

SEQ ID NO: 2323965 - RNA, 19 nt, Human
gcucaggugucccugcacu

SEQ ID NO: 2323966 - RNA, 18 nt, Human
gcucagccuggugggccu

SEQ ID NO: 2323967 - RNA, 17 nt, Human
gcucagccuggugggcc

SEQ ID NO: 2323968 - RNA, 15 nt, Human
gcucagccugguggg

SEQ ID NO: 2323969 - RNA, 14 nt, Human
gcucagccuggugg

SEQ ID NO: 2323970 - RNA, 15 nt, Human
gcucagcggggacag

SEQ ID NO: 2323971 - RNA, 20 nt, Human
gcucagcggggacagcuccu

SEQ ID NO: 2323972 - RNA, 21 nt, Human
gcucagcggggacagcuccuu

SEQ ID NO: 2323973 - RNA, 22 nt, Human
gcucagcggggacagcuccuuc

SEQ ID NO: 2323974 - RNA, 20 nt, Human
gcucagccuggugggccucc

SEQ ID NO: 2323975 - RNA, 19 nt, Human
gcucagccuggugggccuc

SEQ ID NO: 2323976 - RNA, 18 nt, Human
gcucaggugucccugcac

SEQ ID NO: 2323977 - RNA, 14 nt, Human
gcuagcaucccuga

SEQ ID NO: 2323978 - RNA, 15 nt, Human
gcuagcgcugccgca

SEQ ID NO: 2323979 - RNA, 14 nt, Human
gcuagcgcugccgc

SEQ ID NO: 2323980 - RNA, 23 nt, Human
gcuagcgcugccgcaccccagag

SEQ ID NO: 2323981 - RNA, 22 nt, Human
gcuagcgcugccgcaccccaga

SEQ ID NO: 2323982 - RNA, 21 nt, Human
gcuagcgcugccgcaccccag

SEQ ID NO: 2323983 - RNA, 20 nt, Human
gcuagcgcugccgcacccca

SEQ ID NO: 2323984 - RNA, 16 nt, Human
gcuagaguccucacuc

SEQ ID NO: 2323985 - RNA, 13 nt, Human
gcuagaguccuca

SEQ ID NO: 2323986 - RNA, 14 nt, Human
gcuacucagaagcc

SEQ ID NO: 2323987 - RNA, 13 nt, Human
gcuagaggccuga

SEQ ID NO: 2323988 - RNA, 18 nt, Human
gcuagaguccucacuccc

SEQ ID NO: 2323989 - RNA, 16 nt, Human
gcuagaggccugagga

SEQ ID NO: 2323990 - RNA, 16 nt, Human
gcuagcuccccuccuc

SEQ ID NO: 2323991 - RNA, 18 nt, Human
gcuagcuccccuccucuc

SEQ ID NO: 2323992 - RNA, 21 nt, Human
gcuagcuccccuccucucccc

SEQ ID NO: 2323993 - RNA, 22 nt, Human
gcuagcuccccuccucuccccu

SEQ ID NO: 2323994 - RNA, 16 nt, Human
gcuaucucccccagcc

SEQ ID NO: 2323995 - RNA, 17 nt, Human
gcuaucucccccagccc

SEQ ID NO: 2323996 - RNA, 18 nt, Human
gcuaucucccccagcccc

SEQ ID NO: 2323997 - RNA, 12 nt, Human
gcuaugaauuuu

SEQ ID NO: 2323998 - RNA, 14 nt, Human
gcuaucuuaauuuu

SEQ ID NO: 2323999 - RNA, 15 nt, Human
gcuaucuuaauuuug

SEQ ID NO: 2324000 - RNA, 16 nt, Human
gcuaucuuaauuuugg

SEQ ID NO: 2324001 - RNA, 20 nt, Human
gcuaucucugugugcacaaa

SEQ ID NO: 2324002 - RNA, 17 nt, Human
gcuaucuggucaaccuc

SEQ ID NO: 2324003 - RNA, 12 nt, Human
gcuaucuuaauu

SEQ ID NO: 2324004 - RNA, 16 nt, Human
gcuaucucugugugca

SEQ ID NO: 2324005 - RNA, 13 nt, Human
gcuaucucugugu

SEQ ID NO: 2324006 - RNA, 23 nt, Human
gcuaucucucagugaacugugag

SEQ ID NO: 2324007 - RNA, 16 nt, Human
gcuagcugcagagcca

SEQ ID NO: 2324008 - RNA, 12 nt, Human
gcuagcuucugc

SEQ ID NO: 2324009 - RNA, 23 nt, Human
gcuaucucccccagccccauccu

SEQ ID NO: 2324010 - RNA, 19 nt, Human
gcuaucucccccagcccca

SEQ ID NO: 2324011 - RNA, 20 nt, Human
gcuaucucccccagccccau

SEQ ID NO: 2324012 - RNA, 21 nt, Human
gcuaucucccccagccccauc

SEQ ID NO: 2324013 - RNA, 22 nt, Human
gcuaucucccccagccccaucc

SEQ ID NO: 2324014 - RNA, 16 nt, Human
gcuacccgcagaguuc

SEQ ID NO: 2324015 - RNA, 20 nt, Human
gcuaaggacauuucccaggg

SEQ ID NO: 2324016 - RNA, 17 nt, Human
gcuaaggacauuuccca

SEQ ID NO: 2324017 - RNA, 18 nt, Human
gcuaagccccagcaagca

SEQ ID NO: 2324018 - RNA, 20 nt, Human
gcuaagccccagcaagcaau

SEQ ID NO: 2324019 - RNA, 19 nt, Human
gcuaagcuaggaaugaaau

SEQ ID NO: 2324020 - RNA, 15 nt, Human
gcuaagcuaggaaug

SEQ ID NO: 2324021 - RNA, 14 nt, Human
gcuacccgggaagg

SEQ ID NO: 2324022 - RNA, 15 nt, Human
gcuacccgggaaggg

SEQ ID NO: 2324023 - RNA, 19 nt, Human
gcuaagaguguccuaggag

SEQ ID NO: 2324024 - RNA, 17 nt, Human
gcuaagccccagcaagc

SEQ ID NO: 2324025 - RNA, 12 nt, Human
gcuaagaugcuc

SEQ ID NO: 2324026 - RNA, 18 nt, Human
gcuaagauuaucugggga

SEQ ID NO: 2324027 - RNA, 14 nt, Human
gcuaagcauuccaa

SEQ ID NO: 2324028 - RNA, 23 nt, Human
gcuaagagggagggagggcucca

SEQ ID NO: 2324029 - RNA, 17 nt, Human
gcuaagcaaaaugugau

SEQ ID NO: 2324030 - RNA, 22 nt, Human
gcuacccgcagaguucucagaa

SEQ ID NO: 2324031 - RNA, 13 nt, Human
gcuacccucccug

SEQ ID NO: 2324032 - RNA, 12 nt, Human
gcuacgccugca

SEQ ID NO: 2324033 - RNA, 14 nt, Human
gcuacccucccugc

SEQ ID NO: 2324034 - RNA, 21 nt, Human
gcuacccgggaagggggcugg

SEQ ID NO: 2324035 - RNA, 18 nt, Human
gcuacuaaugauguuuuc

SEQ ID NO: 2324036 - RNA, 16 nt, Human
gcuacuaaugauguuu

SEQ ID NO: 2324037 - RNA, 14 nt, Human
gcuacuaaugaugu

SEQ ID NO: 2324038 - RNA, 15 nt, Human
gcuacgugugauuuu

SEQ ID NO: 2324039 - RNA, 18 nt, Human
gcuacguacaugugaggc

SEQ ID NO: 2324040 - RNA, 17 nt, Human
gcuacgugugauuuuuc

SEQ ID NO: 2324041 - RNA, 19 nt, Human
gcuacgugugauuuuucug

SEQ ID NO: 2324042 - RNA, 20 nt, Human
gcuacgugugauuuuucugg

SEQ ID NO: 2324043 - RNA, 19 nt, Human
gcuacguuccuauugucau

SEQ ID NO: 2324044 - RNA, 21 nt, Human
gcuacucaagaggcugaggca

SEQ ID NO: 2324045 - RNA, 20 nt, Human
gcuacucaagaggcugaggc

SEQ ID NO: 2324046 - RNA, 17 nt, Human
gcuacucaagaggcuga

SEQ ID NO: 2324047 - RNA, 16 nt, Human
gcuacucaagaggcug

SEQ ID NO: 2324048 - RNA, 18 nt, Human
gcuagagguucaaagaua

SEQ ID NO: 2324049 - RNA, 21 nt, Human
gcuagagguucaaagauauuu

SEQ ID NO: 2324050 - RNA, 19 nt, Human
gcuagagguucaaagauau

SEQ ID NO: 2324051 - RNA, 16 nt, Human
gcuaacaccagacaga

SEQ ID NO: 2324052 - RNA, 17 nt, Human
gcuaacacuggccccua

SEQ ID NO: 2324053 - RNA, 16 nt, Human
gcuaacacuggccccu

SEQ ID NO: 2324054 - RNA, 15 nt, Human
gcuaacacuggcccc

SEQ ID NO: 2324055 - RNA, 20 nt, Human
gcuaacacacagcucccaua

SEQ ID NO: 2324056 - RNA, 21 nt, Human
gcuaagagggagggagggcuc

SEQ ID NO: 2324057 - RNA, 22 nt, Human
gcuaagagggagggagggcucc

SEQ ID NO: 2324058 - RNA, 17 nt, Human
gcuaaauguaacagucu

SEQ ID NO: 2324059 - RNA, 14 nt, Human
gcuaaauguaacag

SEQ ID NO: 2324060 - RNA, 22 nt, Human
gcuaaauuacucaggaagaaca

SEQ ID NO: 2324061 - RNA, 18 nt, Human
gcuaaauuacaauuguca

SEQ ID NO: 2324062 - RNA, 16 nt, Human
gcuaaaugugaaugau

SEQ ID NO: 2324063 - RNA, 23 nt, Human
gcuaaauggucgcccaggagaca

SEQ ID NO: 2324064 - RNA, 19 nt, Human
gcuaaauggucgcccagga

SEQ ID NO: 2324065 - RNA, 19 nt, Human
gcuaaauccuuuacuguua

SEQ ID NO: 2324066 - RNA, 21 nt, Human
gcuaaauaaaauuuguugcau

SEQ ID NO: 2324067 - RNA, 13 nt, Human
gcuaaaugugaau

SEQ ID NO: 2324068 - RNA, 19 nt, Human
gcuaaauaaaauuuguugc

SEQ ID NO: 2324069 - RNA, 20 nt, Human
gcuaaauaaaauuuguugca

SEQ ID NO: 2324070 - RNA, 16 nt, Human
gcuaaagcccagagac

SEQ ID NO: 2324071 - RNA, 19 nt, Human
gcgugaucaaagccacacu

SEQ ID NO: 2324072 - RNA, 15 nt, Human
gcgugaucaaagcca

SEQ ID NO: 2324073 - RNA, 18 nt, Human
gcgugaggaugggaagga

SEQ ID NO: 2324074 - RNA, 14 nt, Human
gcgugacucaccca

SEQ ID NO: 2324075 - RNA, 13 nt, Human
gcgugacucaccc

SEQ ID NO: 2324076 - RNA, 16 nt, Human
gcgugacucacccaag

SEQ ID NO: 2324077 - RNA, 16 nt, Human
gcgugaaggccgagaa

SEQ ID NO: 2324078 - RNA, 13 nt, Human
gcgugacaauaaa

SEQ ID NO: 2324079 - RNA, 23 nt, Human
gcgugagccacugcaccgggcca

SEQ ID NO: 2324080 - RNA, 15 nt, Human
gcgugaaggccgaga

SEQ ID NO: 2324081 - RNA, 13 nt, Human
gcgugaaggccga

SEQ ID NO: 2324082 - RNA, 23 nt, Human
gcgugaacccgggaggcggagcu

SEQ ID NO: 2324083 - RNA, 23 nt, Human
gcgugaaacacaccaggcugugg

SEQ ID NO: 2324084 - RNA, 20 nt, Human
gcgugaaacacaccaggcug

SEQ ID NO: 2324085 - RNA, 19 nt, Human
gcgugaaacacaccaggcu

SEQ ID NO: 2324086 - RNA, 12 nt, Human
gcgugaaacaca

SEQ ID NO: 2324087 - RNA, 11 nt, Human
gcgugaaacac

SEQ ID NO: 2324088 - RNA, 21 nt, Human
gcgucuuccugaguggugcca

SEQ ID NO: 2324089 - RNA, 13 nt, Human
gcgucuuccugag

SEQ ID NO: 2324090 - RNA, 14 nt, Human
gcgucuuccugagu

SEQ ID NO: 2324091 - RNA, 18 nt, Human
gcgugagccacugcaccg

SEQ ID NO: 2324092 - RNA, 20 nt, Human
gcgucagccuccagccucug

SEQ ID NO: 2324093 - RNA, 12 nt, Human
gcgucuuccuga

SEQ ID NO: 2324094 - RNA, 19 nt, Human
gcgucccagucucuggcag

SEQ ID NO: 2324095 - RNA, 14 nt, Human
gcgucccccugccg

SEQ ID NO: 2324096 - RNA, 18 nt, Human
gcgucccccugccggccg

SEQ ID NO: 2324097 - RNA, 13 nt, Human
gcguaugucuguu

SEQ ID NO: 2324098 - RNA, 11 nt, Human
gcgucagccuc

SEQ ID NO: 2324099 - RNA, 21 nt, Human
gcguaugucuguuaccauguc

SEQ ID NO: 2324100 - RNA, 12 nt, Human
gcgucagccucc

SEQ ID NO: 2324101 - RNA, 15 nt, Human
gcgucagccuccagc

SEQ ID NO: 2324102 - RNA, 16 nt, Human
gcgucagccuccagcc

SEQ ID NO: 2324103 - RNA, 17 nt, Human
gcgucagccuccagccu

SEQ ID NO: 2324104 - RNA, 18 nt, Human
gcgucagccuccagccuc

SEQ ID NO: 2324105 - RNA, 21 nt, Human
gcgucagccuccagccucugu

SEQ ID NO: 2324106 - RNA, 16 nt, Human
gcgucaguauuuuccc

SEQ ID NO: 2324107 - RNA, 14 nt, Human
gcgggcugggcagc

SEQ ID NO: 2324108 - RNA, 14 nt, Human
gcgggcucaaggaa

SEQ ID NO: 2324109 - RNA, 16 nt, Human
gcgggcugggcagcug

SEQ ID NO: 2324110 - RNA, 18 nt, Human
gcgguccacccaggagcc

SEQ ID NO: 2324111 - RNA, 19 nt, Human
gcgguccacccaggagccc

SEQ ID NO: 2324112 - RNA, 12 nt, Human
gcggggacagcu

SEQ ID NO: 2324113 - RNA, 15 nt, Human
gcgggcuuccuccug

SEQ ID NO: 2324114 - RNA, 13 nt, Human
gcggggacagcuc

SEQ ID NO: 2324115 - RNA, 16 nt, Human
gcgguccacccaggag

SEQ ID NO: 2324116 - RNA, 24 nt, Human
gccugugaggugcagagugcccag

SEQ ID NO: 2324117 - RNA, 23 nt, Human
gccugugaggugcagagugccca

SEQ ID NO: 2324118 - RNA, 17 nt, Human
gccugugaggugcagag

SEQ ID NO: 2324119 - RNA, 18 nt, Human
gccugugaggcaggggcg

SEQ ID NO: 2324120 - RNA, 14 nt, Human
gccugugaggcagg

SEQ ID NO: 2324121 - RNA, 12 nt, Human
gccugugcagug

SEQ ID NO: 2324122 - RNA, 19 nt, Human
gccugugccacccaccagg

SEQ ID NO: 2324123 - RNA, 19 nt, Human
gccugugcauguaugucuu

SEQ ID NO: 2324124 - RNA, 17 nt, Human
gccugugaacugaacuc

SEQ ID NO: 2324125 - RNA, 23 nt, Human
gccugugagcuaggaauuguguu

SEQ ID NO: 2324126 - RNA, 17 nt, Human
gcccuggccugcugggc

SEQ ID NO: 2324127 - RNA, 16 nt, Human
gcccuggccugcuggg

SEQ ID NO: 2324128 - RNA, 15 nt, Human
gcccuggccugcugg

SEQ ID NO: 2324129 - RNA, 14 nt, Human
gcccuggccugcug

SEQ ID NO: 2324130 - RNA, 13 nt, Human
gcccuggccugcu

SEQ ID NO: 2324131 - RNA, 12 nt, Human
gcccuggccugc

SEQ ID NO: 2324132 - RNA, 18 nt, Human
gcccuggcccugaggugu

SEQ ID NO: 2324133 - RNA, 19 nt, Human
gcccuggccuccccugcca

SEQ ID NO: 2324134 - RNA, 20 nt, Human
gcccuggccuccccugccac

SEQ ID NO: 2324135 - RNA, 21 nt, Human
gcccuggccuccccugccacc

SEQ ID NO: 2324136 - RNA, 24 nt, Human
gcccuggccuccccugccaccagg

SEQ ID NO: 2324137 - RNA, 15 nt, Human
gcccuggcucccaca

SEQ ID NO: 2324138 - RNA, 19 nt, Human
gcccuggcucccacaggcc

SEQ ID NO: 2324139 - RNA, 20 nt, Human
gcccuggcucccacaggccc

SEQ ID NO: 2324140 - RNA, 14 nt, Human
gcccuggcucugca

SEQ ID NO: 2324141 - RNA, 12 nt, Human
gcccuggcucug

SEQ ID NO: 2324142 - RNA, 10 nt, Human
gcccuggcug

SEQ ID NO: 2324143 - RNA, 12 nt, Human
gcccuggcagga

SEQ ID NO: 2324144 - RNA, 19 nt, Human
gcccuggcaggaugacccu

SEQ ID NO: 2324145 - RNA, 15 nt, Human
gcccuggccagaggc

SEQ ID NO: 2324146 - RNA, 14 nt, Human
gcccuggccagagg

SEQ ID NO: 2324147 - RNA, 13 nt, Human
gcccuggccagag

SEQ ID NO: 2324148 - RNA, 16 nt, Human
gcccuggccagaggcu

SEQ ID NO: 2324149 - RNA, 12 nt, Human
gcccuggcccug

SEQ ID NO: 2324150 - RNA, 13 nt, Human
gcccuggcccuga

SEQ ID NO: 2324151 - RNA, 17 nt, Human
gcccuggcccugaggug

SEQ ID NO: 2324152 - RNA, 12 nt, Human
gcccuggccucc

SEQ ID NO: 2324153 - RNA, 14 nt, Human
gcccuggccucccc

SEQ ID NO: 2324154 - RNA, 16 nt, Human
gcccuggccuccccug

SEQ ID NO: 2324155 - RNA, 17 nt, Human
gcccuggccuccccugc

SEQ ID NO: 2324156 - RNA, 14 nt, Human
gcccugggaggcag

SEQ ID NO: 2324157 - RNA, 11 nt, Human
gcccugggagg

SEQ ID NO: 2324158 - RNA, 17 nt, Human
gcccuggcugcugcccc

SEQ ID NO: 2324159 - RNA, 19 nt, Human
gcccuggcugcugccccca

SEQ ID NO: 2324160 - RNA, 22 nt, Human
gcccuggcugcugcccccaccc

SEQ ID NO: 2324161 - RNA, 13 nt, Human
gcccuggcugaag

SEQ ID NO: 2324162 - RNA, 14 nt, Human
gcccuggcugaagg

SEQ ID NO: 2324163 - RNA, 15 nt, Human
gcccuggcugaagga

SEQ ID NO: 2324164 - RNA, 16 nt, Human
gcccuggcugaaggac

SEQ ID NO: 2324165 - RNA, 17 nt, Human
gcccuggcugaaggacu

SEQ ID NO: 2324166 - RNA, 18 nt, Human
gcccuggcugaaggacug

SEQ ID NO: 2324167 - RNA, 19 nt, Human
gcccuggcugaaggacugu

SEQ ID NO: 2324168 - RNA, 20 nt, Human
gcccuggcugaaggacugug

SEQ ID NO: 2324169 - RNA, 21 nt, Human
gcccuggcugaaggacuguga

SEQ ID NO: 2324170 - RNA, 12 nt, Human
gcccuggcugac

SEQ ID NO: 2324171 - RNA, 11 nt, Human
gcccuggcugc

SEQ ID NO: 2324172 - RNA, 12 nt, Human
gcccuggcugcu

SEQ ID NO: 2324173 - RNA, 14 nt, Human
gcccuggcugcugc

SEQ ID NO: 2324174 - RNA, 15 nt, Human
gcccuggcugcugcc

SEQ ID NO: 2324175 - RNA, 16 nt, Human
gcccuggcugcugccc

SEQ ID NO: 2324176 - RNA, 13 nt, Human
gcccugggaggcu

SEQ ID NO: 2324177 - RNA, 14 nt, Human
gcccugggaggcuc

SEQ ID NO: 2324178 - RNA, 15 nt, Human
gcccugggaggcucu

SEQ ID NO: 2324179 - RNA, 16 nt, Human
gcccugggaggcucug

SEQ ID NO: 2324180 - RNA, 17 nt, Human
gcccugggaucacugug

SEQ ID NO: 2324181 - RNA, 16 nt, Human
gcccugggaggcagug

SEQ ID NO: 2324182 - RNA, 23 nt, Human
gcccugggaggcucuggagccca

SEQ ID NO: 2324183 - RNA, 19 nt, Human
gcccugggccccaccaccu

SEQ ID NO: 2324184 - RNA, 18 nt, Human
gcccugggccccaccacc

SEQ ID NO: 2324185 - RNA, 15 nt, Human
gcccugggccccacc

SEQ ID NO: 2324186 - RNA, 17 nt, Human
gcccugggccacacuga

SEQ ID NO: 2324187 - RNA, 22 nt, Human
gcccugggccccaccaccuagg

SEQ ID NO: 2324188 - RNA, 20 nt, Human
gcccugggccccaccaccua

SEQ ID NO: 2324189 - RNA, 15 nt, Human
gcccugggcucggag

SEQ ID NO: 2324190 - RNA, 16 nt, Human
gcccugggcucggagg

SEQ ID NO: 2324191 - RNA, 17 nt, Human
gcccugggcucggaggc

SEQ ID NO: 2324192 - RNA, 19 nt, Human
gcccugggcucggaggcug

SEQ ID NO: 2324193 - RNA, 21 nt, Human
gcccugggcucggaggcugcc

SEQ ID NO: 2324194 - RNA, 17 nt, Human
gcccugggaggcucugg

SEQ ID NO: 2324195 - RNA, 18 nt, Human
gcccugggaggcucugga

SEQ ID NO: 2324196 - RNA, 19 nt, Human
gcccugggaggcucuggag

SEQ ID NO: 2324197 - RNA, 21 nt, Human
gcccugggaggcucuggagcc

SEQ ID NO: 2324198 - RNA, 14 nt, Human
gcccugguccaggg

SEQ ID NO: 2324199 - RNA, 13 nt, Human
gcccugguccagg

SEQ ID NO: 2324200 - RNA, 21 nt, Human
gcccugggucuaagggguugg

SEQ ID NO: 2324201 - RNA, 16 nt, Human
gcccugguagggcagu

SEQ ID NO: 2324202 - RNA, 23 nt, Human
gcccugggcucggaggcugcccc

SEQ ID NO: 2324203 - RNA, 16 nt, Human
gcccugggcuggaauc

SEQ ID NO: 2324204 - RNA, 18 nt, Human
gcccugggcuggaaucag

SEQ ID NO: 2324205 - RNA, 11 nt, Human
gcccugggcug

SEQ ID NO: 2324206 - RNA, 12 nt, Human
gcccugggcugg

SEQ ID NO: 2324207 - RNA, 13 nt, Human
gcccugggcugga

SEQ ID NO: 2324208 - RNA, 14 nt, Human
gcccugggcuggaa

SEQ ID NO: 2324209 - RNA, 18 nt, Human
gcccugguccuuccaggc

SEQ ID NO: 2324210 - RNA, 14 nt, Human
gcccuggucucagc

SEQ ID NO: 2324211 - RNA, 16 nt, Human
gcccuggucucagcag

SEQ ID NO: 2324212 - RNA, 15 nt, Human
gcccugguccuucca

SEQ ID NO: 2324213 - RNA, 23 nt, Human
gcccugguccagggaagcuggcc

SEQ ID NO: 2324214 - RNA, 20 nt, Human
gcccugguccagggaagcug

SEQ ID NO: 2324215 - RNA, 18 nt, Human
gcccugguccagggaagc

SEQ ID NO: 2324216 - RNA, 17 nt, Human
gcccugguccagggaag

SEQ ID NO: 2324217 - RNA, 16 nt, Human
gcccugguccagggaa

SEQ ID NO: 2324218 - RNA, 15 nt, Human
gcccuggugcugcca

SEQ ID NO: 2324219 - RNA, 16 nt, Human
gcccuggugcugccac

SEQ ID NO: 2324220 - RNA, 17 nt, Human
gcccuggugcugccaca

SEQ ID NO: 2324221 - RNA, 21 nt, Human
gcccuggugcugccacacuuc

SEQ ID NO: 2324222 - RNA, 14 nt, Human
gcccugguggcagu

SEQ ID NO: 2324223 - RNA, 17 nt, Human
gcccugguggcaguggg

SEQ ID NO: 2324224 - RNA, 18 nt, Human
gcccugguggcaguggga

SEQ ID NO: 2324225 - RNA, 19 nt, Human
gcccugguggcagugggag

SEQ ID NO: 2324226 - RNA, 20 nt, Human
gcccugguggcagugggagc

SEQ ID NO: 2324227 - RNA, 21 nt, Human
gcccugguggcagugggagcu

SEQ ID NO: 2324228 - RNA, 22 nt, Human
gcccugguggcagugggagcug

SEQ ID NO: 2324229 - RNA, 23 nt, Human
gcccugguggcagugggagcugc

SEQ ID NO: 2324230 - RNA, 15 nt, Human
gcccugucagugcag

SEQ ID NO: 2324231 - RNA, 14 nt, Human
gcccugucagugca

SEQ ID NO: 2324232 - RNA, 23 nt, Human
gcccugguuuccugcccugggag

SEQ ID NO: 2324233 - RNA, 21 nt, Human
gcccugguuuccugcccuggg

SEQ ID NO: 2324234 - RNA, 20 nt, Human
gcccugguuuccugcccugg

SEQ ID NO: 2324235 - RNA, 19 nt, Human
gcccugguuuccugcccug

SEQ ID NO: 2324236 - RNA, 18 nt, Human
gcccugguuuccugcccu

SEQ ID NO: 2324237 - RNA, 17 nt, Human
gcccugguuuccugccc

SEQ ID NO: 2324238 - RNA, 22 nt, Human
gcccugguuucacuggcccaag

SEQ ID NO: 2324239 - RNA, 20 nt, Human
gcccugguuucacuggccca

SEQ ID NO: 2324240 - RNA, 18 nt, Human
gcccugguuucacuggcc

SEQ ID NO: 2324241 - RNA, 16 nt, Human
gcccugguuucacugg

SEQ ID NO: 2324242 - RNA, 15 nt, Human
gcccugguuuccugc

SEQ ID NO: 2324243 - RNA, 14 nt, Human
gcccugguuuccug

SEQ ID NO: 2324244 - RNA, 18 nt, Human
gcccugguguuucuagca

SEQ ID NO: 2324245 - RNA, 21 nt, Human
gcccugguggagaaagcacug

SEQ ID NO: 2324246 - RNA, 17 nt, Human
gcccuggucucagcagc

SEQ ID NO: 2324247 - RNA, 13 nt, Human
gcccugguggaga

SEQ ID NO: 2324248 - RNA, 14 nt, Human
gcccugguggagaa

SEQ ID NO: 2324249 - RNA, 18 nt, Human
gcccugguggagaaagca

SEQ ID NO: 2324250 - RNA, 21 nt, Human
gcccuuccucuccacugccuu

SEQ ID NO: 2324251 - RNA, 19 nt, Human
gcccuucucuccagccccu

SEQ ID NO: 2324252 - RNA, 17 nt, Human
gcccuuccucuccacug

SEQ ID NO: 2324253 - RNA, 16 nt, Human
gcccuuccucuccacu

SEQ ID NO: 2324254 - RNA, 18 nt, Human
gcccuuccucuccacugc

SEQ ID NO: 2324255 - RNA, 19 nt, Human
gcccuuccucuccacugcc

SEQ ID NO: 2324256 - RNA, 20 nt, Human
gcccuuccucuccacugccu

SEQ ID NO: 2324257 - RNA, 21 nt, Human
gcccuucucuccagccccugg

SEQ ID NO: 2324258 - RNA, 22 nt, Human
gcccuucucuccagccccugga

SEQ ID NO: 2324259 - RNA, 17 nt, Human
gccgagauugcaccacu

SEQ ID NO: 2324260 - RNA, 18 nt, Human
gccgagauugcaccacug

SEQ ID NO: 2324261 - RNA, 18 nt, Human
gccgagaucacgccacug

SEQ ID NO: 2324262 - RNA, 19 nt, Human
gccgagaucacgccacugc

SEQ ID NO: 2324263 - RNA, 13 nt, Human
gcccuuuccucag

SEQ ID NO: 2324264 - RNA, 14 nt, Human
gcccuuuccucagg

SEQ ID NO: 2324265 - RNA, 17 nt, Human
gcccuuugggaggcuga

SEQ ID NO: 2324266 - RNA, 12 nt, Human
gcccuuucugug

SEQ ID NO: 2324267 - RNA, 18 nt, Human
gcccuuugagugcagucc

SEQ ID NO: 2324268 - RNA, 13 nt, Human
gcccuuucugugu

SEQ ID NO: 2324269 - RNA, 16 nt, Human
gccgagaucacgccac

SEQ ID NO: 2324270 - RNA, 21 nt, Human
gcccuuugggaggcugaggcg

SEQ ID NO: 2324271 - RNA, 14 nt, Human
gcccuuuuuaagga

SEQ ID NO: 2324272 - RNA, 14 nt, Human
gcagacgccgggga

SEQ ID NO: 2324273 - RNA, 21 nt, Human
gcagacuagaauucuagugcu

SEQ ID NO: 2324274 - RNA, 15 nt, Human
gcagacuaugcaaac

SEQ ID NO: 2324275 - RNA, 17 nt, Human
gcagacaggaggaauca

SEQ ID NO: 2324276 - RNA, 22 nt, Human
gcagaccuccccagccccuagc

SEQ ID NO: 2324277 - RNA, 23 nt, Human
gcagaccuccccagccccuagcc

SEQ ID NO: 2324278 - RNA, 14 nt, Human
gcagaccuguccuc

SEQ ID NO: 2324279 - RNA, 16 nt, Human
gcagaccuguccuccu

SEQ ID NO: 2324280 - RNA, 19 nt, Human
gcagaccuguccuccuggu

SEQ ID NO: 2324281 - RNA, 20 nt, Human
gcagaccuguccuccuggug

SEQ ID NO: 2324282 - RNA, 20 nt, Human
gcagacucaauaaaaucaug

SEQ ID NO: 2324283 - RNA, 13 nt, Human
gcagacucacugu

SEQ ID NO: 2324284 - RNA, 17 nt, Human
gcagacucaguuuguca

SEQ ID NO: 2324285 - RNA, 15 nt, Human
gcagacucuacagag

SEQ ID NO: 2324286 - RNA, 12 nt, Human
gccccucccuuc

SEQ ID NO: 2324287 - RNA, 14 nt, Human
gccccucccuucaa

SEQ ID NO: 2324288 - RNA, 15 nt, Human
gccccucccuucaac

SEQ ID NO: 2324289 - RNA, 18 nt, Human
gccccuccucucugcccu

SEQ ID NO: 2324290 - RNA, 21 nt, Human
gccccuccucugccaccuccc

SEQ ID NO: 2324291 - RNA, 20 nt, Human
gccccuccucugccaccucc

SEQ ID NO: 2324292 - RNA, 18 nt, Human
gccccuccucugccaccu

SEQ ID NO: 2324293 - RNA, 17 nt, Human
gccccuccucugccacc

SEQ ID NO: 2324294 - RNA, 16 nt, Human
gccccuccucugccac

SEQ ID NO: 2324295 - RNA, 15 nt, Human
gccccuccucugcca

SEQ ID NO: 2324296 - RNA, 14 nt, Human
gccccuccucugcc

SEQ ID NO: 2324297 - RNA, 13 nt, Human
gccccuccucugc

SEQ ID NO: 2324298 - RNA, 12 nt, Human
gccccuccucug

SEQ ID NO: 2324299 - RNA, 18 nt, Human
gcagacucaguuugucag

SEQ ID NO: 2324300 - RNA, 19 nt, Human
gccccuccucucugcccua

SEQ ID NO: 2324301 - RNA, 11 nt, Human
gccccucugcc

SEQ ID NO: 2324302 - RNA, 12 nt, Human
gccccucugccc

SEQ ID NO: 2324303 - RNA, 13 nt, Human
gccccugccaccc

SEQ ID NO: 2324304 - RNA, 22 nt, Human
gccccuccucugccaccucccc

SEQ ID NO: 2324305 - RNA, 23 nt, Human
gccccuccucugccaccuccccu

SEQ ID NO: 2324306 - RNA, 21 nt, Human
gccccucucccgccagacugu

SEQ ID NO: 2324307 - RNA, 14 nt, Human
gccccugccacccu

SEQ ID NO: 2324308 - RNA, 15 nt, Human
gccccugccacccug

SEQ ID NO: 2324309 - RNA, 21 nt, Human
gccccuguucuggcagaguug

SEQ ID NO: 2324310 - RNA, 14 nt, Human
gccccucugcccag

SEQ ID NO: 2324311 - RNA, 15 nt, Human
gccccucugcccagc

SEQ ID NO: 2324312 - RNA, 16 nt, Human
gccccucugcccagcu

SEQ ID NO: 2324313 - RNA, 18 nt, Human
gccccucugcccagcuug

SEQ ID NO: 2324314 - RNA, 13 nt, Human
gcccgccuggcag

SEQ ID NO: 2324315 - RNA, 22 nt, Human
gcccgccugccaguccuagcug

SEQ ID NO: 2324316 - RNA, 17 nt, Human
gcccgccugccaguccu

SEQ ID NO: 2324317 - RNA, 18 nt, Human
gcccgccugccaguccua

SEQ ID NO: 2324318 - RNA, 23 nt, Human
gcccgccugccaguccuagcugc

SEQ ID NO: 2324319 - RNA, 22 nt, Human
gcccgcccacuguccugggcgc

SEQ ID NO: 2324320 - RNA, 20 nt, Human
gcccgcccacuguccugggc

SEQ ID NO: 2324321 - RNA, 12 nt, Human
gcccgccugcca

SEQ ID NO: 2324322 - RNA, 13 nt, Human
gcccgccugccag

SEQ ID NO: 2324323 - RNA, 14 nt, Human
gcccgccugccagu

SEQ ID NO: 2324324 - RNA, 15 nt, Human
gcccgccugccaguc

SEQ ID NO: 2324325 - RNA, 16 nt, Human
gcccgccugccagucc

SEQ ID NO: 2324326 - RNA, 16 nt, Human
gcccggauucugggag

SEQ ID NO: 2324327 - RNA, 15 nt, Human
gcccggauucuggga

SEQ ID NO: 2324328 - RNA, 17 nt, Human
gcccggauucugggagg

SEQ ID NO: 2324329 - RNA, 18 nt, Human
gcccgccuggcagaacug

SEQ ID NO: 2324330 - RNA, 14 nt, Human
gcccgccuggcaga

SEQ ID NO: 2324331 - RNA, 14 nt, Human
gcccggaugcuucu

SEQ ID NO: 2324332 - RNA, 21 nt, Human
gcccggcgcgguggcucacgc

SEQ ID NO: 2324333 - RNA, 18 nt, Human
gcccggcgcccucugucc

SEQ ID NO: 2324334 - RNA, 18 nt, Human
gcccggcuaauuuuugua

SEQ ID NO: 2324335 - RNA, 16 nt, Human
gcccggcuccaggcuc

SEQ ID NO: 2324336 - RNA, 18 nt, Human
gcccggccagccaugucu

SEQ ID NO: 2324337 - RNA, 12 nt, Human
gcccggccagcc

SEQ ID NO: 2324338 - RNA, 14 nt, Human
gcccggccugcucc

SEQ ID NO: 2324339 - RNA, 15 nt, Human
gcccggccugcuccc

SEQ ID NO: 2324340 - RNA, 18 nt, Human
gcccggccugcucccagc

SEQ ID NO: 2324341 - RNA, 22 nt, Human
gcccggccugcucccagcagcc

SEQ ID NO: 2324342 - RNA, 17 nt, Human
gcccggcgccccugcca

SEQ ID NO: 2324343 - RNA, 14 nt, Human
gcccggcgcccucu

SEQ ID NO: 2324344 - RNA, 15 nt, Human
gcccggcgcccucug

SEQ ID NO: 2324345 - RNA, 17 nt, Human
gcccggcgcccucuguc

SEQ ID NO: 2324346 - RNA, 20 nt, Human
gcccggcgcccucuguccug

SEQ ID NO: 2324347 - RNA, 23 nt, Human
gccccuucacuucugaccacacu

SEQ ID NO: 2324348 - RNA, 21 nt, Human
gccccuucacuucugaccaca

SEQ ID NO: 2324349 - RNA, 20 nt, Human
gccccuucacuucugaccac

SEQ ID NO: 2324350 - RNA, 19 nt, Human
gccccuucccacucacccc

SEQ ID NO: 2324351 - RNA, 15 nt, Human
gccccuucccaucuc

SEQ ID NO: 2324352 - RNA, 15 nt, Human
gccccuuccccaugg

SEQ ID NO: 2324353 - RNA, 16 nt, Human
gccccuuccccauggg

SEQ ID NO: 2324354 - RNA, 23 nt, Human
gccccugcauccccuuggcugug

SEQ ID NO: 2324355 - RNA, 19 nt, Human
gccccucugcccagcuugg

SEQ ID NO: 2324356 - RNA, 20 nt, Human
gccccugcauccccuuggcu

SEQ ID NO: 2324357 - RNA, 17 nt, Human
gccccuuagcccccacc

SEQ ID NO: 2324358 - RNA, 22 nt, Human
gccccuuagcccccacccacuu

SEQ ID NO: 2324359 - RNA, 12 nt, Human
gccccuuccccc

SEQ ID NO: 2324360 - RNA, 16 nt, Human
gcccgacagccuggca

SEQ ID NO: 2324361 - RNA, 17 nt, Human
gcccgacagccuggcac

SEQ ID NO: 2324362 - RNA, 19 nt, Human
gcccgacagccuggcacag

SEQ ID NO: 2324363 - RNA, 12 nt, Human
gcccgagcuggu

SEQ ID NO: 2324364 - RNA, 23 nt, Human
gcccgacuugcuguuuuguucug

SEQ ID NO: 2324365 - RNA, 13 nt, Human
gcccgacuugcug

SEQ ID NO: 2324366 - RNA, 18 nt, Human
gcccgacuugcuguuuug

SEQ ID NO: 2324367 - RNA, 15 nt, Human
gcccgagcuggugca

SEQ ID NO: 2324368 - RNA, 14 nt, Human
gcccgagcuggugc

SEQ ID NO: 2324369 - RNA, 13 nt, Human
gcccgagcuggug

SEQ ID NO: 2324370 - RNA, 17 nt, Human
gcccgcaugcggcccag

SEQ ID NO: 2324371 - RNA, 19 nt, Human
gcccgcaugcggcccagga

SEQ ID NO: 2324372 - RNA, 21 nt, Human
gcccgccaagguagccauccc

SEQ ID NO: 2324373 - RNA, 13 nt, Human
gcccgcccacugu

SEQ ID NO: 2324374 - RNA, 14 nt, Human
gcccgcccacuguc

SEQ ID NO: 2324375 - RNA, 15 nt, Human
gcccgcccacugucc

SEQ ID NO: 2324376 - RNA, 17 nt, Human
gcccgcccacuguccug

SEQ ID NO: 2324377 - RNA, 18 nt, Human
gcccgcccacuguccugg

SEQ ID NO: 2324378 - RNA, 19 nt, Human
gcccgcccacuguccuggg

SEQ ID NO: 2324379 - RNA, 18 nt, Human
gcccuggauuucagaaag

SEQ ID NO: 2324380 - RNA, 20 nt, Human
gcccuggagguggcugagcc

SEQ ID NO: 2324381 - RNA, 18 nt, Human
gcccuggagguggcugag

SEQ ID NO: 2324382 - RNA, 15 nt, Human
gcccuggagguggcu

SEQ ID NO: 2324383 - RNA, 14 nt, Human
gcccuggagguggc

SEQ ID NO: 2324384 - RNA, 20 nt, Human
gcccuggagucaugccaagc

SEQ ID NO: 2324385 - RNA, 15 nt, Human
gcccuggagucaugc

SEQ ID NO: 2324386 - RNA, 19 nt, Human
gcccuggagucaugccaag

SEQ ID NO: 2324387 - RNA, 13 nt, Human
gcccuggaggugg

SEQ ID NO: 2324388 - RNA, 24 nt, Human
gcccuggaggugccagcaaagccc

SEQ ID NO: 2324389 - RNA, 22 nt, Human
gcccuggaggugccagcaaagc

SEQ ID NO: 2324390 - RNA, 23 nt, Human
gcccuggaggugccagcaaagcc

SEQ ID NO: 2324391 - RNA, 21 nt, Human
gcccuggagccaacugcugcu

SEQ ID NO: 2324392 - RNA, 17 nt, Human
gcccuggaggugccagc

SEQ ID NO: 2324393 - RNA, 18 nt, Human
gcccuggaggugccagca

SEQ ID NO: 2324394 - RNA, 20 nt, Human
gcccuggaggugccagcaaa

SEQ ID NO: 2324395 - RNA, 18 nt, Human
gcccuggagccaacugcu

SEQ ID NO: 2324396 - RNA, 20 nt, Human
gcccuggaagccggcggccc

SEQ ID NO: 2324397 - RNA, 19 nt, Human
gcccuggagccaacugcug

SEQ ID NO: 2324398 - RNA, 20 nt, Human
gcccuggagccaacugcugc

SEQ ID NO: 2324399 - RNA, 23 nt, Human
gcccuggagccaacugcugcuuu

SEQ ID NO: 2324400 - RNA, 22 nt, Human
gcccugcuuugggcugcccugg

SEQ ID NO: 2324401 - RNA, 23 nt, Human
gcccugcuuugggcugcccuggu

SEQ ID NO: 2324402 - RNA, 12 nt, Human
gcccuggacugu

SEQ ID NO: 2324403 - RNA, 16 nt, Human
gcccuggacugugugc

SEQ ID NO: 2324404 - RNA, 22 nt, Human
gcccuggacugugugcucagga

SEQ ID NO: 2324405 - RNA, 22 nt, Human
gcccugaggugaaagggagcua

SEQ ID NO: 2324406 - RNA, 21 nt, Human
gcccugaggugaaagggagcu

SEQ ID NO: 2324407 - RNA, 13 nt, Human
gcccugaggugug

SEQ ID NO: 2324408 - RNA, 14 nt, Human
gcccugaggugugg

SEQ ID NO: 2324409 - RNA, 15 nt, Human
gcccugagguguggg

SEQ ID NO: 2324410 - RNA, 21 nt, Human
gcccugaggugugggggcugc

SEQ ID NO: 2324411 - RNA, 22 nt, Human
gcccugaggugugggggcugca

SEQ ID NO: 2324412 - RNA, 23 nt, Human
gcccugaggugugggggcugcag

SEQ ID NO: 2324413 - RNA, 24 nt, Human
gcccugaggugugggggcugcagc

SEQ ID NO: 2324414 - RNA, 22 nt, Human
gcccugaguaaucgcuuaaaga

SEQ ID NO: 2324415 - RNA, 21 nt, Human
gcccugaguggaucuccaagg

SEQ ID NO: 2324416 - RNA, 22 nt, Human
gcccugaguggaucuccaagga

SEQ ID NO: 2324417 - RNA, 23 nt, Human
gcccugaguggaucuccaaggac

SEQ ID NO: 2324418 - RNA, 14 nt, Human
gcccugauuugcug

SEQ ID NO: 2324419 - RNA, 18 nt, Human
gcccugcaaaaggacucu

SEQ ID NO: 2324420 - RNA, 14 nt, Human
gcccugcaaaagga

SEQ ID NO: 2324421 - RNA, 18 nt, Human
gcccugaguuccuagcca

SEQ ID NO: 2324422 - RNA, 16 nt, Human
gcccugaguuccuagc

SEQ ID NO: 2324423 - RNA, 20 nt, Human
gcccugcuuugggcugcccu

SEQ ID NO: 2324424 - RNA, 21 nt, Human
gcccugcuuugggcugcccug

SEQ ID NO: 2324425 - RNA, 19 nt, Human
gcccugcuuugggcugccc

SEQ ID NO: 2324426 - RNA, 23 nt, Human
gcccugcacuguccugcuccaca

SEQ ID NO: 2324427 - RNA, 21 nt, Human
gcccugcaaaaggacucucag

SEQ ID NO: 2324428 - RNA, 16 nt, Human
gcccugcaccugugca

SEQ ID NO: 2324429 - RNA, 17 nt, Human
gcccugcaccugugcag

SEQ ID NO: 2324430 - RNA, 14 nt, Human
gcccugcacugucc

SEQ ID NO: 2324431 - RNA, 15 nt, Human
gcccugcacuguccu

SEQ ID NO: 2324432 - RNA, 16 nt, Human
gcccugcacuguccug

SEQ ID NO: 2324433 - RNA, 17 nt, Human
gcccugcacuguccugc

SEQ ID NO: 2324434 - RNA, 18 nt, Human
gcccugcacuguccugcu

SEQ ID NO: 2324435 - RNA, 19 nt, Human
gcccugcacuguccugcuc

SEQ ID NO: 2324436 - RNA, 20 nt, Human
gcccugcacuguccugcucc

SEQ ID NO: 2324437 - RNA, 21 nt, Human
gcccugcacuguccugcucca

SEQ ID NO: 2324438 - RNA, 22 nt, Human
gcccugcacuguccugcuccac

SEQ ID NO: 2324439 - RNA, 18 nt, Human
gcccucgggcgagucacu

SEQ ID NO: 2324440 - RNA, 14 nt, Human
gcccucguggccag

SEQ ID NO: 2324441 - RNA, 20 nt, Human
gcccucgggcccagccccca

SEQ ID NO: 2324442 - RNA, 22 nt, Human
gcccucgggcccagcccccaca

SEQ ID NO: 2324443 - RNA, 15 nt, Human
gcccucgggcccagc

SEQ ID NO: 2324444 - RNA, 16 nt, Human
gcccucgggcccagcc

SEQ ID NO: 2324445 - RNA, 17 nt, Human
gcccucgggcccagccc

SEQ ID NO: 2324446 - RNA, 18 nt, Human
gcccucgggcccagcccc

SEQ ID NO: 2324447 - RNA, 13 nt, Human
gcccucuaccccu

SEQ ID NO: 2324448 - RNA, 19 nt, Human
gcccucguggccagcccgg

SEQ ID NO: 2324449 - RNA, 20 nt, Human
gcccucguggccagcccggc

SEQ ID NO: 2324450 - RNA, 15 nt, Human
gcccucguggccagc

SEQ ID NO: 2324451 - RNA, 16 nt, Human
gcccucguggccagcc

SEQ ID NO: 2324452 - RNA, 17 nt, Human
gcccucguggccagccc

SEQ ID NO: 2324453 - RNA, 18 nt, Human
gcccucguggccagcccg

SEQ ID NO: 2324454 - RNA, 17 nt, Human
gcccucuagggagggac

SEQ ID NO: 2324455 - RNA, 17 nt, Human
gcccggcuccaggcucc

SEQ ID NO: 2324456 - RNA, 18 nt, Human
gcccggcuccaggcuccu

SEQ ID NO: 2324457 - RNA, 17 nt, Human
gcccucgcugccagcuc

SEQ ID NO: 2324458 - RNA, 15 nt, Human
gcccucgcugcuucu

SEQ ID NO: 2324459 - RNA, 16 nt, Human
gcccucgcugcuucug

SEQ ID NO: 2324460 - RNA, 15 nt, Human
gcccucgcugccagc

SEQ ID NO: 2324461 - RNA, 14 nt, Human
gcccucgcugccag

SEQ ID NO: 2324462 - RNA, 16 nt, Human
gcccucgcccccgccc

SEQ ID NO: 2324463 - RNA, 19 nt, Human
gcccuccuuguccacccac

SEQ ID NO: 2324464 - RNA, 16 nt, Human
gcccugagcuuucugc

SEQ ID NO: 2324465 - RNA, 12 nt, Human
gcccucugccca

SEQ ID NO: 2324466 - RNA, 16 nt, Human
gcccucucugcucugc

SEQ ID NO: 2324467 - RNA, 14 nt, Human
gcccucuccgagcu

SEQ ID NO: 2324468 - RNA, 14 nt, Human
gccuggccaccucu

SEQ ID NO: 2324469 - RNA, 15 nt, Human
gccuggccaaaggga

SEQ ID NO: 2324470 - RNA, 16 nt, Human
gccuggccaccucucu

SEQ ID NO: 2324471 - RNA, 17 nt, Human
gccuggccaccucucuc

SEQ ID NO: 2324472 - RNA, 18 nt, Human
gccuggccaccucucucc

SEQ ID NO: 2324473 - RNA, 19 nt, Human
gccuggccaccucucuccu

SEQ ID NO: 2324474 - RNA, 13 nt, Human
gccuggccacgcc

SEQ ID NO: 2324475 - RNA, 17 nt, Human
gccuggccagacacagg

SEQ ID NO: 2324476 - RNA, 16 nt, Human
gccuggccagacacag

SEQ ID NO: 2324477 - RNA, 14 nt, Human
gccuggccagacac

SEQ ID NO: 2324478 - RNA, 13 nt, Human
gccuggccagaca

SEQ ID NO: 2324479 - RNA, 14 nt, Human
gccuggcaggcugu

SEQ ID NO: 2324480 - RNA, 20 nt, Human
gccuggaugcggauggccgg

SEQ ID NO: 2324481 - RNA, 21 nt, Human
gccuggauauuauucuuguag

SEQ ID NO: 2324482 - RNA, 12 nt, Human
gccuggaucucc

SEQ ID NO: 2324483 - RNA, 15 nt, Human
gccuggauggggcug

SEQ ID NO: 2324484 - RNA, 22 nt, Human
gccuggaggccgggugcucagg

SEQ ID NO: 2324485 - RNA, 24 nt, Human
gccuggaguguaugacugcacaug

SEQ ID NO: 2324486 - RNA, 14 nt, Human
gccuggauggggcu

SEQ ID NO: 2324487 - RNA, 14 nt, Human
gccuggccaggcag

SEQ ID NO: 2324488 - RNA, 13 nt, Human
gccuggccaggca

SEQ ID NO: 2324489 - RNA, 15 nt, Human
gccuggccaggcacc

SEQ ID NO: 2324490 - RNA, 19 nt, Human
gccuggccaggagcucuuc

SEQ ID NO: 2324491 - RNA, 12 nt, Human
gccuggccaggc

SEQ ID NO: 2324492 - RNA, 15 nt, Human
gccuggccaggagcu

SEQ ID NO: 2324493 - RNA, 14 nt, Human
gccuggccaggagc

SEQ ID NO: 2324494 - RNA, 21 nt, Human
gccuggccagccuacaauggg

SEQ ID NO: 2324495 - RNA, 16 nt, Human
gccuggccagccuaca

SEQ ID NO: 2324496 - RNA, 17 nt, Human
gccuggccaggcagauc

SEQ ID NO: 2324497 - RNA, 15 nt, Human
gccuggccaggcaga

SEQ ID NO: 2324498 - RNA, 23 nt, Human
gccuggccaggcagaucugugcc

SEQ ID NO: 2324499 - RNA, 17 nt, Human
gccuggccagggccugg

SEQ ID NO: 2324500 - RNA, 15 nt, Human
gccugggcagaagga

SEQ ID NO: 2324501 - RNA, 14 nt, Human
gccuggccagaugc

SEQ ID NO: 2324502 - RNA, 15 nt, Human
gccuggccagaugca

SEQ ID NO: 2324503 - RNA, 23 nt, Human
gccuggccagcagguccccagcu

SEQ ID NO: 2324504 - RNA, 21 nt, Human
gccuggccagacacaggcccu

SEQ ID NO: 2324505 - RNA, 20 nt, Human
gccuggccagacacaggccc

SEQ ID NO: 2324506 - RNA, 20 nt, Human
gccugggugacagagugaga

SEQ ID NO: 2324507 - RNA, 20 nt, Human
gccugggugacagagcaaga

SEQ ID NO: 2324508 - RNA, 14 nt, Human
gccugggugcuggc

SEQ ID NO: 2324509 - RNA, 12 nt, Human
gccugggugcug

SEQ ID NO: 2324510 - RNA, 13 nt, Human
gccugggugacag

SEQ ID NO: 2324511 - RNA, 23 nt, Human
gccugggugacagagugagacuc

SEQ ID NO: 2324512 - RNA, 23 nt, Human
gccugggugacaaagugagacuc

SEQ ID NO: 2324513 - RNA, 23 nt, Human
gccugggucugugucucuuuucu

SEQ ID NO: 2324514 - RNA, 19 nt, Human
gccugggucugugucucuu

SEQ ID NO: 2324515 - RNA, 16 nt, Human
gccugggucugugucu

SEQ ID NO: 2324516 - RNA, 14 nt, Human
gccugggucugugu

SEQ ID NO: 2324517 - RNA, 16 nt, Human
gccuggguggggcugc

SEQ ID NO: 2324518 - RNA, 15 nt, Human
gccuggguggggcug

SEQ ID NO: 2324519 - RNA, 15 nt, Human
gccuggguggacaug

SEQ ID NO: 2324520 - RNA, 21 nt, Human
gccugggugcuggcugcccag

SEQ ID NO: 2324521 - RNA, 20 nt, Human
gccugggugcuggcugccca

SEQ ID NO: 2324522 - RNA, 17 nt, Human
gccugggugcuggcugc

SEQ ID NO: 2324523 - RNA, 15 nt, Human
gccugggugcuggcu

SEQ ID NO: 2324524 - RNA, 22 nt, Human
gccuggguggggcugcuccucc

SEQ ID NO: 2324525 - RNA, 20 nt, Human
gccuggguggggcugcuccu

SEQ ID NO: 2324526 - RNA, 19 nt, Human
gccuggguggggcugcucc

SEQ ID NO: 2324527 - RNA, 18 nt, Human
gccuggguggggcugcuc

SEQ ID NO: 2324528 - RNA, 23 nt, Human
gccuguaguuaggaaauaaaacc

SEQ ID NO: 2324529 - RNA, 22 nt, Human
gccuguaguuaggaaauaaaac

SEQ ID NO: 2324530 - RNA, 19 nt, Human
gccuguaguuaggaaauaa

SEQ ID NO: 2324531 - RNA, 18 nt, Human
gccuguaguuaggaaaua

SEQ ID NO: 2324532 - RNA, 17 nt, Human
gccuguaguuaggaaau

SEQ ID NO: 2324533 - RNA, 16 nt, Human
gccuguaguuaggaaa

SEQ ID NO: 2324534 - RNA, 14 nt, Human
gccuguaguuagga

SEQ ID NO: 2324535 - RNA, 13 nt, Human
gccuguagcccac

SEQ ID NO: 2324536 - RNA, 14 nt, Human
gccuguagcaguga

SEQ ID NO: 2324537 - RNA, 22 nt, Human
gccuguagcccacucugcucgc

SEQ ID NO: 2324538 - RNA, 19 nt, Human
gccuguagcccacucugcu

SEQ ID NO: 2324539 - RNA, 19 nt, Human
gccuguagucccagccacu

SEQ ID NO: 2324540 - RNA, 21 nt, Human
gccugggggcugggcagagga

SEQ ID NO: 2324541 - RNA, 20 nt, Human
gccugggggcugggcagagg

SEQ ID NO: 2324542 - RNA, 14 nt, Human
gccuggggcuggcc

SEQ ID NO: 2324543 - RNA, 22 nt, Human
gccugggggcagggagaggagu

SEQ ID NO: 2324544 - RNA, 17 nt, Human
gccuggggcuggccucc

SEQ ID NO: 2324545 - RNA, 18 nt, Human
gccugggcagaaggaaga

SEQ ID NO: 2324546 - RNA, 21 nt, Human
gccuggcccacagcaggugcu

SEQ ID NO: 2324547 - RNA, 22 nt, Human
gccuggcccacagcaggugcug

SEQ ID NO: 2324548 - RNA, 16 nt, Human
gccugggcagaaggaa

SEQ ID NO: 2324549 - RNA, 17 nt, Human
gccugggcagaaggaag

SEQ ID NO: 2324550 - RNA, 14 nt, Human
gccugauauaaaug

SEQ ID NO: 2324551 - RNA, 15 nt, Human
gccugauauaaaugc

SEQ ID NO: 2324552 - RNA, 16 nt, Human
gccugagucuccugug

SEQ ID NO: 2324553 - RNA, 15 nt, Human
gccugagugccuggc

SEQ ID NO: 2324554 - RNA, 20 nt, Human
gccugaucagaccacggcuc

SEQ ID NO: 2324555 - RNA, 16 nt, Human
gccugaucagaccacg

SEQ ID NO: 2324556 - RNA, 22 nt, Human
gccugauccagccucuccccug

SEQ ID NO: 2324557 - RNA, 19 nt, Human
gccugaugcucccuccccu

SEQ ID NO: 2324558 - RNA, 17 nt, Human
gccugaugcucccuccc

SEQ ID NO: 2324559 - RNA, 16 nt, Human
gccugaugcucccucc

SEQ ID NO: 2324560 - RNA, 14 nt, Human
gccugaugcucccu

SEQ ID NO: 2324561 - RNA, 12 nt, Human
gccugaugacag

SEQ ID NO: 2324562 - RNA, 17 nt, Human
gccugaugacagagcga

SEQ ID NO: 2324563 - RNA, 18 nt, Human
gccugauccagccucucc

SEQ ID NO: 2324564 - RNA, 21 nt, Human
gccugauccagccucuccccu

SEQ ID NO: 2324565 - RNA, 22 nt, Human
gccugacauuuggaguguuccc

SEQ ID NO: 2324566 - RNA, 22 nt, Human
gccugaaugcuuauagguggcc

SEQ ID NO: 2324567 - RNA, 20 nt, Human
gccugacaaccacuggucug

SEQ ID NO: 2324568 - RNA, 21 nt, Human
gccugacaaccacuggucugu

SEQ ID NO: 2324569 - RNA, 13 nt, Human
gccugagucaccu

SEQ ID NO: 2324570 - RNA, 23 nt, Human
gccugacccuacuucuuuugcuc

SEQ ID NO: 2324571 - RNA, 13 nt, Human
gccugagucuccu

SEQ ID NO: 2324572 - RNA, 15 nt, Human
gccugagucuccugu

SEQ ID NO: 2324573 - RNA, 12 nt, Human
gccucugccugu

SEQ ID NO: 2324574 - RNA, 23 nt, Human
gccucucugcaggucccuaauaa

SEQ ID NO: 2324575 - RNA, 18 nt, Human
gccucucugcaggucccu

SEQ ID NO: 2324576 - RNA, 20 nt, Human
gccucucugcaggucccuaa

SEQ ID NO: 2324577 - RNA, 21 nt, Human
gccucucugcaggucccuaau

SEQ ID NO: 2324578 - RNA, 22 nt, Human
gccugaagucacacagugaguc

SEQ ID NO: 2324579 - RNA, 18 nt, Human
gccugaaguuggagugag

SEQ ID NO: 2324580 - RNA, 11 nt, Human
gccucugcugc

SEQ ID NO: 2324581 - RNA, 19 nt, Human
gccucugcugauccuccca

SEQ ID NO: 2324582 - RNA, 19 nt, Human
gccucucgguggccagcag

SEQ ID NO: 2324583 - RNA, 13 nt, Human
gccucugccuguc

SEQ ID NO: 2324584 - RNA, 18 nt, Human
gccucugcugauccuccc

SEQ ID NO: 2324585 - RNA, 18 nt, Human
gccugcuccagcuguuca

SEQ ID NO: 2324586 - RNA, 16 nt, Human
gccugcuccagcuguu

SEQ ID NO: 2324587 - RNA, 17 nt, Human
gccugcucccagcagcc

SEQ ID NO: 2324588 - RNA, 16 nt, Human
gccugcuuccugucuu

SEQ ID NO: 2324589 - RNA, 22 nt, Human
gccugcugugauuccacuacac

SEQ ID NO: 2324590 - RNA, 16 nt, Human
gccugcagagagaagc

SEQ ID NO: 2324591 - RNA, 17 nt, Human
gccugcagagagaagcc

SEQ ID NO: 2324592 - RNA, 18 nt, Human
gccugcagagagaagccu

SEQ ID NO: 2324593 - RNA, 13 nt, Human
gccugcucccagc

SEQ ID NO: 2324594 - RNA, 15 nt, Human
gccugcucccagcag

SEQ ID NO: 2324595 - RNA, 16 nt, Human
gccugcucccagcagc

SEQ ID NO: 2324596 - RNA, 20 nt, Human
gccugcucccagcagcccua

SEQ ID NO: 2324597 - RNA, 22 nt, Human
gccugcuggucacagccuccuc

SEQ ID NO: 2324598 - RNA, 18 nt, Human
gccugcuuuuuauggccu

SEQ ID NO: 2324599 - RNA, 19 nt, Human
gccugcuuuuuauggccug

SEQ ID NO: 2324600 - RNA, 22 nt, Human
gccugcuuuuuauggccuguga

SEQ ID NO: 2324601 - RNA, 18 nt, Human
gccugcuuuucacugcug

SEQ ID NO: 2324602 - RNA, 20 nt, Human
gccugcuuuucacugcugca

SEQ ID NO: 2324603 - RNA, 21 nt, Human
gccugcuuuucacugcugcaa

SEQ ID NO: 2324604 - RNA, 22 nt, Human
gccugcuuuucacugcugcaag

SEQ ID NO: 2324605 - RNA, 20 nt, Human
gccugaugcucccuccccug

SEQ ID NO: 2324606 - RNA, 13 nt, Human
gccugauggaccu

SEQ ID NO: 2324607 - RNA, 14 nt, Human
gccugauggaccug

SEQ ID NO: 2324608 - RNA, 17 nt, Human
gccugauggggaggguc

SEQ ID NO: 2324609 - RNA, 17 nt, Human
gccugauucggcugucu

SEQ ID NO: 2324610 - RNA, 20 nt, Human
gccugauucggcugucucag

SEQ ID NO: 2324611 - RNA, 19 nt, Human
gccugauugccaagcucag

SEQ ID NO: 2324612 - RNA, 16 nt, Human
gccugcacaauaaaaa

SEQ ID NO: 2324613 - RNA, 18 nt, Human
gccugcaaacgcugccug

SEQ ID NO: 2324614 - RNA, 17 nt, Human
gccugcaaacgcugccu

SEQ ID NO: 2324615 - RNA, 16 nt, Human
gccugcaaacgcugcc

SEQ ID NO: 2324616 - RNA, 20 nt, Human
gccugauugccaagcucagg

SEQ ID NO: 2324617 - RNA, 21 nt, Human
gccugauugccaagcucagga

SEQ ID NO: 2324618 - RNA, 15 nt, Human
gccugcuccagcugu

SEQ ID NO: 2324619 - RNA, 15 nt, Human
gccugcagagcugcg

SEQ ID NO: 2324620 - RNA, 12 nt, Human
gccugcagagcu

SEQ ID NO: 2324621 - RNA, 21 nt, Human
gccugcacggugggccuugcu

SEQ ID NO: 2324622 - RNA, 22 nt, Human
gccugcacggugggccuugcug

SEQ ID NO: 2324623 - RNA, 16 nt, Human
gccugcagaauuuggg

SEQ ID NO: 2324624 - RNA, 16 nt, Human
gccugcagacucacug

SEQ ID NO: 2324625 - RNA, 11 nt, Human
gccugcagaga

SEQ ID NO: 2324626 - RNA, 12 nt, Human
gccugcagagag

SEQ ID NO: 2324627 - RNA, 14 nt, Human
gccugcagagagaa

SEQ ID NO: 2324628 - RNA, 12 nt, Human
gccucccacugg

SEQ ID NO: 2324629 - RNA, 18 nt, Human
gccuccccucuccuuccu

SEQ ID NO: 2324630 - RNA, 21 nt, Human
gccucccacgacugcccggca

SEQ ID NO: 2324631 - RNA, 14 nt, Human
gccucccacgacug

SEQ ID NO: 2324632 - RNA, 17 nt, Human
gccucccacccccaucu

SEQ ID NO: 2324633 - RNA, 12 nt, Human
gccucccacccg

SEQ ID NO: 2324634 - RNA, 18 nt, Human
gccucccacccgaugcug

SEQ ID NO: 2324635 - RNA, 19 nt, Human
gccucccacccgaugcugc

SEQ ID NO: 2324636 - RNA, 20 nt, Human
gccucccacccgaugcugcu

SEQ ID NO: 2324637 - RNA, 21 nt, Human
gccucccacccgaugcugcuu

SEQ ID NO: 2324638 - RNA, 21 nt, Human
gccucccgaauagcugggacu

SEQ ID NO: 2324639 - RNA, 18 nt, Human
gccuccccugccagggca

SEQ ID NO: 2324640 - RNA, 17 nt, Human
gccuccccugccagggc

SEQ ID NO: 2324641 - RNA, 15 nt, Human
gccuccccugccagg

SEQ ID NO: 2324642 - RNA, 14 nt, Human
gccuccccugccag

SEQ ID NO: 2324643 - RNA, 21 nt, Human
gccuccccucuccuuccugug

SEQ ID NO: 2324644 - RNA, 19 nt, Human
gccuccccucuccuuccug

SEQ ID NO: 2324645 - RNA, 14 nt, Human
gccuccccugccac

SEQ ID NO: 2324646 - RNA, 15 nt, Human
gccuccccugccacc

SEQ ID NO: 2324647 - RNA, 16 nt, Human
gccuccccugccacca

SEQ ID NO: 2324648 - RNA, 19 nt, Human
gccuccccugccaccaggc

SEQ ID NO: 2324649 - RNA, 13 nt, Human
gccucccacagac

SEQ ID NO: 2324650 - RNA, 22 nt, Human
gccucauccgaggcagggucag

SEQ ID NO: 2324651 - RNA, 19 nt, Human
gccucauccgaggcagggu

SEQ ID NO: 2324652 - RNA, 18 nt, Human
gccucauccgaggcaggg

SEQ ID NO: 2324653 - RNA, 12 nt, Human
gccucccacccc

SEQ ID NO: 2324654 - RNA, 23 nt, Human
gccucccacagugacucgggcuc

SEQ ID NO: 2324655 - RNA, 12 nt, Human
gccucccacagu

SEQ ID NO: 2324656 - RNA, 13 nt, Human
gccucccacagug

SEQ ID NO: 2324657 - RNA, 14 nt, Human
gccucccacaguga

SEQ ID NO: 2324658 - RNA, 16 nt, Human
gccucccacagugacu

SEQ ID NO: 2324659 - RNA, 22 nt, Human
gccucccaacucaccccagccc

SEQ ID NO: 2324660 - RNA, 23 nt, Human
gccucccaacucaccccagcccc

SEQ ID NO: 2324661 - RNA, 17 nt, Human
gccucauccgaggcagg

SEQ ID NO: 2324662 - RNA, 16 nt, Human
gccucauccgaggcag

SEQ ID NO: 2324663 - RNA, 14 nt, Human
gccucaguguauuu

SEQ ID NO: 2324664 - RNA, 13 nt, Human
gccucauauuuaa

SEQ ID NO: 2324665 - RNA, 15 nt, Human
gccucauauuuaaag

SEQ ID NO: 2324666 - RNA, 22 nt, Human
gccucauauuuaaagacaggga

SEQ ID NO: 2324667 - RNA, 21 nt, Human
gccucccaacucaccccagcc

SEQ ID NO: 2324668 - RNA, 22 nt, Human
gccucaguggacuuuccacccc

SEQ ID NO: 2324669 - RNA, 21 nt, Human
gccucaguggacuuuccaccc

SEQ ID NO: 2324670 - RNA, 11 nt, Human
gccucagugga

SEQ ID NO: 2324671 - RNA, 22 nt, Human
gccucagucucccuucucccau

SEQ ID NO: 2324672 - RNA, 24 nt, Human
gccucaguccuccccucacagccu

SEQ ID NO: 2324673 - RNA, 21 nt, Human
gccucagucucccuucuccca

SEQ ID NO: 2324674 - RNA, 15 nt, Human
gccucagugccacua

SEQ ID NO: 2324675 - RNA, 16 nt, Human
gccucucccuggcccu

SEQ ID NO: 2324676 - RNA, 15 nt, Human
gccucucccuggccc

SEQ ID NO: 2324677 - RNA, 14 nt, Human
gccucucccuggcc

SEQ ID NO: 2324678 - RNA, 20 nt, Human
gccucuccuuguggccuggg

SEQ ID NO: 2324679 - RNA, 21 nt, Human
gccucuccuuguggccugggc

SEQ ID NO: 2324680 - RNA, 19 nt, Human
gccucucugcaggucccua

SEQ ID NO: 2324681 - RNA, 23 nt, Human
gccucuccuuuguauauuauuuc

SEQ ID NO: 2324682 - RNA, 16 nt, Human
gccucuccuuuguaua

SEQ ID NO: 2324683 - RNA, 17 nt, Human
gccucuccuuuguauau

SEQ ID NO: 2324684 - RNA, 22 nt, Human
gccucuccuuguggccugggcc

SEQ ID NO: 2324685 - RNA, 12 nt, Human
gccucuccuuug

SEQ ID NO: 2324686 - RNA, 14 nt, Human
gccucuccuuugua

SEQ ID NO: 2324687 - RNA, 15 nt, Human
gccucuccuuuguau

SEQ ID NO: 2324688 - RNA, 13 nt, Human
gccucuagggacc

SEQ ID NO: 2324689 - RNA, 17 nt, Human
gccucuagggaccccuc

SEQ ID NO: 2324690 - RNA, 18 nt, Human
gccucuagggaccccucc

SEQ ID NO: 2324691 - RNA, 19 nt, Human
gccucuagggaccccuccu

SEQ ID NO: 2324692 - RNA, 20 nt, Human
gccucuagggaccccuccuc

SEQ ID NO: 2324693 - RNA, 23 nt, Human
gccucucaccuguacucuuccga

SEQ ID NO: 2324694 - RNA, 23 nt, Human
gccucuagggaccccuccucccu

SEQ ID NO: 2324695 - RNA, 15 nt, Human
gccucuaaccccagg

SEQ ID NO: 2324696 - RNA, 22 nt, Human
gccucgggacaccugcccugcc

SEQ ID NO: 2324697 - RNA, 13 nt, Human
gccucgggaccuc

SEQ ID NO: 2324698 - RNA, 16 nt, Human
gccucuaaccccaggc

SEQ ID NO: 2324699 - RNA, 17 nt, Human
gccucuaaccccaggcc

SEQ ID NO: 2324700 - RNA, 18 nt, Human
gccucuaaccccaggccc

SEQ ID NO: 2324701 - RNA, 19 nt, Human
gccucuaaccccaggcccc

SEQ ID NO: 2324702 - RNA, 23 nt, Human
gccucuaccugacacucccuugg

SEQ ID NO: 2324703 - RNA, 20 nt, Human
gccucuaaccccaggccccg

SEQ ID NO: 2324704 - RNA, 21 nt, Human
gccucuaaccccaggccccga

SEQ ID NO: 2324705 - RNA, 23 nt, Human
gccucggagccucauccgaggca

SEQ ID NO: 2324706 - RNA, 17 nt, Human
gccucggagccucaucc

SEQ ID NO: 2324707 - RNA, 15 nt, Human
gccucggagccucau

SEQ ID NO: 2324708 - RNA, 14 nt, Human
gccucggagccuca

SEQ ID NO: 2324709 - RNA, 17 nt, Human
gccucggccucccaaag

SEQ ID NO: 2324710 - RNA, 14 nt, Human
gccucggcuccugc

SEQ ID NO: 2324711 - RNA, 20 nt, Human
gccucggcuuuucucagcug

SEQ ID NO: 2324712 - RNA, 19 nt, Human
gccucggcuuuucucagcu

SEQ ID NO: 2324713 - RNA, 17 nt, Human
gccucggcuccugcugc

SEQ ID NO: 2324714 - RNA, 18 nt, Human
gccucgggaaccucacuc

SEQ ID NO: 2324715 - RNA, 23 nt, Human
gccucgggaaccucacucuugcc

SEQ ID NO: 2324716 - RNA, 21 nt, Human
gccucgggacaccugcccugc

SEQ ID NO: 2324717 - RNA, 18 nt, Human
gccucggcuuuucucagc

SEQ ID NO: 2324718 - RNA, 15 nt, Human
gccucggcuccugcu

SEQ ID NO: 2324719 - RNA, 16 nt, Human
gccucggcuccugcug

SEQ ID NO: 2324720 - RNA, 18 nt, Human
gccucggcuccugcugca

SEQ ID NO: 2324721 - RNA, 23 nt, Human
gccucccacccgaugcugcuuuc

SEQ ID NO: 2324722 - RNA, 15 nt, Human
gccuccccugcugaa

SEQ ID NO: 2324723 - RNA, 20 nt, Human
gccuccccugcugaaggugg

SEQ ID NO: 2324724 - RNA, 16 nt, Human
gccuccccugugcagu

SEQ ID NO: 2324725 - RNA, 21 nt, Human
gccucggacuuagcugggaga

SEQ ID NO: 2324726 - RNA, 20 nt, Human
gccucggacuuagcugggag

SEQ ID NO: 2324727 - RNA, 23 nt, Human
gccucccgaauagcugggacuac

SEQ ID NO: 2324728 - RNA, 15 nt, Human
gccucccgaguagcu

SEQ ID NO: 2324729 - RNA, 16 nt, Human
gccucaggugggccgc

SEQ ID NO: 2324730 - RNA, 13 nt, Human
gccucagguuccu

SEQ ID NO: 2324731 - RNA, 14 nt, Human
gccucagguuccua

SEQ ID NO: 2324732 - RNA, 15 nt, Human
gccucagcugccuca

SEQ ID NO: 2324733 - RNA, 14 nt, Human
gccucagcugccuc

SEQ ID NO: 2324734 - RNA, 19 nt, Human
gccucagcugccucacuuc

SEQ ID NO: 2324735 - RNA, 16 nt, Human
gccucagcugccucac

SEQ ID NO: 2324736 - RNA, 20 nt, Human
gccucagcugccucacuucc

SEQ ID NO: 2324737 - RNA, 12 nt, Human
gccucagugcca

SEQ ID NO: 2324738 - RNA, 14 nt, Human
gccucagugccacu

SEQ ID NO: 2324739 - RNA, 18 nt, Human
gccucagucucccucccu

SEQ ID NO: 2324740 - RNA, 15 nt, Human
gccucagucucccuc

SEQ ID NO: 2324741 - RNA, 22 nt, Human
gccucaguaaguaucuggagga

SEQ ID NO: 2324742 - RNA, 20 nt, Human
gccucaguaagacgacaagg

SEQ ID NO: 2324743 - RNA, 15 nt, Human
gccucaguccucccc

SEQ ID NO: 2324744 - RNA, 16 nt, Human
gccucaguccuccccu

SEQ ID NO: 2324745 - RNA, 18 nt, Human
gccucaguccuccccuca

SEQ ID NO: 2324746 - RNA, 22 nt, Human
gccucaguccuccccucacagc

SEQ ID NO: 2324747 - RNA, 23 nt, Human
gccucaguccuccccucacagcc

SEQ ID NO: 2324748 - RNA, 16 nt, Human
gccucagccuccugag

SEQ ID NO: 2324749 - RNA, 14 nt, Human
gccucagccucccg

SEQ ID NO: 2324750 - RNA, 18 nt, Human
gccucagccuccugagua

SEQ ID NO: 2324751 - RNA, 23 nt, Human
gccucagaauugaucauuuuccc

SEQ ID NO: 2324752 - RNA, 16 nt, Human
gccucagccucccaag

SEQ ID NO: 2324753 - RNA, 23 nt, Human
gccucagccucccaaagugcugg

SEQ ID NO: 2324754 - RNA, 16 nt, Human
gccucacccccucggg

SEQ ID NO: 2324755 - RNA, 22 nt, Human
gccucacccccucgggucuccu

SEQ ID NO: 2324756 - RNA, 23 nt, Human
gccucacccccucgggucuccuc

SEQ ID NO: 2324757 - RNA, 16 nt, Human
gccucacuugaaugug

SEQ ID NO: 2324758 - RNA, 22 nt, Human
gccucaccuuggggcuugacuu

SEQ ID NO: 2324759 - RNA, 20 nt, Human
gccucacuugaaugugucac

SEQ ID NO: 2324760 - RNA, 18 nt, Human
gccucacuugaauguguc

SEQ ID NO: 2324761 - RNA, 23 nt, Human
gccucaacccucccucagccccu

SEQ ID NO: 2324762 - RNA, 22 nt, Human
gccucaacccucccucagcccc

SEQ ID NO: 2324763 - RNA, 18 nt, Human
gccucaagucacucccaa

SEQ ID NO: 2324764 - RNA, 15 nt, Human
gccucacccccucgg

SEQ ID NO: 2324765 - RNA, 17 nt, Human
gccuaaguggcugcuga

SEQ ID NO: 2324766 - RNA, 16 nt, Human
gccuaaguggcugcug

SEQ ID NO: 2324767 - RNA, 22 nt, Human
gccgagcucguguauccugggg

SEQ ID NO: 2324768 - RNA, 16 nt, Human
gccgaggguccuggcu

SEQ ID NO: 2324769 - RNA, 21 nt, Human
gccuauaaugaagcuuuauac

SEQ ID NO: 2324770 - RNA, 23 nt, Human
gccuaucaaagaccuugugugua

SEQ ID NO: 2324771 - RNA, 16 nt, Human
gccuauaaugaagcuu

SEQ ID NO: 2324772 - RNA, 22 nt, Human
gccuauauuuuuuguuaaauga

SEQ ID NO: 2324773 - RNA, 15 nt, Human
gccgagccgggccug

SEQ ID NO: 2324774 - RNA, 16 nt, Human
gccgagccgggccugg

SEQ ID NO: 2324775 - RNA, 17 nt, Human
gccgagccgggccuggg

SEQ ID NO: 2324776 - RNA, 19 nt, Human
gccgagccgggccuggggc

SEQ ID NO: 2324777 - RNA, 19 nt, Human
gccgagauagccaaggcca

SEQ ID NO: 2324778 - RNA, 16 nt, Human
gccuaaggcugaacuu

SEQ ID NO: 2324779 - RNA, 20 nt, Human
gccgagccgggccuggggcu

SEQ ID NO: 2324780 - RNA, 21 nt, Human
gccgagcucguguauccuggg

SEQ ID NO: 2324781 - RNA, 23 nt, Human
gccgagcucguguauccuggggc

SEQ ID NO: 2324782 - RNA, 17 nt, Human
gccuaagugcagccccg

SEQ ID NO: 2324783 - RNA, 14 nt, Human
gccucaaccuccug

SEQ ID NO: 2324784 - RNA, 16 nt, Human
gccucaaccuccuggg

SEQ ID NO: 2324785 - RNA, 23 nt, Human
gccuaucagugugccccccaucc

SEQ ID NO: 2324786 - RNA, 20 nt, Human
gccuaucagaguugcugcaa

SEQ ID NO: 2324787 - RNA, 13 nt, Human
gccuaucagugug

SEQ ID NO: 2324788 - RNA, 14 nt, Human
gccuaucagugugc

SEQ ID NO: 2324789 - RNA, 15 nt, Human
gccuaucagugugcc

SEQ ID NO: 2324790 - RNA, 16 nt, Human
gccuaucagugugccc

SEQ ID NO: 2324791 - RNA, 18 nt, Human
gccuaucagugugccccc

SEQ ID NO: 2324792 - RNA, 19 nt, Human
gccuaucagugugcccccc

SEQ ID NO: 2324793 - RNA, 21 nt, Human
gccucaacccucccucagccc

SEQ ID NO: 2324794 - RNA, 19 nt, Human
gccucaacccucccucagc

SEQ ID NO: 2324795 - RNA, 18 nt, Human
gccucaacccucccucag

SEQ ID NO: 2324796 - RNA, 17 nt, Human
gccucaacccucccuca

SEQ ID NO: 2324797 - RNA, 19 nt, Human
gccucaagugauucuccug

SEQ ID NO: 2324798 - RNA, 20 nt, Human
gccucaagugauucuccugc

SEQ ID NO: 2324799 - RNA, 21 nt, Human
gccucaagugauucuccugcc

SEQ ID NO: 2324800 - RNA, 22 nt, Human
gcuucucauccugcaggcagcu

SEQ ID NO: 2324801 - RNA, 13 nt, Human
gcuucuccagccu

SEQ ID NO: 2324802 - RNA, 21 nt, Human
gcuuccagguaucuccaggau

SEQ ID NO: 2324803 - RNA, 22 nt, Human
gcuuccagguaucuccaggauu

SEQ ID NO: 2324804 - RNA, 19 nt, Human
gcuucucccacuuggccaa

SEQ ID NO: 2324805 - RNA, 14 nt, Human
gcuucuccagccug

SEQ ID NO: 2324806 - RNA, 17 nt, Human
gcuucuccagccuggac

SEQ ID NO: 2324807 - RNA, 12 nt, Human
gcuucuccaggc

SEQ ID NO: 2324808 - RNA, 18 nt, Human
gcuucucccacuuggcca

SEQ ID NO: 2324809 - RNA, 16 nt, Human
gcuuccagugaggcuc

SEQ ID NO: 2324810 - RNA, 21 nt, Human
gcuuccaggaaacuccacauc

SEQ ID NO: 2324811 - RNA, 19 nt, Human
gcuuccagguaucuccagg

SEQ ID NO: 2324812 - RNA, 20 nt, Human
gcuuccagguaucuccagga

SEQ ID NO: 2324813 - RNA, 17 nt, Human
gcuucauuuccuguguc

SEQ ID NO: 2324814 - RNA, 19 nt, Human
gcuuccaggaaacuccaca

SEQ ID NO: 2324815 - RNA, 15 nt, Human
gcuuccagugaggcu

SEQ ID NO: 2324816 - RNA, 12 nt, Human
gcuucugcaccc

SEQ ID NO: 2324817 - RNA, 23 nt, Human
gcuucuccgccagccuccucugg

SEQ ID NO: 2324818 - RNA, 19 nt, Human
gcuucugaaugcugcuacu

SEQ ID NO: 2324819 - RNA, 22 nt, Human
gcuucucugugaacgauuuaga

SEQ ID NO: 2324820 - RNA, 20 nt, Human
gcuucuccgccagccuccuc

SEQ ID NO: 2324821 - RNA, 21 nt, Human
gcuucuccgccagccuccucu

SEQ ID NO: 2324822 - RNA, 14 nt, Human
gcuucuccgccagc

SEQ ID NO: 2324823 - RNA, 15 nt, Human
gcuucuccgccagcc

SEQ ID NO: 2324824 - RNA, 16 nt, Human
gcuucuccgccagccu

SEQ ID NO: 2324825 - RNA, 17 nt, Human
gcuucuccgccagccuc

SEQ ID NO: 2324826 - RNA, 18 nt, Human
gcuucuccgccagccucc

SEQ ID NO: 2324827 - RNA, 19 nt, Human
gcuucuccgccagccuccu

SEQ ID NO: 2324828 - RNA, 12 nt, Human
gcuucugccacu

SEQ ID NO: 2324829 - RNA, 13 nt, Human
gcuucugccacuu

SEQ ID NO: 2324830 - RNA, 14 nt, Human
gcuucugccacuuc

SEQ ID NO: 2324831 - RNA, 16 nt, Human
gcuucugccacuuccc

SEQ ID NO: 2324832 - RNA, 18 nt, Human
gcuucugccacuucccag

SEQ ID NO: 2324833 - RNA, 19 nt, Human
gcuucugccacuucccagg

SEQ ID NO: 2324834 - RNA, 21 nt, Human
gcuucugccacuucccaggua

SEQ ID NO: 2324835 - RNA, 13 nt, Human
gcuucugcacccu

SEQ ID NO: 2324836 - RNA, 14 nt, Human
gcuucugcacccuc

SEQ ID NO: 2324837 - RNA, 15 nt, Human
gcuucugcacccucc

SEQ ID NO: 2324838 - RNA, 17 nt, Human
gcuucugcacccuccac

SEQ ID NO: 2324839 - RNA, 18 nt, Human
gcuucugcacccuccacc

SEQ ID NO: 2324840 - RNA, 19 nt, Human
gcuucugcacccuccaccc

SEQ ID NO: 2324841 - RNA, 21 nt, Human
gcuucugcacccuccacccug

SEQ ID NO: 2324842 - RNA, 13 nt, Human
gcuucugccugca

SEQ ID NO: 2324843 - RNA, 12 nt, Human
gcuucugccugc

SEQ ID NO: 2324844 - RNA, 16 nt, Human
gcuugaggguugggcu

SEQ ID NO: 2324845 - RNA, 19 nt, Human
gcuuaucucaggggugugc

SEQ ID NO: 2324846 - RNA, 13 nt, Human
gcuuaucucaggg

SEQ ID NO: 2324847 - RNA, 12 nt, Human
gcuuauacacuu

SEQ ID NO: 2324848 - RNA, 18 nt, Human
gcuuagucacugccugca

SEQ ID NO: 2324849 - RNA, 20 nt, Human
gcuuaguuuguguguugucu

SEQ ID NO: 2324850 - RNA, 21 nt, Human
gcuuaguuuguguguugucuc

SEQ ID NO: 2324851 - RNA, 16 nt, Human
gcuucaguggcagcug

SEQ ID NO: 2324852 - RNA, 23 nt, Human
gcuuaugacaucacuuguacaaa

SEQ ID NO: 2324853 - RNA, 22 nt, Human
gcuuaugacaucacuuguacaa

SEQ ID NO: 2324854 - RNA, 18 nt, Human
gcuuaugacaucacuugu

SEQ ID NO: 2324855 - RNA, 17 nt, Human
gcuucaguggcagcugc

SEQ ID NO: 2324856 - RNA, 18 nt, Human
gcuucaguggcagcugcu

SEQ ID NO: 2324857 - RNA, 23 nt, Human
gcuucauacuucaugaaauccug

SEQ ID NO: 2324858 - RNA, 22 nt, Human
gcuucauacagggaugguguuc

SEQ ID NO: 2324859 - RNA, 11 nt, Human
gcuucauacag

SEQ ID NO: 2324860 - RNA, 13 nt, Human
gcuucauuuccug

SEQ ID NO: 2324861 - RNA, 16 nt, Human
gcuucauuuccugugu

SEQ ID NO: 2324862 - RNA, 12 nt, Human
gcuucauccucc

SEQ ID NO: 2324863 - RNA, 15 nt, Human
gcuucauccuccuca

SEQ ID NO: 2324864 - RNA, 21 nt, Human
gcuguccucagguggccaugc

SEQ ID NO: 2324865 - RNA, 22 nt, Human
gcuguccuuacccaucugcacc

SEQ ID NO: 2324866 - RNA, 17 nt, Human
gcuguccuuacccaucu

SEQ ID NO: 2324867 - RNA, 20 nt, Human
gcuguccucagguggccaug

SEQ ID NO: 2324868 - RNA, 14 nt, Human
gcugucuccagacc

SEQ ID NO: 2324869 - RNA, 13 nt, Human
gcugucuccagac

SEQ ID NO: 2324870 - RNA, 22 nt, Human
gcugucgauguaggcauucugg

SEQ ID NO: 2324871 - RNA, 20 nt, Human
gcugucuacacuaagagaga

SEQ ID NO: 2324872 - RNA, 15 nt, Human
gcugccaaugggagc

SEQ ID NO: 2324873 - RNA, 16 nt, Human
gcugccaaugggagcu

SEQ ID NO: 2324874 - RNA, 19 nt, Human
gcugccaaugggagcucau

SEQ ID NO: 2324875 - RNA, 13 nt, Human
gcuguucagcugg

SEQ ID NO: 2324876 - RNA, 14 nt, Human
gcuguucagcuggu

SEQ ID NO: 2324877 - RNA, 22 nt, Human
gcuguucccauguagcccccug

SEQ ID NO: 2324878 - RNA, 19 nt, Human
gcugugggccucaaggacu

SEQ ID NO: 2324879 - RNA, 21 nt, Human
gcuguggggcugguagcucag

SEQ ID NO: 2324880 - RNA, 18 nt, Human
gcugugggccucaaggac

SEQ ID NO: 2324881 - RNA, 23 nt, Human
gcugugggcaggugggagcuuga

SEQ ID NO: 2324882 - RNA, 16 nt, Human
gcuguggggcugguag

SEQ ID NO: 2324883 - RNA, 23 nt, Human
gcugugguagggggugucucagg

SEQ ID NO: 2324884 - RNA, 18 nt, Human
gcuguggguacagagagg

SEQ ID NO: 2324885 - RNA, 22 nt, Human
gcuguggggcugguagcucagg

SEQ ID NO: 2324886 - RNA, 23 nt, Human
gcuguggugugucccccucuguc

SEQ ID NO: 2324887 - RNA, 22 nt, Human
gcugucuccagacccccacccc

SEQ ID NO: 2324888 - RNA, 15 nt, Human
gcugucuccagaccc

SEQ ID NO: 2324889 - RNA, 20 nt, Human
gcugugggcgugagaccugc

SEQ ID NO: 2324890 - RNA, 22 nt, Human
gcugugggcgugagaccugccc

SEQ ID NO: 2324891 - RNA, 21 nt, Human
gcugugggcgugagaccugcc

SEQ ID NO: 2324892 - RNA, 23 nt, Human
gcuuagaccucagccugugcugc

SEQ ID NO: 2324893 - RNA, 19 nt, Human
gcuuagaccucagccugug

SEQ ID NO: 2324894 - RNA, 21 nt, Human
gcuuagacuucgacucaggau

SEQ ID NO: 2324895 - RNA, 23 nt, Human
gcuuagacuucgacucaggaucc

SEQ ID NO: 2324896 - RNA, 16 nt, Human
gcuuagagaauguucu

SEQ ID NO: 2324897 - RNA, 18 nt, Human
gcuuagagaauguucucc

SEQ ID NO: 2324898 - RNA, 13 nt, Human
gcuuagagacagu

SEQ ID NO: 2324899 - RNA, 12 nt, Human
gcuuagagcagu

SEQ ID NO: 2324900 - RNA, 16 nt, Human
gcuuagagccucccuc

SEQ ID NO: 2324901 - RNA, 18 nt, Human
gcuuagcuuugcucugcc

SEQ ID NO: 2324902 - RNA, 22 nt, Human
gcuuagccuccugaccugaggc

SEQ ID NO: 2324903 - RNA, 17 nt, Human
gcuuagcuuugcucugc

SEQ ID NO: 2324904 - RNA, 11 nt, Human
gcuuagcagga

SEQ ID NO: 2324905 - RNA, 16 nt, Human
gcuuagcaggagagga

SEQ ID NO: 2324906 - RNA, 18 nt, Human
gcuuagcaggagaggaga

SEQ ID NO: 2324907 - RNA, 21 nt, Human
gcuuagcaggagaggagagcc

SEQ ID NO: 2324908 - RNA, 22 nt, Human
gcuuagcaggagaggagagcca

SEQ ID NO: 2324909 - RNA, 23 nt, Human
gcuuagcaggagaggagagccag

SEQ ID NO: 2324910 - RNA, 12 nt, Human
gcuguugagcug

SEQ ID NO: 2324911 - RNA, 15 nt, Human
gcuguugagcuguuu

SEQ ID NO: 2324912 - RNA, 16 nt, Human
gcuguugagcuguuuu

SEQ ID NO: 2324913 - RNA, 18 nt, Human
gcuguugagcuguuuucc

SEQ ID NO: 2324914 - RNA, 15 nt, Human
gcuguugccucaucu

SEQ ID NO: 2324915 - RNA, 13 nt, Human
gcuguugccucau

SEQ ID NO: 2324916 - RNA, 21 nt, Human
gcuguugcguaacuggcugug

SEQ ID NO: 2324917 - RNA, 23 nt, Human
gcuguugcguaacuggcuguguu

SEQ ID NO: 2324918 - RNA, 12 nt, Human
gcuguugcugaa

SEQ ID NO: 2324919 - RNA, 21 nt, Human
gcuguugaugaggccucuugg

SEQ ID NO: 2324920 - RNA, 15 nt, Human
gcuguugauugcuaa

SEQ ID NO: 2324921 - RNA, 16 nt, Human
gcuguugauugcuaaa

SEQ ID NO: 2324922 - RNA, 19 nt, Human
gcuguugauugcuaaaugu

SEQ ID NO: 2324923 - RNA, 20 nt, Human
gcuguugauugcuaaaugua

SEQ ID NO: 2324924 - RNA, 18 nt, Human
gcuguugauuucuuucca

SEQ ID NO: 2324925 - RNA, 13 nt, Human
gcuguugcaguga

SEQ ID NO: 2324926 - RNA, 21 nt, Human
gcuuagucacugagacagccc

SEQ ID NO: 2324927 - RNA, 12 nt, Human
gcuuaguuugug

SEQ ID NO: 2324928 - RNA, 15 nt, Human
gcuuagucacugccu

SEQ ID NO: 2324929 - RNA, 17 nt, Human
gcuuagucacugccugc

SEQ ID NO: 2324930 - RNA, 14 nt, Human
gcuuaguuugugug

SEQ ID NO: 2324931 - RNA, 16 nt, Human
gcuuaguuuguguguu

SEQ ID NO: 2324932 - RNA, 19 nt, Human
gcuuagucacugagacagc

SEQ ID NO: 2324933 - RNA, 20 nt, Human
gcuuagucacugagacagcc

SEQ ID NO: 2324934 - RNA, 15 nt, Human
gcuuagucacugaga

SEQ ID NO: 2324935 - RNA, 17 nt, Human
gcuuagucacugagaca

SEQ ID NO: 2324936 - RNA, 12 nt, Human
gcuuaggauguu

SEQ ID NO: 2324937 - RNA, 13 nt, Human
gcuuaggcagggc

SEQ ID NO: 2324938 - RNA, 19 nt, Human
gcuuagcuuugcucugcca

SEQ ID NO: 2324939 - RNA, 12 nt, Human
gcuuaggagaga

SEQ ID NO: 2324940 - RNA, 13 nt, Human
gcuuaggagagac

SEQ ID NO: 2324941 - RNA, 22 nt, Human
gcuuaggaugugugcaugugug

SEQ ID NO: 2324942 - RNA, 18 nt, Human
gcuuaggcagggcucucu

SEQ ID NO: 2324943 - RNA, 23 nt, Human
gcuuaguaaugcuacgugugauu

SEQ ID NO: 2324944 - RNA, 13 nt, Human
ggaaccagggaga

SEQ ID NO: 2324945 - RNA, 13 nt, Human
ggaaccagagcca

SEQ ID NO: 2324946 - RNA, 12 nt, Human
ggaaccagagcc

SEQ ID NO: 2324947 - RNA, 22 nt, Human
ggaaccaaagcgaauuuuaaaa

SEQ ID NO: 2324948 - RNA, 19 nt, Human
ggaaccagagccauggacu

SEQ ID NO: 2324949 - RNA, 17 nt, Human
ggaaccagggagaccga

SEQ ID NO: 2324950 - RNA, 11 nt, Human
ggaacccagac

SEQ ID NO: 2324951 - RNA, 14 nt, Human
ggaacccagacuca

SEQ ID NO: 2324952 - RNA, 13 nt, Human
ggaacccagacuc

SEQ ID NO: 2324953 - RNA, 15 nt, Human
ggaacccagacucag

SEQ ID NO: 2324954 - RNA, 18 nt, Human
ggaaccaugaagacagga

SEQ ID NO: 2324955 - RNA, 15 nt, Human
ggaaccccccuccca

SEQ ID NO: 2324956 - RNA, 22 nt, Human
ggaaccccccucccacccaccg

SEQ ID NO: 2324957 - RNA, 17 nt, Human
ggaaccccccucccacc

SEQ ID NO: 2324958 - RNA, 21 nt, Human
ggaaccccccucccacccacc

SEQ ID NO: 2324959 - RNA, 18 nt, Human
ggaacaguguuucccaua

SEQ ID NO: 2324960 - RNA, 23 nt, Human
ggaacaggcucagaucucauggg

SEQ ID NO: 2324961 - RNA, 23 nt, Human
ggaacaguguuucccauaauuuu

SEQ ID NO: 2324962 - RNA, 16 nt, Human
ggaacaggaaacugau

SEQ ID NO: 2324963 - RNA, 21 nt, Human
ggaaccaaagcgaauuuuaaa

SEQ ID NO: 2324964 - RNA, 15 nt, Human
ggaacaucaucaagg

SEQ ID NO: 2324965 - RNA, 22 nt, Human
ggaacaucaucaaggcacugcc

SEQ ID NO: 2324966 - RNA, 23 nt, Human
ggaacaucaucaaggcacugccu

SEQ ID NO: 2324967 - RNA, 23 nt, Human
ggaacagcuaugggagccccagg

SEQ ID NO: 2324968 - RNA, 22 nt, Human
ggaaauaucaguuacucagccc

SEQ ID NO: 2324969 - RNA, 14 nt, Human
ggaaauaugaaugc

SEQ ID NO: 2324970 - RNA, 21 nt, Human
ggaaaucaccgaaaacguggc

SEQ ID NO: 2324971 - RNA, 14 nt, Human
ggaaaucaccgaaa

SEQ ID NO: 2324972 - RNA, 17 nt, Human
ggaaaucaaauaugcaa

SEQ ID NO: 2324973 - RNA, 16 nt, Human
ggaaauaucaguuacu

SEQ ID NO: 2324974 - RNA, 14 nt, Human
ggaaauauauaugu

SEQ ID NO: 2324975 - RNA, 20 nt, Human
ggaaauaauaaagaugcucu

SEQ ID NO: 2324976 - RNA, 16 nt, Human
ggaaauaccaguucug

SEQ ID NO: 2324977 - RNA, 22 nt, Human
ggaaauaaaaccuuucaaauuu

SEQ ID NO: 2324978 - RNA, 17 nt, Human
ggaaauaagaaaaauca

SEQ ID NO: 2324979 - RNA, 20 nt, Human
ggaaauaaaaccuuucaaau

SEQ ID NO: 2324980 - RNA, 19 nt, Human
ggaaauaaaaccuuucaaa

SEQ ID NO: 2324981 - RNA, 18 nt, Human
ggaaauaaaaccuuucaa

SEQ ID NO: 2324982 - RNA, 16 nt, Human
ggaaauaaaaccuuuc

SEQ ID NO: 2324983 - RNA, 15 nt, Human
ggaaauaaaaccuuu

SEQ ID NO: 2324984 - RNA, 21 nt, Human
ggaaaggggcaggccagagcu

SEQ ID NO: 2324985 - RNA, 21 nt, Human
ggaaaggggagagccugcugg

SEQ ID NO: 2324986 - RNA, 14 nt, Human
ggaaaggggggagc

SEQ ID NO: 2324987 - RNA, 22 nt, Human
ggaaagggggucccagugggag

SEQ ID NO: 2324988 - RNA, 18 nt, Human
ggaaaguguaaagcauuc

SEQ ID NO: 2324989 - RNA, 18 nt, Human
ggaaaggggggagcuggg

SEQ ID NO: 2324990 - RNA, 19 nt, Human
ggaaaguguaaagcauucc

SEQ ID NO: 2324991 - RNA, 12 nt, Human
ggaaaggggaga

SEQ ID NO: 2324992 - RNA, 13 nt, Human
ggaaaggggagag

SEQ ID NO: 2324993 - RNA, 14 nt, Human
ggaaaggggagagc

SEQ ID NO: 2324994 - RNA, 18 nt, Human
ggaaaggggagagccugc

SEQ ID NO: 2324995 - RNA, 19 nt, Human
ggaaaggggagagccugcu

SEQ ID NO: 2324996 - RNA, 20 nt, Human
ggaaaggcucugaaagccag

SEQ ID NO: 2324997 - RNA, 15 nt, Human
ggaaaggcucugaaa

SEQ ID NO: 2324998 - RNA, 23 nt, Human
ggaaaggcucagucucaggagca

SEQ ID NO: 2324999 - RNA, 22 nt, Human
ggaaaggcuccaggagcagcca

SEQ ID NO: 2325000 - RNA, 17 nt, Human
ggaaaggcuccaggagc

SEQ ID NO: 2325001 - RNA, 19 nt, Human
ggaaaggcuccaggagcag

SEQ ID NO: 2325002 - RNA, 20 nt, Human
ggaaaggcuccaggagcagc

SEQ ID NO: 2325003 - RNA, 21 nt, Human
ggaaaggcuccaggagcagcc

SEQ ID NO: 2325004 - RNA, 20 nt, Human
ggaaaggcucagucucagga

SEQ ID NO: 2325005 - RNA, 12 nt, Human
ggaaaauuauuu

SEQ ID NO: 2325006 - RNA, 12 nt, Human
ggaaaggcucca

SEQ ID NO: 2325007 - RNA, 13 nt, Human
ggaaaggcuccag

SEQ ID NO: 2325008 - RNA, 14 nt, Human
ggaaaggcuccagg

SEQ ID NO: 2325009 - RNA, 19 nt, Human
ggaaaaucagccugcucca

SEQ ID NO: 2325010 - RNA, 18 nt, Human
ggaaaagguuuuauuuug

SEQ ID NO: 2325011 - RNA, 15 nt, Human
ggaaaaguacauuua

SEQ ID NO: 2325012 - RNA, 16 nt, Human
ggaaaaugcauuguau

SEQ ID NO: 2325013 - RNA, 20 nt, Human
ggaaaaugcagcagggaugc

SEQ ID NO: 2325014 - RNA, 14 nt, Human
ggaaaaugcauugu

SEQ ID NO: 2325015 - RNA, 19 nt, Human
ggaaaaucucuuuuugacu

SEQ ID NO: 2325016 - RNA, 14 nt, Human
ggaaaaugaauaau

SEQ ID NO: 2325017 - RNA, 23 nt, Human
ggaaaaucagccugcuccagcug

SEQ ID NO: 2325018 - RNA, 21 nt, Human
gcuuuagacacuggcugccag

SEQ ID NO: 2325019 - RNA, 14 nt, Human
gcuuuagacccugg

SEQ ID NO: 2325020 - RNA, 16 nt, Human
gcuuuacuguuuguua

SEQ ID NO: 2325021 - RNA, 18 nt, Human
gcuugaggguugggcugg

SEQ ID NO: 2325022 - RNA, 20 nt, Human
gcuugaggguugggcuggug

SEQ ID NO: 2325023 - RNA, 21 nt, Human
gcuuuauuuuuuaaguauuua

SEQ ID NO: 2325024 - RNA, 19 nt, Human
gcuuuauuuuuuaaguauu

SEQ ID NO: 2325025 - RNA, 20 nt, Human
gcuuuauacguguagcuaua

SEQ ID NO: 2325026 - RNA, 21 nt, Human
gcuuucaauuccguagccagc

SEQ ID NO: 2325027 - RNA, 23 nt, Human
gcuuuauuuuuuaaguauuuaua

SEQ ID NO: 2325028 - RNA, 14 nt, Human
gcuuuauaaauaaa

SEQ ID NO: 2325029 - RNA, 10 nt, Human
gcuuuauaaa

SEQ ID NO: 2325030 - RNA, 23 nt, Human
gcuuuaguccuagaggaccugag

SEQ ID NO: 2325031 - RNA, 17 nt, Human
gcuuuagacccugggug

SEQ ID NO: 2325032 - RNA, 15 nt, Human
gcuuuagacccuggg

SEQ ID NO: 2325033 - RNA, 16 nt, Human
gcuuuagacccugggu

SEQ ID NO: 2325034 - RNA, 16 nt, Human
gcuuucaauuccguag

SEQ ID NO: 2325035 - RNA, 17 nt, Human
gcuuucacuauuuccuu

SEQ ID NO: 2325036 - RNA, 19 nt, Human
gcuuucacuauuuccuuua

SEQ ID NO: 2325037 - RNA, 15 nt, Human
gcuuuguaugcacuu

SEQ ID NO: 2325038 - RNA, 15 nt, Human
gcuuugugugauuga

SEQ ID NO: 2325039 - RNA, 16 nt, Human
gcuuugugugauugaa

SEQ ID NO: 2325040 - RNA, 15 nt, Human
gcuuucagccucugg

SEQ ID NO: 2325041 - RNA, 15 nt, Human
gcuuugugauuuuug

SEQ ID NO: 2325042 - RNA, 20 nt, Human
ggaaaaggcagggagcgagg

SEQ ID NO: 2325043 - RNA, 20 nt, Human
ggaaaagggucuugggaaau

SEQ ID NO: 2325044 - RNA, 21 nt, Human
ggaaaagggucuugggaaaua

SEQ ID NO: 2325045 - RNA, 18 nt, Human
ggaaaagcugcugacagu

SEQ ID NO: 2325046 - RNA, 20 nt, Human
ggaaaagcugcugacagugu

SEQ ID NO: 2325047 - RNA, 19 nt, Human
ggaaaagcggacaucagcu

SEQ ID NO: 2325048 - RNA, 14 nt, Human
ggaaaagccucugu

SEQ ID NO: 2325049 - RNA, 20 nt, Human
ggaaaagccaagaggcugca

SEQ ID NO: 2325050 - RNA, 14 nt, Human
ggaaaagcugcuga

SEQ ID NO: 2325051 - RNA, 18 nt, Human
ggaaaagcagcucucccc

SEQ ID NO: 2325052 - RNA, 14 nt, Human
ggaaaagcagcucu

SEQ ID NO: 2325053 - RNA, 21 nt, Human
ggaaaaccaagccguggcuuc

SEQ ID NO: 2325054 - RNA, 21 nt, Human
ggaaaagaggaguuucgaggu

SEQ ID NO: 2325055 - RNA, 18 nt, Human
ggaaaacagacucagguu

SEQ ID NO: 2325056 - RNA, 22 nt, Human
ggaaaacagaacaucauuagaa

SEQ ID NO: 2325057 - RNA, 15 nt, Human
ggaaaacauuccauc

SEQ ID NO: 2325058 - RNA, 15 nt, Human
ggaaaaauccagaaa

SEQ ID NO: 2325059 - RNA, 17 nt, Human
ggaaaaaugagagaagg

SEQ ID NO: 2325060 - RNA, 15 nt, Human
ggaaaaaugaguaau

SEQ ID NO: 2325061 - RNA, 12 nt, Human
ggaaaaaugugu

SEQ ID NO: 2325062 - RNA, 18 nt, Human
ggaaaacaugcuacacac

SEQ ID NO: 2325063 - RNA, 15 nt, Human
ggaaaaauauuuaag

SEQ ID NO: 2325064 - RNA, 14 nt, Human
ggaaaaauauuuaa

SEQ ID NO: 2325065 - RNA, 13 nt, Human
ggaaaaauauuua

SEQ ID NO: 2325066 - RNA, 16 nt, Human
gcuuuucacugcugca

SEQ ID NO: 2325067 - RNA, 17 nt, Human
gcuuuucacugcugcaa

SEQ ID NO: 2325068 - RNA, 22 nt, Human
gcuuuucacugcuggcugccuu

SEQ ID NO: 2325069 - RNA, 23 nt, Human
gcuuuucacugcuggcugccuua

SEQ ID NO: 2325070 - RNA, 21 nt, Human
gcuuuguuuguugucagcuga

SEQ ID NO: 2325071 - RNA, 14 nt, Human
gcuuuguuuugcac

SEQ ID NO: 2325072 - RNA, 13 nt, Human
gcuuuucacugcu

SEQ ID NO: 2325073 - RNA, 23 nt, Human
gcuuuguuuugcacacuuugcca

SEQ ID NO: 2325074 - RNA, 14 nt, Human
gcuuuucacugcug

SEQ ID NO: 2325075 - RNA, 18 nt, Human
gcuuuucacugcuggcug

SEQ ID NO: 2325076 - RNA, 19 nt, Human
ggagaugaagcaaacacau

SEQ ID NO: 2325077 - RNA, 23 nt, Human
ggagaugaaaucuuacagcuggg

SEQ ID NO: 2325078 - RNA, 23 nt, Human
ggagauauuuauggggggagaac

SEQ ID NO: 2325079 - RNA, 13 nt, Human
ggagauccuccug

SEQ ID NO: 2325080 - RNA, 15 nt, Human
ggagauccuccugca

SEQ ID NO: 2325081 - RNA, 22 nt, Human
ggagauauuuauggggggagaa

SEQ ID NO: 2325082 - RNA, 22 nt, Human
ggagauaucugagggaggaggc

SEQ ID NO: 2325083 - RNA, 20 nt, Human
ggagaucaaggagaggaggc

SEQ ID NO: 2325084 - RNA, 14 nt, Human
ggagauagggaaag

SEQ ID NO: 2325085 - RNA, 23 nt, Human
ggagaguucaauggcugcugaag

SEQ ID NO: 2325086 - RNA, 21 nt, Human
ggagauagccccacaggaggu

SEQ ID NO: 2325087 - RNA, 20 nt, Human
ggagauagccccacaggagg

SEQ ID NO: 2325088 - RNA, 23 nt, Human
ggagagguuauaggucacuccug

SEQ ID NO: 2325089 - RNA, 20 nt, Human
ggagaguacagugagccaag

SEQ ID NO: 2325090 - RNA, 17 nt, Human
ggagaguacagugagcc

SEQ ID NO: 2325091 - RNA, 17 nt, Human
ggagagucccagagcag

SEQ ID NO: 2325092 - RNA, 20 nt, Human
ggagagucccagagcaggag

SEQ ID NO: 2325093 - RNA, 21 nt, Human
ggagagucccagagcaggagg

SEQ ID NO: 2325094 - RNA, 21 nt, Human
ggagaguccccugaaggucug

SEQ ID NO: 2325095 - RNA, 22 nt, Human
ggagagucccagagcaggaggc

SEQ ID NO: 2325096 - RNA, 18 nt, Human
ggagaguuuccugaaaca

SEQ ID NO: 2325097 - RNA, 21 nt, Human
ggagagguuauaggucacucc

SEQ ID NO: 2325098 - RNA, 13 nt, Human
ggagagguggagc

SEQ ID NO: 2325099 - RNA, 15 nt, Human
ggagaggugccagca

SEQ ID NO: 2325100 - RNA, 16 nt, Human
ggagaggugccagcaa

SEQ ID NO: 2325101 - RNA, 23 nt, Human
ggagaggucuuuuuuaaaaggaa

SEQ ID NO: 2325102 - RNA, 14 nt, Human
ggagaggugccagc

SEQ ID NO: 2325103 - RNA, 18 nt, Human
ggagaggucuuuuuuaaa

SEQ ID NO: 2325104 - RNA, 11 nt, Human
ggagaggucuu

SEQ ID NO: 2325105 - RNA, 13 nt, Human
ggagaggccauga

SEQ ID NO: 2325106 - RNA, 21 nt, Human
ggagaggaugagagcccagag

SEQ ID NO: 2325107 - RNA, 22 nt, Human
ggagaggaugagagcccagagg

SEQ ID NO: 2325108 - RNA, 23 nt, Human
ggagagggucuggagaagcagug

SEQ ID NO: 2325109 - RNA, 21 nt, Human
ggagaggcuagaaccaagaag

SEQ ID NO: 2325110 - RNA, 22 nt, Human
ggagaggcccucuggaguggcc

SEQ ID NO: 2325111 - RNA, 15 nt, Human
ggagacaagaaaucc

SEQ ID NO: 2325112 - RNA, 18 nt, Human
ggagacaagaaaucccug

SEQ ID NO: 2325113 - RNA, 22 nt, Human
ggagaauuuagguuuuuauuag

SEQ ID NO: 2325114 - RNA, 16 nt, Human
ggagaauuuuacugug

SEQ ID NO: 2325115 - RNA, 20 nt, Human
ggagacacuggccccucaaa

SEQ ID NO: 2325116 - RNA, 17 nt, Human
ggagacacuggccccuc

SEQ ID NO: 2325117 - RNA, 21 nt, Human
ggagacacaacaacuccuagg

SEQ ID NO: 2325118 - RNA, 22 nt, Human
ggagaaugucaguauguggaag

SEQ ID NO: 2325119 - RNA, 19 nt, Human
ggagaaucaugugaacccg

SEQ ID NO: 2325120 - RNA, 17 nt, Human
ggagaagccauugucuu

SEQ ID NO: 2325121 - RNA, 17 nt, Human
ggagaaucaugugaacc

SEQ ID NO: 2325122 - RNA, 14 nt, Human
ggagaaucauguga

SEQ ID NO: 2325123 - RNA, 18 nt, Human
ggagaagcccgugugaga

SEQ ID NO: 2325124 - RNA, 20 nt, Human
ggagaggagugacugagcuu

SEQ ID NO: 2325125 - RNA, 13 nt, Human
ggagaggaugaga

SEQ ID NO: 2325126 - RNA, 20 nt, Human
ggagaggaugagagcccaga

SEQ ID NO: 2325127 - RNA, 16 nt, Human
ggagaggagagccaga

SEQ ID NO: 2325128 - RNA, 20 nt, Human
ggagaggagagccagagaag

SEQ ID NO: 2325129 - RNA, 13 nt, Human
ggagaggagagag

SEQ ID NO: 2325130 - RNA, 14 nt, Human
ggagaggagagagg

SEQ ID NO: 2325131 - RNA, 15 nt, Human
ggagaggagagaggc

SEQ ID NO: 2325132 - RNA, 18 nt, Human
ggagaggagagaggcaga

SEQ ID NO: 2325133 - RNA, 12 nt, Human
ggagaggagagc

SEQ ID NO: 2325134 - RNA, 13 nt, Human
ggagaggagagcc

SEQ ID NO: 2325135 - RNA, 14 nt, Human
ggagaggagagcca

SEQ ID NO: 2325136 - RNA, 15 nt, Human
ggagaggagagccag

SEQ ID NO: 2325137 - RNA, 12 nt, Human
ggagaggagaga

SEQ ID NO: 2325138 - RNA, 12 nt, Human
ggagaggaaaga

SEQ ID NO: 2325139 - RNA, 19 nt, Human
ggagacagccccagagcag

SEQ ID NO: 2325140 - RNA, 17 nt, Human
ggagacagccccagagc

SEQ ID NO: 2325141 - RNA, 17 nt, Human
ggagaggaaaaguaagg

SEQ ID NO: 2325142 - RNA, 14 nt, Human
ggagacagcaucag

SEQ ID NO: 2325143 - RNA, 17 nt, Human
ggagacagcaucagggu

SEQ ID NO: 2325144 - RNA, 18 nt, Human
ggagacagcaucaggguu

SEQ ID NO: 2325145 - RNA, 14 nt, Human
ggagacagccccag

SEQ ID NO: 2325146 - RNA, 15 nt, Human
ggagacagccccaga

SEQ ID NO: 2325147 - RNA, 18 nt, Human
ggagaagcggcuggcagc

SEQ ID NO: 2325148 - RNA, 17 nt, Human
ggagaagcggcuggcag

SEQ ID NO: 2325149 - RNA, 19 nt, Human
ggagaaucacuugaacccg

SEQ ID NO: 2325150 - RNA, 15 nt, Human
ggagaaucacuugaa

SEQ ID NO: 2325151 - RNA, 17 nt, Human
ggacugugugcucagga

SEQ ID NO: 2325152 - RNA, 12 nt, Human
ggagaagccagg

SEQ ID NO: 2325153 - RNA, 15 nt, Human
ggagaagccaggaau

SEQ ID NO: 2325154 - RNA, 13 nt, Human
ggagaagccagga

SEQ ID NO: 2325155 - RNA, 20 nt, Human
ggagaagccacaggccugag

SEQ ID NO: 2325156 - RNA, 11 nt, Human
ggagaagccau

SEQ ID NO: 2325157 - RNA, 12 nt, Human
ggagaagccauu

SEQ ID NO: 2325158 - RNA, 16 nt, Human
ggagaagccauugucu

SEQ ID NO: 2325159 - RNA, 22 nt, Human
ggacuggcuagaguccucacuc

SEQ ID NO: 2325160 - RNA, 20 nt, Human
ggacuggcuagaguccucac

SEQ ID NO: 2325161 - RNA, 19 nt, Human
ggacuggcuagaguccuca

SEQ ID NO: 2325162 - RNA, 16 nt, Human
ggacuggccccugggu

SEQ ID NO: 2325163 - RNA, 17 nt, Human
ggacuggccccuggguc

SEQ ID NO: 2325164 - RNA, 15 nt, Human
ggacuggaguggagc

SEQ ID NO: 2325165 - RNA, 18 nt, Human
ggacuggaaccagggaga

SEQ ID NO: 2325166 - RNA, 14 nt, Human
ggacuggccccugg

SEQ ID NO: 2325167 - RNA, 15 nt, Human
ggacuggccccuggg

SEQ ID NO: 2325168 - RNA, 18 nt, Human
ggacuggccucugcugau

SEQ ID NO: 2325169 - RNA, 22 nt, Human
ggacuggcgaguccagagagga

SEQ ID NO: 2325170 - RNA, 23 nt, Human
ggacuggcuagaguccucacucc

SEQ ID NO: 2325171 - RNA, 19 nt, Human
ggacugugacaggcagcag

SEQ ID NO: 2325172 - RNA, 20 nt, Human
ggacugugacaggcagcaga

SEQ ID NO: 2325173 - RNA, 21 nt, Human
ggacugugacaggcagcagag

SEQ ID NO: 2325174 - RNA, 15 nt, Human
ggacgcucucuggcc

SEQ ID NO: 2325175 - RNA, 20 nt, Human
ggacgccugggggugccagg

SEQ ID NO: 2325176 - RNA, 17 nt, Human
ggacgcucccugcucca

SEQ ID NO: 2325177 - RNA, 14 nt, Human
ggacuggaaccagg

SEQ ID NO: 2325178 - RNA, 15 nt, Human
ggacuggaaccaggg

SEQ ID NO: 2325179 - RNA, 17 nt, Human
ggacuggaaccagggag

SEQ ID NO: 2325180 - RNA, 22 nt, Human
ggacuggaaccagggagaccga

SEQ ID NO: 2325181 - RNA, 14 nt, Human
ggacgcucucuggc

SEQ ID NO: 2325182 - RNA, 13 nt, Human
ggacgcucucugg

SEQ ID NO: 2325183 - RNA, 17 nt, Human
ggaccaaggagaugaag

SEQ ID NO: 2325184 - RNA, 11 nt, Human
ggaccaaggca

SEQ ID NO: 2325185 - RNA, 15 nt, Human
ggaccaaggcaaggc

SEQ ID NO: 2325186 - RNA, 15 nt, Human
ggaccaaggaccccu

SEQ ID NO: 2325187 - RNA, 22 nt, Human
ggaccaacccuguuuccugagu

SEQ ID NO: 2325188 - RNA, 16 nt, Human
ggaccaagcaucuugg

SEQ ID NO: 2325189 - RNA, 17 nt, Human
ggaccaacccuguuucc

SEQ ID NO: 2325190 - RNA, 18 nt, Human
ggaccaacccuguuuccu

SEQ ID NO: 2325191 - RNA, 20 nt, Human
ggaccaacccuguuuccuga

SEQ ID NO: 2325192 - RNA, 14 nt, Human
ggacauuucucuaa

SEQ ID NO: 2325193 - RNA, 16 nt, Human
ggacauuugcucaugg

SEQ ID NO: 2325194 - RNA, 21 nt, Human
ggacagcagaagggggagacc

SEQ ID NO: 2325195 - RNA, 18 nt, Human
ggacauggccccugugag

SEQ ID NO: 2325196 - RNA, 17 nt, Human
ggacauuccaagacagu

SEQ ID NO: 2325197 - RNA, 17 nt, Human
ggacauguuuugauaaa

SEQ ID NO: 2325198 - RNA, 16 nt, Human
ggacauuccaagacag

SEQ ID NO: 2325199 - RNA, 16 nt, Human
ggacauguuuugauaa

SEQ ID NO: 2325200 - RNA, 21 nt, Human
ggacauguuuuuguuuucuuu

SEQ ID NO: 2325201 - RNA, 20 nt, Human
ggacauugcggacagccacg

SEQ ID NO: 2325202 - RNA, 19 nt, Human
ggacagauccagggacuga

SEQ ID NO: 2325203 - RNA, 23 nt, Human
ggacagauccagggacugaagcc

SEQ ID NO: 2325204 - RNA, 21 nt, Human
ggacagagguuaucuguccca

SEQ ID NO: 2325205 - RNA, 16 nt, Human
ggacagaguaugaaca

SEQ ID NO: 2325206 - RNA, 15 nt, Human
ggacagaucaauggc

SEQ ID NO: 2325207 - RNA, 18 nt, Human
ggacagaucaauggcgca

SEQ ID NO: 2325208 - RNA, 19 nt, Human
ggacagaucaauggcgcag

SEQ ID NO: 2325209 - RNA, 23 nt, Human
ggacagaucaauggcgcagugcc

SEQ ID NO: 2325210 - RNA, 22 nt, Human
ggacacucaaaagcugggcagg

SEQ ID NO: 2325211 - RNA, 17 nt, Human
ggacacucaaaagcugg

SEQ ID NO: 2325212 - RNA, 15 nt, Human
ggacagccacggcca

SEQ ID NO: 2325213 - RNA, 19 nt, Human
ggacagccacggccaggcc

SEQ ID NO: 2325214 - RNA, 20 nt, Human
ggacagccacggccaggcca

SEQ ID NO: 2325215 - RNA, 21 nt, Human
ggacagccacggccaggccag

SEQ ID NO: 2325216 - RNA, 13 nt, Human
ggaccuccugagc

SEQ ID NO: 2325217 - RNA, 14 nt, Human
ggaccuccccugag

SEQ ID NO: 2325218 - RNA, 17 nt, Human
ggaccuccccugaggcu

SEQ ID NO: 2325219 - RNA, 23 nt, Human
ggaccucaggugagaagcagagg

SEQ ID NO: 2325220 - RNA, 19 nt, Human
ggaccucaggugagaagca

SEQ ID NO: 2325221 - RNA, 19 nt, Human
ggaccagaagccaaagacu

SEQ ID NO: 2325222 - RNA, 22 nt, Human
ggaccacaaaaaugaaagcaug

SEQ ID NO: 2325223 - RNA, 23 nt, Human
ggaccaaggcaaggcaggugccu

SEQ ID NO: 2325224 - RNA, 13 nt, Human
ggaccacaccucc

SEQ ID NO: 2325225 - RNA, 17 nt, Human
ggaccaaggcaaggcag

SEQ ID NO: 2325226 - RNA, 19 nt, Human
ggaccaaggcaaggcaggu

SEQ ID NO: 2325227 - RNA, 20 nt, Human
ggaccaaggcaaggcaggug

SEQ ID NO: 2325228 - RNA, 22 nt, Human
ggaccaaggcaaggcaggugcc

SEQ ID NO: 2325229 - RNA, 21 nt, Human
ggaccacaccucccugaacca

SEQ ID NO: 2325230 - RNA, 20 nt, Human
ggaccacagcaaggcaccug

SEQ ID NO: 2325231 - RNA, 13 nt, Human
ggaccacauuuua

SEQ ID NO: 2325232 - RNA, 14 nt, Human
ggaccacauuuuau

SEQ ID NO: 2325233 - RNA, 13 nt, Human
ggaccagagcugc

SEQ ID NO: 2325234 - RNA, 21 nt, Human
ggaccacugcaugagcuuuua

SEQ ID NO: 2325235 - RNA, 14 nt, Human
ggaccuccugagcg

SEQ ID NO: 2325236 - RNA, 19 nt, Human
ggacgccugggggugccag

SEQ ID NO: 2325237 - RNA, 14 nt, Human
ggacgccugggggu

SEQ ID NO: 2325238 - RNA, 17 nt, Human
ggacgcuacccgggaag

SEQ ID NO: 2325239 - RNA, 19 nt, Human
ggacgcuacccgggaaggg

SEQ ID NO: 2325240 - RNA, 20 nt, Human
ggacgcuacccgggaagggg

SEQ ID NO: 2325241 - RNA, 15 nt, Human
ggaccuugaacuggg

SEQ ID NO: 2325242 - RNA, 17 nt, Human
ggaccuugaacugggua

SEQ ID NO: 2325243 - RNA, 20 nt, Human
ggaccuucgggcugugcccg

SEQ ID NO: 2325244 - RNA, 19 nt, Human
ggaccuucgggcugugccc

SEQ ID NO: 2325245 - RNA, 18 nt, Human
ggaccuucgggcugugcc

SEQ ID NO: 2325246 - RNA, 17 nt, Human
ggaccuucgggcugugc

SEQ ID NO: 2325247 - RNA, 17 nt, Human
ggaaggggacccccgcc

SEQ ID NO: 2325248 - RNA, 22 nt, Human
ggaaggggacccccgcccccug

SEQ ID NO: 2325249 - RNA, 17 nt, Human
ggaaggggccagaggcu

SEQ ID NO: 2325250 - RNA, 15 nt, Human
ggaaggggccagagg

SEQ ID NO: 2325251 - RNA, 18 nt, Human
ggaaggggcccgugggag

SEQ ID NO: 2325252 - RNA, 21 nt, Human
ggaaggggcccgugggaguca

SEQ ID NO: 2325253 - RNA, 16 nt, Human
ggaaggggguccaccc

SEQ ID NO: 2325254 - RNA, 11 nt, Human
ggaaggugggg

SEQ ID NO: 2325255 - RNA, 19 nt, Human
ggaaggucccuuguuucca

SEQ ID NO: 2325256 - RNA, 16 nt, Human
ggaagguggggacagg

SEQ ID NO: 2325257 - RNA, 19 nt, Human
ggaagguuuggugugugga

SEQ ID NO: 2325258 - RNA, 23 nt, Human
ggaaguaacaguaacgcagggga

SEQ ID NO: 2325259 - RNA, 18 nt, Human
ggaaggguuuguggcugg

SEQ ID NO: 2325260 - RNA, 13 nt, Human
ggaaggguggugg

SEQ ID NO: 2325261 - RNA, 18 nt, Human
ggaagguuuguauauugu

SEQ ID NO: 2325262 - RNA, 16 nt, Human
ggaaguaggaaguaaa

SEQ ID NO: 2325263 - RNA, 18 nt, Human
ggaaguacuggagaaaau

SEQ ID NO: 2325264 - RNA, 12 nt, Human
ggaaguacugga

SEQ ID NO: 2325265 - RNA, 16 nt, Human
ggaaguacuggagaaa

SEQ ID NO: 2325266 - RNA, 17 nt, Human
ggaagugacaaggcccc

SEQ ID NO: 2325267 - RNA, 17 nt, Human
ggaagucuaggagcugg

SEQ ID NO: 2325268 - RNA, 23 nt, Human
ggaagugaagagggagaagggau

SEQ ID NO: 2325269 - RNA, 14 nt, Human
ggaagucuaggagc

SEQ ID NO: 2325270 - RNA, 20 nt, Human
ggaagugaagacuggaagcu

SEQ ID NO: 2325271 - RNA, 23 nt, Human
ggaaguccccaggccccaggaag

SEQ ID NO: 2325272 - RNA, 21 nt, Human
ggaaguccccaggccccagga

SEQ ID NO: 2325273 - RNA, 13 nt, Human
ggaaguccucugg

SEQ ID NO: 2325274 - RNA, 14 nt, Human
ggaaguccucuggg

SEQ ID NO: 2325275 - RNA, 18 nt, Human
ggaaguccccaggcccca

SEQ ID NO: 2325276 - RNA, 18 nt, Human
ggaagucauccugccaac

SEQ ID NO: 2325277 - RNA, 17 nt, Human
ggaaguccaauguggca

SEQ ID NO: 2325278 - RNA, 16 nt, Human
ggaaguccaauguggc

SEQ ID NO: 2325279 - RNA, 15 nt, Human
ggaaguccaaugugg

SEQ ID NO: 2325280 - RNA, 13 nt, Human
ggaagucaaagca

SEQ ID NO: 2325281 - RNA, 21 nt, Human
ggaagugagggucagagagga

SEQ ID NO: 2325282 - RNA, 16 nt, Human
ggaagugaggaagcca

SEQ ID NO: 2325283 - RNA, 21 nt, Human
ggaagugacaaggccccagag

SEQ ID NO: 2325284 - RNA, 14 nt, Human
ggaagugaggaagc

SEQ ID NO: 2325285 - RNA, 22 nt, Human
ggaagugacaaggccccagaga

SEQ ID NO: 2325286 - RNA, 19 nt, Human
ggaagugacaaggccccag

SEQ ID NO: 2325287 - RNA, 18 nt, Human
ggaagugacaaggcccca

SEQ ID NO: 2325288 - RNA, 20 nt, Human
ggaagugacgguuuaauggg

SEQ ID NO: 2325289 - RNA, 17 nt, Human
ggaaguguaacagcuga

SEQ ID NO: 2325290 - RNA, 16 nt, Human
ggaaguguaacagcug

SEQ ID NO: 2325291 - RNA, 14 nt, Human
ggaaugauuaauua

SEQ ID NO: 2325292 - RNA, 18 nt, Human
ggaagugcuaauuuugaa

SEQ ID NO: 2325293 - RNA, 16 nt, Human
ggaaggggacccccgc

SEQ ID NO: 2325294 - RNA, 12 nt, Human
ggaagggccagu

SEQ ID NO: 2325295 - RNA, 21 nt, Human
ggaagggccagucugggcugc

SEQ ID NO: 2325296 - RNA, 21 nt, Human
ggaagggcaggaaggagagcc

SEQ ID NO: 2325297 - RNA, 17 nt, Human
ggaagggcauccuucug

SEQ ID NO: 2325298 - RNA, 11 nt, Human
ggaagggccag

SEQ ID NO: 2325299 - RNA, 23 nt, Human
ggaaggggagauaaggguaucug

SEQ ID NO: 2325300 - RNA, 15 nt, Human
ggaagggcaggaagg

SEQ ID NO: 2325301 - RNA, 12 nt, Human
ggaagggcagga

SEQ ID NO: 2325302 - RNA, 14 nt, Human
ggaagggcaaaacc

SEQ ID NO: 2325303 - RNA, 16 nt, Human
ggaagggacuaggagc

SEQ ID NO: 2325304 - RNA, 23 nt, Human
ggaagggaccaaggcaaggcagg

SEQ ID NO: 2325305 - RNA, 15 nt, Human
ggaagggaccaaggc

SEQ ID NO: 2325306 - RNA, 16 nt, Human
ggaagggaccaaggca

SEQ ID NO: 2325307 - RNA, 20 nt, Human
ggaagggaccaaggcaaggc

SEQ ID NO: 2325308 - RNA, 22 nt, Human
ggaagggaccaaggcaaggcag

SEQ ID NO: 2325309 - RNA, 17 nt, Human
ggaaggcuggcugggca

SEQ ID NO: 2325310 - RNA, 14 nt, Human
ggaaggcuggcugg

SEQ ID NO: 2325311 - RNA, 17 nt, Human
ggaaggcugagaggaga

SEQ ID NO: 2325312 - RNA, 23 nt, Human
ggaagggacaccaagccuuggcu

SEQ ID NO: 2325313 - RNA, 19 nt, Human
ggaaggcggggcuucaacc

SEQ ID NO: 2325314 - RNA, 21 nt, Human
ggaaggcucuucuccccagag

SEQ ID NO: 2325315 - RNA, 13 nt, Human
ggaacgcagauga

SEQ ID NO: 2325316 - RNA, 14 nt, Human
ggaacgacugggca

SEQ ID NO: 2325317 - RNA, 14 nt, Human
ggaacgagagggga

SEQ ID NO: 2325318 - RNA, 13 nt, Human
ggaaccugacccc

SEQ ID NO: 2325319 - RNA, 18 nt, Human
ggaaccugacguagcugc

SEQ ID NO: 2325320 - RNA, 12 nt, Human
ggaaccuccuuu

SEQ ID NO: 2325321 - RNA, 13 nt, Human
ggaaggauuguaa

SEQ ID NO: 2325322 - RNA, 16 nt, Human
ggaaggauuguaaaaa

SEQ ID NO: 2325323 - RNA, 23 nt, Human
ggaaggauuguaaaaaaaaaugc

SEQ ID NO: 2325324 - RNA, 16 nt, Human
ggaaggcaggaagaga

SEQ ID NO: 2325325 - RNA, 14 nt, Human
ggaaggcagggagg

SEQ ID NO: 2325326 - RNA, 19 nt, Human
ggaauuuguaaguuuaugu

SEQ ID NO: 2325327 - RNA, 22 nt, Human
ggacaaaaaugaacugaaguuu

SEQ ID NO: 2325328 - RNA, 15 nt, Human
ggacaaaacccaccu

SEQ ID NO: 2325329 - RNA, 19 nt, Human
ggaauuuucaucuaggauu

SEQ ID NO: 2325330 - RNA, 15 nt, Human
ggacaaacagcucag

SEQ ID NO: 2325331 - RNA, 18 nt, Human
ggacaaaacccaccuugu

SEQ ID NO: 2325332 - RNA, 23 nt, Human
ggacaaaucaagcuucaguuucc

SEQ ID NO: 2325333 - RNA, 21 nt, Human
ggaauuugcaagucauggcug

SEQ ID NO: 2325334 - RNA, 16 nt, Human
ggaauuuguaaccuca

SEQ ID NO: 2325335 - RNA, 17 nt, Human
ggaauuuguaaccucag

SEQ ID NO: 2325336 - RNA, 18 nt, Human
ggaauuuguaaccucagc

SEQ ID NO: 2325337 - RNA, 12 nt, Human
ggaauuuguaag

SEQ ID NO: 2325338 - RNA, 19 nt, Human
ggaauuucccaggacccug

SEQ ID NO: 2325339 - RNA, 18 nt, Human
ggaauuucccaggacccu

SEQ ID NO: 2325340 - RNA, 17 nt, Human
ggaauuucccaggaccc

SEQ ID NO: 2325341 - RNA, 16 nt, Human
ggaauuucccaggacc

SEQ ID NO: 2325342 - RNA, 15 nt, Human
ggaauuucccaggac

SEQ ID NO: 2325343 - RNA, 14 nt, Human
ggaauuucccagga

SEQ ID NO: 2325344 - RNA, 23 nt, Human
ggaauuucucccagucauuuaau

SEQ ID NO: 2325345 - RNA, 14 nt, Human
ggaauugugugaug

SEQ ID NO: 2325346 - RNA, 23 nt, Human
ggaauuggguggggggcuucaua

SEQ ID NO: 2325347 - RNA, 12 nt, Human
ggaauuguguuu

SEQ ID NO: 2325348 - RNA, 16 nt, Human
ggaauuggagcucgug

SEQ ID NO: 2325349 - RNA, 22 nt, Human
ggaauuggagcucgugggacag

SEQ ID NO: 2325350 - RNA, 20 nt, Human
ggaauucaucucucuuuaau

SEQ ID NO: 2325351 - RNA, 20 nt, Human
ggaauugacuucgacuguga

SEQ ID NO: 2325352 - RNA, 19 nt, Human
ggaauugauuugcauugaa

SEQ ID NO: 2325353 - RNA, 18 nt, Human
ggaauugauuugcauuga

SEQ ID NO: 2325354 - RNA, 17 nt, Human
ggaauugauuugcauug

SEQ ID NO: 2325355 - RNA, 15 nt, Human
ggaauugauuugcau

SEQ ID NO: 2325356 - RNA, 17 nt, Human
ggaauuauuuuaaaaga

SEQ ID NO: 2325357 - RNA, 16 nt, Human
ggaauuauuuuaaaag

SEQ ID NO: 2325358 - RNA, 20 nt, Human
ggaauuaaccuggugcugga

SEQ ID NO: 2325359 - RNA, 22 nt, Human
ggaauuaaguuaucuuuaaaau

SEQ ID NO: 2325360 - RNA, 19 nt, Human
ggaauuacauguaaaacau

SEQ ID NO: 2325361 - RNA, 15 nt, Human
ggaauuauuuuaaaa

SEQ ID NO: 2325362 - RNA, 14 nt, Human
ggaauuauuuuaaa

SEQ ID NO: 2325363 - RNA, 17 nt, Human
ggaauuaaccuggugcu

SEQ ID NO: 2325364 - RNA, 16 nt, Human
ggaauuaaccuggugc

SEQ ID NO: 2325365 - RNA, 14 nt, Human
ggaauuaaccuggu

SEQ ID NO: 2325366 - RNA, 16 nt, Human
ggaauguuaaagucag

SEQ ID NO: 2325367 - RNA, 19 nt, Human
ggaauguuugggcagaagg

SEQ ID NO: 2325368 - RNA, 21 nt, Human
ggaauguuugggcagaaggga

SEQ ID NO: 2325369 - RNA, 19 nt, Human
ggaauguuugccucugccu

SEQ ID NO: 2325370 - RNA, 15 nt, Human
ggaauggcacagccc

SEQ ID NO: 2325371 - RNA, 12 nt, Human
ggaaugggcugu

SEQ ID NO: 2325372 - RNA, 15 nt, Human
ggaauguguggccug

SEQ ID NO: 2325373 - RNA, 16 nt, Human
ggaaugggggccucuu

SEQ ID NO: 2325374 - RNA, 20 nt, Human
ggaauguaacugcugaaaac

SEQ ID NO: 2325375 - RNA, 21 nt, Human
ggaauggaaaaagcagaaggc

SEQ ID NO: 2325376 - RNA, 14 nt, Human
ggaaugcuguguua

SEQ ID NO: 2325377 - RNA, 16 nt, Human
ggaaugcuuccuagaa

SEQ ID NO: 2325378 - RNA, 18 nt, Human
ggaaugcuugaaaaaugu

SEQ ID NO: 2325379 - RNA, 23 nt, Human
ggaaugcucccccauccuccccu

SEQ ID NO: 2325380 - RNA, 23 nt, Human
ggaaugcugcccgcucugcagac

SEQ ID NO: 2325381 - RNA, 13 nt, Human
ggaaugcuccccc

SEQ ID NO: 2325382 - RNA, 23 nt, Human
ggaaugcggccgcauucccugag

SEQ ID NO: 2325383 - RNA, 22 nt, Human
ggaaugcggccgcauucccuga

SEQ ID NO: 2325384 - RNA, 16 nt, Human
ggaaugcggcaagaag

SEQ ID NO: 2325385 - RNA, 14 nt, Human
ggaaugcggcaaga

SEQ ID NO: 2325386 - RNA, 23 nt, Human
ggaaugccugagugccuggccaa

SEQ ID NO: 2325387 - RNA, 21 nt, Human
ggaaguguaacagcugagguc

SEQ ID NO: 2325388 - RNA, 19 nt, Human
ggaaguguaacagcugagg

SEQ ID NO: 2325389 - RNA, 14 nt, Human
ggaaugccugagug

SEQ ID NO: 2325390 - RNA, 18 nt, Human
ggaaugccugagugccug

SEQ ID NO: 2325391 - RNA, 19 nt, Human
ggaaugccugagugccugg

SEQ ID NO: 2325392 - RNA, 12 nt, Human
ggaaugcagugg

SEQ ID NO: 2325393 - RNA, 24 nt, Human
ggaaugauuaauuaaaacacaaca

SEQ ID NO: 2325394 - RNA, 16 nt, Human
ggcucacaccuguaau

SEQ ID NO: 2325395 - RNA, 18 nt, Human
ggcucacacaccuguagc

SEQ ID NO: 2325396 - RNA, 12 nt, Human
ggcucacacuga

SEQ ID NO: 2325397 - RNA, 22 nt, Human
ggcuccagagggcacucugcuu

SEQ ID NO: 2325398 - RNA, 19 nt, Human
ggcuccagaugcagggcag

SEQ ID NO: 2325399 - RNA, 18 nt, Human
ggcuccagaugcagggca

SEQ ID NO: 2325400 - RNA, 17 nt, Human
ggcuccagaugcagggc

SEQ ID NO: 2325401 - RNA, 16 nt, Human
ggcuccagaugcaggg

SEQ ID NO: 2325402 - RNA, 15 nt, Human
ggcucaaguccucuu

SEQ ID NO: 2325403 - RNA, 21 nt, Human
ggcucaaguccucuuuucuga

SEQ ID NO: 2325404 - RNA, 12 nt, Human
ggcuccagcugg

SEQ ID NO: 2325405 - RNA, 12 nt, Human
ggcuccaggagc

SEQ ID NO: 2325406 - RNA, 13 nt, Human
ggcuccaggagca

SEQ ID NO: 2325407 - RNA, 19 nt, Human
ggcuccaggagcagccaca

SEQ ID NO: 2325408 - RNA, 15 nt, Human
ggcuccaggcuccuu

SEQ ID NO: 2325409 - RNA, 18 nt, Human
ggcuccaggccagggggc

SEQ ID NO: 2325410 - RNA, 11 nt, Human
ggcuccaggcu

SEQ ID NO: 2325411 - RNA, 16 nt, Human
ggcuccaggccagggg

SEQ ID NO: 2325412 - RNA, 14 nt, Human
ggcuccaggccagg

SEQ ID NO: 2325413 - RNA, 16 nt, Human
ggcuccaggcuccuuu

SEQ ID NO: 2325414 - RNA, 22 nt, Human
ggcuccagucugcugcccucca

SEQ ID NO: 2325415 - RNA, 18 nt, Human
ggcuccagucugcugccc

SEQ ID NO: 2325416 - RNA, 15 nt, Human
ggcuccagucugcug

SEQ ID NO: 2325417 - RNA, 24 nt, Human
ggcuccagucugcugcccuccauc

SEQ ID NO: 2325418 - RNA, 17 nt, Human
ggcucccacaggcccuu

SEQ ID NO: 2325419 - RNA, 16 nt, Human
ggcucccacaggcagc

SEQ ID NO: 2325420 - RNA, 18 nt, Human
ggcucccacaggcccuuc

SEQ ID NO: 2325421 - RNA, 19 nt, Human
ggcucccacaggcccuucc

SEQ ID NO: 2325422 - RNA, 19 nt, Human
ggcuagaguccucacuccc

SEQ ID NO: 2325423 - RNA, 18 nt, Human
ggcuagaguccucacucc

SEQ ID NO: 2325424 - RNA, 14 nt, Human
ggcuagaguccuca

SEQ ID NO: 2325425 - RNA, 13 nt, Human
ggcuagaguccuc

SEQ ID NO: 2325426 - RNA, 22 nt, Human
ggcuagagguucaaagauauuu

SEQ ID NO: 2325427 - RNA, 17 nt, Human
ggcuagagguucaaaga

SEQ ID NO: 2325428 - RNA, 18 nt, Human
ggcggcucggaggaagcc

SEQ ID NO: 2325429 - RNA, 14 nt, Human
ggcggcugagagcc

SEQ ID NO: 2325430 - RNA, 18 nt, Human
ggcggcugagagccccag

SEQ ID NO: 2325431 - RNA, 22 nt, Human
ggcuaggaccccuccauguggg

SEQ ID NO: 2325432 - RNA, 20 nt, Human
ggcuagcuucugcuuuucug

SEQ ID NO: 2325433 - RNA, 14 nt, Human
ggcuagggggagcc

SEQ ID NO: 2325434 - RNA, 20 nt, Human
ggcuagaguccucacuccca

SEQ ID NO: 2325435 - RNA, 23 nt, Human
ggcggcugagagccccagcugac

SEQ ID NO: 2325436 - RNA, 20 nt, Human
ggcuagagugcaguggcaug

SEQ ID NO: 2325437 - RNA, 15 nt, Human
ggcuagaucaugaag

SEQ ID NO: 2325438 - RNA, 16 nt, Human
ggcuaggaccccucca

SEQ ID NO: 2325439 - RNA, 13 nt, Human
ggcuauucacaac

SEQ ID NO: 2325440 - RNA, 19 nt, Human
ggcuauguauggaauacag

SEQ ID NO: 2325441 - RNA, 23 nt, Human
ggcucaagcagucuacccaccuc

SEQ ID NO: 2325442 - RNA, 19 nt, Human
ggcucaagcgauucuccug

SEQ ID NO: 2325443 - RNA, 14 nt, Human
ggcucaagcagucu

SEQ ID NO: 2325444 - RNA, 19 nt, Human
ggcuaugggggcacugagg

SEQ ID NO: 2325445 - RNA, 21 nt, Human
ggcuauggggauagaugugug

SEQ ID NO: 2325446 - RNA, 15 nt, Human
ggcuaugcauuugaa

SEQ ID NO: 2325447 - RNA, 20 nt, Human
ggcuauagcuacaggaagca

SEQ ID NO: 2325448 - RNA, 19 nt, Human
ggcuauagcuacaggaagc

SEQ ID NO: 2325449 - RNA, 22 nt, Human
ggcuagcuucugcuuuucugcc

SEQ ID NO: 2325450 - RNA, 16 nt, Human
ggcuaguugggcuucc

SEQ ID NO: 2325451 - RNA, 15 nt, Human
ggcuaguugggcuuc

SEQ ID NO: 2325452 - RNA, 23 nt, Human
ggcuagugugguguuuccuggca

SEQ ID NO: 2325453 - RNA, 23 nt, Human
ggccugaagaguccucugaauga

SEQ ID NO: 2325454 - RNA, 22 nt, Human
ggccugaaugcuuauagguggc

SEQ ID NO: 2325455 - RNA, 23 nt, Human
ggccuggcgggaugggccaccgc

SEQ ID NO: 2325456 - RNA, 19 nt, Human
ggccuggccugagcuggga

SEQ ID NO: 2325457 - RNA, 12 nt, Human
ggccuggcuccu

SEQ ID NO: 2325458 - RNA, 15 nt, Human
ggccuggcuucuccu

SEQ ID NO: 2325459 - RNA, 19 nt, Human
ggccugaagaguccucuga

SEQ ID NO: 2325460 - RNA, 13 nt, Human
ggccugaagaguc

SEQ ID NO: 2325461 - RNA, 22 nt, Human
ggccugaaaggagcccuuaucu

SEQ ID NO: 2325462 - RNA, 16 nt, Human
ggccugaaaggagccc

SEQ ID NO: 2325463 - RNA, 23 nt, Human
ggccugaaagaggcugaggccug

SEQ ID NO: 2325464 - RNA, 19 nt, Human
ggccucuugggucccccac

SEQ ID NO: 2325465 - RNA, 13 nt, Human
ggccucuuggcag

SEQ ID NO: 2325466 - RNA, 17 nt, Human
ggccucuuggaccucug

SEQ ID NO: 2325467 - RNA, 22 nt, Human
ggccucuuggaccucugcucug

SEQ ID NO: 2325468 - RNA, 23 nt, Human
ggccucuuugucuaaaacaauaa

SEQ ID NO: 2325469 - RNA, 17 nt, Human
ggccugaaagaggcuga

SEQ ID NO: 2325470 - RNA, 13 nt, Human
ggccucuugagca

SEQ ID NO: 2325471 - RNA, 16 nt, Human
ggccucuugagcagug

SEQ ID NO: 2325472 - RNA, 18 nt, Human
ggccucuugagcaguggc

SEQ ID NO: 2325473 - RNA, 22 nt, Human
ggccucuugagcaguggcuggu

SEQ ID NO: 2325474 - RNA, 14 nt, Human
ggccuguccuccaa

SEQ ID NO: 2325475 - RNA, 18 nt, Human
ggccugggggcagggaga

SEQ ID NO: 2325476 - RNA, 14 nt, Human
ggccuggggcuccu

SEQ ID NO: 2325477 - RNA, 16 nt, Human
ggccuggggcuccuuu

SEQ ID NO: 2325478 - RNA, 18 nt, Human
ggccuggggcuccuuucu

SEQ ID NO: 2325479 - RNA, 23 nt, Human
ggccuggggcuccuuucuccagc

SEQ ID NO: 2325480 - RNA, 20 nt, Human
ggccugucucauccccaggg

SEQ ID NO: 2325481 - RNA, 19 nt, Human
ggccugucucauccccagg

SEQ ID NO: 2325482 - RNA, 18 nt, Human
ggccugucucauccccag

SEQ ID NO: 2325483 - RNA, 17 nt, Human
ggccugucucaucccca

SEQ ID NO: 2325484 - RNA, 11 nt, Human
ggccugugagc

SEQ ID NO: 2325485 - RNA, 14 nt, Human
ggccugggggcugg

SEQ ID NO: 2325486 - RNA, 20 nt, Human
ggccugggggcugggcagag

SEQ ID NO: 2325487 - RNA, 22 nt, Human
ggccugggggcugggcagagga

SEQ ID NO: 2325488 - RNA, 20 nt, Human
ggcgccgcaaaccacacugg

SEQ ID NO: 2325489 - RNA, 22 nt, Human
ggcgccgcaaaccacacuggac

SEQ ID NO: 2325490 - RNA, 20 nt, Human
ggcgccgucuccaggggcug

SEQ ID NO: 2325491 - RNA, 23 nt, Human
ggccugucucauccccagggguc

SEQ ID NO: 2325492 - RNA, 22 nt, Human
ggcgcgcaccuguaaucccagc

SEQ ID NO: 2325493 - RNA, 20 nt, Human
ggcgccuguagucccagcca

SEQ ID NO: 2325494 - RNA, 14 nt, Human
ggcgcggccagccc

SEQ ID NO: 2325495 - RNA, 21 nt, Human
ggcgccgucuccaggggcugc

SEQ ID NO: 2325496 - RNA, 13 nt, Human
ggcgccucugcaa

SEQ ID NO: 2325497 - RNA, 19 nt, Human
ggcgccggcgggcgggccg

SEQ ID NO: 2325498 - RNA, 18 nt, Human
ggcgccuguagucccagc

SEQ ID NO: 2325499 - RNA, 18 nt, Human
ggcgcugccccuggcagc

SEQ ID NO: 2325500 - RNA, 19 nt, Human
ggcgcugccccuggcagcc

SEQ ID NO: 2325501 - RNA, 21 nt, Human
ggcgcugccccuggcagcccc

SEQ ID NO: 2325502 - RNA, 23 nt, Human
ggcgcugccccuggcagccccug

SEQ ID NO: 2325503 - RNA, 13 nt, Human
ggcggagcuggcc

SEQ ID NO: 2325504 - RNA, 20 nt, Human
ggcggagaguacagugagcc

SEQ ID NO: 2325505 - RNA, 21 nt, Human
ggcggagaguacagugagcca

SEQ ID NO: 2325506 - RNA, 14 nt, Human
ggcggagcuggccc

SEQ ID NO: 2325507 - RNA, 15 nt, Human
ggcggagcuggcccc

SEQ ID NO: 2325508 - RNA, 20 nt, Human
ggcggacaccuggcccccga

SEQ ID NO: 2325509 - RNA, 19 nt, Human
ggcgcuggcccagccggcc

SEQ ID NO: 2325510 - RNA, 15 nt, Human
ggcggacguuccagc

SEQ ID NO: 2325511 - RNA, 16 nt, Human
ggcggacguuccagcc

SEQ ID NO: 2325512 - RNA, 17 nt, Human
ggcggacguuccagccg

SEQ ID NO: 2325513 - RNA, 19 nt, Human
ggcggagaguacagugagc

SEQ ID NO: 2325514 - RNA, 16 nt, Human
ggcgcggccagccccg

SEQ ID NO: 2325515 - RNA, 11 nt, Human
ggcgcuggccc

SEQ ID NO: 2325516 - RNA, 12 nt, Human
ggcgcuggccca

SEQ ID NO: 2325517 - RNA, 13 nt, Human
ggcgcuggcccag

SEQ ID NO: 2325518 - RNA, 14 nt, Human
ggcgcuggcccagc

SEQ ID NO: 2325519 - RNA, 15 nt, Human
ggcgcuggcccagcc

SEQ ID NO: 2325520 - RNA, 16 nt, Human
ggcgcuggcccagccg

SEQ ID NO: 2325521 - RNA, 18 nt, Human
ggcgcuggcccagccggc

SEQ ID NO: 2325522 - RNA, 20 nt, Human
ggcgcuggcccagccggccu

SEQ ID NO: 2325523 - RNA, 17 nt, Human
ggcggagcuggccccgc

SEQ ID NO: 2325524 - RNA, 20 nt, Human
ggcggagcuggccccgccgc

SEQ ID NO: 2325525 - RNA, 23 nt, Human
ggcggagcuggccccgccgccug

SEQ ID NO: 2325526 - RNA, 20 nt, Human
ggcggagcuugcagugagcc

SEQ ID NO: 2325527 - RNA, 21 nt, Human
ggcggagcuugcagugagccg

SEQ ID NO: 2325528 - RNA, 20 nt, Human
ggcggauguugaagugagcu

SEQ ID NO: 2325529 - RNA, 14 nt, Human
ggcggcacagccuu

SEQ ID NO: 2325530 - RNA, 15 nt, Human
ggcggcacagccuuc

SEQ ID NO: 2325531 - RNA, 12 nt, Human
ggcggcagcagc

SEQ ID NO: 2325532 - RNA, 23 nt, Human
ggcggcuacucagcagcccuccu

SEQ ID NO: 2325533 - RNA, 22 nt, Human
ggcggcuacucagcagcccucc

SEQ ID NO: 2325534 - RNA, 21 nt, Human
ggcggcuacucagcagcccuc

SEQ ID NO: 2325535 - RNA, 20 nt, Human
ggcggcuacucagcagcccu

SEQ ID NO: 2325536 - RNA, 11 nt, Human
ggcggcgccgg

SEQ ID NO: 2325537 - RNA, 17 nt, Human
ggcggccccucccgccc

SEQ ID NO: 2325538 - RNA, 17 nt, Human
ggcggcaggggccugga

SEQ ID NO: 2325539 - RNA, 14 nt, Human
ggcggcagcagcca

SEQ ID NO: 2325540 - RNA, 16 nt, Human
ggcggcagcagccauc

SEQ ID NO: 2325541 - RNA, 18 nt, Human
ggcggcaggggccuggag

SEQ ID NO: 2325542 - RNA, 17 nt, Human
ggcggccaugauggugc

SEQ ID NO: 2325543 - RNA, 18 nt, Human
ggcggcccaagcccgacu

SEQ ID NO: 2325544 - RNA, 14 nt, Human
ggccucuguguccu

SEQ ID NO: 2325545 - RNA, 20 nt, Human
ggccucuguguccuucccug

SEQ ID NO: 2325546 - RNA, 18 nt, Human
ggccucuucaaauuagaa

SEQ ID NO: 2325547 - RNA, 19 nt, Human
ggccucuuccgugacguca

SEQ ID NO: 2325548 - RNA, 18 nt, Human
ggccucuuaugggcuggg

SEQ ID NO: 2325549 - RNA, 21 nt, Human
ggccucugcaaaggaaauacc

SEQ ID NO: 2325550 - RNA, 16 nt, Human
ggccucugugccuucu

SEQ ID NO: 2325551 - RNA, 17 nt, Human
ggccucuuaugggcugg

SEQ ID NO: 2325552 - RNA, 13 nt, Human
ggccucugcacuc

SEQ ID NO: 2325553 - RNA, 14 nt, Human
ggccucugcacucc

SEQ ID NO: 2325554 - RNA, 15 nt, Human
ggccucugcacuccc

SEQ ID NO: 2325555 - RNA, 16 nt, Human
ggccucugcacucccc

SEQ ID NO: 2325556 - RNA, 15 nt, Human
ggccuagucccuucc

SEQ ID NO: 2325557 - RNA, 20 nt, Human
ggccuaggccucagccagag

SEQ ID NO: 2325558 - RNA, 20 nt, Human
ggccuauaaugaagcuuuau

SEQ ID NO: 2325559 - RNA, 15 nt, Human
ggccuaucagugugc

SEQ ID NO: 2325560 - RNA, 16 nt, Human
ggccuaucagugugcc

SEQ ID NO: 2325561 - RNA, 20 nt, Human
ggccuaugcacauauggacu

SEQ ID NO: 2325562 - RNA, 16 nt, Human
ggccuaucuaaacugg

SEQ ID NO: 2325563 - RNA, 17 nt, Human
ggccuaucagugugccc

SEQ ID NO: 2325564 - RNA, 18 nt, Human
ggccuaucagugugcccc

SEQ ID NO: 2325565 - RNA, 20 nt, Human
ggccuaucagugugcccccc

SEQ ID NO: 2325566 - RNA, 23 nt, Human
ggccuaucagugugccccccauc

SEQ ID NO: 2325567 - RNA, 21 nt, Human
ggccuaugcacauauggacuc

SEQ ID NO: 2325568 - RNA, 19 nt, Human
ggccuauuauauuaaaaua

SEQ ID NO: 2325569 - RNA, 18 nt, Human
ggccucaaaggcccgcuc

SEQ ID NO: 2325570 - RNA, 19 nt, Human
ggccucaaaggcccgcucu

SEQ ID NO: 2325571 - RNA, 22 nt, Human
ggccucggagccucauccgagg

SEQ ID NO: 2325572 - RNA, 19 nt, Human
ggccucggagccucauccg

SEQ ID NO: 2325573 - RNA, 16 nt, Human
ggccucgggacaccug

SEQ ID NO: 2325574 - RNA, 22 nt, Human
ggccucgggacaccugcccugc

SEQ ID NO: 2325575 - RNA, 23 nt, Human
ggccucgggacaccugcccugcc

SEQ ID NO: 2325576 - RNA, 16 nt, Human
ggccucgggaccucag

SEQ ID NO: 2325577 - RNA, 15 nt, Human
ggccucggagccuca

SEQ ID NO: 2325578 - RNA, 13 nt, Human
ggccucggagccu

SEQ ID NO: 2325579 - RNA, 22 nt, Human
ggccucggacuuagcugggaga

SEQ ID NO: 2325580 - RNA, 18 nt, Human
ggccucaacccucccuca

SEQ ID NO: 2325581 - RNA, 17 nt, Human
ggccucaacccucccuc

SEQ ID NO: 2325582 - RNA, 16 nt, Human
ggccucaacccucccu

SEQ ID NO: 2325583 - RNA, 22 nt, Human
ggccucaaaguuggggcaggcu

SEQ ID NO: 2325584 - RNA, 15 nt, Human
ggccucaacccuccc

SEQ ID NO: 2325585 - RNA, 20 nt, Human
ggccucaaaggcccgcucua

SEQ ID NO: 2325586 - RNA, 19 nt, Human
ggccucaacccucccucag

SEQ ID NO: 2325587 - RNA, 17 nt, Human
ggccucggacuuagcug

SEQ ID NO: 2325588 - RNA, 20 nt, Human
ggccucggacuuagcuggga

SEQ ID NO: 2325589 - RNA, 17 nt, Human
ggcccugguccuuccag

SEQ ID NO: 2325590 - RNA, 15 nt, Human
ggcccugguccuucc

SEQ ID NO: 2325591 - RNA, 19 nt, Human
ggcccugguguuucuagca

SEQ ID NO: 2325592 - RNA, 15 nt, Human
ggcccugucccuccc

SEQ ID NO: 2325593 - RNA, 12 nt, Human
ggcccugguccu

SEQ ID NO: 2325594 - RNA, 15 nt, Human
ggcccugggguccca

SEQ ID NO: 2325595 - RNA, 11 nt, Human
ggcccuggggc

SEQ ID NO: 2325596 - RNA, 21 nt, Human
ggcccugggcucggaggcugc

SEQ ID NO: 2325597 - RNA, 14 nt, Human
ggcccugggcugga

SEQ ID NO: 2325598 - RNA, 15 nt, Human
ggcccugggcuggaa

SEQ ID NO: 2325599 - RNA, 16 nt, Human
ggcccugggcucggag

SEQ ID NO: 2325600 - RNA, 18 nt, Human
ggcccugggcucggaggc

SEQ ID NO: 2325601 - RNA, 12 nt, Human
ggcccugggcug

SEQ ID NO: 2325602 - RNA, 13 nt, Human
ggcccugggcugg

SEQ ID NO: 2325603 - RNA, 15 nt, Human
ggccggugugggcug

SEQ ID NO: 2325604 - RNA, 23 nt, Human
ggccggucugcaagucagaggau

SEQ ID NO: 2325605 - RNA, 23 nt, Human
ggccgguuucgaaguugaugcaa

SEQ ID NO: 2325606 - RNA, 22 nt, Human
ggccguaccccacccucagcac

SEQ ID NO: 2325607 - RNA, 14 nt, Human
ggccguaccccacc

SEQ ID NO: 2325608 - RNA, 17 nt, Human
ggccguaccccacccuc

SEQ ID NO: 2325609 - RNA, 19 nt, Human
ggccgucaggacccaccau

SEQ ID NO: 2325610 - RNA, 12 nt, Human
ggccgucaggac

SEQ ID NO: 2325611 - RNA, 19 nt, Human
ggccgucacuugugggggu

SEQ ID NO: 2325612 - RNA, 12 nt, Human
ggcccugugccu

SEQ ID NO: 2325613 - RNA, 16 nt, Human
ggcccugucccuccca

SEQ ID NO: 2325614 - RNA, 17 nt, Human
ggcccugucccucccac

SEQ ID NO: 2325615 - RNA, 18 nt, Human
ggcccugucccucccacc

SEQ ID NO: 2325616 - RNA, 20 nt, Human
ggcccugucccucccaccuc

SEQ ID NO: 2325617 - RNA, 21 nt, Human
ggcccugucccucccaccucu

SEQ ID NO: 2325618 - RNA, 22 nt, Human
ggcccugucccucccaccucug

SEQ ID NO: 2325619 - RNA, 23 nt, Human
ggcccugucccucccaccucugu

SEQ ID NO: 2325620 - RNA, 13 nt, Human
ggccggggcugag

SEQ ID NO: 2325621 - RNA, 17 nt, Human
ggccggucugcaaguca

SEQ ID NO: 2325622 - RNA, 18 nt, Human
ggccggucugcaagucag

SEQ ID NO: 2325623 - RNA, 20 nt, Human
ggccggucugcaagucagag

SEQ ID NO: 2325624 - RNA, 21 nt, Human
ggccggucugcaagucagagg

SEQ ID NO: 2325625 - RNA, 20 nt, Human
ggccgucuucacucgccccc

SEQ ID NO: 2325626 - RNA, 22 nt, Human
ggccguccucccgggcccuccc

SEQ ID NO: 2325627 - RNA, 20 nt, Human
ggccguccucccgggcccuc

SEQ ID NO: 2325628 - RNA, 21 nt, Human
ggccguccucccgggcccucc

SEQ ID NO: 2325629 - RNA, 13 nt, Human
ggccguccucccg

SEQ ID NO: 2325630 - RNA, 14 nt, Human
ggccguccucccgg

SEQ ID NO: 2325631 - RNA, 15 nt, Human
ggccguccucccggg

SEQ ID NO: 2325632 - RNA, 18 nt, Human
ggccguccucccgggccc

SEQ ID NO: 2325633 - RNA, 13 nt, Human
ggccgugcccagg

SEQ ID NO: 2325634 - RNA, 17 nt, Human
ggccuacaugcuuugug

SEQ ID NO: 2325635 - RNA, 23 nt, Human
ggccuacagcuuugaucccugac

SEQ ID NO: 2325636 - RNA, 20 nt, Human
ggccuacagcuuugaucccu

SEQ ID NO: 2325637 - RNA, 19 nt, Human
ggccuaagaguugagcucu

SEQ ID NO: 2325638 - RNA, 23 nt, Human
ggccuacaugcuuugugaacaag

SEQ ID NO: 2325639 - RNA, 18 nt, Human
ggccuacaugcuuuguga

SEQ ID NO: 2325640 - RNA, 16 nt, Human
ggccuaccccgcagac

SEQ ID NO: 2325641 - RNA, 20 nt, Human
ggccuaccccgcagacaccu

SEQ ID NO: 2325642 - RNA, 23 nt, Human
ggccuagcauacguacacauuuu

SEQ ID NO: 2325643 - RNA, 23 nt, Human
ggccuaccccgcagacaccuugg

SEQ ID NO: 2325644 - RNA, 24 nt, Human
ggccuacuagagucugaacagcug

SEQ ID NO: 2325645 - RNA, 14 nt, Human
ggccuaggccucag

SEQ ID NO: 2325646 - RNA, 21 nt, Human
ggccuagcugcuacaaagaag

SEQ ID NO: 2325647 - RNA, 16 nt, Human
ggccuagcugcuacaa

SEQ ID NO: 2325648 - RNA, 19 nt, Human
ggccuagcugcuacaaaga

SEQ ID NO: 2325649 - RNA, 20 nt, Human
ggccuagcugcuacaaagaa

SEQ ID NO: 2325650 - RNA, 22 nt, Human
ggcccuggccugcugggcucuc

SEQ ID NO: 2325651 - RNA, 22 nt, Human
ggcccuggcucccacaggcccu

SEQ ID NO: 2325652 - RNA, 17 nt, Human
ggcccuggccugcuggg

SEQ ID NO: 2325653 - RNA, 16 nt, Human
ggcccuggccugcugg

SEQ ID NO: 2325654 - RNA, 15 nt, Human
ggcccuggccugcug

SEQ ID NO: 2325655 - RNA, 14 nt, Human
ggcccuggccugcu

SEQ ID NO: 2325656 - RNA, 13 nt, Human
ggcccuggcuccc

SEQ ID NO: 2325657 - RNA, 12 nt, Human
ggcccuggccug

SEQ ID NO: 2325658 - RNA, 17 nt, Human
ggcccuggccuccccug

SEQ ID NO: 2325659 - RNA, 13 nt, Human
ggcccuggccucc

SEQ ID NO: 2325660 - RNA, 14 nt, Human
ggcccuggccuccc

SEQ ID NO: 2325661 - RNA, 10 nt, Human
ggcccugccu

SEQ ID NO: 2325662 - RNA, 13 nt, Human
ggcccugccucug

SEQ ID NO: 2325663 - RNA, 22 nt, Human
ggcccugcccugguuuccugcc

SEQ ID NO: 2325664 - RNA, 14 nt, Human
ggcccugccuucuu

SEQ ID NO: 2325665 - RNA, 14 nt, Human
ggcccugccuccuu

SEQ ID NO: 2325666 - RNA, 15 nt, Human
ggcccugccuccuuu

SEQ ID NO: 2325667 - RNA, 21 nt, Human
ggcccugagcucgguggaccc

SEQ ID NO: 2325668 - RNA, 13 nt, Human
ggcccugagcuga

SEQ ID NO: 2325669 - RNA, 19 nt, Human
ggcccugagcucgguggac

SEQ ID NO: 2325670 - RNA, 14 nt, Human
ggcccugagcucgg

SEQ ID NO: 2325671 - RNA, 14 nt, Human
ggcccugagcugag

SEQ ID NO: 2325672 - RNA, 15 nt, Human
ggcccugaggugugg

SEQ ID NO: 2325673 - RNA, 16 nt, Human
ggcccugagguguggg

SEQ ID NO: 2325674 - RNA, 17 nt, Human
ggcccugaggugugggg

SEQ ID NO: 2325675 - RNA, 18 nt, Human
ggcccugagguguggggg

SEQ ID NO: 2325676 - RNA, 19 nt, Human
ggcccugaggugugggggc

SEQ ID NO: 2325677 - RNA, 22 nt, Human
ggcccugaggugugggggcugc

SEQ ID NO: 2325678 - RNA, 22 nt, Human
ggcccugcaaaaggacucucag

SEQ ID NO: 2325679 - RNA, 19 nt, Human
ggcccugcaaaaggacucu

SEQ ID NO: 2325680 - RNA, 21 nt, Human
ggcccugaggugugggggcug

SEQ ID NO: 2325681 - RNA, 18 nt, Human
ggcccugcaccugugcag

SEQ ID NO: 2325682 - RNA, 14 nt, Human
ggcccugcacuguc

SEQ ID NO: 2325683 - RNA, 15 nt, Human
ggcccugcacugucc

SEQ ID NO: 2325684 - RNA, 16 nt, Human
ggcccugcacuguccu

SEQ ID NO: 2325685 - RNA, 17 nt, Human
ggcccugcacuguccug

SEQ ID NO: 2325686 - RNA, 18 nt, Human
ggcccugcacuguccugc

SEQ ID NO: 2325687 - RNA, 19 nt, Human
ggcccugcacuguccugcu

SEQ ID NO: 2325688 - RNA, 20 nt, Human
ggcccugcacuguccugcuc

SEQ ID NO: 2325689 - RNA, 21 nt, Human
ggcccugcacuguccugcucc

SEQ ID NO: 2325690 - RNA, 23 nt, Human
ggcccugcacuguccugcuccac

SEQ ID NO: 2325691 - RNA, 12 nt, Human
ggcccugcccug

SEQ ID NO: 2325692 - RNA, 20 nt, Human
ggcccugccaucuucccagc

SEQ ID NO: 2325693 - RNA, 18 nt, Human
ggcccugccaucuuccca

SEQ ID NO: 2325694 - RNA, 22 nt, Human
ggcccugcacuguccugcucca

SEQ ID NO: 2325695 - RNA, 11 nt, Human
ggcccugcccu

SEQ ID NO: 2325696 - RNA, 20 nt, Human
ggcccugcccugguuuccug

SEQ ID NO: 2325697 - RNA, 13 nt, Human
ggcccugcccugg

SEQ ID NO: 2325698 - RNA, 13 nt, Human
ggcccugccuccu

SEQ ID NO: 2325699 - RNA, 19 nt, Human
ggcccugacauuggagccu

SEQ ID NO: 2325700 - RNA, 19 nt, Human
ggcccucuggaguggccac

SEQ ID NO: 2325701 - RNA, 18 nt, Human
ggcccucuggaguggcca

SEQ ID NO: 2325702 - RNA, 14 nt, Human
ggcccucuggagug

SEQ ID NO: 2325703 - RNA, 21 nt, Human
ggcccucucugcucugcgugu

SEQ ID NO: 2325704 - RNA, 21 nt, Human
ggcccucugcccacucccugc

SEQ ID NO: 2325705 - RNA, 19 nt, Human
ggcccucugcccacucccu

SEQ ID NO: 2325706 - RNA, 20 nt, Human
ggcccucugcccacucccug

SEQ ID NO: 2325707 - RNA, 13 nt, Human
ggcccucugccca

SEQ ID NO: 2325708 - RNA, 15 nt, Human
ggcccucugcccacu

SEQ ID NO: 2325709 - RNA, 16 nt, Human
ggcccucugcccacuc

SEQ ID NO: 2325710 - RNA, 17 nt, Human
ggcccucugcccacucc

SEQ ID NO: 2325711 - RNA, 11 nt, Human
ggcccagagag

SEQ ID NO: 2325712 - RNA, 15 nt, Human
ggcccagagaagcca

SEQ ID NO: 2325713 - RNA, 12 nt, Human
ggcccagagagg

SEQ ID NO: 2325714 - RNA, 15 nt, Human
ggcccucucugcucu

SEQ ID NO: 2325715 - RNA, 14 nt, Human
ggcccucucugcuc

SEQ ID NO: 2325716 - RNA, 22 nt, Human
ggcccacgccuguaaucccagc

SEQ ID NO: 2325717 - RNA, 22 nt, Human
ggcccacguagggcggcacuca

SEQ ID NO: 2325718 - RNA, 18 nt, Human
ggcccaccuggccaccug

SEQ ID NO: 2325719 - RNA, 19 nt, Human
ggcccaccuggccaccuga

SEQ ID NO: 2325720 - RNA, 22 nt, Human
ggcccaccuggccaccugaggu

SEQ ID NO: 2325721 - RNA, 21 nt, Human
ggcccaccuuccccagaacca

SEQ ID NO: 2325722 - RNA, 22 nt, Human
ggcccaagucccuguuuucuga

SEQ ID NO: 2325723 - RNA, 17 nt, Human
ggcccaccuggccaccu

SEQ ID NO: 2325724 - RNA, 17 nt, Human
ggcccaaggcggccccu

SEQ ID NO: 2325725 - RNA, 21 nt, Human
ggcccaaggcggccccucccg

SEQ ID NO: 2325726 - RNA, 14 nt, Human
ggcccaagucccug

SEQ ID NO: 2325727 - RNA, 15 nt, Human
ggcccaagucccugu

SEQ ID NO: 2325728 - RNA, 21 nt, Human
ggcccaaaggccuuggacaac

SEQ ID NO: 2325729 - RNA, 23 nt, Human
ggcccaacacaauucuucuucca

SEQ ID NO: 2325730 - RNA, 19 nt, Human
ggcccaagagaugaagagu

SEQ ID NO: 2325731 - RNA, 17 nt, Human
ggcccaacccugucugu

SEQ ID NO: 2325732 - RNA, 13 nt, Human
ggcccaacccugu

SEQ ID NO: 2325733 - RNA, 16 nt, Human
ggcccaacccugucug

SEQ ID NO: 2325734 - RNA, 13 nt, Human
ggcccaaggcggc

SEQ ID NO: 2325735 - RNA, 14 nt, Human
ggcccaaggcggcc

SEQ ID NO: 2325736 - RNA, 13 nt, Human
ggcauuccugcuu

SEQ ID NO: 2325737 - RNA, 21 nt, Human
ggcaugggaaagccaccucuc

SEQ ID NO: 2325738 - RNA, 16 nt, Human
ggcauuccccaggagg

SEQ ID NO: 2325739 - RNA, 19 nt, Human
ggccacaugggaggcucac

SEQ ID NO: 2325740 - RNA, 16 nt, Human
ggccacaugaguccca

SEQ ID NO: 2325741 - RNA, 16 nt, Human
ggccacauggggcugg

SEQ ID NO: 2325742 - RNA, 18 nt, Human
ggccacaugggaggcuca

SEQ ID NO: 2325743 - RNA, 20 nt, Human
ggccacaugagucccagugg

SEQ ID NO: 2325744 - RNA, 18 nt, Human
ggcauuccccaggaggcc

SEQ ID NO: 2325745 - RNA, 19 nt, Human
ggcauuccccaggaggcca

SEQ ID NO: 2325746 - RNA, 22 nt, Human
ggcaugggaaugaaugucagug

SEQ ID NO: 2325747 - RNA, 17 nt, Human
ggcauuccccaggaggc

SEQ ID NO: 2325748 - RNA, 18 nt, Human
ggcaugggaaugaauguc

SEQ ID NO: 2325749 - RNA, 14 nt, Human
ggcauggcugggaa

SEQ ID NO: 2325750 - RNA, 15 nt, Human
ggccacucugccucu

SEQ ID NO: 2325751 - RNA, 13 nt, Human
ggccacuccucca

SEQ ID NO: 2325752 - RNA, 13 nt, Human
ggccagccuggau

SEQ ID NO: 2325753 - RNA, 17 nt, Human
ggccacgugccaggccc

SEQ ID NO: 2325754 - RNA, 16 nt, Human
ggccacgugccaggcc

SEQ ID NO: 2325755 - RNA, 23 nt, Human
ggccacgugggcaaacaggcagu

SEQ ID NO: 2325756 - RNA, 18 nt, Human
ggccacgugccaggcccg

SEQ ID NO: 2325757 - RNA, 11 nt, Human
ggccacuaagc

SEQ ID NO: 2325758 - RNA, 21 nt, Human
ggccacuaagcagaggagggg

SEQ ID NO: 2325759 - RNA, 20 nt, Human
ggccacuaagcagaggaggg

SEQ ID NO: 2325760 - RNA, 12 nt, Human
ggccacuccucc

SEQ ID NO: 2325761 - RNA, 23 nt, Human
ggccacucccggcacuccaugcu

SEQ ID NO: 2325762 - RNA, 13 nt, Human
ggccacuccgaga

SEQ ID NO: 2325763 - RNA, 17 nt, Human
ggccacuccagaccccu

SEQ ID NO: 2325764 - RNA, 12 nt, Human
ggccacgugcca

SEQ ID NO: 2325765 - RNA, 11 nt, Human
ggccacgugcc

SEQ ID NO: 2325766 - RNA, 18 nt, Human
ggccacgugauguggagg

SEQ ID NO: 2325767 - RNA, 19 nt, Human
ggccacgucuuccuucugc

SEQ ID NO: 2325768 - RNA, 14 nt, Human
ggccaccaggcugg

SEQ ID NO: 2325769 - RNA, 15 nt, Human
ggccaccaggcuggc

SEQ ID NO: 2325770 - RNA, 16 nt, Human
ggccaccaggcuggcg

SEQ ID NO: 2325771 - RNA, 19 nt, Human
ggccaccaggcuggcgcag

SEQ ID NO: 2325772 - RNA, 21 nt, Human
ggccaccaggcuggcgcagcc

SEQ ID NO: 2325773 - RNA, 21 nt, Human
ggccacccguucugcuggccu

SEQ ID NO: 2325774 - RNA, 23 nt, Human
ggccacccguucugcuggccugg

SEQ ID NO: 2325775 - RNA, 24 nt, Human
ggccacccguucugcuggccugga

SEQ ID NO: 2325776 - RNA, 18 nt, Human
ggccaccaccccccacuc

SEQ ID NO: 2325777 - RNA, 14 nt, Human
ggccaccacccccc

SEQ ID NO: 2325778 - RNA, 17 nt, Human
ggccaccaccccccacu

SEQ ID NO: 2325779 - RNA, 11 nt, Human
ggccaccagga

SEQ ID NO: 2325780 - RNA, 14 nt, Human
ggccaccaggaugg

SEQ ID NO: 2325781 - RNA, 12 nt, Human
ggccaccaggcu

SEQ ID NO: 2325782 - RNA, 13 nt, Human
ggccaccaggcug

SEQ ID NO: 2325783 - RNA, 19 nt, Human
ggccacauggggcugggca

SEQ ID NO: 2325784 - RNA, 17 nt, Human
ggccacauggggcuggg

SEQ ID NO: 2325785 - RNA, 12 nt, Human
ggccauucagca

SEQ ID NO: 2325786 - RNA, 20 nt, Human
ggccauucuccacagcaacc

SEQ ID NO: 2325787 - RNA, 23 nt, Human
ggccauguuccaauaaacaggag

SEQ ID NO: 2325788 - RNA, 20 nt, Human
ggccauucuauuguggcaag

SEQ ID NO: 2325789 - RNA, 20 nt, Human
ggccaugguacccccuucug

SEQ ID NO: 2325790 - RNA, 13 nt, Human
ggccauguccuua

SEQ ID NO: 2325791 - RNA, 13 nt, Human
ggccauguuccaa

SEQ ID NO: 2325792 - RNA, 17 nt, Human
ggccauguuccaauaaa

SEQ ID NO: 2325793 - RNA, 16 nt, Human
ggccaggcuccuuccu

SEQ ID NO: 2325794 - RNA, 21 nt, Human
ggccaggcugaugggacagaa

SEQ ID NO: 2325795 - RNA, 19 nt, Human
ggccaugguacccccuucu

SEQ ID NO: 2325796 - RNA, 16 nt, Human
ggccaugggccuccug

SEQ ID NO: 2325797 - RNA, 11 nt, Human
ggccaggcucc

SEQ ID NO: 2325798 - RNA, 11 nt, Human
ggccaggcugc

SEQ ID NO: 2325799 - RNA, 15 nt, Human
ggccaggcugcucuu

SEQ ID NO: 2325800 - RNA, 14 nt, Human
ggccaggcugcucu

SEQ ID NO: 2325801 - RNA, 17 nt, Human
ggccagcuggcagcaga

SEQ ID NO: 2325802 - RNA, 16 nt, Human
ggccagcuggcagcag

SEQ ID NO: 2325803 - RNA, 14 nt, Human
ggccagcuggcagc

SEQ ID NO: 2325804 - RNA, 18 nt, Human
ggccagcuggcagcagag

SEQ ID NO: 2325805 - RNA, 18 nt, Human
ggccaggcccucugccca

SEQ ID NO: 2325806 - RNA, 19 nt, Human
ggccagcugccccagccag

SEQ ID NO: 2325807 - RNA, 20 nt, Human
ggccagcugccccagccaga

SEQ ID NO: 2325808 - RNA, 23 nt, Human
ggccagcugcuugggcuucaucc

SEQ ID NO: 2325809 - RNA, 20 nt, Human
ggccagccuugaccauucuc

SEQ ID NO: 2325810 - RNA, 22 nt, Human
ggccagccuugaccauucucca

SEQ ID NO: 2325811 - RNA, 17 nt, Human
ggccagcugcuugggcu

SEQ ID NO: 2325812 - RNA, 21 nt, Human
ggcagcguacucaucaucaac

SEQ ID NO: 2325813 - RNA, 18 nt, Human
ggcagcgcggggagcccg

SEQ ID NO: 2325814 - RNA, 17 nt, Human
ggcagcgcccuuccucu

SEQ ID NO: 2325815 - RNA, 19 nt, Human
ggcagcgcccuuccucucc

SEQ ID NO: 2325816 - RNA, 20 nt, Human
ggcagcgcccuuccucucca

SEQ ID NO: 2325817 - RNA, 21 nt, Human
ggcagcgcccuuccucuccac

SEQ ID NO: 2325818 - RNA, 22 nt, Human
ggcagcgccaggcugaccacag

SEQ ID NO: 2325819 - RNA, 21 nt, Human
ggcagcgccaggcugaccaca

SEQ ID NO: 2325820 - RNA, 16 nt, Human
ggcagcgcccuuccuc

SEQ ID NO: 2325821 - RNA, 15 nt, Human
ggcacuagccuuugg

SEQ ID NO: 2325822 - RNA, 20 nt, Human
ggcacuagccuuuggcucug

SEQ ID NO: 2325823 - RNA, 21 nt, Human
ggcacuagccuuuggcucugg

SEQ ID NO: 2325824 - RNA, 12 nt, Human
ggcagcucaccu

SEQ ID NO: 2325825 - RNA, 14 nt, Human
ggcagcucaccucu

SEQ ID NO: 2325826 - RNA, 15 nt, Human
ggcaccgagaauguu

SEQ ID NO: 2325827 - RNA, 15 nt, Human
ggcaccuaauccagg

SEQ ID NO: 2325828 - RNA, 14 nt, Human
ggcaccuggggagu

SEQ ID NO: 2325829 - RNA, 16 nt, Human
ggcaccuaauccaggc

SEQ ID NO: 2325830 - RNA, 17 nt, Human
ggcaccuggggaguggg

SEQ ID NO: 2325831 - RNA, 17 nt, Human
ggcaccuuaguggcuuu

SEQ ID NO: 2325832 - RNA, 18 nt, Human
ggcacgcugugggcaggu

SEQ ID NO: 2325833 - RNA, 13 nt, Human
ggcacgcuguggg

SEQ ID NO: 2325834 - RNA, 20 nt, Human
ggcacgagcaaagugaagac

SEQ ID NO: 2325835 - RNA, 20 nt, Human
ggcacgaacccaccugcuga

SEQ ID NO: 2325836 - RNA, 19 nt, Human
ggcacgaacccaccugcug

SEQ ID NO: 2325837 - RNA, 18 nt, Human
ggcacgaacccaccugcu

SEQ ID NO: 2325838 - RNA, 17 nt, Human
ggcacgaacccaccugc

SEQ ID NO: 2325839 - RNA, 15 nt, Human
ggcacgggcccguga

SEQ ID NO: 2325840 - RNA, 21 nt, Human
ggcacgcuugcguaugucugu

SEQ ID NO: 2325841 - RNA, 18 nt, Human
ggcacgucaucuaguuuu

SEQ ID NO: 2325842 - RNA, 14 nt, Human
ggcacuagccuuug

SEQ ID NO: 2325843 - RNA, 23 nt, Human
ggcacuaacguugagccccugga

SEQ ID NO: 2325844 - RNA, 21 nt, Human
ggcagcugaacuauuggaggg

SEQ ID NO: 2325845 - RNA, 21 nt, Human
ggcagcucuccagucaggagg

SEQ ID NO: 2325846 - RNA, 20 nt, Human
ggcagcucuggacagcccca

SEQ ID NO: 2325847 - RNA, 16 nt, Human
ggcagcuggaugagac

SEQ ID NO: 2325848 - RNA, 12 nt, Human
ggcagcugggcc

SEQ ID NO: 2325849 - RNA, 13 nt, Human
ggcagcugggccc

SEQ ID NO: 2325850 - RNA, 14 nt, Human
ggcagcugggccca

SEQ ID NO: 2325851 - RNA, 22 nt, Human
ggcagcugcuuuugucuauggg

SEQ ID NO: 2325852 - RNA, 17 nt, Human
ggcagcuugaggguugg

SEQ ID NO: 2325853 - RNA, 22 nt, Human
ggcagcugggcccaacccuguc

SEQ ID NO: 2325854 - RNA, 18 nt, Human
ggcagcugggcccaaccc

SEQ ID NO: 2325855 - RNA, 19 nt, Human
ggcagcugggcccaacccu

SEQ ID NO: 2325856 - RNA, 20 nt, Human
ggcagcuucuauuagccagu

SEQ ID NO: 2325857 - RNA, 16 nt, Human
ggcagcucaccucucc

SEQ ID NO: 2325858 - RNA, 13 nt, Human
ggcagcucagaga

SEQ ID NO: 2325859 - RNA, 21 nt, Human
ggcagcucagagaggguggga

SEQ ID NO: 2325860 - RNA, 12 nt, Human
ggcagcucagcu

SEQ ID NO: 2325861 - RNA, 15 nt, Human
ggcagcucaucucug

SEQ ID NO: 2325862 - RNA, 15 nt, Human
ggcagcucuggacag

SEQ ID NO: 2325863 - RNA, 14 nt, Human
ggcagcucuccagu

SEQ ID NO: 2325864 - RNA, 16 nt, Human
ggcagcucuccaguca

SEQ ID NO: 2325865 - RNA, 11 nt, Human
ggcagcucucc

SEQ ID NO: 2325866 - RNA, 13 nt, Human
ggcagcucuccag

SEQ ID NO: 2325867 - RNA, 14 nt, Human
ggcagggugacccu

SEQ ID NO: 2325868 - RNA, 17 nt, Human
ggcagguaaacuccugu

SEQ ID NO: 2325869 - RNA, 14 nt, Human
ggcagguagccagg

SEQ ID NO: 2325870 - RNA, 15 nt, Human
ggcagguagccaggg

SEQ ID NO: 2325871 - RNA, 20 nt, Human
ggcagguagccagggggacu

SEQ ID NO: 2325872 - RNA, 21 nt, Human
ggcagggugggauggaggaga

SEQ ID NO: 2325873 - RNA, 16 nt, Human
ggcagggugggaugga

SEQ ID NO: 2325874 - RNA, 23 nt, Human
ggcagggugggauggaggagaag

SEQ ID NO: 2325875 - RNA, 19 nt, Human
ggcagggucucacucuguc

SEQ ID NO: 2325876 - RNA, 20 nt, Human
ggcagggucucacucugucg

SEQ ID NO: 2325877 - RNA, 13 nt, Human
ggcagugggagcu

SEQ ID NO: 2325878 - RNA, 14 nt, Human
ggcagugggagcug

SEQ ID NO: 2325879 - RNA, 16 nt, Human
ggcagugggagcugcc

SEQ ID NO: 2325880 - RNA, 23 nt, Human
ggcaucuuugccuugggcugcuc

SEQ ID NO: 2325881 - RNA, 22 nt, Human
ggcaucuuugccuugggcugcu

SEQ ID NO: 2325882 - RNA, 21 nt, Human
ggcagugggacagggcauggc

SEQ ID NO: 2325883 - RNA, 12 nt, Human
ggcauggcccug

SEQ ID NO: 2325884 - RNA, 16 nt, Human
ggcauggcuccagucu

SEQ ID NO: 2325885 - RNA, 17 nt, Human
ggcauggcccugggguc

SEQ ID NO: 2325886 - RNA, 13 nt, Human
ggcauggcccugg

SEQ ID NO: 2325887 - RNA, 16 nt, Human
ggcauggcccuggggu

SEQ ID NO: 2325888 - RNA, 17 nt, Human
ggcauggccagguggcc

SEQ ID NO: 2325889 - RNA, 18 nt, Human
ggcauggccagguggcca

SEQ ID NO: 2325890 - RNA, 12 nt, Human
ggcaugcugggg

SEQ ID NO: 2325891 - RNA, 19 nt, Human
ggcaugcgcacaaggcuga

SEQ ID NO: 2325892 - RNA, 16 nt, Human
ggcaugccugugugac

SEQ ID NO: 2325893 - RNA, 14 nt, Human
ggcaugcuggggca

SEQ ID NO: 2325894 - RNA, 13 nt, Human
ggcaugcuggggc

SEQ ID NO: 2325895 - RNA, 16 nt, Human
ggcaugcuggggcaag

SEQ ID NO: 2325896 - RNA, 14 nt, Human
ggcaugccugugug

SEQ ID NO: 2325897 - RNA, 23 nt, Human
ggcaugaaguuuccuuggcuggu

SEQ ID NO: 2325898 - RNA, 13 nt, Human
ggcaugccugugu

SEQ ID NO: 2325899 - RNA, 14 nt, Human
ggcaugaacaugua

SEQ ID NO: 2325900 - RNA, 18 nt, Human
ggcaugaacauguacugu

SEQ ID NO: 2325901 - RNA, 22 nt, Human
ggcaugaaguuuccuuggcugg

SEQ ID NO: 2325902 - RNA, 18 nt, Human
ggcaugacacgaauauug

SEQ ID NO: 2325903 - RNA, 15 nt, Human
ggcaugaagacagau

SEQ ID NO: 2325904 - RNA, 13 nt, Human
ggcacccacccug

SEQ ID NO: 2325905 - RNA, 14 nt, Human
ggcacccacccugg

SEQ ID NO: 2325906 - RNA, 18 nt, Human
ggcaaugucaggaacaga

SEQ ID NO: 2325907 - RNA, 16 nt, Human
ggcacccacccagcac

SEQ ID NO: 2325908 - RNA, 20 nt, Human
ggcacccaccguggaggagg

SEQ ID NO: 2325909 - RNA, 21 nt, Human
ggcacccaccguggaggagga

SEQ ID NO: 2325910 - RNA, 20 nt, Human
ggcacccagugagcacuccc

SEQ ID NO: 2325911 - RNA, 23 nt, Human
ggcacccaccaucaugucuggcu

SEQ ID NO: 2325912 - RNA, 21 nt, Human
ggcaaugggagcugaggccac

SEQ ID NO: 2325913 - RNA, 20 nt, Human
ggcaaugggagcugaggcca

SEQ ID NO: 2325914 - RNA, 22 nt, Human
ggcacccggccccugcugguuc

SEQ ID NO: 2325915 - RNA, 14 nt, Human
ggcaccgagaaugu

SEQ ID NO: 2325916 - RNA, 18 nt, Human
ggcaccggggccucggac

SEQ ID NO: 2325917 - RNA, 12 nt, Human
ggcacccuucuu

SEQ ID NO: 2325918 - RNA, 17 nt, Human
ggcacccuucuuuccuc

SEQ ID NO: 2325919 - RNA, 20 nt, Human
ggcacccuucuuuccucuuc

SEQ ID NO: 2325920 - RNA, 22 nt, Human
ggcacccuucuuuccucuuccc

SEQ ID NO: 2325921 - RNA, 21 nt, Human
ggcaauauagcaagaucccau

SEQ ID NO: 2325922 - RNA, 18 nt, Human
ggcaauaguguguucuga

SEQ ID NO: 2325923 - RNA, 19 nt, Human
ggcaaucauggugcucaga

SEQ ID NO: 2325924 - RNA, 18 nt, Human
ggcaacccccagccugcu

SEQ ID NO: 2325925 - RNA, 22 nt, Human
ggauuguaaaaaaaaaugccuu

SEQ ID NO: 2325926 - RNA, 23 nt, Human
ggauuguaaaaaaaaaugccuuu

SEQ ID NO: 2325927 - RNA, 22 nt, Human
ggcaaccccaguucugcuccuc

SEQ ID NO: 2325928 - RNA, 23 nt, Human
ggcaaccccaguucugcuccucu

SEQ ID NO: 2325929 - RNA, 14 nt, Human
ggcaaugcuggcug

SEQ ID NO: 2325930 - RNA, 15 nt, Human
ggcaaugauggcaau

SEQ ID NO: 2325931 - RNA, 18 nt, Human
ggcaaucuauuaauagcu

SEQ ID NO: 2325932 - RNA, 15 nt, Human
ggcaaugcuggcugu

SEQ ID NO: 2325933 - RNA, 23 nt, Human
ggcaaugcuggcuguuggcuggg

SEQ ID NO: 2325934 - RNA, 12 nt, Human
ggauuggggaag

SEQ ID NO: 2325935 - RNA, 18 nt, Human
ggauuggauuauuuaaua

SEQ ID NO: 2325936 - RNA, 20 nt, Human
ggauuggcuuguguguuuca

SEQ ID NO: 2325937 - RNA, 18 nt, Human
ggauugggccccugccag

SEQ ID NO: 2325938 - RNA, 17 nt, Human
ggauugggccccugcca

SEQ ID NO: 2325939 - RNA, 15 nt, Human
ggauugcugccacuu

SEQ ID NO: 2325940 - RNA, 16 nt, Human
ggauuggauuauuuaa

SEQ ID NO: 2325941 - RNA, 22 nt, Human
ggauuggauuauuuaauaacau

SEQ ID NO: 2325942 - RNA, 17 nt, Human
ggauugcuugagcccag

SEQ ID NO: 2325943 - RNA, 14 nt, Human
ggauugcugccacu

SEQ ID NO: 2325944 - RNA, 16 nt, Human
ggauugcuaugaauga

SEQ ID NO: 2325945 - RNA, 17 nt, Human
ggauugcuacuguccua

SEQ ID NO: 2325946 - RNA, 19 nt, Human
ggauuggggaagacugugg

SEQ ID NO: 2325947 - RNA, 18 nt, Human
ggauuggggaagacugug

SEQ ID NO: 2325948 - RNA, 17 nt, Human
ggauuggggucccucua

SEQ ID NO: 2325949 - RNA, 16 nt, Human
ggauuggggucccucu

SEQ ID NO: 2325950 - RNA, 14 nt, Human
ggauugggggcugg

SEQ ID NO: 2325951 - RNA, 18 nt, Human
ggauugggggcuggugcc

SEQ ID NO: 2325952 - RNA, 15 nt, Human
ggauuguaaaauggu

SEQ ID NO: 2325953 - RNA, 16 nt, Human
ggcaacccccagccug

SEQ ID NO: 2325954 - RNA, 17 nt, Human
ggcaacccccagccugc

SEQ ID NO: 2325955 - RNA, 16 nt, Human
ggauucuuccucccuc

SEQ ID NO: 2325956 - RNA, 18 nt, Human
ggauugauuaugcagaau

SEQ ID NO: 2325957 - RNA, 15 nt, Human
ggauugcacguggcc

SEQ ID NO: 2325958 - RNA, 17 nt, Human
ggauugcacguggccuc

SEQ ID NO: 2325959 - RNA, 18 nt, Human
ggauugcacguggccucu

SEQ ID NO: 2325960 - RNA, 16 nt, Human
ggauucuuauggacaa

SEQ ID NO: 2325961 - RNA, 15 nt, Human
ggauuacccaagcaa

SEQ ID NO: 2325962 - RNA, 16 nt, Human
ggauucuuccaucuga

SEQ ID NO: 2325963 - RNA, 23 nt, Human
ggauuacaagcgugagccacugc

SEQ ID NO: 2325964 - RNA, 19 nt, Human
ggauuacaggcuccugcca

SEQ ID NO: 2325965 - RNA, 21 nt, Human
ggauggagcccaggcgggagc

SEQ ID NO: 2325966 - RNA, 22 nt, Human
ggauuaaugguccugugaugcu

SEQ ID NO: 2325967 - RNA, 17 nt, Human
ggauuagggagagaaga

SEQ ID NO: 2325968 - RNA, 13 nt, Human
ggaugcagcauua

SEQ ID NO: 2325969 - RNA, 18 nt, Human
ggaugcagagucagcaga

SEQ ID NO: 2325970 - RNA, 16 nt, Human
ggaugcagagucagca

SEQ ID NO: 2325971 - RNA, 17 nt, Human
ggaugauuggauuauuc

SEQ ID NO: 2325972 - RNA, 19 nt, Human
ggaugcagccucacagucc

SEQ ID NO: 2325973 - RNA, 19 nt, Human
ggaugccaagaaguuuaag

SEQ ID NO: 2325974 - RNA, 21 nt, Human
ggaugcauguuuuccagcucc

SEQ ID NO: 2325975 - RNA, 15 nt, Human
ggaugcauuucucug

SEQ ID NO: 2325976 - RNA, 21 nt, Human
ggaugccuuccccugggcccu

SEQ ID NO: 2325977 - RNA, 16 nt, Human
ggaugcauggagauag

SEQ ID NO: 2325978 - RNA, 14 nt, Human
ggaugcagugcucg

SEQ ID NO: 2325979 - RNA, 22 nt, Human
ggaugcagugcucgcuguugcu

SEQ ID NO: 2325980 - RNA, 21 nt, Human
ggaugcuugccuagggccugg

SEQ ID NO: 2325981 - RNA, 14 nt, Human
ggaugcugccugag

SEQ ID NO: 2325982 - RNA, 16 nt, Human
ggaugcggauggccgg

SEQ ID NO: 2325983 - RNA, 16 nt, Human
ggaugcuaacaucuaa

SEQ ID NO: 2325984 - RNA, 15 nt, Human
ggaugcuuguacaua

SEQ ID NO: 2325985 - RNA, 19 nt, Human
ggauggaaaaggaagacua

SEQ ID NO: 2325986 - RNA, 21 nt, Human
ggaugcuccucccuucucuac

SEQ ID NO: 2325987 - RNA, 16 nt, Human
ggauggagagagggga

SEQ ID NO: 2325988 - RNA, 17 nt, Human
ggauggaaugauggguc

SEQ ID NO: 2325989 - RNA, 19 nt, Human
ggauuacaagcgugagcca

SEQ ID NO: 2325990 - RNA, 23 nt, Human
ggaugcacagaguuguuacauuu

SEQ ID NO: 2325991 - RNA, 21 nt, Human
ggaugauuggaggggggaggu

SEQ ID NO: 2325992 - RNA, 16 nt, Human
ggaugcagccucacag

SEQ ID NO: 2325993 - RNA, 17 nt, Human
ggaugcagccucacagu

SEQ ID NO: 2325994 - RNA, 18 nt, Human
ggaucccucugggcacug

SEQ ID NO: 2325995 - RNA, 17 nt, Human
ggauccgacugcuuugg

SEQ ID NO: 2325996 - RNA, 19 nt, Human
ggauccgacugcuuuggac

SEQ ID NO: 2325997 - RNA, 21 nt, Human
ggauccgacugcuuuggaccu

SEQ ID NO: 2325998 - RNA, 12 nt, Human
ggauccuccagg

SEQ ID NO: 2325999 - RNA, 21 nt, Human
ggauccuauucucaccaggaa

SEQ ID NO: 2326000 - RNA, 23 nt, Human
ggauccuauucucaccaggaagg

SEQ ID NO: 2326001 - RNA, 18 nt, Human
ggauccuagccuuauccu

SEQ ID NO: 2326002 - RNA, 20 nt, Human
ggauccuagccuuauccucu

SEQ ID NO: 2326003 - RNA, 14 nt, Human
ggauccuauucuca

SEQ ID NO: 2326004 - RNA, 20 nt, Human
ggauccuauucucaccagga

SEQ ID NO: 2326005 - RNA, 13 nt, Human
ggauccuccaggu

SEQ ID NO: 2326006 - RNA, 20 nt, Human
ggagugcaaugacacagucu

SEQ ID NO: 2326007 - RNA, 15 nt, Human
ggagugcagggagga

SEQ ID NO: 2326008 - RNA, 18 nt, Human
ggagugcagggaggagag

SEQ ID NO: 2326009 - RNA, 14 nt, Human
ggagugcagugagc

SEQ ID NO: 2326010 - RNA, 12 nt, Human
ggagugcaguga

SEQ ID NO: 2326011 - RNA, 23 nt, Human
ggagugaguugauagcacagacc

SEQ ID NO: 2326012 - RNA, 16 nt, Human
ggauacugcccggggc

SEQ ID NO: 2326013 - RNA, 14 nt, Human
ggauagaugcuggc

SEQ ID NO: 2326014 - RNA, 13 nt, Human
ggauagaugcugg

SEQ ID NO: 2326015 - RNA, 18 nt, Human
ggauacucugucagaugg

SEQ ID NO: 2326016 - RNA, 15 nt, Human
ggauacugcagggcc

SEQ ID NO: 2326017 - RNA, 16 nt, Human
ggauacugcagggcca

SEQ ID NO: 2326018 - RNA, 21 nt, Human
ggauacugcagggccaggacu

SEQ ID NO: 2326019 - RNA, 21 nt, Human
ggauacgcaucagacagaugg

SEQ ID NO: 2326020 - RNA, 18 nt, Human
ggauacaaaagcauguga

SEQ ID NO: 2326021 - RNA, 22 nt, Human
ggaucaaaccccgaccaccugc

SEQ ID NO: 2326022 - RNA, 14 nt, Human
ggaucacagagaca

SEQ ID NO: 2326023 - RNA, 13 nt, Human
ggauauuuucaaa

SEQ ID NO: 2326024 - RNA, 16 nt, Human
ggauaugcuuaguaau

SEQ ID NO: 2326025 - RNA, 18 nt, Human
ggauaguugcuccgccuc

SEQ ID NO: 2326026 - RNA, 13 nt, Human
ggauauaaauaua

SEQ ID NO: 2326027 - RNA, 20 nt, Human
ggauauaguuuuacuuuuaa

SEQ ID NO: 2326028 - RNA, 16 nt, Human
ggauauaguuuuacuu

SEQ ID NO: 2326029 - RNA, 14 nt, Human
ggauauaaauauau

SEQ ID NO: 2326030 - RNA, 15 nt, Human
ggauauaggagagga

SEQ ID NO: 2326031 - RNA, 22 nt, Human
ggaucccucauccucauaccca

SEQ ID NO: 2326032 - RNA, 17 nt, Human
ggaucccucccccccau

SEQ ID NO: 2326033 - RNA, 22 nt, Human
ggaucccucaucugucccuccg

SEQ ID NO: 2326034 - RNA, 18 nt, Human
ggaucccucaucuguccc

SEQ ID NO: 2326035 - RNA, 13 nt, Human
ggaucccucaucu

SEQ ID NO: 2326036 - RNA, 13 nt, Human
ggaucccucaucc

SEQ ID NO: 2326037 - RNA, 17 nt, Human
ggaucccucauccucau

SEQ ID NO: 2326038 - RNA, 21 nt, Human
gaggccucaguggacuuucca

SEQ ID NO: 2326039 - RNA, 18 nt, Human
gaggccucuuggaccucu

SEQ ID NO: 2326040 - RNA, 19 nt, Human
gaggccucuuggaccucug

SEQ ID NO: 2326041 - RNA, 21 nt, Human
gaggccucuuggaccucugcu

SEQ ID NO: 2326042 - RNA, 22 nt, Human
gaggccucuuggaccucugcuc

SEQ ID NO: 2326043 - RNA, 16 nt, Human
gaggccuucucugaag

SEQ ID NO: 2326044 - RNA, 16 nt, Human
gaggccucaguggacu

SEQ ID NO: 2326045 - RNA, 22 nt, Human
gaggccucucauuccagaggaa

SEQ ID NO: 2326046 - RNA, 23 nt, Human
gaggccuauaaugaagcuuuaua

SEQ ID NO: 2326047 - RNA, 18 nt, Human
gaggccuacucuuccauc

SEQ ID NO: 2326048 - RNA, 19 nt, Human
gaggccuaaaaguaaacau

SEQ ID NO: 2326049 - RNA, 18 nt, Human
gaggccuaccccgcagac

SEQ ID NO: 2326050 - RNA, 18 nt, Human
gaggccuucucugaagga

SEQ ID NO: 2326051 - RNA, 19 nt, Human
gaggccuucucugaaggac

SEQ ID NO: 2326052 - RNA, 12 nt, Human
gaggccuugcuc

SEQ ID NO: 2326053 - RNA, 15 nt, Human
gaggccuugagaggc

SEQ ID NO: 2326054 - RNA, 24 nt, Human
gaggccucuuggaccucugcucug

SEQ ID NO: 2326055 - RNA, 22 nt, Human
gaggcgcacuuuccuccuggca

SEQ ID NO: 2326056 - RNA, 21 nt, Human
gaggcgcaugaauuugugaag

SEQ ID NO: 2326057 - RNA, 18 nt, Human
gaggcggacguuccagcc

SEQ ID NO: 2326058 - RNA, 14 nt, Human
gaggcgcgggggcc

SEQ ID NO: 2326059 - RNA, 19 nt, Human
gaggcggacguuccagccg

SEQ ID NO: 2326060 - RNA, 14 nt, Human
gaggcuggaggcag

SEQ ID NO: 2326061 - RNA, 15 nt, Human
gaggcuggaggcagg

SEQ ID NO: 2326062 - RNA, 15 nt, Human
gaggcuggagcuggc

SEQ ID NO: 2326063 - RNA, 19 nt, Human
gaggcuggaggcagggccu

SEQ ID NO: 2326064 - RNA, 18 nt, Human
gaggcuggaggcagggcc

SEQ ID NO: 2326065 - RNA, 17 nt, Human
gaggcuggaggcagggc

SEQ ID NO: 2326066 - RNA, 16 nt, Human
gaggcuggaggcaggg

SEQ ID NO: 2326067 - RNA, 23 nt, Human
gaggcuggauccuagccuuaucc

SEQ ID NO: 2326068 - RNA, 13 nt, Human
gaggcuggcacag

SEQ ID NO: 2326069 - RNA, 13 nt, Human
gaggcuggcaggu

SEQ ID NO: 2326070 - RNA, 12 nt, Human
gaggcuggcagg

SEQ ID NO: 2326071 - RNA, 12 nt, Human
gaggcuggcugg

SEQ ID NO: 2326072 - RNA, 13 nt, Human
gaggcuggcuggg

SEQ ID NO: 2326073 - RNA, 16 nt, Human
gaggcuggcuggggcc

SEQ ID NO: 2326074 - RNA, 16 nt, Human
gaggcugggcucccuu

SEQ ID NO: 2326075 - RNA, 23 nt, Human
gaggccccagccucccugaagcc

SEQ ID NO: 2326076 - RNA, 22 nt, Human
gaggcccuucucuccagccccu

SEQ ID NO: 2326077 - RNA, 21 nt, Human
gaggcccuucucuccagcccc

SEQ ID NO: 2326078 - RNA, 15 nt, Human
gaggcccuucucucc

SEQ ID NO: 2326079 - RNA, 20 nt, Human
gaggcccuucucuccagccc

SEQ ID NO: 2326080 - RNA, 12 nt, Human
gaggcccaggga

SEQ ID NO: 2326081 - RNA, 13 nt, Human
gaggcccaguuca

SEQ ID NO: 2326082 - RNA, 13 nt, Human
gaggcccagggag

SEQ ID NO: 2326083 - RNA, 13 nt, Human
gaggccccaaagg

SEQ ID NO: 2326084 - RNA, 14 nt, Human
gaggccccaaagga

SEQ ID NO: 2326085 - RNA, 19 nt, Human
gaggccccaaaggaaaaag

SEQ ID NO: 2326086 - RNA, 20 nt, Human
gaggcccaguucacccugau

SEQ ID NO: 2326087 - RNA, 18 nt, Human
gaggcccaguucacccug

SEQ ID NO: 2326088 - RNA, 14 nt, Human
gaggccccacuggg

SEQ ID NO: 2326089 - RNA, 13 nt, Human
gaggccccagccu

SEQ ID NO: 2326090 - RNA, 12 nt, Human
gaggccccagcc

SEQ ID NO: 2326091 - RNA, 22 nt, Human
gaggccccagccucccugaagc

SEQ ID NO: 2326092 - RNA, 19 nt, Human
gaggccccagccucccuga

SEQ ID NO: 2326093 - RNA, 14 nt, Human
gaggcccccagccc

SEQ ID NO: 2326094 - RNA, 23 nt, Human
gaggccaugauucgcccaaagcc

SEQ ID NO: 2326095 - RNA, 20 nt, Human
gaggccaugauucgcccaaa

SEQ ID NO: 2326096 - RNA, 19 nt, Human
gaggccauugugugagccu

SEQ ID NO: 2326097 - RNA, 11 nt, Human
gaggcccagag

SEQ ID NO: 2326098 - RNA, 13 nt, Human
gaggcccagaggg

SEQ ID NO: 2326099 - RNA, 14 nt, Human
gaggcccagagggc

SEQ ID NO: 2326100 - RNA, 19 nt, Human
gaggcccagagggccugca

SEQ ID NO: 2326101 - RNA, 23 nt, Human
gaggccauguuccaauaaacagg

SEQ ID NO: 2326102 - RNA, 15 nt, Human
gaggcccagagggcc

SEQ ID NO: 2326103 - RNA, 16 nt, Human
gaggcccagagggccu

SEQ ID NO: 2326104 - RNA, 21 nt, Human
gaggcagggccuugcccagag

SEQ ID NO: 2326105 - RNA, 20 nt, Human
gaggcagggccuugcccaga

SEQ ID NO: 2326106 - RNA, 18 nt, Human
gaggcagggccuugccca

SEQ ID NO: 2326107 - RNA, 17 nt, Human
gaggcagggccuugccc

SEQ ID NO: 2326108 - RNA, 15 nt, Human
gaggcagggccuugc

SEQ ID NO: 2326109 - RNA, 16 nt, Human
gaggcagggaggggac

SEQ ID NO: 2326110 - RNA, 22 nt, Human
gaggcagggccuugcccagaga

SEQ ID NO: 2326111 - RNA, 14 nt, Human
gaggccaugggccu

SEQ ID NO: 2326112 - RNA, 17 nt, Human
gaggccaugggccuccu

SEQ ID NO: 2326113 - RNA, 18 nt, Human
gaggccaugggccuccug

SEQ ID NO: 2326114 - RNA, 20 nt, Human
gaggccaugggccuccugug

SEQ ID NO: 2326115 - RNA, 21 nt, Human
gaggccaugggccuccugugu

SEQ ID NO: 2326116 - RNA, 23 nt, Human
gaggccaugggccuccugugugu

SEQ ID NO: 2326117 - RNA, 17 nt, Human
gaggcagggaggggacu

SEQ ID NO: 2326118 - RNA, 15 nt, Human
gaggcagggagggga

SEQ ID NO: 2326119 - RNA, 14 nt, Human
gaggcagggaaguc

SEQ ID NO: 2326120 - RNA, 22 nt, Human
gaggcagggaaguccccaggcc

SEQ ID NO: 2326121 - RNA, 14 nt, Human
gaggcaggcuccag

SEQ ID NO: 2326122 - RNA, 21 nt, Human
gaggcagccccauucugccug

SEQ ID NO: 2326123 - RNA, 20 nt, Human
gaggcagccccauucugccu

SEQ ID NO: 2326124 - RNA, 9 nt, Human
gaggcaggg

SEQ ID NO: 2326125 - RNA, 19 nt, Human
gaggcagccccauucugcc

SEQ ID NO: 2326126 - RNA, 18 nt, Human
gaggcagccccauucugc

SEQ ID NO: 2326127 - RNA, 19 nt, Human
gaggcagagguugcaguga

SEQ ID NO: 2326128 - RNA, 22 nt, Human
gaggcagagagcggucucaggc

SEQ ID NO: 2326129 - RNA, 11 nt, Human
gaggcagagga

SEQ ID NO: 2326130 - RNA, 13 nt, Human
gaggcagaggaca

SEQ ID NO: 2326131 - RNA, 14 nt, Human
gaggcagaggacag

SEQ ID NO: 2326132 - RNA, 11 nt, Human
gaggcagagag

SEQ ID NO: 2326133 - RNA, 21 nt, Human
gaggcagagaaagaagagaca

SEQ ID NO: 2326134 - RNA, 12 nt, Human
gaggcagagagc

SEQ ID NO: 2326135 - RNA, 13 nt, Human
gaggcagagagcg

SEQ ID NO: 2326136 - RNA, 15 nt, Human
gaggcagagagcggu

SEQ ID NO: 2326137 - RNA, 13 nt, Human
gaggcaagcccug

SEQ ID NO: 2326138 - RNA, 19 nt, Human
gaggcaaugucaggaacag

SEQ ID NO: 2326139 - RNA, 22 nt, Human
gaggcaaugggagcugaggcca

SEQ ID NO: 2326140 - RNA, 17 nt, Human
gaggauuucaagccugc

SEQ ID NO: 2326141 - RNA, 15 nt, Human
gaggauuucaagccu

SEQ ID NO: 2326142 - RNA, 13 nt, Human
gaggauuuugagu

SEQ ID NO: 2326143 - RNA, 17 nt, Human
gaggauuuuuuucugag

SEQ ID NO: 2326144 - RNA, 13 nt, Human
gaggcaagagaau

SEQ ID NO: 2326145 - RNA, 22 nt, Human
gaggcagacagcagcucaggca

SEQ ID NO: 2326146 - RNA, 21 nt, Human
gaggcagacagcagcucaggc

SEQ ID NO: 2326147 - RNA, 20 nt, Human
gaggcagacagcagcucagg

SEQ ID NO: 2326148 - RNA, 19 nt, Human
gaggcagacagcagcucag

SEQ ID NO: 2326149 - RNA, 22 nt, Human
gaggcagacuucccugaaugua

SEQ ID NO: 2326150 - RNA, 16 nt, Human
gaggcagagaaagaag

SEQ ID NO: 2326151 - RNA, 17 nt, Human
gaggcagagaaagaaga

SEQ ID NO: 2326152 - RNA, 19 nt, Human
gaggcagagaaagaagaga

SEQ ID NO: 2326153 - RNA, 15 nt, Human
gaggauggagagagg

SEQ ID NO: 2326154 - RNA, 14 nt, Human
gaggauggccagug

SEQ ID NO: 2326155 - RNA, 14 nt, Human
gaggauggagagag

SEQ ID NO: 2326156 - RNA, 13 nt, Human
gaggauggagaga

SEQ ID NO: 2326157 - RNA, 12 nt, Human
gaggauggagag

SEQ ID NO: 2326158 - RNA, 13 nt, Human
gaggaugagcugg

SEQ ID NO: 2326159 - RNA, 21 nt, Human
gaggaugcagagucagcagaa

SEQ ID NO: 2326160 - RNA, 22 nt, Human
gaggaugagcucuacccagggc

SEQ ID NO: 2326161 - RNA, 18 nt, Human
gaggaugagagcccagag

SEQ ID NO: 2326162 - RNA, 20 nt, Human
gaggaugagagcccagaggu

SEQ ID NO: 2326163 - RNA, 14 nt, Human
gaggaugagagccc

SEQ ID NO: 2326164 - RNA, 15 nt, Human
gaggaugagagccca

SEQ ID NO: 2326165 - RNA, 16 nt, Human
gaggaugagagcccag

SEQ ID NO: 2326166 - RNA, 17 nt, Human
gaggaugagagcccaga

SEQ ID NO: 2326167 - RNA, 20 nt, Human
gaggauugcuugagcucagg

SEQ ID NO: 2326168 - RNA, 22 nt, Human
gaggauuuaagggauggaaaag

SEQ ID NO: 2326169 - RNA, 20 nt, Human
gaggauuuaagggauggaaa

SEQ ID NO: 2326170 - RNA, 15 nt, Human
gaggauggccagugu

SEQ ID NO: 2326171 - RNA, 16 nt, Human
gaggauggccaguguc

SEQ ID NO: 2326172 - RNA, 19 nt, Human
gaggauggccagugucugu

SEQ ID NO: 2326173 - RNA, 19 nt, Human
gaggaucucuugagccugg

SEQ ID NO: 2326174 - RNA, 16 nt, Human
gaggaucucuugagcc

SEQ ID NO: 2326175 - RNA, 17 nt, Human
gaggaucccucucugga

SEQ ID NO: 2326176 - RNA, 13 nt, Human
gaggaucuggaga

SEQ ID NO: 2326177 - RNA, 21 nt, Human
gaggaugaauguaugugcacu

SEQ ID NO: 2326178 - RNA, 20 nt, Human
gaggaucacuggagcccagg

SEQ ID NO: 2326179 - RNA, 22 nt, Human
gaggaucucuugagccugggag

SEQ ID NO: 2326180 - RNA, 13 nt, Human
gaggaucucuuga

SEQ ID NO: 2326181 - RNA, 19 nt, Human
gagcccuuaucugugcuca

SEQ ID NO: 2326182 - RNA, 22 nt, Human
gagcccuguccugccuaaggcu

SEQ ID NO: 2326183 - RNA, 18 nt, Human
gagcccuuaucugugcuc

SEQ ID NO: 2326184 - RNA, 22 nt, Human
gagcccuguggaugagcccuca

SEQ ID NO: 2326185 - RNA, 21 nt, Human
gagcccuguggaugagcccuc

SEQ ID NO: 2326186 - RNA, 18 nt, Human
gagcccuguggaugagcc

SEQ ID NO: 2326187 - RNA, 15 nt, Human
gagggucaggaagga

SEQ ID NO: 2326188 - RNA, 13 nt, Human
gagggucaggaag

SEQ ID NO: 2326189 - RNA, 15 nt, Human
gagggucagagagga

SEQ ID NO: 2326190 - RNA, 13 nt, Human
gagggucagagag

SEQ ID NO: 2326191 - RNA, 16 nt, Human
gagggucaggaaggau

SEQ ID NO: 2326192 - RNA, 18 nt, Human
gagggucccaagcugggc

SEQ ID NO: 2326193 - RNA, 19 nt, Human
gagggucaggacugugacu

SEQ ID NO: 2326194 - RNA, 19 nt, Human
gagggucccaagcugggcc

SEQ ID NO: 2326195 - RNA, 20 nt, Human
gagggucccaagcugggccc

SEQ ID NO: 2326196 - RNA, 23 nt, Human
gagggucccaagcugggccccag

SEQ ID NO: 2326197 - RNA, 19 nt, Human
gaggguccccaccugggac

SEQ ID NO: 2326198 - RNA, 15 nt, Human
gaggguccuggcucc

SEQ ID NO: 2326199 - RNA, 21 nt, Human
gaggguccuggcuccugaggg

SEQ ID NO: 2326200 - RNA, 15 nt, Human
gagggucuggagaag

SEQ ID NO: 2326201 - RNA, 17 nt, Human
gaggguccuggcuccug

SEQ ID NO: 2326202 - RNA, 24 nt, Human
gagggucuggagaagcagugagcc

SEQ ID NO: 2326203 - RNA, 23 nt, Human
gagggucuugguuccagccugcc

SEQ ID NO: 2326204 - RNA, 13 nt, Human
gagggucugagga

SEQ ID NO: 2326205 - RNA, 14 nt, Human
gagggucugaggaa

SEQ ID NO: 2326206 - RNA, 15 nt, Human
gagggugagugcaag

SEQ ID NO: 2326207 - RNA, 21 nt, Human
gagggugaagugaagacaaug

SEQ ID NO: 2326208 - RNA, 19 nt, Human
gagggugggagagcccagc

SEQ ID NO: 2326209 - RNA, 18 nt, Human
gagggugggagagcccag

SEQ ID NO: 2326210 - RNA, 13 nt, Human
gaggguggcaggu

SEQ ID NO: 2326211 - RNA, 13 nt, Human
gaggguggagacu

SEQ ID NO: 2326212 - RNA, 20 nt, Human
gaggguggagacuaagcccu

SEQ ID NO: 2326213 - RNA, 12 nt, Human
gaggguggaaua

SEQ ID NO: 2326214 - RNA, 14 nt, Human
gaggguggugaccu

SEQ ID NO: 2326215 - RNA, 15 nt, Human
gagggugggaguggg

SEQ ID NO: 2326216 - RNA, 21 nt, Human
gaggguggugaccucugccug

SEQ ID NO: 2326217 - RNA, 22 nt, Human
gagggugucccaaaaagaaagg

SEQ ID NO: 2326218 - RNA, 22 nt, Human
gagguauucaauauccuuugcc

SEQ ID NO: 2326219 - RNA, 19 nt, Human
gagguauuuaucuuuacuu

SEQ ID NO: 2326220 - RNA, 22 nt, Human
gaggucaacagagaaggcagga

SEQ ID NO: 2326221 - RNA, 16 nt, Human
gaggucaacagagaag

SEQ ID NO: 2326222 - RNA, 15 nt, Human
gaggucaacagagaa

SEQ ID NO: 2326223 - RNA, 17 nt, Human
gaggucaaggcugcagu

SEQ ID NO: 2326224 - RNA, 17 nt, Human
gagguagaaaagauugg

SEQ ID NO: 2326225 - RNA, 18 nt, Human
gagguagaguuugaagga

SEQ ID NO: 2326226 - RNA, 19 nt, Human
gagguagaguuugaaggag

SEQ ID NO: 2326227 - RNA, 23 nt, Human
gagguagaguuugaaggagguga

SEQ ID NO: 2326228 - RNA, 13 nt, Human
gagguaugagguc

SEQ ID NO: 2326229 - RNA, 21 nt, Human
gagguagguggaucaccugag

SEQ ID NO: 2326230 - RNA, 21 nt, Human
gagguagcuuugagguggaag

SEQ ID NO: 2326231 - RNA, 16 nt, Human
gaggucaaguaagaag

SEQ ID NO: 2326232 - RNA, 16 nt, Human
gaggucacauucagga

SEQ ID NO: 2326233 - RNA, 19 nt, Human
gaggucacauucaggaaga

SEQ ID NO: 2326234 - RNA, 21 nt, Human
gaggucacauucaggaagaug

SEQ ID NO: 2326235 - RNA, 22 nt, Human
gaggucacauucaggaagauga

SEQ ID NO: 2326236 - RNA, 15 nt, Human
gaggucacuggaaag

SEQ ID NO: 2326237 - RNA, 16 nt, Human
gaggucacuggaaagg

SEQ ID NO: 2326238 - RNA, 17 nt, Human
gaggucacuggaaaggg

SEQ ID NO: 2326239 - RNA, 24 nt, Human
gaggucaagcccaggaggacugcc

SEQ ID NO: 2326240 - RNA, 19 nt, Human
gaggucaaggcugcaguga

SEQ ID NO: 2326241 - RNA, 20 nt, Human
gaggucaagcccaggaggac

SEQ ID NO: 2326242 - RNA, 19 nt, Human
gaggucaagcccaggagga

SEQ ID NO: 2326243 - RNA, 17 nt, Human
gaggucaagcccaggag

SEQ ID NO: 2326244 - RNA, 16 nt, Human
gaggucaagcccagga

SEQ ID NO: 2326245 - RNA, 15 nt, Human
gaggucaagcccagg

SEQ ID NO: 2326246 - RNA, 23 nt, Human
gaggucaacagagaaggcaggaa

SEQ ID NO: 2326247 - RNA, 12 nt, Human
gaggucagagcc

SEQ ID NO: 2326248 - RNA, 13 nt, Human
gaggucagagccu

SEQ ID NO: 2326249 - RNA, 15 nt, Human
gaggguuagggaggg

SEQ ID NO: 2326250 - RNA, 14 nt, Human
gaggguugggcugg

SEQ ID NO: 2326251 - RNA, 15 nt, Human
gaggguugggcuggu

SEQ ID NO: 2326252 - RNA, 18 nt, Human
gaggguuguucuccuaga

SEQ ID NO: 2326253 - RNA, 17 nt, Human
gaggguuguucuccuag

SEQ ID NO: 2326254 - RNA, 20 nt, Human
gaggguuggguucaucugag

SEQ ID NO: 2326255 - RNA, 12 nt, Human
gaggguuccugu

SEQ ID NO: 2326256 - RNA, 24 nt, Human
gagguaaggaauaccugucccccu

SEQ ID NO: 2326257 - RNA, 17 nt, Human
gagguaacagaacagcu

SEQ ID NO: 2326258 - RNA, 18 nt, Human
gagguaacagaacagcuu

SEQ ID NO: 2326259 - RNA, 21 nt, Human
gagguaacagaacagcuucag

SEQ ID NO: 2326260 - RNA, 22 nt, Human
gagguaaaagugugagcaguga

SEQ ID NO: 2326261 - RNA, 21 nt, Human
gaggguuuccaugggguagga

SEQ ID NO: 2326262 - RNA, 13 nt, Human
gagguaacagaac

SEQ ID NO: 2326263 - RNA, 14 nt, Human
gagguaacagaaca

SEQ ID NO: 2326264 - RNA, 15 nt, Human
gagguaacagaacag

SEQ ID NO: 2326265 - RNA, 16 nt, Human
gagguaacagaacagc

SEQ ID NO: 2326266 - RNA, 21 nt, Human
gagguaaggaauaccuguccc

SEQ ID NO: 2326267 - RNA, 15 nt, Human
gagggagcuuagcca

SEQ ID NO: 2326268 - RNA, 24 nt, Human
gagggagcauagaaggcaggugag

SEQ ID NO: 2326269 - RNA, 13 nt, Human
gagggaggaaucg

SEQ ID NO: 2326270 - RNA, 12 nt, Human
gagggaggaggc

SEQ ID NO: 2326271 - RNA, 13 nt, Human
gagggaggaggcc

SEQ ID NO: 2326272 - RNA, 19 nt, Human
gagggagggcuccagacac

SEQ ID NO: 2326273 - RNA, 22 nt, Human
gagggagcaaguccuucccuuu

SEQ ID NO: 2326274 - RNA, 12 nt, Human
gagggagaugga

SEQ ID NO: 2326275 - RNA, 12 nt, Human
gagggagcagac

SEQ ID NO: 2326276 - RNA, 20 nt, Human
gagggagcagacaggaggaa

SEQ ID NO: 2326277 - RNA, 20 nt, Human
gagggagcauagaaggcagg

SEQ ID NO: 2326278 - RNA, 14 nt, Human
gagggagaagcaug

SEQ ID NO: 2326279 - RNA, 13 nt, Human
gagggagagagag

SEQ ID NO: 2326280 - RNA, 15 nt, Human
gagggagagagagag

SEQ ID NO: 2326281 - RNA, 16 nt, Human
gagggagagagagaga

SEQ ID NO: 2326282 - RNA, 22 nt, Human
gagggagagagagagagagagg

SEQ ID NO: 2326283 - RNA, 13 nt, Human
gagggagagggag

SEQ ID NO: 2326284 - RNA, 14 nt, Human
gagggagaggugga

SEQ ID NO: 2326285 - RNA, 23 nt, Human
gagggagagguggagcaaaguga

SEQ ID NO: 2326286 - RNA, 13 nt, Human
gagggagaaggga

SEQ ID NO: 2326287 - RNA, 21 nt, Human
gagggagacacuggccccuca

SEQ ID NO: 2326288 - RNA, 22 nt, Human
gaggcugucuucucaggcucug

SEQ ID NO: 2326289 - RNA, 23 nt, Human
gaggcuguggucacagcggaggu

SEQ ID NO: 2326290 - RNA, 21 nt, Human
gaggcugucuucucaggcucu

SEQ ID NO: 2326291 - RNA, 20 nt, Human
gaggcugucuucucaggcuc

SEQ ID NO: 2326292 - RNA, 14 nt, Human
gaggcuguccugua

SEQ ID NO: 2326293 - RNA, 12 nt, Human
gaggcuguccug

SEQ ID NO: 2326294 - RNA, 12 nt, Human
gaggcuguagga

SEQ ID NO: 2326295 - RNA, 23 nt, Human
gaggcuguaggacucgcagucag

SEQ ID NO: 2326296 - RNA, 20 nt, Human
gaggcugggcucccuuccca

SEQ ID NO: 2326297 - RNA, 20 nt, Human
gaggcuggugcuguggccag

SEQ ID NO: 2326298 - RNA, 22 nt, Human
gaggcuggugcuguggccaggg

SEQ ID NO: 2326299 - RNA, 17 nt, Human
gagggaugcugccugag

SEQ ID NO: 2326300 - RNA, 15 nt, Human
gagggaugcugccug

SEQ ID NO: 2326301 - RNA, 18 nt, Human
gagggaugaggugcuggg

SEQ ID NO: 2326302 - RNA, 23 nt, Human
gagggaucacagggccccagaag

SEQ ID NO: 2326303 - RNA, 17 nt, Human
gagggaugaugccacac

SEQ ID NO: 2326304 - RNA, 15 nt, Human
gagggaucacagggc

SEQ ID NO: 2326305 - RNA, 14 nt, Human
gagggaucacaggg

SEQ ID NO: 2326306 - RNA, 13 nt, Human
gagggagggggcu

SEQ ID NO: 2326307 - RNA, 12 nt, Human
gagggaggggcc

SEQ ID NO: 2326308 - RNA, 21 nt, Human
gagggagugacagaggcagcc

SEQ ID NO: 2326309 - RNA, 22 nt, Human
gagggagugacagaggcagccc

SEQ ID NO: 2326310 - RNA, 18 nt, Human
gagggagugacagaggca

SEQ ID NO: 2326311 - RNA, 16 nt, Human
gagggagugacagagg

SEQ ID NO: 2326312 - RNA, 20 nt, Human
gagggagggggaaggcaggg

SEQ ID NO: 2326313 - RNA, 17 nt, Human
gagggaggaggccaccu

SEQ ID NO: 2326314 - RNA, 20 nt, Human
gagggagggcuccagacaca

SEQ ID NO: 2326315 - RNA, 19 nt, Human
gagggcagcagggcuaccc

SEQ ID NO: 2326316 - RNA, 16 nt, Human
gagggcagcagggcua

SEQ ID NO: 2326317 - RNA, 16 nt, Human
gagggcaguguuuccu

SEQ ID NO: 2326318 - RNA, 11 nt, Human
gagggcaggga

SEQ ID NO: 2326319 - RNA, 17 nt, Human
gaggggcuuucuggaga

SEQ ID NO: 2326320 - RNA, 18 nt, Human
gagggccaagacuuggca

SEQ ID NO: 2326321 - RNA, 16 nt, Human
gagggccacgggucug

SEQ ID NO: 2326322 - RNA, 22 nt, Human
gagggcaugcgcacaaggcuga

SEQ ID NO: 2326323 - RNA, 18 nt, Human
gagggcaugcgcacaagg

SEQ ID NO: 2326324 - RNA, 16 nt, Human
gagggccacaugggag

SEQ ID NO: 2326325 - RNA, 17 nt, Human
gaggggcugugggcgug

SEQ ID NO: 2326326 - RNA, 18 nt, Human
gagggauggcgggugggg

SEQ ID NO: 2326327 - RNA, 19 nt, Human
gagggauggcggguggggg

SEQ ID NO: 2326328 - RNA, 22 nt, Human
gagggaugaggugcugggaggg

SEQ ID NO: 2326329 - RNA, 14 nt, Human
gagggauggacuga

SEQ ID NO: 2326330 - RNA, 20 nt, Human
gagggaugcugccugaguca

SEQ ID NO: 2326331 - RNA, 18 nt, Human
gagggauucugguuccag

SEQ ID NO: 2326332 - RNA, 21 nt, Human
gagggauucugguuccagggu

SEQ ID NO: 2326333 - RNA, 19 nt, Human
gagggauuggccgcuuggc

SEQ ID NO: 2326334 - RNA, 18 nt, Human
gagggcaagggccaugcu

SEQ ID NO: 2326335 - RNA, 22 nt, Human
gagggcaagggccaugcugaag

SEQ ID NO: 2326336 - RNA, 12 nt, Human
gagggcacacac

SEQ ID NO: 2326337 - RNA, 15 nt, Human
gagggcagcagggcu

SEQ ID NO: 2326338 - RNA, 14 nt, Human
gagggcagcagggc

SEQ ID NO: 2326339 - RNA, 12 nt, Human
gagggcagcagg

SEQ ID NO: 2326340 - RNA, 15 nt, Human
gagggcacacacugu

SEQ ID NO: 2326341 - RNA, 18 nt, Human
gaggggucuccaggagga

SEQ ID NO: 2326342 - RNA, 14 nt, Human
gagggguguggcag

SEQ ID NO: 2326343 - RNA, 21 nt, Human
gagggguguggcuccuuccca

SEQ ID NO: 2326344 - RNA, 17 nt, Human
gagggguguggcagugg

SEQ ID NO: 2326345 - RNA, 18 nt, Human
gagggguguggcaguggu

SEQ ID NO: 2326346 - RNA, 13 nt, Human
gaggguaaggcug

SEQ ID NO: 2326347 - RNA, 17 nt, Human
gagggguugccacaggc

SEQ ID NO: 2326348 - RNA, 18 nt, Human
gagggguugccacaggcc

SEQ ID NO: 2326349 - RNA, 22 nt, Human
gagggguugccacaggccuccc

SEQ ID NO: 2326350 - RNA, 23 nt, Human
gagggguugccacaggccucccu

SEQ ID NO: 2326351 - RNA, 16 nt, Human
gaggguaauaaacuua

SEQ ID NO: 2326352 - RNA, 22 nt, Human
gagggggccaccuccccaggcc

SEQ ID NO: 2326353 - RNA, 21 nt, Human
gagggggcuauagcuacagga

SEQ ID NO: 2326354 - RNA, 17 nt, Human
gagggggcuugaagcca

SEQ ID NO: 2326355 - RNA, 18 nt, Human
gagggggccaccucccca

SEQ ID NO: 2326356 - RNA, 20 nt, Human
gagggggccaccuccccagg

SEQ ID NO: 2326357 - RNA, 16 nt, Human
gagggguaaaagcuga

SEQ ID NO: 2326358 - RNA, 21 nt, Human
gagggggcuugaagccaaaga

SEQ ID NO: 2326359 - RNA, 18 nt, Human
gagggguaggcagagccu

SEQ ID NO: 2326360 - RNA, 18 nt, Human
gagggggcuugaagccaa

SEQ ID NO: 2326361 - RNA, 14 nt, Human
gagggguaggcaga

SEQ ID NO: 2326362 - RNA, 17 nt, Human
gaggggguggccuccca

SEQ ID NO: 2326363 - RNA, 23 nt, Human
gauagcuucaccccaaucccagc

SEQ ID NO: 2326364 - RNA, 20 nt, Human
gauagcuuuauuuuuuaagu

SEQ ID NO: 2326365 - RNA, 22 nt, Human
gauagcuaacauuuuaaauaaa

SEQ ID NO: 2326366 - RNA, 16 nt, Human
gauagcuaacauuuua

SEQ ID NO: 2326367 - RNA, 20 nt, Human
gauagccuuccguaacccaa

SEQ ID NO: 2326368 - RNA, 18 nt, Human
gauagcuaacauuuuaaa

SEQ ID NO: 2326369 - RNA, 20 nt, Human
gauagcuaacauuuuaaaua

SEQ ID NO: 2326370 - RNA, 14 nt, Human
gauauaagugcugu

SEQ ID NO: 2326371 - RNA, 16 nt, Human
gauauaagugcuguau

SEQ ID NO: 2326372 - RNA, 15 nt, Human
gauauaaauggcugg

SEQ ID NO: 2326373 - RNA, 19 nt, Human
gauauaacuauugcccagg

SEQ ID NO: 2326374 - RNA, 13 nt, Human
gauauaaauauau

SEQ ID NO: 2326375 - RNA, 15 nt, Human
gauauaaauauauau

SEQ ID NO: 2326376 - RNA, 16 nt, Human
gauauaaauauauaua

SEQ ID NO: 2326377 - RNA, 17 nt, Human
gauauaaauauauauaa

SEQ ID NO: 2326378 - RNA, 22 nt, Human
gauauaaauauauauaaauaua

SEQ ID NO: 2326379 - RNA, 21 nt, Human
gauauaaaugcaauauuaaug

SEQ ID NO: 2326380 - RNA, 16 nt, Human
gauauaaauggcuggu

SEQ ID NO: 2326381 - RNA, 20 nt, Human
gauagcaagugaauuuuucu

SEQ ID NO: 2326382 - RNA, 23 nt, Human
gauagcaaagcgacguuagucgu

SEQ ID NO: 2326383 - RNA, 16 nt, Human
gauagcacagacccug

SEQ ID NO: 2326384 - RNA, 15 nt, Human
gauagcacagacccu

SEQ ID NO: 2326385 - RNA, 14 nt, Human
gauagccaaggcca

SEQ ID NO: 2326386 - RNA, 22 nt, Human
gauagccaaggccaaaggaagc

SEQ ID NO: 2326387 - RNA, 22 nt, Human
gauaagaaugcugguuuuccua

SEQ ID NO: 2326388 - RNA, 17 nt, Human
gauaagaccaccaccuc

SEQ ID NO: 2326389 - RNA, 22 nt, Human
gauagauguguggacacauugg

SEQ ID NO: 2326390 - RNA, 14 nt, Human
gauagaugugugga

SEQ ID NO: 2326391 - RNA, 20 nt, Human
gauaagagggcacacacugu

SEQ ID NO: 2326392 - RNA, 21 nt, Human
gauacaggaaaagcugcugac

SEQ ID NO: 2326393 - RNA, 23 nt, Human
gauacaggaaaagcugcugacag

SEQ ID NO: 2326394 - RNA, 11 nt, Human
gauaacucucc

SEQ ID NO: 2326395 - RNA, 20 nt, Human
gauaacuagauggugcugag

SEQ ID NO: 2326396 - RNA, 17 nt, Human
gauaacuguuauuuaua

SEQ ID NO: 2326397 - RNA, 18 nt, Human
gauaacugcaauuuuaau

SEQ ID NO: 2326398 - RNA, 22 nt, Human
gauaagaaccuuuugagugccu

SEQ ID NO: 2326399 - RNA, 20 nt, Human
gauacaggaaaagcugcuga

SEQ ID NO: 2326400 - RNA, 17 nt, Human
gauaagaaugcugguuu

SEQ ID NO: 2326401 - RNA, 18 nt, Human
gauaacuguuauuuauaa

SEQ ID NO: 2326402 - RNA, 21 nt, Human
gauaacugcaauuuuaauuga

SEQ ID NO: 2326403 - RNA, 21 nt, Human
gauaacuuagguggcaagcug

SEQ ID NO: 2326404 - RNA, 21 nt, Human
gauaugaguuguuuucagacu

SEQ ID NO: 2326405 - RNA, 14 nt, Human
gauaugauuuaaaa

SEQ ID NO: 2326406 - RNA, 13 nt, Human
gaucacaaaaaca

SEQ ID NO: 2326407 - RNA, 15 nt, Human
gaucacaacgugcau

SEQ ID NO: 2326408 - RNA, 16 nt, Human
gaucacaacgugcauu

SEQ ID NO: 2326409 - RNA, 17 nt, Human
gaucacaacgugcauug

SEQ ID NO: 2326410 - RNA, 18 nt, Human
gaucacaacgugcauugu

SEQ ID NO: 2326411 - RNA, 15 nt, Human
gauaugaaaaauaug

SEQ ID NO: 2326412 - RNA, 17 nt, Human
gauaucuugaaaugaaa

SEQ ID NO: 2326413 - RNA, 14 nt, Human
gauaugaaaaauau

SEQ ID NO: 2326414 - RNA, 15 nt, Human
gauaucuugaaauga

SEQ ID NO: 2326415 - RNA, 23 nt, Human
gauauaagugcuguauaaaauca

SEQ ID NO: 2326416 - RNA, 15 nt, Human
gauauaagugugugu

SEQ ID NO: 2326417 - RNA, 18 nt, Human
gauauaagugcuguauaa

SEQ ID NO: 2326418 - RNA, 19 nt, Human
gauauaagugcuguauaaa

SEQ ID NO: 2326419 - RNA, 21 nt, Human
gauauaagugcuguauaaaau

SEQ ID NO: 2326420 - RNA, 22 nt, Human
gauauaagugcuguauaaaauc

SEQ ID NO: 2326421 - RNA, 18 nt, Human
gaucacggcucacugcag

SEQ ID NO: 2326422 - RNA, 17 nt, Human
gaucacuuguuguuuua

SEQ ID NO: 2326423 - RNA, 14 nt, Human
gaucagaaauacag

SEQ ID NO: 2326424 - RNA, 15 nt, Human
gaucagaaauacaga

SEQ ID NO: 2326425 - RNA, 18 nt, Human
gaucacuggagcccagga

SEQ ID NO: 2326426 - RNA, 15 nt, Human
gaucacuuguuguuu

SEQ ID NO: 2326427 - RNA, 22 nt, Human
gaucacuuucucaguuuucaua

SEQ ID NO: 2326428 - RNA, 13 nt, Human
gaucacagaggcu

SEQ ID NO: 2326429 - RNA, 16 nt, Human
gaucacagcagcuucu

SEQ ID NO: 2326430 - RNA, 17 nt, Human
gaucacagagacauucc

SEQ ID NO: 2326431 - RNA, 19 nt, Human
gaucacagagacauuccuc

SEQ ID NO: 2326432 - RNA, 20 nt, Human
gaucacaacgugcauugugc

SEQ ID NO: 2326433 - RNA, 21 nt, Human
gaucacaacgugcauugugcu

SEQ ID NO: 2326434 - RNA, 22 nt, Human
gaucacaacgugcauugugcuu

SEQ ID NO: 2326435 - RNA, 23 nt, Human
gaucacaacgugcauugugcuuc

SEQ ID NO: 2326436 - RNA, 15 nt, Human
gaucacggcucacug

SEQ ID NO: 2326437 - RNA, 16 nt, Human
gaucacggcucacugc

SEQ ID NO: 2326438 - RNA, 23 nt, Human
gaguugacuugacagaacacugu

SEQ ID NO: 2326439 - RNA, 20 nt, Human
gaguuacagcgagaggcaga

SEQ ID NO: 2326440 - RNA, 21 nt, Human
gaguugaagacagagcuacac

SEQ ID NO: 2326441 - RNA, 15 nt, Human
gaguugaagacagag

SEQ ID NO: 2326442 - RNA, 17 nt, Human
gaguugaagacagagcu

SEQ ID NO: 2326443 - RNA, 18 nt, Human
gauaaaucagugguuauu

SEQ ID NO: 2326444 - RNA, 19 nt, Human
gauaacuagauggugcuga

SEQ ID NO: 2326445 - RNA, 22 nt, Human
gauaaauggcuuccuggcaaua

SEQ ID NO: 2326446 - RNA, 20 nt, Human
gaguucauacccuguuacca

SEQ ID NO: 2326447 - RNA, 14 nt, Human
gaguucaucuugaa

SEQ ID NO: 2326448 - RNA, 19 nt, Human
gaguucaucuugaauugua

SEQ ID NO: 2326449 - RNA, 20 nt, Human
gaguucaucuugaauuguaa

SEQ ID NO: 2326450 - RNA, 13 nt, Human
gaguuacagacaa

SEQ ID NO: 2326451 - RNA, 15 nt, Human
gaguuacagacaaag

SEQ ID NO: 2326452 - RNA, 18 nt, Human
gaguuacagcgagaggca

SEQ ID NO: 2326453 - RNA, 19 nt, Human
gaguuacagcgagaggcag

SEQ ID NO: 2326454 - RNA, 21 nt, Human
gaguuaagaccuggcagcucu

SEQ ID NO: 2326455 - RNA, 17 nt, Human
gaguuaagaccuggcag

SEQ ID NO: 2326456 - RNA, 11 nt, Human
gaguguagaag

SEQ ID NO: 2326457 - RNA, 13 nt, Human
gaguguacaagua

SEQ ID NO: 2326458 - RNA, 13 nt, Human
gaguguagaagca

SEQ ID NO: 2326459 - RNA, 14 nt, Human
gaguguagaagcau

SEQ ID NO: 2326460 - RNA, 15 nt, Human
gaguguagaagcauu

SEQ ID NO: 2326461 - RNA, 16 nt, Human
gaguguagaagcauuc

SEQ ID NO: 2326462 - RNA, 23 nt, Human
gaguguccuaggaguauccucau

SEQ ID NO: 2326463 - RNA, 21 nt, Human
gaguguauguagggcauaaug

SEQ ID NO: 2326464 - RNA, 11 nt, Human
gaguguaguga

SEQ ID NO: 2326465 - RNA, 20 nt, Human
gaguguagaagcauuccuuc

SEQ ID NO: 2326466 - RNA, 14 nt, Human
gaguguaaguguga

SEQ ID NO: 2326467 - RNA, 14 nt, Human
gaguggucuuucug

SEQ ID NO: 2326468 - RNA, 19 nt, Human
gagugguggcucaugccug

SEQ ID NO: 2326469 - RNA, 21 nt, Human
gaguggucuuucuggagaggu

SEQ ID NO: 2326470 - RNA, 16 nt, Human
gaguggucagaacaga

SEQ ID NO: 2326471 - RNA, 20 nt, Human
gaguguaagugugaguaaga

SEQ ID NO: 2326472 - RNA, 17 nt, Human
gaguguaagugugagua

SEQ ID NO: 2326473 - RNA, 18 nt, Human
gaguguacuuaacuauuc

SEQ ID NO: 2326474 - RNA, 15 nt, Human
gaguggguugauuuc

SEQ ID NO: 2326475 - RNA, 13 nt, Human
gagugggugaaua

SEQ ID NO: 2326476 - RNA, 17 nt, Human
gagugacagaggcagcc

SEQ ID NO: 2326477 - RNA, 21 nt, Human
gagugaagaggggcagcccuu

SEQ ID NO: 2326478 - RNA, 21 nt, Human
gagugggguuaucucuguguu

SEQ ID NO: 2326479 - RNA, 17 nt, Human
gaguguggcuccccucu

SEQ ID NO: 2326480 - RNA, 16 nt, Human
gaguguggcugaggag

SEQ ID NO: 2326481 - RNA, 16 nt, Human
gaguguggcuccccuc

SEQ ID NO: 2326482 - RNA, 14 nt, Human
gagugugcuggagg

SEQ ID NO: 2326483 - RNA, 15 nt, Human
gagugugcuggagga

SEQ ID NO: 2326484 - RNA, 18 nt, Human
gagugugcuggaggacug

SEQ ID NO: 2326485 - RNA, 17 nt, Human
gaguguggaagccggag

SEQ ID NO: 2326486 - RNA, 18 nt, Human
gagugugggaagggagag

SEQ ID NO: 2326487 - RNA, 12 nt, Human
gagugugggaag

SEQ ID NO: 2326488 - RNA, 13 nt, Human
gaguguguaauuu

SEQ ID NO: 2326489 - RNA, 20 nt, Human
gagugugccugaagucccag

SEQ ID NO: 2326490 - RNA, 19 nt, Human
gagugucuuaauuaaaaga

SEQ ID NO: 2326491 - RNA, 17 nt, Human
gaguuaaaaagggcagg

SEQ ID NO: 2326492 - RNA, 22 nt, Human
gaguuaaauagaguauaugcac

SEQ ID NO: 2326493 - RNA, 18 nt, Human
gaguuaacgggugaauaa

SEQ ID NO: 2326494 - RNA, 13 nt, Human
gaguuaagaagcu

SEQ ID NO: 2326495 - RNA, 14 nt, Human
gaguuaagaagcug

SEQ ID NO: 2326496 - RNA, 12 nt, Human
gaguuacagaca

SEQ ID NO: 2326497 - RNA, 14 nt, Human
gaguuaagaccugg

SEQ ID NO: 2326498 - RNA, 13 nt, Human
gaguuaagaccug

SEQ ID NO: 2326499 - RNA, 12 nt, Human
gaguuaagaccu

SEQ ID NO: 2326500 - RNA, 16 nt, Human
gaguuaagaagcuguu

SEQ ID NO: 2326501 - RNA, 21 nt, Human
gaguuaagaagcuguuguaca

SEQ ID NO: 2326502 - RNA, 14 nt, Human
gaguauuggucucc

SEQ ID NO: 2326503 - RNA, 17 nt, Human
gaguccucacucccagu

SEQ ID NO: 2326504 - RNA, 16 nt, Human
gaguccucacucccag

SEQ ID NO: 2326505 - RNA, 19 nt, Human
gaguccgaaagggacuugg

SEQ ID NO: 2326506 - RNA, 13 nt, Human
gaguccucugaau

SEQ ID NO: 2326507 - RNA, 12 nt, Human
gaguccucugga

SEQ ID NO: 2326508 - RNA, 14 nt, Human
gagucgaggacagg

SEQ ID NO: 2326509 - RNA, 18 nt, Human
gaguccuuaaacagggca

SEQ ID NO: 2326510 - RNA, 22 nt, Human
gagucguggggugugcugggag

SEQ ID NO: 2326511 - RNA, 20 nt, Human
gagucuagaaguuguuuguc

SEQ ID NO: 2326512 - RNA, 15 nt, Human
gagucgaggacaggg

SEQ ID NO: 2326513 - RNA, 16 nt, Human
gagucgaggacaggga

SEQ ID NO: 2326514 - RNA, 11 nt, Human
gaguauauguc

SEQ ID NO: 2326515 - RNA, 16 nt, Human
gaguaucugggaacug

SEQ ID NO: 2326516 - RNA, 23 nt, Human
gaguaucucggaccuuucagcug

SEQ ID NO: 2326517 - RNA, 19 nt, Human
gaguauguguuugugugug

SEQ ID NO: 2326518 - RNA, 22 nt, Human
gaguauguuaagcucuuuauga

SEQ ID NO: 2326519 - RNA, 23 nt, Human
gaguaucuccucgcaagcugggu

SEQ ID NO: 2326520 - RNA, 17 nt, Human
gaguaucaggucuccca

SEQ ID NO: 2326521 - RNA, 20 nt, Human
gaguaguugauguugcauuu

SEQ ID NO: 2326522 - RNA, 16 nt, Human
gaguauaggccggucu

SEQ ID NO: 2326523 - RNA, 12 nt, Human
gaguauaugcac

SEQ ID NO: 2326524 - RNA, 14 nt, Human
gaguauaugcacuu

SEQ ID NO: 2326525 - RNA, 21 nt, Human
gaguaguugauguugcauuuu

SEQ ID NO: 2326526 - RNA, 18 nt, Human
gaguagccgagagccugc

SEQ ID NO: 2326527 - RNA, 21 nt, Human
gaguagccaggguguggcccu

SEQ ID NO: 2326528 - RNA, 18 nt, Human
gaguaggaagacuuugga

SEQ ID NO: 2326529 - RNA, 19 nt, Human
gaguaggaagacuuuggaa

SEQ ID NO: 2326530 - RNA, 20 nt, Human
gagucuuggcggcagcagcc

SEQ ID NO: 2326531 - RNA, 22 nt, Human
gagucuugcuaccucagucagu

SEQ ID NO: 2326532 - RNA, 12 nt, Human
gagucugucuca

SEQ ID NO: 2326533 - RNA, 12 nt, Human
gagucugucucu

SEQ ID NO: 2326534 - RNA, 15 nt, Human
gagucugucucuguc

SEQ ID NO: 2326535 - RNA, 18 nt, Human
gagucugucucugucaug

SEQ ID NO: 2326536 - RNA, 23 nt, Human
gagucugaagcagaugcaaagag

SEQ ID NO: 2326537 - RNA, 23 nt, Human
gagucuggugaagcucacuucug

SEQ ID NO: 2326538 - RNA, 15 nt, Human
gagucugaaggcugg

SEQ ID NO: 2326539 - RNA, 14 nt, Human
gagucugaaggcug

SEQ ID NO: 2326540 - RNA, 12 nt, Human
gagucugaaggc

SEQ ID NO: 2326541 - RNA, 13 nt, Human
gagucugaaggcu

SEQ ID NO: 2326542 - RNA, 15 nt, Human
gagucuaucaaucaa

SEQ ID NO: 2326543 - RNA, 15 nt, Human
gagucugaagcagau

SEQ ID NO: 2326544 - RNA, 20 nt, Human
gagucuugcuaccucaguca

SEQ ID NO: 2326545 - RNA, 21 nt, Human
gagucuuggcggcagcagcca

SEQ ID NO: 2326546 - RNA, 20 nt, Human
gagugaaaccuuuagggcag

SEQ ID NO: 2326547 - RNA, 21 nt, Human
gagugaaaccuuuagggcagc

SEQ ID NO: 2326548 - RNA, 15 nt, Human
gagugaaccaucauu

SEQ ID NO: 2326549 - RNA, 22 nt, Human
gagugaaaccuuuagggcagcu

SEQ ID NO: 2326550 - RNA, 23 nt, Human
gagugaaaccuuuagggcagcuu

SEQ ID NO: 2326551 - RNA, 14 nt, Human
gagugaagaggggc

SEQ ID NO: 2326552 - RNA, 16 nt, Human
gagugaaccuaccuuc

SEQ ID NO: 2326553 - RNA, 15 nt, Human
gagugaagaggggca

SEQ ID NO: 2326554 - RNA, 16 nt, Human
gagugaagaggggcag

SEQ ID NO: 2326555 - RNA, 17 nt, Human
gagugaagcugggagaa

SEQ ID NO: 2326556 - RNA, 14 nt, Human
gagugacagaggca

SEQ ID NO: 2326557 - RNA, 14 nt, Human
gagugaauaaaugu

SEQ ID NO: 2326558 - RNA, 15 nt, Human
gagugaauaaauguc

SEQ ID NO: 2326559 - RNA, 17 nt, Human
gagugaagaggggcagc

SEQ ID NO: 2326560 - RNA, 18 nt, Human
gagugaagaggggcagcc

SEQ ID NO: 2326561 - RNA, 19 nt, Human
gagugaagaggggcagccc

SEQ ID NO: 2326562 - RNA, 20 nt, Human
gagugaagaggggcagcccu

SEQ ID NO: 2326563 - RNA, 15 nt, Human
gagugacagaggcag

SEQ ID NO: 2326564 - RNA, 16 nt, Human
gagugacagaggcagc

SEQ ID NO: 2326565 - RNA, 22 nt, Human
gaguagaaagacagagcuggga

SEQ ID NO: 2326566 - RNA, 15 nt, Human
gaguagaaaggccuu

SEQ ID NO: 2326567 - RNA, 17 nt, Human
gaguagaaaggccuuua

SEQ ID NO: 2326568 - RNA, 23 nt, Human
gaguagaaaggccuuuaaaauuu

SEQ ID NO: 2326569 - RNA, 14 nt, Human
gaguagaauugcau

SEQ ID NO: 2326570 - RNA, 17 nt, Human
gaguagaauugcauuga

SEQ ID NO: 2326571 - RNA, 19 nt, Human
gaguagcugggacuacagg

SEQ ID NO: 2326572 - RNA, 17 nt, Human
gaguagccgagagccug

SEQ ID NO: 2326573 - RNA, 18 nt, Human
gaguagauggugaaauuu

SEQ ID NO: 2326574 - RNA, 22 nt, Human
gaguagcaaguucuagagaaga

SEQ ID NO: 2326575 - RNA, 22 nt, Human
gaguagcugggacuacaggcac

SEQ ID NO: 2326576 - RNA, 12 nt, Human
gaguaggaagac

SEQ ID NO: 2326577 - RNA, 13 nt, Human
gaguaggaagacu

SEQ ID NO: 2326578 - RNA, 17 nt, Human
gaguaggaagacuuugg

SEQ ID NO: 2326579 - RNA, 17 nt, Human
gaguagaaagacagagc

SEQ ID NO: 2326580 - RNA, 20 nt, Human
gaguagaaagacagagcugg

SEQ ID NO: 2326581 - RNA, 19 nt, Human
gaguagaaacugcagggaa

SEQ ID NO: 2326582 - RNA, 16 nt, Human
gaguaauuuauuguuu

SEQ ID NO: 2326583 - RNA, 14 nt, Human
gaguaauuuauugu

SEQ ID NO: 2326584 - RNA, 21 nt, Human
gaguacuacaguccucccauc

SEQ ID NO: 2326585 - RNA, 23 nt, Human
gaguacuacaguccucccaucuc

SEQ ID NO: 2326586 - RNA, 13 nt, Human
gaguaaucugugu

SEQ ID NO: 2326587 - RNA, 12 nt, Human
gaguaagagcug

SEQ ID NO: 2326588 - RNA, 22 nt, Human
gaguaauccaagcaaaugugaa

SEQ ID NO: 2326589 - RNA, 22 nt, Human
gaguaaucuguguacaaagaaa

SEQ ID NO: 2326590 - RNA, 22 nt, Human
gaguaauggguuucauauuucu

SEQ ID NO: 2326591 - RNA, 20 nt, Human
gaguacuacaguccucccau

SEQ ID NO: 2326592 - RNA, 13 nt, Human
gagguuucaguga

SEQ ID NO: 2326593 - RNA, 19 nt, Human
gagguuuaggucaagaaga

SEQ ID NO: 2326594 - RNA, 17 nt, Human
gagguugggguguacua

SEQ ID NO: 2326595 - RNA, 19 nt, Human
gagguugcagugagcugag

SEQ ID NO: 2326596 - RNA, 14 nt, Human
gagguugggugggc

SEQ ID NO: 2326597 - RNA, 16 nt, Human
gagguuucaaaccucc

SEQ ID NO: 2326598 - RNA, 13 nt, Human
gagguugcaggga

SEQ ID NO: 2326599 - RNA, 18 nt, Human
gagguugauaacuuugcu

SEQ ID NO: 2326600 - RNA, 19 nt, Human
gagguugauaacuuugcuu

SEQ ID NO: 2326601 - RNA, 13 nt, Human
gagguugaagcca

SEQ ID NO: 2326602 - RNA, 15 nt, Human
gagguugaagccaag

SEQ ID NO: 2326603 - RNA, 15 nt, Human
gagguugauaacuuu

SEQ ID NO: 2326604 - RNA, 15 nt, Human
gagguugcagugagc

SEQ ID NO: 2326605 - RNA, 19 nt, Human
gagguugcagggagccgag

SEQ ID NO: 2326606 - RNA, 13 nt, Human
gagguugcagugu

SEQ ID NO: 2326607 - RNA, 19 nt, Human
gagguugcagugagccaag

SEQ ID NO: 2326608 - RNA, 20 nt, Human
gagguugaucagaucugaca

SEQ ID NO: 2326609 - RNA, 15 nt, Human
gagguugggaggcca

SEQ ID NO: 2326610 - RNA, 17 nt, Human
gagguugggaggccauu

SEQ ID NO: 2326611 - RNA, 20 nt, Human
gagguggucugaauguucug

SEQ ID NO: 2326612 - RNA, 17 nt, Human
gagguggucugaauguu

SEQ ID NO: 2326613 - RNA, 16 nt, Human
gagguggucugaaugu

SEQ ID NO: 2326614 - RNA, 13 nt, Human
gagguggucugaa

SEQ ID NO: 2326615 - RNA, 15 nt, Human
gaggugggguuggga

SEQ ID NO: 2326616 - RNA, 19 nt, Human
gagguggucugaauguucu

SEQ ID NO: 2326617 - RNA, 20 nt, Human
gagguguauggagagaaaac

SEQ ID NO: 2326618 - RNA, 14 nt, Human
gaggugucaggcug

SEQ ID NO: 2326619 - RNA, 15 nt, Human
gaggugucaggcugc

SEQ ID NO: 2326620 - RNA, 18 nt, Human
gaggugucaggcugcugg

SEQ ID NO: 2326621 - RNA, 22 nt, Human
gaggugucaggcugcuggcgcc

SEQ ID NO: 2326622 - RNA, 18 nt, Human
gagguuccucugccugcc

SEQ ID NO: 2326623 - RNA, 19 nt, Human
gagguuccucugccugccc

SEQ ID NO: 2326624 - RNA, 15 nt, Human
gaggugugggggcug

SEQ ID NO: 2326625 - RNA, 16 nt, Human
gagguuccucugccug

SEQ ID NO: 2326626 - RNA, 17 nt, Human
gagguuccucugccugc

SEQ ID NO: 2326627 - RNA, 16 nt, Human
gagguguggagccgag

SEQ ID NO: 2326628 - RNA, 12 nt, Human
gaggugggccca

SEQ ID NO: 2326629 - RNA, 14 nt, Human
gaggugggcccagg

SEQ ID NO: 2326630 - RNA, 15 nt, Human
gaggugggcccagga

SEQ ID NO: 2326631 - RNA, 22 nt, Human
gaggugggcccaggaccagcug

SEQ ID NO: 2326632 - RNA, 23 nt, Human
gaggugggcccaggaccagcugg

SEQ ID NO: 2326633 - RNA, 23 nt, Human
gaggucagcaugucuauucagcu

SEQ ID NO: 2326634 - RNA, 21 nt, Human
gaggugggccagucuguggau

SEQ ID NO: 2326635 - RNA, 21 nt, Human
gaggucacuggaaaggggaga

SEQ ID NO: 2326636 - RNA, 18 nt, Human
gaggucacuggaaagggg

SEQ ID NO: 2326637 - RNA, 20 nt, Human
gaggucacuggaaaggggag

SEQ ID NO: 2326638 - RNA, 17 nt, Human
gaggucagagccugcag

SEQ ID NO: 2326639 - RNA, 20 nt, Human
gaggucagagccugcaguua

SEQ ID NO: 2326640 - RNA, 14 nt, Human
gcagaaggccaaga

SEQ ID NO: 2326641 - RNA, 15 nt, Human
gcagaaggccaagaa

SEQ ID NO: 2326642 - RNA, 22 nt, Human
gcagaaggaagggcauccuucu

SEQ ID NO: 2326643 - RNA, 14 nt, Human
gcagaagggggugg

SEQ ID NO: 2326644 - RNA, 13 nt, Human
gcagaagggagaa

SEQ ID NO: 2326645 - RNA, 15 nt, Human
gcagaagggagaagg

SEQ ID NO: 2326646 - RNA, 11 nt, Human
gcagaauaaag

SEQ ID NO: 2326647 - RNA, 15 nt, Human
gcagaaggggguggu

SEQ ID NO: 2326648 - RNA, 22 nt, Human
gcagaaggggguggugucucca

SEQ ID NO: 2326649 - RNA, 19 nt, Human
gcacugucucaguuucacu

SEQ ID NO: 2326650 - RNA, 22 nt, Human
gcacuguccugcuccacagugu

SEQ ID NO: 2326651 - RNA, 21 nt, Human
gcacuggguugcaggggauug

SEQ ID NO: 2326652 - RNA, 20 nt, Human
gcacugucucaguuucacuu

SEQ ID NO: 2326653 - RNA, 11 nt, Human
gcacugugaag

SEQ ID NO: 2326654 - RNA, 18 nt, Human
gcacugugaaggacccuu

SEQ ID NO: 2326655 - RNA, 17 nt, Human
gcacugugaaggacccu

SEQ ID NO: 2326656 - RNA, 16 nt, Human
gcacugugaaggaccc

SEQ ID NO: 2326657 - RNA, 14 nt, Human
gcacugugaaggac

SEQ ID NO: 2326658 - RNA, 19 nt, Human
gcacugugacccccagcuc

SEQ ID NO: 2326659 - RNA, 11 nt, Human
gcacugugcua

SEQ ID NO: 2326660 - RNA, 14 nt, Human
gcacugugcuaaua

SEQ ID NO: 2326661 - RNA, 13 nt, Human
gcacugugcucag

SEQ ID NO: 2326662 - RNA, 14 nt, Human
gcacugugcucagg

SEQ ID NO: 2326663 - RNA, 16 nt, Human
gcacugugcucagggc

SEQ ID NO: 2326664 - RNA, 18 nt, Human
gcacugugcucagggcua

SEQ ID NO: 2326665 - RNA, 19 nt, Human
gcacuguggguagacacac

SEQ ID NO: 2326666 - RNA, 21 nt, Human
gcagacagcagcucaggcaca

SEQ ID NO: 2326667 - RNA, 14 nt, Human
gcagacaggaggaa

SEQ ID NO: 2326668 - RNA, 12 nt, Human
gcagacaggcaa

SEQ ID NO: 2326669 - RNA, 13 nt, Human
gcagacaggcaag

SEQ ID NO: 2326670 - RNA, 14 nt, Human
gcagacaggcaagc

SEQ ID NO: 2326671 - RNA, 20 nt, Human
gcagacagcagcucaggcac

SEQ ID NO: 2326672 - RNA, 19 nt, Human
gcagacagcagcucaggca

SEQ ID NO: 2326673 - RNA, 18 nt, Human
gcagacagcagcucaggc

SEQ ID NO: 2326674 - RNA, 17 nt, Human
gcagacagcagcucagg

SEQ ID NO: 2326675 - RNA, 16 nt, Human
gcagacagcagcucag

SEQ ID NO: 2326676 - RNA, 14 nt, Human
gcagacagcagcuc

SEQ ID NO: 2326677 - RNA, 13 nt, Human
gcagacagcagcu

SEQ ID NO: 2326678 - RNA, 14 nt, Human
gcagaauaaagcaa

SEQ ID NO: 2326679 - RNA, 23 nt, Human
gcagacacagggacuugaaguug

SEQ ID NO: 2326680 - RNA, 12 nt, Human
gcagaauaaagc

SEQ ID NO: 2326681 - RNA, 13 nt, Human
gcagaauaaagca

SEQ ID NO: 2326682 - RNA, 15 nt, Human
gcagacaccuuggac

SEQ ID NO: 2326683 - RNA, 23 nt, Human
gcagacacggaucugagaaucuu

SEQ ID NO: 2326684 - RNA, 16 nt, Human
gcagacacggaucuga

SEQ ID NO: 2326685 - RNA, 18 nt, Human
gcacuggaguccagucuc

SEQ ID NO: 2326686 - RNA, 17 nt, Human
gcacuggaguccagucu

SEQ ID NO: 2326687 - RNA, 14 nt, Human
gcacuggaguccag

SEQ ID NO: 2326688 - RNA, 11 nt, Human
gcacugcugug

SEQ ID NO: 2326689 - RNA, 14 nt, Human
gcacuggagugcag

SEQ ID NO: 2326690 - RNA, 15 nt, Human
gcacuggagugcagg

SEQ ID NO: 2326691 - RNA, 16 nt, Human
gcacuggagugcaggg

SEQ ID NO: 2326692 - RNA, 17 nt, Human
gcacugcuugaggaaaa

SEQ ID NO: 2326693 - RNA, 16 nt, Human
gcacugcuugaggaaa

SEQ ID NO: 2326694 - RNA, 15 nt, Human
gcacugcugugcugu

SEQ ID NO: 2326695 - RNA, 23 nt, Human
gcacugcuuccagugaggcucug

SEQ ID NO: 2326696 - RNA, 13 nt, Human
gcacugcugggug

SEQ ID NO: 2326697 - RNA, 14 nt, Human
gcacugcugggugg

SEQ ID NO: 2326698 - RNA, 15 nt, Human
gcacugcuggguggc

SEQ ID NO: 2326699 - RNA, 17 nt, Human
gcacugcuggguggccc

SEQ ID NO: 2326700 - RNA, 18 nt, Human
gcacugcuggguggccca

SEQ ID NO: 2326701 - RNA, 19 nt, Human
gcacugcuggguggcccau

SEQ ID NO: 2326702 - RNA, 21 nt, Human
gcacugcuggguggcccaucc

SEQ ID NO: 2326703 - RNA, 22 nt, Human
gcacugcuggguggcccauccc

SEQ ID NO: 2326704 - RNA, 18 nt, Human
gcacuggguugacuuuca

SEQ ID NO: 2326705 - RNA, 16 nt, Human
gcacugggggcagcgg

SEQ ID NO: 2326706 - RNA, 18 nt, Human
gcacuggguugcagggga

SEQ ID NO: 2326707 - RNA, 14 nt, Human
gcacugguggcccg

SEQ ID NO: 2326708 - RNA, 21 nt, Human
gcacuguccugcuccacagug

SEQ ID NO: 2326709 - RNA, 19 nt, Human
gcacuggcauugucccugu

SEQ ID NO: 2326710 - RNA, 20 nt, Human
gcacuggcauugucccugug

SEQ ID NO: 2326711 - RNA, 21 nt, Human
gcacugagauauuuauuguuu

SEQ ID NO: 2326712 - RNA, 13 nt, Human
gcacugagcagag

SEQ ID NO: 2326713 - RNA, 11 nt, Human
gcacugagccc

SEQ ID NO: 2326714 - RNA, 12 nt, Human
gcacugagcccc

SEQ ID NO: 2326715 - RNA, 15 nt, Human
gcacugagauauuua

SEQ ID NO: 2326716 - RNA, 21 nt, Human
gcacugagauaccagcgagga

SEQ ID NO: 2326717 - RNA, 11 nt, Human
gcacugaggaa

SEQ ID NO: 2326718 - RNA, 13 nt, Human
gcacugagccccc

SEQ ID NO: 2326719 - RNA, 14 nt, Human
gcacugagcccccc

SEQ ID NO: 2326720 - RNA, 13 nt, Human
gcacugaggaaga

SEQ ID NO: 2326721 - RNA, 12 nt, Human
gcacugcugccc

SEQ ID NO: 2326722 - RNA, 14 nt, Human
gcacugcugcccag

SEQ ID NO: 2326723 - RNA, 15 nt, Human
gcacugcugcccagc

SEQ ID NO: 2326724 - RNA, 18 nt, Human
gcacugcugcccagccuc

SEQ ID NO: 2326725 - RNA, 20 nt, Human
gcacugcugcccagccucca

SEQ ID NO: 2326726 - RNA, 16 nt, Human
gcacgcacacacacaa

SEQ ID NO: 2326727 - RNA, 14 nt, Human
gcacgcacacacac

SEQ ID NO: 2326728 - RNA, 15 nt, Human
gcacgcacacacaca

SEQ ID NO: 2326729 - RNA, 10 nt, Human
gcacgcacac

SEQ ID NO: 2326730 - RNA, 11 nt, Human
gcacgcacaca

SEQ ID NO: 2326731 - RNA, 12 nt, Human
gcacgcacacac

SEQ ID NO: 2326732 - RNA, 13 nt, Human
gcacgcacacaca

SEQ ID NO: 2326733 - RNA, 18 nt, Human
gcacugacuucuaaguaa

SEQ ID NO: 2326734 - RNA, 16 nt, Human
gcacgauuucuguuua

SEQ ID NO: 2326735 - RNA, 15 nt, Human
gcacugacuucuaag

SEQ ID NO: 2326736 - RNA, 22 nt, Human
gcacagauggauuugccugugc

SEQ ID NO: 2326737 - RNA, 20 nt, Human
gcacaggugggcuucccagu

SEQ ID NO: 2326738 - RNA, 19 nt, Human
gcacagauggauuugccug

SEQ ID NO: 2326739 - RNA, 18 nt, Human
gcacagauggauuugccu

SEQ ID NO: 2326740 - RNA, 24 nt, Human
gcacagauggauuugccugugcca

SEQ ID NO: 2326741 - RNA, 21 nt, Human
gcacaggugggcuucccagug

SEQ ID NO: 2326742 - RNA, 16 nt, Human
gcacagugaagugcug

SEQ ID NO: 2326743 - RNA, 15 nt, Human
gcacagauggauuug

SEQ ID NO: 2326744 - RNA, 13 nt, Human
gcacagauggauu

SEQ ID NO: 2326745 - RNA, 23 nt, Human
gcacagagcucuccagcuccaag

SEQ ID NO: 2326746 - RNA, 22 nt, Human
gcacagaguuguuacauuuuua

SEQ ID NO: 2326747 - RNA, 21 nt, Human
gcacagaguuguuacauuuuu

SEQ ID NO: 2326748 - RNA, 19 nt, Human
gcacagaguuguuacauuu

SEQ ID NO: 2326749 - RNA, 18 nt, Human
gcacagaguuguuacauu

SEQ ID NO: 2326750 - RNA, 16 nt, Human
gcacagaguuguuaca

SEQ ID NO: 2326751 - RNA, 15 nt, Human
gcacagugcaucuca

SEQ ID NO: 2326752 - RNA, 18 nt, Human
gcacagugcaucucagcc

SEQ ID NO: 2326753 - RNA, 13 nt, Human
gcacagugcaucu

SEQ ID NO: 2326754 - RNA, 12 nt, Human
gcacagugauuu

SEQ ID NO: 2326755 - RNA, 12 nt, Human
gcacauguuucc

SEQ ID NO: 2326756 - RNA, 12 nt, Human
gcacaugugugc

SEQ ID NO: 2326757 - RNA, 17 nt, Human
gcacauucuuagaguua

SEQ ID NO: 2326758 - RNA, 23 nt, Human
gcaccaggcacgaacccaccugc

SEQ ID NO: 2326759 - RNA, 21 nt, Human
gcaccaggcacgaacccaccu

SEQ ID NO: 2326760 - RNA, 16 nt, Human
gcaccagggguuucuc

SEQ ID NO: 2326761 - RNA, 18 nt, Human
gcaccagggguuucucgc

SEQ ID NO: 2326762 - RNA, 20 nt, Human
gcaccagggacuaugaaugg

SEQ ID NO: 2326763 - RNA, 23 nt, Human
gcaccaggguugaccccagagga

SEQ ID NO: 2326764 - RNA, 19 nt, Human
gcaccagggguuucucgca

SEQ ID NO: 2326765 - RNA, 16 nt, Human
gcacauuuccccagac

SEQ ID NO: 2326766 - RNA, 23 nt, Human
gcacauuuaagagacagucaccc

SEQ ID NO: 2326767 - RNA, 17 nt, Human
gcacauuuaagagacag

SEQ ID NO: 2326768 - RNA, 21 nt, Human
gcacauuuaagagacagucac

SEQ ID NO: 2326769 - RNA, 22 nt, Human
gcacauuuccccagaccugagc

SEQ ID NO: 2326770 - RNA, 19 nt, Human
gcacauuuccccagaccug

SEQ ID NO: 2326771 - RNA, 20 nt, Human
gcaccaggcacgaacccacc

SEQ ID NO: 2326772 - RNA, 18 nt, Human
gcaccaaaauaagaaaag

SEQ ID NO: 2326773 - RNA, 17 nt, Human
gcaccaaaauaagaaaa

SEQ ID NO: 2326774 - RNA, 21 nt, Human
gcaccccccugggcugagaga

SEQ ID NO: 2326775 - RNA, 14 nt, Human
gcaccccccugggc

SEQ ID NO: 2326776 - RNA, 13 nt, Human
gcaccccccuggg

SEQ ID NO: 2326777 - RNA, 14 nt, Human
gcaccccccaagcu

SEQ ID NO: 2326778 - RNA, 21 nt, Human
gcaccuguacucaggaggcug

SEQ ID NO: 2326779 - RNA, 19 nt, Human
gcaccuguacucaggaggc

SEQ ID NO: 2326780 - RNA, 15 nt, Human
gcaccuggggagugg

SEQ ID NO: 2326781 - RNA, 17 nt, Human
gcaccuggggaguggga

SEQ ID NO: 2326782 - RNA, 21 nt, Human
gcaccuguaaucccagcuacu

SEQ ID NO: 2326783 - RNA, 12 nt, Human
gcaccauaacuu

SEQ ID NO: 2326784 - RNA, 22 nt, Human
gcaccccagcuggggccaggcu

SEQ ID NO: 2326785 - RNA, 18 nt, Human
gcacccccacccuuuggg

SEQ ID NO: 2326786 - RNA, 15 nt, Human
gcacccccacccuuu

SEQ ID NO: 2326787 - RNA, 14 nt, Human
gcacccccacccuu

SEQ ID NO: 2326788 - RNA, 13 nt, Human
gcacccccacccu

SEQ ID NO: 2326789 - RNA, 17 nt, Human
gcaccccaugcuguuga

SEQ ID NO: 2326790 - RNA, 14 nt, Human
gcaccaucccuuuu

SEQ ID NO: 2326791 - RNA, 15 nt, Human
gcaccccaugcuguu

SEQ ID NO: 2326792 - RNA, 18 nt, Human
gcaccuuaccaacuuucu

SEQ ID NO: 2326793 - RNA, 22 nt, Human
gcaccugucccagaaaaagcau

SEQ ID NO: 2326794 - RNA, 19 nt, Human
gcaccugucccagaaaaag

SEQ ID NO: 2326795 - RNA, 15 nt, Human
gcaccugucccagaa

SEQ ID NO: 2326796 - RNA, 20 nt, Human
gcaccuuagacagucccugc

SEQ ID NO: 2326797 - RNA, 21 nt, Human
gcaccuuagacagucccugcc

SEQ ID NO: 2326798 - RNA, 16 nt, Human
gcaccuuccucacuuc

SEQ ID NO: 2326799 - RNA, 14 nt, Human
gcaccuugugucug

SEQ ID NO: 2326800 - RNA, 15 nt, Human
gcaccuuccucacuu

SEQ ID NO: 2326801 - RNA, 19 nt, Human
gcaccuuaccaacuuucug

SEQ ID NO: 2326802 - RNA, 13 nt, Human
gcaccuuaguggc

SEQ ID NO: 2326803 - RNA, 16 nt, Human
gcaccuuaguggcuuu

SEQ ID NO: 2326804 - RNA, 14 nt, Human
gcaccuucagacuu

SEQ ID NO: 2326805 - RNA, 15 nt, Human
gcacgauuucuguuu

SEQ ID NO: 2326806 - RNA, 13 nt, Human
gcacgauuucugu

SEQ ID NO: 2326807 - RNA, 22 nt, Human
gcacaaaauucgaccugauuua

SEQ ID NO: 2326808 - RNA, 13 nt, Human
gcacaaauauuua

SEQ ID NO: 2326809 - RNA, 23 nt, Human
gcacaaaaugauggacccaaugc

SEQ ID NO: 2326810 - RNA, 23 nt, Human
gcacaaaauucgaccugauuuac

SEQ ID NO: 2326811 - RNA, 18 nt, Human
gcacaaacucaccaucug

SEQ ID NO: 2326812 - RNA, 15 nt, Human
gcacaaacagaggcc

SEQ ID NO: 2326813 - RNA, 16 nt, Human
gcacaaacagaggccg

SEQ ID NO: 2326814 - RNA, 18 nt, Human
gcaauuuugcauuugaau

SEQ ID NO: 2326815 - RNA, 17 nt, Human
gcaauuuuccuugaagc

SEQ ID NO: 2326816 - RNA, 19 nt, Human
gcaauuuuccuugaagccg

SEQ ID NO: 2326817 - RNA, 14 nt, Human
gcaauuuuguaacg

SEQ ID NO: 2326818 - RNA, 20 nt, Human
gcaauuuuccuugaagccga

SEQ ID NO: 2326819 - RNA, 19 nt, Human
gcaauuuuaauugauuauu

SEQ ID NO: 2326820 - RNA, 10 nt, Human
gcaauuuucc

SEQ ID NO: 2326821 - RNA, 11 nt, Human
gcaauuuuccu

SEQ ID NO: 2326822 - RNA, 13 nt, Human
gcaauuuuccuug

SEQ ID NO: 2326823 - RNA, 14 nt, Human
gcaauuuuccuuga

SEQ ID NO: 2326824 - RNA, 15 nt, Human
gcaauuuuccuugaa

SEQ ID NO: 2326825 - RNA, 14 nt, Human
gcacaaacagaggc

SEQ ID NO: 2326826 - RNA, 23 nt, Human
gcaauuuuuccaugaaguuugaa

SEQ ID NO: 2326827 - RNA, 23 nt, Human
gcacaaaacccagaccuguuagc

SEQ ID NO: 2326828 - RNA, 13 nt, Human
gcacaaaacccag

SEQ ID NO: 2326829 - RNA, 17 nt, Human
gcaauuuauuaaaauga

SEQ ID NO: 2326830 - RNA, 14 nt, Human
gcaauuucauaugc

SEQ ID NO: 2326831 - RNA, 14 nt, Human
gcaaagggcugaaa

SEQ ID NO: 2326832 - RNA, 18 nt, Human
gcaauuuccuuuuuuguu

SEQ ID NO: 2326833 - RNA, 18 nt, Human
gcaauuuguuugugcuuc

SEQ ID NO: 2326834 - RNA, 20 nt, Human
gcaauuuguuugugcuucua

SEQ ID NO: 2326835 - RNA, 15 nt, Human
gcaauugcuuaggau

SEQ ID NO: 2326836 - RNA, 14 nt, Human
gcaauugggauggc

SEQ ID NO: 2326837 - RNA, 16 nt, Human
gcaauuuauacaauau

SEQ ID NO: 2326838 - RNA, 19 nt, Human
gcaauuuauacaauaucau

SEQ ID NO: 2326839 - RNA, 23 nt, Human
gcaauuuaauauuuugcacaguu

SEQ ID NO: 2326840 - RNA, 17 nt, Human
gcaauuccgcauuuaau

SEQ ID NO: 2326841 - RNA, 18 nt, Human
gcaauugaauuaaauuag

SEQ ID NO: 2326842 - RNA, 20 nt, Human
gcaauucuccugccucagcc

SEQ ID NO: 2326843 - RNA, 19 nt, Human
gcaauucuccugccucagc

SEQ ID NO: 2326844 - RNA, 18 nt, Human
gcaauucuccugccucag

SEQ ID NO: 2326845 - RNA, 17 nt, Human
gcaauucuccugccuca

SEQ ID NO: 2326846 - RNA, 16 nt, Human
gcaauucuccugccuc

SEQ ID NO: 2326847 - RNA, 15 nt, Human
gcaauucuccugccu

SEQ ID NO: 2326848 - RNA, 14 nt, Human
gcaauucuccugcc

SEQ ID NO: 2326849 - RNA, 14 nt, Human
gcaauguuuuccuu

SEQ ID NO: 2326850 - RNA, 21 nt, Human
gcaauuaaagugauacugaaa

SEQ ID NO: 2326851 - RNA, 15 nt, Human
gcaauuccgcauuua

SEQ ID NO: 2326852 - RNA, 21 nt, Human
gcaauuccccucugcugcugu

SEQ ID NO: 2326853 - RNA, 14 nt, Human
gcaauuccccucug

SEQ ID NO: 2326854 - RNA, 18 nt, Human
gcaauuccccucugcugc

SEQ ID NO: 2326855 - RNA, 14 nt, Human
gcaaugugcuacug

SEQ ID NO: 2326856 - RNA, 14 nt, Human
gcaaugucugugcu

SEQ ID NO: 2326857 - RNA, 15 nt, Human
gcaaugucugugcua

SEQ ID NO: 2326858 - RNA, 22 nt, Human
gcaaugucaggaacagaaggau

SEQ ID NO: 2326859 - RNA, 19 nt, Human
gcaaugucugagugaaccu

SEQ ID NO: 2326860 - RNA, 15 nt, Human
gcaaugugggcagag

SEQ ID NO: 2326861 - RNA, 20 nt, Human
gcaaugucaggaacagaagg

SEQ ID NO: 2326862 - RNA, 22 nt, Human
gcaauguagaggggaaaagaga

SEQ ID NO: 2326863 - RNA, 14 nt, Human
gcaaugugauaaaa

SEQ ID NO: 2326864 - RNA, 14 nt, Human
gcaacucaucuuag

SEQ ID NO: 2326865 - RNA, 22 nt, Human
gcaacucaaggacuuugcagcc

SEQ ID NO: 2326866 - RNA, 18 nt, Human
gcaacggggaggccaagu

SEQ ID NO: 2326867 - RNA, 13 nt, Human
gcaacacacagac

SEQ ID NO: 2326868 - RNA, 15 nt, Human
gcaauggcagccuug

SEQ ID NO: 2326869 - RNA, 20 nt, Human
gcaaugguguugcccugagu

SEQ ID NO: 2326870 - RNA, 23 nt, Human
gcaaugguguugcccugagugga

SEQ ID NO: 2326871 - RNA, 14 nt, Human
gcaaugggcacugg

SEQ ID NO: 2326872 - RNA, 16 nt, Human
gcaaugggcacuggga

SEQ ID NO: 2326873 - RNA, 20 nt, Human
gcaaugggagcugaggccac

SEQ ID NO: 2326874 - RNA, 19 nt, Human
gcaaugggagcugaggcca

SEQ ID NO: 2326875 - RNA, 16 nt, Human
gcacaaauauuuauuu

SEQ ID NO: 2326876 - RNA, 15 nt, Human
gcacaaauauuuauu

SEQ ID NO: 2326877 - RNA, 14 nt, Human
gcacaaauauuuau

SEQ ID NO: 2326878 - RNA, 23 nt, Human
gcacaaauucugucucuggauua

SEQ ID NO: 2326879 - RNA, 19 nt, Human
gcacaacuuuaagaggaca

SEQ ID NO: 2326880 - RNA, 11 nt, Human
gcacaagaagc

SEQ ID NO: 2326881 - RNA, 24 nt, Human
gcacaagaagcgugagacgccacc

SEQ ID NO: 2326882 - RNA, 17 nt, Human
gcacaagaagcgugaga

SEQ ID NO: 2326883 - RNA, 23 nt, Human
gcacaagcaaaagggugucugag

SEQ ID NO: 2326884 - RNA, 21 nt, Human
gcacaagcuccaagcucccag

SEQ ID NO: 2326885 - RNA, 18 nt, Human
gcacaagcuccaagcucc

SEQ ID NO: 2326886 - RNA, 15 nt, Human
gcacaagcuccaagc

SEQ ID NO: 2326887 - RNA, 17 nt, Human
gcacaagcuccaagcuc

SEQ ID NO: 2326888 - RNA, 14 nt, Human
gcacacgccuccca

SEQ ID NO: 2326889 - RNA, 17 nt, Human
gcacacgccucccacug

SEQ ID NO: 2326890 - RNA, 19 nt, Human
gcacacgccucccacuggg

SEQ ID NO: 2326891 - RNA, 20 nt, Human
gcacaccgggcacucagaag

SEQ ID NO: 2326892 - RNA, 20 nt, Human
gcacacucauccccucacuu

SEQ ID NO: 2326893 - RNA, 15 nt, Human
gcacacuccccugca

SEQ ID NO: 2326894 - RNA, 21 nt, Human
gcacacuccccugcacuggag

SEQ ID NO: 2326895 - RNA, 17 nt, Human
gcacacgucauguuucu

SEQ ID NO: 2326896 - RNA, 23 nt, Human
gcacacggggugcgucuccccgg

SEQ ID NO: 2326897 - RNA, 12 nt, Human
gcacacuguagc

SEQ ID NO: 2326898 - RNA, 20 nt, Human
gcacacuccccugcacugga

SEQ ID NO: 2326899 - RNA, 14 nt, Human
gcacacuuugccau

SEQ ID NO: 2326900 - RNA, 13 nt, Human
gcacacuuugcca

SEQ ID NO: 2326901 - RNA, 20 nt, Human
gcacacuuugcacugauaua

SEQ ID NO: 2326902 - RNA, 14 nt, Human
gcacacuuggccca

SEQ ID NO: 2326903 - RNA, 20 nt, Human
gcacacuuggcccaaguggc

SEQ ID NO: 2326904 - RNA, 22 nt, Human
gcacacuuugccauauuuucac

SEQ ID NO: 2326905 - RNA, 20 nt, Human
gcacagaaaauggaagacag

SEQ ID NO: 2326906 - RNA, 19 nt, Human
gcacagagagggggccacc

SEQ ID NO: 2326907 - RNA, 23 nt, Human
gcacagagagggggccaccuccc

SEQ ID NO: 2326908 - RNA, 17 nt, Human
gcacagagcucuccagc

SEQ ID NO: 2326909 - RNA, 18 nt, Human
gcacagagcucuccagcu

SEQ ID NO: 2326910 - RNA, 19 nt, Human
gcacagagcucuccagcuc

SEQ ID NO: 2326911 - RNA, 15 nt, Human
gcacagaguuguuac

SEQ ID NO: 2326912 - RNA, 18 nt, Human
gcacagacgucccuccac

SEQ ID NO: 2326913 - RNA, 16 nt, Human
gcacagagaagacaaa

SEQ ID NO: 2326914 - RNA, 15 nt, Human
gcacagagagggggc

SEQ ID NO: 2326915 - RNA, 17 nt, Human
gcacagagagggggcca

SEQ ID NO: 2326916 - RNA, 22 nt, Human
gcacagacccugcccugugggc

SEQ ID NO: 2326917 - RNA, 18 nt, Human
gcacagacccugcccugu

SEQ ID NO: 2326918 - RNA, 19 nt, Human
gcacagacccugcccugug

SEQ ID NO: 2326919 - RNA, 20 nt, Human
gcacagacccugcccugugg

SEQ ID NO: 2326920 - RNA, 21 nt, Human
gcacagacccugcccuguggg

SEQ ID NO: 2326921 - RNA, 12 nt, Human
gcacagaaggag

SEQ ID NO: 2326922 - RNA, 20 nt, Human
gcacagaaacacaauauuuu

SEQ ID NO: 2326923 - RNA, 21 nt, Human
gcacagaaaccucuacuaaaa

SEQ ID NO: 2326924 - RNA, 23 nt, Human
gcacagaaaauggaagacagcuc

SEQ ID NO: 2326925 - RNA, 21 nt, Human
gcacagaaaauggaagacagc

SEQ ID NO: 2326926 - RNA, 22 nt, Human
gcacagaaaauggaagacagcu

SEQ ID NO: 2326927 - RNA, 14 nt, Human
gcacagacccugcc

SEQ ID NO: 2326928 - RNA, 15 nt, Human
gcacagacccugccc

SEQ ID NO: 2326929 - RNA, 16 nt, Human
gcacagacccugcccu

SEQ ID NO: 2326930 - RNA, 17 nt, Human
gcacagacccugcccug

SEQ ID NO: 2326931 - RNA, 22 nt, Human
gaugggucugguuugcagagcu

SEQ ID NO: 2326932 - RNA, 21 nt, Human
gaugggucuggcugagcugaa

SEQ ID NO: 2326933 - RNA, 21 nt, Human
gaugggucaguuguaucagca

SEQ ID NO: 2326934 - RNA, 15 nt, Human
gaugggucaguugua

SEQ ID NO: 2326935 - RNA, 23 nt, Human
gaugggucugguuugcagagcuu

SEQ ID NO: 2326936 - RNA, 21 nt, Human
gauggguucuaauuuuggaug

SEQ ID NO: 2326937 - RNA, 22 nt, Human
gauggguucuaauuuuggaugg

SEQ ID NO: 2326938 - RNA, 18 nt, Human
gauggguuugacaagguu

SEQ ID NO: 2326939 - RNA, 19 nt, Human
gaugggugcuuggaggaag

SEQ ID NO: 2326940 - RNA, 22 nt, Human
gauggggugggguggagaacuc

SEQ ID NO: 2326941 - RNA, 16 nt, Human
gauggggucuguaaaa

SEQ ID NO: 2326942 - RNA, 19 nt, Human
gauggggcucccgcccgug

SEQ ID NO: 2326943 - RNA, 19 nt, Human
gauggggcugcaccggcug

SEQ ID NO: 2326944 - RNA, 15 nt, Human
gauggggcugcaccg

SEQ ID NO: 2326945 - RNA, 13 nt, Human
gauggggccucug

SEQ ID NO: 2326946 - RNA, 20 nt, Human
gaugggaugguggagggcca

SEQ ID NO: 2326947 - RNA, 19 nt, Human
gaugggaugguggagggcc

SEQ ID NO: 2326948 - RNA, 13 nt, Human
gauggggcugcac

SEQ ID NO: 2326949 - RNA, 18 nt, Human
gauggccggagaggaccg

SEQ ID NO: 2326950 - RNA, 15 nt, Human
gaugggagugagaca

SEQ ID NO: 2326951 - RNA, 20 nt, Human
gaugggagggaggcucaggu

SEQ ID NO: 2326952 - RNA, 20 nt, Human
gaugggcaacccccagccug

SEQ ID NO: 2326953 - RNA, 21 nt, Human
gaugggcaacccccagccugc

SEQ ID NO: 2326954 - RNA, 24 nt, Human
gauggggcccugccuccuuuguga

SEQ ID NO: 2326955 - RNA, 12 nt, Human
gauggccagugu

SEQ ID NO: 2326956 - RNA, 12 nt, Human
gauggccccagc

SEQ ID NO: 2326957 - RNA, 21 nt, Human
gaugcugaaacaggagagaaa

SEQ ID NO: 2326958 - RNA, 15 nt, Human
gaugcugacuaguga

SEQ ID NO: 2326959 - RNA, 22 nt, Human
gauggcaggauggccuggccag

SEQ ID NO: 2326960 - RNA, 15 nt, Human
gauggcauccuguga

SEQ ID NO: 2326961 - RNA, 21 nt, Human
gauggcauccugugaaguccu

SEQ ID NO: 2326962 - RNA, 15 nt, Human
gauggcccuucccac

SEQ ID NO: 2326963 - RNA, 22 nt, Human
gauggcccuucccacuggaggu

SEQ ID NO: 2326964 - RNA, 14 nt, Human
gauggccccagcac

SEQ ID NO: 2326965 - RNA, 15 nt, Human
gauggccccagcaca

SEQ ID NO: 2326966 - RNA, 22 nt, Human
gauggccgggcgcgguggcuca

SEQ ID NO: 2326967 - RNA, 17 nt, Human
gaugcccacugaggaau

SEQ ID NO: 2326968 - RNA, 18 nt, Human
gaugcccagagggcccag

SEQ ID NO: 2326969 - RNA, 20 nt, Human
gaugcccagagggcccaggc

SEQ ID NO: 2326970 - RNA, 19 nt, Human
gaugcccagagggcccagg

SEQ ID NO: 2326971 - RNA, 23 nt, Human
gaugcccagagggcccaggcagg

SEQ ID NO: 2326972 - RNA, 22 nt, Human
gaugcccagagggcccaggcag

SEQ ID NO: 2326973 - RNA, 22 nt, Human
gaugcccagggccacucugccu

SEQ ID NO: 2326974 - RNA, 21 nt, Human
gaugcccagggccacucugcc

SEQ ID NO: 2326975 - RNA, 20 nt, Human
gaugcccagggccacucugc

SEQ ID NO: 2326976 - RNA, 15 nt, Human
gaugcccacugagga

SEQ ID NO: 2326977 - RNA, 20 nt, Human
gaugcccaaagaugcagccg

SEQ ID NO: 2326978 - RNA, 18 nt, Human
gaugccaucugugggcac

SEQ ID NO: 2326979 - RNA, 22 nt, Human
gaugccagguucuauuuggaau

SEQ ID NO: 2326980 - RNA, 21 nt, Human
gaugccaguaggcucaacuag

SEQ ID NO: 2326981 - RNA, 11 nt, Human
gaugccaggac

SEQ ID NO: 2326982 - RNA, 14 nt, Human
gaugccagguucua

SEQ ID NO: 2326983 - RNA, 19 nt, Human
gaugcccaaagaugcagcc

SEQ ID NO: 2326984 - RNA, 15 nt, Human
gaucagaacagcaga

SEQ ID NO: 2326985 - RNA, 16 nt, Human
gaucagaccauaaugu

SEQ ID NO: 2326986 - RNA, 14 nt, Human
gaucagagcagcag

SEQ ID NO: 2326987 - RNA, 14 nt, Human
gaucagaucugaca

SEQ ID NO: 2326988 - RNA, 22 nt, Human
gaucagaccuuggaucagauga

SEQ ID NO: 2326989 - RNA, 23 nt, Human
gaucagagccgugguccuuuggg

SEQ ID NO: 2326990 - RNA, 16 nt, Human
gaucagagccgugguc

SEQ ID NO: 2326991 - RNA, 16 nt, Human
gaugccccagagcugu

SEQ ID NO: 2326992 - RNA, 12 nt, Human
gaugccccagag

SEQ ID NO: 2326993 - RNA, 16 nt, Human
gaugccccgucccccu

SEQ ID NO: 2326994 - RNA, 18 nt, Human
gaugcuagaacucccuuu

SEQ ID NO: 2326995 - RNA, 22 nt, Human
gaugcuagaacucccuuucaac

SEQ ID NO: 2326996 - RNA, 20 nt, Human
gaugcuagaacucccuuuca

SEQ ID NO: 2326997 - RNA, 20 nt, Human
gaugcugaaacaggagagaa

SEQ ID NO: 2326998 - RNA, 21 nt, Human
gaugcugacauucaccugccc

SEQ ID NO: 2326999 - RNA, 20 nt, Human
gaugcugacauucaccugcc

SEQ ID NO: 2327000 - RNA, 17 nt, Human
gaugcugacuguacucc

SEQ ID NO: 2327001 - RNA, 20 nt, Human
gaugcugacuguacuccucc

SEQ ID NO: 2327002 - RNA, 15 nt, Human
gaugcucuucugugg

SEQ ID NO: 2327003 - RNA, 21 nt, Human
gaugcuccuugggcccuuuga

SEQ ID NO: 2327004 - RNA, 16 nt, Human
gaugcuccuugggccc

SEQ ID NO: 2327005 - RNA, 14 nt, Human
gaugcuccuugggc

SEQ ID NO: 2327006 - RNA, 21 nt, Human
gaugccccgucccccucuggc

SEQ ID NO: 2327007 - RNA, 13 nt, Human
gaugcuccuuggg

SEQ ID NO: 2327008 - RNA, 17 nt, Human
gaugugggucaaggaau

SEQ ID NO: 2327009 - RNA, 20 nt, Human
gaugugggggaagaccuggc

SEQ ID NO: 2327010 - RNA, 20 nt, Human
gauguggcccuggccugcug

SEQ ID NO: 2327011 - RNA, 16 nt, Human
gauguggcugcagcag

SEQ ID NO: 2327012 - RNA, 18 nt, Human
gauguggcugcagcagcg

SEQ ID NO: 2327013 - RNA, 22 nt, Human
gaugugggagggagcagacagg

SEQ ID NO: 2327014 - RNA, 16 nt, Human
gaugugggggaagacc

SEQ ID NO: 2327015 - RNA, 23 nt, Human
gaugugggagggagcagacagga

SEQ ID NO: 2327016 - RNA, 14 nt, Human
gauguuaaccagaa

SEQ ID NO: 2327017 - RNA, 21 nt, Human
gauguuaacacauuuuguaua

SEQ ID NO: 2327018 - RNA, 22 nt, Human
gauguuaacacauuuuguauaa

SEQ ID NO: 2327019 - RNA, 20 nt, Human
gauguuacaucacaguguuu

SEQ ID NO: 2327020 - RNA, 23 nt, Human
gauguuacaucacaguguuugca

SEQ ID NO: 2327021 - RNA, 15 nt, Human
gauguggugaggcag

SEQ ID NO: 2327022 - RNA, 22 nt, Human
gauguggugaggcaggcuuugu

SEQ ID NO: 2327023 - RNA, 15 nt, Human
gauguggugccugag

SEQ ID NO: 2327024 - RNA, 20 nt, Human
gauguggugccugaggucug

SEQ ID NO: 2327025 - RNA, 22 nt, Human
gauguggugccugaggucugua

SEQ ID NO: 2327026 - RNA, 18 nt, Human
gauguuaacacauuuugu

SEQ ID NO: 2327027 - RNA, 19 nt, Human
gauguuaacacauuuugua

SEQ ID NO: 2327028 - RNA, 21 nt, Human
gauguggcccuggccugcugg

SEQ ID NO: 2327029 - RNA, 14 nt, Human
gauguggcccuggc

SEQ ID NO: 2327030 - RNA, 13 nt, Human
gauguggcccugg

SEQ ID NO: 2327031 - RNA, 12 nt, Human
gauguggcccug

SEQ ID NO: 2327032 - RNA, 17 nt, Human
gauguggaguggggcag

SEQ ID NO: 2327033 - RNA, 17 nt, Human
gaugguguuuuggggau

SEQ ID NO: 2327034 - RNA, 23 nt, Human
gaugguuauuuucuuuucuuuca

SEQ ID NO: 2327035 - RNA, 17 nt, Human
gaugguuauuuucuuuu

SEQ ID NO: 2327036 - RNA, 13 nt, Human
gaugguuccccug

SEQ ID NO: 2327037 - RNA, 18 nt, Human
gaugguuccccuguucac

SEQ ID NO: 2327038 - RNA, 21 nt, Human
gaugguuccccuguucacucu

SEQ ID NO: 2327039 - RNA, 23 nt, Human
gauggguucuaauuuuggaugga

SEQ ID NO: 2327040 - RNA, 14 nt, Human
gauggucagcuccc

SEQ ID NO: 2327041 - RNA, 24 nt, Human
gaugguccuggggcucugugcagg

SEQ ID NO: 2327042 - RNA, 21 nt, Human
gaugguccuggggcucugugc

SEQ ID NO: 2327043 - RNA, 15 nt, Human
gaugguccuggggcu

SEQ ID NO: 2327044 - RNA, 13 nt, Human
gaugguccugggg

SEQ ID NO: 2327045 - RNA, 12 nt, Human
gauggugcaaug

SEQ ID NO: 2327046 - RNA, 14 nt, Human
gauggugcaaugac

SEQ ID NO: 2327047 - RNA, 17 nt, Human
gauggugcaaugaccuu

SEQ ID NO: 2327048 - RNA, 24 nt, Human
gaugguguucaaaaaacuuguaaa

SEQ ID NO: 2327049 - RNA, 15 nt, Human
gauggucagcucccu

SEQ ID NO: 2327050 - RNA, 15 nt, Human
gauggugcaaugacc

SEQ ID NO: 2327051 - RNA, 16 nt, Human
gauggugcaaugaccu

SEQ ID NO: 2327052 - RNA, 18 nt, Human
gauuacaggcaugugcca

SEQ ID NO: 2327053 - RNA, 17 nt, Human
gauuacaggcuccugcc

SEQ ID NO: 2327054 - RNA, 20 nt, Human
gauuacaggcgugagccacc

SEQ ID NO: 2327055 - RNA, 23 nt, Human
gauuacaagcgugagccacugca

SEQ ID NO: 2327056 - RNA, 13 nt, Human
gauuacagaggaa

SEQ ID NO: 2327057 - RNA, 22 nt, Human
gauuacaagcgugagccacugc

SEQ ID NO: 2327058 - RNA, 16 nt, Human
gauuaaacgugcagac

SEQ ID NO: 2327059 - RNA, 16 nt, Human
gauguuuuucaugaaa

SEQ ID NO: 2327060 - RNA, 22 nt, Human
gauguuuuuaaaaguuucaaug

SEQ ID NO: 2327061 - RNA, 20 nt, Human
gauguuuuuaaaaguuucaa

SEQ ID NO: 2327062 - RNA, 21 nt, Human
gauguuuuuaaaaguuucaau

SEQ ID NO: 2327063 - RNA, 15 nt, Human
gauuaaacuuaaucu

SEQ ID NO: 2327064 - RNA, 23 nt, Human
gauguuuacagguggacacacaa

SEQ ID NO: 2327065 - RNA, 18 nt, Human
gauguuuaacuuaaucaa

SEQ ID NO: 2327066 - RNA, 18 nt, Human
gauguuuuuaaaaguuuc

SEQ ID NO: 2327067 - RNA, 16 nt, Human
gauguuuaguaaucau

SEQ ID NO: 2327068 - RNA, 15 nt, Human
gauguuggcugggaa

SEQ ID NO: 2327069 - RNA, 14 nt, Human
gauguuggcuggga

SEQ ID NO: 2327070 - RNA, 19 nt, Human
gauguucagauugcuuuga

SEQ ID NO: 2327071 - RNA, 20 nt, Human
gauguucagauugcuuugau

SEQ ID NO: 2327072 - RNA, 17 nt, Human
gauguucagcacugucc

SEQ ID NO: 2327073 - RNA, 19 nt, Human
gauguucagcacugucccu

SEQ ID NO: 2327074 - RNA, 20 nt, Human
gauguucagcacugucccuu

SEQ ID NO: 2327075 - RNA, 20 nt, Human
gauguuauguaaaaggccaa

SEQ ID NO: 2327076 - RNA, 23 nt, Human
gauguugaaugcccacaggcaaa

SEQ ID NO: 2327077 - RNA, 22 nt, Human
gauguucagcacugucccuugc

SEQ ID NO: 2327078 - RNA, 13 nt, Human
gauguucagugua

SEQ ID NO: 2327079 - RNA, 14 nt, Human
gauguucaguguaa

SEQ ID NO: 2327080 - RNA, 15 nt, Human
gauguucaguguaau

SEQ ID NO: 2327081 - RNA, 20 nt, Human
gauguucaguguaauuucuu

SEQ ID NO: 2327082 - RNA, 23 nt, Human
gauguucaguguaauuucuuugc

SEQ ID NO: 2327083 - RNA, 14 nt, Human
gauguucauuuaga

SEQ ID NO: 2327084 - RNA, 22 nt, Human
gcaaaccacacuggacuccggc

SEQ ID NO: 2327085 - RNA, 16 nt, Human
gcaaagauaucucauc

SEQ ID NO: 2327086 - RNA, 18 nt, Human
gcaaagaggcaagaggcu

SEQ ID NO: 2327087 - RNA, 12 nt, Human
gcaaagaucaaa

SEQ ID NO: 2327088 - RNA, 14 nt, Human
gcaaagaucaaaau

SEQ ID NO: 2327089 - RNA, 15 nt, Human
gcaaagaucaaaaua

SEQ ID NO: 2327090 - RNA, 15 nt, Human
gcaaaccaucauuga

SEQ ID NO: 2327091 - RNA, 22 nt, Human
gcaaagaucuguccucagccuu

SEQ ID NO: 2327092 - RNA, 21 nt, Human
gcaaagaucuguccucagccu

SEQ ID NO: 2327093 - RNA, 20 nt, Human
gcaaagaucuguccucagcc

SEQ ID NO: 2327094 - RNA, 19 nt, Human
gcaaagaucuguccucagc

SEQ ID NO: 2327095 - RNA, 16 nt, Human
gcaaagaucaaaauaa

SEQ ID NO: 2327096 - RNA, 18 nt, Human
gcaaagaucaaaauaaaa

SEQ ID NO: 2327097 - RNA, 17 nt, Human
gcaaaggaguagaaaga

SEQ ID NO: 2327098 - RNA, 23 nt, Human
gcaaaggacuguuuuuuccugag

SEQ ID NO: 2327099 - RNA, 13 nt, Human
gcaaaggcuggga

SEQ ID NO: 2327100 - RNA, 20 nt, Human
gcaaaggacuguuuuuuccu

SEQ ID NO: 2327101 - RNA, 20 nt, Human
gcaaaggaagguggauggcc

SEQ ID NO: 2327102 - RNA, 14 nt, Human
gcaaaggaaauacc

SEQ ID NO: 2327103 - RNA, 15 nt, Human
gcaaaggaaggugga

SEQ ID NO: 2327104 - RNA, 14 nt, Human
gcaaagcgacguua

SEQ ID NO: 2327105 - RNA, 21 nt, Human
gcaaagcugaugacaacuucc

SEQ ID NO: 2327106 - RNA, 22 nt, Human
gcaaagcaccagcuucuccagg

SEQ ID NO: 2327107 - RNA, 23 nt, Human
gcaaagcaccagcuucuccaggc

SEQ ID NO: 2327108 - RNA, 13 nt, Human
gcaaagcaccagc

SEQ ID NO: 2327109 - RNA, 21 nt, Human
gcaaagcaccagcuucuccag

SEQ ID NO: 2327110 - RNA, 12 nt, Human
gcaacacacaga

SEQ ID NO: 2327111 - RNA, 23 nt, Human
gcaacacaagcuggaagcacaug

SEQ ID NO: 2327112 - RNA, 17 nt, Human
gcaacacaagcuggaag

SEQ ID NO: 2327113 - RNA, 19 nt, Human
gcaacacaagcuggaagca

SEQ ID NO: 2327114 - RNA, 16 nt, Human
gcaacacaagcuggaa

SEQ ID NO: 2327115 - RNA, 14 nt, Human
gcaacaauuuauga

SEQ ID NO: 2327116 - RNA, 20 nt, Human
gcaacaagguccucugucag

SEQ ID NO: 2327117 - RNA, 22 nt, Human
gcaacaauacaugcugcuaauu

SEQ ID NO: 2327118 - RNA, 21 nt, Human
gcaaauuaauuggcagcagau

SEQ ID NO: 2327119 - RNA, 22 nt, Human
gcaacaagaccaccacuucgaa

SEQ ID NO: 2327120 - RNA, 12 nt, Human
gcaaauguguac

SEQ ID NO: 2327121 - RNA, 16 nt, Human
gcaaauugucacagga

SEQ ID NO: 2327122 - RNA, 20 nt, Human
gcaaagggagcacuggguug

SEQ ID NO: 2327123 - RNA, 18 nt, Human
gcaaagggagcacugggu

SEQ ID NO: 2327124 - RNA, 23 nt, Human
gcaaaugugaaucauuuuaccuu

SEQ ID NO: 2327125 - RNA, 16 nt, Human
gcaaaugugaccugug

SEQ ID NO: 2327126 - RNA, 17 nt, Human
gcaaagggagcagaacu

SEQ ID NO: 2327127 - RNA, 18 nt, Human
gcaaagggagcagaacug

SEQ ID NO: 2327128 - RNA, 15 nt, Human
gcaaauguggcuccu

SEQ ID NO: 2327129 - RNA, 15 nt, Human
gcaaaccacacugga

SEQ ID NO: 2327130 - RNA, 17 nt, Human
gcaaaccacacuggacu

SEQ ID NO: 2327131 - RNA, 18 nt, Human
gcaaaccacacuggacuc

SEQ ID NO: 2327132 - RNA, 20 nt, Human
gcaaaccacacuggacuccg

SEQ ID NO: 2327133 - RNA, 12 nt, Human
gcaaaccaucau

SEQ ID NO: 2327134 - RNA, 21 nt, Human
gcaaacaugggguuggcuggg

SEQ ID NO: 2327135 - RNA, 14 nt, Human
gauuuuuacacaug

SEQ ID NO: 2327136 - RNA, 15 nt, Human
gauuuuguuuugcuu

SEQ ID NO: 2327137 - RNA, 22 nt, Human
gauuuuguuuugcuuuuucuga

SEQ ID NO: 2327138 - RNA, 16 nt, Human
gauuuugcuguagaag

SEQ ID NO: 2327139 - RNA, 18 nt, Human
gauuuugcuguauauuug

SEQ ID NO: 2327140 - RNA, 15 nt, Human
gauuuugcuguauau

SEQ ID NO: 2327141 - RNA, 13 nt, Human
gauuuugccugug

SEQ ID NO: 2327142 - RNA, 18 nt, Human
gauuuugauagcaaagcg

SEQ ID NO: 2327143 - RNA, 14 nt, Human
gauuuugaguaucu

SEQ ID NO: 2327144 - RNA, 13 nt, Human
gauuuuguuuugc

SEQ ID NO: 2327145 - RNA, 14 nt, Human
gauuuuguuuugcu

SEQ ID NO: 2327146 - RNA, 13 nt, Human
gauuuuguaaccc

SEQ ID NO: 2327147 - RNA, 23 nt, Human
gauuuuguaucugcaggcagaca

SEQ ID NO: 2327148 - RNA, 16 nt, Human
gauuuuguaacccaga

SEQ ID NO: 2327149 - RNA, 19 nt, Human
gauuuugguuuuguucccc

SEQ ID NO: 2327150 - RNA, 22 nt, Human
gauuuugguuuuguuccccucc

SEQ ID NO: 2327151 - RNA, 21 nt, Human
gauuuugggguuguguuguca

SEQ ID NO: 2327152 - RNA, 19 nt, Human
gauuuuggccucauuacuu

SEQ ID NO: 2327153 - RNA, 21 nt, Human
gauuuugguauuacacuguau

SEQ ID NO: 2327154 - RNA, 13 nt, Human
gauuuuaauuuug

SEQ ID NO: 2327155 - RNA, 18 nt, Human
gauuuuaaucaaguugaa

SEQ ID NO: 2327156 - RNA, 15 nt, Human
gauuugcauugaaca

SEQ ID NO: 2327157 - RNA, 14 nt, Human
gauuugcaaaaaaa

SEQ ID NO: 2327158 - RNA, 16 nt, Human
gauuuuaacucugucu

SEQ ID NO: 2327159 - RNA, 14 nt, Human
gauuuuaacucugu

SEQ ID NO: 2327160 - RNA, 18 nt, Human
gauuuuacauguggccca

SEQ ID NO: 2327161 - RNA, 18 nt, Human
gauuuuacaauugaaaug

SEQ ID NO: 2327162 - RNA, 15 nt, Human
gauuuuaauuuugaa

SEQ ID NO: 2327163 - RNA, 19 nt, Human
gauuuuacaauugaaauga

SEQ ID NO: 2327164 - RNA, 17 nt, Human
gauuuuaaucaaguuga

SEQ ID NO: 2327165 - RNA, 21 nt, Human
gauuuugaaauuuuuauuaaa

SEQ ID NO: 2327166 - RNA, 19 nt, Human
gauuuugauccaagcuggu

SEQ ID NO: 2327167 - RNA, 24 nt, Human
gauuuucuuuaaaagaaugggcag

SEQ ID NO: 2327168 - RNA, 21 nt, Human
gauuuugaaaccaugaagaga

SEQ ID NO: 2327169 - RNA, 21 nt, Human
gauuuugaaaucaugaagaua

SEQ ID NO: 2327170 - RNA, 13 nt, Human
gauuuuaugcuuu

SEQ ID NO: 2327171 - RNA, 20 nt, Human
gauuuuaucugugaauucag

SEQ ID NO: 2327172 - RNA, 22 nt, Human
gauuuuaucuuucgcacagcag

SEQ ID NO: 2327173 - RNA, 22 nt, Human
gauugcguggaauugugcugag

SEQ ID NO: 2327174 - RNA, 13 nt, Human
gauugcuaaaugu

SEQ ID NO: 2327175 - RNA, 14 nt, Human
gauugcuaaaugua

SEQ ID NO: 2327176 - RNA, 16 nt, Human
gauugcuaaauguaac

SEQ ID NO: 2327177 - RNA, 20 nt, Human
gauuggggaagacuguggcu

SEQ ID NO: 2327178 - RNA, 17 nt, Human
gauugggccccugccag

SEQ ID NO: 2327179 - RNA, 13 nt, Human
gauuguaaaaaaa

SEQ ID NO: 2327180 - RNA, 20 nt, Human
gauugggugggcaggaaaag

SEQ ID NO: 2327181 - RNA, 19 nt, Human
gauugggugggcaggaaaa

SEQ ID NO: 2327182 - RNA, 18 nt, Human
gauuggguuaugaauauu

SEQ ID NO: 2327183 - RNA, 14 nt, Human
gauugggggcuggu

SEQ ID NO: 2327184 - RNA, 17 nt, Human
gauugggggcuggugcc

SEQ ID NO: 2327185 - RNA, 18 nt, Human
gauugggggcuggugcca

SEQ ID NO: 2327186 - RNA, 12 nt, Human
gauugggucuag

SEQ ID NO: 2327187 - RNA, 12 nt, Human
gauuuaaaucag

SEQ ID NO: 2327188 - RNA, 18 nt, Human
gauuguaaaaaaaaaugc

SEQ ID NO: 2327189 - RNA, 22 nt, Human
gauuguaaaaaaaaaugccuuu

SEQ ID NO: 2327190 - RNA, 12 nt, Human
gauuguaaaaua

SEQ ID NO: 2327191 - RNA, 20 nt, Human
gauuguaaaauagcuuguau

SEQ ID NO: 2327192 - RNA, 23 nt, Human
gauuguaaaauagcuuguauagu

SEQ ID NO: 2327193 - RNA, 18 nt, Human
gauuguaacguugcugug

SEQ ID NO: 2327194 - RNA, 14 nt, Human
gauuuaacagaaau

SEQ ID NO: 2327195 - RNA, 13 nt, Human
gauuuaacagaaa

SEQ ID NO: 2327196 - RNA, 16 nt, Human
gauuugaagcaaagca

SEQ ID NO: 2327197 - RNA, 12 nt, Human
gauuugacuguu

SEQ ID NO: 2327198 - RNA, 13 nt, Human
gauuugacuguuu

SEQ ID NO: 2327199 - RNA, 16 nt, Human
gauuugagcucagccc

SEQ ID NO: 2327200 - RNA, 14 nt, Human
gauuugacuguuuu

SEQ ID NO: 2327201 - RNA, 18 nt, Human
gauuugacuguuuuuacc

SEQ ID NO: 2327202 - RNA, 21 nt, Human
gauuugacuguuuuuacccau

SEQ ID NO: 2327203 - RNA, 22 nt, Human
gauuugaggagcagcuucaguu

SEQ ID NO: 2327204 - RNA, 23 nt, Human
gauuugaggagcagcuucaguug

SEQ ID NO: 2327205 - RNA, 15 nt, Human
gauuugaugcuggag

SEQ ID NO: 2327206 - RNA, 21 nt, Human
gauuugaugcuggagagguua

SEQ ID NO: 2327207 - RNA, 18 nt, Human
gauuugaugcuguuugac

SEQ ID NO: 2327208 - RNA, 18 nt, Human
gauuugaagaacauguga

SEQ ID NO: 2327209 - RNA, 20 nt, Human
gauuucgugggucuguuuuc

SEQ ID NO: 2327210 - RNA, 19 nt, Human
gauuucgugggucuguuuu

SEQ ID NO: 2327211 - RNA, 23 nt, Human
gauuucuagaaagccuguucccc

SEQ ID NO: 2327212 - RNA, 13 nt, Human
gauuugacauugc

SEQ ID NO: 2327213 - RNA, 20 nt, Human
gauuugaagaacaugugaga

SEQ ID NO: 2327214 - RNA, 19 nt, Human
gauuugaagaacaugugag

SEQ ID NO: 2327215 - RNA, 22 nt, Human
gauuuccguuaaaauaccagcc

SEQ ID NO: 2327216 - RNA, 15 nt, Human
gauuuaacagaaaug

SEQ ID NO: 2327217 - RNA, 13 nt, Human
gauuuccuugaau

SEQ ID NO: 2327218 - RNA, 22 nt, Human
gauuuccuugaauguggcuuga

SEQ ID NO: 2327219 - RNA, 17 nt, Human
gauuuccuugaaugugg

SEQ ID NO: 2327220 - RNA, 19 nt, Human
gauuguaacguugcugugg

SEQ ID NO: 2327221 - RNA, 22 nt, Human
gauuuccugcuuugggaagccg

SEQ ID NO: 2327222 - RNA, 18 nt, Human
gauuacagggaugagcca

SEQ ID NO: 2327223 - RNA, 20 nt, Human
gauuacagggaugagccacc

SEQ ID NO: 2327224 - RNA, 21 nt, Human
gauuacaggcuccugccacca

SEQ ID NO: 2327225 - RNA, 18 nt, Human
gauuacaggcuccugcca

SEQ ID NO: 2327226 - RNA, 20 nt, Human
gauucaaucuguaaacugug

SEQ ID NO: 2327227 - RNA, 22 nt, Human
gauucaaucuguaaacugugua

SEQ ID NO: 2327228 - RNA, 21 nt, Human
gauucaaucuguaaacugugu

SEQ ID NO: 2327229 - RNA, 11 nt, Human
gauucucagau

SEQ ID NO: 2327230 - RNA, 12 nt, Human
gauucucagggu

SEQ ID NO: 2327231 - RNA, 17 nt, Human
gauucucagggucucug

SEQ ID NO: 2327232 - RNA, 19 nt, Human
gauucucagggucucugcu

SEQ ID NO: 2327233 - RNA, 23 nt, Human
gauucucagggucucugcugccg

SEQ ID NO: 2327234 - RNA, 21 nt, Human
gauucucagggucucugcugc

SEQ ID NO: 2327235 - RNA, 22 nt, Human
gauucucagggucucugcugcc

SEQ ID NO: 2327236 - RNA, 21 nt, Human
gauucuauuuauauguacaug

SEQ ID NO: 2327237 - RNA, 20 nt, Human
gauucuauuuauauguacau

SEQ ID NO: 2327238 - RNA, 15 nt, Human
gauucuauuuauaug

SEQ ID NO: 2327239 - RNA, 18 nt, Human
gauucacaaugaaaugcu

SEQ ID NO: 2327240 - RNA, 22 nt, Human
gauucacaaugaaaugcucucc

SEQ ID NO: 2327241 - RNA, 22 nt, Human
gauugcauuagaaauagacagu

SEQ ID NO: 2327242 - RNA, 17 nt, Human
gauugcaugugacucug

SEQ ID NO: 2327243 - RNA, 19 nt, Human
gauugcagguggaacucag

SEQ ID NO: 2327244 - RNA, 23 nt, Human
gauugcaggagucccugccauca

SEQ ID NO: 2327245 - RNA, 14 nt, Human
gauucuccugccuc

SEQ ID NO: 2327246 - RNA, 16 nt, Human
gauucucaugccucag

SEQ ID NO: 2327247 - RNA, 13 nt, Human
gauugagaaggag

SEQ ID NO: 2327248 - RNA, 16 nt, Human
gauugagaaggagaga

SEQ ID NO: 2327249 - RNA, 17 nt, Human
gauugagaaggagagaa

SEQ ID NO: 2327250 - RNA, 18 nt, Human
gauugagaaggagagaaa

SEQ ID NO: 2327251 - RNA, 13 nt, Human
gauugaggccugc

SEQ ID NO: 2327252 - RNA, 16 nt, Human
gauugagucugugcca

SEQ ID NO: 2327253 - RNA, 19 nt, Human
gauugagaaggagagaaag

SEQ ID NO: 2327254 - RNA, 22 nt, Human
gauugaggccugcccucaggga

SEQ ID NO: 2327255 - RNA, 17 nt, Human
gauugauuugaagaaca

SEQ ID NO: 2327256 - RNA, 15 nt, Human
gauugauuugaagaa

SEQ ID NO: 2327257 - RNA, 19 nt, Human
gauugauagaguguuauca

SEQ ID NO: 2327258 - RNA, 22 nt, Human
gauugaucggagccuccucucu

SEQ ID NO: 2327259 - RNA, 15 nt, Human
gauugauaauugcau

SEQ ID NO: 2327260 - RNA, 14 nt, Human
gaauugcagaguac

SEQ ID NO: 2327261 - RNA, 13 nt, Human
gaauugcauugac

SEQ ID NO: 2327262 - RNA, 12 nt, Human
gaauugcauuga

SEQ ID NO: 2327263 - RNA, 18 nt, Human
gaauugauuugcauugaa

SEQ ID NO: 2327264 - RNA, 22 nt, Human
gaauugauuugcauugaacaca

SEQ ID NO: 2327265 - RNA, 16 nt, Human
gaauugccugcagaga

SEQ ID NO: 2327266 - RNA, 20 nt, Human
gaauugccugcagagagaag

SEQ ID NO: 2327267 - RNA, 16 nt, Human
gaauuggagcucgugg

SEQ ID NO: 2327268 - RNA, 22 nt, Human
gaauucuuacauguuuucuuug

SEQ ID NO: 2327269 - RNA, 19 nt, Human
gaauucuuacauguuuucu

SEQ ID NO: 2327270 - RNA, 18 nt, Human
gaauucuugaaggaaaau

SEQ ID NO: 2327271 - RNA, 21 nt, Human
gaauucuuaugcuuauaauau

SEQ ID NO: 2327272 - RNA, 21 nt, Human
gaauugacccacaagaaauga

SEQ ID NO: 2327273 - RNA, 16 nt, Human
gaauugacccacaaga

SEQ ID NO: 2327274 - RNA, 18 nt, Human
gaauucuuacauguuuuc

SEQ ID NO: 2327275 - RNA, 16 nt, Human
gaauguuuauagcaaa

SEQ ID NO: 2327276 - RNA, 20 nt, Human
gaauguuuacacucuuugua

SEQ ID NO: 2327277 - RNA, 14 nt, Human
gaauguugggacug

SEQ ID NO: 2327278 - RNA, 21 nt, Human
gaauguuuacacucuuuguaa

SEQ ID NO: 2327279 - RNA, 14 nt, Human
gaauguuuauuccu

SEQ ID NO: 2327280 - RNA, 20 nt, Human
gaauguuacauuguuugucu

SEQ ID NO: 2327281 - RNA, 17 nt, Human
gaauguuacauuguuug

SEQ ID NO: 2327282 - RNA, 21 nt, Human
gaauguuaaauaaauuguaua

SEQ ID NO: 2327283 - RNA, 16 nt, Human
gaauguuaaauaaauu

SEQ ID NO: 2327284 - RNA, 18 nt, Human
gaauguuaaauaaauugu

SEQ ID NO: 2327285 - RNA, 15 nt, Human
gaauguuaagcagau

SEQ ID NO: 2327286 - RNA, 20 nt, Human
gaauguucugacauuaacag

SEQ ID NO: 2327287 - RNA, 23 nt, Human
gaauguugggacugcuaaauaaa

SEQ ID NO: 2327288 - RNA, 19 nt, Human
gaauguucugacauuaaca

SEQ ID NO: 2327289 - RNA, 17 nt, Human
gaauguucugacauuaa

SEQ ID NO: 2327290 - RNA, 16 nt, Human
gaauguucugacauua

SEQ ID NO: 2327291 - RNA, 15 nt, Human
gaauguucugacauu

SEQ ID NO: 2327292 - RNA, 11 nt, Human
gaauguucuga

SEQ ID NO: 2327293 - RNA, 16 nt, Human
gaauguuaaagucagu

SEQ ID NO: 2327294 - RNA, 13 nt, Human
gaauguuaaauaa

SEQ ID NO: 2327295 - RNA, 14 nt, Human
gaauguuaaauaaa

SEQ ID NO: 2327296 - RNA, 14 nt, Human
gaauguuaagcaga

SEQ ID NO: 2327297 - RNA, 18 nt, Human
gaauguggcuugagaaau

SEQ ID NO: 2327298 - RNA, 22 nt, Human
gaauguggccccugaacaagaa

SEQ ID NO: 2327299 - RNA, 21 nt, Human
gaaugugcagguuuguuacau

SEQ ID NO: 2327300 - RNA, 18 nt, Human
gaauguguacaaagugua

SEQ ID NO: 2327301 - RNA, 22 nt, Human
gaaugucuuuguuggaaaagaa

SEQ ID NO: 2327302 - RNA, 16 nt, Human
gaaugucuuuugaaua

SEQ ID NO: 2327303 - RNA, 14 nt, Human
gaaugugaaagcac

SEQ ID NO: 2327304 - RNA, 17 nt, Human
gaaugugauuuuaaaga

SEQ ID NO: 2327305 - RNA, 19 nt, Human
gaaugugauuuuaaagagu

SEQ ID NO: 2327306 - RNA, 15 nt, Human
gaaugugcagguuug

SEQ ID NO: 2327307 - RNA, 14 nt, Human
gaaugugauuuuaa

SEQ ID NO: 2327308 - RNA, 16 nt, Human
gaauguaucaggaaau

SEQ ID NO: 2327309 - RNA, 19 nt, Human
gaaugucaguauguggaag

SEQ ID NO: 2327310 - RNA, 13 nt, Human
gaaugucagugug

SEQ ID NO: 2327311 - RNA, 17 nt, Human
gaauguaucaggaaaua

SEQ ID NO: 2327312 - RNA, 15 nt, Human
gaauguaucaggaaa

SEQ ID NO: 2327313 - RNA, 21 nt, Human
gaauguauauguuuuguggga

SEQ ID NO: 2327314 - RNA, 13 nt, Human
gaaugucaguaug

SEQ ID NO: 2327315 - RNA, 18 nt, Human
gaaugucaguauguggaa

SEQ ID NO: 2327316 - RNA, 16 nt, Human
gaaugucaguaugugg

SEQ ID NO: 2327317 - RNA, 15 nt, Human
gaauguagcugguuu

SEQ ID NO: 2327318 - RNA, 20 nt, Human
gaauguagcugguuuccuca

SEQ ID NO: 2327319 - RNA, 14 nt, Human
gaauguacucuguu

SEQ ID NO: 2327320 - RNA, 21 nt, Human
gaauggccugccuugaagcca

SEQ ID NO: 2327321 - RNA, 17 nt, Human
gaauggccugccuugaa

SEQ ID NO: 2327322 - RNA, 18 nt, Human
gaauggccuccucccuua

SEQ ID NO: 2327323 - RNA, 11 nt, Human
gaauguaauca

SEQ ID NO: 2327324 - RNA, 13 nt, Human
gaauguaaucaau

SEQ ID NO: 2327325 - RNA, 16 nt, Human
gaauguaaucaauguu

SEQ ID NO: 2327326 - RNA, 18 nt, Human
gaauguaaucaauguuuc

SEQ ID NO: 2327327 - RNA, 19 nt, Human
gaauguaaucaauguuucu

SEQ ID NO: 2327328 - RNA, 13 nt, Human
gaaucuauauuua

SEQ ID NO: 2327329 - RNA, 17 nt, Human
gaaucuacccaaaggau

SEQ ID NO: 2327330 - RNA, 15 nt, Human
gaaucuacuaauucc

SEQ ID NO: 2327331 - RNA, 19 nt, Human
gaaucgaggaaccagagcc

SEQ ID NO: 2327332 - RNA, 18 nt, Human
gaaucgaggaaccagagc

SEQ ID NO: 2327333 - RNA, 16 nt, Human
gaaucgaggaaccaga

SEQ ID NO: 2327334 - RNA, 14 nt, Human
gaaucgaggaacca

SEQ ID NO: 2327335 - RNA, 12 nt, Human
gaaucuaccaac

SEQ ID NO: 2327336 - RNA, 16 nt, Human
gaaucuacccaaagga

SEQ ID NO: 2327337 - RNA, 14 nt, Human
gaaucgcuucucuu

SEQ ID NO: 2327338 - RNA, 22 nt, Human
gaaucuacccccagauccaagc

SEQ ID NO: 2327339 - RNA, 18 nt, Human
gaaucuacccccagaucc

SEQ ID NO: 2327340 - RNA, 15 nt, Human
gaaucccaagaccca

SEQ ID NO: 2327341 - RNA, 18 nt, Human
gaaucccacccacaugug

SEQ ID NO: 2327342 - RNA, 22 nt, Human
gaaucccacccacaugugacac

SEQ ID NO: 2327343 - RNA, 14 nt, Human
gaauccaugcuugg

SEQ ID NO: 2327344 - RNA, 13 nt, Human
gaauccaugcuug

SEQ ID NO: 2327345 - RNA, 16 nt, Human
gaaucccaaauuugau

SEQ ID NO: 2327346 - RNA, 19 nt, Human
gaaucccaaauuugauuga

SEQ ID NO: 2327347 - RNA, 17 nt, Human
gaaucccaaauuugauu

SEQ ID NO: 2327348 - RNA, 18 nt, Human
gaauccagacccggcugc

SEQ ID NO: 2327349 - RNA, 20 nt, Human
gaauccagacccggcugcgu

SEQ ID NO: 2327350 - RNA, 19 nt, Human
gaaucauacuuagcaaagu

SEQ ID NO: 2327351 - RNA, 11 nt, Human
gaaucauguag

SEQ ID NO: 2327352 - RNA, 21 nt, Human
gaaucaguauaaacaaaguua

SEQ ID NO: 2327353 - RNA, 19 nt, Human
gaaucaguauaaacaaagu

SEQ ID NO: 2327354 - RNA, 20 nt, Human
gaaucaguauugggagccgg

SEQ ID NO: 2327355 - RNA, 21 nt, Human
gaaucaggaauauuuuccaaa

SEQ ID NO: 2327356 - RNA, 23 nt, Human
gaaucaggaauauuuuccaaaga

SEQ ID NO: 2327357 - RNA, 15 nt, Human
gaaucagugcaaaga

SEQ ID NO: 2327358 - RNA, 19 nt, Human
gaaucauaugauucugcuu

SEQ ID NO: 2327359 - RNA, 13 nt, Human
gaaucauguagua

SEQ ID NO: 2327360 - RNA, 14 nt, Human
gaaucauguaguau

SEQ ID NO: 2327361 - RNA, 17 nt, Human
gaaucaugucaggccug

SEQ ID NO: 2327362 - RNA, 20 nt, Human
gaaucaugucaggccugugu

SEQ ID NO: 2327363 - RNA, 21 nt, Human
gaaucaugucaggccugugug

SEQ ID NO: 2327364 - RNA, 19 nt, Human
gaaucaugugaacccggga

SEQ ID NO: 2327365 - RNA, 17 nt, Human
gaaucauucucgauuua

SEQ ID NO: 2327366 - RNA, 16 nt, Human
gaaaggccagcuggca

SEQ ID NO: 2327367 - RNA, 14 nt, Human
gaaaggccagcugg

SEQ ID NO: 2327368 - RNA, 12 nt, Human
gaaaggccagcu

SEQ ID NO: 2327369 - RNA, 17 nt, Human
gaaaggcauucucugaa

SEQ ID NO: 2327370 - RNA, 22 nt, Human
gaaaggccagcuggcagcagag

SEQ ID NO: 2327371 - RNA, 21 nt, Human
gaaaggccagcuggcagcaga

SEQ ID NO: 2327372 - RNA, 19 nt, Human
gaaaggccagcuggcagca

SEQ ID NO: 2327373 - RNA, 14 nt, Human
gaaaggccuuuaaa

SEQ ID NO: 2327374 - RNA, 15 nt, Human
gaaaggccuuuaaaa

SEQ ID NO: 2327375 - RNA, 19 nt, Human
gaaaggcucagucucagga

SEQ ID NO: 2327376 - RNA, 18 nt, Human
gaaaggcucagucucagg

SEQ ID NO: 2327377 - RNA, 14 nt, Human
gaaaggcucagucu

SEQ ID NO: 2327378 - RNA, 18 nt, Human
gaaaggccuuuaaaauuu

SEQ ID NO: 2327379 - RNA, 22 nt, Human
gaaaggcucagucucaggagca

SEQ ID NO: 2327380 - RNA, 21 nt, Human
gaaaggcucagucucaggagc

SEQ ID NO: 2327381 - RNA, 12 nt, Human
gaaaggcuccag

SEQ ID NO: 2327382 - RNA, 18 nt, Human
gaaucucugaauuugaga

SEQ ID NO: 2327383 - RNA, 17 nt, Human
gaaucuauauuuaacaa

SEQ ID NO: 2327384 - RNA, 18 nt, Human
gaaucucuuuuugcuuuc

SEQ ID NO: 2327385 - RNA, 15 nt, Human
gaaucucugugccuu

SEQ ID NO: 2327386 - RNA, 13 nt, Human
gaaucucugugcc

SEQ ID NO: 2327387 - RNA, 14 nt, Human
gaaucucugugccu

SEQ ID NO: 2327388 - RNA, 21 nt, Human
gaaugaaagggcccagagagg

SEQ ID NO: 2327389 - RNA, 21 nt, Human
gaaucuggaccccaucuguga

SEQ ID NO: 2327390 - RNA, 13 nt, Human
gaaugaacaaauu

SEQ ID NO: 2327391 - RNA, 20 nt, Human
gaaugaacacucuuuugcuu

SEQ ID NO: 2327392 - RNA, 16 nt, Human
gaaugaaauugcugaa

SEQ ID NO: 2327393 - RNA, 20 nt, Human
gaaugcacaaacagaggccg

SEQ ID NO: 2327394 - RNA, 12 nt, Human
gaaucuggagac

SEQ ID NO: 2327395 - RNA, 23 nt, Human
gaaucuggaccccaucugugaau

SEQ ID NO: 2327396 - RNA, 22 nt, Human
gaaucuggaccccaucugugaa

SEQ ID NO: 2327397 - RNA, 18 nt, Human
gaaugaaauacuguuuga

SEQ ID NO: 2327398 - RNA, 15 nt, Human
gaaugaaauacuguu

SEQ ID NO: 2327399 - RNA, 19 nt, Human
gaaugaaauacuguuugag

SEQ ID NO: 2327400 - RNA, 23 nt, Human
gaaugaaauccugcuucagugua

SEQ ID NO: 2327401 - RNA, 15 nt, Human
gaaugcuguauaugu

SEQ ID NO: 2327402 - RNA, 13 nt, Human
gaaugcuguguua

SEQ ID NO: 2327403 - RNA, 22 nt, Human
gaaugcacacuagccucuccag

SEQ ID NO: 2327404 - RNA, 20 nt, Human
gaaugcacacuagccucucc

SEQ ID NO: 2327405 - RNA, 21 nt, Human
gaaugcacaaacagaggccgc

SEQ ID NO: 2327406 - RNA, 16 nt, Human
gaauggcagcugccac

SEQ ID NO: 2327407 - RNA, 20 nt, Human
gaaugcuugaaaaaugugca

SEQ ID NO: 2327408 - RNA, 13 nt, Human
gaauggcagcugc

SEQ ID NO: 2327409 - RNA, 22 nt, Human
gaauggcacagcccaaagaagg

SEQ ID NO: 2327410 - RNA, 17 nt, Human
gaauggcacagcccaaa

SEQ ID NO: 2327411 - RNA, 15 nt, Human
gaaugcuucuucuca

SEQ ID NO: 2327412 - RNA, 13 nt, Human
gaaugcuugaaaa

SEQ ID NO: 2327413 - RNA, 16 nt, Human
gaaugcuugaaaaaug

SEQ ID NO: 2327414 - RNA, 17 nt, Human
gaaugcuugaaaaaugu

SEQ ID NO: 2327415 - RNA, 21 nt, Human
gaaugcuucugacuucauaga

SEQ ID NO: 2327416 - RNA, 18 nt, Human
gaaugcuucugacuucau

SEQ ID NO: 2327417 - RNA, 22 nt, Human
gaaugcuuauagguggccucuc

SEQ ID NO: 2327418 - RNA, 16 nt, Human
gaaugcuuccuagaag

SEQ ID NO: 2327419 - RNA, 18 nt, Human
gaaugcuuauagguggcc

SEQ ID NO: 2327420 - RNA, 14 nt, Human
gaaugcuguguuaa

SEQ ID NO: 2327421 - RNA, 19 nt, Human
gacaaggagaagagcaagg

SEQ ID NO: 2327422 - RNA, 17 nt, Human
gacaaggaaaggcaaau

SEQ ID NO: 2327423 - RNA, 19 nt, Human
gacaaggaaaggcaaaugc

SEQ ID NO: 2327424 - RNA, 16 nt, Human
gacaagaaaucccugu

SEQ ID NO: 2327425 - RNA, 15 nt, Human
gacaagaaaucccug

SEQ ID NO: 2327426 - RNA, 16 nt, Human
gacaaggaaaaaauaa

SEQ ID NO: 2327427 - RNA, 18 nt, Human
gacaaggauugcuacugu

SEQ ID NO: 2327428 - RNA, 21 nt, Human
gacaaggaugaucuaggaaga

SEQ ID NO: 2327429 - RNA, 19 nt, Human
gacaaggauugcuacuguc

SEQ ID NO: 2327430 - RNA, 21 nt, Human
gacaaggauugcuacuguccu

SEQ ID NO: 2327431 - RNA, 14 nt, Human
gacaaugucugaac

SEQ ID NO: 2327432 - RNA, 22 nt, Human
gacaaugcaaaccaucauugaa

SEQ ID NO: 2327433 - RNA, 18 nt, Human
gacaaugugaaaagaaaa

SEQ ID NO: 2327434 - RNA, 12 nt, Human
gacaaugugaaa

SEQ ID NO: 2327435 - RNA, 20 nt, Human
gacaaugugaaaagaaaaau

SEQ ID NO: 2327436 - RNA, 19 nt, Human
gacaaugugaaaagaaaaa

SEQ ID NO: 2327437 - RNA, 13 nt, Human
gacaauucuuuau

SEQ ID NO: 2327438 - RNA, 15 nt, Human
gacaauucuuuauac

SEQ ID NO: 2327439 - RNA, 22 nt, Human
gacaauucuuuauacaacagug

SEQ ID NO: 2327440 - RNA, 16 nt, Human
gacacaaaaaguagau

SEQ ID NO: 2327441 - RNA, 16 nt, Human
gacaauucaugaacuu

SEQ ID NO: 2327442 - RNA, 13 nt, Human
gacaauucaugaa

SEQ ID NO: 2327443 - RNA, 20 nt, Human
gacaccagccuuucucccag

SEQ ID NO: 2327444 - RNA, 23 nt, Human
gacaccagccaggcucugugcug

SEQ ID NO: 2327445 - RNA, 17 nt, Human
gacaccagccaggcucu

SEQ ID NO: 2327446 - RNA, 19 nt, Human
gacaccagccaggcucugu

SEQ ID NO: 2327447 - RNA, 19 nt, Human
gacaccagagcagaugcag

SEQ ID NO: 2327448 - RNA, 22 nt, Human
gacaccagagcagaugcagaga

SEQ ID NO: 2327449 - RNA, 14 nt, Human
gacaccagccaggc

SEQ ID NO: 2327450 - RNA, 15 nt, Human
gacaccagccaggcu

SEQ ID NO: 2327451 - RNA, 19 nt, Human
gacaccacacccagccuca

SEQ ID NO: 2327452 - RNA, 20 nt, Human
gacaccacacccagccucag

SEQ ID NO: 2327453 - RNA, 21 nt, Human
gacaccacacccagccucagu

SEQ ID NO: 2327454 - RNA, 12 nt, Human
gacaccagagca

SEQ ID NO: 2327455 - RNA, 13 nt, Human
gacaccagagcag

SEQ ID NO: 2327456 - RNA, 14 nt, Human
gacaccagagcaga

SEQ ID NO: 2327457 - RNA, 15 nt, Human
gacaccagagcagau

SEQ ID NO: 2327458 - RNA, 18 nt, Human
gacaccagagcagaugca

SEQ ID NO: 2327459 - RNA, 20 nt, Human
gacacauucaacccuggaga

SEQ ID NO: 2327460 - RNA, 21 nt, Human
gacacauucaacccuggagag

SEQ ID NO: 2327461 - RNA, 14 nt, Human
gacaccacacccag

SEQ ID NO: 2327462 - RNA, 15 nt, Human
gacaccacacccagc

SEQ ID NO: 2327463 - RNA, 16 nt, Human
gacaccacacccagcc

SEQ ID NO: 2327464 - RNA, 17 nt, Human
gacaccacacccagccu

SEQ ID NO: 2327465 - RNA, 18 nt, Human
gacaccacacccagccuc

SEQ ID NO: 2327466 - RNA, 19 nt, Human
gacacaugcaaggucauuu

SEQ ID NO: 2327467 - RNA, 15 nt, Human
gacacauguccaaga

SEQ ID NO: 2327468 - RNA, 20 nt, Human
gacacauguccaagaagccc

SEQ ID NO: 2327469 - RNA, 23 nt, Human
gacacauguccaagaagcccagg

SEQ ID NO: 2327470 - RNA, 14 nt, Human
gacacaacaacucc

SEQ ID NO: 2327471 - RNA, 13 nt, Human
gacacaggcccuc

SEQ ID NO: 2327472 - RNA, 14 nt, Human
gacacaugcaaggu

SEQ ID NO: 2327473 - RNA, 20 nt, Human
gacacaggcccggcuccagg

SEQ ID NO: 2327474 - RNA, 21 nt, Human
gacacaggcccggcuccaggc

SEQ ID NO: 2327475 - RNA, 19 nt, Human
gacacaggcccggcuccag

SEQ ID NO: 2327476 - RNA, 13 nt, Human
gacacaacuauuu

SEQ ID NO: 2327477 - RNA, 18 nt, Human
gacacaaaccugccuggg

SEQ ID NO: 2327478 - RNA, 20 nt, Human
gacacaaaccugccuggguu

SEQ ID NO: 2327479 - RNA, 17 nt, Human
gacacaaaccugccugg

SEQ ID NO: 2327480 - RNA, 14 nt, Human
gacacaaaccugcc

SEQ ID NO: 2327481 - RNA, 16 nt, Human
gacacaagccuucggc

SEQ ID NO: 2327482 - RNA, 16 nt, Human
gacaacgaggaagccc

SEQ ID NO: 2327483 - RNA, 15 nt, Human
gacaacgaggaagcc

SEQ ID NO: 2327484 - RNA, 17 nt, Human
gacaacguuucagcgac

SEQ ID NO: 2327485 - RNA, 21 nt, Human
gacaaccgaugcuccagccaa

SEQ ID NO: 2327486 - RNA, 14 nt, Human
gacaacgaggaagc

SEQ ID NO: 2327487 - RNA, 18 nt, Human
gacaacuuugccagcuuu

SEQ ID NO: 2327488 - RNA, 15 nt, Human
gacaagacuucagua

SEQ ID NO: 2327489 - RNA, 20 nt, Human
gacaaccgaugcuccagcca

SEQ ID NO: 2327490 - RNA, 19 nt, Human
gacaaccgaugcuccagcc

SEQ ID NO: 2327491 - RNA, 18 nt, Human
gacaaccgaugcuccagc

SEQ ID NO: 2327492 - RNA, 20 nt, Human
gacaacccugcaaaggacug

SEQ ID NO: 2327493 - RNA, 13 nt, Human
gacaacccugcaa

SEQ ID NO: 2327494 - RNA, 23 nt, Human
gacaaccaccgcuccccagccca

SEQ ID NO: 2327495 - RNA, 19 nt, Human
gacaaccacuggucuguag

SEQ ID NO: 2327496 - RNA, 12 nt, Human
gacaaccaugac

SEQ ID NO: 2327497 - RNA, 15 nt, Human
gacaaccacuggucu

SEQ ID NO: 2327498 - RNA, 17 nt, Human
gacaaccacuggucugu

SEQ ID NO: 2327499 - RNA, 12 nt, Human
gacaacauuaaa

SEQ ID NO: 2327500 - RNA, 17 nt, Human
gacaaccaccgcucccc

SEQ ID NO: 2327501 - RNA, 22 nt, Human
gacaaccaccgcuccccagccc

SEQ ID NO: 2327502 - RNA, 19 nt, Human
gacaaccaccgcuccccag

SEQ ID NO: 2327503 - RNA, 18 nt, Human
gacaaccaccgcucccca

SEQ ID NO: 2327504 - RNA, 16 nt, Human
gacaacagacuucuga

SEQ ID NO: 2327505 - RNA, 12 nt, Human
gacaacagaagc

SEQ ID NO: 2327506 - RNA, 11 nt, Human
gacaacaucug

SEQ ID NO: 2327507 - RNA, 19 nt, Human
gacaacacugggaaacaga

SEQ ID NO: 2327508 - RNA, 21 nt, Human
gacaacaaauuagguuuugua

SEQ ID NO: 2327509 - RNA, 23 nt, Human
gacaacaaauuagguuuuguaca

SEQ ID NO: 2327510 - RNA, 22 nt, Human
gacaacagaagucaugaagccc

SEQ ID NO: 2327511 - RNA, 17 nt, Human
gacaacagaagucauga

SEQ ID NO: 2327512 - RNA, 14 nt, Human
gacaacagaaguca

SEQ ID NO: 2327513 - RNA, 12 nt, Human
gacaacagaagu

SEQ ID NO: 2327514 - RNA, 22 nt, Human
gacaacacucauugaccugagg

SEQ ID NO: 2327515 - RNA, 23 nt, Human
gacaacacucauugaccugaggc

SEQ ID NO: 2327516 - RNA, 17 nt, Human
gacaaaucaagcuucag

SEQ ID NO: 2327517 - RNA, 22 nt, Human
gacaaaugcugcgcccuucccc

SEQ ID NO: 2327518 - RNA, 21 nt, Human
gacaaaugcugcgcccuuccc

SEQ ID NO: 2327519 - RNA, 15 nt, Human
gacaaauucuguuuc

SEQ ID NO: 2327520 - RNA, 14 nt, Human
gacaaauucuguuu

SEQ ID NO: 2327521 - RNA, 12 nt, Human
gacaaauucugu

SEQ ID NO: 2327522 - RNA, 22 nt, Human
gacaaauguguaucggaugcuu

SEQ ID NO: 2327523 - RNA, 17 nt, Human
gacaaauucuguuucuu

SEQ ID NO: 2327524 - RNA, 16 nt, Human
gacaaauucuguuucu

SEQ ID NO: 2327525 - RNA, 20 nt, Human
gacaaauucuguuucuugag

SEQ ID NO: 2327526 - RNA, 21 nt, Human
gaauuucuugguaagaagccg

SEQ ID NO: 2327527 - RNA, 20 nt, Human
gaauuucuucacuguugaaa

SEQ ID NO: 2327528 - RNA, 12 nt, Human
gaauuucuuggu

SEQ ID NO: 2327529 - RNA, 19 nt, Human
gaauuucuucacuguugaa

SEQ ID NO: 2327530 - RNA, 17 nt, Human
gaauuugaaugaaaaau

SEQ ID NO: 2327531 - RNA, 16 nt, Human
gaauuugaaugaaaaa

SEQ ID NO: 2327532 - RNA, 14 nt, Human
gaauuugaaugaaa

SEQ ID NO: 2327533 - RNA, 21 nt, Human
gaauuucuucaacucccugcc

SEQ ID NO: 2327534 - RNA, 22 nt, Human
gaauuucuuuugccguuauuaa

SEQ ID NO: 2327535 - RNA, 19 nt, Human
gaauuuggccugcacuaau

SEQ ID NO: 2327536 - RNA, 19 nt, Human
gaauuuggagacucugugg

SEQ ID NO: 2327537 - RNA, 13 nt, Human
gaauuugcugggg

SEQ ID NO: 2327538 - RNA, 23 nt, Human
gaauuugaucguuccaguuccca

SEQ ID NO: 2327539 - RNA, 19 nt, Human
gaauuugaaugaaaaauuu

SEQ ID NO: 2327540 - RNA, 17 nt, Human
gaauuugagugcucuga

SEQ ID NO: 2327541 - RNA, 19 nt, Human
gaauuugcaagucauggcu

SEQ ID NO: 2327542 - RNA, 14 nt, Human
gaauuuguaaguuu

SEQ ID NO: 2327543 - RNA, 22 nt, Human
gaauuuguaaguuuaugucuaa

SEQ ID NO: 2327544 - RNA, 16 nt, Human
gaauuuguaaccucag

SEQ ID NO: 2327545 - RNA, 17 nt, Human
gaauuuguaaccucagc

SEQ ID NO: 2327546 - RNA, 18 nt, Human
gaauuuguaaccucagcu

SEQ ID NO: 2327547 - RNA, 19 nt, Human
gaauuuguaaccucagcuc

SEQ ID NO: 2327548 - RNA, 21 nt, Human
gaauuuguaaccucagcucug

SEQ ID NO: 2327549 - RNA, 21 nt, Human
gaauuuccucuauugauguac

SEQ ID NO: 2327550 - RNA, 17 nt, Human
gaauuucuaaaaaacag

SEQ ID NO: 2327551 - RNA, 16 nt, Human
gaauuguaacuguucu

SEQ ID NO: 2327552 - RNA, 12 nt, Human
gaauuucuaaaa

SEQ ID NO: 2327553 - RNA, 13 nt, Human
gaauuuccucuau

SEQ ID NO: 2327554 - RNA, 17 nt, Human
gaauugcuugaaccugg

SEQ ID NO: 2327555 - RNA, 21 nt, Human
gaauugccugcagagagaagc

SEQ ID NO: 2327556 - RNA, 22 nt, Human
gaauugccugcagagagaagcc

SEQ ID NO: 2327557 - RNA, 22 nt, Human
gaauuggaccauccuauuuaac

SEQ ID NO: 2327558 - RNA, 16 nt, Human
gaauugggagcuuggg

SEQ ID NO: 2327559 - RNA, 20 nt, Human
gaauuggguggggggcuuca

SEQ ID NO: 2327560 - RNA, 17 nt, Human
gaauugggagcuuggga

SEQ ID NO: 2327561 - RNA, 15 nt, Human
gaauuguaaggaaug

SEQ ID NO: 2327562 - RNA, 23 nt, Human
gaauuggguggggggcuucauac

SEQ ID NO: 2327563 - RNA, 22 nt, Human
gaauuggguggggggcuucaua

SEQ ID NO: 2327564 - RNA, 15 nt, Human
gacagugggaaauau

SEQ ID NO: 2327565 - RNA, 13 nt, Human
gacagugggaaau

SEQ ID NO: 2327566 - RNA, 14 nt, Human
gacaguuaagagaa

SEQ ID NO: 2327567 - RNA, 19 nt, Human
gacagugcuucagccugag

SEQ ID NO: 2327568 - RNA, 18 nt, Human
gacagugcuucagccuga

SEQ ID NO: 2327569 - RNA, 20 nt, Human
gacagugcuucagccugagg

SEQ ID NO: 2327570 - RNA, 20 nt, Human
gacaguggauugcauuucuu

SEQ ID NO: 2327571 - RNA, 24 nt, Human
gacagggcacaccgggcacucaga

SEQ ID NO: 2327572 - RNA, 19 nt, Human
gacagggacccacuucaca

SEQ ID NO: 2327573 - RNA, 13 nt, Human
gacagggacccac

SEQ ID NO: 2327574 - RNA, 17 nt, Human
gacagggaagcuacagg

SEQ ID NO: 2327575 - RNA, 14 nt, Human
gacagggaugagca

SEQ ID NO: 2327576 - RNA, 21 nt, Human
gacagggaugagcauggagcu

SEQ ID NO: 2327577 - RNA, 23 nt, Human
gacagggaugagcauggagcugg

SEQ ID NO: 2327578 - RNA, 23 nt, Human
gacagggcacaccgggcacucag

SEQ ID NO: 2327579 - RNA, 16 nt, Human
gacagggaggugaccc

SEQ ID NO: 2327580 - RNA, 18 nt, Human
gacagggaggacgcucuc

SEQ ID NO: 2327581 - RNA, 13 nt, Human
gacaggaccugac

SEQ ID NO: 2327582 - RNA, 14 nt, Human
gacaggaccuagga

SEQ ID NO: 2327583 - RNA, 14 nt, Human
gacagggaagcuac

SEQ ID NO: 2327584 - RNA, 17 nt, Human
gacagggaggacgcucu

SEQ ID NO: 2327585 - RNA, 23 nt, Human
gacaggacagugcuucagccuga

SEQ ID NO: 2327586 - RNA, 22 nt, Human
gacaggacagugcuucagccug

SEQ ID NO: 2327587 - RNA, 14 nt, Human
gacaggacagugcu

SEQ ID NO: 2327588 - RNA, 17 nt, Human
gacaggaaagggaaggc

SEQ ID NO: 2327589 - RNA, 12 nt, Human
gacaggaaaggg

SEQ ID NO: 2327590 - RNA, 19 nt, Human
gacaggaaaauccucuggc

SEQ ID NO: 2327591 - RNA, 14 nt, Human
gacaggaccaggga

SEQ ID NO: 2327592 - RNA, 15 nt, Human
gacaggaccagggau

SEQ ID NO: 2327593 - RNA, 23 nt, Human
gacaggaccagggauuuccauga

SEQ ID NO: 2327594 - RNA, 23 nt, Human
gacauccccccgccaaaagcugc

SEQ ID NO: 2327595 - RNA, 16 nt, Human
gacauccguugugcuu

SEQ ID NO: 2327596 - RNA, 15 nt, Human
gacauccuccuccca

SEQ ID NO: 2327597 - RNA, 22 nt, Human
gacauccauguuuguaaaacua

SEQ ID NO: 2327598 - RNA, 20 nt, Human
gacauagagagggagaagaa

SEQ ID NO: 2327599 - RNA, 23 nt, Human
gacauccauguuuguaaaacuac

SEQ ID NO: 2327600 - RNA, 23 nt, Human
gacauacuugaagggccagagcc

SEQ ID NO: 2327601 - RNA, 22 nt, Human
gacauacuugaagggccagagc

SEQ ID NO: 2327602 - RNA, 13 nt, Human
gacaucucagggg

SEQ ID NO: 2327603 - RNA, 15 nt, Human
gacaucucaggggcc

SEQ ID NO: 2327604 - RNA, 16 nt, Human
gacaucucaggggcca

SEQ ID NO: 2327605 - RNA, 17 nt, Human
gacaucucaggggccag

SEQ ID NO: 2327606 - RNA, 18 nt, Human
gacaucucaggggccaga

SEQ ID NO: 2327607 - RNA, 23 nt, Human
gacauccucuucugcuuaggaga

SEQ ID NO: 2327608 - RNA, 18 nt, Human
gacauccuccucccaccc

SEQ ID NO: 2327609 - RNA, 13 nt, Human
gacauccucuucu

SEQ ID NO: 2327610 - RNA, 16 nt, Human
gacauccucuucugcu

SEQ ID NO: 2327611 - RNA, 22 nt, Human
gacauacuccuuccaucaaaua

SEQ ID NO: 2327612 - RNA, 23 nt, Human
gacaguguugaaaauguucagaa

SEQ ID NO: 2327613 - RNA, 15 nt, Human
gacauacuugaaggg

SEQ ID NO: 2327614 - RNA, 14 nt, Human
gacauacuugaagg

SEQ ID NO: 2327615 - RNA, 22 nt, Human
gacaguuaagagaaaugagcuu

SEQ ID NO: 2327616 - RNA, 20 nt, Human
gacauagaauuaacacauga

SEQ ID NO: 2327617 - RNA, 20 nt, Human
gacauacuugaagggccaga

SEQ ID NO: 2327618 - RNA, 19 nt, Human
gacauacuugaagggccag

SEQ ID NO: 2327619 - RNA, 18 nt, Human
gacauacuugaagggcca

SEQ ID NO: 2327620 - RNA, 17 nt, Human
gacauacuugaagggcc

SEQ ID NO: 2327621 - RNA, 14 nt, Human
gacaugcacucagc

SEQ ID NO: 2327622 - RNA, 24 nt, Human
gacaugauuuccuugaauguggcu

SEQ ID NO: 2327623 - RNA, 22 nt, Human
gacaugauuuccuugaaugugg

SEQ ID NO: 2327624 - RNA, 14 nt, Human
gacaugcgggcugg

SEQ ID NO: 2327625 - RNA, 15 nt, Human
gacaugcgggcuggg

SEQ ID NO: 2327626 - RNA, 22 nt, Human
gacaugauuccuuccuguucug

SEQ ID NO: 2327627 - RNA, 18 nt, Human
gacaugcgggcugggcag

SEQ ID NO: 2327628 - RNA, 20 nt, Human
gacaugcgggcugggcagcu

SEQ ID NO: 2327629 - RNA, 21 nt, Human
gacaugcgggcugggcagcug

SEQ ID NO: 2327630 - RNA, 22 nt, Human
gacaugcgggcugggcagcugu

SEQ ID NO: 2327631 - RNA, 14 nt, Human
gacaugggaaaggg

SEQ ID NO: 2327632 - RNA, 21 nt, Human
gacaugauggagcgcaccugc

SEQ ID NO: 2327633 - RNA, 16 nt, Human
gacaugauuccuuccu

SEQ ID NO: 2327634 - RNA, 14 nt, Human
gacaugauuccuuc

SEQ ID NO: 2327635 - RNA, 14 nt, Human
gacaugauuuccuu

SEQ ID NO: 2327636 - RNA, 20 nt, Human
gacaugauuuccuugaaugu

SEQ ID NO: 2327637 - RNA, 19 nt, Human
gacaugauuuccuugaaug

SEQ ID NO: 2327638 - RNA, 17 nt, Human
gacaugauuuccuugaa

SEQ ID NO: 2327639 - RNA, 16 nt, Human
gacaugauuuccuuga

SEQ ID NO: 2327640 - RNA, 14 nt, Human
gacaugaucuucuu

SEQ ID NO: 2327641 - RNA, 15 nt, Human
gacaucucugcaccc

SEQ ID NO: 2327642 - RNA, 16 nt, Human
gacaugaaugcacacu

SEQ ID NO: 2327643 - RNA, 19 nt, Human
gacaugagugcgugcucag

SEQ ID NO: 2327644 - RNA, 22 nt, Human
gacaucucaggggccagaggaa

SEQ ID NO: 2327645 - RNA, 20 nt, Human
gacaucucaggggccagagg

SEQ ID NO: 2327646 - RNA, 13 nt, Human
gacaucucugcac

SEQ ID NO: 2327647 - RNA, 18 nt, Human
gacagagaggacgugggc

SEQ ID NO: 2327648 - RNA, 19 nt, Human
gacagagaggacgugggcg

SEQ ID NO: 2327649 - RNA, 15 nt, Human
gacagagaggacugu

SEQ ID NO: 2327650 - RNA, 16 nt, Human
gacagagaggacugua

SEQ ID NO: 2327651 - RNA, 21 nt, Human
gacagagcaagugagacccug

SEQ ID NO: 2327652 - RNA, 20 nt, Human
gacaccaggagucccuggua

SEQ ID NO: 2327653 - RNA, 19 nt, Human
gacaccaggagucccuggu

SEQ ID NO: 2327654 - RNA, 22 nt, Human
gacaccagccuuucucccaggc

SEQ ID NO: 2327655 - RNA, 22 nt, Human
gacaccaucuuuugugagaugu

SEQ ID NO: 2327656 - RNA, 14 nt, Human
gacacccaaagggu

SEQ ID NO: 2327657 - RNA, 19 nt, Human
gacacccauguuucucugg

SEQ ID NO: 2327658 - RNA, 15 nt, Human
gacacccauuuucac

SEQ ID NO: 2327659 - RNA, 14 nt, Human
gacacccaggacuu

SEQ ID NO: 2327660 - RNA, 13 nt, Human
gacacccaggacu

SEQ ID NO: 2327661 - RNA, 14 nt, Human
gacagaggcagccc

SEQ ID NO: 2327662 - RNA, 16 nt, Human
gacagaggcagcccca

SEQ ID NO: 2327663 - RNA, 19 nt, Human
gacagagaggacuguaggg

SEQ ID NO: 2327664 - RNA, 13 nt, Human
gacagagccaugc

SEQ ID NO: 2327665 - RNA, 19 nt, Human
gacagagccaugcugggaa

SEQ ID NO: 2327666 - RNA, 17 nt, Human
gacagaggcagccccau

SEQ ID NO: 2327667 - RNA, 15 nt, Human
gacagaggggguggc

SEQ ID NO: 2327668 - RNA, 18 nt, Human
gacagaggggguggccuc

SEQ ID NO: 2327669 - RNA, 19 nt, Human
gacagaggggguggccucc

SEQ ID NO: 2327670 - RNA, 14 nt, Human
gacagagucucacu

SEQ ID NO: 2327671 - RNA, 23 nt, Human
gacagaggggguggccucccaac

SEQ ID NO: 2327672 - RNA, 21 nt, Human
gacagaggggguggccuccca

SEQ ID NO: 2327673 - RNA, 22 nt, Human
gacagaggggguggccucccaa

SEQ ID NO: 2327674 - RNA, 18 nt, Human
gacaggaaaauccucugg

SEQ ID NO: 2327675 - RNA, 15 nt, Human
gacagcuuugcugcu

SEQ ID NO: 2327676 - RNA, 16 nt, Human
gacagcuuugcugcug

SEQ ID NO: 2327677 - RNA, 12 nt, Human
gacagcuuugcu

SEQ ID NO: 2327678 - RNA, 19 nt, Human
gacagaucaagcugugaga

SEQ ID NO: 2327679 - RNA, 16 nt, Human
gacagaucaagcugug

SEQ ID NO: 2327680 - RNA, 17 nt, Human
gacagaucaagcuguga

SEQ ID NO: 2327681 - RNA, 18 nt, Human
gacagcugccugggaucc

SEQ ID NO: 2327682 - RNA, 21 nt, Human
gacagcugccugggaucccuc

SEQ ID NO: 2327683 - RNA, 20 nt, Human
gacagccacggccaggccag

SEQ ID NO: 2327684 - RNA, 21 nt, Human
gacagccacggccaggccaga

SEQ ID NO: 2327685 - RNA, 16 nt, Human
gacagcugccugggau

SEQ ID NO: 2327686 - RNA, 17 nt, Human
gacagcugccugggauc

SEQ ID NO: 2327687 - RNA, 21 nt, Human
gacagaguucacuauaaaugg

SEQ ID NO: 2327688 - RNA, 14 nt, Human
gacagaucaagcug

SEQ ID NO: 2327689 - RNA, 16 nt, Human
gacagaguaugaacac

SEQ ID NO: 2327690 - RNA, 20 nt, Human
gacagaucaagcugugagac

SEQ ID NO: 2327691 - RNA, 13 nt, Human
gacagauaacucu

SEQ ID NO: 2327692 - RNA, 13 nt, Human
gacagagggggug

SEQ ID NO: 2327693 - RNA, 20 nt, Human
gacagagugagacucugucu

SEQ ID NO: 2327694 - RNA, 22 nt, Human
gacagagugagacucugucuca

SEQ ID NO: 2327695 - RNA, 14 nt, Human
gacagccacggcca

SEQ ID NO: 2327696 - RNA, 17 nt, Human
gacagccacggccaggc

SEQ ID NO: 2327697 - RNA, 18 nt, Human
gacagccacggccaggcc

SEQ ID NO: 2327698 - RNA, 19 nt, Human
gacagccacggccaggcca

SEQ ID NO: 2327699 - RNA, 22 nt, Human
gaccagccucccugucggccug

SEQ ID NO: 2327700 - RNA, 13 nt, Human
gaccagccuggcc

SEQ ID NO: 2327701 - RNA, 12 nt, Human
gaccagccuggc

SEQ ID NO: 2327702 - RNA, 11 nt, Human
gaccagccugg

SEQ ID NO: 2327703 - RNA, 14 nt, Human
gaccagccucccug

SEQ ID NO: 2327704 - RNA, 19 nt, Human
gaccauucuccaccugcca

SEQ ID NO: 2327705 - RNA, 20 nt, Human
gaccauucuccaccugccag

SEQ ID NO: 2327706 - RNA, 15 nt, Human
gaccauuucaggggu

SEQ ID NO: 2327707 - RNA, 17 nt, Human
gaccauucuccaccugc

SEQ ID NO: 2327708 - RNA, 21 nt, Human
gaccauucuccaccugccagg

SEQ ID NO: 2327709 - RNA, 22 nt, Human
gaccauucuccaccugccaggg

SEQ ID NO: 2327710 - RNA, 21 nt, Human
gaccagccuccaugcugccuc

SEQ ID NO: 2327711 - RNA, 22 nt, Human
gaccagccuccaugcugccucc

SEQ ID NO: 2327712 - RNA, 20 nt, Human
gaccagccuccaugcugccu

SEQ ID NO: 2327713 - RNA, 21 nt, Human
gaccagagccccacacggagg

SEQ ID NO: 2327714 - RNA, 11 nt, Human
gaccagacuaa

SEQ ID NO: 2327715 - RNA, 18 nt, Human
gaccagagcugccaccug

SEQ ID NO: 2327716 - RNA, 19 nt, Human
gaccagagcugccaccugc

SEQ ID NO: 2327717 - RNA, 13 nt, Human
gaccagagcugcc

SEQ ID NO: 2327718 - RNA, 14 nt, Human
gaccagagcugcca

SEQ ID NO: 2327719 - RNA, 15 nt, Human
gaccagagcugccac

SEQ ID NO: 2327720 - RNA, 17 nt, Human
gaccagagcugccaccu

SEQ ID NO: 2327721 - RNA, 13 nt, Human
gaccaccugccca

SEQ ID NO: 2327722 - RNA, 14 nt, Human
gaccaccugcccaa

SEQ ID NO: 2327723 - RNA, 17 nt, Human
gaccacgcccguccugc

SEQ ID NO: 2327724 - RNA, 19 nt, Human
gaccacgcccguccugccu

SEQ ID NO: 2327725 - RNA, 21 nt, Human
gaccacgcccguccugccugu

SEQ ID NO: 2327726 - RNA, 22 nt, Human
gaccaccccugccuccacccuc

SEQ ID NO: 2327727 - RNA, 14 nt, Human
gaccacccuccccu

SEQ ID NO: 2327728 - RNA, 14 nt, Human
gaccaccccugccu

SEQ ID NO: 2327729 - RNA, 17 nt, Human
gaccaccccugccucca

SEQ ID NO: 2327730 - RNA, 19 nt, Human
gaccaccccugccuccacc

SEQ ID NO: 2327731 - RNA, 20 nt, Human
gaccaccccugccuccaccc

SEQ ID NO: 2327732 - RNA, 19 nt, Human
gaccacccuccccucucuu

SEQ ID NO: 2327733 - RNA, 15 nt, Human
gaccacccuccccuc

SEQ ID NO: 2327734 - RNA, 16 nt, Human
gaccacccuccccucu

SEQ ID NO: 2327735 - RNA, 17 nt, Human
gaccacccuccccucuc

SEQ ID NO: 2327736 - RNA, 18 nt, Human
gaccacccuccccucucu

SEQ ID NO: 2327737 - RNA, 18 nt, Human
gacaugggaaaggggaag

SEQ ID NO: 2327738 - RNA, 16 nt, Human
gacaugggacauuugc

SEQ ID NO: 2327739 - RNA, 17 nt, Human
gacaugcgguagccagc

SEQ ID NO: 2327740 - RNA, 16 nt, Human
gacaugcgguagccag

SEQ ID NO: 2327741 - RNA, 18 nt, Human
gaccaccccgccugcccu

SEQ ID NO: 2327742 - RNA, 21 nt, Human
gacauggcuugccacagcucu

SEQ ID NO: 2327743 - RNA, 19 nt, Human
gaccaccccgccugcccuc

SEQ ID NO: 2327744 - RNA, 20 nt, Human
gaccaccccgccugcccuca

SEQ ID NO: 2327745 - RNA, 14 nt, Human
gaccacgcuuucua

SEQ ID NO: 2327746 - RNA, 22 nt, Human
gaccacgcccguccugccugug

SEQ ID NO: 2327747 - RNA, 21 nt, Human
gaccacgcuuucuagcuguug

SEQ ID NO: 2327748 - RNA, 20 nt, Human
gaccacggacguuuccauca

SEQ ID NO: 2327749 - RNA, 14 nt, Human
gaccacguuucuaa

SEQ ID NO: 2327750 - RNA, 21 nt, Human
gaccacugcagaagacaguau

SEQ ID NO: 2327751 - RNA, 13 nt, Human
gaccacggcucga

SEQ ID NO: 2327752 - RNA, 21 nt, Human
gaccacggacguuuccaucag

SEQ ID NO: 2327753 - RNA, 22 nt, Human
gaccacggacguuuccaucagg

SEQ ID NO: 2327754 - RNA, 16 nt, Human
gaccagaagccaaaga

SEQ ID NO: 2327755 - RNA, 21 nt, Human
gaccacugcaugagcuuuuau

SEQ ID NO: 2327756 - RNA, 17 nt, Human
gaccacgggaagcaucu

SEQ ID NO: 2327757 - RNA, 17 nt, Human
gaccacgugcuaccccc

SEQ ID NO: 2327758 - RNA, 12 nt, Human
gaccacugcaug

SEQ ID NO: 2327759 - RNA, 14 nt, Human
gaccacuguuauca

SEQ ID NO: 2327760 - RNA, 11 nt, Human
gaccagagcug

SEQ ID NO: 2327761 - RNA, 17 nt, Human
gacccuguauauagccc

SEQ ID NO: 2327762 - RNA, 19 nt, Human
gacccuguauauagcccag

SEQ ID NO: 2327763 - RNA, 11 nt, Human
gacccuguaua

SEQ ID NO: 2327764 - RNA, 21 nt, Human
gacccugggugggcucugugc

SEQ ID NO: 2327765 - RNA, 12 nt, Human
gacccugucuca

SEQ ID NO: 2327766 - RNA, 22 nt, Human
gacccugcgaaggggcccuggu

SEQ ID NO: 2327767 - RNA, 17 nt, Human
gacccugggcagggacu

SEQ ID NO: 2327768 - RNA, 17 nt, Human
gacccugggugggcucu

SEQ ID NO: 2327769 - RNA, 18 nt, Human
gacccugggugggcucug

SEQ ID NO: 2327770 - RNA, 19 nt, Human
gacccugggugggcucugu

SEQ ID NO: 2327771 - RNA, 22 nt, Human
gacccugggugggcucugugca

SEQ ID NO: 2327772 - RNA, 21 nt, Human
gacccuuuccuuccuucccug

SEQ ID NO: 2327773 - RNA, 20 nt, Human
gacccuuuccuuccuucccu

SEQ ID NO: 2327774 - RNA, 14 nt, Human
gacccuuuccuucc

SEQ ID NO: 2327775 - RNA, 23 nt, Human
gacccuuuagccaaacccuuguc

SEQ ID NO: 2327776 - RNA, 21 nt, Human
gacccuuguggucccacccca

SEQ ID NO: 2327777 - RNA, 19 nt, Human
gacccuuguggucccaccc

SEQ ID NO: 2327778 - RNA, 20 nt, Human
gacccuuguggucccacccc

SEQ ID NO: 2327779 - RNA, 19 nt, Human
gaccuaccucagguugcug

SEQ ID NO: 2327780 - RNA, 19 nt, Human
gaccgugaggccagagaca

SEQ ID NO: 2327781 - RNA, 16 nt, Human
gaccuaccucagguug

SEQ ID NO: 2327782 - RNA, 18 nt, Human
gaccgugaggccagagac

SEQ ID NO: 2327783 - RNA, 16 nt, Human
gaccgugaggccagag

SEQ ID NO: 2327784 - RNA, 17 nt, Human
gaccgugaggccagaga

SEQ ID NO: 2327785 - RNA, 16 nt, Human
gaccgccagauggggc

SEQ ID NO: 2327786 - RNA, 20 nt, Human
gaccgccagauggggccucu

SEQ ID NO: 2327787 - RNA, 22 nt, Human
gaccgccagauggggccucugu

SEQ ID NO: 2327788 - RNA, 12 nt, Human
gaccgcccccuc

SEQ ID NO: 2327789 - RNA, 14 nt, Human
gaccgcccccuccu

SEQ ID NO: 2327790 - RNA, 23 nt, Human
gacccuuuccuuccuucccuggc

SEQ ID NO: 2327791 - RNA, 22 nt, Human
gacccuuuccuuccuucccugg

SEQ ID NO: 2327792 - RNA, 17 nt, Human
gaccgaggcuggagcug

SEQ ID NO: 2327793 - RNA, 19 nt, Human
gaccgaacuguuguauaaa

SEQ ID NO: 2327794 - RNA, 15 nt, Human
gaccgcccccuccuc

SEQ ID NO: 2327795 - RNA, 16 nt, Human
gaccgcccccuccucu

SEQ ID NO: 2327796 - RNA, 17 nt, Human
gaccggacuuuucugca

SEQ ID NO: 2327797 - RNA, 19 nt, Human
gaccccuccccuaaugccu

SEQ ID NO: 2327798 - RNA, 20 nt, Human
gacccccagcaacccuccua

SEQ ID NO: 2327799 - RNA, 23 nt, Human
gacccugaggcccagagggccug

SEQ ID NO: 2327800 - RNA, 14 nt, Human
gaccccuccaugug

SEQ ID NO: 2327801 - RNA, 18 nt, Human
gaccccuccaugugggcu

SEQ ID NO: 2327802 - RNA, 21 nt, Human
gaccccuccaugugggcuagu

SEQ ID NO: 2327803 - RNA, 22 nt, Human
gacccugaggcccagagggccu

SEQ ID NO: 2327804 - RNA, 23 nt, Human
gacccccacucucauuccccagg

SEQ ID NO: 2327805 - RNA, 19 nt, Human
gacccccacucucauuccc

SEQ ID NO: 2327806 - RNA, 18 nt, Human
gacccccacucucauucc

SEQ ID NO: 2327807 - RNA, 22 nt, Human
gacccccaccccuuccccacug

SEQ ID NO: 2327808 - RNA, 21 nt, Human
gacccccaccccuuccccacu

SEQ ID NO: 2327809 - RNA, 19 nt, Human
gacccccaccccuucccca

SEQ ID NO: 2327810 - RNA, 18 nt, Human
gacccccaccccuucccc

SEQ ID NO: 2327811 - RNA, 17 nt, Human
gacccccaccccuuccc

SEQ ID NO: 2327812 - RNA, 16 nt, Human
gacccccaccccuucc

SEQ ID NO: 2327813 - RNA, 15 nt, Human
gacccccaccccuuc

SEQ ID NO: 2327814 - RNA, 14 nt, Human
gacccccaccccuu

SEQ ID NO: 2327815 - RNA, 13 nt, Human
gacccccaccccu

SEQ ID NO: 2327816 - RNA, 12 nt, Human
gacccccacccc

SEQ ID NO: 2327817 - RNA, 14 nt, Human
gacccaaggaggaa

SEQ ID NO: 2327818 - RNA, 15 nt, Human
gacccccacaccuca

SEQ ID NO: 2327819 - RNA, 13 nt, Human
gacccccacaccu

SEQ ID NO: 2327820 - RNA, 19 nt, Human
gacccaauguaggagcugc

SEQ ID NO: 2327821 - RNA, 21 nt, Human
gacccccaaccaaguggcucc

SEQ ID NO: 2327822 - RNA, 13 nt, Human
gacccaaggagga

SEQ ID NO: 2327823 - RNA, 12 nt, Human
gacccaaagacc

SEQ ID NO: 2327824 - RNA, 18 nt, Human
gacccaauguaggagcug

SEQ ID NO: 2327825 - RNA, 12 nt, Human
gacccccaacca

SEQ ID NO: 2327826 - RNA, 22 nt, Human
gacccacaagaaaugaaagcag

SEQ ID NO: 2327827 - RNA, 15 nt, Human
gacccacaagaaaug

SEQ ID NO: 2327828 - RNA, 16 nt, Human
gacccaaaaggcagaa

SEQ ID NO: 2327829 - RNA, 11 nt, Human
gacccaaagac

SEQ ID NO: 2327830 - RNA, 13 nt, Human
gacccaaagacca

SEQ ID NO: 2327831 - RNA, 15 nt, Human
gacuccggcccuccu

SEQ ID NO: 2327832 - RNA, 17 nt, Human
gacucagcuccccagag

SEQ ID NO: 2327833 - RNA, 18 nt, Human
gacucagcuccccagagu

SEQ ID NO: 2327834 - RNA, 18 nt, Human
gacuccaaagaaauguaa

SEQ ID NO: 2327835 - RNA, 16 nt, Human
gacuccaaagaaaugu

SEQ ID NO: 2327836 - RNA, 22 nt, Human
gacuccggcccuccuacccugc

SEQ ID NO: 2327837 - RNA, 23 nt, Human
gacuccggguuugagauggacac

SEQ ID NO: 2327838 - RNA, 17 nt, Human
gacuccguuggccacuc

SEQ ID NO: 2327839 - RNA, 16 nt, Human
gacuccguuggccacu

SEQ ID NO: 2327840 - RNA, 20 nt, Human
gacucagcuccccagagucc

SEQ ID NO: 2327841 - RNA, 17 nt, Human
gacuccuaggcaggaca

SEQ ID NO: 2327842 - RNA, 19 nt, Human
gacuccuaggcaggacaug

SEQ ID NO: 2327843 - RNA, 15 nt, Human
gacuccaaagaaaug

SEQ ID NO: 2327844 - RNA, 12 nt, Human
gacuccaaagaa

SEQ ID NO: 2327845 - RNA, 11 nt, Human
gacuccaaaga

SEQ ID NO: 2327846 - RNA, 21 nt, Human
gacucauuuuaaaaaauggaa

SEQ ID NO: 2327847 - RNA, 22 nt, Human
gacuccuugagagaccaggcaa

SEQ ID NO: 2327848 - RNA, 16 nt, Human
gacuccugugcaacuu

SEQ ID NO: 2327849 - RNA, 13 nt, Human
gacuccugcccug

SEQ ID NO: 2327850 - RNA, 14 nt, Human
gacuccugcccugu

SEQ ID NO: 2327851 - RNA, 11 nt, Human
gacuccugggu

SEQ ID NO: 2327852 - RNA, 17 nt, Human
gacuccuggguugagcu

SEQ ID NO: 2327853 - RNA, 13 nt, Human
gacucgcgacaau

SEQ ID NO: 2327854 - RNA, 23 nt, Human
gacuccugcacacgcuccuuccu

SEQ ID NO: 2327855 - RNA, 13 nt, Human
gacuccugcaggc

SEQ ID NO: 2327856 - RNA, 14 nt, Human
gacuccucugucca

SEQ ID NO: 2327857 - RNA, 18 nt, Human
gacuccugaggacagcug

SEQ ID NO: 2327858 - RNA, 19 nt, Human
gacuccugaggacagcugu

SEQ ID NO: 2327859 - RNA, 20 nt, Human
gacuccugaggacagcuguc

SEQ ID NO: 2327860 - RNA, 21 nt, Human
gacuccugaggacagcugucc

SEQ ID NO: 2327861 - RNA, 12 nt, Human
gacuccugcagg

SEQ ID NO: 2327862 - RNA, 11 nt, Human
gacuccucugu

SEQ ID NO: 2327863 - RNA, 17 nt, Human
gacuccucggccuggcu

SEQ ID NO: 2327864 - RNA, 18 nt, Human
gacuccucggccuggcuc

SEQ ID NO: 2327865 - RNA, 20 nt, Human
gacuccucggccuggcuccu

SEQ ID NO: 2327866 - RNA, 23 nt, Human
gacuccuaggcaggacaugcuga

SEQ ID NO: 2327867 - RNA, 15 nt, Human
gacuccucggccugg

SEQ ID NO: 2327868 - RNA, 15 nt, Human
gacuccuaugaucuc

SEQ ID NO: 2327869 - RNA, 23 nt, Human
gaccuagggauguucuggcccuc

SEQ ID NO: 2327870 - RNA, 15 nt, Human
gaccuaucacuucca

SEQ ID NO: 2327871 - RNA, 22 nt, Human
gaccuagggauguucuggcccu

SEQ ID NO: 2327872 - RNA, 21 nt, Human
gaccuagggauguucuggccc

SEQ ID NO: 2327873 - RNA, 20 nt, Human
gaccuagggauguucuggcc

SEQ ID NO: 2327874 - RNA, 21 nt, Human
gaccuagggaggaccuuaucu

SEQ ID NO: 2327875 - RNA, 17 nt, Human
gaccuagggaggaccuu

SEQ ID NO: 2327876 - RNA, 20 nt, Human
gaccuaggauaucuucucca

SEQ ID NO: 2327877 - RNA, 18 nt, Human
gaccuaggauaucuucuc

SEQ ID NO: 2327878 - RNA, 13 nt, Human
gaccuacucucau

SEQ ID NO: 2327879 - RNA, 13 nt, Human
gacuacaggugug

SEQ ID NO: 2327880 - RNA, 16 nt, Human
gaccuauuccuccugg

SEQ ID NO: 2327881 - RNA, 17 nt, Human
gaccuauuccuccuggg

SEQ ID NO: 2327882 - RNA, 21 nt, Human
gaccuauguccuaaggacaca

SEQ ID NO: 2327883 - RNA, 22 nt, Human
gaccuauguccuaaggacacac

SEQ ID NO: 2327884 - RNA, 23 nt, Human
gaccuauguccuaaggacacacu

SEQ ID NO: 2327885 - RNA, 15 nt, Human
gacuagaggcaggga

SEQ ID NO: 2327886 - RNA, 22 nt, Human
gacuagaggcagggaggggacu

SEQ ID NO: 2327887 - RNA, 20 nt, Human
gacuagaggcagggagggga

SEQ ID NO: 2327888 - RNA, 17 nt, Human
gacuagaggcagggagg

SEQ ID NO: 2327889 - RNA, 16 nt, Human
gacuagaggcagggag

SEQ ID NO: 2327890 - RNA, 13 nt, Human
gaccucaaccugu

SEQ ID NO: 2327891 - RNA, 18 nt, Human
gacuacagucaggaaagg

SEQ ID NO: 2327892 - RNA, 14 nt, Human
gacuacauuuagag

SEQ ID NO: 2327893 - RNA, 22 nt, Human
gacuacccacguucucacaccc

SEQ ID NO: 2327894 - RNA, 18 nt, Human
gacuacaggugugaguca

SEQ ID NO: 2327895 - RNA, 21 nt, Human
gacuacaggugugagucacca

SEQ ID NO: 2327896 - RNA, 23 nt, Human
gacuagagggaccucucccaggg

SEQ ID NO: 2327897 - RNA, 20 nt, Human
gacuagagggaccucuccca

SEQ ID NO: 2327898 - RNA, 19 nt, Human
gacuagagggaccucuccc

SEQ ID NO: 2327899 - RNA, 17 nt, Human
gacuagagggaccucuc

SEQ ID NO: 2327900 - RNA, 16 nt, Human
gacuagaggcuugcau

SEQ ID NO: 2327901 - RNA, 21 nt, Human
gacuagaugauggaugccaau

SEQ ID NO: 2327902 - RNA, 16 nt, Human
gacuagaugauggaug

SEQ ID NO: 2327903 - RNA, 14 nt, Human
gacuagaugaugga

SEQ ID NO: 2327904 - RNA, 23 nt, Human
gacucagacaggaaagggaaggc

SEQ ID NO: 2327905 - RNA, 17 nt, Human
gacucagacaggaaagg

SEQ ID NO: 2327906 - RNA, 19 nt, Human
gacucagaagccucugggu

SEQ ID NO: 2327907 - RNA, 13 nt, Human
gacucagcccuga

SEQ ID NO: 2327908 - RNA, 11 nt, Human
gacucagcccu

SEQ ID NO: 2327909 - RNA, 16 nt, Human
gacucagacuccauuu

SEQ ID NO: 2327910 - RNA, 18 nt, Human
gacucagacauuggcacc

SEQ ID NO: 2327911 - RNA, 14 nt, Human
gacucagcucccca

SEQ ID NO: 2327912 - RNA, 20 nt, Human
gacucagccuucagacagag

SEQ ID NO: 2327913 - RNA, 15 nt, Human
gacucagccuucaga

SEQ ID NO: 2327914 - RNA, 19 nt, Human
gacucagccuucagacaga

SEQ ID NO: 2327915 - RNA, 16 nt, Human
gacucagcccugaggu

SEQ ID NO: 2327916 - RNA, 15 nt, Human
gacucagcccugagg

SEQ ID NO: 2327917 - RNA, 12 nt, Human
gacucagccuuc

SEQ ID NO: 2327918 - RNA, 14 nt, Human
gacucagccuucag

SEQ ID NO: 2327919 - RNA, 14 nt, Human
gacucauucuucug

SEQ ID NO: 2327920 - RNA, 15 nt, Human
gacucauucuucugu

SEQ ID NO: 2327921 - RNA, 14 nt, Human
gacuggaagcacag

SEQ ID NO: 2327922 - RNA, 15 nt, Human
gacuggaaccaggga

SEQ ID NO: 2327923 - RNA, 21 nt, Human
gacugcuuuggaccuaaaugg

SEQ ID NO: 2327924 - RNA, 15 nt, Human
gacuggaagcacagc

SEQ ID NO: 2327925 - RNA, 16 nt, Human
gacuggaagcacagcu

SEQ ID NO: 2327926 - RNA, 14 nt, Human
gacugcugggacug

SEQ ID NO: 2327927 - RNA, 12 nt, Human
gacugcugggac

SEQ ID NO: 2327928 - RNA, 23 nt, Human
gacugccgaccgaggcuggagcu

SEQ ID NO: 2327929 - RNA, 19 nt, Human
gacugcugggacuggccag

SEQ ID NO: 2327930 - RNA, 13 nt, Human
gacugcuucccau

SEQ ID NO: 2327931 - RNA, 15 nt, Human
gacugcuucccaucc

SEQ ID NO: 2327932 - RNA, 16 nt, Human
gacugcuucccauccu

SEQ ID NO: 2327933 - RNA, 12 nt, Human
gacugcuuccca

SEQ ID NO: 2327934 - RNA, 22 nt, Human
gacugcuucccauccuacccuc

SEQ ID NO: 2327935 - RNA, 17 nt, Human
gacugcuucccauccua

SEQ ID NO: 2327936 - RNA, 20 nt, Human
gacugcuucccauccuaccc

SEQ ID NO: 2327937 - RNA, 14 nt, Human
gacuggagcaucug

SEQ ID NO: 2327938 - RNA, 15 nt, Human
gacuggauacugccc

SEQ ID NO: 2327939 - RNA, 22 nt, Human
gacuggauacugcccggggcag

SEQ ID NO: 2327940 - RNA, 17 nt, Human
gacuggaaccagggaga

SEQ ID NO: 2327941 - RNA, 20 nt, Human
gacuggaagcuaauuugcau

SEQ ID NO: 2327942 - RNA, 21 nt, Human
gacuggaagcuaauuugcauu

SEQ ID NO: 2327943 - RNA, 18 nt, Human
gacuggaagcacagcuuc

SEQ ID NO: 2327944 - RNA, 15 nt, Human
gacugggagggccca

SEQ ID NO: 2327945 - RNA, 13 nt, Human
gacugggagguag

SEQ ID NO: 2327946 - RNA, 14 nt, Human
gacugggcccugcc

SEQ ID NO: 2327947 - RNA, 18 nt, Human
gacugggagccgcagcag

SEQ ID NO: 2327948 - RNA, 23 nt, Human
gacugggagccgcagcagcuccc

SEQ ID NO: 2327949 - RNA, 21 nt, Human
gacugggcugagggagccugg

SEQ ID NO: 2327950 - RNA, 16 nt, Human
gacugggcugagggag

SEQ ID NO: 2327951 - RNA, 15 nt, Human
gacugggcugaggga

SEQ ID NO: 2327952 - RNA, 14 nt, Human
gacugggcugaggg

SEQ ID NO: 2327953 - RNA, 21 nt, Human
gacuguuuuuuccugagcuug

SEQ ID NO: 2327954 - RNA, 14 nt, Human
gacuggggggcuug

SEQ ID NO: 2327955 - RNA, 20 nt, Human
gacuggggaugugggaggga

SEQ ID NO: 2327956 - RNA, 23 nt, Human
gacuggggaugugggagggagca

SEQ ID NO: 2327957 - RNA, 17 nt, Human
gacugggcccugccucu

SEQ ID NO: 2327958 - RNA, 16 nt, Human
gacuggggauguggga

SEQ ID NO: 2327959 - RNA, 17 nt, Human
gacuggggaugugggag

SEQ ID NO: 2327960 - RNA, 18 nt, Human
gacuggggaugugggagg

SEQ ID NO: 2327961 - RNA, 16 nt, Human
gacucgagaacuuuca

SEQ ID NO: 2327962 - RNA, 19 nt, Human
gacucgagaacuuucauuu

SEQ ID NO: 2327963 - RNA, 14 nt, Human
gacucuaccagacu

SEQ ID NO: 2327964 - RNA, 17 nt, Human
gacucgcgacaaugcaa

SEQ ID NO: 2327965 - RNA, 23 nt, Human
gacucuaccucauaucaguuugc

SEQ ID NO: 2327966 - RNA, 19 nt, Human
gacucuaccucauaucagu

SEQ ID NO: 2327967 - RNA, 20 nt, Human
gacucuaccagacuguguau

SEQ ID NO: 2327968 - RNA, 19 nt, Human
gacucuaggugcccuugga

SEQ ID NO: 2327969 - RNA, 17 nt, Human
gacucuaggugcccuug

SEQ ID NO: 2327970 - RNA, 14 nt, Human
gacucucaaaucuu

SEQ ID NO: 2327971 - RNA, 13 nt, Human
gacucucugugac

SEQ ID NO: 2327972 - RNA, 12 nt, Human
gacucucuguga

SEQ ID NO: 2327973 - RNA, 20 nt, Human
gacucucagucucugagcag

SEQ ID NO: 2327974 - RNA, 14 nt, Human
gacucucagucucu

SEQ ID NO: 2327975 - RNA, 18 nt, Human
gacucucagucucugagc

SEQ ID NO: 2327976 - RNA, 16 nt, Human
gacucucagucucuga

SEQ ID NO: 2327977 - RNA, 22 nt, Human
gacugaguacguugugcauuug

SEQ ID NO: 2327978 - RNA, 21 nt, Human
gacugaguacguugugcauuu

SEQ ID NO: 2327979 - RNA, 20 nt, Human
gacugccgaccgaggcugga

SEQ ID NO: 2327980 - RNA, 19 nt, Human
gacugccgaccgaggcugg

SEQ ID NO: 2327981 - RNA, 16 nt, Human
gacugccgaccgaggc

SEQ ID NO: 2327982 - RNA, 23 nt, Human
gacugccccgugcagacuggagg

SEQ ID NO: 2327983 - RNA, 21 nt, Human
gacugccccgugcagacugga

SEQ ID NO: 2327984 - RNA, 20 nt, Human
gacugccccgugcagacugg

SEQ ID NO: 2327985 - RNA, 19 nt, Human
gacugccccgugcagacug

SEQ ID NO: 2327986 - RNA, 17 nt, Human
gacugccccgugcagac

SEQ ID NO: 2327987 - RNA, 15 nt, Human
gacugcccggcaggg

SEQ ID NO: 2327988 - RNA, 21 nt, Human
gacugcauguaccauuugcau

SEQ ID NO: 2327989 - RNA, 23 nt, Human
gacugcauguaccauuugcaugg

SEQ ID NO: 2327990 - RNA, 13 nt, Human
gacugcccggcag

SEQ ID NO: 2327991 - RNA, 22 nt, Human
gacugaguccucguagccaucu

SEQ ID NO: 2327992 - RNA, 23 nt, Human
gacugaguacguugugcauuugg

SEQ ID NO: 2327993 - RNA, 14 nt, Human
gacugcauuauauu

SEQ ID NO: 2327994 - RNA, 16 nt, Human
gacugcauuauauuua

SEQ ID NO: 2327995 - RNA, 16 nt, Human
gacuugacagaacacu

SEQ ID NO: 2327996 - RNA, 18 nt, Human
gacuugacagaacacugu

SEQ ID NO: 2327997 - RNA, 15 nt, Human
gacuugaaguuguua

SEQ ID NO: 2327998 - RNA, 19 nt, Human
gacuugaauuuucccacug

SEQ ID NO: 2327999 - RNA, 20 nt, Human
gacuugaauuuucccacugc

SEQ ID NO: 2328000 - RNA, 21 nt, Human
gacuugaauuuucccacugca

SEQ ID NO: 2328001 - RNA, 21 nt, Human
gacuugaaagcauccaugugu

SEQ ID NO: 2328002 - RNA, 19 nt, Human
gacuugaaagcauccaugu

SEQ ID NO: 2328003 - RNA, 17 nt, Human
gacuugaaagcauccau

SEQ ID NO: 2328004 - RNA, 11 nt, Human
gacuugaaguu

SEQ ID NO: 2328005 - RNA, 12 nt, Human
gacuugaaguug

SEQ ID NO: 2328006 - RNA, 13 nt, Human
gacuugaaguugu

SEQ ID NO: 2328007 - RNA, 16 nt, Human
gacuugaaagcaucca

SEQ ID NO: 2328008 - RNA, 14 nt, Human
gacuugaaagcauc

SEQ ID NO: 2328009 - RNA, 13 nt, Human
gacuugaaagcau

SEQ ID NO: 2328010 - RNA, 22 nt, Human
gacuucuuuucacauucuuaua

SEQ ID NO: 2328011 - RNA, 19 nt, Human
gacuucuuuucacauucuu

SEQ ID NO: 2328012 - RNA, 21 nt, Human
gacuucuuuucacauucuuau

SEQ ID NO: 2328013 - RNA, 12 nt, Human
gacuucuuuuca

SEQ ID NO: 2328014 - RNA, 15 nt, Human
gacuucuuuucacau

SEQ ID NO: 2328015 - RNA, 16 nt, Human
gacuucuuuucacauu

SEQ ID NO: 2328016 - RNA, 18 nt, Human
gacuucuuuucacauucu

SEQ ID NO: 2328017 - RNA, 22 nt, Human
gacuucuuucaaauugagagaa

SEQ ID NO: 2328018 - RNA, 21 nt, Human
gacuucuuucaaauugagaga

SEQ ID NO: 2328019 - RNA, 17 nt, Human
gacuucugcuuuccaca

SEQ ID NO: 2328020 - RNA, 13 nt, Human
gacuuggaagcuc

SEQ ID NO: 2328021 - RNA, 21 nt, Human
gacuuggaggguugguccucu

SEQ ID NO: 2328022 - RNA, 19 nt, Human
gacuugcuguuuuguucug

SEQ ID NO: 2328023 - RNA, 20 nt, Human
gacuugcuguuuuguucugu

SEQ ID NO: 2328024 - RNA, 22 nt, Human
gacuugcuguuuuguucugugg

SEQ ID NO: 2328025 - RNA, 17 nt, Human
gacuuggcaacagaagc

SEQ ID NO: 2328026 - RNA, 19 nt, Human
gacuuggcaacagaagcag

SEQ ID NO: 2328027 - RNA, 23 nt, Human
gacuugagaaacaaauaauuugu

SEQ ID NO: 2328028 - RNA, 19 nt, Human
gacuugagaaacaaauaau

SEQ ID NO: 2328029 - RNA, 19 nt, Human
gacuugacuuuagucugca

SEQ ID NO: 2328030 - RNA, 19 nt, Human
gacuugaggauuuugagua

SEQ ID NO: 2328031 - RNA, 23 nt, Human
gacuugaggauuuugaguaucuc

SEQ ID NO: 2328032 - RNA, 15 nt, Human
gacuugcauuuuugc

SEQ ID NO: 2328033 - RNA, 13 nt, Human
gacuugcauuuuu

SEQ ID NO: 2328034 - RNA, 18 nt, Human
gacuugcaauuucuaccu

SEQ ID NO: 2328035 - RNA, 15 nt, Human
gacuugcaucgugga

SEQ ID NO: 2328036 - RNA, 23 nt, Human
gacuugguguccuuucccuccac

SEQ ID NO: 2328037 - RNA, 14 nt, Human
gacuuggucugauu

SEQ ID NO: 2328038 - RNA, 19 nt, Human
gacuuguagggaugccuuu

SEQ ID NO: 2328039 - RNA, 16 nt, Human
gacuuguauauuugua

SEQ ID NO: 2328040 - RNA, 21 nt, Human
gagaaaacgucuugcuuggga

SEQ ID NO: 2328041 - RNA, 18 nt, Human
gacuuguauauuuguaca

SEQ ID NO: 2328042 - RNA, 9 nt, Human
gagaaaaga

SEQ ID NO: 2328043 - RNA, 16 nt, Human
gagaaaacuuauuuga

SEQ ID NO: 2328044 - RNA, 18 nt, Human
gagaaaacuuauuugagu

SEQ ID NO: 2328045 - RNA, 20 nt, Human
gacuuggggagauggaguuc

SEQ ID NO: 2328046 - RNA, 20 nt, Human
gacuugggucucauuuagaa

SEQ ID NO: 2328047 - RNA, 16 nt, Human
gacuuggucaccagcu

SEQ ID NO: 2328048 - RNA, 19 nt, Human
gacuuggucaccagcuccu

SEQ ID NO: 2328049 - RNA, 20 nt, Human
gacuuaacugcauuuuuaga

SEQ ID NO: 2328050 - RNA, 16 nt, Human
gacuuaacuccuucca

SEQ ID NO: 2328051 - RNA, 19 nt, Human
gacuuaacggcuccaggau

SEQ ID NO: 2328052 - RNA, 14 nt, Human
gacuuaacggcucc

SEQ ID NO: 2328053 - RNA, 16 nt, Human
gacuuaacggcuccag

SEQ ID NO: 2328054 - RNA, 19 nt, Human
gacuuaaaauauuccugca

SEQ ID NO: 2328055 - RNA, 13 nt, Human
gacuuaaagcaga

SEQ ID NO: 2328056 - RNA, 14 nt, Human
gacugggggccaga

SEQ ID NO: 2328057 - RNA, 19 nt, Human
gacuuaagcacacuugaca

SEQ ID NO: 2328058 - RNA, 15 nt, Human
gacuuccuugagaca

SEQ ID NO: 2328059 - RNA, 19 nt, Human
gacuuaagugugcaaaaua

SEQ ID NO: 2328060 - RNA, 20 nt, Human
gacuuccuugagacacggag

SEQ ID NO: 2328061 - RNA, 16 nt, Human
gacuuccuugagacac

SEQ ID NO: 2328062 - RNA, 16 nt, Human
gacuuaauagaaacau

SEQ ID NO: 2328063 - RNA, 14 nt, Human
gacuuccuugcucu

SEQ ID NO: 2328064 - RNA, 16 nt, Human
gacuuccuugcucucc

SEQ ID NO: 2328065 - RNA, 17 nt, Human
gacuuccuugcucuccc

SEQ ID NO: 2328066 - RNA, 16 nt, Human
gacuucuaaguaaaac

SEQ ID NO: 2328067 - RNA, 18 nt, Human
gacuucuaaguaaaacca

SEQ ID NO: 2328068 - RNA, 17 nt, Human
gacuucuaaguaaaacc

SEQ ID NO: 2328069 - RNA, 18 nt, Human
gacuucgacugugaccug

SEQ ID NO: 2328070 - RNA, 18 nt, Human
gacuuccuugcucucccu

SEQ ID NO: 2328071 - RNA, 15 nt, Human
gacuucgacucagga

SEQ ID NO: 2328072 - RNA, 16 nt, Human
gacuucgacucaggau

SEQ ID NO: 2328073 - RNA, 14 nt, Human
gacuucuccagguc

SEQ ID NO: 2328074 - RNA, 24 nt, Human
gacuucuaaguaaaaccacagcag

SEQ ID NO: 2328075 - RNA, 23 nt, Human
gacuucuaaguaaaaccacagca

SEQ ID NO: 2328076 - RNA, 19 nt, Human
gacuucuaaguaaaaccac

SEQ ID NO: 2328077 - RNA, 17 nt, Human
gacuucugccuggagac

SEQ ID NO: 2328078 - RNA, 15 nt, Human
gacuucugccuggag

SEQ ID NO: 2328079 - RNA, 16 nt, Human
gacuucugccuggaga

SEQ ID NO: 2328080 - RNA, 22 nt, Human
gacuucuccaggucucacgggc

SEQ ID NO: 2328081 - RNA, 13 nt, Human
gacuucugccugg

SEQ ID NO: 2328082 - RNA, 14 nt, Human
gacuucugccugga

SEQ ID NO: 2328083 - RNA, 23 nt, Human
gacuucugucuucacaacagauu

SEQ ID NO: 2328084 - RNA, 20 nt, Human
gacuucugucuucacaacag

SEQ ID NO: 2328085 - RNA, 20 nt, Human
gagaaagccaggcagguagc

SEQ ID NO: 2328086 - RNA, 15 nt, Human
gagaaagccaggcag

SEQ ID NO: 2328087 - RNA, 16 nt, Human
gagaaagccaggcagg

SEQ ID NO: 2328088 - RNA, 17 nt, Human
gagaaaauaaaaaguua

SEQ ID NO: 2328089 - RNA, 22 nt, Human
gagaaaacuuauuugagugauu

SEQ ID NO: 2328090 - RNA, 22 nt, Human
gagaaaguacuucuccacccug

SEQ ID NO: 2328091 - RNA, 18 nt, Human
gagaaaggggagcccacu

SEQ ID NO: 2328092 - RNA, 17 nt, Human
gagaaaggggagcccac

SEQ ID NO: 2328093 - RNA, 16 nt, Human
gagaaagguugaagca

SEQ ID NO: 2328094 - RNA, 13 nt, Human
gagaaaagacaug

SEQ ID NO: 2328095 - RNA, 12 nt, Human
gagaaaauaaaa

SEQ ID NO: 2328096 - RNA, 11 nt, Human
gagaaaauaaa

SEQ ID NO: 2328097 - RNA, 16 nt, Human
gagaaaauaaaaaguu

SEQ ID NO: 2328098 - RNA, 15 nt, Human
gagaaaauaaaaagu

SEQ ID NO: 2328099 - RNA, 14 nt, Human
gagaaaauaaaaag

SEQ ID NO: 2328100 - RNA, 13 nt, Human
gagaaaauaaaaa

SEQ ID NO: 2328101 - RNA, 20 nt, Human
gagaaaagaaaaaaaaagaa

SEQ ID NO: 2328102 - RNA, 19 nt, Human
gagaaaagaaaaaaaaaga

SEQ ID NO: 2328103 - RNA, 15 nt, Human
gagaaaagaaaaaaa

SEQ ID NO: 2328104 - RNA, 14 nt, Human
gagaaaagaaaaaa

SEQ ID NO: 2328105 - RNA, 13 nt, Human
gagaaaagaaaaa

SEQ ID NO: 2328106 - RNA, 12 nt, Human
gagaaaagaaaa

SEQ ID NO: 2328107 - RNA, 11 nt, Human
gagaaaagaaa

SEQ ID NO: 2328108 - RNA, 10 nt, Human
gagaaaagaa

SEQ ID NO: 2328109 - RNA, 14 nt, Human
gagaaccucaggcu

SEQ ID NO: 2328110 - RNA, 22 nt, Human
gagaaccucacgcaccucccau

SEQ ID NO: 2328111 - RNA, 14 nt, Human
gagaaauugacaga

SEQ ID NO: 2328112 - RNA, 18 nt, Human
gagaaccuaaguuucagu

SEQ ID NO: 2328113 - RNA, 13 nt, Human
gagaacgcagccc

SEQ ID NO: 2328114 - RNA, 19 nt, Human
gagaaccuggaguuccuga

SEQ ID NO: 2328115 - RNA, 21 nt, Human
gagaaccuagggugauauuaa

SEQ ID NO: 2328116 - RNA, 22 nt, Human
gagaaccuagggugauauuaac

SEQ ID NO: 2328117 - RNA, 21 nt, Human
gagaaaugaaaaaauauauau

SEQ ID NO: 2328118 - RNA, 14 nt, Human
gagaaaugagcuug

SEQ ID NO: 2328119 - RNA, 12 nt, Human
gagaaaugaaaa

SEQ ID NO: 2328120 - RNA, 13 nt, Human
gagaaaugggacu

SEQ ID NO: 2328121 - RNA, 11 nt, Human
gagaaauuauu

SEQ ID NO: 2328122 - RNA, 12 nt, Human
gagaaaugcaua

SEQ ID NO: 2328123 - RNA, 17 nt, Human
gagaacuuucauuuuuu

SEQ ID NO: 2328124 - RNA, 15 nt, Human
gagaacuuucauuuu

SEQ ID NO: 2328125 - RNA, 16 nt, Human
gagaacuuucauuuuu

SEQ ID NO: 2328126 - RNA, 23 nt, Human
gagaacugcauauguuucgcuga

SEQ ID NO: 2328127 - RNA, 19 nt, Human
gagaacugcauauguuucg

SEQ ID NO: 2328128 - RNA, 15 nt, Human
gagaacuguggccgu

SEQ ID NO: 2328129 - RNA, 20 nt, Human
gagaagaauuuucagacccc

SEQ ID NO: 2328130 - RNA, 14 nt, Human
gagaagagaaugca

SEQ ID NO: 2328131 - RNA, 18 nt, Human
gagaacugcauauguuuc

SEQ ID NO: 2328132 - RNA, 15 nt, Human
gagaacuccuagggu

SEQ ID NO: 2328133 - RNA, 23 nt, Human
gagaacucaucccuaaugcugca

SEQ ID NO: 2328134 - RNA, 14 nt, Human
gagaacgcagcccu

SEQ ID NO: 2328135 - RNA, 15 nt, Human
gagaacgcagcccua

SEQ ID NO: 2328136 - RNA, 16 nt, Human
gagaacgcagcccuag

SEQ ID NO: 2328137 - RNA, 24 nt, Human
gagaacgcagcccuagagccugcc

SEQ ID NO: 2328138 - RNA, 19 nt, Human
gacuuguauauuuguacaa

SEQ ID NO: 2328139 - RNA, 19 nt, Human
gagaacuagaaccuggagg

SEQ ID NO: 2328140 - RNA, 22 nt, Human
gagaacuuccagauccuggaaa

SEQ ID NO: 2328141 - RNA, 23 nt, Human
gagaacuuccagauccuggaaau

SEQ ID NO: 2328142 - RNA, 13 nt, Human
gagaagcaugaaa

SEQ ID NO: 2328143 - RNA, 20 nt, Human
gagaagccacaggccugaga

SEQ ID NO: 2328144 - RNA, 22 nt, Human
gagaagccacaggccugagauu

SEQ ID NO: 2328145 - RNA, 17 nt, Human
gagaaugagagacacac

SEQ ID NO: 2328146 - RNA, 18 nt, Human
gagaagccaaaagauugg

SEQ ID NO: 2328147 - RNA, 13 nt, Human
gagaagccacagg

SEQ ID NO: 2328148 - RNA, 17 nt, Human
gagaagccacaggccug

SEQ ID NO: 2328149 - RNA, 18 nt, Human
gagaagccacaggccuga

SEQ ID NO: 2328150 - RNA, 21 nt, Human
gagaagcaucggagggaauug

SEQ ID NO: 2328151 - RNA, 18 nt, Human
gagaagcagugagccgca

SEQ ID NO: 2328152 - RNA, 14 nt, Human
gagaagcagugagc

SEQ ID NO: 2328153 - RNA, 12 nt, Human
gagaagcacugu

SEQ ID NO: 2328154 - RNA, 16 nt, Human
gagaagcagaggaagg

SEQ ID NO: 2328155 - RNA, 15 nt, Human
gagaagagaggagag

SEQ ID NO: 2328156 - RNA, 16 nt, Human
gagaagagaggagagg

SEQ ID NO: 2328157 - RNA, 13 nt, Human
gagaagagcuguu

SEQ ID NO: 2328158 - RNA, 19 nt, Human
gagaagagagaaauagccu

SEQ ID NO: 2328159 - RNA, 15 nt, Human
gagaagacaaaauua

SEQ ID NO: 2328160 - RNA, 12 nt, Human
gagaagagagga

SEQ ID NO: 2328161 - RNA, 21 nt, Human
gagaagaauuuucagacccca

SEQ ID NO: 2328162 - RNA, 20 nt, Human
gagaagaaaggugaguuuga

SEQ ID NO: 2328163 - RNA, 16 nt, Human
gagaagagaaugcaca

SEQ ID NO: 2328164 - RNA, 22 nt, Human
gagacaggguuuugccauguug

SEQ ID NO: 2328165 - RNA, 17 nt, Human
gagacagugaucuccau

SEQ ID NO: 2328166 - RNA, 16 nt, Human
gagacagucaccccag

SEQ ID NO: 2328167 - RNA, 14 nt, Human
gagacagugggaaa

SEQ ID NO: 2328168 - RNA, 16 nt, Human
gagacaguucaagaaa

SEQ ID NO: 2328169 - RNA, 16 nt, Human
gagacagugggaaaua

SEQ ID NO: 2328170 - RNA, 12 nt, Human
gagacaggguuu

SEQ ID NO: 2328171 - RNA, 19 nt, Human
gagacaggguuucaccaug

SEQ ID NO: 2328172 - RNA, 13 nt, Human
gagacaggguuug

SEQ ID NO: 2328173 - RNA, 22 nt, Human
gagacaggguuuggcugugucu

SEQ ID NO: 2328174 - RNA, 17 nt, Human
gagacaguccagccugg

SEQ ID NO: 2328175 - RNA, 14 nt, Human
gagaccaucccuga

SEQ ID NO: 2328176 - RNA, 22 nt, Human
gagacaguugggugagaacaac

SEQ ID NO: 2328177 - RNA, 15 nt, Human
gagacagugggaaau

SEQ ID NO: 2328178 - RNA, 18 nt, Human
gagacaguucaagaaagc

SEQ ID NO: 2328179 - RNA, 18 nt, Human
gagaccaucccugaaggc

SEQ ID NO: 2328180 - RNA, 21 nt, Human
gagaccaucccugaaggcccc

SEQ ID NO: 2328181 - RNA, 19 nt, Human
gagacagcuugaucaaagg

SEQ ID NO: 2328182 - RNA, 17 nt, Human
gagaaugucaguaugug

SEQ ID NO: 2328183 - RNA, 16 nt, Human
gagacaggaccugacu

SEQ ID NO: 2328184 - RNA, 12 nt, Human
gagacaggaagg

SEQ ID NO: 2328185 - RNA, 15 nt, Human
gagacaggagggcaa

SEQ ID NO: 2328186 - RNA, 21 nt, Human
gagacaggaaaauccucuggc

SEQ ID NO: 2328187 - RNA, 20 nt, Human
gagacaggaaaauccucugg

SEQ ID NO: 2328188 - RNA, 19 nt, Human
gagacaggaaaauccucug

SEQ ID NO: 2328189 - RNA, 21 nt, Human
gagaauguagauauugugaag

SEQ ID NO: 2328190 - RNA, 20 nt, Human
gagaauggcgugaacccggg

SEQ ID NO: 2328191 - RNA, 15 nt, Human
gagaauguaagaacu

SEQ ID NO: 2328192 - RNA, 16 nt, Human
gagaauguaagaacua

SEQ ID NO: 2328193 - RNA, 20 nt, Human
gagacagcucugcauacuca

SEQ ID NO: 2328194 - RNA, 15 nt, Human
gagaauggaaaacag

SEQ ID NO: 2328195 - RNA, 23 nt, Human
gagaaugcacaaacagaggccgc

SEQ ID NO: 2328196 - RNA, 20 nt, Human
gagaaugagagacacacuga

SEQ ID NO: 2328197 - RNA, 21 nt, Human
gagaaugagagacacacugaa

SEQ ID NO: 2328198 - RNA, 13 nt, Human
gagacucugucuc

SEQ ID NO: 2328199 - RNA, 17 nt, Human
gagaccaugcagagcgc

SEQ ID NO: 2328200 - RNA, 20 nt, Human
gagacucgcgacaaugcaaa

SEQ ID NO: 2328201 - RNA, 21 nt, Human
gagacucgcgacaaugcaaac

SEQ ID NO: 2328202 - RNA, 19 nt, Human
gagacuccugcaggcagcc

SEQ ID NO: 2328203 - RNA, 23 nt, Human
gagacaguugggugagaacaacc

SEQ ID NO: 2328204 - RNA, 16 nt, Human
gagacaguuucuuagc

SEQ ID NO: 2328205 - RNA, 18 nt, Human
gagaccaugcagagcgcc

SEQ ID NO: 2328206 - RNA, 20 nt, Human
gagacuccugcaggcagcca

SEQ ID NO: 2328207 - RNA, 21 nt, Human
gagacuccugcaggcagccag

SEQ ID NO: 2328208 - RNA, 13 nt, Human
gagacugggaaga

SEQ ID NO: 2328209 - RNA, 20 nt, Human
gagacuggagcaucugacuc

SEQ ID NO: 2328210 - RNA, 19 nt, Human
gagacucucuuaggagcag

SEQ ID NO: 2328211 - RNA, 12 nt, Human
gagacucuggcc

SEQ ID NO: 2328212 - RNA, 13 nt, Human
gagacucuggccu

SEQ ID NO: 2328213 - RNA, 14 nt, Human
gagacucuggccuc

SEQ ID NO: 2328214 - RNA, 21 nt, Human
gagacugggaagauaggcucu

SEQ ID NO: 2328215 - RNA, 14 nt, Human
gagacugggcugag

SEQ ID NO: 2328216 - RNA, 13 nt, Human
gagacugggcuga

SEQ ID NO: 2328217 - RNA, 21 nt, Human
gagacugggcugagggagccu

SEQ ID NO: 2328218 - RNA, 20 nt, Human
gagacugggcugagggagcc

SEQ ID NO: 2328219 - RNA, 17 nt, Human
gagacugggcugaggga

SEQ ID NO: 2328220 - RNA, 15 nt, Human
gagacugggcugagg

SEQ ID NO: 2328221 - RNA, 16 nt, Human
gagacugguccugugu

SEQ ID NO: 2328222 - RNA, 23 nt, Human
gagacugguccugugugcaguga

SEQ ID NO: 2328223 - RNA, 14 nt, Human
gagacuggggggcu

SEQ ID NO: 2328224 - RNA, 16 nt, Human
gagacuggggggcuug

SEQ ID NO: 2328225 - RNA, 18 nt, Human
gagacuggggggcuugaa

SEQ ID NO: 2328226 - RNA, 19 nt, Human
gagacuggggggcuugaaa

SEQ ID NO: 2328227 - RNA, 22 nt, Human
gagagaaagugugagcaaacua

SEQ ID NO: 2328228 - RNA, 20 nt, Human
gagagaaagugggugagaug

SEQ ID NO: 2328229 - RNA, 22 nt, Human
gagagaaagugggugagaugcu

SEQ ID NO: 2328230 - RNA, 15 nt, Human
gagagaaagugggug

SEQ ID NO: 2328231 - RNA, 17 nt, Human
gagagaaagugggugag

SEQ ID NO: 2328232 - RNA, 18 nt, Human
gagagaaagugggugaga

SEQ ID NO: 2328233 - RNA, 11 nt, Human
gagagaaagaa

SEQ ID NO: 2328234 - RNA, 16 nt, Human
gagagaaagccaggca

SEQ ID NO: 2328235 - RNA, 21 nt, Human
gagagaaagccaggcagguag

SEQ ID NO: 2328236 - RNA, 18 nt, Human
gagagaaagccaggcagg

SEQ ID NO: 2328237 - RNA, 19 nt, Human
gagagaaagccaggcaggu

SEQ ID NO: 2328238 - RNA, 17 nt, Human
gagagaaaauaaaaagu

SEQ ID NO: 2328239 - RNA, 16 nt, Human
gagagaaaauaaaaag

SEQ ID NO: 2328240 - RNA, 21 nt, Human
gagagaaaauaaaaaguuaaa

SEQ ID NO: 2328241 - RNA, 20 nt, Human
gagagaaaauaaaaaguuaa

SEQ ID NO: 2328242 - RNA, 19 nt, Human
gagagaaaauaaaaaguua

SEQ ID NO: 2328243 - RNA, 18 nt, Human
gagagaaaauaaaaaguu

SEQ ID NO: 2328244 - RNA, 18 nt, Human
gagagccccucacacagc

SEQ ID NO: 2328245 - RNA, 15 nt, Human
gagagcccgggagcu

SEQ ID NO: 2328246 - RNA, 20 nt, Human
gagagcccggcgccccugcc

SEQ ID NO: 2328247 - RNA, 13 nt, Human
gagagcccagcca

SEQ ID NO: 2328248 - RNA, 13 nt, Human
gagagccccagcu

SEQ ID NO: 2328249 - RNA, 14 nt, Human
gagagccccagcug

SEQ ID NO: 2328250 - RNA, 15 nt, Human
gagagccccagcuga

SEQ ID NO: 2328251 - RNA, 21 nt, Human
gagagccugcucccccacccc

SEQ ID NO: 2328252 - RNA, 17 nt, Human
gagagccugcuccccca

SEQ ID NO: 2328253 - RNA, 14 nt, Human
gagagccugcuccc

SEQ ID NO: 2328254 - RNA, 16 nt, Human
gagagcccuucauuug

SEQ ID NO: 2328255 - RNA, 15 nt, Human
gagagcaacauuuua

SEQ ID NO: 2328256 - RNA, 13 nt, Human
gagagagcuggag

SEQ ID NO: 2328257 - RNA, 19 nt, Human
gagagagcagcuucugcca

SEQ ID NO: 2328258 - RNA, 18 nt, Human
gagagaugggagcuccuc

SEQ ID NO: 2328259 - RNA, 13 nt, Human
gagagcaacucug

SEQ ID NO: 2328260 - RNA, 17 nt, Human
gagagcaacucugagau

SEQ ID NO: 2328261 - RNA, 20 nt, Human
gagagcaacucugagaucua

SEQ ID NO: 2328262 - RNA, 16 nt, Human
gagagcagcuucugcc

SEQ ID NO: 2328263 - RNA, 18 nt, Human
gagagcagcuucugccac

SEQ ID NO: 2328264 - RNA, 19 nt, Human
gagagcagcuucugccacu

SEQ ID NO: 2328265 - RNA, 22 nt, Human
gagagcagcuucugccacuucc

SEQ ID NO: 2328266 - RNA, 21 nt, Human
gagagcagcuuuaaacucagg

SEQ ID NO: 2328267 - RNA, 23 nt, Human
gagagcagcuuuaaacucaggga

SEQ ID NO: 2328268 - RNA, 13 nt, Human
gagagcaggcugg

SEQ ID NO: 2328269 - RNA, 14 nt, Human
gagagcaggcuggc

SEQ ID NO: 2328270 - RNA, 17 nt, Human
gagagcaggcuggcagc

SEQ ID NO: 2328271 - RNA, 21 nt, Human
gagagcaggcuggcagcucuc

SEQ ID NO: 2328272 - RNA, 15 nt, Human
gagagagcagcuucu

SEQ ID NO: 2328273 - RNA, 19 nt, Human
gagagagcuucuguugcug

SEQ ID NO: 2328274 - RNA, 22 nt, Human
gagagagcuucuguugcugccu

SEQ ID NO: 2328275 - RNA, 13 nt, Human
gagagagagaggu

SEQ ID NO: 2328276 - RNA, 14 nt, Human
gagagagagaggac

SEQ ID NO: 2328277 - RNA, 12 nt, Human
gagagagaggac

SEQ ID NO: 2328278 - RNA, 13 nt, Human
gagagagaggaca

SEQ ID NO: 2328279 - RNA, 14 nt, Human
gagagagagagaga

SEQ ID NO: 2328280 - RNA, 14 nt, Human
gagagagagagagg

SEQ ID NO: 2328281 - RNA, 13 nt, Human
gagagagagagga

SEQ ID NO: 2328282 - RNA, 23 nt, Human
gagagagaagugccccugcugcc

SEQ ID NO: 2328283 - RNA, 12 nt, Human
gagagagaaagc

SEQ ID NO: 2328284 - RNA, 15 nt, Human
gagagagaaagccag

SEQ ID NO: 2328285 - RNA, 18 nt, Human
gagagagaaagccaggca

SEQ ID NO: 2328286 - RNA, 20 nt, Human
gagagacccaaggaggaaaa

SEQ ID NO: 2328287 - RNA, 19 nt, Human
gagagacccaaggaggaaa

SEQ ID NO: 2328288 - RNA, 15 nt, Human
gagagacccaaggag

SEQ ID NO: 2328289 - RNA, 14 nt, Human
gagagacccaagga

SEQ ID NO: 2328290 - RNA, 14 nt, Human
gagagaccaggcaa

SEQ ID NO: 2328291 - RNA, 16 nt, Human
gagagaccaggcaaag

SEQ ID NO: 2328292 - RNA, 19 nt, Human
gagagacguguacauagug

SEQ ID NO: 2328293 - RNA, 16 nt, Human
gagagacguguacaua

SEQ ID NO: 2328294 - RNA, 17 nt, Human
gagagacguguacauag

SEQ ID NO: 2328295 - RNA, 20 nt, Human
gagagacguguacauagugu

SEQ ID NO: 2328296 - RNA, 15 nt, Human
gagagaccucaucag

SEQ ID NO: 2328297 - RNA, 17 nt, Human
gagagaccucaucagga

SEQ ID NO: 2328298 - RNA, 18 nt, Human
gagagaccucaucaggau

SEQ ID NO: 2328299 - RNA, 18 nt, Human
gagagggggccaccuccc

SEQ ID NO: 2328300 - RNA, 18 nt, Human
gagagggucuggagaagc

SEQ ID NO: 2328301 - RNA, 13 nt, Human
gagagggugacaa

SEQ ID NO: 2328302 - RNA, 13 nt, Human
gagagggucugga

SEQ ID NO: 2328303 - RNA, 14 nt, Human
gagagggugggagu

SEQ ID NO: 2328304 - RNA, 19 nt, Human
gagaguacagugagccaag

SEQ ID NO: 2328305 - RNA, 16 nt, Human
gagaguacagugagcc

SEQ ID NO: 2328306 - RNA, 20 nt, Human
gagagggugggagugggccc

SEQ ID NO: 2328307 - RNA, 16 nt, Human
gagagggugggagugg

SEQ ID NO: 2328308 - RNA, 13 nt, Human
gagaggggcacag

SEQ ID NO: 2328309 - RNA, 21 nt, Human
gagaggggaauaauagaagaa

SEQ ID NO: 2328310 - RNA, 18 nt, Human
gagaggggaagggccagu

SEQ ID NO: 2328311 - RNA, 21 nt, Human
gagaggggacaaaacccaccu

SEQ ID NO: 2328312 - RNA, 22 nt, Human
gagaggggacaaaacccaccuu

SEQ ID NO: 2328313 - RNA, 22 nt, Human
gagagccugcucccccaccccc

SEQ ID NO: 2328314 - RNA, 18 nt, Human
gagaggggaagaguguac

SEQ ID NO: 2328315 - RNA, 20 nt, Human
gagaggggaagaguguacug

SEQ ID NO: 2328316 - RNA, 21 nt, Human
gagaggggaagaguguacugg

SEQ ID NO: 2328317 - RNA, 22 nt, Human
gagaggggaagaguguacuggg

SEQ ID NO: 2328318 - RNA, 16 nt, Human
gagaggggaagggcca

SEQ ID NO: 2328319 - RNA, 17 nt, Human
gagaggggaagggccag

SEQ ID NO: 2328320 - RNA, 19 nt, Human
gagaggggaacagacugga

SEQ ID NO: 2328321 - RNA, 16 nt, Human
gagaguggcuccuccc

SEQ ID NO: 2328322 - RNA, 21 nt, Human
gagaguggcuccucccggugc

SEQ ID NO: 2328323 - RNA, 20 nt, Human
gagagugugaaauagacauu

SEQ ID NO: 2328324 - RNA, 21 nt, Human
gagagugucuucacggcagga

SEQ ID NO: 2328325 - RNA, 20 nt, Human
gagaguucaauggcugcuga

SEQ ID NO: 2328326 - RNA, 15 nt, Human
gagauaccagcgagg

SEQ ID NO: 2328327 - RNA, 21 nt, Human
gagaguucaauggcugcugaa

SEQ ID NO: 2328328 - RNA, 22 nt, Human
gagaguucaauggcugcugaag

SEQ ID NO: 2328329 - RNA, 22 nt, Human
gagaguagccgagagccugcuc

SEQ ID NO: 2328330 - RNA, 21 nt, Human
gagaguagccgagagccugcu

SEQ ID NO: 2328331 - RNA, 20 nt, Human
gagaguagccgagagccugc

SEQ ID NO: 2328332 - RNA, 18 nt, Human
gagaguagccgagagccu

SEQ ID NO: 2328333 - RNA, 15 nt, Human
gagaguagaacagau

SEQ ID NO: 2328334 - RNA, 17 nt, Human
gagagucauauuuugau

SEQ ID NO: 2328335 - RNA, 15 nt, Human
gagaguauauuaugu

SEQ ID NO: 2328336 - RNA, 15 nt, Human
gagagucccacugcc

SEQ ID NO: 2328337 - RNA, 20 nt, Human
gagagucccacugccucagg

SEQ ID NO: 2328338 - RNA, 21 nt, Human
gagagucccacugccucaggu

SEQ ID NO: 2328339 - RNA, 13 nt, Human
gagaguggcuccu

SEQ ID NO: 2328340 - RNA, 19 nt, Human
gagagucccagagcaggag

SEQ ID NO: 2328341 - RNA, 15 nt, Human
gagaguccucuggau

SEQ ID NO: 2328342 - RNA, 22 nt, Human
gagagucccacugccucagguu

SEQ ID NO: 2328343 - RNA, 15 nt, Human
gagagucccagagca

SEQ ID NO: 2328344 - RNA, 17 nt, Human
gagagucccagagcagg

SEQ ID NO: 2328345 - RNA, 18 nt, Human
gagagucccagagcagga

SEQ ID NO: 2328346 - RNA, 20 nt, Human
gagcaaggguucccucaaga

SEQ ID NO: 2328347 - RNA, 13 nt, Human
gagcaagucugca

SEQ ID NO: 2328348 - RNA, 15 nt, Human
gagcaagucugcagg

SEQ ID NO: 2328349 - RNA, 16 nt, Human
gagcaagucugcaggu

SEQ ID NO: 2328350 - RNA, 21 nt, Human
gagcaagucugcaggugcacc

SEQ ID NO: 2328351 - RNA, 18 nt, Human
gagcaaguuccuucuggu

SEQ ID NO: 2328352 - RNA, 20 nt, Human
gagcaagcauuuauguuuau

SEQ ID NO: 2328353 - RNA, 14 nt, Human
gagcaagagcuggc

SEQ ID NO: 2328354 - RNA, 15 nt, Human
gagcaaugucugugc

SEQ ID NO: 2328355 - RNA, 16 nt, Human
gagcaaugucugugcu

SEQ ID NO: 2328356 - RNA, 17 nt, Human
gagcaaugucugugcua

SEQ ID NO: 2328357 - RNA, 20 nt, Human
gagcaccuuagacagucccu

SEQ ID NO: 2328358 - RNA, 13 nt, Human
gagcaacauuuua

SEQ ID NO: 2328359 - RNA, 20 nt, Human
gagcaacagagugagacccu

SEQ ID NO: 2328360 - RNA, 14 nt, Human
gagcaaauguuucu

SEQ ID NO: 2328361 - RNA, 15 nt, Human
gagcaaauguuucug

SEQ ID NO: 2328362 - RNA, 16 nt, Human
gagcaaauguuucugc

SEQ ID NO: 2328363 - RNA, 19 nt, Human
gagcaaauguuucugcagu

SEQ ID NO: 2328364 - RNA, 12 nt, Human
gagcaagacucu

SEQ ID NO: 2328365 - RNA, 14 nt, Human
gagcaagacucugu

SEQ ID NO: 2328366 - RNA, 12 nt, Human
gagcaagagcug

SEQ ID NO: 2328367 - RNA, 13 nt, Human
gagcaagagcugg

SEQ ID NO: 2328368 - RNA, 20 nt, Human
gagcacucccaagucuacag

SEQ ID NO: 2328369 - RNA, 20 nt, Human
gagcagacuggugagcagac

SEQ ID NO: 2328370 - RNA, 19 nt, Human
gagcagacuggugagcaga

SEQ ID NO: 2328371 - RNA, 18 nt, Human
gagcagacuggugagcag

SEQ ID NO: 2328372 - RNA, 21 nt, Human
gagcacuaaggugugcucuga

SEQ ID NO: 2328373 - RNA, 15 nt, Human
gagcacucccaaguc

SEQ ID NO: 2328374 - RNA, 17 nt, Human
gagcaccuuccucacuu

SEQ ID NO: 2328375 - RNA, 19 nt, Human
gagcaccuuccucacuucc

SEQ ID NO: 2328376 - RNA, 20 nt, Human
gagcaccuuccucacuucca

SEQ ID NO: 2328377 - RNA, 20 nt, Human
gagcacggccaacaaagcug

SEQ ID NO: 2328378 - RNA, 15 nt, Human
gagcacuaaggugug

SEQ ID NO: 2328379 - RNA, 16 nt, Human
gagcaccuuccucacu

SEQ ID NO: 2328380 - RNA, 21 nt, Human
gagcaccuuagacagucccug

SEQ ID NO: 2328381 - RNA, 22 nt, Human
gagcaccuuagacagucccugc

SEQ ID NO: 2328382 - RNA, 20 nt, Human
gagaugaagcaaacacauua

SEQ ID NO: 2328383 - RNA, 16 nt, Human
gagaugaauuaaauuu

SEQ ID NO: 2328384 - RNA, 16 nt, Human
gagaugacugaguccu

SEQ ID NO: 2328385 - RNA, 13 nt, Human
gagaugacugagu

SEQ ID NO: 2328386 - RNA, 18 nt, Human
gagaugaagcaaacacau

SEQ ID NO: 2328387 - RNA, 15 nt, Human
gagaugaagcaaaca

SEQ ID NO: 2328388 - RNA, 17 nt, Human
gagaucccgccucuucu

SEQ ID NO: 2328389 - RNA, 12 nt, Human
gagauccuccug

SEQ ID NO: 2328390 - RNA, 20 nt, Human
gagcaaagugaagacacugg

SEQ ID NO: 2328391 - RNA, 14 nt, Human
gagcaaagugaggg

SEQ ID NO: 2328392 - RNA, 16 nt, Human
gagcaaagucuaaagu

SEQ ID NO: 2328393 - RNA, 19 nt, Human
gagcaaagucuaaaguuua

SEQ ID NO: 2328394 - RNA, 22 nt, Human
gagcaaaggggucccauagagg

SEQ ID NO: 2328395 - RNA, 22 nt, Human
gagcaaaggcugagaacacugu

SEQ ID NO: 2328396 - RNA, 14 nt, Human
gagcaaagucuaaa

SEQ ID NO: 2328397 - RNA, 18 nt, Human
gagaugaugaaaauauuu

SEQ ID NO: 2328398 - RNA, 13 nt, Human
gagcaaaggcuga

SEQ ID NO: 2328399 - RNA, 16 nt, Human
gagcaaaggcugagaa

SEQ ID NO: 2328400 - RNA, 21 nt, Human
gagaugacugaguccucguag

SEQ ID NO: 2328401 - RNA, 17 nt, Human
gagaugaggccgccaug

SEQ ID NO: 2328402 - RNA, 22 nt, Human
gagaugauacauccaaagcaga

SEQ ID NO: 2328403 - RNA, 16 nt, Human
gagaucacgccacugc

SEQ ID NO: 2328404 - RNA, 18 nt, Human
gagaucacgccacugcac

SEQ ID NO: 2328405 - RNA, 18 nt, Human
gagaucaggcucugccuc

SEQ ID NO: 2328406 - RNA, 16 nt, Human
gagaucauccuuucca

SEQ ID NO: 2328407 - RNA, 20 nt, Human
gagaucauccuuuccagcau

SEQ ID NO: 2328408 - RNA, 22 nt, Human
gagauccaaaagaagcccccag

SEQ ID NO: 2328409 - RNA, 21 nt, Human
gagauccaaaagaagccccca

SEQ ID NO: 2328410 - RNA, 19 nt, Human
gagaucacgccacugcacu

SEQ ID NO: 2328411 - RNA, 16 nt, Human
gagauagaagaacugc

SEQ ID NO: 2328412 - RNA, 12 nt, Human
gagauagcauug

SEQ ID NO: 2328413 - RNA, 15 nt, Human
gagauagcauuguga

SEQ ID NO: 2328414 - RNA, 16 nt, Human
gagauagcauugugaa

SEQ ID NO: 2328415 - RNA, 20 nt, Human
gagauagcauugugaacuga

SEQ ID NO: 2328416 - RNA, 23 nt, Human
gagauagcauugugaacugacag

SEQ ID NO: 2328417 - RNA, 14 nt, Human
gagauagccaaggc

SEQ ID NO: 2328418 - RNA, 23 nt, Human
gagaucaaccccuucgcuccugu

SEQ ID NO: 2328419 - RNA, 16 nt, Human
gagauagccaaggcca

SEQ ID NO: 2328420 - RNA, 21 nt, Human
gagccagcagccuggcucucc

SEQ ID NO: 2328421 - RNA, 14 nt, Human
gagccagcccuccc

SEQ ID NO: 2328422 - RNA, 13 nt, Human
gagccagcccucc

SEQ ID NO: 2328423 - RNA, 12 nt, Human
gagccagcccuc

SEQ ID NO: 2328424 - RNA, 14 nt, Human
gagccagggucuca

SEQ ID NO: 2328425 - RNA, 23 nt, Human
gagccagauuucacucuccuugg

SEQ ID NO: 2328426 - RNA, 12 nt, Human
gagccagcagac

SEQ ID NO: 2328427 - RNA, 15 nt, Human
gagccagcagacauu

SEQ ID NO: 2328428 - RNA, 17 nt, Human
gagccagcagacauugu

SEQ ID NO: 2328429 - RNA, 20 nt, Human
gagccagcagacauugucag

SEQ ID NO: 2328430 - RNA, 22 nt, Human
gagccagcagacauugucagca

SEQ ID NO: 2328431 - RNA, 23 nt, Human
gagccagcagacauugucagcaa

SEQ ID NO: 2328432 - RNA, 19 nt, Human
gagccaguucaguaccugg

SEQ ID NO: 2328433 - RNA, 21 nt, Human
gagccaguucaguaccuggag

SEQ ID NO: 2328434 - RNA, 13 nt, Human
gagccagucccag

SEQ ID NO: 2328435 - RNA, 15 nt, Human
gagccagucccaggg

SEQ ID NO: 2328436 - RNA, 19 nt, Human
gagccauauaaguuugaag

SEQ ID NO: 2328437 - RNA, 22 nt, Human
gagccaguucaguaccuggagg

SEQ ID NO: 2328438 - RNA, 23 nt, Human
gagccaguucaguaccuggagga

SEQ ID NO: 2328439 - RNA, 23 nt, Human
gagcccacuguacuugcucuuga

SEQ ID NO: 2328440 - RNA, 24 nt, Human
gagcccacuguccugggccugcag

SEQ ID NO: 2328441 - RNA, 19 nt, Human
gagcccacuguccugggcc

SEQ ID NO: 2328442 - RNA, 16 nt, Human
gagccagcccucccug

SEQ ID NO: 2328443 - RNA, 15 nt, Human
gagccagcccucccu

SEQ ID NO: 2328444 - RNA, 18 nt, Human
gagccagguaaugaggga

SEQ ID NO: 2328445 - RNA, 19 nt, Human
gagccagguaaugagggac

SEQ ID NO: 2328446 - RNA, 22 nt, Human
gagccagguaaugagggacugg

SEQ ID NO: 2328447 - RNA, 18 nt, Human
gagccaguaaacagagga

SEQ ID NO: 2328448 - RNA, 19 nt, Human
gagccagggucucacuaug

SEQ ID NO: 2328449 - RNA, 18 nt, Human
gagcccagcccuccccau

SEQ ID NO: 2328450 - RNA, 13 nt, Human
gagcccagcucca

SEQ ID NO: 2328451 - RNA, 12 nt, Human
gagcccagcucc

SEQ ID NO: 2328452 - RNA, 14 nt, Human
gagcccagcuccaa

SEQ ID NO: 2328453 - RNA, 12 nt, Human
gagcccagcucu

SEQ ID NO: 2328454 - RNA, 21 nt, Human
gagcccagcucugaaaccagu

SEQ ID NO: 2328455 - RNA, 14 nt, Human
gagcccagcucuga

SEQ ID NO: 2328456 - RNA, 22 nt, Human
gagcccagccauuaccauggag

SEQ ID NO: 2328457 - RNA, 15 nt, Human
gagcccagcccuccc

SEQ ID NO: 2328458 - RNA, 23 nt, Human
gagcccagagguaacagaacagc

SEQ ID NO: 2328459 - RNA, 14 nt, Human
gagcccagaggagg

SEQ ID NO: 2328460 - RNA, 22 nt, Human
gagcccagaggagggcagcaga

SEQ ID NO: 2328461 - RNA, 21 nt, Human
gagcccagagguaacagaaca

SEQ ID NO: 2328462 - RNA, 22 nt, Human
gagcccagagguaacagaacag

SEQ ID NO: 2328463 - RNA, 12 nt, Human
gagcccaggagu

SEQ ID NO: 2328464 - RNA, 11 nt, Human
gagcccaggag

SEQ ID NO: 2328465 - RNA, 22 nt, Human
gagcccagcugggucaggcagg

SEQ ID NO: 2328466 - RNA, 21 nt, Human
gagcccagcugggucaggcag

SEQ ID NO: 2328467 - RNA, 19 nt, Human
gagcccagcugggucaggc

SEQ ID NO: 2328468 - RNA, 13 nt, Human
gagcccagcuggg

SEQ ID NO: 2328469 - RNA, 18 nt, Human
gagcccugguggcagugg

SEQ ID NO: 2328470 - RNA, 23 nt, Human
gagcccaggaguucgaggcugca

SEQ ID NO: 2328471 - RNA, 20 nt, Human
gagccaacagaagcuuccau

SEQ ID NO: 2328472 - RNA, 14 nt, Human
gagccaacugcugc

SEQ ID NO: 2328473 - RNA, 15 nt, Human
gagccaacugcugcu

SEQ ID NO: 2328474 - RNA, 21 nt, Human
gagccaagaucgcgccacugc

SEQ ID NO: 2328475 - RNA, 17 nt, Human
gagcauuuagggcaagg

SEQ ID NO: 2328476 - RNA, 19 nt, Human
gagcauuguggcugucagc

SEQ ID NO: 2328477 - RNA, 15 nt, Human
gagcauuggcugaga

SEQ ID NO: 2328478 - RNA, 23 nt, Human
gagcauuuccaacaccacagaca

SEQ ID NO: 2328479 - RNA, 17 nt, Human
gagcauugccauucccu

SEQ ID NO: 2328480 - RNA, 21 nt, Human
gagcauuacgugagccaggua

SEQ ID NO: 2328481 - RNA, 18 nt, Human
gagcauuacgugagccag

SEQ ID NO: 2328482 - RNA, 20 nt, Human
gagcauuacgugagccaggu

SEQ ID NO: 2328483 - RNA, 21 nt, Human
gagcauuagauuucucauuug

SEQ ID NO: 2328484 - RNA, 15 nt, Human
gagcauuagauuucu

SEQ ID NO: 2328485 - RNA, 14 nt, Human
gagccaaguccaga

SEQ ID NO: 2328486 - RNA, 23 nt, Human
gagccaaggguucagagacucag

SEQ ID NO: 2328487 - RNA, 20 nt, Human
gagccagauuucacucuccu

SEQ ID NO: 2328488 - RNA, 19 nt, Human
gagccaaggguucagagac

SEQ ID NO: 2328489 - RNA, 19 nt, Human
gagccaauuuaaagaaaac

SEQ ID NO: 2328490 - RNA, 24 nt, Human
gagcagagacaugacucagccugu

SEQ ID NO: 2328491 - RNA, 21 nt, Human
gagcagagacacuaacgacuu

SEQ ID NO: 2328492 - RNA, 13 nt, Human
gagcagagacacu

SEQ ID NO: 2328493 - RNA, 12 nt, Human
gagcagagacac

SEQ ID NO: 2328494 - RNA, 15 nt, Human
gagcagacugguggg

SEQ ID NO: 2328495 - RNA, 23 nt, Human
gagcagacuggugagcagacugg

SEQ ID NO: 2328496 - RNA, 16 nt, Human
gagcagagaauucucu

SEQ ID NO: 2328497 - RNA, 18 nt, Human
gagcagcgguuuggggag

SEQ ID NO: 2328498 - RNA, 12 nt, Human
gagcagagacca

SEQ ID NO: 2328499 - RNA, 17 nt, Human
gagcauuacgugagcca

SEQ ID NO: 2328500 - RNA, 22 nt, Human
gagcaggaccucugaaacccug

SEQ ID NO: 2328501 - RNA, 22 nt, Human
gagcaggaagcauucagagagc

SEQ ID NO: 2328502 - RNA, 15 nt, Human
gagcagcuucaguug

SEQ ID NO: 2328503 - RNA, 16 nt, Human
gagcagcuucugccac

SEQ ID NO: 2328504 - RNA, 17 nt, Human
gagcagcuucugccacu

SEQ ID NO: 2328505 - RNA, 20 nt, Human
gagcagcuucugccacuucc

SEQ ID NO: 2328506 - RNA, 21 nt, Human
gagcagcuucugccacuuccc

SEQ ID NO: 2328507 - RNA, 17 nt, Human
gagcagcuuuaaacuca

SEQ ID NO: 2328508 - RNA, 18 nt, Human
gagcagcuuuaaacucag

SEQ ID NO: 2328509 - RNA, 21 nt, Human
gagcagcuuuaaacucaggga

SEQ ID NO: 2328510 - RNA, 22 nt, Human
gagcagcuuuaaacucagggac

SEQ ID NO: 2328511 - RNA, 23 nt, Human
gagcagcuuuaaacucagggaca

SEQ ID NO: 2328512 - RNA, 16 nt, Human
gagcaggaagcauuca

SEQ ID NO: 2328513 - RNA, 23 nt, Human
gagcaggaagcauucagagagca

SEQ ID NO: 2328514 - RNA, 14 nt, Human
cugccuccccaacc

SEQ ID NO: 2328515 - RNA, 12 nt, Human
cugccuccccaa

SEQ ID NO: 2328516 - RNA, 18 nt, Human
cugccuccauucugacca

SEQ ID NO: 2328517 - RNA, 16 nt, Human
cugccucccauucuga

SEQ ID NO: 2328518 - RNA, 19 nt, Human
cugccuccccaacccugcc

SEQ ID NO: 2328519 - RNA, 18 nt, Human
cugccuccccaacccugc

SEQ ID NO: 2328520 - RNA, 16 nt, Human
cugccuccccaacccu

SEQ ID NO: 2328521 - RNA, 15 nt, Human
cugccuccccaaccc

SEQ ID NO: 2328522 - RNA, 20 nt, Human
cugccucucugcaggucccu

SEQ ID NO: 2328523 - RNA, 21 nt, Human
cugccucucugcaggucccua

SEQ ID NO: 2328524 - RNA, 15 nt, Human
cugccucugacacac

SEQ ID NO: 2328525 - RNA, 22 nt, Human
cugccucucugcaggucccuaa

SEQ ID NO: 2328526 - RNA, 22 nt, Human
cugccucugacacacagcucug

SEQ ID NO: 2328527 - RNA, 23 nt, Human
cugccucugacacacagcucugu

SEQ ID NO: 2328528 - RNA, 13 nt, Human
cugccuaagcccu

SEQ ID NO: 2328529 - RNA, 11 nt, Human
cugccucccau

SEQ ID NO: 2328530 - RNA, 14 nt, Human
cugccgugugcccu

SEQ ID NO: 2328531 - RNA, 12 nt, Human
cugccucccauc

SEQ ID NO: 2328532 - RNA, 14 nt, Human
cugccucccaucac

SEQ ID NO: 2328533 - RNA, 16 nt, Human
cugccucccaucaccc

SEQ ID NO: 2328534 - RNA, 19 nt, Human
cugccucccaucacccgcu

SEQ ID NO: 2328535 - RNA, 14 nt, Human
cugccuuggcucag

SEQ ID NO: 2328536 - RNA, 22 nt, Human
cugccuuggcucagacauguuu

SEQ ID NO: 2328537 - RNA, 18 nt, Human
cugccuuggcucagacau

SEQ ID NO: 2328538 - RNA, 17 nt, Human
cugccuuggcucagaca

SEQ ID NO: 2328539 - RNA, 15 nt, Human
cugccuuggcucaga

SEQ ID NO: 2328540 - RNA, 21 nt, Human
cugccugggaucccucauccu

SEQ ID NO: 2328541 - RNA, 20 nt, Human
cugccuggcccccagcugug

SEQ ID NO: 2328542 - RNA, 16 nt, Human
cugccuggcccccagc

SEQ ID NO: 2328543 - RNA, 14 nt, Human
cugccuggccccca

SEQ ID NO: 2328544 - RNA, 18 nt, Human
cugccuggcccccugucc

SEQ ID NO: 2328545 - RNA, 17 nt, Human
cugccuggccaggcaga

SEQ ID NO: 2328546 - RNA, 16 nt, Human
cugccuggccaggcag

SEQ ID NO: 2328547 - RNA, 21 nt, Human
cugccuggccaggcagaucug

SEQ ID NO: 2328548 - RNA, 15 nt, Human
cugccuggccaggca

SEQ ID NO: 2328549 - RNA, 13 nt, Human
cugccuggccagg

SEQ ID NO: 2328550 - RNA, 12 nt, Human
cugccuggccag

SEQ ID NO: 2328551 - RNA, 17 nt, Human
cugccugaaccuuccau

SEQ ID NO: 2328552 - RNA, 18 nt, Human
cugccucugccugcauuc

SEQ ID NO: 2328553 - RNA, 20 nt, Human
cugccugcccaggccccugc

SEQ ID NO: 2328554 - RNA, 15 nt, Human
cugccugaagucaca

SEQ ID NO: 2328555 - RNA, 22 nt, Human
cugccucuucugggagggcagc

SEQ ID NO: 2328556 - RNA, 16 nt, Human
cugccucuucuguggg

SEQ ID NO: 2328557 - RNA, 16 nt, Human
cugccugcccaggccc

SEQ ID NO: 2328558 - RNA, 17 nt, Human
cugccugcccaggcccc

SEQ ID NO: 2328559 - RNA, 15 nt, Human
cugccucuucucuac

SEQ ID NO: 2328560 - RNA, 17 nt, Human
cugccucuucugggagg

SEQ ID NO: 2328561 - RNA, 16 nt, Human
cugccucuucugggag

SEQ ID NO: 2328562 - RNA, 20 nt, Human
cugccucugccugcauucug

SEQ ID NO: 2328563 - RNA, 17 nt, Human
cugccucugccugcauu

SEQ ID NO: 2328564 - RNA, 14 nt, Human
cugccucugccugc

SEQ ID NO: 2328565 - RNA, 21 nt, Human
cugccucugagggaaagccca

SEQ ID NO: 2328566 - RNA, 22 nt, Human
cugccuccccaacccugccccu

SEQ ID NO: 2328567 - RNA, 14 nt, Human
cugccucugaggga

SEQ ID NO: 2328568 - RNA, 15 nt, Human
cugccucugagggaa

SEQ ID NO: 2328569 - RNA, 19 nt, Human
cugccucucugcagguccc

SEQ ID NO: 2328570 - RNA, 12 nt, Human
cugcccuaggcu

SEQ ID NO: 2328571 - RNA, 22 nt, Human
cugcccuagcuccacacccucu

SEQ ID NO: 2328572 - RNA, 16 nt, Human
cugcccuagcuccaca

SEQ ID NO: 2328573 - RNA, 15 nt, Human
cugcccuagcuccac

SEQ ID NO: 2328574 - RNA, 21 nt, Human
cugcccuagagcacacuguag

SEQ ID NO: 2328575 - RNA, 19 nt, Human
cugcccuagagcacacugu

SEQ ID NO: 2328576 - RNA, 13 nt, Human
cucccuggccugu

SEQ ID NO: 2328577 - RNA, 19 nt, Human
cucccuucaugcauggaaa

SEQ ID NO: 2328578 - RNA, 15 nt, Human
cugcccuagagcaca

SEQ ID NO: 2328579 - RNA, 18 nt, Human
cugcccuaggcuccguca

SEQ ID NO: 2328580 - RNA, 12 nt, Human
cugcccucaggg

SEQ ID NO: 2328581 - RNA, 19 nt, Human
cugcccucauggccccucu

SEQ ID NO: 2328582 - RNA, 12 nt, Human
cugcccuccaag

SEQ ID NO: 2328583 - RNA, 14 nt, Human
cucccuucccaccu

SEQ ID NO: 2328584 - RNA, 15 nt, Human
cucccuucccaccuc

SEQ ID NO: 2328585 - RNA, 16 nt, Human
cucccuucccaccucu

SEQ ID NO: 2328586 - RNA, 17 nt, Human
cucccuucccaccucuc

SEQ ID NO: 2328587 - RNA, 12 nt, Human
cugcccuuccuc

SEQ ID NO: 2328588 - RNA, 16 nt, Human
cugcccuggcugcugc

SEQ ID NO: 2328589 - RNA, 17 nt, Human
cugcccuggcugcugcc

SEQ ID NO: 2328590 - RNA, 14 nt, Human
cugcccuuccucag

SEQ ID NO: 2328591 - RNA, 15 nt, Human
cugcccuuccucagu

SEQ ID NO: 2328592 - RNA, 12 nt, Human
cugcccuggcug

SEQ ID NO: 2328593 - RNA, 23 nt, Human
cugcccuggcccugagguguggg

SEQ ID NO: 2328594 - RNA, 14 nt, Human
cugcccuggcugcu

SEQ ID NO: 2328595 - RNA, 16 nt, Human
cugcccuggcccugag

SEQ ID NO: 2328596 - RNA, 17 nt, Human
cugcccuggcccugagg

SEQ ID NO: 2328597 - RNA, 18 nt, Human
cugcccuggcccugaggu

SEQ ID NO: 2328598 - RNA, 22 nt, Human
cugcccuggcccugaggugugg

SEQ ID NO: 2328599 - RNA, 22 nt, Human
cugcccugcugccgccucccag

SEQ ID NO: 2328600 - RNA, 21 nt, Human
cugcccugcugccgccuccca

SEQ ID NO: 2328601 - RNA, 22 nt, Human
cugcccugcugagucccaggcu

SEQ ID NO: 2328602 - RNA, 16 nt, Human
cugcccugccugaggg

SEQ ID NO: 2328603 - RNA, 12 nt, Human
cugcccuggccc

SEQ ID NO: 2328604 - RNA, 13 nt, Human
cugcccuggcccu

SEQ ID NO: 2328605 - RNA, 14 nt, Human
cugcccuggcccug

SEQ ID NO: 2328606 - RNA, 15 nt, Human
cugcccuggcccuga

SEQ ID NO: 2328607 - RNA, 11 nt, Human
cugcccugcug

SEQ ID NO: 2328608 - RNA, 13 nt, Human
cugcccucaggga

SEQ ID NO: 2328609 - RNA, 20 nt, Human
cugcccugcgggucacagga

SEQ ID NO: 2328610 - RNA, 12 nt, Human
cugcccucaugg

SEQ ID NO: 2328611 - RNA, 21 nt, Human
cugccgguaaacacgccugca

SEQ ID NO: 2328612 - RNA, 18 nt, Human
cugccgguaaacacgccu

SEQ ID NO: 2328613 - RNA, 19 nt, Human
cugccggguucuagucucc

SEQ ID NO: 2328614 - RNA, 20 nt, Human
cugccggguucuagucuccu

SEQ ID NO: 2328615 - RNA, 21 nt, Human
cugccggguucuagucuccuu

SEQ ID NO: 2328616 - RNA, 23 nt, Human
cugccggguucuagucuccuuug

SEQ ID NO: 2328617 - RNA, 13 nt, Human
cugccguggggcc

SEQ ID NO: 2328618 - RNA, 20 nt, Human
cugccguggggccgccgccu

SEQ ID NO: 2328619 - RNA, 21 nt, Human
cugccguggggccgccgccuc

SEQ ID NO: 2328620 - RNA, 14 nt, Human
cugccggcucuuuc

SEQ ID NO: 2328621 - RNA, 20 nt, Human
cugccggcucuuuccuugcu

SEQ ID NO: 2328622 - RNA, 22 nt, Human
cugccggcucuuuccuugcuca

SEQ ID NO: 2328623 - RNA, 19 nt, Human
cugccgcaauacaggaacc

SEQ ID NO: 2328624 - RNA, 17 nt, Human
cugccgcaauacaggaa

SEQ ID NO: 2328625 - RNA, 18 nt, Human
cugccgcaauacaggaac

SEQ ID NO: 2328626 - RNA, 14 nt, Human
cugccggguucuag

SEQ ID NO: 2328627 - RNA, 17 nt, Human
cugccgcagcccugcag

SEQ ID NO: 2328628 - RNA, 18 nt, Human
cugccgcagcccugcaga

SEQ ID NO: 2328629 - RNA, 19 nt, Human
cugccgaccucguccuccc

SEQ ID NO: 2328630 - RNA, 17 nt, Human
cugccgaccucguccuc

SEQ ID NO: 2328631 - RNA, 15 nt, Human
cugccgaccucgucc

SEQ ID NO: 2328632 - RNA, 23 nt, Human
cugccgaccgaggcuggagcugg

SEQ ID NO: 2328633 - RNA, 19 nt, Human
cugccgacuccuggguuga

SEQ ID NO: 2328634 - RNA, 14 nt, Human
cugccgacuccugg

SEQ ID NO: 2328635 - RNA, 15 nt, Human
cugccgacuccuggg

SEQ ID NO: 2328636 - RNA, 14 nt, Human
cugccgcagcccug

SEQ ID NO: 2328637 - RNA, 17 nt, Human
cugccgcaacaguuuuu

SEQ ID NO: 2328638 - RNA, 15 nt, Human
cugccgcagcccugc

SEQ ID NO: 2328639 - RNA, 18 nt, Human
cugcccuugucccacuca

SEQ ID NO: 2328640 - RNA, 17 nt, Human
cugcccuugucccacuc

SEQ ID NO: 2328641 - RNA, 15 nt, Human
cugcccuugucccac

SEQ ID NO: 2328642 - RNA, 22 nt, Human
cugcccuuccucaguuuaaucc

SEQ ID NO: 2328643 - RNA, 23 nt, Human
cugcccuugucccacucaagcca

SEQ ID NO: 2328644 - RNA, 16 nt, Human
cugcccuugucugaga

SEQ ID NO: 2328645 - RNA, 21 nt, Human
cugcccuuucugggcaccggg

SEQ ID NO: 2328646 - RNA, 13 nt, Human
cugccgaccagag

SEQ ID NO: 2328647 - RNA, 22 nt, Human
cugccgaccgaggcuggagcug

SEQ ID NO: 2328648 - RNA, 21 nt, Human
cugccgaccgaggcuggagcu

SEQ ID NO: 2328649 - RNA, 16 nt, Human
cugccgaccgaggcug

SEQ ID NO: 2328650 - RNA, 16 nt, Human
cugccgaccagagccc

SEQ ID NO: 2328651 - RNA, 15 nt, Human
cugccgaccagagcc

SEQ ID NO: 2328652 - RNA, 20 nt, Human
cugcgacuuucugccuggag

SEQ ID NO: 2328653 - RNA, 18 nt, Human
cugcgacuuucugccugg

SEQ ID NO: 2328654 - RNA, 19 nt, Human
cugcgacuuucugccugga

SEQ ID NO: 2328655 - RNA, 19 nt, Human
cugcuccagcuguucagcu

SEQ ID NO: 2328656 - RNA, 20 nt, Human
cugcuccagcuguucagcug

SEQ ID NO: 2328657 - RNA, 14 nt, Human
cugcgaucuucaga

SEQ ID NO: 2328658 - RNA, 17 nt, Human
cugcgaucuucagagca

SEQ ID NO: 2328659 - RNA, 19 nt, Human
cugcgaucuucagagcagg

SEQ ID NO: 2328660 - RNA, 17 nt, Human
cugcgauuuugccugug

SEQ ID NO: 2328661 - RNA, 20 nt, Human
cugccuuuagucgcugagga

SEQ ID NO: 2328662 - RNA, 12 nt, Human
cugccuuuauug

SEQ ID NO: 2328663 - RNA, 14 nt, Human
cugccuuguguaca

SEQ ID NO: 2328664 - RNA, 19 nt, Human
cugcgaccacaagaaggau

SEQ ID NO: 2328665 - RNA, 14 nt, Human
cugcgacuuucugc

SEQ ID NO: 2328666 - RNA, 16 nt, Human
cugcgacuuucugccu

SEQ ID NO: 2328667 - RNA, 17 nt, Human
cugcgacuuucugccug

SEQ ID NO: 2328668 - RNA, 15 nt, Human
cugccuuuauugugu

SEQ ID NO: 2328669 - RNA, 17 nt, Human
cugccuuuauuguguuu

SEQ ID NO: 2328670 - RNA, 18 nt, Human
cugccuuuauuguguuug

SEQ ID NO: 2328671 - RNA, 24 nt, Human
cugcuccuccagggccacgugcca

SEQ ID NO: 2328672 - RNA, 22 nt, Human
cugcuccuccagggccacgugc

SEQ ID NO: 2328673 - RNA, 12 nt, Human
cugcuccucccu

SEQ ID NO: 2328674 - RNA, 13 nt, Human
cugcuccucccug

SEQ ID NO: 2328675 - RNA, 17 nt, Human
cugcuccuccagggcca

SEQ ID NO: 2328676 - RNA, 16 nt, Human
cugcuccuccagggcc

SEQ ID NO: 2328677 - RNA, 14 nt, Human
cugcuccuccaggg

SEQ ID NO: 2328678 - RNA, 13 nt, Human
cugcuccuccagg

SEQ ID NO: 2328679 - RNA, 14 nt, Human
cugcuccucauggu

SEQ ID NO: 2328680 - RNA, 13 nt, Human
cugcuccucaugg

SEQ ID NO: 2328681 - RNA, 11 nt, Human
cugcuccucca

SEQ ID NO: 2328682 - RNA, 12 nt, Human
cugcuccuccag

SEQ ID NO: 2328683 - RNA, 22 nt, Human
cugcuccuagagggaggggccu

SEQ ID NO: 2328684 - RNA, 21 nt, Human
cugcuccuagagggaggggcc

SEQ ID NO: 2328685 - RNA, 17 nt, Human
cugcuccuagagggagg

SEQ ID NO: 2328686 - RNA, 15 nt, Human
cugcuccuagaggga

SEQ ID NO: 2328687 - RNA, 14 nt, Human
cugcuccuagaggg

SEQ ID NO: 2328688 - RNA, 20 nt, Human
cugcgaucuucagagcaggg

SEQ ID NO: 2328689 - RNA, 19 nt, Human
cugcucuccgaccagacac

SEQ ID NO: 2328690 - RNA, 14 nt, Human
cugcuccucccugg

SEQ ID NO: 2328691 - RNA, 15 nt, Human
cugcuccucccuggc

SEQ ID NO: 2328692 - RNA, 16 nt, Human
cugcuccucccuggcu

SEQ ID NO: 2328693 - RNA, 17 nt, Human
cugcuccucccuggcug

SEQ ID NO: 2328694 - RNA, 18 nt, Human
cugcuccucccuggcugc

SEQ ID NO: 2328695 - RNA, 19 nt, Human
cugcuccucccuggcugcc

SEQ ID NO: 2328696 - RNA, 20 nt, Human
cugcuccucccuggcugccc

SEQ ID NO: 2328697 - RNA, 21 nt, Human
cugcuccucccuggcugcccu

SEQ ID NO: 2328698 - RNA, 14 nt, Human
cugcucuccucuug

SEQ ID NO: 2328699 - RNA, 20 nt, Human
cugcucuccucuugccacug

SEQ ID NO: 2328700 - RNA, 13 nt, Human
cugcuccucucca

SEQ ID NO: 2328701 - RNA, 22 nt, Human
cugcuccucccuggcugcccug

SEQ ID NO: 2328702 - RNA, 23 nt, Human
cugcuccucccuggcugcccugg

SEQ ID NO: 2328703 - RNA, 21 nt, Human
cugcucuccucuugccacugc

SEQ ID NO: 2328704 - RNA, 12 nt, Human
cugcucuccuuc

SEQ ID NO: 2328705 - RNA, 13 nt, Human
cugcucuccuucc

SEQ ID NO: 2328706 - RNA, 17 nt, Human
cugcugaaggaauaaau

SEQ ID NO: 2328707 - RNA, 18 nt, Human
cugcugaaggaauaaauu

SEQ ID NO: 2328708 - RNA, 15 nt, Human
cugcucuccuuccug

SEQ ID NO: 2328709 - RNA, 21 nt, Human
cugcugaagaugaaucaaugg

SEQ ID NO: 2328710 - RNA, 15 nt, Human
cugcugaagcugccu

SEQ ID NO: 2328711 - RNA, 16 nt, Human
cugcugaagcugccug

SEQ ID NO: 2328712 - RNA, 19 nt, Human
cugcugaagcugccugcuu

SEQ ID NO: 2328713 - RNA, 20 nt, Human
cugcugaagcugccugcuuu

SEQ ID NO: 2328714 - RNA, 16 nt, Human
cugcugcagaggggca

SEQ ID NO: 2328715 - RNA, 17 nt, Human
cugcugcagaggggcag

SEQ ID NO: 2328716 - RNA, 18 nt, Human
cugcugcagaggggcagg

SEQ ID NO: 2328717 - RNA, 21 nt, Human
cugcugcagaggggcaggccc

SEQ ID NO: 2328718 - RNA, 22 nt, Human
cugcugcagaggggcaggcccu

SEQ ID NO: 2328719 - RNA, 22 nt, Human
cugcugcaaggccuuucugugu

SEQ ID NO: 2328720 - RNA, 23 nt, Human
cugcugcaaggccuuucugugug

SEQ ID NO: 2328721 - RNA, 15 nt, Human
cugcugcaccaaccc

SEQ ID NO: 2328722 - RNA, 17 nt, Human
cugcugcaccaacccag

SEQ ID NO: 2328723 - RNA, 18 nt, Human
cugcugcaccaacccagc

SEQ ID NO: 2328724 - RNA, 19 nt, Human
cugcugcaccaacccagcc

SEQ ID NO: 2328725 - RNA, 20 nt, Human
cugcugcaccaacccagccg

SEQ ID NO: 2328726 - RNA, 23 nt, Human
cugcugcaccaacccagccgcug

SEQ ID NO: 2328727 - RNA, 11 nt, Human
cugcugaaggc

SEQ ID NO: 2328728 - RNA, 13 nt, Human
cugcugcaaggcc

SEQ ID NO: 2328729 - RNA, 15 nt, Human
cugcugcaaggccuu

SEQ ID NO: 2328730 - RNA, 16 nt, Human
cugcugcaaggccuuu

SEQ ID NO: 2328731 - RNA, 19 nt, Human
cugcugcaaggccuuucug

SEQ ID NO: 2328732 - RNA, 21 nt, Human
cugcugcaaggccuuucugug

SEQ ID NO: 2328733 - RNA, 12 nt, Human
cugcugcccagc

SEQ ID NO: 2328734 - RNA, 15 nt, Human
cugcugcccagccuc

SEQ ID NO: 2328735 - RNA, 14 nt, Human
cugcugcccccacc

SEQ ID NO: 2328736 - RNA, 22 nt, Human
cugcugcccagccuccaagcuc

SEQ ID NO: 2328737 - RNA, 14 nt, Human
cugcugcccuccau

SEQ ID NO: 2328738 - RNA, 13 nt, Human
cugcugcccucca

SEQ ID NO: 2328739 - RNA, 17 nt, Human
cugcugcccuccauccc

SEQ ID NO: 2328740 - RNA, 12 nt, Human
cugcugcccucc

SEQ ID NO: 2328741 - RNA, 15 nt, Human
cugcugcccccaccc

SEQ ID NO: 2328742 - RNA, 12 nt, Human
cugcugcccagg

SEQ ID NO: 2328743 - RNA, 22 nt, Human
cugcugcccccaccccggggac

SEQ ID NO: 2328744 - RNA, 21 nt, Human
cugcugcccccaccccgggga

SEQ ID NO: 2328745 - RNA, 16 nt, Human
cugcugcauggggugg

SEQ ID NO: 2328746 - RNA, 22 nt, Human
cugcugccauggcgugucccuc

SEQ ID NO: 2328747 - RNA, 19 nt, Human
cugcugcaggggcucugga

SEQ ID NO: 2328748 - RNA, 20 nt, Human
cugcugcaggggcucuggag

SEQ ID NO: 2328749 - RNA, 23 nt, Human
cugcugcagaggggcaggcccug

SEQ ID NO: 2328750 - RNA, 11 nt, Human
cugcugcaggg

SEQ ID NO: 2328751 - RNA, 12 nt, Human
cugcugcagggg

SEQ ID NO: 2328752 - RNA, 13 nt, Human
cugcugcaggggc

SEQ ID NO: 2328753 - RNA, 14 nt, Human
cugcugcaggggcu

SEQ ID NO: 2328754 - RNA, 16 nt, Human
cugcugcaggggcucu

SEQ ID NO: 2328755 - RNA, 17 nt, Human
cugcugcaggggcucug

SEQ ID NO: 2328756 - RNA, 18 nt, Human
cugcugcaggggcucugg

SEQ ID NO: 2328757 - RNA, 15 nt, Human
cugcuuccagugagg

SEQ ID NO: 2328758 - RNA, 16 nt, Human
cugcuuccagugaggc

SEQ ID NO: 2328759 - RNA, 18 nt, Human
cugcuuccagugaggcuc

SEQ ID NO: 2328760 - RNA, 19 nt, Human
cugcuuccagugaggcucu

SEQ ID NO: 2328761 - RNA, 20 nt, Human
cugcuuccagugaggcucug

SEQ ID NO: 2328762 - RNA, 21 nt, Human
cugcuuccagugaggcucugc

SEQ ID NO: 2328763 - RNA, 23 nt, Human
cugcuuccagugaggcucugccc

SEQ ID NO: 2328764 - RNA, 23 nt, Human
cugcugggcucuccaccucagcc

SEQ ID NO: 2328765 - RNA, 12 nt, Human
cugcugggcugg

SEQ ID NO: 2328766 - RNA, 22 nt, Human
cugcugggcucuccaccucagc

SEQ ID NO: 2328767 - RNA, 21 nt, Human
cugcugggcucuccaccucag

SEQ ID NO: 2328768 - RNA, 19 nt, Human
cugcugggcucuccaccuc

SEQ ID NO: 2328769 - RNA, 18 nt, Human
cugcugggcucuccaccu

SEQ ID NO: 2328770 - RNA, 17 nt, Human
cugcugggcucuccacc

SEQ ID NO: 2328771 - RNA, 16 nt, Human
cugcugggcucuccac

SEQ ID NO: 2328772 - RNA, 11 nt, Human
cugcugggcuu

SEQ ID NO: 2328773 - RNA, 13 nt, Human
cugcugggcuggg

SEQ ID NO: 2328774 - RNA, 14 nt, Human
cugcugggcugggg

SEQ ID NO: 2328775 - RNA, 15 nt, Human
cugcugggcuggggc

SEQ ID NO: 2328776 - RNA, 17 nt, Human
cugcugggcuggggccu

SEQ ID NO: 2328777 - RNA, 15 nt, Human
cugcugggcucucca

SEQ ID NO: 2328778 - RNA, 18 nt, Human
cugcuggcgccucugcaa

SEQ ID NO: 2328779 - RNA, 20 nt, Human
cugcuggcgccucugcaagg

SEQ ID NO: 2328780 - RNA, 12 nt, Human
cugcuggcucuu

SEQ ID NO: 2328781 - RNA, 19 nt, Human
cugcuggcucuucugccca

SEQ ID NO: 2328782 - RNA, 16 nt, Human
cugcuggccuggaucu

SEQ ID NO: 2328783 - RNA, 13 nt, Human
cugcuggccuggc

SEQ ID NO: 2328784 - RNA, 16 nt, Human
cugcuggccuggccgg

SEQ ID NO: 2328785 - RNA, 20 nt, Human
cugcuggccuggccggcaac

SEQ ID NO: 2328786 - RNA, 14 nt, Human
cugcuggcgccucu

SEQ ID NO: 2328787 - RNA, 15 nt, Human
cugcuggcgccucug

SEQ ID NO: 2328788 - RNA, 16 nt, Human
cugcuggcgccucugc

SEQ ID NO: 2328789 - RNA, 17 nt, Human
cugcuggcgccucugca

SEQ ID NO: 2328790 - RNA, 13 nt, Human
cugcugguucagg

SEQ ID NO: 2328791 - RNA, 21 nt, Human
cugcugggcuggggccugaug

SEQ ID NO: 2328792 - RNA, 18 nt, Human
cugcugggcuggggccug

SEQ ID NO: 2328793 - RNA, 19 nt, Human
cugcugggcuggggccuga

SEQ ID NO: 2328794 - RNA, 15 nt, Human
cugcugguucagggu

SEQ ID NO: 2328795 - RNA, 23 nt, Human
cugcugguucaggguuggccccu

SEQ ID NO: 2328796 - RNA, 15 nt, Human
cugcuggaaacagac

SEQ ID NO: 2328797 - RNA, 20 nt, Human
cugcugcuuuuugagguggc

SEQ ID NO: 2328798 - RNA, 22 nt, Human
cugcugcuuuuugagguggcac

SEQ ID NO: 2328799 - RNA, 22 nt, Human
cugcuggacaguaucacugucu

SEQ ID NO: 2328800 - RNA, 20 nt, Human
cugcuggacaguaucacugu

SEQ ID NO: 2328801 - RNA, 15 nt, Human
cugcuggacaguauc

SEQ ID NO: 2328802 - RNA, 13 nt, Human
cugcugcuucuua

SEQ ID NO: 2328803 - RNA, 13 nt, Human
cugcugcuguguu

SEQ ID NO: 2328804 - RNA, 11 nt, Human
cugcuggagga

SEQ ID NO: 2328805 - RNA, 20 nt, Human
cugcuggaguuucauguaca

SEQ ID NO: 2328806 - RNA, 21 nt, Human
cugcuggcacauuuccccaga

SEQ ID NO: 2328807 - RNA, 23 nt, Human
cugcuggaucacagcugcuuucu

SEQ ID NO: 2328808 - RNA, 14 nt, Human
cugcuggcacccac

SEQ ID NO: 2328809 - RNA, 21 nt, Human
cugcuggaguuucauguacaa

SEQ ID NO: 2328810 - RNA, 21 nt, Human
cugcuggaucacagcugcuuu

SEQ ID NO: 2328811 - RNA, 22 nt, Human
cugcuggcccagccaaacccug

SEQ ID NO: 2328812 - RNA, 16 nt, Human
cugcuggcccagccaa

SEQ ID NO: 2328813 - RNA, 15 nt, Human
cugcuggcccagcca

SEQ ID NO: 2328814 - RNA, 16 nt, Human
cugcuggcacccaccg

SEQ ID NO: 2328815 - RNA, 17 nt, Human
cugcuggcacccaccgu

SEQ ID NO: 2328816 - RNA, 23 nt, Human
cugcuggccccucaccugggcac

SEQ ID NO: 2328817 - RNA, 13 nt, Human
cugcuggccgccu

SEQ ID NO: 2328818 - RNA, 17 nt, Human
cugcuggccccucaccu

SEQ ID NO: 2328819 - RNA, 16 nt, Human
cugcuggccccucacc

SEQ ID NO: 2328820 - RNA, 15 nt, Human
cugcuggccccucac

SEQ ID NO: 2328821 - RNA, 14 nt, Human
cugcuggccccuca

SEQ ID NO: 2328822 - RNA, 11 nt, Human
cugcuggcccc

SEQ ID NO: 2328823 - RNA, 15 nt, Human
cugcuggccggagca

SEQ ID NO: 2328824 - RNA, 16 nt, Human
cugcuggccggagcaa

SEQ ID NO: 2328825 - RNA, 20 nt, Human
cugcuggccgccucaccccc

SEQ ID NO: 2328826 - RNA, 15 nt, Human
cugcuggccgccuca

SEQ ID NO: 2328827 - RNA, 18 nt, Human
cugcuggccgccucaccc

SEQ ID NO: 2328828 - RNA, 12 nt, Human
cugcuggccugg

SEQ ID NO: 2328829 - RNA, 13 nt, Human
cugcuggccugga

SEQ ID NO: 2328830 - RNA, 14 nt, Human
cugcuggccuggau

SEQ ID NO: 2328831 - RNA, 15 nt, Human
cugcuggccuggauc

SEQ ID NO: 2328832 - RNA, 20 nt, Human
cugcugccgccucccagccu

SEQ ID NO: 2328833 - RNA, 16 nt, Human
cugcugcgcccugggc

SEQ ID NO: 2328834 - RNA, 20 nt, Human
cugcugccgccccacccaga

SEQ ID NO: 2328835 - RNA, 17 nt, Human
cugcugcgcccugggcu

SEQ ID NO: 2328836 - RNA, 18 nt, Human
cugcugcgcccugggcuc

SEQ ID NO: 2328837 - RNA, 17 nt, Human
cugcugcgcccuuaccu

SEQ ID NO: 2328838 - RNA, 20 nt, Human
cugcugcgcccuuaccuucc

SEQ ID NO: 2328839 - RNA, 21 nt, Human
cugcugcgcccuuaccuuccc

SEQ ID NO: 2328840 - RNA, 19 nt, Human
cugcugccgccucccagcc

SEQ ID NO: 2328841 - RNA, 17 nt, Human
cugcugccgccucccag

SEQ ID NO: 2328842 - RNA, 14 nt, Human
cugcugccgccucc

SEQ ID NO: 2328843 - RNA, 19 nt, Human
cugcugccgccccacccag

SEQ ID NO: 2328844 - RNA, 21 nt, Human
cugcugcuaaucuucagggca

SEQ ID NO: 2328845 - RNA, 15 nt, Human
cugcugcuggcuggu

SEQ ID NO: 2328846 - RNA, 14 nt, Human
cugcugcugucccu

SEQ ID NO: 2328847 - RNA, 17 nt, Human
cuggacaccgggccagu

SEQ ID NO: 2328848 - RNA, 23 nt, Human
cuggacaagccaacuuguaaaua

SEQ ID NO: 2328849 - RNA, 22 nt, Human
cuggacaccgggccaguaucua

SEQ ID NO: 2328850 - RNA, 15 nt, Human
cuggacaagcagagg

SEQ ID NO: 2328851 - RNA, 18 nt, Human
cuggacaagcagaggugg

SEQ ID NO: 2328852 - RNA, 11 nt, Human
cuggacaagcc

SEQ ID NO: 2328853 - RNA, 15 nt, Human
cuggacaagccaacu

SEQ ID NO: 2328854 - RNA, 21 nt, Human
cuggacaagccaacuuguaaa

SEQ ID NO: 2328855 - RNA, 13 nt, Human
cuggaauuugaaa

SEQ ID NO: 2328856 - RNA, 15 nt, Human
cugcuuccuccugga

SEQ ID NO: 2328857 - RNA, 16 nt, Human
cugcuuccuccuggaa

SEQ ID NO: 2328858 - RNA, 18 nt, Human
cugcuuccuccuggaaau

SEQ ID NO: 2328859 - RNA, 21 nt, Human
cuggaauuugcaagucauggc

SEQ ID NO: 2328860 - RNA, 22 nt, Human
cuggaauuugcaagucauggcu

SEQ ID NO: 2328861 - RNA, 23 nt, Human
cuggaauuugcaagucauggcug

SEQ ID NO: 2328862 - RNA, 21 nt, Human
cugcuucccucugccuguccc

SEQ ID NO: 2328863 - RNA, 20 nt, Human
cugcuucccucugccugucc

SEQ ID NO: 2328864 - RNA, 18 nt, Human
cugcuucccucugccugu

SEQ ID NO: 2328865 - RNA, 14 nt, Human
cugcuucccucugc

SEQ ID NO: 2328866 - RNA, 15 nt, Human
cugcuucccauccua

SEQ ID NO: 2328867 - RNA, 18 nt, Human
cugcuucccauccuaccc

SEQ ID NO: 2328868 - RNA, 19 nt, Human
cugcuucccauccuacccu

SEQ ID NO: 2328869 - RNA, 24 nt, Human
cugcuucccauccuacccucgggc

SEQ ID NO: 2328870 - RNA, 11 nt, Human
cugcuucccau

SEQ ID NO: 2328871 - RNA, 12 nt, Human
cugcuucccauc

SEQ ID NO: 2328872 - RNA, 13 nt, Human
cugcuucccaucc

SEQ ID NO: 2328873 - RNA, 14 nt, Human
cugcuucccauccu

SEQ ID NO: 2328874 - RNA, 23 nt, Human
cugcuucccucugccugucccuc

SEQ ID NO: 2328875 - RNA, 22 nt, Human
cugcuucccucugccugucccu

SEQ ID NO: 2328876 - RNA, 12 nt, Human
cugcuuccuccu

SEQ ID NO: 2328877 - RNA, 13 nt, Human
cugcuuccuccug

SEQ ID NO: 2328878 - RNA, 14 nt, Human
cugcuuccuccugg

SEQ ID NO: 2328879 - RNA, 23 nt, Human
cuggacaggcauguucucugagg

SEQ ID NO: 2328880 - RNA, 17 nt, Human
cuggacacucagaccug

SEQ ID NO: 2328881 - RNA, 15 nt, Human
cuggacacucagacc

SEQ ID NO: 2328882 - RNA, 16 nt, Human
cuggacacucagaccu

SEQ ID NO: 2328883 - RNA, 14 nt, Human
cuggacaggcaugu

SEQ ID NO: 2328884 - RNA, 17 nt, Human
cuggacaggcauguucu

SEQ ID NO: 2328885 - RNA, 21 nt, Human
cuggaccaguggucucacaug

SEQ ID NO: 2328886 - RNA, 18 nt, Human
cuggaccccaucugugaa

SEQ ID NO: 2328887 - RNA, 17 nt, Human
cuggaccccaucuguga

SEQ ID NO: 2328888 - RNA, 13 nt, Human
cuggacuccggcc

SEQ ID NO: 2328889 - RNA, 15 nt, Human
cuggacuccggcccu

SEQ ID NO: 2328890 - RNA, 14 nt, Human
cuggacggcaggcu

SEQ ID NO: 2328891 - RNA, 20 nt, Human
cuggacggcaggcucacugc

SEQ ID NO: 2328892 - RNA, 21 nt, Human
cuggacggcaggcucacugcc

SEQ ID NO: 2328893 - RNA, 22 nt, Human
cuggacggcaggcucacugcca

SEQ ID NO: 2328894 - RNA, 14 nt, Human
cuggacuccucugu

SEQ ID NO: 2328895 - RNA, 17 nt, Human
cuggacuccucugucca

SEQ ID NO: 2328896 - RNA, 18 nt, Human
cuggacuccggcccuccu

SEQ ID NO: 2328897 - RNA, 18 nt, Human
cuggacuccucuguccag

SEQ ID NO: 2328898 - RNA, 19 nt, Human
cuggacuccucuguccagg

SEQ ID NO: 2328899 - RNA, 17 nt, Human
cuggaccuugaacuggg

SEQ ID NO: 2328900 - RNA, 20 nt, Human
cuggaccuugaacuggguac

SEQ ID NO: 2328901 - RNA, 21 nt, Human
cuggaccuugaacuggguacu

SEQ ID NO: 2328902 - RNA, 15 nt, Human
cuggaccugccuccu

SEQ ID NO: 2328903 - RNA, 17 nt, Human
cuggaccugccuccugc

SEQ ID NO: 2328904 - RNA, 21 nt, Human
cuggaccugccuccugccugc

SEQ ID NO: 2328905 - RNA, 20 nt, Human
cuggaccugccuccugccug

SEQ ID NO: 2328906 - RNA, 13 nt, Human
cuggacggcaggc

SEQ ID NO: 2328907 - RNA, 12 nt, Human
cuggaccugccu

SEQ ID NO: 2328908 - RNA, 16 nt, Human
cuggaccuugaacugg

SEQ ID NO: 2328909 - RNA, 15 nt, Human
cuggaccuauguccu

SEQ ID NO: 2328910 - RNA, 19 nt, Human
cuggaccuauguccuaagg

SEQ ID NO: 2328911 - RNA, 20 nt, Human
cuggaccuauguccuaagga

SEQ ID NO: 2328912 - RNA, 15 nt, Human
cuggacccuguugcu

SEQ ID NO: 2328913 - RNA, 16 nt, Human
cuggacccuguugcua

SEQ ID NO: 2328914 - RNA, 17 nt, Human
cuggacccuguugcuaa

SEQ ID NO: 2328915 - RNA, 18 nt, Human
cuggacccuguugcuaag

SEQ ID NO: 2328916 - RNA, 15 nt, Human
cuggacccuguggau

SEQ ID NO: 2328917 - RNA, 14 nt, Human
cuggacccuguugc

SEQ ID NO: 2328918 - RNA, 14 nt, Human
cuggacccccagcu

SEQ ID NO: 2328919 - RNA, 22 nt, Human
cuggaccccaucugugaauaag

SEQ ID NO: 2328920 - RNA, 20 nt, Human
cuggaccccaucugugaaua

SEQ ID NO: 2328921 - RNA, 19 nt, Human
cuggaccccaucugugaau

SEQ ID NO: 2328922 - RNA, 20 nt, Human
cuggagucaugccaagcauu

SEQ ID NO: 2328923 - RNA, 15 nt, Human
cuggaguccagucuc

SEQ ID NO: 2328924 - RNA, 15 nt, Human
cuggagucuccagug

SEQ ID NO: 2328925 - RNA, 15 nt, Human
cuggagugaggaaaa

SEQ ID NO: 2328926 - RNA, 14 nt, Human
cuggagucuccagu

SEQ ID NO: 2328927 - RNA, 16 nt, Human
cuggaguccagucucu

SEQ ID NO: 2328928 - RNA, 14 nt, Human
cuggagugaggggu

SEQ ID NO: 2328929 - RNA, 12 nt, Human
cuggagugcagg

SEQ ID NO: 2328930 - RNA, 16 nt, Human
cuggagugcagggagg

SEQ ID NO: 2328931 - RNA, 17 nt, Human
cuggagguuuguuuaga

SEQ ID NO: 2328932 - RNA, 12 nt, Human
cuggagguuugu

SEQ ID NO: 2328933 - RNA, 17 nt, Human
cuggagguugaagccaa

SEQ ID NO: 2328934 - RNA, 19 nt, Human
cuggagguugaagccaagu

SEQ ID NO: 2328935 - RNA, 15 nt, Human
cuggagguugauaac

SEQ ID NO: 2328936 - RNA, 17 nt, Human
cuggagguugauaacuu

SEQ ID NO: 2328937 - RNA, 18 nt, Human
cuggagguugauaacuuu

SEQ ID NO: 2328938 - RNA, 19 nt, Human
cuggagguugauaacuuug

SEQ ID NO: 2328939 - RNA, 21 nt, Human
cuggagguugauaacuuugcu

SEQ ID NO: 2328940 - RNA, 22 nt, Human
cuggagguugauaacuuugcuu

SEQ ID NO: 2328941 - RNA, 14 nt, Human
cuggagugcaguga

SEQ ID NO: 2328942 - RNA, 15 nt, Human
cuggagugcagugag

SEQ ID NO: 2328943 - RNA, 16 nt, Human
cuggagugcagugagc

SEQ ID NO: 2328944 - RNA, 17 nt, Human
cuggagugcagugagcc

SEQ ID NO: 2328945 - RNA, 23 nt, Human
cuggaggggcauggccagcagcu

SEQ ID NO: 2328946 - RNA, 22 nt, Human
cuggaggggcauggccagcagc

SEQ ID NO: 2328947 - RNA, 12 nt, Human
cuggaggggccc

SEQ ID NO: 2328948 - RNA, 14 nt, Human
cuggaggggccccu

SEQ ID NO: 2328949 - RNA, 14 nt, Human
cuggaggggcaugg

SEQ ID NO: 2328950 - RNA, 13 nt, Human
cuggaggggaggg

SEQ ID NO: 2328951 - RNA, 21 nt, Human
cuggaggggcuagaaccuaga

SEQ ID NO: 2328952 - RNA, 15 nt, Human
cuggaggggccccug

SEQ ID NO: 2328953 - RNA, 16 nt, Human
cuggaggggccccugc

SEQ ID NO: 2328954 - RNA, 17 nt, Human
cuggaggggccccugcu

SEQ ID NO: 2328955 - RNA, 23 nt, Human
cuggaggggccccugcuucucca

SEQ ID NO: 2328956 - RNA, 17 nt, Human
cuggagguacgaaaaga

SEQ ID NO: 2328957 - RNA, 16 nt, Human
cuggagggguguggcu

SEQ ID NO: 2328958 - RNA, 20 nt, Human
cuggagggguguggcuccuu

SEQ ID NO: 2328959 - RNA, 16 nt, Human
cuggagguaaggccuu

SEQ ID NO: 2328960 - RNA, 20 nt, Human
cuggagguaaggccuuugag

SEQ ID NO: 2328961 - RNA, 22 nt, Human
cuggagguacgaaaagagggga

SEQ ID NO: 2328962 - RNA, 13 nt, Human
cuggaggugccag

SEQ ID NO: 2328963 - RNA, 22 nt, Human
cuggaggucacauucaggaaga

SEQ ID NO: 2328964 - RNA, 19 nt, Human
cuggaggucacauucagga

SEQ ID NO: 2328965 - RNA, 21 nt, Human
cuggaggucacauucaggaag

SEQ ID NO: 2328966 - RNA, 16 nt, Human
cuggaggugccagcaa

SEQ ID NO: 2328967 - RNA, 19 nt, Human
cuggaggugccagcaaagc

SEQ ID NO: 2328968 - RNA, 22 nt, Human
cuggaggugccagcaaagcccc

SEQ ID NO: 2328969 - RNA, 23 nt, Human
cuggaggugccagcaaagcccca

SEQ ID NO: 2328970 - RNA, 20 nt, Human
cuggagguggcugagccccu

SEQ ID NO: 2328971 - RNA, 14 nt, Human
cuggaggugggagc

SEQ ID NO: 2328972 - RNA, 16 nt, Human
cuggaggugggagcag

SEQ ID NO: 2328973 - RNA, 17 nt, Human
cuggaggugggagcagg

SEQ ID NO: 2328974 - RNA, 18 nt, Human
cuggaggugggagcagga

SEQ ID NO: 2328975 - RNA, 19 nt, Human
cuggaggugggagcaggag

SEQ ID NO: 2328976 - RNA, 20 nt, Human
cuggaggugggagcaggaga

SEQ ID NO: 2328977 - RNA, 21 nt, Human
cuggaggugggagcaggagau

SEQ ID NO: 2328978 - RNA, 22 nt, Human
cuggaggugggagcaggagauu

SEQ ID NO: 2328979 - RNA, 18 nt, Human
cuggagguggggccugga

SEQ ID NO: 2328980 - RNA, 22 nt, Human
cuggagguggggccuggagcag

SEQ ID NO: 2328981 - RNA, 15 nt, Human
cuggaggugggguug

SEQ ID NO: 2328982 - RNA, 20 nt, Human
cuggaggugggguugggauu

SEQ ID NO: 2328983 - RNA, 22 nt, Human
cuggaggugggguugggauugg

SEQ ID NO: 2328984 - RNA, 16 nt, Human
cuggagguugaagcca

SEQ ID NO: 2328985 - RNA, 17 nt, Human
cuggagccccugggugg

SEQ ID NO: 2328986 - RNA, 18 nt, Human
cuggagccccuggguggg

SEQ ID NO: 2328987 - RNA, 12 nt, Human
cuggagccccug

SEQ ID NO: 2328988 - RNA, 14 nt, Human
cuggagccccuggg

SEQ ID NO: 2328989 - RNA, 15 nt, Human
cuggagccccugggu

SEQ ID NO: 2328990 - RNA, 16 nt, Human
cuggagccccugggug

SEQ ID NO: 2328991 - RNA, 15 nt, Human
cuggagcccuugggu

SEQ ID NO: 2328992 - RNA, 15 nt, Human
cuggagccuggugcc

SEQ ID NO: 2328993 - RNA, 16 nt, Human
cuggagccuggugccc

SEQ ID NO: 2328994 - RNA, 17 nt, Human
cuggagccuggugcccu

SEQ ID NO: 2328995 - RNA, 15 nt, Human
cuggagcccaggagu

SEQ ID NO: 2328996 - RNA, 13 nt, Human
cuggagcccaggg

SEQ ID NO: 2328997 - RNA, 14 nt, Human
cuggagcccaggga

SEQ ID NO: 2328998 - RNA, 13 nt, Human
cuggagccccauc

SEQ ID NO: 2328999 - RNA, 13 nt, Human
cuggagcccagga

SEQ ID NO: 2329000 - RNA, 12 nt, Human
cuggagcccagg

SEQ ID NO: 2329001 - RNA, 21 nt, Human
cuggagcccagaggagggcag

SEQ ID NO: 2329002 - RNA, 23 nt, Human
cuggagcccagaggagggcagca

SEQ ID NO: 2329003 - RNA, 18 nt, Human
cuggagauguuuuagagu

SEQ ID NO: 2329004 - RNA, 23 nt, Human
cuggagauccuccugcagaccac

SEQ ID NO: 2329005 - RNA, 18 nt, Human
cuggagauccuccugcag

SEQ ID NO: 2329006 - RNA, 20 nt, Human
cuggagauccuccugcagac

SEQ ID NO: 2329007 - RNA, 14 nt, Human
cuggagauccuccu

SEQ ID NO: 2329008 - RNA, 15 nt, Human
cuggagauccuccug

SEQ ID NO: 2329009 - RNA, 16 nt, Human
cuggagauccuccugc

SEQ ID NO: 2329010 - RNA, 17 nt, Human
cuggagauccuccugca

SEQ ID NO: 2329011 - RNA, 22 nt, Human
cuggaggcagggccuugcccag

SEQ ID NO: 2329012 - RNA, 20 nt, Human
cuggaggcagggccuugccc

SEQ ID NO: 2329013 - RNA, 19 nt, Human
cuggaggcagggccuugcc

SEQ ID NO: 2329014 - RNA, 16 nt, Human
cuggaggcagggccuu

SEQ ID NO: 2329015 - RNA, 23 nt, Human
cuggaggcagggccuugcccaga

SEQ ID NO: 2329016 - RNA, 12 nt, Human
cuggaggcccag

SEQ ID NO: 2329017 - RNA, 21 nt, Human
cuggaggggacgcugguagag

SEQ ID NO: 2329018 - RNA, 16 nt, Human
cuggaggggacgcugg

SEQ ID NO: 2329019 - RNA, 15 nt, Human
cuggaggggacgcug

SEQ ID NO: 2329020 - RNA, 22 nt, Human
cuggagggcuggaaucuggaga

SEQ ID NO: 2329021 - RNA, 21 nt, Human
cuggaggcccaguucacccug

SEQ ID NO: 2329022 - RNA, 20 nt, Human
cuggagggcuggaaucugga

SEQ ID NO: 2329023 - RNA, 15 nt, Human
cuggaggcccaguuc

SEQ ID NO: 2329024 - RNA, 14 nt, Human
cuggaggcccaguu

SEQ ID NO: 2329025 - RNA, 13 nt, Human
cuggaggcccagu

SEQ ID NO: 2329026 - RNA, 15 nt, Human
cuggaggcagggccu

SEQ ID NO: 2329027 - RNA, 14 nt, Human
cuggaggcagggcc

SEQ ID NO: 2329028 - RNA, 13 nt, Human
cuggaggcagggc

SEQ ID NO: 2329029 - RNA, 11 nt, Human
cuggagcuggc

SEQ ID NO: 2329030 - RNA, 11 nt, Human
cuggagccugu

SEQ ID NO: 2329031 - RNA, 12 nt, Human
cuggaggcaggg

SEQ ID NO: 2329032 - RNA, 16 nt, Human
cuggagcucugcccau

SEQ ID NO: 2329033 - RNA, 13 nt, Human
cuggagcucugcc

SEQ ID NO: 2329034 - RNA, 12 nt, Human
cuggagcucugc

SEQ ID NO: 2329035 - RNA, 12 nt, Human
cuggcgccucug

SEQ ID NO: 2329036 - RNA, 13 nt, Human
cuggcgccucugc

SEQ ID NO: 2329037 - RNA, 14 nt, Human
cuggcgccucugca

SEQ ID NO: 2329038 - RNA, 15 nt, Human
cuggcgccucugcaa

SEQ ID NO: 2329039 - RNA, 23 nt, Human
cuggcggcuacucagcagcccuc

SEQ ID NO: 2329040 - RNA, 22 nt, Human
cuggcggcuacucagcagcccu

SEQ ID NO: 2329041 - RNA, 20 nt, Human
cuggcggcuacucagcagcc

SEQ ID NO: 2329042 - RNA, 18 nt, Human
cuggcggcuacucagcag

SEQ ID NO: 2329043 - RNA, 17 nt, Human
cuggcggcuacucagca

SEQ ID NO: 2329044 - RNA, 16 nt, Human
cuggcggcuacucagc

SEQ ID NO: 2329045 - RNA, 20 nt, Human
cuggcgccucugcaagggca

SEQ ID NO: 2329046 - RNA, 19 nt, Human
cuggccuugaaaccaccuu

SEQ ID NO: 2329047 - RNA, 14 nt, Human
cuggccugugucua

SEQ ID NO: 2329048 - RNA, 23 nt, Human
cuggccuucggccuccauccuga

SEQ ID NO: 2329049 - RNA, 14 nt, Human
cuggcgucugucuu

SEQ ID NO: 2329050 - RNA, 13 nt, Human
cuggcgucugucu

SEQ ID NO: 2329051 - RNA, 18 nt, Human
cuggcgucaugcaaaguc

SEQ ID NO: 2329052 - RNA, 19 nt, Human
cuggcgucaugcaaaguca

SEQ ID NO: 2329053 - RNA, 21 nt, Human
cuggcguagaaguuuuuguac

SEQ ID NO: 2329054 - RNA, 22 nt, Human
cuggcguagaaguuuuuguacu

SEQ ID NO: 2329055 - RNA, 13 nt, Human
cuggcgggauggg

SEQ ID NO: 2329056 - RNA, 16 nt, Human
cuggcgggaugggcca

SEQ ID NO: 2329057 - RNA, 19 nt, Human
cuggcgggaugggccaccg

SEQ ID NO: 2329058 - RNA, 20 nt, Human
cuggcgggaugggccaccgc

SEQ ID NO: 2329059 - RNA, 14 nt, Human
cuggcgugcagugg

SEQ ID NO: 2329060 - RNA, 15 nt, Human
cuggcgugcaguggu

SEQ ID NO: 2329061 - RNA, 22 nt, Human
cuggcugaggauuucaagccug

SEQ ID NO: 2329062 - RNA, 21 nt, Human
cuggcugaggauuucaagccu

SEQ ID NO: 2329063 - RNA, 17 nt, Human
cuggcugagguuccucu

SEQ ID NO: 2329064 - RNA, 19 nt, Human
cuggcugagguuccucugc

SEQ ID NO: 2329065 - RNA, 23 nt, Human
cuggcugcagagcagugggccug

SEQ ID NO: 2329066 - RNA, 20 nt, Human
cuggcugagguuccucugcc

SEQ ID NO: 2329067 - RNA, 21 nt, Human
cuggcugagguuccucugccu

SEQ ID NO: 2329068 - RNA, 22 nt, Human
cuggcugagguuccucugccug

SEQ ID NO: 2329069 - RNA, 23 nt, Human
cuggcugagguuccucugccugc

SEQ ID NO: 2329070 - RNA, 17 nt, Human
cuggcuaacuggaagca

SEQ ID NO: 2329071 - RNA, 15 nt, Human
cuggcucuucugccc

SEQ ID NO: 2329072 - RNA, 23 nt, Human
cuggcuagaggccagccccaccc

SEQ ID NO: 2329073 - RNA, 16 nt, Human
cuggcucuucugccca

SEQ ID NO: 2329074 - RNA, 17 nt, Human
cuggcucuucugcccaa

SEQ ID NO: 2329075 - RNA, 18 nt, Human
cuggcugagccuggcugg

SEQ ID NO: 2329076 - RNA, 13 nt, Human
cuggcugagcuga

SEQ ID NO: 2329077 - RNA, 24 nt, Human
cuggcucuuccaggcugggagagc

SEQ ID NO: 2329078 - RNA, 22 nt, Human
cuggcuagaggccagccccacc

SEQ ID NO: 2329079 - RNA, 21 nt, Human
cuggcuagaggccagccccac

SEQ ID NO: 2329080 - RNA, 20 nt, Human
cuggcuagaggccagcccca

SEQ ID NO: 2329081 - RNA, 16 nt, Human
cuggcuaacuggaagc

SEQ ID NO: 2329082 - RNA, 23 nt, Human
cuggcgucugucuucaagggcuu

SEQ ID NO: 2329083 - RNA, 22 nt, Human
cuggcgucugucuucaagggcu

SEQ ID NO: 2329084 - RNA, 15 nt, Human
cuggcgucugucuuc

SEQ ID NO: 2329085 - RNA, 13 nt, Human
cuggcgugugggu

SEQ ID NO: 2329086 - RNA, 21 nt, Human
cuggcucuuccaggcugggag

SEQ ID NO: 2329087 - RNA, 22 nt, Human
cuggcucuuccaggcugggaga

SEQ ID NO: 2329088 - RNA, 19 nt, Human
cuggccuggccccucaggg

SEQ ID NO: 2329089 - RNA, 18 nt, Human
cuggccuggcacacauca

SEQ ID NO: 2329090 - RNA, 22 nt, Human
cuggccuggcacacaucaggag

SEQ ID NO: 2329091 - RNA, 13 nt, Human
cuggccuggcaca

SEQ ID NO: 2329092 - RNA, 14 nt, Human
cuggccuggcacac

SEQ ID NO: 2329093 - RNA, 16 nt, Human
cuggccuggcacacau

SEQ ID NO: 2329094 - RNA, 17 nt, Human
cuggccuggcacacauc

SEQ ID NO: 2329095 - RNA, 22 nt, Human
cuggccuggacuguuuucucuc

SEQ ID NO: 2329096 - RNA, 12 nt, Human
cuggccuggauc

SEQ ID NO: 2329097 - RNA, 14 nt, Human
cuggccuggaucuc

SEQ ID NO: 2329098 - RNA, 15 nt, Human
cuggccuggaucucc

SEQ ID NO: 2329099 - RNA, 21 nt, Human
cuggccuggaucuccccacuc

SEQ ID NO: 2329100 - RNA, 22 nt, Human
cuggccuggaucuccccacucu

SEQ ID NO: 2329101 - RNA, 24 nt, Human
cuggccuggccccucagggucccu

SEQ ID NO: 2329102 - RNA, 15 nt, Human
cuggccuggccggca

SEQ ID NO: 2329103 - RNA, 14 nt, Human
cuggccuggccggc

SEQ ID NO: 2329104 - RNA, 13 nt, Human
cuggccuggcuuc

SEQ ID NO: 2329105 - RNA, 14 nt, Human
cuggccuggcuucu

SEQ ID NO: 2329106 - RNA, 17 nt, Human
cuggccuggcuucuccu

SEQ ID NO: 2329107 - RNA, 22 nt, Human
cuggccuucggccuccauccug

SEQ ID NO: 2329108 - RNA, 16 nt, Human
cuggccucugcacucc

SEQ ID NO: 2329109 - RNA, 14 nt, Human
cuggccuggacugu

SEQ ID NO: 2329110 - RNA, 18 nt, Human
cuggccuggacuguuuuc

SEQ ID NO: 2329111 - RNA, 21 nt, Human
cuggccucugcacuccccugc

SEQ ID NO: 2329112 - RNA, 18 nt, Human
cuggccucugcacucccc

SEQ ID NO: 2329113 - RNA, 20 nt, Human
cuggccucugcacuccccug

SEQ ID NO: 2329114 - RNA, 19 nt, Human
cuggcccagccggccucuc

SEQ ID NO: 2329115 - RNA, 16 nt, Human
cuggcccaucagugua

SEQ ID NO: 2329116 - RNA, 13 nt, Human
cuggccccaggac

SEQ ID NO: 2329117 - RNA, 23 nt, Human
cuggcccagggcccagagcccag

SEQ ID NO: 2329118 - RNA, 22 nt, Human
cuggcccagggcccagagccca

SEQ ID NO: 2329119 - RNA, 21 nt, Human
cuggcccagggcccagagccc

SEQ ID NO: 2329120 - RNA, 20 nt, Human
cuggcccagggcccagagcc

SEQ ID NO: 2329121 - RNA, 19 nt, Human
cuggcccagggcccagagc

SEQ ID NO: 2329122 - RNA, 18 nt, Human
cuggcccagggcccagag

SEQ ID NO: 2329123 - RNA, 17 nt, Human
cuggcccagggcccaga

SEQ ID NO: 2329124 - RNA, 23 nt, Human
cuggccaucccucguggucccca

SEQ ID NO: 2329125 - RNA, 16 nt, Human
cuggccaucuccaccc

SEQ ID NO: 2329126 - RNA, 18 nt, Human
cuggccaucccacaagug

SEQ ID NO: 2329127 - RNA, 17 nt, Human
cuggccaucccucgugg

SEQ ID NO: 2329128 - RNA, 15 nt, Human
cuggcccacugcauc

SEQ ID NO: 2329129 - RNA, 21 nt, Human
cuggccaguggcuggaucugu

SEQ ID NO: 2329130 - RNA, 22 nt, Human
cuggccaguccaggcugccgug

SEQ ID NO: 2329131 - RNA, 23 nt, Human
cuggccaguccaggcugccgugg

SEQ ID NO: 2329132 - RNA, 23 nt, Human
cuggcccagccaaacccugucug

SEQ ID NO: 2329133 - RNA, 10 nt, Human
cuggcccagc

SEQ ID NO: 2329134 - RNA, 13 nt, Human
cuggcccagcccu

SEQ ID NO: 2329135 - RNA, 20 nt, Human
cuggcccagccaaacccugu

SEQ ID NO: 2329136 - RNA, 17 nt, Human
cuggcccagccaaaccc

SEQ ID NO: 2329137 - RNA, 13 nt, Human
cuggcccagccaa

SEQ ID NO: 2329138 - RNA, 11 nt, Human
cuggcccagcc

SEQ ID NO: 2329139 - RNA, 16 nt, Human
cuggcccagggcccag

SEQ ID NO: 2329140 - RNA, 16 nt, Human
cuggcccagccggccu

SEQ ID NO: 2329141 - RNA, 18 nt, Human
cuggcccagccggccucu

SEQ ID NO: 2329142 - RNA, 12 nt, Human
cuggcccagccg

SEQ ID NO: 2329143 - RNA, 13 nt, Human
cuggcccagccgg

SEQ ID NO: 2329144 - RNA, 14 nt, Human
cuggcccagccggc

SEQ ID NO: 2329145 - RNA, 15 nt, Human
cuggcccagccggcc

SEQ ID NO: 2329146 - RNA, 14 nt, Human
cuggcccagcccug

SEQ ID NO: 2329147 - RNA, 15 nt, Human
cuggcccagcccugc

SEQ ID NO: 2329148 - RNA, 16 nt, Human
cuggcccagcccugcu

SEQ ID NO: 2329149 - RNA, 17 nt, Human
cuggcccagcccugcug

SEQ ID NO: 2329150 - RNA, 18 nt, Human
cuggcccagcccugcugg

SEQ ID NO: 2329151 - RNA, 19 nt, Human
cuggcccagcccugcuggc

SEQ ID NO: 2329152 - RNA, 20 nt, Human
cuggcccagcccugcuggcc

SEQ ID NO: 2329153 - RNA, 22 nt, Human
cuggcccagcccugcuggccgc

SEQ ID NO: 2329154 - RNA, 19 nt, Human
cuggcaguggaacuaagaa

SEQ ID NO: 2329155 - RNA, 22 nt, Human
cuggcaguccuggaagccagcu

SEQ ID NO: 2329156 - RNA, 13 nt, Human
cuggcagaaggga

SEQ ID NO: 2329157 - RNA, 15 nt, Human
cuggcaguuuuccau

SEQ ID NO: 2329158 - RNA, 15 nt, Human
cuggcaguuuaaaaa

SEQ ID NO: 2329159 - RNA, 19 nt, Human
cuggcaguuuaaaaaaauu

SEQ ID NO: 2329160 - RNA, 15 nt, Human
cuggccacugcacag

SEQ ID NO: 2329161 - RNA, 23 nt, Human
cuggcaucgcaccauucugacuc

SEQ ID NO: 2329162 - RNA, 12 nt, Human
cuggccacugca

SEQ ID NO: 2329163 - RNA, 20 nt, Human
cuggcaucgcaccauucuga

SEQ ID NO: 2329164 - RNA, 22 nt, Human
cuggcaucgcaccauucugacu

SEQ ID NO: 2329165 - RNA, 17 nt, Human
cuggcaucgcaccauuc

SEQ ID NO: 2329166 - RNA, 18 nt, Human
cuggcaucgcaccauucu

SEQ ID NO: 2329167 - RNA, 19 nt, Human
cuggcaucgcaccauucug

SEQ ID NO: 2329168 - RNA, 13 nt, Human
cuggccagaggcu

SEQ ID NO: 2329169 - RNA, 22 nt, Human
cuggccacugcacagagcucuc

SEQ ID NO: 2329170 - RNA, 21 nt, Human
cuggccagacacaggcccucc

SEQ ID NO: 2329171 - RNA, 19 nt, Human
cuggccaguccaggcugcc

SEQ ID NO: 2329172 - RNA, 21 nt, Human
cuggccaguccaggcugccgu

SEQ ID NO: 2329173 - RNA, 14 nt, Human
cuggccagaugcac

SEQ ID NO: 2329174 - RNA, 19 nt, Human
cuggccagacacaggcccu

SEQ ID NO: 2329175 - RNA, 18 nt, Human
cuggccagacacaggccc

SEQ ID NO: 2329176 - RNA, 17 nt, Human
cuggccagacacaggcc

SEQ ID NO: 2329177 - RNA, 15 nt, Human
cuggccagacacagg

SEQ ID NO: 2329178 - RNA, 13 nt, Human
cuggccagaaugc

SEQ ID NO: 2329179 - RNA, 13 nt, Human
cuggccagacaca

SEQ ID NO: 2329180 - RNA, 18 nt, Human
cuggccacugcacagagc

SEQ ID NO: 2329181 - RNA, 19 nt, Human
cuggccacugcacagagcu

SEQ ID NO: 2329182 - RNA, 20 nt, Human
cuggccacugcacagagcuc

SEQ ID NO: 2329183 - RNA, 21 nt, Human
cuggccacugcacagagcucu

SEQ ID NO: 2329184 - RNA, 20 nt, Human
cuggcacccggccccugcug

SEQ ID NO: 2329185 - RNA, 21 nt, Human
cuggcacccggccccugcugg

SEQ ID NO: 2329186 - RNA, 19 nt, Human
cuggcacccggccccugcu

SEQ ID NO: 2329187 - RNA, 14 nt, Human
cuggagugcagugg

SEQ ID NO: 2329188 - RNA, 13 nt, Human
cuggagugcaguu

SEQ ID NO: 2329189 - RNA, 14 nt, Human
cuggcacaucagaa

SEQ ID NO: 2329190 - RNA, 19 nt, Human
cuggcacaucagaaaggaa

SEQ ID NO: 2329191 - RNA, 20 nt, Human
cuggagugcagugagccgag

SEQ ID NO: 2329192 - RNA, 20 nt, Human
cuggcacaguuuucugagaa

SEQ ID NO: 2329193 - RNA, 22 nt, Human
cuggcacaguuuucugagaaag

SEQ ID NO: 2329194 - RNA, 21 nt, Human
cuggcacaguuuucugagaaa

SEQ ID NO: 2329195 - RNA, 23 nt, Human
cuggcacauuuccccagaccuga

SEQ ID NO: 2329196 - RNA, 22 nt, Human
cuggcacauuuccccagaccug

SEQ ID NO: 2329197 - RNA, 19 nt, Human
cuggcacauuuccccagac

SEQ ID NO: 2329198 - RNA, 17 nt, Human
cuggcacauuuccccag

SEQ ID NO: 2329199 - RNA, 19 nt, Human
cuggcacugcuuccaguga

SEQ ID NO: 2329200 - RNA, 20 nt, Human
cuggcacugcuuccagugag

SEQ ID NO: 2329201 - RNA, 23 nt, Human
cuggcacugcuuccagugaggcu

SEQ ID NO: 2329202 - RNA, 21 nt, Human
cuggcacuggaugcagaaaca

SEQ ID NO: 2329203 - RNA, 14 nt, Human
cuggcacuuggaga

SEQ ID NO: 2329204 - RNA, 19 nt, Human
cuggcacccaccguggagg

SEQ ID NO: 2329205 - RNA, 18 nt, Human
cuggcacugcuuccagug

SEQ ID NO: 2329206 - RNA, 21 nt, Human
cuggcagaacugagcuccucu

SEQ ID NO: 2329207 - RNA, 20 nt, Human
cuggcagaacugagcuccuc

SEQ ID NO: 2329208 - RNA, 19 nt, Human
cuggcagaacugagcuccu

SEQ ID NO: 2329209 - RNA, 18 nt, Human
cuggcagaacugagcucc

SEQ ID NO: 2329210 - RNA, 17 nt, Human
cuggcagaacugagcuc

SEQ ID NO: 2329211 - RNA, 16 nt, Human
cuggcagaacugagcu

SEQ ID NO: 2329212 - RNA, 13 nt, Human
cuggcagaacuga

SEQ ID NO: 2329213 - RNA, 21 nt, Human
cuggcagaaagcaaaugugac

SEQ ID NO: 2329214 - RNA, 23 nt, Human
cuggcagaaagcaaaugugaccu

SEQ ID NO: 2329215 - RNA, 21 nt, Human
cuggcacuuggagacuuguau

SEQ ID NO: 2329216 - RNA, 14 nt, Human
cugguacucaagcc

SEQ ID NO: 2329217 - RNA, 16 nt, Human
cugguacccuccuggc

SEQ ID NO: 2329218 - RNA, 23 nt, Human
cugguacccagccaucugcccag

SEQ ID NO: 2329219 - RNA, 14 nt, Human
cugguacccuccug

SEQ ID NO: 2329220 - RNA, 15 nt, Human
cugguacccuccugg

SEQ ID NO: 2329221 - RNA, 18 nt, Human
cugguacccagccaucug

SEQ ID NO: 2329222 - RNA, 19 nt, Human
cugguacccagccaucugc

SEQ ID NO: 2329223 - RNA, 21 nt, Human
cugguacccagccaucugccc

SEQ ID NO: 2329224 - RNA, 22 nt, Human
cugguacccagccaucugccca

SEQ ID NO: 2329225 - RNA, 13 nt, Human
cugguacccagcc

SEQ ID NO: 2329226 - RNA, 14 nt, Human
cugguacccagcca

SEQ ID NO: 2329227 - RNA, 16 nt, Human
cugguacccagccauc

SEQ ID NO: 2329228 - RNA, 17 nt, Human
cugguacccagccaucu

SEQ ID NO: 2329229 - RNA, 22 nt, Human
cugguaauuuguaucugaagga

SEQ ID NO: 2329230 - RNA, 21 nt, Human
cugguaauuuguaucugaagg

SEQ ID NO: 2329231 - RNA, 18 nt, Human
cugguaauuuguaucuga

SEQ ID NO: 2329232 - RNA, 14 nt, Human
cuggguucuaccca

SEQ ID NO: 2329233 - RNA, 15 nt, Human
cuggguucuacccag

SEQ ID NO: 2329234 - RNA, 16 nt, Human
cuggguucuacccagg

SEQ ID NO: 2329235 - RNA, 17 nt, Human
cuggguucuacccaggu

SEQ ID NO: 2329236 - RNA, 15 nt, Human
cugggguccagggag

SEQ ID NO: 2329237 - RNA, 16 nt, Human
cugggguccagggagc

SEQ ID NO: 2329238 - RNA, 20 nt, Human
cugggguauaaaacuuuccu

SEQ ID NO: 2329239 - RNA, 18 nt, Human
cugggguccuggggccuc

SEQ ID NO: 2329240 - RNA, 15 nt, Human
cugggguccuggggc

SEQ ID NO: 2329241 - RNA, 19 nt, Human
cugggguccuggggccucg

SEQ ID NO: 2329242 - RNA, 13 nt, Human
cuggggucuggag

SEQ ID NO: 2329243 - RNA, 15 nt, Human
cuggggugccgccug

SEQ ID NO: 2329244 - RNA, 22 nt, Human
cuggggucuggaguugaucugg

SEQ ID NO: 2329245 - RNA, 13 nt, Human
cugggguccccca

SEQ ID NO: 2329246 - RNA, 16 nt, Human
cuggggugccgccugc

SEQ ID NO: 2329247 - RNA, 23 nt, Human
cuggguacuucuugaaggugcug

SEQ ID NO: 2329248 - RNA, 20 nt, Human
cuggguacuucuugaaggug

SEQ ID NO: 2329249 - RNA, 17 nt, Human
cuggguacuucuugaag

SEQ ID NO: 2329250 - RNA, 15 nt, Human
cuggguacuucuuga

SEQ ID NO: 2329251 - RNA, 20 nt, Human
cuggguaacuagggaagaua

SEQ ID NO: 2329252 - RNA, 22 nt, Human
cuggguaacuagggaagauaau

SEQ ID NO: 2329253 - RNA, 18 nt, Human
cuggcugcccagaccccu

SEQ ID NO: 2329254 - RNA, 13 nt, Human
cuggcugcccaga

SEQ ID NO: 2329255 - RNA, 16 nt, Human
cuggcugccccaaccu

SEQ ID NO: 2329256 - RNA, 18 nt, Human
cuggcugccccaaccugc

SEQ ID NO: 2329257 - RNA, 12 nt, Human
cuggcugcccag

SEQ ID NO: 2329258 - RNA, 16 nt, Human
cuggcugccagcuauu

SEQ ID NO: 2329259 - RNA, 13 nt, Human
cuggcugcaguga

SEQ ID NO: 2329260 - RNA, 24 nt, Human
cugggcuucaguggcagcugcuuu

SEQ ID NO: 2329261 - RNA, 19 nt, Human
cugggcuucaucuggcaac

SEQ ID NO: 2329262 - RNA, 15 nt, Human
cugggcuucaucugg

SEQ ID NO: 2329263 - RNA, 19 nt, Human
cuggcugccccaaccugcu

SEQ ID NO: 2329264 - RNA, 20 nt, Human
cuggcugccccaaccugcug

SEQ ID NO: 2329265 - RNA, 21 nt, Human
cuggcugccccaaccugcuga

SEQ ID NO: 2329266 - RNA, 13 nt, Human
cugggcuuggccu

SEQ ID NO: 2329267 - RNA, 13 nt, Human
cugggggaagaag

SEQ ID NO: 2329268 - RNA, 18 nt, Human
cuggggcuggccucccaa

SEQ ID NO: 2329269 - RNA, 15 nt, Human
cuggggcuggccucc

SEQ ID NO: 2329270 - RNA, 15 nt, Human
cuggggcuucuccug

SEQ ID NO: 2329271 - RNA, 15 nt, Human
cuggggcuggcacaa

SEQ ID NO: 2329272 - RNA, 14 nt, Human
cuggggcuggccuc

SEQ ID NO: 2329273 - RNA, 20 nt, Human
cugggcuuggccugcuguga

SEQ ID NO: 2329274 - RNA, 14 nt, Human
cuggggcugcuggc

SEQ ID NO: 2329275 - RNA, 15 nt, Human
cuggggcugcuggcc

SEQ ID NO: 2329276 - RNA, 16 nt, Human
cuggggcugcuggccu

SEQ ID NO: 2329277 - RNA, 14 nt, Human
cugggcuuggccug

SEQ ID NO: 2329278 - RNA, 15 nt, Human
cugggcuuggccugc

SEQ ID NO: 2329279 - RNA, 16 nt, Human
cugggcuuggccugcu

SEQ ID NO: 2329280 - RNA, 12 nt, Human
cuggggcugcug

SEQ ID NO: 2329281 - RNA, 17 nt, Human
cugggcuuggccugcug

SEQ ID NO: 2329282 - RNA, 18 nt, Human
cugggcuuggccugcugu

SEQ ID NO: 2329283 - RNA, 18 nt, Human
cugggggccaugagcucc

SEQ ID NO: 2329284 - RNA, 17 nt, Human
cugggggccaugagcuc

SEQ ID NO: 2329285 - RNA, 16 nt, Human
cugggggccaugagcu

SEQ ID NO: 2329286 - RNA, 14 nt, Human
cugggggccaugag

SEQ ID NO: 2329287 - RNA, 19 nt, Human
cugggggcugggcagagga

SEQ ID NO: 2329288 - RNA, 22 nt, Human
cugggggggauuguaaaauggu

SEQ ID NO: 2329289 - RNA, 16 nt, Human
cuggggggcaguggug

SEQ ID NO: 2329290 - RNA, 13 nt, Human
cuggggggcagug

SEQ ID NO: 2329291 - RNA, 14 nt, Human
cugggggaagcccu

SEQ ID NO: 2329292 - RNA, 20 nt, Human
cuggggcuucuccugaccca

SEQ ID NO: 2329293 - RNA, 16 nt, Human
cuggggcuucuccuga

SEQ ID NO: 2329294 - RNA, 19 nt, Human
cuggggcuucuccugaccc

SEQ ID NO: 2329295 - RNA, 17 nt, Human
cugggggaagcccugga

SEQ ID NO: 2329296 - RNA, 20 nt, Human
cugggggacccaauguagga

SEQ ID NO: 2329297 - RNA, 15 nt, Human
cugggggaagaagcu

SEQ ID NO: 2329298 - RNA, 19 nt, Human
cugggggcaggagggcccu

SEQ ID NO: 2329299 - RNA, 14 nt, Human
cugggggcaggagg

SEQ ID NO: 2329300 - RNA, 12 nt, Human
cugggggcagga

SEQ ID NO: 2329301 - RNA, 16 nt, Human
cugggggaagcccugg

SEQ ID NO: 2329302 - RNA, 13 nt, Human
cugggggagugga

SEQ ID NO: 2329303 - RNA, 14 nt, Human
cugggggaguggaa

SEQ ID NO: 2329304 - RNA, 17 nt, Human
cuggucaaacaaacucu

SEQ ID NO: 2329305 - RNA, 14 nt, Human
cugguauuuuaucu

SEQ ID NO: 2329306 - RNA, 13 nt, Human
cugguacucuccu

SEQ ID NO: 2329307 - RNA, 16 nt, Human
cugguacucuccuaga

SEQ ID NO: 2329308 - RNA, 23 nt, Human
cuggucaaacaaacucucugaac

SEQ ID NO: 2329309 - RNA, 18 nt, Human
cuggucaaacaaacucuc

SEQ ID NO: 2329310 - RNA, 15 nt, Human
cuggucaaccuccug

SEQ ID NO: 2329311 - RNA, 16 nt, Human
cuggucaaccuccugg

SEQ ID NO: 2329312 - RNA, 17 nt, Human
cuggucaaccuccugga

SEQ ID NO: 2329313 - RNA, 19 nt, Human
cuggucaaccuccuggaca

SEQ ID NO: 2329314 - RNA, 15 nt, Human
cuggucacagccucc

SEQ ID NO: 2329315 - RNA, 16 nt, Human
cuggucacagccuccu

SEQ ID NO: 2329316 - RNA, 17 nt, Human
cuggucacagccuccuc

SEQ ID NO: 2329317 - RNA, 18 nt, Human
cuggucacagccuccucu

SEQ ID NO: 2329318 - RNA, 15 nt, Human
cuggucccugggagg

SEQ ID NO: 2329319 - RNA, 18 nt, Human
cuggucacaggacucugc

SEQ ID NO: 2329320 - RNA, 21 nt, Human
cuggucccuugcagcuaguuu

SEQ ID NO: 2329321 - RNA, 17 nt, Human
cuggucccuugcagcua

SEQ ID NO: 2329322 - RNA, 19 nt, Human
cuggucacagccuccucug

SEQ ID NO: 2329323 - RNA, 16 nt, Human
cugguccggacacucc

SEQ ID NO: 2329324 - RNA, 20 nt, Human
cugguccggacacuccuaga

SEQ ID NO: 2329325 - RNA, 21 nt, Human
cugguccggacacuccuagag

SEQ ID NO: 2329326 - RNA, 22 nt, Human
cugguccggacacuccuagaga

SEQ ID NO: 2329327 - RNA, 15 nt, Human
cugguccgugggacg

SEQ ID NO: 2329328 - RNA, 16 nt, Human
cugguccgugggacgg

SEQ ID NO: 2329329 - RNA, 17 nt, Human
cugguccuacccauccc

SEQ ID NO: 2329330 - RNA, 16 nt, Human
cugguccugagggucc

SEQ ID NO: 2329331 - RNA, 19 nt, Human
cugguccugagggucccca

SEQ ID NO: 2329332 - RNA, 14 nt, Human
cuggugcucucugc

SEQ ID NO: 2329333 - RNA, 16 nt, Human
cuggugcucucugcca

SEQ ID NO: 2329334 - RNA, 18 nt, Human
cuggugcucucugccacu

SEQ ID NO: 2329335 - RNA, 22 nt, Human
cugguccuacccauccccgcag

SEQ ID NO: 2329336 - RNA, 16 nt, Human
cugguccuacccaucc

SEQ ID NO: 2329337 - RNA, 13 nt, Human
cugguccuaccca

SEQ ID NO: 2329338 - RNA, 19 nt, Human
cugguccgugggacggugc

SEQ ID NO: 2329339 - RNA, 21 nt, Human
cugguccgugggacggugccc

SEQ ID NO: 2329340 - RNA, 12 nt, Human
cuggugcugcca

SEQ ID NO: 2329341 - RNA, 13 nt, Human
cuggugcugccac

SEQ ID NO: 2329342 - RNA, 20 nt, Human
cuggugcugccacacuucag

SEQ ID NO: 2329343 - RNA, 22 nt, Human
cuggugcugccacacuucaggc

SEQ ID NO: 2329344 - RNA, 21 nt, Human
cugguggcagcucaccucucc

SEQ ID NO: 2329345 - RNA, 19 nt, Human
cuggugcugccucuaccug

SEQ ID NO: 2329346 - RNA, 14 nt, Human
cuggugcugccucu

SEQ ID NO: 2329347 - RNA, 23 nt, Human
cugguggcagcucaccucucccu

SEQ ID NO: 2329348 - RNA, 13 nt, Human
cugguggcagcug

SEQ ID NO: 2329349 - RNA, 14 nt, Human
cugguggcagcugc

SEQ ID NO: 2329350 - RNA, 20 nt, Human
cugguggcccgacagccugg

SEQ ID NO: 2329351 - RNA, 21 nt, Human
cugguggcccgacagccuggc

SEQ ID NO: 2329352 - RNA, 22 nt, Human
cugguggcccgacagccuggca

SEQ ID NO: 2329353 - RNA, 23 nt, Human
cugguggcccgacagccuggcac

SEQ ID NO: 2329354 - RNA, 18 nt, Human
cugguuccggaauccugu

SEQ ID NO: 2329355 - RNA, 12 nt, Human
cugguuccuccc

SEQ ID NO: 2329356 - RNA, 17 nt, Human
cugguuccggaauccug

SEQ ID NO: 2329357 - RNA, 21 nt, Human
cugguucccguuucuccaccu

SEQ ID NO: 2329358 - RNA, 23 nt, Human
cuggugggaucugugcccagaga

SEQ ID NO: 2329359 - RNA, 23 nt, Human
cuggugggaggggcgcccaccuc

SEQ ID NO: 2329360 - RNA, 18 nt, Human
cugguucccguuucucca

SEQ ID NO: 2329361 - RNA, 15 nt, Human
cugguggccucugcc

SEQ ID NO: 2329362 - RNA, 15 nt, Human
cugguggcucccgga

SEQ ID NO: 2329363 - RNA, 23 nt, Human
cugguggcucccggagggcccug

SEQ ID NO: 2329364 - RNA, 22 nt, Human
cuggugggaggggcgcccaccu

SEQ ID NO: 2329365 - RNA, 16 nt, Human
cugguuccauggccuc

SEQ ID NO: 2329366 - RNA, 14 nt, Human
cugguggccucugc

SEQ ID NO: 2329367 - RNA, 12 nt, Human
cuggugcugcug

SEQ ID NO: 2329368 - RNA, 16 nt, Human
cugguucuauuuaaug

SEQ ID NO: 2329369 - RNA, 20 nt, Human
cuguaauaaagaugauugug

SEQ ID NO: 2329370 - RNA, 17 nt, Human
cugguucuauuuaaugg

SEQ ID NO: 2329371 - RNA, 18 nt, Human
cugguucuauuuaaugga

SEQ ID NO: 2329372 - RNA, 13 nt, Human
cugguuccucccc

SEQ ID NO: 2329373 - RNA, 21 nt, Human
cugguucggauuuggggugga

SEQ ID NO: 2329374 - RNA, 23 nt, Human
cugguucggauuugggguggauu

SEQ ID NO: 2329375 - RNA, 23 nt, Human
cuguaaucacagcuacuugggag

SEQ ID NO: 2329376 - RNA, 12 nt, Human
cuguaauaaaua

SEQ ID NO: 2329377 - RNA, 13 nt, Human
cuguaauaaauau

SEQ ID NO: 2329378 - RNA, 14 nt, Human
cuguaauaaauaug

SEQ ID NO: 2329379 - RNA, 15 nt, Human
cuguaauaaauauga

SEQ ID NO: 2329380 - RNA, 16 nt, Human
cuguaauaaauaugag

SEQ ID NO: 2329381 - RNA, 17 nt, Human
cuguaauaaauaugagu

SEQ ID NO: 2329382 - RNA, 20 nt, Human
cuguaauuuuuuucuuauau

SEQ ID NO: 2329383 - RNA, 15 nt, Human
cuguacaaauauaag

SEQ ID NO: 2329384 - RNA, 16 nt, Human
cuguacaaauauaaga

SEQ ID NO: 2329385 - RNA, 13 nt, Human
cuguaauuuuaua

SEQ ID NO: 2329386 - RNA, 15 nt, Human
cuguacaaaguagaa

SEQ ID NO: 2329387 - RNA, 13 nt, Human
cuguacaaaguag

SEQ ID NO: 2329388 - RNA, 20 nt, Human
cuguaauccuagcacuuugg

SEQ ID NO: 2329389 - RNA, 19 nt, Human
cuguaaucauauaauaaau

SEQ ID NO: 2329390 - RNA, 21 nt, Human
cuguaaugaaucuaagcagca

SEQ ID NO: 2329391 - RNA, 21 nt, Human
cuguaaugaaacaccuucucu

SEQ ID NO: 2329392 - RNA, 20 nt, Human
cuguaaugaaccgcugaaua

SEQ ID NO: 2329393 - RNA, 21 nt, Human
cuguaaugaaccgcugaauau

SEQ ID NO: 2329394 - RNA, 15 nt, Human
cuguaaugaaucuaa

SEQ ID NO: 2329395 - RNA, 19 nt, Human
cuguaaucucguuucaaaa

SEQ ID NO: 2329396 - RNA, 20 nt, Human
cuguaaucucguuucaaaaa

SEQ ID NO: 2329397 - RNA, 22 nt, Human
cuguaaucucguuucaaaaaca

SEQ ID NO: 2329398 - RNA, 20 nt, Human
cuguaaucgcccuacuauuc

SEQ ID NO: 2329399 - RNA, 14 nt, Human
cuguaaucuaugaa

SEQ ID NO: 2329400 - RNA, 16 nt, Human
cuguauauagcccagc

SEQ ID NO: 2329401 - RNA, 15 nt, Human
cuguauauacuuuuu

SEQ ID NO: 2329402 - RNA, 14 nt, Human
cuguauauacuuuu

SEQ ID NO: 2329403 - RNA, 23 nt, Human
cuguaucaggacccagaggaagg

SEQ ID NO: 2329404 - RNA, 22 nt, Human
cuguaucaggacccagaggaag

SEQ ID NO: 2329405 - RNA, 16 nt, Human
cuguaucaggacccag

SEQ ID NO: 2329406 - RNA, 23 nt, Human
cuguauauuugugauagcacuuu

SEQ ID NO: 2329407 - RNA, 22 nt, Human
cuguauauuugugauagcacuu

SEQ ID NO: 2329408 - RNA, 18 nt, Human
cuguaguuaggaaauaaa

SEQ ID NO: 2329409 - RNA, 17 nt, Human
cuguaguuaggaaauaa

SEQ ID NO: 2329410 - RNA, 21 nt, Human
cuguauaaauaggagaggaug

SEQ ID NO: 2329411 - RNA, 12 nt, Human
cuguauaaguaa

SEQ ID NO: 2329412 - RNA, 13 nt, Human
cuguauaaguaag

SEQ ID NO: 2329413 - RNA, 14 nt, Human
cuguauaaguaaga

SEQ ID NO: 2329414 - RNA, 15 nt, Human
cuguauaaguaagaa

SEQ ID NO: 2329415 - RNA, 16 nt, Human
cuguauaaguaagaaa

SEQ ID NO: 2329416 - RNA, 17 nt, Human
cuguauaaguaagaaaa

SEQ ID NO: 2329417 - RNA, 21 nt, Human
cuguauaaguggaggcacuuu

SEQ ID NO: 2329418 - RNA, 21 nt, Human
cuguauaaguaagaaaauauu

SEQ ID NO: 2329419 - RNA, 18 nt, Human
cuguauaaguaagaaaau

SEQ ID NO: 2329420 - RNA, 19 nt, Human
cuguauaaguaagaaaaua

SEQ ID NO: 2329421 - RNA, 22 nt, Human
cuguauaaguggaggcacuuua

SEQ ID NO: 2329422 - RNA, 19 nt, Human
cuguauacaacccuggcau

SEQ ID NO: 2329423 - RNA, 22 nt, Human
cuguaguccuagccacucagga

SEQ ID NO: 2329424 - RNA, 20 nt, Human
cuguaguccuagccacucag

SEQ ID NO: 2329425 - RNA, 22 nt, Human
cuguagucccagcuacucggga

SEQ ID NO: 2329426 - RNA, 23 nt, Human
cuguagucccagcuacucaggag

SEQ ID NO: 2329427 - RNA, 22 nt, Human
cuguagucccagcuacucagga

SEQ ID NO: 2329428 - RNA, 18 nt, Human
cuguagucccagcuacuc

SEQ ID NO: 2329429 - RNA, 15 nt, Human
cuguagucccagcua

SEQ ID NO: 2329430 - RNA, 14 nt, Human
cuguagucccagcu

SEQ ID NO: 2329431 - RNA, 15 nt, Human
cuguacacugcacga

SEQ ID NO: 2329432 - RNA, 13 nt, Human
cuguacacugcac

SEQ ID NO: 2329433 - RNA, 20 nt, Human
cuguagucucaggaccuagg

SEQ ID NO: 2329434 - RNA, 18 nt, Human
cuguagugagauagcauu

SEQ ID NO: 2329435 - RNA, 20 nt, Human
cuguagugagauagcauugu

SEQ ID NO: 2329436 - RNA, 22 nt, Human
cuguagugagauagcauuguga

SEQ ID NO: 2329437 - RNA, 15 nt, Human
cuguagucucaggac

SEQ ID NO: 2329438 - RNA, 14 nt, Human
cuguagucucagga

SEQ ID NO: 2329439 - RNA, 23 nt, Human
cuguaguccuagccacucaggag

SEQ ID NO: 2329440 - RNA, 15 nt, Human
cuguaguuaggaaau

SEQ ID NO: 2329441 - RNA, 14 nt, Human
cuguaguuaggaaa

SEQ ID NO: 2329442 - RNA, 13 nt, Human
cuguaguuaggaa

SEQ ID NO: 2329443 - RNA, 19 nt, Human
cuguacacugaauauuuau

SEQ ID NO: 2329444 - RNA, 18 nt, Human
cuguacacguguccugua

SEQ ID NO: 2329445 - RNA, 16 nt, Human
cuguacacguguccug

SEQ ID NO: 2329446 - RNA, 17 nt, Human
cuguacacguguccugu

SEQ ID NO: 2329447 - RNA, 13 nt, Human
cuguacagagccc

SEQ ID NO: 2329448 - RNA, 18 nt, Human
cuguacaauauuuaaaau

SEQ ID NO: 2329449 - RNA, 17 nt, Human
cuguacaauauuuaaaa

SEQ ID NO: 2329450 - RNA, 16 nt, Human
cuguacaauauuuaaa

SEQ ID NO: 2329451 - RNA, 15 nt, Human
cuguacaauauuuaa

SEQ ID NO: 2329452 - RNA, 14 nt, Human
cuguacaauauuua

SEQ ID NO: 2329453 - RNA, 20 nt, Human
cuguacaaauauaagaauaa

SEQ ID NO: 2329454 - RNA, 17 nt, Human
cuguacaaauauaagaa

SEQ ID NO: 2329455 - RNA, 19 nt, Human
cuguacaaauauaagaaua

SEQ ID NO: 2329456 - RNA, 21 nt, Human
cuguacaauauuuaaaauuua

SEQ ID NO: 2329457 - RNA, 15 nt, Human
cuguacaaugacuuu

SEQ ID NO: 2329458 - RNA, 17 nt, Human
cuguaucggagacagug

SEQ ID NO: 2329459 - RNA, 23 nt, Human
cuguaucccaugagccucagcau

SEQ ID NO: 2329460 - RNA, 18 nt, Human
cuguaucuuguuuuucca

SEQ ID NO: 2329461 - RNA, 23 nt, Human
cuguaucuguagugagauagcau

SEQ ID NO: 2329462 - RNA, 18 nt, Human
cuguaucggagacaguga

SEQ ID NO: 2329463 - RNA, 17 nt, Human
cuguaucuguagugaga

SEQ ID NO: 2329464 - RNA, 22 nt, Human
cuguaucuugggggacagggcu

SEQ ID NO: 2329465 - RNA, 22 nt, Human
cugucaaacaaagccagaagcu

SEQ ID NO: 2329466 - RNA, 19 nt, Human
cugucaaacaaagccagaa

SEQ ID NO: 2329467 - RNA, 18 nt, Human
cugucaaacaaagccaga

SEQ ID NO: 2329468 - RNA, 23 nt, Human
cuguauuuuauuuagacaagaga

SEQ ID NO: 2329469 - RNA, 21 nt, Human
cuguauuuuauuuagacaaga

SEQ ID NO: 2329470 - RNA, 22 nt, Human
cuguauuuuauuuagacaagag

SEQ ID NO: 2329471 - RNA, 22 nt, Human
cuguauuuuaaaagaaugauua

SEQ ID NO: 2329472 - RNA, 20 nt, Human
cuguauuuuaaaagaaugau

SEQ ID NO: 2329473 - RNA, 19 nt, Human
cuguauuuuaaaagaauga

SEQ ID NO: 2329474 - RNA, 21 nt, Human
cugucaagugggaucugucac

SEQ ID NO: 2329475 - RNA, 19 nt, Human
cugucaaguuccuuugggu

SEQ ID NO: 2329476 - RNA, 17 nt, Human
cugucaaggcugcuuag

SEQ ID NO: 2329477 - RNA, 20 nt, Human
cugucaaggcugcuuagaau

SEQ ID NO: 2329478 - RNA, 19 nt, Human
cugucaaggcugcuuagaa

SEQ ID NO: 2329479 - RNA, 17 nt, Human
cuguccagacagccugu

SEQ ID NO: 2329480 - RNA, 21 nt, Human
cuguccagacagccuguaucu

SEQ ID NO: 2329481 - RNA, 11 nt, Human
cuguccagaga

SEQ ID NO: 2329482 - RNA, 12 nt, Human
cugucaagaaga

SEQ ID NO: 2329483 - RNA, 14 nt, Human
cugucaagaagaug

SEQ ID NO: 2329484 - RNA, 17 nt, Human
cuguccagccugggcag

SEQ ID NO: 2329485 - RNA, 15 nt, Human
cuguccagccugggc

SEQ ID NO: 2329486 - RNA, 13 nt, Human
cuguccagccugg

SEQ ID NO: 2329487 - RNA, 18 nt, Human
cuguccagagagagaagu

SEQ ID NO: 2329488 - RNA, 18 nt, Human
cuguccagccugggcagc

SEQ ID NO: 2329489 - RNA, 12 nt, Human
cuguccagcucc

SEQ ID NO: 2329490 - RNA, 14 nt, Human
cuguccagcuccaa

SEQ ID NO: 2329491 - RNA, 13 nt, Human
cuguccagcucca

SEQ ID NO: 2329492 - RNA, 23 nt, Human
cuguccaggcacugcugcccagc

SEQ ID NO: 2329493 - RNA, 18 nt, Human
cuguccagcuccaaccug

SEQ ID NO: 2329494 - RNA, 17 nt, Human
cuguccagcuccaaccu

SEQ ID NO: 2329495 - RNA, 21 nt, Human
cuguccagcuccaaccugcaa

SEQ ID NO: 2329496 - RNA, 16 nt, Human
cuguccaggcacugag

SEQ ID NO: 2329497 - RNA, 19 nt, Human
cuguccaggcacugagaua

SEQ ID NO: 2329498 - RNA, 18 nt, Human
cuguccagggcccugagc

SEQ ID NO: 2329499 - RNA, 23 nt, Human
cuguccagggcccugagcucggu

SEQ ID NO: 2329500 - RNA, 22 nt, Human
cuguccagggcccugagcucgg

SEQ ID NO: 2329501 - RNA, 20 nt, Human
cuguccagggcccugagcuc

SEQ ID NO: 2329502 - RNA, 19 nt, Human
cuguccagggcccugagcu

SEQ ID NO: 2329503 - RNA, 17 nt, Human
cuguccccgcacugggc

SEQ ID NO: 2329504 - RNA, 13 nt, Human
cuguccagugccc

SEQ ID NO: 2329505 - RNA, 14 nt, Human
cuguccagugccca

SEQ ID NO: 2329506 - RNA, 15 nt, Human
cuguccagugcccau

SEQ ID NO: 2329507 - RNA, 18 nt, Human
cuguccagugcccauucc

SEQ ID NO: 2329508 - RNA, 14 nt, Human
cuguccagugggua

SEQ ID NO: 2329509 - RNA, 14 nt, Human
cuguccaguuccca

SEQ ID NO: 2329510 - RNA, 15 nt, Human
cuguccaguucccag

SEQ ID NO: 2329511 - RNA, 16 nt, Human
cuguccaguucccaga

SEQ ID NO: 2329512 - RNA, 18 nt, Human
cuguccccgcacugggcu

SEQ ID NO: 2329513 - RNA, 19 nt, Human
cuguccccgcacugggcuu

SEQ ID NO: 2329514 - RNA, 22 nt, Human
cuguccccgcacugggcuuggg

SEQ ID NO: 2329515 - RNA, 21 nt, Human
cuguccaguucccagaaggca

SEQ ID NO: 2329516 - RNA, 18 nt, Human
cuguccaguucccagaag

SEQ ID NO: 2329517 - RNA, 19 nt, Human
cuguccaguucccagaagg

SEQ ID NO: 2329518 - RNA, 20 nt, Human
cuguccaguucccagaaggc

SEQ ID NO: 2329519 - RNA, 14 nt, Human
cuguccgagcuuug

SEQ ID NO: 2329520 - RNA, 20 nt, Human
cugucccuuacgugaguccu

SEQ ID NO: 2329521 - RNA, 15 nt, Human
cugucccucucaggc

SEQ ID NO: 2329522 - RNA, 21 nt, Human
cugucccgggguccuguggca

SEQ ID NO: 2329523 - RNA, 17 nt, Human
cugucccuccgggaccu

SEQ ID NO: 2329524 - RNA, 21 nt, Human
cugucccuccgggaccuggug

SEQ ID NO: 2329525 - RNA, 12 nt, Human
cugucccuguca

SEQ ID NO: 2329526 - RNA, 16 nt, Human
cugucccucucaggca

SEQ ID NO: 2329527 - RNA, 14 nt, Human
cugucccugccuca

SEQ ID NO: 2329528 - RNA, 14 nt, Human
cuguccccuucucu

SEQ ID NO: 2329529 - RNA, 16 nt, Human
cuguccccuucucuca

SEQ ID NO: 2329530 - RNA, 19 nt, Human
cuguccccuucucucaucu

SEQ ID NO: 2329531 - RNA, 20 nt, Human
cuguccccuucucucaucuc

SEQ ID NO: 2329532 - RNA, 21 nt, Human
cuguccccuucucucaucucu

SEQ ID NO: 2329533 - RNA, 22 nt, Human
cuguccccuucucucaucucuu

SEQ ID NO: 2329534 - RNA, 23 nt, Human
cuguccccuucucucaucucuua

SEQ ID NO: 2329535 - RNA, 17 nt, Human
cugucccgggguccugu

SEQ ID NO: 2329536 - RNA, 18 nt, Human
cugucccgggguccugug

SEQ ID NO: 2329537 - RNA, 19 nt, Human
cuguccccucuugccccaa

SEQ ID NO: 2329538 - RNA, 20 nt, Human
cuguccccucuugccccaac

SEQ ID NO: 2329539 - RNA, 15 nt, Human
cuguccccucuugcc

SEQ ID NO: 2329540 - RNA, 16 nt, Human
cuguccccucuugccc

SEQ ID NO: 2329541 - RNA, 17 nt, Human
cuguccccucuugcccc

SEQ ID NO: 2329542 - RNA, 18 nt, Human
cuguccccucuugcccca

SEQ ID NO: 2329543 - RNA, 14 nt, Human
cuguccccucagcu

SEQ ID NO: 2329544 - RNA, 15 nt, Human
cuguccccucagcuc

SEQ ID NO: 2329545 - RNA, 16 nt, Human
cuguccccucagcucc

SEQ ID NO: 2329546 - RNA, 17 nt, Human
cuguccccucagcucca

SEQ ID NO: 2329547 - RNA, 20 nt, Human
cuguccccucagcuccagac

SEQ ID NO: 2329548 - RNA, 12 nt, Human
cuguccccucuu

SEQ ID NO: 2329549 - RNA, 12 nt, Human
cuguccuccaag

SEQ ID NO: 2329550 - RNA, 23 nt, Human
cuguccuccaacaccaagcacag

SEQ ID NO: 2329551 - RNA, 15 nt, Human
cuguccuccaacacc

SEQ ID NO: 2329552 - RNA, 13 nt, Human
cugucuagagagg

SEQ ID NO: 2329553 - RNA, 17 nt, Human
cugucuagagagggagg

SEQ ID NO: 2329554 - RNA, 16 nt, Human
cugucuagagagggag

SEQ ID NO: 2329555 - RNA, 14 nt, Human
cugucuagagaggg

SEQ ID NO: 2329556 - RNA, 13 nt, Human
cugucuauucuag

SEQ ID NO: 2329557 - RNA, 14 nt, Human
cugucuauuucugc

SEQ ID NO: 2329558 - RNA, 15 nt, Human
cugucuauuucugcu

SEQ ID NO: 2329559 - RNA, 18 nt, Human
cugucuagagagggaggc

SEQ ID NO: 2329560 - RNA, 12 nt, Human
cugucuagagua

SEQ ID NO: 2329561 - RNA, 18 nt, Human
cugucucaaaaaaagaaa

SEQ ID NO: 2329562 - RNA, 22 nt, Human
cugucucaagagggcacuggug

SEQ ID NO: 2329563 - RNA, 16 nt, Human
cugucuauuucugcug

SEQ ID NO: 2329564 - RNA, 17 nt, Human
cugucuauuucugcuga

SEQ ID NO: 2329565 - RNA, 18 nt, Human
cugucuauuucugcugaa

SEQ ID NO: 2329566 - RNA, 19 nt, Human
cugucuauuucugcugaau

SEQ ID NO: 2329567 - RNA, 16 nt, Human
cugucucaaaaaaaga

SEQ ID NO: 2329568 - RNA, 23 nt, Human
cugucucaaaaaaacacaaaagu

SEQ ID NO: 2329569 - RNA, 15 nt, Human
cuguccucagguggc

SEQ ID NO: 2329570 - RNA, 16 nt, Human
cuguccucagguggcc

SEQ ID NO: 2329571 - RNA, 17 nt, Human
cuguccucagguggcca

SEQ ID NO: 2329572 - RNA, 18 nt, Human
cuguccucagguggccau

SEQ ID NO: 2329573 - RNA, 20 nt, Human
cugucuacacuaagagagaa

SEQ ID NO: 2329574 - RNA, 12 nt, Human
cuguccucaggu

SEQ ID NO: 2329575 - RNA, 17 nt, Human
cuguccucagcuucuua

SEQ ID NO: 2329576 - RNA, 15 nt, Human
cuguccucagcuucu

SEQ ID NO: 2329577 - RNA, 22 nt, Human
cuguccucagccuugccagaga

SEQ ID NO: 2329578 - RNA, 21 nt, Human
cuguccucagccuugccagag

SEQ ID NO: 2329579 - RNA, 20 nt, Human
cuguccucagccuugccaga

SEQ ID NO: 2329580 - RNA, 18 nt, Human
cuguccucagccuugcca

SEQ ID NO: 2329581 - RNA, 14 nt, Human
cuguccucagccuu

SEQ ID NO: 2329582 - RNA, 18 nt, Human
cuguccguuuacuccaag

SEQ ID NO: 2329583 - RNA, 17 nt, Human
cugucccugucaccaag

SEQ ID NO: 2329584 - RNA, 13 nt, Human
cuguccucagccu

SEQ ID NO: 2329585 - RNA, 14 nt, Human
cuguccuacccacc

SEQ ID NO: 2329586 - RNA, 15 nt, Human
cuguccgagcuuuga

SEQ ID NO: 2329587 - RNA, 15 nt, Human
cugucccugucacca

SEQ ID NO: 2329588 - RNA, 22 nt, Human
cugucccuuacgugaguccugg

SEQ ID NO: 2329589 - RNA, 23 nt, Human
cugugggcugcacucugugccca

SEQ ID NO: 2329590 - RNA, 15 nt, Human
cugugggcuggcagu

SEQ ID NO: 2329591 - RNA, 18 nt, Human
cugugggcugcacucugu

SEQ ID NO: 2329592 - RNA, 20 nt, Human
cugugggcugcacucugugc

SEQ ID NO: 2329593 - RNA, 21 nt, Human
cugugggcugcacucugugcc

SEQ ID NO: 2329594 - RNA, 22 nt, Human
cugugggcugcacucugugccc

SEQ ID NO: 2329595 - RNA, 19 nt, Human
cugugggccucaaggacuu

SEQ ID NO: 2329596 - RNA, 15 nt, Human
cugugggcugcacuc

SEQ ID NO: 2329597 - RNA, 14 nt, Human
cugugggcugcacu

SEQ ID NO: 2329598 - RNA, 23 nt, Human
cugugggcgugagaccugccccu

SEQ ID NO: 2329599 - RNA, 19 nt, Human
cuguggggauuucucccag

SEQ ID NO: 2329600 - RNA, 18 nt, Human
cuguggggauuucuccca

SEQ ID NO: 2329601 - RNA, 17 nt, Human
cuguggggauuucuccc

SEQ ID NO: 2329602 - RNA, 21 nt, Human
cuguggggaucucaggggcug

SEQ ID NO: 2329603 - RNA, 16 nt, Human
cuguggggaucucagg

SEQ ID NO: 2329604 - RNA, 17 nt, Human
cuguggggaucucaggg

SEQ ID NO: 2329605 - RNA, 20 nt, Human
cuguggggaucucaggggcu

SEQ ID NO: 2329606 - RNA, 21 nt, Human
cuguggggauuucucccagcu

SEQ ID NO: 2329607 - RNA, 20 nt, Human
cuguggggauuucucccagc

SEQ ID NO: 2329608 - RNA, 19 nt, Human
cuguggggccuugguuccc

SEQ ID NO: 2329609 - RNA, 14 nt, Human
cuguggggcuggua

SEQ ID NO: 2329610 - RNA, 17 nt, Human
cuguggggcugguagcu

SEQ ID NO: 2329611 - RNA, 21 nt, Human
cuguggggcugguagcucagg

SEQ ID NO: 2329612 - RNA, 22 nt, Human
cuguggggcugguagcucaggu

SEQ ID NO: 2329613 - RNA, 21 nt, Human
cugugucuugcaauggcagcc

SEQ ID NO: 2329614 - RNA, 20 nt, Human
cugugucuugcaauggcagc

SEQ ID NO: 2329615 - RNA, 19 nt, Human
cugugggggaagagcacag

SEQ ID NO: 2329616 - RNA, 20 nt, Human
cugugggggaagagcacagc

SEQ ID NO: 2329617 - RNA, 21 nt, Human
cugugggggaagagcacagcc

SEQ ID NO: 2329618 - RNA, 22 nt, Human
cugugggggaagagcacagccc

SEQ ID NO: 2329619 - RNA, 22 nt, Human
cugugucuugcaauggcagccu

SEQ ID NO: 2329620 - RNA, 23 nt, Human
cugugucuugcaauggcagccuu

SEQ ID NO: 2329621 - RNA, 16 nt, Human
cuguguggacugugau

SEQ ID NO: 2329622 - RNA, 18 nt, Human
cuguguggacugugaugc

SEQ ID NO: 2329623 - RNA, 15 nt, Human
cuguguggcagucug

SEQ ID NO: 2329624 - RNA, 23 nt, Human
cugugggggaagagcacagcccu

SEQ ID NO: 2329625 - RNA, 18 nt, Human
cugugugcuccuccuugg

SEQ ID NO: 2329626 - RNA, 23 nt, Human
cugugugcuccuccuuggugccu

SEQ ID NO: 2329627 - RNA, 23 nt, Human
cugugugcucaggagcccuggga

SEQ ID NO: 2329628 - RNA, 19 nt, Human
cugugugcucaggagcccu

SEQ ID NO: 2329629 - RNA, 16 nt, Human
cugugugcucaggagc

SEQ ID NO: 2329630 - RNA, 20 nt, Human
cugugugcucaggagcccug

SEQ ID NO: 2329631 - RNA, 21 nt, Human
cugugugcucaggagcccugg

SEQ ID NO: 2329632 - RNA, 21 nt, Human
cugugugguuugguguguucc

SEQ ID NO: 2329633 - RNA, 12 nt, Human
cuguguguguga

SEQ ID NO: 2329634 - RNA, 16 nt, Human
cugugugugugaauga

SEQ ID NO: 2329635 - RNA, 14 nt, Human
cugugugugugaau

SEQ ID NO: 2329636 - RNA, 23 nt, Human
cugugugugugaaugaacacucu

SEQ ID NO: 2329637 - RNA, 18 nt, Human
cugugugugugaaugaac

SEQ ID NO: 2329638 - RNA, 17 nt, Human
cugugugugugaaugaa

SEQ ID NO: 2329639 - RNA, 18 nt, Human
cugugugugcgccuacag

SEQ ID NO: 2329640 - RNA, 12 nt, Human
cugugugguuug

SEQ ID NO: 2329641 - RNA, 22 nt, Human
cuguguggugucgcgccuucuc

SEQ ID NO: 2329642 - RNA, 20 nt, Human
cugugugugcgccuacagga

SEQ ID NO: 2329643 - RNA, 17 nt, Human
cuguguguuuaugugug

SEQ ID NO: 2329644 - RNA, 16 nt, Human
cuguguguuuaugugu

SEQ ID NO: 2329645 - RNA, 22 nt, Human
cuguguguugccacaggacaca

SEQ ID NO: 2329646 - RNA, 21 nt, Human
cuguguguugccacaggacac

SEQ ID NO: 2329647 - RNA, 22 nt, Human
cuguguugucucuagagcaggg

SEQ ID NO: 2329648 - RNA, 20 nt, Human
cuguguguugccacaggaca

SEQ ID NO: 2329649 - RNA, 19 nt, Human
cuguguguugccacaggac

SEQ ID NO: 2329650 - RNA, 13 nt, Human
cuguguguugcca

SEQ ID NO: 2329651 - RNA, 19 nt, Human
cuguguguuaguucccaac

SEQ ID NO: 2329652 - RNA, 16 nt, Human
cuguguguuaguuccc

SEQ ID NO: 2329653 - RNA, 18 nt, Human
cuguguguuaguucccaa

SEQ ID NO: 2329654 - RNA, 21 nt, Human
cuguguguuaguucccaacau

SEQ ID NO: 2329655 - RNA, 21 nt, Human
cugugugugugaaugaacacu

SEQ ID NO: 2329656 - RNA, 12 nt, Human
cuguguguuagu

SEQ ID NO: 2329657 - RNA, 20 nt, Human
cuguguuugagcucugcagc

SEQ ID NO: 2329658 - RNA, 19 nt, Human
cuguguuucuuuugguucc

SEQ ID NO: 2329659 - RNA, 19 nt, Human
cuguguuucaaguggggcu

SEQ ID NO: 2329660 - RNA, 22 nt, Human
cuguguuugagcucugcagccc

SEQ ID NO: 2329661 - RNA, 20 nt, Human
cuguuaaaagaugaaaauau

SEQ ID NO: 2329662 - RNA, 13 nt, Human
cuguguuuuaaua

SEQ ID NO: 2329663 - RNA, 15 nt, Human
cuguguuuguuccua

SEQ ID NO: 2329664 - RNA, 14 nt, Human
cuguguuuguuccu

SEQ ID NO: 2329665 - RNA, 23 nt, Human
cuguuaaaagaugaaaauauuug

SEQ ID NO: 2329666 - RNA, 21 nt, Human
cuguuaaaagaugaaaauauu

SEQ ID NO: 2329667 - RNA, 17 nt, Human
cuguucccaccugcugg

SEQ ID NO: 2329668 - RNA, 18 nt, Human
cuguucccaaauuuucua

SEQ ID NO: 2329669 - RNA, 14 nt, Human
cuguuccagccugc

SEQ ID NO: 2329670 - RNA, 17 nt, Human
cuguuccagccugcccu

SEQ ID NO: 2329671 - RNA, 23 nt, Human
cuguuccagccugcccucuucau

SEQ ID NO: 2329672 - RNA, 18 nt, Human
cuguucccauucuugcau

SEQ ID NO: 2329673 - RNA, 20 nt, Human
cuguucccauguagcccccu

SEQ ID NO: 2329674 - RNA, 13 nt, Human
cuguuccccagag

SEQ ID NO: 2329675 - RNA, 16 nt, Human
cuguuccccagagaaa

SEQ ID NO: 2329676 - RNA, 12 nt, Human
cuguucccccgc

SEQ ID NO: 2329677 - RNA, 23 nt, Human
cuguucccccgccgcuuuucucc

SEQ ID NO: 2329678 - RNA, 15 nt, Human
cuguuccccagagaa

SEQ ID NO: 2329679 - RNA, 14 nt, Human
cuguuccccagaga

SEQ ID NO: 2329680 - RNA, 17 nt, Human
cuguucauuuccucaaa

SEQ ID NO: 2329681 - RNA, 14 nt, Human
cuguucauuuccuc

SEQ ID NO: 2329682 - RNA, 17 nt, Human
cuguucaguuacagaaa

SEQ ID NO: 2329683 - RNA, 18 nt, Human
cuguucaguuacagaaag

SEQ ID NO: 2329684 - RNA, 19 nt, Human
cuguucaguuacagaaagu

SEQ ID NO: 2329685 - RNA, 21 nt, Human
cuguucaguuacagaaagugg

SEQ ID NO: 2329686 - RNA, 21 nt, Human
cuguucagcugguugagguuu

SEQ ID NO: 2329687 - RNA, 19 nt, Human
cuguucagcugguugaggu

SEQ ID NO: 2329688 - RNA, 18 nt, Human
cuguucagcugguugagg

SEQ ID NO: 2329689 - RNA, 16 nt, Human
cuguucagugucccgg

SEQ ID NO: 2329690 - RNA, 20 nt, Human
cuguucagugucccgggccc

SEQ ID NO: 2329691 - RNA, 12 nt, Human
cuguucaguuac

SEQ ID NO: 2329692 - RNA, 13 nt, Human
cuguucaguuaca

SEQ ID NO: 2329693 - RNA, 14 nt, Human
cuguucaguuacag

SEQ ID NO: 2329694 - RNA, 15 nt, Human
cuguucaguuacaga

SEQ ID NO: 2329695 - RNA, 13 nt, Human
cuguuacugucuu

SEQ ID NO: 2329696 - RNA, 20 nt, Human
cuguuaccugaucaaugaca

SEQ ID NO: 2329697 - RNA, 21 nt, Human
cuguuaccugaucaaugacag

SEQ ID NO: 2329698 - RNA, 18 nt, Human
cuguuacccagagaauau

SEQ ID NO: 2329699 - RNA, 20 nt, Human
cuguuaccaugucacugugg

SEQ ID NO: 2329700 - RNA, 16 nt, Human
cuguuacacuggagga

SEQ ID NO: 2329701 - RNA, 15 nt, Human
cuguuaccaugucac

SEQ ID NO: 2329702 - RNA, 16 nt, Human
cuguuaccaugucacu

SEQ ID NO: 2329703 - RNA, 18 nt, Human
cuguuaccaugucacugu

SEQ ID NO: 2329704 - RNA, 19 nt, Human
cuguuaccaugucacugug

SEQ ID NO: 2329705 - RNA, 13 nt, Human
cuguuacacugga

SEQ ID NO: 2329706 - RNA, 21 nt, Human
cuguuccuucacauccugugu

SEQ ID NO: 2329707 - RNA, 18 nt, Human
cuguuccuucacauccug

SEQ ID NO: 2329708 - RNA, 15 nt, Human
cuguuccuucacauc

SEQ ID NO: 2329709 - RNA, 15 nt, Human
cuguuccuuagaccu

SEQ ID NO: 2329710 - RNA, 16 nt, Human
cuguuccuuagaccuu

SEQ ID NO: 2329711 - RNA, 13 nt, Human
cuguucucugccc

SEQ ID NO: 2329712 - RNA, 20 nt, Human
cuguucuacauagaugcuua

SEQ ID NO: 2329713 - RNA, 23 nt, Human
cuguucccccuucacaaagccca

SEQ ID NO: 2329714 - RNA, 22 nt, Human
cuguuccccuaguaagugccuu

SEQ ID NO: 2329715 - RNA, 23 nt, Human
cuguuccccuaguaagugccuuc

SEQ ID NO: 2329716 - RNA, 12 nt, Human
cuguuccccuca

SEQ ID NO: 2329717 - RNA, 17 nt, Human
cuguucccccuucacaa

SEQ ID NO: 2329718 - RNA, 16 nt, Human
cuguucccccuucaca

SEQ ID NO: 2329719 - RNA, 15 nt, Human
cuguucccccuucac

SEQ ID NO: 2329720 - RNA, 14 nt, Human
cuguucccccuuca

SEQ ID NO: 2329721 - RNA, 17 nt, Human
cuguucccccugugcag

SEQ ID NO: 2329722 - RNA, 16 nt, Human
cuguucccccugugca

SEQ ID NO: 2329723 - RNA, 15 nt, Human
cuguucccccugugc

SEQ ID NO: 2329724 - RNA, 12 nt, Human
cuguucccccug

SEQ ID NO: 2329725 - RNA, 20 nt, Human
cuguucccucugcuccugga

SEQ ID NO: 2329726 - RNA, 17 nt, Human
cuguucccucugcuccu

SEQ ID NO: 2329727 - RNA, 19 nt, Human
cuguucccucugcuccugg

SEQ ID NO: 2329728 - RNA, 22 nt, Human
cuguuccccucacuggaugaaa

SEQ ID NO: 2329729 - RNA, 14 nt, Human
cuguuccccucacu

SEQ ID NO: 2329730 - RNA, 15 nt, Human
cuguuccccucacug

SEQ ID NO: 2329731 - RNA, 17 nt, Human
cuguuccccucacugga

SEQ ID NO: 2329732 - RNA, 14 nt, Human
cuguucccucugcu

SEQ ID NO: 2329733 - RNA, 20 nt, Human
cuguucucugcccuccaaga

SEQ ID NO: 2329734 - RNA, 15 nt, Human
cuguucucuugggaa

SEQ ID NO: 2329735 - RNA, 19 nt, Human
cuguucuacauagaugcuu

SEQ ID NO: 2329736 - RNA, 18 nt, Human
cuguucucugcccuccaa

SEQ ID NO: 2329737 - RNA, 19 nt, Human
cuguucucugcccuccaag

SEQ ID NO: 2329738 - RNA, 14 nt, Human
cuguucucugcccu

SEQ ID NO: 2329739 - RNA, 15 nt, Human
cuguucucugcccuc

SEQ ID NO: 2329740 - RNA, 16 nt, Human
cuguucucugcccucc

SEQ ID NO: 2329741 - RNA, 17 nt, Human
cuguucucugcccucca

SEQ ID NO: 2329742 - RNA, 13 nt, Human
cugugccuccuca

SEQ ID NO: 2329743 - RNA, 14 nt, Human
cugugccucccaaa

SEQ ID NO: 2329744 - RNA, 16 nt, Human
cugugccuccucaccc

SEQ ID NO: 2329745 - RNA, 15 nt, Human
cugugccuccucacc

SEQ ID NO: 2329746 - RNA, 14 nt, Human
cugugccauuuugu

SEQ ID NO: 2329747 - RNA, 20 nt, Human
cugugccacccugggcucug

SEQ ID NO: 2329748 - RNA, 22 nt, Human
cugugccacccugggcucugug

SEQ ID NO: 2329749 - RNA, 18 nt, Human
cugugccacccaccaggg

SEQ ID NO: 2329750 - RNA, 13 nt, Human
cugugccacccug

SEQ ID NO: 2329751 - RNA, 13 nt, Human
cugugccacccac

SEQ ID NO: 2329752 - RNA, 17 nt, Human
cugugcaugguggcacc

SEQ ID NO: 2329753 - RNA, 15 nt, Human
cugugccacccuggg

SEQ ID NO: 2329754 - RNA, 16 nt, Human
cugugccacccugggc

SEQ ID NO: 2329755 - RNA, 17 nt, Human
cugugccacccugggcu

SEQ ID NO: 2329756 - RNA, 18 nt, Human
cugugccacccugggcuc

SEQ ID NO: 2329757 - RNA, 17 nt, Human
cugugcauguaugucuu

SEQ ID NO: 2329758 - RNA, 11 nt, Human
cugugccaccc

SEQ ID NO: 2329759 - RNA, 16 nt, Human
cugugccaugugccag

SEQ ID NO: 2329760 - RNA, 18 nt, Human
cugugccaugugccaggu

SEQ ID NO: 2329761 - RNA, 22 nt, Human
cugugcacaaaacccagaccug

SEQ ID NO: 2329762 - RNA, 19 nt, Human
cugugcacaucugugucuu

SEQ ID NO: 2329763 - RNA, 18 nt, Human
cugugcacaucugugucu

SEQ ID NO: 2329764 - RNA, 23 nt, Human
cugugcaguggcccccacagaaa

SEQ ID NO: 2329765 - RNA, 20 nt, Human
cugugcacaucugugucuug

SEQ ID NO: 2329766 - RNA, 22 nt, Human
cugugcaugggugaagggagag

SEQ ID NO: 2329767 - RNA, 20 nt, Human
cugugcaugggugaagggag

SEQ ID NO: 2329768 - RNA, 17 nt, Human
cugugcaugggugaagg

SEQ ID NO: 2329769 - RNA, 14 nt, Human
cugugcauggguga

SEQ ID NO: 2329770 - RNA, 15 nt, Human
cugugcauguauguc

SEQ ID NO: 2329771 - RNA, 16 nt, Human
cugugcauguaugucu

SEQ ID NO: 2329772 - RNA, 19 nt, Human
cugugauggggcccugccu

SEQ ID NO: 2329773 - RNA, 20 nt, Human
cugugauggggcccugccuc

SEQ ID NO: 2329774 - RNA, 21 nt, Human
cugugcaaccucuuggccuga

SEQ ID NO: 2329775 - RNA, 20 nt, Human
cugugcacaaaacccagacc

SEQ ID NO: 2329776 - RNA, 19 nt, Human
cugugcacaaaacccagac

SEQ ID NO: 2329777 - RNA, 13 nt, Human
cugucucagggug

SEQ ID NO: 2329778 - RNA, 13 nt, Human
cugucuccagacc

SEQ ID NO: 2329779 - RNA, 18 nt, Human
cugucuccagacccccac

SEQ ID NO: 2329780 - RNA, 16 nt, Human
cugucuccagaccccc

SEQ ID NO: 2329781 - RNA, 15 nt, Human
cugucuccagacccc

SEQ ID NO: 2329782 - RNA, 13 nt, Human
cugucucagccuc

SEQ ID NO: 2329783 - RNA, 17 nt, Human
cugucucagccucccag

SEQ ID NO: 2329784 - RNA, 16 nt, Human
cugucucagccuccca

SEQ ID NO: 2329785 - RNA, 15 nt, Human
cugucucagccuccc

SEQ ID NO: 2329786 - RNA, 14 nt, Human
cugucucagccucc

SEQ ID NO: 2329787 - RNA, 12 nt, Human
cugucucagccu

SEQ ID NO: 2329788 - RNA, 13 nt, Human
cugucucagacuc

SEQ ID NO: 2329789 - RNA, 23 nt, Human
cugucucaagagggcacuggugg

SEQ ID NO: 2329790 - RNA, 13 nt, Human
cugucuccuagga

SEQ ID NO: 2329791 - RNA, 23 nt, Human
cugugaggugcagagugcccaga

SEQ ID NO: 2329792 - RNA, 19 nt, Human
cugugaggggcucucucau

SEQ ID NO: 2329793 - RNA, 22 nt, Human
cugucuccagacccccaccccu

SEQ ID NO: 2329794 - RNA, 19 nt, Human
cugucuccagacccccacc

SEQ ID NO: 2329795 - RNA, 20 nt, Human
cugucuccauggcccugcaa

SEQ ID NO: 2329796 - RNA, 18 nt, Human
cugucuccauguuugaug

SEQ ID NO: 2329797 - RNA, 14 nt, Human
cugugaguguaagu

SEQ ID NO: 2329798 - RNA, 22 nt, Human
cugugaggugcagagugcccag

SEQ ID NO: 2329799 - RNA, 23 nt, Human
cugugaguacuacaguccuccca

SEQ ID NO: 2329800 - RNA, 20 nt, Human
cugugaguacuacaguccuc

SEQ ID NO: 2329801 - RNA, 21 nt, Human
cugugaguacuacaguccucc

SEQ ID NO: 2329802 - RNA, 20 nt, Human
cugugaguguaagugugagu

SEQ ID NO: 2329803 - RNA, 19 nt, Human
cugugaguguaagugugag

SEQ ID NO: 2329804 - RNA, 21 nt, Human
cugugaguguaagugugagua

SEQ ID NO: 2329805 - RNA, 17 nt, Human
cugugaguuuaaagcaa

SEQ ID NO: 2329806 - RNA, 18 nt, Human
cugugauggggcccugcc

SEQ ID NO: 2329807 - RNA, 17 nt, Human
cugugauggggcccugc

SEQ ID NO: 2329808 - RNA, 19 nt, Human
cuguggaaaagaaacacgc

SEQ ID NO: 2329809 - RNA, 18 nt, Human
cuguggaaaaauauuuaa

SEQ ID NO: 2329810 - RNA, 14 nt, Human
cuguggaaaaauau

SEQ ID NO: 2329811 - RNA, 17 nt, Human
cugugcuuuuaaaugca

SEQ ID NO: 2329812 - RNA, 19 nt, Human
cugugcuuugacucaccug

SEQ ID NO: 2329813 - RNA, 21 nt, Human
cugugcuuugacucaccuguu

SEQ ID NO: 2329814 - RNA, 12 nt, Human
cugugcuuucua

SEQ ID NO: 2329815 - RNA, 13 nt, Human
cugugcuuucuau

SEQ ID NO: 2329816 - RNA, 15 nt, Human
cugugcuuucuauug

SEQ ID NO: 2329817 - RNA, 16 nt, Human
cugugcuuucuauugu

SEQ ID NO: 2329818 - RNA, 20 nt, Human
cugugcuuucuauuguacag

SEQ ID NO: 2329819 - RNA, 22 nt, Human
cugugcuuucuauuguacagaa

SEQ ID NO: 2329820 - RNA, 16 nt, Human
cugugcuuugacucac

SEQ ID NO: 2329821 - RNA, 18 nt, Human
cugugcuuugacucaccu

SEQ ID NO: 2329822 - RNA, 15 nt, Human
cugugcuuuccagcu

SEQ ID NO: 2329823 - RNA, 21 nt, Human
cugugcuucgggcccuuccca

SEQ ID NO: 2329824 - RNA, 20 nt, Human
cugugcuucgggcccuuccc

SEQ ID NO: 2329825 - RNA, 16 nt, Human
cugugcuuuccagcuc

SEQ ID NO: 2329826 - RNA, 17 nt, Human
cugugcuuuccagcuca

SEQ ID NO: 2329827 - RNA, 20 nt, Human
cugugcuuuccagcucaccc

SEQ ID NO: 2329828 - RNA, 21 nt, Human
cugugcuuuccagcucacccc

SEQ ID NO: 2329829 - RNA, 22 nt, Human
cugugcuuuccagcucaccccc

SEQ ID NO: 2329830 - RNA, 14 nt, Human
cugugcuuucccug

SEQ ID NO: 2329831 - RNA, 19 nt, Human
cugugcuuucccugaacug

SEQ ID NO: 2329832 - RNA, 12 nt, Human
cugugcuggugu

SEQ ID NO: 2329833 - RNA, 17 nt, Human
cugugcugguguccuga

SEQ ID NO: 2329834 - RNA, 18 nt, Human
cugugcugguguccugac

SEQ ID NO: 2329835 - RNA, 19 nt, Human
cugugcugguguccugacc

SEQ ID NO: 2329836 - RNA, 20 nt, Human
cugugcugguguccugacca

SEQ ID NO: 2329837 - RNA, 21 nt, Human
cugugcugguguccugaccac

SEQ ID NO: 2329838 - RNA, 11 nt, Human
cugugcugugu

SEQ ID NO: 2329839 - RNA, 13 nt, Human
cugugcugugugu

SEQ ID NO: 2329840 - RNA, 23 nt, Human
cugugcugguguccugaccaccc

SEQ ID NO: 2329841 - RNA, 18 nt, Human
cugugcugugcccaaguu

SEQ ID NO: 2329842 - RNA, 12 nt, Human
cugugcugugga

SEQ ID NO: 2329843 - RNA, 15 nt, Human
cugugcuguggaagc

SEQ ID NO: 2329844 - RNA, 19 nt, Human
cugugcuucgggcccuucc

SEQ ID NO: 2329845 - RNA, 17 nt, Human
cugugcuucgggcccuu

SEQ ID NO: 2329846 - RNA, 18 nt, Human
cugugcuucaauuaauaa

SEQ ID NO: 2329847 - RNA, 21 nt, Human
cugugcuguggaagcaacagg

SEQ ID NO: 2329848 - RNA, 18 nt, Human
cugugcugugugugacgu

SEQ ID NO: 2329849 - RNA, 17 nt, Human
cugugcuucaauuaaua

SEQ ID NO: 2329850 - RNA, 18 nt, Human
cugugccucugggacugg

SEQ ID NO: 2329851 - RNA, 17 nt, Human
cugugccucugggacug

SEQ ID NO: 2329852 - RNA, 22 nt, Human
cugugcugcccugcccaccugg

SEQ ID NO: 2329853 - RNA, 16 nt, Human
cugugcuggagccacu

SEQ ID NO: 2329854 - RNA, 21 nt, Human
cugugcuggagccacuaacua

SEQ ID NO: 2329855 - RNA, 13 nt, Human
cugugcuggagcc

SEQ ID NO: 2329856 - RNA, 14 nt, Human
cugugcuggagcca

SEQ ID NO: 2329857 - RNA, 15 nt, Human
cugugcuggagccac

SEQ ID NO: 2329858 - RNA, 16 nt, Human
cugugccucugggacu

SEQ ID NO: 2329859 - RNA, 14 nt, Human
cugugccucuggga

SEQ ID NO: 2329860 - RNA, 11 nt, Human
cugugccucug

SEQ ID NO: 2329861 - RNA, 23 nt, Human
cugugccucggcuuuucucagcu

SEQ ID NO: 2329862 - RNA, 22 nt, Human
cugugccucggcuuuucucagc

SEQ ID NO: 2329863 - RNA, 13 nt, Human
cugugccucggcu

SEQ ID NO: 2329864 - RNA, 22 nt, Human
cuguggaaaagaaacacgcacu

SEQ ID NO: 2329865 - RNA, 19 nt, Human
cuguggaaaaauauuuaag

SEQ ID NO: 2329866 - RNA, 13 nt, Human
cuguggaaagugu

SEQ ID NO: 2329867 - RNA, 14 nt, Human
cuguggaaagugua

SEQ ID NO: 2329868 - RNA, 15 nt, Human
cuguggaaaguguaa

SEQ ID NO: 2329869 - RNA, 16 nt, Human
cuguggaaaguguaaa

SEQ ID NO: 2329870 - RNA, 17 nt, Human
cuguggaaaguguaaag

SEQ ID NO: 2329871 - RNA, 17 nt, Human
cuguggaugauaaaaca

SEQ ID NO: 2329872 - RNA, 20 nt, Human
cuguggaugagcccucagaa

SEQ ID NO: 2329873 - RNA, 18 nt, Human
cuguggaaaguguaaagc

SEQ ID NO: 2329874 - RNA, 20 nt, Human
cuguggaaaguguaaagcau

SEQ ID NO: 2329875 - RNA, 21 nt, Human
cuguggaaaguguaaagcauu

SEQ ID NO: 2329876 - RNA, 19 nt, Human
cuguggaugagcccucaga

SEQ ID NO: 2329877 - RNA, 16 nt, Human
cuguggccaaguucuu

SEQ ID NO: 2329878 - RNA, 17 nt, Human
cuguggcaucuuugccu

SEQ ID NO: 2329879 - RNA, 23 nt, Human
cuguggcaggcagcgccaagcaa

SEQ ID NO: 2329880 - RNA, 14 nt, Human
cuguggcaggcagc

SEQ ID NO: 2329881 - RNA, 17 nt, Human
cuguggcaggcagcgcc

SEQ ID NO: 2329882 - RNA, 18 nt, Human
cuguggcaggcagcgcca

SEQ ID NO: 2329883 - RNA, 21 nt, Human
cuguggcaggcagcgccaagc

SEQ ID NO: 2329884 - RNA, 13 nt, Human
cuguggcaggcag

SEQ ID NO: 2329885 - RNA, 18 nt, Human
cuguggccaaguucuuag

SEQ ID NO: 2329886 - RNA, 22 nt, Human
cuguggccagcuuguuauuuau

SEQ ID NO: 2329887 - RNA, 14 nt, Human
cuguggccugggca

SEQ ID NO: 2329888 - RNA, 13 nt, Human
cuguggccugggc

SEQ ID NO: 2329889 - RNA, 13 nt, Human
cuguggccaaagg

SEQ ID NO: 2329890 - RNA, 23 nt, Human
cuguggccagcuuguuauuuaua

SEQ ID NO: 2329891 - RNA, 20 nt, Human
cuguggccugugucccauga

SEQ ID NO: 2329892 - RNA, 22 nt, Human
cuguggccugugucccaugacc

SEQ ID NO: 2329893 - RNA, 16 nt, Human
cuguggccugggcaag

SEQ ID NO: 2329894 - RNA, 14 nt, Human
cuguggccuguguc

SEQ ID NO: 2329895 - RNA, 17 nt, Human
cuguggccuguguccca

SEQ ID NO: 2329896 - RNA, 17 nt, Human
cuguggcgccgucucca

SEQ ID NO: 2329897 - RNA, 23 nt, Human
cuguggccugugucccaugaccc

SEQ ID NO: 2329898 - RNA, 19 nt, Human
cuguggcgccgucuccagg

SEQ ID NO: 2329899 - RNA, 20 nt, Human
cuguggcgccgucuccaggg

SEQ ID NO: 2329900 - RNA, 18 nt, Human
cuguggcggugccugggu

SEQ ID NO: 2329901 - RNA, 21 nt, Human
cuguggcgccgucuccagggg

SEQ ID NO: 2329902 - RNA, 24 nt, Human
cuguggcgccgucuccaggggcug

SEQ ID NO: 2329903 - RNA, 14 nt, Human
cugugggcccccaa

SEQ ID NO: 2329904 - RNA, 20 nt, Human
cugugggccucaaggacuug

SEQ ID NO: 2329905 - RNA, 14 nt, Human
cugugggccucaag

SEQ ID NO: 2329906 - RNA, 17 nt, Human
cuguggcugcuagcacu

SEQ ID NO: 2329907 - RNA, 15 nt, Human
cuguggcggugccug

SEQ ID NO: 2329908 - RNA, 14 nt, Human
cuguggcggugccu

SEQ ID NO: 2329909 - RNA, 22 nt, Human
cugugggcgugagaccugcccc

SEQ ID NO: 2329910 - RNA, 21 nt, Human
cugugggcgugagaccugccc

SEQ ID NO: 2329911 - RNA, 18 nt, Human
cuucaccccaaucccagc

SEQ ID NO: 2329912 - RNA, 24 nt, Human
cuucacccagcuaaucuguagggc

SEQ ID NO: 2329913 - RNA, 21 nt, Human
cuucaccauuuggcaaugcca

SEQ ID NO: 2329914 - RNA, 19 nt, Human
cuucaccagagcauuucca

SEQ ID NO: 2329915 - RNA, 22 nt, Human
cuucacccagcuaaucuguagg

SEQ ID NO: 2329916 - RNA, 15 nt, Human
cuucaccccccacuc

SEQ ID NO: 2329917 - RNA, 14 nt, Human
cuucaccccagugg

SEQ ID NO: 2329918 - RNA, 19 nt, Human
cuucaccccaguggccacu

SEQ ID NO: 2329919 - RNA, 23 nt, Human
cuucaccccaguggccacucagc

SEQ ID NO: 2329920 - RNA, 21 nt, Human
cuucacccugaaugguuccau

SEQ ID NO: 2329921 - RNA, 15 nt, Human
cuucacccuggagcc

SEQ ID NO: 2329922 - RNA, 19 nt, Human
cuucaggcucuucuccuuu

SEQ ID NO: 2329923 - RNA, 22 nt, Human
cuucaggcucuucuccuuucac

SEQ ID NO: 2329924 - RNA, 23 nt, Human
cuucaguaagccgugauuuucau

SEQ ID NO: 2329925 - RNA, 16 nt, Human
cuucaguaagccguga

SEQ ID NO: 2329926 - RNA, 19 nt, Human
cuucagggcacugcugcug

SEQ ID NO: 2329927 - RNA, 15 nt, Human
cuucagggagugagg

SEQ ID NO: 2329928 - RNA, 20 nt, Human
cuucagggcagggcucugau

SEQ ID NO: 2329929 - RNA, 17 nt, Human
cuucagggcagggcucu

SEQ ID NO: 2329930 - RNA, 16 nt, Human
cuucagggcagggcuc

SEQ ID NO: 2329931 - RNA, 19 nt, Human
cuucagggcagggcucuga

SEQ ID NO: 2329932 - RNA, 18 nt, Human
cuucagggcagggcucug

SEQ ID NO: 2329933 - RNA, 19 nt, Human
cuucaguacccucucagcu

SEQ ID NO: 2329934 - RNA, 22 nt, Human
cuucaguacccucucagcucca

SEQ ID NO: 2329935 - RNA, 23 nt, Human
cuucaguacccucucagcuccag

SEQ ID NO: 2329936 - RNA, 14 nt, Human
cuucaguauguugu

SEQ ID NO: 2329937 - RNA, 15 nt, Human
cuucaguauguuguc

SEQ ID NO: 2329938 - RNA, 18 nt, Human
cuucaguauguugucaaa

SEQ ID NO: 2329939 - RNA, 19 nt, Human
cuucaguauguugucaaag

SEQ ID NO: 2329940 - RNA, 18 nt, Human
cuucagugccuuauggaa

SEQ ID NO: 2329941 - RNA, 22 nt, Human
cuucagugccuuauggaacacu

SEQ ID NO: 2329942 - RNA, 13 nt, Human
cuucaguggcagc

SEQ ID NO: 2329943 - RNA, 14 nt, Human
cuucaguggcagcu

SEQ ID NO: 2329944 - RNA, 15 nt, Human
cuucaguggcagcug

SEQ ID NO: 2329945 - RNA, 16 nt, Human
cuucaguggcagcugc

SEQ ID NO: 2329946 - RNA, 14 nt, Human
cuuccacugagggc

SEQ ID NO: 2329947 - RNA, 22 nt, Human
cuuccaggaaacuccacaucug

SEQ ID NO: 2329948 - RNA, 23 nt, Human
cuuccaggaaacuccacaucugc

SEQ ID NO: 2329949 - RNA, 17 nt, Human
cuuccaggaaacuccac

SEQ ID NO: 2329950 - RNA, 18 nt, Human
cuuccaggaaacuccaca

SEQ ID NO: 2329951 - RNA, 19 nt, Human
cuuccaggaaacuccacau

SEQ ID NO: 2329952 - RNA, 21 nt, Human
cuuccaggaaacuccacaucu

SEQ ID NO: 2329953 - RNA, 12 nt, Human
cuuccaggcugg

SEQ ID NO: 2329954 - RNA, 14 nt, Human
cuuccaggcuggga

SEQ ID NO: 2329955 - RNA, 17 nt, Human
cuuccaccagccugcac

SEQ ID NO: 2329956 - RNA, 21 nt, Human
cuuccaccagccugcacuacu

SEQ ID NO: 2329957 - RNA, 16 nt, Human
cuuccacaagagccca

SEQ ID NO: 2329958 - RNA, 14 nt, Human
cuuccaccucaccc

SEQ ID NO: 2329959 - RNA, 16 nt, Human
cuuccaccucacccca

SEQ ID NO: 2329960 - RNA, 17 nt, Human
cuuccaccucaccccac

SEQ ID NO: 2329961 - RNA, 18 nt, Human
cuuccaccucaccccacu

SEQ ID NO: 2329962 - RNA, 22 nt, Human
cuuccacgcugucuccagaccc

SEQ ID NO: 2329963 - RNA, 21 nt, Human
cuuccacgcugucuccagacc

SEQ ID NO: 2329964 - RNA, 20 nt, Human
cuuccacgcugucuccagac

SEQ ID NO: 2329965 - RNA, 18 nt, Human
cuuccacgcugucuccag

SEQ ID NO: 2329966 - RNA, 16 nt, Human
cuuccacgcugucucc

SEQ ID NO: 2329967 - RNA, 17 nt, Human
cuuccacgcugucucca

SEQ ID NO: 2329968 - RNA, 20 nt, Human
cuuccaccucaccccacuua

SEQ ID NO: 2329969 - RNA, 13 nt, Human
cuuccaccucccu

SEQ ID NO: 2329970 - RNA, 14 nt, Human
cuuccaccucccuc

SEQ ID NO: 2329971 - RNA, 15 nt, Human
cuuccaccucccucc

SEQ ID NO: 2329972 - RNA, 19 nt, Human
cuucauugccuuaacugga

SEQ ID NO: 2329973 - RNA, 14 nt, Human
cuucauuucauugu

SEQ ID NO: 2329974 - RNA, 23 nt, Human
cuucauugagaguuuugucuuga

SEQ ID NO: 2329975 - RNA, 17 nt, Human
cuuccacaagagcccag

SEQ ID NO: 2329976 - RNA, 19 nt, Human
cuuccacaagagcccaggc

SEQ ID NO: 2329977 - RNA, 21 nt, Human
cuuccacaagagcccaggccu

SEQ ID NO: 2329978 - RNA, 22 nt, Human
cuucauucaagucuaugaugcu

SEQ ID NO: 2329979 - RNA, 20 nt, Human
cuucauucuugaaagcugug

SEQ ID NO: 2329980 - RNA, 21 nt, Human
cuucauucuugaaagcugugg

SEQ ID NO: 2329981 - RNA, 14 nt, Human
cuucauugagaguu

SEQ ID NO: 2329982 - RNA, 17 nt, Human
cuucaguggagaauuau

SEQ ID NO: 2329983 - RNA, 21 nt, Human
cuucauugagaguuuugucuu

SEQ ID NO: 2329984 - RNA, 20 nt, Human
cuucauucaacccaccugcg

SEQ ID NO: 2329985 - RNA, 17 nt, Human
cuucaguggcagcugcu

SEQ ID NO: 2329986 - RNA, 21 nt, Human
cuuccaggggugggacacccu

SEQ ID NO: 2329987 - RNA, 17 nt, Human
cuuccaggggugggaca

SEQ ID NO: 2329988 - RNA, 14 nt, Human
cuuccagggguggg

SEQ ID NO: 2329989 - RNA, 15 nt, Human
cuuccagggguggga

SEQ ID NO: 2329990 - RNA, 19 nt, Human
cuuccaggcccccaccacu

SEQ ID NO: 2329991 - RNA, 16 nt, Human
cuuccaggcccccacc

SEQ ID NO: 2329992 - RNA, 19 nt, Human
cuuccaggcugggagagcc

SEQ ID NO: 2329993 - RNA, 15 nt, Human
cuuccaggcugggag

SEQ ID NO: 2329994 - RNA, 16 nt, Human
cuuccaggcugggaga

SEQ ID NO: 2329995 - RNA, 18 nt, Human
cuucccaucacuggagca

SEQ ID NO: 2329996 - RNA, 17 nt, Human
cuucccaucacuggagc

SEQ ID NO: 2329997 - RNA, 16 nt, Human
cuucccaucacuggag

SEQ ID NO: 2329998 - RNA, 11 nt, Human
cuucccaucac

SEQ ID NO: 2329999 - RNA, 23 nt, Human
cuucccaguucaggagucccaag

SEQ ID NO: 2330000 - RNA, 20 nt, Human
cuucccaguggcugcugccc

SEQ ID NO: 2330001 - RNA, 20 nt, Human
cuucccauaccacccaaugc

SEQ ID NO: 2330002 - RNA, 22 nt, Human
cuucccaguucaggagucccaa

SEQ ID NO: 2330003 - RNA, 18 nt, Human
cuucccaguggcugcugc

SEQ ID NO: 2330004 - RNA, 19 nt, Human
cuucccaguggcugcugcc

SEQ ID NO: 2330005 - RNA, 17 nt, Human
cuucccaguggcugcug

SEQ ID NO: 2330006 - RNA, 11 nt, Human
cuucccauccu

SEQ ID NO: 2330007 - RNA, 12 nt, Human
cuucccauccua

SEQ ID NO: 2330008 - RNA, 15 nt, Human
cuucccauccuaccc

SEQ ID NO: 2330009 - RNA, 16 nt, Human
cuucccauccuacccu

SEQ ID NO: 2330010 - RNA, 19 nt, Human
cuucccauccuacccucgg

SEQ ID NO: 2330011 - RNA, 15 nt, Human
cuucccaucgcuguc

SEQ ID NO: 2330012 - RNA, 15 nt, Human
cuucccaugacccag

SEQ ID NO: 2330013 - RNA, 17 nt, Human
cuucccaugacccaggc

SEQ ID NO: 2330014 - RNA, 19 nt, Human
cuucccaugacccaggcug

SEQ ID NO: 2330015 - RNA, 20 nt, Human
cuucccaugacccaggcugg

SEQ ID NO: 2330016 - RNA, 21 nt, Human
cuucccaugacccaggcuggg

SEQ ID NO: 2330017 - RNA, 22 nt, Human
cuucccaugacccaggcugggc

SEQ ID NO: 2330018 - RNA, 20 nt, Human
cuuccccucucuccuccugc

SEQ ID NO: 2330019 - RNA, 20 nt, Human
cuuccccucccuggcuccca

SEQ ID NO: 2330020 - RNA, 18 nt, Human
cuuccccucccuggcucc

SEQ ID NO: 2330021 - RNA, 15 nt, Human
cuuccccugggcccu

SEQ ID NO: 2330022 - RNA, 13 nt, Human
cuuccccuccuac

SEQ ID NO: 2330023 - RNA, 22 nt, Human
cuuccccuccuaccccucccag

SEQ ID NO: 2330024 - RNA, 23 nt, Human
cuuccccuccuaccccucccagc

SEQ ID NO: 2330025 - RNA, 14 nt, Human
cuuccccugggccc

SEQ ID NO: 2330026 - RNA, 16 nt, Human
cuuccccucccuggcu

SEQ ID NO: 2330027 - RNA, 14 nt, Human
cuuccccucccugg

SEQ ID NO: 2330028 - RNA, 12 nt, Human
cuuccccucacu

SEQ ID NO: 2330029 - RNA, 23 nt, Human
cuuccccgagggaugaugccaca

SEQ ID NO: 2330030 - RNA, 18 nt, Human
cuucccccugcuuccacc

SEQ ID NO: 2330031 - RNA, 22 nt, Human
cuuccccgagggaugaugccac

SEQ ID NO: 2330032 - RNA, 17 nt, Human
cuucccuacaguugaaa

SEQ ID NO: 2330033 - RNA, 15 nt, Human
cuucccgucccauau

SEQ ID NO: 2330034 - RNA, 19 nt, Human
cuucccgucccauauccug

SEQ ID NO: 2330035 - RNA, 20 nt, Human
cuucccgucccauauccugc

SEQ ID NO: 2330036 - RNA, 21 nt, Human
cuucccgucccauauccugcc

SEQ ID NO: 2330037 - RNA, 22 nt, Human
cuucccgucccauauccugccu

SEQ ID NO: 2330038 - RNA, 23 nt, Human
cuucccgucccauauccugccuc

SEQ ID NO: 2330039 - RNA, 16 nt, Human
cuucccuaaaaucagg

SEQ ID NO: 2330040 - RNA, 23 nt, Human
cuucccgcucagcccucccugcc

SEQ ID NO: 2330041 - RNA, 18 nt, Human
cuucccgcucagcccucc

SEQ ID NO: 2330042 - RNA, 14 nt, Human
cuucccgucccaua

SEQ ID NO: 2330043 - RNA, 19 nt, Human
cuucccgcucagcccuccc

SEQ ID NO: 2330044 - RNA, 16 nt, Human
cuuccccuugcccagg

SEQ ID NO: 2330045 - RNA, 13 nt, Human
cuuccccuugccc

SEQ ID NO: 2330046 - RNA, 12 nt, Human
cuuccccuugcc

SEQ ID NO: 2330047 - RNA, 16 nt, Human
cuucccuugagcccuc

SEQ ID NO: 2330048 - RNA, 16 nt, Human
cuucccuucuccaucu

SEQ ID NO: 2330049 - RNA, 13 nt, Human
cuucccuuucugc

SEQ ID NO: 2330050 - RNA, 15 nt, Human
cuucccugucccucu

SEQ ID NO: 2330051 - RNA, 16 nt, Human
cuucccugucccucua

SEQ ID NO: 2330052 - RNA, 22 nt, Human
cuucccuguaugauuccuugau

SEQ ID NO: 2330053 - RNA, 12 nt, Human
cuucccuaaucu

SEQ ID NO: 2330054 - RNA, 22 nt, Human
cuucccuguauuuucuuucucu

SEQ ID NO: 2330055 - RNA, 12 nt, Human
cuucccuguccc

SEQ ID NO: 2330056 - RNA, 13 nt, Human
cuucccugucccu

SEQ ID NO: 2330057 - RNA, 14 nt, Human
cuucccugucccuc

SEQ ID NO: 2330058 - RNA, 13 nt, Human
cuuccucccucau

SEQ ID NO: 2330059 - RNA, 12 nt, Human
cuuccucccaag

SEQ ID NO: 2330060 - RNA, 20 nt, Human
cuuccucccaaguggugccu

SEQ ID NO: 2330061 - RNA, 21 nt, Human
cuuccucccaaguggugccua

SEQ ID NO: 2330062 - RNA, 23 nt, Human
cuuccucccaaguggugccuaaa

SEQ ID NO: 2330063 - RNA, 15 nt, Human
cuuccuccacauccu

SEQ ID NO: 2330064 - RNA, 21 nt, Human
cuuccuccacauccuuucuaa

SEQ ID NO: 2330065 - RNA, 23 nt, Human
cuuccucauccaccccaucccuc

SEQ ID NO: 2330066 - RNA, 18 nt, Human
cuuccucauccaccccau

SEQ ID NO: 2330067 - RNA, 22 nt, Human
cuuccucauccaccccaucccu

SEQ ID NO: 2330068 - RNA, 17 nt, Human
cuuccucaguuacacaa

SEQ ID NO: 2330069 - RNA, 18 nt, Human
cuuccucaguuuaauccu

SEQ ID NO: 2330070 - RNA, 20 nt, Human
cuuccucaguuuaauccuuc

SEQ ID NO: 2330071 - RNA, 15 nt, Human
cuucccuugagcccu

SEQ ID NO: 2330072 - RNA, 17 nt, Human
cuuccguaacccaacuc

SEQ ID NO: 2330073 - RNA, 23 nt, Human
cuuccguaacccaacucuccugg

SEQ ID NO: 2330074 - RNA, 19 nt, Human
cuuccuaauuccacagcug

SEQ ID NO: 2330075 - RNA, 18 nt, Human
cuuccuaauuccacagcu

SEQ ID NO: 2330076 - RNA, 17 nt, Human
cuuccuaauuccacagc

SEQ ID NO: 2330077 - RNA, 13 nt, Human
cuuccuaauucca

SEQ ID NO: 2330078 - RNA, 10 nt, Human
cuucaaggau

SEQ ID NO: 2330079 - RNA, 15 nt, Human
cuucaacauuuacau

SEQ ID NO: 2330080 - RNA, 17 nt, Human
cuucaaccuugagacag

SEQ ID NO: 2330081 - RNA, 20 nt, Human
cuucaaccauuccccauggg

SEQ ID NO: 2330082 - RNA, 22 nt, Human
cuucaacaucaauguucauugu

SEQ ID NO: 2330083 - RNA, 16 nt, Human
cuucaaccauucccca

SEQ ID NO: 2330084 - RNA, 18 nt, Human
cuucaaguuaaagugaau

SEQ ID NO: 2330085 - RNA, 22 nt, Human
cuucaagugcaugcucucugca

SEQ ID NO: 2330086 - RNA, 16 nt, Human
cuucaaggauccugag

SEQ ID NO: 2330087 - RNA, 13 nt, Human
cuucaaggauccu

SEQ ID NO: 2330088 - RNA, 15 nt, Human
cuucaaggauccuga

SEQ ID NO: 2330089 - RNA, 16 nt, Human
cuucacagcucugugu

SEQ ID NO: 2330090 - RNA, 23 nt, Human
cuucacagagugugcuggaggac

SEQ ID NO: 2330091 - RNA, 13 nt, Human
cuucacagagugu

SEQ ID NO: 2330092 - RNA, 17 nt, Human
cuucacagagugugcug

SEQ ID NO: 2330093 - RNA, 20 nt, Human
cuucacagagugugcuggag

SEQ ID NO: 2330094 - RNA, 22 nt, Human
cuucacagagugugcuggagga

SEQ ID NO: 2330095 - RNA, 17 nt, Human
cuucaccauuuggcaau

SEQ ID NO: 2330096 - RNA, 22 nt, Human
cuucaccagaggaaucacucuu

SEQ ID NO: 2330097 - RNA, 21 nt, Human
cuucacacugcaagagccuug

SEQ ID NO: 2330098 - RNA, 11 nt, Human
cuucacagagu

SEQ ID NO: 2330099 - RNA, 20 nt, Human
cuucacacugcaagagccuu

SEQ ID NO: 2330100 - RNA, 18 nt, Human
cuucacacugcaagagcc

SEQ ID NO: 2330101 - RNA, 15 nt, Human
cuucacacugcaaga

SEQ ID NO: 2330102 - RNA, 13 nt, Human
cuucacacugcaa

SEQ ID NO: 2330103 - RNA, 12 nt, Human
cuucacacugca

SEQ ID NO: 2330104 - RNA, 23 nt, Human
cuucacagaugggugcuuggagg

SEQ ID NO: 2330105 - RNA, 22 nt, Human
cuucacacacaggcaacugagg

SEQ ID NO: 2330106 - RNA, 15 nt, Human
cuucaauuaauaaaa

SEQ ID NO: 2330107 - RNA, 21 nt, Human
cuucacacacaggcaacugag

SEQ ID NO: 2330108 - RNA, 16 nt, Human
cuucaauuccugggcc

SEQ ID NO: 2330109 - RNA, 15 nt, Human
cuucaauuccugggc

SEQ ID NO: 2330110 - RNA, 19 nt, Human
cuucaaguuagcucaggag

SEQ ID NO: 2330111 - RNA, 18 nt, Human
cuucaaguuagcucagga

SEQ ID NO: 2330112 - RNA, 17 nt, Human
cuucaaguuagcucagg

SEQ ID NO: 2330113 - RNA, 16 nt, Human
cuucaaguuagcucag

SEQ ID NO: 2330114 - RNA, 14 nt, Human
cuucaauaaaguau

SEQ ID NO: 2330115 - RNA, 20 nt, Human
cuucaaguuagcucaggagg

SEQ ID NO: 2330116 - RNA, 12 nt, Human
cuucaauaaagu

SEQ ID NO: 2330117 - RNA, 21 nt, Human
cuucaauaaaugguauagcaa

SEQ ID NO: 2330118 - RNA, 22 nt, Human
cuucaauacccaaauccucucc

SEQ ID NO: 2330119 - RNA, 23 nt, Human
cuucaaacuagggccaagcccag

SEQ ID NO: 2330120 - RNA, 17 nt, Human
cuucaaagcaaaugucu

SEQ ID NO: 2330121 - RNA, 22 nt, Human
cuucaaacagaacugcagucag

SEQ ID NO: 2330122 - RNA, 18 nt, Human
cuucaaagcuugaagauc

SEQ ID NO: 2330123 - RNA, 16 nt, Human
cuucaaagcuugaaga

SEQ ID NO: 2330124 - RNA, 20 nt, Human
cuucaacaucaauguucauu

SEQ ID NO: 2330125 - RNA, 19 nt, Human
cuucaacaucaauguucau

SEQ ID NO: 2330126 - RNA, 18 nt, Human
cuucaacaucaauguuca

SEQ ID NO: 2330127 - RNA, 16 nt, Human
cuucaacaucaauguu

SEQ ID NO: 2330128 - RNA, 24 nt, Human
cuucaacagacccccucuagaaau

SEQ ID NO: 2330129 - RNA, 16 nt, Human
cuucaacagcucccca

SEQ ID NO: 2330130 - RNA, 17 nt, Human
cuucaacagcuccccau

SEQ ID NO: 2330131 - RNA, 11 nt, Human
cuuauuugagu

SEQ ID NO: 2330132 - RNA, 17 nt, Human
cuuauuucaugaaaauu

SEQ ID NO: 2330133 - RNA, 15 nt, Human
cuuauuucauuucuu

SEQ ID NO: 2330134 - RNA, 23 nt, Human
cuuauuuuaaaauuuuaucucuu

SEQ ID NO: 2330135 - RNA, 12 nt, Human
cuuauuugagug

SEQ ID NO: 2330136 - RNA, 13 nt, Human
cuuauuugaguga

SEQ ID NO: 2330137 - RNA, 23 nt, Human
cuuauuugcugccacaccugagc

SEQ ID NO: 2330138 - RNA, 15 nt, Human
cuucaaaaguauuuu

SEQ ID NO: 2330139 - RNA, 16 nt, Human
cuucaaaaguauuuuc

SEQ ID NO: 2330140 - RNA, 17 nt, Human
cuucaaaaguauuuucc

SEQ ID NO: 2330141 - RNA, 21 nt, Human
cuucaaaaguauuuuccugua

SEQ ID NO: 2330142 - RNA, 18 nt, Human
cuuauuuaaugaaagacu

SEQ ID NO: 2330143 - RNA, 13 nt, Human
cuuauuuauuauu

SEQ ID NO: 2330144 - RNA, 19 nt, Human
cuuaucucagucaugcaua

SEQ ID NO: 2330145 - RNA, 20 nt, Human
cuuaucucagucaugcauaa

SEQ ID NO: 2330146 - RNA, 21 nt, Human
cuuaucucagucaugcauaaa

SEQ ID NO: 2330147 - RNA, 21 nt, Human
cuuauuuauucauauuuucuu

SEQ ID NO: 2330148 - RNA, 14 nt, Human
cuuauuucauuucu

SEQ ID NO: 2330149 - RNA, 18 nt, Human
cuuauccucugaucucca

SEQ ID NO: 2330150 - RNA, 15 nt, Human
cuuauccucugaucu

SEQ ID NO: 2330151 - RNA, 16 nt, Human
cuuauccucugaucuc

SEQ ID NO: 2330152 - RNA, 22 nt, Human
cuuauccucugaucuccauggc

SEQ ID NO: 2330153 - RNA, 13 nt, Human
cuuauccucugau

SEQ ID NO: 2330154 - RNA, 14 nt, Human
cuuauccucugauc

SEQ ID NO: 2330155 - RNA, 17 nt, Human
cuuauuuaaugaaagac

SEQ ID NO: 2330156 - RNA, 22 nt, Human
cuuaucaccacaguaaguuccu

SEQ ID NO: 2330157 - RNA, 23 nt, Human
cuuaucaccacaguaaguuccua

SEQ ID NO: 2330158 - RNA, 13 nt, Human
cuuaucaccagcu

SEQ ID NO: 2330159 - RNA, 19 nt, Human
cuuaucaagugucuuccau

SEQ ID NO: 2330160 - RNA, 13 nt, Human
cuuauauuaugga

SEQ ID NO: 2330161 - RNA, 19 nt, Human
cuuauauaguuuacuauuu

SEQ ID NO: 2330162 - RNA, 14 nt, Human
cuuauauaugugaa

SEQ ID NO: 2330163 - RNA, 17 nt, Human
cuuauauaugugaacau

SEQ ID NO: 2330164 - RNA, 21 nt, Human
cuuauaucaucagcauaccuu

SEQ ID NO: 2330165 - RNA, 21 nt, Human
cuuauauuaauauuccucagu

SEQ ID NO: 2330166 - RNA, 18 nt, Human
cuuauauguguauugcua

SEQ ID NO: 2330167 - RNA, 15 nt, Human
cuuauccaggacucu

SEQ ID NO: 2330168 - RNA, 21 nt, Human
cuuauccuaaaacaaauaguu

SEQ ID NO: 2330169 - RNA, 15 nt, Human
cuuauccagcuggug

SEQ ID NO: 2330170 - RNA, 12 nt, Human
cuuauccaggac

SEQ ID NO: 2330171 - RNA, 13 nt, Human
cuuauccaggacu

SEQ ID NO: 2330172 - RNA, 19 nt, Human
cuuauccaggacucuguca

SEQ ID NO: 2330173 - RNA, 12 nt, Human
cuuaucccucuc

SEQ ID NO: 2330174 - RNA, 18 nt, Human
cuuaucacugacacaaaa

SEQ ID NO: 2330175 - RNA, 16 nt, Human
cuuaucaccagcugcc

SEQ ID NO: 2330176 - RNA, 17 nt, Human
cuuaucaccagcugccu

SEQ ID NO: 2330177 - RNA, 19 nt, Human
cuuaucaccagcugccucu

SEQ ID NO: 2330178 - RNA, 22 nt, Human
cuuaucaccagcugccucuucu

SEQ ID NO: 2330179 - RNA, 20 nt, Human
cuuaucaugcugucuuuaca

SEQ ID NO: 2330180 - RNA, 21 nt, Human
cuuaucauccacauuguuuua

SEQ ID NO: 2330181 - RNA, 15 nt, Human
cuuaucauccacauu

SEQ ID NO: 2330182 - RNA, 19 nt, Human
cuuaucauccacauuguuu

SEQ ID NO: 2330183 - RNA, 15 nt, Human
cuuaucauucauucu

SEQ ID NO: 2330184 - RNA, 15 nt, Human
cuuaucauggucuca

SEQ ID NO: 2330185 - RNA, 14 nt, Human
cuuaucauggucuc

SEQ ID NO: 2330186 - RNA, 18 nt, Human
cuuauauaguuuacuauu

SEQ ID NO: 2330187 - RNA, 20 nt, Human
cuuauauaguuuacuauuuu

SEQ ID NO: 2330188 - RNA, 20 nt, Human
cuuauagaauauuuauuacc

SEQ ID NO: 2330189 - RNA, 13 nt, Human
cuuauagaauauu

SEQ ID NO: 2330190 - RNA, 14 nt, Human
cuuauagaauauuu

SEQ ID NO: 2330191 - RNA, 15 nt, Human
cuuauagaauauuua

SEQ ID NO: 2330192 - RNA, 16 nt, Human
cuuauagaauauuuau

SEQ ID NO: 2330193 - RNA, 14 nt, Human
cuuauagacaacau

SEQ ID NO: 2330194 - RNA, 14 nt, Human
cuuaguucucacug

SEQ ID NO: 2330195 - RNA, 19 nt, Human
cuuaguguuucugugcaug

SEQ ID NO: 2330196 - RNA, 16 nt, Human
cuuaguuaucagcuuu

SEQ ID NO: 2330197 - RNA, 13 nt, Human
cuuaguguuucug

SEQ ID NO: 2330198 - RNA, 16 nt, Human
cuuaguguuucugugc

SEQ ID NO: 2330199 - RNA, 17 nt, Human
cuuaguguuucugugca

SEQ ID NO: 2330200 - RNA, 18 nt, Human
cuuaguguuucugugcau

SEQ ID NO: 2330201 - RNA, 17 nt, Human
cuuaguuuguguguugu

SEQ ID NO: 2330202 - RNA, 22 nt, Human
cuuaguuuguguguugucucuu

SEQ ID NO: 2330203 - RNA, 15 nt, Human
cuuaguucucacugu

SEQ ID NO: 2330204 - RNA, 16 nt, Human
cuuaguucucacuguu

SEQ ID NO: 2330205 - RNA, 22 nt, Human
cuuaguuuggauucuuauguag

SEQ ID NO: 2330206 - RNA, 14 nt, Human
cuuauacccaugaa

SEQ ID NO: 2330207 - RNA, 19 nt, Human
cuuaguuuggauucuuaug

SEQ ID NO: 2330208 - RNA, 23 nt, Human
cuuaguuuguguguugucucuug

SEQ ID NO: 2330209 - RNA, 20 nt, Human
cuuagucuucucauagcauu

SEQ ID NO: 2330210 - RNA, 16 nt, Human
cuuagucuucucauag

SEQ ID NO: 2330211 - RNA, 15 nt, Human
cuuagucuucucaua

SEQ ID NO: 2330212 - RNA, 20 nt, Human
cuuagucucaguuugugugu

SEQ ID NO: 2330213 - RNA, 23 nt, Human
cuuagucucaguuugugugucuu

SEQ ID NO: 2330214 - RNA, 17 nt, Human
cuuagugaaauuacuuc

SEQ ID NO: 2330215 - RNA, 19 nt, Human
cuuagugcggacaaguuuu

SEQ ID NO: 2330216 - RNA, 20 nt, Human
cuuagugcggacaaguuuua

SEQ ID NO: 2330217 - RNA, 21 nt, Human
cuuagucuucucauagcauua

SEQ ID NO: 2330218 - RNA, 22 nt, Human
cuuagugcggacaaguuuuaau

SEQ ID NO: 2330219 - RNA, 22 nt, Human
cuuaguggcuuuuuuccuccug

SEQ ID NO: 2330220 - RNA, 17 nt, Human
cuuagugguuccccacc

SEQ ID NO: 2330221 - RNA, 13 nt, Human
cuuaguggcuuuu

SEQ ID NO: 2330222 - RNA, 18 nt, Human
cuuagucacugagacagc

SEQ ID NO: 2330223 - RNA, 19 nt, Human
cuuagucacugagacagcc

SEQ ID NO: 2330224 - RNA, 14 nt, Human
cuuagucacugaga

SEQ ID NO: 2330225 - RNA, 16 nt, Human
cuuagauggauucucc

SEQ ID NO: 2330226 - RNA, 14 nt, Human
cuguucuguggaaa

SEQ ID NO: 2330227 - RNA, 12 nt, Human
cuuagucucagu

SEQ ID NO: 2330228 - RNA, 13 nt, Human
cuuagucucaguu

SEQ ID NO: 2330229 - RNA, 18 nt, Human
cuuagucucaguuugugu

SEQ ID NO: 2330230 - RNA, 19 nt, Human
cuuagucucaguuugugug

SEQ ID NO: 2330231 - RNA, 13 nt, Human
cuuagauguauau

SEQ ID NO: 2330232 - RNA, 22 nt, Human
cuuagaugcaguucugaagaag

SEQ ID NO: 2330233 - RNA, 22 nt, Human
cuguucugguuuuuaaccauug

SEQ ID NO: 2330234 - RNA, 19 nt, Human
cuguucugucccuuggagc

SEQ ID NO: 2330235 - RNA, 11 nt, Human
cuguucugugg

SEQ ID NO: 2330236 - RNA, 16 nt, Human
cuuagucacugagaca

SEQ ID NO: 2330237 - RNA, 11 nt, Human
cuguucuggaa

SEQ ID NO: 2330238 - RNA, 20 nt, Human
cuuagaugcaguucugaaga

SEQ ID NO: 2330239 - RNA, 16 nt, Human
cuguucugcacacagc

SEQ ID NO: 2330240 - RNA, 21 nt, Human
cuguucucuugggaacugaac

SEQ ID NO: 2330241 - RNA, 16 nt, Human
cuguucuggcagaguu

SEQ ID NO: 2330242 - RNA, 21 nt, Human
cuugaggaaacaacagcuuua

SEQ ID NO: 2330243 - RNA, 21 nt, Human
cuugaggguugggcugguguc

SEQ ID NO: 2330244 - RNA, 19 nt, Human
cuugaggguugggcuggug

SEQ ID NO: 2330245 - RNA, 20 nt, Human
cuugaggguugggcuggugu

SEQ ID NO: 2330246 - RNA, 20 nt, Human
cuugaggaaacaacagcuuu

SEQ ID NO: 2330247 - RNA, 18 nt, Human
cuugaggaaacaacagcu

SEQ ID NO: 2330248 - RNA, 13 nt, Human
cuugaggaaacaa

SEQ ID NO: 2330249 - RNA, 21 nt, Human
cuugagcuuggcagcugaacu

SEQ ID NO: 2330250 - RNA, 20 nt, Human
cuugagcuuggcagcugaac

SEQ ID NO: 2330251 - RNA, 12 nt, Human
cuugagcuuggc

SEQ ID NO: 2330252 - RNA, 13 nt, Human
cuugagcugagau

SEQ ID NO: 2330253 - RNA, 16 nt, Human
cuugagcugagaugga

SEQ ID NO: 2330254 - RNA, 10 nt, Human
cuugagcuga

SEQ ID NO: 2330255 - RNA, 14 nt, Human
cuugagcuccccaa

SEQ ID NO: 2330256 - RNA, 20 nt, Human
cuugacuaaaaaaaaaagaa

SEQ ID NO: 2330257 - RNA, 13 nt, Human
cuugacuccuugu

SEQ ID NO: 2330258 - RNA, 22 nt, Human
cuugacuugcaauuucuaccua

SEQ ID NO: 2330259 - RNA, 20 nt, Human
cuugacuuuagucugcaaaa

SEQ ID NO: 2330260 - RNA, 15 nt, Human
cuugagccuugaacu

SEQ ID NO: 2330261 - RNA, 18 nt, Human
cuugagccuugaacuuug

SEQ ID NO: 2330262 - RNA, 17 nt, Human
cuugagccuugaacuuu

SEQ ID NO: 2330263 - RNA, 16 nt, Human
cuugagccugggaggu

SEQ ID NO: 2330264 - RNA, 12 nt, Human
cuugaccuccua

SEQ ID NO: 2330265 - RNA, 14 nt, Human
cuugaccugaggcu

SEQ ID NO: 2330266 - RNA, 23 nt, Human
cuugaccugaggcuguggucaca

SEQ ID NO: 2330267 - RNA, 17 nt, Human
cuugaccugaggcugug

SEQ ID NO: 2330268 - RNA, 20 nt, Human
cuugaccugaggcugugguc

SEQ ID NO: 2330269 - RNA, 13 nt, Human
cuugaccucaggu

SEQ ID NO: 2330270 - RNA, 21 nt, Human
cuugaccgugaggccagagac

SEQ ID NO: 2330271 - RNA, 18 nt, Human
cuugaccgugaggccaga

SEQ ID NO: 2330272 - RNA, 20 nt, Human
cuugaccgugaggccagaga

SEQ ID NO: 2330273 - RNA, 16 nt, Human
cuugaagacuuuucuu

SEQ ID NO: 2330274 - RNA, 16 nt, Human
cuugacccaucucccc

SEQ ID NO: 2330275 - RNA, 13 nt, Human
cuugacccaucuc

SEQ ID NO: 2330276 - RNA, 17 nt, Human
cuugaccgugaggccag

SEQ ID NO: 2330277 - RNA, 22 nt, Human
cuugaccauucuccaccugcca

SEQ ID NO: 2330278 - RNA, 23 nt, Human
cuugaccauucuccaccugccag

SEQ ID NO: 2330279 - RNA, 15 nt, Human
cuugaacccaggaga

SEQ ID NO: 2330280 - RNA, 14 nt, Human
cuugaaccacuucc

SEQ ID NO: 2330281 - RNA, 15 nt, Human
cuugaaccacuuccc

SEQ ID NO: 2330282 - RNA, 13 nt, Human
cuugaacuccugg

SEQ ID NO: 2330283 - RNA, 16 nt, Human
cuugaacuccugaccu

SEQ ID NO: 2330284 - RNA, 13 nt, Human
cuugaacuccuga

SEQ ID NO: 2330285 - RNA, 18 nt, Human
cuugaacuccugaccuca

SEQ ID NO: 2330286 - RNA, 12 nt, Human
cuugaagaacug

SEQ ID NO: 2330287 - RNA, 17 nt, Human
cuugaagaacugcaggc

SEQ ID NO: 2330288 - RNA, 18 nt, Human
cuugaagaacugcaggcc

SEQ ID NO: 2330289 - RNA, 20 nt, Human
cuugaagaacugcaggcccu

SEQ ID NO: 2330290 - RNA, 22 nt, Human
cuugaagaacugcaggcccugg

SEQ ID NO: 2330291 - RNA, 21 nt, Human
cuugaacuuugaccucugcag

SEQ ID NO: 2330292 - RNA, 17 nt, Human
cuugaacuuugaccucu

SEQ ID NO: 2330293 - RNA, 16 nt, Human
cuugaacacuggggga

SEQ ID NO: 2330294 - RNA, 18 nt, Human
cuugaacauguuuuguau

SEQ ID NO: 2330295 - RNA, 15 nt, Human
cuugaacacuggggg

SEQ ID NO: 2330296 - RNA, 13 nt, Human
cuugaacacuggg

SEQ ID NO: 2330297 - RNA, 19 nt, Human
cuugaacacucaugcugaa

SEQ ID NO: 2330298 - RNA, 20 nt, Human
cuugaacacucaugcugaaa

SEQ ID NO: 2330299 - RNA, 23 nt, Human
cuugaacacucaugcugaaagcc

SEQ ID NO: 2330300 - RNA, 17 nt, Human
cuugaaauuuuaaccua

SEQ ID NO: 2330301 - RNA, 20 nt, Human
cuugaaagcauccaugugug

SEQ ID NO: 2330302 - RNA, 22 nt, Human
cuugaaauaccagugaaccaaa

SEQ ID NO: 2330303 - RNA, 17 nt, Human
cuugaaauaccagugaa

SEQ ID NO: 2330304 - RNA, 16 nt, Human
cuugaaauuuuaaccu

SEQ ID NO: 2330305 - RNA, 15 nt, Human
cuugaaauuuuaacc

SEQ ID NO: 2330306 - RNA, 16 nt, Human
cuugaaagcauccaug

SEQ ID NO: 2330307 - RNA, 18 nt, Human
cuugaaagcauccaugug

SEQ ID NO: 2330308 - RNA, 17 nt, Human
cuugaaagcauccaugu

SEQ ID NO: 2330309 - RNA, 13 nt, Human
cuugaaagcugug

SEQ ID NO: 2330310 - RNA, 13 nt, Human
cuugaaagaaaau

SEQ ID NO: 2330311 - RNA, 23 nt, Human
cuugaaaauauuuuuuauauaua

SEQ ID NO: 2330312 - RNA, 22 nt, Human
cuugaaaauaagaauagaaaua

SEQ ID NO: 2330313 - RNA, 20 nt, Human
cuugaaaauuuuauuaaaaa

SEQ ID NO: 2330314 - RNA, 18 nt, Human
cuugaaaauuaacaugaa

SEQ ID NO: 2330315 - RNA, 12 nt, Human
cuugaaaauuaa

SEQ ID NO: 2330316 - RNA, 13 nt, Human
cuugaaaauuaac

SEQ ID NO: 2330317 - RNA, 16 nt, Human
cuucuuuuuuuucauu

SEQ ID NO: 2330318 - RNA, 17 nt, Human
cuucuuuaauugaucua

SEQ ID NO: 2330319 - RNA, 17 nt, Human
cuucuuuuuuugugaug

SEQ ID NO: 2330320 - RNA, 12 nt, Human
cuugaaaaaugc

SEQ ID NO: 2330321 - RNA, 18 nt, Human
cuugaaaaaugcauguug

SEQ ID NO: 2330322 - RNA, 14 nt, Human
cuugaaaacacugu

SEQ ID NO: 2330323 - RNA, 12 nt, Human
cuugaaaaaugu

SEQ ID NO: 2330324 - RNA, 13 nt, Human
cuugaaaaaugug

SEQ ID NO: 2330325 - RNA, 18 nt, Human
cuugaaaaaugugcaaaa

SEQ ID NO: 2330326 - RNA, 23 nt, Human
cuugaaaacacuguucucugccc

SEQ ID NO: 2330327 - RNA, 21 nt, Human
cuugaaaaaugugcaaaacag

SEQ ID NO: 2330328 - RNA, 22 nt, Human
cuugaaaaaugugcaaaacagc

SEQ ID NO: 2330329 - RNA, 15 nt, Human
cuugaaaaggguguu

SEQ ID NO: 2330330 - RNA, 16 nt, Human
cuugaaaauaagaaua

SEQ ID NO: 2330331 - RNA, 15 nt, Human
cuucuguggcucaca

SEQ ID NO: 2330332 - RNA, 22 nt, Human
cuucuguggcucacagaacccu

SEQ ID NO: 2330333 - RNA, 13 nt, Human
cuucuguggguuu

SEQ ID NO: 2330334 - RNA, 14 nt, Human
cuucuguggguuuc

SEQ ID NO: 2330335 - RNA, 21 nt, Human
cuucuguggguuucuaaagcu

SEQ ID NO: 2330336 - RNA, 13 nt, Human
cuucuguggcuca

SEQ ID NO: 2330337 - RNA, 21 nt, Human
cuucugugagacccccacacc

SEQ ID NO: 2330338 - RNA, 20 nt, Human
cuucugugagacccccacac

SEQ ID NO: 2330339 - RNA, 22 nt, Human
cuucugugagacccccacaccu

SEQ ID NO: 2330340 - RNA, 19 nt, Human
cuucugugagacccccaca

SEQ ID NO: 2330341 - RNA, 17 nt, Human
cuucuguccugguguca

SEQ ID NO: 2330342 - RNA, 14 nt, Human
cuucugugaaagua

SEQ ID NO: 2330343 - RNA, 16 nt, Human
cuucuuggucuuauuu

SEQ ID NO: 2330344 - RNA, 23 nt, Human
cuucuuggugcuuacacaucuca

SEQ ID NO: 2330345 - RNA, 20 nt, Human
cuucuuggucuuauuuauua

SEQ ID NO: 2330346 - RNA, 13 nt, Human
cuucuuguucccc

SEQ ID NO: 2330347 - RNA, 16 nt, Human
cuucuugccucugugc

SEQ ID NO: 2330348 - RNA, 17 nt, Human
cuucuugccucugugcu

SEQ ID NO: 2330349 - RNA, 18 nt, Human
cuucuugccucugugcug

SEQ ID NO: 2330350 - RNA, 14 nt, Human
cuucuguucugccu

SEQ ID NO: 2330351 - RNA, 21 nt, Human
cuucugugggugacccagguc

SEQ ID NO: 2330352 - RNA, 15 nt, Human
cuucuguugcugccu

SEQ ID NO: 2330353 - RNA, 13 nt, Human
cuucuugccucug

SEQ ID NO: 2330354 - RNA, 15 nt, Human
cuucuugccucugug

SEQ ID NO: 2330355 - RNA, 19 nt, Human
cuucuccugacccaguccc

SEQ ID NO: 2330356 - RNA, 18 nt, Human
cuucucucucuaaaauga

SEQ ID NO: 2330357 - RNA, 13 nt, Human
cuucucuccuccc

SEQ ID NO: 2330358 - RNA, 15 nt, Human
cuucucuccucccca

SEQ ID NO: 2330359 - RNA, 13 nt, Human
cuucucucucacc

SEQ ID NO: 2330360 - RNA, 15 nt, Human
cuucucucucaccag

SEQ ID NO: 2330361 - RNA, 16 nt, Human
cuucucucugugggau

SEQ ID NO: 2330362 - RNA, 13 nt, Human
cuucucugaagga

SEQ ID NO: 2330363 - RNA, 13 nt, Human
cuucucucugugg

SEQ ID NO: 2330364 - RNA, 11 nt, Human
cuucucugaag

SEQ ID NO: 2330365 - RNA, 12 nt, Human
cuucucugaagg

SEQ ID NO: 2330366 - RNA, 13 nt, Human
cuucucugaaggg

SEQ ID NO: 2330367 - RNA, 16 nt, Human
cuucucugaagggagg

SEQ ID NO: 2330368 - RNA, 12 nt, Human
cuucucugacuu

SEQ ID NO: 2330369 - RNA, 14 nt, Human
cuucucugacuucu

SEQ ID NO: 2330370 - RNA, 15 nt, Human
cuucucugacuucug

SEQ ID NO: 2330371 - RNA, 16 nt, Human
cuucucugacuucugc

SEQ ID NO: 2330372 - RNA, 17 nt, Human
cuucucugacuucugcc

SEQ ID NO: 2330373 - RNA, 20 nt, Human
cuucucugacuucugccugg

SEQ ID NO: 2330374 - RNA, 14 nt, Human
cuucuccucuugua

SEQ ID NO: 2330375 - RNA, 22 nt, Human
cuucuccuauguguaaggugaa

SEQ ID NO: 2330376 - RNA, 18 nt, Human
cuucuccuccccacccgc

SEQ ID NO: 2330377 - RNA, 14 nt, Human
cuucuccuaugugu

SEQ ID NO: 2330378 - RNA, 15 nt, Human
cuucuccuaugugua

SEQ ID NO: 2330379 - RNA, 16 nt, Human
cuucuccuauguguaa

SEQ ID NO: 2330380 - RNA, 15 nt, Human
cuucuccucuuguaa

SEQ ID NO: 2330381 - RNA, 17 nt, Human
cuucuccucuuguaaau

SEQ ID NO: 2330382 - RNA, 18 nt, Human
cuucuccucuuguaaaua

SEQ ID NO: 2330383 - RNA, 23 nt, Human
cuucuccucuuguaaauaaagcc

SEQ ID NO: 2330384 - RNA, 19 nt, Human
cuucuccuucaccuuuguc

SEQ ID NO: 2330385 - RNA, 12 nt, Human
cuucucuccagc

SEQ ID NO: 2330386 - RNA, 13 nt, Human
cuucucuccagcc

SEQ ID NO: 2330387 - RNA, 15 nt, Human
cuucucuccagcccc

SEQ ID NO: 2330388 - RNA, 17 nt, Human
cuucucuccagccccug

SEQ ID NO: 2330389 - RNA, 19 nt, Human
cuucucuccagccccugga

SEQ ID NO: 2330390 - RNA, 19 nt, Human
cuuccuguccagagagaga

SEQ ID NO: 2330391 - RNA, 17 nt, Human
cuuccuguccagagaga

SEQ ID NO: 2330392 - RNA, 16 nt, Human
cuuccuguccagcucc

SEQ ID NO: 2330393 - RNA, 13 nt, Human
cuucuccacugga

SEQ ID NO: 2330394 - RNA, 14 nt, Human
cuucuccacuggau

SEQ ID NO: 2330395 - RNA, 15 nt, Human
cuucuccacuggaug

SEQ ID NO: 2330396 - RNA, 11 nt, Human
cuucuccacuu

SEQ ID NO: 2330397 - RNA, 20 nt, Human
cuucuccacuuucuagccag

SEQ ID NO: 2330398 - RNA, 16 nt, Human
cuuccuggagcccaga

SEQ ID NO: 2330399 - RNA, 17 nt, Human
cuuccuggagcccagag

SEQ ID NO: 2330400 - RNA, 22 nt, Human
cuuccuggagcccagaggaggg

SEQ ID NO: 2330401 - RNA, 16 nt, Human
cuuccuguccagagag

SEQ ID NO: 2330402 - RNA, 15 nt, Human
cuuccuguccagaga

SEQ ID NO: 2330403 - RNA, 23 nt, Human
cuuccuguaacacaagccacaga

SEQ ID NO: 2330404 - RNA, 22 nt, Human
cuuccuguaacacaagccacag

SEQ ID NO: 2330405 - RNA, 23 nt, Human
cuuccuggggcaucuggcgaauc

SEQ ID NO: 2330406 - RNA, 20 nt, Human
cuuccuggggcaucuggcga

SEQ ID NO: 2330407 - RNA, 12 nt, Human
cuucuccaggcu

SEQ ID NO: 2330408 - RNA, 17 nt, Human
cuucuccagacaaacca

SEQ ID NO: 2330409 - RNA, 12 nt, Human
cuucuccagccu

SEQ ID NO: 2330410 - RNA, 23 nt, Human
cuucuccagacaaaccagaagca

SEQ ID NO: 2330411 - RNA, 17 nt, Human
cuucuccacuggaugga

SEQ ID NO: 2330412 - RNA, 13 nt, Human
cuucuccaggcug

SEQ ID NO: 2330413 - RNA, 15 nt, Human
cuucuccagccuaga

SEQ ID NO: 2330414 - RNA, 18 nt, Human
cuucucccccccggggcu

SEQ ID NO: 2330415 - RNA, 20 nt, Human
cuucucccccccggggcugg

SEQ ID NO: 2330416 - RNA, 22 nt, Human
cuucucccccccggggcugggu

SEQ ID NO: 2330417 - RNA, 22 nt, Human
cuucucccucauuucaggagca

SEQ ID NO: 2330418 - RNA, 12 nt, Human
cuucuccgccag

SEQ ID NO: 2330419 - RNA, 13 nt, Human
cuucuccgccagc

SEQ ID NO: 2330420 - RNA, 14 nt, Human
cuucuccgccagcc

SEQ ID NO: 2330421 - RNA, 15 nt, Human
cuucuccgccagccu

SEQ ID NO: 2330422 - RNA, 16 nt, Human
cuucuccgccagccuc

SEQ ID NO: 2330423 - RNA, 17 nt, Human
cuucuccgccagccucc

SEQ ID NO: 2330424 - RNA, 18 nt, Human
cuucuccgccagccuccu

SEQ ID NO: 2330425 - RNA, 19 nt, Human
cuucuccgccagccuccuc

SEQ ID NO: 2330426 - RNA, 21 nt, Human
cuucuccgccagccuccucug

SEQ ID NO: 2330427 - RNA, 23 nt, Human
cuucuccgccagccuccucugga

SEQ ID NO: 2330428 - RNA, 24 nt, Human
cuucuccgccagccuccucuggac

SEQ ID NO: 2330429 - RNA, 18 nt, Human
cuucuguauacuguggag

SEQ ID NO: 2330430 - RNA, 14 nt, Human
cuucuguaguuuua

SEQ ID NO: 2330431 - RNA, 17 nt, Human
cuucuguaguuuuauca

SEQ ID NO: 2330432 - RNA, 21 nt, Human
cuucuguaguuuuaucacaug

SEQ ID NO: 2330433 - RNA, 15 nt, Human
cuucuguauucacuu

SEQ ID NO: 2330434 - RNA, 22 nt, Human
cuucuguauuuuuuuuucuaag

SEQ ID NO: 2330435 - RNA, 19 nt, Human
cuucuguauucacuuauau

SEQ ID NO: 2330436 - RNA, 20 nt, Human
cuucuguauuuuuuuuucua

SEQ ID NO: 2330437 - RNA, 15 nt, Human
cuucugucccucaca

SEQ ID NO: 2330438 - RNA, 14 nt, Human
cuucugucccucac

SEQ ID NO: 2330439 - RNA, 11 nt, Human
cuucuguaguu

SEQ ID NO: 2330440 - RNA, 18 nt, Human
cuucuguaggaauucuuu

SEQ ID NO: 2330441 - RNA, 19 nt, Human
cuucugguacucuccuaga

SEQ ID NO: 2330442 - RNA, 20 nt, Human
cuucugguacucuccuagag

SEQ ID NO: 2330443 - RNA, 21 nt, Human
cuucuguacgucugacaggca

SEQ ID NO: 2330444 - RNA, 14 nt, Human
cuucuguacgucug

SEQ ID NO: 2330445 - RNA, 15 nt, Human
cuucuguacgucuga

SEQ ID NO: 2330446 - RNA, 18 nt, Human
cuucuguacgucugacag

SEQ ID NO: 2330447 - RNA, 20 nt, Human
cuucuguacgucugacaggc

SEQ ID NO: 2330448 - RNA, 16 nt, Human
cuucuguccuacucug

SEQ ID NO: 2330449 - RNA, 17 nt, Human
cuucuguccuacucugu

SEQ ID NO: 2330450 - RNA, 18 nt, Human
cuucuguccuacucugug

SEQ ID NO: 2330451 - RNA, 19 nt, Human
cuucuguccuacucugugu

SEQ ID NO: 2330452 - RNA, 21 nt, Human
cuucuguccuacucuguguca

SEQ ID NO: 2330453 - RNA, 18 nt, Human
cuucugucuucacaacag

SEQ ID NO: 2330454 - RNA, 22 nt, Human
cuucugucuucacaacagauua

SEQ ID NO: 2330455 - RNA, 21 nt, Human
cuucugucuucacaacagauu

SEQ ID NO: 2330456 - RNA, 19 nt, Human
cuucugcuggauaaaauga

SEQ ID NO: 2330457 - RNA, 17 nt, Human
cuucugcuggauaaaau

SEQ ID NO: 2330458 - RNA, 11 nt, Human
cuucugcuggg

SEQ ID NO: 2330459 - RNA, 13 nt, Human
cuucugcugggcu

SEQ ID NO: 2330460 - RNA, 14 nt, Human
cuucugcugggcug

SEQ ID NO: 2330461 - RNA, 15 nt, Human
cuucugcugggcugg

SEQ ID NO: 2330462 - RNA, 16 nt, Human
cuucugcugggcuggg

SEQ ID NO: 2330463 - RNA, 17 nt, Human
cuucugcugggcugggg

SEQ ID NO: 2330464 - RNA, 15 nt, Human
cuucugcuggauaaa

SEQ ID NO: 2330465 - RNA, 14 nt, Human
cuucugccuguuau

SEQ ID NO: 2330466 - RNA, 23 nt, Human
cuucugcuccacccuuggccugu

SEQ ID NO: 2330467 - RNA, 21 nt, Human
cuucugcuccacccuuggccu

SEQ ID NO: 2330468 - RNA, 19 nt, Human
cuucugcuccacccuuggc

SEQ ID NO: 2330469 - RNA, 13 nt, Human
cuucugcuucagc

SEQ ID NO: 2330470 - RNA, 19 nt, Human
cuucugcugggcuggggcc

SEQ ID NO: 2330471 - RNA, 15 nt, Human
cuucugcuuaggaga

SEQ ID NO: 2330472 - RNA, 16 nt, Human
cuucugcuuaggagag

SEQ ID NO: 2330473 - RNA, 21 nt, Human
cuucucugacuucugccugga

SEQ ID NO: 2330474 - RNA, 17 nt, Human
cuucucugaagggaggu

SEQ ID NO: 2330475 - RNA, 23 nt, Human
cuucugcccaauuggaggaaagc

SEQ ID NO: 2330476 - RNA, 19 nt, Human
cuucugccggcccuggggc

SEQ ID NO: 2330477 - RNA, 18 nt, Human
cuucugccggcccugggg

SEQ ID NO: 2330478 - RNA, 17 nt, Human
cuucugccggcccuggg

SEQ ID NO: 2330479 - RNA, 15 nt, Human
cuucugcccuugcca

SEQ ID NO: 2330480 - RNA, 12 nt, Human
cuucugccugca

SEQ ID NO: 2330481 - RNA, 14 nt, Human
cuucugccugagcu

SEQ ID NO: 2330482 - RNA, 15 nt, Human
cuucugccugagcuu

SEQ ID NO: 2330483 - RNA, 17 nt, Human
cuucugcuccacccuug

SEQ ID NO: 2330484 - RNA, 15 nt, Human
cuucugcuccacccu

SEQ ID NO: 2330485 - RNA, 18 nt, Human
cuucugccuguggaacug

SEQ ID NO: 2330486 - RNA, 18 nt, Human
cuucugccuuagucucag

SEQ ID NO: 2330487 - RNA, 13 nt, Human
cuucugccuggag

SEQ ID NO: 2330488 - RNA, 14 nt, Human
cuucugccuggaga

SEQ ID NO: 2330489 - RNA, 15 nt, Human
cuucugccuggagac

SEQ ID NO: 2330490 - RNA, 16 nt, Human
cuucugccuggagacu

SEQ ID NO: 2330491 - RNA, 23 nt, Human
cuucuggguuccuuccucugagc

SEQ ID NO: 2330492 - RNA, 15 nt, Human
cuucugguacucucc

SEQ ID NO: 2330493 - RNA, 16 nt, Human
cuucugguacucuccu

SEQ ID NO: 2330494 - RNA, 17 nt, Human
cuucugguacucuccua

SEQ ID NO: 2330495 - RNA, 18 nt, Human
cuucugguacucuccuag

SEQ ID NO: 2330496 - RNA, 17 nt, Human
cuucuggguuccuuccu

SEQ ID NO: 2330497 - RNA, 16 nt, Human
cuucuggguuccuucc

SEQ ID NO: 2330498 - RNA, 14 nt, Human
cuucugguugaugc

SEQ ID NO: 2330499 - RNA, 21 nt, Human
cuucuggugaccuuccaagag

SEQ ID NO: 2330500 - RNA, 20 nt, Human
cuucuggugaccuuccaaga

SEQ ID NO: 2330501 - RNA, 18 nt, Human
cuucuggugaccuuccaa

SEQ ID NO: 2330502 - RNA, 15 nt, Human
cuucuggguggggca

SEQ ID NO: 2330503 - RNA, 23 nt, Human
cuucugggagggcagcagggcua

SEQ ID NO: 2330504 - RNA, 19 nt, Human
cuucugggcaucuguucug

SEQ ID NO: 2330505 - RNA, 20 nt, Human
cuucugggcaucuguucugg

SEQ ID NO: 2330506 - RNA, 19 nt, Human
cuucugggagggcagcagg

SEQ ID NO: 2330507 - RNA, 18 nt, Human
cuucugcuuaggagagac

SEQ ID NO: 2330508 - RNA, 22 nt, Human
cuucugggagggcagcagggcu

SEQ ID NO: 2330509 - RNA, 22 nt, Human
cuucugggcuucaucuggcaac

SEQ ID NO: 2330510 - RNA, 21 nt, Human
cuucugggcuucaucuggcaa

SEQ ID NO: 2330511 - RNA, 21 nt, Human
cuucugggcaucuguucuggu

SEQ ID NO: 2330512 - RNA, 18 nt, Human
cuuuacggacacccccuc

SEQ ID NO: 2330513 - RNA, 21 nt, Human
cuuuaaacauugguucuugua

SEQ ID NO: 2330514 - RNA, 13 nt, Human
cuuuacuauggcc

SEQ ID NO: 2330515 - RNA, 18 nt, Human
cuuuaaaauuuuuuuaga

SEQ ID NO: 2330516 - RNA, 21 nt, Human
cuuuaaaauuuuuuuagaaag

SEQ ID NO: 2330517 - RNA, 23 nt, Human
cuuuaaaauuuuuuuagaaagca

SEQ ID NO: 2330518 - RNA, 22 nt, Human
cuuuaccuuuuuuauacauaaa

SEQ ID NO: 2330519 - RNA, 12 nt, Human
cuuuacuguuug

SEQ ID NO: 2330520 - RNA, 19 nt, Human
cuuuacugucaaaauaauu

SEQ ID NO: 2330521 - RNA, 22 nt, Human
cuuuacuaagaugacauugcua

SEQ ID NO: 2330522 - RNA, 15 nt, Human
cuuuacugucaaaau

SEQ ID NO: 2330523 - RNA, 18 nt, Human
cuuuacuaagaugacauu

SEQ ID NO: 2330524 - RNA, 16 nt, Human
cuuuaccuuuuuucuu

SEQ ID NO: 2330525 - RNA, 15 nt, Human
cuuuagccaaacccu

SEQ ID NO: 2330526 - RNA, 17 nt, Human
cuuuagaugcugaugau

SEQ ID NO: 2330527 - RNA, 16 nt, Human
cuuuagccaaacccuu

SEQ ID NO: 2330528 - RNA, 12 nt, Human
cuuuagaugcug

SEQ ID NO: 2330529 - RNA, 13 nt, Human
cuuuagaugcuga

SEQ ID NO: 2330530 - RNA, 14 nt, Human
cuuuagaugcugau

SEQ ID NO: 2330531 - RNA, 22 nt, Human
cuuguucuacucauauauaucu

SEQ ID NO: 2330532 - RNA, 13 nt, Human
cuuguucuacuca

SEQ ID NO: 2330533 - RNA, 21 nt, Human
cuuguucucuaaguuccacug

SEQ ID NO: 2330534 - RNA, 21 nt, Human
cuuguuccccacugacagccu

SEQ ID NO: 2330535 - RNA, 16 nt, Human
cuuguuccagcucuuu

SEQ ID NO: 2330536 - RNA, 14 nt, Human
cuuguucccucucc

SEQ ID NO: 2330537 - RNA, 12 nt, Human
cuuguuccuaga

SEQ ID NO: 2330538 - RNA, 21 nt, Human
cuuguucgugggucaucggga

SEQ ID NO: 2330539 - RNA, 13 nt, Human
cuuguuccagcuc

SEQ ID NO: 2330540 - RNA, 16 nt, Human
cuuguucacacucuca

SEQ ID NO: 2330541 - RNA, 13 nt, Human
cuuguuauuuaua

SEQ ID NO: 2330542 - RNA, 15 nt, Human
cuuguuauuuauaac

SEQ ID NO: 2330543 - RNA, 20 nt, Human
cuuguucaaaauauguucuu

SEQ ID NO: 2330544 - RNA, 22 nt, Human
cuugugucccuccugggaucug

SEQ ID NO: 2330545 - RNA, 15 nt, Human
cuugugucuacagag

SEQ ID NO: 2330546 - RNA, 16 nt, Human
cuugugucaaacagua

SEQ ID NO: 2330547 - RNA, 14 nt, Human
cuugugucccauga

SEQ ID NO: 2330548 - RNA, 15 nt, Human
cuuguguauccauua

SEQ ID NO: 2330549 - RNA, 16 nt, Human
cuuguguauccauuau

SEQ ID NO: 2330550 - RNA, 22 nt, Human
cuuguguauccauuaucaugug

SEQ ID NO: 2330551 - RNA, 23 nt, Human
cuuguguauccauuaucaugugu

SEQ ID NO: 2330552 - RNA, 18 nt, Human
cuuuauacguguagcuau

SEQ ID NO: 2330553 - RNA, 20 nt, Human
cuuuauacaacagugcuaaa

SEQ ID NO: 2330554 - RNA, 23 nt, Human
cuuuauacaacagugcuaaaaau

SEQ ID NO: 2330555 - RNA, 13 nt, Human
cuuuauacaacag

SEQ ID NO: 2330556 - RNA, 15 nt, Human
cuuuauacaacagug

SEQ ID NO: 2330557 - RNA, 17 nt, Human
cuuuauacaacagugcu

SEQ ID NO: 2330558 - RNA, 18 nt, Human
cuuuauacaacagugcua

SEQ ID NO: 2330559 - RNA, 19 nt, Human
cuuuauacguguagcuaua

SEQ ID NO: 2330560 - RNA, 13 nt, Human
cuuuauaugaaga

SEQ ID NO: 2330561 - RNA, 20 nt, Human
cuuuauauggccucaagauc

SEQ ID NO: 2330562 - RNA, 22 nt, Human
cuuuauaugaagaaaaucacuu

SEQ ID NO: 2330563 - RNA, 19 nt, Human
cuuuauaauucuacuuuga

SEQ ID NO: 2330564 - RNA, 13 nt, Human
cuuuauaauucua

SEQ ID NO: 2330565 - RNA, 14 nt, Human
cuuuagcgcccagu

SEQ ID NO: 2330566 - RNA, 15 nt, Human
cuuuagcgcccaguu

SEQ ID NO: 2330567 - RNA, 19 nt, Human
cuuuaugccggaugugcuu

SEQ ID NO: 2330568 - RNA, 20 nt, Human
cuuuaugccggaugugcuuu

SEQ ID NO: 2330569 - RNA, 22 nt, Human
cuuuaugccggaugugcuuuuc

SEQ ID NO: 2330570 - RNA, 14 nt, Human
cuuuaucuugacau

SEQ ID NO: 2330571 - RNA, 23 nt, Human
cuuuaugacuguuuuuguagugg

SEQ ID NO: 2330572 - RNA, 15 nt, Human
cuuuaugcacaaaau

SEQ ID NO: 2330573 - RNA, 22 nt, Human
cuuuaugaaugaaaaaacaguc

SEQ ID NO: 2330574 - RNA, 13 nt, Human
cuuuaucuguucu

SEQ ID NO: 2330575 - RNA, 18 nt, Human
cuuuaucuguucuugcua

SEQ ID NO: 2330576 - RNA, 23 nt, Human
cuuuaucuugaauaauguaagac

SEQ ID NO: 2330577 - RNA, 19 nt, Human
cuuuaucacauuauuugca

SEQ ID NO: 2330578 - RNA, 13 nt, Human
cuuuauauuuagu

SEQ ID NO: 2330579 - RNA, 12 nt, Human
cuuuauauuuag

SEQ ID NO: 2330580 - RNA, 21 nt, Human
cuuuaucuaauaccucugugu

SEQ ID NO: 2330581 - RNA, 22 nt, Human
cuuuaucuaauaccucugugug

SEQ ID NO: 2330582 - RNA, 14 nt, Human
cuuuauccucuuua

SEQ ID NO: 2330583 - RNA, 16 nt, Human
cuuuauccucuuuaga

SEQ ID NO: 2330584 - RNA, 18 nt, Human
cuuuaucuugaauaaugu

SEQ ID NO: 2330585 - RNA, 21 nt, Human
cuuuaucuugaauaauguaag

SEQ ID NO: 2330586 - RNA, 22 nt, Human
cuuguauagguuuuaaagaccu

SEQ ID NO: 2330587 - RNA, 15 nt, Human
cuuguauaguguaaa

SEQ ID NO: 2330588 - RNA, 16 nt, Human
cuuguauaguguaaaa

SEQ ID NO: 2330589 - RNA, 17 nt, Human
cuuguauaguguaaaau

SEQ ID NO: 2330590 - RNA, 20 nt, Human
cuuguauauacgcaucuaua

SEQ ID NO: 2330591 - RNA, 17 nt, Human
cuuguauaucuuguuuu

SEQ ID NO: 2330592 - RNA, 11 nt, Human
cuuguauauuu

SEQ ID NO: 2330593 - RNA, 12 nt, Human
cuuguauauuug

SEQ ID NO: 2330594 - RNA, 14 nt, Human
cuuguauauuugua

SEQ ID NO: 2330595 - RNA, 16 nt, Human
cuuguauauuuguaca

SEQ ID NO: 2330596 - RNA, 23 nt, Human
cuugucaauaaaauccauacauu

SEQ ID NO: 2330597 - RNA, 17 nt, Human
cuuguauauuuuaagaa

SEQ ID NO: 2330598 - RNA, 17 nt, Human
cuuguauauuuguacaa

SEQ ID NO: 2330599 - RNA, 18 nt, Human
cuuguauauuuguacaaa

SEQ ID NO: 2330600 - RNA, 19 nt, Human
cuuguauauuuguacaaaa

SEQ ID NO: 2330601 - RNA, 15 nt, Human
cuugucaaagaaggu

SEQ ID NO: 2330602 - RNA, 21 nt, Human
cuuguaguuuaccucuuuaaa

SEQ ID NO: 2330603 - RNA, 17 nt, Human
cuuguagggaugccuuu

SEQ ID NO: 2330604 - RNA, 23 nt, Human
cuuguacauguguagccugugca

SEQ ID NO: 2330605 - RNA, 14 nt, Human
cuuguacaugugua

SEQ ID NO: 2330606 - RNA, 19 nt, Human
cuuguacauguguagccug

SEQ ID NO: 2330607 - RNA, 20 nt, Human
cuuguacauguguagccugu

SEQ ID NO: 2330608 - RNA, 22 nt, Human
cuuguacauguguagccugugc

SEQ ID NO: 2330609 - RNA, 21 nt, Human
cuugucccacucaagccaagc

SEQ ID NO: 2330610 - RNA, 15 nt, Human
cuugucccagaggcu

SEQ ID NO: 2330611 - RNA, 14 nt, Human
cuuguccccaaauc

SEQ ID NO: 2330612 - RNA, 19 nt, Human
cuugucccagaggcugccc

SEQ ID NO: 2330613 - RNA, 19 nt, Human
cuugucccacucaagccaa

SEQ ID NO: 2330614 - RNA, 18 nt, Human
cuugucccacucaagcca

SEQ ID NO: 2330615 - RNA, 16 nt, Human
cuugucccacucaagc

SEQ ID NO: 2330616 - RNA, 18 nt, Human
cuugucccacuaucuggg

SEQ ID NO: 2330617 - RNA, 13 nt, Human
cuuguccagcuga

SEQ ID NO: 2330618 - RNA, 12 nt, Human
cuuguccagcug

SEQ ID NO: 2330619 - RNA, 12 nt, Human
cuuguccccaca

SEQ ID NO: 2330620 - RNA, 14 nt, Human
cuugugguuuaugu

SEQ ID NO: 2330621 - RNA, 14 nt, Human
cuuguguauccauu

SEQ ID NO: 2330622 - RNA, 15 nt, Human
cuugucaauauuuaa

SEQ ID NO: 2330623 - RNA, 19 nt, Human
cuugucaauauuuaaacau

SEQ ID NO: 2330624 - RNA, 18 nt, Human
cuuguccagcgccuagug

SEQ ID NO: 2330625 - RNA, 14 nt, Human
cuuguccagcgccu

SEQ ID NO: 2330626 - RNA, 15 nt, Human
cuuguccacccaccu

SEQ ID NO: 2330627 - RNA, 20 nt, Human
cuuguccaacccgaggcccg

SEQ ID NO: 2330628 - RNA, 22 nt, Human
cuugucaauauuuaaacauggu

SEQ ID NO: 2330629 - RNA, 16 nt, Human
cuuguaaauagcucag

SEQ ID NO: 2330630 - RNA, 22 nt, Human
cuugggggguuuuuacuccagu

SEQ ID NO: 2330631 - RNA, 23 nt, Human
cuugggggguuuuuacuccagug

SEQ ID NO: 2330632 - RNA, 13 nt, Human
cuugaguuugucg

SEQ ID NO: 2330633 - RNA, 14 nt, Human
cuuggggggguggc

SEQ ID NO: 2330634 - RNA, 16 nt, Human
cuuggggggguggccg

SEQ ID NO: 2330635 - RNA, 18 nt, Human
cuuggggggguggccgcu

SEQ ID NO: 2330636 - RNA, 19 nt, Human
cuuggggggguggccgcug

SEQ ID NO: 2330637 - RNA, 22 nt, Human
cuuggggggguggccgcugagu

SEQ ID NO: 2330638 - RNA, 23 nt, Human
cuuggggggcugaggugggagga

SEQ ID NO: 2330639 - RNA, 12 nt, Human
cuugaguuuguc

SEQ ID NO: 2330640 - RNA, 19 nt, Human
cuugaguuuaaauuguaau

SEQ ID NO: 2330641 - RNA, 17 nt, Human
cuuguaaauagcucagg

SEQ ID NO: 2330642 - RNA, 18 nt, Human
cuuguaaauagcucaggu

SEQ ID NO: 2330643 - RNA, 12 nt, Human
cuuguacauaau

SEQ ID NO: 2330644 - RNA, 15 nt, Human
cuuguacauaaugcg

SEQ ID NO: 2330645 - RNA, 13 nt, Human
cuuguacaugugu

SEQ ID NO: 2330646 - RNA, 22 nt, Human
cuuguacauaaugcgugcauac

SEQ ID NO: 2330647 - RNA, 21 nt, Human
cuuguacauaaugcgugcaua

SEQ ID NO: 2330648 - RNA, 19 nt, Human
cuuguacauaaugcgugca

SEQ ID NO: 2330649 - RNA, 16 nt, Human
cuuuauguaauaaugu

SEQ ID NO: 2330650 - RNA, 13 nt, Human
cuuuaugguuucu

SEQ ID NO: 2330651 - RNA, 15 nt, Human
cuuuaugcugaaaca

SEQ ID NO: 2330652 - RNA, 12 nt, Human
cuuuaugcugaa

SEQ ID NO: 2330653 - RNA, 16 nt, Human
cuuuaugguaaagaug

SEQ ID NO: 2330654 - RNA, 15 nt, Human
cuuuccaucuacccu

SEQ ID NO: 2330655 - RNA, 15 nt, Human
cuuuccaggaaggcu

SEQ ID NO: 2330656 - RNA, 15 nt, Human
cuuuccccugugggg

SEQ ID NO: 2330657 - RNA, 17 nt, Human
cuuuccccuguggggau

SEQ ID NO: 2330658 - RNA, 18 nt, Human
cuuucccggacugcaagc

SEQ ID NO: 2330659 - RNA, 18 nt, Human
cuuuccauuggaucucau

SEQ ID NO: 2330660 - RNA, 14 nt, Human
cuuuccauguugcu

SEQ ID NO: 2330661 - RNA, 17 nt, Human
cuuuccauguugcugcc

SEQ ID NO: 2330662 - RNA, 18 nt, Human
cuuuccauguugcugcca

SEQ ID NO: 2330663 - RNA, 19 nt, Human
cuuucccugcuuaaugaaa

SEQ ID NO: 2330664 - RNA, 15 nt, Human
cuuucccuuaucaaa

SEQ ID NO: 2330665 - RNA, 20 nt, Human
cuuucccugaacugggaccu

SEQ ID NO: 2330666 - RNA, 17 nt, Human
cuuucccuucaguaccc

SEQ ID NO: 2330667 - RNA, 13 nt, Human
cuuucccuccacu

SEQ ID NO: 2330668 - RNA, 13 nt, Human
cuuucccugaacu

SEQ ID NO: 2330669 - RNA, 13 nt, Human
cuuucccugccuc

SEQ ID NO: 2330670 - RNA, 12 nt, Human
cuuuccugaggc

SEQ ID NO: 2330671 - RNA, 16 nt, Human
cuuucccucccuuccu

SEQ ID NO: 2330672 - RNA, 14 nt, Human
cuuucccucccuuc

SEQ ID NO: 2330673 - RNA, 13 nt, Human
cuuucccucccuu

SEQ ID NO: 2330674 - RNA, 11 nt, Human
cuuucccuccc

SEQ ID NO: 2330675 - RNA, 19 nt, Human
cuuucugcucagcuucucc

SEQ ID NO: 2330676 - RNA, 16 nt, Human
cuuucugcuuguguua

SEQ ID NO: 2330677 - RNA, 17 nt, Human
cuuucucuucucuguuc

SEQ ID NO: 2330678 - RNA, 15 nt, Human
cuuucucuucucugu

SEQ ID NO: 2330679 - RNA, 16 nt, Human
cuuucucugccaguga

SEQ ID NO: 2330680 - RNA, 18 nt, Human
cuuucucugccagugaca

SEQ ID NO: 2330681 - RNA, 13 nt, Human
cuuucucugccag

SEQ ID NO: 2330682 - RNA, 14 nt, Human
cuuucucugccagu

SEQ ID NO: 2330683 - RNA, 15 nt, Human
cuuucucuccuuucu

SEQ ID NO: 2330684 - RNA, 17 nt, Human
cuuucucuccuuucuuu

SEQ ID NO: 2330685 - RNA, 16 nt, Human
cuuucucuccuuucuu

SEQ ID NO: 2330686 - RNA, 22 nt, Human
cuuuccugaauccaaacuaauc

SEQ ID NO: 2330687 - RNA, 15 nt, Human
cuuuccugaauccaa

SEQ ID NO: 2330688 - RNA, 16 nt, Human
cuuucucuacuuugag

SEQ ID NO: 2330689 - RNA, 13 nt, Human
cuuuccugaggcu

SEQ ID NO: 2330690 - RNA, 15 nt, Human
cuuuccugaggcugg

SEQ ID NO: 2330691 - RNA, 13 nt, Human
cuuucuguaaacu

SEQ ID NO: 2330692 - RNA, 13 nt, Human
cuuucuguauaua

SEQ ID NO: 2330693 - RNA, 11 nt, Human
cuuucuuccuc

SEQ ID NO: 2330694 - RNA, 14 nt, Human
cuuucugggccaag

SEQ ID NO: 2330695 - RNA, 20 nt, Human
cuuucugggcaccggggccu

SEQ ID NO: 2330696 - RNA, 16 nt, Human
cuuucuguaaccauaa

SEQ ID NO: 2330697 - RNA, 13 nt, Human
cuuucuggcucuc

SEQ ID NO: 2330698 - RNA, 20 nt, Human
cuuucuggcuaugcauuuga

SEQ ID NO: 2330699 - RNA, 19 nt, Human
cuuucuggcuaugcauuug

SEQ ID NO: 2330700 - RNA, 18 nt, Human
cuuucuggcuaugcauuu

SEQ ID NO: 2330701 - RNA, 17 nt, Human
cuuucuggcuaugcauu

SEQ ID NO: 2330702 - RNA, 12 nt, Human
cuuucuuccucu

SEQ ID NO: 2330703 - RNA, 13 nt, Human
cuuucuuccucug

SEQ ID NO: 2330704 - RNA, 14 nt, Human
cuuucuuccucugc

SEQ ID NO: 2330705 - RNA, 15 nt, Human
cuuucuuccucugcu

SEQ ID NO: 2330706 - RNA, 15 nt, Human
cuuugaccucugcag

SEQ ID NO: 2330707 - RNA, 14 nt, Human
cuuugaccucugca

SEQ ID NO: 2330708 - RNA, 24 nt, Human
cuuugaccucugcagcaauaaagc

SEQ ID NO: 2330709 - RNA, 20 nt, Human
cuuugaccucugcagcaaua

SEQ ID NO: 2330710 - RNA, 18 nt, Human
cuuugaccucugcagcaa

SEQ ID NO: 2330711 - RNA, 17 nt, Human
cuuugaccucugcagca

SEQ ID NO: 2330712 - RNA, 22 nt, Human
cuuugccuugggcugcuccuca

SEQ ID NO: 2330713 - RNA, 19 nt, Human
cuuugccuugggcugcucc

SEQ ID NO: 2330714 - RNA, 18 nt, Human
cuuugccuugggcugcuc

SEQ ID NO: 2330715 - RNA, 16 nt, Human
cuuugccuugggcugc

SEQ ID NO: 2330716 - RNA, 13 nt, Human
cuuugccuugggc

SEQ ID NO: 2330717 - RNA, 23 nt, Human
cuuugccuuccacgcugucucca

SEQ ID NO: 2330718 - RNA, 22 nt, Human
cuuugccuuccacgcugucucc

SEQ ID NO: 2330719 - RNA, 22 nt, Human
cuuugccuguucaguuacagaa

SEQ ID NO: 2330720 - RNA, 15 nt, Human
cuuugccuguucagu

SEQ ID NO: 2330721 - RNA, 16 nt, Human
cuuugccuguucaguu

SEQ ID NO: 2330722 - RNA, 13 nt, Human
cuuugccuccccg

SEQ ID NO: 2330723 - RNA, 11 nt, Human
cuuugccuggu

SEQ ID NO: 2330724 - RNA, 14 nt, Human
cuuugccuguucag

SEQ ID NO: 2330725 - RNA, 17 nt, Human
cuuugcagguugcuuug

SEQ ID NO: 2330726 - RNA, 18 nt, Human
cuuugaccugccucccuu

SEQ ID NO: 2330727 - RNA, 12 nt, Human
cuuugcaggcau

SEQ ID NO: 2330728 - RNA, 15 nt, Human
cuuugcagguugcuu

SEQ ID NO: 2330729 - RNA, 16 nt, Human
cuuugcagacaggcaa

SEQ ID NO: 2330730 - RNA, 13 nt, Human
cuuugaccucugc

SEQ ID NO: 2330731 - RNA, 15 nt, Human
cuuugaccugccucc

SEQ ID NO: 2330732 - RNA, 14 nt, Human
cuuugaccugccuc

SEQ ID NO: 2330733 - RNA, 13 nt, Human
cuuugcaggcuca

SEQ ID NO: 2330734 - RNA, 22 nt, Human
cuuugcagccggcacagggucu

SEQ ID NO: 2330735 - RNA, 20 nt, Human
cuuugcagacaggcaagcac

SEQ ID NO: 2330736 - RNA, 14 nt, Human
cuuugucccauuuc

SEQ ID NO: 2330737 - RNA, 15 nt, Human
cuuuguccccaccgc

SEQ ID NO: 2330738 - RNA, 19 nt, Human
cuuugugagagugagcugu

SEQ ID NO: 2330739 - RNA, 23 nt, Human
cuuugugacuguauauaaaggaa

SEQ ID NO: 2330740 - RNA, 15 nt, Human
cuuugugacuguaua

SEQ ID NO: 2330741 - RNA, 22 nt, Human
cuuugugaauagaacucugaaa

SEQ ID NO: 2330742 - RNA, 15 nt, Human
cuuugucugaaaaau

SEQ ID NO: 2330743 - RNA, 13 nt, Human
cuuugugcugugg

SEQ ID NO: 2330744 - RNA, 15 nt, Human
cuuugugaggaagcc

SEQ ID NO: 2330745 - RNA, 16 nt, Human
cuuugucaaaaggaag

SEQ ID NO: 2330746 - RNA, 18 nt, Human
cuuugucaucuuucuucu

SEQ ID NO: 2330747 - RNA, 20 nt, Human
cuuuguauuuuuacuuuuaa

SEQ ID NO: 2330748 - RNA, 23 nt, Human
cuuuguauuuuuacuuuuaaaug

SEQ ID NO: 2330749 - RNA, 14 nt, Human
cuuuguccccaccg

SEQ ID NO: 2330750 - RNA, 13 nt, Human
cuuuggcucugga

SEQ ID NO: 2330751 - RNA, 14 nt, Human
cuuuggcucuggag

SEQ ID NO: 2330752 - RNA, 15 nt, Human
cuuuggcucuggaga

SEQ ID NO: 2330753 - RNA, 13 nt, Human
cuuuggcuccccu

SEQ ID NO: 2330754 - RNA, 15 nt, Human
cuuuggcuccccugu

SEQ ID NO: 2330755 - RNA, 14 nt, Human
cuuuggcugcaugc

SEQ ID NO: 2330756 - RNA, 14 nt, Human
cuuugccuuuugca

SEQ ID NO: 2330757 - RNA, 23 nt, Human
cuuugccuugggcugcuccucau

SEQ ID NO: 2330758 - RNA, 19 nt, Human
cuuuggcuauuagagauca

SEQ ID NO: 2330759 - RNA, 19 nt, Human
cuuuggcuaugagggccuu

SEQ ID NO: 2330760 - RNA, 21 nt, Human
gaaaccauuaugaagaagaga

SEQ ID NO: 2330761 - RNA, 19 nt, Human
gaaaccaguguagccuugc

SEQ ID NO: 2330762 - RNA, 23 nt, Human
gaaacccagcucugguccauaga

SEQ ID NO: 2330763 - RNA, 17 nt, Human
gaaaccccaucucuacu

SEQ ID NO: 2330764 - RNA, 21 nt, Human
gaaacccagacugaacuuacc

SEQ ID NO: 2330765 - RNA, 15 nt, Human
gaaacccccacacac

SEQ ID NO: 2330766 - RNA, 17 nt, Human
gaaacccccacacacac

SEQ ID NO: 2330767 - RNA, 16 nt, Human
gaaacccccacacaca

SEQ ID NO: 2330768 - RNA, 16 nt, Human
gaaacccgacagaggg

SEQ ID NO: 2330769 - RNA, 15 nt, Human
gaaacccuauuuccc

SEQ ID NO: 2330770 - RNA, 23 nt, Human
gaaacccccacacacacacacau

SEQ ID NO: 2330771 - RNA, 20 nt, Human
gaaaccucuacuaaaaagaa

SEQ ID NO: 2330772 - RNA, 16 nt, Human
gaaaccugggauucag

SEQ ID NO: 2330773 - RNA, 13 nt, Human
gaaaccugaaaaa

SEQ ID NO: 2330774 - RNA, 18 nt, Human
gaaaccugaaaaaaaguu

SEQ ID NO: 2330775 - RNA, 12 nt, Human
gaaaccugcccu

SEQ ID NO: 2330776 - RNA, 13 nt, Human
gaaaccugcccug

SEQ ID NO: 2330777 - RNA, 17 nt, Human
gaaacccuugaaaagac

SEQ ID NO: 2330778 - RNA, 21 nt, Human
gaaacccuggaccaguggucu

SEQ ID NO: 2330779 - RNA, 14 nt, Human
gaaacccuggacca

SEQ ID NO: 2330780 - RNA, 14 nt, Human
gaaacccugucucu

SEQ ID NO: 2330781 - RNA, 15 nt, Human
gaaacuaacagauaa

SEQ ID NO: 2330782 - RNA, 16 nt, Human
gaaacgucuucuaaac

SEQ ID NO: 2330783 - RNA, 20 nt, Human
gaaaccuuauuguaccucuc

SEQ ID NO: 2330784 - RNA, 13 nt, Human
gaaaccuuaauau

SEQ ID NO: 2330785 - RNA, 13 nt, Human
gaaaccuuauuuu

SEQ ID NO: 2330786 - RNA, 17 nt, Human
gaaaccuuauuguaccu

SEQ ID NO: 2330787 - RNA, 19 nt, Human
gaaaccuuauuguaccucu

SEQ ID NO: 2330788 - RNA, 18 nt, Human
gaaaccugcccugccuga

SEQ ID NO: 2330789 - RNA, 14 nt, Human
gaaaccugcccugc

SEQ ID NO: 2330790 - RNA, 17 nt, Human
gaaaccugcccugccug

SEQ ID NO: 2330791 - RNA, 12 nt, Human
gaaacuaacaga

SEQ ID NO: 2330792 - RNA, 22 nt, Human
gaaaccuuauuuuuucccaaag

SEQ ID NO: 2330793 - RNA, 13 nt, Human
gaaacuaggucug

SEQ ID NO: 2330794 - RNA, 19 nt, Human
gaaacuccacaucugccuu

SEQ ID NO: 2330795 - RNA, 18 nt, Human
gaaacuaggucugauauu

SEQ ID NO: 2330796 - RNA, 20 nt, Human
gaaacuccacaucugccuua

SEQ ID NO: 2330797 - RNA, 20 nt, Human
gaaacuccaccuugcgggga

SEQ ID NO: 2330798 - RNA, 23 nt, Human
gaaacucguuaauuuguaguguu

SEQ ID NO: 2330799 - RNA, 18 nt, Human
gaaaaugcaacaacaugu

SEQ ID NO: 2330800 - RNA, 20 nt, Human
gaaaaugcaacaacauguau

SEQ ID NO: 2330801 - RNA, 23 nt, Human
gaaaaugauguguacccaaacgu

SEQ ID NO: 2330802 - RNA, 22 nt, Human
gaaaaugaucugagucccagga

SEQ ID NO: 2330803 - RNA, 14 nt, Human
gaaaaugaucugag

SEQ ID NO: 2330804 - RNA, 16 nt, Human
gaaaaugaucugaguc

SEQ ID NO: 2330805 - RNA, 22 nt, Human
gaaacaauacucauaaugugaa

SEQ ID NO: 2330806 - RNA, 15 nt, Human
gaaacaauaaagaga

SEQ ID NO: 2330807 - RNA, 21 nt, Human
gaaacaauacucauaauguga

SEQ ID NO: 2330808 - RNA, 14 nt, Human
gaaaaugcagcagg

SEQ ID NO: 2330809 - RNA, 22 nt, Human
gaaaaugcagcagggaugcccu

SEQ ID NO: 2330810 - RNA, 16 nt, Human
gaaaaugaaucccucu

SEQ ID NO: 2330811 - RNA, 23 nt, Human
gaaaaugaguuuuuauggggcug

SEQ ID NO: 2330812 - RNA, 12 nt, Human
gaaaaugaauaa

SEQ ID NO: 2330813 - RNA, 20 nt, Human
gaaaaugauacgcaacauaa

SEQ ID NO: 2330814 - RNA, 20 nt, Human
gaaacacacugaggcaggga

SEQ ID NO: 2330815 - RNA, 19 nt, Human
gaaacacacugaggcaggg

SEQ ID NO: 2330816 - RNA, 16 nt, Human
gaaacacacugaggca

SEQ ID NO: 2330817 - RNA, 23 nt, Human
gaaacacaccaggcugugggccu

SEQ ID NO: 2330818 - RNA, 17 nt, Human
gaaacacaccaggcugu

SEQ ID NO: 2330819 - RNA, 16 nt, Human
gaaacacaccaggcug

SEQ ID NO: 2330820 - RNA, 15 nt, Human
gaaacacaauauuuu

SEQ ID NO: 2330821 - RNA, 14 nt, Human
gaaacacaauauuu

SEQ ID NO: 2330822 - RNA, 16 nt, Human
gaaacacaacuauauu

SEQ ID NO: 2330823 - RNA, 23 nt, Human
gaaacacacugaggcagggaagu

SEQ ID NO: 2330824 - RNA, 21 nt, Human
gaaacacacugaggcagggaa

SEQ ID NO: 2330825 - RNA, 13 nt, Human
gaaacacagaaac

SEQ ID NO: 2330826 - RNA, 16 nt, Human
gaaaccaaagaagaaa

SEQ ID NO: 2330827 - RNA, 22 nt, Human
gaaaccaaagauauauacacag

SEQ ID NO: 2330828 - RNA, 15 nt, Human
gaaaccaaagaagaa

SEQ ID NO: 2330829 - RNA, 13 nt, Human
gaaacauuuucau

SEQ ID NO: 2330830 - RNA, 11 nt, Human
gaaacauuugg

SEQ ID NO: 2330831 - RNA, 14 nt, Human
gaaaccacagcugc

SEQ ID NO: 2330832 - RNA, 15 nt, Human
gaaaccacagcugcu

SEQ ID NO: 2330833 - RNA, 20 nt, Human
gaaaccacagcugcuggaga

SEQ ID NO: 2330834 - RNA, 17 nt, Human
gaaaccacagcugcugg

SEQ ID NO: 2330835 - RNA, 18 nt, Human
gaaaccacagcugcugga

SEQ ID NO: 2330836 - RNA, 14 nt, Human
gaaaccagggccug

SEQ ID NO: 2330837 - RNA, 20 nt, Human
gaaaccagggccugagccaa

SEQ ID NO: 2330838 - RNA, 18 nt, Human
gaaaccagugcaacagca

SEQ ID NO: 2330839 - RNA, 13 nt, Human
gaaacccagcucu

SEQ ID NO: 2330840 - RNA, 14 nt, Human
gaaacccagcucug

SEQ ID NO: 2330841 - RNA, 15 nt, Human
gaaacccagcucugg

SEQ ID NO: 2330842 - RNA, 16 nt, Human
gaaacccagcucuggu

SEQ ID NO: 2330843 - RNA, 18 nt, Human
gaaacccagcucuggucc

SEQ ID NO: 2330844 - RNA, 19 nt, Human
gaaacccagcucuggucca

SEQ ID NO: 2330845 - RNA, 13 nt, Human
gaaagcuagagau

SEQ ID NO: 2330846 - RNA, 24 nt, Human
gaaagccuguuccccucacuggau

SEQ ID NO: 2330847 - RNA, 16 nt, Human
gaaagccucugcugcc

SEQ ID NO: 2330848 - RNA, 18 nt, Human
gaaagccuguuccccuca

SEQ ID NO: 2330849 - RNA, 20 nt, Human
gaaagccuguuccccucacu

SEQ ID NO: 2330850 - RNA, 21 nt, Human
gaaagccuguuccccucacug

SEQ ID NO: 2330851 - RNA, 15 nt, Human
gaaagccucugcugc

SEQ ID NO: 2330852 - RNA, 16 nt, Human
gaaagccuaucaaaga

SEQ ID NO: 2330853 - RNA, 16 nt, Human
gaaagcuagagauaug

SEQ ID NO: 2330854 - RNA, 18 nt, Human
gaaagcuccuagcagaga

SEQ ID NO: 2330855 - RNA, 20 nt, Human
gaaagcuccuagcagagaga

SEQ ID NO: 2330856 - RNA, 22 nt, Human
gaaagcuccucgagggcaggga

SEQ ID NO: 2330857 - RNA, 17 nt, Human
gaaagcugccugguaua

SEQ ID NO: 2330858 - RNA, 21 nt, Human
gaaagcugguaaacuauuugu

SEQ ID NO: 2330859 - RNA, 17 nt, Human
gaaagcuucaaacugca

SEQ ID NO: 2330860 - RNA, 18 nt, Human
gaaagccccagcacuaac

SEQ ID NO: 2330861 - RNA, 14 nt, Human
gaaagccccagcac

SEQ ID NO: 2330862 - RNA, 17 nt, Human
gaaagcccugagcuuuc

SEQ ID NO: 2330863 - RNA, 22 nt, Human
gaaagcccugagcuuucugcua

SEQ ID NO: 2330864 - RNA, 21 nt, Human
gaaagcccugagcuuucugcu

SEQ ID NO: 2330865 - RNA, 17 nt, Human
gaaagcauccaugugug

SEQ ID NO: 2330866 - RNA, 15 nt, Human
gaaagcauccaugug

SEQ ID NO: 2330867 - RNA, 20 nt, Human
gaaagcccagaaaaggacag

SEQ ID NO: 2330868 - RNA, 21 nt, Human
gaaagcccagaaaaggacaga

SEQ ID NO: 2330869 - RNA, 19 nt, Human
gaaagcaucaccucaggcc

SEQ ID NO: 2330870 - RNA, 18 nt, Human
gaaagcaucaccucaggc

SEQ ID NO: 2330871 - RNA, 17 nt, Human
gaaagcaucaccucagg

SEQ ID NO: 2330872 - RNA, 16 nt, Human
gaaagcaucaccucag

SEQ ID NO: 2330873 - RNA, 20 nt, Human
gaaagcagcucaaaggcaca

SEQ ID NO: 2330874 - RNA, 14 nt, Human
gaaagcagcugaac

SEQ ID NO: 2330875 - RNA, 12 nt, Human
gaaagcaggggc

SEQ ID NO: 2330876 - RNA, 13 nt, Human
gaaagcaggggcu

SEQ ID NO: 2330877 - RNA, 14 nt, Human
gaaagcaggggcua

SEQ ID NO: 2330878 - RNA, 19 nt, Human
gaaagcaggggcuacaaga

SEQ ID NO: 2330879 - RNA, 23 nt, Human
gaaagcaggggcuacaagaggga

SEQ ID NO: 2330880 - RNA, 14 nt, Human
gaaagcagggacuu

SEQ ID NO: 2330881 - RNA, 19 nt, Human
gaaagcagcucaaaggcac

SEQ ID NO: 2330882 - RNA, 22 nt, Human
gaaagcagauaccucacccugc

SEQ ID NO: 2330883 - RNA, 20 nt, Human
gaaagcagauaccucacccu

SEQ ID NO: 2330884 - RNA, 15 nt, Human
gaaagaguaaaggaa

SEQ ID NO: 2330885 - RNA, 22 nt, Human
gaaagcagaacagugauuacca

SEQ ID NO: 2330886 - RNA, 17 nt, Human
gaaagcagaacagugau

SEQ ID NO: 2330887 - RNA, 20 nt, Human
gaaagaggcugaggccugga

SEQ ID NO: 2330888 - RNA, 21 nt, Human
gaaagaggcugaggccuggac

SEQ ID NO: 2330889 - RNA, 22 nt, Human
gaaagaggcugaggccuggacu

SEQ ID NO: 2330890 - RNA, 21 nt, Human
gaaagaguacucuuguuuccu

SEQ ID NO: 2330891 - RNA, 15 nt, Human
gaaagaguaggaaga

SEQ ID NO: 2330892 - RNA, 16 nt, Human
gaaagaguaggaagac

SEQ ID NO: 2330893 - RNA, 17 nt, Human
gaaagacuguacaaagu

SEQ ID NO: 2330894 - RNA, 23 nt, Human
gaaacucuuaucucagucaugca

SEQ ID NO: 2330895 - RNA, 18 nt, Human
gaaacuccgucuuagaag

SEQ ID NO: 2330896 - RNA, 21 nt, Human
gaaacuccaccuugcggggau

SEQ ID NO: 2330897 - RNA, 22 nt, Human
gaaacuccgucuuagaagugga

SEQ ID NO: 2330898 - RNA, 14 nt, Human
gaaacucuuaucuc

SEQ ID NO: 2330899 - RNA, 15 nt, Human
gaaacucuuaucuca

SEQ ID NO: 2330900 - RNA, 16 nt, Human
gaaacucuuaucucag

SEQ ID NO: 2330901 - RNA, 20 nt, Human
gaaacucuuaucucagucau

SEQ ID NO: 2330902 - RNA, 19 nt, Human
gaaagacuuuuccaacccu

SEQ ID NO: 2330903 - RNA, 17 nt, Human
gaaagagaacuuccaga

SEQ ID NO: 2330904 - RNA, 17 nt, Human
gaaagaggagugcuugu

SEQ ID NO: 2330905 - RNA, 20 nt, Human
gaaagaggcagcuugaaacu

SEQ ID NO: 2330906 - RNA, 14 nt, Human
gaaagagaaggugg

SEQ ID NO: 2330907 - RNA, 15 nt, Human
gaaagagaagguggg

SEQ ID NO: 2330908 - RNA, 21 nt, Human
gaaacucuuaucucagucaug

SEQ ID NO: 2330909 - RNA, 21 nt, Human
gaaagaggaaugaaguacuca

SEQ ID NO: 2330910 - RNA, 18 nt, Human
cuuuuucuuuauaaacuu

SEQ ID NO: 2330911 - RNA, 18 nt, Human
cuuuuugaaaucagcaua

SEQ ID NO: 2330912 - RNA, 17 nt, Human
cuuuuugguuugcagau

SEQ ID NO: 2330913 - RNA, 15 nt, Human
cuuuuugaaaucagc

SEQ ID NO: 2330914 - RNA, 21 nt, Human
cuuuuuggaggugcuuaagca

SEQ ID NO: 2330915 - RNA, 17 nt, Human
cuuuuuuggcugcugaa

SEQ ID NO: 2330916 - RNA, 14 nt, Human
cuuuuuguaccugg

SEQ ID NO: 2330917 - RNA, 16 nt, Human
cuuuuuguaccuggug

SEQ ID NO: 2330918 - RNA, 11 nt, Human
cuuuuuguagg

SEQ ID NO: 2330919 - RNA, 20 nt, Human
cuuuuuuggcugcugaaggc

SEQ ID NO: 2330920 - RNA, 22 nt, Human
cuuuuuuggcugcugaaggcuc

SEQ ID NO: 2330921 - RNA, 15 nt, Human
gaaaaaggaggaaga

SEQ ID NO: 2330922 - RNA, 12 nt, Human
gaaaaaggagga

SEQ ID NO: 2330923 - RNA, 16 nt, Human
cuuuuuuggcugcuga

SEQ ID NO: 2330924 - RNA, 13 nt, Human
gaaaaagcaugua

SEQ ID NO: 2330925 - RNA, 18 nt, Human
gaaaaagcauguacagug

SEQ ID NO: 2330926 - RNA, 20 nt, Human
gaaaaagcauguacaguguu

SEQ ID NO: 2330927 - RNA, 14 nt, Human
gaaaaagcauguac

SEQ ID NO: 2330928 - RNA, 15 nt, Human
gaaaaagcauguaca

SEQ ID NO: 2330929 - RNA, 16 nt, Human
gaaaaagcauguacag

SEQ ID NO: 2330930 - RNA, 17 nt, Human
gaaaaagcauguacagu

SEQ ID NO: 2330931 - RNA, 22 nt, Human
gaaaaagcauguacaguguucu

SEQ ID NO: 2330932 - RNA, 21 nt, Human
gaaaaagcuccuguccuccca

SEQ ID NO: 2330933 - RNA, 14 nt, Human
gaaaacacauuuuu

SEQ ID NO: 2330934 - RNA, 18 nt, Human
gaaaacacauuuuucuua

SEQ ID NO: 2330935 - RNA, 18 nt, Human
gaaaacacuguucucugc

SEQ ID NO: 2330936 - RNA, 21 nt, Human
gaaaacacugugcacaucugu

SEQ ID NO: 2330937 - RNA, 14 nt, Human
gaaaacacugugca

SEQ ID NO: 2330938 - RNA, 19 nt, Human
gaaaacacauuuuucuuag

SEQ ID NO: 2330939 - RNA, 15 nt, Human
cuuuuuauugaaucu

SEQ ID NO: 2330940 - RNA, 17 nt, Human
cuuuuuauugaaucuau

SEQ ID NO: 2330941 - RNA, 22 nt, Human
cuuuuuauguugccaguuuaau

SEQ ID NO: 2330942 - RNA, 13 nt, Human
cuuuuuauugaau

SEQ ID NO: 2330943 - RNA, 14 nt, Human
cuuuuuauugaauc

SEQ ID NO: 2330944 - RNA, 13 nt, Human
cuuuuguucgcau

SEQ ID NO: 2330945 - RNA, 20 nt, Human
cuuuuguucuugguuuguaa

SEQ ID NO: 2330946 - RNA, 17 nt, Human
cuuuuuauggccuguga

SEQ ID NO: 2330947 - RNA, 19 nt, Human
cuuuuuauugaaucuauuu

SEQ ID NO: 2330948 - RNA, 11 nt, Human
cuuuuucugac

SEQ ID NO: 2330949 - RNA, 17 nt, Human
cuuuuucugacuccagu

SEQ ID NO: 2330950 - RNA, 22 nt, Human
cuuuuucuggacugaagccugc

SEQ ID NO: 2330951 - RNA, 16 nt, Human
cuuuuucuuuauaaac

SEQ ID NO: 2330952 - RNA, 12 nt, Human
cuuuuucuuuau

SEQ ID NO: 2330953 - RNA, 15 nt, Human
cuuuuucuucuuccc

SEQ ID NO: 2330954 - RNA, 19 nt, Human
cuuuuucuucuucccuccc

SEQ ID NO: 2330955 - RNA, 15 nt, Human
cuuugugugauugaa

SEQ ID NO: 2330956 - RNA, 17 nt, Human
cuuugugcuguggggcu

SEQ ID NO: 2330957 - RNA, 16 nt, Human
cuuuguggaugucuuc

SEQ ID NO: 2330958 - RNA, 17 nt, Human
cuuuguggaugucuucc

SEQ ID NO: 2330959 - RNA, 20 nt, Human
cuuuguggaugucuuccuug

SEQ ID NO: 2330960 - RNA, 14 nt, Human
cuuuguguuucuau

SEQ ID NO: 2330961 - RNA, 23 nt, Human
cuuuguguuucuauugacuucaa

SEQ ID NO: 2330962 - RNA, 18 nt, Human
cuuuguuaguuucuccaa

SEQ ID NO: 2330963 - RNA, 15 nt, Human
cuuuguuacaggcac

SEQ ID NO: 2330964 - RNA, 22 nt, Human
cuuuuguucagggcugugaucg

SEQ ID NO: 2330965 - RNA, 20 nt, Human
cuuuguuauuuuuguuucuu

SEQ ID NO: 2330966 - RNA, 22 nt, Human
cuuuguuauuuuuguuucuucc

SEQ ID NO: 2330967 - RNA, 12 nt, Human
cuuuuguucuug

SEQ ID NO: 2330968 - RNA, 11 nt, Human
cuuuuguucuu

SEQ ID NO: 2330969 - RNA, 11 nt, Human
gaaaaggcagg

SEQ ID NO: 2330970 - RNA, 20 nt, Human
gaaaacguuuuauuguguuu

SEQ ID NO: 2330971 - RNA, 19 nt, Human
gaaaacguuuuauuguguu

SEQ ID NO: 2330972 - RNA, 15 nt, Human
gaaaaggaagacuag

SEQ ID NO: 2330973 - RNA, 13 nt, Human
gaaaaggaagacu

SEQ ID NO: 2330974 - RNA, 20 nt, Human
gaaaaggaagacuagaggcu

SEQ ID NO: 2330975 - RNA, 16 nt, Human
gaaaagugaaugcuca

SEQ ID NO: 2330976 - RNA, 17 nt, Human
gaaaacagacucagguu

SEQ ID NO: 2330977 - RNA, 21 nt, Human
gaaaacagaccuaaugcuccu

SEQ ID NO: 2330978 - RNA, 13 nt, Human
gaaaacagaccua

SEQ ID NO: 2330979 - RNA, 21 nt, Human
gaaaacagaacaucauuagaa

SEQ ID NO: 2330980 - RNA, 22 nt, Human
gaaaacacuguucucugcccuc

SEQ ID NO: 2330981 - RNA, 24 nt, Human
gaaaacacuguucucugcccucca

SEQ ID NO: 2330982 - RNA, 19 nt, Human
gaaaagcugcugacagugu

SEQ ID NO: 2330983 - RNA, 18 nt, Human
gaaaacguuuuauugugu

SEQ ID NO: 2330984 - RNA, 16 nt, Human
gaaaacguuuuauugu

SEQ ID NO: 2330985 - RNA, 14 nt, Human
gaaaacguuuuauu

SEQ ID NO: 2330986 - RNA, 19 nt, Human
gaaaacguggcugcuucaa

SEQ ID NO: 2330987 - RNA, 20 nt, Human
gaaaacguggcugcuucaag

SEQ ID NO: 2330988 - RNA, 22 nt, Human
gaaaacguggcugcuucaagga

SEQ ID NO: 2330989 - RNA, 17 nt, Human
gaaaauauuuugucuaa

SEQ ID NO: 2330990 - RNA, 18 nt, Human
gaaaauauuuugucuaaa

SEQ ID NO: 2330991 - RNA, 19 nt, Human
gaaaauauuuugucuaaaa

SEQ ID NO: 2330992 - RNA, 20 nt, Human
gaaaauauuuugucuaaaau

SEQ ID NO: 2330993 - RNA, 21 nt, Human
gaaaauauuuugucuaaaaug

SEQ ID NO: 2330994 - RNA, 13 nt, Human
gaaaauauuuaaa

SEQ ID NO: 2330995 - RNA, 18 nt, Human
gaaaauauuuguaucaca

SEQ ID NO: 2330996 - RNA, 21 nt, Human
gaaaauauuauguguuuccau

SEQ ID NO: 2330997 - RNA, 14 nt, Human
gaaaauaaaaaguu

SEQ ID NO: 2330998 - RNA, 16 nt, Human
gaaaauaaaaaaaaga

SEQ ID NO: 2330999 - RNA, 11 nt, Human
gaaaauaaaaa

SEQ ID NO: 2331000 - RNA, 12 nt, Human
gaaaaguucaua

SEQ ID NO: 2331001 - RNA, 21 nt, Human
gaaaauaaaaaaaagaaaaaa

SEQ ID NO: 2331002 - RNA, 19 nt, Human
gaaaauaaaaaaaagaaaa

SEQ ID NO: 2331003 - RNA, 18 nt, Human
gaaaauaaaaaaaagaaa

SEQ ID NO: 2331004 - RNA, 17 nt, Human
gaaaauaaaaaaaagaa

SEQ ID NO: 2331005 - RNA, 22 nt, Human
gaaaauaaaaaaaagaaaaaag

SEQ ID NO: 2331006 - RNA, 13 nt, Human
gaaaauaaaaagu

SEQ ID NO: 2331007 - RNA, 12 nt, Human
gaaaauaaaaag

SEQ ID NO: 2331008 - RNA, 22 nt, Human
gaaaaucagccugcuccagcug

SEQ ID NO: 2331009 - RNA, 20 nt, Human
gaaaaucagccugcuccagc

SEQ ID NO: 2331010 - RNA, 14 nt, Human
gaaaaucauauugc

SEQ ID NO: 2331011 - RNA, 18 nt, Human
gaaaauauuuuuuauaua

SEQ ID NO: 2331012 - RNA, 13 nt, Human
gaaaauccucugg

SEQ ID NO: 2331013 - RNA, 22 nt, Human
gaaaaucuacacuccagugaga

SEQ ID NO: 2331014 - RNA, 15 nt, Human
gaaaauccucuggcu

SEQ ID NO: 2331015 - RNA, 14 nt, Human
gaaaauccucuggc

SEQ ID NO: 2331016 - RNA, 14 nt, Human
gaaaaucuaauauu

SEQ ID NO: 2331017 - RNA, 20 nt, Human
gaaaaucuaauauuaaaaau

SEQ ID NO: 2331018 - RNA, 21 nt, Human
gaaaaucuaauauuaaaaaua

SEQ ID NO: 2331019 - RNA, 23 nt, Human
gaaaaucuaauauuaaaaauaug

SEQ ID NO: 2331020 - RNA, 13 nt, Human
gaaaaugaauaau

SEQ ID NO: 2331021 - RNA, 18 nt, Human
gaaaaucuuauaauuuaa

SEQ ID NO: 2331022 - RNA, 15 nt, Human
ccuuggacuugagga

SEQ ID NO: 2331023 - RNA, 18 nt, Human
ccuugaggaaacaacagc

SEQ ID NO: 2331024 - RNA, 14 nt, Human
ccuugagcugagau

SEQ ID NO: 2331025 - RNA, 12 nt, Human
ccuugagcugag

SEQ ID NO: 2331026 - RNA, 15 nt, Human
ccuuggacucauuuu

SEQ ID NO: 2331027 - RNA, 23 nt, Human
ccuuggauaaugcuguugccuca

SEQ ID NO: 2331028 - RNA, 22 nt, Human
ccuuggauaaugcuguugccuc

SEQ ID NO: 2331029 - RNA, 18 nt, Human
ccuuggauaaugcuguug

SEQ ID NO: 2331030 - RNA, 23 nt, Human
ccuuggagggucccaagcugggc

SEQ ID NO: 2331031 - RNA, 18 nt, Human
ccuuggaggcugucuucu

SEQ ID NO: 2331032 - RNA, 16 nt, Human
ccuuggaggccagcca

SEQ ID NO: 2331033 - RNA, 12 nt, Human
ccuuggaggcca

SEQ ID NO: 2331034 - RNA, 13 nt, Human
ccuuggacuugag

SEQ ID NO: 2331035 - RNA, 15 nt, Human
ccuuggauugucccc

SEQ ID NO: 2331036 - RNA, 13 nt, Human
ccuuggccucaga

SEQ ID NO: 2331037 - RNA, 11 nt, Human
ccuuggccuca

SEQ ID NO: 2331038 - RNA, 14 nt, Human
ccuuggccucagaa

SEQ ID NO: 2331039 - RNA, 19 nt, Human
ccuuggccugucucauccc

SEQ ID NO: 2331040 - RNA, 15 nt, Human
ccuuggccugucuca

SEQ ID NO: 2331041 - RNA, 22 nt, Human
ccuuggcucaaguccucuuuuc

SEQ ID NO: 2331042 - RNA, 14 nt, Human
ccuugagacagcuu

SEQ ID NO: 2331043 - RNA, 19 nt, Human
ccuugagaaaccuuauugu

SEQ ID NO: 2331044 - RNA, 23 nt, Human
ccuugaccagcagaucccagcuc

SEQ ID NO: 2331045 - RNA, 12 nt, Human
ccuugaccaggc

SEQ ID NO: 2331046 - RNA, 14 nt, Human
ccuugagaaaccuu

SEQ ID NO: 2331047 - RNA, 21 nt, Human
ccuugaccagcagaucccagc

SEQ ID NO: 2331048 - RNA, 20 nt, Human
ccuugaccagcagaucccag

SEQ ID NO: 2331049 - RNA, 12 nt, Human
ccuugaccagca

SEQ ID NO: 2331050 - RNA, 23 nt, Human
ccuugacauuguagagcuucugg

SEQ ID NO: 2331051 - RNA, 17 nt, Human
ccuugagcuccccaaaa

SEQ ID NO: 2331052 - RNA, 21 nt, Human
ccuugagagaccaggcaaagc

SEQ ID NO: 2331053 - RNA, 18 nt, Human
ccuugagagaccaggcaa

SEQ ID NO: 2331054 - RNA, 20 nt, Human
ccuugagagaccaggcaaag

SEQ ID NO: 2331055 - RNA, 21 nt, Human
ccuugagaguaucaggucucc

SEQ ID NO: 2331056 - RNA, 19 nt, Human
ccuugagaccucagccaug

SEQ ID NO: 2331057 - RNA, 16 nt, Human
ccuugagagaccaggc

SEQ ID NO: 2331058 - RNA, 18 nt, Human
ccuugagaccucagccau

SEQ ID NO: 2331059 - RNA, 17 nt, Human
ccuugagaccucagcca

SEQ ID NO: 2331060 - RNA, 16 nt, Human
ccuugagaccucagcc

SEQ ID NO: 2331061 - RNA, 14 nt, Human
ccuugagaccucag

SEQ ID NO: 2331062 - RNA, 16 nt, Human
ccuugagaccacaggg

SEQ ID NO: 2331063 - RNA, 11 nt, Human
ccuugagacca

SEQ ID NO: 2331064 - RNA, 18 nt, Human
ccuugacagggcacaccg

SEQ ID NO: 2331065 - RNA, 21 nt, Human
ccuugacagggcacaccgggc

SEQ ID NO: 2331066 - RNA, 17 nt, Human
ccuucucuccagccccu

SEQ ID NO: 2331067 - RNA, 18 nt, Human
ccuucucuccagccccug

SEQ ID NO: 2331068 - RNA, 17 nt, Human
ccuugggcugcuccuca

SEQ ID NO: 2331069 - RNA, 15 nt, Human
ccuugggcugcuccu

SEQ ID NO: 2331070 - RNA, 14 nt, Human
ccuugggcugcucc

SEQ ID NO: 2331071 - RNA, 14 nt, Human
ccuuggggagcagg

SEQ ID NO: 2331072 - RNA, 13 nt, Human
ccuugggcucccu

SEQ ID NO: 2331073 - RNA, 18 nt, Human
ccuugggcggcugagagc

SEQ ID NO: 2331074 - RNA, 18 nt, Human
ccuuggcuugcccacgug

SEQ ID NO: 2331075 - RNA, 12 nt, Human
ccuugggcuccc

SEQ ID NO: 2331076 - RNA, 14 nt, Human
ccuugggcggcuga

SEQ ID NO: 2331077 - RNA, 17 nt, Human
ccuugggcggcugagag

SEQ ID NO: 2331078 - RNA, 20 nt, Human
ccuuggcuucaggggagucc

SEQ ID NO: 2331079 - RNA, 13 nt, Human
ccuuggcuugccc

SEQ ID NO: 2331080 - RNA, 16 nt, Human
ccuuggcuugcccacg

SEQ ID NO: 2331081 - RNA, 15 nt, Human
ccuuggcuugcccac

SEQ ID NO: 2331082 - RNA, 12 nt, Human
ccuuggcuggug

SEQ ID NO: 2331083 - RNA, 13 nt, Human
ccuuggcuggugc

SEQ ID NO: 2331084 - RNA, 14 nt, Human
ccuuggcuggugca

SEQ ID NO: 2331085 - RNA, 21 nt, Human
ccuuggcugugaggccccugg

SEQ ID NO: 2331086 - RNA, 21 nt, Human
ccuuggcuguuggcagugagu

SEQ ID NO: 2331087 - RNA, 14 nt, Human
ccuuggcugcaggg

SEQ ID NO: 2331088 - RNA, 23 nt, Human
ccuuggccugucucauccccagg

SEQ ID NO: 2331089 - RNA, 22 nt, Human
ccuuggccugucucauccccag

SEQ ID NO: 2331090 - RNA, 16 nt, Human
ccuuggcugcagggag

SEQ ID NO: 2331091 - RNA, 21 nt, Human
ccuugguguccaccuggcccc

SEQ ID NO: 2331092 - RNA, 20 nt, Human
ccuugguguccaccuggccc

SEQ ID NO: 2331093 - RNA, 19 nt, Human
ccuugguguccaccuggcc

SEQ ID NO: 2331094 - RNA, 18 nt, Human
ccuugguguccaccuggc

SEQ ID NO: 2331095 - RNA, 17 nt, Human
ccuugguguccaccugg

SEQ ID NO: 2331096 - RNA, 16 nt, Human
ccuugguguccaccug

SEQ ID NO: 2331097 - RNA, 15 nt, Human
ccuugguguccaccu

SEQ ID NO: 2331098 - RNA, 18 nt, Human
ccuugguguaguugaacu

SEQ ID NO: 2331099 - RNA, 18 nt, Human
ccuugggcugcuccucau

SEQ ID NO: 2331100 - RNA, 17 nt, Human
ccuuggggaauuuccuc

SEQ ID NO: 2331101 - RNA, 22 nt, Human
ccuuggggaauuuccucuauug

SEQ ID NO: 2331102 - RNA, 23 nt, Human
ccuuggggaauuuccucuauuga

SEQ ID NO: 2331103 - RNA, 19 nt, Human
ccuuggugucgggcaugac

SEQ ID NO: 2331104 - RNA, 20 nt, Human
ccuuggugucgggcaugaca

SEQ ID NO: 2331105 - RNA, 17 nt, Human
ccuugguucccuugugu

SEQ ID NO: 2331106 - RNA, 16 nt, Human
ccuugguucccccacu

SEQ ID NO: 2331107 - RNA, 14 nt, Human
ccuuguauuuaaau

SEQ ID NO: 2331108 - RNA, 13 nt, Human
ccuuguauuuaaa

SEQ ID NO: 2331109 - RNA, 16 nt, Human
ccuuguaauucuaaau

SEQ ID NO: 2331110 - RNA, 19 nt, Human
ccuuguaauucuaaaugaa

SEQ ID NO: 2331111 - RNA, 19 nt, Human
ccuucucuccagccccugg

SEQ ID NO: 2331112 - RNA, 16 nt, Human
ccuuccagcacccugc

SEQ ID NO: 2331113 - RNA, 17 nt, Human
ccuuccagcacccugca

SEQ ID NO: 2331114 - RNA, 15 nt, Human
ccuucauuuccuccg

SEQ ID NO: 2331115 - RNA, 14 nt, Human
ccuucauuuccucc

SEQ ID NO: 2331116 - RNA, 23 nt, Human
ccuucauugccuuaacuggagcc

SEQ ID NO: 2331117 - RNA, 18 nt, Human
ccuucauuucaggaggga

SEQ ID NO: 2331118 - RNA, 19 nt, Human
ccuucauuucaggagggau

SEQ ID NO: 2331119 - RNA, 13 nt, Human
ccuucauuuccuc

SEQ ID NO: 2331120 - RNA, 12 nt, Human
ccuucauuuccu

SEQ ID NO: 2331121 - RNA, 20 nt, Human
ccuucauugccuuaacugga

SEQ ID NO: 2331122 - RNA, 15 nt, Human
ccuucaugcauggaa

SEQ ID NO: 2331123 - RNA, 21 nt, Human
ccuucauuaccuuuuuugaua

SEQ ID NO: 2331124 - RNA, 22 nt, Human
ccuguggggauuucucccagcu

SEQ ID NO: 2331125 - RNA, 20 nt, Human
ccugugggggaagagcacag

SEQ ID NO: 2331126 - RNA, 20 nt, Human
ccuguggggauuucucccag

SEQ ID NO: 2331127 - RNA, 19 nt, Human
ccuguggggauuucuccca

SEQ ID NO: 2331128 - RNA, 23 nt, Human
ccugugggggaagagcacagccc

SEQ ID NO: 2331129 - RNA, 21 nt, Human
ccugugggggaagagcacagc

SEQ ID NO: 2331130 - RNA, 22 nt, Human
ccugugggggaagagcacagcc

SEQ ID NO: 2331131 - RNA, 13 nt, Human
ccuguguaacagc

SEQ ID NO: 2331132 - RNA, 12 nt, Human
ccuguggugcaa

SEQ ID NO: 2331133 - RNA, 22 nt, Human
ccuguguaacagcuccuuggga

SEQ ID NO: 2331134 - RNA, 20 nt, Human
ccuguguaacagcuccuugg

SEQ ID NO: 2331135 - RNA, 21 nt, Human
ccuguguaacagcuccuuggg

SEQ ID NO: 2331136 - RNA, 15 nt, Human
ccuguguaacagcuc

SEQ ID NO: 2331137 - RNA, 16 nt, Human
ccuguguaacagcucc

SEQ ID NO: 2331138 - RNA, 17 nt, Human
ccuguguaacagcuccu

SEQ ID NO: 2331139 - RNA, 18 nt, Human
ccuguguaacagcuccuu

SEQ ID NO: 2331140 - RNA, 21 nt, Human
ccuucaugcauggaaauuccc

SEQ ID NO: 2331141 - RNA, 12 nt, Human
ccuucaugcaug

SEQ ID NO: 2331142 - RNA, 21 nt, Human
ccuguguaaucauuucuuggg

SEQ ID NO: 2331143 - RNA, 20 nt, Human
ccuguggcggugccugggug

SEQ ID NO: 2331144 - RNA, 11 nt, Human
ccuguggcucu

SEQ ID NO: 2331145 - RNA, 23 nt, Human
ccuguggcucuacaacugagucc

SEQ ID NO: 2331146 - RNA, 19 nt, Human
ccuguggcggugccugggu

SEQ ID NO: 2331147 - RNA, 18 nt, Human
ccuguggcggugccuggg

SEQ ID NO: 2331148 - RNA, 17 nt, Human
ccuguggcggugccugg

SEQ ID NO: 2331149 - RNA, 16 nt, Human
ccuguggcggugccug

SEQ ID NO: 2331150 - RNA, 15 nt, Human
ccuguggcggugccu

SEQ ID NO: 2331151 - RNA, 23 nt, Human
ccuguggccugugucccaugacc

SEQ ID NO: 2331152 - RNA, 22 nt, Human
ccuguggcgccgucuccagggg

SEQ ID NO: 2331153 - RNA, 20 nt, Human
ccugugggcccccaaaugga

SEQ ID NO: 2331154 - RNA, 14 nt, Human
ccugugggagccug

SEQ ID NO: 2331155 - RNA, 15 nt, Human
ccugugggagccugc

SEQ ID NO: 2331156 - RNA, 18 nt, Human
ccuguggggaucucaggg

SEQ ID NO: 2331157 - RNA, 20 nt, Human
ccuguggggaucucaggggc

SEQ ID NO: 2331158 - RNA, 22 nt, Human
ccuguggggaucucaggggcug

SEQ ID NO: 2331159 - RNA, 20 nt, Human
ccuguggaugauaaaacaca

SEQ ID NO: 2331160 - RNA, 18 nt, Human
ccuguggaucaaauccag

SEQ ID NO: 2331161 - RNA, 17 nt, Human
ccuguggagcccgcacc

SEQ ID NO: 2331162 - RNA, 20 nt, Human
ccuguggaugagcccucaga

SEQ ID NO: 2331163 - RNA, 21 nt, Human
ccuguggcgccgucuccaggg

SEQ ID NO: 2331164 - RNA, 19 nt, Human
ccuguggccugugucccau

SEQ ID NO: 2331165 - RNA, 21 nt, Human
ccuguggccugugucccauga

SEQ ID NO: 2331166 - RNA, 13 nt, Human
ccuguggccugug

SEQ ID NO: 2331167 - RNA, 14 nt, Human
ccuguggccugugu

SEQ ID NO: 2331168 - RNA, 15 nt, Human
ccuguggccuguguc

SEQ ID NO: 2331169 - RNA, 18 nt, Human
ccuguggccuguguccca

SEQ ID NO: 2331170 - RNA, 18 nt, Human
ccuguggagcccgcaccc

SEQ ID NO: 2331171 - RNA, 15 nt, Human
ccuguggagcccgca

SEQ ID NO: 2331172 - RNA, 14 nt, Human
ccuguggagacugg

SEQ ID NO: 2331173 - RNA, 21 nt, Human
ccugugcugcccgucuucagc

SEQ ID NO: 2331174 - RNA, 11 nt, Human
ccuguggagac

SEQ ID NO: 2331175 - RNA, 17 nt, Human
ccugugcuccgugccuc

SEQ ID NO: 2331176 - RNA, 18 nt, Human
ccugugcuccgugccucc

SEQ ID NO: 2331177 - RNA, 19 nt, Human
ccugugcuccgugccucca

SEQ ID NO: 2331178 - RNA, 20 nt, Human
ccugugcuccgugccuccac

SEQ ID NO: 2331179 - RNA, 21 nt, Human
ccugugcuccgugccuccacc

SEQ ID NO: 2331180 - RNA, 22 nt, Human
ccugugcuccgugccuccacca

SEQ ID NO: 2331181 - RNA, 18 nt, Human
ccugugcugacggaagcc

SEQ ID NO: 2331182 - RNA, 17 nt, Human
ccugugccuuuugccau

SEQ ID NO: 2331183 - RNA, 15 nt, Human
ccugugccugacccu

SEQ ID NO: 2331184 - RNA, 21 nt, Human
ccuguccucacugcucccuga

SEQ ID NO: 2331185 - RNA, 23 nt, Human
ccugugcuacuuugccuuuugca

SEQ ID NO: 2331186 - RNA, 16 nt, Human
ccuguccucacugcuc

SEQ ID NO: 2331187 - RNA, 15 nt, Human
ccugugcuacuuugc

SEQ ID NO: 2331188 - RNA, 17 nt, Human
ccugugcuacuuugccu

SEQ ID NO: 2331189 - RNA, 19 nt, Human
ccugugcuacuuugccuuu

SEQ ID NO: 2331190 - RNA, 16 nt, Human
ccugucccucucaggc

SEQ ID NO: 2331191 - RNA, 15 nt, Human
ccugucccucucagg

SEQ ID NO: 2331192 - RNA, 20 nt, Human
ccugucccucccaccucugu

SEQ ID NO: 2331193 - RNA, 21 nt, Human
ccugucccucccaccucugug

SEQ ID NO: 2331194 - RNA, 16 nt, Human
ccugucccucccaccu

SEQ ID NO: 2331195 - RNA, 17 nt, Human
ccugucccucccaccuc

SEQ ID NO: 2331196 - RNA, 18 nt, Human
ccugucccucccaccucu

SEQ ID NO: 2331197 - RNA, 19 nt, Human
ccugucccucccaccucug

SEQ ID NO: 2331198 - RNA, 23 nt, Human
ccugucccuucucuuaauuuaau

SEQ ID NO: 2331199 - RNA, 22 nt, Human
ccugucccucucaggcaugccu

SEQ ID NO: 2331200 - RNA, 20 nt, Human
ccugugccucugggacugga

SEQ ID NO: 2331201 - RNA, 13 nt, Human
ccuguccucacug

SEQ ID NO: 2331202 - RNA, 14 nt, Human
ccuguccucacugc

SEQ ID NO: 2331203 - RNA, 15 nt, Human
ccuguccucacugcu

SEQ ID NO: 2331204 - RNA, 12 nt, Human
ccuguccucacu

SEQ ID NO: 2331205 - RNA, 15 nt, Human
ccuucucucaucucu

SEQ ID NO: 2331206 - RNA, 16 nt, Human
ccuucucucaucucuu

SEQ ID NO: 2331207 - RNA, 17 nt, Human
ccuucucucaucucuua

SEQ ID NO: 2331208 - RNA, 21 nt, Human
ccuucucucaucucuuagcuc

SEQ ID NO: 2331209 - RNA, 15 nt, Human
ccuucuccucuugua

SEQ ID NO: 2331210 - RNA, 16 nt, Human
ccuucuccucuuguaa

SEQ ID NO: 2331211 - RNA, 21 nt, Human
ccuucuccuccccacccgccc

SEQ ID NO: 2331212 - RNA, 16 nt, Human
ccuucucccucauuuc

SEQ ID NO: 2331213 - RNA, 23 nt, Human
ccuucucccccccggggcugggu

SEQ ID NO: 2331214 - RNA, 14 nt, Human
ccuucucccccccg

SEQ ID NO: 2331215 - RNA, 16 nt, Human
ccuucucccccccggg

SEQ ID NO: 2331216 - RNA, 22 nt, Human
ccuucucccccccggggcuggg

SEQ ID NO: 2331217 - RNA, 12 nt, Human
ccuucucuccag

SEQ ID NO: 2331218 - RNA, 13 nt, Human
ccuucucuccagc

SEQ ID NO: 2331219 - RNA, 15 nt, Human
ccuucucuccagccc

SEQ ID NO: 2331220 - RNA, 16 nt, Human
ccuucucuccagcccc

SEQ ID NO: 2331221 - RNA, 16 nt, Human
ccuucucccacacugc

SEQ ID NO: 2331222 - RNA, 22 nt, Human
ccuucuccaucucucuggcccu

SEQ ID NO: 2331223 - RNA, 16 nt, Human
ccuucucccaccccug

SEQ ID NO: 2331224 - RNA, 14 nt, Human
ccuucucccaugag

SEQ ID NO: 2331225 - RNA, 14 nt, Human
ccuucucccacacu

SEQ ID NO: 2331226 - RNA, 21 nt, Human
ccuucucaucacuccccucca

SEQ ID NO: 2331227 - RNA, 14 nt, Human
ccuucuccaucucu

SEQ ID NO: 2331228 - RNA, 17 nt, Human
ccuucuccaucucucug

SEQ ID NO: 2331229 - RNA, 21 nt, Human
ccuucuccaucucucuggccc

SEQ ID NO: 2331230 - RNA, 22 nt, Human
ccuucuccauccacaugggagc

SEQ ID NO: 2331231 - RNA, 16 nt, Human
ccuucuccauccacau

SEQ ID NO: 2331232 - RNA, 13 nt, Human
ccuucuccaucca

SEQ ID NO: 2331233 - RNA, 11 nt, Human
ccuucuccauc

SEQ ID NO: 2331234 - RNA, 15 nt, Human
ccuucuccaaaugag

SEQ ID NO: 2331235 - RNA, 13 nt, Human
ccuucucaucacu

SEQ ID NO: 2331236 - RNA, 17 nt, Human
ccuucucaucacucccc

SEQ ID NO: 2331237 - RNA, 14 nt, Human
ccuucucagaaucu

SEQ ID NO: 2331238 - RNA, 22 nt, Human
ccuucuaaagguguugucccuu

SEQ ID NO: 2331239 - RNA, 19 nt, Human
ccuucguuuacuaugccug

SEQ ID NO: 2331240 - RNA, 17 nt, Human
ccuucguuuacuaugcc

SEQ ID NO: 2331241 - RNA, 14 nt, Human
ccuucuaaaggugu

SEQ ID NO: 2331242 - RNA, 13 nt, Human
ccuucuaaaggug

SEQ ID NO: 2331243 - RNA, 23 nt, Human
ccuucguuuacuaugccuguguc

SEQ ID NO: 2331244 - RNA, 22 nt, Human
ccuucguuuacuaugccugugu

SEQ ID NO: 2331245 - RNA, 20 nt, Human
ccuucguuuacuaugccugu

SEQ ID NO: 2331246 - RNA, 13 nt, Human
ccuuccaggcccc

SEQ ID NO: 2331247 - RNA, 17 nt, Human
ccuuccagcuccuguaa

SEQ ID NO: 2331248 - RNA, 23 nt, Human
ccuuccauagccuaaucccuggg

SEQ ID NO: 2331249 - RNA, 15 nt, Human
ccuuccaucccagag

SEQ ID NO: 2331250 - RNA, 15 nt, Human
ccuuccauaauuaug

SEQ ID NO: 2331251 - RNA, 12 nt, Human
ccuuccauaauu

SEQ ID NO: 2331252 - RNA, 11 nt, Human
ccuuccauaau

SEQ ID NO: 2331253 - RNA, 22 nt, Human
ccuuccaguguccuuagaacau

SEQ ID NO: 2331254 - RNA, 16 nt, Human
ccuuccagucaggaug

SEQ ID NO: 2331255 - RNA, 13 nt, Human
ccuuccaggggug

SEQ ID NO: 2331256 - RNA, 12 nt, Human
ccuuccagcucc

SEQ ID NO: 2331257 - RNA, 13 nt, Human
ccuuccagcuccu

SEQ ID NO: 2331258 - RNA, 15 nt, Human
ccuuccagcuccugu

SEQ ID NO: 2331259 - RNA, 16 nt, Human
ccuuccagcuccugua

SEQ ID NO: 2331260 - RNA, 19 nt, Human
ccuuccaucccuacccccu

SEQ ID NO: 2331261 - RNA, 12 nt, Human
ccuuccaucccu

SEQ ID NO: 2331262 - RNA, 17 nt, Human
ccuuccaucucgccacc

SEQ ID NO: 2331263 - RNA, 23 nt, Human
ccuuccauggugugaucgucuga

SEQ ID NO: 2331264 - RNA, 17 nt, Human
ccuuccauggacuuugu

SEQ ID NO: 2331265 - RNA, 18 nt, Human
ccuuccaugucgccucug

SEQ ID NO: 2331266 - RNA, 21 nt, Human
ccuuccuggagcccagaggag

SEQ ID NO: 2331267 - RNA, 20 nt, Human
ccuuccuggagacugcccag

SEQ ID NO: 2331268 - RNA, 17 nt, Human
ccuuccugucuuccugc

SEQ ID NO: 2331269 - RNA, 19 nt, Human
ccuuccugucuuccugcau

SEQ ID NO: 2331270 - RNA, 15 nt, Human
ccuuccuguucugaa

SEQ ID NO: 2331271 - RNA, 19 nt, Human
ccuuccuguuuuucacauu

SEQ ID NO: 2331272 - RNA, 17 nt, Human
ccuuccuguuuuucaca

SEQ ID NO: 2331273 - RNA, 19 nt, Human
ccuuccuggggcaucuggc

SEQ ID NO: 2331274 - RNA, 16 nt, Human
ccuuccugucccaccu

SEQ ID NO: 2331275 - RNA, 19 nt, Human
ccuuccugucccaccucuu

SEQ ID NO: 2331276 - RNA, 17 nt, Human
ccuucggccuccauccu

SEQ ID NO: 2331277 - RNA, 16 nt, Human
ccuucggccuccaucc

SEQ ID NO: 2331278 - RNA, 14 nt, Human
ccuuccuucccugg

SEQ ID NO: 2331279 - RNA, 16 nt, Human
ccuucgucuuucccau

SEQ ID NO: 2331280 - RNA, 17 nt, Human
ccuucgucuuucccaug

SEQ ID NO: 2331281 - RNA, 16 nt, Human
ccuucgggcugugccc

SEQ ID NO: 2331282 - RNA, 15 nt, Human
ccuucgggcugugcc

SEQ ID NO: 2331283 - RNA, 18 nt, Human
ccuucggccuccauccug

SEQ ID NO: 2331284 - RNA, 14 nt, Human
ccuucgggcugugc

SEQ ID NO: 2331285 - RNA, 17 nt, Human
ccuuccuguucugaacu

SEQ ID NO: 2331286 - RNA, 13 nt, Human
ccuuccuucccac

SEQ ID NO: 2331287 - RNA, 22 nt, Human
ccuuccuguuuuucacauuuuc

SEQ ID NO: 2331288 - RNA, 19 nt, Human
cgaauccccucccugucaa

SEQ ID NO: 2331289 - RNA, 22 nt, Human
cgaaucucuuuuugcuuucgaa

SEQ ID NO: 2331290 - RNA, 12 nt, Human
cgaaucucugug

SEQ ID NO: 2331291 - RNA, 16 nt, Human
cgaaucucugugccuu

SEQ ID NO: 2331292 - RNA, 15 nt, Human
cgaaugaucuuucuu

SEQ ID NO: 2331293 - RNA, 13 nt, Human
cgaaugugcaggu

SEQ ID NO: 2331294 - RNA, 21 nt, Human
cgaaugugcagguuuguuaca

SEQ ID NO: 2331295 - RNA, 18 nt, Human
cgagacuugguuucaaaa

SEQ ID NO: 2331296 - RNA, 16 nt, Human
cgaauuaauagcuuuu

SEQ ID NO: 2331297 - RNA, 22 nt, Human
cgaauuaauagcuuuuauugua

SEQ ID NO: 2331298 - RNA, 15 nt, Human
cgaauguguacaacu

SEQ ID NO: 2331299 - RNA, 23 nt, Human
cgaauguguacaacuuaaguugg

SEQ ID NO: 2331300 - RNA, 14 nt, Human
cgaauuaauagcuu

SEQ ID NO: 2331301 - RNA, 18 nt, Human
cgaaucagcuauuuacug

SEQ ID NO: 2331302 - RNA, 22 nt, Human
cgaaguggacuggccccugggu

SEQ ID NO: 2331303 - RNA, 21 nt, Human
cgaauauuaugcccaguuucu

SEQ ID NO: 2331304 - RNA, 19 nt, Human
cgaaguggacuggccccug

SEQ ID NO: 2331305 - RNA, 17 nt, Human
cgaaucauuuguucaaa

SEQ ID NO: 2331306 - RNA, 14 nt, Human
cgaaucauuuguuc

SEQ ID NO: 2331307 - RNA, 17 nt, Human
cgaaucuacuaauucca

SEQ ID NO: 2331308 - RNA, 18 nt, Human
cgaauccccucccuguca

SEQ ID NO: 2331309 - RNA, 15 nt, Human
cgaauauugcugaug

SEQ ID NO: 2331310 - RNA, 17 nt, Human
cgaauauugcugauggu

SEQ ID NO: 2331311 - RNA, 16 nt, Human
cgaauagcugggacua

SEQ ID NO: 2331312 - RNA, 11 nt, Human
cgaauauugcu

SEQ ID NO: 2331313 - RNA, 12 nt, Human
cgaauauugcug

SEQ ID NO: 2331314 - RNA, 14 nt, Human
cgaauauugcugau

SEQ ID NO: 2331315 - RNA, 17 nt, Human
cgaagcucagcccaccc

SEQ ID NO: 2331316 - RNA, 16 nt, Human
cgaagcucagcccacc

SEQ ID NO: 2331317 - RNA, 15 nt, Human
cgaagcucagcccac

SEQ ID NO: 2331318 - RNA, 23 nt, Human
cgaagcgcgccacucgcuucccc

SEQ ID NO: 2331319 - RNA, 13 nt, Human
cgaagcucagccc

SEQ ID NO: 2331320 - RNA, 18 nt, Human
cgaagcucagcccacccc

SEQ ID NO: 2331321 - RNA, 12 nt, Human
cgaagcucuggc

SEQ ID NO: 2331322 - RNA, 14 nt, Human
cgaagcucuggcug

SEQ ID NO: 2331323 - RNA, 15 nt, Human
cgaagcucuggcuga

SEQ ID NO: 2331324 - RNA, 23 nt, Human
cgaaggcagugcaagagacucug

SEQ ID NO: 2331325 - RNA, 20 nt, Human
cgaagcucuggcugaacccu

SEQ ID NO: 2331326 - RNA, 18 nt, Human
cgaagcuuugaaggccga

SEQ ID NO: 2331327 - RNA, 16 nt, Human
cgaaggugcuggaggu

SEQ ID NO: 2331328 - RNA, 13 nt, Human
cgaaggugcugga

SEQ ID NO: 2331329 - RNA, 13 nt, Human
cgaaggggcccug

SEQ ID NO: 2331330 - RNA, 15 nt, Human
cgaauagcugggacu

SEQ ID NO: 2331331 - RNA, 22 nt, Human
cgaacauggaacucauuccugc

SEQ ID NO: 2331332 - RNA, 20 nt, Human
cgaacauggaacucauuccu

SEQ ID NO: 2331333 - RNA, 16 nt, Human
cgaagcgcgccacucg

SEQ ID NO: 2331334 - RNA, 14 nt, Human
cgaagcccaggccc

SEQ ID NO: 2331335 - RNA, 11 nt, Human
cgaagcgcgcc

SEQ ID NO: 2331336 - RNA, 21 nt, Human
cgaacacccucgaagcgcgcc

SEQ ID NO: 2331337 - RNA, 18 nt, Human
cgaacacccucgaagcgc

SEQ ID NO: 2331338 - RNA, 22 nt, Human
cgaacacccucgaagcgcgcca

SEQ ID NO: 2331339 - RNA, 19 nt, Human
cgaacauccaaccuuccca

SEQ ID NO: 2331340 - RNA, 13 nt, Human
cgaaauguuauuu

SEQ ID NO: 2331341 - RNA, 14 nt, Human
cgaaauguuauuuu

SEQ ID NO: 2331342 - RNA, 22 nt, Human
cgaaauguuauuuuuuaauuau

SEQ ID NO: 2331343 - RNA, 23 nt, Human
cgaacauguuuuucuucucccuc

SEQ ID NO: 2331344 - RNA, 21 nt, Human
cgaacauguuuuucuucuccc

SEQ ID NO: 2331345 - RNA, 23 nt, Human
cgaaagggacuuggaagcuccgc

SEQ ID NO: 2331346 - RNA, 23 nt, Human
ccuuuuuugauaaaguuucucag

SEQ ID NO: 2331347 - RNA, 20 nt, Human
ccuuuuuuggcuuuagacac

SEQ ID NO: 2331348 - RNA, 11 nt, Human
cgaaauaacaa

SEQ ID NO: 2331349 - RNA, 16 nt, Human
cgaaauaacaauguua

SEQ ID NO: 2331350 - RNA, 17 nt, Human
cgaaauaacaauguuaa

SEQ ID NO: 2331351 - RNA, 20 nt, Human
cgaaauaacaauguuaagga

SEQ ID NO: 2331352 - RNA, 17 nt, Human
ccuuuuuuggcugcuga

SEQ ID NO: 2331353 - RNA, 18 nt, Human
ccuuuuuuggcugcugaa

SEQ ID NO: 2331354 - RNA, 20 nt, Human
ccuuuuuuggcugcugaagg

SEQ ID NO: 2331355 - RNA, 22 nt, Human
ccuuuuuuggcugcugaaggcu

SEQ ID NO: 2331356 - RNA, 21 nt, Human
ccuugucguugacuuuaggga

SEQ ID NO: 2331357 - RNA, 21 nt, Human
ccuuguauuuaaauauuaaau

SEQ ID NO: 2331358 - RNA, 16 nt, Human
ccuuguauuuaaauau

SEQ ID NO: 2331359 - RNA, 13 nt, Human
ccuugucugagau

SEQ ID NO: 2331360 - RNA, 18 nt, Human
ccuugugccuggcucaga

SEQ ID NO: 2331361 - RNA, 17 nt, Human
ccuugugccuggcucag

SEQ ID NO: 2331362 - RNA, 16 nt, Human
ccuuguggccugggcc

SEQ ID NO: 2331363 - RNA, 22 nt, Human
ccuuguggccugggccuccuca

SEQ ID NO: 2331364 - RNA, 23 nt, Human
ccuugugauguggcaauaaauuu

SEQ ID NO: 2331365 - RNA, 11 nt, Human
ccuugugccug

SEQ ID NO: 2331366 - RNA, 16 nt, Human
ccuugugccuggcuca

SEQ ID NO: 2331367 - RNA, 18 nt, Human
ccuuuggggggggcccgc

SEQ ID NO: 2331368 - RNA, 14 nt, Human
ccuuugguucuggc

SEQ ID NO: 2331369 - RNA, 21 nt, Human
ccuuuguaaauugucagaugc

SEQ ID NO: 2331370 - RNA, 20 nt, Human
ccuuugguucuggccagaau

SEQ ID NO: 2331371 - RNA, 15 nt, Human
ccuuugguucuggcc

SEQ ID NO: 2331372 - RNA, 19 nt, Human
ccuuugggaggcugaggcg

SEQ ID NO: 2331373 - RNA, 14 nt, Human
ccuuugggaagggg

SEQ ID NO: 2331374 - RNA, 14 nt, Human
ccuuugggcccagg

SEQ ID NO: 2331375 - RNA, 16 nt, Human
ccuuugggcccaggga

SEQ ID NO: 2331376 - RNA, 17 nt, Human
ccuuugggcccagggac

SEQ ID NO: 2331377 - RNA, 18 nt, Human
ccuuugucaucuuucuuc

SEQ ID NO: 2331378 - RNA, 19 nt, Human
ccuuugucaucauuguaua

SEQ ID NO: 2331379 - RNA, 23 nt, Human
ccuuugucaucauuguauauaug

SEQ ID NO: 2331380 - RNA, 14 nt, Human
ccuuugucccagaa

SEQ ID NO: 2331381 - RNA, 14 nt, Human
ccuuuguccccacc

SEQ ID NO: 2331382 - RNA, 16 nt, Human
ccuuuguccccaccgc

SEQ ID NO: 2331383 - RNA, 18 nt, Human
ccuuuguccccaccgcag

SEQ ID NO: 2331384 - RNA, 16 nt, Human
ccuuugguuuuuuucu

SEQ ID NO: 2331385 - RNA, 23 nt, Human
ccuuuguaaauugucagaugcug

SEQ ID NO: 2331386 - RNA, 24 nt, Human
ccuuuguauucucuccuguaccuc

SEQ ID NO: 2331387 - RNA, 23 nt, Human
ccuuuguauucucuccuguaccu

SEQ ID NO: 2331388 - RNA, 22 nt, Human
ccuuuguauucucuccuguacc

SEQ ID NO: 2331389 - RNA, 19 nt, Human
ccuuuguuuuuuuuuccug

SEQ ID NO: 2331390 - RNA, 19 nt, Human
ccuuuguuuuuaugaagaa

SEQ ID NO: 2331391 - RNA, 23 nt, Human
ccuuuguuuugauguuuguggcc

SEQ ID NO: 2331392 - RNA, 13 nt, Human
ccuuuguguuucu

SEQ ID NO: 2331393 - RNA, 12 nt, Human
ccuuugugcugu

SEQ ID NO: 2331394 - RNA, 13 nt, Human
ccuuugugcugug

SEQ ID NO: 2331395 - RNA, 18 nt, Human
ccuuuuaacaccugaugu

SEQ ID NO: 2331396 - RNA, 19 nt, Human
ccuuuuuuauacauaaaca

SEQ ID NO: 2331397 - RNA, 20 nt, Human
ccuuuguuuuuaugaagaaa

SEQ ID NO: 2331398 - RNA, 22 nt, Human
ccuuuuuuauuuuuuuaagcug

SEQ ID NO: 2331399 - RNA, 22 nt, Human
ccuuuuuucacggaaguuuuca

SEQ ID NO: 2331400 - RNA, 15 nt, Human
ccuuuuuuggcugcu

SEQ ID NO: 2331401 - RNA, 12 nt, Human
ccuuuuuugauc

SEQ ID NO: 2331402 - RNA, 13 nt, Human
ccuuuuuugauca

SEQ ID NO: 2331403 - RNA, 23 nt, Human
ccuuugucaucuuucuucuauuu

SEQ ID NO: 2331404 - RNA, 14 nt, Human
ccuuugucuuguca

SEQ ID NO: 2331405 - RNA, 14 nt, Human
ccuuugugaggaag

SEQ ID NO: 2331406 - RNA, 22 nt, Human
ccuuuguccccaccgcagacag

SEQ ID NO: 2331407 - RNA, 23 nt, Human
ccuuuguccccaccgcagacagg

SEQ ID NO: 2331408 - RNA, 15 nt, Human
ccuuugugaggaagc

SEQ ID NO: 2331409 - RNA, 16 nt, Human
ccuuugugaggaagcc

SEQ ID NO: 2331410 - RNA, 17 nt, Human
ccuuugugaggaagccg

SEQ ID NO: 2331411 - RNA, 23 nt, Human
ccuuugugaggaagccgcugggg

SEQ ID NO: 2331412 - RNA, 20 nt, Human
cggcccuccuacccugcgcc

SEQ ID NO: 2331413 - RNA, 23 nt, Human
cggcccuccuacccugcgcccag

SEQ ID NO: 2331414 - RNA, 22 nt, Human
cggcccuccuacccugcgccca

SEQ ID NO: 2331415 - RNA, 13 nt, Human
cggcccugggcuc

SEQ ID NO: 2331416 - RNA, 18 nt, Human
cggcccugggcucggagg

SEQ ID NO: 2331417 - RNA, 12 nt, Human
cggcccuggggc

SEQ ID NO: 2331418 - RNA, 11 nt, Human
cggcccugggg

SEQ ID NO: 2331419 - RNA, 22 nt, Human
cggcccugggcucggaggcugc

SEQ ID NO: 2331420 - RNA, 18 nt, Human
cggccgcauucccugagu

SEQ ID NO: 2331421 - RNA, 15 nt, Human
cggccgcauucccug

SEQ ID NO: 2331422 - RNA, 13 nt, Human
cggccgcauuccc

SEQ ID NO: 2331423 - RNA, 16 nt, Human
cggccgcauucccuga

SEQ ID NO: 2331424 - RNA, 12 nt, Human
cggccgcuccag

SEQ ID NO: 2331425 - RNA, 15 nt, Human
cggccucccaaagug

SEQ ID NO: 2331426 - RNA, 21 nt, Human
cggccuccguccaggagccug

SEQ ID NO: 2331427 - RNA, 22 nt, Human
cggccuccguccaggagccugg

SEQ ID NO: 2331428 - RNA, 16 nt, Human
cggccugaugcucccu

SEQ ID NO: 2331429 - RNA, 15 nt, Human
cggccugaugcuccc

SEQ ID NO: 2331430 - RNA, 21 nt, Human
cggccucucuggccucccacc

SEQ ID NO: 2331431 - RNA, 14 nt, Human
cggcuggcagccca

SEQ ID NO: 2331432 - RNA, 13 nt, Human
cggccucuaaccc

SEQ ID NO: 2331433 - RNA, 15 nt, Human
cggccucuaacccca

SEQ ID NO: 2331434 - RNA, 17 nt, Human
cggccucuaaccccagg

SEQ ID NO: 2331435 - RNA, 18 nt, Human
cggccucuaaccccaggc

SEQ ID NO: 2331436 - RNA, 19 nt, Human
cggccucuaaccccaggcc

SEQ ID NO: 2331437 - RNA, 20 nt, Human
cggccucuaaccccaggccc

SEQ ID NO: 2331438 - RNA, 21 nt, Human
cggccucuaaccccaggcccc

SEQ ID NO: 2331439 - RNA, 22 nt, Human
cggccucuaaccccaggccccg

SEQ ID NO: 2331440 - RNA, 13 nt, Human
cggccucucuggc

SEQ ID NO: 2331441 - RNA, 14 nt, Human
cggccucucuggcc

SEQ ID NO: 2331442 - RNA, 15 nt, Human
cggccucucuggccu

SEQ ID NO: 2331443 - RNA, 16 nt, Human
cggccucucuggccuc

SEQ ID NO: 2331444 - RNA, 18 nt, Human
cggccucucuggccuccc

SEQ ID NO: 2331445 - RNA, 19 nt, Human
cggccucucuggccuccca

SEQ ID NO: 2331446 - RNA, 23 nt, Human
cggaucaccgagaguagccgaga

SEQ ID NO: 2331447 - RNA, 18 nt, Human
cggaucaccgagaguagc

SEQ ID NO: 2331448 - RNA, 13 nt, Human
cggaguugggggu

SEQ ID NO: 2331449 - RNA, 19 nt, Human
cggagugagaagcuuugcc

SEQ ID NO: 2331450 - RNA, 23 nt, Human
cggagugaagaggggcagcccuu

SEQ ID NO: 2331451 - RNA, 18 nt, Human
cggagugaagaggggcag

SEQ ID NO: 2331452 - RNA, 19 nt, Human
cggagugaagaggggcagc

SEQ ID NO: 2331453 - RNA, 20 nt, Human
cggagugaagaggggcagcc

SEQ ID NO: 2331454 - RNA, 22 nt, Human
cggagugaagaggggcagcccu

SEQ ID NO: 2331455 - RNA, 11 nt, Human
cggccaggcca

SEQ ID NO: 2331456 - RNA, 22 nt, Human
cggccagccccuggccccagga

SEQ ID NO: 2331457 - RNA, 18 nt, Human
cggcccuaccagcgcccg

SEQ ID NO: 2331458 - RNA, 21 nt, Human
cggcccuaccagcgcccgcug

SEQ ID NO: 2331459 - RNA, 20 nt, Human
cggcccuaccagcgcccgcu

SEQ ID NO: 2331460 - RNA, 14 nt, Human
cggcccuaugcaug

SEQ ID NO: 2331461 - RNA, 12 nt, Human
cggccaggccag

SEQ ID NO: 2331462 - RNA, 20 nt, Human
cggccaggccagagggagug

SEQ ID NO: 2331463 - RNA, 12 nt, Human
cgggaagcggag

SEQ ID NO: 2331464 - RNA, 23 nt, Human
cgggaagagaggaguucaaugau

SEQ ID NO: 2331465 - RNA, 24 nt, Human
cgggaagagaggaguucaaugauc

SEQ ID NO: 2331466 - RNA, 18 nt, Human
cgggaagagaggaguuca

SEQ ID NO: 2331467 - RNA, 19 nt, Human
cgggaagagaggaguucaa

SEQ ID NO: 2331468 - RNA, 20 nt, Human
cgggaagagaggaguucaau

SEQ ID NO: 2331469 - RNA, 22 nt, Human
cgggaagagaggaguucaauga

SEQ ID NO: 2331470 - RNA, 16 nt, Human
cgggaagggggcuggg

SEQ ID NO: 2331471 - RNA, 19 nt, Human
cgggaagggggcugggaca

SEQ ID NO: 2331472 - RNA, 20 nt, Human
cgggaagggggcugggacau

SEQ ID NO: 2331473 - RNA, 23 nt, Human
cgggaaggaggguuagggagggg

SEQ ID NO: 2331474 - RNA, 23 nt, Human
cgggaagcaucuuccagaagugu

SEQ ID NO: 2331475 - RNA, 16 nt, Human
cgggaaggucaccagc

SEQ ID NO: 2331476 - RNA, 14 nt, Human
cgggaaggaggguu

SEQ ID NO: 2331477 - RNA, 12 nt, Human
cgggaaggaggg

SEQ ID NO: 2331478 - RNA, 18 nt, Human
cgggaauuuucaucuagg

SEQ ID NO: 2331479 - RNA, 17 nt, Human
cgggaaggucaccagca

SEQ ID NO: 2331480 - RNA, 15 nt, Human
cgggacaccugcccu

SEQ ID NO: 2331481 - RNA, 20 nt, Human
cgggaaggucaccagcacca

SEQ ID NO: 2331482 - RNA, 15 nt, Human
cgggaacagacaaca

SEQ ID NO: 2331483 - RNA, 14 nt, Human
cgggaaagaagagc

SEQ ID NO: 2331484 - RNA, 20 nt, Human
cgggaaagccagugacucca

SEQ ID NO: 2331485 - RNA, 22 nt, Human
cgggaaaagcagcccuuggcca

SEQ ID NO: 2331486 - RNA, 23 nt, Human
cgggaaaagcagcccuuggccag

SEQ ID NO: 2331487 - RNA, 16 nt, Human
cggcuuuucucagcug

SEQ ID NO: 2331488 - RNA, 19 nt, Human
cggcuucaugccagcuacu

SEQ ID NO: 2331489 - RNA, 22 nt, Human
cgggaacaguguuucccauaau

SEQ ID NO: 2331490 - RNA, 13 nt, Human
cgggaacaguguu

SEQ ID NO: 2331491 - RNA, 22 nt, Human
cgggaaagccagugacuccagg

SEQ ID NO: 2331492 - RNA, 20 nt, Human
cgggaacaguguuucccaua

SEQ ID NO: 2331493 - RNA, 14 nt, Human
cgggaaccucacuc

SEQ ID NO: 2331494 - RNA, 20 nt, Human
cgggaaccucacucuugcca

SEQ ID NO: 2331495 - RNA, 12 nt, Human
cgggaagagagg

SEQ ID NO: 2331496 - RNA, 14 nt, Human
cgggaagagaggag

SEQ ID NO: 2331497 - RNA, 23 nt, Human
cggcuggcagcccaccccucaac

SEQ ID NO: 2331498 - RNA, 13 nt, Human
cggcuggccuggc

SEQ ID NO: 2331499 - RNA, 17 nt, Human
cggccugaugcucccuc

SEQ ID NO: 2331500 - RNA, 20 nt, Human
cggccucucuggccucccac

SEQ ID NO: 2331501 - RNA, 14 nt, Human
cggcuggccuggcc

SEQ ID NO: 2331502 - RNA, 23 nt, Human
cggcuuagacuucgacucaggau

SEQ ID NO: 2331503 - RNA, 15 nt, Human
cggcuucaugccagc

SEQ ID NO: 2331504 - RNA, 16 nt, Human
cggcuucaugccagcu

SEQ ID NO: 2331505 - RNA, 20 nt, Human
cgggaauuuucaucuaggau

SEQ ID NO: 2331506 - RNA, 15 nt, Human
cgcggggacauuggg

SEQ ID NO: 2331507 - RNA, 22 nt, Human
cgcgaaaguaucaccagggugc

SEQ ID NO: 2331508 - RNA, 16 nt, Human
cgcguuguaaaauaua

SEQ ID NO: 2331509 - RNA, 17 nt, Human
cgcguuguaaaauauag

SEQ ID NO: 2331510 - RNA, 15 nt, Human
cgcuaaagagcccuu

SEQ ID NO: 2331511 - RNA, 19 nt, Human
cgcuaaagagcccuugccu

SEQ ID NO: 2331512 - RNA, 21 nt, Human
cgcuaaagagcccuugccucc

SEQ ID NO: 2331513 - RNA, 18 nt, Human
cgcuacccgggaaggggg

SEQ ID NO: 2331514 - RNA, 22 nt, Human
cgcuaaagagcccuugccuccc

SEQ ID NO: 2331515 - RNA, 17 nt, Human
cgcuacccgggaagggg

SEQ ID NO: 2331516 - RNA, 21 nt, Human
cgcuacccgggaagggggcug

SEQ ID NO: 2331517 - RNA, 24 nt, Human
cgcuacccgggaagggggcuggga

SEQ ID NO: 2331518 - RNA, 19 nt, Human
cgcgguggcucacgccugu

SEQ ID NO: 2331519 - RNA, 23 nt, Human
cgcgggagccaugcgcccccucc

SEQ ID NO: 2331520 - RNA, 15 nt, Human
cgcgacaaugcaaac

SEQ ID NO: 2331521 - RNA, 13 nt, Human
cgccuuucccagg

SEQ ID NO: 2331522 - RNA, 12 nt, Human
cgccuuguucuu

SEQ ID NO: 2331523 - RNA, 14 nt, Human
cgccuuucccaacu

SEQ ID NO: 2331524 - RNA, 19 nt, Human
cgccuucucccccccgggg

SEQ ID NO: 2331525 - RNA, 14 nt, Human
cgcgacaaugcaaa

SEQ ID NO: 2331526 - RNA, 12 nt, Human
cgcccguccugc

SEQ ID NO: 2331527 - RNA, 14 nt, Human
cgcccguccugccu

SEQ ID NO: 2331528 - RNA, 13 nt, Human
cgccuucuccccc

SEQ ID NO: 2331529 - RNA, 21 nt, Human
cgccuucucccccccggggcu

SEQ ID NO: 2331530 - RNA, 15 nt, Human
cgcccguccugccug

SEQ ID NO: 2331531 - RNA, 12 nt, Human
cgcccaaggccc

SEQ ID NO: 2331532 - RNA, 18 nt, Human
cgcccaacuaauuuuugu

SEQ ID NO: 2331533 - RNA, 17 nt, Human
cgcccaaagccagacag

SEQ ID NO: 2331534 - RNA, 14 nt, Human
cgcccaacccuucc

SEQ ID NO: 2331535 - RNA, 15 nt, Human
cgcccaacccuuccc

SEQ ID NO: 2331536 - RNA, 16 nt, Human
cgcccaacccuucccc

SEQ ID NO: 2331537 - RNA, 13 nt, Human
cgcccagucugga

SEQ ID NO: 2331538 - RNA, 19 nt, Human
cgcccagucuggaaugcag

SEQ ID NO: 2331539 - RNA, 21 nt, Human
cgcccagucuggaaugcagug

SEQ ID NO: 2331540 - RNA, 13 nt, Human
cgccccuuccccc

SEQ ID NO: 2331541 - RNA, 14 nt, Human
cgcccgcccacugu

SEQ ID NO: 2331542 - RNA, 16 nt, Human
cgcccgcccacugucc

SEQ ID NO: 2331543 - RNA, 18 nt, Human
cgcccgcccacuguccug

SEQ ID NO: 2331544 - RNA, 19 nt, Human
cgcccgcccacuguccugg

SEQ ID NO: 2331545 - RNA, 21 nt, Human
cgcccgcccacuguccugggc

SEQ ID NO: 2331546 - RNA, 13 nt, Human
cgcccgcgcccgc

SEQ ID NO: 2331547 - RNA, 12 nt, Human
cgcccgcgcccu

SEQ ID NO: 2331548 - RNA, 18 nt, Human
cgcccggcuaauuuuugu

SEQ ID NO: 2331549 - RNA, 13 nt, Human
cgcccgcugggcu

SEQ ID NO: 2331550 - RNA, 14 nt, Human
cgcccgcugggcug

SEQ ID NO: 2331551 - RNA, 16 nt, Human
cgcccgcugggcugag

SEQ ID NO: 2331552 - RNA, 23 nt, Human
cgcccgcugggcugagccccuac

SEQ ID NO: 2331553 - RNA, 12 nt, Human
cgcagccaaggc

SEQ ID NO: 2331554 - RNA, 13 nt, Human
cgcagccaaggcc

SEQ ID NO: 2331555 - RNA, 13 nt, Human
cgcagcccugcuu

SEQ ID NO: 2331556 - RNA, 15 nt, Human
cgcagcccugcuuug

SEQ ID NO: 2331557 - RNA, 24 nt, Human
cgcagcccugcuuugggcugcccu

SEQ ID NO: 2331558 - RNA, 18 nt, Human
cgcagcccugcagagggc

SEQ ID NO: 2331559 - RNA, 19 nt, Human
cgcagcccugcagagggca

SEQ ID NO: 2331560 - RNA, 12 nt, Human
cgcaggaagcug

SEQ ID NO: 2331561 - RNA, 18 nt, Human
cgccauucucaagcccug

SEQ ID NO: 2331562 - RNA, 14 nt, Human
cgccauugccacca

SEQ ID NO: 2331563 - RNA, 15 nt, Human
cgccauugcacucca

SEQ ID NO: 2331564 - RNA, 20 nt, Human
cgccauggcuuccaaggugg

SEQ ID NO: 2331565 - RNA, 17 nt, Human
cgccauugccaccagga

SEQ ID NO: 2331566 - RNA, 16 nt, Human
cgccauugccaccagg

SEQ ID NO: 2331567 - RNA, 18 nt, Human
cgccauugccaccaggag

SEQ ID NO: 2331568 - RNA, 19 nt, Human
cgccauugcacuccagccu

SEQ ID NO: 2331569 - RNA, 16 nt, Human
cgcagccucccucuga

SEQ ID NO: 2331570 - RNA, 20 nt, Human
cgagaggggaagaguguacu

SEQ ID NO: 2331571 - RNA, 21 nt, Human
cgcagccaaggccgaagcucu

SEQ ID NO: 2331572 - RNA, 13 nt, Human
cgcagcucuugcc

SEQ ID NO: 2331573 - RNA, 17 nt, Human
cgcagcucuugcccuuc

SEQ ID NO: 2331574 - RNA, 18 nt, Human
cgcagcucuugcccuucc

SEQ ID NO: 2331575 - RNA, 19 nt, Human
cgcagcucuugcccuuccc

SEQ ID NO: 2331576 - RNA, 23 nt, Human
cgcagcucuugcccuucccuguc

SEQ ID NO: 2331577 - RNA, 20 nt, Human
cgcagcucuugcccuucccu

SEQ ID NO: 2331578 - RNA, 15 nt, Human
cgcaggaacucccag

SEQ ID NO: 2331579 - RNA, 17 nt, Human
cgcaggaacucccagca

SEQ ID NO: 2331580 - RNA, 18 nt, Human
cgcaggaacucccagcaa

SEQ ID NO: 2331581 - RNA, 18 nt, Human
cggaauccuguccucagc

SEQ ID NO: 2331582 - RNA, 17 nt, Human
cggaauccuguccucag

SEQ ID NO: 2331583 - RNA, 16 nt, Human
cggacuuagcugggag

SEQ ID NO: 2331584 - RNA, 21 nt, Human
cggacagccacggccaggcca

SEQ ID NO: 2331585 - RNA, 22 nt, Human
cggacagccacggccaggccag

SEQ ID NO: 2331586 - RNA, 17 nt, Human
cggacuuagcugggaga

SEQ ID NO: 2331587 - RNA, 14 nt, Human
cggacuuuucugca

SEQ ID NO: 2331588 - RNA, 15 nt, Human
cggacuuuucugcaa

SEQ ID NO: 2331589 - RNA, 15 nt, Human
cggagaaaggaaggg

SEQ ID NO: 2331590 - RNA, 17 nt, Human
cggagaaaggaagggcu

SEQ ID NO: 2331591 - RNA, 16 nt, Human
cggacuuuucugcaaa

SEQ ID NO: 2331592 - RNA, 22 nt, Human
cggagucguggggugugcuggg

SEQ ID NO: 2331593 - RNA, 23 nt, Human
cggagucguggggugugcuggga

SEQ ID NO: 2331594 - RNA, 14 nt, Human
cggagugaagaggg

SEQ ID NO: 2331595 - RNA, 15 nt, Human
cggaauccuguccuc

SEQ ID NO: 2331596 - RNA, 13 nt, Human
cgcuuucuaugua

SEQ ID NO: 2331597 - RNA, 22 nt, Human
cgcuuucuggaaaagaggaguu

SEQ ID NO: 2331598 - RNA, 20 nt, Human
cggacagccacggccaggcc

SEQ ID NO: 2331599 - RNA, 21 nt, Human
cggaaucacucuguccuugga

SEQ ID NO: 2331600 - RNA, 16 nt, Human
cggaauaguuggcuag

SEQ ID NO: 2331601 - RNA, 17 nt, Human
cggaauaguuggcuagg

SEQ ID NO: 2331602 - RNA, 17 nt, Human
cgcuucugaaugcugcu

SEQ ID NO: 2331603 - RNA, 20 nt, Human
cgcuugugcagaaaacauug

SEQ ID NO: 2331604 - RNA, 14 nt, Human
cgcuuuccugaauc

SEQ ID NO: 2331605 - RNA, 16 nt, Human
cgcuuucuagcuguug

SEQ ID NO: 2331606 - RNA, 22 nt, Human
cgcuuucuagcuguugagcugu

SEQ ID NO: 2331607 - RNA, 16 nt, Human
cgcuuucuacccagcg

SEQ ID NO: 2331608 - RNA, 14 nt, Human
cgcuuucuacccag

SEQ ID NO: 2331609 - RNA, 16 nt, Human
cgcuucuugccucugu

SEQ ID NO: 2331610 - RNA, 17 nt, Human
cgcuucuugccucugug

SEQ ID NO: 2331611 - RNA, 22 nt, Human
cgcuugugcagaaaacauuguu

SEQ ID NO: 2331612 - RNA, 19 nt, Human
cgcuccccgccuguucccc

SEQ ID NO: 2331613 - RNA, 18 nt, Human
cgcuccugccgcagagcu

SEQ ID NO: 2331614 - RNA, 22 nt, Human
cgcuccucccucugaggcugua

SEQ ID NO: 2331615 - RNA, 19 nt, Human
cgcuccugccgcagagcug

SEQ ID NO: 2331616 - RNA, 20 nt, Human
cgcuccugccgcagagcugg

SEQ ID NO: 2331617 - RNA, 14 nt, Human
cgcucccagugucu

SEQ ID NO: 2331618 - RNA, 21 nt, Human
cgcucccagugucuuccugug

SEQ ID NO: 2331619 - RNA, 22 nt, Human
cgcucccagugucuuccugugg

SEQ ID NO: 2331620 - RNA, 14 nt, Human
cgcuccccgccugu

SEQ ID NO: 2331621 - RNA, 16 nt, Human
cgcuccccgccuguuc

SEQ ID NO: 2331622 - RNA, 17 nt, Human
cgcuccccgccuguucc

SEQ ID NO: 2331623 - RNA, 18 nt, Human
cgcuccccgccuguuccc

SEQ ID NO: 2331624 - RNA, 14 nt, Human
cgcuccugucugcc

SEQ ID NO: 2331625 - RNA, 16 nt, Human
cgcugucuccagaccc

SEQ ID NO: 2331626 - RNA, 11 nt, Human
cgcugugcugc

SEQ ID NO: 2331627 - RNA, 13 nt, Human
cgcugugcugccc

SEQ ID NO: 2331628 - RNA, 14 nt, Human
cgcugugcugcccu

SEQ ID NO: 2331629 - RNA, 22 nt, Human
cgcugucuccagacccccaccc

SEQ ID NO: 2331630 - RNA, 20 nt, Human
cgcugucuccagacccccac

SEQ ID NO: 2331631 - RNA, 16 nt, Human
cgcugugagccccugg

SEQ ID NO: 2331632 - RNA, 19 nt, Human
cgcugugagccccuggucc

SEQ ID NO: 2331633 - RNA, 19 nt, Human
cgcugugcugcccugccca

SEQ ID NO: 2331634 - RNA, 21 nt, Human
cgcugugcugcccugcccacc

SEQ ID NO: 2331635 - RNA, 23 nt, Human
cgcugugcugcccugcccaccug

SEQ ID NO: 2331636 - RNA, 12 nt, Human
cgcuucugacug

SEQ ID NO: 2331637 - RNA, 15 nt, Human
cgcuucuugccucug

SEQ ID NO: 2331638 - RNA, 14 nt, Human
cgcuucugccugca

SEQ ID NO: 2331639 - RNA, 20 nt, Human
cgcuucccccauagccaccc

SEQ ID NO: 2331640 - RNA, 18 nt, Human
cgcuucccccauagccac

SEQ ID NO: 2331641 - RNA, 17 nt, Human
cgcuuccggcuccugug

SEQ ID NO: 2331642 - RNA, 20 nt, Human
cgcuuccggcuccugugcuu

SEQ ID NO: 2331643 - RNA, 14 nt, Human
cgcugugggcaggu

SEQ ID NO: 2331644 - RNA, 20 nt, Human
cgcuguguguuaguucccaa

SEQ ID NO: 2331645 - RNA, 13 nt, Human
cgcuguugcugaa

SEQ ID NO: 2331646 - RNA, 14 nt, Human
cgcuguugcugaau

SEQ ID NO: 2331647 - RNA, 17 nt, Human
cgcuguugcugaauagg

SEQ ID NO: 2331648 - RNA, 16 nt, Human
cgcuucccccauagcc

SEQ ID NO: 2331649 - RNA, 13 nt, Human
cgcuucccccaua

SEQ ID NO: 2331650 - RNA, 14 nt, Human
cgcuguucacccac

SEQ ID NO: 2331651 - RNA, 17 nt, Human
cgcuuaaaggugucuuc

SEQ ID NO: 2331652 - RNA, 17 nt, Human
cgaggagguaaugaauu

SEQ ID NO: 2331653 - RNA, 20 nt, Human
cgaggaggcuccagagggca

SEQ ID NO: 2331654 - RNA, 19 nt, Human
cgaggaggcuccagagggc

SEQ ID NO: 2331655 - RNA, 19 nt, Human
cgaggacuguauuugugac

SEQ ID NO: 2331656 - RNA, 20 nt, Human
cgaggacuguauuugugacu

SEQ ID NO: 2331657 - RNA, 21 nt, Human
cgaggacuguauuugugacua

SEQ ID NO: 2331658 - RNA, 16 nt, Human
cgaggacagggaggug

SEQ ID NO: 2331659 - RNA, 18 nt, Human
cgaggacuguauuuguga

SEQ ID NO: 2331660 - RNA, 17 nt, Human
cgaggacccagacccag

SEQ ID NO: 2331661 - RNA, 20 nt, Human
cgaggacccagacccagugg

SEQ ID NO: 2331662 - RNA, 21 nt, Human
cgaggacaugaaacuccaccu

SEQ ID NO: 2331663 - RNA, 12 nt, Human
cgaggacccaga

SEQ ID NO: 2331664 - RNA, 13 nt, Human
cgaggacccagac

SEQ ID NO: 2331665 - RNA, 14 nt, Human
cgaggacccagacc

SEQ ID NO: 2331666 - RNA, 15 nt, Human
cgaugcaaugaacac

SEQ ID NO: 2331667 - RNA, 23 nt, Human
cgaugaauuuggagacucugugg

SEQ ID NO: 2331668 - RNA, 23 nt, Human
cgaggccuaccccgcagacaccu

SEQ ID NO: 2331669 - RNA, 13 nt, Human
cgaggcccgcaug

SEQ ID NO: 2331670 - RNA, 19 nt, Human
cgaggcccucgggcccagc

SEQ ID NO: 2331671 - RNA, 20 nt, Human
cgaggcccucgggcccagcc

SEQ ID NO: 2331672 - RNA, 17 nt, Human
cgaggccuaccccgcag

SEQ ID NO: 2331673 - RNA, 21 nt, Human
cgaggcccucgggcccagccc

SEQ ID NO: 2331674 - RNA, 22 nt, Human
cgaggcagggucaggagagggg

SEQ ID NO: 2331675 - RNA, 11 nt, Human
cgaggccagua

SEQ ID NO: 2331676 - RNA, 19 nt, Human
cgaggccaguaccuuucca

SEQ ID NO: 2331677 - RNA, 14 nt, Human
cgaggcagggucag

SEQ ID NO: 2331678 - RNA, 13 nt, Human
cgaggcagaggac

SEQ ID NO: 2331679 - RNA, 15 nt, Human
cgaggcagaggacag

SEQ ID NO: 2331680 - RNA, 12 nt, Human
cgaggcagagga

SEQ ID NO: 2331681 - RNA, 14 nt, Human
cgaggacagggagg

SEQ ID NO: 2331682 - RNA, 13 nt, Human
cgagccuggcucc

SEQ ID NO: 2331683 - RNA, 18 nt, Human
cgagcccugguggcagug

SEQ ID NO: 2331684 - RNA, 16 nt, Human
cgagagggagagagag

SEQ ID NO: 2331685 - RNA, 23 nt, Human
cgagcccuguggaugagcccuca

SEQ ID NO: 2331686 - RNA, 14 nt, Human
cgagccgggccugg

SEQ ID NO: 2331687 - RNA, 15 nt, Human
cgagccgggccuggg

SEQ ID NO: 2331688 - RNA, 17 nt, Human
cgagccgggccuggggc

SEQ ID NO: 2331689 - RNA, 18 nt, Human
cgagccggggaguuucuu

SEQ ID NO: 2331690 - RNA, 22 nt, Human
cgagccggggaguuucuuuccu

SEQ ID NO: 2331691 - RNA, 19 nt, Human
cgagccucugucacugcag

SEQ ID NO: 2331692 - RNA, 20 nt, Human
cgagccucugucacugcagg

SEQ ID NO: 2331693 - RNA, 23 nt, Human
cgagccucugucacugcaggcac

SEQ ID NO: 2331694 - RNA, 20 nt, Human
cgagagccugcucccccacc

SEQ ID NO: 2331695 - RNA, 19 nt, Human
cgagagccugcucccccac

SEQ ID NO: 2331696 - RNA, 15 nt, Human
cgagagccugcuccc

SEQ ID NO: 2331697 - RNA, 14 nt, Human
cgagagccugcucc

SEQ ID NO: 2331698 - RNA, 13 nt, Human
cgagagccugcuc

SEQ ID NO: 2331699 - RNA, 21 nt, Human
cgagagacuuguggccuggga

SEQ ID NO: 2331700 - RNA, 21 nt, Human
cgagagagcaccccucucugc

SEQ ID NO: 2331701 - RNA, 19 nt, Human
cgagcccugguggcagugg

SEQ ID NO: 2331702 - RNA, 21 nt, Human
cgagagccugcucccccaccc

SEQ ID NO: 2331703 - RNA, 14 nt, Human
cgagaggaggggcc

SEQ ID NO: 2331704 - RNA, 15 nt, Human
cgagaggaggggccc

SEQ ID NO: 2331705 - RNA, 14 nt, Human
cgagaggcagagaa

SEQ ID NO: 2331706 - RNA, 15 nt, Human
cgagaggcagagaaa

SEQ ID NO: 2331707 - RNA, 13 nt, Human
cgagagggagaga

SEQ ID NO: 2331708 - RNA, 14 nt, Human
cgagagggagagag

SEQ ID NO: 2331709 - RNA, 17 nt, Human
cgcacugugacccccag

SEQ ID NO: 2331710 - RNA, 23 nt, Human
cgcacuucgggaggucgaggcag

SEQ ID NO: 2331711 - RNA, 17 nt, Human
cgcacugggcuugggga

SEQ ID NO: 2331712 - RNA, 14 nt, Human
cgcagaugauccau

SEQ ID NO: 2331713 - RNA, 22 nt, Human
cgcacugugacccccagcuccg

SEQ ID NO: 2331714 - RNA, 14 nt, Human
cgcagagcuggccg

SEQ ID NO: 2331715 - RNA, 16 nt, Human
cgcagcaggaggccag

SEQ ID NO: 2331716 - RNA, 18 nt, Human
cgcagcaggaggccaggc

SEQ ID NO: 2331717 - RNA, 17 nt, Human
cgcagcaggaggccagg

SEQ ID NO: 2331718 - RNA, 19 nt, Human
cgcagcauauucaggaagc

SEQ ID NO: 2331719 - RNA, 20 nt, Human
cgcagcauauucaggaagcu

SEQ ID NO: 2331720 - RNA, 15 nt, Human
cgcagcccugcagag

SEQ ID NO: 2331721 - RNA, 17 nt, Human
cgcagcccugcagaggg

SEQ ID NO: 2331722 - RNA, 21 nt, Human
cgaugggcccaauucuuacaa

SEQ ID NO: 2331723 - RNA, 18 nt, Human
cgauggcuuugccagcuu

SEQ ID NO: 2331724 - RNA, 18 nt, Human
cgauggauauauguuuuu

SEQ ID NO: 2331725 - RNA, 22 nt, Human
cgaugcugcuuuccccuguggg

SEQ ID NO: 2331726 - RNA, 16 nt, Human
cgcaccuaccaucagg

SEQ ID NO: 2331727 - RNA, 16 nt, Human
cgcaccucccauccua

SEQ ID NO: 2331728 - RNA, 12 nt, Human
cgcaccucccau

SEQ ID NO: 2331729 - RNA, 19 nt, Human
cgcaccuaccaucagggac

SEQ ID NO: 2331730 - RNA, 23 nt, Human
cgaugcuccagccaaccccugug

SEQ ID NO: 2331731 - RNA, 22 nt, Human
cgaugcuccagccaaccccugu

SEQ ID NO: 2331732 - RNA, 20 nt, Human
cgaugcuccagccaaccccu

SEQ ID NO: 2331733 - RNA, 18 nt, Human
cgaugcuccagccaaccc

SEQ ID NO: 2331734 - RNA, 12 nt, Human
cgaugcugcuuu

SEQ ID NO: 2331735 - RNA, 18 nt, Human
cgaugcugcuuuccccug

SEQ ID NO: 2331736 - RNA, 20 nt, Human
cgaugcugcuuuccccugug

SEQ ID NO: 2331737 - RNA, 21 nt, Human
cgaugcugcuuuccccugugg

SEQ ID NO: 2331738 - RNA, 14 nt, Human
cgaugcuccagcca

SEQ ID NO: 2331739 - RNA, 18 nt, Human
cgcacgugggucuucagg

SEQ ID NO: 2331740 - RNA, 22 nt, Human
cgcacuacaugugguuuauaga

SEQ ID NO: 2331741 - RNA, 18 nt, Human
cgcacucacccaugugcc

SEQ ID NO: 2331742 - RNA, 16 nt, Human
cgcacuccaugagcac

SEQ ID NO: 2331743 - RNA, 17 nt, Human
cgcacuccaugagcacc

SEQ ID NO: 2331744 - RNA, 13 nt, Human
cgcacugggcuug

SEQ ID NO: 2331745 - RNA, 17 nt, Human
cgcaccugcccccuggu

SEQ ID NO: 2331746 - RNA, 16 nt, Human
cgcaccugcccccugg

SEQ ID NO: 2331747 - RNA, 15 nt, Human
cgcaccugccucagg

SEQ ID NO: 2331748 - RNA, 14 nt, Human
cgcaccugccucag

SEQ ID NO: 2331749 - RNA, 18 nt, Human
cgcaccucccauccuaau

SEQ ID NO: 2331750 - RNA, 11 nt, Human
cgcacgcacac

SEQ ID NO: 2331751 - RNA, 16 nt, Human
cgcaccugccucagga

SEQ ID NO: 2331752 - RNA, 13 nt, Human
cgcacgcacacac

SEQ ID NO: 2331753 - RNA, 14 nt, Human
cgcacgcacacaca

SEQ ID NO: 2331754 - RNA, 15 nt, Human
cgcacgcacacacac

SEQ ID NO: 2331755 - RNA, 16 nt, Human
cgcacgcacacacaca

SEQ ID NO: 2331756 - RNA, 18 nt, Human
cgcccacaggaagccugc

SEQ ID NO: 2331757 - RNA, 21 nt, Human
ccugggguggggauagggagc

SEQ ID NO: 2331758 - RNA, 20 nt, Human
ccuggggugugggaggcccg

SEQ ID NO: 2331759 - RNA, 15 nt, Human
ccuggggugggguca

SEQ ID NO: 2331760 - RNA, 20 nt, Human
ccuggguaaaugcagcguga

SEQ ID NO: 2331761 - RNA, 22 nt, Human
ccuggguaaaugcagcgugaag

SEQ ID NO: 2331762 - RNA, 14 nt, Human
ccugggucagucug

SEQ ID NO: 2331763 - RNA, 15 nt, Human
ccugggucagucugg

SEQ ID NO: 2331764 - RNA, 19 nt, Human
ccugggucagucugguggg

SEQ ID NO: 2331765 - RNA, 21 nt, Human
ccugggucagucuggugggag

SEQ ID NO: 2331766 - RNA, 22 nt, Human
ccugggucagucuggugggagg

SEQ ID NO: 2331767 - RNA, 23 nt, Human
ccugggcagccaggcugccaagg

SEQ ID NO: 2331768 - RNA, 12 nt, Human
ccuggggggcag

SEQ ID NO: 2331769 - RNA, 18 nt, Human
ccugggggcugggcagag

SEQ ID NO: 2331770 - RNA, 23 nt, Human
ccugggaguuuuguauucaucuu

SEQ ID NO: 2331771 - RNA, 22 nt, Human
ccugggguauaaaacuuuccuc

SEQ ID NO: 2331772 - RNA, 14 nt, Human
ccuggggucuggag

SEQ ID NO: 2331773 - RNA, 20 nt, Human
ccugggggcugggcagagga

SEQ ID NO: 2331774 - RNA, 21 nt, Human
ccugggggcugggcagaggaa

SEQ ID NO: 2331775 - RNA, 19 nt, Human
ccugggggcugggcagagg

SEQ ID NO: 2331776 - RNA, 17 nt, Human
ccugggacugcugcuuc

SEQ ID NO: 2331777 - RNA, 20 nt, Human
ccugggaccuccccugaggc

SEQ ID NO: 2331778 - RNA, 17 nt, Human
ccugggagaaccucagg

SEQ ID NO: 2331779 - RNA, 17 nt, Human
ccugggaccuccccuga

SEQ ID NO: 2331780 - RNA, 19 nt, Human
ccugggaccuccccugagg

SEQ ID NO: 2331781 - RNA, 19 nt, Human
ccugggagaaccucaggcu

SEQ ID NO: 2331782 - RNA, 18 nt, Human
ccugggagaaccucaggc

SEQ ID NO: 2331783 - RNA, 19 nt, Human
ccugggaggaaauuugaau

SEQ ID NO: 2331784 - RNA, 22 nt, Human
ccugggaggucaaggcugcagu

SEQ ID NO: 2331785 - RNA, 16 nt, Human
ccugggagugagcugg

SEQ ID NO: 2331786 - RNA, 19 nt, Human
ccugggcagccaggcugcc

SEQ ID NO: 2331787 - RNA, 18 nt, Human
ccugggcagccaggcugc

SEQ ID NO: 2331788 - RNA, 17 nt, Human
ccugggcagccaggcug

SEQ ID NO: 2331789 - RNA, 23 nt, Human
ccugggagguggagguugcagug

SEQ ID NO: 2331790 - RNA, 16 nt, Human
ccugggcagaaggaag

SEQ ID NO: 2331791 - RNA, 18 nt, Human
ccugggagugagcugguu

SEQ ID NO: 2331792 - RNA, 15 nt, Human
ccugggcagaaggaa

SEQ ID NO: 2331793 - RNA, 16 nt, Human
ccuggcccacugcauc

SEQ ID NO: 2331794 - RNA, 15 nt, Human
ccuggcccagcggcc

SEQ ID NO: 2331795 - RNA, 20 nt, Human
ccuggcccagcggccccucc

SEQ ID NO: 2331796 - RNA, 21 nt, Human
ccuggcccagcggccccuccc

SEQ ID NO: 2331797 - RNA, 12 nt, Human
ccuggcccagcu

SEQ ID NO: 2331798 - RNA, 13 nt, Human
ccuggcccagcuc

SEQ ID NO: 2331799 - RNA, 14 nt, Human
ccuggcccagcucc

SEQ ID NO: 2331800 - RNA, 15 nt, Human
ccuggcccagcuccc

SEQ ID NO: 2331801 - RNA, 20 nt, Human
ccuggcccagcucccccggg

SEQ ID NO: 2331802 - RNA, 16 nt, Human
ccuggcccagcucccc

SEQ ID NO: 2331803 - RNA, 12 nt, Human
ccuggccccaug

SEQ ID NO: 2331804 - RNA, 13 nt, Human
ccuggccccagga

SEQ ID NO: 2331805 - RNA, 12 nt, Human
ccuggccccagg

SEQ ID NO: 2331806 - RNA, 17 nt, Human
ccuggcccaucagugua

SEQ ID NO: 2331807 - RNA, 18 nt, Human
ccuggcccaucaguguac

SEQ ID NO: 2331808 - RNA, 20 nt, Human
ccuggcccaucaguguaccc

SEQ ID NO: 2331809 - RNA, 22 nt, Human
ccuggcucccaugaccauacug

SEQ ID NO: 2331810 - RNA, 15 nt, Human
ccuggcucccaugac

SEQ ID NO: 2331811 - RNA, 14 nt, Human
ccuggcucccauga

SEQ ID NO: 2331812 - RNA, 21 nt, Human
ccuggcucccaugaccauacu

SEQ ID NO: 2331813 - RNA, 23 nt, Human
ccuggcuccugaggggcaucugc

SEQ ID NO: 2331814 - RNA, 15 nt, Human
ccuggcuccugaggg

SEQ ID NO: 2331815 - RNA, 18 nt, Human
ccuggcuccuacccaccg

SEQ ID NO: 2331816 - RNA, 21 nt, Human
ccuggcuccguccaggagccu

SEQ ID NO: 2331817 - RNA, 23 nt, Human
ccuggcuucuggagcccuugggu

SEQ ID NO: 2331818 - RNA, 22 nt, Human
ccuggcuucuggagcccuuggg

SEQ ID NO: 2331819 - RNA, 21 nt, Human
ccuggcuucuggagcccuugg

SEQ ID NO: 2331820 - RNA, 20 nt, Human
ccuggcuucuggagcccuug

SEQ ID NO: 2331821 - RNA, 22 nt, Human
ccuggcuuguaacuccaccaac

SEQ ID NO: 2331822 - RNA, 20 nt, Human
ccuggcuuguaacuccacca

SEQ ID NO: 2331823 - RNA, 18 nt, Human
ccuggcuuguaacuccac

SEQ ID NO: 2331824 - RNA, 17 nt, Human
ccuggcuuuucacugcu

SEQ ID NO: 2331825 - RNA, 16 nt, Human
ccuggcuuuucacugc

SEQ ID NO: 2331826 - RNA, 12 nt, Human
ccugggaagggg

SEQ ID NO: 2331827 - RNA, 18 nt, Human
ccugggaaauauucccua

SEQ ID NO: 2331828 - RNA, 17 nt, Human
ccugggaaauauucccu

SEQ ID NO: 2331829 - RNA, 14 nt, Human
ccugggaauguauu

SEQ ID NO: 2331830 - RNA, 21 nt, Human
ccugcuaauuccccagauugc

SEQ ID NO: 2331831 - RNA, 20 nt, Human
ccugccuguugggccaggag

SEQ ID NO: 2331832 - RNA, 18 nt, Human
ccugccuguugggccagg

SEQ ID NO: 2331833 - RNA, 19 nt, Human
ccugccuguugggccagga

SEQ ID NO: 2331834 - RNA, 18 nt, Human
ccugcuagacacauuuuu

SEQ ID NO: 2331835 - RNA, 13 nt, Human
ccuggacuuuccu

SEQ ID NO: 2331836 - RNA, 14 nt, Human
ccuggacuuuccug

SEQ ID NO: 2331837 - RNA, 13 nt, Human
ccugcuacucugu

SEQ ID NO: 2331838 - RNA, 16 nt, Human
ccugcuacucuguucc

SEQ ID NO: 2331839 - RNA, 23 nt, Human
ccugccuguggcgccgucuccag

SEQ ID NO: 2331840 - RNA, 19 nt, Human
ccugcuacaacuucagcag

SEQ ID NO: 2331841 - RNA, 20 nt, Human
ccugcuacaacuucagcagu

SEQ ID NO: 2331842 - RNA, 17 nt, Human
ccugcuaauuccccaga

SEQ ID NO: 2331843 - RNA, 19 nt, Human
ccuggcacccggccccugc

SEQ ID NO: 2331844 - RNA, 16 nt, Human
ccuggagaacuagaga

SEQ ID NO: 2331845 - RNA, 23 nt, Human
ccuggagaacuagaaccuggagg

SEQ ID NO: 2331846 - RNA, 17 nt, Human
ccuggagaagcugaugc

SEQ ID NO: 2331847 - RNA, 12 nt, Human
ccuggagaacua

SEQ ID NO: 2331848 - RNA, 13 nt, Human
ccuggagaacuag

SEQ ID NO: 2331849 - RNA, 15 nt, Human
ccuggacuuuccugc

SEQ ID NO: 2331850 - RNA, 16 nt, Human
ccuggacuuuccugca

SEQ ID NO: 2331851 - RNA, 17 nt, Human
ccuggacuuuccugcaa

SEQ ID NO: 2331852 - RNA, 19 nt, Human
ccuggacuuuccugcaacu

SEQ ID NO: 2331853 - RNA, 20 nt, Human
ccuggcacccggccccugcu

SEQ ID NO: 2331854 - RNA, 21 nt, Human
ccuggcacccggccccugcug

SEQ ID NO: 2331855 - RNA, 12 nt, Human
ccuggcacugcu

SEQ ID NO: 2331856 - RNA, 22 nt, Human
ccuggcacuauaauguaagcuc

SEQ ID NO: 2331857 - RNA, 15 nt, Human
ccuggccaccacccc

SEQ ID NO: 2331858 - RNA, 17 nt, Human
ccuggccaccacccccc

SEQ ID NO: 2331859 - RNA, 21 nt, Human
ccuggccaccaccccccacuc

SEQ ID NO: 2331860 - RNA, 13 nt, Human
ccuggccaccucu

SEQ ID NO: 2331861 - RNA, 14 nt, Human
ccuggccaccucuc

SEQ ID NO: 2331862 - RNA, 15 nt, Human
ccuggccaccucucu

SEQ ID NO: 2331863 - RNA, 23 nt, Human
ccuggcaugggaaugaaugucag

SEQ ID NO: 2331864 - RNA, 19 nt, Human
ccuggcauuauguccacug

SEQ ID NO: 2331865 - RNA, 13 nt, Human
ccuggcaugggaa

SEQ ID NO: 2331866 - RNA, 21 nt, Human
ccuggcagguuagaaccuaga

SEQ ID NO: 2331867 - RNA, 19 nt, Human
ccuggcagguuagaaccua

SEQ ID NO: 2331868 - RNA, 20 nt, Human
ccuggcagguuagaaccuag

SEQ ID NO: 2331869 - RNA, 21 nt, Human
ccuggcaucgcaccauucuga

SEQ ID NO: 2331870 - RNA, 23 nt, Human
ccuggcaucgcaccauucugacu

SEQ ID NO: 2331871 - RNA, 21 nt, Human
ccuggcaggcugucuggccag

SEQ ID NO: 2331872 - RNA, 22 nt, Human
ccuggcaggaugacccugcgaa

SEQ ID NO: 2331873 - RNA, 11 nt, Human
ccuggagaagc

SEQ ID NO: 2331874 - RNA, 15 nt, Human
ccuggcacugcugug

SEQ ID NO: 2331875 - RNA, 17 nt, Human
ccuggcacugcugugcu

SEQ ID NO: 2331876 - RNA, 13 nt, Human
ccuggcacugcuu

SEQ ID NO: 2331877 - RNA, 16 nt, Human
ccuggcacugcuucca

SEQ ID NO: 2331878 - RNA, 21 nt, Human
ccuggccagaugcaccagccc

SEQ ID NO: 2331879 - RNA, 23 nt, Human
ccuggccagaugcaccagcccuu

SEQ ID NO: 2331880 - RNA, 20 nt, Human
ccuggccagaugcaccagcc

SEQ ID NO: 2331881 - RNA, 17 nt, Human
ccuggccaccugaggug

SEQ ID NO: 2331882 - RNA, 18 nt, Human
ccuggccaccugaggugg

SEQ ID NO: 2331883 - RNA, 18 nt, Human
ccuggccaccucucuccu

SEQ ID NO: 2331884 - RNA, 12 nt, Human
ccuggccaccug

SEQ ID NO: 2331885 - RNA, 13 nt, Human
ccuggccaccuga

SEQ ID NO: 2331886 - RNA, 16 nt, Human
ccuggccaccugaggu

SEQ ID NO: 2331887 - RNA, 14 nt, Human
ccuggcccacugca

SEQ ID NO: 2331888 - RNA, 13 nt, Human
ccuggcccacugc

SEQ ID NO: 2331889 - RNA, 13 nt, Human
ccuggccaggagc

SEQ ID NO: 2331890 - RNA, 15 nt, Human
ccuggccagccuaca

SEQ ID NO: 2331891 - RNA, 21 nt, Human
ccuggcccacagcaggugcug

SEQ ID NO: 2331892 - RNA, 19 nt, Human
ccuggccaucccacaagug

SEQ ID NO: 2331893 - RNA, 17 nt, Human
ccuggccaucccacaag

SEQ ID NO: 2331894 - RNA, 13 nt, Human
ccuggccacgccc

SEQ ID NO: 2331895 - RNA, 14 nt, Human
ccuggcaugggaau

SEQ ID NO: 2331896 - RNA, 23 nt, Human
ccuguauauagcccagccaggcc

SEQ ID NO: 2331897 - RNA, 14 nt, Human
ccugucaccaagcu

SEQ ID NO: 2331898 - RNA, 19 nt, Human
ccuguaugcaacaggcacu

SEQ ID NO: 2331899 - RNA, 13 nt, Human
ccuguauauagcc

SEQ ID NO: 2331900 - RNA, 12 nt, Human
ccuguauaguua

SEQ ID NO: 2331901 - RNA, 22 nt, Human
ccuguauaguuaggauagcauu

SEQ ID NO: 2331902 - RNA, 16 nt, Human
ccuguauauagcccag

SEQ ID NO: 2331903 - RNA, 21 nt, Human
ccuguauauagcccagccagg

SEQ ID NO: 2331904 - RNA, 23 nt, Human
ccuguauaaguggaggcacuuua

SEQ ID NO: 2331905 - RNA, 22 nt, Human
ccuguauaaguggaggcacuuu

SEQ ID NO: 2331906 - RNA, 19 nt, Human
ccugucagugcagcccgug

SEQ ID NO: 2331907 - RNA, 12 nt, Human
ccugucagugcc

SEQ ID NO: 2331908 - RNA, 13 nt, Human
ccugucagugccg

SEQ ID NO: 2331909 - RNA, 14 nt, Human
ccugucagugccgc

SEQ ID NO: 2331910 - RNA, 15 nt, Human
ccugucagugccgcc

SEQ ID NO: 2331911 - RNA, 19 nt, Human
ccugucagugccgccgccu

SEQ ID NO: 2331912 - RNA, 16 nt, Human
ccugucagugcagccc

SEQ ID NO: 2331913 - RNA, 14 nt, Human
ccugucagugcagc

SEQ ID NO: 2331914 - RNA, 21 nt, Human
ccugucaugccccccucaaac

SEQ ID NO: 2331915 - RNA, 22 nt, Human
ccugucauucccaccacccuga

SEQ ID NO: 2331916 - RNA, 11 nt, Human
ccugucccacc

SEQ ID NO: 2331917 - RNA, 13 nt, Human
ccugucccacccc

SEQ ID NO: 2331918 - RNA, 12 nt, Human
ccugucaugccc

SEQ ID NO: 2331919 - RNA, 14 nt, Human
ccugucaugccccc

SEQ ID NO: 2331920 - RNA, 15 nt, Human
ccugucaugcccccc

SEQ ID NO: 2331921 - RNA, 16 nt, Human
ccugucaugccccccu

SEQ ID NO: 2331922 - RNA, 18 nt, Human
ccugucaugccccccuca

SEQ ID NO: 2331923 - RNA, 19 nt, Human
ccugucaugccccccucaa

SEQ ID NO: 2331924 - RNA, 14 nt, Human
ccugucccaccucu

SEQ ID NO: 2331925 - RNA, 16 nt, Human
ccugucccauggacac

SEQ ID NO: 2331926 - RNA, 19 nt, Human
ccugucccauggacacucc

SEQ ID NO: 2331927 - RNA, 23 nt, Human
ccugucccauggacacuccagug

SEQ ID NO: 2331928 - RNA, 13 nt, Human
ccugucccaccuc

SEQ ID NO: 2331929 - RNA, 16 nt, Human
ccugucccaccucuuc

SEQ ID NO: 2331930 - RNA, 15 nt, Human
ccugucccaccccca

SEQ ID NO: 2331931 - RNA, 17 nt, Human
ccugucccacccccacc

SEQ ID NO: 2331932 - RNA, 18 nt, Human
ccugucccacccccaccc

SEQ ID NO: 2331933 - RNA, 12 nt, Human
ccugucccccug

SEQ ID NO: 2331934 - RNA, 13 nt, Human
ccugucccccagc

SEQ ID NO: 2331935 - RNA, 14 nt, Human
ccugucccccagcu

SEQ ID NO: 2331936 - RNA, 15 nt, Human
ccugucccccagcuc

SEQ ID NO: 2331937 - RNA, 16 nt, Human
ccugucccccagcucu

SEQ ID NO: 2331938 - RNA, 13 nt, Human
ccugucccccuga

SEQ ID NO: 2331939 - RNA, 14 nt, Human
ccugucccccugac

SEQ ID NO: 2331940 - RNA, 15 nt, Human
ccugucccccugaca

SEQ ID NO: 2331941 - RNA, 17 nt, Human
ccugucccccagcucug

SEQ ID NO: 2331942 - RNA, 19 nt, Human
ccugucccccagcucuggu

SEQ ID NO: 2331943 - RNA, 14 nt, Human
ccugucccucccac

SEQ ID NO: 2331944 - RNA, 15 nt, Human
ccugucccucccacc

SEQ ID NO: 2331945 - RNA, 18 nt, Human
ccuguagaccuagggagg

SEQ ID NO: 2331946 - RNA, 13 nt, Human
ccuguagaccuag

SEQ ID NO: 2331947 - RNA, 12 nt, Human
ccuguacuuuuu

SEQ ID NO: 2331948 - RNA, 20 nt, Human
ccuguacuguucugugucuu

SEQ ID NO: 2331949 - RNA, 12 nt, Human
ccuguaccucuu

SEQ ID NO: 2331950 - RNA, 17 nt, Human
ccuguaccccagcacuu

SEQ ID NO: 2331951 - RNA, 14 nt, Human
ccuguaccccagca

SEQ ID NO: 2331952 - RNA, 10 nt, Human
ccuguaccuc

SEQ ID NO: 2331953 - RNA, 22 nt, Human
ccuguacaguagauuuuccaaa

SEQ ID NO: 2331954 - RNA, 16 nt, Human
ccuguacauuguggga

SEQ ID NO: 2331955 - RNA, 16 nt, Human
ccuggucuugagaugu

SEQ ID NO: 2331956 - RNA, 16 nt, Human
ccuggucuuuccucug

SEQ ID NO: 2331957 - RNA, 14 nt, Human
ccuggucuguagaa

SEQ ID NO: 2331958 - RNA, 15 nt, Human
ccugguggcaguggg

SEQ ID NO: 2331959 - RNA, 14 nt, Human
ccuguacaguagau

SEQ ID NO: 2331960 - RNA, 20 nt, Human
ccuguacaguagauuuucca

SEQ ID NO: 2331961 - RNA, 21 nt, Human
ccuguacaguagauuuuccaa

SEQ ID NO: 2331962 - RNA, 13 nt, Human
ccugguggcagug

SEQ ID NO: 2331963 - RNA, 14 nt, Human
ccugguggcagugg

SEQ ID NO: 2331964 - RNA, 23 nt, Human
ccuguagaccuagggaggaccuu

SEQ ID NO: 2331965 - RNA, 22 nt, Human
ccuguagaccuagggaggaccu

SEQ ID NO: 2331966 - RNA, 17 nt, Human
ccuguagcacuuacugg

SEQ ID NO: 2331967 - RNA, 14 nt, Human
ccuguagagcuaga

SEQ ID NO: 2331968 - RNA, 13 nt, Human
ccuguagcaguga

SEQ ID NO: 2331969 - RNA, 16 nt, Human
ccuguagcccacucug

SEQ ID NO: 2331970 - RNA, 12 nt, Human
ccuguagcccac

SEQ ID NO: 2331971 - RNA, 21 nt, Human
ccuguagcagugagaaaaagc

SEQ ID NO: 2331972 - RNA, 13 nt, Human
ccuguagcaucuu

SEQ ID NO: 2331973 - RNA, 15 nt, Human
ccuguagcaucuucu

SEQ ID NO: 2331974 - RNA, 18 nt, Human
ccuguagcaucuucugga

SEQ ID NO: 2331975 - RNA, 16 nt, Human
ccuguagagugggagc

SEQ ID NO: 2331976 - RNA, 15 nt, Human
ccuguagagugggag

SEQ ID NO: 2331977 - RNA, 13 nt, Human
ccuguagcccuaa

SEQ ID NO: 2331978 - RNA, 24 nt, Human
ccuguagcccacucugcucgccuu

SEQ ID NO: 2331979 - RNA, 23 nt, Human
ccuguagcccacucugcucgccu

SEQ ID NO: 2331980 - RNA, 22 nt, Human
ccuguagcccacucugcucgcc

SEQ ID NO: 2331981 - RNA, 19 nt, Human
ccuguagcccacucugcuc

SEQ ID NO: 2331982 - RNA, 23 nt, Human
ccuguaguugcguggacucugca

SEQ ID NO: 2331983 - RNA, 18 nt, Human
ccuguauaaguggaggca

SEQ ID NO: 2331984 - RNA, 16 nt, Human
ccuguauaaguggagg

SEQ ID NO: 2331985 - RNA, 21 nt, Human
ccuguaguugcguggacucug

SEQ ID NO: 2331986 - RNA, 19 nt, Human
ccuguagccuucuguagga

SEQ ID NO: 2331987 - RNA, 20 nt, Human
ccuguaguugcguggacucu

SEQ ID NO: 2331988 - RNA, 16 nt, Human
ccuguagccuucugua

SEQ ID NO: 2331989 - RNA, 21 nt, Human
ccuguagcaucuucuggaguc

SEQ ID NO: 2331990 - RNA, 15 nt, Human
ccuggguccaaauaa

SEQ ID NO: 2331991 - RNA, 17 nt, Human
ccuggguccaaauaaaa

SEQ ID NO: 2331992 - RNA, 20 nt, Human
ccuggguggggcugcuccuc

SEQ ID NO: 2331993 - RNA, 19 nt, Human
ccuggguggggcugcuccu

SEQ ID NO: 2331994 - RNA, 20 nt, Human
ccuggguccaaauaaaaacu

SEQ ID NO: 2331995 - RNA, 23 nt, Human
ccuggguggggcugcuccuccag

SEQ ID NO: 2331996 - RNA, 13 nt, Human
ccugggugggugg

SEQ ID NO: 2331997 - RNA, 22 nt, Human
ccuggguggggcugcuccucca

SEQ ID NO: 2331998 - RNA, 21 nt, Human
ccuggguggggcugcuccucc

SEQ ID NO: 2331999 - RNA, 17 nt, Human
ccugggugggugguggg

SEQ ID NO: 2332000 - RNA, 19 nt, Human
ccuggguggguggugggga

SEQ ID NO: 2332001 - RNA, 20 nt, Human
ccugggugggugguggggag

SEQ ID NO: 2332002 - RNA, 21 nt, Human
ccugggugggugguggggagg

SEQ ID NO: 2332003 - RNA, 22 nt, Human
ccuggguggucugcaggcaggg

SEQ ID NO: 2332004 - RNA, 20 nt, Human
ccuggguggucugcaggcag

SEQ ID NO: 2332005 - RNA, 19 nt, Human
ccuggguggucugcaggca

SEQ ID NO: 2332006 - RNA, 18 nt, Human
ccuggguggucugcaggc

SEQ ID NO: 2332007 - RNA, 14 nt, Human
ccuggguggucugc

SEQ ID NO: 2332008 - RNA, 22 nt, Human
ccugggugggugguggggaggg

SEQ ID NO: 2332009 - RNA, 23 nt, Human
ccugggugggugguggggagggg

SEQ ID NO: 2332010 - RNA, 21 nt, Human
ccuggguggucugcaggcagg

SEQ ID NO: 2332011 - RNA, 19 nt, Human
ccuggguucagaaaugcug

SEQ ID NO: 2332012 - RNA, 18 nt, Human
ccugguccuuccaggccc

SEQ ID NO: 2332013 - RNA, 15 nt, Human
ccugguccuuccagg

SEQ ID NO: 2332014 - RNA, 16 nt, Human
ccuggucccugggagg

SEQ ID NO: 2332015 - RNA, 14 nt, Human
ccuggucccuggga

SEQ ID NO: 2332016 - RNA, 14 nt, Human
ccugguccugaggg

SEQ ID NO: 2332017 - RNA, 22 nt, Human
ccuggguucagaaaugcugccu

SEQ ID NO: 2332018 - RNA, 23 nt, Human
ccuggguucagaaaugcugccug

SEQ ID NO: 2332019 - RNA, 20 nt, Human
ccugguccucacacucaccc

SEQ ID NO: 2332020 - RNA, 13 nt, Human
ccuggucucuggu

SEQ ID NO: 2332021 - RNA, 23 nt, Human
ccuggucucagcagcgaccaccc

SEQ ID NO: 2332022 - RNA, 14 nt, Human
ccuggucucugguc

SEQ ID NO: 2332023 - RNA, 19 nt, Human
ccugguccuuccaggcccc

SEQ ID NO: 2332024 - RNA, 23 nt, Human
ccugguccugaggguccccaccu

SEQ ID NO: 2332025 - RNA, 14 nt, Human
ccugguggcagcug

SEQ ID NO: 2332026 - RNA, 22 nt, Human
ccugguggcagcucaccucucc

SEQ ID NO: 2332027 - RNA, 19 nt, Human
ccugguggcagcucaccuc

SEQ ID NO: 2332028 - RNA, 21 nt, Human
ccugguggcagcucaccucuc

SEQ ID NO: 2332029 - RNA, 15 nt, Human
ccugguggcagcugc

SEQ ID NO: 2332030 - RNA, 16 nt, Human
ccugguggcagcugcg

SEQ ID NO: 2332031 - RNA, 17 nt, Human
ccugguggcagcugcgg

SEQ ID NO: 2332032 - RNA, 18 nt, Human
ccugguggcagcugcggu

SEQ ID NO: 2332033 - RNA, 13 nt, Human
ccuggguucccuu

SEQ ID NO: 2332034 - RNA, 18 nt, Human
ccuguggauguaaaguga

SEQ ID NO: 2332035 - RNA, 13 nt, Human
ccugccaccuccc

SEQ ID NO: 2332036 - RNA, 14 nt, Human
ccugccaccucccu

SEQ ID NO: 2332037 - RNA, 16 nt, Human
ccugccaccucccuga

SEQ ID NO: 2332038 - RNA, 16 nt, Human
ccugccaccugcugcu

SEQ ID NO: 2332039 - RNA, 16 nt, Human
ccugccacccugggga

SEQ ID NO: 2332040 - RNA, 22 nt, Human
ccugccacccuggggagaaagu

SEQ ID NO: 2332041 - RNA, 19 nt, Human
ccugccaccagucacuguc

SEQ ID NO: 2332042 - RNA, 14 nt, Human
ccugccacccuggg

SEQ ID NO: 2332043 - RNA, 12 nt, Human
ccugccacccug

SEQ ID NO: 2332044 - RNA, 13 nt, Human
ccugccacccugg

SEQ ID NO: 2332045 - RNA, 23 nt, Human
ccugcauuugugaaaugauggug

SEQ ID NO: 2332046 - RNA, 14 nt, Human
ccugcauuucugag

SEQ ID NO: 2332047 - RNA, 18 nt, Human
ccugcauucuuucuguau

SEQ ID NO: 2332048 - RNA, 13 nt, Human
ccugcacuguccu

SEQ ID NO: 2332049 - RNA, 12 nt, Human
ccugcacugucc

SEQ ID NO: 2332050 - RNA, 14 nt, Human
ccugcacuguccug

SEQ ID NO: 2332051 - RNA, 15 nt, Human
ccugcacuguccugc

SEQ ID NO: 2332052 - RNA, 16 nt, Human
ccugcacuguccugcu

SEQ ID NO: 2332053 - RNA, 17 nt, Human
ccugcacuguccugcuc

SEQ ID NO: 2332054 - RNA, 14 nt, Human
ccugcacuuacuug

SEQ ID NO: 2332055 - RNA, 17 nt, Human
ccugcacuuacuugcuu

SEQ ID NO: 2332056 - RNA, 19 nt, Human
ccugcacuguccugcucca

SEQ ID NO: 2332057 - RNA, 20 nt, Human
ccugcacuguccugcuccac

SEQ ID NO: 2332058 - RNA, 21 nt, Human
ccugcacuguccugcuccaca

SEQ ID NO: 2332059 - RNA, 23 nt, Human
ccugcacuguccugcuccacagu

SEQ ID NO: 2332060 - RNA, 19 nt, Human
ccugccaccacgcccggcu

SEQ ID NO: 2332061 - RNA, 15 nt, Human
ccugccaccacgccc

SEQ ID NO: 2332062 - RNA, 19 nt, Human
ccugccaauggacuaacuu

SEQ ID NO: 2332063 - RNA, 12 nt, Human
ccugccacagcc

SEQ ID NO: 2332064 - RNA, 12 nt, Human
ccugccaccagg

SEQ ID NO: 2332065 - RNA, 13 nt, Human
ccugccaccaggc

SEQ ID NO: 2332066 - RNA, 14 nt, Human
ccugccaccaggcc

SEQ ID NO: 2332067 - RNA, 15 nt, Human
ccugccaccaggcca

SEQ ID NO: 2332068 - RNA, 18 nt, Human
ccugccaccaggccaccu

SEQ ID NO: 2332069 - RNA, 19 nt, Human
ccugccaccaggccaccuc

SEQ ID NO: 2332070 - RNA, 16 nt, Human
ccugcauuucugaguu

SEQ ID NO: 2332071 - RNA, 14 nt, Human
ccugccaccaguca

SEQ ID NO: 2332072 - RNA, 15 nt, Human
ccugauccagccucu

SEQ ID NO: 2332073 - RNA, 13 nt, Human
ccugaucagagcc

SEQ ID NO: 2332074 - RNA, 19 nt, Human
ccugaucagaccacggcuc

SEQ ID NO: 2332075 - RNA, 18 nt, Human
ccugaucagaccacggcu

SEQ ID NO: 2332076 - RNA, 14 nt, Human
ccugaucagaccac

SEQ ID NO: 2332077 - RNA, 15 nt, Human
ccugaucaaugacag

SEQ ID NO: 2332078 - RNA, 17 nt, Human
ccugaucaaugacagag

SEQ ID NO: 2332079 - RNA, 13 nt, Human
ccugauccuggag

SEQ ID NO: 2332080 - RNA, 18 nt, Human
ccugauccuggaggccca

SEQ ID NO: 2332081 - RNA, 15 nt, Human
ccugauccuggaggc

SEQ ID NO: 2332082 - RNA, 15 nt, Human
ccugauccugugaag

SEQ ID NO: 2332083 - RNA, 22 nt, Human
ccugcaaacucacugcucaaga

SEQ ID NO: 2332084 - RNA, 20 nt, Human
ccugauccuggaggcccagu

SEQ ID NO: 2332085 - RNA, 19 nt, Human
ccugauccuggaggcccag

SEQ ID NO: 2332086 - RNA, 22 nt, Human
ccugcacaaagcccuuccaugu

SEQ ID NO: 2332087 - RNA, 20 nt, Human
ccugcacaaagcccuuccau

SEQ ID NO: 2332088 - RNA, 18 nt, Human
ccugcaaagcccagcuug

SEQ ID NO: 2332089 - RNA, 17 nt, Human
ccugcaaagcccagcuu

SEQ ID NO: 2332090 - RNA, 14 nt, Human
ccugcaaagcccag

SEQ ID NO: 2332091 - RNA, 16 nt, Human
ccugcaaagcccagcu

SEQ ID NO: 2332092 - RNA, 15 nt, Human
ccugcaaagcccagc

SEQ ID NO: 2332093 - RNA, 23 nt, Human
ccugcacaaagcccuuccauguc

SEQ ID NO: 2332094 - RNA, 21 nt, Human
ccugcacacgcuccuuccucu

SEQ ID NO: 2332095 - RNA, 20 nt, Human
ccugcacaauaaaaauguuu

SEQ ID NO: 2332096 - RNA, 19 nt, Human
ccugcacaauaaaaauguu

SEQ ID NO: 2332097 - RNA, 23 nt, Human
ccugcacuggaguccagucucuu

SEQ ID NO: 2332098 - RNA, 20 nt, Human
ccugcacuggaguccagucu

SEQ ID NO: 2332099 - RNA, 17 nt, Human
ccugcacuggaguccag

SEQ ID NO: 2332100 - RNA, 15 nt, Human
ccugcacuggagucc

SEQ ID NO: 2332101 - RNA, 20 nt, Human
ccugcaccuccccccacugc

SEQ ID NO: 2332102 - RNA, 14 nt, Human
ccugcacuggggag

SEQ ID NO: 2332103 - RNA, 21 nt, Human
ccugcacuggggagcccgucu

SEQ ID NO: 2332104 - RNA, 19 nt, Human
ccugcaccuccccccacug

SEQ ID NO: 2332105 - RNA, 18 nt, Human
ccugcaccuccccccacu

SEQ ID NO: 2332106 - RNA, 17 nt, Human
ccugcaccuccccccac

SEQ ID NO: 2332107 - RNA, 14 nt, Human
ccugcaccuccccc

SEQ ID NO: 2332108 - RNA, 15 nt, Human
ccugaggcucaggga

SEQ ID NO: 2332109 - RNA, 21 nt, Human
ccugaggcugagacugcggga

SEQ ID NO: 2332110 - RNA, 17 nt, Human
ccugagcugccauccag

SEQ ID NO: 2332111 - RNA, 18 nt, Human
ccugagcugaggcagcag

SEQ ID NO: 2332112 - RNA, 17 nt, Human
ccugaggcuccacuugg

SEQ ID NO: 2332113 - RNA, 14 nt, Human
ccugaggcuccacu

SEQ ID NO: 2332114 - RNA, 13 nt, Human
ccugaggcuccac

SEQ ID NO: 2332115 - RNA, 20 nt, Human
ccugaucaagucaccggagc

SEQ ID NO: 2332116 - RNA, 14 nt, Human
ccugaucaaugaca

SEQ ID NO: 2332117 - RNA, 17 nt, Human
ccugaggcucagggaaa

SEQ ID NO: 2332118 - RNA, 16 nt, Human
ccugaggcugggcucc

SEQ ID NO: 2332119 - RNA, 15 nt, Human
ccugaggcugggcuc

SEQ ID NO: 2332120 - RNA, 13 nt, Human
ccugaggcugggc

SEQ ID NO: 2332121 - RNA, 14 nt, Human
ccugaggcugggcu

SEQ ID NO: 2332122 - RNA, 22 nt, Human
ccugagcucgguggacccaggg

SEQ ID NO: 2332123 - RNA, 21 nt, Human
ccugagcucgguggacccagg

SEQ ID NO: 2332124 - RNA, 20 nt, Human
ccugagcucgguggacccag

SEQ ID NO: 2332125 - RNA, 19 nt, Human
ccugagcucgguggaccca

SEQ ID NO: 2332126 - RNA, 18 nt, Human
ccugagcucgguggaccc

SEQ ID NO: 2332127 - RNA, 16 nt, Human
ccugagcucgguggac

SEQ ID NO: 2332128 - RNA, 15 nt, Human
ccugagcucggugga

SEQ ID NO: 2332129 - RNA, 12 nt, Human
ccugagcucccc

SEQ ID NO: 2332130 - RNA, 15 nt, Human
ccugagcuccccacc

SEQ ID NO: 2332131 - RNA, 14 nt, Human
ccugagcucugaua

SEQ ID NO: 2332132 - RNA, 16 nt, Human
ccugagcugaggcagc

SEQ ID NO: 2332133 - RNA, 15 nt, Human
ccugagcugaggcag

SEQ ID NO: 2332134 - RNA, 12 nt, Human
ccugagcuggga

SEQ ID NO: 2332135 - RNA, 15 nt, Human
ccugaggcccagagg

SEQ ID NO: 2332136 - RNA, 16 nt, Human
ccugaggcccagaggg

SEQ ID NO: 2332137 - RNA, 17 nt, Human
ccugaggcccagagggc

SEQ ID NO: 2332138 - RNA, 18 nt, Human
ccugaggcccagagggcc

SEQ ID NO: 2332139 - RNA, 12 nt, Human
ccugagcgcucc

SEQ ID NO: 2332140 - RNA, 16 nt, Human
ccugagcgcuccugcc

SEQ ID NO: 2332141 - RNA, 21 nt, Human
ccugagcgcuccugccgcaga

SEQ ID NO: 2332142 - RNA, 23 nt, Human
ccugagcgcuccugccgcagagc

SEQ ID NO: 2332143 - RNA, 11 nt, Human
ccugagcuaga

SEQ ID NO: 2332144 - RNA, 18 nt, Human
ccugagcuagaagcugga

SEQ ID NO: 2332145 - RNA, 21 nt, Human
ccugagcuagaagcuggagga

SEQ ID NO: 2332146 - RNA, 13 nt, Human
ccugagcucacuc

SEQ ID NO: 2332147 - RNA, 16 nt, Human
ccugagccuggccagc

SEQ ID NO: 2332148 - RNA, 15 nt, Human
ccugagccuggccag

SEQ ID NO: 2332149 - RNA, 14 nt, Human
ccugagccuggcca

SEQ ID NO: 2332150 - RNA, 13 nt, Human
ccugagccuggcc

SEQ ID NO: 2332151 - RNA, 12 nt, Human
ccugagccuggc

SEQ ID NO: 2332152 - RNA, 12 nt, Human
ccugagccccuu

SEQ ID NO: 2332153 - RNA, 13 nt, Human
ccugagccccuuc

SEQ ID NO: 2332154 - RNA, 14 nt, Human
ccugagccccuucc

SEQ ID NO: 2332155 - RNA, 15 nt, Human
ccugagccccuuccu

SEQ ID NO: 2332156 - RNA, 16 nt, Human
ccugagccccuuccuu

SEQ ID NO: 2332157 - RNA, 23 nt, Human
ccugagccccuuccuugcucugc

SEQ ID NO: 2332158 - RNA, 20 nt, Human
ccugagccccuuccuugcuc

SEQ ID NO: 2332159 - RNA, 19 nt, Human
ccugaaguaagcaaagacu

SEQ ID NO: 2332160 - RNA, 17 nt, Human
ccugaaguucaccauua

SEQ ID NO: 2332161 - RNA, 22 nt, Human
ccugaagucuuuguacagacaa

SEQ ID NO: 2332162 - RNA, 20 nt, Human
ccugaagucacacagugagu

SEQ ID NO: 2332163 - RNA, 19 nt, Human
ccugaagucacacagugag

SEQ ID NO: 2332164 - RNA, 15 nt, Human
ccugagccagauuuc

SEQ ID NO: 2332165 - RNA, 12 nt, Human
ccugaaucauuc

SEQ ID NO: 2332166 - RNA, 16 nt, Human
ccugagccagauuuca

SEQ ID NO: 2332167 - RNA, 18 nt, Human
ccugagccagauuucacu

SEQ ID NO: 2332168 - RNA, 21 nt, Human
ccugaagaguccucugaauga

SEQ ID NO: 2332169 - RNA, 22 nt, Human
ccugaagaggcgggccagccag

SEQ ID NO: 2332170 - RNA, 23 nt, Human
ccugaagaggcgggccagccagg

SEQ ID NO: 2332171 - RNA, 18 nt, Human
ccugaagaggcgggccag

SEQ ID NO: 2332172 - RNA, 19 nt, Human
ccugaagaggcgggccagc

SEQ ID NO: 2332173 - RNA, 20 nt, Human
ccugaagaggcgggccagcc

SEQ ID NO: 2332174 - RNA, 21 nt, Human
ccugaagaggcgggccagcca

SEQ ID NO: 2332175 - RNA, 17 nt, Human
ccugaagaggcgggcca

SEQ ID NO: 2332176 - RNA, 19 nt, Human
ccugaagagaagggcaggg

SEQ ID NO: 2332177 - RNA, 18 nt, Human
ccugaaagcccugagcuu

SEQ ID NO: 2332178 - RNA, 14 nt, Human
ccugaaagcccuga

SEQ ID NO: 2332179 - RNA, 13 nt, Human
ccugaaagcccug

SEQ ID NO: 2332180 - RNA, 18 nt, Human
ccugaaacuuacacacaa

SEQ ID NO: 2332181 - RNA, 15 nt, Human
ccugaaacuuauuuu

SEQ ID NO: 2332182 - RNA, 16 nt, Human
ccugaaacuuauuuuu

SEQ ID NO: 2332183 - RNA, 22 nt, Human
ccugaaacuuauuuuuuucuga

SEQ ID NO: 2332184 - RNA, 13 nt, Human
ccugaaagaggaa

SEQ ID NO: 2332185 - RNA, 14 nt, Human
ccugaaggccccgc

SEQ ID NO: 2332186 - RNA, 21 nt, Human
ccugaagccaggccauggcua

SEQ ID NO: 2332187 - RNA, 17 nt, Human
ccugaagccagccuucu

SEQ ID NO: 2332188 - RNA, 18 nt, Human
ccugaagccagccuucuu

SEQ ID NO: 2332189 - RNA, 12 nt, Human
ccugaagccagc

SEQ ID NO: 2332190 - RNA, 14 nt, Human
ccugaagccagccu

SEQ ID NO: 2332191 - RNA, 15 nt, Human
ccugaagccagccuu

SEQ ID NO: 2332192 - RNA, 16 nt, Human
ccugaagccagccuuc

SEQ ID NO: 2332193 - RNA, 18 nt, Human
ccugaaggccccgcccag

SEQ ID NO: 2332194 - RNA, 19 nt, Human
ccugaaggccccgcccagg

SEQ ID NO: 2332195 - RNA, 22 nt, Human
ccugaaggccccgcccaggcuu

SEQ ID NO: 2332196 - RNA, 22 nt, Human
ccugaaggggcgucuguucccc

SEQ ID NO: 2332197 - RNA, 16 nt, Human
ccugaaggggcgucug

SEQ ID NO: 2332198 - RNA, 14 nt, Human
ccugaaggggcguc

SEQ ID NO: 2332199 - RNA, 20 nt, Human
ccugaaggggccaugauggc

SEQ ID NO: 2332200 - RNA, 20 nt, Human
ccugaaggccccgcccaggc

SEQ ID NO: 2332201 - RNA, 21 nt, Human
ccugaaggccccgcccaggcu

SEQ ID NO: 2332202 - RNA, 11 nt, Human
ccucuuccuga

SEQ ID NO: 2332203 - RNA, 16 nt, Human
ccucuuccuugcugug

SEQ ID NO: 2332204 - RNA, 22 nt, Human
ccucuuccucugaggcuggauc

SEQ ID NO: 2332205 - RNA, 22 nt, Human
ccucuuccccagaaaggagacu

SEQ ID NO: 2332206 - RNA, 14 nt, Human
ccucuuccccagaa

SEQ ID NO: 2332207 - RNA, 13 nt, Human
ccucuuccccaga

SEQ ID NO: 2332208 - RNA, 18 nt, Human
ccucuuccaucauguccc

SEQ ID NO: 2332209 - RNA, 15 nt, Human
ccucuucccccugcu

SEQ ID NO: 2332210 - RNA, 15 nt, Human
ccucuuccccuugcc

SEQ ID NO: 2332211 - RNA, 17 nt, Human
ccucuuccccuugcccu

SEQ ID NO: 2332212 - RNA, 14 nt, Human
ccucuuccucugag

SEQ ID NO: 2332213 - RNA, 15 nt, Human
ccucuuccucugagg

SEQ ID NO: 2332214 - RNA, 22 nt, Human
ccugaaaauguuuuucugccag

SEQ ID NO: 2332215 - RNA, 21 nt, Human
ccugaaaauguuuuucugcca

SEQ ID NO: 2332216 - RNA, 23 nt, Human
ccugaaaauguuuuucugccagg

SEQ ID NO: 2332217 - RNA, 15 nt, Human
ccugaaacaacuugg

SEQ ID NO: 2332218 - RNA, 17 nt, Human
ccugaaaacccagagag

SEQ ID NO: 2332219 - RNA, 16 nt, Human
ccugaaaacccagaga

SEQ ID NO: 2332220 - RNA, 13 nt, Human
ccugaaaacccag

SEQ ID NO: 2332221 - RNA, 19 nt, Human
ccucuucucaagugccuua

SEQ ID NO: 2332222 - RNA, 22 nt, Human
ccugaaaaguaacuuggcuuuc

SEQ ID NO: 2332223 - RNA, 15 nt, Human
ccucuuccuuuagga

SEQ ID NO: 2332224 - RNA, 18 nt, Human
ccucuucuauuuuguaaa

SEQ ID NO: 2332225 - RNA, 17 nt, Human
ccucuucuauuuuguaa

SEQ ID NO: 2332226 - RNA, 18 nt, Human
ccugaaaacacugugcac

SEQ ID NO: 2332227 - RNA, 17 nt, Human
ccucuucucaagugccu

SEQ ID NO: 2332228 - RNA, 18 nt, Human
ccucuucucaagugccuu

SEQ ID NO: 2332229 - RNA, 14 nt, Human
ccucuucucaagug

SEQ ID NO: 2332230 - RNA, 15 nt, Human
ccucuucucaagugc

SEQ ID NO: 2332231 - RNA, 16 nt, Human
ccucuucucaagugcc

SEQ ID NO: 2332232 - RNA, 15 nt, Human
ccuaugaucccagca

SEQ ID NO: 2332233 - RNA, 14 nt, Human
ccuaugaucccagc

SEQ ID NO: 2332234 - RNA, 13 nt, Human
ccuaugaucccag

SEQ ID NO: 2332235 - RNA, 17 nt, Human
ccuaugauauuuucugu

SEQ ID NO: 2332236 - RNA, 14 nt, Human
ccucuucagaggcc

SEQ ID NO: 2332237 - RNA, 13 nt, Human
ccucuucagaggc

SEQ ID NO: 2332238 - RNA, 12 nt, Human
ccucuuccccac

SEQ ID NO: 2332239 - RNA, 11 nt, Human
ccucuucccca

SEQ ID NO: 2332240 - RNA, 14 nt, Human
ccucuuccagucuu

SEQ ID NO: 2332241 - RNA, 12 nt, Human
ccucuuccaguc

SEQ ID NO: 2332242 - RNA, 15 nt, Human
ccucuuccaggcccc

SEQ ID NO: 2332243 - RNA, 18 nt, Human
ccucuucauggauggggg

SEQ ID NO: 2332244 - RNA, 16 nt, Human
ccucuucagaggcccu

SEQ ID NO: 2332245 - RNA, 15 nt, Human
ccuagucccuucccc

SEQ ID NO: 2332246 - RNA, 14 nt, Human
ccuagucccuuccc

SEQ ID NO: 2332247 - RNA, 14 nt, Human
ccuaguagucauuu

SEQ ID NO: 2332248 - RNA, 13 nt, Human
ccuagucccuucc

SEQ ID NO: 2332249 - RNA, 18 nt, Human
ccuagucccuuccacacc

SEQ ID NO: 2332250 - RNA, 19 nt, Human
ccuagucccuuccacaccc

SEQ ID NO: 2332251 - RNA, 19 nt, Human
ccuagucccuuccccuccc

SEQ ID NO: 2332252 - RNA, 16 nt, Human
ccuagucccuuccccu

SEQ ID NO: 2332253 - RNA, 21 nt, Human
ccuagucccuuccccucccug

SEQ ID NO: 2332254 - RNA, 12 nt, Human
ccuaucuuugcc

SEQ ID NO: 2332255 - RNA, 18 nt, Human
ccuaucuuuuaguuuuag

SEQ ID NO: 2332256 - RNA, 20 nt, Human
ccuaucuuugccacccucau

SEQ ID NO: 2332257 - RNA, 19 nt, Human
ccuaucuuugccacccuca

SEQ ID NO: 2332258 - RNA, 15 nt, Human
ccuaucuuugccacc

SEQ ID NO: 2332259 - RNA, 13 nt, Human
ccuaucuuugcca

SEQ ID NO: 2332260 - RNA, 15 nt, Human
ccugagcugggauga

SEQ ID NO: 2332261 - RNA, 15 nt, Human
ccugcccccugaaac

SEQ ID NO: 2332262 - RNA, 18 nt, Human
ccugcccccugaaacuua

SEQ ID NO: 2332263 - RNA, 12 nt, Human
ccugcccccugg

SEQ ID NO: 2332264 - RNA, 18 nt, Human
ccugccccccagccucug

SEQ ID NO: 2332265 - RNA, 22 nt, Human
ccugccccccagccucuggcau

SEQ ID NO: 2332266 - RNA, 22 nt, Human
ccugccagugccuuaccuccug

SEQ ID NO: 2332267 - RNA, 21 nt, Human
ccugccagugccuuaccuccu

SEQ ID NO: 2332268 - RNA, 20 nt, Human
ccugccagugccuuaccucc

SEQ ID NO: 2332269 - RNA, 18 nt, Human
ccugccagugccuuaccu

SEQ ID NO: 2332270 - RNA, 17 nt, Human
ccugccagugccuuacc

SEQ ID NO: 2332271 - RNA, 14 nt, Human
ccugccagugccuu

SEQ ID NO: 2332272 - RNA, 13 nt, Human
ccugccagugccu

SEQ ID NO: 2332273 - RNA, 22 nt, Human
ccugccaguccuagcugcacag

SEQ ID NO: 2332274 - RNA, 14 nt, Human
ccugccccccagcc

SEQ ID NO: 2332275 - RNA, 15 nt, Human
ccugccccccagccu

SEQ ID NO: 2332276 - RNA, 17 nt, Human
ccugccccccagccucu

SEQ ID NO: 2332277 - RNA, 15 nt, Human
ccugccaggcauggu

SEQ ID NO: 2332278 - RNA, 13 nt, Human
ccugccaggcagg

SEQ ID NO: 2332279 - RNA, 14 nt, Human
ccugccaggcaggg

SEQ ID NO: 2332280 - RNA, 22 nt, Human
ccugccagggacagagggggug

SEQ ID NO: 2332281 - RNA, 15 nt, Human
ccugccaggcagggg

SEQ ID NO: 2332282 - RNA, 19 nt, Human
ccugccaggcagggguggg

SEQ ID NO: 2332283 - RNA, 22 nt, Human
ccugccaggcaggggugggggu

SEQ ID NO: 2332284 - RNA, 16 nt, Human
ccugccagggagacag

SEQ ID NO: 2332285 - RNA, 19 nt, Human
ccugccagggcagggcccc

SEQ ID NO: 2332286 - RNA, 17 nt, Human
ccugccagggcagggcc

SEQ ID NO: 2332287 - RNA, 13 nt, Human
ccugccagggcag

SEQ ID NO: 2332288 - RNA, 17 nt, Human
ccugccagggagacaga

SEQ ID NO: 2332289 - RNA, 19 nt, Human
ccugccagggagacagagc

SEQ ID NO: 2332290 - RNA, 20 nt, Human
ccugccagggagacagagcu

SEQ ID NO: 2332291 - RNA, 12 nt, Human
ccugccaguccu

SEQ ID NO: 2332292 - RNA, 14 nt, Human
ccugccaguccuag

SEQ ID NO: 2332293 - RNA, 15 nt, Human
ccugccaguccuagc

SEQ ID NO: 2332294 - RNA, 16 nt, Human
ccugccaguccuagcu

SEQ ID NO: 2332295 - RNA, 19 nt, Human
ccugccaguccuagcugca

SEQ ID NO: 2332296 - RNA, 20 nt, Human
ccugccaguccuagcugcac

SEQ ID NO: 2332297 - RNA, 21 nt, Human
ccugccaguccuagcugcaca

SEQ ID NO: 2332298 - RNA, 13 nt, Human
ccugccaccuggg

SEQ ID NO: 2332299 - RNA, 16 nt, Human
ccugccaccuggggca

SEQ ID NO: 2332300 - RNA, 12 nt, Human
ccugccacucac

SEQ ID NO: 2332301 - RNA, 13 nt, Human
ccugccacucaca

SEQ ID NO: 2332302 - RNA, 14 nt, Human
ccugccacucacac

SEQ ID NO: 2332303 - RNA, 16 nt, Human
ccugccacucacacag

SEQ ID NO: 2332304 - RNA, 17 nt, Human
ccugccacucacacagc

SEQ ID NO: 2332305 - RNA, 20 nt, Human
ccugccacucacacagccag

SEQ ID NO: 2332306 - RNA, 21 nt, Human
ccugccacucacacagccagg

SEQ ID NO: 2332307 - RNA, 22 nt, Human
ccugccacucacacagccaggu

SEQ ID NO: 2332308 - RNA, 23 nt, Human
ccugccacucacacagccaggug

SEQ ID NO: 2332309 - RNA, 12 nt, Human
ccugccaggcau

SEQ ID NO: 2332310 - RNA, 21 nt, Human
ccugccacucacuaggccccc

SEQ ID NO: 2332311 - RNA, 22 nt, Human
ccugccacucacuaggccccca

SEQ ID NO: 2332312 - RNA, 13 nt, Human
ccugccacucacu

SEQ ID NO: 2332313 - RNA, 15 nt, Human
ccugccacucacuag

SEQ ID NO: 2332314 - RNA, 16 nt, Human
ccugccacucacuagg

SEQ ID NO: 2332315 - RNA, 18 nt, Human
ccugccacucacuaggcc

SEQ ID NO: 2332316 - RNA, 17 nt, Human
ccugccccugccccguc

SEQ ID NO: 2332317 - RNA, 11 nt, Human
ccugccccugc

SEQ ID NO: 2332318 - RNA, 15 nt, Human
ccugccccucucccg

SEQ ID NO: 2332319 - RNA, 16 nt, Human
ccugccccucucccgc

SEQ ID NO: 2332320 - RNA, 17 nt, Human
ccugccccugagcccau

SEQ ID NO: 2332321 - RNA, 22 nt, Human
ccugccccuccucucugcccua

SEQ ID NO: 2332322 - RNA, 21 nt, Human
ccugccccuccucucugcccu

SEQ ID NO: 2332323 - RNA, 20 nt, Human
ccugccccuccucucugccc

SEQ ID NO: 2332324 - RNA, 19 nt, Human
ccugccccuccucucugcc

SEQ ID NO: 2332325 - RNA, 15 nt, Human
ccugccccucccuuc

SEQ ID NO: 2332326 - RNA, 16 nt, Human
ccugccccucccuuca

SEQ ID NO: 2332327 - RNA, 18 nt, Human
ccugccccucccuucaac

SEQ ID NO: 2332328 - RNA, 18 nt, Human
ccugccccuccucucugc

SEQ ID NO: 2332329 - RNA, 16 nt, Human
ccugcccccuggugga

SEQ ID NO: 2332330 - RNA, 15 nt, Human
ccugcccccuggugg

SEQ ID NO: 2332331 - RNA, 14 nt, Human
ccugcccccuggug

SEQ ID NO: 2332332 - RNA, 13 nt, Human
ccugcccccuggu

SEQ ID NO: 2332333 - RNA, 16 nt, Human
ccugcccccuucuccc

SEQ ID NO: 2332334 - RNA, 13 nt, Human
ccugcccccuucu

SEQ ID NO: 2332335 - RNA, 12 nt, Human
ccugcccccuuc

SEQ ID NO: 2332336 - RNA, 14 nt, Human
ccugccccucccuu

SEQ ID NO: 2332337 - RNA, 16 nt, Human
ccugcccuagcuccac

SEQ ID NO: 2332338 - RNA, 24 nt, Human
ccugcccuagagcacacuguagca

SEQ ID NO: 2332339 - RNA, 22 nt, Human
ccugcccuagagcacacuguag

SEQ ID NO: 2332340 - RNA, 19 nt, Human
ccugcccuagagcacacug

SEQ ID NO: 2332341 - RNA, 14 nt, Human
ccugcccuagcucc

SEQ ID NO: 2332342 - RNA, 14 nt, Human
ccugcccucaggga

SEQ ID NO: 2332343 - RNA, 15 nt, Human
ccugcccucagggau

SEQ ID NO: 2332344 - RNA, 19 nt, Human
ccugcccucaucucucucc

SEQ ID NO: 2332345 - RNA, 21 nt, Human
ccugcccucauggccccucug

SEQ ID NO: 2332346 - RNA, 23 nt, Human
ccugcccucauggccccucugac

SEQ ID NO: 2332347 - RNA, 18 nt, Human
ccugcccuagagcacacu

SEQ ID NO: 2332348 - RNA, 20 nt, Human
ccugcccuacagaggucucu

SEQ ID NO: 2332349 - RNA, 23 nt, Human
ccugcccuacagaggucucugcc

SEQ ID NO: 2332350 - RNA, 23 nt, Human
ccugcccgucucucucccaugga

SEQ ID NO: 2332351 - RNA, 22 nt, Human
ccugcccgucucucucccaugg

SEQ ID NO: 2332352 - RNA, 23 nt, Human
ccugcccguaaacacgccugcaa

SEQ ID NO: 2332353 - RNA, 22 nt, Human
ccugcccgggcgcggccagccc

SEQ ID NO: 2332354 - RNA, 12 nt, Human
ccugcccgucuc

SEQ ID NO: 2332355 - RNA, 13 nt, Human
ccugcccgucucu

SEQ ID NO: 2332356 - RNA, 17 nt, Human
ccugcccgucucucucc

SEQ ID NO: 2332357 - RNA, 19 nt, Human
ccugcccgucucucuccca

SEQ ID NO: 2332358 - RNA, 20 nt, Human
ccugcccgucucucucccau

SEQ ID NO: 2332359 - RNA, 14 nt, Human
ccugcccggcugcg

SEQ ID NO: 2332360 - RNA, 16 nt, Human
ccugcccggcugcgga

SEQ ID NO: 2332361 - RNA, 10 nt, Human
ccugcccggg

SEQ ID NO: 2332362 - RNA, 14 nt, Human
ccugccccuguucu

SEQ ID NO: 2332363 - RNA, 22 nt, Human
ccugcccguaaacacgccugca

SEQ ID NO: 2332364 - RNA, 21 nt, Human
ccugcccguaaacacgccugc

SEQ ID NO: 2332365 - RNA, 20 nt, Human
ccugcccguaaacacgccug

SEQ ID NO: 2332366 - RNA, 15 nt, Human
ccugcccguaaacac

SEQ ID NO: 2332367 - RNA, 13 nt, Human
ccugcccuccccu

SEQ ID NO: 2332368 - RNA, 20 nt, Human
ccugcccuccccagagcacu

SEQ ID NO: 2332369 - RNA, 21 nt, Human
ccugcccuccccagagcacug

SEQ ID NO: 2332370 - RNA, 14 nt, Human
ccugcccuccccag

SEQ ID NO: 2332371 - RNA, 15 nt, Human
ccugcccuccccaga

SEQ ID NO: 2332372 - RNA, 16 nt, Human
ccugcccuccccagag

SEQ ID NO: 2332373 - RNA, 19 nt, Human
ccugcccuccccagagcac

SEQ ID NO: 2332374 - RNA, 22 nt, Human
ccugcccuccccagagcacugg

SEQ ID NO: 2332375 - RNA, 12 nt, Human
ccugcccucgug

SEQ ID NO: 2332376 - RNA, 13 nt, Human
ccugcccucgugg

SEQ ID NO: 2332377 - RNA, 14 nt, Human
ccugcccucguggc

SEQ ID NO: 2332378 - RNA, 15 nt, Human
ccugcccucguggcc

SEQ ID NO: 2332379 - RNA, 16 nt, Human
ccugcccucguggcca

SEQ ID NO: 2332380 - RNA, 17 nt, Human
ccugcccucguggccag

SEQ ID NO: 2332381 - RNA, 18 nt, Human
ccugcccucguggccagc

SEQ ID NO: 2332382 - RNA, 11 nt, Human
ccugcccugca

SEQ ID NO: 2332383 - RNA, 13 nt, Human
ccugcccugcacg

SEQ ID NO: 2332384 - RNA, 19 nt, Human
ccugcccucguggccagcc

SEQ ID NO: 2332385 - RNA, 20 nt, Human
ccugcccucguggccagccc

SEQ ID NO: 2332386 - RNA, 22 nt, Human
ccugcccucguggccagcccgg

SEQ ID NO: 2332387 - RNA, 23 nt, Human
ccugcccucguggccagcccggc

SEQ ID NO: 2332388 - RNA, 13 nt, Human
ccugcccugcugc

SEQ ID NO: 2332389 - RNA, 14 nt, Human
ccugcccugccuga

SEQ ID NO: 2332390 - RNA, 15 nt, Human
ccugcccugccugag

SEQ ID NO: 2332391 - RNA, 13 nt, Human
ccugcccugccug

SEQ ID NO: 2332392 - RNA, 15 nt, Human
ccugcccugccccca

SEQ ID NO: 2332393 - RNA, 15 nt, Human
ccugcccugggaggc

SEQ ID NO: 2332394 - RNA, 14 nt, Human
ccugcccugggagg

SEQ ID NO: 2332395 - RNA, 12 nt, Human
ccugcccuggga

SEQ ID NO: 2332396 - RNA, 10 nt, Human
ccugcccugg

SEQ ID NO: 2332397 - RNA, 15 nt, Human
ccugcccugguccag

SEQ ID NO: 2332398 - RNA, 23 nt, Human
ccugcccugguuuccugcccugg

SEQ ID NO: 2332399 - RNA, 11 nt, Human
ccugcccugug

SEQ ID NO: 2332400 - RNA, 12 nt, Human
ccugcccugugg

SEQ ID NO: 2332401 - RNA, 14 nt, Human
ccugcccugugggc

SEQ ID NO: 2332402 - RNA, 12 nt, Human
ccugcccugguc

SEQ ID NO: 2332403 - RNA, 20 nt, Human
ccugcccugcugccgccucc

SEQ ID NO: 2332404 - RNA, 14 nt, Human
ccugcccugguuuc

SEQ ID NO: 2332405 - RNA, 22 nt, Human
ccugcccugggaggcagugaug

SEQ ID NO: 2332406 - RNA, 20 nt, Human
ccugcccugggaggcaguga

SEQ ID NO: 2332407 - RNA, 22 nt, Human
ccugcccugguuuccugcccug

SEQ ID NO: 2332408 - RNA, 21 nt, Human
ccugcccugguuuccugcccu

SEQ ID NO: 2332409 - RNA, 20 nt, Human
ccugcccugguuuccugccc

SEQ ID NO: 2332410 - RNA, 19 nt, Human
ccugcccugguuuccugcc

SEQ ID NO: 2332411 - RNA, 21 nt, Human
ccugcccuguuguguauagau

SEQ ID NO: 2332412 - RNA, 19 nt, Human
ccugcccuugucccacuca

SEQ ID NO: 2332413 - RNA, 13 nt, Human
ccugcccuugucu

SEQ ID NO: 2332414 - RNA, 16 nt, Human
ccugcccuugucccac

SEQ ID NO: 2332415 - RNA, 15 nt, Human
ccugcccuuguccca

SEQ ID NO: 2332416 - RNA, 18 nt, Human
ccugccgaccucguccuc

SEQ ID NO: 2332417 - RNA, 16 nt, Human
ccugcccuugucugag

SEQ ID NO: 2332418 - RNA, 17 nt, Human
ccugcccuugucugaga

SEQ ID NO: 2332419 - RNA, 14 nt, Human
ccugccgacuccug

SEQ ID NO: 2332420 - RNA, 16 nt, Human
ccugccgacuccuggg

SEQ ID NO: 2332421 - RNA, 15 nt, Human
ccugcccugugggcc

SEQ ID NO: 2332422 - RNA, 19 nt, Human
ccugcccuuaccugccagg

SEQ ID NO: 2332423 - RNA, 21 nt, Human
ccugcccuuaccugccaggaa

SEQ ID NO: 2332424 - RNA, 22 nt, Human
ccugcccuuaccugccaggaag

SEQ ID NO: 2332425 - RNA, 13 nt, Human
ccugccucagccu

SEQ ID NO: 2332426 - RNA, 14 nt, Human
ccugccucagccuc

SEQ ID NO: 2332427 - RNA, 12 nt, Human
ccugccucagcc

SEQ ID NO: 2332428 - RNA, 13 nt, Human
ccugccgcagagc

SEQ ID NO: 2332429 - RNA, 14 nt, Human
ccugccgcagagcu

SEQ ID NO: 2332430 - RNA, 15 nt, Human
ccugccgcagagcug

SEQ ID NO: 2332431 - RNA, 16 nt, Human
ccugccgcagagcugg

SEQ ID NO: 2332432 - RNA, 15 nt, Human
ccugccugucuccuu

SEQ ID NO: 2332433 - RNA, 12 nt, Human
ccugccugucug

SEQ ID NO: 2332434 - RNA, 14 nt, Human
ccugccugucuccu

SEQ ID NO: 2332435 - RNA, 13 nt, Human
ccugccugucucc

SEQ ID NO: 2332436 - RNA, 13 nt, Human
ccugccugucugu

SEQ ID NO: 2332437 - RNA, 17 nt, Human
ccugccugucugucucu

SEQ ID NO: 2332438 - RNA, 18 nt, Human
ccugccugucugucucuc

SEQ ID NO: 2332439 - RNA, 14 nt, Human
ccugccgccucaau

SEQ ID NO: 2332440 - RNA, 17 nt, Human
ccugccgcagagcuggc

SEQ ID NO: 2332441 - RNA, 16 nt, Human
ccugccuguagcccac

SEQ ID NO: 2332442 - RNA, 22 nt, Human
ccugccugucugucucuccauc

SEQ ID NO: 2332443 - RNA, 22 nt, Human
ccugccuguucccauucuugca

SEQ ID NO: 2332444 - RNA, 14 nt, Human
ccugccuguugggc

SEQ ID NO: 2332445 - RNA, 22 nt, Human
ccugccuguugggccaggagcc

SEQ ID NO: 2332446 - RNA, 20 nt, Human
cuacagguuacaacagauuu

SEQ ID NO: 2332447 - RNA, 11 nt, Human
cuacagguuac

SEQ ID NO: 2332448 - RNA, 14 nt, Human
cuacagguuacaac

SEQ ID NO: 2332449 - RNA, 17 nt, Human
cuacagguuacaacaga

SEQ ID NO: 2332450 - RNA, 18 nt, Human
cuacagguuacaacagau

SEQ ID NO: 2332451 - RNA, 16 nt, Human
cuacaggugugaguca

SEQ ID NO: 2332452 - RNA, 14 nt, Human
cuacaggugugagu

SEQ ID NO: 2332453 - RNA, 20 nt, Human
cuacauggaguauaugucaa

SEQ ID NO: 2332454 - RNA, 18 nt, Human
cuacauggaguauauguc

SEQ ID NO: 2332455 - RNA, 13 nt, Human
cuacaguccuccc

SEQ ID NO: 2332456 - RNA, 21 nt, Human
cuacagucaggaaaggaauca

SEQ ID NO: 2332457 - RNA, 18 nt, Human
cuacagucaggaaaggaa

SEQ ID NO: 2332458 - RNA, 15 nt, Human
cuacagucaggaaag

SEQ ID NO: 2332459 - RNA, 14 nt, Human
cuacagucaggaaa

SEQ ID NO: 2332460 - RNA, 22 nt, Human
cuacaggggaagguggccucug

SEQ ID NO: 2332461 - RNA, 18 nt, Human
cuacaggggaagguggcc

SEQ ID NO: 2332462 - RNA, 21 nt, Human
cuacaggagagggaagagugc

SEQ ID NO: 2332463 - RNA, 22 nt, Human
cuacaggcacacgccaccucgc

SEQ ID NO: 2332464 - RNA, 15 nt, Human
cuacaggcacccacc

SEQ ID NO: 2332465 - RNA, 17 nt, Human
cuacaggcacccaccau

SEQ ID NO: 2332466 - RNA, 18 nt, Human
cuacaggagagggaagag

SEQ ID NO: 2332467 - RNA, 22 nt, Human
cuacagcuuugugacuguauau

SEQ ID NO: 2332468 - RNA, 22 nt, Human
cuacaggaagcaccccaugcca

SEQ ID NO: 2332469 - RNA, 20 nt, Human
cuacaggaagcaccccaugc

SEQ ID NO: 2332470 - RNA, 18 nt, Human
cuacaggaagcaccccau

SEQ ID NO: 2332471 - RNA, 14 nt, Human
cuacaggagugagc

SEQ ID NO: 2332472 - RNA, 15 nt, Human
cuacaggagugagca

SEQ ID NO: 2332473 - RNA, 16 nt, Human
cuacaggagugagcac

SEQ ID NO: 2332474 - RNA, 21 nt, Human
cuacagcuaaucagcauucuc

SEQ ID NO: 2332475 - RNA, 22 nt, Human
cuacagcuaaucagcauucuca

SEQ ID NO: 2332476 - RNA, 15 nt, Human
cuacagauagucaaa

SEQ ID NO: 2332477 - RNA, 23 nt, Human
cuacagaggucucugccggcucu

SEQ ID NO: 2332478 - RNA, 14 nt, Human
cuacagauagucaa

SEQ ID NO: 2332479 - RNA, 18 nt, Human
cuacagcuaaucagcauu

SEQ ID NO: 2332480 - RNA, 19 nt, Human
cuacagcuaaucagcauuc

SEQ ID NO: 2332481 - RNA, 23 nt, Human
cuacagcuugaccgugaggccag

SEQ ID NO: 2332482 - RNA, 19 nt, Human
cuacagcuuugaucccuga

SEQ ID NO: 2332483 - RNA, 18 nt, Human
cuacagcuuugugacugu

SEQ ID NO: 2332484 - RNA, 19 nt, Human
cuacagcuugaccgugagg

SEQ ID NO: 2332485 - RNA, 22 nt, Human
cuacagcuugaccgugaggcca

SEQ ID NO: 2332486 - RNA, 17 nt, Human
cuacagaggccaugggc

SEQ ID NO: 2332487 - RNA, 17 nt, Human
cuacacugugcugaguc

SEQ ID NO: 2332488 - RNA, 13 nt, Human
cuacacugugcug

SEQ ID NO: 2332489 - RNA, 14 nt, Human
cuacacugugcuga

SEQ ID NO: 2332490 - RNA, 16 nt, Human
cuacacuccagccuga

SEQ ID NO: 2332491 - RNA, 16 nt, Human
cuacacugacacuggu

SEQ ID NO: 2332492 - RNA, 20 nt, Human
cuacacugugaacuugggga

SEQ ID NO: 2332493 - RNA, 20 nt, Human
cuacagaggucucugccggc

SEQ ID NO: 2332494 - RNA, 22 nt, Human
cuacagaggccaugggccuccu

SEQ ID NO: 2332495 - RNA, 18 nt, Human
cuacagaggccaugggcc

SEQ ID NO: 2332496 - RNA, 20 nt, Human
cuacagaggccaugggccuc

SEQ ID NO: 2332497 - RNA, 19 nt, Human
cuacccuagccauuccugg

SEQ ID NO: 2332498 - RNA, 12 nt, Human
cuacccucccac

SEQ ID NO: 2332499 - RNA, 18 nt, Human
cuacccuagccauuccug

SEQ ID NO: 2332500 - RNA, 17 nt, Human
cuacccccuaagagcca

SEQ ID NO: 2332501 - RNA, 19 nt, Human
cuacccccaggguugaggg

SEQ ID NO: 2332502 - RNA, 15 nt, Human
cuacccccuccucuc

SEQ ID NO: 2332503 - RNA, 17 nt, Human
cuacccccuccucucug

SEQ ID NO: 2332504 - RNA, 19 nt, Human
cuacccccuccucucugcc

SEQ ID NO: 2332505 - RNA, 14 nt, Human
cuacccucccccag

SEQ ID NO: 2332506 - RNA, 13 nt, Human
cuacccucccugc

SEQ ID NO: 2332507 - RNA, 14 nt, Human
cuacccucccugcu

SEQ ID NO: 2332508 - RNA, 15 nt, Human
cuacccucccugcug

SEQ ID NO: 2332509 - RNA, 16 nt, Human
cuacccucccugcugu

SEQ ID NO: 2332510 - RNA, 18 nt, Human
cuacccucccugcugucc

SEQ ID NO: 2332511 - RNA, 20 nt, Human
cuacccucccugcugucccc

SEQ ID NO: 2332512 - RNA, 19 nt, Human
cuacccucccacccccuuc

SEQ ID NO: 2332513 - RNA, 16 nt, Human
cuacccucccaccccc

SEQ ID NO: 2332514 - RNA, 14 nt, Human
cuacccucccaccc

SEQ ID NO: 2332515 - RNA, 13 nt, Human
cuacccucccacc

SEQ ID NO: 2332516 - RNA, 17 nt, Human
cuacccucuuagaaaaa

SEQ ID NO: 2332517 - RNA, 23 nt, Human
cuacccucccugcuguccccucu

SEQ ID NO: 2332518 - RNA, 15 nt, Human
cuacccucgggccca

SEQ ID NO: 2332519 - RNA, 16 nt, Human
cuacccucgggcccac

SEQ ID NO: 2332520 - RNA, 17 nt, Human
cuacccucgggcccacc

SEQ ID NO: 2332521 - RNA, 19 nt, Human
cuacccucgggcccaccug

SEQ ID NO: 2332522 - RNA, 20 nt, Human
cuacccucgggcccaccugg

SEQ ID NO: 2332523 - RNA, 22 nt, Human
cuacccucgggcccaccuggcc

SEQ ID NO: 2332524 - RNA, 17 nt, Human
cuacccugagcugaggc

SEQ ID NO: 2332525 - RNA, 12 nt, Human
cuacccugagcu

SEQ ID NO: 2332526 - RNA, 23 nt, Human
cuacccucgggcccaccuggcca

SEQ ID NO: 2332527 - RNA, 18 nt, Human
cuacccugagcugaggca

SEQ ID NO: 2332528 - RNA, 16 nt, Human
cuacccuuuuucucca

SEQ ID NO: 2332529 - RNA, 14 nt, Human
cuaccccaccacga

SEQ ID NO: 2332530 - RNA, 13 nt, Human
cuaccccaccacg

SEQ ID NO: 2332531 - RNA, 17 nt, Human
cuaccccaauuccuugu

SEQ ID NO: 2332532 - RNA, 12 nt, Human
cuaccccacacc

SEQ ID NO: 2332533 - RNA, 17 nt, Human
cuaccccacaccaggcc

SEQ ID NO: 2332534 - RNA, 21 nt, Human
cuaccccacaccaggccgucc

SEQ ID NO: 2332535 - RNA, 13 nt, Human
cuacccauccccg

SEQ ID NO: 2332536 - RNA, 16 nt, Human
cuaccccaauuccuug

SEQ ID NO: 2332537 - RNA, 15 nt, Human
cuacccauccccgca

SEQ ID NO: 2332538 - RNA, 18 nt, Human
cuacccagcgagcccugg

SEQ ID NO: 2332539 - RNA, 13 nt, Human
cuacccaggugcu

SEQ ID NO: 2332540 - RNA, 13 nt, Human
cuacccacccucc

SEQ ID NO: 2332541 - RNA, 13 nt, Human
cuacccaaccacu

SEQ ID NO: 2332542 - RNA, 14 nt, Human
cuacccaaccacuc

SEQ ID NO: 2332543 - RNA, 15 nt, Human
cuacccaaccacuca

SEQ ID NO: 2332544 - RNA, 16 nt, Human
cuacccaaccacucaa

SEQ ID NO: 2332545 - RNA, 16 nt, Human
cuacccacaccucugc

SEQ ID NO: 2332546 - RNA, 18 nt, Human
cuacccacaccucugcca

SEQ ID NO: 2332547 - RNA, 19 nt, Human
cuacccacaccucugccag

SEQ ID NO: 2332548 - RNA, 20 nt, Human
cuacccacaccucugccaga

SEQ ID NO: 2332549 - RNA, 15 nt, Human
cuacccagcgagccc

SEQ ID NO: 2332550 - RNA, 17 nt, Human
cuacccagcgagcccug

SEQ ID NO: 2332551 - RNA, 16 nt, Human
cuacaugugggagcuu

SEQ ID NO: 2332552 - RNA, 22 nt, Human
cuacauguauugcacauuguaa

SEQ ID NO: 2332553 - RNA, 18 nt, Human
cuacauguauugcacauu

SEQ ID NO: 2332554 - RNA, 21 nt, Human
cuacauguauugcacauugua

SEQ ID NO: 2332555 - RNA, 17 nt, Human
cuacaugcuuugugaac

SEQ ID NO: 2332556 - RNA, 23 nt, Human
cuacaugguugaaaccccaucuc

SEQ ID NO: 2332557 - RNA, 13 nt, Human
cuacauguauugc

SEQ ID NO: 2332558 - RNA, 17 nt, Human
cuacaugugggagcuuu

SEQ ID NO: 2332559 - RNA, 22 nt, Human
cuacauuauaaaugucucuuua

SEQ ID NO: 2332560 - RNA, 12 nt, Human
cuacauucauuu

SEQ ID NO: 2332561 - RNA, 14 nt, Human
cuaccaaagcaccu

SEQ ID NO: 2332562 - RNA, 14 nt, Human
cuacauucuguuaa

SEQ ID NO: 2332563 - RNA, 13 nt, Human
cuacauucuguua

SEQ ID NO: 2332564 - RNA, 19 nt, Human
cuaccaugaacagaaaaca

SEQ ID NO: 2332565 - RNA, 13 nt, Human
cuaccauucagug

SEQ ID NO: 2332566 - RNA, 17 nt, Human
cuaccaccuccccagcc

SEQ ID NO: 2332567 - RNA, 16 nt, Human
cuaccaccuccccagc

SEQ ID NO: 2332568 - RNA, 12 nt, Human
cuacccaaagga

SEQ ID NO: 2332569 - RNA, 20 nt, Human
cuaccauuugcagaguccug

SEQ ID NO: 2332570 - RNA, 13 nt, Human
cuaccauuucaga

SEQ ID NO: 2332571 - RNA, 12 nt, Human
cuaccauuucag

SEQ ID NO: 2332572 - RNA, 15 nt, Human
cuaccaccuccccag

SEQ ID NO: 2332573 - RNA, 14 nt, Human
cuaccaccucccca

SEQ ID NO: 2332574 - RNA, 11 nt, Human
cuaccaccucc

SEQ ID NO: 2332575 - RNA, 22 nt, Human
cuaccaccccuuccugucccac

SEQ ID NO: 2332576 - RNA, 16 nt, Human
cuaccaccccuuccug

SEQ ID NO: 2332577 - RNA, 17 nt, Human
cuaccaccccuuccugu

SEQ ID NO: 2332578 - RNA, 18 nt, Human
cuaccaccccuuccuguc

SEQ ID NO: 2332579 - RNA, 18 nt, Human
cuaccauccccuguagag

SEQ ID NO: 2332580 - RNA, 15 nt, Human
cuaccacagugucug

SEQ ID NO: 2332581 - RNA, 18 nt, Human
cuaccacaugccaagcac

SEQ ID NO: 2332582 - RNA, 14 nt, Human
cuaccaccccuucc

SEQ ID NO: 2332583 - RNA, 14 nt, Human
cuaccacagugucu

SEQ ID NO: 2332584 - RNA, 13 nt, Human
cuaccacaguguc

SEQ ID NO: 2332585 - RNA, 14 nt, Human
cuaccaaugcaugc

SEQ ID NO: 2332586 - RNA, 15 nt, Human
cuaccaaugcaugca

SEQ ID NO: 2332587 - RNA, 13 nt, Human
cuaccaaugcaug

SEQ ID NO: 2332588 - RNA, 19 nt, Human
cuaccaagcuauccuggcu

SEQ ID NO: 2332589 - RNA, 15 nt, Human
cuaccaaagcaccuu

SEQ ID NO: 2332590 - RNA, 18 nt, Human
cuaccaauagauucccca

SEQ ID NO: 2332591 - RNA, 22 nt, Human
cuaggaaauauuuauuuuaaua

SEQ ID NO: 2332592 - RNA, 21 nt, Human
cuaaaaauagacuuaaaucuc

SEQ ID NO: 2332593 - RNA, 23 nt, Human
cuaaaagugggcuugauucugca

SEQ ID NO: 2332594 - RNA, 11 nt, Human
cuaaaaauaaa

SEQ ID NO: 2332595 - RNA, 20 nt, Human
cuaaaagugggcuugauucu

SEQ ID NO: 2332596 - RNA, 22 nt, Human
cuaaaauaagggcagagucaca

SEQ ID NO: 2332597 - RNA, 22 nt, Human
cuaaaaaacauaaauuucuuua

SEQ ID NO: 2332598 - RNA, 17 nt, Human
cuaaaaaacagaggcca

SEQ ID NO: 2332599 - RNA, 11 nt, Human
cuaaaaaagau

SEQ ID NO: 2332600 - RNA, 13 nt, Human
cuaaaaaagauau

SEQ ID NO: 2332601 - RNA, 15 nt, Human
cuaaaaaagauauau

SEQ ID NO: 2332602 - RNA, 19 nt, Human
cuaaaaaagauauauuaaa

SEQ ID NO: 2332603 - RNA, 22 nt, Human
cuaaaaaagauauauuaaaaau

SEQ ID NO: 2332604 - RNA, 21 nt, Human
cuaaaaagaaggaaaaugauc

SEQ ID NO: 2332605 - RNA, 11 nt, Human
cuaaaaaacag

SEQ ID NO: 2332606 - RNA, 18 nt, Human
cguuuuauuguguuuuua

SEQ ID NO: 2332607 - RNA, 14 nt, Human
cguuuuauuguguu

SEQ ID NO: 2332608 - RNA, 20 nt, Human
cuaaaaaaaaaaaaguauua

SEQ ID NO: 2332609 - RNA, 18 nt, Human
cuaaaaaaaaaaaaguau

SEQ ID NO: 2332610 - RNA, 12 nt, Human
cguuuuauugug

SEQ ID NO: 2332611 - RNA, 23 nt, Human
cgggaggauguucugggacacag

SEQ ID NO: 2332612 - RNA, 21 nt, Human
cgggaggauguucugggacac

SEQ ID NO: 2332613 - RNA, 22 nt, Human
cgggaggcagagguugcagugu

SEQ ID NO: 2332614 - RNA, 21 nt, Human
cgggacgagacccuacaggag

SEQ ID NO: 2332615 - RNA, 20 nt, Human
cguuuguuccccaagacauu

SEQ ID NO: 2332616 - RNA, 14 nt, Human
cguuuguaugugug

SEQ ID NO: 2332617 - RNA, 15 nt, Human
cguuuguaugugugu

SEQ ID NO: 2332618 - RNA, 20 nt, Human
cgggaggcagagguugcagu

SEQ ID NO: 2332619 - RNA, 23 nt, Human
cgggaccccgagccuggcuccaa

SEQ ID NO: 2332620 - RNA, 13 nt, Human
cgggaccuggugc

SEQ ID NO: 2332621 - RNA, 13 nt, Human
cgggaccuguggc

SEQ ID NO: 2332622 - RNA, 14 nt, Human
cgggaccuguggcu

SEQ ID NO: 2332623 - RNA, 18 nt, Human
cgggacaccugcccugcc

SEQ ID NO: 2332624 - RNA, 13 nt, Human
cuaaaauagccac

SEQ ID NO: 2332625 - RNA, 19 nt, Human
cuaaaauagccacuuaccu

SEQ ID NO: 2332626 - RNA, 14 nt, Human
cuaaaauauuuauu

SEQ ID NO: 2332627 - RNA, 23 nt, Human
cuaaaauauuuauuuuuuuuaag

SEQ ID NO: 2332628 - RNA, 15 nt, Human
cuaaaauauuuauuu

SEQ ID NO: 2332629 - RNA, 14 nt, Human
cuaaaaugauuuua

SEQ ID NO: 2332630 - RNA, 23 nt, Human
cuaaaaugauuuuaucugugaau

SEQ ID NO: 2332631 - RNA, 22 nt, Human
cuaaaaugccucaguguauuug

SEQ ID NO: 2332632 - RNA, 13 nt, Human
cuaaacugccccc

SEQ ID NO: 2332633 - RNA, 12 nt, Human
cuaaacugcccc

SEQ ID NO: 2332634 - RNA, 22 nt, Human
cuaaacucauuuauaaagcuaa

SEQ ID NO: 2332635 - RNA, 17 nt, Human
cuaaacucauuuauaaa

SEQ ID NO: 2332636 - RNA, 22 nt, Human
cuaaacucucuuugggaauguu

SEQ ID NO: 2332637 - RNA, 15 nt, Human
cuaaacucauuuaua

SEQ ID NO: 2332638 - RNA, 14 nt, Human
cuaaacucauuuau

SEQ ID NO: 2332639 - RNA, 14 nt, Human
cuaaacuaucuuuu

SEQ ID NO: 2332640 - RNA, 15 nt, Human
cuaaacuaucuuuuu

SEQ ID NO: 2332641 - RNA, 23 nt, Human
cuaaauagcauguauugugucuu

SEQ ID NO: 2332642 - RNA, 15 nt, Human
cuaaaucucuaauau

SEQ ID NO: 2332643 - RNA, 15 nt, Human
cuaaauagcauguau

SEQ ID NO: 2332644 - RNA, 17 nt, Human
cuaaauagcauguauug

SEQ ID NO: 2332645 - RNA, 20 nt, Human
cuaaauagcauguauugugu

SEQ ID NO: 2332646 - RNA, 22 nt, Human
cuaaauagcauguauugugucu

SEQ ID NO: 2332647 - RNA, 22 nt, Human
cuaaaugaaaaucgugacaaca

SEQ ID NO: 2332648 - RNA, 21 nt, Human
cuaaaucuccaaaauaaaacu

SEQ ID NO: 2332649 - RNA, 24 nt, Human
cuaaauaccugcccugacaugcac

SEQ ID NO: 2332650 - RNA, 14 nt, Human
cuaaauagcaugua

SEQ ID NO: 2332651 - RNA, 23 nt, Human
cuaaauaaagcuugcaacaaaau

SEQ ID NO: 2332652 - RNA, 15 nt, Human
cuaaauaaaauuugu

SEQ ID NO: 2332653 - RNA, 20 nt, Human
cuaaauaaaauuuguugcau

SEQ ID NO: 2332654 - RNA, 21 nt, Human
cuaaacugcccccucugcccu

SEQ ID NO: 2332655 - RNA, 11 nt, Human
cuaaacugcau

SEQ ID NO: 2332656 - RNA, 24 nt, Human
cuaaaguuuacaguaaauaaauug

SEQ ID NO: 2332657 - RNA, 18 nt, Human
cuaagaguguccuaggag

SEQ ID NO: 2332658 - RNA, 18 nt, Human
cuaagaguugagcucucg

SEQ ID NO: 2332659 - RNA, 21 nt, Human
cuaagaguugagcucucggaa

SEQ ID NO: 2332660 - RNA, 12 nt, Human
cuaagaugacau

SEQ ID NO: 2332661 - RNA, 12 nt, Human
cuaagagugucc

SEQ ID NO: 2332662 - RNA, 22 nt, Human
cuaagagugcugggcauuuuua

SEQ ID NO: 2332663 - RNA, 16 nt, Human
cuaagauaguaacaau

SEQ ID NO: 2332664 - RNA, 23 nt, Human
cuaagagggagggagggcuccag

SEQ ID NO: 2332665 - RNA, 20 nt, Human
cuaagagcuagcgcugccgc

SEQ ID NO: 2332666 - RNA, 19 nt, Human
cuaagagcuagcgcugccg

SEQ ID NO: 2332667 - RNA, 13 nt, Human
cuaagagcucccg

SEQ ID NO: 2332668 - RNA, 13 nt, Human
cuaagagggaggg

SEQ ID NO: 2332669 - RNA, 15 nt, Human
cuaagagggagggag

SEQ ID NO: 2332670 - RNA, 22 nt, Human
cuaagagggagggagggcucca

SEQ ID NO: 2332671 - RNA, 18 nt, Human
cuaagagcuagcgcugcc

SEQ ID NO: 2332672 - RNA, 16 nt, Human
cuaagagcuagcgcug

SEQ ID NO: 2332673 - RNA, 20 nt, Human
cuaagagccauuuaggggcc

SEQ ID NO: 2332674 - RNA, 11 nt, Human
cuaagagccau

SEQ ID NO: 2332675 - RNA, 11 nt, Human
cuaaccugacc

SEQ ID NO: 2332676 - RNA, 21 nt, Human
cuaaccugaccgugggcgggg

SEQ ID NO: 2332677 - RNA, 22 nt, Human
cuaagagaaguuauuuucuaca

SEQ ID NO: 2332678 - RNA, 14 nt, Human
cuaagagagagaga

SEQ ID NO: 2332679 - RNA, 14 nt, Human
cuaagagagaauga

SEQ ID NO: 2332680 - RNA, 15 nt, Human
cuaagagagaaugag

SEQ ID NO: 2332681 - RNA, 12 nt, Human
cuaaccucaucu

SEQ ID NO: 2332682 - RNA, 21 nt, Human
cuaacccucagaaacacuggg

SEQ ID NO: 2332683 - RNA, 20 nt, Human
cuaacccucccauggcaccu

SEQ ID NO: 2332684 - RNA, 19 nt, Human
cuaacccuuaucaccagcu

SEQ ID NO: 2332685 - RNA, 15 nt, Human
cuaaccucaucuucu

SEQ ID NO: 2332686 - RNA, 16 nt, Human
cuaaccccuuuccugc

SEQ ID NO: 2332687 - RNA, 14 nt, Human
cuaaccccuuuccu

SEQ ID NO: 2332688 - RNA, 13 nt, Human
cuaaccccuuucc

SEQ ID NO: 2332689 - RNA, 16 nt, Human
cuaaccccgggcgggu

SEQ ID NO: 2332690 - RNA, 16 nt, Human
cuaaccccaggccccg

SEQ ID NO: 2332691 - RNA, 13 nt, Human
cuaaccacaucaa

SEQ ID NO: 2332692 - RNA, 13 nt, Human
cuaaccccaggcc

SEQ ID NO: 2332693 - RNA, 15 nt, Human
cuaaccccaggcccc

SEQ ID NO: 2332694 - RNA, 12 nt, Human
cuaaccacgcug

SEQ ID NO: 2332695 - RNA, 14 nt, Human
cuaaccacgcugga

SEQ ID NO: 2332696 - RNA, 12 nt, Human
cuaacaucagaa

SEQ ID NO: 2332697 - RNA, 18 nt, Human
cuaacauuuuaaauaaaa

SEQ ID NO: 2332698 - RNA, 21 nt, Human
cuaacauuuuaaauaaaagaa

SEQ ID NO: 2332699 - RNA, 17 nt, Human
cuaacagauaagcaaga

SEQ ID NO: 2332700 - RNA, 16 nt, Human
cuaacacuggccccua

SEQ ID NO: 2332701 - RNA, 18 nt, Human
cuaacagauaagcaagag

SEQ ID NO: 2332702 - RNA, 17 nt, Human
cuaacacuggccccuag

SEQ ID NO: 2332703 - RNA, 22 nt, Human
cuaacaagucauagguuaauau

SEQ ID NO: 2332704 - RNA, 12 nt, Human
cuaacauauaau

SEQ ID NO: 2332705 - RNA, 22 nt, Human
cuaacauauaauguuguuauuu

SEQ ID NO: 2332706 - RNA, 23 nt, Human
cuaacauauaauguuguuauuua

SEQ ID NO: 2332707 - RNA, 17 nt, Human
cuaacagcucaggaucu

SEQ ID NO: 2332708 - RNA, 13 nt, Human
cuaaaugaagugc

SEQ ID NO: 2332709 - RNA, 12 nt, Human
cuaaaugaaugu

SEQ ID NO: 2332710 - RNA, 14 nt, Human
cuaaaugaauguuu

SEQ ID NO: 2332711 - RNA, 14 nt, Human
cuaaauuccacacu

SEQ ID NO: 2332712 - RNA, 16 nt, Human
cuaaauucaugcugcu

SEQ ID NO: 2332713 - RNA, 19 nt, Human
cuaaauugacacuuaaaaa

SEQ ID NO: 2332714 - RNA, 17 nt, Human
cuaaauugaaaccugga

SEQ ID NO: 2332715 - RNA, 12 nt, Human
cuaaauugaaua

SEQ ID NO: 2332716 - RNA, 13 nt, Human
cuaaauugaauaa

SEQ ID NO: 2332717 - RNA, 14 nt, Human
cuaaauugaauaau

SEQ ID NO: 2332718 - RNA, 13 nt, Human
cguuuucaaaauu

SEQ ID NO: 2332719 - RNA, 23 nt, Human
cuaauagcggguuacuuucacau

SEQ ID NO: 2332720 - RNA, 17 nt, Human
cuaauauacaggguagc

SEQ ID NO: 2332721 - RNA, 22 nt, Human
cuaauauaaguuucuuugcuuc

SEQ ID NO: 2332722 - RNA, 23 nt, Human
cuaauaguuuuauuaauaaacau

SEQ ID NO: 2332723 - RNA, 15 nt, Human
cuaauauauuuuuau

SEQ ID NO: 2332724 - RNA, 12 nt, Human
cuaauaucagca

SEQ ID NO: 2332725 - RNA, 12 nt, Human
cuaauauauuuu

SEQ ID NO: 2332726 - RNA, 21 nt, Human
cuaauauauuuuuauauuuag

SEQ ID NO: 2332727 - RNA, 11 nt, Human
cuaauauauuu

SEQ ID NO: 2332728 - RNA, 13 nt, Human
cuaauagaacuca

SEQ ID NO: 2332729 - RNA, 20 nt, Human
cuaauagaacucaguuuuaa

SEQ ID NO: 2332730 - RNA, 17 nt, Human
cuaauagacaauuuauu

SEQ ID NO: 2332731 - RNA, 23 nt, Human
cuaauagacaauuuauuauggca

SEQ ID NO: 2332732 - RNA, 19 nt, Human
cuaauagacaauuuauuau

SEQ ID NO: 2332733 - RNA, 12 nt, Human
cuaauacaccag

SEQ ID NO: 2332734 - RNA, 18 nt, Human
cuaauaaucauuggauuc

SEQ ID NO: 2332735 - RNA, 23 nt, Human
cuaauacagcaacaauuuaugaa

SEQ ID NO: 2332736 - RNA, 19 nt, Human
cuaauacagcaacaauuua

SEQ ID NO: 2332737 - RNA, 13 nt, Human
cuaauaccucugu

SEQ ID NO: 2332738 - RNA, 15 nt, Human
cuaauaccucugugu

SEQ ID NO: 2332739 - RNA, 16 nt, Human
cuaauaccucugugug

SEQ ID NO: 2332740 - RNA, 17 nt, Human
cuaauaccucugugugc

SEQ ID NO: 2332741 - RNA, 14 nt, Human
cuaauaaagcugug

SEQ ID NO: 2332742 - RNA, 19 nt, Human
cuaaguaaaaccacagcag

SEQ ID NO: 2332743 - RNA, 18 nt, Human
cuaaguaaaaccacagca

SEQ ID NO: 2332744 - RNA, 14 nt, Human
cuaaguaaaaccac

SEQ ID NO: 2332745 - RNA, 22 nt, Human
cuaagcucaaggcgugaggaug

SEQ ID NO: 2332746 - RNA, 19 nt, Human
cuaagcuuugccagcugcu

SEQ ID NO: 2332747 - RNA, 20 nt, Human
cuaagcuuugccagcugcug

SEQ ID NO: 2332748 - RNA, 22 nt, Human
cuaagcuuugccagcugcugcu

SEQ ID NO: 2332749 - RNA, 21 nt, Human
cuaagcuucacuguaaaauaa

SEQ ID NO: 2332750 - RNA, 22 nt, Human
cuaagcuauucaguaauaacuc

SEQ ID NO: 2332751 - RNA, 11 nt, Human
cuaagaugcuc

SEQ ID NO: 2332752 - RNA, 15 nt, Human
cuaagaugacauugc

SEQ ID NO: 2332753 - RNA, 18 nt, Human
cuaagaugacauugcuaa

SEQ ID NO: 2332754 - RNA, 19 nt, Human
cuaagaugacauugcuaag

SEQ ID NO: 2332755 - RNA, 20 nt, Human
cuaagaugacauugcuaaga

SEQ ID NO: 2332756 - RNA, 19 nt, Human
cuaaggccgaagaaggguc

SEQ ID NO: 2332757 - RNA, 16 nt, Human
cuaaggcguggagcug

SEQ ID NO: 2332758 - RNA, 21 nt, Human
cuaaggcguggagcugccuga

SEQ ID NO: 2332759 - RNA, 22 nt, Human
cuaaggcguggagcugccugau

SEQ ID NO: 2332760 - RNA, 17 nt, Human
cuaaggcguggagcugc

SEQ ID NO: 2332761 - RNA, 18 nt, Human
cuaaggcguggagcugcc

SEQ ID NO: 2332762 - RNA, 19 nt, Human
cuaaggcguggagcugccu

SEQ ID NO: 2332763 - RNA, 20 nt, Human
cuaaggcguggagcugccug

SEQ ID NO: 2332764 - RNA, 14 nt, Human
cuaagguucucaua

SEQ ID NO: 2332765 - RNA, 19 nt, Human
cuaaggacauuucccaggg

SEQ ID NO: 2332766 - RNA, 17 nt, Human
cuaaggacauuucccag

SEQ ID NO: 2332767 - RNA, 16 nt, Human
cuaaggacauuuccca

SEQ ID NO: 2332768 - RNA, 16 nt, Human
cuaaggacacacuaau

SEQ ID NO: 2332769 - RNA, 11 nt, Human
cuaaggacaca

SEQ ID NO: 2332770 - RNA, 12 nt, Human
cuaaggacacac

SEQ ID NO: 2332771 - RNA, 13 nt, Human
cuaaggacacacu

SEQ ID NO: 2332772 - RNA, 14 nt, Human
cuaaggacacacua

SEQ ID NO: 2332773 - RNA, 18 nt, Human
cuacaccuuucuccuuug

SEQ ID NO: 2332774 - RNA, 20 nt, Human
cuacaccuuucuccuuugua

SEQ ID NO: 2332775 - RNA, 14 nt, Human
cuacacuccagccu

SEQ ID NO: 2332776 - RNA, 13 nt, Human
cuacaccuugagg

SEQ ID NO: 2332777 - RNA, 14 nt, Human
cuacacuaagagag

SEQ ID NO: 2332778 - RNA, 23 nt, Human
cuacacgagauacagaauuuuau

SEQ ID NO: 2332779 - RNA, 15 nt, Human
cuacaccuuucuccu

SEQ ID NO: 2332780 - RNA, 13 nt, Human
cuacaccuggcug

SEQ ID NO: 2332781 - RNA, 15 nt, Human
cuacaccuggcugag

SEQ ID NO: 2332782 - RNA, 12 nt, Human
cuacaccuggcu

SEQ ID NO: 2332783 - RNA, 18 nt, Human
cuacacccuuuuccagcu

SEQ ID NO: 2332784 - RNA, 13 nt, Human
cuacaccuaacuc

SEQ ID NO: 2332785 - RNA, 14 nt, Human
cuacaccuaacuca

SEQ ID NO: 2332786 - RNA, 16 nt, Human
cuacacccuuuuccag

SEQ ID NO: 2332787 - RNA, 16 nt, Human
cuacacccuuggacuu

SEQ ID NO: 2332788 - RNA, 20 nt, Human
cuacacccuuggacuugagg

SEQ ID NO: 2332789 - RNA, 22 nt, Human
cuacaccccuccccugcccuag

SEQ ID NO: 2332790 - RNA, 21 nt, Human
cuacacacugcauguuuguga

SEQ ID NO: 2332791 - RNA, 15 nt, Human
cuaauuccuuucuau

SEQ ID NO: 2332792 - RNA, 21 nt, Human
cuacacaggggaaaagaggag

SEQ ID NO: 2332793 - RNA, 21 nt, Human
cuacacauauguauuccugau

SEQ ID NO: 2332794 - RNA, 14 nt, Human
cuacacagggaugu

SEQ ID NO: 2332795 - RNA, 21 nt, Human
cuacacagggauguacaaggc

SEQ ID NO: 2332796 - RNA, 23 nt, Human
cuacacagucugcaagauucuga

SEQ ID NO: 2332797 - RNA, 21 nt, Human
cuaauucccauuuugcaaaau

SEQ ID NO: 2332798 - RNA, 20 nt, Human
cuaauucccauuuugcaaaa

SEQ ID NO: 2332799 - RNA, 19 nt, Human
cuaauucccauuuugcaaa

SEQ ID NO: 2332800 - RNA, 18 nt, Human
cuaauucccauuuugcaa

SEQ ID NO: 2332801 - RNA, 17 nt, Human
cuaauucccauuuugca

SEQ ID NO: 2332802 - RNA, 16 nt, Human
cuaauucccagagugu

SEQ ID NO: 2332803 - RNA, 14 nt, Human
cuaauucccagagu

SEQ ID NO: 2332804 - RNA, 16 nt, Human
cuaauuccacagcugc

SEQ ID NO: 2332805 - RNA, 15 nt, Human
cuaauuccacagcug

SEQ ID NO: 2332806 - RNA, 14 nt, Human
cuaauuccacagcu

SEQ ID NO: 2332807 - RNA, 17 nt, Human
cuaauuccacaccuuuu

SEQ ID NO: 2332808 - RNA, 15 nt, Human
cuaauuccacaccuu

SEQ ID NO: 2332809 - RNA, 13 nt, Human
cuaauucauuuau

SEQ ID NO: 2332810 - RNA, 14 nt, Human
cuaauuagagcaga

SEQ ID NO: 2332811 - RNA, 22 nt, Human
cuaauuauacccccugcaaagc

SEQ ID NO: 2332812 - RNA, 19 nt, Human
cuaauggguauuuaaacaa

SEQ ID NO: 2332813 - RNA, 16 nt, Human
cuaauuauauaauauu

SEQ ID NO: 2332814 - RNA, 18 nt, Human
cuaauuauauaauauuuu

SEQ ID NO: 2332815 - RNA, 19 nt, Human
cuaaugcuccuuguuccua

SEQ ID NO: 2332816 - RNA, 23 nt, Human
cuaaugcugcagauuugggcugg

SEQ ID NO: 2332817 - RNA, 18 nt, Human
cuaaugcuccuuguuccu

SEQ ID NO: 2332818 - RNA, 12 nt, Human
cuaaugcuccuu

SEQ ID NO: 2332819 - RNA, 18 nt, Human
cuaaugccuuacucuucu

SEQ ID NO: 2332820 - RNA, 23 nt, Human
cuaaugcgcaggcuggcccugcc

SEQ ID NO: 2332821 - RNA, 22 nt, Human
cuaaugcgcaggcuggcccugc

SEQ ID NO: 2332822 - RNA, 12 nt, Human
cuaaugggacac

SEQ ID NO: 2332823 - RNA, 13 nt, Human
cuaaugggacacu

SEQ ID NO: 2332824 - RNA, 18 nt, Human
cuaauauguaacaagcca

SEQ ID NO: 2332825 - RNA, 13 nt, Human
cuaauauggcaaa

SEQ ID NO: 2332826 - RNA, 20 nt, Human
cuaaucagcauucucacucc

SEQ ID NO: 2332827 - RNA, 21 nt, Human
cuaaucagcauucucacuccu

SEQ ID NO: 2332828 - RNA, 20 nt, Human
cuaauauggccacaguaguc

SEQ ID NO: 2332829 - RNA, 19 nt, Human
cuaaucagggaggucauuu

SEQ ID NO: 2332830 - RNA, 20 nt, Human
cuaaucagggaggucauuuu

SEQ ID NO: 2332831 - RNA, 21 nt, Human
cuaaucagggaggucauuuug

SEQ ID NO: 2332832 - RNA, 15 nt, Human
cuaauccaacccaug

SEQ ID NO: 2332833 - RNA, 16 nt, Human
cuaaucauccaaugcu

SEQ ID NO: 2332834 - RNA, 21 nt, Human
cuaaucagugucucacacugg

SEQ ID NO: 2332835 - RNA, 13 nt, Human
cuaauccaaccca

SEQ ID NO: 2332836 - RNA, 20 nt, Human
cuaaucaggcugaggugucu

SEQ ID NO: 2332837 - RNA, 12 nt, Human
cuaaucaguguc

SEQ ID NO: 2332838 - RNA, 13 nt, Human
cuaaucagugucu

SEQ ID NO: 2332839 - RNA, 15 nt, Human
cuaaucagugucuca

SEQ ID NO: 2332840 - RNA, 16 nt, Human
cuaaucagugucucac

SEQ ID NO: 2332841 - RNA, 17 nt, Human
cuaaucagugucucaca

SEQ ID NO: 2332842 - RNA, 18 nt, Human
cuaaucagugucucacac

SEQ ID NO: 2332843 - RNA, 20 nt, Human
cuaaucagugucucacacug

SEQ ID NO: 2332844 - RNA, 20 nt, Human
cuaaugcgcaggcuggcccu

SEQ ID NO: 2332845 - RNA, 19 nt, Human
cuaaugcgcaggcuggccc

SEQ ID NO: 2332846 - RNA, 16 nt, Human
cuaaugcgcaggcugg

SEQ ID NO: 2332847 - RNA, 15 nt, Human
cuaaugcgcaggcug

SEQ ID NO: 2332848 - RNA, 22 nt, Human
cuacuuaauuccuuucucaucc

SEQ ID NO: 2332849 - RNA, 15 nt, Human
cuacuuaauuccuuu

SEQ ID NO: 2332850 - RNA, 19 nt, Human
cuacuuaauuccuuucuca

SEQ ID NO: 2332851 - RNA, 21 nt, Human
cuacuuaccuaccacaugcca

SEQ ID NO: 2332852 - RNA, 22 nt, Human
cuacuuacaugcauuacugcau

SEQ ID NO: 2332853 - RNA, 20 nt, Human
cuacuguccuacccacccuc

SEQ ID NO: 2332854 - RNA, 17 nt, Human
cuacuguaauuuuauau

SEQ ID NO: 2332855 - RNA, 20 nt, Human
cuacugucucacugaaacau

SEQ ID NO: 2332856 - RNA, 19 nt, Human
cuacuguaauuuuauauga

SEQ ID NO: 2332857 - RNA, 17 nt, Human
cuacuuagcaugucccu

SEQ ID NO: 2332858 - RNA, 19 nt, Human
cuacuuaccauaugugcuu

SEQ ID NO: 2332859 - RNA, 22 nt, Human
cuacuuagcaugucccuaccga

SEQ ID NO: 2332860 - RNA, 18 nt, Human
cuacuuugucuaaaaaua

SEQ ID NO: 2332861 - RNA, 17 nt, Human
cuacuuuugcaugaaaa

SEQ ID NO: 2332862 - RNA, 18 nt, Human
cuacuuuugcaugaaaau

SEQ ID NO: 2332863 - RNA, 16 nt, Human
cuagaaacagaucuug

SEQ ID NO: 2332864 - RNA, 22 nt, Human
cuagaaagccuguuccccucac

SEQ ID NO: 2332865 - RNA, 16 nt, Human
cuagaaacuuccaaau

SEQ ID NO: 2332866 - RNA, 14 nt, Human
cuagaaacuuccaa

SEQ ID NO: 2332867 - RNA, 13 nt, Human
cuagaaauaugau

SEQ ID NO: 2332868 - RNA, 15 nt, Human
cuagaaauaugauuu

SEQ ID NO: 2332869 - RNA, 17 nt, Human
cuagaaauaugauuuua

SEQ ID NO: 2332870 - RNA, 13 nt, Human
cuagacuuucugu

SEQ ID NO: 2332871 - RNA, 14 nt, Human
cuagacuuucuguu

SEQ ID NO: 2332872 - RNA, 15 nt, Human
cuagagaacgcagcc

SEQ ID NO: 2332873 - RNA, 16 nt, Human
cuagagaacgcagccc

SEQ ID NO: 2332874 - RNA, 17 nt, Human
cuagagaacgcagcccu

SEQ ID NO: 2332875 - RNA, 18 nt, Human
cuagagaacgcagcccua

SEQ ID NO: 2332876 - RNA, 12 nt, Human
cuagagaagagg

SEQ ID NO: 2332877 - RNA, 15 nt, Human
cuagagaagaggcug

SEQ ID NO: 2332878 - RNA, 12 nt, Human
cuagacuuucug

SEQ ID NO: 2332879 - RNA, 16 nt, Human
cuagagggaccucucc

SEQ ID NO: 2332880 - RNA, 15 nt, Human
cuagagggaccucuc

SEQ ID NO: 2332881 - RNA, 14 nt, Human
cuagagggaccucu

SEQ ID NO: 2332882 - RNA, 22 nt, Human
cuagaggcuugcauaauaagcu

SEQ ID NO: 2332883 - RNA, 17 nt, Human
cuagagguucaaagaua

SEQ ID NO: 2332884 - RNA, 21 nt, Human
cuagagguucaaagauauuuu

SEQ ID NO: 2332885 - RNA, 18 nt, Human
cuagagguucaaagauau

SEQ ID NO: 2332886 - RNA, 15 nt, Human
cuagagguucaaaga

SEQ ID NO: 2332887 - RNA, 18 nt, Human
cuagaguuuagcuggaaa

SEQ ID NO: 2332888 - RNA, 16 nt, Human
cuagagugagggccug

SEQ ID NO: 2332889 - RNA, 17 nt, Human
cuagagugagggccuga

SEQ ID NO: 2332890 - RNA, 18 nt, Human
cuagagugagggccugag

SEQ ID NO: 2332891 - RNA, 19 nt, Human
cuagaguuuagcuggaaaa

SEQ ID NO: 2332892 - RNA, 22 nt, Human
cuagaggccagccccacccagg

SEQ ID NO: 2332893 - RNA, 14 nt, Human
cuagagccugccug

SEQ ID NO: 2332894 - RNA, 23 nt, Human
cuagaggccagccccacccagga

SEQ ID NO: 2332895 - RNA, 12 nt, Human
cuagaggccuga

SEQ ID NO: 2332896 - RNA, 14 nt, Human
cuagagcagggauu

SEQ ID NO: 2332897 - RNA, 15 nt, Human
cuagagcagggauua

SEQ ID NO: 2332898 - RNA, 17 nt, Human
cuagagcagcccuggag

SEQ ID NO: 2332899 - RNA, 11 nt, Human
cuagagccugc

SEQ ID NO: 2332900 - RNA, 12 nt, Human
cuagagccugcc

SEQ ID NO: 2332901 - RNA, 13 nt, Human
cuagagccugccu

SEQ ID NO: 2332902 - RNA, 13 nt, Human
cuagaggccugag

SEQ ID NO: 2332903 - RNA, 15 nt, Human
cuagaggccugagga

SEQ ID NO: 2332904 - RNA, 16 nt, Human
cuagaggccugaggau

SEQ ID NO: 2332905 - RNA, 18 nt, Human
cuagaggccugaggauga

SEQ ID NO: 2332906 - RNA, 20 nt, Human
cuagaggccugaggaugagc

SEQ ID NO: 2332907 - RNA, 22 nt, Human
cuagaggccugaggaugagcug

SEQ ID NO: 2332908 - RNA, 23 nt, Human
cuagaggcuuccuucauuuccuc

SEQ ID NO: 2332909 - RNA, 21 nt, Human
cuagaggcuuccuucauuucc

SEQ ID NO: 2332910 - RNA, 19 nt, Human
cuagaggcuuccuucauuu

SEQ ID NO: 2332911 - RNA, 18 nt, Human
cuagaggcuuccuucauu

SEQ ID NO: 2332912 - RNA, 12 nt, Human
cuagagagggag

SEQ ID NO: 2332913 - RNA, 22 nt, Human
cuagagacagaagcaggcugga

SEQ ID NO: 2332914 - RNA, 23 nt, Human
cuagagacagaagcaggcuggag

SEQ ID NO: 2332915 - RNA, 19 nt, Human
cuagagaauguuagaggau

SEQ ID NO: 2332916 - RNA, 15 nt, Human
cuagagacagaagca

SEQ ID NO: 2332917 - RNA, 20 nt, Human
cuagagacagaagcaggcug

SEQ ID NO: 2332918 - RNA, 17 nt, Human
cuagagaagaggcuggu

SEQ ID NO: 2332919 - RNA, 19 nt, Human
cuagagaagaggcuggugc

SEQ ID NO: 2332920 - RNA, 17 nt, Human
cuagagauauggcagcg

SEQ ID NO: 2332921 - RNA, 17 nt, Human
cuagagaucugguuuug

SEQ ID NO: 2332922 - RNA, 23 nt, Human
cuagagagggaggcaagcccugu

SEQ ID NO: 2332923 - RNA, 22 nt, Human
cuagagagggaggcaagcccug

SEQ ID NO: 2332924 - RNA, 21 nt, Human
cuagagagggaggcaagcccu

SEQ ID NO: 2332925 - RNA, 13 nt, Human
cuagagagggagg

SEQ ID NO: 2332926 - RNA, 15 nt, Human
cuagagcagcccugg

SEQ ID NO: 2332927 - RNA, 21 nt, Human
cuagagaucugguuuugcuau

SEQ ID NO: 2332928 - RNA, 22 nt, Human
cuagagaucugguuuugcuauu

SEQ ID NO: 2332929 - RNA, 14 nt, Human
cuacugcagcuuua

SEQ ID NO: 2332930 - RNA, 17 nt, Human
cuacugauuguuucauu

SEQ ID NO: 2332931 - RNA, 17 nt, Human
cuacugauaaagaaaga

SEQ ID NO: 2332932 - RNA, 16 nt, Human
cuacugauuuccuuug

SEQ ID NO: 2332933 - RNA, 16 nt, Human
cuacugauuuuuguga

SEQ ID NO: 2332934 - RNA, 16 nt, Human
cuacugauuguuucau

SEQ ID NO: 2332935 - RNA, 12 nt, Human
cuacucuguguc

SEQ ID NO: 2332936 - RNA, 13 nt, Human
cuacucuguguca

SEQ ID NO: 2332937 - RNA, 22 nt, Human
cuacucucaggaucaagaaagu

SEQ ID NO: 2332938 - RNA, 18 nt, Human
cuacucucccauggcuua

SEQ ID NO: 2332939 - RNA, 22 nt, Human
cuacucuggagguuuguuuaga

SEQ ID NO: 2332940 - RNA, 13 nt, Human
cuacucuccucau

SEQ ID NO: 2332941 - RNA, 12 nt, Human
cuacucuccuca

SEQ ID NO: 2332942 - RNA, 17 nt, Human
cuacucuccucaucucu

SEQ ID NO: 2332943 - RNA, 17 nt, Human
cuacucuccucggcccc

SEQ ID NO: 2332944 - RNA, 14 nt, Human
cuacucugugccag

SEQ ID NO: 2332945 - RNA, 15 nt, Human
cuacugggagccuac

SEQ ID NO: 2332946 - RNA, 14 nt, Human
cuacugggagccua

SEQ ID NO: 2332947 - RNA, 17 nt, Human
cuacugcagcuuuacau

SEQ ID NO: 2332948 - RNA, 19 nt, Human
cuacuguccuacccacccu

SEQ ID NO: 2332949 - RNA, 16 nt, Human
cuacuguaauuuuaua

SEQ ID NO: 2332950 - RNA, 21 nt, Human
cuacuguaauuugugauacaa

SEQ ID NO: 2332951 - RNA, 18 nt, Human
cuacugggagccuaccca

SEQ ID NO: 2332952 - RNA, 21 nt, Human
cuacuccuaccucagccuaga

SEQ ID NO: 2332953 - RNA, 14 nt, Human
cuacuccucugcag

SEQ ID NO: 2332954 - RNA, 15 nt, Human
cuacuccucugcagu

SEQ ID NO: 2332955 - RNA, 18 nt, Human
cuacuccuaccucagccu

SEQ ID NO: 2332956 - RNA, 17 nt, Human
cuacuccuaccucagcc

SEQ ID NO: 2332957 - RNA, 16 nt, Human
cuacuccuaccucagc

SEQ ID NO: 2332958 - RNA, 15 nt, Human
cuacuccuaccucag

SEQ ID NO: 2332959 - RNA, 16 nt, Human
cuacuccggagacagg

SEQ ID NO: 2332960 - RNA, 15 nt, Human
cuaccucagucagua

SEQ ID NO: 2332961 - RNA, 15 nt, Human
cuaccuccucaggga

SEQ ID NO: 2332962 - RNA, 17 nt, Human
cuacucccagacaccca

SEQ ID NO: 2332963 - RNA, 15 nt, Human
cuacucccagacacc

SEQ ID NO: 2332964 - RNA, 14 nt, Human
cuaccuccucaggg

SEQ ID NO: 2332965 - RNA, 18 nt, Human
cuaccucagguugcuggu

SEQ ID NO: 2332966 - RNA, 19 nt, Human
cuaccucagguugcugguu

SEQ ID NO: 2332967 - RNA, 20 nt, Human
cuaccucagguugcugguug

SEQ ID NO: 2332968 - RNA, 22 nt, Human
cuaccucagguugcugguugcu

SEQ ID NO: 2332969 - RNA, 21 nt, Human
cuacuccucugcagugccuug

SEQ ID NO: 2332970 - RNA, 20 nt, Human
cuacuccucugcagugccuu

SEQ ID NO: 2332971 - RNA, 18 nt, Human
cuacuccuguaauuccua

SEQ ID NO: 2332972 - RNA, 15 nt, Human
cuacucgaguuacag

SEQ ID NO: 2332973 - RNA, 16 nt, Human
cuacucgaguuacaga

SEQ ID NO: 2332974 - RNA, 19 nt, Human
cuacucgaguuacagacaa

SEQ ID NO: 2332975 - RNA, 17 nt, Human
cuaccgagucucuucuc

SEQ ID NO: 2332976 - RNA, 19 nt, Human
cuaccgagucucuucucca

SEQ ID NO: 2332977 - RNA, 18 nt, Human
cuaccgaaaccuugccuu

SEQ ID NO: 2332978 - RNA, 18 nt, Human
cuacccuuuuucuccagc

SEQ ID NO: 2332979 - RNA, 19 nt, Human
cuacccuuuuucuccagcu

SEQ ID NO: 2332980 - RNA, 23 nt, Human
cuaccgagucucuucuccacugg

SEQ ID NO: 2332981 - RNA, 21 nt, Human
cuaccgagucucuucuccacu

SEQ ID NO: 2332982 - RNA, 22 nt, Human
cuaccgagucucuucuccacug

SEQ ID NO: 2332983 - RNA, 13 nt, Human
cuaccucaggcag

SEQ ID NO: 2332984 - RNA, 15 nt, Human
cuaccucagccuaga

SEQ ID NO: 2332985 - RNA, 14 nt, Human
cuaccucagccuag

SEQ ID NO: 2332986 - RNA, 12 nt, Human
cuaccucagccu

SEQ ID NO: 2332987 - RNA, 11 nt, Human
cuaccucagcc

SEQ ID NO: 2332988 - RNA, 17 nt, Human
cuaccucacuggggucc

SEQ ID NO: 2332989 - RNA, 22 nt, Human
cuaccucacuauucaaguauua

SEQ ID NO: 2332990 - RNA, 15 nt, Human
cuaccgcucuuggga

SEQ ID NO: 2332991 - RNA, 20 nt, Human
cuaccucaggcaggaagggc

SEQ ID NO: 2332992 - RNA, 14 nt, Human
cuaccucaggcagg

SEQ ID NO: 2332993 - RNA, 17 nt, Human
cuaccucaggcagcuca

SEQ ID NO: 2332994 - RNA, 18 nt, Human
cuaccucaggcagcucaa

SEQ ID NO: 2332995 - RNA, 23 nt, Human
cuaccucaggcaggaagggcagg

SEQ ID NO: 2332996 - RNA, 12 nt, Human
cuaccucagguu

SEQ ID NO: 2332997 - RNA, 13 nt, Human
cuaccucagguug

SEQ ID NO: 2332998 - RNA, 14 nt, Human
cuaccucagguugc

SEQ ID NO: 2332999 - RNA, 15 nt, Human
cuaccucagguugcu

SEQ ID NO: 2333000 - RNA, 17 nt, Human
cuaccucagguugcugg

SEQ ID NO: 2333001 - RNA, 15 nt, Human
cuagcuuagagccuc

SEQ ID NO: 2333002 - RNA, 19 nt, Human
cuagcuuagagccucccuc

SEQ ID NO: 2333003 - RNA, 20 nt, Human
cuagcuuagagccucccuca

SEQ ID NO: 2333004 - RNA, 18 nt, Human
cuagcuguugagcuguuu

SEQ ID NO: 2333005 - RNA, 22 nt, Human
cuagcuuagagccucccucaau

SEQ ID NO: 2333006 - RNA, 13 nt, Human
cuagcuucugcuu

SEQ ID NO: 2333007 - RNA, 14 nt, Human
cuagcuucugcuuu

SEQ ID NO: 2333008 - RNA, 15 nt, Human
cuagcuucugcuuuu

SEQ ID NO: 2333009 - RNA, 16 nt, Human
cuagcuucugcuuuuc

SEQ ID NO: 2333010 - RNA, 18 nt, Human
cuagcuucugcuuuucug

SEQ ID NO: 2333011 - RNA, 21 nt, Human
cuagcuucugcuuuucugccc

SEQ ID NO: 2333012 - RNA, 22 nt, Human
cuagcuucugcuuuucugcccu

SEQ ID NO: 2333013 - RNA, 20 nt, Human
cuagcuugggaggcuucccc

SEQ ID NO: 2333014 - RNA, 23 nt, Human
cuagcuucugcuuuucugcccug

SEQ ID NO: 2333015 - RNA, 15 nt, Human
cuagcuuuagacccu

SEQ ID NO: 2333016 - RNA, 19 nt, Human
cuagcuuuagacccugggu

SEQ ID NO: 2333017 - RNA, 18 nt, Human
cuagcuuuagacccuggg

SEQ ID NO: 2333018 - RNA, 12 nt, Human
cuaggaaaauac

SEQ ID NO: 2333019 - RNA, 14 nt, Human
cuaggaaauauuua

SEQ ID NO: 2333020 - RNA, 15 nt, Human
cuaggaaauauuuau

SEQ ID NO: 2333021 - RNA, 19 nt, Human
cuaggaaauauuuauuuua

SEQ ID NO: 2333022 - RNA, 20 nt, Human
cuaggaaauauuuauuuuaa

SEQ ID NO: 2333023 - RNA, 21 nt, Human
cuagcugcuacaaagaagaca

SEQ ID NO: 2333024 - RNA, 23 nt, Human
cuagcugcuacaaagaagacaug

SEQ ID NO: 2333025 - RNA, 17 nt, Human
cuagcugcacagggcag

SEQ ID NO: 2333026 - RNA, 20 nt, Human
cuagcugcacagggcagcug

SEQ ID NO: 2333027 - RNA, 21 nt, Human
cuagcugcacagggcagcugg

SEQ ID NO: 2333028 - RNA, 14 nt, Human
cuagcugcuacaaa

SEQ ID NO: 2333029 - RNA, 15 nt, Human
cuagcugcuacaaag

SEQ ID NO: 2333030 - RNA, 16 nt, Human
cuagcugcuacaaaga

SEQ ID NO: 2333031 - RNA, 18 nt, Human
cuagcugcuacaaagaag

SEQ ID NO: 2333032 - RNA, 12 nt, Human
cuagcugggggu

SEQ ID NO: 2333033 - RNA, 20 nt, Human
cuagcugggggugggccagg

SEQ ID NO: 2333034 - RNA, 19 nt, Human
cuagcugggggugggccag

SEQ ID NO: 2333035 - RNA, 18 nt, Human
cuagcugggggugggcca

SEQ ID NO: 2333036 - RNA, 22 nt, Human
cuagcugggggugggccaggcu

SEQ ID NO: 2333037 - RNA, 21 nt, Human
cuagcugggggugggccaggc

SEQ ID NO: 2333038 - RNA, 15 nt, Human
cuagcuggugguuuc

SEQ ID NO: 2333039 - RNA, 17 nt, Human
cuagcuggugguuucac

SEQ ID NO: 2333040 - RNA, 22 nt, Human
cuagcuggugguuucacggugc

SEQ ID NO: 2333041 - RNA, 14 nt, Human
cuagcugugggggu

SEQ ID NO: 2333042 - RNA, 22 nt, Human
cuagcuccacacccucucccag

SEQ ID NO: 2333043 - RNA, 10 nt, Human
cuagcucccc

SEQ ID NO: 2333044 - RNA, 13 nt, Human
cuagcuccccucc

SEQ ID NO: 2333045 - RNA, 14 nt, Human
cuagcuccccuccu

SEQ ID NO: 2333046 - RNA, 15 nt, Human
cuagcuccccuccuc

SEQ ID NO: 2333047 - RNA, 16 nt, Human
cuagcuccccuccucu

SEQ ID NO: 2333048 - RNA, 19 nt, Human
cuagcuccccuccucuccc

SEQ ID NO: 2333049 - RNA, 21 nt, Human
cuagcuccccuccucuccccu

SEQ ID NO: 2333050 - RNA, 23 nt, Human
cuagcuagaagugggccaggaca

SEQ ID NO: 2333051 - RNA, 19 nt, Human
cuagcuagaagugggccag

SEQ ID NO: 2333052 - RNA, 17 nt, Human
cuagcuagaaauaugau

SEQ ID NO: 2333053 - RNA, 21 nt, Human
cuagcuagaaauaugauuuua

SEQ ID NO: 2333054 - RNA, 20 nt, Human
cuagcucugagccaguucag

SEQ ID NO: 2333055 - RNA, 16 nt, Human
cuagcugcacagggca

SEQ ID NO: 2333056 - RNA, 23 nt, Human
cuagcucuauguuuacaaaugga

SEQ ID NO: 2333057 - RNA, 14 nt, Human
cuagcucugagcca

SEQ ID NO: 2333058 - RNA, 19 nt, Human
cuagcucugagccaguuca

SEQ ID NO: 2333059 - RNA, 20 nt, Human
cuagcucuauguuuacaaau

SEQ ID NO: 2333060 - RNA, 19 nt, Human
cuagcucuauguuuacaaa

SEQ ID NO: 2333061 - RNA, 23 nt, Human
cuagcuccccuccucuccccuac

SEQ ID NO: 2333062 - RNA, 14 nt, Human
cuagcucgugauug

SEQ ID NO: 2333063 - RNA, 14 nt, Human
cuagauaucgacuu

SEQ ID NO: 2333064 - RNA, 21 nt, Human
cuagauaucgacuuguuuuug

SEQ ID NO: 2333065 - RNA, 24 nt, Human
cuagauacuguaucaugacaaaga

SEQ ID NO: 2333066 - RNA, 16 nt, Human
cuagauacuguaucau

SEQ ID NO: 2333067 - RNA, 13 nt, Human
cuagauacuguau

SEQ ID NO: 2333068 - RNA, 19 nt, Human
cuagccugugccucuggga

SEQ ID NO: 2333069 - RNA, 21 nt, Human
cuagccugugccucugggacu

SEQ ID NO: 2333070 - RNA, 22 nt, Human
cuagccugugccucugggacug

SEQ ID NO: 2333071 - RNA, 21 nt, Human
cuagccuuagaagucacacag

SEQ ID NO: 2333072 - RNA, 19 nt, Human
cuagccuugaggaguguga

SEQ ID NO: 2333073 - RNA, 15 nt, Human
cuagccuuuggcucu

SEQ ID NO: 2333074 - RNA, 16 nt, Human
cuagccuuuggcucug

SEQ ID NO: 2333075 - RNA, 17 nt, Human
cuagccuuauccucuga

SEQ ID NO: 2333076 - RNA, 22 nt, Human
cuagccuuaaucagguccucag

SEQ ID NO: 2333077 - RNA, 18 nt, Human
cuagccuuauccucugau

SEQ ID NO: 2333078 - RNA, 19 nt, Human
cuagccuuauccucugauc

SEQ ID NO: 2333079 - RNA, 21 nt, Human
cuagccuuauccucugaucuc

SEQ ID NO: 2333080 - RNA, 22 nt, Human
cuagccuuauccucugaucucc

SEQ ID NO: 2333081 - RNA, 22 nt, Human
cuagccuuagaagucacacagu

SEQ ID NO: 2333082 - RNA, 23 nt, Human
cuagccuuagaagucacacagua

SEQ ID NO: 2333083 - RNA, 22 nt, Human
cuagcgcugccgcaccccagag

SEQ ID NO: 2333084 - RNA, 12 nt, Human
cuagcgcugccg

SEQ ID NO: 2333085 - RNA, 17 nt, Human
cuagccuuuggcucugg

SEQ ID NO: 2333086 - RNA, 18 nt, Human
cuagccuuuggcucugga

SEQ ID NO: 2333087 - RNA, 19 nt, Human
cuagccuuuggcucuggag

SEQ ID NO: 2333088 - RNA, 20 nt, Human
cuagccuuuggcucuggaga

SEQ ID NO: 2333089 - RNA, 21 nt, Human
cuagccuuuggcucuggagac

SEQ ID NO: 2333090 - RNA, 23 nt, Human
cuagccuuuggcucuggagacag

SEQ ID NO: 2333091 - RNA, 16 nt, Human
cuagcgcugccgcacc

SEQ ID NO: 2333092 - RNA, 22 nt, Human
cuagcuaauguaauaacuguga

SEQ ID NO: 2333093 - RNA, 14 nt, Human
cuagcuagaaauau

SEQ ID NO: 2333094 - RNA, 15 nt, Human
cuagcuagaaauaug

SEQ ID NO: 2333095 - RNA, 16 nt, Human
cuagcuagaaauauga

SEQ ID NO: 2333096 - RNA, 15 nt, Human
cuauaggugcuacaa

SEQ ID NO: 2333097 - RNA, 21 nt, Human
cuauugauauaaauaaaacau

SEQ ID NO: 2333098 - RNA, 17 nt, Human
cuauugacaagucauuu

SEQ ID NO: 2333099 - RNA, 14 nt, Human
cuauugacuucaau

SEQ ID NO: 2333100 - RNA, 16 nt, Human
cuauugacuucaauga

SEQ ID NO: 2333101 - RNA, 15 nt, Human
cuauugauguacagu

SEQ ID NO: 2333102 - RNA, 17 nt, Human
cuauugauguacagucu

SEQ ID NO: 2333103 - RNA, 19 nt, Human
cuauugauguacagucugu

SEQ ID NO: 2333104 - RNA, 20 nt, Human
cuauugauguacagucuguc

SEQ ID NO: 2333105 - RNA, 21 nt, Human
cuauugauguacagucuguca

SEQ ID NO: 2333106 - RNA, 23 nt, Human
cuauugauguacagucugucaug

SEQ ID NO: 2333107 - RNA, 16 nt, Human
cuauugacaagucauu

SEQ ID NO: 2333108 - RNA, 13 nt, Human
cuauugacuucaa

SEQ ID NO: 2333109 - RNA, 12 nt, Human
cuauucucucuu

SEQ ID NO: 2333110 - RNA, 21 nt, Human
cuauucucuccaaaaaugcac

SEQ ID NO: 2333111 - RNA, 14 nt, Human
cuauucucuccaaa

SEQ ID NO: 2333112 - RNA, 19 nt, Human
cuauucaguggcgagaaau

SEQ ID NO: 2333113 - RNA, 15 nt, Human
cuauucuccagcuga

SEQ ID NO: 2333114 - RNA, 23 nt, Human
cuauucagcuucguuuauuuuca

SEQ ID NO: 2333115 - RNA, 23 nt, Human
cuauucaguaauaacucuacccu

SEQ ID NO: 2333116 - RNA, 17 nt, Human
cuauuguaaauauguuu

SEQ ID NO: 2333117 - RNA, 17 nt, Human
cuauucaguaauaacuc

SEQ ID NO: 2333118 - RNA, 21 nt, Human
cuauucaggagaguagaacag

SEQ ID NO: 2333119 - RNA, 17 nt, Human
cuauucagacaagcaac

SEQ ID NO: 2333120 - RNA, 14 nt, Human
cuauucagacaagc

SEQ ID NO: 2333121 - RNA, 15 nt, Human
cuauucagacaagca

SEQ ID NO: 2333122 - RNA, 22 nt, Human
cuauuauuuucacuguagaaug

SEQ ID NO: 2333123 - RNA, 20 nt, Human
cuauuauuuucacuguagaa

SEQ ID NO: 2333124 - RNA, 21 nt, Human
cuauuauaauuuaaugcaugu

SEQ ID NO: 2333125 - RNA, 16 nt, Human
cuauuauacuguauua

SEQ ID NO: 2333126 - RNA, 14 nt, Human
cuauuauagccaca

SEQ ID NO: 2333127 - RNA, 17 nt, Human
cuauuauaauuuaaugc

SEQ ID NO: 2333128 - RNA, 16 nt, Human
cuauuauaauuuaaug

SEQ ID NO: 2333129 - RNA, 17 nt, Human
cuauuauccccauuucu

SEQ ID NO: 2333130 - RNA, 16 nt, Human
cuauuauccccauuuc

SEQ ID NO: 2333131 - RNA, 18 nt, Human
cuauuauagccacauccc

SEQ ID NO: 2333132 - RNA, 14 nt, Human
cuauuauauuaaaa

SEQ ID NO: 2333133 - RNA, 15 nt, Human
cuauuauaauuuaau

SEQ ID NO: 2333134 - RNA, 13 nt, Human
cuauguaucaaug

SEQ ID NO: 2333135 - RNA, 13 nt, Human
cuaugcguuuuua

SEQ ID NO: 2333136 - RNA, 21 nt, Human
cuauggggagaaaagacauga

SEQ ID NO: 2333137 - RNA, 17 nt, Human
cuauggggagaaaagac

SEQ ID NO: 2333138 - RNA, 19 nt, Human
cuaugggagccccaggguc

SEQ ID NO: 2333139 - RNA, 20 nt, Human
cuauggggauagaugugugg

SEQ ID NO: 2333140 - RNA, 19 nt, Human
cuauggggauagaugugug

SEQ ID NO: 2333141 - RNA, 21 nt, Human
cuauguaacugcauugagaac

SEQ ID NO: 2333142 - RNA, 22 nt, Human
cuauguaggaaagaccauuuuu

SEQ ID NO: 2333143 - RNA, 20 nt, Human
cuauguaguccgugcugaca

SEQ ID NO: 2333144 - RNA, 23 nt, Human
cuauguaggaaagaccauuuuuc

SEQ ID NO: 2333145 - RNA, 18 nt, Human
cuauggggaugguccacu

SEQ ID NO: 2333146 - RNA, 15 nt, Human
cuauggggauggucc

SEQ ID NO: 2333147 - RNA, 21 nt, Human
cuauggggauagaugugugga

SEQ ID NO: 2333148 - RNA, 15 nt, Human
cuauguaacugcauu

SEQ ID NO: 2333149 - RNA, 22 nt, Human
cuauguaacauguaggaaguag

SEQ ID NO: 2333150 - RNA, 18 nt, Human
cuauagccuggggugggg

SEQ ID NO: 2333151 - RNA, 14 nt, Human
cuauagccuggggu

SEQ ID NO: 2333152 - RNA, 13 nt, Human
cuauagccugggg

SEQ ID NO: 2333153 - RNA, 12 nt, Human
cuauagccuggg

SEQ ID NO: 2333154 - RNA, 21 nt, Human
cuauagccuggggugggguca

SEQ ID NO: 2333155 - RNA, 14 nt, Human
cuauagcucaggac

SEQ ID NO: 2333156 - RNA, 16 nt, Human
cuauagcucaggaccu

SEQ ID NO: 2333157 - RNA, 23 nt, Human
cuauagcucaggaccugggaccu

SEQ ID NO: 2333158 - RNA, 21 nt, Human
cuauaguccagcuuuguucuu

SEQ ID NO: 2333159 - RNA, 19 nt, Human
cuauaggucauacaaucca

SEQ ID NO: 2333160 - RNA, 18 nt, Human
cuauaggcuggagaagcu

SEQ ID NO: 2333161 - RNA, 22 nt, Human
cuauaggcuggagaagcucacc

SEQ ID NO: 2333162 - RNA, 15 nt, Human
cuauaggcuggagaa

SEQ ID NO: 2333163 - RNA, 16 nt, Human
cuauaggcuggagaag

SEQ ID NO: 2333164 - RNA, 17 nt, Human
cuauaggcuggagaagc

SEQ ID NO: 2333165 - RNA, 23 nt, Human
cuauauaggcaucacauuuuugu

SEQ ID NO: 2333166 - RNA, 14 nt, Human
cuauauagagaugu

SEQ ID NO: 2333167 - RNA, 19 nt, Human
cuaugaaauauuauguuaa

SEQ ID NO: 2333168 - RNA, 21 nt, Human
cuauauacucacuuucuagau

SEQ ID NO: 2333169 - RNA, 20 nt, Human
cuaugccagcucagucccau

SEQ ID NO: 2333170 - RNA, 19 nt, Human
cuaugccagcucaguccca

SEQ ID NO: 2333171 - RNA, 14 nt, Human
cuaugccugugucu

SEQ ID NO: 2333172 - RNA, 22 nt, Human
cuaugccaaagaucacuuguug

SEQ ID NO: 2333173 - RNA, 15 nt, Human
cuaugccaaagauca

SEQ ID NO: 2333174 - RNA, 22 nt, Human
cuaugcaauauaucuaaauuga

SEQ ID NO: 2333175 - RNA, 17 nt, Human
cuaugccaaagaucacu

SEQ ID NO: 2333176 - RNA, 18 nt, Human
cuaugccaaagaucacuu

SEQ ID NO: 2333177 - RNA, 19 nt, Human
cuaugauuuggaaaauaaa

SEQ ID NO: 2333178 - RNA, 20 nt, Human
cuaugcaauauaucuaaauu

SEQ ID NO: 2333179 - RNA, 12 nt, Human
cuaugcacauau

SEQ ID NO: 2333180 - RNA, 15 nt, Human
cuaugauuuggaaaa

SEQ ID NO: 2333181 - RNA, 13 nt, Human
cuaugaacuacaa

SEQ ID NO: 2333182 - RNA, 18 nt, Human
cuaugaaguauauaaugg

SEQ ID NO: 2333183 - RNA, 23 nt, Human
cuaugaaguauauaaugguuuca

SEQ ID NO: 2333184 - RNA, 20 nt, Human
cuaugaaucuauuauacugu

SEQ ID NO: 2333185 - RNA, 14 nt, Human
cuaugaaugggcaa

SEQ ID NO: 2333186 - RNA, 14 nt, Human
cuaugaucucaggu

SEQ ID NO: 2333187 - RNA, 17 nt, Human
cuaugaucucagguucu

SEQ ID NO: 2333188 - RNA, 16 nt, Human
cuaugaugcuguugcc

SEQ ID NO: 2333189 - RNA, 22 nt, Human
cuaugaaguuuuuuuuauacag

SEQ ID NO: 2333190 - RNA, 19 nt, Human
cuaugaacucuguuuucuu

SEQ ID NO: 2333191 - RNA, 15 nt, Human
cuauauagagauguu

SEQ ID NO: 2333192 - RNA, 13 nt, Human
cuaugaaggcugu

SEQ ID NO: 2333193 - RNA, 17 nt, Human
cuaugaacuucucucag

SEQ ID NO: 2333194 - RNA, 11 nt, Human
cuaggaagaau

SEQ ID NO: 2333195 - RNA, 14 nt, Human
cuaggaagaauuuu

SEQ ID NO: 2333196 - RNA, 15 nt, Human
cuaggaagaauuuua

SEQ ID NO: 2333197 - RNA, 19 nt, Human
cuaggaagaauuuuaaaaa

SEQ ID NO: 2333198 - RNA, 20 nt, Human
cuaggaagaauuuuaaaaau

SEQ ID NO: 2333199 - RNA, 20 nt, Human
cuaggaacacuccuucacag

SEQ ID NO: 2333200 - RNA, 15 nt, Human
cuaggaagacuuugg

SEQ ID NO: 2333201 - RNA, 17 nt, Human
cuaggaagacuuuggaa

SEQ ID NO: 2333202 - RNA, 20 nt, Human
cuauaauucccuaucuuuua

SEQ ID NO: 2333203 - RNA, 23 nt, Human
cuaggaagaauuuuaaaaaugaa

SEQ ID NO: 2333204 - RNA, 21 nt, Human
cuaggaagaauuuuaaaaaug

SEQ ID NO: 2333205 - RNA, 22 nt, Human
cuaggaagaauuuuaaaaauga

SEQ ID NO: 2333206 - RNA, 13 nt, Human
cuauaauuuaaau

SEQ ID NO: 2333207 - RNA, 12 nt, Human
cuauaauuuaaa

SEQ ID NO: 2333208 - RNA, 19 nt, Human
cuauagccuaggugacaga

SEQ ID NO: 2333209 - RNA, 18 nt, Human
cuauagccuaggugacag

SEQ ID NO: 2333210 - RNA, 20 nt, Human
cuauagccuaggugacagag

SEQ ID NO: 2333211 - RNA, 21 nt, Human
cuauagccuaggugacagagu

SEQ ID NO: 2333212 - RNA, 20 nt, Human
cuauaccugggcauacuaau

SEQ ID NO: 2333213 - RNA, 15 nt, Human
cuauaccugugccuc

SEQ ID NO: 2333214 - RNA, 14 nt, Human
cuauaccugugccu

SEQ ID NO: 2333215 - RNA, 22 nt, Human
cuauaauucccuaucuuuuagu

SEQ ID NO: 2333216 - RNA, 19 nt, Human
cuauaccugugccucggcu

SEQ ID NO: 2333217 - RNA, 21 nt, Human
cuauaccugggcauacuaaua

SEQ ID NO: 2333218 - RNA, 19 nt, Human
cuauacgcagcgugcuuua

SEQ ID NO: 2333219 - RNA, 17 nt, Human
cuauacugcauacuuuu

SEQ ID NO: 2333220 - RNA, 21 nt, Human
cuauacugcauacuuuuuaaa

SEQ ID NO: 2333221 - RNA, 19 nt, Human
cuauacugcauacuuuuua

SEQ ID NO: 2333222 - RNA, 13 nt, Human
cucaaauuucuaa

SEQ ID NO: 2333223 - RNA, 12 nt, Human
cucaaauuugga

SEQ ID NO: 2333224 - RNA, 20 nt, Human
cucaacauguuacugaccag

SEQ ID NO: 2333225 - RNA, 16 nt, Human
cucaacauguuacuga

SEQ ID NO: 2333226 - RNA, 20 nt, Human
cucaacaugagucaagagca

SEQ ID NO: 2333227 - RNA, 15 nt, Human
cucaacaugagucaa

SEQ ID NO: 2333228 - RNA, 18 nt, Human
cucaacaugagucaagag

SEQ ID NO: 2333229 - RNA, 17 nt, Human
cucaaauuucuaaaucu

SEQ ID NO: 2333230 - RNA, 15 nt, Human
cucaaauuucuaaau

SEQ ID NO: 2333231 - RNA, 16 nt, Human
cucaacccucccucag

SEQ ID NO: 2333232 - RNA, 19 nt, Human
cucaacccccauuucuauu

SEQ ID NO: 2333233 - RNA, 22 nt, Human
cucaacccccauuucuauuuau

SEQ ID NO: 2333234 - RNA, 18 nt, Human
cucaaccccaccacuucu

SEQ ID NO: 2333235 - RNA, 20 nt, Human
cucaaccauccccuccgugg

SEQ ID NO: 2333236 - RNA, 15 nt, Human
cucaaccauccccuc

SEQ ID NO: 2333237 - RNA, 18 nt, Human
cucaaccaccuuucagau

SEQ ID NO: 2333238 - RNA, 22 nt, Human
cucaacccucccucagccccuc

SEQ ID NO: 2333239 - RNA, 21 nt, Human
cucaacccucccucagccccu

SEQ ID NO: 2333240 - RNA, 19 nt, Human
cucaacccucccucagccc

SEQ ID NO: 2333241 - RNA, 18 nt, Human
cucaacccucccucagcc

SEQ ID NO: 2333242 - RNA, 13 nt, Human
cucaacccucuca

SEQ ID NO: 2333243 - RNA, 20 nt, Human
cucaaccuaccaccccuucc

SEQ ID NO: 2333244 - RNA, 14 nt, Human
cucaacucuccucc

SEQ ID NO: 2333245 - RNA, 14 nt, Human
cucaaauuucuaaa

SEQ ID NO: 2333246 - RNA, 13 nt, Human
cuauuucugagaa

SEQ ID NO: 2333247 - RNA, 16 nt, Human
cuauuucuccuccaug

SEQ ID NO: 2333248 - RNA, 15 nt, Human
cuauuucuccuccau

SEQ ID NO: 2333249 - RNA, 23 nt, Human
cuauuucugagaagguccuuaau

SEQ ID NO: 2333250 - RNA, 12 nt, Human
cuauuucugcug

SEQ ID NO: 2333251 - RNA, 13 nt, Human
cuauuucugcuga

SEQ ID NO: 2333252 - RNA, 20 nt, Human
cuauuucugcugaauuuuca

SEQ ID NO: 2333253 - RNA, 21 nt, Human
cuauuucugcugaauuuucac

SEQ ID NO: 2333254 - RNA, 14 nt, Human
cuauuuauuuacug

SEQ ID NO: 2333255 - RNA, 15 nt, Human
cuauuuauuuacuga

SEQ ID NO: 2333256 - RNA, 18 nt, Human
cuauuuauuuacugagcu

SEQ ID NO: 2333257 - RNA, 15 nt, Human
cuauuucuaugagaa

SEQ ID NO: 2333258 - RNA, 22 nt, Human
cucaagcagcgaccgcccccuc

SEQ ID NO: 2333259 - RNA, 17 nt, Human
cucaacucaccuaaugu

SEQ ID NO: 2333260 - RNA, 16 nt, Human
cucaacucuccuccag

SEQ ID NO: 2333261 - RNA, 18 nt, Human
cucaacucuccuccagag

SEQ ID NO: 2333262 - RNA, 17 nt, Human
cucaagcccgcggggac

SEQ ID NO: 2333263 - RNA, 18 nt, Human
cucaagccaauccccucc

SEQ ID NO: 2333264 - RNA, 20 nt, Human
cucaagccaauccccuccuu

SEQ ID NO: 2333265 - RNA, 22 nt, Human
cucaagccaagcagccaagcuc

SEQ ID NO: 2333266 - RNA, 21 nt, Human
cucaagccaagcagccaagcu

SEQ ID NO: 2333267 - RNA, 18 nt, Human
cucaagccaagcagccaa

SEQ ID NO: 2333268 - RNA, 16 nt, Human
cucaagccaagcagcc

SEQ ID NO: 2333269 - RNA, 23 nt, Human
cucaagcagucuacccaccucag

SEQ ID NO: 2333270 - RNA, 14 nt, Human
cucaagcagucuac

SEQ ID NO: 2333271 - RNA, 23 nt, Human
cucaagcagcgaccgcccccucc

SEQ ID NO: 2333272 - RNA, 16 nt, Human
cucaaggcgugaggau

SEQ ID NO: 2333273 - RNA, 15 nt, Human
cucaaggcgugagga

SEQ ID NO: 2333274 - RNA, 21 nt, Human
cucaagggcuagcaucccuga

SEQ ID NO: 2333275 - RNA, 20 nt, Human
cucaaggggccauccugucc

SEQ ID NO: 2333276 - RNA, 22 nt, Human
cucaaggggccauccuguccca

SEQ ID NO: 2333277 - RNA, 23 nt, Human
cucaaggggccauccugucccac

SEQ ID NO: 2333278 - RNA, 12 nt, Human
cucaagcccugc

SEQ ID NO: 2333279 - RNA, 13 nt, Human
cucaagcccugca

SEQ ID NO: 2333280 - RNA, 19 nt, Human
cucaaggccucccacagug

SEQ ID NO: 2333281 - RNA, 20 nt, Human
cucaaggccucccacaguga

SEQ ID NO: 2333282 - RNA, 19 nt, Human
cucaagucacucccaagcc

SEQ ID NO: 2333283 - RNA, 14 nt, Human
cucaaguccucuuu

SEQ ID NO: 2333284 - RNA, 19 nt, Human
cucaaggugggccuugcua

SEQ ID NO: 2333285 - RNA, 18 nt, Human
cucaagggggacugucuu

SEQ ID NO: 2333286 - RNA, 21 nt, Human
cucacaccgcgucuggugaca

SEQ ID NO: 2333287 - RNA, 20 nt, Human
cucaagucacucccaagccc

SEQ ID NO: 2333288 - RNA, 13 nt, Human
cucacacucaccc

SEQ ID NO: 2333289 - RNA, 23 nt, Human
cucacacggacacucaaaagcug

SEQ ID NO: 2333290 - RNA, 12 nt, Human
cucacacugaga

SEQ ID NO: 2333291 - RNA, 13 nt, Human
cucacacugagaa

SEQ ID NO: 2333292 - RNA, 14 nt, Human
cucacacugagaau

SEQ ID NO: 2333293 - RNA, 20 nt, Human
cucacacugagaauguaaga

SEQ ID NO: 2333294 - RNA, 13 nt, Human
cucacagaagaau

SEQ ID NO: 2333295 - RNA, 17 nt, Human
cucacagaacccuugga

SEQ ID NO: 2333296 - RNA, 13 nt, Human
cucacagaaauga

SEQ ID NO: 2333297 - RNA, 9 nt, Human
cuauuuaag

SEQ ID NO: 2333298 - RNA, 12 nt, Human
cuauuuaauauu

SEQ ID NO: 2333299 - RNA, 14 nt, Human
cuauuuaauauuua

SEQ ID NO: 2333300 - RNA, 22 nt, Human
cuauuuaugugauccuuuugga

SEQ ID NO: 2333301 - RNA, 15 nt, Human
cuauuuaauauuuau

SEQ ID NO: 2333302 - RNA, 22 nt, Human
cuauuuaacuggcuucagccuc

SEQ ID NO: 2333303 - RNA, 14 nt, Human
cuauuuaacuugag

SEQ ID NO: 2333304 - RNA, 15 nt, Human
cuauuuaacuugagg

SEQ ID NO: 2333305 - RNA, 15 nt, Human
cuauuuaaaaaagag

SEQ ID NO: 2333306 - RNA, 15 nt, Human
cuauuuaaagccucc

SEQ ID NO: 2333307 - RNA, 16 nt, Human
cuauuuaaaacuugua

SEQ ID NO: 2333308 - RNA, 17 nt, Human
cuauuuaaaacuuguaa

SEQ ID NO: 2333309 - RNA, 23 nt, Human
cuauuggguucauuauuggaauu

SEQ ID NO: 2333310 - RNA, 13 nt, Human
cuauuguaaauau

SEQ ID NO: 2333311 - RNA, 16 nt, Human
cuauuggguucauuau

SEQ ID NO: 2333312 - RNA, 15 nt, Human
cuauuggguucauua

SEQ ID NO: 2333313 - RNA, 11 nt, Human
cuauugguaaa

SEQ ID NO: 2333314 - RNA, 18 nt, Human
cuauuguuagucucuuga

SEQ ID NO: 2333315 - RNA, 14 nt, Human
cuauuguaaauaug

SEQ ID NO: 2333316 - RNA, 14 nt, Human
cuauuguuuauucu

SEQ ID NO: 2333317 - RNA, 22 nt, Human
cuauuguuuauucuuuuuaaag

SEQ ID NO: 2333318 - RNA, 21 nt, Human
cuauuguuucuuuaagaaagu

SEQ ID NO: 2333319 - RNA, 16 nt, Human
cuauugcugcuugagg

SEQ ID NO: 2333320 - RNA, 18 nt, Human
cuauugcaguuauagaaa

SEQ ID NO: 2333321 - RNA, 21 nt, Human
cuauugcaaagguuccaacug

SEQ ID NO: 2333322 - RNA, 22 nt, Human
cuauugcaaagguuccaacugu

SEQ ID NO: 2333323 - RNA, 12 nt, Human
cuauugcccagg

SEQ ID NO: 2333324 - RNA, 21 nt, Human
cucagcugcuucucccacuug

SEQ ID NO: 2333325 - RNA, 23 nt, Human
cucagcuggaugauggucuucag

SEQ ID NO: 2333326 - RNA, 20 nt, Human
cucagcucuuggcuccacug

SEQ ID NO: 2333327 - RNA, 12 nt, Human
cucagcugccuc

SEQ ID NO: 2333328 - RNA, 16 nt, Human
cucagcugccucacuu

SEQ ID NO: 2333329 - RNA, 14 nt, Human
cucagcugccucac

SEQ ID NO: 2333330 - RNA, 18 nt, Human
cucagcugccucacuucc

SEQ ID NO: 2333331 - RNA, 16 nt, Human
cucagcucuucugacu

SEQ ID NO: 2333332 - RNA, 12 nt, Human
cucagcugcuuc

SEQ ID NO: 2333333 - RNA, 13 nt, Human
cucagcugcuucu

SEQ ID NO: 2333334 - RNA, 15 nt, Human
cucagcugcuucucc

SEQ ID NO: 2333335 - RNA, 16 nt, Human
cucagcugcuucuccc

SEQ ID NO: 2333336 - RNA, 17 nt, Human
cucagcugcuucuccca

SEQ ID NO: 2333337 - RNA, 18 nt, Human
cucagcucuuggcuccac

SEQ ID NO: 2333338 - RNA, 17 nt, Human
cucagcucuuggcucca

SEQ ID NO: 2333339 - RNA, 23 nt, Human
cucagcucugggccauucuccac

SEQ ID NO: 2333340 - RNA, 14 nt, Human
cucagcucugggcc

SEQ ID NO: 2333341 - RNA, 13 nt, Human
cucagcucuggga

SEQ ID NO: 2333342 - RNA, 14 nt, Human
cucagcucugggag

SEQ ID NO: 2333343 - RNA, 15 nt, Human
cucagcucugggaga

SEQ ID NO: 2333344 - RNA, 16 nt, Human
cucagcucugggagag

SEQ ID NO: 2333345 - RNA, 18 nt, Human
cucagcucugggagagga

SEQ ID NO: 2333346 - RNA, 22 nt, Human
cucagcucugggagaggauuuu

SEQ ID NO: 2333347 - RNA, 12 nt, Human
cucagcucuggg

SEQ ID NO: 2333348 - RNA, 20 nt, Human
cucagcucccccuguccccu

SEQ ID NO: 2333349 - RNA, 18 nt, Human
cucagcucccccuguccc

SEQ ID NO: 2333350 - RNA, 19 nt, Human
cucagcucccccugucccc

SEQ ID NO: 2333351 - RNA, 12 nt, Human
cucaggaagaac

SEQ ID NO: 2333352 - RNA, 14 nt, Human
cucaggaagaacac

SEQ ID NO: 2333353 - RNA, 13 nt, Human
cucaggaagaaca

SEQ ID NO: 2333354 - RNA, 15 nt, Human
cucaggaagccccca

SEQ ID NO: 2333355 - RNA, 19 nt, Human
cucaggaagcccccaaguu

SEQ ID NO: 2333356 - RNA, 15 nt, Human
cucaggaaugggcug

SEQ ID NO: 2333357 - RNA, 16 nt, Human
cucaggaaugggcugu

SEQ ID NO: 2333358 - RNA, 21 nt, Human
cucagcuuuuugucuuuucug

SEQ ID NO: 2333359 - RNA, 17 nt, Human
cucagcuuuuugucuuu

SEQ ID NO: 2333360 - RNA, 16 nt, Human
cucagcuucuccugug

SEQ ID NO: 2333361 - RNA, 16 nt, Human
cucagcuuccuaccca

SEQ ID NO: 2333362 - RNA, 22 nt, Human
cucagcuuccuacccacaccuc

SEQ ID NO: 2333363 - RNA, 14 nt, Human
cucagcuuccuacc

SEQ ID NO: 2333364 - RNA, 17 nt, Human
cucaggaaaacgggacc

SEQ ID NO: 2333365 - RNA, 12 nt, Human
cucaggaaaacg

SEQ ID NO: 2333366 - RNA, 22 nt, Human
cucaggaaaucaaauaugcaaa

SEQ ID NO: 2333367 - RNA, 12 nt, Human
cucaggaccuag

SEQ ID NO: 2333368 - RNA, 12 nt, Human
cucaggaccagg

SEQ ID NO: 2333369 - RNA, 14 nt, Human
cucaggaccaggca

SEQ ID NO: 2333370 - RNA, 21 nt, Human
cucaggacucagaagccucug

SEQ ID NO: 2333371 - RNA, 16 nt, Human
cucaggacucagaagc

SEQ ID NO: 2333372 - RNA, 14 nt, Human
cucaggacucagaa

SEQ ID NO: 2333373 - RNA, 15 nt, Human
cucaggaccaggcaa

SEQ ID NO: 2333374 - RNA, 16 nt, Human
cucaggaccugggacc

SEQ ID NO: 2333375 - RNA, 18 nt, Human
cucaggacagaugccaca

SEQ ID NO: 2333376 - RNA, 16 nt, Human
cucaggacagaugcca

SEQ ID NO: 2333377 - RNA, 14 nt, Human
cucaggacagaugc

SEQ ID NO: 2333378 - RNA, 12 nt, Human
cucaggacagau

SEQ ID NO: 2333379 - RNA, 19 nt, Human
cucaggacagaugccacac

SEQ ID NO: 2333380 - RNA, 20 nt, Human
cucaggaccaaagcuuucau

SEQ ID NO: 2333381 - RNA, 22 nt, Human
cucaggaccaaagcuuucaugu

SEQ ID NO: 2333382 - RNA, 21 nt, Human
cucaggaccaaagcuuucaug

SEQ ID NO: 2333383 - RNA, 16 nt, Human
cucaggacuccucucc

SEQ ID NO: 2333384 - RNA, 22 nt, Human
cucaggaccugggaccuccccu

SEQ ID NO: 2333385 - RNA, 16 nt, Human
cucaggacugcaacag

SEQ ID NO: 2333386 - RNA, 15 nt, Human
cucaggacuccucuc

SEQ ID NO: 2333387 - RNA, 14 nt, Human
cucaggacugcgac

SEQ ID NO: 2333388 - RNA, 17 nt, Human
cucaggacugcaacagg

SEQ ID NO: 2333389 - RNA, 19 nt, Human
cucaggacugcaacaggcu

SEQ ID NO: 2333390 - RNA, 12 nt, Human
cucaggagcaca

SEQ ID NO: 2333391 - RNA, 12 nt, Human
cucaggagcccu

SEQ ID NO: 2333392 - RNA, 13 nt, Human
cucaggagcccug

SEQ ID NO: 2333393 - RNA, 14 nt, Human
cucaggagcccugg

SEQ ID NO: 2333394 - RNA, 15 nt, Human
cucaggagcccuggg

SEQ ID NO: 2333395 - RNA, 16 nt, Human
cucaggagcccuggga

SEQ ID NO: 2333396 - RNA, 17 nt, Human
cucaggagcccugggag

SEQ ID NO: 2333397 - RNA, 20 nt, Human
cucaggagcccugggaggcu

SEQ ID NO: 2333398 - RNA, 21 nt, Human
cucaggagcccugggaggcuc

SEQ ID NO: 2333399 - RNA, 22 nt, Human
cucaggagcccugggaggcucu

SEQ ID NO: 2333400 - RNA, 23 nt, Human
cucaggagcccugggaggcucug

SEQ ID NO: 2333401 - RNA, 12 nt, Human
cucagguggcca

SEQ ID NO: 2333402 - RNA, 20 nt, Human
cucagguggccagccuggau

SEQ ID NO: 2333403 - RNA, 13 nt, Human
cucagguggccau

SEQ ID NO: 2333404 - RNA, 21 nt, Human
cucagguggccagccuggauc

SEQ ID NO: 2333405 - RNA, 22 nt, Human
cucagguggccagccuggaucu

SEQ ID NO: 2333406 - RNA, 15 nt, Human
cucagguggccaugc

SEQ ID NO: 2333407 - RNA, 18 nt, Human
cucagguggccaugccuc

SEQ ID NO: 2333408 - RNA, 19 nt, Human
cucagguggccaugccuca

SEQ ID NO: 2333409 - RNA, 20 nt, Human
cucagguggccaugccucag

SEQ ID NO: 2333410 - RNA, 22 nt, Human
cucaggugauccacccaccuca

SEQ ID NO: 2333411 - RNA, 20 nt, Human
cucaggugauccaccugccu

SEQ ID NO: 2333412 - RNA, 20 nt, Human
cucaggugaucuaccugccu

SEQ ID NO: 2333413 - RNA, 23 nt, Human
cucaggugauccacccaccucag

SEQ ID NO: 2333414 - RNA, 21 nt, Human
cucagguggccaugccucagc

SEQ ID NO: 2333415 - RNA, 13 nt, Human
cucaggugggcgu

SEQ ID NO: 2333416 - RNA, 21 nt, Human
cucaguucccuuggccucaga

SEQ ID NO: 2333417 - RNA, 20 nt, Human
cucaguucccuuggccucag

SEQ ID NO: 2333418 - RNA, 21 nt, Human
cucagguggggucacucuggc

SEQ ID NO: 2333419 - RNA, 19 nt, Human
cucagguggggucacucug

SEQ ID NO: 2333420 - RNA, 20 nt, Human
cucagguggggucacucugg

SEQ ID NO: 2333421 - RNA, 14 nt, Human
cucagggccugguc

SEQ ID NO: 2333422 - RNA, 20 nt, Human
cucagggucccugguggcag

SEQ ID NO: 2333423 - RNA, 21 nt, Human
cucagggucccugguggcagc

SEQ ID NO: 2333424 - RNA, 22 nt, Human
cucagggucccugguggcagcu

SEQ ID NO: 2333425 - RNA, 24 nt, Human
cucagguaaucgaccugccucggc

SEQ ID NO: 2333426 - RNA, 22 nt, Human
cucagguaaucgaccugccucg

SEQ ID NO: 2333427 - RNA, 20 nt, Human
cucagguaaucgaccugccu

SEQ ID NO: 2333428 - RNA, 19 nt, Human
cucagggucucugcugccg

SEQ ID NO: 2333429 - RNA, 18 nt, Human
cucagggucucugcugcc

SEQ ID NO: 2333430 - RNA, 24 nt, Human
cucagggucccugguggcagcuca

SEQ ID NO: 2333431 - RNA, 13 nt, Human
cucagggucucug

SEQ ID NO: 2333432 - RNA, 14 nt, Human
cucagggucucugc

SEQ ID NO: 2333433 - RNA, 16 nt, Human
cucagggucucugcug

SEQ ID NO: 2333434 - RNA, 17 nt, Human
cucagggucucugcugc

SEQ ID NO: 2333435 - RNA, 13 nt, Human
cucagggccccag

SEQ ID NO: 2333436 - RNA, 12 nt, Human
cucagggcccca

SEQ ID NO: 2333437 - RNA, 19 nt, Human
cucagggccaugcugaggc

SEQ ID NO: 2333438 - RNA, 20 nt, Human
cucagggccaugcugaggcc

SEQ ID NO: 2333439 - RNA, 20 nt, Human
cucagggccaugccugcccc

SEQ ID NO: 2333440 - RNA, 15 nt, Human
cucagggccaugcug

SEQ ID NO: 2333441 - RNA, 17 nt, Human
cucagggccaugcugag

SEQ ID NO: 2333442 - RNA, 18 nt, Human
cucagggccaugcugagg

SEQ ID NO: 2333443 - RNA, 17 nt, Human
cucaggcaugccugugu

SEQ ID NO: 2333444 - RNA, 16 nt, Human
cucaggcaugccugug

SEQ ID NO: 2333445 - RNA, 15 nt, Human
cucaggcaugccugu

SEQ ID NO: 2333446 - RNA, 23 nt, Human
cucaggcauaggccugggugcug

SEQ ID NO: 2333447 - RNA, 22 nt, Human
cucaggcauaggccugggugcu

SEQ ID NO: 2333448 - RNA, 18 nt, Human
cucaggcaugccugugug

SEQ ID NO: 2333449 - RNA, 20 nt, Human
cucagggcagcgccaggcug

SEQ ID NO: 2333450 - RNA, 13 nt, Human
cucagggccaugc

SEQ ID NO: 2333451 - RNA, 16 nt, Human
cucagggccccagcac

SEQ ID NO: 2333452 - RNA, 14 nt, Human
cucagggccccagc

SEQ ID NO: 2333453 - RNA, 18 nt, Human
cucagggccccagcacua

SEQ ID NO: 2333454 - RNA, 18 nt, Human
cucagggccuggcucagg

SEQ ID NO: 2333455 - RNA, 19 nt, Human
cucagggccuggcucaggu

SEQ ID NO: 2333456 - RNA, 20 nt, Human
cucagggccuggcucaggug

SEQ ID NO: 2333457 - RNA, 21 nt, Human
cucaggcauaggccugggugc

SEQ ID NO: 2333458 - RNA, 20 nt, Human
cucaggcauaggccugggug

SEQ ID NO: 2333459 - RNA, 17 nt, Human
cucaggcauaggccugg

SEQ ID NO: 2333460 - RNA, 16 nt, Human
cucaggcauaggccug

SEQ ID NO: 2333461 - RNA, 19 nt, Human
cucaggaggcugaggcaga

SEQ ID NO: 2333462 - RNA, 13 nt, Human
cucaggaggcuga

SEQ ID NO: 2333463 - RNA, 18 nt, Human
cucaggaggcugaggcag

SEQ ID NO: 2333464 - RNA, 18 nt, Human
cucaggcaggugggaugg

SEQ ID NO: 2333465 - RNA, 17 nt, Human
cucaggaggcugaggca

SEQ ID NO: 2333466 - RNA, 15 nt, Human
cucaggaggcugagg

SEQ ID NO: 2333467 - RNA, 14 nt, Human
cucaggaggcugag

SEQ ID NO: 2333468 - RNA, 15 nt, Human
cucaggcagguggga

SEQ ID NO: 2333469 - RNA, 24 nt, Human
cucaggagcccugggaggcucugg

SEQ ID NO: 2333470 - RNA, 16 nt, Human
cucaggagccucugcu

SEQ ID NO: 2333471 - RNA, 14 nt, Human
cucaggagcacagg

SEQ ID NO: 2333472 - RNA, 15 nt, Human
cucaggagcacaggc

SEQ ID NO: 2333473 - RNA, 17 nt, Human
cucaggagcacaggcag

SEQ ID NO: 2333474 - RNA, 18 nt, Human
cucaggagcacaggcagc

SEQ ID NO: 2333475 - RNA, 18 nt, Human
cucaggaggcaggaccuu

SEQ ID NO: 2333476 - RNA, 17 nt, Human
cucaggaggcaggaccu

SEQ ID NO: 2333477 - RNA, 16 nt, Human
cucaggaggcaggacc

SEQ ID NO: 2333478 - RNA, 22 nt, Human
cucaggagcacaggcagcugga

SEQ ID NO: 2333479 - RNA, 17 nt, Human
cucagcccugacccugu

SEQ ID NO: 2333480 - RNA, 23 nt, Human
cucagcguuuuuuuguuuuuaau

SEQ ID NO: 2333481 - RNA, 23 nt, Human
cucagcggggacagcuccuucug

SEQ ID NO: 2333482 - RNA, 22 nt, Human
cucagcuccagacguaggggag

SEQ ID NO: 2333483 - RNA, 16 nt, Human
cucagcucagcgccag

SEQ ID NO: 2333484 - RNA, 17 nt, Human
cucagcucagcgccagc

SEQ ID NO: 2333485 - RNA, 15 nt, Human
cucagcucagcgcca

SEQ ID NO: 2333486 - RNA, 13 nt, Human
cucagcucagcgc

SEQ ID NO: 2333487 - RNA, 19 nt, Human
cucagcucccaaggcucug

SEQ ID NO: 2333488 - RNA, 10 nt, Human
cucagcuccc

SEQ ID NO: 2333489 - RNA, 15 nt, Human
cucagcucccaaggc

SEQ ID NO: 2333490 - RNA, 19 nt, Human
cucagcuccagguggcucu

SEQ ID NO: 2333491 - RNA, 20 nt, Human
cucagcuccagguggcucug

SEQ ID NO: 2333492 - RNA, 16 nt, Human
cucagcucccauuucu

SEQ ID NO: 2333493 - RNA, 17 nt, Human
cucagcucccauuucua

SEQ ID NO: 2333494 - RNA, 18 nt, Human
cucagcucccauuucuac

SEQ ID NO: 2333495 - RNA, 21 nt, Human
cucagcucccauuucuacucu

SEQ ID NO: 2333496 - RNA, 11 nt, Human
cucagcucccc

SEQ ID NO: 2333497 - RNA, 12 nt, Human
cucagcucccca

SEQ ID NO: 2333498 - RNA, 14 nt, Human
cucagcuccccaga

SEQ ID NO: 2333499 - RNA, 16 nt, Human
cucagcuccccagagu

SEQ ID NO: 2333500 - RNA, 19 nt, Human
cucagcuccccagaguccu

SEQ ID NO: 2333501 - RNA, 12 nt, Human
cucagcuccccc

SEQ ID NO: 2333502 - RNA, 14 nt, Human
cucagcucccccug

SEQ ID NO: 2333503 - RNA, 15 nt, Human
cucagcucccccugu

SEQ ID NO: 2333504 - RNA, 16 nt, Human
cucagcucccccuguc

SEQ ID NO: 2333505 - RNA, 17 nt, Human
cucagcucccccugucc

SEQ ID NO: 2333506 - RNA, 14 nt, Human
cucagcccugaccc

SEQ ID NO: 2333507 - RNA, 15 nt, Human
cucagcccugacccu

SEQ ID NO: 2333508 - RNA, 13 nt, Human
cucagcccugacc

SEQ ID NO: 2333509 - RNA, 11 nt, Human
cucagcccuga

SEQ ID NO: 2333510 - RNA, 14 nt, Human
cucagcggggacag

SEQ ID NO: 2333511 - RNA, 15 nt, Human
cucagcggggacagc

SEQ ID NO: 2333512 - RNA, 16 nt, Human
cucagcggggacagcu

SEQ ID NO: 2333513 - RNA, 18 nt, Human
cucagcggggacagcucc

SEQ ID NO: 2333514 - RNA, 19 nt, Human
cucagcggggacagcuccu

SEQ ID NO: 2333515 - RNA, 20 nt, Human
cucagcggggacagcuccuu

SEQ ID NO: 2333516 - RNA, 21 nt, Human
cucagcggggacagcuccuuc

SEQ ID NO: 2333517 - RNA, 19 nt, Human
cucagcccaccccccucau

SEQ ID NO: 2333518 - RNA, 17 nt, Human
cucagcccaccccccuc

SEQ ID NO: 2333519 - RNA, 16 nt, Human
cucagcccaccccccu

SEQ ID NO: 2333520 - RNA, 11 nt, Human
cucagcccacc

SEQ ID NO: 2333521 - RNA, 16 nt, Human
cucagccaagcacagu

SEQ ID NO: 2333522 - RNA, 17 nt, Human
cucagccaagcacagug

SEQ ID NO: 2333523 - RNA, 15 nt, Human
cucagcauccuggca

SEQ ID NO: 2333524 - RNA, 19 nt, Human
cucagcauauuuguauagu

SEQ ID NO: 2333525 - RNA, 23 nt, Human
cucagcauauuuguauaguugcu

SEQ ID NO: 2333526 - RNA, 13 nt, Human
cucagcaugcauc

SEQ ID NO: 2333527 - RNA, 16 nt, Human
cucagcaugcauccuu

SEQ ID NO: 2333528 - RNA, 13 nt, Human
cucagccaagcac

SEQ ID NO: 2333529 - RNA, 14 nt, Human
cucagccaagcaca

SEQ ID NO: 2333530 - RNA, 15 nt, Human
cucagccaagcacag

SEQ ID NO: 2333531 - RNA, 19 nt, Human
cucagccccucuugccccc

SEQ ID NO: 2333532 - RNA, 18 nt, Human
cucagccccucuugcccc

SEQ ID NO: 2333533 - RNA, 20 nt, Human
cucagccccugauccuguga

SEQ ID NO: 2333534 - RNA, 22 nt, Human
cucagccccugauccugugaag

SEQ ID NO: 2333535 - RNA, 23 nt, Human
cucagccccugauccugugaagu

SEQ ID NO: 2333536 - RNA, 16 nt, Human
cucagccccucuugcc

SEQ ID NO: 2333537 - RNA, 13 nt, Human
cucagccccucuu

SEQ ID NO: 2333538 - RNA, 11 nt, Human
cucagccccuc

SEQ ID NO: 2333539 - RNA, 17 nt, Human
cucagccccaccccagg

SEQ ID NO: 2333540 - RNA, 14 nt, Human
cucagcccucccug

SEQ ID NO: 2333541 - RNA, 19 nt, Human
cucagcccucccugccccu

SEQ ID NO: 2333542 - RNA, 20 nt, Human
cucagcccucccugccccuc

SEQ ID NO: 2333543 - RNA, 21 nt, Human
cucagcccucccugccccucc

SEQ ID NO: 2333544 - RNA, 21 nt, Human
cucagcaaaagaugcuucuca

SEQ ID NO: 2333545 - RNA, 16 nt, Human
cucagcaggggagggu

SEQ ID NO: 2333546 - RNA, 20 nt, Human
cucagcaaaagaugcuucuc

SEQ ID NO: 2333547 - RNA, 19 nt, Human
cucagcaaaagaugcuucu

SEQ ID NO: 2333548 - RNA, 20 nt, Human
cucagcagcugguaaucuug

SEQ ID NO: 2333549 - RNA, 12 nt, Human
cucagcauaccu

SEQ ID NO: 2333550 - RNA, 16 nt, Human
cucagcauaccugcug

SEQ ID NO: 2333551 - RNA, 14 nt, Human
cucagcauauuugu

SEQ ID NO: 2333552 - RNA, 16 nt, Human
cucagcauauuuguau

SEQ ID NO: 2333553 - RNA, 18 nt, Human
cucagcauauuuguauag

SEQ ID NO: 2333554 - RNA, 13 nt, Human
cucagcauccugg

SEQ ID NO: 2333555 - RNA, 21 nt, Human
cucagcauccuggcacccggc

SEQ ID NO: 2333556 - RNA, 22 nt, Human
cucagcauccuggcacccggcc

SEQ ID NO: 2333557 - RNA, 14 nt, Human
cucacuggccaucc

SEQ ID NO: 2333558 - RNA, 23 nt, Human
cucacugcucccugaagccagcc

SEQ ID NO: 2333559 - RNA, 19 nt, Human
cucacugcucccugaagcc

SEQ ID NO: 2333560 - RNA, 20 nt, Human
cucacugcucccugaagcca

SEQ ID NO: 2333561 - RNA, 12 nt, Human
cucacugcucaa

SEQ ID NO: 2333562 - RNA, 14 nt, Human
cucacugcucaaga

SEQ ID NO: 2333563 - RNA, 16 nt, Human
cucacugcucaagaag

SEQ ID NO: 2333564 - RNA, 19 nt, Human
cucacugcucaagaagaca

SEQ ID NO: 2333565 - RNA, 20 nt, Human
cucacugcucaagaagacau

SEQ ID NO: 2333566 - RNA, 21 nt, Human
cucacugcucaagaagacaug

SEQ ID NO: 2333567 - RNA, 15 nt, Human
cucacugcucccuga

SEQ ID NO: 2333568 - RNA, 17 nt, Human
cucacugcucccugaag

SEQ ID NO: 2333569 - RNA, 20 nt, Human
cucacugggguccuggggcc

SEQ ID NO: 2333570 - RNA, 17 nt, Human
cucacugggguccuggg

SEQ ID NO: 2333571 - RNA, 18 nt, Human
cucacuggggccuacagc

SEQ ID NO: 2333572 - RNA, 16 nt, Human
cucacuggggccuaca

SEQ ID NO: 2333573 - RNA, 13 nt, Human
cucacuggggccu

SEQ ID NO: 2333574 - RNA, 16 nt, Human
cucacuggccaucccu

SEQ ID NO: 2333575 - RNA, 21 nt, Human
cucacuggccaucccucgugg

SEQ ID NO: 2333576 - RNA, 14 nt, Human
cucacuguugccca

SEQ ID NO: 2333577 - RNA, 15 nt, Human
cucacuguugcccag

SEQ ID NO: 2333578 - RNA, 13 nt, Human
cucacuggguggg

SEQ ID NO: 2333579 - RNA, 12 nt, Human
cucacugggugg

SEQ ID NO: 2333580 - RNA, 22 nt, Human
cucacugggguccuggggccuc

SEQ ID NO: 2333581 - RNA, 13 nt, Human
cucacugucugag

SEQ ID NO: 2333582 - RNA, 12 nt, Human
cucacugucuga

SEQ ID NO: 2333583 - RNA, 23 nt, Human
cucacugugggaaggccagcugc

SEQ ID NO: 2333584 - RNA, 20 nt, Human
cucacuguggugucuguguu

SEQ ID NO: 2333585 - RNA, 24 nt, Human
cucacugugggaaggccagcugcc

SEQ ID NO: 2333586 - RNA, 12 nt, Human
cucacuguuccc

SEQ ID NO: 2333587 - RNA, 18 nt, Human
cucacuguucccucugcu

SEQ ID NO: 2333588 - RNA, 20 nt, Human
cucacuguucccucugcucc

SEQ ID NO: 2333589 - RNA, 13 nt, Human
cucacagcacaga

SEQ ID NO: 2333590 - RNA, 14 nt, Human
cucacagcacagag

SEQ ID NO: 2333591 - RNA, 14 nt, Human
cucacugcagccuc

SEQ ID NO: 2333592 - RNA, 22 nt, Human
cucacugcggagaaccuugugc

SEQ ID NO: 2333593 - RNA, 11 nt, Human
cucacugccag

SEQ ID NO: 2333594 - RNA, 12 nt, Human
cucacugccagg

SEQ ID NO: 2333595 - RNA, 20 nt, Human
cucacugcauccuccgccuc

SEQ ID NO: 2333596 - RNA, 23 nt, Human
cucacugcuaagaauauuugaau

SEQ ID NO: 2333597 - RNA, 22 nt, Human
cucacugcuaagaauauuugaa

SEQ ID NO: 2333598 - RNA, 21 nt, Human
cucacugcuaagaauauuuga

SEQ ID NO: 2333599 - RNA, 20 nt, Human
cucacugcuaagaauauuug

SEQ ID NO: 2333600 - RNA, 15 nt, Human
cucacugcagccuca

SEQ ID NO: 2333601 - RNA, 16 nt, Human
cucacugcagccucaa

SEQ ID NO: 2333602 - RNA, 15 nt, Human
cucacagcacagaga

SEQ ID NO: 2333603 - RNA, 14 nt, Human
cucacagaccugga

SEQ ID NO: 2333604 - RNA, 17 nt, Human
cucacagaccuggagcc

SEQ ID NO: 2333605 - RNA, 20 nt, Human
cucacagaccuggagccccu

SEQ ID NO: 2333606 - RNA, 22 nt, Human
cucacagaccuggagccccugg

SEQ ID NO: 2333607 - RNA, 23 nt, Human
cucacagaccuggagccccuggg

SEQ ID NO: 2333608 - RNA, 14 nt, Human
cucagaguccaggc

SEQ ID NO: 2333609 - RNA, 18 nt, Human
cucagaguauggagcuca

SEQ ID NO: 2333610 - RNA, 16 nt, Human
cucagaguauggagcu

SEQ ID NO: 2333611 - RNA, 17 nt, Human
cucagaguauggagcuc

SEQ ID NO: 2333612 - RNA, 19 nt, Human
cucagagguagggcugcca

SEQ ID NO: 2333613 - RNA, 21 nt, Human
cucagaggguuguucuccuag

SEQ ID NO: 2333614 - RNA, 18 nt, Human
cucagaggguuguucucc

SEQ ID NO: 2333615 - RNA, 19 nt, Human
cucagaggcgcacugugac

SEQ ID NO: 2333616 - RNA, 16 nt, Human
cucagaggcuguucuu

SEQ ID NO: 2333617 - RNA, 18 nt, Human
cucagagcuacuugggcc

SEQ ID NO: 2333618 - RNA, 15 nt, Human
cucagagccagucuu

SEQ ID NO: 2333619 - RNA, 22 nt, Human
cucagagaugugcacccauggg

SEQ ID NO: 2333620 - RNA, 12 nt, Human
cucagagccagu

SEQ ID NO: 2333621 - RNA, 19 nt, Human
cucagagcuacuugggcca

SEQ ID NO: 2333622 - RNA, 18 nt, Human
cucagaggcgcacuguga

SEQ ID NO: 2333623 - RNA, 17 nt, Human
cucagaggcgcacugug

SEQ ID NO: 2333624 - RNA, 22 nt, Human
cucagauggaaccgcaggaagc

SEQ ID NO: 2333625 - RNA, 21 nt, Human
cucagauggaaccgcaggaag

SEQ ID NO: 2333626 - RNA, 23 nt, Human
cucagauggaaccgcaggaagcu

SEQ ID NO: 2333627 - RNA, 20 nt, Human
cucagauggaaccgcaggaa

SEQ ID NO: 2333628 - RNA, 16 nt, Human
cucagauggaaccgca

SEQ ID NO: 2333629 - RNA, 16 nt, Human
cucagaucuucugugg

SEQ ID NO: 2333630 - RNA, 15 nt, Human
cucacuguugaauuu

SEQ ID NO: 2333631 - RNA, 21 nt, Human
cucacuguucccucugcuccu

SEQ ID NO: 2333632 - RNA, 21 nt, Human
cucacuguucuauucaucuca

SEQ ID NO: 2333633 - RNA, 18 nt, Human
cucagagagggugggagu

SEQ ID NO: 2333634 - RNA, 19 nt, Human
cucagagagggugggagug

SEQ ID NO: 2333635 - RNA, 21 nt, Human
cucacuguugaauuuucucua

SEQ ID NO: 2333636 - RNA, 20 nt, Human
cucagagaugugcacccaug

SEQ ID NO: 2333637 - RNA, 15 nt, Human
cucagagccaccccu

SEQ ID NO: 2333638 - RNA, 23 nt, Human
cucagagagggugggagugggcc

SEQ ID NO: 2333639 - RNA, 16 nt, Human
cucacuguugcccagg

SEQ ID NO: 2333640 - RNA, 17 nt, Human
cucacuguugcccaggc

SEQ ID NO: 2333641 - RNA, 18 nt, Human
cucacuguugcccaggcu

SEQ ID NO: 2333642 - RNA, 19 nt, Human
cucacuguugcccaggcug

SEQ ID NO: 2333643 - RNA, 13 nt, Human
cucccaggcucuc

SEQ ID NO: 2333644 - RNA, 12 nt, Human
cucccaggcucu

SEQ ID NO: 2333645 - RNA, 16 nt, Human
cucccagggccagggc

SEQ ID NO: 2333646 - RNA, 18 nt, Human
cucccacaggcagcuuua

SEQ ID NO: 2333647 - RNA, 20 nt, Human
cucccaggcgccccuucccc

SEQ ID NO: 2333648 - RNA, 22 nt, Human
cucccaggcgccccuucccccu

SEQ ID NO: 2333649 - RNA, 16 nt, Human
cucccaucacuucccu

SEQ ID NO: 2333650 - RNA, 19 nt, Human
cucccagggccagggcccu

SEQ ID NO: 2333651 - RNA, 14 nt, Human
cucccaucacccgc

SEQ ID NO: 2333652 - RNA, 14 nt, Human
cucccacacugcua

SEQ ID NO: 2333653 - RNA, 19 nt, Human
cucccaauuucagacuccc

SEQ ID NO: 2333654 - RNA, 21 nt, Human
cucccaauuucagacucccau

SEQ ID NO: 2333655 - RNA, 15 nt, Human
cucccacacugcuag

SEQ ID NO: 2333656 - RNA, 14 nt, Human
cucccacaggcagc

SEQ ID NO: 2333657 - RNA, 15 nt, Human
cucccacaggcagcu

SEQ ID NO: 2333658 - RNA, 16 nt, Human
cucccacaggcagcuu

SEQ ID NO: 2333659 - RNA, 17 nt, Human
cucccacaggcagcuuu

SEQ ID NO: 2333660 - RNA, 17 nt, Human
cucccaggcgccccuuc

SEQ ID NO: 2333661 - RNA, 19 nt, Human
cucccaggcgccccuuccc

SEQ ID NO: 2333662 - RNA, 23 nt, Human
cuccccaccuucaauuccugggc

SEQ ID NO: 2333663 - RNA, 21 nt, Human
cuccccaccuucaauuccugg

SEQ ID NO: 2333664 - RNA, 12 nt, Human
cuccccacgccc

SEQ ID NO: 2333665 - RNA, 20 nt, Human
cuccccaccaccccagcugc

SEQ ID NO: 2333666 - RNA, 14 nt, Human
cuccccacccgccc

SEQ ID NO: 2333667 - RNA, 19 nt, Human
cuccccaccaccccagcug

SEQ ID NO: 2333668 - RNA, 22 nt, Human
cucccauugucccucugcccca

SEQ ID NO: 2333669 - RNA, 14 nt, Human
cucccauuuccuga

SEQ ID NO: 2333670 - RNA, 19 nt, Human
cucccauugucccucugcc

SEQ ID NO: 2333671 - RNA, 17 nt, Human
cucccauugucccucug

SEQ ID NO: 2333672 - RNA, 19 nt, Human
cucccauuccugaagaacc

SEQ ID NO: 2333673 - RNA, 17 nt, Human
cucccauuccugaagaa

SEQ ID NO: 2333674 - RNA, 16 nt, Human
cucccauuccugaaga

SEQ ID NO: 2333675 - RNA, 15 nt, Human
cucccauuccugaag

SEQ ID NO: 2333676 - RNA, 14 nt, Human
cucccauuccugaa

SEQ ID NO: 2333677 - RNA, 19 nt, Human
cucccauucacucuuccag

SEQ ID NO: 2333678 - RNA, 19 nt, Human
cucccauuaggacaaucag

SEQ ID NO: 2333679 - RNA, 20 nt, Human
cucccauucacucuuccaga

SEQ ID NO: 2333680 - RNA, 22 nt, Human
cucccauccagggcccccaucu

SEQ ID NO: 2333681 - RNA, 15 nt, Human
cucccauccagggcc

SEQ ID NO: 2333682 - RNA, 14 nt, Human
cucccauccagggc

SEQ ID NO: 2333683 - RNA, 12 nt, Human
cucccauccccc

SEQ ID NO: 2333684 - RNA, 14 nt, Human
cucccaucccccug

SEQ ID NO: 2333685 - RNA, 16 nt, Human
cucccaucccccugcc

SEQ ID NO: 2333686 - RNA, 17 nt, Human
cucccaucccccugccc

SEQ ID NO: 2333687 - RNA, 18 nt, Human
cucccaucccccugcccu

SEQ ID NO: 2333688 - RNA, 19 nt, Human
cucccaucccccugcccuc

SEQ ID NO: 2333689 - RNA, 24 nt, Human
cucccaucccccugcccucguggc

SEQ ID NO: 2333690 - RNA, 13 nt, Human
cucccauccccug

SEQ ID NO: 2333691 - RNA, 15 nt, Human
cucccauccccugga

SEQ ID NO: 2333692 - RNA, 16 nt, Human
cucccauccccuggac

SEQ ID NO: 2333693 - RNA, 23 nt, Human
cucccauccccuggacugggagg

SEQ ID NO: 2333694 - RNA, 14 nt, Human
cucccauggagccc

SEQ ID NO: 2333695 - RNA, 15 nt, Human
cucccauggagcccc

SEQ ID NO: 2333696 - RNA, 16 nt, Human
cucccauggagcccca

SEQ ID NO: 2333697 - RNA, 17 nt, Human
cucccauggagccccag

SEQ ID NO: 2333698 - RNA, 18 nt, Human
cucccauggagccccagc

SEQ ID NO: 2333699 - RNA, 19 nt, Human
cucccauggagccccagcc

SEQ ID NO: 2333700 - RNA, 20 nt, Human
cucccauggagccccagccc

SEQ ID NO: 2333701 - RNA, 23 nt, Human
cucccauggagccccagcccccu

SEQ ID NO: 2333702 - RNA, 14 nt, Human
cucccauggcaccu

SEQ ID NO: 2333703 - RNA, 20 nt, Human
cucccauggcuuaaugcuuc

SEQ ID NO: 2333704 - RNA, 21 nt, Human
cucccauggcuuaaugcuucu

SEQ ID NO: 2333705 - RNA, 20 nt, Human
cuccagcugcucugucuucu

SEQ ID NO: 2333706 - RNA, 15 nt, Human
cuccagcucuuuccu

SEQ ID NO: 2333707 - RNA, 23 nt, Human
cuccagcuggccgggagccugau

SEQ ID NO: 2333708 - RNA, 22 nt, Human
cuccagcuggccgggagccuga

SEQ ID NO: 2333709 - RNA, 15 nt, Human
cuccagcugggcucu

SEQ ID NO: 2333710 - RNA, 19 nt, Human
cuccagcugggcucugcaa

SEQ ID NO: 2333711 - RNA, 20 nt, Human
cuccagcugggcucugcaau

SEQ ID NO: 2333712 - RNA, 13 nt, Human
cuccaugcugccu

SEQ ID NO: 2333713 - RNA, 14 nt, Human
cuccaugcugccuc

SEQ ID NO: 2333714 - RNA, 15 nt, Human
cuccaugcugccucc

SEQ ID NO: 2333715 - RNA, 16 nt, Human
cuccaugcugccucca

SEQ ID NO: 2333716 - RNA, 17 nt, Human
cuccaugcugccuccag

SEQ ID NO: 2333717 - RNA, 20 nt, Human
cuccaugcuuagucacugcc

SEQ ID NO: 2333718 - RNA, 21 nt, Human
cuccaugcuuagucacugccu

SEQ ID NO: 2333719 - RNA, 15 nt, Human
cucccacaaaggaga

SEQ ID NO: 2333720 - RNA, 15 nt, Human
cucccaaaugagcca

SEQ ID NO: 2333721 - RNA, 20 nt, Human
cucccaaguuuuaggacaaa

SEQ ID NO: 2333722 - RNA, 14 nt, Human
cucccaacucaccc

SEQ ID NO: 2333723 - RNA, 15 nt, Human
cucccaacucacccc

SEQ ID NO: 2333724 - RNA, 16 nt, Human
cucccaaagugcuggg

SEQ ID NO: 2333725 - RNA, 23 nt, Human
cucccaaagugcugggauuacag

SEQ ID NO: 2333726 - RNA, 15 nt, Human
cuccauuuaguucuu

SEQ ID NO: 2333727 - RNA, 15 nt, Human
cuccccugcacugga

SEQ ID NO: 2333728 - RNA, 22 nt, Human
cuccccugauuacaccagccuc

SEQ ID NO: 2333729 - RNA, 15 nt, Human
cuccccucucuugca

SEQ ID NO: 2333730 - RNA, 13 nt, Human
cuccccugaggcu

SEQ ID NO: 2333731 - RNA, 22 nt, Human
cuccccugaggcucagggaaag

SEQ ID NO: 2333732 - RNA, 21 nt, Human
cuccccugcacuggaguccag

SEQ ID NO: 2333733 - RNA, 17 nt, Human
cuccccucucuugcacc

SEQ ID NO: 2333734 - RNA, 21 nt, Human
cuccccucuauuuagcaugac

SEQ ID NO: 2333735 - RNA, 12 nt, Human
cuccccucucuu

SEQ ID NO: 2333736 - RNA, 10 nt, Human
cuccccucua

SEQ ID NO: 2333737 - RNA, 22 nt, Human
cuccccuccuugccuccugugu

SEQ ID NO: 2333738 - RNA, 16 nt, Human
cuccccugaccuguga

SEQ ID NO: 2333739 - RNA, 22 nt, Human
cuccccugaccugugagcccag

SEQ ID NO: 2333740 - RNA, 17 nt, Human
cuccccugaccugugag

SEQ ID NO: 2333741 - RNA, 14 nt, Human
cuccccugcugggu

SEQ ID NO: 2333742 - RNA, 16 nt, Human
cuccccugccagggca

SEQ ID NO: 2333743 - RNA, 15 nt, Human
cuccccugccagggc

SEQ ID NO: 2333744 - RNA, 12 nt, Human
cuccccugccac

SEQ ID NO: 2333745 - RNA, 13 nt, Human
cuccccugccacc

SEQ ID NO: 2333746 - RNA, 18 nt, Human
cuccccugccaccaggcc

SEQ ID NO: 2333747 - RNA, 23 nt, Human
cuccccugccaccaggccaccuc

SEQ ID NO: 2333748 - RNA, 21 nt, Human
cuccccugcuggguguggcgc

SEQ ID NO: 2333749 - RNA, 23 nt, Human
cuccccugcuggguguggcgcag

SEQ ID NO: 2333750 - RNA, 13 nt, Human
cuccccagcccag

SEQ ID NO: 2333751 - RNA, 21 nt, Human
cuccccagcauuccagccccu

SEQ ID NO: 2333752 - RNA, 22 nt, Human
cuccccagcauuccagccccuc

SEQ ID NO: 2333753 - RNA, 23 nt, Human
cuccccagcauuccagccccucu

SEQ ID NO: 2333754 - RNA, 15 nt, Human
cuccccacgcccucc

SEQ ID NO: 2333755 - RNA, 17 nt, Human
cuccccacggccgcucc

SEQ ID NO: 2333756 - RNA, 20 nt, Human
cuccccacggccgcuccagg

SEQ ID NO: 2333757 - RNA, 13 nt, Human
cuccccacucuag

SEQ ID NO: 2333758 - RNA, 21 nt, Human
cuccccacggccgcuccaggg

SEQ ID NO: 2333759 - RNA, 22 nt, Human
cuccccacggccgcuccagggg

SEQ ID NO: 2333760 - RNA, 23 nt, Human
cuccccacggggccucgggaccu

SEQ ID NO: 2333761 - RNA, 12 nt, Human
cuccccacucua

SEQ ID NO: 2333762 - RNA, 20 nt, Human
cuccccuccuugccuccugu

SEQ ID NO: 2333763 - RNA, 19 nt, Human
cuccccuccuugccuccug

SEQ ID NO: 2333764 - RNA, 22 nt, Human
cuccccagcccaggguuccccc

SEQ ID NO: 2333765 - RNA, 16 nt, Human
cuccccagcccagggu

SEQ ID NO: 2333766 - RNA, 16 nt, Human
cuccccucuccuuccu

SEQ ID NO: 2333767 - RNA, 14 nt, Human
cuccccucggagaa

SEQ ID NO: 2333768 - RNA, 15 nt, Human
cuccccagcccaggg

SEQ ID NO: 2333769 - RNA, 11 nt, Human
cuccccagccc

SEQ ID NO: 2333770 - RNA, 18 nt, Human
cuccccagcccagagaca

SEQ ID NO: 2333771 - RNA, 20 nt, Human
cuccccagccccaucccaaa

SEQ ID NO: 2333772 - RNA, 16 nt, Human
cuccccuccuugccuc

SEQ ID NO: 2333773 - RNA, 17 nt, Human
cuccccagcccagagac

SEQ ID NO: 2333774 - RNA, 16 nt, Human
cuccccagcccagaga

SEQ ID NO: 2333775 - RNA, 15 nt, Human
cuccccagcccagag

SEQ ID NO: 2333776 - RNA, 14 nt, Human
cuccccagcccaga

SEQ ID NO: 2333777 - RNA, 18 nt, Human
cucccucagccccucuug

SEQ ID NO: 2333778 - RNA, 16 nt, Human
cucccucagccccucu

SEQ ID NO: 2333779 - RNA, 15 nt, Human
cucccucagccccuc

SEQ ID NO: 2333780 - RNA, 14 nt, Human
cucccucagccccu

SEQ ID NO: 2333781 - RNA, 13 nt, Human
cucccucagcccc

SEQ ID NO: 2333782 - RNA, 12 nt, Human
cucccucagccc

SEQ ID NO: 2333783 - RNA, 18 nt, Human
cucccucagucuggcccu

SEQ ID NO: 2333784 - RNA, 12 nt, Human
cucccuggagcc

SEQ ID NO: 2333785 - RNA, 19 nt, Human
cucccugcuguccccucuu

SEQ ID NO: 2333786 - RNA, 20 nt, Human
cucccugcuguccccucuug

SEQ ID NO: 2333787 - RNA, 11 nt, Human
cucccugcugu

SEQ ID NO: 2333788 - RNA, 14 nt, Human
cucccugcuguccc

SEQ ID NO: 2333789 - RNA, 16 nt, Human
cucccugcuguccccu

SEQ ID NO: 2333790 - RNA, 18 nt, Human
cucccugcuguccccucu

SEQ ID NO: 2333791 - RNA, 18 nt, Human
cucccuggagccagacuc

SEQ ID NO: 2333792 - RNA, 19 nt, Human
cucccuggagccagacucu

SEQ ID NO: 2333793 - RNA, 21 nt, Human
cucccuggagccagacucugg

SEQ ID NO: 2333794 - RNA, 11 nt, Human
cucccuggagu

SEQ ID NO: 2333795 - RNA, 12 nt, Human
cucccuggagug

SEQ ID NO: 2333796 - RNA, 22 nt, Human
cucccuggagugcaguuuccaa

SEQ ID NO: 2333797 - RNA, 22 nt, Human
cucccuggaguguggcugagga

SEQ ID NO: 2333798 - RNA, 22 nt, Human
cucccuucaaccauuccccaug

SEQ ID NO: 2333799 - RNA, 23 nt, Human
cucccuucaaccauuccccaugg

SEQ ID NO: 2333800 - RNA, 15 nt, Human
cucccuucauccuuc

SEQ ID NO: 2333801 - RNA, 12 nt, Human
cucccuggcccu

SEQ ID NO: 2333802 - RNA, 13 nt, Human
cucccuggcccuc

SEQ ID NO: 2333803 - RNA, 14 nt, Human
cucccuggcccuca

SEQ ID NO: 2333804 - RNA, 15 nt, Human
cucccuggcccucaa

SEQ ID NO: 2333805 - RNA, 21 nt, Human
cucccuucaaccauuccccau

SEQ ID NO: 2333806 - RNA, 23 nt, Human
cucccuggaguguggcugaggag

SEQ ID NO: 2333807 - RNA, 20 nt, Human
cucccgaauagcugggacua

SEQ ID NO: 2333808 - RNA, 23 nt, Human
cucccgaauagcugggacuacag

SEQ ID NO: 2333809 - RNA, 19 nt, Human
cuccccugugcaguccugg

SEQ ID NO: 2333810 - RNA, 14 nt, Human
cuccccuguaccuu

SEQ ID NO: 2333811 - RNA, 23 nt, Human
cuccccuggggacagcaagggcu

SEQ ID NO: 2333812 - RNA, 21 nt, Human
cuccccugccagggcagggcc

SEQ ID NO: 2333813 - RNA, 22 nt, Human
cuccccuggaacugucucucau

SEQ ID NO: 2333814 - RNA, 14 nt, Human
cucccucaacccca

SEQ ID NO: 2333815 - RNA, 13 nt, Human
cucccucacccug

SEQ ID NO: 2333816 - RNA, 18 nt, Human
cucccucacccugagccc

SEQ ID NO: 2333817 - RNA, 17 nt, Human
cucccucaauucccccu

SEQ ID NO: 2333818 - RNA, 15 nt, Human
cucccucacccugag

SEQ ID NO: 2333819 - RNA, 15 nt, Human
cucccucaaagcaca

SEQ ID NO: 2333820 - RNA, 22 nt, Human
cucccuauuuuuuuucuguuau

SEQ ID NO: 2333821 - RNA, 21 nt, Human
cucccuauuuuuuuucuguua

SEQ ID NO: 2333822 - RNA, 12 nt, Human
cucauuccugua

SEQ ID NO: 2333823 - RNA, 14 nt, Human
cucauaaaaagcaa

SEQ ID NO: 2333824 - RNA, 17 nt, Human
cucauaaaaagcaaaac

SEQ ID NO: 2333825 - RNA, 20 nt, Human
cucauuccugccugucuccu

SEQ ID NO: 2333826 - RNA, 14 nt, Human
cucaguuuucauaa

SEQ ID NO: 2333827 - RNA, 21 nt, Human
cucauaaaaagccugcaauuu

SEQ ID NO: 2333828 - RNA, 12 nt, Human
cucaguuucccu

SEQ ID NO: 2333829 - RNA, 21 nt, Human
cucaguuuaauccuucuaguu

SEQ ID NO: 2333830 - RNA, 17 nt, Human
cucaguuuaauccuucu

SEQ ID NO: 2333831 - RNA, 18 nt, Human
cucaguuuaauccuucua

SEQ ID NO: 2333832 - RNA, 16 nt, Human
cucaguuucccuaucu

SEQ ID NO: 2333833 - RNA, 13 nt, Human
cucaguuucccua

SEQ ID NO: 2333834 - RNA, 13 nt, Human
cucaguuugucag

SEQ ID NO: 2333835 - RNA, 18 nt, Human
cucaguuuuaucauuuuc

SEQ ID NO: 2333836 - RNA, 13 nt, Human
cucaguuuucaua

SEQ ID NO: 2333837 - RNA, 17 nt, Human
cucaguuuuaucauuuu

SEQ ID NO: 2333838 - RNA, 22 nt, Human
cucaguuugugugucuuaauua

SEQ ID NO: 2333839 - RNA, 11 nt, Human
cucaguuguag

SEQ ID NO: 2333840 - RNA, 14 nt, Human
cucaguuguagaau

SEQ ID NO: 2333841 - RNA, 16 nt, Human
cucaguuguagaaugu

SEQ ID NO: 2333842 - RNA, 21 nt, Human
cucaguuguagaauguauugu

SEQ ID NO: 2333843 - RNA, 15 nt, Human
cucaguuuaauccuu

SEQ ID NO: 2333844 - RNA, 15 nt, Human
cucaguucuagucuc

SEQ ID NO: 2333845 - RNA, 19 nt, Human
cucaguucuagucucucug

SEQ ID NO: 2333846 - RNA, 20 nt, Human
cucaguucuagucucucugg

SEQ ID NO: 2333847 - RNA, 21 nt, Human
cucaguucuagucucucuggg

SEQ ID NO: 2333848 - RNA, 22 nt, Human
cucaguucccuuggccucagaa

SEQ ID NO: 2333849 - RNA, 20 nt, Human
cucaguuccgauuucccagg

SEQ ID NO: 2333850 - RNA, 22 nt, Human
cucaguuccgauuucccaggcu

SEQ ID NO: 2333851 - RNA, 17 nt, Human
cucaguucucuucacuc

SEQ ID NO: 2333852 - RNA, 16 nt, Human
cucaguucucuucacu

SEQ ID NO: 2333853 - RNA, 16 nt, Human
cucauugcugagccuc

SEQ ID NO: 2333854 - RNA, 15 nt, Human
cucauugcugagccu

SEQ ID NO: 2333855 - RNA, 14 nt, Human
cucauuucaccccu

SEQ ID NO: 2333856 - RNA, 17 nt, Human
cucauuucaccccuccc

SEQ ID NO: 2333857 - RNA, 19 nt, Human
cucauuucaccccucccuu

SEQ ID NO: 2333858 - RNA, 22 nt, Human
cucauuucaccccucccuuucu

SEQ ID NO: 2333859 - RNA, 19 nt, Human
cucauugaccugaggcccu

SEQ ID NO: 2333860 - RNA, 21 nt, Human
cucauugaccugaggcccuuc

SEQ ID NO: 2333861 - RNA, 12 nt, Human
cucauucuucug

SEQ ID NO: 2333862 - RNA, 19 nt, Human
cucauucugaaggagcccc

SEQ ID NO: 2333863 - RNA, 17 nt, Human
cucauucugaaggagcc

SEQ ID NO: 2333864 - RNA, 17 nt, Human
cucauugaccugaggcc

SEQ ID NO: 2333865 - RNA, 22 nt, Human
cucauucuccuuguguuacuaa

SEQ ID NO: 2333866 - RNA, 18 nt, Human
cucauucuccuuguguua

SEQ ID NO: 2333867 - RNA, 18 nt, Human
cuccaaacugaagcagcc

SEQ ID NO: 2333868 - RNA, 17 nt, Human
cuccaagcucccaggca

SEQ ID NO: 2333869 - RNA, 22 nt, Human
cuccaaaccuccuguuagcugu

SEQ ID NO: 2333870 - RNA, 21 nt, Human
cuccaaacccucgaggcggau

SEQ ID NO: 2333871 - RNA, 12 nt, Human
cuccaaggacca

SEQ ID NO: 2333872 - RNA, 14 nt, Human
cuccaaggaccagg

SEQ ID NO: 2333873 - RNA, 15 nt, Human
cuccaaggaccaggu

SEQ ID NO: 2333874 - RNA, 23 nt, Human
cuccaaacugaagcagccucucc

SEQ ID NO: 2333875 - RNA, 22 nt, Human
cuccaaacugaagcagccucuc

SEQ ID NO: 2333876 - RNA, 22 nt, Human
cuccaaggaggggcuguaaaau

SEQ ID NO: 2333877 - RNA, 21 nt, Human
cuccaaggaggggcuguaaaa

SEQ ID NO: 2333878 - RNA, 20 nt, Human
cuccaaggaggggcuguaaa

SEQ ID NO: 2333879 - RNA, 19 nt, Human
cuccaaggaggggcuguaa

SEQ ID NO: 2333880 - RNA, 18 nt, Human
cuccaaaauaaaacuuuu

SEQ ID NO: 2333881 - RNA, 18 nt, Human
cucauuuuuuuaauuuau

SEQ ID NO: 2333882 - RNA, 17 nt, Human
cuccaaacccucgaggc

SEQ ID NO: 2333883 - RNA, 15 nt, Human
cuccaaacccucgag

SEQ ID NO: 2333884 - RNA, 22 nt, Human
cuccaaaauguuggucauuuua

SEQ ID NO: 2333885 - RNA, 21 nt, Human
cucauuugucacacacuuugg

SEQ ID NO: 2333886 - RNA, 21 nt, Human
cucauuucaggagcagccuca

SEQ ID NO: 2333887 - RNA, 16 nt, Human
cucauuucaggagcag

SEQ ID NO: 2333888 - RNA, 17 nt, Human
cucauuuccaagcaagu

SEQ ID NO: 2333889 - RNA, 23 nt, Human
cucauuucaccccucccuuucuc

SEQ ID NO: 2333890 - RNA, 12 nt, Human
cucauuucagga

SEQ ID NO: 2333891 - RNA, 13 nt, Human
cucauuucaggau

SEQ ID NO: 2333892 - RNA, 12 nt, Human
cucauuuccaag

SEQ ID NO: 2333893 - RNA, 13 nt, Human
cucauuuccaagc

SEQ ID NO: 2333894 - RNA, 14 nt, Human
cucauuuccaagca

SEQ ID NO: 2333895 - RNA, 20 nt, Human
cuccagaguggggaugacau

SEQ ID NO: 2333896 - RNA, 21 nt, Human
cuccagauagcucauuucauu

SEQ ID NO: 2333897 - RNA, 16 nt, Human
cuccagaugcagggca

SEQ ID NO: 2333898 - RNA, 17 nt, Human
cuccagauguuuccaga

SEQ ID NO: 2333899 - RNA, 21 nt, Human
cuccagaugcagggcagucau

SEQ ID NO: 2333900 - RNA, 18 nt, Human
cuccagaugcagggcagu

SEQ ID NO: 2333901 - RNA, 17 nt, Human
cuccagaugcagggcag

SEQ ID NO: 2333902 - RNA, 16 nt, Human
cuccagagucagaagu

SEQ ID NO: 2333903 - RNA, 21 nt, Human
cuccagagggcacucugcuug

SEQ ID NO: 2333904 - RNA, 20 nt, Human
cuccagagggcacucugcuu

SEQ ID NO: 2333905 - RNA, 13 nt, Human
cuccagagggcac

SEQ ID NO: 2333906 - RNA, 14 nt, Human
cuccagacucucug

SEQ ID NO: 2333907 - RNA, 15 nt, Human
cuccagacucucugu

SEQ ID NO: 2333908 - RNA, 16 nt, Human
cuccagacucucugug

SEQ ID NO: 2333909 - RNA, 18 nt, Human
cuccagacucucugugaa

SEQ ID NO: 2333910 - RNA, 22 nt, Human
cuccacuccuuccugccaccug

SEQ ID NO: 2333911 - RNA, 19 nt, Human
cuccagacguaggggaggg

SEQ ID NO: 2333912 - RNA, 20 nt, Human
cuccagacguaggggagggg

SEQ ID NO: 2333913 - RNA, 13 nt, Human
cuccagacucucu

SEQ ID NO: 2333914 - RNA, 23 nt, Human
cuccagaccugauccuggaggcc

SEQ ID NO: 2333915 - RNA, 19 nt, Human
cuccagaccugauccugga

SEQ ID NO: 2333916 - RNA, 21 nt, Human
cuccagaccccuggcuuuuca

SEQ ID NO: 2333917 - RNA, 14 nt, Human
cuccacuggaugga

SEQ ID NO: 2333918 - RNA, 14 nt, Human
cuccagaccugauc

SEQ ID NO: 2333919 - RNA, 12 nt, Human
cuccagaccuga

SEQ ID NO: 2333920 - RNA, 11 nt, Human
cuccagaccug

SEQ ID NO: 2333921 - RNA, 16 nt, Human
cuccacucucccccac

SEQ ID NO: 2333922 - RNA, 19 nt, Human
cuccagauguuuccagacu

SEQ ID NO: 2333923 - RNA, 11 nt, Human
cuccagccccu

SEQ ID NO: 2333924 - RNA, 13 nt, Human
cuccagccccugg

SEQ ID NO: 2333925 - RNA, 14 nt, Human
cuccagccccugga

SEQ ID NO: 2333926 - RNA, 15 nt, Human
cuccagcucaccagc

SEQ ID NO: 2333927 - RNA, 16 nt, Human
cuccagcucaccagcc

SEQ ID NO: 2333928 - RNA, 18 nt, Human
cuccagcucaccagcccc

SEQ ID NO: 2333929 - RNA, 14 nt, Human
cuccacccauccua

SEQ ID NO: 2333930 - RNA, 21 nt, Human
cuccacccauccuaucagccu

SEQ ID NO: 2333931 - RNA, 23 nt, Human
cuccacccauccuaucagccugu

SEQ ID NO: 2333932 - RNA, 13 nt, Human
cuccacccccagc

SEQ ID NO: 2333933 - RNA, 14 nt, Human
cuccacccccagcu

SEQ ID NO: 2333934 - RNA, 15 nt, Human
cuccacccccagcug

SEQ ID NO: 2333935 - RNA, 17 nt, Human
cuccacccccagcugcu

SEQ ID NO: 2333936 - RNA, 16 nt, Human
cuccacccuuggccug

SEQ ID NO: 2333937 - RNA, 15 nt, Human
cuccacccuuggccu

SEQ ID NO: 2333938 - RNA, 14 nt, Human
cuccacccuuggcc

SEQ ID NO: 2333939 - RNA, 18 nt, Human
cuccacccccagcugcuu

SEQ ID NO: 2333940 - RNA, 19 nt, Human
cuccacccccagcugcuug

SEQ ID NO: 2333941 - RNA, 21 nt, Human
cuccacccuuggccugucuca

SEQ ID NO: 2333942 - RNA, 17 nt, Human
cuccacccuuggccugu

SEQ ID NO: 2333943 - RNA, 15 nt, Human
cuccaaggugggguc

SEQ ID NO: 2333944 - RNA, 20 nt, Human
cuccaaggggaaucagaacu

SEQ ID NO: 2333945 - RNA, 18 nt, Human
cuccaagggcuucugcac

SEQ ID NO: 2333946 - RNA, 19 nt, Human
cuccaagggcuucugcacc

SEQ ID NO: 2333947 - RNA, 20 nt, Human
cuccaagggcuucugcaccc

SEQ ID NO: 2333948 - RNA, 22 nt, Human
cuccaagggcuucugcacccuc

SEQ ID NO: 2333949 - RNA, 23 nt, Human
cuccaagggcuucugcacccucc

SEQ ID NO: 2333950 - RNA, 16 nt, Human
cuccaccacccaaaag

SEQ ID NO: 2333951 - RNA, 12 nt, Human
cuccaccaccca

SEQ ID NO: 2333952 - RNA, 23 nt, Human
cuccaccaccacuggccaccagg

SEQ ID NO: 2333953 - RNA, 19 nt, Human
cuccaccaccacuggccac

SEQ ID NO: 2333954 - RNA, 21 nt, Human
cuccaccaccacuggccacca

SEQ ID NO: 2333955 - RNA, 14 nt, Human
cuccaccacccaaa

SEQ ID NO: 2333956 - RNA, 13 nt, Human
cuccaccacccaa

SEQ ID NO: 2333957 - RNA, 15 nt, Human
cuccaccaggaaccu

SEQ ID NO: 2333958 - RNA, 14 nt, Human
cuccaccaggaacc

SEQ ID NO: 2333959 - RNA, 13 nt, Human
cuccaccaggaac

SEQ ID NO: 2333960 - RNA, 12 nt, Human
cuccaccucagc

SEQ ID NO: 2333961 - RNA, 23 nt, Human
cuccaccuaguggcuguccagug

SEQ ID NO: 2333962 - RNA, 21 nt, Human
cuccaccuaguggcuguccag

SEQ ID NO: 2333963 - RNA, 22 nt, Human
cuccaccuaguggcuguccagu

SEQ ID NO: 2333964 - RNA, 15 nt, Human
cuccaccuagacugu

SEQ ID NO: 2333965 - RNA, 15 nt, Human
cuccaccuaguggcu

SEQ ID NO: 2333966 - RNA, 20 nt, Human
cuccaccuaguggcugucca

SEQ ID NO: 2333967 - RNA, 19 nt, Human
cuccaccgcugccuaagug

SEQ ID NO: 2333968 - RNA, 16 nt, Human
cuccaccgcugccuaa

SEQ ID NO: 2333969 - RNA, 15 nt, Human
cuccaccgcugccua

SEQ ID NO: 2333970 - RNA, 14 nt, Human
cuccaccgcugccu

SEQ ID NO: 2333971 - RNA, 20 nt, Human
cuccaccgccauggcuucca

SEQ ID NO: 2333972 - RNA, 16 nt, Human
cuccaccgccauggcu

SEQ ID NO: 2333973 - RNA, 14 nt, Human
cuccaccucagccu

SEQ ID NO: 2333974 - RNA, 13 nt, Human
cuccaccucagcc

SEQ ID NO: 2333975 - RNA, 13 nt, Human
cuccacucccacu

SEQ ID NO: 2333976 - RNA, 14 nt, Human
cuccacucccacuu

SEQ ID NO: 2333977 - RNA, 20 nt, Human
cuccacguucugcucaucau

SEQ ID NO: 2333978 - RNA, 19 nt, Human
cuccacuccuuccugccac

SEQ ID NO: 2333979 - RNA, 15 nt, Human
cuccacuccuuccug

SEQ ID NO: 2333980 - RNA, 14 nt, Human
cuccacuccuuccu

SEQ ID NO: 2333981 - RNA, 12 nt, Human
cuccacuccuuc

SEQ ID NO: 2333982 - RNA, 13 nt, Human
cuccacucucccc

SEQ ID NO: 2333983 - RNA, 15 nt, Human
cuccacucuccccca

SEQ ID NO: 2333984 - RNA, 13 nt, Human
cuccacugccuuc

SEQ ID NO: 2333985 - RNA, 14 nt, Human
cuccacucuccucu

SEQ ID NO: 2333986 - RNA, 14 nt, Human
cuccacugccuucg

SEQ ID NO: 2333987 - RNA, 15 nt, Human
cuccacugccuucga

SEQ ID NO: 2333988 - RNA, 16 nt, Human
cuccacugccuucgau

SEQ ID NO: 2333989 - RNA, 13 nt, Human
cuccacuggaugg

SEQ ID NO: 2333990 - RNA, 15 nt, Human
cccgccaaaagcugc

SEQ ID NO: 2333991 - RNA, 23 nt, Human
cccgccaccuaucucgugggaga

SEQ ID NO: 2333992 - RNA, 12 nt, Human
cccgcccacugu

SEQ ID NO: 2333993 - RNA, 16 nt, Human
cccgcccacuguccug

SEQ ID NO: 2333994 - RNA, 13 nt, Human
cccgcccagcugc

SEQ ID NO: 2333995 - RNA, 12 nt, Human
cccgcccaggcu

SEQ ID NO: 2333996 - RNA, 14 nt, Human
cccgcccaggcugg

SEQ ID NO: 2333997 - RNA, 17 nt, Human
cccgcccacuguccugg

SEQ ID NO: 2333998 - RNA, 18 nt, Human
cccgcccacuguccuggg

SEQ ID NO: 2333999 - RNA, 19 nt, Human
cccgcccacuguccugggc

SEQ ID NO: 2334000 - RNA, 20 nt, Human
cccgcccacuguccugggcg

SEQ ID NO: 2334001 - RNA, 22 nt, Human
cccgcagugugcacuaaggggc

SEQ ID NO: 2334002 - RNA, 19 nt, Human
cccgcagugugcacuaagg

SEQ ID NO: 2334003 - RNA, 21 nt, Human
cccgcagaccuccccagcccc

SEQ ID NO: 2334004 - RNA, 20 nt, Human
cccgcccaggcuuagucacu

SEQ ID NO: 2334005 - RNA, 22 nt, Human
cccgcccaggcuuagucacuga

SEQ ID NO: 2334006 - RNA, 23 nt, Human
cccgcuaagagggagggagggcu

SEQ ID NO: 2334007 - RNA, 15 nt, Human
cccgcccaggcuggc

SEQ ID NO: 2334008 - RNA, 17 nt, Human
cccgcccaggcuggcca

SEQ ID NO: 2334009 - RNA, 18 nt, Human
cccgcccaggcuggccag

SEQ ID NO: 2334010 - RNA, 20 nt, Human
cccgcccaggcuggccagcc

SEQ ID NO: 2334011 - RNA, 22 nt, Human
cccgcccaggcuggccagcccc

SEQ ID NO: 2334012 - RNA, 22 nt, Human
cccgagcuggugcauuacagag

SEQ ID NO: 2334013 - RNA, 15 nt, Human
cccgaggacccagac

SEQ ID NO: 2334014 - RNA, 16 nt, Human
cccgaggacccagacc

SEQ ID NO: 2334015 - RNA, 15 nt, Human
cccgcagacaccuug

SEQ ID NO: 2334016 - RNA, 18 nt, Human
cccgaggacccagaccca

SEQ ID NO: 2334017 - RNA, 16 nt, Human
cccgcagacaccuugg

SEQ ID NO: 2334018 - RNA, 17 nt, Human
cccgaggacccagaccc

SEQ ID NO: 2334019 - RNA, 12 nt, Human
cccgcagaccuc

SEQ ID NO: 2334020 - RNA, 14 nt, Human
cccgcagaccuccc

SEQ ID NO: 2334021 - RNA, 18 nt, Human
cccgcagaccuccccagc

SEQ ID NO: 2334022 - RNA, 19 nt, Human
cccgcagaccuccccagcc

SEQ ID NO: 2334023 - RNA, 20 nt, Human
cccgcagaccuccccagccc

SEQ ID NO: 2334024 - RNA, 14 nt, Human
cccgagcuggugca

SEQ ID NO: 2334025 - RNA, 12 nt, Human
cccgagcuggug

SEQ ID NO: 2334026 - RNA, 23 nt, Human
cccgagcugggggccaugagcuc

SEQ ID NO: 2334027 - RNA, 22 nt, Human
cccgagcugggggccaugagcu

SEQ ID NO: 2334028 - RNA, 20 nt, Human
cccgagcugggggccaugag

SEQ ID NO: 2334029 - RNA, 11 nt, Human
cccgagcuggg

SEQ ID NO: 2334030 - RNA, 15 nt, Human
cccgagccuggcucc

SEQ ID NO: 2334031 - RNA, 13 nt, Human
cccgagccuggcu

SEQ ID NO: 2334032 - RNA, 23 nt, Human
cccgacauggacccggagcuaac

SEQ ID NO: 2334033 - RNA, 15 nt, Human
cccgacagagggaag

SEQ ID NO: 2334034 - RNA, 12 nt, Human
cccgacagaggg

SEQ ID NO: 2334035 - RNA, 20 nt, Human
cccgacauggacccggagcu

SEQ ID NO: 2334036 - RNA, 15 nt, Human
cccgacagccuggca

SEQ ID NO: 2334037 - RNA, 18 nt, Human
cccgacagccuggcacag

SEQ ID NO: 2334038 - RNA, 14 nt, Human
cccgacuccucaaa

SEQ ID NO: 2334039 - RNA, 12 nt, Human
cccgacuccuca

SEQ ID NO: 2334040 - RNA, 13 nt, Human
cccgacuugcugu

SEQ ID NO: 2334041 - RNA, 20 nt, Human
ccccugguggacaguccugg

SEQ ID NO: 2334042 - RNA, 19 nt, Human
ccccugguggacaguccug

SEQ ID NO: 2334043 - RNA, 15 nt, Human
ccccugguggacagu

SEQ ID NO: 2334044 - RNA, 15 nt, Human
ccccuggucucuggu

SEQ ID NO: 2334045 - RNA, 22 nt, Human
ccccugguggacaguccuggga

SEQ ID NO: 2334046 - RNA, 21 nt, Human
ccccugguggacaguccuggg

SEQ ID NO: 2334047 - RNA, 12 nt, Human
ccccuggugguu

SEQ ID NO: 2334048 - RNA, 23 nt, Human
ccccugguggacaguccugggag

SEQ ID NO: 2334049 - RNA, 11 nt, Human
ccccugugcag

SEQ ID NO: 2334050 - RNA, 18 nt, Human
ccccuggcuuuucacugc

SEQ ID NO: 2334051 - RNA, 23 nt, Human
ccccuggcugggacguggcucag

SEQ ID NO: 2334052 - RNA, 22 nt, Human
ccccuggcugggacguggcuca

SEQ ID NO: 2334053 - RNA, 20 nt, Human
ccccuggcuccaggccaggg

SEQ ID NO: 2334054 - RNA, 14 nt, Human
ccccuggccucugu

SEQ ID NO: 2334055 - RNA, 20 nt, Human
ccccuggcuuuucacugcug

SEQ ID NO: 2334056 - RNA, 20 nt, Human
ccccugggucagucuggugg

SEQ ID NO: 2334057 - RNA, 21 nt, Human
ccccugggucagucugguggg

SEQ ID NO: 2334058 - RNA, 20 nt, Human
ccccuggguggguggugggg

SEQ ID NO: 2334059 - RNA, 21 nt, Human
ccccuggguggguggugggga

SEQ ID NO: 2334060 - RNA, 23 nt, Human
ccccugggugggugguggggagg

SEQ ID NO: 2334061 - RNA, 22 nt, Human
cccgaauagcugggacuacagg

SEQ ID NO: 2334062 - RNA, 14 nt, Human
cccgacagccuggc

SEQ ID NO: 2334063 - RNA, 21 nt, Human
ccccuuccccacugccugccc

SEQ ID NO: 2334064 - RNA, 19 nt, Human
ccccuuccccacugccugc

SEQ ID NO: 2334065 - RNA, 15 nt, Human
ccccuuccccacugc

SEQ ID NO: 2334066 - RNA, 13 nt, Human
ccccuuccccacu

SEQ ID NO: 2334067 - RNA, 13 nt, Human
ccccuuccaugug

SEQ ID NO: 2334068 - RNA, 14 nt, Human
ccccuuccaugugg

SEQ ID NO: 2334069 - RNA, 13 nt, Human
ccccuuccaugga

SEQ ID NO: 2334070 - RNA, 20 nt, Human
ccccuuccauggacuuuguu

SEQ ID NO: 2334071 - RNA, 15 nt, Human
ccccuguucacucua

SEQ ID NO: 2334072 - RNA, 21 nt, Human
ccccuguggggaucucagggg

SEQ ID NO: 2334073 - RNA, 24 nt, Human
ccccuguggggaucucaggggcug

SEQ ID NO: 2334074 - RNA, 16 nt, Human
ccccuucauccucuga

SEQ ID NO: 2334075 - RNA, 14 nt, Human
ccccuuccacugag

SEQ ID NO: 2334076 - RNA, 16 nt, Human
ccccuuccaucccaga

SEQ ID NO: 2334077 - RNA, 20 nt, Human
ccccugugcagccgcugagc

SEQ ID NO: 2334078 - RNA, 19 nt, Human
ccccugugcagccgcugag

SEQ ID NO: 2334079 - RNA, 19 nt, Human
ccccugugcuccgugccuc

SEQ ID NO: 2334080 - RNA, 11 nt, Human
ccccugugcuc

SEQ ID NO: 2334081 - RNA, 12 nt, Human
ccccugugggga

SEQ ID NO: 2334082 - RNA, 18 nt, Human
ccccuguggggaucucag

SEQ ID NO: 2334083 - RNA, 20 nt, Human
ccccuguggggaucucaggg

SEQ ID NO: 2334084 - RNA, 23 nt, Human
ccccugcccuccccucucugcac

SEQ ID NO: 2334085 - RNA, 13 nt, Human
ccccugcccucgu

SEQ ID NO: 2334086 - RNA, 14 nt, Human
ccccugcccucgug

SEQ ID NO: 2334087 - RNA, 15 nt, Human
ccccugcccucgugg

SEQ ID NO: 2334088 - RNA, 19 nt, Human
ccccugcccucguggccag

SEQ ID NO: 2334089 - RNA, 13 nt, Human
ccccugcccugcu

SEQ ID NO: 2334090 - RNA, 13 nt, Human
ccccugcccugca

SEQ ID NO: 2334091 - RNA, 14 nt, Human
ccccugcccugcac

SEQ ID NO: 2334092 - RNA, 21 nt, Human
ccccugcccucguggccagcc

SEQ ID NO: 2334093 - RNA, 22 nt, Human
ccccugcccucguggccagccc

SEQ ID NO: 2334094 - RNA, 23 nt, Human
ccccugcccucguggccagcccg

SEQ ID NO: 2334095 - RNA, 12 nt, Human
ccccugcccugc

SEQ ID NO: 2334096 - RNA, 17 nt, Human
ccccugcccggcugcgg

SEQ ID NO: 2334097 - RNA, 19 nt, Human
ccccugcccggcugcggaa

SEQ ID NO: 2334098 - RNA, 22 nt, Human
ccccugccccgucaccaucuca

SEQ ID NO: 2334099 - RNA, 15 nt, Human
ccccugccccgucac

SEQ ID NO: 2334100 - RNA, 14 nt, Human
ccccugccccguca

SEQ ID NO: 2334101 - RNA, 22 nt, Human
ccccucugcccagcuugggccc

SEQ ID NO: 2334102 - RNA, 13 nt, Human
ccccucugcccug

SEQ ID NO: 2334103 - RNA, 12 nt, Human
ccccucugcccu

SEQ ID NO: 2334104 - RNA, 13 nt, Human
ccccucugcccag

SEQ ID NO: 2334105 - RNA, 15 nt, Human
ccccucugcccagcu

SEQ ID NO: 2334106 - RNA, 17 nt, Human
ccccucugcccagcuug

SEQ ID NO: 2334107 - RNA, 18 nt, Human
ccccucugcccagcuugg

SEQ ID NO: 2334108 - RNA, 15 nt, Human
ccccucugaccugca

SEQ ID NO: 2334109 - RNA, 19 nt, Human
ccccucucugcaucugacc

SEQ ID NO: 2334110 - RNA, 18 nt, Human
ccccucugaccugcacug

SEQ ID NO: 2334111 - RNA, 12 nt, Human
ccccucugccca

SEQ ID NO: 2334112 - RNA, 22 nt, Human
ccccugccuccacccucugagc

SEQ ID NO: 2334113 - RNA, 18 nt, Human
ccccugccuccacccucu

SEQ ID NO: 2334114 - RNA, 21 nt, Human
ccccugccuccacccucugag

SEQ ID NO: 2334115 - RNA, 19 nt, Human
ccccugccucucugcaggu

SEQ ID NO: 2334116 - RNA, 16 nt, Human
ccccugccucucugca

SEQ ID NO: 2334117 - RNA, 17 nt, Human
ccccugccucucugcag

SEQ ID NO: 2334118 - RNA, 17 nt, Human
ccccugcccugguccag

SEQ ID NO: 2334119 - RNA, 13 nt, Human
ccccugcccuggu

SEQ ID NO: 2334120 - RNA, 15 nt, Human
ccccugcccugcugc

SEQ ID NO: 2334121 - RNA, 14 nt, Human
ccccugcccugcug

SEQ ID NO: 2334122 - RNA, 13 nt, Human
ccccugcccuggg

SEQ ID NO: 2334123 - RNA, 17 nt, Human
ccccugccggccggggc

SEQ ID NO: 2334124 - RNA, 11 nt, Human
ccccugccucc

SEQ ID NO: 2334125 - RNA, 12 nt, Human
ccccugccucca

SEQ ID NO: 2334126 - RNA, 15 nt, Human
ccccugccuccaccc

SEQ ID NO: 2334127 - RNA, 14 nt, Human
ccccugccucucug

SEQ ID NO: 2334128 - RNA, 15 nt, Human
ccccugccucucugc

SEQ ID NO: 2334129 - RNA, 20 nt, Human
ccccugcugccuccccaacc

SEQ ID NO: 2334130 - RNA, 14 nt, Human
ccccugcuggcucu

SEQ ID NO: 2334131 - RNA, 21 nt, Human
ccccugcuggcucuucugccc

SEQ ID NO: 2334132 - RNA, 18 nt, Human
ccccugcugccuccccaa

SEQ ID NO: 2334133 - RNA, 14 nt, Human
ccccugcugccucc

SEQ ID NO: 2334134 - RNA, 13 nt, Human
ccccugcugccuc

SEQ ID NO: 2334135 - RNA, 12 nt, Human
ccccugcugccu

SEQ ID NO: 2334136 - RNA, 19 nt, Human
ccccugcugcaggggcucu

SEQ ID NO: 2334137 - RNA, 22 nt, Human
ccccugcugcaggggcucugga

SEQ ID NO: 2334138 - RNA, 23 nt, Human
ccccugcugcaggggcucuggag

SEQ ID NO: 2334139 - RNA, 14 nt, Human
ccccugcugggugu

SEQ ID NO: 2334140 - RNA, 17 nt, Human
ccccugcuggguguggc

SEQ ID NO: 2334141 - RNA, 11 nt, Human
ccccugcuggu

SEQ ID NO: 2334142 - RNA, 13 nt, Human
ccccugcugguuc

SEQ ID NO: 2334143 - RNA, 15 nt, Human
ccccugcugguucag

SEQ ID NO: 2334144 - RNA, 20 nt, Human
ccccugcugguucaggguug

SEQ ID NO: 2334145 - RNA, 22 nt, Human
ccccugcuggcucuucugccca

SEQ ID NO: 2334146 - RNA, 19 nt, Human
ccccugcuuccaccucacc

SEQ ID NO: 2334147 - RNA, 11 nt, Human
ccccugcuucu

SEQ ID NO: 2334148 - RNA, 13 nt, Human
ccccugcuucucc

SEQ ID NO: 2334149 - RNA, 15 nt, Human
ccccugcuucuccag

SEQ ID NO: 2334150 - RNA, 18 nt, Human
ccccugcuucuccagccu

SEQ ID NO: 2334151 - RNA, 19 nt, Human
ccccugcuucuccagccug

SEQ ID NO: 2334152 - RNA, 15 nt, Human
ccccuggaugcagcc

SEQ ID NO: 2334153 - RNA, 20 nt, Human
ccccuggaggcacugaagug

SEQ ID NO: 2334154 - RNA, 15 nt, Human
ccccuggacugggag

SEQ ID NO: 2334155 - RNA, 15 nt, Human
ccccuggagagaagu

SEQ ID NO: 2334156 - RNA, 12 nt, Human
ccccuggccucu

SEQ ID NO: 2334157 - RNA, 19 nt, Human
ccccuggccuccggcguca

SEQ ID NO: 2334158 - RNA, 13 nt, Human
ccccuggccuccg

SEQ ID NO: 2334159 - RNA, 18 nt, Human
ccccuggaugcagccuca

SEQ ID NO: 2334160 - RNA, 19 nt, Human
ccccuggaugcagccucac

SEQ ID NO: 2334161 - RNA, 21 nt, Human
ccccucgcuuggacggcuggg

SEQ ID NO: 2334162 - RNA, 14 nt, Human
ccccucgugccagu

SEQ ID NO: 2334163 - RNA, 15 nt, Human
ccccucgugccaguc

SEQ ID NO: 2334164 - RNA, 20 nt, Human
ccccucuccaggcgccggcg

SEQ ID NO: 2334165 - RNA, 17 nt, Human
ccccucgugccagucgc

SEQ ID NO: 2334166 - RNA, 12 nt, Human
ccccucucuccu

SEQ ID NO: 2334167 - RNA, 11 nt, Human
ccccucucugc

SEQ ID NO: 2334168 - RNA, 19 nt, Human
ccccucuccuuccugugug

SEQ ID NO: 2334169 - RNA, 14 nt, Human
ccccucuccuuccu

SEQ ID NO: 2334170 - RNA, 12 nt, Human
ccccuccuucuc

SEQ ID NO: 2334171 - RNA, 17 nt, Human
ccccuccuuccuugacc

SEQ ID NO: 2334172 - RNA, 14 nt, Human
ccccuccugcugca

SEQ ID NO: 2334173 - RNA, 15 nt, Human
ccccuccuuccuuga

SEQ ID NO: 2334174 - RNA, 14 nt, Human
ccccuccucugcca

SEQ ID NO: 2334175 - RNA, 12 nt, Human
ccccuccugcug

SEQ ID NO: 2334176 - RNA, 13 nt, Human
ccccuccugcugc

SEQ ID NO: 2334177 - RNA, 13 nt, Human
ccccuccuucaga

SEQ ID NO: 2334178 - RNA, 22 nt, Human
ccccuccugcugcagaggggca

SEQ ID NO: 2334179 - RNA, 20 nt, Human
ccccuccuugccuccugugu

SEQ ID NO: 2334180 - RNA, 18 nt, Human
ccccuccuugccuccugu

SEQ ID NO: 2334181 - RNA, 15 nt, Human
ccccuccuugccucc

SEQ ID NO: 2334182 - RNA, 20 nt, Human
ccccuccuuccuugaccagc

SEQ ID NO: 2334183 - RNA, 15 nt, Human
ccccuccuugggcac

SEQ ID NO: 2334184 - RNA, 14 nt, Human
ccccuccuugcucu

SEQ ID NO: 2334185 - RNA, 13 nt, Human
ccccuccuugggc

SEQ ID NO: 2334186 - RNA, 15 nt, Human
ccccucggagaagag

SEQ ID NO: 2334187 - RNA, 11 nt, Human
ccccuccucug

SEQ ID NO: 2334188 - RNA, 13 nt, Human
ccccuccucucug

SEQ ID NO: 2334189 - RNA, 13 nt, Human
ccccuccucugcc

SEQ ID NO: 2334190 - RNA, 17 nt, Human
ccccuccucucugcccu

SEQ ID NO: 2334191 - RNA, 15 nt, Human
ccccuccucucugcc

SEQ ID NO: 2334192 - RNA, 21 nt, Human
ccccuccucuagcuguggggg

SEQ ID NO: 2334193 - RNA, 22 nt, Human
ccccuccucccuuuuuccuugu

SEQ ID NO: 2334194 - RNA, 11 nt, Human
ccccuccucuc

SEQ ID NO: 2334195 - RNA, 13 nt, Human
ccccuccucuccc

SEQ ID NO: 2334196 - RNA, 15 nt, Human
ccccuccucucccau

SEQ ID NO: 2334197 - RNA, 18 nt, Human
ccccuccucucccauccc

SEQ ID NO: 2334198 - RNA, 23 nt, Human
ccccuccucuccccuaccacugu

SEQ ID NO: 2334199 - RNA, 22 nt, Human
ccccuccuccuggacuccugca

SEQ ID NO: 2334200 - RNA, 17 nt, Human
ccccuccucuagcugug

SEQ ID NO: 2334201 - RNA, 19 nt, Human
ccccuccucuagcuguggg

SEQ ID NO: 2334202 - RNA, 18 nt, Human
ccccuccuccuggacucc

SEQ ID NO: 2334203 - RNA, 18 nt, Human
ccccuccuccacucuccc

SEQ ID NO: 2334204 - RNA, 23 nt, Human
ccccuccucacuggccaucccuc

SEQ ID NO: 2334205 - RNA, 13 nt, Human
ccccuccucccuu

SEQ ID NO: 2334206 - RNA, 12 nt, Human
ccccuccuccac

SEQ ID NO: 2334207 - RNA, 15 nt, Human
ccccuccuccacucu

SEQ ID NO: 2334208 - RNA, 23 nt, Human
ccccuccuaccccucccagcuga

SEQ ID NO: 2334209 - RNA, 12 nt, Human
ccccuccucacu

SEQ ID NO: 2334210 - RNA, 13 nt, Human
ccccuccucacug

SEQ ID NO: 2334211 - RNA, 19 nt, Human
ccccuccuaccccucccag

SEQ ID NO: 2334212 - RNA, 19 nt, Human
ccccuccgcccugccacuc

SEQ ID NO: 2334213 - RNA, 17 nt, Human
ccccuccgcccugccac

SEQ ID NO: 2334214 - RNA, 18 nt, Human
ccccuccgcccugccacu

SEQ ID NO: 2334215 - RNA, 23 nt, Human
ccccuccaaucccaccaacccuc

SEQ ID NO: 2334216 - RNA, 20 nt, Human
ccccucaucucucugcccaa

SEQ ID NO: 2334217 - RNA, 20 nt, Human
ccccucauagcccucacccu

SEQ ID NO: 2334218 - RNA, 13 nt, Human
ccccuccaccugc

SEQ ID NO: 2334219 - RNA, 14 nt, Human
ccccuccaaccugg

SEQ ID NO: 2334220 - RNA, 15 nt, Human
ccccuccaauccugc

SEQ ID NO: 2334221 - RNA, 12 nt, Human
ccccuccacugu

SEQ ID NO: 2334222 - RNA, 16 nt, Human
ccccuccaauccugcc

SEQ ID NO: 2334223 - RNA, 17 nt, Human
ccccuccaauccugccc

SEQ ID NO: 2334224 - RNA, 15 nt, Human
ccccucaccuugcaa

SEQ ID NO: 2334225 - RNA, 14 nt, Human
ccccucaccuugca

SEQ ID NO: 2334226 - RNA, 12 nt, Human
ccccucacucug

SEQ ID NO: 2334227 - RNA, 14 nt, Human
ccccucacucuggc

SEQ ID NO: 2334228 - RNA, 13 nt, Human
ccccucaccuugc

SEQ ID NO: 2334229 - RNA, 15 nt, Human
ccccucaccugggca

SEQ ID NO: 2334230 - RNA, 14 nt, Human
ccccucaccuccuc

SEQ ID NO: 2334231 - RNA, 13 nt, Human
ccccucacccugc

SEQ ID NO: 2334232 - RNA, 16 nt, Human
ccccucacccugccuu

SEQ ID NO: 2334233 - RNA, 12 nt, Human
ccccucaccucc

SEQ ID NO: 2334234 - RNA, 13 nt, Human
ccccucaccuccu

SEQ ID NO: 2334235 - RNA, 15 nt, Human
ccccucaggacugca

SEQ ID NO: 2334236 - RNA, 12 nt, Human
ccccucagcucc

SEQ ID NO: 2334237 - RNA, 13 nt, Human
ccccucagcucca

SEQ ID NO: 2334238 - RNA, 17 nt, Human
ccccucagcuccagacg

SEQ ID NO: 2334239 - RNA, 16 nt, Human
ccccucagggucccug

SEQ ID NO: 2334240 - RNA, 22 nt, Human
ccccucccuggcucccaugacc

SEQ ID NO: 2334241 - RNA, 12 nt, Human
ccccucccuggg

SEQ ID NO: 2334242 - RNA, 13 nt, Human
ccccucccugggu

SEQ ID NO: 2334243 - RNA, 15 nt, Human
ccccucccuucaacc

SEQ ID NO: 2334244 - RNA, 15 nt, Human
ccccucccuuucucc

SEQ ID NO: 2334245 - RNA, 16 nt, Human
ccccuccgcccugcca

SEQ ID NO: 2334246 - RNA, 12 nt, Human
ccccucccuuuc

SEQ ID NO: 2334247 - RNA, 14 nt, Human
ccccucccuggguu

SEQ ID NO: 2334248 - RNA, 13 nt, Human
ccccucccuguca

SEQ ID NO: 2334249 - RNA, 15 nt, Human
ccccucccuggcucc

SEQ ID NO: 2334250 - RNA, 14 nt, Human
ccccucccuggcuc

SEQ ID NO: 2334251 - RNA, 13 nt, Human
ccccucccuggcu

SEQ ID NO: 2334252 - RNA, 17 nt, Human
ccccucccuggccuguu

SEQ ID NO: 2334253 - RNA, 16 nt, Human
ccccucccuggccugu

SEQ ID NO: 2334254 - RNA, 15 nt, Human
ccccucccuggccug

SEQ ID NO: 2334255 - RNA, 14 nt, Human
ccccucccugcuuc

SEQ ID NO: 2334256 - RNA, 12 nt, Human
ccccucccuggc

SEQ ID NO: 2334257 - RNA, 13 nt, Human
ccccucccagaac

SEQ ID NO: 2334258 - RNA, 12 nt, Human
ccccucccagaa

SEQ ID NO: 2334259 - RNA, 11 nt, Human
ccccucccaga

SEQ ID NO: 2334260 - RNA, 12 nt, Human
ccccucccacca

SEQ ID NO: 2334261 - RNA, 16 nt, Human
ccccucccaccacagc

SEQ ID NO: 2334262 - RNA, 16 nt, Human
ccccucccacccaccg

SEQ ID NO: 2334263 - RNA, 12 nt, Human
ccccucccaggg

SEQ ID NO: 2334264 - RNA, 14 nt, Human
ccccucccagcuga

SEQ ID NO: 2334265 - RNA, 22 nt, Human
ccccucccagcugacaguccuc

SEQ ID NO: 2334266 - RNA, 12 nt, Human
ccccucccagcu

SEQ ID NO: 2334267 - RNA, 13 nt, Human
ccccucccagcug

SEQ ID NO: 2334268 - RNA, 11 nt, Human
ccccucccacc

SEQ ID NO: 2334269 - RNA, 22 nt, Human
ccccuccagcuuguggagcccc

SEQ ID NO: 2334270 - RNA, 11 nt, Human
ccccuccagga

SEQ ID NO: 2334271 - RNA, 11 nt, Human
ccccuccagcu

SEQ ID NO: 2334272 - RNA, 13 nt, Human
ccccuccagcuug

SEQ ID NO: 2334273 - RNA, 15 nt, Human
ccccuccagcuugug

SEQ ID NO: 2334274 - RNA, 12 nt, Human
ccccuccaugug

SEQ ID NO: 2334275 - RNA, 23 nt, Human
ccccggguuuggcgggccaagga

SEQ ID NO: 2334276 - RNA, 19 nt, Human
ccccggguuuggcgggcca

SEQ ID NO: 2334277 - RNA, 18 nt, Human
ccccggguuuggcgggcc

SEQ ID NO: 2334278 - RNA, 16 nt, Human
ccccggggacccugug

SEQ ID NO: 2334279 - RNA, 21 nt, Human
ccccggggcguuucuuugccg

SEQ ID NO: 2334280 - RNA, 15 nt, Human
ccccggggcuggguu

SEQ ID NO: 2334281 - RNA, 22 nt, Human
ccccggggugaguccauucucc

SEQ ID NO: 2334282 - RNA, 18 nt, Human
ccccgggcucucugcugu

SEQ ID NO: 2334283 - RNA, 17 nt, Human
ccccggggacccuguga

SEQ ID NO: 2334284 - RNA, 17 nt, Human
ccccgggcucucugcug

SEQ ID NO: 2334285 - RNA, 16 nt, Human
ccccgggcucucugcu

SEQ ID NO: 2334286 - RNA, 15 nt, Human
ccccgggcucucugc

SEQ ID NO: 2334287 - RNA, 16 nt, Human
ccccgggaggggcccg

SEQ ID NO: 2334288 - RNA, 23 nt, Human
ccccgggaggggcccgcuugccu

SEQ ID NO: 2334289 - RNA, 21 nt, Human
ccccggcccugggcucggagg

SEQ ID NO: 2334290 - RNA, 14 nt, Human
ccccggccucagca

SEQ ID NO: 2334291 - RNA, 15 nt, Human
ccccggcggcgccgg

SEQ ID NO: 2334292 - RNA, 21 nt, Human
cccccugugcagccgcugagc

SEQ ID NO: 2334293 - RNA, 13 nt, Human
ccccggcccuggg

SEQ ID NO: 2334294 - RNA, 12 nt, Human
ccccggcccugg

SEQ ID NO: 2334295 - RNA, 20 nt, Human
cccccugguggacaguccug

SEQ ID NO: 2334296 - RNA, 19 nt, Human
cccccugguggacaguccu

SEQ ID NO: 2334297 - RNA, 23 nt, Human
cccccuggggcuucuccugaccc

SEQ ID NO: 2334298 - RNA, 15 nt, Human
cccccuggucucugg

SEQ ID NO: 2334299 - RNA, 16 nt, Human
cccccugccagugccu

SEQ ID NO: 2334300 - RNA, 19 nt, Human
cccccuggggcuucuccug

SEQ ID NO: 2334301 - RNA, 20 nt, Human
cccccuggggcuucuccuga

SEQ ID NO: 2334302 - RNA, 21 nt, Human
cccccuggggcuucuccugac

SEQ ID NO: 2334303 - RNA, 13 nt, Human
cccccugggcucu

SEQ ID NO: 2334304 - RNA, 21 nt, Human
cccccugccccccagccucug

SEQ ID NO: 2334305 - RNA, 11 nt, Human
cccccugggcu

SEQ ID NO: 2334306 - RNA, 23 nt, Human
cccccugguggacaguccuggga

SEQ ID NO: 2334307 - RNA, 21 nt, Human
cccccugguggacaguccugg

SEQ ID NO: 2334308 - RNA, 16 nt, Human
cccccuggucucuggu

SEQ ID NO: 2334309 - RNA, 12 nt, Human
cccccugucccc

SEQ ID NO: 2334310 - RNA, 12 nt, Human
cccccugugcag

SEQ ID NO: 2334311 - RNA, 21 nt, Human
cccccuguccccucagcucca

SEQ ID NO: 2334312 - RNA, 12 nt, Human
cccccuguccuc

SEQ ID NO: 2334313 - RNA, 15 nt, Human
cccccuguccccuca

SEQ ID NO: 2334314 - RNA, 18 nt, Human
cccccuguccccucagcu

SEQ ID NO: 2334315 - RNA, 19 nt, Human
cccccuguccccucagcuc

SEQ ID NO: 2334316 - RNA, 24 nt, Human
ccccggucccuugagaccucagcc

SEQ ID NO: 2334317 - RNA, 16 nt, Human
ccccggucccuugaga

SEQ ID NO: 2334318 - RNA, 15 nt, Human
ccccggucccuugag

SEQ ID NO: 2334319 - RNA, 18 nt, Human
ccccuagcccaggagaga

SEQ ID NO: 2334320 - RNA, 20 nt, Human
ccccuagcccaggagagaga

SEQ ID NO: 2334321 - RNA, 18 nt, Human
ccccuaguaagugccuuc

SEQ ID NO: 2334322 - RNA, 21 nt, Human
ccccuagcuuagagccucccu

SEQ ID NO: 2334323 - RNA, 20 nt, Human
ccccuauccacccagcccau

SEQ ID NO: 2334324 - RNA, 19 nt, Human
ccccuauccacccagccca

SEQ ID NO: 2334325 - RNA, 17 nt, Human
ccccuauccacccagcc

SEQ ID NO: 2334326 - RNA, 16 nt, Human
ccccuauccacccagc

SEQ ID NO: 2334327 - RNA, 14 nt, Human
ccccuauccaccca

SEQ ID NO: 2334328 - RNA, 19 nt, Human
ccccuaguaagugccuucc

SEQ ID NO: 2334329 - RNA, 20 nt, Human
ccccuaguaagugccuucca

SEQ ID NO: 2334330 - RNA, 15 nt, Human
ccccucaacaccucu

SEQ ID NO: 2334331 - RNA, 21 nt, Human
ccccuauccacccagcccauu

SEQ ID NO: 2334332 - RNA, 18 nt, Human
ccccucaaaucguccagc

SEQ ID NO: 2334333 - RNA, 13 nt, Human
ccccucacagccu

SEQ ID NO: 2334334 - RNA, 21 nt, Human
ccccucaaaccuccucuucug

SEQ ID NO: 2334335 - RNA, 16 nt, Human
ccccucaccaggggca

SEQ ID NO: 2334336 - RNA, 17 nt, Human
ccccucaccaggggcag

SEQ ID NO: 2334337 - RNA, 14 nt, Human
ccccucacagccuc

SEQ ID NO: 2334338 - RNA, 17 nt, Human
ccccucacagccucuga

SEQ ID NO: 2334339 - RNA, 18 nt, Human
ccccucacagccucugac

SEQ ID NO: 2334340 - RNA, 20 nt, Human
ccccucacagccucugaccc

SEQ ID NO: 2334341 - RNA, 16 nt, Human
ccccucaacaccucug

SEQ ID NO: 2334342 - RNA, 23 nt, Human
ccccucaacucuccuccagaguc

SEQ ID NO: 2334343 - RNA, 24 nt, Human
cccccggguuuggcgggccaagga

SEQ ID NO: 2334344 - RNA, 15 nt, Human
cccccggggcugggu

SEQ ID NO: 2334345 - RNA, 16 nt, Human
cccccggggcuggguu

SEQ ID NO: 2334346 - RNA, 20 nt, Human
cccccgggaggggcccgcuu

SEQ ID NO: 2334347 - RNA, 22 nt, Human
cccccgggaggggcccgcuugc

SEQ ID NO: 2334348 - RNA, 18 nt, Human
cccccgggccgacggagc

SEQ ID NO: 2334349 - RNA, 23 nt, Human
cccccgggccgacggagccggga

SEQ ID NO: 2334350 - RNA, 15 nt, Human
cccccagcuccggcc

SEQ ID NO: 2334351 - RNA, 12 nt, Human
cccccagcucug

SEQ ID NO: 2334352 - RNA, 14 nt, Human
cccccagcucuggu

SEQ ID NO: 2334353 - RNA, 11 nt, Human
cccccagcugg

SEQ ID NO: 2334354 - RNA, 12 nt, Human
cccccagcuggc

SEQ ID NO: 2334355 - RNA, 21 nt, Human
cccccucaucucauucaaacc

SEQ ID NO: 2334356 - RNA, 16 nt, Human
cccccucaaaccuccu

SEQ ID NO: 2334357 - RNA, 19 nt, Human
cccccucaaaccuccucuu

SEQ ID NO: 2334358 - RNA, 15 nt, Human
cccccuccaauccug

SEQ ID NO: 2334359 - RNA, 16 nt, Human
cccccuccaauccugc

SEQ ID NO: 2334360 - RNA, 18 nt, Human
cccccuccaauccugccc

SEQ ID NO: 2334361 - RNA, 13 nt, Human
cccccucccaggg

SEQ ID NO: 2334362 - RNA, 12 nt, Human
cccccucccacc

SEQ ID NO: 2334363 - RNA, 13 nt, Human
cccccuccccagg

SEQ ID NO: 2334364 - RNA, 16 nt, Human
cccccagcaacccucc

SEQ ID NO: 2334365 - RNA, 12 nt, Human
cccccagccugc

SEQ ID NO: 2334366 - RNA, 21 nt, Human
cccccagcuaagaaccuggaa

SEQ ID NO: 2334367 - RNA, 18 nt, Human
cccccagcuaagaaccug

SEQ ID NO: 2334368 - RNA, 13 nt, Human
cccccagcuaaga

SEQ ID NO: 2334369 - RNA, 15 nt, Human
cccccagccucuggc

SEQ ID NO: 2334370 - RNA, 14 nt, Human
cccccugccagugc

SEQ ID NO: 2334371 - RNA, 16 nt, Human
cccccugccccccagc

SEQ ID NO: 2334372 - RNA, 14 nt, Human
cccccuccucuccc

SEQ ID NO: 2334373 - RNA, 21 nt, Human
cccccugcaaagcccagcuug

SEQ ID NO: 2334374 - RNA, 19 nt, Human
cccccugcaaagcccagcu

SEQ ID NO: 2334375 - RNA, 18 nt, Human
cccccugcaaagcccagc

SEQ ID NO: 2334376 - RNA, 19 nt, Human
cccccugacaacacucauu

SEQ ID NO: 2334377 - RNA, 14 nt, Human
cccccucccuggcc

SEQ ID NO: 2334378 - RNA, 12 nt, Human
cccccuccucuc

SEQ ID NO: 2334379 - RNA, 19 nt, Human
cccccuccgcccugccacu

SEQ ID NO: 2334380 - RNA, 19 nt, Human
cccccucuggcuccagcug

SEQ ID NO: 2334381 - RNA, 12 nt, Human
cccccucuggcu

SEQ ID NO: 2334382 - RNA, 21 nt, Human
cccccucuggcuccagcuggc

SEQ ID NO: 2334383 - RNA, 12 nt, Human
cccccucugucc

SEQ ID NO: 2334384 - RNA, 16 nt, Human
cccccucugucuugug

SEQ ID NO: 2334385 - RNA, 17 nt, Human
cccccugacaacacuca

SEQ ID NO: 2334386 - RNA, 22 nt, Human
cccccaccucucccugacccug

SEQ ID NO: 2334387 - RNA, 14 nt, Human
cccccacuccagcu

SEQ ID NO: 2334388 - RNA, 17 nt, Human
cccccacugccuuugac

SEQ ID NO: 2334389 - RNA, 21 nt, Human
cccccacucucauuccccagg

SEQ ID NO: 2334390 - RNA, 14 nt, Human
cccccacugcaggc

SEQ ID NO: 2334391 - RNA, 12 nt, Human
cccccacccuuu

SEQ ID NO: 2334392 - RNA, 17 nt, Human
cccccaccccuucccca

SEQ ID NO: 2334393 - RNA, 15 nt, Human
cccccaccccuuccc

SEQ ID NO: 2334394 - RNA, 12 nt, Human
cccccacccccu

SEQ ID NO: 2334395 - RNA, 13 nt, Human
cccccacccacuu

SEQ ID NO: 2334396 - RNA, 20 nt, Human
cccccaccccggggacccug

SEQ ID NO: 2334397 - RNA, 15 nt, Human
cccccacccccagcu

SEQ ID NO: 2334398 - RNA, 17 nt, Human
cccccacccccagcuca

SEQ ID NO: 2334399 - RNA, 22 nt, Human
cccccagaaccuguccuugcac

SEQ ID NO: 2334400 - RNA, 22 nt, Human
cccccacuugccucuuccuuga

SEQ ID NO: 2334401 - RNA, 15 nt, Human
cccccagaaccuguc

SEQ ID NO: 2334402 - RNA, 15 nt, Human
cccccacuggugaca

SEQ ID NO: 2334403 - RNA, 11 nt, Human
cccccacuggu

SEQ ID NO: 2334404 - RNA, 13 nt, Human
cccccacugguga

SEQ ID NO: 2334405 - RNA, 17 nt, Human
cccccacaccucaguuc

SEQ ID NO: 2334406 - RNA, 19 nt, Human
ccccauccuccccuucccu

SEQ ID NO: 2334407 - RNA, 18 nt, Human
ccccauccuccccuuccc

SEQ ID NO: 2334408 - RNA, 13 nt, Human
cccccacccaagg

SEQ ID NO: 2334409 - RNA, 15 nt, Human
cccccaccacuagga

SEQ ID NO: 2334410 - RNA, 14 nt, Human
cccccacccccagc

SEQ ID NO: 2334411 - RNA, 16 nt, Human
cccccacagugcuguc

SEQ ID NO: 2334412 - RNA, 22 nt, Human
cccccaccacggccacuggcca

SEQ ID NO: 2334413 - RNA, 24 nt, Human
cccccacccaagggccuggccuga

SEQ ID NO: 2334414 - RNA, 17 nt, Human
ccccauccuccccuucc

SEQ ID NO: 2334415 - RNA, 13 nt, Human
ccccauccucccc

SEQ ID NO: 2334416 - RNA, 17 nt, Human
ccccauccuccagcuuc

SEQ ID NO: 2334417 - RNA, 18 nt, Human
ccccauccuccagcuucu

SEQ ID NO: 2334418 - RNA, 15 nt, Human
ccccauccuccagca

SEQ ID NO: 2334419 - RNA, 14 nt, Human
ccccauccuccagc

SEQ ID NO: 2334420 - RNA, 15 nt, Human
ccccauccuccagcu

SEQ ID NO: 2334421 - RNA, 16 nt, Human
ccccauccuccagcuu

SEQ ID NO: 2334422 - RNA, 14 nt, Human
ccccauccucugua

SEQ ID NO: 2334423 - RNA, 16 nt, Human
ccccaucccacacccu

SEQ ID NO: 2334424 - RNA, 12 nt, Human
ccccauccucca

SEQ ID NO: 2334425 - RNA, 19 nt, Human
ccccaucaggacucuugug

SEQ ID NO: 2334426 - RNA, 13 nt, Human
ccccaucauucau

SEQ ID NO: 2334427 - RNA, 17 nt, Human
ccccaucauugguaccc

SEQ ID NO: 2334428 - RNA, 19 nt, Human
ccccaggccccaggaagcc

SEQ ID NO: 2334429 - RNA, 12 nt, Human
ccccaggccccg

SEQ ID NO: 2334430 - RNA, 13 nt, Human
ccccaggccccga

SEQ ID NO: 2334431 - RNA, 20 nt, Human
ccccaggccccgaggaccca

SEQ ID NO: 2334432 - RNA, 18 nt, Human
ccccaggccccaggaagc

SEQ ID NO: 2334433 - RNA, 12 nt, Human
ccccaggcccca

SEQ ID NO: 2334434 - RNA, 11 nt, Human
ccccaggcccc

SEQ ID NO: 2334435 - RNA, 19 nt, Human
ccccagaccugagcucccc

SEQ ID NO: 2334436 - RNA, 18 nt, Human
ccccagacaccgccacau

SEQ ID NO: 2334437 - RNA, 15 nt, Human
ccccagaccugagcu

SEQ ID NO: 2334438 - RNA, 11 nt, Human
ccccagggcac

SEQ ID NO: 2334439 - RNA, 13 nt, Human
ccccaggcugaag

SEQ ID NO: 2334440 - RNA, 21 nt, Human
ccccaggccugaaagaggcug

SEQ ID NO: 2334441 - RNA, 15 nt, Human
ccccaggccucugug

SEQ ID NO: 2334442 - RNA, 17 nt, Human
ccccaggccucuguguc

SEQ ID NO: 2334443 - RNA, 23 nt, Human
ccccaggccugaaagaggcugag

SEQ ID NO: 2334444 - RNA, 18 nt, Human
ccccaguaagccacugcc

SEQ ID NO: 2334445 - RNA, 16 nt, Human
ccccaguaagccacug

SEQ ID NO: 2334446 - RNA, 17 nt, Human
ccccaguaaaauugcca

SEQ ID NO: 2334447 - RNA, 14 nt, Human
ccccagucagccuc

SEQ ID NO: 2334448 - RNA, 19 nt, Human
ccccaguccccaccccugc

SEQ ID NO: 2334449 - RNA, 23 nt, Human
ccccagucagccucucucccagu

SEQ ID NO: 2334450 - RNA, 18 nt, Human
ccccaguccccaccccug

SEQ ID NO: 2334451 - RNA, 15 nt, Human
ccccagucagccucu

SEQ ID NO: 2334452 - RNA, 16 nt, Human
ccccagucagccucuc

SEQ ID NO: 2334453 - RNA, 17 nt, Human
ccccagucagccucucu

SEQ ID NO: 2334454 - RNA, 21 nt, Human
ccccagucagccucucuccca

SEQ ID NO: 2334455 - RNA, 13 nt, Human
ccccaguaaaauu

SEQ ID NO: 2334456 - RNA, 14 nt, Human
ccccaguaaaauug

SEQ ID NO: 2334457 - RNA, 23 nt, Human
ccccagguguguuggggccuugg

SEQ ID NO: 2334458 - RNA, 14 nt, Human
ccccagugcccaca

SEQ ID NO: 2334459 - RNA, 15 nt, Human
ccccagugcccacag

SEQ ID NO: 2334460 - RNA, 16 nt, Human
ccccagugcccacagg

SEQ ID NO: 2334461 - RNA, 20 nt, Human
ccccagugcccacaggauca

SEQ ID NO: 2334462 - RNA, 23 nt, Human
ccccaguuugcagaaaagcaccu

SEQ ID NO: 2334463 - RNA, 21 nt, Human
ccccaguucugcuccucucca

SEQ ID NO: 2334464 - RNA, 23 nt, Human
ccccaguucugcuccucuccagg

SEQ ID NO: 2334465 - RNA, 17 nt, Human
ccccaguucugcuccuc

SEQ ID NO: 2334466 - RNA, 18 nt, Human
ccccaguucugcuccucu

SEQ ID NO: 2334467 - RNA, 19 nt, Human
ccccaguucugcuccucuc

SEQ ID NO: 2334468 - RNA, 20 nt, Human
ccccaguucugcuccucucc

SEQ ID NO: 2334469 - RNA, 16 nt, Human
ccccagugcacccacu

SEQ ID NO: 2334470 - RNA, 14 nt, Human
ccccaguucugcuc

SEQ ID NO: 2334471 - RNA, 15 nt, Human
ccccaguucugcucc

SEQ ID NO: 2334472 - RNA, 16 nt, Human
ccccaguucugcuccu

SEQ ID NO: 2334473 - RNA, 14 nt, Human
ccccauauggucau

SEQ ID NO: 2334474 - RNA, 13 nt, Human
ccccaucagugcu

SEQ ID NO: 2334475 - RNA, 20 nt, Human
ccccaucagugcucccucac

SEQ ID NO: 2334476 - RNA, 14 nt, Human
ccccaucagugcuc

SEQ ID NO: 2334477 - RNA, 14 nt, Human
ccccauagccaccc

SEQ ID NO: 2334478 - RNA, 12 nt, Human
ccccauagccac

SEQ ID NO: 2334479 - RNA, 22 nt, Human
ccccauaauuuuuuuuuuccuu

SEQ ID NO: 2334480 - RNA, 12 nt, Human
cccagagaagcc

SEQ ID NO: 2334481 - RNA, 22 nt, Human
cccagagaaaggggagcccacu

SEQ ID NO: 2334482 - RNA, 13 nt, Human
cccagagaagcca

SEQ ID NO: 2334483 - RNA, 14 nt, Human
cccagagaagcccc

SEQ ID NO: 2334484 - RNA, 15 nt, Human
cccagagaagccccu

SEQ ID NO: 2334485 - RNA, 17 nt, Human
cccagaaugaggcugcu

SEQ ID NO: 2334486 - RNA, 17 nt, Human
cccagagacaggaaaau

SEQ ID NO: 2334487 - RNA, 16 nt, Human
cccagagacaggaaaa

SEQ ID NO: 2334488 - RNA, 15 nt, Human
cccagagacaggaaa

SEQ ID NO: 2334489 - RNA, 14 nt, Human
cccagagacaggaa

SEQ ID NO: 2334490 - RNA, 13 nt, Human
cccagagacagga

SEQ ID NO: 2334491 - RNA, 22 nt, Human
cccagagaagccccuuccccau

SEQ ID NO: 2334492 - RNA, 16 nt, Human
cccagagaagccccuu

SEQ ID NO: 2334493 - RNA, 21 nt, Human
cccagagaagccccuucccca

SEQ ID NO: 2334494 - RNA, 23 nt, Human
cccagagacauacuugaagggcc

SEQ ID NO: 2334495 - RNA, 22 nt, Human
cccagagacauacuugaagggc

SEQ ID NO: 2334496 - RNA, 21 nt, Human
cccagagacauacuugaaggg

SEQ ID NO: 2334497 - RNA, 18 nt, Human
cccagagacauacuugaa

SEQ ID NO: 2334498 - RNA, 13 nt, Human
cccaguucugcuc

SEQ ID NO: 2334499 - RNA, 14 nt, Human
cccaguucugcucc

SEQ ID NO: 2334500 - RNA, 15 nt, Human
cccaguucugcuccu

SEQ ID NO: 2334501 - RNA, 23 nt, Human
cccaguucugcuccucuccaggc

SEQ ID NO: 2334502 - RNA, 15 nt, Human
cccaguugccaucug

SEQ ID NO: 2334503 - RNA, 16 nt, Human
cccaguucugcuccuc

SEQ ID NO: 2334504 - RNA, 20 nt, Human
cccaguucugcuccucucca

SEQ ID NO: 2334505 - RNA, 21 nt, Human
cccaguucugcuccucuccag

SEQ ID NO: 2334506 - RNA, 22 nt, Human
cccaguucugcuccucuccagg

SEQ ID NO: 2334507 - RNA, 17 nt, Human
cccaguugccaucugcg

SEQ ID NO: 2334508 - RNA, 14 nt, Human
cccaguugggugga

SEQ ID NO: 2334509 - RNA, 21 nt, Human
cccaucucaugccccuggcug

SEQ ID NO: 2334510 - RNA, 22 nt, Human
cccaucucaugccccuggcugg

SEQ ID NO: 2334511 - RNA, 19 nt, Human
cccaucucuacaaaaagca

SEQ ID NO: 2334512 - RNA, 13 nt, Human
cccaucucccccu

SEQ ID NO: 2334513 - RNA, 22 nt, Human
cccaucugcaccccccugggcu

SEQ ID NO: 2334514 - RNA, 21 nt, Human
cccaucugcaccccccugggc

SEQ ID NO: 2334515 - RNA, 17 nt, Human
cccaucugcagggcccc

SEQ ID NO: 2334516 - RNA, 19 nt, Human
cccaucugcaccccuucuc

SEQ ID NO: 2334517 - RNA, 12 nt, Human
cccaucugccca

SEQ ID NO: 2334518 - RNA, 13 nt, Human
cccaucugcccag

SEQ ID NO: 2334519 - RNA, 14 nt, Human
cccaucugcccagg

SEQ ID NO: 2334520 - RNA, 15 nt, Human
cccaucugcccagga

SEQ ID NO: 2334521 - RNA, 16 nt, Human
cccaucugcccaggac

SEQ ID NO: 2334522 - RNA, 16 nt, Human
cccaucugggaguccc

SEQ ID NO: 2334523 - RNA, 23 nt, Human
cccaucugggaguccccuuuucu

SEQ ID NO: 2334524 - RNA, 18 nt, Human
cccaucuggguccuugca

SEQ ID NO: 2334525 - RNA, 21 nt, Human
cccaucucucccuccccugcc

SEQ ID NO: 2334526 - RNA, 18 nt, Human
cccaucucucccuccccu

SEQ ID NO: 2334527 - RNA, 13 nt, Human
cccaucucucccu

SEQ ID NO: 2334528 - RNA, 23 nt, Human
cccaucucucccuccccugccau

SEQ ID NO: 2334529 - RNA, 18 nt, Human
cccaucucuuccuaccca

SEQ ID NO: 2334530 - RNA, 13 nt, Human
cccaucugcaccc

SEQ ID NO: 2334531 - RNA, 14 nt, Human
cccaucucuucugg

SEQ ID NO: 2334532 - RNA, 18 nt, Human
cccaugcccaccugccca

SEQ ID NO: 2334533 - RNA, 15 nt, Human
cccaugcccaccugc

SEQ ID NO: 2334534 - RNA, 14 nt, Human
cccaugcccaccug

SEQ ID NO: 2334535 - RNA, 21 nt, Human
cccaugccaaagcuagggugg

SEQ ID NO: 2334536 - RNA, 22 nt, Human
cccaugcacugugaaggacccu

SEQ ID NO: 2334537 - RNA, 20 nt, Human
cccaugcacugugaaggacc

SEQ ID NO: 2334538 - RNA, 19 nt, Human
cccaugcacugugaaggac

SEQ ID NO: 2334539 - RNA, 18 nt, Human
cccaugcacugugaagga

SEQ ID NO: 2334540 - RNA, 16 nt, Human
cccaugcacugugaag

SEQ ID NO: 2334541 - RNA, 14 nt, Human
cccaugcacuguga

SEQ ID NO: 2334542 - RNA, 12 nt, Human
cccaugcacugu

SEQ ID NO: 2334543 - RNA, 23 nt, Human
cccaugaguuggggucuggcagc

SEQ ID NO: 2334544 - RNA, 15 nt, Human
cccaugaucccugug

SEQ ID NO: 2334545 - RNA, 21 nt, Human
cccaugcuggagccuguguaa

SEQ ID NO: 2334546 - RNA, 19 nt, Human
cccaugcuggagccugugu

SEQ ID NO: 2334547 - RNA, 20 nt, Human
cccaugcuggagccugugua

SEQ ID NO: 2334548 - RNA, 14 nt, Human
cccaugcuguugau

SEQ ID NO: 2334549 - RNA, 19 nt, Human
cccaugcuguugauugcua

SEQ ID NO: 2334550 - RNA, 21 nt, Human
cccaugcuguugauugcuaaa

SEQ ID NO: 2334551 - RNA, 13 nt, Human
cccaugcuggagc

SEQ ID NO: 2334552 - RNA, 14 nt, Human
cccaugcuggagcc

SEQ ID NO: 2334553 - RNA, 15 nt, Human
cccaugcuggagccu

SEQ ID NO: 2334554 - RNA, 16 nt, Human
cccaugcuggagccug

SEQ ID NO: 2334555 - RNA, 17 nt, Human
cccaugcuggagccugu

SEQ ID NO: 2334556 - RNA, 18 nt, Human
cccaugcuggagccugug

SEQ ID NO: 2334557 - RNA, 22 nt, Human
cccauggacaggcuggcuccag

SEQ ID NO: 2334558 - RNA, 20 nt, Human
cccauggacaggcuggcucc

SEQ ID NO: 2334559 - RNA, 15 nt, Human
cccauggacaggcug

SEQ ID NO: 2334560 - RNA, 22 nt, Human
cccaugcuguugauugcuaaau

SEQ ID NO: 2334561 - RNA, 15 nt, Human
cccauggacacucca

SEQ ID NO: 2334562 - RNA, 16 nt, Human
cccauggacacuccag

SEQ ID NO: 2334563 - RNA, 20 nt, Human
cccauggacacuccagugcc

SEQ ID NO: 2334564 - RNA, 21 nt, Human
cccauggacacuccagugcca

SEQ ID NO: 2334565 - RNA, 22 nt, Human
cccaugagccucagcauccugg

SEQ ID NO: 2334566 - RNA, 22 nt, Human
cccaugacuuuauauggaugau

SEQ ID NO: 2334567 - RNA, 19 nt, Human
cccaugaccauacugaggg

SEQ ID NO: 2334568 - RNA, 13 nt, Human
cccaugacccacc

SEQ ID NO: 2334569 - RNA, 14 nt, Human
cccaugacccaccc

SEQ ID NO: 2334570 - RNA, 15 nt, Human
cccaugacccacccc

SEQ ID NO: 2334571 - RNA, 16 nt, Human
cccaugacccaccccu

SEQ ID NO: 2334572 - RNA, 17 nt, Human
cccaugacccaccccug

SEQ ID NO: 2334573 - RNA, 19 nt, Human
cccaugacccaccccugug

SEQ ID NO: 2334574 - RNA, 12 nt, Human
cccaucugugaa

SEQ ID NO: 2334575 - RNA, 22 nt, Human
cccaucuggguccuugcacccc

SEQ ID NO: 2334576 - RNA, 14 nt, Human
cccaugagccucag

SEQ ID NO: 2334577 - RNA, 19 nt, Human
cccaugacccaggcugggc

SEQ ID NO: 2334578 - RNA, 17 nt, Human
cccaugacccaggcugg

SEQ ID NO: 2334579 - RNA, 18 nt, Human
cccaugacccaggcuggg

SEQ ID NO: 2334580 - RNA, 20 nt, Human
cccaugacccaccccugugc

SEQ ID NO: 2334581 - RNA, 21 nt, Human
cccaugacccaccccugugcu

SEQ ID NO: 2334582 - RNA, 22 nt, Human
cccaugacccaccccugugcuc

SEQ ID NO: 2334583 - RNA, 23 nt, Human
cccaugacccaccccugugcucc

SEQ ID NO: 2334584 - RNA, 12 nt, Human
ccccaccucucc

SEQ ID NO: 2334585 - RNA, 12 nt, Human
ccccaccuccac

SEQ ID NO: 2334586 - RNA, 17 nt, Human
ccccaccucucccugac

SEQ ID NO: 2334587 - RNA, 12 nt, Human
ccccaccugcca

SEQ ID NO: 2334588 - RNA, 21 nt, Human
ccccaccuucaauuccugggc

SEQ ID NO: 2334589 - RNA, 11 nt, Human
ccccaccuggg

SEQ ID NO: 2334590 - RNA, 14 nt, Human
ccccacgcccuccc

SEQ ID NO: 2334591 - RNA, 17 nt, Human
ccccacgagggucagga

SEQ ID NO: 2334592 - RNA, 14 nt, Human
ccccacccuuuggg

SEQ ID NO: 2334593 - RNA, 19 nt, Human
ccccaccgcagacaggacc

SEQ ID NO: 2334594 - RNA, 15 nt, Human
ccccaccgcagacag

SEQ ID NO: 2334595 - RNA, 20 nt, Human
ccccacccuggugggccaac

SEQ ID NO: 2334596 - RNA, 20 nt, Human
ccccacccugggcucuggga

SEQ ID NO: 2334597 - RNA, 19 nt, Human
ccccacgugacagugccug

SEQ ID NO: 2334598 - RNA, 21 nt, Human
ccccacggggccucgggaccu

SEQ ID NO: 2334599 - RNA, 22 nt, Human
ccccacggggccucgggaccuc

SEQ ID NO: 2334600 - RNA, 18 nt, Human
ccccacggccgcuccagg

SEQ ID NO: 2334601 - RNA, 19 nt, Human
ccccacggccgcuccaggg

SEQ ID NO: 2334602 - RNA, 22 nt, Human
ccccacggccgcuccaggggug

SEQ ID NO: 2334603 - RNA, 18 nt, Human
ccccacucaccagugucc

SEQ ID NO: 2334604 - RNA, 14 nt, Human
ccccacuccccacc

SEQ ID NO: 2334605 - RNA, 13 nt, Human
ccccacuccagcu

SEQ ID NO: 2334606 - RNA, 23 nt, Human
ccccacucccuggcucucagaag

SEQ ID NO: 2334607 - RNA, 21 nt, Human
ccccacucuaggggucaggcu

SEQ ID NO: 2334608 - RNA, 18 nt, Human
ccccacucuccccacacu

SEQ ID NO: 2334609 - RNA, 18 nt, Human
ccccacuuaucccucucc

SEQ ID NO: 2334610 - RNA, 13 nt, Human
ccccacuugccuc

SEQ ID NO: 2334611 - RNA, 15 nt, Human
ccccacucuccccac

SEQ ID NO: 2334612 - RNA, 12 nt, Human
ccccacucuccc

SEQ ID NO: 2334613 - RNA, 20 nt, Human
ccccacucucauuccccagg

SEQ ID NO: 2334614 - RNA, 15 nt, Human
ccccacucucauucc

SEQ ID NO: 2334615 - RNA, 20 nt, Human
ccccagaaccuguccuugca

SEQ ID NO: 2334616 - RNA, 15 nt, Human
ccccagaaccugucc

SEQ ID NO: 2334617 - RNA, 21 nt, Human
ccccagaaccuguccuugcac

SEQ ID NO: 2334618 - RNA, 16 nt, Human
ccccagaaggcaggga

SEQ ID NO: 2334619 - RNA, 14 nt, Human
ccccacuugccucu

SEQ ID NO: 2334620 - RNA, 15 nt, Human
ccccacuugccucuu

SEQ ID NO: 2334621 - RNA, 16 nt, Human
ccccacuugccucuuc

SEQ ID NO: 2334622 - RNA, 21 nt, Human
ccccacuugccucuuccuuga

SEQ ID NO: 2334623 - RNA, 16 nt, Human
ccccaccccacacuug

SEQ ID NO: 2334624 - RNA, 13 nt, Human
ccccaccccagcc

SEQ ID NO: 2334625 - RNA, 13 nt, Human
ccccacccccagc

SEQ ID NO: 2334626 - RNA, 16 nt, Human
ccccacccccagcuca

SEQ ID NO: 2334627 - RNA, 17 nt, Human
ccccacccccagcucaa

SEQ ID NO: 2334628 - RNA, 20 nt, Human
ccccacccccagcucaaugg

SEQ ID NO: 2334629 - RNA, 13 nt, Human
ccccacccaggag

SEQ ID NO: 2334630 - RNA, 12 nt, Human
ccccacccagga

SEQ ID NO: 2334631 - RNA, 14 nt, Human
ccccaccccacacu

SEQ ID NO: 2334632 - RNA, 21 nt, Human
ccccacccaagggccuggccu

SEQ ID NO: 2334633 - RNA, 12 nt, Human
ccccacacuccu

SEQ ID NO: 2334634 - RNA, 12 nt, Human
ccccacccucau

SEQ ID NO: 2334635 - RNA, 15 nt, Human
ccccacccucccugg

SEQ ID NO: 2334636 - RNA, 16 nt, Human
ccccacccucccugga

SEQ ID NO: 2334637 - RNA, 18 nt, Human
ccccacccucccuggagu

SEQ ID NO: 2334638 - RNA, 12 nt, Human
ccccacccuggg

SEQ ID NO: 2334639 - RNA, 14 nt, Human
ccccacccugggcc

SEQ ID NO: 2334640 - RNA, 15 nt, Human
ccccacccugggccc

SEQ ID NO: 2334641 - RNA, 20 nt, Human
ccccacccugggcccugggc

SEQ ID NO: 2334642 - RNA, 14 nt, Human
ccccacccugggcu

SEQ ID NO: 2334643 - RNA, 15 nt, Human
ccccacccugggcuc

SEQ ID NO: 2334644 - RNA, 16 nt, Human
ccccacccugggcucu

SEQ ID NO: 2334645 - RNA, 13 nt, Human
ccccaaucccagc

SEQ ID NO: 2334646 - RNA, 14 nt, Human
ccccaauuccuugu

SEQ ID NO: 2334647 - RNA, 15 nt, Human
ccccaauaauugcag

SEQ ID NO: 2334648 - RNA, 16 nt, Human
ccccaaggggcagucu

SEQ ID NO: 2334649 - RNA, 15 nt, Human
ccccaaggggcaguc

SEQ ID NO: 2334650 - RNA, 14 nt, Human
ccccaaggggcagu

SEQ ID NO: 2334651 - RNA, 14 nt, Human
cccauuccucaccu

SEQ ID NO: 2334652 - RNA, 22 nt, Human
ccccaaggggcagucuggaggg

SEQ ID NO: 2334653 - RNA, 18 nt, Human
ccccaaggggcagucugg

SEQ ID NO: 2334654 - RNA, 15 nt, Human
ccccacacucacucc

SEQ ID NO: 2334655 - RNA, 16 nt, Human
ccccacaccucaguuc

SEQ ID NO: 2334656 - RNA, 14 nt, Human
ccccacaccucagu

SEQ ID NO: 2334657 - RNA, 14 nt, Human
ccccacaccaggcc

SEQ ID NO: 2334658 - RNA, 15 nt, Human
ccccaauuccuugua

SEQ ID NO: 2334659 - RNA, 11 nt, Human
ccccacacaca

SEQ ID NO: 2334660 - RNA, 14 nt, Human
ccccacacacacac

SEQ ID NO: 2334661 - RNA, 12 nt, Human
ccccacacacac

SEQ ID NO: 2334662 - RNA, 21 nt, Human
cccauucauuccauucuggaa

SEQ ID NO: 2334663 - RNA, 22 nt, Human
cccauggacacuccagugccag

SEQ ID NO: 2334664 - RNA, 13 nt, Human
cccauuccugaag

SEQ ID NO: 2334665 - RNA, 12 nt, Human
cccauuccugaa

SEQ ID NO: 2334666 - RNA, 18 nt, Human
cccauucauuccauucug

SEQ ID NO: 2334667 - RNA, 22 nt, Human
cccauucauuccauucuggaag

SEQ ID NO: 2334668 - RNA, 13 nt, Human
cccaugccugucc

SEQ ID NO: 2334669 - RNA, 14 nt, Human
ccccuccacuguca

SEQ ID NO: 2334670 - RNA, 17 nt, Human
cccuguauauagcccag

SEQ ID NO: 2334671 - RNA, 18 nt, Human
cccuguauauagcccagc

SEQ ID NO: 2334672 - RNA, 15 nt, Human
cccuguauauagccc

SEQ ID NO: 2334673 - RNA, 15 nt, Human
cccuggugcugccac

SEQ ID NO: 2334674 - RNA, 14 nt, Human
cccugucaccaagc

SEQ ID NO: 2334675 - RNA, 19 nt, Human
cccugucaccaagcucaca

SEQ ID NO: 2334676 - RNA, 20 nt, Human
cccuguauuuucuuucucua

SEQ ID NO: 2334677 - RNA, 14 nt, Human
cccuguauggcacu

SEQ ID NO: 2334678 - RNA, 21 nt, Human
cccugucagugcagcccgugu

SEQ ID NO: 2334679 - RNA, 17 nt, Human
cccugucagugcagccc

SEQ ID NO: 2334680 - RNA, 14 nt, Human
cccuguccaaacug

SEQ ID NO: 2334681 - RNA, 14 nt, Human
cccugucagugcag

SEQ ID NO: 2334682 - RNA, 22 nt, Human
cccugucagugcagcccgugug

SEQ ID NO: 2334683 - RNA, 14 nt, Human
cccuguuccccaga

SEQ ID NO: 2334684 - RNA, 17 nt, Human
cccuguuccccagagaa

SEQ ID NO: 2334685 - RNA, 16 nt, Human
cccuguuccccagaga

SEQ ID NO: 2334686 - RNA, 13 nt, Human
cccuguucuggca

SEQ ID NO: 2334687 - RNA, 14 nt, Human
cccuguucuggcag

SEQ ID NO: 2334688 - RNA, 20 nt, Human
cccuguuuucugagcccggg

SEQ ID NO: 2334689 - RNA, 22 nt, Human
cccuguuuucugagcccgggcu

SEQ ID NO: 2334690 - RNA, 23 nt, Human
cccuguuuucugagcccgggcug

SEQ ID NO: 2334691 - RNA, 14 nt, Human
cccuuaaaauagaa

SEQ ID NO: 2334692 - RNA, 14 nt, Human
cccuguuuucugag

SEQ ID NO: 2334693 - RNA, 15 nt, Human
cccuguuuucugagc

SEQ ID NO: 2334694 - RNA, 16 nt, Human
cccuguuuucugagcc

SEQ ID NO: 2334695 - RNA, 17 nt, Human
cccuguuuucugagccc

SEQ ID NO: 2334696 - RNA, 18 nt, Human
cccuguuuucugagcccg

SEQ ID NO: 2334697 - RNA, 14 nt, Human
cccuguuuuauacu

SEQ ID NO: 2334698 - RNA, 20 nt, Human
cccuguugacgaagucucuu

SEQ ID NO: 2334699 - RNA, 19 nt, Human
cccuguuuguuucugaaag

SEQ ID NO: 2334700 - RNA, 17 nt, Human
cccuuaccugccaggaa

SEQ ID NO: 2334701 - RNA, 20 nt, Human
cccuuaccugccaggaagcc

SEQ ID NO: 2334702 - RNA, 23 nt, Human
cccuuaccugccaggaagccagc

SEQ ID NO: 2334703 - RNA, 23 nt, Human
cccuggggccuggaccugccucc

SEQ ID NO: 2334704 - RNA, 18 nt, Human
cccuggggccuggaccug

SEQ ID NO: 2334705 - RNA, 21 nt, Human
cccuggggccuggaccugccu

SEQ ID NO: 2334706 - RNA, 13 nt, Human
cccuggugcugcc

SEQ ID NO: 2334707 - RNA, 14 nt, Human
cccuggugcugcca

SEQ ID NO: 2334708 - RNA, 21 nt, Human
cccuggugaccagcaccaucu

SEQ ID NO: 2334709 - RNA, 13 nt, Human
cccuggggccugg

SEQ ID NO: 2334710 - RNA, 20 nt, Human
cccuggggacagcaagggcu

SEQ ID NO: 2334711 - RNA, 14 nt, Human
cccuggggccugga

SEQ ID NO: 2334712 - RNA, 17 nt, Human
cccuggggccuggaccu

SEQ ID NO: 2334713 - RNA, 13 nt, Human
cccugguggcagu

SEQ ID NO: 2334714 - RNA, 21 nt, Human
cccugguggcagcucaccucu

SEQ ID NO: 2334715 - RNA, 21 nt, Human
cccuguagagugggagcugag

SEQ ID NO: 2334716 - RNA, 14 nt, Human
cccugguggcagug

SEQ ID NO: 2334717 - RNA, 13 nt, Human
cccugggcugaga

SEQ ID NO: 2334718 - RNA, 13 nt, Human
cccugggcuggaa

SEQ ID NO: 2334719 - RNA, 14 nt, Human
cccugggcuggaau

SEQ ID NO: 2334720 - RNA, 15 nt, Human
cccugggcugugcua

SEQ ID NO: 2334721 - RNA, 17 nt, Human
cccugggcuuggccugc

SEQ ID NO: 2334722 - RNA, 17 nt, Human
cccuggggacagcaagg

SEQ ID NO: 2334723 - RNA, 22 nt, Human
cccugggcuuggccugcuguga

SEQ ID NO: 2334724 - RNA, 19 nt, Human
cccuggggacagcaagggc

SEQ ID NO: 2334725 - RNA, 18 nt, Human
cccugggcuuggccugcu

SEQ ID NO: 2334726 - RNA, 19 nt, Human
cccugggcuuggccugcug

SEQ ID NO: 2334727 - RNA, 20 nt, Human
cccugggcuuggccugcugu

SEQ ID NO: 2334728 - RNA, 21 nt, Human
cccugggcuuggccugcugug

SEQ ID NO: 2334729 - RNA, 17 nt, Human
cccugcuucuccagccu

SEQ ID NO: 2334730 - RNA, 18 nt, Human
cccugcuucuccagccug

SEQ ID NO: 2334731 - RNA, 21 nt, Human
cccugcuucuccagccuggac

SEQ ID NO: 2334732 - RNA, 23 nt, Human
cccugcuucuccagccuggaccc

SEQ ID NO: 2334733 - RNA, 16 nt, Human
cccugcuuccaggaaa

SEQ ID NO: 2334734 - RNA, 11 nt, Human
cccugcuucuc

SEQ ID NO: 2334735 - RNA, 12 nt, Human
cccugcuucucc

SEQ ID NO: 2334736 - RNA, 15 nt, Human
cccugcuucuccagc

SEQ ID NO: 2334737 - RNA, 16 nt, Human
cccugcuucuccagcc

SEQ ID NO: 2334738 - RNA, 14 nt, Human
cccugcuuccaccu

SEQ ID NO: 2334739 - RNA, 15 nt, Human
cccugcuuccaccuc

SEQ ID NO: 2334740 - RNA, 17 nt, Human
cccugcuuccaccucac

SEQ ID NO: 2334741 - RNA, 18 nt, Human
cccugcuuccaccucacc

SEQ ID NO: 2334742 - RNA, 21 nt, Human
cccugcuuccaccucacccca

SEQ ID NO: 2334743 - RNA, 14 nt, Human
cccugcuuccagga

SEQ ID NO: 2334744 - RNA, 15 nt, Human
cccugcuuccaggaa

SEQ ID NO: 2334745 - RNA, 23 nt, Human
cccugcuguccccucuugcccca

SEQ ID NO: 2334746 - RNA, 21 nt, Human
cccugcuucaauacccaaauc

SEQ ID NO: 2334747 - RNA, 16 nt, Human
cccugcuguccccucu

SEQ ID NO: 2334748 - RNA, 17 nt, Human
cccugcuguccccucuu

SEQ ID NO: 2334749 - RNA, 18 nt, Human
cccugcuguccccucuug

SEQ ID NO: 2334750 - RNA, 19 nt, Human
cccugcuguccccucuugc

SEQ ID NO: 2334751 - RNA, 17 nt, Human
cccugcuggccgccuca

SEQ ID NO: 2334752 - RNA, 12 nt, Human
cccugcuguccc

SEQ ID NO: 2334753 - RNA, 13 nt, Human
cccugcugucccc

SEQ ID NO: 2334754 - RNA, 17 nt, Human
cccugcugcugacccag

SEQ ID NO: 2334755 - RNA, 12 nt, Human
cccugcuggccg

SEQ ID NO: 2334756 - RNA, 13 nt, Human
cccugcuggccgc

SEQ ID NO: 2334757 - RNA, 15 nt, Human
cccugcuggccgccu

SEQ ID NO: 2334758 - RNA, 13 nt, Human
cccuuccacugag

SEQ ID NO: 2334759 - RNA, 17 nt, Human
cccuucacuucugacca

SEQ ID NO: 2334760 - RNA, 17 nt, Human
cccuuccacacccccac

SEQ ID NO: 2334761 - RNA, 16 nt, Human
cccuuccacugagggc

SEQ ID NO: 2334762 - RNA, 20 nt, Human
cccuuccaugucgccucugc

SEQ ID NO: 2334763 - RNA, 12 nt, Human
cccuuccaugga

SEQ ID NO: 2334764 - RNA, 22 nt, Human
cccuucacuucugaccacacuu

SEQ ID NO: 2334765 - RNA, 17 nt, Human
cccuucacugccuuugc

SEQ ID NO: 2334766 - RNA, 18 nt, Human
cccuucacugccuuugcu

SEQ ID NO: 2334767 - RNA, 16 nt, Human
cccuucacaguguuuc

SEQ ID NO: 2334768 - RNA, 20 nt, Human
cccuucacaaagcccaaggg

SEQ ID NO: 2334769 - RNA, 15 nt, Human
cccuucacauaguuu

SEQ ID NO: 2334770 - RNA, 18 nt, Human
cccuucaaccauucccca

SEQ ID NO: 2334771 - RNA, 18 nt, Human
cccuucacaaagcccaag

SEQ ID NO: 2334772 - RNA, 13 nt, Human
cccuucacaaagc

SEQ ID NO: 2334773 - RNA, 12 nt, Human
cccuuauuuuca

SEQ ID NO: 2334774 - RNA, 14 nt, Human
cccuucaaccauuc

SEQ ID NO: 2334775 - RNA, 12 nt, Human
cccuuauuuccu

SEQ ID NO: 2334776 - RNA, 16 nt, Human
cccuuauuacacggaa

SEQ ID NO: 2334777 - RNA, 20 nt, Human
cccuuauuacacggaaaacg

SEQ ID NO: 2334778 - RNA, 20 nt, Human
cccuuaucugugcucaggac

SEQ ID NO: 2334779 - RNA, 16 nt, Human
cccuuaucugugcuca

SEQ ID NO: 2334780 - RNA, 23 nt, Human
cccuuagcagggaaacagcuaau

SEQ ID NO: 2334781 - RNA, 14 nt, Human
cccuuagcccccac

SEQ ID NO: 2334782 - RNA, 19 nt, Human
cccuuagcccccacccacu

SEQ ID NO: 2334783 - RNA, 21 nt, Human
cccuuagcccccacccacuuc

SEQ ID NO: 2334784 - RNA, 14 nt, Human
cccuuagccucccu

SEQ ID NO: 2334785 - RNA, 22 nt, Human
cccuuagcccccacccacuucc

SEQ ID NO: 2334786 - RNA, 17 nt, Human
cccuuagccucccugaa

SEQ ID NO: 2334787 - RNA, 15 nt, Human
cccuuauccaggacu

SEQ ID NO: 2334788 - RNA, 16 nt, Human
cccuuauccaggacuc

SEQ ID NO: 2334789 - RNA, 15 nt, Human
cccuuaucaccagcu

SEQ ID NO: 2334790 - RNA, 12 nt, Human
cccuuauccagg

SEQ ID NO: 2334791 - RNA, 13 nt, Human
cccuuauccagga

SEQ ID NO: 2334792 - RNA, 14 nt, Human
cccuuauccaggac

SEQ ID NO: 2334793 - RNA, 14 nt, Human
cccuuagcagggaa

SEQ ID NO: 2334794 - RNA, 13 nt, Human
cccuuaccuuccc

SEQ ID NO: 2334795 - RNA, 20 nt, Human
cccuuagaaguuuguuguga

SEQ ID NO: 2334796 - RNA, 15 nt, Human
cccuuacgugagucc

SEQ ID NO: 2334797 - RNA, 17 nt, Human
cccuuacgugaguccug

SEQ ID NO: 2334798 - RNA, 22 nt, Human
cccuugaggaaacaacagcuuu

SEQ ID NO: 2334799 - RNA, 18 nt, Human
cccuugagcuccccaaaa

SEQ ID NO: 2334800 - RNA, 19 nt, Human
cccuugagaccucagccau

SEQ ID NO: 2334801 - RNA, 18 nt, Human
cccuugagaccucagcca

SEQ ID NO: 2334802 - RNA, 17 nt, Human
cccuugagaccucagcc

SEQ ID NO: 2334803 - RNA, 17 nt, Human
cccuugagcccucuaug

SEQ ID NO: 2334804 - RNA, 20 nt, Human
cccuugagaccucagccaug

SEQ ID NO: 2334805 - RNA, 16 nt, Human
cccuugagaccucagc

SEQ ID NO: 2334806 - RNA, 15 nt, Human
cccuugagaccucag

SEQ ID NO: 2334807 - RNA, 14 nt, Human
cccuugagaccuca

SEQ ID NO: 2334808 - RNA, 13 nt, Human
cccuugagaccuc

SEQ ID NO: 2334809 - RNA, 17 nt, Human
cccuucccuugagcccu

SEQ ID NO: 2334810 - RNA, 16 nt, Human
cccuucccugucccuc

SEQ ID NO: 2334811 - RNA, 14 nt, Human
cccuugagaaaccu

SEQ ID NO: 2334812 - RNA, 22 nt, Human
cccuugagaaaccuuauuguac

SEQ ID NO: 2334813 - RNA, 19 nt, Human
cccuuccccucccuggcuc

SEQ ID NO: 2334814 - RNA, 17 nt, Human
cccuuccccucccuggc

SEQ ID NO: 2334815 - RNA, 16 nt, Human
cccuuccccucccugg

SEQ ID NO: 2334816 - RNA, 15 nt, Human
cccuuccccucccug

SEQ ID NO: 2334817 - RNA, 14 nt, Human
cccuuccccucccu

SEQ ID NO: 2334818 - RNA, 12 nt, Human
cccuuccccucc

SEQ ID NO: 2334819 - RNA, 14 nt, Human
cccuuccccgaggg

SEQ ID NO: 2334820 - RNA, 17 nt, Human
cccuuccccgagggaug

SEQ ID NO: 2334821 - RNA, 13 nt, Human
cccuucccugcaa

SEQ ID NO: 2334822 - RNA, 13 nt, Human
cccuucccugucc

SEQ ID NO: 2334823 - RNA, 14 nt, Human
cccuucccuguccc

SEQ ID NO: 2334824 - RNA, 15 nt, Human
cccuucccugucccu

SEQ ID NO: 2334825 - RNA, 15 nt, Human
cccuucccugcaaac

SEQ ID NO: 2334826 - RNA, 13 nt, Human
cccuucccucacc

SEQ ID NO: 2334827 - RNA, 13 nt, Human
cccuuccccuccu

SEQ ID NO: 2334828 - RNA, 22 nt, Human
cccuuccccucccuggcuccca

SEQ ID NO: 2334829 - RNA, 21 nt, Human
cccuuccccuacccccuccuc

SEQ ID NO: 2334830 - RNA, 19 nt, Human
cccuugcucuccccugccc

SEQ ID NO: 2334831 - RNA, 13 nt, Human
cccuuggaaaccu

SEQ ID NO: 2334832 - RNA, 17 nt, Human
cccuuggaaaccugccc

SEQ ID NO: 2334833 - RNA, 18 nt, Human
cccuugcucuccccugcc

SEQ ID NO: 2334834 - RNA, 13 nt, Human
cccuugcccugac

SEQ ID NO: 2334835 - RNA, 12 nt, Human
cccuugcccuga

SEQ ID NO: 2334836 - RNA, 12 nt, Human
cccuugccuccc

SEQ ID NO: 2334837 - RNA, 20 nt, Human
cccuugccuccccauuuccc

SEQ ID NO: 2334838 - RNA, 23 nt, Human
cccuugccuccccauuucccauc

SEQ ID NO: 2334839 - RNA, 13 nt, Human
cccuugccucccc

SEQ ID NO: 2334840 - RNA, 15 nt, Human
cccuugccuccccau

SEQ ID NO: 2334841 - RNA, 18 nt, Human
cccuugccuccccauuuc

SEQ ID NO: 2334842 - RNA, 19 nt, Human
cccuugccuccccauuucc

SEQ ID NO: 2334843 - RNA, 13 nt, Human
cccuugccagaca

SEQ ID NO: 2334844 - RNA, 20 nt, Human
cccuugagcuccccaaaaac

SEQ ID NO: 2334845 - RNA, 15 nt, Human
cccuugccagacaug

SEQ ID NO: 2334846 - RNA, 12 nt, Human
cccuugcccagg

SEQ ID NO: 2334847 - RNA, 20 nt, Human
cccuugcccagggcucagcc

SEQ ID NO: 2334848 - RNA, 19 nt, Human
cccuugcccagggcucagc

SEQ ID NO: 2334849 - RNA, 15 nt, Human
cccuugcccagggcu

SEQ ID NO: 2334850 - RNA, 14 nt, Human
cccuugcccagggc

SEQ ID NO: 2334851 - RNA, 22 nt, Human
cccuugcccagggcucagccug

SEQ ID NO: 2334852 - RNA, 21 nt, Human
cccuugcccagggcucagccu

SEQ ID NO: 2334853 - RNA, 23 nt, Human
cccuugcccagggcucagccugg

SEQ ID NO: 2334854 - RNA, 19 nt, Human
cccugcuccagaagauagc

SEQ ID NO: 2334855 - RNA, 17 nt, Human
cccugcucccucccauc

SEQ ID NO: 2334856 - RNA, 16 nt, Human
cccugcucaguaaagc

SEQ ID NO: 2334857 - RNA, 21 nt, Human
cccugcuccacgucugcgccg

SEQ ID NO: 2334858 - RNA, 21 nt, Human
cccugcgggucacaggaggga

SEQ ID NO: 2334859 - RNA, 19 nt, Human
cccugcgggucacaggagg

SEQ ID NO: 2334860 - RNA, 17 nt, Human
cccugcgguagauggga

SEQ ID NO: 2334861 - RNA, 22 nt, Human
cccugcggccccgucuguggcu

SEQ ID NO: 2334862 - RNA, 15 nt, Human
cccugcguggggaca

SEQ ID NO: 2334863 - RNA, 22 nt, Human
cccugcgggugaacaaagcagc

SEQ ID NO: 2334864 - RNA, 20 nt, Human
cccugcgaaggggcccuggu

SEQ ID NO: 2334865 - RNA, 19 nt, Human
cccugcgaaggggcccugg

SEQ ID NO: 2334866 - RNA, 21 nt, Human
cccugcgaaggggcccugguc

SEQ ID NO: 2334867 - RNA, 17 nt, Human
cccugcgaaggggcccu

SEQ ID NO: 2334868 - RNA, 22 nt, Human
cccugccuuaucuugcacccca

SEQ ID NO: 2334869 - RNA, 13 nt, Human
cccugccugguca

SEQ ID NO: 2334870 - RNA, 15 nt, Human
cccugccucucugca

SEQ ID NO: 2334871 - RNA, 22 nt, Human
cccugcucuccgaccagacacc

SEQ ID NO: 2334872 - RNA, 21 nt, Human
cccugcugagucccaggcuga

SEQ ID NO: 2334873 - RNA, 22 nt, Human
cccugcuccucccuggcugccc

SEQ ID NO: 2334874 - RNA, 21 nt, Human
cccugcucuccgaccagacac

SEQ ID NO: 2334875 - RNA, 13 nt, Human
cccugcuccuccc

SEQ ID NO: 2334876 - RNA, 15 nt, Human
cccugcuccucccug

SEQ ID NO: 2334877 - RNA, 16 nt, Human
cccugcuccucccugg

SEQ ID NO: 2334878 - RNA, 17 nt, Human
cccugcuccucccuggc

SEQ ID NO: 2334879 - RNA, 18 nt, Human
cccugcuccucccuggcu

SEQ ID NO: 2334880 - RNA, 19 nt, Human
cccugcuccucccuggcug

SEQ ID NO: 2334881 - RNA, 20 nt, Human
cccugcuccucccuggcugc

SEQ ID NO: 2334882 - RNA, 12 nt, Human
cccugcugccuc

SEQ ID NO: 2334883 - RNA, 11 nt, Human
cccugcugccu

SEQ ID NO: 2334884 - RNA, 23 nt, Human
cccugcugccgccucccagccug

SEQ ID NO: 2334885 - RNA, 22 nt, Human
cccugcugccgccucccagccu

SEQ ID NO: 2334886 - RNA, 20 nt, Human
cccugcugccgccucccagc

SEQ ID NO: 2334887 - RNA, 16 nt, Human
cccugcugccucccca

SEQ ID NO: 2334888 - RNA, 14 nt, Human
cccugcugccuccc

SEQ ID NO: 2334889 - RNA, 19 nt, Human
cccugcugccgccucccag

SEQ ID NO: 2334890 - RNA, 16 nt, Human
cccugcugcaggggcu

SEQ ID NO: 2334891 - RNA, 19 nt, Human
cccugcugcaggggcucug

SEQ ID NO: 2334892 - RNA, 21 nt, Human
cccugcugcaggggcucugga

SEQ ID NO: 2334893 - RNA, 22 nt, Human
cccugcugcaggggcucuggag

SEQ ID NO: 2334894 - RNA, 23 nt, Human
cccugcugagucccaggcugagc

SEQ ID NO: 2334895 - RNA, 21 nt, Human
cccugcuccucccuggcugcc

SEQ ID NO: 2334896 - RNA, 13 nt, Human
cccugcugcaggg

SEQ ID NO: 2334897 - RNA, 15 nt, Human
cccugcugcaggggc

SEQ ID NO: 2334898 - RNA, 22 nt, Human
cccugccuccacccucugagcu

SEQ ID NO: 2334899 - RNA, 16 nt, Human
cccugccuccacccuc

SEQ ID NO: 2334900 - RNA, 19 nt, Human
cccugccuccacccucuga

SEQ ID NO: 2334901 - RNA, 20 nt, Human
cccugccuccacccucugag

SEQ ID NO: 2334902 - RNA, 21 nt, Human
cccugccuccacccucugagc

SEQ ID NO: 2334903 - RNA, 12 nt, Human
cccugccuccac

SEQ ID NO: 2334904 - RNA, 14 nt, Human
cccugccuccaccc

SEQ ID NO: 2334905 - RNA, 15 nt, Human
cccugccuccacccu

SEQ ID NO: 2334906 - RNA, 14 nt, Human
cccugccgccucaa

SEQ ID NO: 2334907 - RNA, 13 nt, Human
cccugccgccuca

SEQ ID NO: 2334908 - RNA, 21 nt, Human
cccugcaucugaccagcagcg

SEQ ID NO: 2334909 - RNA, 13 nt, Human
cccugccggccgg

SEQ ID NO: 2334910 - RNA, 12 nt, Human
cccugcaucccc

SEQ ID NO: 2334911 - RNA, 19 nt, Human
cccugcaucugaccagcag

SEQ ID NO: 2334912 - RNA, 18 nt, Human
cccugcaucugaccagca

SEQ ID NO: 2334913 - RNA, 16 nt, Human
cccugcaucugaccag

SEQ ID NO: 2334914 - RNA, 13 nt, Human
cccugcauccccu

SEQ ID NO: 2334915 - RNA, 13 nt, Human
cccugccucucug

SEQ ID NO: 2334916 - RNA, 14 nt, Human
cccugccucucugc

SEQ ID NO: 2334917 - RNA, 11 nt, Human
cccugccuccu

SEQ ID NO: 2334918 - RNA, 22 nt, Human
cccugccucucaucaacugaau

SEQ ID NO: 2334919 - RNA, 19 nt, Human
cccugaggagccaggccgg

SEQ ID NO: 2334920 - RNA, 14 nt, Human
cccugaaaacccag

SEQ ID NO: 2334921 - RNA, 17 nt, Human
cccugaggcaggucccc

SEQ ID NO: 2334922 - RNA, 12 nt, Human
cccugaggccca

SEQ ID NO: 2334923 - RNA, 20 nt, Human
cccugaggcagguccccaga

SEQ ID NO: 2334924 - RNA, 18 nt, Human
cccugaggcaggucccca

SEQ ID NO: 2334925 - RNA, 21 nt, Human
cccugaggcagguccccagac

SEQ ID NO: 2334926 - RNA, 16 nt, Human
cccuggugcugccaca

SEQ ID NO: 2334927 - RNA, 23 nt, Human
cccucccucuuucccucccuucc

SEQ ID NO: 2334928 - RNA, 13 nt, Human
cccucccucagcc

SEQ ID NO: 2334929 - RNA, 16 nt, Human
cccucccggcauggga

SEQ ID NO: 2334930 - RNA, 16 nt, Human
cccucccgccccuucc

SEQ ID NO: 2334931 - RNA, 23 nt, Human
cccucccgccccuucccacucac

SEQ ID NO: 2334932 - RNA, 12 nt, Human
cccucccugcug

SEQ ID NO: 2334933 - RNA, 13 nt, Human
cccucccugcugu

SEQ ID NO: 2334934 - RNA, 14 nt, Human
cccucccugcuguc

SEQ ID NO: 2334935 - RNA, 15 nt, Human
cccucccugcugucc

SEQ ID NO: 2334936 - RNA, 17 nt, Human
cccucccugcugucccc

SEQ ID NO: 2334937 - RNA, 19 nt, Human
cccucccugcuguccccuc

SEQ ID NO: 2334938 - RNA, 16 nt, Human
cccucccucagccccu

SEQ ID NO: 2334939 - RNA, 22 nt, Human
cccucccgucuacucauucccc

SEQ ID NO: 2334940 - RNA, 14 nt, Human
cccucccugccccu

SEQ ID NO: 2334941 - RNA, 14 nt, Human
cccucccuggcucc

SEQ ID NO: 2334942 - RNA, 17 nt, Human
cccucccuggccuguuc

SEQ ID NO: 2334943 - RNA, 15 nt, Human
cccucccuggccugu

SEQ ID NO: 2334944 - RNA, 14 nt, Human
cccucccugcuuca

SEQ ID NO: 2334945 - RNA, 12 nt, Human
cccucccuggag

SEQ ID NO: 2334946 - RNA, 13 nt, Human
cccucccuggagu

SEQ ID NO: 2334947 - RNA, 14 nt, Human
cccucccuggagug

SEQ ID NO: 2334948 - RNA, 19 nt, Human
cccucccuggcucccauga

SEQ ID NO: 2334949 - RNA, 16 nt, Human
cccucccuggcuccca

SEQ ID NO: 2334950 - RNA, 13 nt, Human
cccucgugccagu

SEQ ID NO: 2334951 - RNA, 14 nt, Human
cccucgugccaguc

SEQ ID NO: 2334952 - RNA, 16 nt, Human
cccucgugccagucgc

SEQ ID NO: 2334953 - RNA, 13 nt, Human
cccucguggccag

SEQ ID NO: 2334954 - RNA, 14 nt, Human
cccucguggccagc

SEQ ID NO: 2334955 - RNA, 15 nt, Human
cccucguggccagcc

SEQ ID NO: 2334956 - RNA, 22 nt, Human
cccucgugccagucgcgcugcc

SEQ ID NO: 2334957 - RNA, 23 nt, Human
cccucgugccagucgcgcugccu

SEQ ID NO: 2334958 - RNA, 16 nt, Human
cccuccccugcccuag

SEQ ID NO: 2334959 - RNA, 13 nt, Human
cccuccccugcug

SEQ ID NO: 2334960 - RNA, 14 nt, Human
cccuccccugcugc

SEQ ID NO: 2334961 - RNA, 14 nt, Human
cccuccccugcccu

SEQ ID NO: 2334962 - RNA, 13 nt, Human
cccuccccugccc

SEQ ID NO: 2334963 - RNA, 16 nt, Human
cccuccccugcugcag

SEQ ID NO: 2334964 - RNA, 15 nt, Human
cccuccccuggggac

SEQ ID NO: 2334965 - RNA, 14 nt, Human
cccucccgccccuu

SEQ ID NO: 2334966 - RNA, 15 nt, Human
cccucccgccccuuc

SEQ ID NO: 2334967 - RNA, 12 nt, Human
cccucccagcug

SEQ ID NO: 2334968 - RNA, 19 nt, Human
cccucccaccucugugacc

SEQ ID NO: 2334969 - RNA, 13 nt, Human
cccucccaccucu

SEQ ID NO: 2334970 - RNA, 14 nt, Human
cccucccaccucug

SEQ ID NO: 2334971 - RNA, 15 nt, Human
cccucccaccucugu

SEQ ID NO: 2334972 - RNA, 17 nt, Human
cccucccaccucuguga

SEQ ID NO: 2334973 - RNA, 13 nt, Human
cccuccccugcca

SEQ ID NO: 2334974 - RNA, 24 nt, Human
cccuccccucucuugcacccgccu

SEQ ID NO: 2334975 - RNA, 13 nt, Human
cccucccagcuga

SEQ ID NO: 2334976 - RNA, 17 nt, Human
cccucccagcugacagu

SEQ ID NO: 2334977 - RNA, 20 nt, Human
cccucccagcugacaguccu

SEQ ID NO: 2334978 - RNA, 13 nt, Human
cccucccaccccc

SEQ ID NO: 2334979 - RNA, 12 nt, Human
cccucccacccc

SEQ ID NO: 2334980 - RNA, 14 nt, Human
cccucccacccacc

SEQ ID NO: 2334981 - RNA, 15 nt, Human
cccucccacccaccg

SEQ ID NO: 2334982 - RNA, 17 nt, Human
cccucccaccacagcag

SEQ ID NO: 2334983 - RNA, 12 nt, Human
cccucccaccca

SEQ ID NO: 2334984 - RNA, 14 nt, Human
cccucccaccacag

SEQ ID NO: 2334985 - RNA, 12 nt, Human
cccucccaccac

SEQ ID NO: 2334986 - RNA, 14 nt, Human
cccucccacagcgc

SEQ ID NO: 2334987 - RNA, 14 nt, Human
cccgcucagcccuc

SEQ ID NO: 2334988 - RNA, 12 nt, Human
cccucccacagc

SEQ ID NO: 2334989 - RNA, 12 nt, Human
cccgcucagccc

SEQ ID NO: 2334990 - RNA, 13 nt, Human
cccgcucagcccu

SEQ ID NO: 2334991 - RNA, 15 nt, Human
cccgcucagcccucc

SEQ ID NO: 2334992 - RNA, 13 nt, Human
cccucugccuguc

SEQ ID NO: 2334993 - RNA, 15 nt, Human
cccucugccccaucc

SEQ ID NO: 2334994 - RNA, 13 nt, Human
cccucugggcacu

SEQ ID NO: 2334995 - RNA, 16 nt, Human
cccucuggcccugccu

SEQ ID NO: 2334996 - RNA, 22 nt, Human
cccucuggcuccagcuggccgg

SEQ ID NO: 2334997 - RNA, 21 nt, Human
cccucugccugaaccuuccau

SEQ ID NO: 2334998 - RNA, 18 nt, Human
cccucugccccauccucc

SEQ ID NO: 2334999 - RNA, 12 nt, Human
cccucuggcucc

SEQ ID NO: 2335000 - RNA, 17 nt, Human
cccucuggcuccagcug

SEQ ID NO: 2335001 - RNA, 16 nt, Human
cccucuggcuccagcu

SEQ ID NO: 2335002 - RNA, 20 nt, Human
cccucuguguauuugcuuuu

SEQ ID NO: 2335003 - RNA, 21 nt, Human
cccucuguucugcacacagca

SEQ ID NO: 2335004 - RNA, 20 nt, Human
cccucuguucugcacacagc

SEQ ID NO: 2335005 - RNA, 11 nt, Human
cccucuuccau

SEQ ID NO: 2335006 - RNA, 18 nt, Human
cccucuguugccaggcua

SEQ ID NO: 2335007 - RNA, 20 nt, Human
cccucuguuucucuuuccuu

SEQ ID NO: 2335008 - RNA, 13 nt, Human
cccucuuccauca

SEQ ID NO: 2335009 - RNA, 20 nt, Human
cccucuuucccucccuuccu

SEQ ID NO: 2335010 - RNA, 17 nt, Human
cccucuuucccucccuu

SEQ ID NO: 2335011 - RNA, 17 nt, Human
cccucuuuggcuccccu

SEQ ID NO: 2335012 - RNA, 19 nt, Human
cccucuuuggcuccccugu

SEQ ID NO: 2335013 - RNA, 20 nt, Human
cccucuuuggcuccccugua

SEQ ID NO: 2335014 - RNA, 21 nt, Human
cccucuuuggcuccccuguac

SEQ ID NO: 2335015 - RNA, 16 nt, Human
cccucuugccccccac

SEQ ID NO: 2335016 - RNA, 23 nt, Human
cccucuugccccaacccccagca

SEQ ID NO: 2335017 - RNA, 22 nt, Human
cccucuugccccccaccccagc

SEQ ID NO: 2335018 - RNA, 18 nt, Human
cccucuuggucuucccag

SEQ ID NO: 2335019 - RNA, 12 nt, Human
cccucuuucccu

SEQ ID NO: 2335020 - RNA, 15 nt, Human
cccucuucucaagug

SEQ ID NO: 2335021 - RNA, 16 nt, Human
cccucuucucaagugc

SEQ ID NO: 2335022 - RNA, 20 nt, Human
cccucuucucaagugccuua

SEQ ID NO: 2335023 - RNA, 22 nt, Human
cccucuugacccaucucccccu

SEQ ID NO: 2335024 - RNA, 19 nt, Human
cccucuugacccaucuccc

SEQ ID NO: 2335025 - RNA, 12 nt, Human
cccucuugcccc

SEQ ID NO: 2335026 - RNA, 13 nt, Human
cccucuugcccca

SEQ ID NO: 2335027 - RNA, 18 nt, Human
cccucuugccccaacccc

SEQ ID NO: 2335028 - RNA, 19 nt, Human
cccucuugccccaaccccc

SEQ ID NO: 2335029 - RNA, 22 nt, Human
cccucuugccccaacccccagc

SEQ ID NO: 2335030 - RNA, 11 nt, Human
cccucucccug

SEQ ID NO: 2335031 - RNA, 19 nt, Human
cccucuccccccccccucc

SEQ ID NO: 2335032 - RNA, 21 nt, Human
cccucuccccccccccuccaa

SEQ ID NO: 2335033 - RNA, 11 nt, Human
cccucuccugc

SEQ ID NO: 2335034 - RNA, 13 nt, Human
cccucuccgagcu

SEQ ID NO: 2335035 - RNA, 16 nt, Human
cccucguggccuuccc

SEQ ID NO: 2335036 - RNA, 15 nt, Human
cccucguggccuucc

SEQ ID NO: 2335037 - RNA, 18 nt, Human
cccucgugguccccaaca

SEQ ID NO: 2335038 - RNA, 20 nt, Human
cccucgugguccccaacagc

SEQ ID NO: 2335039 - RNA, 16 nt, Human
cccucguggccagccc

SEQ ID NO: 2335040 - RNA, 17 nt, Human
cccucguggccagcccg

SEQ ID NO: 2335041 - RNA, 19 nt, Human
cccucguggccagcccggc

SEQ ID NO: 2335042 - RNA, 20 nt, Human
cccucguggccagcccggcu

SEQ ID NO: 2335043 - RNA, 22 nt, Human
cccucucaggcaugccugugug

SEQ ID NO: 2335044 - RNA, 21 nt, Human
cccucucaggugaccaaaauc

SEQ ID NO: 2335045 - RNA, 12 nt, Human
cccucccugggu

SEQ ID NO: 2335046 - RNA, 23 nt, Human
cccucgugguccccaacagcgac

SEQ ID NO: 2335047 - RNA, 16 nt, Human
cccucuaaagcaauaa

SEQ ID NO: 2335048 - RNA, 13 nt, Human
cccucucccagga

SEQ ID NO: 2335049 - RNA, 18 nt, Human
cccucuccauaaccccac

SEQ ID NO: 2335050 - RNA, 11 nt, Human
cccucugccca

SEQ ID NO: 2335051 - RNA, 14 nt, Human
cccucuccuuccug

SEQ ID NO: 2335052 - RNA, 15 nt, Human
cccucugcccacucc

SEQ ID NO: 2335053 - RNA, 18 nt, Human
cccucugcccacucccug

SEQ ID NO: 2335054 - RNA, 19 nt, Human
cccucugcccacucccugc

SEQ ID NO: 2335055 - RNA, 17 nt, Human
cccucuccuuccugugu

SEQ ID NO: 2335056 - RNA, 19 nt, Human
cccucugccaccagagacc

SEQ ID NO: 2335057 - RNA, 12 nt, Human
cccucugcccag

SEQ ID NO: 2335058 - RNA, 13 nt, Human
cccucugcccagc

SEQ ID NO: 2335059 - RNA, 14 nt, Human
cccucugcccagcu

SEQ ID NO: 2335060 - RNA, 15 nt, Human
cccucugcccagcuu

SEQ ID NO: 2335061 - RNA, 16 nt, Human
cccucugcccagcuug

SEQ ID NO: 2335062 - RNA, 14 nt, Human
cccucugcccugcg

SEQ ID NO: 2335063 - RNA, 13 nt, Human
cccucugcccugc

SEQ ID NO: 2335064 - RNA, 12 nt, Human
cccucugcccug

SEQ ID NO: 2335065 - RNA, 13 nt, Human
cccucugccccau

SEQ ID NO: 2335066 - RNA, 23 nt, Human
cccucugcccagcuugggcccag

SEQ ID NO: 2335067 - RNA, 18 nt, Human
cccucugcccagcuuggg

SEQ ID NO: 2335068 - RNA, 19 nt, Human
cccucugcccagcuugggc

SEQ ID NO: 2335069 - RNA, 22 nt, Human
ccgggcaugguggcgcaagccu

SEQ ID NO: 2335070 - RNA, 13 nt, Human
ccgggccacagag

SEQ ID NO: 2335071 - RNA, 22 nt, Human
ccgggcacucagaagacacuga

SEQ ID NO: 2335072 - RNA, 23 nt, Human
ccggcucgagcaguccugccuca

SEQ ID NO: 2335073 - RNA, 16 nt, Human
ccggcuccugugcuuu

SEQ ID NO: 2335074 - RNA, 19 nt, Human
ccggcucccaccgaggcgc

SEQ ID NO: 2335075 - RNA, 12 nt, Human
ccggagggcccu

SEQ ID NO: 2335076 - RNA, 16 nt, Human
ccggcuccaggcuccu

SEQ ID NO: 2335077 - RNA, 21 nt, Human
ccggcuccaggcuccuuuagc

SEQ ID NO: 2335078 - RNA, 19 nt, Human
ccggggcuggcggcuacuc

SEQ ID NO: 2335079 - RNA, 13 nt, Human
ccggggcuggguu

SEQ ID NO: 2335080 - RNA, 15 nt, Human
ccggggcuggguugg

SEQ ID NO: 2335081 - RNA, 12 nt, Human
ccgggguccugu

SEQ ID NO: 2335082 - RNA, 22 nt, Human
ccgggggcagcucuggaggggg

SEQ ID NO: 2335083 - RNA, 21 nt, Human
ccgggguccuguggcaggcag

SEQ ID NO: 2335084 - RNA, 18 nt, Human
ccgugaggccagagacac

SEQ ID NO: 2335085 - RNA, 20 nt, Human
ccggggugcccacaggccgc

SEQ ID NO: 2335086 - RNA, 23 nt, Human
ccgggguccuguggcaggcagcg

SEQ ID NO: 2335087 - RNA, 21 nt, Human
ccgggguggagcaugggccug

SEQ ID NO: 2335088 - RNA, 18 nt, Human
ccgggcucugccucccau

SEQ ID NO: 2335089 - RNA, 13 nt, Human
ccgggcucugccu

SEQ ID NO: 2335090 - RNA, 14 nt, Human
ccgggcucugccuc

SEQ ID NO: 2335091 - RNA, 15 nt, Human
ccgggcucugccucc

SEQ ID NO: 2335092 - RNA, 14 nt, Human
ccgccugguacuca

SEQ ID NO: 2335093 - RNA, 14 nt, Human
ccgcucccaguguc

SEQ ID NO: 2335094 - RNA, 21 nt, Human
ccgccuggcagaacugagcuc

SEQ ID NO: 2335095 - RNA, 16 nt, Human
ccgccuggcagaacug

SEQ ID NO: 2335096 - RNA, 12 nt, Human
ccgccuggcaga

SEQ ID NO: 2335097 - RNA, 22 nt, Human
ccgccuggaugcggauggccgg

SEQ ID NO: 2335098 - RNA, 14 nt, Human
ccgccugcccucau

SEQ ID NO: 2335099 - RNA, 16 nt, Human
ccgccugcccucaugg

SEQ ID NO: 2335100 - RNA, 16 nt, Human
ccgcuccccagcccag

SEQ ID NO: 2335101 - RNA, 15 nt, Human
ccgcucggaggcccc

SEQ ID NO: 2335102 - RNA, 16 nt, Human
ccgcucggaggcccca

SEQ ID NO: 2335103 - RNA, 18 nt, Human
ccgcucggaggccccaaa

SEQ ID NO: 2335104 - RNA, 17 nt, Human
ccgcuccugucugccag

SEQ ID NO: 2335105 - RNA, 15 nt, Human
ccgcuccugucugcc

SEQ ID NO: 2335106 - RNA, 14 nt, Human
ccgcuccugucugc

SEQ ID NO: 2335107 - RNA, 15 nt, Human
ccgcuccccagccca

SEQ ID NO: 2335108 - RNA, 14 nt, Human
ccgcuccccagccc

SEQ ID NO: 2335109 - RNA, 13 nt, Human
ccgcuccccagcc

SEQ ID NO: 2335110 - RNA, 12 nt, Human
ccgcuccccagc

SEQ ID NO: 2335111 - RNA, 15 nt, Human
ccgcucccagugucu

SEQ ID NO: 2335112 - RNA, 20 nt, Human
ccgcucccagugucuuccug

SEQ ID NO: 2335113 - RNA, 23 nt, Human
ccgccuccccacggccgcuccag

SEQ ID NO: 2335114 - RNA, 14 nt, Human
ccgccucgcccacc

SEQ ID NO: 2335115 - RNA, 15 nt, Human
ccgccucgcccaccg

SEQ ID NO: 2335116 - RNA, 17 nt, Human
ccgccucgcccaccgca

SEQ ID NO: 2335117 - RNA, 18 nt, Human
ccgccucgcccaccgcau

SEQ ID NO: 2335118 - RNA, 19 nt, Human
ccgccucgcccaccgcaug

SEQ ID NO: 2335119 - RNA, 15 nt, Human
ccgccucccagccug

SEQ ID NO: 2335120 - RNA, 23 nt, Human
ccgccucaaugugguugcaaggc

SEQ ID NO: 2335121 - RNA, 18 nt, Human
ccgccucacccccucggg

SEQ ID NO: 2335122 - RNA, 17 nt, Human
ccgccuccuacagccca

SEQ ID NO: 2335123 - RNA, 11 nt, Human
ccgccucugcu

SEQ ID NO: 2335124 - RNA, 20 nt, Human
ccgccucucccgucagggcc

SEQ ID NO: 2335125 - RNA, 21 nt, Human
ccgccucgcccaccgcaugcc

SEQ ID NO: 2335126 - RNA, 13 nt, Human
ccgccucucccgu

SEQ ID NO: 2335127 - RNA, 14 nt, Human
ccgccucugcuggc

SEQ ID NO: 2335128 - RNA, 16 nt, Human
ccgccugaaucauucu

SEQ ID NO: 2335129 - RNA, 11 nt, Human
ccgccugccag

SEQ ID NO: 2335130 - RNA, 22 nt, Human
ccgccugccaguccuagcugca

SEQ ID NO: 2335131 - RNA, 14 nt, Human
ccgccugccagucc

SEQ ID NO: 2335132 - RNA, 15 nt, Human
ccgccugccaguccu

SEQ ID NO: 2335133 - RNA, 21 nt, Human
ccgccugccaguccuagcugc

SEQ ID NO: 2335134 - RNA, 22 nt, Human
ccgccugcccgucucucuccca

SEQ ID NO: 2335135 - RNA, 19 nt, Human
ccgcugccuaaguggcugc

SEQ ID NO: 2335136 - RNA, 11 nt, Human
ccgcugcugcu

SEQ ID NO: 2335137 - RNA, 14 nt, Human
ccgcugcugcugcu

SEQ ID NO: 2335138 - RNA, 16 nt, Human
ccgcugcugcugcugc

SEQ ID NO: 2335139 - RNA, 20 nt, Human
ccgcugccuaaguggcugcu

SEQ ID NO: 2335140 - RNA, 23 nt, Human
ccgcugcccggcgcccucugucc

SEQ ID NO: 2335141 - RNA, 18 nt, Human
ccgcucuacaucuucugc

SEQ ID NO: 2335142 - RNA, 19 nt, Human
ccgcucuacaucuucugcc

SEQ ID NO: 2335143 - RNA, 20 nt, Human
ccgcucggaggccccaaagg

SEQ ID NO: 2335144 - RNA, 21 nt, Human
ccgcucggaggccccaaagga

SEQ ID NO: 2335145 - RNA, 22 nt, Human
ccgcucggaggccccaaaggaa

SEQ ID NO: 2335146 - RNA, 23 nt, Human
ccgcucggaggccccaaaggaaa

SEQ ID NO: 2335147 - RNA, 14 nt, Human
ccgcugggcugagc

SEQ ID NO: 2335148 - RNA, 19 nt, Human
ccgcugggcugagccccua

SEQ ID NO: 2335149 - RNA, 21 nt, Human
ccgcugggcugagccccuacc

SEQ ID NO: 2335150 - RNA, 11 nt, Human
ccgcuggaggu

SEQ ID NO: 2335151 - RNA, 19 nt, Human
ccgcuggagguggggccug

SEQ ID NO: 2335152 - RNA, 11 nt, Human
ccgcuggggcc

SEQ ID NO: 2335153 - RNA, 22 nt, Human
ccggagcuaacacuggccccua

SEQ ID NO: 2335154 - RNA, 20 nt, Human
ccggagcuaacacuggcccc

SEQ ID NO: 2335155 - RNA, 19 nt, Human
ccggagcuaacacuggccc

SEQ ID NO: 2335156 - RNA, 17 nt, Human
ccggagcuaacacuggc

SEQ ID NO: 2335157 - RNA, 16 nt, Human
ccggagcuaacacugg

SEQ ID NO: 2335158 - RNA, 14 nt, Human
ccgcuggggccagu

SEQ ID NO: 2335159 - RNA, 15 nt, Human
ccggaggggccuggc

SEQ ID NO: 2335160 - RNA, 16 nt, Human
ccggaggggccuggca

SEQ ID NO: 2335161 - RNA, 21 nt, Human
ccggagcuuucaaagaaggaa

SEQ ID NO: 2335162 - RNA, 15 nt, Human
ccggagcuuucaaag

SEQ ID NO: 2335163 - RNA, 14 nt, Human
ccggaggggccugg

SEQ ID NO: 2335164 - RNA, 19 nt, Human
ccgagucucuucuccacug

SEQ ID NO: 2335165 - RNA, 20 nt, Human
ccgagucucuucuccacugg

SEQ ID NO: 2335166 - RNA, 23 nt, Human
ccgcacugggcuuggggaccaga

SEQ ID NO: 2335167 - RNA, 16 nt, Human
ccgcagaagccucccc

SEQ ID NO: 2335168 - RNA, 20 nt, Human
ccgcagaagccuccccagcu

SEQ ID NO: 2335169 - RNA, 22 nt, Human
ccgcagaagccuccccagcuca

SEQ ID NO: 2335170 - RNA, 15 nt, Human
ccgaguccaagcugg

SEQ ID NO: 2335171 - RNA, 14 nt, Human
ccgcagaagcagac

SEQ ID NO: 2335172 - RNA, 14 nt, Human
ccgccucccagccu

SEQ ID NO: 2335173 - RNA, 13 nt, Human
ccgccgcuuuucu

SEQ ID NO: 2335174 - RNA, 18 nt, Human
ccgccgcuuuucuccucu

SEQ ID NO: 2335175 - RNA, 14 nt, Human
ccgccgccucgccc

SEQ ID NO: 2335176 - RNA, 15 nt, Human
ccgccgccucgccca

SEQ ID NO: 2335177 - RNA, 16 nt, Human
ccgccgccucgcccac

SEQ ID NO: 2335178 - RNA, 17 nt, Human
ccgccgccucgcccacc

SEQ ID NO: 2335179 - RNA, 20 nt, Human
ccgccgacuuuguacccccc

SEQ ID NO: 2335180 - RNA, 15 nt, Human
ccgcagacaccuugg

SEQ ID NO: 2335181 - RNA, 16 nt, Human
ccgcagacaccuugga

SEQ ID NO: 2335182 - RNA, 14 nt, Human
ccgcagacaccuug

SEQ ID NO: 2335183 - RNA, 14 nt, Human
ccgaguagcuggga

SEQ ID NO: 2335184 - RNA, 16 nt, Human
ccgaguagcugggacu

SEQ ID NO: 2335185 - RNA, 14 nt, Human
ccgagucucuucuc

SEQ ID NO: 2335186 - RNA, 20 nt, Human
ccgaguagcugagauuauag

SEQ ID NO: 2335187 - RNA, 16 nt, Human
ccgagucucuucucca

SEQ ID NO: 2335188 - RNA, 18 nt, Human
ccgagucucuucuccacu

SEQ ID NO: 2335189 - RNA, 23 nt, Human
ccgaggguccuggcuccugaggg

SEQ ID NO: 2335190 - RNA, 21 nt, Human
ccgaggguccuggcuccugag

SEQ ID NO: 2335191 - RNA, 19 nt, Human
ccgaggguccuggcuccug

SEQ ID NO: 2335192 - RNA, 18 nt, Human
ccgaggacccagacccag

SEQ ID NO: 2335193 - RNA, 16 nt, Human
ccgaggacccagaccc

SEQ ID NO: 2335194 - RNA, 17 nt, Human
ccgaggacccagaccca

SEQ ID NO: 2335195 - RNA, 17 nt, Human
ccgaggguccuggcucc

SEQ ID NO: 2335196 - RNA, 19 nt, Human
ccgaggacgcucccugcuc

SEQ ID NO: 2335197 - RNA, 20 nt, Human
ccgagcuggugcauuacaga

SEQ ID NO: 2335198 - RNA, 17 nt, Human
ccgagcuggugcauuac

SEQ ID NO: 2335199 - RNA, 16 nt, Human
ccgagcuggugcauua

SEQ ID NO: 2335200 - RNA, 14 nt, Human
ccgaggaaacucag

SEQ ID NO: 2335201 - RNA, 13 nt, Human
ccgaggacccaga

SEQ ID NO: 2335202 - RNA, 15 nt, Human
ccgaggacccagacc

SEQ ID NO: 2335203 - RNA, 19 nt, Human
ccgagcuuugaaaauucag

SEQ ID NO: 2335204 - RNA, 20 nt, Human
ccgagagccugcucccccac

SEQ ID NO: 2335205 - RNA, 13 nt, Human
ccgagagggagag

SEQ ID NO: 2335206 - RNA, 15 nt, Human
ccgagaggugggcca

SEQ ID NO: 2335207 - RNA, 19 nt, Human
ccgagaggugggccagucu

SEQ ID NO: 2335208 - RNA, 21 nt, Human
ccgagaggugggccagucugu

SEQ ID NO: 2335209 - RNA, 15 nt, Human
ccgagagccugcucc

SEQ ID NO: 2335210 - RNA, 14 nt, Human
ccgagagccugcuc

SEQ ID NO: 2335211 - RNA, 23 nt, Human
ccgacugcacagcggccccugca

SEQ ID NO: 2335212 - RNA, 13 nt, Human
ccgagagccugcu

SEQ ID NO: 2335213 - RNA, 16 nt, Human
ccgacugcuuuggacc

SEQ ID NO: 2335214 - RNA, 17 nt, Human
ccgacugcuuuggaccu

SEQ ID NO: 2335215 - RNA, 22 nt, Human
ccgagaguagccgagagccugc

SEQ ID NO: 2335216 - RNA, 21 nt, Human
ccgagaguagccgagagccug

SEQ ID NO: 2335217 - RNA, 20 nt, Human
ccgagaguagccgagagccu

SEQ ID NO: 2335218 - RNA, 16 nt, Human
ccgagaguagccgaga

SEQ ID NO: 2335219 - RNA, 21 nt, Human
ccgagaucacgccacugcacu

SEQ ID NO: 2335220 - RNA, 19 nt, Human
ccgagauugcaccacugca

SEQ ID NO: 2335221 - RNA, 15 nt, Human
ccgagauugcaccac

SEQ ID NO: 2335222 - RNA, 21 nt, Human
ccgagcugggggccaugagcu

SEQ ID NO: 2335223 - RNA, 19 nt, Human
ccgagcugggggccaugag

SEQ ID NO: 2335224 - RNA, 18 nt, Human
ccgagcugggggccauga

SEQ ID NO: 2335225 - RNA, 16 nt, Human
ccgagcugggggccau

SEQ ID NO: 2335226 - RNA, 11 nt, Human
ccgagcugggg

SEQ ID NO: 2335227 - RNA, 23 nt, Human
ccgagcucguguauccuggggcu

SEQ ID NO: 2335228 - RNA, 15 nt, Human
ccgagcaaagaucaa

SEQ ID NO: 2335229 - RNA, 21 nt, Human
ccgagauugcaccacugcacu

SEQ ID NO: 2335230 - RNA, 23 nt, Human
ccgaccucguccucccccugcca

SEQ ID NO: 2335231 - RNA, 22 nt, Human
cccuuggaaaccugcccugccu

SEQ ID NO: 2335232 - RNA, 18 nt, Human
cccuuggaaaccugcccu

SEQ ID NO: 2335233 - RNA, 19 nt, Human
cccuuggaaaccugcccug

SEQ ID NO: 2335234 - RNA, 23 nt, Human
ccgacggugggcauuugugaggc

SEQ ID NO: 2335235 - RNA, 14 nt, Human
ccgacggagccggg

SEQ ID NO: 2335236 - RNA, 16 nt, Human
ccgacgcgucuccugu

SEQ ID NO: 2335237 - RNA, 17 nt, Human
ccgacgcgucuccuguu

SEQ ID NO: 2335238 - RNA, 20 nt, Human
ccgacuccuggguugagcug

SEQ ID NO: 2335239 - RNA, 14 nt, Human
ccgacugcuuugga

SEQ ID NO: 2335240 - RNA, 23 nt, Human
cccuuggaaaccugcccugccug

SEQ ID NO: 2335241 - RNA, 20 nt, Human
ccgcucuacaucuucugccu

SEQ ID NO: 2335242 - RNA, 18 nt, Human
ccuaggccucagccagag

SEQ ID NO: 2335243 - RNA, 20 nt, Human
ccuaggccucagccagagaa

SEQ ID NO: 2335244 - RNA, 19 nt, Human
ccuaggccucagccagaga

SEQ ID NO: 2335245 - RNA, 14 nt, Human
ccuaggcgggcggu

SEQ ID NO: 2335246 - RNA, 18 nt, Human
ccuaggugacagagugag

SEQ ID NO: 2335247 - RNA, 16 nt, Human
ccuaguccagugaccu

SEQ ID NO: 2335248 - RNA, 19 nt, Human
ccuaguaagugccuuccau

SEQ ID NO: 2335249 - RNA, 15 nt, Human
ccuaguaagugccuu

SEQ ID NO: 2335250 - RNA, 16 nt, Human
ccuaguaagugccuuc

SEQ ID NO: 2335251 - RNA, 18 nt, Human
ccuaguaagugccuucca

SEQ ID NO: 2335252 - RNA, 14 nt, Human
ccuaggccucagcc

SEQ ID NO: 2335253 - RNA, 20 nt, Human
ccuaggccacuccuccaaag

SEQ ID NO: 2335254 - RNA, 19 nt, Human
ccuaggccacuccuccaaa

SEQ ID NO: 2335255 - RNA, 18 nt, Human
ccuaggccacuccuccaa

SEQ ID NO: 2335256 - RNA, 17 nt, Human
ccuaggccacuccucca

SEQ ID NO: 2335257 - RNA, 16 nt, Human
ccuaggccacuccucc

SEQ ID NO: 2335258 - RNA, 15 nt, Human
ccuaggccacuccuc

SEQ ID NO: 2335259 - RNA, 14 nt, Human
ccuaggccacuccu

SEQ ID NO: 2335260 - RNA, 13 nt, Human
ccuacugaaugcu

SEQ ID NO: 2335261 - RNA, 23 nt, Human
ccuaggccacaccaucuccuuuc

SEQ ID NO: 2335262 - RNA, 23 nt, Human
ccuaggcauuugcugaauacaga

SEQ ID NO: 2335263 - RNA, 16 nt, Human
ccuacaguguacaguc

SEQ ID NO: 2335264 - RNA, 20 nt, Human
ccuacaguguacagucuugu

SEQ ID NO: 2335265 - RNA, 21 nt, Human
ccuacaguugaaaaacagcug

SEQ ID NO: 2335266 - RNA, 17 nt, Human
ccuaccgaaaccuugcc

SEQ ID NO: 2335267 - RNA, 16 nt, Human
ccuaccgagucucuuc

SEQ ID NO: 2335268 - RNA, 17 nt, Human
ccuaccgagucucuucu

SEQ ID NO: 2335269 - RNA, 18 nt, Human
ccuacuacaucgcccucc

SEQ ID NO: 2335270 - RNA, 17 nt, Human
ccuacuacaucgcccuc

SEQ ID NO: 2335271 - RNA, 21 nt, Human
ccuacgucaaacaugaagugu

SEQ ID NO: 2335272 - RNA, 20 nt, Human
ccuacuacaucgcccuccac

SEQ ID NO: 2335273 - RNA, 16 nt, Human
ccuacuccaaaauguu

SEQ ID NO: 2335274 - RNA, 20 nt, Human
ccuacgucaaacaugaagug

SEQ ID NO: 2335275 - RNA, 20 nt, Human
ccuaccgaaaccuugccuuu

SEQ ID NO: 2335276 - RNA, 21 nt, Human
ccuaccgagucucuucuccac

SEQ ID NO: 2335277 - RNA, 19 nt, Human
ccuaccgagucucuucucc

SEQ ID NO: 2335278 - RNA, 20 nt, Human
ccuaccgagucucuucucca

SEQ ID NO: 2335279 - RNA, 15 nt, Human
ccuacaguguacagu

SEQ ID NO: 2335280 - RNA, 18 nt, Human
ccuacaggagugagcacu

SEQ ID NO: 2335281 - RNA, 15 nt, Human
ccuaacgaaguaucc

SEQ ID NO: 2335282 - RNA, 12 nt, Human
ccuaaccccuuu

SEQ ID NO: 2335283 - RNA, 15 nt, Human
ccuaaccccuuuccu

SEQ ID NO: 2335284 - RNA, 19 nt, Human
ccguugucucccuggcccu

SEQ ID NO: 2335285 - RNA, 20 nt, Human
ccguugucucccuggcccuc

SEQ ID NO: 2335286 - RNA, 21 nt, Human
ccguugucucccuggcccuca

SEQ ID NO: 2335287 - RNA, 12 nt, Human
ccguuguuuacu

SEQ ID NO: 2335288 - RNA, 20 nt, Human
ccguuggggauuggggaaga

SEQ ID NO: 2335289 - RNA, 14 nt, Human
ccguugucucccug

SEQ ID NO: 2335290 - RNA, 18 nt, Human
ccguugucucccuggccc

SEQ ID NO: 2335291 - RNA, 23 nt, Human
ccguuggaaacauaaccauuaca

SEQ ID NO: 2335292 - RNA, 11 nt, Human
ccguuggccac

SEQ ID NO: 2335293 - RNA, 20 nt, Human
ccguugggccccagccuucu

SEQ ID NO: 2335294 - RNA, 19 nt, Human
ccguugauguuggcuggga

SEQ ID NO: 2335295 - RNA, 15 nt, Human
ccguucugcuggccu

SEQ ID NO: 2335296 - RNA, 18 nt, Human
ccguucugcuggccugga

SEQ ID NO: 2335297 - RNA, 23 nt, Human
ccguucugcuggccuggaucucc

SEQ ID NO: 2335298 - RNA, 18 nt, Human
ccguugauguuggcuggg

SEQ ID NO: 2335299 - RNA, 14 nt, Human
ccguggcugcggca

SEQ ID NO: 2335300 - RNA, 22 nt, Human
ccguggccccagccuggcccag

SEQ ID NO: 2335301 - RNA, 11 nt, Human
ccguggcuucc

SEQ ID NO: 2335302 - RNA, 21 nt, Human
ccguuauuauaauuguaucag

SEQ ID NO: 2335303 - RNA, 20 nt, Human
ccguuauuauaauuguauca

SEQ ID NO: 2335304 - RNA, 14 nt, Human
ccguucacauuuuu

SEQ ID NO: 2335305 - RNA, 19 nt, Human
ccgugcagacuggagggga

SEQ ID NO: 2335306 - RNA, 17 nt, Human
ccgugcagacuggaggg

SEQ ID NO: 2335307 - RNA, 19 nt, Human
ccgugcagcuucuguccug

SEQ ID NO: 2335308 - RNA, 18 nt, Human
ccgugcagcuucuguccu

SEQ ID NO: 2335309 - RNA, 12 nt, Human
ccgugcccaggg

SEQ ID NO: 2335310 - RNA, 20 nt, Human
ccgugcccaggggcccacag

SEQ ID NO: 2335311 - RNA, 15 nt, Human
ccgugccccgccucc

SEQ ID NO: 2335312 - RNA, 19 nt, Human
ccguggccccagccuggcc

SEQ ID NO: 2335313 - RNA, 20 nt, Human
ccguggccccagccuggccc

SEQ ID NO: 2335314 - RNA, 21 nt, Human
ccguggccccagccuggccca

SEQ ID NO: 2335315 - RNA, 23 nt, Human
ccguggccccagccuggcccagc

SEQ ID NO: 2335316 - RNA, 14 nt, Human
ccgugcagacugga

SEQ ID NO: 2335317 - RNA, 13 nt, Human
ccgugcagacugg

SEQ ID NO: 2335318 - RNA, 23 nt, Human
ccgugauguaggguaaggugccu

SEQ ID NO: 2335319 - RNA, 17 nt, Human
ccgugaugcucaggcuu

SEQ ID NO: 2335320 - RNA, 18 nt, Human
ccgugaguucucagggcu

SEQ ID NO: 2335321 - RNA, 19 nt, Human
ccgugaguucucagggcuc

SEQ ID NO: 2335322 - RNA, 20 nt, Human
ccgugaguucucagggcucc

SEQ ID NO: 2335323 - RNA, 23 nt, Human
ccgugaguucucagggcuccugc

SEQ ID NO: 2335324 - RNA, 22 nt, Human
ccgggucaucuguaccucugcc

SEQ ID NO: 2335325 - RNA, 14 nt, Human
ccgugaguucucag

SEQ ID NO: 2335326 - RNA, 16 nt, Human
ccgugaguucucaggg

SEQ ID NO: 2335327 - RNA, 17 nt, Human
ccgugaguucucagggc

SEQ ID NO: 2335328 - RNA, 14 nt, Human
ccguggcuucccgc

SEQ ID NO: 2335329 - RNA, 18 nt, Human
ccuagucucccucacagc

SEQ ID NO: 2335330 - RNA, 15 nt, Human
ccacuggaagggcag

SEQ ID NO: 2335331 - RNA, 16 nt, Human
ccacugcugcuucucc

SEQ ID NO: 2335332 - RNA, 19 nt, Human
ccacugcugcuucuccaug

SEQ ID NO: 2335333 - RNA, 22 nt, Human
ccacugcuuuuggucuguguga

SEQ ID NO: 2335334 - RNA, 20 nt, Human
ccacugcuuuuggucugugu

SEQ ID NO: 2335335 - RNA, 21 nt, Human
ccacugccuucgauacaccgg

SEQ ID NO: 2335336 - RNA, 11 nt, Human
ccacugcucug

SEQ ID NO: 2335337 - RNA, 12 nt, Human
ccacugcucugg

SEQ ID NO: 2335338 - RNA, 13 nt, Human
ccacugcucuggu

SEQ ID NO: 2335339 - RNA, 15 nt, Human
ccacugcucugguua

SEQ ID NO: 2335340 - RNA, 18 nt, Human
ccacugggguccagggag

SEQ ID NO: 2335341 - RNA, 19 nt, Human
ccacugggguccagggagc

SEQ ID NO: 2335342 - RNA, 22 nt, Human
ccacugggguccagggagcagg

SEQ ID NO: 2335343 - RNA, 23 nt, Human
ccacuggugacaugucuuuucuu

SEQ ID NO: 2335344 - RNA, 22 nt, Human
ccacugucacuguuucucugcu

SEQ ID NO: 2335345 - RNA, 19 nt, Human
ccacugucacuguuucucu

SEQ ID NO: 2335346 - RNA, 14 nt, Human
ccacuguaaaauga

SEQ ID NO: 2335347 - RNA, 17 nt, Human
ccacugucacccuccac

SEQ ID NO: 2335348 - RNA, 15 nt, Human
ccacugguucuucuu

SEQ ID NO: 2335349 - RNA, 24 nt, Human
ccacugucacuguuucucugcugu

SEQ ID NO: 2335350 - RNA, 23 nt, Human
ccacugucacuguuucucugcug

SEQ ID NO: 2335351 - RNA, 11 nt, Human
ccacuguccug

SEQ ID NO: 2335352 - RNA, 12 nt, Human
ccacuguccugg

SEQ ID NO: 2335353 - RNA, 13 nt, Human
ccacuguccuggg

SEQ ID NO: 2335354 - RNA, 21 nt, Human
ccacuguccugggccugcaga

SEQ ID NO: 2335355 - RNA, 20 nt, Human
ccacuguccugggccugcag

SEQ ID NO: 2335356 - RNA, 19 nt, Human
ccacuguccugggccugca

SEQ ID NO: 2335357 - RNA, 15 nt, Human
ccacuguccugggcc

SEQ ID NO: 2335358 - RNA, 15 nt, Human
ccacugugaagagaa

SEQ ID NO: 2335359 - RNA, 14 nt, Human
ccacugugaagaga

SEQ ID NO: 2335360 - RNA, 19 nt, Human
ccacugcauaccaaccugg

SEQ ID NO: 2335361 - RNA, 23 nt, Human
ccacugccacacgucugacccuc

SEQ ID NO: 2335362 - RNA, 13 nt, Human
ccacugccucuuc

SEQ ID NO: 2335363 - RNA, 16 nt, Human
ccacugccugcccacc

SEQ ID NO: 2335364 - RNA, 15 nt, Human
ccacugccugcccac

SEQ ID NO: 2335365 - RNA, 14 nt, Human
ccacugccugccca

SEQ ID NO: 2335366 - RNA, 13 nt, Human
ccacugccugccc

SEQ ID NO: 2335367 - RNA, 23 nt, Human
ccacugccugcccacccguggag

SEQ ID NO: 2335368 - RNA, 17 nt, Human
ccacugccugcccaccc

SEQ ID NO: 2335369 - RNA, 12 nt, Human
ccacugccuucg

SEQ ID NO: 2335370 - RNA, 12 nt, Human
ccacugccugcc

SEQ ID NO: 2335371 - RNA, 11 nt, Human
ccacugccugc

SEQ ID NO: 2335372 - RNA, 16 nt, Human
ccacugccucuuccuc

SEQ ID NO: 2335373 - RNA, 18 nt, Human
ccacugcauaccaaccug

SEQ ID NO: 2335374 - RNA, 21 nt, Human
ccaccuucccagcucucccuc

SEQ ID NO: 2335375 - RNA, 14 nt, Human
ccaccuugcgggga

SEQ ID NO: 2335376 - RNA, 14 nt, Human
ccaccuucccaugc

SEQ ID NO: 2335377 - RNA, 19 nt, Human
ccaccuucccagcucuccc

SEQ ID NO: 2335378 - RNA, 16 nt, Human
ccaccuucccagcucu

SEQ ID NO: 2335379 - RNA, 15 nt, Human
ccaccuucccagcuc

SEQ ID NO: 2335380 - RNA, 14 nt, Human
ccaccuucccagcu

SEQ ID NO: 2335381 - RNA, 13 nt, Human
ccaccuucccagc

SEQ ID NO: 2335382 - RNA, 12 nt, Human
ccaccuucccag

SEQ ID NO: 2335383 - RNA, 11 nt, Human
ccaccuuccca

SEQ ID NO: 2335384 - RNA, 23 nt, Human
ccacugcaucguuucaucuucca

SEQ ID NO: 2335385 - RNA, 21 nt, Human
ccacugcaucguuucaucuuc

SEQ ID NO: 2335386 - RNA, 15 nt, Human
ccagaaccuguccuu

SEQ ID NO: 2335387 - RNA, 17 nt, Human
ccagaacaguuuguaca

SEQ ID NO: 2335388 - RNA, 18 nt, Human
ccagaacguggcucugcu

SEQ ID NO: 2335389 - RNA, 19 nt, Human
ccagaacguggcucugcug

SEQ ID NO: 2335390 - RNA, 19 nt, Human
ccagaacucacuggggccu

SEQ ID NO: 2335391 - RNA, 20 nt, Human
ccagaacguggcucugcugg

SEQ ID NO: 2335392 - RNA, 21 nt, Human
ccagaacguggcucugcuggc

SEQ ID NO: 2335393 - RNA, 12 nt, Human
ccagaacuggac

SEQ ID NO: 2335394 - RNA, 15 nt, Human
ccagaagcccagaau

SEQ ID NO: 2335395 - RNA, 22 nt, Human
ccagaagaaaauagugguguga

SEQ ID NO: 2335396 - RNA, 16 nt, Human
ccagaaaaccccagca

SEQ ID NO: 2335397 - RNA, 14 nt, Human
ccagaaaaggacag

SEQ ID NO: 2335398 - RNA, 15 nt, Human
ccagaaaaccccagc

SEQ ID NO: 2335399 - RNA, 19 nt, Human
ccagaaaaaaaaaaacuua

SEQ ID NO: 2335400 - RNA, 14 nt, Human
ccagaaccuguccu

SEQ ID NO: 2335401 - RNA, 15 nt, Human
ccagaaaaggacaga

SEQ ID NO: 2335402 - RNA, 16 nt, Human
ccagaaaaggacagaa

SEQ ID NO: 2335403 - RNA, 18 nt, Human
ccagaaaccuuuguuugc

SEQ ID NO: 2335404 - RNA, 19 nt, Human
ccacugugccaugugccag

SEQ ID NO: 2335405 - RNA, 14 nt, Human
ccacugucuucuuc

SEQ ID NO: 2335406 - RNA, 14 nt, Human
ccacuguccugggc

SEQ ID NO: 2335407 - RNA, 15 nt, Human
ccacuguccugggcg

SEQ ID NO: 2335408 - RNA, 16 nt, Human
ccacuguccugggcgc

SEQ ID NO: 2335409 - RNA, 22 nt, Human
ccacuguccugggcgcccugga

SEQ ID NO: 2335410 - RNA, 15 nt, Human
ccacugugccaugug

SEQ ID NO: 2335411 - RNA, 16 nt, Human
ccacugugccaugugc

SEQ ID NO: 2335412 - RNA, 16 nt, Human
ccacuuaaaaaauguc

SEQ ID NO: 2335413 - RNA, 12 nt, Human
ccacuuuuuaac

SEQ ID NO: 2335414 - RNA, 14 nt, Human
ccacuguuaucaaa

SEQ ID NO: 2335415 - RNA, 12 nt, Human
ccacuguguaua

SEQ ID NO: 2335416 - RNA, 17 nt, Human
ccacugugcugaauucu

SEQ ID NO: 2335417 - RNA, 19 nt, Human
ccacugugcugaauucugc

SEQ ID NO: 2335418 - RNA, 21 nt, Human
ccagaaugcuguacaucuauu

SEQ ID NO: 2335419 - RNA, 12 nt, Human
ccagaaggcagg

SEQ ID NO: 2335420 - RNA, 16 nt, Human
ccagaagcuuccauag

SEQ ID NO: 2335421 - RNA, 15 nt, Human
ccagaagggggccau

SEQ ID NO: 2335422 - RNA, 22 nt, Human
ccagaaggcauaucagucucug

SEQ ID NO: 2335423 - RNA, 14 nt, Human
ccagaagggguuug

SEQ ID NO: 2335424 - RNA, 20 nt, Human
ccagaagccucuggcuagag

SEQ ID NO: 2335425 - RNA, 19 nt, Human
ccagaagccucuggcuaga

SEQ ID NO: 2335426 - RNA, 16 nt, Human
ccagaagccucuggcu

SEQ ID NO: 2335427 - RNA, 15 nt, Human
ccagaagccucuggc

SEQ ID NO: 2335428 - RNA, 20 nt, Human
ccagaagcugagcaccaggg

SEQ ID NO: 2335429 - RNA, 15 nt, Human
ccagaagcuuccaua

SEQ ID NO: 2335430 - RNA, 22 nt, Human
ccagaauaaguuauugcaguuu

SEQ ID NO: 2335431 - RNA, 23 nt, Human
ccagaauaaguuauugcaguuua

SEQ ID NO: 2335432 - RNA, 20 nt, Human
ccagaagucaagcccagcca

SEQ ID NO: 2335433 - RNA, 15 nt, Human
ccagaauaaguuauu

SEQ ID NO: 2335434 - RNA, 19 nt, Human
ccagaauaaguuauugcag

SEQ ID NO: 2335435 - RNA, 21 nt, Human
ccagaauaaguuauugcaguu

SEQ ID NO: 2335436 - RNA, 16 nt, Human
ccagaaucuaaagcca

SEQ ID NO: 2335437 - RNA, 12 nt, Human
ccagaaucaaag

SEQ ID NO: 2335438 - RNA, 15 nt, Human
ccagaaugaggcugc

SEQ ID NO: 2335439 - RNA, 19 nt, Human
ccagacacaggcccucccu

SEQ ID NO: 2335440 - RNA, 17 nt, Human
ccagaaugcuguacauc

SEQ ID NO: 2335441 - RNA, 16 nt, Human
ccagaaugcuguacau

SEQ ID NO: 2335442 - RNA, 18 nt, Human
ccagagaguggcuccucc

SEQ ID NO: 2335443 - RNA, 22 nt, Human
ccagagaguggcuccucccggu

SEQ ID NO: 2335444 - RNA, 13 nt, Human
ccagagauccaaa

SEQ ID NO: 2335445 - RNA, 15 nt, Human
ccagagaguccucug

SEQ ID NO: 2335446 - RNA, 17 nt, Human
ccagagaguccucugga

SEQ ID NO: 2335447 - RNA, 18 nt, Human
ccagagaguccucuggau

SEQ ID NO: 2335448 - RNA, 21 nt, Human
ccagagcauuuccaacaccac

SEQ ID NO: 2335449 - RNA, 22 nt, Human
ccagagcauuuccaacaccaca

SEQ ID NO: 2335450 - RNA, 23 nt, Human
ccagagcauuuccaacaccacag

SEQ ID NO: 2335451 - RNA, 23 nt, Human
ccagagccaggggggugaggagc

SEQ ID NO: 2335452 - RNA, 22 nt, Human
ccagagccaggggggugaggag

SEQ ID NO: 2335453 - RNA, 12 nt, Human
ccagagccaggg

SEQ ID NO: 2335454 - RNA, 11 nt, Human
ccagagccagg

SEQ ID NO: 2335455 - RNA, 14 nt, Human
ccagagaguggcuc

SEQ ID NO: 2335456 - RNA, 15 nt, Human
ccagagaguggcucc

SEQ ID NO: 2335457 - RNA, 16 nt, Human
ccagagaguggcuccu

SEQ ID NO: 2335458 - RNA, 14 nt, Human
ccagacccggcugc

SEQ ID NO: 2335459 - RNA, 15 nt, Human
ccagacccggcugcg

SEQ ID NO: 2335460 - RNA, 20 nt, Human
ccagacagcucccucugccu

SEQ ID NO: 2335461 - RNA, 13 nt, Human
ccagacagcuccc

SEQ ID NO: 2335462 - RNA, 17 nt, Human
ccagacagccuguaucu

SEQ ID NO: 2335463 - RNA, 15 nt, Human
ccagacacaggcccu

SEQ ID NO: 2335464 - RNA, 10 nt, Human
ccagacaccc

SEQ ID NO: 2335465 - RNA, 13 nt, Human
ccagacacccagg

SEQ ID NO: 2335466 - RNA, 22 nt, Human
ccagacacauguccaagaagcc

SEQ ID NO: 2335467 - RNA, 17 nt, Human
ccagacacauguccaag

SEQ ID NO: 2335468 - RNA, 20 nt, Human
ccagacacauguccaagaag

SEQ ID NO: 2335469 - RNA, 23 nt, Human
ccagacauguggugggacaggga

SEQ ID NO: 2335470 - RNA, 19 nt, Human
ccagacauguggugggaca

SEQ ID NO: 2335471 - RNA, 24 nt, Human
ccagaccccuggcuuuucacugcu

SEQ ID NO: 2335472 - RNA, 18 nt, Human
ccagaccccuggcuuuuc

SEQ ID NO: 2335473 - RNA, 14 nt, Human
ccagacaucaacag

SEQ ID NO: 2335474 - RNA, 20 nt, Human
ccagacaugccacaaggacu

SEQ ID NO: 2335475 - RNA, 14 nt, Human
ccagacaugccaca

SEQ ID NO: 2335476 - RNA, 16 nt, Human
ccaccucucccugacc

SEQ ID NO: 2335477 - RNA, 17 nt, Human
ccaccucucccugaccc

SEQ ID NO: 2335478 - RNA, 18 nt, Human
ccaccucucccugacccu

SEQ ID NO: 2335479 - RNA, 14 nt, Human
ccaccucucuccuu

SEQ ID NO: 2335480 - RNA, 17 nt, Human
ccaccucucuccuuugc

SEQ ID NO: 2335481 - RNA, 15 nt, Human
ccaccucucuuuuuc

SEQ ID NO: 2335482 - RNA, 19 nt, Human
ccaccucucuccuuugcug

SEQ ID NO: 2335483 - RNA, 24 nt, Human
ccaccucucuccuuugcugaggcc

SEQ ID NO: 2335484 - RNA, 10 nt, Human
ccaccucugc

SEQ ID NO: 2335485 - RNA, 11 nt, Human
ccaccucugcg

SEQ ID NO: 2335486 - RNA, 13 nt, Human
ccaccucugcgga

SEQ ID NO: 2335487 - RNA, 18 nt, Human
ccaccucugcggacccca

SEQ ID NO: 2335488 - RNA, 19 nt, Human
ccaccucucucacuccuug

SEQ ID NO: 2335489 - RNA, 20 nt, Human
ccaccucucucacuccuuga

SEQ ID NO: 2335490 - RNA, 14 nt, Human
ccaccucucucacu

SEQ ID NO: 2335491 - RNA, 16 nt, Human
ccaccucucucacucc

SEQ ID NO: 2335492 - RNA, 12 nt, Human
ccaccucuccaa

SEQ ID NO: 2335493 - RNA, 13 nt, Human
ccaccucuccaag

SEQ ID NO: 2335494 - RNA, 14 nt, Human
ccaccucuccaagg

SEQ ID NO: 2335495 - RNA, 15 nt, Human
ccaccucuccaaggg

SEQ ID NO: 2335496 - RNA, 16 nt, Human
ccaccucuccaagggc

SEQ ID NO: 2335497 - RNA, 17 nt, Human
ccaccucuccaagggcu

SEQ ID NO: 2335498 - RNA, 17 nt, Human
ccaccucuccccaccuu

SEQ ID NO: 2335499 - RNA, 12 nt, Human
ccaccucucccu

SEQ ID NO: 2335500 - RNA, 13 nt, Human
ccaccucucccuc

SEQ ID NO: 2335501 - RNA, 11 nt, Human
ccacccugcuc

SEQ ID NO: 2335502 - RNA, 12 nt, Human
ccacccugcucu

SEQ ID NO: 2335503 - RNA, 12 nt, Human
ccaccuccuucu

SEQ ID NO: 2335504 - RNA, 13 nt, Human
ccaccuccuucuc

SEQ ID NO: 2335505 - RNA, 17 nt, Human
ccaccuccuucucuguc

SEQ ID NO: 2335506 - RNA, 18 nt, Human
ccaccuccuucucugucu

SEQ ID NO: 2335507 - RNA, 18 nt, Human
ccaccucccugccuccag

SEQ ID NO: 2335508 - RNA, 16 nt, Human
ccaccucccugccucc

SEQ ID NO: 2335509 - RNA, 14 nt, Human
ccaccucccugccu

SEQ ID NO: 2335510 - RNA, 15 nt, Human
ccaccugcugagaga

SEQ ID NO: 2335511 - RNA, 23 nt, Human
ccaccucuucucuuccuguaaca

SEQ ID NO: 2335512 - RNA, 19 nt, Human
ccaccucuucucuuccugu

SEQ ID NO: 2335513 - RNA, 20 nt, Human
ccaccucuucucuuccugua

SEQ ID NO: 2335514 - RNA, 23 nt, Human
ccaccugcugagagacccaagga

SEQ ID NO: 2335515 - RNA, 22 nt, Human
ccaccugcugagagacccaagg

SEQ ID NO: 2335516 - RNA, 12 nt, Human
ccaccuggccac

SEQ ID NO: 2335517 - RNA, 13 nt, Human
ccaccuggccacc

SEQ ID NO: 2335518 - RNA, 12 nt, Human
ccaccugccagg

SEQ ID NO: 2335519 - RNA, 15 nt, Human
ccaccugccagggac

SEQ ID NO: 2335520 - RNA, 16 nt, Human
ccaccucuucucuucc

SEQ ID NO: 2335521 - RNA, 18 nt, Human
ccaccucuucucuuccug

SEQ ID NO: 2335522 - RNA, 19 nt, Human
ccaccucugugaccucagg

SEQ ID NO: 2335523 - RNA, 22 nt, Human
ccaccucugugaccucaggcac

SEQ ID NO: 2335524 - RNA, 23 nt, Human
ccaccucugugaccucaggcacu

SEQ ID NO: 2335525 - RNA, 22 nt, Human
ccaccucugcggaccccagcug

SEQ ID NO: 2335526 - RNA, 19 nt, Human
ccaccucugcggaccccag

SEQ ID NO: 2335527 - RNA, 20 nt, Human
ccaccucugcggaccccagc

SEQ ID NO: 2335528 - RNA, 15 nt, Human
ccaccucugugaccu

SEQ ID NO: 2335529 - RNA, 17 nt, Human
ccaccucugugaccuca

SEQ ID NO: 2335530 - RNA, 18 nt, Human
ccaccucugugaccucag

SEQ ID NO: 2335531 - RNA, 13 nt, Human
ccaccugccaggg

SEQ ID NO: 2335532 - RNA, 14 nt, Human
ccaccugccaggga

SEQ ID NO: 2335533 - RNA, 12 nt, Human
ccaccuggcccc

SEQ ID NO: 2335534 - RNA, 18 nt, Human
ccaccuggccaccugagg

SEQ ID NO: 2335535 - RNA, 14 nt, Human
ccaccuggccaccu

SEQ ID NO: 2335536 - RNA, 15 nt, Human
ccaccuggccaccug

SEQ ID NO: 2335537 - RNA, 22 nt, Human
ccaccuggccccaugucucuca

SEQ ID NO: 2335538 - RNA, 21 nt, Human
ccaccuggccccaugucucuc

SEQ ID NO: 2335539 - RNA, 13 nt, Human
ccaccuggccucu

SEQ ID NO: 2335540 - RNA, 18 nt, Human
ccaccuggccucugcacu

SEQ ID NO: 2335541 - RNA, 20 nt, Human
ccaccuggccucugcacucc

SEQ ID NO: 2335542 - RNA, 20 nt, Human
ccaccuucaauuccugggcc

SEQ ID NO: 2335543 - RNA, 19 nt, Human
ccaccuucaauuccugggc

SEQ ID NO: 2335544 - RNA, 18 nt, Human
ccaccuucaauuccuggg

SEQ ID NO: 2335545 - RNA, 14 nt, Human
ccaccugucuucaa

SEQ ID NO: 2335546 - RNA, 17 nt, Human
ccaccuucaauuccugg

SEQ ID NO: 2335547 - RNA, 16 nt, Human
ccaccuggggcaguca

SEQ ID NO: 2335548 - RNA, 15 nt, Human
ccaccuggggcaguc

SEQ ID NO: 2335549 - RNA, 20 nt, Human
ccaccuggggcagucaccug

SEQ ID NO: 2335550 - RNA, 14 nt, Human
ccaccuggggcagu

SEQ ID NO: 2335551 - RNA, 22 nt, Human
ccaccugggcauauccaccacc

SEQ ID NO: 2335552 - RNA, 19 nt, Human
ccacccccuucucugcucc

SEQ ID NO: 2335553 - RNA, 18 nt, Human
ccacccccuucucugcuc

SEQ ID NO: 2335554 - RNA, 13 nt, Human
ccacccccuucuc

SEQ ID NO: 2335555 - RNA, 22 nt, Human
ccacccccuucagugcccacca

SEQ ID NO: 2335556 - RNA, 20 nt, Human
ccacccccuucagugcccac

SEQ ID NO: 2335557 - RNA, 18 nt, Human
ccacccccuucagugccc

SEQ ID NO: 2335558 - RNA, 17 nt, Human
ccacccccuucagugcc

SEQ ID NO: 2335559 - RNA, 12 nt, Human
ccacccccuuca

SEQ ID NO: 2335560 - RNA, 18 nt, Human
ccacccccugcccugcac

SEQ ID NO: 2335561 - RNA, 16 nt, Human
ccacccccugcccugc

SEQ ID NO: 2335562 - RNA, 17 nt, Human
ccacccccugcccugca

SEQ ID NO: 2335563 - RNA, 22 nt, Human
ccacccccucccuggccuguuc

SEQ ID NO: 2335564 - RNA, 13 nt, Human
ccacccccugccc

SEQ ID NO: 2335565 - RNA, 14 nt, Human
ccacccccugcccu

SEQ ID NO: 2335566 - RNA, 15 nt, Human
ccacccccugcccug

SEQ ID NO: 2335567 - RNA, 19 nt, Human
ccacccccuccccagggga

SEQ ID NO: 2335568 - RNA, 18 nt, Human
ccacccccuccccagggg

SEQ ID NO: 2335569 - RNA, 17 nt, Human
ccacccccuccccaggg

SEQ ID NO: 2335570 - RNA, 16 nt, Human
ccacccccuccccagg

SEQ ID NO: 2335571 - RNA, 13 nt, Human
ccaccccccucau

SEQ ID NO: 2335572 - RNA, 12 nt, Human
ccacccccucaa

SEQ ID NO: 2335573 - RNA, 14 nt, Human
ccacccccucaagc

SEQ ID NO: 2335574 - RNA, 15 nt, Human
ccacccccucaagcc

SEQ ID NO: 2335575 - RNA, 21 nt, Human
ccaccccccagaaccuguccu

SEQ ID NO: 2335576 - RNA, 22 nt, Human
ccaccccccagaaccuguccuu

SEQ ID NO: 2335577 - RNA, 15 nt, Human
ccacccccagcugcu

SEQ ID NO: 2335578 - RNA, 18 nt, Human
ccaccccccacucugugc

SEQ ID NO: 2335579 - RNA, 19 nt, Human
ccacccccaggaccccuga

SEQ ID NO: 2335580 - RNA, 18 nt, Human
ccacccccaggaccccug

SEQ ID NO: 2335581 - RNA, 16 nt, Human
ccacccccaggacccc

SEQ ID NO: 2335582 - RNA, 19 nt, Human
ccacccccacccaagggcc

SEQ ID NO: 2335583 - RNA, 15 nt, Human
ccacccccaccccca

SEQ ID NO: 2335584 - RNA, 13 nt, Human
ccacccccagcuc

SEQ ID NO: 2335585 - RNA, 16 nt, Human
ccacccccagcucaau

SEQ ID NO: 2335586 - RNA, 16 nt, Human
ccaccccuuccccacu

SEQ ID NO: 2335587 - RNA, 13 nt, Human
ccaccccuuccug

SEQ ID NO: 2335588 - RNA, 15 nt, Human
ccaccccuuccccac

SEQ ID NO: 2335589 - RNA, 13 nt, Human
ccaccccuucccc

SEQ ID NO: 2335590 - RNA, 13 nt, Human
ccaccccugugcu

SEQ ID NO: 2335591 - RNA, 14 nt, Human
ccaccccugugcuc

SEQ ID NO: 2335592 - RNA, 15 nt, Human
ccaccccugugcucc

SEQ ID NO: 2335593 - RNA, 14 nt, Human
ccaccccuuccugu

SEQ ID NO: 2335594 - RNA, 15 nt, Human
ccaccccuuccuguc

SEQ ID NO: 2335595 - RNA, 13 nt, Human
ccaccccuugcuc

SEQ ID NO: 2335596 - RNA, 16 nt, Human
ccacccucccuggagu

SEQ ID NO: 2335597 - RNA, 17 nt, Human
ccacccucccuggagug

SEQ ID NO: 2335598 - RNA, 12 nt, Human
ccacccuccugu

SEQ ID NO: 2335599 - RNA, 13 nt, Human
ccacccuccuguc

SEQ ID NO: 2335600 - RNA, 16 nt, Human
ccaccccuccuuccuu

SEQ ID NO: 2335601 - RNA, 15 nt, Human
ccaccccuccuuccu

SEQ ID NO: 2335602 - RNA, 14 nt, Human
ccaccccuccccau

SEQ ID NO: 2335603 - RNA, 13 nt, Human
ccaccccugcccc

SEQ ID NO: 2335604 - RNA, 22 nt, Human
ccaccccugcccccagccccgg

SEQ ID NO: 2335605 - RNA, 12 nt, Human
ccaccccugccu

SEQ ID NO: 2335606 - RNA, 14 nt, Human
ccaccccugccucc

SEQ ID NO: 2335607 - RNA, 20 nt, Human
ccaccccugggggcucucau

SEQ ID NO: 2335608 - RNA, 12 nt, Human
ccaccccugugc

SEQ ID NO: 2335609 - RNA, 17 nt, Human
ccaccccugggggcucu

SEQ ID NO: 2335610 - RNA, 15 nt, Human
ccaccccugccucca

SEQ ID NO: 2335611 - RNA, 16 nt, Human
ccaccccugccuccac

SEQ ID NO: 2335612 - RNA, 18 nt, Human
ccaccccugccuccaccc

SEQ ID NO: 2335613 - RNA, 22 nt, Human
ccaccccugccuccacccucug

SEQ ID NO: 2335614 - RNA, 14 nt, Human
ccacccuccuuuca

SEQ ID NO: 2335615 - RNA, 14 nt, Human
ccacccuccugucu

SEQ ID NO: 2335616 - RNA, 15 nt, Human
ccacccuccugucuu

SEQ ID NO: 2335617 - RNA, 17 nt, Human
ccacccuccugucuucc

SEQ ID NO: 2335618 - RNA, 19 nt, Human
ccacccuccugucuuccca

SEQ ID NO: 2335619 - RNA, 20 nt, Human
ccacccuccugucuucccag

SEQ ID NO: 2335620 - RNA, 21 nt, Human
ccacccuccugucuucccagg

SEQ ID NO: 2335621 - RNA, 22 nt, Human
ccacccuccugucuucccaggg

SEQ ID NO: 2335622 - RNA, 23 nt, Human
ccacccuccugucuucccagggu

SEQ ID NO: 2335623 - RNA, 12 nt, Human
ccagcuccucau

SEQ ID NO: 2335624 - RNA, 20 nt, Human
ccagcuccggccuguccucc

SEQ ID NO: 2335625 - RNA, 23 nt, Human
ccagcuccucauccagggcucug

SEQ ID NO: 2335626 - RNA, 14 nt, Human
ccagcuccucccuu

SEQ ID NO: 2335627 - RNA, 20 nt, Human
ccagcuccucccuuguucuc

SEQ ID NO: 2335628 - RNA, 19 nt, Human
ccagcuccggccuguccuc

SEQ ID NO: 2335629 - RNA, 18 nt, Human
ccagcuccggccuguccu

SEQ ID NO: 2335630 - RNA, 20 nt, Human
ccagccuuugaucagguggg

SEQ ID NO: 2335631 - RNA, 16 nt, Human
ccagcucccucuauuu

SEQ ID NO: 2335632 - RNA, 13 nt, Human
ccagcgagcccug

SEQ ID NO: 2335633 - RNA, 16 nt, Human
ccagccugggcgacag

SEQ ID NO: 2335634 - RNA, 13 nt, Human
ccagccugggguc

SEQ ID NO: 2335635 - RNA, 19 nt, Human
ccagccugucccauggaca

SEQ ID NO: 2335636 - RNA, 23 nt, Human
ccagccugucccauggacacucc

SEQ ID NO: 2335637 - RNA, 14 nt, Human
ccagccuguuggac

SEQ ID NO: 2335638 - RNA, 20 nt, Human
ccagccuguuggacccgcuc

SEQ ID NO: 2335639 - RNA, 15 nt, Human
ccagccuuccucugc

SEQ ID NO: 2335640 - RNA, 16 nt, Human
ccagccuuccucugca

SEQ ID NO: 2335641 - RNA, 20 nt, Human
ccagccuuccucugcagcug

SEQ ID NO: 2335642 - RNA, 21 nt, Human
ccagccuuucucccaggccag

SEQ ID NO: 2335643 - RNA, 20 nt, Human
ccagccuuucucccaggcca

SEQ ID NO: 2335644 - RNA, 19 nt, Human
ccagccuuucucccaggcc

SEQ ID NO: 2335645 - RNA, 18 nt, Human
ccagccuuucucccaggc

SEQ ID NO: 2335646 - RNA, 15 nt, Human
ccagccuuucuccca

SEQ ID NO: 2335647 - RNA, 18 nt, Human
ccagccuuggcaucuaga

SEQ ID NO: 2335648 - RNA, 23 nt, Human
ccagccuugaccauucuccaccu

SEQ ID NO: 2335649 - RNA, 19 nt, Human
ccagccugggcgacagagc

SEQ ID NO: 2335650 - RNA, 13 nt, Human
ccagccuggguga

SEQ ID NO: 2335651 - RNA, 23 nt, Human
ccagccugggcagccaggcugcc

SEQ ID NO: 2335652 - RNA, 22 nt, Human
ccagccugggcagccaggcugc

SEQ ID NO: 2335653 - RNA, 18 nt, Human
ccagccugggcagccagg

SEQ ID NO: 2335654 - RNA, 16 nt, Human
ccagccugggcagcca

SEQ ID NO: 2335655 - RNA, 19 nt, Human
ccagccugggcaacagagc

SEQ ID NO: 2335656 - RNA, 18 nt, Human
ccagccuggcuucuggag

SEQ ID NO: 2335657 - RNA, 17 nt, Human
ccagccuggcuucugga

SEQ ID NO: 2335658 - RNA, 15 nt, Human
ccagccuggcuucug

SEQ ID NO: 2335659 - RNA, 13 nt, Human
ccagccuggcuuc

SEQ ID NO: 2335660 - RNA, 20 nt, Human
ccagccuggcuucuggagcc

SEQ ID NO: 2335661 - RNA, 19 nt, Human
ccagccuggcuucuggagc

SEQ ID NO: 2335662 - RNA, 21 nt, Human
ccagccuggcuucuggagccc

SEQ ID NO: 2335663 - RNA, 12 nt, Human
ccagccuggcuc

SEQ ID NO: 2335664 - RNA, 21 nt, Human
ccagccuggcucccacaggca

SEQ ID NO: 2335665 - RNA, 23 nt, Human
ccagccuggcucccacaggcagc

SEQ ID NO: 2335666 - RNA, 17 nt, Human
ccagccuaagaugaaga

SEQ ID NO: 2335667 - RNA, 19 nt, Human
ccagccugagcgacaguga

SEQ ID NO: 2335668 - RNA, 10 nt, Human
ccagccugcc

SEQ ID NO: 2335669 - RNA, 20 nt, Human
ccagccugccuggcaggcug

SEQ ID NO: 2335670 - RNA, 21 nt, Human
ccagccugccuggcaggcugu

SEQ ID NO: 2335671 - RNA, 20 nt, Human
ccagccgugaugcucaggcu

SEQ ID NO: 2335672 - RNA, 21 nt, Human
ccagccgugaugcucaggcuu

SEQ ID NO: 2335673 - RNA, 23 nt, Human
ccagccgugaugcucaggcuuga

SEQ ID NO: 2335674 - RNA, 16 nt, Human
ccagccugccuggcag

SEQ ID NO: 2335675 - RNA, 18 nt, Human
ccagccugccuggcaggc

SEQ ID NO: 2335676 - RNA, 19 nt, Human
ccagccugccuggcaggcu

SEQ ID NO: 2335677 - RNA, 19 nt, Human
ccagccauuaccauggaga

SEQ ID NO: 2335678 - RNA, 12 nt, Human
ccagcccaaguc

SEQ ID NO: 2335679 - RNA, 13 nt, Human
ccagcccaagucc

SEQ ID NO: 2335680 - RNA, 21 nt, Human
ccagccauuaccauggagaca

SEQ ID NO: 2335681 - RNA, 18 nt, Human
ccagccaugucugcauuu

SEQ ID NO: 2335682 - RNA, 17 nt, Human
ccagccaugucugcauu

SEQ ID NO: 2335683 - RNA, 16 nt, Human
ccagccaugucugcau

SEQ ID NO: 2335684 - RNA, 14 nt, Human
ccagccaugucugc

SEQ ID NO: 2335685 - RNA, 19 nt, Human
ccagccaucugcccagggg

SEQ ID NO: 2335686 - RNA, 20 nt, Human
ccagccaucugcccaggggu

SEQ ID NO: 2335687 - RNA, 21 nt, Human
ccagccaucugcccaggggug

SEQ ID NO: 2335688 - RNA, 18 nt, Human
ccagccaucaaaaugcuu

SEQ ID NO: 2335689 - RNA, 16 nt, Human
ccagccaucaaaaugc

SEQ ID NO: 2335690 - RNA, 20 nt, Human
ccagcagggucuuuucaucu

SEQ ID NO: 2335691 - RNA, 21 nt, Human
ccagcagggucuuuucaucug

SEQ ID NO: 2335692 - RNA, 22 nt, Human
ccagcagggucuuuucaucugg

SEQ ID NO: 2335693 - RNA, 23 nt, Human
ccagcagggucuuuucaucuggg

SEQ ID NO: 2335694 - RNA, 16 nt, Human
ccagccaucugcccag

SEQ ID NO: 2335695 - RNA, 17 nt, Human
ccagccaucugcccagg

SEQ ID NO: 2335696 - RNA, 18 nt, Human
ccagccaucugcccaggg

SEQ ID NO: 2335697 - RNA, 15 nt, Human
ccagccaucugccca

SEQ ID NO: 2335698 - RNA, 22 nt, Human
ccagccauacuuaucucucugu

SEQ ID NO: 2335699 - RNA, 19 nt, Human
ccagcaggcucucaggcca

SEQ ID NO: 2335700 - RNA, 20 nt, Human
ccagcaggcucucaggccag

SEQ ID NO: 2335701 - RNA, 21 nt, Human
ccagcaggcucucaggccagc

SEQ ID NO: 2335702 - RNA, 23 nt, Human
ccagcaggcucucaggccagcug

SEQ ID NO: 2335703 - RNA, 16 nt, Human
ccagcccagcccagcu

SEQ ID NO: 2335704 - RNA, 13 nt, Human
ccagcccagggcu

SEQ ID NO: 2335705 - RNA, 14 nt, Human
ccagcccagggcuc

SEQ ID NO: 2335706 - RNA, 15 nt, Human
ccagcccagggcucc

SEQ ID NO: 2335707 - RNA, 13 nt, Human
ccagcccagcugg

SEQ ID NO: 2335708 - RNA, 14 nt, Human
ccagcccagcccag

SEQ ID NO: 2335709 - RNA, 12 nt, Human
ccagcccagccc

SEQ ID NO: 2335710 - RNA, 15 nt, Human
ccagcccagauguuu

SEQ ID NO: 2335711 - RNA, 14 nt, Human
ccagcccagauguu

SEQ ID NO: 2335712 - RNA, 23 nt, Human
ccagcccagagacauacuugaag

SEQ ID NO: 2335713 - RNA, 22 nt, Human
ccagcccagagacauacuugaa

SEQ ID NO: 2335714 - RNA, 14 nt, Human
ccagcccagagaca

SEQ ID NO: 2335715 - RNA, 13 nt, Human
ccagcccagagac

SEQ ID NO: 2335716 - RNA, 12 nt, Human
ccagcccagaga

SEQ ID NO: 2335717 - RNA, 11 nt, Human
ccagcccagag

SEQ ID NO: 2335718 - RNA, 16 nt, Human
ccagcccacuucugcc

SEQ ID NO: 2335719 - RNA, 17 nt, Human
ccagcccacuucugcca

SEQ ID NO: 2335720 - RNA, 22 nt, Human
ccagcccacccuccugucuucc

SEQ ID NO: 2335721 - RNA, 18 nt, Human
ccagcccacccuccuguc

SEQ ID NO: 2335722 - RNA, 19 nt, Human
ccagcccacccuccugucu

SEQ ID NO: 2335723 - RNA, 13 nt, Human
ccagcccacccuc

SEQ ID NO: 2335724 - RNA, 14 nt, Human
ccagcccacccucc

SEQ ID NO: 2335725 - RNA, 14 nt, Human
ccagcccaagucca

SEQ ID NO: 2335726 - RNA, 21 nt, Human
ccagcccaggguucccccagc

SEQ ID NO: 2335727 - RNA, 18 nt, Human
ccagcccaggguuccccc

SEQ ID NO: 2335728 - RNA, 14 nt, Human
ccagcccagggugg

SEQ ID NO: 2335729 - RNA, 12 nt, Human
ccagcccagggu

SEQ ID NO: 2335730 - RNA, 18 nt, Human
ccagcccagcccagcugg

SEQ ID NO: 2335731 - RNA, 21 nt, Human
ccagcccagggcuccugcacu

SEQ ID NO: 2335732 - RNA, 17 nt, Human
ccagcccagggcuccug

SEQ ID NO: 2335733 - RNA, 19 nt, Human
ccagcccagggcuccugca

SEQ ID NO: 2335734 - RNA, 21 nt, Human
ccagcccauucucucuccugu

SEQ ID NO: 2335735 - RNA, 19 nt, Human
ccagcccauucucucuccu

SEQ ID NO: 2335736 - RNA, 17 nt, Human
ccagcccauucucucuc

SEQ ID NO: 2335737 - RNA, 22 nt, Human
ccagcccauucucucuccuguc

SEQ ID NO: 2335738 - RNA, 19 nt, Human
ccagccccaaaacucuccu

SEQ ID NO: 2335739 - RNA, 18 nt, Human
ccagcccugaguuccuag

SEQ ID NO: 2335740 - RNA, 14 nt, Human
ccagcccugaguuc

SEQ ID NO: 2335741 - RNA, 11 nt, Human
ccagcccugcu

SEQ ID NO: 2335742 - RNA, 13 nt, Human
ccagcccugcugg

SEQ ID NO: 2335743 - RNA, 14 nt, Human
ccagcccugcuggc

SEQ ID NO: 2335744 - RNA, 15 nt, Human
ccagcccugcuggcc

SEQ ID NO: 2335745 - RNA, 24 nt, Human
ccagcccugcuggccgccucaccc

SEQ ID NO: 2335746 - RNA, 16 nt, Human
ccagcccugcuggccg

SEQ ID NO: 2335747 - RNA, 18 nt, Human
ccagcccugcuggccgcc

SEQ ID NO: 2335748 - RNA, 21 nt, Human
ccagcccugcuggccgccuca

SEQ ID NO: 2335749 - RNA, 13 nt, Human
ccagcccuggcuc

SEQ ID NO: 2335750 - RNA, 17 nt, Human
ccagcccuggcucugca

SEQ ID NO: 2335751 - RNA, 14 nt, Human
ccagcccuggcuga

SEQ ID NO: 2335752 - RNA, 17 nt, Human
ccagcccuggcugaagg

SEQ ID NO: 2335753 - RNA, 18 nt, Human
ccagcccuggcugaagga

SEQ ID NO: 2335754 - RNA, 23 nt, Human
ccagccgccauugccaccaggag

SEQ ID NO: 2335755 - RNA, 20 nt, Human
ccagccgccauugccaccag

SEQ ID NO: 2335756 - RNA, 16 nt, Human
ccagccgcucggaggc

SEQ ID NO: 2335757 - RNA, 19 nt, Human
ccagccgcucggaggcccc

SEQ ID NO: 2335758 - RNA, 23 nt, Human
ccagccgcugcccggcgcccucu

SEQ ID NO: 2335759 - RNA, 14 nt, Human
ccagccgcugcccg

SEQ ID NO: 2335760 - RNA, 16 nt, Human
ccagccgcugcccggc

SEQ ID NO: 2335761 - RNA, 23 nt, Human
ccagccggccucucuggccuccc

SEQ ID NO: 2335762 - RNA, 22 nt, Human
ccagccgguaccugggaagggg

SEQ ID NO: 2335763 - RNA, 18 nt, Human
ccagccgugaugcucagg

SEQ ID NO: 2335764 - RNA, 19 nt, Human
ccagccgugaugcucaggc

SEQ ID NO: 2335765 - RNA, 13 nt, Human
ccagccggcaugg

SEQ ID NO: 2335766 - RNA, 14 nt, Human
ccagccggcauggc

SEQ ID NO: 2335767 - RNA, 13 nt, Human
ccagccggccucu

SEQ ID NO: 2335768 - RNA, 14 nt, Human
ccagccggccucuc

SEQ ID NO: 2335769 - RNA, 20 nt, Human
ccagccggccucucuggccu

SEQ ID NO: 2335770 - RNA, 22 nt, Human
ccagccggccucucuggccucc

SEQ ID NO: 2335771 - RNA, 17 nt, Human
ccagccgagauagccaa

SEQ ID NO: 2335772 - RNA, 21 nt, Human
ccagcccuggcugaaggacug

SEQ ID NO: 2335773 - RNA, 13 nt, Human
ccagcccuggucu

SEQ ID NO: 2335774 - RNA, 20 nt, Human
ccagcccuggucucagcagc

SEQ ID NO: 2335775 - RNA, 20 nt, Human
ccagccgagauagccaaggc

SEQ ID NO: 2335776 - RNA, 22 nt, Human
ccagccgagauagccaaggcca

SEQ ID NO: 2335777 - RNA, 13 nt, Human
ccagauuuacacu

SEQ ID NO: 2335778 - RNA, 21 nt, Human
ccagauuugcuaauuuauccu

SEQ ID NO: 2335779 - RNA, 18 nt, Human
ccagauuuugcuguauau

SEQ ID NO: 2335780 - RNA, 19 nt, Human
ccagauuuacacugggaga

SEQ ID NO: 2335781 - RNA, 24 nt, Human
ccagauuuuuuacagcugccugca

SEQ ID NO: 2335782 - RNA, 15 nt, Human
ccagauuuugcugua

SEQ ID NO: 2335783 - RNA, 16 nt, Human
ccagauuuuuacacau

SEQ ID NO: 2335784 - RNA, 21 nt, Human
ccagcaaagagugggcugcau

SEQ ID NO: 2335785 - RNA, 15 nt, Human
ccagcaaaagguugu

SEQ ID NO: 2335786 - RNA, 13 nt, Human
ccagcaaagcccc

SEQ ID NO: 2335787 - RNA, 14 nt, Human
ccagcaaagcccca

SEQ ID NO: 2335788 - RNA, 19 nt, Human
ccagcaaagccccaugcug

SEQ ID NO: 2335789 - RNA, 21 nt, Human
ccagcaaagccccaugcugga

SEQ ID NO: 2335790 - RNA, 22 nt, Human
ccagcaaagccccaugcuggag

SEQ ID NO: 2335791 - RNA, 15 nt, Human
ccagcaacacaagcu

SEQ ID NO: 2335792 - RNA, 15 nt, Human
ccagcaacccuccua

SEQ ID NO: 2335793 - RNA, 17 nt, Human
ccagcaacccuccuauc

SEQ ID NO: 2335794 - RNA, 16 nt, Human
ccagcacacagggcag

SEQ ID NO: 2335795 - RNA, 13 nt, Human
ccagcacaugaaa

SEQ ID NO: 2335796 - RNA, 19 nt, Human
ccagcaccaacaccacggu

SEQ ID NO: 2335797 - RNA, 13 nt, Human
ccagcacagcuug

SEQ ID NO: 2335798 - RNA, 17 nt, Human
ccagcacagcuugaccu

SEQ ID NO: 2335799 - RNA, 17 nt, Human
ccagcaagugagagcug

SEQ ID NO: 2335800 - RNA, 21 nt, Human
ccagcaacacaagcuggaagc

SEQ ID NO: 2335801 - RNA, 18 nt, Human
ccagcaagugagagcugg

SEQ ID NO: 2335802 - RNA, 19 nt, Human
ccagcaagugagagcuggg

SEQ ID NO: 2335803 - RNA, 17 nt, Human
ccagcacuaaagcagug

SEQ ID NO: 2335804 - RNA, 15 nt, Human
ccagcaccuggcauc

SEQ ID NO: 2335805 - RNA, 16 nt, Human
ccagcaggcucucagg

SEQ ID NO: 2335806 - RNA, 17 nt, Human
ccagcaggcucucaggc

SEQ ID NO: 2335807 - RNA, 18 nt, Human
ccagcaggcucucaggcc

SEQ ID NO: 2335808 - RNA, 18 nt, Human
ccagcacccagcaacucc

SEQ ID NO: 2335809 - RNA, 17 nt, Human
ccagcacccgggcucag

SEQ ID NO: 2335810 - RNA, 14 nt, Human
ccagcacccgggcu

SEQ ID NO: 2335811 - RNA, 14 nt, Human
ccagcacccagcaa

SEQ ID NO: 2335812 - RNA, 22 nt, Human
ccagcaccauccgccagggccc

SEQ ID NO: 2335813 - RNA, 23 nt, Human
ccagcacccgggcucagggacca

SEQ ID NO: 2335814 - RNA, 18 nt, Human
ccagcacccgggcucagg

SEQ ID NO: 2335815 - RNA, 20 nt, Human
ccagcacccgggcucaggga

SEQ ID NO: 2335816 - RNA, 17 nt, Human
ccagcaccaucucuccu

SEQ ID NO: 2335817 - RNA, 18 nt, Human
ccagcaccaucucuccuc

SEQ ID NO: 2335818 - RNA, 19 nt, Human
ccagagccccacacggagg

SEQ ID NO: 2335819 - RNA, 18 nt, Human
ccagagccccacacggag

SEQ ID NO: 2335820 - RNA, 14 nt, Human
ccagagccccacac

SEQ ID NO: 2335821 - RNA, 16 nt, Human
ccagagcccagcucca

SEQ ID NO: 2335822 - RNA, 15 nt, Human
ccagagccauggacu

SEQ ID NO: 2335823 - RNA, 13 nt, Human
ccagagccaugga

SEQ ID NO: 2335824 - RNA, 21 nt, Human
ccagagccauggacucuacac

SEQ ID NO: 2335825 - RNA, 18 nt, Human
ccagagcccagcuccaag

SEQ ID NO: 2335826 - RNA, 17 nt, Human
ccagagcccagcuccaa

SEQ ID NO: 2335827 - RNA, 14 nt, Human
ccagagcccaccuu

SEQ ID NO: 2335828 - RNA, 14 nt, Human
ccagauugcaacag

SEQ ID NO: 2335829 - RNA, 16 nt, Human
ccagauugcaacaggc

SEQ ID NO: 2335830 - RNA, 21 nt, Human
ccagagcgccccucccuagug

SEQ ID NO: 2335831 - RNA, 19 nt, Human
ccagagcgugggagacggu

SEQ ID NO: 2335832 - RNA, 13 nt, Human
ccagauugacgac

SEQ ID NO: 2335833 - RNA, 23 nt, Human
ccagauugcaacaggcugggcuu

SEQ ID NO: 2335834 - RNA, 16 nt, Human
ccagauuggcucacac

SEQ ID NO: 2335835 - RNA, 21 nt, Human
ccagauugacgacaagugcug

SEQ ID NO: 2335836 - RNA, 18 nt, Human
ccagauugacgacaagug

SEQ ID NO: 2335837 - RNA, 19 nt, Human
ccagauugacgacaagugc

SEQ ID NO: 2335838 - RNA, 18 nt, Human
ccagauugcaacaggcug

SEQ ID NO: 2335839 - RNA, 22 nt, Human
ccagauugcaacaggcugggcu

SEQ ID NO: 2335840 - RNA, 18 nt, Human
ccagauuucacucuccuu

SEQ ID NO: 2335841 - RNA, 19 nt, Human
ccagauuucacucuccuug

SEQ ID NO: 2335842 - RNA, 15 nt, Human
ccagauuucacucuc

SEQ ID NO: 2335843 - RNA, 19 nt, Human
ccagauuggcucacacuga

SEQ ID NO: 2335844 - RNA, 20 nt, Human
ccagauuggcucacacugag

SEQ ID NO: 2335845 - RNA, 21 nt, Human
ccagauuggcucacacugaga

SEQ ID NO: 2335846 - RNA, 22 nt, Human
ccagauuggcucacacugagaa

SEQ ID NO: 2335847 - RNA, 23 nt, Human
cccacagacucaaaugcucagac

SEQ ID NO: 2335848 - RNA, 13 nt, Human
cccacagacucaa

SEQ ID NO: 2335849 - RNA, 11 nt, Human
cccacagccca

SEQ ID NO: 2335850 - RNA, 15 nt, Human
cccacagcccacguc

SEQ ID NO: 2335851 - RNA, 13 nt, Human
cccacagcgcugg

SEQ ID NO: 2335852 - RNA, 18 nt, Human
cccacagcccacguccug

SEQ ID NO: 2335853 - RNA, 19 nt, Human
cccacagcccacguccugu

SEQ ID NO: 2335854 - RNA, 22 nt, Human
cccacagcccacguccugucag

SEQ ID NO: 2335855 - RNA, 17 nt, Human
cccacaggaucagucug

SEQ ID NO: 2335856 - RNA, 13 nt, Human
cccacaggaucag

SEQ ID NO: 2335857 - RNA, 19 nt, Human
cccacauagugaugguucc

SEQ ID NO: 2335858 - RNA, 20 nt, Human
cccacaucccaggcuucacc

SEQ ID NO: 2335859 - RNA, 13 nt, Human
cccacaucccagg

SEQ ID NO: 2335860 - RNA, 14 nt, Human
cccacaucccaggc

SEQ ID NO: 2335861 - RNA, 16 nt, Human
cccacaucccaggcuu

SEQ ID NO: 2335862 - RNA, 14 nt, Human
cccacaggcagcuu

SEQ ID NO: 2335863 - RNA, 12 nt, Human
cccacaggcagc

SEQ ID NO: 2335864 - RNA, 13 nt, Human
cccacaggcagcu

SEQ ID NO: 2335865 - RNA, 22 nt, Human
cccacagugacucgggcuccug

SEQ ID NO: 2335866 - RNA, 23 nt, Human
cccacagugacucgggcuccugu

SEQ ID NO: 2335867 - RNA, 15 nt, Human
cccacagugcugucu

SEQ ID NO: 2335868 - RNA, 16 nt, Human
cccacaggcccuuccu

SEQ ID NO: 2335869 - RNA, 18 nt, Human
cccacaggcccuuccucu

SEQ ID NO: 2335870 - RNA, 19 nt, Human
cccaagugggggcagaggg

SEQ ID NO: 2335871 - RNA, 14 nt, Human
cccaagugggggca

SEQ ID NO: 2335872 - RNA, 16 nt, Human
cccaaguggcagagcu

SEQ ID NO: 2335873 - RNA, 18 nt, Human
cccaagugccagucuugu

SEQ ID NO: 2335874 - RNA, 15 nt, Human
cccaagugccagucu

SEQ ID NO: 2335875 - RNA, 23 nt, Human
cccaaguccugaagaggcgggcc

SEQ ID NO: 2335876 - RNA, 23 nt, Human
cccaagucccuguuuucugagcc

SEQ ID NO: 2335877 - RNA, 13 nt, Human
cccaaguccugaa

SEQ ID NO: 2335878 - RNA, 16 nt, Human
cccaaguccugaagag

SEQ ID NO: 2335879 - RNA, 17 nt, Human
cccaaguccugaagagg

SEQ ID NO: 2335880 - RNA, 17 nt, Human
cccacacuuguuccagc

SEQ ID NO: 2335881 - RNA, 22 nt, Human
cccacacuggggugccgccugc

SEQ ID NO: 2335882 - RNA, 11 nt, Human
cccacacuccu

SEQ ID NO: 2335883 - RNA, 14 nt, Human
cccacacuccuaca

SEQ ID NO: 2335884 - RNA, 19 nt, Human
cccacacuggggugccgcc

SEQ ID NO: 2335885 - RNA, 21 nt, Human
cccacagaaagacugagcuca

SEQ ID NO: 2335886 - RNA, 19 nt, Human
cccacacuuguuccagcuc

SEQ ID NO: 2335887 - RNA, 23 nt, Human
cccacagaaagacugagcucaag

SEQ ID NO: 2335888 - RNA, 19 nt, Human
cccacacuugagaggauga

SEQ ID NO: 2335889 - RNA, 18 nt, Human
cccaagucccuguuuucu

SEQ ID NO: 2335890 - RNA, 20 nt, Human
cccaaguccaaauguuuaca

SEQ ID NO: 2335891 - RNA, 12 nt, Human
cccaaguccaaa

SEQ ID NO: 2335892 - RNA, 23 nt, Human
cccaagguuuaaacuucucugaa

SEQ ID NO: 2335893 - RNA, 22 nt, Human
cccaaguagggggucuaaaauu

SEQ ID NO: 2335894 - RNA, 21 nt, Human
cccaaggggcagucuggaggg

SEQ ID NO: 2335895 - RNA, 15 nt, Human
cccaaggggcagucu

SEQ ID NO: 2335896 - RNA, 21 nt, Human
cccaagggcaaaauucccagg

SEQ ID NO: 2335897 - RNA, 22 nt, Human
cccaagggcaaaauucccaggg

SEQ ID NO: 2335898 - RNA, 16 nt, Human
cccaagggccuggccu

SEQ ID NO: 2335899 - RNA, 23 nt, Human
cccaagggaucugguccuaccca

SEQ ID NO: 2335900 - RNA, 19 nt, Human
cccaagggcaaaauuccca

SEQ ID NO: 2335901 - RNA, 11 nt, Human
ccauuuuuccu

SEQ ID NO: 2335902 - RNA, 17 nt, Human
ccauuuuuuaaggaaac

SEQ ID NO: 2335903 - RNA, 19 nt, Human
ccauuuuuuaaggaaacaa

SEQ ID NO: 2335904 - RNA, 12 nt, Human
ccauuuuuuccu

SEQ ID NO: 2335905 - RNA, 19 nt, Human
ccauuuugcccuuccauag

SEQ ID NO: 2335906 - RNA, 13 nt, Human
ccauuuugugaau

SEQ ID NO: 2335907 - RNA, 14 nt, Human
ccauuuugugaaug

SEQ ID NO: 2335908 - RNA, 12 nt, Human
ccauuuugugaa

SEQ ID NO: 2335909 - RNA, 21 nt, Human
ccauuuuguauuuuacuaaua

SEQ ID NO: 2335910 - RNA, 16 nt, Human
ccauuuugcccuucca

SEQ ID NO: 2335911 - RNA, 21 nt, Human
ccauuuugcaaaauuuccagu

SEQ ID NO: 2335912 - RNA, 17 nt, Human
ccauuuugcaaaauuuc

SEQ ID NO: 2335913 - RNA, 14 nt, Human
ccauuuugcaaaau

SEQ ID NO: 2335914 - RNA, 12 nt, Human
ccauuuucugug

SEQ ID NO: 2335915 - RNA, 13 nt, Human
ccauuuucugugg

SEQ ID NO: 2335916 - RNA, 20 nt, Human
ccauuuugcugucccuuuuc

SEQ ID NO: 2335917 - RNA, 14 nt, Human
cccaacccccaccc

SEQ ID NO: 2335918 - RNA, 22 nt, Human
cccaaccccagccgcucggagg

SEQ ID NO: 2335919 - RNA, 12 nt, Human
cccaacccccag

SEQ ID NO: 2335920 - RNA, 13 nt, Human
cccaacccccacc

SEQ ID NO: 2335921 - RNA, 12 nt, Human
cccaacccccac

SEQ ID NO: 2335922 - RNA, 13 nt, Human
cccaacccccagc

SEQ ID NO: 2335923 - RNA, 14 nt, Human
cccaacccccagca

SEQ ID NO: 2335924 - RNA, 15 nt, Human
cccaacccccagcac

SEQ ID NO: 2335925 - RNA, 12 nt, Human
cccaaccccuga

SEQ ID NO: 2335926 - RNA, 13 nt, Human
cccaaccccugag

SEQ ID NO: 2335927 - RNA, 14 nt, Human
cccaaccccugagg

SEQ ID NO: 2335928 - RNA, 15 nt, Human
cccaaccccugagga

SEQ ID NO: 2335929 - RNA, 16 nt, Human
cccaaccccugaggaa

SEQ ID NO: 2335930 - RNA, 12 nt, Human
cccaagggccug

SEQ ID NO: 2335931 - RNA, 14 nt, Human
cccaagggccuggc

SEQ ID NO: 2335932 - RNA, 12 nt, Human
cccaaccccagc

SEQ ID NO: 2335933 - RNA, 19 nt, Human
cccaacagugugaaguuag

SEQ ID NO: 2335934 - RNA, 18 nt, Human
cccaacaggaggacaauu

SEQ ID NO: 2335935 - RNA, 19 nt, Human
cccaacaggaggacaauuc

SEQ ID NO: 2335936 - RNA, 20 nt, Human
cccaacaggaggacaauuca

SEQ ID NO: 2335937 - RNA, 12 nt, Human
cccaacagugug

SEQ ID NO: 2335938 - RNA, 13 nt, Human
cccaacaguguga

SEQ ID NO: 2335939 - RNA, 14 nt, Human
cccaacagugugaa

SEQ ID NO: 2335940 - RNA, 15 nt, Human
cccaacagugugaag

SEQ ID NO: 2335941 - RNA, 16 nt, Human
cccaacagugugaagu

SEQ ID NO: 2335942 - RNA, 16 nt, Human
cccaacaggaggacaa

SEQ ID NO: 2335943 - RNA, 17 nt, Human
cccaacaggaggacaau

SEQ ID NO: 2335944 - RNA, 22 nt, Human
cccaacacugugcccuggugga

SEQ ID NO: 2335945 - RNA, 19 nt, Human
cccaacagaugcuuuucug

SEQ ID NO: 2335946 - RNA, 19 nt, Human
cccaacagcgacauagccc

SEQ ID NO: 2335947 - RNA, 23 nt, Human
cccaacagcgacauagcccaucc

SEQ ID NO: 2335948 - RNA, 12 nt, Human
cccaacacugug

SEQ ID NO: 2335949 - RNA, 13 nt, Human
cccaacacugugc

SEQ ID NO: 2335950 - RNA, 15 nt, Human
cccaacacugugccc

SEQ ID NO: 2335951 - RNA, 16 nt, Human
cccaacacugugcccu

SEQ ID NO: 2335952 - RNA, 18 nt, Human
cccaacacugugcccugg

SEQ ID NO: 2335953 - RNA, 19 nt, Human
cccaacacugugcccuggu

SEQ ID NO: 2335954 - RNA, 20 nt, Human
cccaacacugugcccuggug

SEQ ID NO: 2335955 - RNA, 21 nt, Human
cccaacacugugcccuggugg

SEQ ID NO: 2335956 - RNA, 13 nt, Human
cccacguccuguc

SEQ ID NO: 2335957 - RNA, 15 nt, Human
cccacguccugucag

SEQ ID NO: 2335958 - RNA, 17 nt, Human
cccacguccugucagug

SEQ ID NO: 2335959 - RNA, 19 nt, Human
cccacggggccucgggacc

SEQ ID NO: 2335960 - RNA, 13 nt, Human
cccacgcuucucu

SEQ ID NO: 2335961 - RNA, 20 nt, Human
cccacggagucguggggugu

SEQ ID NO: 2335962 - RNA, 14 nt, Human
cccacggccgcucc

SEQ ID NO: 2335963 - RNA, 16 nt, Human
cccacggccgcuccag

SEQ ID NO: 2335964 - RNA, 17 nt, Human
cccacggccgcuccagg

SEQ ID NO: 2335965 - RNA, 21 nt, Human
cccacggccgcuccaggggug

SEQ ID NO: 2335966 - RNA, 22 nt, Human
cccagaauaaguuauugcaguu

SEQ ID NO: 2335967 - RNA, 12 nt, Human
cccagaaucaaa

SEQ ID NO: 2335968 - RNA, 16 nt, Human
cccagaaugaggcugc

SEQ ID NO: 2335969 - RNA, 24 nt, Human
cccagaauaaacuggcagcucagc

SEQ ID NO: 2335970 - RNA, 19 nt, Human
cccagaauaaguuauugca

SEQ ID NO: 2335971 - RNA, 15 nt, Human
cccacguucucacac

SEQ ID NO: 2335972 - RNA, 16 nt, Human
cccacguucucacacc

SEQ ID NO: 2335973 - RNA, 22 nt, Human
cccagaauaaacuggcagcuca

SEQ ID NO: 2335974 - RNA, 19 nt, Human
cccacguccugucagugcc

SEQ ID NO: 2335975 - RNA, 22 nt, Human
cccacguccugucagugccgcc

SEQ ID NO: 2335976 - RNA, 12 nt, Human
cccacgugggag

SEQ ID NO: 2335977 - RNA, 17 nt, Human
cccacgcccuccccucc

SEQ ID NO: 2335978 - RNA, 22 nt, Human
cccaccuucaauuccugggccc

SEQ ID NO: 2335979 - RNA, 12 nt, Human
cccaccugucuu

SEQ ID NO: 2335980 - RNA, 17 nt, Human
cccacgcccccacuggu

SEQ ID NO: 2335981 - RNA, 19 nt, Human
cccacgcccccacugguga

SEQ ID NO: 2335982 - RNA, 15 nt, Human
cccaccuuggcucaa

SEQ ID NO: 2335983 - RNA, 22 nt, Human
cccaccuuggcucaaguccucu

SEQ ID NO: 2335984 - RNA, 14 nt, Human
cccaccuuggcugc

SEQ ID NO: 2335985 - RNA, 15 nt, Human
cccaccuuggcugca

SEQ ID NO: 2335986 - RNA, 20 nt, Human
cccaccugguggccucugcc

SEQ ID NO: 2335987 - RNA, 13 nt, Human
cccaccugggacc

SEQ ID NO: 2335988 - RNA, 22 nt, Human
cccaccucuccccaccuuaccc

SEQ ID NO: 2335989 - RNA, 19 nt, Human
cccaccucucucacuccuu

SEQ ID NO: 2335990 - RNA, 21 nt, Human
cccaccuucaauuccugggcc

SEQ ID NO: 2335991 - RNA, 20 nt, Human
cccaccuucaauuccugggc

SEQ ID NO: 2335992 - RNA, 19 nt, Human
cccaccuucaauuccuggg

SEQ ID NO: 2335993 - RNA, 23 nt, Human
cccaccugucaaacaaagccaga

SEQ ID NO: 2335994 - RNA, 22 nt, Human
cccaccugucaaacaaagccag

SEQ ID NO: 2335995 - RNA, 12 nt, Human
cccaccuuggcu

SEQ ID NO: 2335996 - RNA, 21 nt, Human
cccaccucagccucccaaagu

SEQ ID NO: 2335997 - RNA, 13 nt, Human
cccaccucucuca

SEQ ID NO: 2335998 - RNA, 14 nt, Human
cccaccucucucac

SEQ ID NO: 2335999 - RNA, 17 nt, Human
cccaccucucucacucc

SEQ ID NO: 2336000 - RNA, 16 nt, Human
cccaccuaugugccaa

SEQ ID NO: 2336001 - RNA, 19 nt, Human
cccaccgugggcagggagc

SEQ ID NO: 2336002 - RNA, 20 nt, Human
cccaccguggaggaggaagg

SEQ ID NO: 2336003 - RNA, 12 nt, Human
cccaccucagcc

SEQ ID NO: 2336004 - RNA, 14 nt, Human
cccaccucagccuc

SEQ ID NO: 2336005 - RNA, 15 nt, Human
cccaccucagccucc

SEQ ID NO: 2336006 - RNA, 15 nt, Human
cccaccguccgcccu

SEQ ID NO: 2336007 - RNA, 17 nt, Human
cccaccguccgcccugc

SEQ ID NO: 2336008 - RNA, 17 nt, Human
cccaccgugggcaggga

SEQ ID NO: 2336009 - RNA, 15 nt, Human
cccaccgugggcagg

SEQ ID NO: 2336010 - RNA, 19 nt, Human
cccaccguccgcccugcuc

SEQ ID NO: 2336011 - RNA, 21 nt, Human
cccaccguccgcccugcuccu

SEQ ID NO: 2336012 - RNA, 23 nt, Human
cccaccguccgcccugcuccucc

SEQ ID NO: 2336013 - RNA, 19 nt, Human
cccaccguggaggaggaag

SEQ ID NO: 2336014 - RNA, 18 nt, Human
cccacaugaggacaugau

SEQ ID NO: 2336015 - RNA, 13 nt, Human
ccaucucuuccua

SEQ ID NO: 2336016 - RNA, 21 nt, Human
ccaucucuuccuacccaacca

SEQ ID NO: 2336017 - RNA, 12 nt, Human
ccaucugugaau

SEQ ID NO: 2336018 - RNA, 22 nt, Human
ccaucugugggcacgcuguggg

SEQ ID NO: 2336019 - RNA, 14 nt, Human
ccaucugucccugc

SEQ ID NO: 2336020 - RNA, 16 nt, Human
ccaucugugcacgcag

SEQ ID NO: 2336021 - RNA, 15 nt, Human
ccaucugugaauaag

SEQ ID NO: 2336022 - RNA, 14 nt, Human
ccaucugugaauaa

SEQ ID NO: 2336023 - RNA, 20 nt, Human
ccaucucucuacuccuaccu

SEQ ID NO: 2336024 - RNA, 13 nt, Human
ccaucucucuggc

SEQ ID NO: 2336025 - RNA, 14 nt, Human
ccaucucucuggcc

SEQ ID NO: 2336026 - RNA, 16 nt, Human
ccaucucucuggcccu

SEQ ID NO: 2336027 - RNA, 18 nt, Human
ccaucucugauuuucaaa

SEQ ID NO: 2336028 - RNA, 23 nt, Human
ccaucucugauuuucaaagcuuu

SEQ ID NO: 2336029 - RNA, 12 nt, Human
ccaucucuggau

SEQ ID NO: 2336030 - RNA, 15 nt, Human
ccaucucuggaugcc

SEQ ID NO: 2336031 - RNA, 18 nt, Human
ccaucucuggaugccuga

SEQ ID NO: 2336032 - RNA, 22 nt, Human
ccaucucuggaugccugauugc

SEQ ID NO: 2336033 - RNA, 19 nt, Human
ccaucuguuuggugggggu

SEQ ID NO: 2336034 - RNA, 15 nt, Human
ccaucuuaguuugga

SEQ ID NO: 2336035 - RNA, 15 nt, Human
ccaucuucagcuucu

SEQ ID NO: 2336036 - RNA, 14 nt, Human
ccaucuuccaggug

SEQ ID NO: 2336037 - RNA, 13 nt, Human
ccaucuucccagc

SEQ ID NO: 2336038 - RNA, 15 nt, Human
ccaucuuccaggugg

SEQ ID NO: 2336039 - RNA, 16 nt, Human
ccaucuuccagguggg

SEQ ID NO: 2336040 - RNA, 12 nt, Human
ccaugugugugc

SEQ ID NO: 2336041 - RNA, 10 nt, Human
ccaugugugu

SEQ ID NO: 2336042 - RNA, 15 nt, Human
ccauguguggacuca

SEQ ID NO: 2336043 - RNA, 18 nt, Human
ccaugugugagugugugc

SEQ ID NO: 2336044 - RNA, 17 nt, Human
ccaugugugagugugug

SEQ ID NO: 2336045 - RNA, 11 nt, Human
ccaugugugag

SEQ ID NO: 2336046 - RNA, 17 nt, Human
ccauguguccugguucc

SEQ ID NO: 2336047 - RNA, 13 nt, Human
ccaucuugguaaa

SEQ ID NO: 2336048 - RNA, 14 nt, Human
ccauguguccuggu

SEQ ID NO: 2336049 - RNA, 20 nt, Human
ccaucuugcuucccuaaucu

SEQ ID NO: 2336050 - RNA, 21 nt, Human
ccaucuugcuucccuaaucua

SEQ ID NO: 2336051 - RNA, 19 nt, Human
ccaugugugugcaagugug

SEQ ID NO: 2336052 - RNA, 18 nt, Human
ccauguuaguuuuuacuu

SEQ ID NO: 2336053 - RNA, 22 nt, Human
ccauguuaauuucaugugucaa

SEQ ID NO: 2336054 - RNA, 18 nt, Human
ccauguuccaauaaacag

SEQ ID NO: 2336055 - RNA, 22 nt, Human
ccauguucacaccgcugcacuc

SEQ ID NO: 2336056 - RNA, 17 nt, Human
ccauguuccaauaaaca

SEQ ID NO: 2336057 - RNA, 23 nt, Human
ccauguucuauuucagugccaau

SEQ ID NO: 2336058 - RNA, 18 nt, Human
ccauguuuuguuuacggu

SEQ ID NO: 2336059 - RNA, 13 nt, Human
ccauguugcugcc

SEQ ID NO: 2336060 - RNA, 14 nt, Human
ccauguugcugcca

SEQ ID NO: 2336061 - RNA, 15 nt, Human
ccauuaaaacugaag

SEQ ID NO: 2336062 - RNA, 20 nt, Human
ccauuaaaacugaagucuga

SEQ ID NO: 2336063 - RNA, 21 nt, Human
ccauuaaaacugaagucugaa

SEQ ID NO: 2336064 - RNA, 23 nt, Human
ccauuaaaacugaagucugaaau

SEQ ID NO: 2336065 - RNA, 14 nt, Human
ccauuaccauggag

SEQ ID NO: 2336066 - RNA, 12 nt, Human
ccauuacccuca

SEQ ID NO: 2336067 - RNA, 23 nt, Human
ccauuagaagauauuagucuugg

SEQ ID NO: 2336068 - RNA, 22 nt, Human
ccauuaaagucgagcuuuucua

SEQ ID NO: 2336069 - RNA, 15 nt, Human
ccauuaaaguucuca

SEQ ID NO: 2336070 - RNA, 22 nt, Human
ccauuaaaacugaagucugaaa

SEQ ID NO: 2336071 - RNA, 17 nt, Human
ccauucugaccauuuca

SEQ ID NO: 2336072 - RNA, 20 nt, Human
ccauucugacucgguuucuc

SEQ ID NO: 2336073 - RNA, 15 nt, Human
ccauucugccugccc

SEQ ID NO: 2336074 - RNA, 20 nt, Human
ccauucugccuccauucuga

SEQ ID NO: 2336075 - RNA, 15 nt, Human
ccauuugaaagaaag

SEQ ID NO: 2336076 - RNA, 20 nt, Human
ccauuugcagaguccugcac

SEQ ID NO: 2336077 - RNA, 18 nt, Human
ccauuuuagucacuuuuu

SEQ ID NO: 2336078 - RNA, 19 nt, Human
ccauuuuagucacuuuuuu

SEQ ID NO: 2336079 - RNA, 16 nt, Human
ccauuugcuuuuucac

SEQ ID NO: 2336080 - RNA, 13 nt, Human
ccauuugcuccuu

SEQ ID NO: 2336081 - RNA, 21 nt, Human
ccauuugcguuccaugaugcu

SEQ ID NO: 2336082 - RNA, 24 nt, Human
ccauuccugguacccagccaucug

SEQ ID NO: 2336083 - RNA, 14 nt, Human
ccauucuacacaga

SEQ ID NO: 2336084 - RNA, 17 nt, Human
ccauuaugaagaagaga

SEQ ID NO: 2336085 - RNA, 14 nt, Human
ccauuaucccugaa

SEQ ID NO: 2336086 - RNA, 21 nt, Human
ccauuaucccugaaucccccu

SEQ ID NO: 2336087 - RNA, 14 nt, Human
ccauuaucaugugu

SEQ ID NO: 2336088 - RNA, 15 nt, Human
ccauuaucaugugua

SEQ ID NO: 2336089 - RNA, 16 nt, Human
ccauuaucauguguaa

SEQ ID NO: 2336090 - RNA, 16 nt, Human
ccauuagagucagccu

SEQ ID NO: 2336091 - RNA, 19 nt, Human
ccauuagcuuucaauuccg

SEQ ID NO: 2336092 - RNA, 15 nt, Human
ccauguugcugccaa

SEQ ID NO: 2336093 - RNA, 13 nt, Human
ccauuaucaugug

SEQ ID NO: 2336094 - RNA, 22 nt, Human
ccauuaggacaaucaguccccu

SEQ ID NO: 2336095 - RNA, 17 nt, Human
ccauucucaagcccugc

SEQ ID NO: 2336096 - RNA, 18 nt, Human
ccauucucaagcccugca

SEQ ID NO: 2336097 - RNA, 18 nt, Human
ccauucuccacagcaacc

SEQ ID NO: 2336098 - RNA, 16 nt, Human
ccauucuccacagcaa

SEQ ID NO: 2336099 - RNA, 15 nt, Human
ccauucuccacagca

SEQ ID NO: 2336100 - RNA, 13 nt, Human
ccauucuccacag

SEQ ID NO: 2336101 - RNA, 23 nt, Human
ccauucucccagguaccagcugc

SEQ ID NO: 2336102 - RNA, 14 nt, Human
ccauucucucuccu

SEQ ID NO: 2336103 - RNA, 16 nt, Human
ccauucugaccauuuc

SEQ ID NO: 2336104 - RNA, 20 nt, Human
ccauucucucuccuguccaa

SEQ ID NO: 2336105 - RNA, 19 nt, Human
ccauucucucuccugucca

SEQ ID NO: 2336106 - RNA, 16 nt, Human
ccauucucucuccugu

SEQ ID NO: 2336107 - RNA, 12 nt, Human
ccauucugacuc

SEQ ID NO: 2336108 - RNA, 13 nt, Human
ccauucugacucg

SEQ ID NO: 2336109 - RNA, 23 nt, Human
cccaagugggggcagagggcaga

SEQ ID NO: 2336110 - RNA, 14 nt, Human
ccagugcaacacug

SEQ ID NO: 2336111 - RNA, 21 nt, Human
ccagugaugcuaaagguugua

SEQ ID NO: 2336112 - RNA, 14 nt, Human
ccagugcaacagca

SEQ ID NO: 2336113 - RNA, 15 nt, Human
ccagugcaacagcac

SEQ ID NO: 2336114 - RNA, 18 nt, Human
ccagugcaacagcacugg

SEQ ID NO: 2336115 - RNA, 19 nt, Human
ccagugagcacucccaagu

SEQ ID NO: 2336116 - RNA, 20 nt, Human
ccagugagcacucccaaguc

SEQ ID NO: 2336117 - RNA, 14 nt, Human
ccagugcacccacu

SEQ ID NO: 2336118 - RNA, 19 nt, Human
ccagugcccaaagucugug

SEQ ID NO: 2336119 - RNA, 22 nt, Human
ccagugcccaaagucuguguga

SEQ ID NO: 2336120 - RNA, 23 nt, Human
ccaguggccucaacccucccuca

SEQ ID NO: 2336121 - RNA, 17 nt, Human
ccaguggccucaacccu

SEQ ID NO: 2336122 - RNA, 16 nt, Human
ccaguggccucaaccc

SEQ ID NO: 2336123 - RNA, 21 nt, Human
ccaguggccacucagcuuccu

SEQ ID NO: 2336124 - RNA, 15 nt, Human
ccaguggccacucag

SEQ ID NO: 2336125 - RNA, 16 nt, Human
ccaguggccacucagc

SEQ ID NO: 2336126 - RNA, 17 nt, Human
ccaguggccacucagcu

SEQ ID NO: 2336127 - RNA, 24 nt, Human
ccaguggccucaacccucccucag

SEQ ID NO: 2336128 - RNA, 13 nt, Human
ccaguggcugcug

SEQ ID NO: 2336129 - RNA, 14 nt, Human
ccaguggcugcugc

SEQ ID NO: 2336130 - RNA, 15 nt, Human
ccaguggcugcugcc

SEQ ID NO: 2336131 - RNA, 16 nt, Human
ccaguggcugcugccc

SEQ ID NO: 2336132 - RNA, 17 nt, Human
ccaguggcugcugccca

SEQ ID NO: 2336133 - RNA, 18 nt, Human
ccaguggcugcugcccag

SEQ ID NO: 2336134 - RNA, 13 nt, Human
ccagugucuuccu

SEQ ID NO: 2336135 - RNA, 14 nt, Human
ccagugucuuccug

SEQ ID NO: 2336136 - RNA, 15 nt, Human
ccagugucuuccugu

SEQ ID NO: 2336137 - RNA, 16 nt, Human
ccagugucuuccugug

SEQ ID NO: 2336138 - RNA, 17 nt, Human
ccagugucuuccugugg

SEQ ID NO: 2336139 - RNA, 23 nt, Human
ccagugacacuucagagagcugg

SEQ ID NO: 2336140 - RNA, 20 nt, Human
ccagugacacuucagagagc

SEQ ID NO: 2336141 - RNA, 19 nt, Human
ccagugacacuucagagag

SEQ ID NO: 2336142 - RNA, 16 nt, Human
ccagugacacuucaga

SEQ ID NO: 2336143 - RNA, 15 nt, Human
ccagugacagacagg

SEQ ID NO: 2336144 - RNA, 17 nt, Human
ccagugacagacaggcu

SEQ ID NO: 2336145 - RNA, 24 nt, Human
ccagugacacuucagagagcuggu

SEQ ID NO: 2336146 - RNA, 21 nt, Human
ccagugacagacaggcucuua

SEQ ID NO: 2336147 - RNA, 18 nt, Human
ccagugacagacaggcuc

SEQ ID NO: 2336148 - RNA, 19 nt, Human
ccagugacagacaggcucu

SEQ ID NO: 2336149 - RNA, 11 nt, Human
ccagugacacu

SEQ ID NO: 2336150 - RNA, 23 nt, Human
ccagugaauucuugaaggaaaau

SEQ ID NO: 2336151 - RNA, 12 nt, Human
ccagguuuuuca

SEQ ID NO: 2336152 - RNA, 23 nt, Human
ccaguaaaugggggugcauuuga

SEQ ID NO: 2336153 - RNA, 15 nt, Human
ccagugaccugagga

SEQ ID NO: 2336154 - RNA, 19 nt, Human
ccagugaccugaggaagcg

SEQ ID NO: 2336155 - RNA, 18 nt, Human
ccagugaccugcugggua

SEQ ID NO: 2336156 - RNA, 18 nt, Human
ccagugaccugaggaagc

SEQ ID NO: 2336157 - RNA, 17 nt, Human
ccagugaccugaggaag

SEQ ID NO: 2336158 - RNA, 20 nt, Human
ccagugaccugcuggguaaa

SEQ ID NO: 2336159 - RNA, 22 nt, Human
ccagugaccugcuggguaaacu

SEQ ID NO: 2336160 - RNA, 16 nt, Human
ccagugacuccaggag

SEQ ID NO: 2336161 - RNA, 13 nt, Human
ccagugagaugca

SEQ ID NO: 2336162 - RNA, 14 nt, Human
ccagugagaugcau

SEQ ID NO: 2336163 - RNA, 17 nt, Human
ccagugagaugcauucu

SEQ ID NO: 2336164 - RNA, 21 nt, Human
ccagugagaugcauucuuggu

SEQ ID NO: 2336165 - RNA, 16 nt, Human
ccagugagcacuccca

SEQ ID NO: 2336166 - RNA, 18 nt, Human
ccagugagcacucccaag

SEQ ID NO: 2336167 - RNA, 12 nt, Human
ccagugacucca

SEQ ID NO: 2336168 - RNA, 13 nt, Human
ccagugacuccag

SEQ ID NO: 2336169 - RNA, 15 nt, Human
ccagugacuccagga

SEQ ID NO: 2336170 - RNA, 17 nt, Human
ccagugacuuuuucuaa

SEQ ID NO: 2336171 - RNA, 14 nt, Human
ccaggugcaguggc

SEQ ID NO: 2336172 - RNA, 13 nt, Human
ccaggugccaguu

SEQ ID NO: 2336173 - RNA, 12 nt, Human
ccaggugccagu

SEQ ID NO: 2336174 - RNA, 22 nt, Human
ccaggugcaguggcucacgccu

SEQ ID NO: 2336175 - RNA, 17 nt, Human
ccagguaucuccaggau

SEQ ID NO: 2336176 - RNA, 21 nt, Human
ccaggugcuaggaacacuccu

SEQ ID NO: 2336177 - RNA, 16 nt, Human
ccagguggccacucca

SEQ ID NO: 2336178 - RNA, 21 nt, Human
ccagguggccacuccagaccc

SEQ ID NO: 2336179 - RNA, 14 nt, Human
ccagguagaacaca

SEQ ID NO: 2336180 - RNA, 16 nt, Human
ccagguaucuccagga

SEQ ID NO: 2336181 - RNA, 18 nt, Human
ccagguaucuccaggauu

SEQ ID NO: 2336182 - RNA, 15 nt, Human
ccagguaucuccagg

SEQ ID NO: 2336183 - RNA, 19 nt, Human
ccaggugcacagacguccc

SEQ ID NO: 2336184 - RNA, 13 nt, Human
ccaggugcacaga

SEQ ID NO: 2336185 - RNA, 16 nt, Human
ccaggugcacagacgu

SEQ ID NO: 2336186 - RNA, 13 nt, Human
ccagguuuaagcu

SEQ ID NO: 2336187 - RNA, 16 nt, Human
ccagguuucuaugugu

SEQ ID NO: 2336188 - RNA, 23 nt, Human
ccagguggcugacccagucccug

SEQ ID NO: 2336189 - RNA, 22 nt, Human
ccagguggcugacccagucccu

SEQ ID NO: 2336190 - RNA, 21 nt, Human
ccagguggcugacccaguccc

SEQ ID NO: 2336191 - RNA, 20 nt, Human
ccagguggcugacccagucc

SEQ ID NO: 2336192 - RNA, 19 nt, Human
ccagguggcugacccaguc

SEQ ID NO: 2336193 - RNA, 17 nt, Human
ccagguggcugacccag

SEQ ID NO: 2336194 - RNA, 16 nt, Human
ccagguggcugaccca

SEQ ID NO: 2336195 - RNA, 19 nt, Human
ccaggugggcgggcagcac

SEQ ID NO: 2336196 - RNA, 20 nt, Human
ccaggugggcgggcagcaca

SEQ ID NO: 2336197 - RNA, 22 nt, Human
ccaggugggcgggcagcacagc

SEQ ID NO: 2336198 - RNA, 23 nt, Human
ccaggugggcgggcagcacagca

SEQ ID NO: 2336199 - RNA, 22 nt, Human
ccaguaaaugggggugcauuug

SEQ ID NO: 2336200 - RNA, 21 nt, Human
ccaguaaaugggggugcauuu

SEQ ID NO: 2336201 - RNA, 20 nt, Human
ccagguuuucugggugucca

SEQ ID NO: 2336202 - RNA, 16 nt, Human
ccagguuuucugggug

SEQ ID NO: 2336203 - RNA, 19 nt, Human
ccagguuuucugggugucc

SEQ ID NO: 2336204 - RNA, 16 nt, Human
ccagguuuagacagua

SEQ ID NO: 2336205 - RNA, 17 nt, Human
ccagguuucuggucucu

SEQ ID NO: 2336206 - RNA, 22 nt, Human
ccagguuucuggucucuaggcu

SEQ ID NO: 2336207 - RNA, 20 nt, Human
ccaguaaaugggggugcauu

SEQ ID NO: 2336208 - RNA, 22 nt, Human
ccaucuaugucccuugcuguga

SEQ ID NO: 2336209 - RNA, 20 nt, Human
ccaucuaugucccuugcugu

SEQ ID NO: 2336210 - RNA, 12 nt, Human
ccauccuggccc

SEQ ID NO: 2336211 - RNA, 13 nt, Human
ccaucuaccuucc

SEQ ID NO: 2336212 - RNA, 14 nt, Human
ccaucuaccuucca

SEQ ID NO: 2336213 - RNA, 16 nt, Human
ccauccugcagccucc

SEQ ID NO: 2336214 - RNA, 18 nt, Human
ccauccugcagccuccuc

SEQ ID NO: 2336215 - RNA, 21 nt, Human
ccauccugcagccuccuccug

SEQ ID NO: 2336216 - RNA, 22 nt, Human
ccauccugcagccuccuccuga

SEQ ID NO: 2336217 - RNA, 13 nt, Human
ccauccuggccca

SEQ ID NO: 2336218 - RNA, 20 nt, Human
ccauccugaggcuccacuug

SEQ ID NO: 2336219 - RNA, 14 nt, Human
ccaucaugucccca

SEQ ID NO: 2336220 - RNA, 15 nt, Human
ccauccugcagccuc

SEQ ID NO: 2336221 - RNA, 14 nt, Human
ccaucauugaaauc

SEQ ID NO: 2336222 - RNA, 16 nt, Human
ccaucauugaaaucuu

SEQ ID NO: 2336223 - RNA, 17 nt, Human
ccaucauugaaaucuuu

SEQ ID NO: 2336224 - RNA, 18 nt, Human
ccauccugaggcuccacu

SEQ ID NO: 2336225 - RNA, 23 nt, Human
ccaucucucccuccccugccauu

SEQ ID NO: 2336226 - RNA, 17 nt, Human
ccaucucucccuccccu

SEQ ID NO: 2336227 - RNA, 15 nt, Human
ccaucucuccuccuu

SEQ ID NO: 2336228 - RNA, 20 nt, Human
ccaucucacacaugagcauc

SEQ ID NO: 2336229 - RNA, 21 nt, Human
ccaucucacacaugagcauca

SEQ ID NO: 2336230 - RNA, 14 nt, Human
ccaucucacacaug

SEQ ID NO: 2336231 - RNA, 15 nt, Human
ccaucucacacauga

SEQ ID NO: 2336232 - RNA, 17 nt, Human
ccaucucacacaugagc

SEQ ID NO: 2336233 - RNA, 18 nt, Human
ccaucucacacaugagca

SEQ ID NO: 2336234 - RNA, 12 nt, Human
ccaucaugucug

SEQ ID NO: 2336235 - RNA, 13 nt, Human
ccaucauccuacu

SEQ ID NO: 2336236 - RNA, 13 nt, Human
ccaucaucuccug

SEQ ID NO: 2336237 - RNA, 13 nt, Human
ccaucaugucugg

SEQ ID NO: 2336238 - RNA, 12 nt, Human
ccaucauugaaa

SEQ ID NO: 2336239 - RNA, 16 nt, Human
ccaucaagccaccaac

SEQ ID NO: 2336240 - RNA, 15 nt, Human
ccaucaucccagcug

SEQ ID NO: 2336241 - RNA, 16 nt, Human
ccaucaucccagcugc

SEQ ID NO: 2336242 - RNA, 13 nt, Human
ccaucaagccacc

SEQ ID NO: 2336243 - RNA, 14 nt, Human
ccaucaagccacca

SEQ ID NO: 2336244 - RNA, 22 nt, Human
ccauauggauuuucuauuguua

SEQ ID NO: 2336245 - RNA, 15 nt, Human
ccauaugccugggca

SEQ ID NO: 2336246 - RNA, 14 nt, Human
ccauauguuacacu

SEQ ID NO: 2336247 - RNA, 12 nt, Human
ccauaugugcuu

SEQ ID NO: 2336248 - RNA, 12 nt, Human
ccaucaagccac

SEQ ID NO: 2336249 - RNA, 22 nt, Human
ccagugugggaaugcggcaaga

SEQ ID NO: 2336250 - RNA, 12 nt, Human
ccaguguggaac

SEQ ID NO: 2336251 - RNA, 22 nt, Human
ccagugugaucccaagugccag

SEQ ID NO: 2336252 - RNA, 15 nt, Human
ccagugugaucccaa

SEQ ID NO: 2336253 - RNA, 13 nt, Human
ccauaugccuggg

SEQ ID NO: 2336254 - RNA, 14 nt, Human
ccagugugacaagg

SEQ ID NO: 2336255 - RNA, 23 nt, Human
ccagugugacaaggauugcuacu

SEQ ID NO: 2336256 - RNA, 22 nt, Human
ccagggagcuugaaaguuuuca

SEQ ID NO: 2336257 - RNA, 23 nt, Human
ccagggagcggaaagcagcucaa

SEQ ID NO: 2336258 - RNA, 20 nt, Human
ccagggagcggaaagcagcu

SEQ ID NO: 2336259 - RNA, 19 nt, Human
ccagggagcggaaagcagc

SEQ ID NO: 2336260 - RNA, 18 nt, Human
ccagggagcggaaagcag

SEQ ID NO: 2336261 - RNA, 13 nt, Human
ccagggagucccc

SEQ ID NO: 2336262 - RNA, 23 nt, Human
ccagggaugccaucugugggcac

SEQ ID NO: 2336263 - RNA, 16 nt, Human
ccagggaguccccucc

SEQ ID NO: 2336264 - RNA, 17 nt, Human
ccagggaguccccuccc

SEQ ID NO: 2336265 - RNA, 22 nt, Human
ccagggagccuuugguucuggc

SEQ ID NO: 2336266 - RNA, 18 nt, Human
ccaggcugggcaaggagg

SEQ ID NO: 2336267 - RNA, 20 nt, Human
ccaggcugggcaaggaggcc

SEQ ID NO: 2336268 - RNA, 16 nt, Human
ccaggcuucacccuga

SEQ ID NO: 2336269 - RNA, 18 nt, Human
ccaggcuucacccugaau

SEQ ID NO: 2336270 - RNA, 17 nt, Human
ccagggcccaggcaaau

SEQ ID NO: 2336271 - RNA, 18 nt, Human
ccagggcccugagcucgg

SEQ ID NO: 2336272 - RNA, 15 nt, Human
ccagggcccugagcu

SEQ ID NO: 2336273 - RNA, 17 nt, Human
ccagggcccccaucuca

SEQ ID NO: 2336274 - RNA, 21 nt, Human
ccagggccccucacccugccu

SEQ ID NO: 2336275 - RNA, 22 nt, Human
ccagggccccucacccugccuu

SEQ ID NO: 2336276 - RNA, 18 nt, Human
ccagggccugagccaagc

SEQ ID NO: 2336277 - RNA, 23 nt, Human
ccagggucuucccuaccucaggc

SEQ ID NO: 2336278 - RNA, 14 nt, Human
ccagggugagagcu

SEQ ID NO: 2336279 - RNA, 14 nt, Human
ccagggucuucccu

SEQ ID NO: 2336280 - RNA, 15 nt, Human
ccagggcccugcaga

SEQ ID NO: 2336281 - RNA, 14 nt, Human
ccagggcccugcag

SEQ ID NO: 2336282 - RNA, 16 nt, Human
ccagggccugagccug

SEQ ID NO: 2336283 - RNA, 14 nt, Human
ccagggccugagcc

SEQ ID NO: 2336284 - RNA, 23 nt, Human
ccagggccugcaggaccugccug

SEQ ID NO: 2336285 - RNA, 19 nt, Human
ccagggccugagccuggcc

SEQ ID NO: 2336286 - RNA, 18 nt, Human
ccagggccugagccuggc

SEQ ID NO: 2336287 - RNA, 17 nt, Human
ccagggccugagccugg

SEQ ID NO: 2336288 - RNA, 14 nt, Human
ccagggugugugcu

SEQ ID NO: 2336289 - RNA, 22 nt, Human
ccaggguggacuuagaaagcag

SEQ ID NO: 2336290 - RNA, 19 nt, Human
ccaggguguggcccugcca

SEQ ID NO: 2336291 - RNA, 21 nt, Human
ccaggguguggcccugccauc

SEQ ID NO: 2336292 - RNA, 20 nt, Human
ccagguagaggguguguaag

SEQ ID NO: 2336293 - RNA, 15 nt, Human
ccagggugagagcug

SEQ ID NO: 2336294 - RNA, 16 nt, Human
ccagggugagagcugc

SEQ ID NO: 2336295 - RNA, 17 nt, Human
ccagggugagagcugcu

SEQ ID NO: 2336296 - RNA, 22 nt, Human
ccagggugagagcugcucugga

SEQ ID NO: 2336297 - RNA, 23 nt, Human
ccagggugagagcugcucuggaa

SEQ ID NO: 2336298 - RNA, 20 nt, Human
ccaggguggacuuagaaagc

SEQ ID NO: 2336299 - RNA, 21 nt, Human
ccaggguggacuuagaaagca

SEQ ID NO: 2336300 - RNA, 14 nt, Human
ccaggcuggucuca

SEQ ID NO: 2336301 - RNA, 21 nt, Human
ccaggcuuagucacugagaca

SEQ ID NO: 2336302 - RNA, 22 nt, Human
ccaggcuuagucacugagacag

SEQ ID NO: 2336303 - RNA, 23 nt, Human
ccaggcuuagucacugagacagc

SEQ ID NO: 2336304 - RNA, 21 nt, Human
ccaggcugggucgcccuggac

SEQ ID NO: 2336305 - RNA, 22 nt, Human
ccaggcugggucgcccuggacu

SEQ ID NO: 2336306 - RNA, 23 nt, Human
ccaggcugggucgcccuggacug

SEQ ID NO: 2336307 - RNA, 24 nt, Human
ccaggcugggucgcccuggacugu

SEQ ID NO: 2336308 - RNA, 12 nt, Human
ccaggcuggguc

SEQ ID NO: 2336309 - RNA, 16 nt, Human
ccaggcugggucgccc

SEQ ID NO: 2336310 - RNA, 15 nt, Human
ccaggcccucugccc

SEQ ID NO: 2336311 - RNA, 23 nt, Human
ccaggcugggagagccuuccagg

SEQ ID NO: 2336312 - RNA, 21 nt, Human
ccagcucuagacaacccugca

SEQ ID NO: 2336313 - RNA, 19 nt, Human
ccagcucuagacaacccug

SEQ ID NO: 2336314 - RNA, 21 nt, Human
ccaggccacaagacccuugug

SEQ ID NO: 2336315 - RNA, 20 nt, Human
ccaggaggccagccuugacc

SEQ ID NO: 2336316 - RNA, 16 nt, Human
ccaggccacuggcccc

SEQ ID NO: 2336317 - RNA, 16 nt, Human
ccaggccaccucccca

SEQ ID NO: 2336318 - RNA, 17 nt, Human
ccaggccaccuccccag

SEQ ID NO: 2336319 - RNA, 19 nt, Human
ccaggccacauggggcugg

SEQ ID NO: 2336320 - RNA, 12 nt, Human
ccaggccaccag

SEQ ID NO: 2336321 - RNA, 13 nt, Human
ccaggccaccucc

SEQ ID NO: 2336322 - RNA, 14 nt, Human
ccaggccaccagga

SEQ ID NO: 2336323 - RNA, 15 nt, Human
ccaggccaccaggau

SEQ ID NO: 2336324 - RNA, 22 nt, Human
ccagcucuagacaacccugcaa

SEQ ID NO: 2336325 - RNA, 18 nt, Human
ccagcucuagacaacccu

SEQ ID NO: 2336326 - RNA, 17 nt, Human
ccagcucuagacaaccc

SEQ ID NO: 2336327 - RNA, 20 nt, Human
ccagcuccuccgugcuuccu

SEQ ID NO: 2336328 - RNA, 14 nt, Human
ccagcuccuucgcu

SEQ ID NO: 2336329 - RNA, 15 nt, Human
ccaggaggccagccu

SEQ ID NO: 2336330 - RNA, 18 nt, Human
ccaggaggccagccuuga

SEQ ID NO: 2336331 - RNA, 12 nt, Human
ccaggccagagg

SEQ ID NO: 2336332 - RNA, 14 nt, Human
ccaggccccugcca

SEQ ID NO: 2336333 - RNA, 15 nt, Human
ccaggccccugccac

SEQ ID NO: 2336334 - RNA, 16 nt, Human
ccaggccccugccacc

SEQ ID NO: 2336335 - RNA, 13 nt, Human
ccaggcccucugc

SEQ ID NO: 2336336 - RNA, 14 nt, Human
ccaggcccucugcc

SEQ ID NO: 2336337 - RNA, 23 nt, Human
ccaggccacuggccccugagauc

SEQ ID NO: 2336338 - RNA, 21 nt, Human
ccaggccaccuccccagcauu

SEQ ID NO: 2336339 - RNA, 16 nt, Human
ccaggccaccuccaga

SEQ ID NO: 2336340 - RNA, 21 nt, Human
ccaggcccggggcuggcggcu

SEQ ID NO: 2336341 - RNA, 12 nt, Human
cuggucugaggg

SEQ ID NO: 2336342 - RNA, 12 nt, Human
cuggucucuggu

SEQ ID NO: 2336343 - RNA, 20 nt, Human
cuggucucuaggcuggggaa

SEQ ID NO: 2336344 - RNA, 18 nt, Human
cuggucuuauuuguaaag

SEQ ID NO: 2336345 - RNA, 14 nt, Human
cuggucucuaggcu

SEQ ID NO: 2336346 - RNA, 16 nt, Human
cuggucucuaggcugg

SEQ ID NO: 2336347 - RNA, 14 nt, Human
cuggucucuccuug

SEQ ID NO: 2336348 - RNA, 17 nt, Human
cuggucucuaggcuggg

SEQ ID NO: 2336349 - RNA, 18 nt, Human
cuggucucuaggcugggg

SEQ ID NO: 2336350 - RNA, 21 nt, Human
cuggucucgaacuccugaccu

SEQ ID NO: 2336351 - RNA, 23 nt, Human
cuggugaccuuccaagagccuga

SEQ ID NO: 2336352 - RNA, 22 nt, Human
cuggugaccuuccaagagccug

SEQ ID NO: 2336353 - RNA, 16 nt, Human
cuggucuucuuugggu

SEQ ID NO: 2336354 - RNA, 22 nt, Human
cuggucuguagaagagggauaa

SEQ ID NO: 2336355 - RNA, 16 nt, Human
cuggucugggugcccc

SEQ ID NO: 2336356 - RNA, 23 nt, Human
cuggugaccccuuuucagcuucu

SEQ ID NO: 2336357 - RNA, 14 nt, Human
cuggucuguaggga

SEQ ID NO: 2336358 - RNA, 23 nt, Human
cuguaaaugguguacauaaugua

SEQ ID NO: 2336359 - RNA, 17 nt, Human
cuguaacacaagccaca

SEQ ID NO: 2336360 - RNA, 18 nt, Human
cuguaacacaagccacag

SEQ ID NO: 2336361 - RNA, 19 nt, Human
cuguaacacaagccacaga

SEQ ID NO: 2336362 - RNA, 20 nt, Human
cuguaacacaagccacagaa

SEQ ID NO: 2336363 - RNA, 18 nt, Human
cuguaaaugguguacaua

SEQ ID NO: 2336364 - RNA, 21 nt, Human
cuguaaaugguguacauaaug

SEQ ID NO: 2336365 - RNA, 17 nt, Human
cuguaaaugguguacau

SEQ ID NO: 2336366 - RNA, 15 nt, Human
cuguaaaaacugugg

SEQ ID NO: 2336367 - RNA, 21 nt, Human
cuguaaaaagagagaaaacuu

SEQ ID NO: 2336368 - RNA, 19 nt, Human
cuguaaaaaaaaaaaaguu

SEQ ID NO: 2336369 - RNA, 22 nt, Human
cuguaagaagagacugggaaga

SEQ ID NO: 2336370 - RNA, 20 nt, Human
cuguaagaagagacugggaa

SEQ ID NO: 2336371 - RNA, 17 nt, Human
cuguaagaagagacugg

SEQ ID NO: 2336372 - RNA, 23 nt, Human
cuguaagaagagacugggaagau

SEQ ID NO: 2336373 - RNA, 21 nt, Human
cuguaagacucauucccuaga

SEQ ID NO: 2336374 - RNA, 20 nt, Human
cuguaagaaaauaucacuug

SEQ ID NO: 2336375 - RNA, 21 nt, Human
cuguaacacaagccacagaag

SEQ ID NO: 2336376 - RNA, 22 nt, Human
cuguaacacaagccacagaagc

SEQ ID NO: 2336377 - RNA, 15 nt, Human
cuguaacacagcuga

SEQ ID NO: 2336378 - RNA, 21 nt, Human
cuguaacacagcugagagacu

SEQ ID NO: 2336379 - RNA, 15 nt, Human
cuguagagugggagc

SEQ ID NO: 2336380 - RNA, 20 nt, Human
cuguagcagugagaaaaagc

SEQ ID NO: 2336381 - RNA, 21 nt, Human
cuguagcagugagaaaaagcu

SEQ ID NO: 2336382 - RNA, 12 nt, Human
cuguagcaucuu

SEQ ID NO: 2336383 - RNA, 16 nt, Human
cuguagcacuuacugg

SEQ ID NO: 2336384 - RNA, 15 nt, Human
cuguagauucugugg

SEQ ID NO: 2336385 - RNA, 20 nt, Human
cuguagauucuguggaacaa

SEQ ID NO: 2336386 - RNA, 13 nt, Human
cuguagauucugu

SEQ ID NO: 2336387 - RNA, 17 nt, Human
cuguacuugaugacaga

SEQ ID NO: 2336388 - RNA, 22 nt, Human
cuguacuucacugucaggaaga

SEQ ID NO: 2336389 - RNA, 20 nt, Human
cuguacuucaaguuaaagug

SEQ ID NO: 2336390 - RNA, 14 nt, Human
cuguacuucacugu

SEQ ID NO: 2336391 - RNA, 17 nt, Human
cuguacuucacugucag

SEQ ID NO: 2336392 - RNA, 16 nt, Human
cuguacuugcucuuga

SEQ ID NO: 2336393 - RNA, 19 nt, Human
cuguacuugcucuugaugc

SEQ ID NO: 2336394 - RNA, 20 nt, Human
cuguacuugcucuugaugcc

SEQ ID NO: 2336395 - RNA, 14 nt, Human
cugguuuuucaguu

SEQ ID NO: 2336396 - RNA, 15 nt, Human
cugguuuuucaguuu

SEQ ID NO: 2336397 - RNA, 16 nt, Human
cugguuuuucaguuuu

SEQ ID NO: 2336398 - RNA, 21 nt, Human
cugguuuuguaagaugcuggg

SEQ ID NO: 2336399 - RNA, 22 nt, Human
cugguuuuguaagaugcugggu

SEQ ID NO: 2336400 - RNA, 20 nt, Human
cugguuuuuaaccauugucu

SEQ ID NO: 2336401 - RNA, 15 nt, Human
cugguuuuuguagcc

SEQ ID NO: 2336402 - RNA, 18 nt, Human
cugguuuuccuaaaugca

SEQ ID NO: 2336403 - RNA, 13 nt, Human
cugguuuuaacaa

SEQ ID NO: 2336404 - RNA, 20 nt, Human
cugguuuucuggaugguucc

SEQ ID NO: 2336405 - RNA, 13 nt, Human
cugguuuugcuau

SEQ ID NO: 2336406 - RNA, 14 nt, Human
cugguuuugcuauu

SEQ ID NO: 2336407 - RNA, 13 nt, Human
cugguuuuguaag

SEQ ID NO: 2336408 - RNA, 15 nt, Human
cugguuuuguaagau

SEQ ID NO: 2336409 - RNA, 19 nt, Human
cugguuuuguaagaugcug

SEQ ID NO: 2336410 - RNA, 20 nt, Human
cugguuuuguaagaugcugg

SEQ ID NO: 2336411 - RNA, 13 nt, Human
cugucuaaaaaac

SEQ ID NO: 2336412 - RNA, 15 nt, Human
cugucuaaccuguga

SEQ ID NO: 2336413 - RNA, 22 nt, Human
cugucuaaugaaaccugugucu

SEQ ID NO: 2336414 - RNA, 16 nt, Human
cugucuaaccugugac

SEQ ID NO: 2336415 - RNA, 17 nt, Human
cugucuaaccugugacc

SEQ ID NO: 2336416 - RNA, 13 nt, Human
cugucuaacugcu

SEQ ID NO: 2336417 - RNA, 15 nt, Human
cuguccuucucucac

SEQ ID NO: 2336418 - RNA, 14 nt, Human
cuguccuucagaug

SEQ ID NO: 2336419 - RNA, 16 nt, Human
cuguccuucagaugga

SEQ ID NO: 2336420 - RNA, 19 nt, Human
cuguccuuacccaucugca

SEQ ID NO: 2336421 - RNA, 17 nt, Human
cuguccuuacccaucug

SEQ ID NO: 2336422 - RNA, 12 nt, Human
cuguccuuaccc

SEQ ID NO: 2336423 - RNA, 18 nt, Human
cuguccuguguagugauu

SEQ ID NO: 2336424 - RNA, 20 nt, Human
cuguccuucucucaccuccu

SEQ ID NO: 2336425 - RNA, 23 nt, Human
cuguccuucucucaccuccuaaa

SEQ ID NO: 2336426 - RNA, 16 nt, Human
cuguccuugcacacuc

SEQ ID NO: 2336427 - RNA, 17 nt, Human
cuguccuucagauggaa

SEQ ID NO: 2336428 - RNA, 15 nt, Human
cugucagugcagccc

SEQ ID NO: 2336429 - RNA, 18 nt, Human
cugucagucacagccacc

SEQ ID NO: 2336430 - RNA, 19 nt, Human
cugucagugcagcccgugu

SEQ ID NO: 2336431 - RNA, 18 nt, Human
cugucagugcagcccgug

SEQ ID NO: 2336432 - RNA, 14 nt, Human
cugucaucugugca

SEQ ID NO: 2336433 - RNA, 15 nt, Human
cugucaucugugcac

SEQ ID NO: 2336434 - RNA, 14 nt, Human
cugucagugccgcc

SEQ ID NO: 2336435 - RNA, 15 nt, Human
cugucaugaacaugu

SEQ ID NO: 2336436 - RNA, 21 nt, Human
cugucaucugugcacugccca

SEQ ID NO: 2336437 - RNA, 14 nt, Human
cugucauuugagca

SEQ ID NO: 2336438 - RNA, 18 nt, Human
cugucaugccccccucaa

SEQ ID NO: 2336439 - RNA, 16 nt, Human
cugucauucagaaaaa

SEQ ID NO: 2336440 - RNA, 19 nt, Human
cugucaugaacauguuccu

SEQ ID NO: 2336441 - RNA, 20 nt, Human
cugucaugaacauguuccug

SEQ ID NO: 2336442 - RNA, 13 nt, Human
cugucaugccccc

SEQ ID NO: 2336443 - RNA, 17 nt, Human
cugucaugccccccuca

SEQ ID NO: 2336444 - RNA, 13 nt, Human
cuguccugggagu

SEQ ID NO: 2336445 - RNA, 14 nt, Human
cuguccugggagug

SEQ ID NO: 2336446 - RNA, 20 nt, Human
cuguccugggagugagcugg

SEQ ID NO: 2336447 - RNA, 23 nt, Human
cugucauucccaccacccugagg

SEQ ID NO: 2336448 - RNA, 17 nt, Human
cuguagcauuacagugg

SEQ ID NO: 2336449 - RNA, 19 nt, Human
cuguagcaucuucuggagu

SEQ ID NO: 2336450 - RNA, 20 nt, Human
cuguagcaucuucuggaguc

SEQ ID NO: 2336451 - RNA, 15 nt, Human
cuguagcaucuucug

SEQ ID NO: 2336452 - RNA, 16 nt, Human
cuguagcaucuucugg

SEQ ID NO: 2336453 - RNA, 17 nt, Human
cuguagcaucuucugga

SEQ ID NO: 2336454 - RNA, 18 nt, Human
cuguagcaucuucuggag

SEQ ID NO: 2336455 - RNA, 18 nt, Human
cuguagcauuacaguggg

SEQ ID NO: 2336456 - RNA, 16 nt, Human
cuguagcccacucugc

SEQ ID NO: 2336457 - RNA, 21 nt, Human
cuguagcccacucugcucgcc

SEQ ID NO: 2336458 - RNA, 20 nt, Human
cuguagcccacucugcucgc

SEQ ID NO: 2336459 - RNA, 13 nt, Human
cuguagccuucug

SEQ ID NO: 2336460 - RNA, 18 nt, Human
cuguagcuuguucccugu

SEQ ID NO: 2336461 - RNA, 16 nt, Human
cugucaguaugacauu

SEQ ID NO: 2336462 - RNA, 17 nt, Human
cugucagucacagccac

SEQ ID NO: 2336463 - RNA, 15 nt, Human
cugucagucacagcc

SEQ ID NO: 2336464 - RNA, 14 nt, Human
cugucagucacagc

SEQ ID NO: 2336465 - RNA, 13 nt, Human
cugucagucacag

SEQ ID NO: 2336466 - RNA, 18 nt, Human
cuguaggaagguuaaugu

SEQ ID NO: 2336467 - RNA, 13 nt, Human
cugucaggaagaa

SEQ ID NO: 2336468 - RNA, 14 nt, Human
cugucaggaagaaa

SEQ ID NO: 2336469 - RNA, 17 nt, Human
cugucaggaagaaauca

SEQ ID NO: 2336470 - RNA, 18 nt, Human
cugucaggaagaaaucac

SEQ ID NO: 2336471 - RNA, 16 nt, Human
cugucaggagagcagc

SEQ ID NO: 2336472 - RNA, 14 nt, Human
cuuaaacaaaugua

SEQ ID NO: 2336473 - RNA, 14 nt, Human
cuuaaacagggcau

SEQ ID NO: 2336474 - RNA, 22 nt, Human
cuuaaacagggcaucuccagga

SEQ ID NO: 2336475 - RNA, 13 nt, Human
cuuaaaauagaaa

SEQ ID NO: 2336476 - RNA, 22 nt, Human
cuuaaaauagcaacacucuaua

SEQ ID NO: 2336477 - RNA, 18 nt, Human
cuuaaaauagaaauaagu

SEQ ID NO: 2336478 - RNA, 23 nt, Human
cuuaaacuguguggacugugaug

SEQ ID NO: 2336479 - RNA, 15 nt, Human
cuuaaacugugugga

SEQ ID NO: 2336480 - RNA, 14 nt, Human
cuuaaacugugugg

SEQ ID NO: 2336481 - RNA, 18 nt, Human
cuuaaagaaaacccaccc

SEQ ID NO: 2336482 - RNA, 12 nt, Human
cuuaaagaaagu

SEQ ID NO: 2336483 - RNA, 21 nt, Human
cuuaaagaaagucgaauuaau

SEQ ID NO: 2336484 - RNA, 14 nt, Human
cuuaaaccugggag

SEQ ID NO: 2336485 - RNA, 15 nt, Human
cuuaaaccuucaguu

SEQ ID NO: 2336486 - RNA, 23 nt, Human
cuuaaaccuucaguuaugauuuu

SEQ ID NO: 2336487 - RNA, 19 nt, Human
cuuaaauaaugugaaacug

SEQ ID NO: 2336488 - RNA, 16 nt, Human
cuuaaauaaugugaaa

SEQ ID NO: 2336489 - RNA, 14 nt, Human
cuuaaauaauguga

SEQ ID NO: 2336490 - RNA, 13 nt, Human
cuuaaauaaugug

SEQ ID NO: 2336491 - RNA, 17 nt, Human
cuguuguuauggaaacu

SEQ ID NO: 2336492 - RNA, 13 nt, Human
cuguuguuguuaa

SEQ ID NO: 2336493 - RNA, 12 nt, Human
cuuaaaaauggu

SEQ ID NO: 2336494 - RNA, 20 nt, Human
cuuaaaaaugguuuaaaugg

SEQ ID NO: 2336495 - RNA, 13 nt, Human
cuuaaaaaugguu

SEQ ID NO: 2336496 - RNA, 15 nt, Human
cuuaaaaccaaagag

SEQ ID NO: 2336497 - RNA, 21 nt, Human
cuuaaaaccaaagagggcuuc

SEQ ID NO: 2336498 - RNA, 23 nt, Human
cuguuguuguuaaugaaaauguc

SEQ ID NO: 2336499 - RNA, 14 nt, Human
cuuaaaaccaaaga

SEQ ID NO: 2336500 - RNA, 22 nt, Human
cuguuguuguuaaugaaaaugu

SEQ ID NO: 2336501 - RNA, 17 nt, Human
cuguuguuguuaaugaa

SEQ ID NO: 2336502 - RNA, 13 nt, Human
cuuaaaauaacuu

SEQ ID NO: 2336503 - RNA, 19 nt, Human
cuuaaaauaacuuauauca

SEQ ID NO: 2336504 - RNA, 18 nt, Human
cuguugcccaggcuggcg

SEQ ID NO: 2336505 - RNA, 14 nt, Human
cuguugccucaucu

SEQ ID NO: 2336506 - RNA, 12 nt, Human
cuguugccucau

SEQ ID NO: 2336507 - RNA, 12 nt, Human
cuguugcuaagc

SEQ ID NO: 2336508 - RNA, 23 nt, Human
cuguugcguaacuggcuguguuc

SEQ ID NO: 2336509 - RNA, 21 nt, Human
cuguugcuaagccccagcaag

SEQ ID NO: 2336510 - RNA, 22 nt, Human
cuguugcuaagccccagcaagc

SEQ ID NO: 2336511 - RNA, 23 nt, Human
cuguugcuaagccccagcaagca

SEQ ID NO: 2336512 - RNA, 18 nt, Human
cuguugcguaacuggcug

SEQ ID NO: 2336513 - RNA, 11 nt, Human
cuguugcucaa

SEQ ID NO: 2336514 - RNA, 12 nt, Human
cuguuggccagu

SEQ ID NO: 2336515 - RNA, 15 nt, Human
cuguuggcaggcugg

SEQ ID NO: 2336516 - RNA, 16 nt, Human
cuguuggcaggcuggc

SEQ ID NO: 2336517 - RNA, 18 nt, Human
cuguuggcaggcuggcca

SEQ ID NO: 2336518 - RNA, 19 nt, Human
cuguuggcaggcuggccag

SEQ ID NO: 2336519 - RNA, 21 nt, Human
cuguuggcacucacagaccug

SEQ ID NO: 2336520 - RNA, 22 nt, Human
cuguuggcacucacagaccugg

SEQ ID NO: 2336521 - RNA, 23 nt, Human
cuguuggcacucacagaccugga

SEQ ID NO: 2336522 - RNA, 16 nt, Human
cuguugcugaauaggc

SEQ ID NO: 2336523 - RNA, 15 nt, Human
cuguugcugaauagg

SEQ ID NO: 2336524 - RNA, 21 nt, Human
cuguugcucaaaucuauucag

SEQ ID NO: 2336525 - RNA, 22 nt, Human
cuguugcucaaaucuauucaga

SEQ ID NO: 2336526 - RNA, 17 nt, Human
cuguugucccucugcua

SEQ ID NO: 2336527 - RNA, 17 nt, Human
cuguugucauugcuguu

SEQ ID NO: 2336528 - RNA, 16 nt, Human
cuguuguccuauggga

SEQ ID NO: 2336529 - RNA, 14 nt, Human
cuguuggcagugag

SEQ ID NO: 2336530 - RNA, 21 nt, Human
cuguuggcagugagugagccu

SEQ ID NO: 2336531 - RNA, 22 nt, Human
cuguuggcagugagugagccug

SEQ ID NO: 2336532 - RNA, 15 nt, Human
cuguugucauugcug

SEQ ID NO: 2336533 - RNA, 15 nt, Human
cuguuggccagugug

SEQ ID NO: 2336534 - RNA, 22 nt, Human
cuguuguguacguggagaggga

SEQ ID NO: 2336535 - RNA, 20 nt, Human
cuguugugaccugaaguuca

SEQ ID NO: 2336536 - RNA, 21 nt, Human
cuguuguguauagaugcaaga

SEQ ID NO: 2336537 - RNA, 19 nt, Human
cuguugugaccugaaguuc

SEQ ID NO: 2336538 - RNA, 20 nt, Human
cuguuguccuccccuugggc

SEQ ID NO: 2336539 - RNA, 14 nt, Human
cuguuguccucccc

SEQ ID NO: 2336540 - RNA, 15 nt, Human
cuguuguccuccccu

SEQ ID NO: 2336541 - RNA, 13 nt, Human
cuguuauccaugg

SEQ ID NO: 2336542 - RNA, 14 nt, Human
cuguuaugcuguga

SEQ ID NO: 2336543 - RNA, 18 nt, Human
cuguucacccacagggcu

SEQ ID NO: 2336544 - RNA, 14 nt, Human
cuguucacccacag

SEQ ID NO: 2336545 - RNA, 12 nt, Human
cuguucacccac

SEQ ID NO: 2336546 - RNA, 22 nt, Human
cuguucacagccagacuggcac

SEQ ID NO: 2336547 - RNA, 15 nt, Human
cuguucagcuccagc

SEQ ID NO: 2336548 - RNA, 13 nt, Human
cuguucacucuac

SEQ ID NO: 2336549 - RNA, 19 nt, Human
cuguuaucccugccugguc

SEQ ID NO: 2336550 - RNA, 19 nt, Human
cuguuaucaaaacuuucuu

SEQ ID NO: 2336551 - RNA, 22 nt, Human
cuguuauauaaaugguuaaaag

SEQ ID NO: 2336552 - RNA, 19 nt, Human
cuguucacagccagacugg

SEQ ID NO: 2336553 - RNA, 19 nt, Human
cuguuaugcugugacacau

SEQ ID NO: 2336554 - RNA, 12 nt, Human
cuguucagcugg

SEQ ID NO: 2336555 - RNA, 16 nt, Human
cuguucagcuccagcu

SEQ ID NO: 2336556 - RNA, 18 nt, Human
cuguucagcuccagcuca

SEQ ID NO: 2336557 - RNA, 19 nt, Human
cuguucagcuccagcucac

SEQ ID NO: 2336558 - RNA, 22 nt, Human
cuguucagcuccagcucaccag

SEQ ID NO: 2336559 - RNA, 13 nt, Human
cuguuagcagaca

SEQ ID NO: 2336560 - RNA, 19 nt, Human
cugugucccaugacccacc

SEQ ID NO: 2336561 - RNA, 15 nt, Human
cuguuacuuaccuaa

SEQ ID NO: 2336562 - RNA, 19 nt, Human
cuguuacuuaccuaaacag

SEQ ID NO: 2336563 - RNA, 18 nt, Human
cuguuacuugaaauacca

SEQ ID NO: 2336564 - RNA, 21 nt, Human
cuguuacuugaaauaccagug

SEQ ID NO: 2336565 - RNA, 16 nt, Human
cuguuagcuguuauuu

SEQ ID NO: 2336566 - RNA, 15 nt, Human
cuguuagcuguuauu

SEQ ID NO: 2336567 - RNA, 17 nt, Human
cuguuagccauguggcu

SEQ ID NO: 2336568 - RNA, 15 nt, Human
cuguuagcagacagg

SEQ ID NO: 2336569 - RNA, 13 nt, Human
cuguuauauaaau

SEQ ID NO: 2336570 - RNA, 15 nt, Human
cuguuauauaaaugg

SEQ ID NO: 2336571 - RNA, 14 nt, Human
cuguuauauaaaug

SEQ ID NO: 2336572 - RNA, 17 nt, Human
cuguuacugucuucagu

SEQ ID NO: 2336573 - RNA, 22 nt, Human
cuguguccaugcgcucagggcc

SEQ ID NO: 2336574 - RNA, 23 nt, Human
cuguguccaugcgcucagggcca

SEQ ID NO: 2336575 - RNA, 13 nt, Human
cugugucccauga

SEQ ID NO: 2336576 - RNA, 15 nt, Human
cugugucccaugacc

SEQ ID NO: 2336577 - RNA, 17 nt, Human
cugugucccaugaccca

SEQ ID NO: 2336578 - RNA, 13 nt, Human
cuguguccaugcg

SEQ ID NO: 2336579 - RNA, 18 nt, Human
cuguguccaugcgcucag

SEQ ID NO: 2336580 - RNA, 19 nt, Human
cuguguccaugcgcucagg

SEQ ID NO: 2336581 - RNA, 21 nt, Human
cuguguccaugcgcucagggc

SEQ ID NO: 2336582 - RNA, 22 nt, Human
cugugucagguggggcagcuug

SEQ ID NO: 2336583 - RNA, 16 nt, Human
cuguguauuugcuuuu

SEQ ID NO: 2336584 - RNA, 14 nt, Human
cuguguauuugcuu

SEQ ID NO: 2336585 - RNA, 15 nt, Human
cuguguauuugcuuu

SEQ ID NO: 2336586 - RNA, 16 nt, Human
cuguguauucauugaa

SEQ ID NO: 2336587 - RNA, 15 nt, Human
cuguguauuccaaga

SEQ ID NO: 2336588 - RNA, 19 nt, Human
cuguguauuccaagacaug

SEQ ID NO: 2336589 - RNA, 21 nt, Human
cugugagauuuugcuuuucca

SEQ ID NO: 2336590 - RNA, 19 nt, Human
cugugagcaucacaguuuu

SEQ ID NO: 2336591 - RNA, 14 nt, Human
cugugagcccagcu

SEQ ID NO: 2336592 - RNA, 18 nt, Human
cugugcucuggacaggca

SEQ ID NO: 2336593 - RNA, 19 nt, Human
cugugcucuggacaggcau

SEQ ID NO: 2336594 - RNA, 19 nt, Human
cugugaauuuguguaagga

SEQ ID NO: 2336595 - RNA, 15 nt, Human
cugugacaggcagca

SEQ ID NO: 2336596 - RNA, 18 nt, Human
cugugacaggcagcagag

SEQ ID NO: 2336597 - RNA, 22 nt, Human
cugugaacgauuuagaaagaag

SEQ ID NO: 2336598 - RNA, 18 nt, Human
cugugaaucaccuagggg

SEQ ID NO: 2336599 - RNA, 15 nt, Human
cugugaaugccacug

SEQ ID NO: 2336600 - RNA, 16 nt, Human
cugugaaugccacugc

SEQ ID NO: 2336601 - RNA, 15 nt, Human
cugugaauucagauu

SEQ ID NO: 2336602 - RNA, 14 nt, Human
cugugaauucagau

SEQ ID NO: 2336603 - RNA, 20 nt, Human
cugugaaugccacugccuuc

SEQ ID NO: 2336604 - RNA, 21 nt, Human
cugugaaugccacugccuucg

SEQ ID NO: 2336605 - RNA, 15 nt, Human
cugugagcaagaagu

SEQ ID NO: 2336606 - RNA, 16 nt, Human
cugugagcaucacagu

SEQ ID NO: 2336607 - RNA, 16 nt, Human
cugugacaggcagcag

SEQ ID NO: 2336608 - RNA, 17 nt, Human
cugugacaggcagcaga

SEQ ID NO: 2336609 - RNA, 13 nt, Human
cugugagauuuug

SEQ ID NO: 2336610 - RNA, 23 nt, Human
cugugagaugcuagaacucccuu

SEQ ID NO: 2336611 - RNA, 17 nt, Human
cugugcucuggacaggc

SEQ ID NO: 2336612 - RNA, 15 nt, Human
cugugcucuggacag

SEQ ID NO: 2336613 - RNA, 18 nt, Human
cugugaacgauuuagaaa

SEQ ID NO: 2336614 - RNA, 16 nt, Human
cugugaacugaacucu

SEQ ID NO: 2336615 - RNA, 15 nt, Human
cugugaacugaacuc

SEQ ID NO: 2336616 - RNA, 13 nt, Human
cugugaacugaac

SEQ ID NO: 2336617 - RNA, 18 nt, Human
cugugaaguuuacauugu

SEQ ID NO: 2336618 - RNA, 23 nt, Human
cugugaaguuuacauuguaaaua

SEQ ID NO: 2336619 - RNA, 21 nt, Human
cugcccuucaccccaguggcc

SEQ ID NO: 2336620 - RNA, 16 nt, Human
cugcccuucaccccag

SEQ ID NO: 2336621 - RNA, 17 nt, Human
cugcccuucaccccagu

SEQ ID NO: 2336622 - RNA, 22 nt, Human
cugcccuuaccugccaggaagc

SEQ ID NO: 2336623 - RNA, 23 nt, Human
cugcccuuaccugccaggaagcc

SEQ ID NO: 2336624 - RNA, 11 nt, Human
cugcccugugg

SEQ ID NO: 2336625 - RNA, 12 nt, Human
cugcccuguggg

SEQ ID NO: 2336626 - RNA, 20 nt, Human
cugcccugguuuccugcccu

SEQ ID NO: 2336627 - RNA, 19 nt, Human
cugcccuuaccugccagga

SEQ ID NO: 2336628 - RNA, 23 nt, Human
cugcccuggugcugccacacuuc

SEQ ID NO: 2336629 - RNA, 17 nt, Human
cugcccugguuuccugc

SEQ ID NO: 2336630 - RNA, 19 nt, Human
cugcccugguuuccugccc

SEQ ID NO: 2336631 - RNA, 18 nt, Human
cugcccugguuuccugcc

SEQ ID NO: 2336632 - RNA, 21 nt, Human
cugcccugguuuccugcccug

SEQ ID NO: 2336633 - RNA, 24 nt, Human
cugcccugugaguacuacaguccu

SEQ ID NO: 2336634 - RNA, 15 nt, Human
cugcccugguccagg

SEQ ID NO: 2336635 - RNA, 14 nt, Human
cugcccugguccag

SEQ ID NO: 2336636 - RNA, 24 nt, Human
cugcccugggauguccacagaugc

SEQ ID NO: 2336637 - RNA, 20 nt, Human
cugcccccuucucccacacu

SEQ ID NO: 2336638 - RNA, 19 nt, Human
cugcccccuucucccacac

SEQ ID NO: 2336639 - RNA, 21 nt, Human
cugcccugguccagggaagcu

SEQ ID NO: 2336640 - RNA, 20 nt, Human
cugcccugguccagggaagc

SEQ ID NO: 2336641 - RNA, 12 nt, Human
cugcccuggugc

SEQ ID NO: 2336642 - RNA, 13 nt, Human
cugcccuggugcu

SEQ ID NO: 2336643 - RNA, 14 nt, Human
cugcccuggugcug

SEQ ID NO: 2336644 - RNA, 23 nt, Human
cugcccugguccagggaagcugg

SEQ ID NO: 2336645 - RNA, 15 nt, Human
cugcccuggugcugc

SEQ ID NO: 2336646 - RNA, 18 nt, Human
cugcccccuucucccaca

SEQ ID NO: 2336647 - RNA, 17 nt, Human
cugcccccuucucccac

SEQ ID NO: 2336648 - RNA, 16 nt, Human
cugcccccuucuccca

SEQ ID NO: 2336649 - RNA, 14 nt, Human
cugcccccuucucc

SEQ ID NO: 2336650 - RNA, 22 nt, Human
cugcccccugguggacaguccu

SEQ ID NO: 2336651 - RNA, 14 nt, Human
cugcccccuggugg

SEQ ID NO: 2336652 - RNA, 13 nt, Human
cugcccccuggug

SEQ ID NO: 2336653 - RNA, 12 nt, Human
cugcccccuggu

SEQ ID NO: 2336654 - RNA, 15 nt, Human
cugcccccugcuggc

SEQ ID NO: 2336655 - RNA, 17 nt, Human
cugcccccugcuggcuc

SEQ ID NO: 2336656 - RNA, 19 nt, Human
cugcccccugcuggcucuu

SEQ ID NO: 2336657 - RNA, 16 nt, Human
cugcccccugaaacuu

SEQ ID NO: 2336658 - RNA, 17 nt, Human
cugcccccugaaacuua

SEQ ID NO: 2336659 - RNA, 18 nt, Human
cugcccccugaaacuuau

SEQ ID NO: 2336660 - RNA, 20 nt, Human
cugcccccugaaacuuauuu

SEQ ID NO: 2336661 - RNA, 14 nt, Human
cugcccccugcugg

SEQ ID NO: 2336662 - RNA, 18 nt, Human
cugcugagggaccagcca

SEQ ID NO: 2336663 - RNA, 22 nt, Human
cugcugagagacccaaggagga

SEQ ID NO: 2336664 - RNA, 21 nt, Human
cugcugagagacccaaggagg

SEQ ID NO: 2336665 - RNA, 16 nt, Human
cugcugagagacccaa

SEQ ID NO: 2336666 - RNA, 15 nt, Human
cugcugagagaccca

SEQ ID NO: 2336667 - RNA, 17 nt, Human
cugcugagggaccagcc

SEQ ID NO: 2336668 - RNA, 22 nt, Human
cugcuacucuguuccuucacau

SEQ ID NO: 2336669 - RNA, 18 nt, Human
cugcuacucuguuccuuc

SEQ ID NO: 2336670 - RNA, 17 nt, Human
cugcuacucuguuccuu

SEQ ID NO: 2336671 - RNA, 21 nt, Human
cugcuacguuccuauugucau

SEQ ID NO: 2336672 - RNA, 20 nt, Human
cugcuacguuccuauuguca

SEQ ID NO: 2336673 - RNA, 18 nt, Human
cugcuaccucacuggggu

SEQ ID NO: 2336674 - RNA, 22 nt, Human
cugcuagcacuuggagccaagg

SEQ ID NO: 2336675 - RNA, 16 nt, Human
cugcuagagccagcaa

SEQ ID NO: 2336676 - RNA, 21 nt, Human
cugcuagcacuuggagccaag

SEQ ID NO: 2336677 - RNA, 14 nt, Human
cugcuagcacuugg

SEQ ID NO: 2336678 - RNA, 18 nt, Human
cugcuacuguaauuuuau

SEQ ID NO: 2336679 - RNA, 17 nt, Human
cugcuacuggcaaaagg

SEQ ID NO: 2336680 - RNA, 20 nt, Human
cugccuguucagcuccagcu

SEQ ID NO: 2336681 - RNA, 23 nt, Human
cugccuguucagcuccagcucac

SEQ ID NO: 2336682 - RNA, 13 nt, Human
cugccugucuccu

SEQ ID NO: 2336683 - RNA, 15 nt, Human
cugccugucugaagc

SEQ ID NO: 2336684 - RNA, 15 nt, Human
cugccuguucccauu

SEQ ID NO: 2336685 - RNA, 19 nt, Human
cugccuguucccauucuug

SEQ ID NO: 2336686 - RNA, 15 nt, Human
cugccugucugucuc

SEQ ID NO: 2336687 - RNA, 23 nt, Human
cugcugaaugauuuccaaagaga

SEQ ID NO: 2336688 - RNA, 22 nt, Human
cugcugaaugauuuccaaagag

SEQ ID NO: 2336689 - RNA, 16 nt, Human
cugcugaauaauaaac

SEQ ID NO: 2336690 - RNA, 15 nt, Human
cugcucaauacaucu

SEQ ID NO: 2336691 - RNA, 17 nt, Human
cugcugaauuuucacau

SEQ ID NO: 2336692 - RNA, 14 nt, Human
cugcugaauuuuca

SEQ ID NO: 2336693 - RNA, 15 nt, Human
cugcugaauuuucac

SEQ ID NO: 2336694 - RNA, 24 nt, Human
cugcugaaggcucgagcaugccug

SEQ ID NO: 2336695 - RNA, 23 nt, Human
cugcugaaggcucgagcaugccu

SEQ ID NO: 2336696 - RNA, 18 nt, Human
cugcugaaggcucgagca

SEQ ID NO: 2336697 - RNA, 16 nt, Human
cugcuauccugccaaa

SEQ ID NO: 2336698 - RNA, 17 nt, Human
cugcuaucaaagagguu

SEQ ID NO: 2336699 - RNA, 20 nt, Human
cugcucaagaagacauggag

SEQ ID NO: 2336700 - RNA, 23 nt, Human
cugcucaagaagacauggagacu

SEQ ID NO: 2336701 - RNA, 22 nt, Human
cugccucucaucaacugaauga

SEQ ID NO: 2336702 - RNA, 17 nt, Human
cugccucgggaaccuca

SEQ ID NO: 2336703 - RNA, 19 nt, Human
cugccucgaaacacagaaa

SEQ ID NO: 2336704 - RNA, 19 nt, Human
cugccucgaacuggcugca

SEQ ID NO: 2336705 - RNA, 18 nt, Human
cugccucgaaacacagaa

SEQ ID NO: 2336706 - RNA, 15 nt, Human
cugccucgaaacaca

SEQ ID NO: 2336707 - RNA, 20 nt, Human
cugccucgaacuggcugcaa

SEQ ID NO: 2336708 - RNA, 21 nt, Human
cugccuguaguuaggaaauaa

SEQ ID NO: 2336709 - RNA, 20 nt, Human
cugccuguaguuaggaaaua

SEQ ID NO: 2336710 - RNA, 19 nt, Human
cugccuguaguuaggaaau

SEQ ID NO: 2336711 - RNA, 18 nt, Human
cugccuguaguuaggaaa

SEQ ID NO: 2336712 - RNA, 17 nt, Human
cugccuguaguuaggaa

SEQ ID NO: 2336713 - RNA, 22 nt, Human
cugccuguaguuaggaaauaaa

SEQ ID NO: 2336714 - RNA, 18 nt, Human
cugccugucccucucagg

SEQ ID NO: 2336715 - RNA, 16 nt, Human
cugccugucccucuca

SEQ ID NO: 2336716 - RNA, 12 nt, Human
cugccugucucc

SEQ ID NO: 2336717 - RNA, 23 nt, Human
cugccugucccucucaggcaugc

SEQ ID NO: 2336718 - RNA, 20 nt, Human
cugccugucccucucaggca

SEQ ID NO: 2336719 - RNA, 19 nt, Human
cugccugucccucucaggc

SEQ ID NO: 2336720 - RNA, 13 nt, Human
cugccugucuguc

SEQ ID NO: 2336721 - RNA, 14 nt, Human
cugccucgaacugg

SEQ ID NO: 2336722 - RNA, 23 nt, Human
cugccuccuuugugaggaagccg

SEQ ID NO: 2336723 - RNA, 17 nt, Human
cugccuccuuugugagg

SEQ ID NO: 2336724 - RNA, 21 nt, Human
cugccuccuuugugaggaagc

SEQ ID NO: 2336725 - RNA, 19 nt, Human
cugccuccugccugccccu

SEQ ID NO: 2336726 - RNA, 15 nt, Human
cugccuccugccugc

SEQ ID NO: 2336727 - RNA, 16 nt, Human
cugccuccugccugcc

SEQ ID NO: 2336728 - RNA, 17 nt, Human
cugccuccugccugccc

SEQ ID NO: 2336729 - RNA, 14 nt, Human
cugccuccuuugug

SEQ ID NO: 2336730 - RNA, 13 nt, Human
cugccuccugccu

SEQ ID NO: 2336731 - RNA, 12 nt, Human
cugccuccugcc

SEQ ID NO: 2336732 - RNA, 18 nt, Human
cuggaugcagccucacag

SEQ ID NO: 2336733 - RNA, 15 nt, Human
cuggaugcagccuca

SEQ ID NO: 2336734 - RNA, 23 nt, Human
cuggauccuagccuuauccucug

SEQ ID NO: 2336735 - RNA, 19 nt, Human
cuggauccaucaggccacu

SEQ ID NO: 2336736 - RNA, 15 nt, Human
cuggauccugaaaua

SEQ ID NO: 2336737 - RNA, 15 nt, Human
cuggaucuccccacu

SEQ ID NO: 2336738 - RNA, 19 nt, Human
cuggauccuagccuuaucc

SEQ ID NO: 2336739 - RNA, 20 nt, Human
cuggaucuccauucucucag

SEQ ID NO: 2336740 - RNA, 16 nt, Human
cuggaugcagccucac

SEQ ID NO: 2336741 - RNA, 17 nt, Human
cuggaugcagccucaca

SEQ ID NO: 2336742 - RNA, 16 nt, Human
cuggaaaccacagucc

SEQ ID NO: 2336743 - RNA, 20 nt, Human
cuggaaaauuccuauugauu

SEQ ID NO: 2336744 - RNA, 22 nt, Human
cuggaaaagggucuugggaaau

SEQ ID NO: 2336745 - RNA, 15 nt, Human
cuggaaaagaggagu

SEQ ID NO: 2336746 - RNA, 19 nt, Human
cuggaaaagggucuuggga

SEQ ID NO: 2336747 - RNA, 18 nt, Human
cuggaaaaugugacccag

SEQ ID NO: 2336748 - RNA, 23 nt, Human
cuggaaaaguauguuagugcaaa

SEQ ID NO: 2336749 - RNA, 22 nt, Human
cugcuuccaccucaccccacuu

SEQ ID NO: 2336750 - RNA, 14 nt, Human
cuggaaaagaggag

SEQ ID NO: 2336751 - RNA, 23 nt, Human
cugcuucagccucccgaguagcu

SEQ ID NO: 2336752 - RNA, 19 nt, Human
cugcuucaguguauggaaa

SEQ ID NO: 2336753 - RNA, 21 nt, Human
cugcuucaguguauggaaaua

SEQ ID NO: 2336754 - RNA, 12 nt, Human
cugcuucagugg

SEQ ID NO: 2336755 - RNA, 15 nt, Human
cugcuucaugacauu

SEQ ID NO: 2336756 - RNA, 14 nt, Human
cugcuuccagugag

SEQ ID NO: 2336757 - RNA, 24 nt, Human
cugcuuccaauuuucuggaauaca

SEQ ID NO: 2336758 - RNA, 21 nt, Human
cugcuucaugcucagcccuga

SEQ ID NO: 2336759 - RNA, 16 nt, Human
cugcuuccaccucacc

SEQ ID NO: 2336760 - RNA, 17 nt, Human
cugcuuccaccucaccc

SEQ ID NO: 2336761 - RNA, 18 nt, Human
cugcuuccaccucacccc

SEQ ID NO: 2336762 - RNA, 19 nt, Human
cugcuuccaccucacccca

SEQ ID NO: 2336763 - RNA, 20 nt, Human
cugcuuccaccucaccccac

SEQ ID NO: 2336764 - RNA, 20 nt, Human
cugcuucaaggauccugagc

SEQ ID NO: 2336765 - RNA, 19 nt, Human
cugcuucaaggauccugag

SEQ ID NO: 2336766 - RNA, 14 nt, Human
cugcuucaaggauc

SEQ ID NO: 2336767 - RNA, 16 nt, Human
cugcuucaaggauccu

SEQ ID NO: 2336768 - RNA, 22 nt, Human
cuggacuccucuguccaggcac

SEQ ID NO: 2336769 - RNA, 23 nt, Human
cuggacuccucuguccaggcacu

SEQ ID NO: 2336770 - RNA, 17 nt, Human
cuggacucucagucucu

SEQ ID NO: 2336771 - RNA, 14 nt, Human
cuggacucucaguc

SEQ ID NO: 2336772 - RNA, 21 nt, Human
cuggagaaaauggacguguua

SEQ ID NO: 2336773 - RNA, 21 nt, Human
cuggacucucagucucugagc

SEQ ID NO: 2336774 - RNA, 20 nt, Human
cuggacucucagucucugag

SEQ ID NO: 2336775 - RNA, 19 nt, Human
cuggacucucagucucuga

SEQ ID NO: 2336776 - RNA, 18 nt, Human
cuggacucucagucucug

SEQ ID NO: 2336777 - RNA, 22 nt, Human
cuggaaaggcucagucucagga

SEQ ID NO: 2336778 - RNA, 21 nt, Human
cuggaaaggcucagucucagg

SEQ ID NO: 2336779 - RNA, 20 nt, Human
cuggaaaggcucagucucag

SEQ ID NO: 2336780 - RNA, 17 nt, Human
cuggaaaggcucagucu

SEQ ID NO: 2336781 - RNA, 15 nt, Human
cuggaaaggcucagu

SEQ ID NO: 2336782 - RNA, 14 nt, Human
cuggaaaggcucag

SEQ ID NO: 2336783 - RNA, 13 nt, Human
cuggaaaggcuca

SEQ ID NO: 2336784 - RNA, 23 nt, Human
cuggaaaggcucagucucaggag

SEQ ID NO: 2336785 - RNA, 13 nt, Human
cuggaaaggggag

SEQ ID NO: 2336786 - RNA, 15 nt, Human
cuggaaaggggagag

SEQ ID NO: 2336787 - RNA, 16 nt, Human
cuggaaaggggagagc

SEQ ID NO: 2336788 - RNA, 17 nt, Human
cuggaaaggggagagcc

SEQ ID NO: 2336789 - RNA, 18 nt, Human
cuggaaaggggagagccu

SEQ ID NO: 2336790 - RNA, 19 nt, Human
cuggaaaggggagagccug

SEQ ID NO: 2336791 - RNA, 20 nt, Human
cuggacuccucuguccaggc

SEQ ID NO: 2336792 - RNA, 19 nt, Human
cuggaaaggggggagcugg

SEQ ID NO: 2336793 - RNA, 20 nt, Human
cuggaaaggggggagcuggg

SEQ ID NO: 2336794 - RNA, 20 nt, Human
cuggaaaggggagagccugc

SEQ ID NO: 2336795 - RNA, 21 nt, Human
cuggaaaggggagagccugcu

SEQ ID NO: 2336796 - RNA, 22 nt, Human
cuggaaaggggagagccugcug

SEQ ID NO: 2336797 - RNA, 23 nt, Human
cuggaaaggggagagccugcugg

SEQ ID NO: 2336798 - RNA, 14 nt, Human
cuggagaacuagag

SEQ ID NO: 2336799 - RNA, 15 nt, Human
cuggagaacuagaga

SEQ ID NO: 2336800 - RNA, 23 nt, Human
cuggacucucagucucugagcag

SEQ ID NO: 2336801 - RNA, 23 nt, Human
cuggaaaggggggagcuggggaa

SEQ ID NO: 2336802 - RNA, 13 nt, Human
cuggagaacuaga

SEQ ID NO: 2336803 - RNA, 23 nt, Human
cuggaguggccacuaagcagagg

SEQ ID NO: 2336804 - RNA, 19 nt, Human
cuggagugguguucagcca

SEQ ID NO: 2336805 - RNA, 14 nt, Human
cuggaguggccacu

SEQ ID NO: 2336806 - RNA, 13 nt, Human
cuggaguggccac

SEQ ID NO: 2336807 - RNA, 24 nt, Human
cuggaguggccacuaagcagagga

SEQ ID NO: 2336808 - RNA, 19 nt, Human
cuggagaagacccuccccg

SEQ ID NO: 2336809 - RNA, 19 nt, Human
cuggagaacuagaaccugg

SEQ ID NO: 2336810 - RNA, 22 nt, Human
cuggagaacuagaaccuggagg

SEQ ID NO: 2336811 - RNA, 23 nt, Human
cuggagaacuagaaccuggaggg

SEQ ID NO: 2336812 - RNA, 12 nt, Human
cuggagaagaga

SEQ ID NO: 2336813 - RNA, 14 nt, Human
cuggagaagagagg

SEQ ID NO: 2336814 - RNA, 15 nt, Human
cuggagaagagagga

SEQ ID NO: 2336815 - RNA, 21 nt, Human
cuggaucaguccuuugaucag

SEQ ID NO: 2336816 - RNA, 20 nt, Human
cuggaucaguccuuugauca

SEQ ID NO: 2336817 - RNA, 17 nt, Human
cuggaucaguccuuuga

SEQ ID NO: 2336818 - RNA, 13 nt, Human
cuggaucaguccu

SEQ ID NO: 2336819 - RNA, 17 nt, Human
cuggauccaucaggcca

SEQ ID NO: 2336820 - RNA, 18 nt, Human
cuggaguguggcugagga

SEQ ID NO: 2336821 - RNA, 19 nt, Human
cuggaguguggcugaggag

SEQ ID NO: 2336822 - RNA, 20 nt, Human
cuggaguguggcugaggagg

SEQ ID NO: 2336823 - RNA, 21 nt, Human
cuggaguguggcugaggaggc

SEQ ID NO: 2336824 - RNA, 22 nt, Human
cuggaguguggcugaggaggcc

SEQ ID NO: 2336825 - RNA, 16 nt, Human
cuggaguuacauuaau

SEQ ID NO: 2336826 - RNA, 22 nt, Human
cuggaguuacauuaauguuaau

SEQ ID NO: 2336827 - RNA, 12 nt, Human
cuggcagcucuc

SEQ ID NO: 2336828 - RNA, 22 nt, Human
cuggcccgucauguuccucaaa

SEQ ID NO: 2336829 - RNA, 15 nt, Human
cuggcccgugacaga

SEQ ID NO: 2336830 - RNA, 13 nt, Human
cuggcagcucucc

SEQ ID NO: 2336831 - RNA, 16 nt, Human
cuggcccgugacagac

SEQ ID NO: 2336832 - RNA, 18 nt, Human
cuggcccgugacagacuc

SEQ ID NO: 2336833 - RNA, 19 nt, Human
cuggcccgugacagacucc

SEQ ID NO: 2336834 - RNA, 23 nt, Human
cuggcccgugacagacuccugag

SEQ ID NO: 2336835 - RNA, 17 nt, Human
cuggcccucaccccugc

SEQ ID NO: 2336836 - RNA, 24 nt, Human
cuggcccucaaggccucccacagu

SEQ ID NO: 2336837 - RNA, 22 nt, Human
cuggcccucaaggccucccaca

SEQ ID NO: 2336838 - RNA, 23 nt, Human
cuggcccucaaggccucccacag

SEQ ID NO: 2336839 - RNA, 17 nt, Human
cuggcccucaaggccuc

SEQ ID NO: 2336840 - RNA, 18 nt, Human
cuggcccucaaggccucc

SEQ ID NO: 2336841 - RNA, 19 nt, Human
cuggcccucaaggccuccc

SEQ ID NO: 2336842 - RNA, 21 nt, Human
cuggcccucaaggccucccac

SEQ ID NO: 2336843 - RNA, 23 nt, Human
cuggcccuaugcuuccggccucc

SEQ ID NO: 2336844 - RNA, 16 nt, Human
cuggcccucaaggccu

SEQ ID NO: 2336845 - RNA, 17 nt, Human
cuggcagccgugccuuc

SEQ ID NO: 2336846 - RNA, 18 nt, Human
cuggcagccgugccuuca

SEQ ID NO: 2336847 - RNA, 16 nt, Human
cuggcagcucagagag

SEQ ID NO: 2336848 - RNA, 17 nt, Human
cuggcagcucagagagg

SEQ ID NO: 2336849 - RNA, 19 nt, Human
cuggcagcucagagagggu

SEQ ID NO: 2336850 - RNA, 23 nt, Human
cuggcccucaccccugcccuggg

SEQ ID NO: 2336851 - RNA, 22 nt, Human
cuggcccucaccccugcccugg

SEQ ID NO: 2336852 - RNA, 21 nt, Human
cuggcccucaccccugcccug

SEQ ID NO: 2336853 - RNA, 19 nt, Human
cuggcccucaccccugccc

SEQ ID NO: 2336854 - RNA, 16 nt, Human
cuggcccucaguuucc

SEQ ID NO: 2336855 - RNA, 23 nt, Human
cuggccgaguccaagcugggaga

SEQ ID NO: 2336856 - RNA, 20 nt, Human
cuggccgaguccaagcuggg

SEQ ID NO: 2336857 - RNA, 18 nt, Human
cuggccgaguccaagcug

SEQ ID NO: 2336858 - RNA, 17 nt, Human
cuggccgaguccaagcu

SEQ ID NO: 2336859 - RNA, 16 nt, Human
cuggccgaguccaagc

SEQ ID NO: 2336860 - RNA, 13 nt, Human
cuggccgcccccu

SEQ ID NO: 2336861 - RNA, 14 nt, Human
cuggccgcccccug

SEQ ID NO: 2336862 - RNA, 22 nt, Human
cuggccgcccccugccccccag

SEQ ID NO: 2336863 - RNA, 18 nt, Human
cuggccgcgccaaauaau

SEQ ID NO: 2336864 - RNA, 14 nt, Human
cuggccgccucacc

SEQ ID NO: 2336865 - RNA, 16 nt, Human
cuggccgccucacccc

SEQ ID NO: 2336866 - RNA, 18 nt, Human
cuggccgccucacccccu

SEQ ID NO: 2336867 - RNA, 19 nt, Human
cuggccgccucacccccuc

SEQ ID NO: 2336868 - RNA, 22 nt, Human
cuggcucccacaggcccuuccu

SEQ ID NO: 2336869 - RNA, 19 nt, Human
cuggcucccacaggcccuu

SEQ ID NO: 2336870 - RNA, 18 nt, Human
cuggcucccacaggcccu

SEQ ID NO: 2336871 - RNA, 21 nt, Human
cuggccggagcaaacucugcu

SEQ ID NO: 2336872 - RNA, 22 nt, Human
cuggccggagcaaacucugcug

SEQ ID NO: 2336873 - RNA, 18 nt, Human
cuggccggagucagugcc

SEQ ID NO: 2336874 - RNA, 23 nt, Human
cuggccggagucagugccagguc

SEQ ID NO: 2336875 - RNA, 18 nt, Human
cuggccggcaaccccagu

SEQ ID NO: 2336876 - RNA, 17 nt, Human
cugggacuacaggcacc

SEQ ID NO: 2336877 - RNA, 22 nt, Human
cuggcucccucuuggucuuccc

SEQ ID NO: 2336878 - RNA, 21 nt, Human
cugggacuacaggcacccacc

SEQ ID NO: 2336879 - RNA, 17 nt, Human
cugggacuacaggugug

SEQ ID NO: 2336880 - RNA, 14 nt, Human
cuggcucccucuug

SEQ ID NO: 2336881 - RNA, 13 nt, Human
cuggcucuuccag

SEQ ID NO: 2336882 - RNA, 14 nt, Human
cuggcucuuccagg

SEQ ID NO: 2336883 - RNA, 15 nt, Human
cuggcucuuccaggc

SEQ ID NO: 2336884 - RNA, 20 nt, Human
cuggcagaguugaagacaga

SEQ ID NO: 2336885 - RNA, 21 nt, Human
cuggcagaguugaagacagag

SEQ ID NO: 2336886 - RNA, 13 nt, Human
cuggcagccgugc

SEQ ID NO: 2336887 - RNA, 23 nt, Human
cuggcagccccuguucuggcaga

SEQ ID NO: 2336888 - RNA, 22 nt, Human
cuggcagaguugaagacagagc

SEQ ID NO: 2336889 - RNA, 16 nt, Human
cuuuuauuguauaaac

SEQ ID NO: 2336890 - RNA, 13 nt, Human
cuuuuauuguaua

SEQ ID NO: 2336891 - RNA, 19 nt, Human
cuuuuauuguauaaacuau

SEQ ID NO: 2336892 - RNA, 18 nt, Human
cuuuuaugugaaacaugu

SEQ ID NO: 2336893 - RNA, 19 nt, Human
cuuuuaugugaaacauguu

SEQ ID NO: 2336894 - RNA, 18 nt, Human
cuuuuauugacacagaaa

SEQ ID NO: 2336895 - RNA, 17 nt, Human
cuuuuauugacacagaa

SEQ ID NO: 2336896 - RNA, 19 nt, Human
cuuuuauuaaugcacuuuc

SEQ ID NO: 2336897 - RNA, 18 nt, Human
cuuuuauguuauuuauau

SEQ ID NO: 2336898 - RNA, 17 nt, Human
cuuuuauucauuugagu

SEQ ID NO: 2336899 - RNA, 14 nt, Human
cuuuuauuaaugca

SEQ ID NO: 2336900 - RNA, 16 nt, Human
cuuuuauuaaugcacu

SEQ ID NO: 2336901 - RNA, 20 nt, Human
cuuuuauguuauuuauauau

SEQ ID NO: 2336902 - RNA, 12 nt, Human
gaaacaaagaag

SEQ ID NO: 2336903 - RNA, 21 nt, Human
gaaaagagauauuuuaaaaug

SEQ ID NO: 2336904 - RNA, 13 nt, Human
gaaacaaagaagg

SEQ ID NO: 2336905 - RNA, 14 nt, Human
gaaaauuuuaaaaa

SEQ ID NO: 2336906 - RNA, 18 nt, Human
gaaaauuuugauguuuua

SEQ ID NO: 2336907 - RNA, 23 nt, Human
gaaacaaaaacacuaaaaauaaa

SEQ ID NO: 2336908 - RNA, 19 nt, Human
gaaacaaaaacacuaaaaa

SEQ ID NO: 2336909 - RNA, 14 nt, Human
gaaacaaaaacacu

SEQ ID NO: 2336910 - RNA, 20 nt, Human
gaaaagcggacaucagcugg

SEQ ID NO: 2336911 - RNA, 15 nt, Human
gaaaagccucugugu

SEQ ID NO: 2336912 - RNA, 21 nt, Human
gaaaauguugagaaucccaaa

SEQ ID NO: 2336913 - RNA, 14 nt, Human
gaaaauuaacauga

SEQ ID NO: 2336914 - RNA, 15 nt, Human
gaaaauuaacacugc

SEQ ID NO: 2336915 - RNA, 13 nt, Human
gaaaauuaacacu

SEQ ID NO: 2336916 - RNA, 20 nt, Human
gaaaauguuuuucugccagg

SEQ ID NO: 2336917 - RNA, 18 nt, Human
gaaaauuaggauuucaug

SEQ ID NO: 2336918 - RNA, 22 nt, Human
gaaaauuaggauuucaugauuu

SEQ ID NO: 2336919 - RNA, 18 nt, Human
gaaaagcggacaucagcu

SEQ ID NO: 2336920 - RNA, 13 nt, Human
gaaaagccucugu

SEQ ID NO: 2336921 - RNA, 14 nt, Human
gaaaagccucugug

SEQ ID NO: 2336922 - RNA, 21 nt, Human
gaaaagccucugugucacugg

SEQ ID NO: 2336923 - RNA, 20 nt, Human
gaaaagcagcccuuggccag

SEQ ID NO: 2336924 - RNA, 17 nt, Human
gaaaagcagcucucccc

SEQ ID NO: 2336925 - RNA, 14 nt, Human
gaaaagcagcucuc

SEQ ID NO: 2336926 - RNA, 17 nt, Human
gaaaagcaccugccgac

SEQ ID NO: 2336927 - RNA, 19 nt, Human
gaaaagcagcccuuggcca

SEQ ID NO: 2336928 - RNA, 16 nt, Human
gaaaagcaccugccga

SEQ ID NO: 2336929 - RNA, 19 nt, Human
gaaaagagauauuuuaaaa

SEQ ID NO: 2336930 - RNA, 15 nt, Human
gaaaagagauauuuu

SEQ ID NO: 2336931 - RNA, 16 nt, Human
gaaaacuucuuuuaaa

SEQ ID NO: 2336932 - RNA, 16 nt, Human
gaaaacuuauuugagu

SEQ ID NO: 2336933 - RNA, 21 nt, Human
gaaaagacuccaaagaaaugu

SEQ ID NO: 2336934 - RNA, 20 nt, Human
gaaaagacuccaaagaaaug

SEQ ID NO: 2336935 - RNA, 16 nt, Human
gaaaacugaaaaucua

SEQ ID NO: 2336936 - RNA, 17 nt, Human
gaaaacucauuacuuuu

SEQ ID NO: 2336937 - RNA, 20 nt, Human
gaaaacuccuuuagcaggug

SEQ ID NO: 2336938 - RNA, 19 nt, Human
gaaaaaaugauguucauuu

SEQ ID NO: 2336939 - RNA, 14 nt, Human
gaaaaaauguugga

SEQ ID NO: 2336940 - RNA, 18 nt, Human
gaaaaaauguuggauuua

SEQ ID NO: 2336941 - RNA, 21 nt, Human
gaaaaaauguuggauuuauaa

SEQ ID NO: 2336942 - RNA, 19 nt, Human
gaaaacugcaacuuguaaa

SEQ ID NO: 2336943 - RNA, 16 nt, Human
gaaaacugacagagga

SEQ ID NO: 2336944 - RNA, 20 nt, Human
gaaaacugaaaaucuaauau

SEQ ID NO: 2336945 - RNA, 18 nt, Human
gaaaacugaaaaucuaau

SEQ ID NO: 2336946 - RNA, 23 nt, Human
gaaaacuuaugaccucuuccuuu

SEQ ID NO: 2336947 - RNA, 14 nt, Human
gaaaacuuauuuga

SEQ ID NO: 2336948 - RNA, 15 nt, Human
gaaaacuuauuugag

SEQ ID NO: 2336949 - RNA, 15 nt, Human
cuuuuuuuuguaugu

SEQ ID NO: 2336950 - RNA, 21 nt, Human
cuuuuuuuuuuuuuuugacaa

SEQ ID NO: 2336951 - RNA, 13 nt, Human
gaaaaaaaaagaa

SEQ ID NO: 2336952 - RNA, 12 nt, Human
gaaaaaaaaaga

SEQ ID NO: 2336953 - RNA, 20 nt, Human
gaaaaaaaaaaugcugaaca

SEQ ID NO: 2336954 - RNA, 19 nt, Human
gaaaaaaaaaaugcugaac

SEQ ID NO: 2336955 - RNA, 18 nt, Human
gaaaaaaaaaaugcugaa

SEQ ID NO: 2336956 - RNA, 15 nt, Human
cuuuuuuuuuccaaa

SEQ ID NO: 2336957 - RNA, 19 nt, Human
gaaaaaauauuuuccugcc

SEQ ID NO: 2336958 - RNA, 14 nt, Human
gaaaaaauauauau

SEQ ID NO: 2336959 - RNA, 14 nt, Human
gaaaaaauacauuu

SEQ ID NO: 2336960 - RNA, 13 nt, Human
gaaaaaauacauu

SEQ ID NO: 2336961 - RNA, 10 nt, Human
gaaaaaauac

SEQ ID NO: 2336962 - RNA, 17 nt, Human
gaaaaaauacauuuuau

SEQ ID NO: 2336963 - RNA, 15 nt, Human
gaaaaaauacauuuu

SEQ ID NO: 2336964 - RNA, 18 nt, Human
gaaaaaaaaagaaaaaag

SEQ ID NO: 2336965 - RNA, 17 nt, Human
gaaaaaaaaagaaaaaa

SEQ ID NO: 2336966 - RNA, 16 nt, Human
gaaaaaaaaagaaaaa

SEQ ID NO: 2336967 - RNA, 15 nt, Human
gaaaaaaaaagaaaa

SEQ ID NO: 2336968 - RNA, 14 nt, Human
cuuuuguguacagu

SEQ ID NO: 2336969 - RNA, 23 nt, Human
cuuuuguguacaguguguaaagu

SEQ ID NO: 2336970 - RNA, 18 nt, Human
cuuuugugcauuaucuag

SEQ ID NO: 2336971 - RNA, 14 nt, Human
cuuuugugcauuau

SEQ ID NO: 2336972 - RNA, 14 nt, Human
cuuuuuuuuaaguu

SEQ ID NO: 2336973 - RNA, 21 nt, Human
cuuuuuuuuccccccuagaaa

SEQ ID NO: 2336974 - RNA, 17 nt, Human
cuuuuuuuuaaugugcu

SEQ ID NO: 2336975 - RNA, 18 nt, Human
cuuuuuuuuaaugugcug

SEQ ID NO: 2336976 - RNA, 15 nt, Human
cuuuuuuuucuuuaa

SEQ ID NO: 2336977 - RNA, 14 nt, Human
cuuuuuuuucuuua

SEQ ID NO: 2336978 - RNA, 22 nt, Human
cuuuugcucuuagcugucugcu

SEQ ID NO: 2336979 - RNA, 14 nt, Human
cuuuugcuuuauuc

SEQ ID NO: 2336980 - RNA, 11 nt, Human
cuuuugcuuuu

SEQ ID NO: 2336981 - RNA, 18 nt, Human
cuuuugccguuauuaaaa

SEQ ID NO: 2336982 - RNA, 20 nt, Human
cuuuugguaaagacuggcuu

SEQ ID NO: 2336983 - RNA, 21 nt, Human
cuuuugguaaagacuggcuuu

SEQ ID NO: 2336984 - RNA, 17 nt, Human
cuuuugcuuuuggcaaa

SEQ ID NO: 2336985 - RNA, 15 nt, Human
cuuuugcuuuuggca

SEQ ID NO: 2336986 - RNA, 15 nt, Human
cuuuuggucugugug

SEQ ID NO: 2336987 - RNA, 16 nt, Human
cuuuuggucuguguga

SEQ ID NO: 2336988 - RNA, 17 nt, Human
cuuuugucuaugggacu

SEQ ID NO: 2336989 - RNA, 14 nt, Human
cuuuugucccagaa

SEQ ID NO: 2336990 - RNA, 14 nt, Human
cuuuuguauaguug

SEQ ID NO: 2336991 - RNA, 13 nt, Human
cuuuuguauguaa

SEQ ID NO: 2336992 - RNA, 15 nt, Human
cuuuuguauguaaau

SEQ ID NO: 2336993 - RNA, 16 nt, Human
cuuuuguauguaaaug

SEQ ID NO: 2336994 - RNA, 17 nt, Human
cuuuuguauguaaaugu

SEQ ID NO: 2336995 - RNA, 18 nt, Human
cuuuuguauguaaaugug

SEQ ID NO: 2336996 - RNA, 20 nt, Human
cuuuuguauguaaaugugca

SEQ ID NO: 2336997 - RNA, 21 nt, Human
cuuuuguauguaaaugugcau

SEQ ID NO: 2336998 - RNA, 23 nt, Human
cuuuuguauguaaaugugcauuc

SEQ ID NO: 2336999 - RNA, 22 nt, Human
gaacaagucccuguaauuguug

SEQ ID NO: 2337000 - RNA, 21 nt, Human
gaacaaggcaaggcugucaau

SEQ ID NO: 2337001 - RNA, 14 nt, Human
gaacaaggcaaggc

SEQ ID NO: 2337002 - RNA, 15 nt, Human
gaacaaggcaaggcu

SEQ ID NO: 2337003 - RNA, 17 nt, Human
gaacaaggcaaggcugu

SEQ ID NO: 2337004 - RNA, 18 nt, Human
gaacaaggcaaggcuguc

SEQ ID NO: 2337005 - RNA, 16 nt, Human
gaacaagcauucuccu

SEQ ID NO: 2337006 - RNA, 13 nt, Human
gaacaagccuaaa

SEQ ID NO: 2337007 - RNA, 21 nt, Human
gaacaacuaggcuucagcaua

SEQ ID NO: 2337008 - RNA, 19 nt, Human
gaacaacuaggcuucagca

SEQ ID NO: 2337009 - RNA, 15 nt, Human
gaacaacuacuguga

SEQ ID NO: 2337010 - RNA, 23 nt, Human
gaacaaauuuacagagacagaaa

SEQ ID NO: 2337011 - RNA, 19 nt, Human
gaaauuuuuauuaaauuau

SEQ ID NO: 2337012 - RNA, 19 nt, Human
gaaaugaauaauuucccaa

SEQ ID NO: 2337013 - RNA, 17 nt, Human
gaaauuuuuauuuuucu

SEQ ID NO: 2337014 - RNA, 18 nt, Human
gaaaugaauaauuuccca

SEQ ID NO: 2337015 - RNA, 14 nt, Human
gaaaugaauaauuu

SEQ ID NO: 2337016 - RNA, 20 nt, Human
gaaauuuuucagaugcuucu

SEQ ID NO: 2337017 - RNA, 17 nt, Human
gaaauuuuucagaugcu

SEQ ID NO: 2337018 - RNA, 22 nt, Human
gaaauuuuucagaugcuucugg

SEQ ID NO: 2337019 - RNA, 18 nt, Human
gaacaaauuuacagagac

SEQ ID NO: 2337020 - RNA, 17 nt, Human
gaacaaauuuacagaga

SEQ ID NO: 2337021 - RNA, 18 nt, Human
gaaaugaaagcagggacu

SEQ ID NO: 2337022 - RNA, 18 nt, Human
gaaauuuuuauuaaauua

SEQ ID NO: 2337023 - RNA, 13 nt, Human
gaaaugaauaauu

SEQ ID NO: 2337024 - RNA, 15 nt, Human
gaaaucacagaauca

SEQ ID NO: 2337025 - RNA, 16 nt, Human
gaaaucacagaaucau

SEQ ID NO: 2337026 - RNA, 23 nt, Human
gaaaucaaauaugcaaagcacug

SEQ ID NO: 2337027 - RNA, 17 nt, Human
gaaaucaccgaaaacgu

SEQ ID NO: 2337028 - RNA, 17 nt, Human
gaaaugaaagcagggac

SEQ ID NO: 2337029 - RNA, 16 nt, Human
gaaagguuuacauugu

SEQ ID NO: 2337030 - RNA, 20 nt, Human
gaaagguuugagaagcacug

SEQ ID NO: 2337031 - RNA, 21 nt, Human
gaaaguacuucuccacccugc

SEQ ID NO: 2337032 - RNA, 19 nt, Human
gaaauauuuauuuuuuuaa

SEQ ID NO: 2337033 - RNA, 17 nt, Human
gaaaucaaauaugcaaa

SEQ ID NO: 2337034 - RNA, 21 nt, Human
gaaaucaaauaugcaaagcac

SEQ ID NO: 2337035 - RNA, 19 nt, Human
gaaaucaaagagagaaaau

SEQ ID NO: 2337036 - RNA, 16 nt, Human
gaaaucaaauaugcaa

SEQ ID NO: 2337037 - RNA, 16 nt, Human
gaaagacagcuucuca

SEQ ID NO: 2337038 - RNA, 17 nt, Human
gaaagacagcuucucau

SEQ ID NO: 2337039 - RNA, 16 nt, Human
gaaagaccauuuuucc

SEQ ID NO: 2337040 - RNA, 22 nt, Human
gaaagacauccauaaagaagca

SEQ ID NO: 2337041 - RNA, 21 nt, Human
gaaagacauccauaaagaagc

SEQ ID NO: 2337042 - RNA, 23 nt, Human
gaaagacauccauaaagaagcaa

SEQ ID NO: 2337043 - RNA, 21 nt, Human
gaaagacggauugcauuagaa

SEQ ID NO: 2337044 - RNA, 18 nt, Human
gaaagacuaucuaaaugu

SEQ ID NO: 2337045 - RNA, 14 nt, Human
gaaagguuuacauu

SEQ ID NO: 2337046 - RNA, 14 nt, Human
gaaagguucugccc

SEQ ID NO: 2337047 - RNA, 15 nt, Human
gaaagguucugcccg

SEQ ID NO: 2337048 - RNA, 19 nt, Human
gaaaggcuccaggagcagc

SEQ ID NO: 2337049 - RNA, 17 nt, Human
gaaaggcuccaggagca

SEQ ID NO: 2337050 - RNA, 18 nt, Human
gaaaggcuccaggagcag

SEQ ID NO: 2337051 - RNA, 16 nt, Human
gaaagaaggcaaaguc

SEQ ID NO: 2337052 - RNA, 16 nt, Human
gaaagaaugaaagagu

SEQ ID NO: 2337053 - RNA, 19 nt, Human
gaaagaaugaaagaguaaa

SEQ ID NO: 2337054 - RNA, 14 nt, Human
gaaagacagagcug

SEQ ID NO: 2337055 - RNA, 16 nt, Human
gaaagacagagcuggg

SEQ ID NO: 2337056 - RNA, 11 nt, Human
gaaagaaggaa

SEQ ID NO: 2337057 - RNA, 15 nt, Human
gaaagaagagacagg

SEQ ID NO: 2337058 - RNA, 19 nt, Human
gaaagaagagccggagccu

SEQ ID NO: 2337059 - RNA, 11 nt, Human
gaaagaagaga

SEQ ID NO: 2337060 - RNA, 18 nt, Human
gaaagaaguggggacaga

SEQ ID NO: 2337061 - RNA, 11 nt, Human
gaaacuuggau

SEQ ID NO: 2337062 - RNA, 12 nt, Human
gaaacuuggcuc

SEQ ID NO: 2337063 - RNA, 22 nt, Human
gaaacuguucccaccugcugga

SEQ ID NO: 2337064 - RNA, 21 nt, Human
gaaacuguucccaccugcugg

SEQ ID NO: 2337065 - RNA, 20 nt, Human
gaaacuguucccaccugcug

SEQ ID NO: 2337066 - RNA, 23 nt, Human
gaaacuguugccagagauggagg

SEQ ID NO: 2337067 - RNA, 21 nt, Human
gaaacuguugccagagaugga

SEQ ID NO: 2337068 - RNA, 17 nt, Human
gaaacuguugccagaga

SEQ ID NO: 2337069 - RNA, 15 nt, Human
gaaacuguugccaga

SEQ ID NO: 2337070 - RNA, 15 nt, Human
gaaacuuacacacaa

SEQ ID NO: 2337071 - RNA, 14 nt, Human
gaaacuuacacaca

SEQ ID NO: 2337072 - RNA, 21 nt, Human
gaaacuuauuuuuuucugauu

SEQ ID NO: 2337073 - RNA, 19 nt, Human
gaaacuuauuuuuuucuga

SEQ ID NO: 2337074 - RNA, 20 nt, Human
gaaacuuauuuuuuucugau

SEQ ID NO: 2337075 - RNA, 11 nt, Human
gaaacuuauuu

SEQ ID NO: 2337076 - RNA, 12 nt, Human
gaaacuuauuuu

SEQ ID NO: 2337077 - RNA, 17 nt, Human
gaaacuuauuuuuuucu

SEQ ID NO: 2337078 - RNA, 23 nt, Human
gaaacuucagcgguuuauauaag

SEQ ID NO: 2337079 - RNA, 23 nt, Human
cuugccgcgucgcccucccaggc

SEQ ID NO: 2337080 - RNA, 18 nt, Human
cuugccucaaugccagua

SEQ ID NO: 2337081 - RNA, 19 nt, Human
cuugccgucuaccugaggg

SEQ ID NO: 2337082 - RNA, 21 nt, Human
cuugccgcgucgcccucccag

SEQ ID NO: 2337083 - RNA, 18 nt, Human
cuugccgcgucgcccucc

SEQ ID NO: 2337084 - RNA, 23 nt, Human
cuugccgaaccaggagcugcuca

SEQ ID NO: 2337085 - RNA, 18 nt, Human
cuugccgucuaccugagg

SEQ ID NO: 2337086 - RNA, 23 nt, Human
cuugcccuucccugucccucuaa

SEQ ID NO: 2337087 - RNA, 15 nt, Human
cuugcccuugcccug

SEQ ID NO: 2337088 - RNA, 17 nt, Human
cuugcccuugcccugac

SEQ ID NO: 2337089 - RNA, 22 nt, Human
cuugauucugcaguaaaucuuu

SEQ ID NO: 2337090 - RNA, 21 nt, Human
cuugauucugcaguaaaucuu

SEQ ID NO: 2337091 - RNA, 19 nt, Human
cuugauucauaaugacuua

SEQ ID NO: 2337092 - RNA, 13 nt, Human
cuugauucugcag

SEQ ID NO: 2337093 - RNA, 20 nt, Human
cuugauucugcaguaaaucu

SEQ ID NO: 2337094 - RNA, 17 nt, Human
cuugauucugcaguaaa

SEQ ID NO: 2337095 - RNA, 15 nt, Human
cuugaugugccauuu

SEQ ID NO: 2337096 - RNA, 22 nt, Human
cuugaugugccauuuuaaaaaa

SEQ ID NO: 2337097 - RNA, 12 nt, Human
cuugaugugccu

SEQ ID NO: 2337098 - RNA, 22 nt, Human
cuugauguggugaggcaggcuu

SEQ ID NO: 2337099 - RNA, 15 nt, Human
cuugauguguuaucu

SEQ ID NO: 2337100 - RNA, 21 nt, Human
cuugauggcuccgaacacccu

SEQ ID NO: 2337101 - RNA, 15 nt, Human
cuugccuccugugua

SEQ ID NO: 2337102 - RNA, 12 nt, Human
cuugccuccugu

SEQ ID NO: 2337103 - RNA, 15 nt, Human
cuugccucggcuccu

SEQ ID NO: 2337104 - RNA, 16 nt, Human
cuugccucggcuccug

SEQ ID NO: 2337105 - RNA, 20 nt, Human
cuugccuccccauuucccau

SEQ ID NO: 2337106 - RNA, 12 nt, Human
cuugccuccugg

SEQ ID NO: 2337107 - RNA, 13 nt, Human
cuugccuccugga

SEQ ID NO: 2337108 - RNA, 12 nt, Human
cuugccucccca

SEQ ID NO: 2337109 - RNA, 16 nt, Human
cuugcccuugcccuga

SEQ ID NO: 2337110 - RNA, 14 nt, Human
cuugccuccccauu

SEQ ID NO: 2337111 - RNA, 15 nt, Human
cuuggauuguccccg

SEQ ID NO: 2337112 - RNA, 17 nt, Human
cuugccucggcuccugc

SEQ ID NO: 2337113 - RNA, 18 nt, Human
cuugccucggcuccugcu

SEQ ID NO: 2337114 - RNA, 19 nt, Human
cuugccucggcuccugcug

SEQ ID NO: 2337115 - RNA, 20 nt, Human
cuugccucggcuccugcugc

SEQ ID NO: 2337116 - RNA, 21 nt, Human
cuugccucggcuccugcugca

SEQ ID NO: 2337117 - RNA, 22 nt, Human
cuugccucggcuccugcugcac

SEQ ID NO: 2337118 - RNA, 23 nt, Human
cuugccucggcuccugcugcacc

SEQ ID NO: 2337119 - RNA, 13 nt, Human
cuugccucucugu

SEQ ID NO: 2337120 - RNA, 22 nt, Human
cuuggauuguccccgacccuug

SEQ ID NO: 2337121 - RNA, 17 nt, Human
cuugccucuguccccuu

SEQ ID NO: 2337122 - RNA, 18 nt, Human
cuuggauuguccccgacc

SEQ ID NO: 2337123 - RNA, 20 nt, Human
cuuggauuguccccgacccu

SEQ ID NO: 2337124 - RNA, 14 nt, Human
cuugccucucuguu

SEQ ID NO: 2337125 - RNA, 18 nt, Human
cuuggcccgcacagagcu

SEQ ID NO: 2337126 - RNA, 23 nt, Human
cuuggcgcugccccuggcagccc

SEQ ID NO: 2337127 - RNA, 14 nt, Human
cuuggcggcagcag

SEQ ID NO: 2337128 - RNA, 15 nt, Human
cuuggcggcagcagc

SEQ ID NO: 2337129 - RNA, 17 nt, Human
cuuggcggcagcagcca

SEQ ID NO: 2337130 - RNA, 18 nt, Human
cuuggcggcagcagccau

SEQ ID NO: 2337131 - RNA, 19 nt, Human
cuuggcggcagcagccauc

SEQ ID NO: 2337132 - RNA, 21 nt, Human
cuuggcgcugccccuggcagc

SEQ ID NO: 2337133 - RNA, 22 nt, Human
cuuggcgcugccccuggcagcc

SEQ ID NO: 2337134 - RNA, 15 nt, Human
cuugguccugcugca

SEQ ID NO: 2337135 - RNA, 16 nt, Human
cuugguccugcugcag

SEQ ID NO: 2337136 - RNA, 17 nt, Human
cuugguccugcugcagu

SEQ ID NO: 2337137 - RNA, 18 nt, Human
cuugguccugcugcaguu

SEQ ID NO: 2337138 - RNA, 20 nt, Human
cuugguccugcugcaguugc

SEQ ID NO: 2337139 - RNA, 20 nt, Human
cuugucucccagcucagggc

SEQ ID NO: 2337140 - RNA, 15 nt, Human
cuugguugaggaaac

SEQ ID NO: 2337141 - RNA, 14 nt, Human
cuugguugaggaaa

SEQ ID NO: 2337142 - RNA, 16 nt, Human
cuugguugaggaaaca

SEQ ID NO: 2337143 - RNA, 14 nt, Human
cuugguuggcuggc

SEQ ID NO: 2337144 - RNA, 17 nt, Human
cuugguucccuugugug

SEQ ID NO: 2337145 - RNA, 19 nt, Human
cuugguucccccacugauc

SEQ ID NO: 2337146 - RNA, 16 nt, Human
cuugguucccccacug

SEQ ID NO: 2337147 - RNA, 14 nt, Human
cuugucuuguucac

SEQ ID NO: 2337148 - RNA, 20 nt, Human
cuugucuuuggacccugagg

SEQ ID NO: 2337149 - RNA, 13 nt, Human
cuugucucugggc

SEQ ID NO: 2337150 - RNA, 14 nt, Human
cuugucucugggcu

SEQ ID NO: 2337151 - RNA, 12 nt, Human
cuugucugagau

SEQ ID NO: 2337152 - RNA, 23 nt, Human
cuugucugauuggcucacccaag

SEQ ID NO: 2337153 - RNA, 13 nt, Human
cuugucuguagau

SEQ ID NO: 2337154 - RNA, 20 nt, Human
cuuggucugauuucaggaua

SEQ ID NO: 2337155 - RNA, 19 nt, Human
cuuggugugacccucugaa

SEQ ID NO: 2337156 - RNA, 14 nt, Human
cuugguucauaaau

SEQ ID NO: 2337157 - RNA, 21 nt, Human
cuugguuauuuguuuaccacu

SEQ ID NO: 2337158 - RNA, 16 nt, Human
cuugguucauaaauga

SEQ ID NO: 2337159 - RNA, 22 nt, Human
cuugguccugcugcaguugcca

SEQ ID NO: 2337160 - RNA, 23 nt, Human
cuuggucucagugucaaugcagc

SEQ ID NO: 2337161 - RNA, 20 nt, Human
cuugguucccauuugcuccu

SEQ ID NO: 2337162 - RNA, 20 nt, Human
cuugguuccagccugccacu

SEQ ID NO: 2337163 - RNA, 13 nt, Human
cuugguuccccca

SEQ ID NO: 2337164 - RNA, 17 nt, Human
cuugguucauaaaugaa

SEQ ID NO: 2337165 - RNA, 22 nt, Human
cuugguucauaaaugaauuuua

SEQ ID NO: 2337166 - RNA, 16 nt, Human
cuugguucccauuugc

SEQ ID NO: 2337167 - RNA, 19 nt, Human
cuugguuccagccugccac

SEQ ID NO: 2337168 - RNA, 17 nt, Human
cuugguuccagccugcc

SEQ ID NO: 2337169 - RNA, 12 nt, Human
cuuuaaugcauc

SEQ ID NO: 2337170 - RNA, 14 nt, Human
cuuuaaugcaucua

SEQ ID NO: 2337171 - RNA, 13 nt, Human
cuuuaaugcaucu

SEQ ID NO: 2337172 - RNA, 19 nt, Human
cuuuaagcagcucuugcua

SEQ ID NO: 2337173 - RNA, 12 nt, Human
cuuuaaggaaaa

SEQ ID NO: 2337174 - RNA, 21 nt, Human
cuuuaagcagcucuugcuaau

SEQ ID NO: 2337175 - RNA, 23 nt, Human
cuuuaagacauacuccuuccauc

SEQ ID NO: 2337176 - RNA, 15 nt, Human
cuuuaagacugagca

SEQ ID NO: 2337177 - RNA, 14 nt, Human
cuuuaagaggacau

SEQ ID NO: 2337178 - RNA, 19 nt, Human
cuuuaagcacuacauaaac

SEQ ID NO: 2337179 - RNA, 20 nt, Human
cuuuaagcacuacauaaacu

SEQ ID NO: 2337180 - RNA, 14 nt, Human
cuuuaagcagcucu

SEQ ID NO: 2337181 - RNA, 16 nt, Human
cuuuaagcagcucuug

SEQ ID NO: 2337182 - RNA, 17 nt, Human
cuuuaagcagcucuugc

SEQ ID NO: 2337183 - RNA, 18 nt, Human
cuuuaagcagcucuugcu

SEQ ID NO: 2337184 - RNA, 14 nt, Human
cuuuaagacauacu

SEQ ID NO: 2337185 - RNA, 19 nt, Human
cuuuaacuuaauugcuaug

SEQ ID NO: 2337186 - RNA, 21 nt, Human
cuugucuuuggacccugaggc

SEQ ID NO: 2337187 - RNA, 22 nt, Human
cuugucuuuggacccugaggcc

SEQ ID NO: 2337188 - RNA, 22 nt, Human
cuuuaaugucacaggcaggucc

SEQ ID NO: 2337189 - RNA, 12 nt, Human
cuuuaaugcuuu

SEQ ID NO: 2337190 - RNA, 23 nt, Human
cuuuaaugcaucuagauuaugga

SEQ ID NO: 2337191 - RNA, 14 nt, Human
cuuucaauaggaaa

SEQ ID NO: 2337192 - RNA, 15 nt, Human
cuuucaauaggaaaa

SEQ ID NO: 2337193 - RNA, 17 nt, Human
cuuuaaugucacaggca

SEQ ID NO: 2337194 - RNA, 18 nt, Human
cuuuaaugucacaggcag

SEQ ID NO: 2337195 - RNA, 19 nt, Human
cuuuaaugucacaggcagg

SEQ ID NO: 2337196 - RNA, 20 nt, Human
cuuuaaugucacaggcaggu

SEQ ID NO: 2337197 - RNA, 16 nt, Human
cuuucacauagauguc

SEQ ID NO: 2337198 - RNA, 17 nt, Human
cuuucacauagagauca

SEQ ID NO: 2337199 - RNA, 15 nt, Human
cuuucaccccagggc

SEQ ID NO: 2337200 - RNA, 21 nt, Human
cuuucaccccagggccugagc

SEQ ID NO: 2337201 - RNA, 16 nt, Human
cuuucaccccagggcc

SEQ ID NO: 2337202 - RNA, 23 nt, Human
cuuucacacuuccaccagccugc

SEQ ID NO: 2337203 - RNA, 15 nt, Human
cuuucacagcuccuc

SEQ ID NO: 2337204 - RNA, 18 nt, Human
cuuucacagcuccuccca

SEQ ID NO: 2337205 - RNA, 21 nt, Human
cuuucacacuuccaccagccu

SEQ ID NO: 2337206 - RNA, 20 nt, Human
cuuucacacuuccaccagcc

SEQ ID NO: 2337207 - RNA, 19 nt, Human
cuuucacacuuccaccagc

SEQ ID NO: 2337208 - RNA, 16 nt, Human
cuuucacacuuccacc

SEQ ID NO: 2337209 - RNA, 13 nt, Human
cuuucacagcucc

SEQ ID NO: 2337210 - RNA, 14 nt, Human
cuuucacagcuccu

SEQ ID NO: 2337211 - RNA, 15 nt, Human
cuuucacacuuccac

SEQ ID NO: 2337212 - RNA, 14 nt, Human
cuuucacacuucca

SEQ ID NO: 2337213 - RNA, 16 nt, Human
cuuucacaaccuucug

SEQ ID NO: 2337214 - RNA, 18 nt, Human
cuuucaauaggaaaaacu

SEQ ID NO: 2337215 - RNA, 17 nt, Human
cuuucaauaggaaaaac

SEQ ID NO: 2337216 - RNA, 21 nt, Human
cuuccaugagaacagcagggu

SEQ ID NO: 2337217 - RNA, 15 nt, Human
cuuccauguggagaa

SEQ ID NO: 2337218 - RNA, 18 nt, Human
cuuccauguggagaaagg

SEQ ID NO: 2337219 - RNA, 18 nt, Human
cuuccaucuuuccugaug

SEQ ID NO: 2337220 - RNA, 22 nt, Human
cuuccaucuuuccugauggcag

SEQ ID NO: 2337221 - RNA, 12 nt, Human
cuuccauuuaua

SEQ ID NO: 2337222 - RNA, 17 nt, Human
cuuccaugagaacagca

SEQ ID NO: 2337223 - RNA, 13 nt, Human
cuuccauuugcaa

SEQ ID NO: 2337224 - RNA, 16 nt, Human
cuuccauuugugugug

SEQ ID NO: 2337225 - RNA, 14 nt, Human
cuuccauuugcaag

SEQ ID NO: 2337226 - RNA, 14 nt, Human
cuucccaaaggacu

SEQ ID NO: 2337227 - RNA, 21 nt, Human
cuucccaaaggacuccaccca

SEQ ID NO: 2337228 - RNA, 18 nt, Human
cuucccaaaggacuccac

SEQ ID NO: 2337229 - RNA, 19 nt, Human
cuucccaaaggacuccacc

SEQ ID NO: 2337230 - RNA, 14 nt, Human
cuuacaugcauuug

SEQ ID NO: 2337231 - RNA, 21 nt, Human
cuuccauaugaccucaugcau

SEQ ID NO: 2337232 - RNA, 20 nt, Human
cuuacauuagcaguuugcuu

SEQ ID NO: 2337233 - RNA, 12 nt, Human
cuuccaucaugu

SEQ ID NO: 2337234 - RNA, 13 nt, Human
cuuccaucauguc

SEQ ID NO: 2337235 - RNA, 17 nt, Human
cuuccaucaugucccca

SEQ ID NO: 2337236 - RNA, 14 nt, Human
cuuccaucaugucc

SEQ ID NO: 2337237 - RNA, 14 nt, Human
cuuccaucccagag

SEQ ID NO: 2337238 - RNA, 14 nt, Human
cuuccaucccagga

SEQ ID NO: 2337239 - RNA, 17 nt, Human
cuuccaucccaggacac

SEQ ID NO: 2337240 - RNA, 16 nt, Human
cuuccaucccuacccc

SEQ ID NO: 2337241 - RNA, 15 nt, Human
cuuccaucccuaccc

SEQ ID NO: 2337242 - RNA, 14 nt, Human
cuuccaucccuacc

SEQ ID NO: 2337243 - RNA, 12 nt, Human
cuuccaucccua

SEQ ID NO: 2337244 - RNA, 19 nt, Human
cuuccaucccuacccccua

SEQ ID NO: 2337245 - RNA, 17 nt, Human
cuuccaucccuaccccc

SEQ ID NO: 2337246 - RNA, 15 nt, Human
cuuccaucucgccac

SEQ ID NO: 2337247 - RNA, 22 nt, Human
cuuccaucccaggacaccacac

SEQ ID NO: 2337248 - RNA, 21 nt, Human
cuuacauguuuucuuugcuuu

SEQ ID NO: 2337249 - RNA, 14 nt, Human
cuuacauguuuucu

SEQ ID NO: 2337250 - RNA, 19 nt, Human
cuuacaugcauuacugcau

SEQ ID NO: 2337251 - RNA, 18 nt, Human
cuuacaugcauuacugca

SEQ ID NO: 2337252 - RNA, 16 nt, Human
cuuacauaauuuuuua

SEQ ID NO: 2337253 - RNA, 12 nt, Human
cuuacaugauuc

SEQ ID NO: 2337254 - RNA, 22 nt, Human
cuuacauaauuuuuuauucaag

SEQ ID NO: 2337255 - RNA, 22 nt, Human
cuuacagcuggguggcacugcc

SEQ ID NO: 2337256 - RNA, 22 nt, Human
cuuaaagaaagucgaauuaaua

SEQ ID NO: 2337257 - RNA, 23 nt, Human
cuuacagcuggguggcacugcca

SEQ ID NO: 2337258 - RNA, 16 nt, Human
cuuacaguaggagccc

SEQ ID NO: 2337259 - RNA, 23 nt, Human
cuuacaguaggagcccagcucug

SEQ ID NO: 2337260 - RNA, 23 nt, Human
cuuacagugagggcuauacaugg

SEQ ID NO: 2337261 - RNA, 18 nt, Human
cuuacaguuuuaaauucu

SEQ ID NO: 2337262 - RNA, 12 nt, Human
cuucuucucccc

SEQ ID NO: 2337263 - RNA, 13 nt, Human
cuucuucuccccc

SEQ ID NO: 2337264 - RNA, 12 nt, Human
cuucuucuccua

SEQ ID NO: 2337265 - RNA, 19 nt, Human
cuucuucuccuauguguaa

SEQ ID NO: 2337266 - RNA, 18 nt, Human
cuucuucuccuaugugua

SEQ ID NO: 2337267 - RNA, 14 nt, Human
cuucuucuucagaa

SEQ ID NO: 2337268 - RNA, 15 nt, Human
cuucuucuuucuaca

SEQ ID NO: 2337269 - RNA, 13 nt, Human
cuucuucuucaga

SEQ ID NO: 2337270 - RNA, 18 nt, Human
cuucuucuuuuugcuguu

SEQ ID NO: 2337271 - RNA, 21 nt, Human
cuucuucuuuugagcaacuuu

SEQ ID NO: 2337272 - RNA, 17 nt, Human
cuucuucuuuuugcugu

SEQ ID NO: 2337273 - RNA, 22 nt, Human
cuucuugaaauuuuaaccuaug

SEQ ID NO: 2337274 - RNA, 19 nt, Human
cuucuugaacacucaugcu

SEQ ID NO: 2337275 - RNA, 20 nt, Human
cuucuugaacacucaugcug

SEQ ID NO: 2337276 - RNA, 12 nt, Human
cuucuugaaggu

SEQ ID NO: 2337277 - RNA, 21 nt, Human
cuucuugaacacucaugcuga

SEQ ID NO: 2337278 - RNA, 22 nt, Human
cuucuugaacacucaugcugaa

SEQ ID NO: 2337279 - RNA, 21 nt, Human
cuucuucggggaacuccugga

SEQ ID NO: 2337280 - RNA, 13 nt, Human
cuucuucucaggc

SEQ ID NO: 2337281 - RNA, 14 nt, Human
cuucuuauucucac

SEQ ID NO: 2337282 - RNA, 22 nt, Human
cuucuuauggaauugauuugca

SEQ ID NO: 2337283 - RNA, 23 nt, Human
cuucuuauggaauugauuugcau

SEQ ID NO: 2337284 - RNA, 19 nt, Human
cuucuuauggaauugauuu

SEQ ID NO: 2337285 - RNA, 16 nt, Human
cuucuuauacauuuga

SEQ ID NO: 2337286 - RNA, 13 nt, Human
cuucuuauacauu

SEQ ID NO: 2337287 - RNA, 15 nt, Human
cuucuuacaugcauu

SEQ ID NO: 2337288 - RNA, 23 nt, Human
cuucugaacuuggcgcugccccu

SEQ ID NO: 2337289 - RNA, 18 nt, Human
cuucugacccaugcugcc

SEQ ID NO: 2337290 - RNA, 16 nt, Human
cuucugacccaugcug

SEQ ID NO: 2337291 - RNA, 17 nt, Human
cuucugacccaugcugc

SEQ ID NO: 2337292 - RNA, 18 nt, Human
cuuccucccucccucuuu

SEQ ID NO: 2337293 - RNA, 14 nt, Human
cuuccucccucccu

SEQ ID NO: 2337294 - RNA, 13 nt, Human
cuuccucccuccc

SEQ ID NO: 2337295 - RNA, 12 nt, Human
cuuccucccucc

SEQ ID NO: 2337296 - RNA, 16 nt, Human
cuuccucuccacugcc

SEQ ID NO: 2337297 - RNA, 17 nt, Human
cuuccucuccacugccu

SEQ ID NO: 2337298 - RNA, 19 nt, Human
cuuccucuccacugccuuc

SEQ ID NO: 2337299 - RNA, 21 nt, Human
cuuccucuccacugccuucga

SEQ ID NO: 2337300 - RNA, 11 nt, Human
cuuccucugcu

SEQ ID NO: 2337301 - RNA, 15 nt, Human
cuuccucccucauuc

SEQ ID NO: 2337302 - RNA, 14 nt, Human
cuuccucugcagcu

SEQ ID NO: 2337303 - RNA, 19 nt, Human
cuuccucugcagcugaccu

SEQ ID NO: 2337304 - RNA, 12 nt, Human
cuuccucugcug

SEQ ID NO: 2337305 - RNA, 13 nt, Human
cuuccucugcuga

SEQ ID NO: 2337306 - RNA, 20 nt, Human
cuuccucugcagcugaccuc

SEQ ID NO: 2337307 - RNA, 22 nt, Human
cuuccucugcagcugaccucug

SEQ ID NO: 2337308 - RNA, 17 nt, Human
cuucuaauauuuauugc

SEQ ID NO: 2337309 - RNA, 20 nt, Human
cuucuaauauuuauugcuuu

SEQ ID NO: 2337310 - RNA, 21 nt, Human
cuucuaauauuuauugcuuua

SEQ ID NO: 2337311 - RNA, 15 nt, Human
cuucuaucccaggag

SEQ ID NO: 2337312 - RNA, 23 nt, Human
cuucuauggacugguuguugcca

SEQ ID NO: 2337313 - RNA, 18 nt, Human
cuucuauuagccagucuu

SEQ ID NO: 2337314 - RNA, 19 nt, Human
cuucuauuauagccacauc

SEQ ID NO: 2337315 - RNA, 22 nt, Human
cuucucugacuucugccuggag

SEQ ID NO: 2337316 - RNA, 18 nt, Human
cuucuacugagccuucag

SEQ ID NO: 2337317 - RNA, 15 nt, Human
cuucuaccugccacu

SEQ ID NO: 2337318 - RNA, 16 nt, Human
cuucuaccugccacuc

SEQ ID NO: 2337319 - RNA, 17 nt, Human
cuucuaccugccacuca

SEQ ID NO: 2337320 - RNA, 17 nt, Human
cuucuaccuuaaaaugu

SEQ ID NO: 2337321 - RNA, 12 nt, Human
cuucuaccugcc

SEQ ID NO: 2337322 - RNA, 13 nt, Human
cuucuaccugcca

SEQ ID NO: 2337323 - RNA, 14 nt, Human
cuucuaccugccac

SEQ ID NO: 2337324 - RNA, 23 nt, Human
cuucuaccugccacucacacagc

SEQ ID NO: 2337325 - RNA, 17 nt, Human
cuucuaccaugaacaga

SEQ ID NO: 2337326 - RNA, 17 nt, Human
cuucuaccucuuggcug

SEQ ID NO: 2337327 - RNA, 16 nt, Human
cuucucugcuccacca

SEQ ID NO: 2337328 - RNA, 15 nt, Human
cuucucugcuccacc

SEQ ID NO: 2337329 - RNA, 14 nt, Human
cuucucugcuccac

SEQ ID NO: 2337330 - RNA, 13 nt, Human
cuucucugcucca

SEQ ID NO: 2337331 - RNA, 12 nt, Human
cuucucugcucc

SEQ ID NO: 2337332 - RNA, 11 nt, Human
cuucucugcuc

SEQ ID NO: 2337333 - RNA, 13 nt, Human
cuucucugucuca

SEQ ID NO: 2337334 - RNA, 21 nt, Human
cuucucuggagccaaguccag

SEQ ID NO: 2337335 - RNA, 22 nt, Human
cuucucuggagccaaguccaga

SEQ ID NO: 2337336 - RNA, 22 nt, Human
cuucucugcuccaccacauccu

SEQ ID NO: 2337337 - RNA, 21 nt, Human
cuucucugcuccaccacaucc

SEQ ID NO: 2337338 - RNA, 12 nt, Human
cuucucugcugc

SEQ ID NO: 2337339 - RNA, 19 nt, Human
cuucucuggaaagggggga

SEQ ID NO: 2337340 - RNA, 20 nt, Human
cuucucuggagccaagucca

SEQ ID NO: 2337341 - RNA, 19 nt, Human
cuucugaacuuggcgcugc

SEQ ID NO: 2337342 - RNA, 22 nt, Human
cuucugaacucaaacugaggaa

SEQ ID NO: 2337343 - RNA, 18 nt, Human
cuucugaacucaaacuga

SEQ ID NO: 2337344 - RNA, 17 nt, Human
cuucugaacucaaacug

SEQ ID NO: 2337345 - RNA, 15 nt, Human
cuucugacccaugcu

SEQ ID NO: 2337346 - RNA, 22 nt, Human
cuucugaacuuggcgcugcccc

SEQ ID NO: 2337347 - RNA, 17 nt, Human
gagcuguuuauggccuc

SEQ ID NO: 2337348 - RNA, 16 nt, Human
gagcuguuuauggccu

SEQ ID NO: 2337349 - RNA, 17 nt, Human
gagcuguuuacuaggga

SEQ ID NO: 2337350 - RNA, 22 nt, Human
gagcuguucacagccagacugg

SEQ ID NO: 2337351 - RNA, 18 nt, Human
gagcuguuuauggccuca

SEQ ID NO: 2337352 - RNA, 16 nt, Human
gagcuguugccucagu

SEQ ID NO: 2337353 - RNA, 13 nt, Human
gagcuggccccgc

SEQ ID NO: 2337354 - RNA, 14 nt, Human
gagcuggccccgcc

SEQ ID NO: 2337355 - RNA, 16 nt, Human
gagcuggccccgccgc

SEQ ID NO: 2337356 - RNA, 17 nt, Human
gagcuggccccgccgcc

SEQ ID NO: 2337357 - RNA, 23 nt, Human
gagcuggccgcgccaaauaaugu

SEQ ID NO: 2337358 - RNA, 20 nt, Human
gagcuggcaaagguggcucu

SEQ ID NO: 2337359 - RNA, 17 nt, Human
gagcuggccgugggccu

SEQ ID NO: 2337360 - RNA, 19 nt, Human
gagcuggccgugggccugg

SEQ ID NO: 2337361 - RNA, 20 nt, Human
gagcuggccgugggccuggg

SEQ ID NO: 2337362 - RNA, 16 nt, Human
gagcuggcgucugucu

SEQ ID NO: 2337363 - RNA, 12 nt, Human
gagcuggcucug

SEQ ID NO: 2337364 - RNA, 20 nt, Human
gagcuguucacagccagacu

SEQ ID NO: 2337365 - RNA, 13 nt, Human
gagcccugguggc

SEQ ID NO: 2337366 - RNA, 14 nt, Human
gagcccugguggca

SEQ ID NO: 2337367 - RNA, 23 nt, Human
gagcccuggcaggaugacccugc

SEQ ID NO: 2337368 - RNA, 13 nt, Human
gagcccuggcagg

SEQ ID NO: 2337369 - RNA, 14 nt, Human
gagcuggagccugg

SEQ ID NO: 2337370 - RNA, 15 nt, Human
gagcuggagccuggu

SEQ ID NO: 2337371 - RNA, 20 nt, Human
gagcuggagccuggugcccu

SEQ ID NO: 2337372 - RNA, 12 nt, Human
gagcuggagccu

SEQ ID NO: 2337373 - RNA, 16 nt, Human
gagccccacacggagg

SEQ ID NO: 2337374 - RNA, 12 nt, Human
gagccccacacu

SEQ ID NO: 2337375 - RNA, 14 nt, Human
gagccccacacgga

SEQ ID NO: 2337376 - RNA, 21 nt, Human
gagccccaaguccugaagagg

SEQ ID NO: 2337377 - RNA, 11 nt, Human
gagccccaagu

SEQ ID NO: 2337378 - RNA, 13 nt, Human
gagccccaagucc

SEQ ID NO: 2337379 - RNA, 15 nt, Human
gagccccaaguccug

SEQ ID NO: 2337380 - RNA, 17 nt, Human
gagccccaaguccugaa

SEQ ID NO: 2337381 - RNA, 22 nt, Human
gagccccacacuggggugccgc

SEQ ID NO: 2337382 - RNA, 13 nt, Human
gagccccgaggcc

SEQ ID NO: 2337383 - RNA, 14 nt, Human
gagccccgaggccu

SEQ ID NO: 2337384 - RNA, 23 nt, Human
gagccccgcagaccuccccagcc

SEQ ID NO: 2337385 - RNA, 15 nt, Human
gagccccuaccccac

SEQ ID NO: 2337386 - RNA, 17 nt, Human
gagccccuaccccacac

SEQ ID NO: 2337387 - RNA, 20 nt, Human
gagccccuaccccacaccag

SEQ ID NO: 2337388 - RNA, 12 nt, Human
gagccccugggu

SEQ ID NO: 2337389 - RNA, 13 nt, Human
gagccccugggug

SEQ ID NO: 2337390 - RNA, 14 nt, Human
gagccccugggugg

SEQ ID NO: 2337391 - RNA, 19 nt, Human
gagccccuggguggguggu

SEQ ID NO: 2337392 - RNA, 12 nt, Human
gagccccugguc

SEQ ID NO: 2337393 - RNA, 13 nt, Human
gagccccgcagac

SEQ ID NO: 2337394 - RNA, 18 nt, Human
gagccccgcagaccuccc

SEQ ID NO: 2337395 - RNA, 22 nt, Human
gagccccgcagaccuccccagc

SEQ ID NO: 2337396 - RNA, 17 nt, Human
gagccccgaggccuucu

SEQ ID NO: 2337397 - RNA, 12 nt, Human
gagcccugggag

SEQ ID NO: 2337398 - RNA, 15 nt, Human
gagcccucagaaccc

SEQ ID NO: 2337399 - RNA, 22 nt, Human
gagccccugucuagagagggag

SEQ ID NO: 2337400 - RNA, 21 nt, Human
gagccccugucuagagaggga

SEQ ID NO: 2337401 - RNA, 11 nt, Human
gagccccuucc

SEQ ID NO: 2337402 - RNA, 13 nt, Human
gagccccuuccuu

SEQ ID NO: 2337403 - RNA, 20 nt, Human
gagccccugucuagagaggg

SEQ ID NO: 2337404 - RNA, 20 nt, Human
gagccccugguccugagggu

SEQ ID NO: 2337405 - RNA, 13 nt, Human
gagccccuggucc

SEQ ID NO: 2337406 - RNA, 14 nt, Human
gagccccugguccu

SEQ ID NO: 2337407 - RNA, 21 nt, Human
gagccccuucugcucagcucu

SEQ ID NO: 2337408 - RNA, 20 nt, Human
gagccccuucugcucagcuc

SEQ ID NO: 2337409 - RNA, 17 nt, Human
gagccccuucugcucag

SEQ ID NO: 2337410 - RNA, 19 nt, Human
gagccccuuccuugcucug

SEQ ID NO: 2337411 - RNA, 21 nt, Human
gagccccuuccuugcucugca

SEQ ID NO: 2337412 - RNA, 16 nt, Human
gagcccugggaggcuc

SEQ ID NO: 2337413 - RNA, 18 nt, Human
gagcccugggaggcucug

SEQ ID NO: 2337414 - RNA, 19 nt, Human
gagcccugggaggcucugg

SEQ ID NO: 2337415 - RNA, 20 nt, Human
gagcccugggaggcucugga

SEQ ID NO: 2337416 - RNA, 18 nt, Human
gagcaucucuugaggcca

SEQ ID NO: 2337417 - RNA, 17 nt, Human
gagcauccaccuccuuc

SEQ ID NO: 2337418 - RNA, 18 nt, Human
gagcauccaccuccuucu

SEQ ID NO: 2337419 - RNA, 13 nt, Human
gagcaucaggcca

SEQ ID NO: 2337420 - RNA, 15 nt, Human
gagcaucaggccagg

SEQ ID NO: 2337421 - RNA, 16 nt, Human
gagcaucaggccaggc

SEQ ID NO: 2337422 - RNA, 23 nt, Human
gagcaucucuugaggccaggagu

SEQ ID NO: 2337423 - RNA, 22 nt, Human
gagcaucucuugaggccaggag

SEQ ID NO: 2337424 - RNA, 20 nt, Human
gagcaucucuugaggccagg

SEQ ID NO: 2337425 - RNA, 19 nt, Human
gagcaucucuugaggccag

SEQ ID NO: 2337426 - RNA, 13 nt, Human
gagcaugccugga

SEQ ID NO: 2337427 - RNA, 13 nt, Human
gagcaucugacuc

SEQ ID NO: 2337428 - RNA, 21 nt, Human
gagcaugccuggauggggcug

SEQ ID NO: 2337429 - RNA, 20 nt, Human
gagcaguccugccucagccu

SEQ ID NO: 2337430 - RNA, 16 nt, Human
gagcaguccugccuca

SEQ ID NO: 2337431 - RNA, 17 nt, Human
gagcaguaucaugaagc

SEQ ID NO: 2337432 - RNA, 14 nt, Human
gagcaucaggccag

SEQ ID NO: 2337433 - RNA, 16 nt, Human
gagcaggggcagggug

SEQ ID NO: 2337434 - RNA, 15 nt, Human
gagcaggggcgugga

SEQ ID NO: 2337435 - RNA, 20 nt, Human
gagcagggguccuuggugug

SEQ ID NO: 2337436 - RNA, 16 nt, Human
gagcaguaucaugaag

SEQ ID NO: 2337437 - RNA, 16 nt, Human
gagcagggugcugugg

SEQ ID NO: 2337438 - RNA, 16 nt, Human
gagcaggguguuggga

SEQ ID NO: 2337439 - RNA, 14 nt, Human
gagcagucaggaaa

SEQ ID NO: 2337440 - RNA, 13 nt, Human
gagcaggggcagg

SEQ ID NO: 2337441 - RNA, 13 nt, Human
gaggggcagcccu

SEQ ID NO: 2337442 - RNA, 18 nt, Human
gaggggcagaacagccgc

SEQ ID NO: 2337443 - RNA, 16 nt, Human
gaggggcagcccuugc

SEQ ID NO: 2337444 - RNA, 14 nt, Human
gaggggcagcccuu

SEQ ID NO: 2337445 - RNA, 15 nt, Human
gaggggcagcccuug

SEQ ID NO: 2337446 - RNA, 15 nt, Human
gagggcccuaccuga

SEQ ID NO: 2337447 - RNA, 22 nt, Human
gagggccccucugcccagcuug

SEQ ID NO: 2337448 - RNA, 17 nt, Human
gagggcccugagcugag

SEQ ID NO: 2337449 - RNA, 12 nt, Human
gagggcccuggu

SEQ ID NO: 2337450 - RNA, 22 nt, Human
gagggcccugguguuucuagca

SEQ ID NO: 2337451 - RNA, 16 nt, Human
gagggccgagugagag

SEQ ID NO: 2337452 - RNA, 17 nt, Human
gagggccguaccccacc

SEQ ID NO: 2337453 - RNA, 14 nt, Human
gagggccugcaagg

SEQ ID NO: 2337454 - RNA, 17 nt, Human
gagggccugcaagggag

SEQ ID NO: 2337455 - RNA, 21 nt, Human
gagggccugcaagggagugag

SEQ ID NO: 2337456 - RNA, 21 nt, Human
gaggggacgcugguagagaug

SEQ ID NO: 2337457 - RNA, 12 nt, Human
gaggggagaagc

SEQ ID NO: 2337458 - RNA, 21 nt, Human
gaggggaggaucacuggagcc

SEQ ID NO: 2337459 - RNA, 11 nt, Human
gaggggagggg

SEQ ID NO: 2337460 - RNA, 22 nt, Human
gaggggacuauuuaugaaggca

SEQ ID NO: 2337461 - RNA, 12 nt, Human
gagggccugggc

SEQ ID NO: 2337462 - RNA, 22 nt, Human
gagggccugaggucuggcugcu

SEQ ID NO: 2337463 - RNA, 21 nt, Human
gagggccguaccccacccuca

SEQ ID NO: 2337464 - RNA, 15 nt, Human
gagggccugaggucu

SEQ ID NO: 2337465 - RNA, 22 nt, Human
gagggccucaaaggcccgcucu

SEQ ID NO: 2337466 - RNA, 18 nt, Human
gagggccguaccccaccc

SEQ ID NO: 2337467 - RNA, 20 nt, Human
gagggccguaccccacccuc

SEQ ID NO: 2337468 - RNA, 16 nt, Human
gagggcccaggcaggc

SEQ ID NO: 2337469 - RNA, 13 nt, Human
gagggcccaggca

SEQ ID NO: 2337470 - RNA, 15 nt, Human
gagggcccagagcag

SEQ ID NO: 2337471 - RNA, 16 nt, Human
gagggcccagagcagg

SEQ ID NO: 2337472 - RNA, 18 nt, Human
gagggcccagagcaggaa

SEQ ID NO: 2337473 - RNA, 20 nt, Human
gagggcccagagcaggaagc

SEQ ID NO: 2337474 - RNA, 22 nt, Human
gagggcccagagcaggaagcau

SEQ ID NO: 2337475 - RNA, 11 nt, Human
gagggccccuc

SEQ ID NO: 2337476 - RNA, 12 nt, Human
gagggccccucu

SEQ ID NO: 2337477 - RNA, 15 nt, Human
gagggccccucugcc

SEQ ID NO: 2337478 - RNA, 16 nt, Human
gagggccccucugccc

SEQ ID NO: 2337479 - RNA, 17 nt, Human
gagggccccucugccca

SEQ ID NO: 2337480 - RNA, 18 nt, Human
gagggccccucugcccag

SEQ ID NO: 2337481 - RNA, 20 nt, Human
gagggccccucugcccagcu

SEQ ID NO: 2337482 - RNA, 14 nt, Human
gaggcugaggcaga

SEQ ID NO: 2337483 - RNA, 16 nt, Human
gaggcugagacaggag

SEQ ID NO: 2337484 - RNA, 13 nt, Human
gagggcccagagc

SEQ ID NO: 2337485 - RNA, 14 nt, Human
gagggcccagagca

SEQ ID NO: 2337486 - RNA, 13 nt, Human
gaggcugaggcag

SEQ ID NO: 2337487 - RNA, 12 nt, Human
gaggcugaggca

SEQ ID NO: 2337488 - RNA, 16 nt, Human
gaggcucuuucugggc

SEQ ID NO: 2337489 - RNA, 12 nt, Human
gaggccaaggug

SEQ ID NO: 2337490 - RNA, 14 nt, Human
gaggcugagacagg

SEQ ID NO: 2337491 - RNA, 16 nt, Human
gaggcugaggcaagag

SEQ ID NO: 2337492 - RNA, 20 nt, Human
gaggcugaaagaggccaaug

SEQ ID NO: 2337493 - RNA, 20 nt, Human
gaggcucuggagcccacugu

SEQ ID NO: 2337494 - RNA, 18 nt, Human
gaggcugagaugggagaa

SEQ ID NO: 2337495 - RNA, 17 nt, Human
gaggcuccacuuggucu

SEQ ID NO: 2337496 - RNA, 19 nt, Human
gaggcauuuguuugaacug

SEQ ID NO: 2337497 - RNA, 22 nt, Human
gaggcaugugaugagaggaaau

SEQ ID NO: 2337498 - RNA, 20 nt, Human
gaggcaugugaugagaggaa

SEQ ID NO: 2337499 - RNA, 21 nt, Human
gaggcaugugaugagaggaaa

SEQ ID NO: 2337500 - RNA, 21 nt, Human
gaggcauuuguuugaacugau

SEQ ID NO: 2337501 - RNA, 15 nt, Human
gaggcuccacuuggu

SEQ ID NO: 2337502 - RNA, 23 nt, Human
gaggacuguugacauccaagcuu

SEQ ID NO: 2337503 - RNA, 14 nt, Human
gaggacuugugucu

SEQ ID NO: 2337504 - RNA, 17 nt, Human
gaggacuugugucucug

SEQ ID NO: 2337505 - RNA, 16 nt, Human
gaggacuugugucucu

SEQ ID NO: 2337506 - RNA, 16 nt, Human
gaggacuuuucuuugu

SEQ ID NO: 2337507 - RNA, 20 nt, Human
gaggacuuuucuuuguggcu

SEQ ID NO: 2337508 - RNA, 23 nt, Human
gaggacuuuucuuuguggcuucc

SEQ ID NO: 2337509 - RNA, 15 nt, Human
gaggacgugggcggc

SEQ ID NO: 2337510 - RNA, 17 nt, Human
gaggacggugcaaccca

SEQ ID NO: 2337511 - RNA, 20 nt, Human
gaggacggugcaacccaagg

SEQ ID NO: 2337512 - RNA, 16 nt, Human
gaggacggugcaaccc

SEQ ID NO: 2337513 - RNA, 16 nt, Human
gaggacgugggcggca

SEQ ID NO: 2337514 - RNA, 18 nt, Human
gaggacgugggcggcaga

SEQ ID NO: 2337515 - RNA, 20 nt, Human
gaggacgugggcggcagaga

SEQ ID NO: 2337516 - RNA, 22 nt, Human
gaggacgugggcggcagagagg

SEQ ID NO: 2337517 - RNA, 23 nt, Human
gaggacugccccgugcagacugg

SEQ ID NO: 2337518 - RNA, 20 nt, Human
gaggacuguagggagggcgg

SEQ ID NO: 2337519 - RNA, 21 nt, Human
gaggacuguagggagggcggc

SEQ ID NO: 2337520 - RNA, 13 nt, Human
gaggacuguauuu

SEQ ID NO: 2337521 - RNA, 18 nt, Human
gaggacuguauuugugac

SEQ ID NO: 2337522 - RNA, 16 nt, Human
gaggacuagaaccugg

SEQ ID NO: 2337523 - RNA, 18 nt, Human
gaggacuagaaccuggag

SEQ ID NO: 2337524 - RNA, 18 nt, Human
gaggacucacuugcccac

SEQ ID NO: 2337525 - RNA, 18 nt, Human
gaggacaugauggagcgc

SEQ ID NO: 2337526 - RNA, 20 nt, Human
gaggacauaaugggguccug

SEQ ID NO: 2337527 - RNA, 21 nt, Human
gaggacauguuuuuguuuucu

SEQ ID NO: 2337528 - RNA, 22 nt, Human
gaggacaguauuuguggggagg

SEQ ID NO: 2337529 - RNA, 22 nt, Human
gaggaccacuccuguacacuga

SEQ ID NO: 2337530 - RNA, 13 nt, Human
gaggaccacuccu

SEQ ID NO: 2337531 - RNA, 13 nt, Human
gaggacccagacc

SEQ ID NO: 2337532 - RNA, 19 nt, Human
gaggaccagggcagggcca

SEQ ID NO: 2337533 - RNA, 14 nt, Human
gaggacccagaccc

SEQ ID NO: 2337534 - RNA, 16 nt, Human
gaggacccagacccag

SEQ ID NO: 2337535 - RNA, 20 nt, Human
gaggacgcucucuggccuuc

SEQ ID NO: 2337536 - RNA, 21 nt, Human
gaggacgcucucuggccuucg

SEQ ID NO: 2337537 - RNA, 22 nt, Human
gaggcagggucucacucugucg

SEQ ID NO: 2337538 - RNA, 15 nt, Human
gaggagcagugcagg

SEQ ID NO: 2337539 - RNA, 17 nt, Human
gaggcaucgcaauguaa

SEQ ID NO: 2337540 - RNA, 13 nt, Human
gaggcauggcccu

SEQ ID NO: 2337541 - RNA, 14 nt, Human
gaggcauggcccug

SEQ ID NO: 2337542 - RNA, 15 nt, Human
gaggcauggcccugg

SEQ ID NO: 2337543 - RNA, 17 nt, Human
gaggcauggcccugggg

SEQ ID NO: 2337544 - RNA, 18 nt, Human
gaggcauggcccuggggu

SEQ ID NO: 2337545 - RNA, 19 nt, Human
gaggcagggucucacucug

SEQ ID NO: 2337546 - RNA, 20 nt, Human
gaggcagggucucacucugu

SEQ ID NO: 2337547 - RNA, 13 nt, Human
gaggagaggagag

SEQ ID NO: 2337548 - RNA, 17 nt, Human
gaggagagccagagaag

SEQ ID NO: 2337549 - RNA, 22 nt, Human
gaggagagccagagaagugaca

SEQ ID NO: 2337550 - RNA, 23 nt, Human
gaggagagccagagaagugacag

SEQ ID NO: 2337551 - RNA, 14 nt, Human
gaggagaggagaga

SEQ ID NO: 2337552 - RNA, 16 nt, Human
gaggagaggagagagg

SEQ ID NO: 2337553 - RNA, 17 nt, Human
gaggagaggagagaggc

SEQ ID NO: 2337554 - RNA, 12 nt, Human
gaggagagaggc

SEQ ID NO: 2337555 - RNA, 13 nt, Human
gaggagagaggca

SEQ ID NO: 2337556 - RNA, 14 nt, Human
gaggagagaggcag

SEQ ID NO: 2337557 - RNA, 15 nt, Human
gaggagagaggcaga

SEQ ID NO: 2337558 - RNA, 17 nt, Human
gaggagagaggcagaga

SEQ ID NO: 2337559 - RNA, 16 nt, Human
gaggagagaggcagag

SEQ ID NO: 2337560 - RNA, 13 nt, Human
gaggagagccaga

SEQ ID NO: 2337561 - RNA, 18 nt, Human
gaggcagggucucacucu

SEQ ID NO: 2337562 - RNA, 17 nt, Human
gaggagaugcuccuugg

SEQ ID NO: 2337563 - RNA, 16 nt, Human
gaggagcaaaggcuga

SEQ ID NO: 2337564 - RNA, 20 nt, Human
gaggagaggggaagggccag

SEQ ID NO: 2337565 - RNA, 14 nt, Human
gaggagagucccag

SEQ ID NO: 2337566 - RNA, 15 nt, Human
gaggagagucccaga

SEQ ID NO: 2337567 - RNA, 17 nt, Human
gaggagagucccagagc

SEQ ID NO: 2337568 - RNA, 22 nt, Human
gaggagaagaauuuucagaccc

SEQ ID NO: 2337569 - RNA, 15 nt, Human
gaggagacauuggcu

SEQ ID NO: 2337570 - RNA, 22 nt, Human
gaggagacuagauuuaugaaua

SEQ ID NO: 2337571 - RNA, 20 nt, Human
gaggagaagaauuuucagac

SEQ ID NO: 2337572 - RNA, 12 nt, Human
gaggagaagaau

SEQ ID NO: 2337573 - RNA, 9 nt, Human
gaggagaaa

SEQ ID NO: 2337574 - RNA, 13 nt, Human
gaggagaaacaca

SEQ ID NO: 2337575 - RNA, 22 nt, Human
gaggacuugugucucugugcuu

SEQ ID NO: 2337576 - RNA, 18 nt, Human
gaggacuugugucucugu

SEQ ID NO: 2337577 - RNA, 14 nt, Human
gaggagaaacugga

SEQ ID NO: 2337578 - RNA, 12 nt, Human
gaggagaaacug

SEQ ID NO: 2337579 - RNA, 12 nt, Human
gaggagagagga

SEQ ID NO: 2337580 - RNA, 12 nt, Human
gaggagagaaga

SEQ ID NO: 2337581 - RNA, 13 nt, Human
gaggagagaagaa

SEQ ID NO: 2337582 - RNA, 14 nt, Human
gaggagagaagaau

SEQ ID NO: 2337583 - RNA, 15 nt, Human
gaggagagaagaaug

SEQ ID NO: 2337584 - RNA, 21 nt, Human
gaggagagaagaaugagccua

SEQ ID NO: 2337585 - RNA, 20 nt, Human
gaggagagagcagcuucugc

SEQ ID NO: 2337586 - RNA, 21 nt, Human
gaggagagagcagcuucugcc

SEQ ID NO: 2337587 - RNA, 11 nt, Human
gaggagagagg

SEQ ID NO: 2337588 - RNA, 14 nt, Human
gaggagagaggacc

SEQ ID NO: 2337589 - RNA, 15 nt, Human
gaggagagaggaccc

SEQ ID NO: 2337590 - RNA, 22 nt, Human
gagaagugccccugcugccucc

SEQ ID NO: 2337591 - RNA, 20 nt, Human
gagaagugccccugcugccu

SEQ ID NO: 2337592 - RNA, 17 nt, Human
gagaagugccccugcug

SEQ ID NO: 2337593 - RNA, 16 nt, Human
gagaagugccccugcu

SEQ ID NO: 2337594 - RNA, 15 nt, Human
gagaagugccccugc

SEQ ID NO: 2337595 - RNA, 15 nt, Human
gagaagguccuuaau

SEQ ID NO: 2337596 - RNA, 23 nt, Human
gagaagguggguuuucaucaaga

SEQ ID NO: 2337597 - RNA, 16 nt, Human
gagaaguauacauaag

SEQ ID NO: 2337598 - RNA, 13 nt, Human
gagaaggcaggaa

SEQ ID NO: 2337599 - RNA, 12 nt, Human
gagaaggcagga

SEQ ID NO: 2337600 - RNA, 12 nt, Human
gagaaggcagcc

SEQ ID NO: 2337601 - RNA, 16 nt, Human
gagaaggcagccacca

SEQ ID NO: 2337602 - RNA, 17 nt, Human
gagaaggaucuagaaug

SEQ ID NO: 2337603 - RNA, 15 nt, Human
gagaaggagagaaag

SEQ ID NO: 2337604 - RNA, 11 nt, Human
gagaaggcagc

SEQ ID NO: 2337605 - RNA, 15 nt, Human
gagaagggauggagg

SEQ ID NO: 2337606 - RNA, 23 nt, Human
gagaaggcaggaauguguggcag

SEQ ID NO: 2337607 - RNA, 15 nt, Human
gagaaggggaggagg

SEQ ID NO: 2337608 - RNA, 23 nt, Human
gagaaggacccggaggggccugg

SEQ ID NO: 2337609 - RNA, 11 nt, Human
gagaaggagcc

SEQ ID NO: 2337610 - RNA, 12 nt, Human
gagaaggagaga

SEQ ID NO: 2337611 - RNA, 14 nt, Human
gagaaggagagaaa

SEQ ID NO: 2337612 - RNA, 18 nt, Human
gagaccuaccucagguug

SEQ ID NO: 2337613 - RNA, 21 nt, Human
gagaccuaccucagguugcug

SEQ ID NO: 2337614 - RNA, 23 nt, Human
gagaccuaccucagguugcuggu

SEQ ID NO: 2337615 - RNA, 14 nt, Human
gagacggaguccca

SEQ ID NO: 2337616 - RNA, 16 nt, Human
gagaccguccucaccc

SEQ ID NO: 2337617 - RNA, 22 nt, Human
gagaccguccucaccccugucc

SEQ ID NO: 2337618 - RNA, 14 nt, Human
gagaccuaccucag

SEQ ID NO: 2337619 - RNA, 16 nt, Human
gagaccuaccucaggu

SEQ ID NO: 2337620 - RNA, 17 nt, Human
gagaccuaccucagguu

SEQ ID NO: 2337621 - RNA, 20 nt, Human
gagaccgggguauccugggg

SEQ ID NO: 2337622 - RNA, 13 nt, Human
gagaccguccuca

SEQ ID NO: 2337623 - RNA, 14 nt, Human
gagaccguccucac

SEQ ID NO: 2337624 - RNA, 15 nt, Human
gagaccguccucacc

SEQ ID NO: 2337625 - RNA, 16 nt, Human
gagacggagucccacc

SEQ ID NO: 2337626 - RNA, 19 nt, Human
gagacggagucccaccuug

SEQ ID NO: 2337627 - RNA, 19 nt, Human
gagaccuggcacuggaugc

SEQ ID NO: 2337628 - RNA, 16 nt, Human
gagacgggaccgggcc

SEQ ID NO: 2337629 - RNA, 18 nt, Human
gagacgggggcagagagg

SEQ ID NO: 2337630 - RNA, 23 nt, Human
gagaagugccccugcugccuccc

SEQ ID NO: 2337631 - RNA, 16 nt, Human
gagaaguuucuggccc

SEQ ID NO: 2337632 - RNA, 17 nt, Human
gagaaguuucuggcccu

SEQ ID NO: 2337633 - RNA, 21 nt, Human
gagaaguuucuggcccuggcu

SEQ ID NO: 2337634 - RNA, 17 nt, Human
gagaaguuuuguacaga

SEQ ID NO: 2337635 - RNA, 18 nt, Human
gagaaguuuuguacagag

SEQ ID NO: 2337636 - RNA, 19 nt, Human
gagaaguuuuguacagaga

SEQ ID NO: 2337637 - RNA, 18 nt, Human
gagaauaggcagccccca

SEQ ID NO: 2337638 - RNA, 18 nt, Human
gagaauaagagaaagaaa

SEQ ID NO: 2337639 - RNA, 16 nt, Human
gagaaguuuuguuuuu

SEQ ID NO: 2337640 - RNA, 22 nt, Human
gagaauaagagaaagaaaauga

SEQ ID NO: 2337641 - RNA, 23 nt, Human
gagaauauuagcuuuacuguuug

SEQ ID NO: 2337642 - RNA, 20 nt, Human
gagaauaagagagucauaaa

SEQ ID NO: 2337643 - RNA, 12 nt, Human
gagaauauauac

SEQ ID NO: 2337644 - RNA, 21 nt, Human
gagaauauuuuaaguauugca

SEQ ID NO: 2337645 - RNA, 14 nt, Human
gagaauauauacau

SEQ ID NO: 2337646 - RNA, 19 nt, Human
gagaauauuuuaaguauug

SEQ ID NO: 2337647 - RNA, 20 nt, Human
gagaaucccacuuucuauag

SEQ ID NO: 2337648 - RNA, 21 nt, Human
gagaaucuacccccagaucca

SEQ ID NO: 2337649 - RNA, 22 nt, Human
gagaaucuauauuuaacaagau

SEQ ID NO: 2337650 - RNA, 15 nt, Human
gagaaucuauauuua

SEQ ID NO: 2337651 - RNA, 15 nt, Human
gagaaugaaagggcc

SEQ ID NO: 2337652 - RNA, 23 nt, Human
gagaaugaaagggcccagagagg

SEQ ID NO: 2337653 - RNA, 19 nt, Human
gagaaucuuuauugagaaa

SEQ ID NO: 2337654 - RNA, 13 nt, Human
gagaaucuuuauu

SEQ ID NO: 2337655 - RNA, 16 nt, Human
gagaccgagccucugu

SEQ ID NO: 2337656 - RNA, 14 nt, Human
gagaccgagugaac

SEQ ID NO: 2337657 - RNA, 15 nt, Human
gagaccgagugaacc

SEQ ID NO: 2337658 - RNA, 17 nt, Human
gagaaaaagcuccuguc

SEQ ID NO: 2337659 - RNA, 19 nt, Human
gagaaaaagcuccuguccu

SEQ ID NO: 2337660 - RNA, 15 nt, Human
gagaaaacagaccua

SEQ ID NO: 2337661 - RNA, 19 nt, Human
gacuuuuuuuuuuuauaau

SEQ ID NO: 2337662 - RNA, 11 nt, Human
gagaaaaacaa

SEQ ID NO: 2337663 - RNA, 16 nt, Human
gacuuuuugcauuuaa

SEQ ID NO: 2337664 - RNA, 20 nt, Human
gacuuuuccaacccucauca

SEQ ID NO: 2337665 - RNA, 12 nt, Human
gacuuuguucac

SEQ ID NO: 2337666 - RNA, 18 nt, Human
gacuuuuauuuccaguga

SEQ ID NO: 2337667 - RNA, 14 nt, Human
gacuuuuccaaccc

SEQ ID NO: 2337668 - RNA, 19 nt, Human
gacuuuuccaacccucauc

SEQ ID NO: 2337669 - RNA, 22 nt, Human
gacuuuuuauggcacuaguauu

SEQ ID NO: 2337670 - RNA, 16 nt, Human
gagacuccuaggcagg

SEQ ID NO: 2337671 - RNA, 16 nt, Human
gagagcgccugccccu

SEQ ID NO: 2337672 - RNA, 22 nt, Human
gagagcgccugccccucccaga

SEQ ID NO: 2337673 - RNA, 14 nt, Human
gagagcggucucag

SEQ ID NO: 2337674 - RNA, 21 nt, Human
gagagcggucucaggcuggug

SEQ ID NO: 2337675 - RNA, 21 nt, Human
gagagcgugcuccagccuggc

SEQ ID NO: 2337676 - RNA, 22 nt, Human
gagagcgugcuccagccuggcu

SEQ ID NO: 2337677 - RNA, 23 nt, Human
gagagcgugcuccagccuggcuc

SEQ ID NO: 2337678 - RNA, 19 nt, Human
gagagcuagaacccggcag

SEQ ID NO: 2337679 - RNA, 20 nt, Human
gagagcuagaacccggcagg

SEQ ID NO: 2337680 - RNA, 17 nt, Human
gagagcuagaaccuaga

SEQ ID NO: 2337681 - RNA, 16 nt, Human
gagagcuagaaccugg

SEQ ID NO: 2337682 - RNA, 18 nt, Human
gagagcuagaaccuggag

SEQ ID NO: 2337683 - RNA, 19 nt, Human
gagagcuagaaccuggaga

SEQ ID NO: 2337684 - RNA, 18 nt, Human
gagagccuuccaggggug

SEQ ID NO: 2337685 - RNA, 20 nt, Human
gagagccuuccagggguggg

SEQ ID NO: 2337686 - RNA, 21 nt, Human
gagagcuagcagcagggaggg

SEQ ID NO: 2337687 - RNA, 15 nt, Human
gagagcuagcagcag

SEQ ID NO: 2337688 - RNA, 13 nt, Human
gagagcugggugu

SEQ ID NO: 2337689 - RNA, 13 nt, Human
gagagcuggagcc

SEQ ID NO: 2337690 - RNA, 20 nt, Human
gagagcuagaaccuggagag

SEQ ID NO: 2337691 - RNA, 19 nt, Human
gagagcuagaaccuggagg

SEQ ID NO: 2337692 - RNA, 21 nt, Human
gagacucagggccccagcacu

SEQ ID NO: 2337693 - RNA, 17 nt, Human
gagacucagggccccag

SEQ ID NO: 2337694 - RNA, 16 nt, Human
gagacguguacauagu

SEQ ID NO: 2337695 - RNA, 16 nt, Human
gagacuccaugagaag

SEQ ID NO: 2337696 - RNA, 18 nt, Human
gagacuccgucucaagga

SEQ ID NO: 2337697 - RNA, 14 nt, Human
gagacucagacagg

SEQ ID NO: 2337698 - RNA, 15 nt, Human
gagacucagagggag

SEQ ID NO: 2337699 - RNA, 15 nt, Human
gagacggucgagcag

SEQ ID NO: 2337700 - RNA, 18 nt, Human
gagacgggugggcggcug

SEQ ID NO: 2337701 - RNA, 15 nt, Human
gagacguguacauag

SEQ ID NO: 2337702 - RNA, 13 nt, Human
gagacuccugcag

SEQ ID NO: 2337703 - RNA, 14 nt, Human
gagacuccugcagg

SEQ ID NO: 2337704 - RNA, 15 nt, Human
gagagccuuccaggg

SEQ ID NO: 2337705 - RNA, 16 nt, Human
gagagccuuccagggg

SEQ ID NO: 2337706 - RNA, 20 nt, Human
gagaggaugagagcccagag

SEQ ID NO: 2337707 - RNA, 12 nt, Human
gagaggccauga

SEQ ID NO: 2337708 - RNA, 16 nt, Human
gagaggcccucuggag

SEQ ID NO: 2337709 - RNA, 14 nt, Human
gagaggccaggugc

SEQ ID NO: 2337710 - RNA, 21 nt, Human
gagaggccaggugcagguugg

SEQ ID NO: 2337711 - RNA, 15 nt, Human
gagaggccuuuugga

SEQ ID NO: 2337712 - RNA, 23 nt, Human
gagaggcccucuggaguggccac

SEQ ID NO: 2337713 - RNA, 20 nt, Human
gagaggcccucuggaguggc

SEQ ID NO: 2337714 - RNA, 10 nt, Human
gagagggaga

SEQ ID NO: 2337715 - RNA, 14 nt, Human
gagagggagaagaa

SEQ ID NO: 2337716 - RNA, 15 nt, Human
gagagggagaagaag

SEQ ID NO: 2337717 - RNA, 23 nt, Human
gagagggagaagaagucagagag

SEQ ID NO: 2337718 - RNA, 12 nt, Human
gagaggcuggga

SEQ ID NO: 2337719 - RNA, 18 nt, Human
gagaggccuuuuggaaug

SEQ ID NO: 2337720 - RNA, 14 nt, Human
gagaggcaaugauu

SEQ ID NO: 2337721 - RNA, 15 nt, Human
gagaggcaauggcca

SEQ ID NO: 2337722 - RNA, 18 nt, Human
gagaggaugagagcccag

SEQ ID NO: 2337723 - RNA, 19 nt, Human
gagaggaugagagcccaga

SEQ ID NO: 2337724 - RNA, 21 nt, Human
gagaggaugagagcccagagg

SEQ ID NO: 2337725 - RNA, 17 nt, Human
gagaggaguucaaugau

SEQ ID NO: 2337726 - RNA, 18 nt, Human
gagaggaguucaaugauc

SEQ ID NO: 2337727 - RNA, 19 nt, Human
gagaggaguucaaugaucu

SEQ ID NO: 2337728 - RNA, 12 nt, Human
gagaggaugaau

SEQ ID NO: 2337729 - RNA, 14 nt, Human
gagaggaugaaugu

SEQ ID NO: 2337730 - RNA, 21 nt, Human
gagaggaugaauguaugugca

SEQ ID NO: 2337731 - RNA, 14 nt, Human
gagaggaugagagc

SEQ ID NO: 2337732 - RNA, 16 nt, Human
gagaggaugagagccc

SEQ ID NO: 2337733 - RNA, 19 nt, Human
gagaggagcgggaccugug

SEQ ID NO: 2337734 - RNA, 21 nt, Human
gagaggagcgggaccuguggc

SEQ ID NO: 2337735 - RNA, 22 nt, Human
gagaggagcgggaccuguggcu

SEQ ID NO: 2337736 - RNA, 13 nt, Human
gagaggaguucaa

SEQ ID NO: 2337737 - RNA, 13 nt, Human
gagaggaggcaac

SEQ ID NO: 2337738 - RNA, 15 nt, Human
gagaggaguucaaug

SEQ ID NO: 2337739 - RNA, 16 nt, Human
gagaggaguucaauga

SEQ ID NO: 2337740 - RNA, 18 nt, Human
gagaggagagaggcagag

SEQ ID NO: 2337741 - RNA, 19 nt, Human
gagaggagagaggcagaga

SEQ ID NO: 2337742 - RNA, 13 nt, Human
gagaggagagcca

SEQ ID NO: 2337743 - RNA, 15 nt, Human
gagaggagagccaga

SEQ ID NO: 2337744 - RNA, 16 nt, Human
gagaggagagccagag

SEQ ID NO: 2337745 - RNA, 19 nt, Human
gagaggagagccagagaag

SEQ ID NO: 2337746 - RNA, 18 nt, Human
gagaggagaggagagagg

SEQ ID NO: 2337747 - RNA, 16 nt, Human
gagaggacgugggcgg

SEQ ID NO: 2337748 - RNA, 17 nt, Human
gagaggacgugggcggc

SEQ ID NO: 2337749 - RNA, 10 nt, Human
gagaggacag

SEQ ID NO: 2337750 - RNA, 15 nt, Human
gagaggacagcuuga

SEQ ID NO: 2337751 - RNA, 18 nt, Human
gagaggacagcuugagcc

SEQ ID NO: 2337752 - RNA, 15 nt, Human
gagaggagaaacaca

SEQ ID NO: 2337753 - RNA, 14 nt, Human
gagaggagaaacac

SEQ ID NO: 2337754 - RNA, 20 nt, Human
gagaggacuguagggagggc

SEQ ID NO: 2337755 - RNA, 11 nt, Human
gagaggagaga

SEQ ID NO: 2337756 - RNA, 12 nt, Human
gagaggagagag

SEQ ID NO: 2337757 - RNA, 15 nt, Human
gagaggagagaggca

SEQ ID NO: 2337758 - RNA, 19 nt, Human
gagaggaaugccuguguga

SEQ ID NO: 2337759 - RNA, 20 nt, Human
gagaggaaauauugcugggg

SEQ ID NO: 2337760 - RNA, 21 nt, Human
gagaggaaauauugcuggggu

SEQ ID NO: 2337761 - RNA, 23 nt, Human
gagagcuuucuguccuuuuggca

SEQ ID NO: 2337762 - RNA, 20 nt, Human
gagaggaaaaguaaggugca

SEQ ID NO: 2337763 - RNA, 16 nt, Human
gagagcuuaaugauaa

SEQ ID NO: 2337764 - RNA, 15 nt, Human
gagaggacccccuga

SEQ ID NO: 2337765 - RNA, 18 nt, Human
gagagcuguucccaaauu

SEQ ID NO: 2337766 - RNA, 23 nt, Human
gagagcuggggaagcuucuuaaa

SEQ ID NO: 2337767 - RNA, 17 nt, Human
gagagcuggugcccgga

SEQ ID NO: 2337768 - RNA, 22 nt, Human
gagagcuucuguugcugccuca

SEQ ID NO: 2337769 - RNA, 12 nt, Human
gagaggaaauca

SEQ ID NO: 2337770 - RNA, 14 nt, Human
gagagcuggugccc

SEQ ID NO: 2337771 - RNA, 13 nt, Human
gagagcuggugcc

SEQ ID NO: 2337772 - RNA, 14 nt, Human
gagagcuggggaag

SEQ ID NO: 2337773 - RNA, 21 nt, Human
gagagcuggagccuggugccc

SEQ ID NO: 2337774 - RNA, 14 nt, Human
gagagcuggagccu

SEQ ID NO: 2337775 - RNA, 16 nt, Human
gagagcuggagccugg

SEQ ID NO: 2337776 - RNA, 20 nt, Human
gagagcugggugucaagagg

SEQ ID NO: 2337777 - RNA, 17 nt, Human
gagauuggacggccuga

SEQ ID NO: 2337778 - RNA, 21 nt, Human
gagauugugccacuucacucc

SEQ ID NO: 2337779 - RNA, 23 nt, Human
gagauuguuguuugccauacuuu

SEQ ID NO: 2337780 - RNA, 14 nt, Human
gagauuggaaggaa

SEQ ID NO: 2337781 - RNA, 21 nt, Human
gagauugugccccugcacucc

SEQ ID NO: 2337782 - RNA, 23 nt, Human
gagaugccuccaccgcugccuaa

SEQ ID NO: 2337783 - RNA, 22 nt, Human
gagaugccuccaccgcugccua

SEQ ID NO: 2337784 - RNA, 18 nt, Human
gagagggaggcaagcccu

SEQ ID NO: 2337785 - RNA, 14 nt, Human
gagagggagagaga

SEQ ID NO: 2337786 - RNA, 16 nt, Human
gagaugcuagaacucc

SEQ ID NO: 2337787 - RNA, 20 nt, Human
gagaugcuagaacucccuuu

SEQ ID NO: 2337788 - RNA, 15 nt, Human
gagaugcuggagaag

SEQ ID NO: 2337789 - RNA, 16 nt, Human
gagaugcuggagaaga

SEQ ID NO: 2337790 - RNA, 18 nt, Human
gagaugcuggagaagaga

SEQ ID NO: 2337791 - RNA, 22 nt, Human
gagaugucuucguacaguucuu

SEQ ID NO: 2337792 - RNA, 14 nt, Human
gagaugugcaccca

SEQ ID NO: 2337793 - RNA, 14 nt, Human
gagauucagacugu

SEQ ID NO: 2337794 - RNA, 15 nt, Human
gagauuauguucuuu

SEQ ID NO: 2337795 - RNA, 15 nt, Human
gagauuaccuccuga

SEQ ID NO: 2337796 - RNA, 16 nt, Human
gagauuagagggaggu

SEQ ID NO: 2337797 - RNA, 14 nt, Human
gagauguuuuagag

SEQ ID NO: 2337798 - RNA, 14 nt, Human
gagauguuuuuaaa

SEQ ID NO: 2337799 - RNA, 17 nt, Human
gagauguuuuuaaaagu

SEQ ID NO: 2337800 - RNA, 18 nt, Human
gagauguuuuuaaaaguu

SEQ ID NO: 2337801 - RNA, 19 nt, Human
gagauguuuuuaaaaguuu

SEQ ID NO: 2337802 - RNA, 21 nt, Human
gagauguuuuuaaaaguuuca

SEQ ID NO: 2337803 - RNA, 11 nt, Human
gaccccuccuc

SEQ ID NO: 2337804 - RNA, 12 nt, Human
gaccccuccuca

SEQ ID NO: 2337805 - RNA, 13 nt, Human
gaccccuccucac

SEQ ID NO: 2337806 - RNA, 14 nt, Human
gaccccuccucacu

SEQ ID NO: 2337807 - RNA, 15 nt, Human
gaccccuccucacug

SEQ ID NO: 2337808 - RNA, 18 nt, Human
gacccggaggggccuggc

SEQ ID NO: 2337809 - RNA, 19 nt, Human
gacccggaggggccuggca

SEQ ID NO: 2337810 - RNA, 20 nt, Human
gacccggaggggccuggcag

SEQ ID NO: 2337811 - RNA, 23 nt, Human
gacccggaggccacaugaguccc

SEQ ID NO: 2337812 - RNA, 15 nt, Human
gacccggaggccaca

SEQ ID NO: 2337813 - RNA, 17 nt, Human
gacccggaggccacaug

SEQ ID NO: 2337814 - RNA, 15 nt, Human
gaccccucuggccag

SEQ ID NO: 2337815 - RNA, 13 nt, Human
gaccccucuggcc

SEQ ID NO: 2337816 - RNA, 13 nt, Human
gaccccuccuccc

SEQ ID NO: 2337817 - RNA, 14 nt, Human
gaccccuccucccu

SEQ ID NO: 2337818 - RNA, 16 nt, Human
gaccccugagcuugca

SEQ ID NO: 2337819 - RNA, 17 nt, Human
gaccccuccucacuggc

SEQ ID NO: 2337820 - RNA, 19 nt, Human
gaccccuccucacuggcca

SEQ ID NO: 2337821 - RNA, 23 nt, Human
gaccccuccucacuggccauccc

SEQ ID NO: 2337822 - RNA, 12 nt, Human
gaccccuccucc

SEQ ID NO: 2337823 - RNA, 16 nt, Human
gaccccuccucccuuu

SEQ ID NO: 2337824 - RNA, 23 nt, Human
gacccggagcuaacacuggcccc

SEQ ID NO: 2337825 - RNA, 11 nt, Human
gacccggaggc

SEQ ID NO: 2337826 - RNA, 13 nt, Human
gacccggaggcca

SEQ ID NO: 2337827 - RNA, 14 nt, Human
gacccggaggccac

SEQ ID NO: 2337828 - RNA, 17 nt, Human
gacccggaggggccugg

SEQ ID NO: 2337829 - RNA, 18 nt, Human
gaccccucuggccaggau

SEQ ID NO: 2337830 - RNA, 16 nt, Human
gaccccucuggccagg

SEQ ID NO: 2337831 - RNA, 20 nt, Human
gaccccucuggccaggaugg

SEQ ID NO: 2337832 - RNA, 22 nt, Human
gacccggagcuaacacuggccc

SEQ ID NO: 2337833 - RNA, 19 nt, Human
gaccucaggugagaagcag

SEQ ID NO: 2337834 - RNA, 18 nt, Human
gaccucaggugagaagca

SEQ ID NO: 2337835 - RNA, 23 nt, Human
gaccucagguaaucgaccugccu

SEQ ID NO: 2337836 - RNA, 22 nt, Human
gaccucagguaaucgaccugcc

SEQ ID NO: 2337837 - RNA, 19 nt, Human
gaccucaggccugggggcu

SEQ ID NO: 2337838 - RNA, 21 nt, Human
gaccucaggugagaagcagag

SEQ ID NO: 2337839 - RNA, 19 nt, Human
gaccucaggugauccaccc

SEQ ID NO: 2337840 - RNA, 20 nt, Human
gaccucaggugauccaccca

SEQ ID NO: 2337841 - RNA, 21 nt, Human
gaccucaggugauccacccac

SEQ ID NO: 2337842 - RNA, 14 nt, Human
gacccucugccacc

SEQ ID NO: 2337843 - RNA, 20 nt, Human
gacccucugaaugguccagg

SEQ ID NO: 2337844 - RNA, 23 nt, Human
gacccucugaaugguccaggguu

SEQ ID NO: 2337845 - RNA, 17 nt, Human
gacccucuccaccccau

SEQ ID NO: 2337846 - RNA, 15 nt, Human
gacccucugaauggu

SEQ ID NO: 2337847 - RNA, 16 nt, Human
gacccucuccacccca

SEQ ID NO: 2337848 - RNA, 15 nt, Human
gacccucuccacccc

SEQ ID NO: 2337849 - RNA, 14 nt, Human
gaccucaggccugg

SEQ ID NO: 2337850 - RNA, 16 nt, Human
gacccugaaggggcca

SEQ ID NO: 2337851 - RNA, 20 nt, Human
gacccucugccaccagagac

SEQ ID NO: 2337852 - RNA, 15 nt, Human
gacccucugccacca

SEQ ID NO: 2337853 - RNA, 16 nt, Human
gacccucugccaccag

SEQ ID NO: 2337854 - RNA, 20 nt, Human
gaccucaguuuuaucauuuu

SEQ ID NO: 2337855 - RNA, 21 nt, Human
gaccucaguuuuaucauuuuc

SEQ ID NO: 2337856 - RNA, 10 nt, Human
gaccucauca

SEQ ID NO: 2337857 - RNA, 13 nt, Human
gaccucaucagga

SEQ ID NO: 2337858 - RNA, 22 nt, Human
gaccucaugcaucuccaccugc

SEQ ID NO: 2337859 - RNA, 19 nt, Human
gaccucaucaggaugaacc

SEQ ID NO: 2337860 - RNA, 23 nt, Human
gaccucaucaggaugaacccagg

SEQ ID NO: 2337861 - RNA, 17 nt, Human
gaccucaugcaucucca

SEQ ID NO: 2337862 - RNA, 21 nt, Human
gaccucaugcaucuccaccug

SEQ ID NO: 2337863 - RNA, 16 nt, Human
gaccuccccugaggcu

SEQ ID NO: 2337864 - RNA, 14 nt, Human
gaccucccagcccu

SEQ ID NO: 2337865 - RNA, 15 nt, Human
gaccucccagcccua

SEQ ID NO: 2337866 - RNA, 21 nt, Human
gaccucccagcccuauggaug

SEQ ID NO: 2337867 - RNA, 22 nt, Human
gaccucccagcccuauggaugu

SEQ ID NO: 2337868 - RNA, 23 nt, Human
gaccucccagcccuauggaugug

SEQ ID NO: 2337869 - RNA, 22 nt, Human
gaccucugcagcaauaaagcag

SEQ ID NO: 2337870 - RNA, 18 nt, Human
gaccucugcagcaauaaa

SEQ ID NO: 2337871 - RNA, 16 nt, Human
gaccucugcagcaaua

SEQ ID NO: 2337872 - RNA, 17 nt, Human
gaccuccuaacaaguag

SEQ ID NO: 2337873 - RNA, 13 nt, Human
gaccuccccagcc

SEQ ID NO: 2337874 - RNA, 14 nt, Human
gaccuccccagccc

SEQ ID NO: 2337875 - RNA, 16 nt, Human
gaccuccccagccccu

SEQ ID NO: 2337876 - RNA, 12 nt, Human
gaccuccugccu

SEQ ID NO: 2337877 - RNA, 14 nt, Human
gaccuccugccucc

SEQ ID NO: 2337878 - RNA, 21 nt, Human
gaccucgagcagaugaugcca

SEQ ID NO: 2337879 - RNA, 13 nt, Human
gaccucguccucc

SEQ ID NO: 2337880 - RNA, 14 nt, Human
gacgccaccauucc

SEQ ID NO: 2337881 - RNA, 15 nt, Human
gacgccaccauuccu

SEQ ID NO: 2337882 - RNA, 16 nt, Human
gacgccaccauuccug

SEQ ID NO: 2337883 - RNA, 12 nt, Human
gacgccacccag

SEQ ID NO: 2337884 - RNA, 13 nt, Human
gaccucugccuga

SEQ ID NO: 2337885 - RNA, 12 nt, Human
gacgccauccca

SEQ ID NO: 2337886 - RNA, 13 nt, Human
gacgccaucccag

SEQ ID NO: 2337887 - RNA, 19 nt, Human
gacgccaucccagccccaa

SEQ ID NO: 2337888 - RNA, 21 nt, Human
gacgccggggacagaggccug

SEQ ID NO: 2337889 - RNA, 14 nt, Human
gacgccugaggaac

SEQ ID NO: 2337890 - RNA, 17 nt, Human
gacgccugagcucacuc

SEQ ID NO: 2337891 - RNA, 18 nt, Human
gacgccugcccuccccag

SEQ ID NO: 2337892 - RNA, 13 nt, Human
gacgccugaggaa

SEQ ID NO: 2337893 - RNA, 22 nt, Human
gacgccggggacagaggccugc

SEQ ID NO: 2337894 - RNA, 13 nt, Human
gacgccugagcuc

SEQ ID NO: 2337895 - RNA, 15 nt, Human
gacgccaucccagcc

SEQ ID NO: 2337896 - RNA, 13 nt, Human
gacgccacccagc

SEQ ID NO: 2337897 - RNA, 14 nt, Human
gacgccacccagca

SEQ ID NO: 2337898 - RNA, 21 nt, Human
gacgccaucccagccccaaug

SEQ ID NO: 2337899 - RNA, 15 nt, Human
gacgcugugcugccc

SEQ ID NO: 2337900 - RNA, 17 nt, Human
gacgcucccugcuccac

SEQ ID NO: 2337901 - RNA, 18 nt, Human
gacgcugugcugcccugc

SEQ ID NO: 2337902 - RNA, 16 nt, Human
gacgcugugcugcccu

SEQ ID NO: 2337903 - RNA, 17 nt, Human
gacgcugugcugcccug

SEQ ID NO: 2337904 - RNA, 22 nt, Human
gacgcuacccgggaagggggcu

SEQ ID NO: 2337905 - RNA, 23 nt, Human
gacgccugcccuccccagagcac

SEQ ID NO: 2337906 - RNA, 20 nt, Human
gacgccugcccuccccagag

SEQ ID NO: 2337907 - RNA, 22 nt, Human
gacgccugcccuccccagagca

SEQ ID NO: 2337908 - RNA, 23 nt, Human
gacgcuacccgggaagggggcug

SEQ ID NO: 2337909 - RNA, 14 nt, Human
gacgcucucuggcc

SEQ ID NO: 2337910 - RNA, 19 nt, Human
gacacugguauuccugccu

SEQ ID NO: 2337911 - RNA, 22 nt, Human
gacacuggcugccagcuauuuu

SEQ ID NO: 2337912 - RNA, 20 nt, Human
gacacugguauuccugccuc

SEQ ID NO: 2337913 - RNA, 23 nt, Human
gacacugguuuacacuuuaugcc

SEQ ID NO: 2337914 - RNA, 19 nt, Human
gacacugguuuacacuuua

SEQ ID NO: 2337915 - RNA, 23 nt, Human
gacacuggcucauauuccugcag

SEQ ID NO: 2337916 - RNA, 17 nt, Human
gacacuggcugccagcu

SEQ ID NO: 2337917 - RNA, 15 nt, Human
gacacuggccccuca

SEQ ID NO: 2337918 - RNA, 23 nt, Human
gacacuucagagagcugguaguu

SEQ ID NO: 2337919 - RNA, 20 nt, Human
gacacuucagagagcuggua

SEQ ID NO: 2337920 - RNA, 19 nt, Human
gacacuucagagagcuggu

SEQ ID NO: 2337921 - RNA, 18 nt, Human
gacacuucagagagcugg

SEQ ID NO: 2337922 - RNA, 17 nt, Human
gacacuucagagagcug

SEQ ID NO: 2337923 - RNA, 15 nt, Human
gacacuucagagagc

SEQ ID NO: 2337924 - RNA, 21 nt, Human
gacacuucccucuguuucucu

SEQ ID NO: 2337925 - RNA, 12 nt, Human
gacacuuccugc

SEQ ID NO: 2337926 - RNA, 13 nt, Human
gacacuuccugcc

SEQ ID NO: 2337927 - RNA, 17 nt, Human
gacacuucccucuguuu

SEQ ID NO: 2337928 - RNA, 18 nt, Human
gacacuucccucuguuuc

SEQ ID NO: 2337929 - RNA, 19 nt, Human
gacacuucccucuguuucu

SEQ ID NO: 2337930 - RNA, 20 nt, Human
gacacuucccucuguuucuc

SEQ ID NO: 2337931 - RNA, 16 nt, Human
gacacugcggggcuug

SEQ ID NO: 2337932 - RNA, 12 nt, Human
gacacuggcaug

SEQ ID NO: 2337933 - RNA, 22 nt, Human
gacacugcggggcuuggcugag

SEQ ID NO: 2337934 - RNA, 13 nt, Human
gacacuggccccu

SEQ ID NO: 2337935 - RNA, 14 nt, Human
gacacuggccccuc

SEQ ID NO: 2337936 - RNA, 19 nt, Human
gacacugcggggcuuggcu

SEQ ID NO: 2337937 - RNA, 20 nt, Human
gacacugcggggcuuggcug

SEQ ID NO: 2337938 - RNA, 16 nt, Human
gacagcuccuucuguc

SEQ ID NO: 2337939 - RNA, 16 nt, Human
gacagcccgggcucug

SEQ ID NO: 2337940 - RNA, 17 nt, Human
gacagcuccuucugucc

SEQ ID NO: 2337941 - RNA, 18 nt, Human
gacagcuccuucuguccu

SEQ ID NO: 2337942 - RNA, 15 nt, Human
gacacuugccuucuu

SEQ ID NO: 2337943 - RNA, 22 nt, Human
gacacuugccuucuucacccag

SEQ ID NO: 2337944 - RNA, 14 nt, Human
gacacuuccugccu

SEQ ID NO: 2337945 - RNA, 15 nt, Human
gacacuuccugccua

SEQ ID NO: 2337946 - RNA, 14 nt, Human
gacacuugucccca

SEQ ID NO: 2337947 - RNA, 23 nt, Human
gacacuugccuucuucacccagc

SEQ ID NO: 2337948 - RNA, 23 nt, Human
gacacuuuaauuaccaaccuguu

SEQ ID NO: 2337949 - RNA, 21 nt, Human
gacacuuugaaauguguuucu

SEQ ID NO: 2337950 - RNA, 22 nt, Human
gacacuuugaaauguguuucug

SEQ ID NO: 2337951 - RNA, 15 nt, Human
gacacuuugaaaugu

SEQ ID NO: 2337952 - RNA, 18 nt, Human
gacacuuugaaauguguu

SEQ ID NO: 2337953 - RNA, 19 nt, Human
gacacuuugaaauguguuu

SEQ ID NO: 2337954 - RNA, 20 nt, Human
gacacuuugaaauguguuuc

SEQ ID NO: 2337955 - RNA, 14 nt, Human
gacagcccgggcuc

SEQ ID NO: 2337956 - RNA, 15 nt, Human
gacagccccacccug

SEQ ID NO: 2337957 - RNA, 14 nt, Human
gacagccccacccu

SEQ ID NO: 2337958 - RNA, 14 nt, Human
gacagccccagagc

SEQ ID NO: 2337959 - RNA, 16 nt, Human
gacagccccagagcag

SEQ ID NO: 2337960 - RNA, 17 nt, Human
gacagccccagagcagg

SEQ ID NO: 2337961 - RNA, 23 nt, Human
gacauguggaaagugaauuugaa

SEQ ID NO: 2337962 - RNA, 19 nt, Human
gacauguggaaagugaauu

SEQ ID NO: 2337963 - RNA, 18 nt, Human
gacauguggaaagugaau

SEQ ID NO: 2337964 - RNA, 13 nt, Human
gacauguggaaag

SEQ ID NO: 2337965 - RNA, 16 nt, Human
gacaugugacauuuau

SEQ ID NO: 2337966 - RNA, 20 nt, Human
gacaugugacauuuauauau

SEQ ID NO: 2337967 - RNA, 15 nt, Human
gacaguccucuccac

SEQ ID NO: 2337968 - RNA, 17 nt, Human
gacaguccagccuggag

SEQ ID NO: 2337969 - RNA, 19 nt, Human
gacaguccagccuggagau

SEQ ID NO: 2337970 - RNA, 12 nt, Human
gacaugugacau

SEQ ID NO: 2337971 - RNA, 16 nt, Human
gacaguccucuccacc

SEQ ID NO: 2337972 - RNA, 23 nt, Human
gacaugugaaaccuuuuuuaaga

SEQ ID NO: 2337973 - RNA, 22 nt, Human
gacauguggugggacagggacc

SEQ ID NO: 2337974 - RNA, 16 nt, Human
gacauguggugggaca

SEQ ID NO: 2337975 - RNA, 14 nt, Human
gacaugugguggga

SEQ ID NO: 2337976 - RNA, 17 nt, Human
gacauguggggccaggu

SEQ ID NO: 2337977 - RNA, 23 nt, Human
gacauguuuuagacaaauacuca

SEQ ID NO: 2337978 - RNA, 15 nt, Human
gacauguuauauauu

SEQ ID NO: 2337979 - RNA, 18 nt, Human
gacauguuauauauuuuu

SEQ ID NO: 2337980 - RNA, 17 nt, Human
gacauguuuuccgugaa

SEQ ID NO: 2337981 - RNA, 14 nt, Human
gacauguuuugaua

SEQ ID NO: 2337982 - RNA, 16 nt, Human
gacauguuuugauaaa

SEQ ID NO: 2337983 - RNA, 14 nt, Human
gacagucccugcca

SEQ ID NO: 2337984 - RNA, 15 nt, Human
gacagucccugccaa

SEQ ID NO: 2337985 - RNA, 16 nt, Human
gacagucccugccaau

SEQ ID NO: 2337986 - RNA, 20 nt, Human
gacagucccugccaauggac

SEQ ID NO: 2337987 - RNA, 19 nt, Human
gacagcuccuucuguccua

SEQ ID NO: 2337988 - RNA, 12 nt, Human
gacagcucugca

SEQ ID NO: 2337989 - RNA, 15 nt, Human
gacagcucugccugu

SEQ ID NO: 2337990 - RNA, 20 nt, Human
gacagccccagagcagggug

SEQ ID NO: 2337991 - RNA, 18 nt, Human
gacagccccagagcaggg

SEQ ID NO: 2337992 - RNA, 19 nt, Human
gacagccccagagcagggu

SEQ ID NO: 2337993 - RNA, 10 nt, Human
gacagcucuu

SEQ ID NO: 2337994 - RNA, 12 nt, Human
gacagucccugc

SEQ ID NO: 2337995 - RNA, 15 nt, Human
gacaguccagccugg

SEQ ID NO: 2337996 - RNA, 16 nt, Human
gacaguccagccugga

SEQ ID NO: 2337997 - RNA, 11 nt, Human
gacagcucuua

SEQ ID NO: 2337998 - RNA, 18 nt, Human
gacagucaccucauggaa

SEQ ID NO: 2337999 - RNA, 17 nt, Human
gacauuuugccaaaauu

SEQ ID NO: 2338000 - RNA, 17 nt, Human
gacauugcggacagcca

SEQ ID NO: 2338001 - RNA, 23 nt, Human
gacauugcggacagccacggcca

SEQ ID NO: 2338002 - RNA, 21 nt, Human
gacauugcguuugaccuuuua

SEQ ID NO: 2338003 - RNA, 14 nt, Human
gacauugcguuuga

SEQ ID NO: 2338004 - RNA, 18 nt, Human
gacauguuuuuguuuucu

SEQ ID NO: 2338005 - RNA, 14 nt, Human
gacauguuuuuguu

SEQ ID NO: 2338006 - RNA, 20 nt, Human
gacauguuuugauaaaguag

SEQ ID NO: 2338007 - RNA, 23 nt, Human
gacauguuuugauaaaguaguaa

SEQ ID NO: 2338008 - RNA, 23 nt, Human
gacauuggcaccuaauccaggca

SEQ ID NO: 2338009 - RNA, 12 nt, Human
gacauugcuaag

SEQ ID NO: 2338010 - RNA, 18 nt, Human
gacauugcuaagaugcuc

SEQ ID NO: 2338011 - RNA, 15 nt, Human
gacauuuucuucaga

SEQ ID NO: 2338012 - RNA, 15 nt, Human
gacauuuugccaaaa

SEQ ID NO: 2338013 - RNA, 23 nt, Human
gacauugcuuuacugucaaaaua

SEQ ID NO: 2338014 - RNA, 22 nt, Human
gacauuugggagacaugugaca

SEQ ID NO: 2338015 - RNA, 23 nt, Human
gacauuugggagacaugugacau

SEQ ID NO: 2338016 - RNA, 14 nt, Human
gaaugaauggcuaa

SEQ ID NO: 2338017 - RNA, 22 nt, Human
gaauauugcugauggugcaaug

SEQ ID NO: 2338018 - RNA, 23 nt, Human
gaauauugcugauggugcaauga

SEQ ID NO: 2338019 - RNA, 22 nt, Human
gaauauugcuuuggucauauga

SEQ ID NO: 2338020 - RNA, 24 nt, Human
gaauauugcugauggugcaaugac

SEQ ID NO: 2338021 - RNA, 22 nt, Human
gaauauacagcaggugcucaau

SEQ ID NO: 2338022 - RNA, 21 nt, Human
gaauauaccccuuaguguuug

SEQ ID NO: 2338023 - RNA, 15 nt, Human
gaauauauaaccagu

SEQ ID NO: 2338024 - RNA, 12 nt, Human
gaauauauuaua

SEQ ID NO: 2338025 - RNA, 11 nt, Human
gaauauauuau

SEQ ID NO: 2338026 - RNA, 23 nt, Human
gaauauauggcagaguuguaaau

SEQ ID NO: 2338027 - RNA, 15 nt, Human
gaauauauggcagag

SEQ ID NO: 2338028 - RNA, 20 nt, Human
gaauauauggcagaguugua

SEQ ID NO: 2338029 - RNA, 21 nt, Human
gaauauauggcagaguuguaa

SEQ ID NO: 2338030 - RNA, 22 nt, Human
gaauauauggcagaguuguaaa

SEQ ID NO: 2338031 - RNA, 19 nt, Human
gaauaugauuaguaaagaa

SEQ ID NO: 2338032 - RNA, 17 nt, Human
gaauaugggagaaauag

SEQ ID NO: 2338033 - RNA, 17 nt, Human
gaauaugacggaagaac

SEQ ID NO: 2338034 - RNA, 15 nt, Human
gaauaugacggaaga

SEQ ID NO: 2338035 - RNA, 14 nt, Human
gaauaugacagcug

SEQ ID NO: 2338036 - RNA, 22 nt, Human
gaauaugaacggugagcauugu

SEQ ID NO: 2338037 - RNA, 19 nt, Human
gaauaugagcuuuauguaa

SEQ ID NO: 2338038 - RNA, 19 nt, Human
gaauaugacggaagaacau

SEQ ID NO: 2338039 - RNA, 14 nt, Human
gaauaucugggauu

SEQ ID NO: 2338040 - RNA, 22 nt, Human
gaauauccccucccagucaccu

SEQ ID NO: 2338041 - RNA, 17 nt, Human
gaauauccccucccagu

SEQ ID NO: 2338042 - RNA, 16 nt, Human
gaauauccaugaccua

SEQ ID NO: 2338043 - RNA, 18 nt, Human
gaauaugauuaguaaaga

SEQ ID NO: 2338044 - RNA, 15 nt, Human
gaauauucaggacuu

SEQ ID NO: 2338045 - RNA, 18 nt, Human
gaauaugggagaaauagu

SEQ ID NO: 2338046 - RNA, 18 nt, Human
gaauauucccaagcccau

SEQ ID NO: 2338047 - RNA, 11 nt, Human
gaauauugcug

SEQ ID NO: 2338048 - RNA, 12 nt, Human
gaauauugcuga

SEQ ID NO: 2338049 - RNA, 13 nt, Human
gaauauugcugau

SEQ ID NO: 2338050 - RNA, 18 nt, Human
gaauuaaguuagggaaug

SEQ ID NO: 2338051 - RNA, 21 nt, Human
gaauuaaguuagggaauggca

SEQ ID NO: 2338052 - RNA, 21 nt, Human
gaauuaauaucccuacaugua

SEQ ID NO: 2338053 - RNA, 15 nt, Human
gaauuaaguuaucuu

SEQ ID NO: 2338054 - RNA, 20 nt, Human
gaauuaaguuaucuuuaaaa

SEQ ID NO: 2338055 - RNA, 17 nt, Human
gaauuaacuccauucca

SEQ ID NO: 2338056 - RNA, 22 nt, Human
gaauuaaccuggugcuggauau

SEQ ID NO: 2338057 - RNA, 19 nt, Human
gaauuaaccuggugcugga

SEQ ID NO: 2338058 - RNA, 18 nt, Human
gaauuaaccuggugcugg

SEQ ID NO: 2338059 - RNA, 16 nt, Human
gaauuaaccuggugcu

SEQ ID NO: 2338060 - RNA, 15 nt, Human
gaauuaaccuggugc

SEQ ID NO: 2338061 - RNA, 13 nt, Human
gaauuaaauuuaa

SEQ ID NO: 2338062 - RNA, 19 nt, Human
gaauuaaugacagagccag

SEQ ID NO: 2338063 - RNA, 21 nt, Human
gaauuacauguaaaacauuau

SEQ ID NO: 2338064 - RNA, 22 nt, Human
gaauuaauaucccuacauguau

SEQ ID NO: 2338065 - RNA, 15 nt, Human
gaauuaauagcuuuu

SEQ ID NO: 2338066 - RNA, 21 nt, Human
gaauuaaucaucuauaaagaa

SEQ ID NO: 2338067 - RNA, 13 nt, Human
gaauuacauuugu

SEQ ID NO: 2338068 - RNA, 22 nt, Human
gaauuacauguaaaacauuauc

SEQ ID NO: 2338069 - RNA, 20 nt, Human
gaauuacauuuguauaaaau

SEQ ID NO: 2338070 - RNA, 15 nt, Human
gaauuacauuuguau

SEQ ID NO: 2338071 - RNA, 18 nt, Human
gaauuacauuuguauaaa

SEQ ID NO: 2338072 - RNA, 21 nt, Human
gaauuaaauuaggaauaaaua

SEQ ID NO: 2338073 - RNA, 20 nt, Human
gaauuaaauuaggaauaaau

SEQ ID NO: 2338074 - RNA, 20 nt, Human
gaauuaaauaaacccuuccu

SEQ ID NO: 2338075 - RNA, 12 nt, Human
gaauuaaauaaa

SEQ ID NO: 2338076 - RNA, 22 nt, Human
gaauuaaaguggaccaauaggg

SEQ ID NO: 2338077 - RNA, 15 nt, Human
gaauuaacacaugau

SEQ ID NO: 2338078 - RNA, 14 nt, Human
gaauuaacacauga

SEQ ID NO: 2338079 - RNA, 16 nt, Human
gaauguuuuaaauucu

SEQ ID NO: 2338080 - RNA, 15 nt, Human
gaauguuuuaaauuc

SEQ ID NO: 2338081 - RNA, 14 nt, Human
gaauguuugucuca

SEQ ID NO: 2338082 - RNA, 18 nt, Human
gaauguuugccucugccu

SEQ ID NO: 2338083 - RNA, 19 nt, Human
gaauguuugccucugccuc

SEQ ID NO: 2338084 - RNA, 22 nt, Human
gaaugauuuccaaagagaaaaa

SEQ ID NO: 2338085 - RNA, 14 nt, Human
gaaugauuuuuaga

SEQ ID NO: 2338086 - RNA, 16 nt, Human
gaaugauuuuuagaug

SEQ ID NO: 2338087 - RNA, 15 nt, Human
gaauguuugccucug

SEQ ID NO: 2338088 - RNA, 19 nt, Human
gaaugcacaaacagaggcc

SEQ ID NO: 2338089 - RNA, 16 nt, Human
gaauguuugccucugc

SEQ ID NO: 2338090 - RNA, 17 nt, Human
gaauguuugccucugcc

SEQ ID NO: 2338091 - RNA, 20 nt, Human
gaaugauuuccaaagagaaa

SEQ ID NO: 2338092 - RNA, 16 nt, Human
gaaugauuuccaaaga

SEQ ID NO: 2338093 - RNA, 14 nt, Human
gaaugauuucaugc

SEQ ID NO: 2338094 - RNA, 23 nt, Human
gaaugauucuaauuuuuaagcaa

SEQ ID NO: 2338095 - RNA, 13 nt, Human
gaaugaugaagcu

SEQ ID NO: 2338096 - RNA, 18 nt, Human
gaaugcacaaacagaggc

SEQ ID NO: 2338097 - RNA, 15 nt, Human
gaaugauucaguguu

SEQ ID NO: 2338098 - RNA, 18 nt, Human
gaaugaucuuucuuuccu

SEQ ID NO: 2338099 - RNA, 17 nt, Human
gaaugaucucuucuuuu

SEQ ID NO: 2338100 - RNA, 22 nt, Human
gaaugauuaugaauuacauuug

SEQ ID NO: 2338101 - RNA, 20 nt, Human
gaaugaugauccuaggcauu

SEQ ID NO: 2338102 - RNA, 14 nt, Human
gaaugaugccauga

SEQ ID NO: 2338103 - RNA, 14 nt, Human
gaaugauuaauuaa

SEQ ID NO: 2338104 - RNA, 14 nt, Human
gaaugauuaugaau

SEQ ID NO: 2338105 - RNA, 22 nt, Human
gaaugaggugggagguggaaga

SEQ ID NO: 2338106 - RNA, 16 nt, Human
gaaugaucucuucuuu

SEQ ID NO: 2338107 - RNA, 20 nt, Human
gaaugaauggcuaagcaaaa

SEQ ID NO: 2338108 - RNA, 15 nt, Human
gaaugaauggcuaag

SEQ ID NO: 2338109 - RNA, 22 nt, Human
gacaaagaugauuuaaaaggga

SEQ ID NO: 2338110 - RNA, 21 nt, Human
gacaaagacaaauucuguuuc

SEQ ID NO: 2338111 - RNA, 14 nt, Human
gacaaagacaaauu

SEQ ID NO: 2338112 - RNA, 19 nt, Human
gacaaacugcauauguacu

SEQ ID NO: 2338113 - RNA, 17 nt, Human
gacaaacugccaguuuu

SEQ ID NO: 2338114 - RNA, 20 nt, Human
gacaaacugccaguuuuguu

SEQ ID NO: 2338115 - RNA, 20 nt, Human
gacaaagccaaacucugcca

SEQ ID NO: 2338116 - RNA, 23 nt, Human
gacaaagaugauuuaaaagggaa

SEQ ID NO: 2338117 - RNA, 23 nt, Human
gacaaagcuuggaagagccugca

SEQ ID NO: 2338118 - RNA, 17 nt, Human
gacaaaggacauuuguu

SEQ ID NO: 2338119 - RNA, 13 nt, Human
gacaaaggcaagc

SEQ ID NO: 2338120 - RNA, 15 nt, Human
gacaaaccagaagca

SEQ ID NO: 2338121 - RNA, 14 nt, Human
gacaaacagcucag

SEQ ID NO: 2338122 - RNA, 22 nt, Human
gacaaacaccucccaggagaca

SEQ ID NO: 2338123 - RNA, 17 nt, Human
gacaaacaccucccagg

SEQ ID NO: 2338124 - RNA, 19 nt, Human
gacaaacaccucccaggag

SEQ ID NO: 2338125 - RNA, 20 nt, Human
gacaaaaacagccucacaga

SEQ ID NO: 2338126 - RNA, 18 nt, Human
gacaaaaacagccucaca

SEQ ID NO: 2338127 - RNA, 17 nt, Human
gacaaaaacagccucac

SEQ ID NO: 2338128 - RNA, 16 nt, Human
gacaaaaacagccuca

SEQ ID NO: 2338129 - RNA, 22 nt, Human
gaauuuuuuuuuccuagcccuc

SEQ ID NO: 2338130 - RNA, 22 nt, Human
gaauuuuuuucaucuucucugg

SEQ ID NO: 2338131 - RNA, 16 nt, Human
gaauuaguccuugcuu

SEQ ID NO: 2338132 - RNA, 18 nt, Human
gaauuaguccuugcuugg

SEQ ID NO: 2338133 - RNA, 18 nt, Human
gaauuagaaacauaaaua

SEQ ID NO: 2338134 - RNA, 22 nt, Human
gaauuaccuuagauuagcucug

SEQ ID NO: 2338135 - RNA, 16 nt, Human
gaauuuuuuucaucuu

SEQ ID NO: 2338136 - RNA, 20 nt, Human
gaauuuuuuucaucuucucu

SEQ ID NO: 2338137 - RNA, 22 nt, Human
gaauucaaacuggggccuccag

SEQ ID NO: 2338138 - RNA, 21 nt, Human
gaauucaaacuggggccucca

SEQ ID NO: 2338139 - RNA, 18 nt, Human
gaauucaaacuggggccu

SEQ ID NO: 2338140 - RNA, 16 nt, Human
gaauucaaacuggggc

SEQ ID NO: 2338141 - RNA, 18 nt, Human
gaauuauuuuaaaagaua

SEQ ID NO: 2338142 - RNA, 16 nt, Human
gaauuauuuuaaaaga

SEQ ID NO: 2338143 - RNA, 13 nt, Human
gaauuauuuuaaa

SEQ ID NO: 2338144 - RNA, 23 nt, Human
gacaaaguuacugauucacugca

SEQ ID NO: 2338145 - RNA, 18 nt, Human
gacaaagguuuuccucuu

SEQ ID NO: 2338146 - RNA, 17 nt, Human
gacaaauacucaugugu

SEQ ID NO: 2338147 - RNA, 18 nt, Human
gacaaauacucaugugua

SEQ ID NO: 2338148 - RNA, 19 nt, Human
gacaaauacucauguguau

SEQ ID NO: 2338149 - RNA, 15 nt, Human
gacaaagucaagcca

SEQ ID NO: 2338150 - RNA, 21 nt, Human
gacacagaaaauguugagaau

SEQ ID NO: 2338151 - RNA, 19 nt, Human
gacacagaaaauguugaga

SEQ ID NO: 2338152 - RNA, 15 nt, Human
gacaaaucaaagcag

SEQ ID NO: 2338153 - RNA, 20 nt, Human
gacaaauacucauguguaug

SEQ ID NO: 2338154 - RNA, 12 nt, Human
gacacagcucuu

SEQ ID NO: 2338155 - RNA, 15 nt, Human
gacacagaugaaaca

SEQ ID NO: 2338156 - RNA, 11 nt, Human
gacacagcagc

SEQ ID NO: 2338157 - RNA, 15 nt, Human
gacacagcagcuuca

SEQ ID NO: 2338158 - RNA, 18 nt, Human
gacacagcagcuucacca

SEQ ID NO: 2338159 - RNA, 19 nt, Human
gacacagcagcuucaccag

SEQ ID NO: 2338160 - RNA, 20 nt, Human
gacacagcagcuucaccaga

SEQ ID NO: 2338161 - RNA, 21 nt, Human
gacacagcagcuucaccagag

SEQ ID NO: 2338162 - RNA, 19 nt, Human
gacacagcucuucuccagg

SEQ ID NO: 2338163 - RNA, 20 nt, Human
gacacagcucuucuccaggc

SEQ ID NO: 2338164 - RNA, 21 nt, Human
gacacagcucuucuccaggcu

SEQ ID NO: 2338165 - RNA, 22 nt, Human
gacacagcagcuucaccagagc

SEQ ID NO: 2338166 - RNA, 23 nt, Human
gacacagcagcuucaccagagca

SEQ ID NO: 2338167 - RNA, 22 nt, Human
gauggaaaaaccacccccaaau

SEQ ID NO: 2338168 - RNA, 15 nt, Human
gauggaaaaggaaga

SEQ ID NO: 2338169 - RNA, 17 nt, Human
gauggaaaaggaagacu

SEQ ID NO: 2338170 - RNA, 17 nt, Human
gauggaaccgcaggaag

SEQ ID NO: 2338171 - RNA, 22 nt, Human
gauggaacccuuuuggcccccg

SEQ ID NO: 2338172 - RNA, 20 nt, Human
gauggaacccuuuuggcccc

SEQ ID NO: 2338173 - RNA, 21 nt, Human
gauggaacaggcucagaucuc

SEQ ID NO: 2338174 - RNA, 17 nt, Human
gauggaacacggccaca

SEQ ID NO: 2338175 - RNA, 24 nt, Human
gaugcuugccuagggccuggucca

SEQ ID NO: 2338176 - RNA, 15 nt, Human
gaugcuucugggaga

SEQ ID NO: 2338177 - RNA, 22 nt, Human
gaugauuucuugaaaagggugu

SEQ ID NO: 2338178 - RNA, 14 nt, Human
gaugauuuuuguca

SEQ ID NO: 2338179 - RNA, 21 nt, Human
gaugcuucuucagagacuccu

SEQ ID NO: 2338180 - RNA, 17 nt, Human
gaugcuucuucagagac

SEQ ID NO: 2338181 - RNA, 20 nt, Human
gaugcuucuucagagacucc

SEQ ID NO: 2338182 - RNA, 19 nt, Human
gaugaucagcuguuuguca

SEQ ID NO: 2338183 - RNA, 23 nt, Human
gaugauccaugaguuugcccugg

SEQ ID NO: 2338184 - RNA, 22 nt, Human
gaugauccaugaguuugcccug

SEQ ID NO: 2338185 - RNA, 20 nt, Human
gaugaucagcuguuugucau

SEQ ID NO: 2338186 - RNA, 14 nt, Human
gaugauccuaggca

SEQ ID NO: 2338187 - RNA, 13 nt, Human
gaugauccuaggc

SEQ ID NO: 2338188 - RNA, 17 nt, Human
gaugauuuaaaagggaa

SEQ ID NO: 2338189 - RNA, 21 nt, Human
gaugauccggauuuaauuuga

SEQ ID NO: 2338190 - RNA, 16 nt, Human
gaugauccggauuuaa

SEQ ID NO: 2338191 - RNA, 22 nt, Human
gaugauuggaggggggaggugg

SEQ ID NO: 2338192 - RNA, 19 nt, Human
gaucugaacagaaauacca

SEQ ID NO: 2338193 - RNA, 12 nt, Human
gaucugaacaga

SEQ ID NO: 2338194 - RNA, 19 nt, Human
gaucugacaugauuccuuc

SEQ ID NO: 2338195 - RNA, 17 nt, Human
gaucugacaugauuccu

SEQ ID NO: 2338196 - RNA, 19 nt, Human
gaucucuugagccugggag

SEQ ID NO: 2338197 - RNA, 14 nt, Human
gaucugagaaucuu

SEQ ID NO: 2338198 - RNA, 22 nt, Human
gaucugacaugauuccuuccug

SEQ ID NO: 2338199 - RNA, 21 nt, Human
gaucugacaugauuccuuccu

SEQ ID NO: 2338200 - RNA, 15 nt, Human
gaucugagaaucuuu

SEQ ID NO: 2338201 - RNA, 18 nt, Human
gaucugagaaucuuuauu

SEQ ID NO: 2338202 - RNA, 17 nt, Human
gaucugaugcaagcaag

SEQ ID NO: 2338203 - RNA, 15 nt, Human
gaucugagucccagg

SEQ ID NO: 2338204 - RNA, 23 nt, Human
gaucucugcaggaaauggcugug

SEQ ID NO: 2338205 - RNA, 18 nt, Human
gaucucuugagccuggga

SEQ ID NO: 2338206 - RNA, 12 nt, Human
gaucucugcagg

SEQ ID NO: 2338207 - RNA, 23 nt, Human
gaucucucaggagcacaggcagc

SEQ ID NO: 2338208 - RNA, 17 nt, Human
gaucucucaggagcaca

SEQ ID NO: 2338209 - RNA, 18 nt, Human
gaucucucaggagcacag

SEQ ID NO: 2338210 - RNA, 19 nt, Human
gaucucucaggagcacagg

SEQ ID NO: 2338211 - RNA, 20 nt, Human
gaucucucaggagcacaggc

SEQ ID NO: 2338212 - RNA, 21 nt, Human
gaucucucaggagcacaggca

SEQ ID NO: 2338213 - RNA, 22 nt, Human
gaucucucaggagcacaggcag

SEQ ID NO: 2338214 - RNA, 24 nt, Human
gaucucucaggagcacaggcagcu

SEQ ID NO: 2338215 - RNA, 19 nt, Human
gauccaccugucucagccu

SEQ ID NO: 2338216 - RNA, 18 nt, Human
gauccaccugucucagcc

SEQ ID NO: 2338217 - RNA, 14 nt, Human
gauccaccugucuc

SEQ ID NO: 2338218 - RNA, 23 nt, Human
gauccagcccugaguuccuagcc

SEQ ID NO: 2338219 - RNA, 12 nt, Human
gauccagccugg

SEQ ID NO: 2338220 - RNA, 14 nt, Human
gauccagagcacag

SEQ ID NO: 2338221 - RNA, 19 nt, Human
gaucccagcucacgucaca

SEQ ID NO: 2338222 - RNA, 17 nt, Human
gaucccagcucacguca

SEQ ID NO: 2338223 - RNA, 17 nt, Human
gauccagccucuccccu

SEQ ID NO: 2338224 - RNA, 22 nt, Human
gaucccaccccauuuucugugg

SEQ ID NO: 2338225 - RNA, 15 nt, Human
gaucucuaacuucac

SEQ ID NO: 2338226 - RNA, 12 nt, Human
gaucucucagga

SEQ ID NO: 2338227 - RNA, 13 nt, Human
gaucucucaggag

SEQ ID NO: 2338228 - RNA, 14 nt, Human
gaucucucaggagc

SEQ ID NO: 2338229 - RNA, 16 nt, Human
gaucucucaggagcac

SEQ ID NO: 2338230 - RNA, 24 nt, Human
gaucccaucuugauaagaccacca

SEQ ID NO: 2338231 - RNA, 23 nt, Human
gaucccaggggcccaaggcggcc

SEQ ID NO: 2338232 - RNA, 21 nt, Human
gaucuggaaccucagccuggc

SEQ ID NO: 2338233 - RNA, 20 nt, Human
gaucuggaaccucagccugg

SEQ ID NO: 2338234 - RNA, 19 nt, Human
gaucuggaaccucagccug

SEQ ID NO: 2338235 - RNA, 18 nt, Human
gaucuggaaccucagccu

SEQ ID NO: 2338236 - RNA, 17 nt, Human
gaucuggaaccucagcc

SEQ ID NO: 2338237 - RNA, 16 nt, Human
gaucuggaaccucagc

SEQ ID NO: 2338238 - RNA, 12 nt, Human
gaucuggaaccu

SEQ ID NO: 2338239 - RNA, 20 nt, Human
gaucuggaacccagacucag

SEQ ID NO: 2338240 - RNA, 18 nt, Human
gaucuggaacccagacuc

SEQ ID NO: 2338241 - RNA, 17 nt, Human
gaucuggaacccagacu

SEQ ID NO: 2338242 - RNA, 16 nt, Human
gaucuggaacccagac

SEQ ID NO: 2338243 - RNA, 15 nt, Human
gaucuggaacccaga

SEQ ID NO: 2338244 - RNA, 14 nt, Human
gaucugccccuccc

SEQ ID NO: 2338245 - RNA, 20 nt, Human
gaucugccccucccugcuuc

SEQ ID NO: 2338246 - RNA, 14 nt, Human
gaucuggaacccag

SEQ ID NO: 2338247 - RNA, 12 nt, Human
gaucuggaaccc

SEQ ID NO: 2338248 - RNA, 13 nt, Human
gaucugccccucc

SEQ ID NO: 2338249 - RNA, 20 nt, Human
gaucugcagggggugugucu

SEQ ID NO: 2338250 - RNA, 17 nt, Human
gauacugucucuuucau

SEQ ID NO: 2338251 - RNA, 16 nt, Human
gauacuguaacacuuu

SEQ ID NO: 2338252 - RNA, 19 nt, Human
gauacuggaaguuuugcau

SEQ ID NO: 2338253 - RNA, 16 nt, Human
gauacuggaaguuuug

SEQ ID NO: 2338254 - RNA, 20 nt, Human
gauacuggaaguuuugcauu

SEQ ID NO: 2338255 - RNA, 21 nt, Human
gauacuguaucaugacaaaga

SEQ ID NO: 2338256 - RNA, 17 nt, Human
gauacuguaucaugaca

SEQ ID NO: 2338257 - RNA, 14 nt, Human
gauacuggaaguuu

SEQ ID NO: 2338258 - RNA, 23 nt, Human
gauacugcuacuguaauuuuaua

SEQ ID NO: 2338259 - RNA, 21 nt, Human
gauacugcgacuuucugccug

SEQ ID NO: 2338260 - RNA, 23 nt, Human
gauacugcgacuuucugccugga

SEQ ID NO: 2338261 - RNA, 17 nt, Human
gauacugcgacuuucug

SEQ ID NO: 2338262 - RNA, 18 nt, Human
gauacugcgacuuucugc

SEQ ID NO: 2338263 - RNA, 19 nt, Human
gauacugcgacuuucugcc

SEQ ID NO: 2338264 - RNA, 20 nt, Human
gauacugcgacuuucugccu

SEQ ID NO: 2338265 - RNA, 17 nt, Human
gauacucugucagaugg

SEQ ID NO: 2338266 - RNA, 13 nt, Human
gauacucugucag

SEQ ID NO: 2338267 - RNA, 20 nt, Human
gauaccagguugaaagaccu

SEQ ID NO: 2338268 - RNA, 17 nt, Human
gauaccagguugaaaga

SEQ ID NO: 2338269 - RNA, 12 nt, Human
gauaccagcccc

SEQ ID NO: 2338270 - RNA, 18 nt, Human
gauaccauauacagcuca

SEQ ID NO: 2338271 - RNA, 15 nt, Human
gauacugcccggggc

SEQ ID NO: 2338272 - RNA, 18 nt, Human
gauacugcagggccagga

SEQ ID NO: 2338273 - RNA, 21 nt, Human
gauacugcagggccaggacug

SEQ ID NO: 2338274 - RNA, 16 nt, Human
gauacaguuacucaga

SEQ ID NO: 2338275 - RNA, 23 nt, Human
gauacaguuacucagaauucucu

SEQ ID NO: 2338276 - RNA, 19 nt, Human
gauacaguuacucagaauu

SEQ ID NO: 2338277 - RNA, 15 nt, Human
gauaccagcgaggag

SEQ ID NO: 2338278 - RNA, 22 nt, Human
gauaccagcgaggaggcuccag

SEQ ID NO: 2338279 - RNA, 13 nt, Human
gauaccagcugga

SEQ ID NO: 2338280 - RNA, 12 nt, Human
gauacaugugcc

SEQ ID NO: 2338281 - RNA, 21 nt, Human
gauacauacaccagcauuccu

SEQ ID NO: 2338282 - RNA, 23 nt, Human
gauacauccaaagcagacagcuc

SEQ ID NO: 2338283 - RNA, 21 nt, Human
gauacauccaaagcagacagc

SEQ ID NO: 2338284 - RNA, 20 nt, Human
gauacauccaaagcagacag

SEQ ID NO: 2338285 - RNA, 17 nt, Human
gauacauccaaagcaga

SEQ ID NO: 2338286 - RNA, 20 nt, Human
gauacauaugaguguggaag

SEQ ID NO: 2338287 - RNA, 18 nt, Human
gauacauaugagugugga

SEQ ID NO: 2338288 - RNA, 18 nt, Human
gauacagucccuaaagaa

SEQ ID NO: 2338289 - RNA, 19 nt, Human
gauacagucccuaaagaaa

SEQ ID NO: 2338290 - RNA, 21 nt, Human
gauauuuuaccucuuauugca

SEQ ID NO: 2338291 - RNA, 22 nt, Human
gauauuucccuccccuggggac

SEQ ID NO: 2338292 - RNA, 20 nt, Human
gauauuuucaaauuguaucu

SEQ ID NO: 2338293 - RNA, 19 nt, Human
gauauuuucaaauuguauc

SEQ ID NO: 2338294 - RNA, 18 nt, Human
gauauuuucaaauuguau

SEQ ID NO: 2338295 - RNA, 12 nt, Human
gauauuuucaaa

SEQ ID NO: 2338296 - RNA, 19 nt, Human
gauauuuucaacgcagccc

SEQ ID NO: 2338297 - RNA, 23 nt, Human
gauauuuauauuuuuauuuuauu

SEQ ID NO: 2338298 - RNA, 16 nt, Human
gauauuuauauauauu

SEQ ID NO: 2338299 - RNA, 16 nt, Human
gauauugugaaguaca

SEQ ID NO: 2338300 - RNA, 13 nt, Human
gauauuuauauau

SEQ ID NO: 2338301 - RNA, 17 nt, Human
gauauugugaaguacau

SEQ ID NO: 2338302 - RNA, 19 nt, Human
gauauuuauggggggagaa

SEQ ID NO: 2338303 - RNA, 23 nt, Human
gauauuucuauuuccuggaaugg

SEQ ID NO: 2338304 - RNA, 13 nt, Human
gauacuuuacaug

SEQ ID NO: 2338305 - RNA, 18 nt, Human
gauacuuugauauuuuca

SEQ ID NO: 2338306 - RNA, 22 nt, Human
gauacuguaacacuuuacaaug

SEQ ID NO: 2338307 - RNA, 16 nt, Human
gauagaagaacugcaa

SEQ ID NO: 2338308 - RNA, 14 nt, Human
gauagaagaacugc

SEQ ID NO: 2338309 - RNA, 20 nt, Human
gauagaaauaaauagcuaua

SEQ ID NO: 2338310 - RNA, 16 nt, Human
gauagaaauaaauagc

SEQ ID NO: 2338311 - RNA, 14 nt, Human
gauagaaauaaaua

SEQ ID NO: 2338312 - RNA, 17 nt, Human
gaucaaaggcacacagc

SEQ ID NO: 2338313 - RNA, 14 nt, Human
gaucaaauacuuua

SEQ ID NO: 2338314 - RNA, 16 nt, Human
gaucaaauacuuuaaa

SEQ ID NO: 2338315 - RNA, 17 nt, Human
gaucaaauacuuuaaag

SEQ ID NO: 2338316 - RNA, 19 nt, Human
gaucaaauacuuuaaagga

SEQ ID NO: 2338317 - RNA, 22 nt, Human
gaucaaaccccgaccaccugcc

SEQ ID NO: 2338318 - RNA, 22 nt, Human
gaucaaaauaaaaagugacaca

SEQ ID NO: 2338319 - RNA, 23 nt, Human
gaucaaaagguuaauaaaguaau

SEQ ID NO: 2338320 - RNA, 20 nt, Human
gauauuuucuuccaagcaaa

SEQ ID NO: 2338321 - RNA, 17 nt, Human
gaucaaaauaaaaagug

SEQ ID NO: 2338322 - RNA, 20 nt, Human
gaucaaaauaaaaagugaca

SEQ ID NO: 2338323 - RNA, 20 nt, Human
gaucaaaagguuaauaaagu

SEQ ID NO: 2338324 - RNA, 15 nt, Human
gauauuuugcuuugu

SEQ ID NO: 2338325 - RNA, 17 nt, Human
gauauuuuuuucuuuuc

SEQ ID NO: 2338326 - RNA, 21 nt, Human
gauauuuucaacgcagcccug

SEQ ID NO: 2338327 - RNA, 22 nt, Human
gauauuuucaacgcagcccugc

SEQ ID NO: 2338328 - RNA, 23 nt, Human
gauauuuucaacgcagcccugcu

SEQ ID NO: 2338329 - RNA, 21 nt, Human
gauauuuucugugccugaaua

SEQ ID NO: 2338330 - RNA, 15 nt, Human
gauauuuucugugcc

SEQ ID NO: 2338331 - RNA, 19 nt, Human
gauccacacacagaggaag

SEQ ID NO: 2338332 - RNA, 17 nt, Human
gauccacacacagagga

SEQ ID NO: 2338333 - RNA, 16 nt, Human
gauccacacacagagg

SEQ ID NO: 2338334 - RNA, 18 nt, Human
gauccacacacagaggaa

SEQ ID NO: 2338335 - RNA, 22 nt, Human
gauccacccaccucagccuccc

SEQ ID NO: 2338336 - RNA, 20 nt, Human
gauccacccaccucagccuc

SEQ ID NO: 2338337 - RNA, 21 nt, Human
gauccacccaccucagccucc

SEQ ID NO: 2338338 - RNA, 15 nt, Human
gauccacacacagag

SEQ ID NO: 2338339 - RNA, 14 nt, Human
gauccacacacaga

SEQ ID NO: 2338340 - RNA, 19 nt, Human
gauccaaguuuacucaacc

SEQ ID NO: 2338341 - RNA, 18 nt, Human
gaucaaccagcuaagaaa

SEQ ID NO: 2338342 - RNA, 21 nt, Human
gauccaagcuggucccacuca

SEQ ID NO: 2338343 - RNA, 18 nt, Human
gauccacccaccucagcc

SEQ ID NO: 2338344 - RNA, 19 nt, Human
gauccacccaccucagccu

SEQ ID NO: 2338345 - RNA, 23 nt, Human
gaucaaauucauuuuuuucacug

SEQ ID NO: 2338346 - RNA, 14 nt, Human
gaucaacaucuuuu

SEQ ID NO: 2338347 - RNA, 16 nt, Human
gaucaacaucuuuucu

SEQ ID NO: 2338348 - RNA, 17 nt, Human
gaucaacaucuuuucuu

SEQ ID NO: 2338349 - RNA, 20 nt, Human
gaucaacaucuuuucuugcc

SEQ ID NO: 2338350 - RNA, 13 nt, Human
gauccaaaagaag

SEQ ID NO: 2338351 - RNA, 23 nt, Human
gaucauuuucuuaucuucugcaa

SEQ ID NO: 2338352 - RNA, 22 nt, Human
gauccaaaagaagcccccagcu

SEQ ID NO: 2338353 - RNA, 20 nt, Human
gauccaaaagaagcccccag

SEQ ID NO: 2338354 - RNA, 19 nt, Human
gauccaaaagaagccccca

SEQ ID NO: 2338355 - RNA, 16 nt, Human
gauccaaaagaagccc

SEQ ID NO: 2338356 - RNA, 23 nt, Human
gauccaaaagaagcccccagcua

SEQ ID NO: 2338357 - RNA, 20 nt, Human
gauccaacuaaugccuuacu

SEQ ID NO: 2338358 - RNA, 19 nt, Human
gauccaacuaaugccuuac

SEQ ID NO: 2338359 - RNA, 12 nt, Human
gauccaagcugg

SEQ ID NO: 2338360 - RNA, 16 nt, Human
gauccaagcugguccc

SEQ ID NO: 2338361 - RNA, 17 nt, Human
gauccaagcugguccca

SEQ ID NO: 2338362 - RNA, 19 nt, Human
gauccaagcuggucccacu

SEQ ID NO: 2338363 - RNA, 12 nt, Human
gauucuucugcu

SEQ ID NO: 2338364 - RNA, 13 nt, Human
gauucuucugcuu

SEQ ID NO: 2338365 - RNA, 15 nt, Human
gauucuucugcuuca

SEQ ID NO: 2338366 - RNA, 19 nt, Human
gauuuaauaaaauaauucu

SEQ ID NO: 2338367 - RNA, 22 nt, Human
gauuuaauaaaauaauucuaaa

SEQ ID NO: 2338368 - RNA, 19 nt, Human
gauuuaacagaaauguaca

SEQ ID NO: 2338369 - RNA, 14 nt, Human
gauuuaauaguguu

SEQ ID NO: 2338370 - RNA, 23 nt, Human
gauuuaauaaaauaauucuaaag

SEQ ID NO: 2338371 - RNA, 15 nt, Human
gauuuaauaguguua

SEQ ID NO: 2338372 - RNA, 16 nt, Human
gauuuaauaguguuaa

SEQ ID NO: 2338373 - RNA, 17 nt, Human
gauuuaauaguguuaau

SEQ ID NO: 2338374 - RNA, 18 nt, Human
gauuuaauaguguuaauc

SEQ ID NO: 2338375 - RNA, 19 nt, Human
gauuuaauaguguuaauca

SEQ ID NO: 2338376 - RNA, 20 nt, Human
gauuuaauaguguuaaucaa

SEQ ID NO: 2338377 - RNA, 23 nt, Human
gauuuaauaguguuaaucaauuu

SEQ ID NO: 2338378 - RNA, 21 nt, Human
gauuuaauaguguuaaucaau

SEQ ID NO: 2338379 - RNA, 22 nt, Human
gauuuaauaguguuaaucaauu

SEQ ID NO: 2338380 - RNA, 21 nt, Human
gauuuaauuaaucaugaaugu

SEQ ID NO: 2338381 - RNA, 20 nt, Human
gauucuucugcuucagccuc

SEQ ID NO: 2338382 - RNA, 16 nt, Human
gauuuaacagaaaugu

SEQ ID NO: 2338383 - RNA, 18 nt, Human
gauuuaacagaaauguac

SEQ ID NO: 2338384 - RNA, 17 nt, Human
gauuuaacagaaaugua

SEQ ID NO: 2338385 - RNA, 15 nt, Human
gauuucaagccugcc

SEQ ID NO: 2338386 - RNA, 21 nt, Human
gauuuuuuuuuccuucagugc

SEQ ID NO: 2338387 - RNA, 14 nt, Human
gcaaaaaggcagga

SEQ ID NO: 2338388 - RNA, 22 nt, Human
gcaaaagaugcuucucacugcc

SEQ ID NO: 2338389 - RNA, 23 nt, Human
gcaaaaauauuuauaaaacuucu

SEQ ID NO: 2338390 - RNA, 14 nt, Human
gcaaaaauauuuau

SEQ ID NO: 2338391 - RNA, 21 nt, Human
gcaaaaggaucuuuguggcca

SEQ ID NO: 2338392 - RNA, 20 nt, Human
gcaaaaggaucuuuguggcc

SEQ ID NO: 2338393 - RNA, 17 nt, Human
gcaaaagaugcuucuca

SEQ ID NO: 2338394 - RNA, 13 nt, Human
gcaaaaagcaaaa

SEQ ID NO: 2338395 - RNA, 22 nt, Human
gauuuauuucaucauauuauac

SEQ ID NO: 2338396 - RNA, 18 nt, Human
gauuuauuucaucauauu

SEQ ID NO: 2338397 - RNA, 11 nt, Human
gauuucacucu

SEQ ID NO: 2338398 - RNA, 16 nt, Human
gauuuacacugggaga

SEQ ID NO: 2338399 - RNA, 19 nt, Human
gauuuacagccucacuuga

SEQ ID NO: 2338400 - RNA, 19 nt, Human
gauuuaauuugauaucaca

SEQ ID NO: 2338401 - RNA, 23 nt, Human
gauuuaauuugauaucacagucu

SEQ ID NO: 2338402 - RNA, 12 nt, Human
gauuuaauucuc

SEQ ID NO: 2338403 - RNA, 13 nt, Human
gauuuaauucucu

SEQ ID NO: 2338404 - RNA, 15 nt, Human
gauuuaauucucuug

SEQ ID NO: 2338405 - RNA, 16 nt, Human
gauuuuuuuuuccuuc

SEQ ID NO: 2338406 - RNA, 12 nt, Human
gauuucacucuc

SEQ ID NO: 2338407 - RNA, 17 nt, Human
gauuuuuuuuuccuuca

SEQ ID NO: 2338408 - RNA, 18 nt, Human
gauuuuuuuuuccuucag

SEQ ID NO: 2338409 - RNA, 21 nt, Human
gauggaaguugcagugagcug

SEQ ID NO: 2338410 - RNA, 15 nt, Human
gauggaagcuuccag

SEQ ID NO: 2338411 - RNA, 22 nt, Human
gauggaaccgcaggaagcugcu

SEQ ID NO: 2338412 - RNA, 20 nt, Human
gauggaaccgcaggaagcug

SEQ ID NO: 2338413 - RNA, 19 nt, Human
gauggaaccgcaggaagcu

SEQ ID NO: 2338414 - RNA, 18 nt, Human
gauggaaccgcaggaagc

SEQ ID NO: 2338415 - RNA, 13 nt, Human
gauggaaugaugg

SEQ ID NO: 2338416 - RNA, 16 nt, Human
gcaagugagagcuggg

SEQ ID NO: 2338417 - RNA, 15 nt, Human
gcaagugagagcugg

SEQ ID NO: 2338418 - RNA, 14 nt, Human
gcaaccaguuggcu

SEQ ID NO: 2338419 - RNA, 16 nt, Human
gcaaccaguuggcuag

SEQ ID NO: 2338420 - RNA, 18 nt, Human
gcaaccaguuggcuaggg

SEQ ID NO: 2338421 - RNA, 20 nt, Human
gcaaccacaggcagcauuua

SEQ ID NO: 2338422 - RNA, 14 nt, Human
gcaaccacuaagaa

SEQ ID NO: 2338423 - RNA, 14 nt, Human
gcaacccccagccu

SEQ ID NO: 2338424 - RNA, 16 nt, Human
gcaacccaaggacuga

SEQ ID NO: 2338425 - RNA, 19 nt, Human
gcaaccccaggcugaagca

SEQ ID NO: 2338426 - RNA, 20 nt, Human
gcaacccaaggacugaggga

SEQ ID NO: 2338427 - RNA, 14 nt, Human
gcaacccacgugua

SEQ ID NO: 2338428 - RNA, 15 nt, Human
gcaacccccagccug

SEQ ID NO: 2338429 - RNA, 16 nt, Human
gcaacccccagccugc

SEQ ID NO: 2338430 - RNA, 19 nt, Human
gcaaccuccgccucuuggg

SEQ ID NO: 2338431 - RNA, 16 nt, Human
gcaaccccaguucugc

SEQ ID NO: 2338432 - RNA, 18 nt, Human
gcaaccccaguucugcuc

SEQ ID NO: 2338433 - RNA, 19 nt, Human
gcaaccccaguucugcucc

SEQ ID NO: 2338434 - RNA, 20 nt, Human
gcaaccccaguucugcuccu

SEQ ID NO: 2338435 - RNA, 14 nt, Human
gcaaccugggucca

SEQ ID NO: 2338436 - RNA, 18 nt, Human
gcaaccuggguccaaaua

SEQ ID NO: 2338437 - RNA, 19 nt, Human
gcaaccuggguccaaauaa

SEQ ID NO: 2338438 - RNA, 20 nt, Human
gcaaccuucgccaccugggu

SEQ ID NO: 2338439 - RNA, 20 nt, Human
gcaaccuccgccucuugggu

SEQ ID NO: 2338440 - RNA, 23 nt, Human
gcaaccucuuggccugaucagac

SEQ ID NO: 2338441 - RNA, 16 nt, Human
gcaaccucuuggccug

SEQ ID NO: 2338442 - RNA, 21 nt, Human
gcaaccccaguucugcuccuc

SEQ ID NO: 2338443 - RNA, 22 nt, Human
gcaaccccaguucugcuccucu

SEQ ID NO: 2338444 - RNA, 24 nt, Human
gcaaccccaguucugcuccucucc

SEQ ID NO: 2338445 - RNA, 18 nt, Human
gcaacaucuagcaaaugu

SEQ ID NO: 2338446 - RNA, 13 nt, Human
gcaaccaccacca

SEQ ID NO: 2338447 - RNA, 16 nt, Human
gcaaccaccaccaacc

SEQ ID NO: 2338448 - RNA, 18 nt, Human
gcaaccaccaccaaccac

SEQ ID NO: 2338449 - RNA, 17 nt, Human
gcaacaguagcauagga

SEQ ID NO: 2338450 - RNA, 20 nt, Human
gcaacagguuuuauaauuuu

SEQ ID NO: 2338451 - RNA, 13 nt, Human
gcaacagguuuua

SEQ ID NO: 2338452 - RNA, 17 nt, Human
gcaacauccaaaauagu

SEQ ID NO: 2338453 - RNA, 13 nt, Human
gcaacauccaaaa

SEQ ID NO: 2338454 - RNA, 22 nt, Human
gcaacaggguauggacuaucug

SEQ ID NO: 2338455 - RNA, 18 nt, Human
gcaacaggaaucaagagc

SEQ ID NO: 2338456 - RNA, 21 nt, Human
gcaacaggaaucaagagcugc

SEQ ID NO: 2338457 - RNA, 13 nt, Human
gcaacagcacugg

SEQ ID NO: 2338458 - RNA, 18 nt, Human
gcaacagcacuggcucuc

SEQ ID NO: 2338459 - RNA, 20 nt, Human
gcaacagcacuggcucucuc

SEQ ID NO: 2338460 - RNA, 17 nt, Human
gcaacagcauaacaagg

SEQ ID NO: 2338461 - RNA, 16 nt, Human
gcaacaggcugggcuu

SEQ ID NO: 2338462 - RNA, 19 nt, Human
gcaacaggcugggcuucag

SEQ ID NO: 2338463 - RNA, 20 nt, Human
gcaaaagguucacuaaagca

SEQ ID NO: 2338464 - RNA, 21 nt, Human
gcaaaagguucacuaaagcag

SEQ ID NO: 2338465 - RNA, 23 nt, Human
gcaaaaggaucuuuguggccaag

SEQ ID NO: 2338466 - RNA, 17 nt, Human
gcaaaagggugucugag

SEQ ID NO: 2338467 - RNA, 18 nt, Human
gcaaaaguucugacuuga

SEQ ID NO: 2338468 - RNA, 19 nt, Human
gcaaaaguucugacuugac

SEQ ID NO: 2338469 - RNA, 15 nt, Human
gcaaaauaauuuuaa

SEQ ID NO: 2338470 - RNA, 13 nt, Human
gcaaaauaauuuu

SEQ ID NO: 2338471 - RNA, 13 nt, Human
gcaaaauagcauu

SEQ ID NO: 2338472 - RNA, 20 nt, Human
gcaaaauaauuuuaaacaaa

SEQ ID NO: 2338473 - RNA, 13 nt, Human
gcaaaaucaugga

SEQ ID NO: 2338474 - RNA, 20 nt, Human
gcaaaaucauggaaugguua

SEQ ID NO: 2338475 - RNA, 23 nt, Human
gcaaaaucauuuuauaugucaaa

SEQ ID NO: 2338476 - RNA, 17 nt, Human
gcaaaaugaggaaugua

SEQ ID NO: 2338477 - RNA, 13 nt, Human
gcaaaaugugaau

SEQ ID NO: 2338478 - RNA, 14 nt, Human
gcaacaggcugggc

SEQ ID NO: 2338479 - RNA, 15 nt, Human
gcaacaggcugggcu

SEQ ID NO: 2338480 - RNA, 13 nt, Human
gcaacaggcuggg

SEQ ID NO: 2338481 - RNA, 16 nt, Human
gcaaaauucccaggga

SEQ ID NO: 2338482 - RNA, 19 nt, Human
gcaacagcaaaucacgacc

SEQ ID NO: 2338483 - RNA, 18 nt, Human
gcauccaguaucuugaag

SEQ ID NO: 2338484 - RNA, 21 nt, Human
gcauccauuccucagggacag

SEQ ID NO: 2338485 - RNA, 18 nt, Human
gcauccauuccucaggga

SEQ ID NO: 2338486 - RNA, 16 nt, Human
gcauccauuccucagg

SEQ ID NO: 2338487 - RNA, 15 nt, Human
gcauccauuccucag

SEQ ID NO: 2338488 - RNA, 14 nt, Human
gcauccauuccuca

SEQ ID NO: 2338489 - RNA, 12 nt, Human
gcauccauuccu

SEQ ID NO: 2338490 - RNA, 17 nt, Human
gcauccauguguggacu

SEQ ID NO: 2338491 - RNA, 14 nt, Human
gcauccaguaucuu

SEQ ID NO: 2338492 - RNA, 17 nt, Human
gcauccaguaucuugaa

SEQ ID NO: 2338493 - RNA, 11 nt, Human
gcauccuaguc

SEQ ID NO: 2338494 - RNA, 23 nt, Human
gcauccuagucucuaucauuaaa

SEQ ID NO: 2338495 - RNA, 19 nt, Human
gcauccguaguucccugaa

SEQ ID NO: 2338496 - RNA, 18 nt, Human
gcauccguaguucccuga

SEQ ID NO: 2338497 - RNA, 14 nt, Human
gcauccuccaagaa

SEQ ID NO: 2338498 - RNA, 15 nt, Human
gcauccuccaagaau

SEQ ID NO: 2338499 - RNA, 19 nt, Human
gcauccuccaagaaucuau

SEQ ID NO: 2338500 - RNA, 18 nt, Human
gcauccuccacaauagca

SEQ ID NO: 2338501 - RNA, 17 nt, Human
gcauccguaguucccug

SEQ ID NO: 2338502 - RNA, 22 nt, Human
gcaucccuugaccaggccuggg

SEQ ID NO: 2338503 - RNA, 20 nt, Human
gcaucccuugaccaggccug

SEQ ID NO: 2338504 - RNA, 18 nt, Human
gcaucccuugaccaggcc

SEQ ID NO: 2338505 - RNA, 20 nt, Human
gcaucccaguggccucaacc

SEQ ID NO: 2338506 - RNA, 23 nt, Human
gcaucccaguggccucaacccuc

SEQ ID NO: 2338507 - RNA, 17 nt, Human
gcaucccaguggccuca

SEQ ID NO: 2338508 - RNA, 16 nt, Human
gcaucccaguggccuc

SEQ ID NO: 2338509 - RNA, 15 nt, Human
gcaucccaguggccu

SEQ ID NO: 2338510 - RNA, 14 nt, Human
gcaucccaguggcc

SEQ ID NO: 2338511 - RNA, 21 nt, Human
gcaucccaggggaccacaccu

SEQ ID NO: 2338512 - RNA, 19 nt, Human
gcaucccaggggaccacac

SEQ ID NO: 2338513 - RNA, 16 nt, Human
gcaucccaggggacca

SEQ ID NO: 2338514 - RNA, 15 nt, Human
gcaucccaggggacc

SEQ ID NO: 2338515 - RNA, 14 nt, Human
gcaucccaggggac

SEQ ID NO: 2338516 - RNA, 13 nt, Human
gcaucccagggga

SEQ ID NO: 2338517 - RNA, 19 nt, Human
gcauccccuuggcugugag

SEQ ID NO: 2338518 - RNA, 21 nt, Human
gcauccccuuggcugugaggc

SEQ ID NO: 2338519 - RNA, 20 nt, Human
gcauccccuuggcugugagg

SEQ ID NO: 2338520 - RNA, 18 nt, Human
gcaucccugaggagccag

SEQ ID NO: 2338521 - RNA, 20 nt, Human
gcauguguauuuccagugca

SEQ ID NO: 2338522 - RNA, 12 nt, Human
gcauguguauuu

SEQ ID NO: 2338523 - RNA, 16 nt, Human
gcauguggccuguggc

SEQ ID NO: 2338524 - RNA, 15 nt, Human
gcauuuacuuugugu

SEQ ID NO: 2338525 - RNA, 22 nt, Human
gcauuuaaaagauacaguuacu

SEQ ID NO: 2338526 - RNA, 18 nt, Human
gcauuuaaaagauacagu

SEQ ID NO: 2338527 - RNA, 17 nt, Human
gcauuuaaaagauacag

SEQ ID NO: 2338528 - RNA, 16 nt, Human
gcauuuaaaagauaca

SEQ ID NO: 2338529 - RNA, 16 nt, Human
gcauugugggaagggg

SEQ ID NO: 2338530 - RNA, 18 nt, Human
gcauugugggaaggggag

SEQ ID NO: 2338531 - RNA, 15 nt, Human
gcauguaaacacgcc

SEQ ID NO: 2338532 - RNA, 19 nt, Human
gcauguaaacacgccugca

SEQ ID NO: 2338533 - RNA, 17 nt, Human
gcauguaaacacgccug

SEQ ID NO: 2338534 - RNA, 19 nt, Human
gcaugugaugagaggaaau

SEQ ID NO: 2338535 - RNA, 18 nt, Human
gcaugugaugagaggaaa

SEQ ID NO: 2338536 - RNA, 11 nt, Human
gcauguacagu

SEQ ID NO: 2338537 - RNA, 21 nt, Human
gcaugugaugagaggaaauca

SEQ ID NO: 2338538 - RNA, 13 nt, Human
gcauguacagugu

SEQ ID NO: 2338539 - RNA, 20 nt, Human
gcauguacaguguucuguuu

SEQ ID NO: 2338540 - RNA, 12 nt, Human
gcauguggccug

SEQ ID NO: 2338541 - RNA, 17 nt, Human
gcauguggccuguggcc

SEQ ID NO: 2338542 - RNA, 13 nt, Human
gcauugugggaag

SEQ ID NO: 2338543 - RNA, 15 nt, Human
gcauugugggaaggg

SEQ ID NO: 2338544 - RNA, 15 nt, Human
gcaugguggcaccag

SEQ ID NO: 2338545 - RNA, 23 nt, Human
gcauggugccccaggaccagcuc

SEQ ID NO: 2338546 - RNA, 21 nt, Human
gcauggugccccaggaccagc

SEQ ID NO: 2338547 - RNA, 20 nt, Human
gcauggugccccaggaccag

SEQ ID NO: 2338548 - RNA, 19 nt, Human
gcaugguggcgcaagccug

SEQ ID NO: 2338549 - RNA, 15 nt, Human
gcauggugccccagg

SEQ ID NO: 2338550 - RNA, 13 nt, Human
gcauggugcaguu

SEQ ID NO: 2338551 - RNA, 19 nt, Human
gcauggugccccaggacca

SEQ ID NO: 2338552 - RNA, 18 nt, Human
gcauggugccccaggacc

SEQ ID NO: 2338553 - RNA, 17 nt, Human
gcauggugccccaggac

SEQ ID NO: 2338554 - RNA, 16 nt, Human
gcauggugccccagga

SEQ ID NO: 2338555 - RNA, 20 nt, Human
gcaugggaaagccaccucuc

SEQ ID NO: 2338556 - RNA, 15 nt, Human
gcauggggugggccu

SEQ ID NO: 2338557 - RNA, 18 nt, Human
gcauggggugggccucug

SEQ ID NO: 2338558 - RNA, 21 nt, Human
gcaugggugaagggagagcca

SEQ ID NO: 2338559 - RNA, 19 nt, Human
gcauggggugggccucugg

SEQ ID NO: 2338560 - RNA, 15 nt, Human
gcauggucacacacu

SEQ ID NO: 2338561 - RNA, 18 nt, Human
gcauggucacacacugau

SEQ ID NO: 2338562 - RNA, 22 nt, Human
gcauggcuccagucugcugccc

SEQ ID NO: 2338563 - RNA, 15 nt, Human
gcauggcugugagga

SEQ ID NO: 2338564 - RNA, 21 nt, Human
gcauggcuccagucugcugcc

SEQ ID NO: 2338565 - RNA, 15 nt, Human
gcauggcuccagucu

SEQ ID NO: 2338566 - RNA, 18 nt, Human
gcaugggaaagccaccuc

SEQ ID NO: 2338567 - RNA, 19 nt, Human
gcaugggaaagccaccucu

SEQ ID NO: 2338568 - RNA, 21 nt, Human
gcauggcugccaaugggagcu

SEQ ID NO: 2338569 - RNA, 13 nt, Human
gcauccuggcacc

SEQ ID NO: 2338570 - RNA, 17 nt, Human
gcauccuccgccucccg

SEQ ID NO: 2338571 - RNA, 21 nt, Human
gcauccugccuuagagccagg

SEQ ID NO: 2338572 - RNA, 23 nt, Human
gcauccugccuuagagccaggca

SEQ ID NO: 2338573 - RNA, 14 nt, Human
gcauggcuccaguc

SEQ ID NO: 2338574 - RNA, 13 nt, Human
gcauggcuccagu

SEQ ID NO: 2338575 - RNA, 18 nt, Human
gcauggcuccagaaaugu

SEQ ID NO: 2338576 - RNA, 19 nt, Human
gcauggcuccagaaauguc

SEQ ID NO: 2338577 - RNA, 22 nt, Human
gcauggcccuggggucccacga

SEQ ID NO: 2338578 - RNA, 17 nt, Human
gcauggcuccagaaaug

SEQ ID NO: 2338579 - RNA, 16 nt, Human
gcauggcccugggguc

SEQ ID NO: 2338580 - RNA, 17 nt, Human
gcauggcccuggggucc

SEQ ID NO: 2338581 - RNA, 23 nt, Human
gcaucuagaggcuuccuucauuu

SEQ ID NO: 2338582 - RNA, 22 nt, Human
gcaucuagaggcuuccuucauu

SEQ ID NO: 2338583 - RNA, 13 nt, Human
gcaucguggagac

SEQ ID NO: 2338584 - RNA, 21 nt, Human
gcaucuagaggcuuccuucau

SEQ ID NO: 2338585 - RNA, 20 nt, Human
gcaucuagcaugucgucaaa

SEQ ID NO: 2338586 - RNA, 18 nt, Human
gcauacguacacauuuua

SEQ ID NO: 2338587 - RNA, 14 nt, Human
gcaguuuaucauuc

SEQ ID NO: 2338588 - RNA, 13 nt, Human
gcaguugugucag

SEQ ID NO: 2338589 - RNA, 15 nt, Human
gcauacguacacauu

SEQ ID NO: 2338590 - RNA, 17 nt, Human
gcauacguacacauuuu

SEQ ID NO: 2338591 - RNA, 16 nt, Human
gcauacguacacauuu

SEQ ID NO: 2338592 - RNA, 22 nt, Human
gcaguuggccagagagccuggu

SEQ ID NO: 2338593 - RNA, 14 nt, Human
gcaguuggccagag

SEQ ID NO: 2338594 - RNA, 22 nt, Human
gcaguuguugcccacagcugua

SEQ ID NO: 2338595 - RNA, 21 nt, Human
gcagugaugcuggaugcuccu

SEQ ID NO: 2338596 - RNA, 22 nt, Human
gcagugauauggcagaagacac

SEQ ID NO: 2338597 - RNA, 20 nt, Human
gcagugaguuacagcgagag

SEQ ID NO: 2338598 - RNA, 16 nt, Human
gcagugauauggcaga

SEQ ID NO: 2338599 - RNA, 19 nt, Human
gcagugauauggcagaaga

SEQ ID NO: 2338600 - RNA, 21 nt, Human
gcagugauauggcagaagaca

SEQ ID NO: 2338601 - RNA, 13 nt, Human
gcagugaugucac

SEQ ID NO: 2338602 - RNA, 12 nt, Human
gcagcucucccc

SEQ ID NO: 2338603 - RNA, 20 nt, Human
gcagcucuggacagccccac

SEQ ID NO: 2338604 - RNA, 14 nt, Human
gcagcucuugcccu

SEQ ID NO: 2338605 - RNA, 15 nt, Human
gcagcucuugcccuu

SEQ ID NO: 2338606 - RNA, 16 nt, Human
gcagcucuugcccuuc

SEQ ID NO: 2338607 - RNA, 17 nt, Human
gcagcucuugcccuucc

SEQ ID NO: 2338608 - RNA, 18 nt, Human
gcagcucuugcccuuccc

SEQ ID NO: 2338609 - RNA, 19 nt, Human
gcagcucuugcccuucccu

SEQ ID NO: 2338610 - RNA, 20 nt, Human
gcagcucuugcccuucccug

SEQ ID NO: 2338611 - RNA, 23 nt, Human
gcagcucuugcccuucccugucc

SEQ ID NO: 2338612 - RNA, 18 nt, Human
gcagcugaaauaugcugg

SEQ ID NO: 2338613 - RNA, 13 nt, Human
gcagcucuugcua

SEQ ID NO: 2338614 - RNA, 22 nt, Human
gcagcucuugcuaaucaguguc

SEQ ID NO: 2338615 - RNA, 19 nt, Human
gcagcugaaauaugcuggc

SEQ ID NO: 2338616 - RNA, 22 nt, Human
gcagcugaaauaugcuggcugg

SEQ ID NO: 2338617 - RNA, 14 nt, Human
gcagcugaccucug

SEQ ID NO: 2338618 - RNA, 23 nt, Human
gcagcucuugcuaaucagugucu

SEQ ID NO: 2338619 - RNA, 16 nt, Human
gcagucuacccaccuc

SEQ ID NO: 2338620 - RNA, 20 nt, Human
gcagucuauauguuuguaua

SEQ ID NO: 2338621 - RNA, 16 nt, Human
gcagucgugccugugu

SEQ ID NO: 2338622 - RNA, 17 nt, Human
gcagucgugccuguguc

SEQ ID NO: 2338623 - RNA, 18 nt, Human
gcagucgugccugugucc

SEQ ID NO: 2338624 - RNA, 19 nt, Human
gcagucgugccugugucca

SEQ ID NO: 2338625 - RNA, 18 nt, Human
gcagcugauuuuaacaau

SEQ ID NO: 2338626 - RNA, 17 nt, Human
gcagcugauuuuaacaa

SEQ ID NO: 2338627 - RNA, 15 nt, Human
gcagcugauuuuaac

SEQ ID NO: 2338628 - RNA, 14 nt, Human
gcagcugauuuuaa

SEQ ID NO: 2338629 - RNA, 15 nt, Human
gcagcugccagagaa

SEQ ID NO: 2338630 - RNA, 14 nt, Human
gcagcugccagaga

SEQ ID NO: 2338631 - RNA, 16 nt, Human
gcagcugauacaaauu

SEQ ID NO: 2338632 - RNA, 21 nt, Human
gcagcugauguuggaagagaa

SEQ ID NO: 2338633 - RNA, 16 nt, Human
gcagucuggaggggca

SEQ ID NO: 2338634 - RNA, 19 nt, Human
gcagucuggcugagcccug

SEQ ID NO: 2338635 - RNA, 15 nt, Human
gcagucuggaggggc

SEQ ID NO: 2338636 - RNA, 14 nt, Human
gcagucuggagggg

SEQ ID NO: 2338637 - RNA, 13 nt, Human
gcagucuggaggg

SEQ ID NO: 2338638 - RNA, 12 nt, Human
gcagucuggagg

SEQ ID NO: 2338639 - RNA, 21 nt, Human
gcagugaaaacaagugcuggc

SEQ ID NO: 2338640 - RNA, 18 nt, Human
gcagucucggguggcuag

SEQ ID NO: 2338641 - RNA, 17 nt, Human
gcagucugauccaggag

SEQ ID NO: 2338642 - RNA, 20 nt, Human
gcagugagccaagauugcgc

SEQ ID NO: 2338643 - RNA, 14 nt, Human
gcagugagcugaga

SEQ ID NO: 2338644 - RNA, 21 nt, Human
gcagugagccgcaucuucucc

SEQ ID NO: 2338645 - RNA, 14 nt, Human
gcagugagcggaga

SEQ ID NO: 2338646 - RNA, 18 nt, Human
gcagugagucucuucaga

SEQ ID NO: 2338647 - RNA, 15 nt, Human
gcagugagugagccu

SEQ ID NO: 2338648 - RNA, 17 nt, Human
gcagugagugagccugg

SEQ ID NO: 2338649 - RNA, 18 nt, Human
gcagugagugagccuggc

SEQ ID NO: 2338650 - RNA, 19 nt, Human
gcagugagugagccuggcu

SEQ ID NO: 2338651 - RNA, 20 nt, Human
gcagugagugagccuggcuc

SEQ ID NO: 2338652 - RNA, 21 nt, Human
gcagugagugagccuggcucu

SEQ ID NO: 2338653 - RNA, 19 nt, Human
gcagugaguuacagcgaga

SEQ ID NO: 2338654 - RNA, 20 nt, Human
gcagugagaaaaagcuccug

SEQ ID NO: 2338655 - RNA, 18 nt, Human
gcagugacgugcaccugu

SEQ ID NO: 2338656 - RNA, 14 nt, Human
gcagugaauuguga

SEQ ID NO: 2338657 - RNA, 18 nt, Human
gcagugaaagacaagcug

SEQ ID NO: 2338658 - RNA, 20 nt, Human
gcagugaaugauucaguguu

SEQ ID NO: 2338659 - RNA, 21 nt, Human
gcagugaauugugaccaaguu

SEQ ID NO: 2338660 - RNA, 21 nt, Human
gcagugagaaaaagcuccugu

SEQ ID NO: 2338661 - RNA, 23 nt, Human
gcagugagaaaaagcuccugucc

SEQ ID NO: 2338662 - RNA, 22 nt, Human
gcagugagaaaaagcuccuguc

SEQ ID NO: 2338663 - RNA, 20 nt, Human
gcacucagaagacacugaug

SEQ ID NO: 2338664 - RNA, 18 nt, Human
gcaagugagagcugggug

SEQ ID NO: 2338665 - RNA, 19 nt, Human
gcaagugagagcugggugu

SEQ ID NO: 2338666 - RNA, 20 nt, Human
gcagaaagcaaaauuauguu

SEQ ID NO: 2338667 - RNA, 23 nt, Human
gcagaaagcaaaugugaccugug

SEQ ID NO: 2338668 - RNA, 16 nt, Human
gcagaaaauugccuaa

SEQ ID NO: 2338669 - RNA, 14 nt, Human
gcagaaaauugcac

SEQ ID NO: 2338670 - RNA, 20 nt, Human
gcagaaaagcaccugccgac

SEQ ID NO: 2338671 - RNA, 22 nt, Human
gcagaaaaucuuuuacuagugu

SEQ ID NO: 2338672 - RNA, 21 nt, Human
gcagaaaagcaccugccgacc

SEQ ID NO: 2338673 - RNA, 13 nt, Human
gcagaacagugau

SEQ ID NO: 2338674 - RNA, 12 nt, Human
gcagaacaguga

SEQ ID NO: 2338675 - RNA, 12 nt, Human
gcacuccagccu

SEQ ID NO: 2338676 - RNA, 16 nt, Human
gcacuuuuuaauucac

SEQ ID NO: 2338677 - RNA, 20 nt, Human
gcacuuuuuaauucaccaaa

SEQ ID NO: 2338678 - RNA, 14 nt, Human
gcacuuuuucauuu

SEQ ID NO: 2338679 - RNA, 20 nt, Human
gcacuuuuucauuugccuau

SEQ ID NO: 2338680 - RNA, 22 nt, Human
gcacuuuguucuggcucuucca

SEQ ID NO: 2338681 - RNA, 18 nt, Human
gcagaaaagcaccugccg

SEQ ID NO: 2338682 - RNA, 17 nt, Human
gcagaaaagcaccugcc

SEQ ID NO: 2338683 - RNA, 16 nt, Human
gcagaaaagcaccugc

SEQ ID NO: 2338684 - RNA, 15 nt, Human
gcagaaaagcaccug

SEQ ID NO: 2338685 - RNA, 18 nt, Human
gcagaaaaaugucauuga

SEQ ID NO: 2338686 - RNA, 12 nt, Human
gcagaaaacauu

SEQ ID NO: 2338687 - RNA, 13 nt, Human
gcagaaaacauug

SEQ ID NO: 2338688 - RNA, 14 nt, Human
gcagaaaacauugu

SEQ ID NO: 2338689 - RNA, 15 nt, Human
gcagaaaacauuguu

SEQ ID NO: 2338690 - RNA, 14 nt, Human
gcacuccagccugg

SEQ ID NO: 2338691 - RNA, 13 nt, Human
gcacuccccugcu

SEQ ID NO: 2338692 - RNA, 14 nt, Human
gcacuccccugcug

SEQ ID NO: 2338693 - RNA, 12 nt, Human
gcacuccccugc

SEQ ID NO: 2338694 - RNA, 15 nt, Human
gcacuccccugcugg

SEQ ID NO: 2338695 - RNA, 18 nt, Human
gcacuuuguucuggcucu

SEQ ID NO: 2338696 - RNA, 19 nt, Human
gcacuuuguucuggcucuu

SEQ ID NO: 2338697 - RNA, 21 nt, Human
gcagaggcuggaggcagggcc

SEQ ID NO: 2338698 - RNA, 19 nt, Human
gcagaggcuggaggcaggg

SEQ ID NO: 2338699 - RNA, 11 nt, Human
gcagaggcugg

SEQ ID NO: 2338700 - RNA, 15 nt, Human
gcagaggccagaggc

SEQ ID NO: 2338701 - RNA, 19 nt, Human
gcagagggcagaggcugga

SEQ ID NO: 2338702 - RNA, 18 nt, Human
gcagagggcagaggcugg

SEQ ID NO: 2338703 - RNA, 16 nt, Human
gcagagggcagaggcu

SEQ ID NO: 2338704 - RNA, 22 nt, Human
gcagaggcuggaggcagggccu

SEQ ID NO: 2338705 - RNA, 14 nt, Human
gcagagggcacaga

SEQ ID NO: 2338706 - RNA, 21 nt, Human
gcagcagugagucucuucaga

SEQ ID NO: 2338707 - RNA, 17 nt, Human
gcagcagugagucucuu

SEQ ID NO: 2338708 - RNA, 18 nt, Human
gcagcagugaaaacaagu

SEQ ID NO: 2338709 - RNA, 21 nt, Human
gcagcagugaaaacaagugcu

SEQ ID NO: 2338710 - RNA, 20 nt, Human
gcagcagguggcagaauggg

SEQ ID NO: 2338711 - RNA, 14 nt, Human
gcagcagugaaaac

SEQ ID NO: 2338712 - RNA, 15 nt, Human
gcagcagugaaaaca

SEQ ID NO: 2338713 - RNA, 16 nt, Human
gcagcagugaaaacaa

SEQ ID NO: 2338714 - RNA, 11 nt, Human
gcagaggggca

SEQ ID NO: 2338715 - RNA, 14 nt, Human
gcagcauaugagga

SEQ ID NO: 2338716 - RNA, 15 nt, Human
gcagcauaaaggccu

SEQ ID NO: 2338717 - RNA, 12 nt, Human
gcagcauaaagg

SEQ ID NO: 2338718 - RNA, 23 nt, Human
gcagcagugugaggccagggcag

SEQ ID NO: 2338719 - RNA, 22 nt, Human
gcagcagugugaggccagggca

SEQ ID NO: 2338720 - RNA, 21 nt, Human
gcagcagugugaggccagggc

SEQ ID NO: 2338721 - RNA, 20 nt, Human
gcagcagugugaggccaggg

SEQ ID NO: 2338722 - RNA, 19 nt, Human
gcagcagugugaggccagg

SEQ ID NO: 2338723 - RNA, 15 nt, Human
gcagcagugugaggc

SEQ ID NO: 2338724 - RNA, 17 nt, Human
gcagcaugaccugugac

SEQ ID NO: 2338725 - RNA, 21 nt, Human
gcagcaucuucaaacauguac

SEQ ID NO: 2338726 - RNA, 20 nt, Human
gcagcauguugcugaggagu

SEQ ID NO: 2338727 - RNA, 21 nt, Human
gcagccaaacccaugaggcaa

SEQ ID NO: 2338728 - RNA, 19 nt, Human
gcagcaucuucacuucuaa

SEQ ID NO: 2338729 - RNA, 15 nt, Human
gcagcaucuucaaac

SEQ ID NO: 2338730 - RNA, 15 nt, Human
gcagcaucugcuaau

SEQ ID NO: 2338731 - RNA, 20 nt, Human
gcagccaagcuccuugggag

SEQ ID NO: 2338732 - RNA, 12 nt, Human
gcagccaaggcc

SEQ ID NO: 2338733 - RNA, 21 nt, Human
gcagccaaggccgaagcucug

SEQ ID NO: 2338734 - RNA, 22 nt, Human
gcagccaaggccgaagcucugg

SEQ ID NO: 2338735 - RNA, 17 nt, Human
gcagccaagcuccuugg

SEQ ID NO: 2338736 - RNA, 13 nt, Human
gcagccaagcucc

SEQ ID NO: 2338737 - RNA, 22 nt, Human
gcagcauguugcugaggaguga

SEQ ID NO: 2338738 - RNA, 23 nt, Human
gcagccaaggccgaagcucuggc

SEQ ID NO: 2338739 - RNA, 12 nt, Human
gcagccaaggga

SEQ ID NO: 2338740 - RNA, 17 nt, Human
gcagcauauucaggaag

SEQ ID NO: 2338741 - RNA, 18 nt, Human
gcagcauauucaggaagc

SEQ ID NO: 2338742 - RNA, 19 nt, Human
gcagcauauucaggaagcu

SEQ ID NO: 2338743 - RNA, 23 nt, Human
gcagcauauucaggaagcucagg

SEQ ID NO: 2338744 - RNA, 12 nt, Human
gcagaggcagcg

SEQ ID NO: 2338745 - RNA, 15 nt, Human
gcagaggaggggccg

SEQ ID NO: 2338746 - RNA, 12 nt, Human
gcagaggcacug

SEQ ID NO: 2338747 - RNA, 12 nt, Human
gcagaggccaga

SEQ ID NO: 2338748 - RNA, 21 nt, Human
gcagaggaggggccgcugcca

SEQ ID NO: 2338749 - RNA, 14 nt, Human
gcagaggaggggcc

SEQ ID NO: 2338750 - RNA, 12 nt, Human
gcagaggagggg

SEQ ID NO: 2338751 - RNA, 21 nt, Human
gcagaggaaagcaaaggagau

SEQ ID NO: 2338752 - RNA, 22 nt, Human
gcagagcuucuuccaggugccc

SEQ ID NO: 2338753 - RNA, 16 nt, Human
gcagagcuucuuccag

SEQ ID NO: 2338754 - RNA, 17 nt, Human
gcagagcuuggacugga

SEQ ID NO: 2338755 - RNA, 11 nt, Human
gcagaggacag

SEQ ID NO: 2338756 - RNA, 13 nt, Human
gcagaggaaagca

SEQ ID NO: 2338757 - RNA, 14 nt, Human
gcagaggaaagcaa

SEQ ID NO: 2338758 - RNA, 18 nt, Human
gcagaggaaagcaaagga

SEQ ID NO: 2338759 - RNA, 20 nt, Human
gcagaggaaagcaaaggaga

SEQ ID NO: 2338760 - RNA, 18 nt, Human
gcagaacugagcuccucu

SEQ ID NO: 2338761 - RNA, 19 nt, Human
gcagagcugcgggcugggu

SEQ ID NO: 2338762 - RNA, 17 nt, Human
gcagagcugcgggcugg

SEQ ID NO: 2338763 - RNA, 12 nt, Human
gcagagcuggcu

SEQ ID NO: 2338764 - RNA, 13 nt, Human
gcagagcuggcuc

SEQ ID NO: 2338765 - RNA, 14 nt, Human
gcagagcuggcucu

SEQ ID NO: 2338766 - RNA, 15 nt, Human
gcagagcuggcucug

SEQ ID NO: 2338767 - RNA, 17 nt, Human
gcagagcuggcucugag

SEQ ID NO: 2338768 - RNA, 23 nt, Human
gcagagcuggcucugagcgccuc

SEQ ID NO: 2338769 - RNA, 23 nt, Human
gcagaacagccgcuccugucugc

SEQ ID NO: 2338770 - RNA, 21 nt, Human
gcagaacguauugguccagcu

SEQ ID NO: 2338771 - RNA, 24 nt, Human
gcagaacggagccccaggccucug

SEQ ID NO: 2338772 - RNA, 13 nt, Human
gcagaacggagcc

SEQ ID NO: 2338773 - RNA, 16 nt, Human
gcagaacugagcuccu

SEQ ID NO: 2338774 - RNA, 14 nt, Human
gcagaacugagcuc

SEQ ID NO: 2338775 - RNA, 21 nt, Human
gcagaacuaaacucauuuaua

SEQ ID NO: 2338776 - RNA, 19 nt, Human
gcagaacuaaacucauuua

SEQ ID NO: 2338777 - RNA, 22 nt, Human
gcagaacagugauuaccaggga

SEQ ID NO: 2338778 - RNA, 18 nt, Human
gcagaacagugauuacca

SEQ ID NO: 2338779 - RNA, 14 nt, Human
gcagcucaucucug

SEQ ID NO: 2338780 - RNA, 14 nt, Human
gcagcucuccaguc

SEQ ID NO: 2338781 - RNA, 15 nt, Human
gcagcucuccaguca

SEQ ID NO: 2338782 - RNA, 21 nt, Human
gcagcucuccagucaggaggc

SEQ ID NO: 2338783 - RNA, 19 nt, Human
gcagcucaucucuguccca

SEQ ID NO: 2338784 - RNA, 21 nt, Human
gcagcucaucucugucccacu

SEQ ID NO: 2338785 - RNA, 18 nt, Human
gcagcccaccccucaaca

SEQ ID NO: 2338786 - RNA, 23 nt, Human
gcagccagcccagcccagcuggu

SEQ ID NO: 2338787 - RNA, 21 nt, Human
gcagccagcccagcccagcug

SEQ ID NO: 2338788 - RNA, 13 nt, Human
gcagccagcucuc

SEQ ID NO: 2338789 - RNA, 17 nt, Human
gcagccagcccagccca

SEQ ID NO: 2338790 - RNA, 16 nt, Human
gcagccagcccagccc

SEQ ID NO: 2338791 - RNA, 15 nt, Human
gcagccagcccagcc

SEQ ID NO: 2338792 - RNA, 13 nt, Human
gcagccagcccag

SEQ ID NO: 2338793 - RNA, 15 nt, Human
gcagccacauuccug

SEQ ID NO: 2338794 - RNA, 17 nt, Human
gcagccaggcugccaag

SEQ ID NO: 2338795 - RNA, 14 nt, Human
gcagccaggcugcc

SEQ ID NO: 2338796 - RNA, 13 nt, Human
gcagccaggcugc

SEQ ID NO: 2338797 - RNA, 12 nt, Human
gcagccaggcug

SEQ ID NO: 2338798 - RNA, 18 nt, Human
gcagccagcucucagcca

SEQ ID NO: 2338799 - RNA, 17 nt, Human
gcagccagcucucagcc

SEQ ID NO: 2338800 - RNA, 16 nt, Human
gcagccagcucucagc

SEQ ID NO: 2338801 - RNA, 15 nt, Human
gcagccagcucucag

SEQ ID NO: 2338802 - RNA, 20 nt, Human
gcagccaggccacuggcccc

SEQ ID NO: 2338803 - RNA, 11 nt, Human
gcccccugccc

SEQ ID NO: 2338804 - RNA, 12 nt, Human
gccccugcuggu

SEQ ID NO: 2338805 - RNA, 17 nt, Human
gcccccucugcccugcg

SEQ ID NO: 2338806 - RNA, 18 nt, Human
gcccccugaaacuuauuu

SEQ ID NO: 2338807 - RNA, 15 nt, Human
gccccugcugguuca

SEQ ID NO: 2338808 - RNA, 16 nt, Human
gccccugcugguucag

SEQ ID NO: 2338809 - RNA, 12 nt, Human
gccccuggcagc

SEQ ID NO: 2338810 - RNA, 15 nt, Human
gccccuggcagcccc

SEQ ID NO: 2338811 - RNA, 18 nt, Human
gcccccagcuguggguac

SEQ ID NO: 2338812 - RNA, 14 nt, Human
gcccccagcuggcc

SEQ ID NO: 2338813 - RNA, 15 nt, Human
gcccccagcuggccc

SEQ ID NO: 2338814 - RNA, 12 nt, Human
gcccccaggacu

SEQ ID NO: 2338815 - RNA, 23 nt, Human
gcccccagcuaagaaccuggaac

SEQ ID NO: 2338816 - RNA, 12 nt, Human
gcccccagcugg

SEQ ID NO: 2338817 - RNA, 13 nt, Human
gcccccagcuggc

SEQ ID NO: 2338818 - RNA, 22 nt, Human
gcccccagcuaagaaccuggaa

SEQ ID NO: 2338819 - RNA, 21 nt, Human
gcccccagcuaagaaccugga

SEQ ID NO: 2338820 - RNA, 16 nt, Human
gcccccucugcccugc

SEQ ID NO: 2338821 - RNA, 15 nt, Human
gcccccucugcccug

SEQ ID NO: 2338822 - RNA, 13 nt, Human
gcccccaggacug

SEQ ID NO: 2338823 - RNA, 14 nt, Human
gcccccaggacugg

SEQ ID NO: 2338824 - RNA, 15 nt, Human
gcccccaggacuggg

SEQ ID NO: 2338825 - RNA, 16 nt, Human
gcccccaggacugggc

SEQ ID NO: 2338826 - RNA, 15 nt, Human
gcccccagcuaagaa

SEQ ID NO: 2338827 - RNA, 20 nt, Human
gcccccagccccggggugag

SEQ ID NO: 2338828 - RNA, 21 nt, Human
gcccccagccccggggugagu

SEQ ID NO: 2338829 - RNA, 18 nt, Human
gcccccagagcgccccuc

SEQ ID NO: 2338830 - RNA, 17 nt, Human
gcccccagcccagggcu

SEQ ID NO: 2338831 - RNA, 18 nt, Human
gcccccagcccagggcuc

SEQ ID NO: 2338832 - RNA, 21 nt, Human
gcccccagcccagggcuccug

SEQ ID NO: 2338833 - RNA, 22 nt, Human
gcccccagcccagggcuccugc

SEQ ID NO: 2338834 - RNA, 12 nt, Human
gcccccagacgc

SEQ ID NO: 2338835 - RNA, 22 nt, Human
gccccacccagaugggggaaag

SEQ ID NO: 2338836 - RNA, 17 nt, Human
gcccccacuugccucuu

SEQ ID NO: 2338837 - RNA, 21 nt, Human
gcccccacuugccucuuccuu

SEQ ID NO: 2338838 - RNA, 15 nt, Human
gccccacccaggagg

SEQ ID NO: 2338839 - RNA, 12 nt, Human
gccccacccagg

SEQ ID NO: 2338840 - RNA, 14 nt, Human
gcccccacuugccu

SEQ ID NO: 2338841 - RNA, 16 nt, Human
gcccccacuugccucu

SEQ ID NO: 2338842 - RNA, 11 nt, Human
gccccacccag

SEQ ID NO: 2338843 - RNA, 12 nt, Human
gccccacccaga

SEQ ID NO: 2338844 - RNA, 13 nt, Human
gccccacccagau

SEQ ID NO: 2338845 - RNA, 23 nt, Human
gccccaccaccuaggccacuccu

SEQ ID NO: 2338846 - RNA, 20 nt, Human
gccccaccaccuaggccacu

SEQ ID NO: 2338847 - RNA, 18 nt, Human
gccccaccaccuaggcca

SEQ ID NO: 2338848 - RNA, 15 nt, Human
gccccaccaccuagg

SEQ ID NO: 2338849 - RNA, 14 nt, Human
gccccaccaccuag

SEQ ID NO: 2338850 - RNA, 13 nt, Human
gccccaccaccua

SEQ ID NO: 2338851 - RNA, 11 nt, Human
gccccaccacc

SEQ ID NO: 2338852 - RNA, 18 nt, Human
gccccacagcccacgucc

SEQ ID NO: 2338853 - RNA, 14 nt, Human
gccccacagcccac

SEQ ID NO: 2338854 - RNA, 17 nt, Human
gccccacagcccacguc

SEQ ID NO: 2338855 - RNA, 23 nt, Human
gccccacagcccacguccuguca

SEQ ID NO: 2338856 - RNA, 18 nt, Human
gccccaacuccuggaagc

SEQ ID NO: 2338857 - RNA, 13 nt, Human
gccccacagccca

SEQ ID NO: 2338858 - RNA, 17 nt, Human
gccccaacuccuggaag

SEQ ID NO: 2338859 - RNA, 16 nt, Human
gccccaacuccuggaa

SEQ ID NO: 2338860 - RNA, 15 nt, Human
gccccaacuccugga

SEQ ID NO: 2338861 - RNA, 14 nt, Human
gccccaacuccugg

SEQ ID NO: 2338862 - RNA, 14 nt, Human
gccccaaccugcug

SEQ ID NO: 2338863 - RNA, 15 nt, Human
gccccaaccugcuga

SEQ ID NO: 2338864 - RNA, 14 nt, Human
gccccaacccccag

SEQ ID NO: 2338865 - RNA, 16 nt, Human
gccccaacccccagca

SEQ ID NO: 2338866 - RNA, 17 nt, Human
gccccaacccccagcac

SEQ ID NO: 2338867 - RNA, 19 nt, Human
gccccaacccccagcaccc

SEQ ID NO: 2338868 - RNA, 13 nt, Human
gccccaaccugcu

SEQ ID NO: 2338869 - RNA, 20 nt, Human
gccccaaaacucuccucugc

SEQ ID NO: 2338870 - RNA, 20 nt, Human
gccccaaacgggcugcccug

SEQ ID NO: 2338871 - RNA, 14 nt, Human
gccccaaaggaaaa

SEQ ID NO: 2338872 - RNA, 20 nt, Human
gccccaaaggaaaaagcaca

SEQ ID NO: 2338873 - RNA, 18 nt, Human
gccccaaacaaauaugca

SEQ ID NO: 2338874 - RNA, 19 nt, Human
gccccaaacaaauaugcaa

SEQ ID NO: 2338875 - RNA, 17 nt, Human
gccccaaacaaauaugc

SEQ ID NO: 2338876 - RNA, 21 nt, Human
gccccaaaacucuccucugcu

SEQ ID NO: 2338877 - RNA, 11 nt, Human
gccccaaaagg

SEQ ID NO: 2338878 - RNA, 15 nt, Human
gcccaggauggcuuu

SEQ ID NO: 2338879 - RNA, 11 nt, Human
gcccaggcagg

SEQ ID NO: 2338880 - RNA, 15 nt, Human
gcccaggagagccag

SEQ ID NO: 2338881 - RNA, 13 nt, Human
gcccaggaccagc

SEQ ID NO: 2338882 - RNA, 14 nt, Human
gcccaggaccagcu

SEQ ID NO: 2338883 - RNA, 15 nt, Human
gcccaggaccagcug

SEQ ID NO: 2338884 - RNA, 16 nt, Human
gcccaggaccagcugg

SEQ ID NO: 2338885 - RNA, 17 nt, Human
gcccaggaccagcuggg

SEQ ID NO: 2338886 - RNA, 18 nt, Human
gcccaggaccagcugggg

SEQ ID NO: 2338887 - RNA, 19 nt, Human
gcccaggaccagcuggggc

SEQ ID NO: 2338888 - RNA, 18 nt, Human
gcccaggaccaucauccu

SEQ ID NO: 2338889 - RNA, 18 nt, Human
gcccaggacggggccggc

SEQ ID NO: 2338890 - RNA, 19 nt, Human
gcccaggacggggccggcc

SEQ ID NO: 2338891 - RNA, 20 nt, Human
gcccaggacggggccggcca

SEQ ID NO: 2338892 - RNA, 21 nt, Human
gcccaggacggggccggccag

SEQ ID NO: 2338893 - RNA, 18 nt, Human
gcccaggagagccagccc

SEQ ID NO: 2338894 - RNA, 22 nt, Human
gcccaggagagagaaagccagg

SEQ ID NO: 2338895 - RNA, 23 nt, Human
gcccaggagagagaaagccaggc

SEQ ID NO: 2338896 - RNA, 15 nt, Human
gcccaggagagagaa

SEQ ID NO: 2338897 - RNA, 16 nt, Human
gcccaggagagagaaa

SEQ ID NO: 2338898 - RNA, 17 nt, Human
gcccaggagagagaaag

SEQ ID NO: 2338899 - RNA, 20 nt, Human
gcccaggagagagaaagcca

SEQ ID NO: 2338900 - RNA, 11 nt, Human
gcccaggagac

SEQ ID NO: 2338901 - RNA, 10 nt, Human
gcccaggaga

SEQ ID NO: 2338902 - RNA, 23 nt, Human
gcccaggacggggccggccaggu

SEQ ID NO: 2338903 - RNA, 12 nt, Human
gcccaggagaga

SEQ ID NO: 2338904 - RNA, 13 nt, Human
gcccaggagagag

SEQ ID NO: 2338905 - RNA, 14 nt, Human
gcccaggagagaga

SEQ ID NO: 2338906 - RNA, 14 nt, Human
gcccaggcaggcca

SEQ ID NO: 2338907 - RNA, 13 nt, Human
gcccaggccaucu

SEQ ID NO: 2338908 - RNA, 18 nt, Human
gcccaggccaucuuccag

SEQ ID NO: 2338909 - RNA, 19 nt, Human
gcccaggccaucuuccagg

SEQ ID NO: 2338910 - RNA, 22 nt, Human
gcccaggccaucuuccaggugg

SEQ ID NO: 2338911 - RNA, 11 nt, Human
gcccaggcccc

SEQ ID NO: 2338912 - RNA, 12 nt, Human
gcccaggccccu

SEQ ID NO: 2338913 - RNA, 20 nt, Human
gcccaggccccugccacccu

SEQ ID NO: 2338914 - RNA, 21 nt, Human
gcccaggccccugccacccug

SEQ ID NO: 2338915 - RNA, 23 nt, Human
gcccaggccaucuuccagguggg

SEQ ID NO: 2338916 - RNA, 18 nt, Human
gcccaggccccugccacc

SEQ ID NO: 2338917 - RNA, 22 nt, Human
gcccaggccccugccacccugg

SEQ ID NO: 2338918 - RNA, 16 nt, Human
gcauuuaauguagcca

SEQ ID NO: 2338919 - RNA, 19 nt, Human
gcauuuaauguagccaugg

SEQ ID NO: 2338920 - RNA, 17 nt, Human
gcauuuacuuugaauuu

SEQ ID NO: 2338921 - RNA, 16 nt, Human
gccauuaccauggaga

SEQ ID NO: 2338922 - RNA, 13 nt, Human
gccauuaccaugg

SEQ ID NO: 2338923 - RNA, 18 nt, Human
gcauuuacuuuguguuca

SEQ ID NO: 2338924 - RNA, 12 nt, Human
gcauuuagaugu

SEQ ID NO: 2338925 - RNA, 19 nt, Human
gcauuuaggccaugggaca

SEQ ID NO: 2338926 - RNA, 13 nt, Human
gcauuuagaugua

SEQ ID NO: 2338927 - RNA, 18 nt, Human
gccauuaccauggagaca

SEQ ID NO: 2338928 - RNA, 22 nt, Human
gccauuaucccugaaucccccu

SEQ ID NO: 2338929 - RNA, 19 nt, Human
gccauugccaccaggagaa

SEQ ID NO: 2338930 - RNA, 18 nt, Human
gccauugccaccaggaga

SEQ ID NO: 2338931 - RNA, 17 nt, Human
gccauugccaccaggag

SEQ ID NO: 2338932 - RNA, 21 nt, Human
gccauugcacuccagccuggg

SEQ ID NO: 2338933 - RNA, 19 nt, Human
gccauugcacuccagccug

SEQ ID NO: 2338934 - RNA, 18 nt, Human
gccauugcacuccagccu

SEQ ID NO: 2338935 - RNA, 15 nt, Human
gccauugcacuccag

SEQ ID NO: 2338936 - RNA, 14 nt, Human
gccauugcacucca

SEQ ID NO: 2338937 - RNA, 17 nt, Human
gccauugacuucuuccc

SEQ ID NO: 2338938 - RNA, 15 nt, Human
gcccacgcccccacu

SEQ ID NO: 2338939 - RNA, 16 nt, Human
gcccacgcccccacug

SEQ ID NO: 2338940 - RNA, 17 nt, Human
gcccacgcccccacugg

SEQ ID NO: 2338941 - RNA, 21 nt, Human
gcccacgcccccacuggugac

SEQ ID NO: 2338942 - RNA, 23 nt, Human
gcccacgcuggagugcagugagc

SEQ ID NO: 2338943 - RNA, 20 nt, Human
gccauuggcuauuuaaaacu

SEQ ID NO: 2338944 - RNA, 21 nt, Human
gccauugucuucggaaaccuu

SEQ ID NO: 2338945 - RNA, 22 nt, Human
gccauugucuucggaaaccuug

SEQ ID NO: 2338946 - RNA, 19 nt, Human
gcccacgcuggagugcagu

SEQ ID NO: 2338947 - RNA, 21 nt, Human
gcccacgcuggagugcaguga

SEQ ID NO: 2338948 - RNA, 15 nt, Human
gcccacuguacuugc

SEQ ID NO: 2338949 - RNA, 20 nt, Human
gcccacuguacuugcucuug

SEQ ID NO: 2338950 - RNA, 22 nt, Human
gcccacuguacuugcucuugau

SEQ ID NO: 2338951 - RNA, 23 nt, Human
gcccacugcccacccccucaagc

SEQ ID NO: 2338952 - RNA, 20 nt, Human
gcccacugcccacccccuca

SEQ ID NO: 2338953 - RNA, 15 nt, Human
gcccacuguccuggg

SEQ ID NO: 2338954 - RNA, 13 nt, Human
gcccacuguccug

SEQ ID NO: 2338955 - RNA, 14 nt, Human
gcccacuguccugg

SEQ ID NO: 2338956 - RNA, 13 nt, Human
gcccacuucugcc

SEQ ID NO: 2338957 - RNA, 13 nt, Human
gcccacuucaggg

SEQ ID NO: 2338958 - RNA, 23 nt, Human
gcccacuucaggguucuccucuc

SEQ ID NO: 2338959 - RNA, 24 nt, Human
gcccacuguccugggccugcagaa

SEQ ID NO: 2338960 - RNA, 16 nt, Human
gcccacuguccugggc

SEQ ID NO: 2338961 - RNA, 17 nt, Human
gcccacuguccugggcg

SEQ ID NO: 2338962 - RNA, 23 nt, Human
gcccacuguccugggcgcccugg

SEQ ID NO: 2338963 - RNA, 19 nt, Human
gcccacuguccugggcgcc

SEQ ID NO: 2338964 - RNA, 21 nt, Human
gcccacuguccugggcgcccu

SEQ ID NO: 2338965 - RNA, 23 nt, Human
gcccacuguccugggccugcaga

SEQ ID NO: 2338966 - RNA, 21 nt, Human
gcccacuguccugggccugca

SEQ ID NO: 2338967 - RNA, 18 nt, Human
gcccacuguccugggccu

SEQ ID NO: 2338968 - RNA, 17 nt, Human
gcccacuguccugggcc

SEQ ID NO: 2338969 - RNA, 24 nt, Human
gcccaggaaaggcuccaggagcag

SEQ ID NO: 2338970 - RNA, 22 nt, Human
gcccaggaaaggcuccaggagc

SEQ ID NO: 2338971 - RNA, 23 nt, Human
gcccaggaaaggcuccaggagca

SEQ ID NO: 2338972 - RNA, 19 nt, Human
gccucaugcuaagacucag

SEQ ID NO: 2338973 - RNA, 13 nt, Human
gccucauguggcu

SEQ ID NO: 2338974 - RNA, 14 nt, Human
gccucauguggcug

SEQ ID NO: 2338975 - RNA, 22 nt, Human
gccucauguccacugguucuuc

SEQ ID NO: 2338976 - RNA, 18 nt, Human
gccuccaccgcugccuaa

SEQ ID NO: 2338977 - RNA, 12 nt, Human
gccuccacuccc

SEQ ID NO: 2338978 - RNA, 12 nt, Human
gccuccaccgcu

SEQ ID NO: 2338979 - RNA, 22 nt, Human
gccuccacccucugagcuuugc

SEQ ID NO: 2338980 - RNA, 16 nt, Human
gccuccacccucugag

SEQ ID NO: 2338981 - RNA, 17 nt, Human
gccuccacccucugagc

SEQ ID NO: 2338982 - RNA, 18 nt, Human
gccuccacccucugagcu

SEQ ID NO: 2338983 - RNA, 19 nt, Human
gccuccacccucugagcuu

SEQ ID NO: 2338984 - RNA, 18 nt, Human
gccuccaccccccagaac

SEQ ID NO: 2338985 - RNA, 12 nt, Human
gccuccacccuc

SEQ ID NO: 2338986 - RNA, 14 nt, Human
gccuccacccucug

SEQ ID NO: 2338987 - RNA, 15 nt, Human
gccuccacccucuga

SEQ ID NO: 2338988 - RNA, 18 nt, Human
gccuccaccaccacuggc

SEQ ID NO: 2338989 - RNA, 20 nt, Human
gccuccaccaccacuggcca

SEQ ID NO: 2338990 - RNA, 21 nt, Human
gccuccaccaccacuggccac

SEQ ID NO: 2338991 - RNA, 23 nt, Human
gccuccaccaccacuggccacca

SEQ ID NO: 2338992 - RNA, 22 nt, Human
gccucaucuauaacaugcauuu

SEQ ID NO: 2338993 - RNA, 17 nt, Human
gccucauguggcuggaa

SEQ ID NO: 2338994 - RNA, 15 nt, Human
gccucauguggcugg

SEQ ID NO: 2338995 - RNA, 16 nt, Human
gccucauguggcugga

SEQ ID NO: 2338996 - RNA, 12 nt, Human
gccuccaccacc

SEQ ID NO: 2338997 - RNA, 14 nt, Human
gccuccaccaccac

SEQ ID NO: 2338998 - RNA, 15 nt, Human
gccuccaccaccacu

SEQ ID NO: 2338999 - RNA, 16 nt, Human
gccuccaccaccacug

SEQ ID NO: 2339000 - RNA, 15 nt, Human
gccuccauccugagg

SEQ ID NO: 2339001 - RNA, 14 nt, Human
gccuccauccugag

SEQ ID NO: 2339002 - RNA, 13 nt, Human
gccuccauccuga

SEQ ID NO: 2339003 - RNA, 12 nt, Human
gccuccagaacu

SEQ ID NO: 2339004 - RNA, 21 nt, Human
gccuccacucccacuucccug

SEQ ID NO: 2339005 - RNA, 22 nt, Human
gccuccacucccacuucccuga

SEQ ID NO: 2339006 - RNA, 14 nt, Human
gccuccacucccac

SEQ ID NO: 2339007 - RNA, 15 nt, Human
gccuccacucccacu

SEQ ID NO: 2339008 - RNA, 16 nt, Human
gccuccacucccacuu

SEQ ID NO: 2339009 - RNA, 18 nt, Human
gccuccacucccacuucc

SEQ ID NO: 2339010 - RNA, 16 nt, Human
gccuccucuguccagg

SEQ ID NO: 2339011 - RNA, 13 nt, Human
gccuccucugucc

SEQ ID NO: 2339012 - RNA, 21 nt, Human
gccuccucugucugcccuuca

SEQ ID NO: 2339013 - RNA, 17 nt, Human
gccuccucuggacggca

SEQ ID NO: 2339014 - RNA, 23 nt, Human
gccuccucucucaguuuuuauau

SEQ ID NO: 2339015 - RNA, 17 nt, Human
gccuccagaacucacug

SEQ ID NO: 2339016 - RNA, 19 nt, Human
gccuccugaguagcuggga

SEQ ID NO: 2339017 - RNA, 20 nt, Human
gccuccucuggacggcaggc

SEQ ID NO: 2339018 - RNA, 17 nt, Human
gccuccucugucugccc

SEQ ID NO: 2339019 - RNA, 19 nt, Human
gccuccucugucugcccuu

SEQ ID NO: 2339020 - RNA, 16 nt, Human
gccuccugaccugagg

SEQ ID NO: 2339021 - RNA, 17 nt, Human
gccuccugaccugaggc

SEQ ID NO: 2339022 - RNA, 21 nt, Human
gccuccugaccugaggcuccu

SEQ ID NO: 2339023 - RNA, 23 nt, Human
gccuccugaguagcugggacuac

SEQ ID NO: 2339024 - RNA, 12 nt, Human
gccuccugccca

SEQ ID NO: 2339025 - RNA, 14 nt, Human
gccucugggacugg

SEQ ID NO: 2339026 - RNA, 16 nt, Human
gccucgaaacacagaa

SEQ ID NO: 2339027 - RNA, 15 nt, Human
gccuccugcccaguc

SEQ ID NO: 2339028 - RNA, 17 nt, Human
gccuccugcccaguccc

SEQ ID NO: 2339029 - RNA, 16 nt, Human
gccucgaacuggcugc

SEQ ID NO: 2339030 - RNA, 13 nt, Human
gccucgaacuggc

SEQ ID NO: 2339031 - RNA, 22 nt, Human
gccuccuuugugaggaagccgc

SEQ ID NO: 2339032 - RNA, 19 nt, Human
gccuagcauacguacacau

SEQ ID NO: 2339033 - RNA, 12 nt, Human
gccuagcauacg

SEQ ID NO: 2339034 - RNA, 23 nt, Human
gccuagauccacacacagaggaa

SEQ ID NO: 2339035 - RNA, 20 nt, Human
gccuagauccacacacagag

SEQ ID NO: 2339036 - RNA, 17 nt, Human
gccuagauccacacaca

SEQ ID NO: 2339037 - RNA, 22 nt, Human
gccuaaucccugggcauugcuu

SEQ ID NO: 2339038 - RNA, 22 nt, Human
gccuacagcuuugaucccugac

SEQ ID NO: 2339039 - RNA, 23 nt, Human
gccuacagcuuugaucccugaca

SEQ ID NO: 2339040 - RNA, 17 nt, Human
gccuacaggagugagca

SEQ ID NO: 2339041 - RNA, 17 nt, Human
gccgcgucgcccuccca

SEQ ID NO: 2339042 - RNA, 17 nt, Human
gcccuucccugucccuc

SEQ ID NO: 2339043 - RNA, 13 nt, Human
gcccuuccucucc

SEQ ID NO: 2339044 - RNA, 22 nt, Human
gcccuuccucuccacccuccca

SEQ ID NO: 2339045 - RNA, 23 nt, Human
gcccuuccucuccacccucccag

SEQ ID NO: 2339046 - RNA, 14 nt, Human
gcccuuccucucca

SEQ ID NO: 2339047 - RNA, 15 nt, Human
gcccuuccucuccac

SEQ ID NO: 2339048 - RNA, 18 nt, Human
gccgcuagaggccugagg

SEQ ID NO: 2339049 - RNA, 19 nt, Human
gccgcuagaggccugagga

SEQ ID NO: 2339050 - RNA, 18 nt, Human
gccgcuagaugggcaugg

SEQ ID NO: 2339051 - RNA, 23 nt, Human
gccgcuagaugggcauggggugg

SEQ ID NO: 2339052 - RNA, 13 nt, Human
gccgcuagaggcc

SEQ ID NO: 2339053 - RNA, 15 nt, Human
gccgcuagaggccug

SEQ ID NO: 2339054 - RNA, 16 nt, Human
gccgcuagaggccuga

SEQ ID NO: 2339055 - RNA, 17 nt, Human
gccgcuagaggccugag

SEQ ID NO: 2339056 - RNA, 22 nt, Human
gcccuuccaugucgccucugca

SEQ ID NO: 2339057 - RNA, 12 nt, Human
gcccuucccacu

SEQ ID NO: 2339058 - RNA, 16 nt, Human
gcccuucccacuggag

SEQ ID NO: 2339059 - RNA, 12 nt, Human
gcccuucccugu

SEQ ID NO: 2339060 - RNA, 13 nt, Human
gcccuucccuguc

SEQ ID NO: 2339061 - RNA, 12 nt, Human
gcccuuccucuc

SEQ ID NO: 2339062 - RNA, 15 nt, Human
gcccuucccuguccc

SEQ ID NO: 2339063 - RNA, 16 nt, Human
gcccuucccugucccu

SEQ ID NO: 2339064 - RNA, 18 nt, Human
gcccuucccugucccucu

SEQ ID NO: 2339065 - RNA, 16 nt, Human
gcccuucacaguguuu

SEQ ID NO: 2339066 - RNA, 15 nt, Human
gcccuucaccccagu

SEQ ID NO: 2339067 - RNA, 21 nt, Human
gcccuucaccccaguggccac

SEQ ID NO: 2339068 - RNA, 19 nt, Human
gcccuucacugccuuugcu

SEQ ID NO: 2339069 - RNA, 20 nt, Human
gcccuucacugccuuugcuc

SEQ ID NO: 2339070 - RNA, 12 nt, Human
gcccuuccaugu

SEQ ID NO: 2339071 - RNA, 21 nt, Human
gcccuuccaugucgccucugc

SEQ ID NO: 2339072 - RNA, 23 nt, Human
gccuaaucccugggcauugcuuu

SEQ ID NO: 2339073 - RNA, 16 nt, Human
gccuaaucccugggca

SEQ ID NO: 2339074 - RNA, 14 nt, Human
gccuaaucccuggg

SEQ ID NO: 2339075 - RNA, 16 nt, Human
gccuacaggagugagc

SEQ ID NO: 2339076 - RNA, 22 nt, Human
gccggcacccacaagugccacu

SEQ ID NO: 2339077 - RNA, 21 nt, Human
gccggcacagggucugcucuu

SEQ ID NO: 2339078 - RNA, 13 nt, Human
gccggcacagggu

SEQ ID NO: 2339079 - RNA, 19 nt, Human
gccggcaaccccaguucug

SEQ ID NO: 2339080 - RNA, 20 nt, Human
gccggcaaccccaguucugc

SEQ ID NO: 2339081 - RNA, 21 nt, Human
gccggcaaccccaguucugcu

SEQ ID NO: 2339082 - RNA, 23 nt, Human
gccggcaaccccaguucugcucc

SEQ ID NO: 2339083 - RNA, 19 nt, Human
gccgcuccugucugccagc

SEQ ID NO: 2339084 - RNA, 15 nt, Human
gccgcuccugucugc

SEQ ID NO: 2339085 - RNA, 12 nt, Human
gccgcuccaggg

SEQ ID NO: 2339086 - RNA, 21 nt, Human
gccgcuccugucugccagcca

SEQ ID NO: 2339087 - RNA, 20 nt, Human
gccgcuccugucugccagcc

SEQ ID NO: 2339088 - RNA, 22 nt, Human
gccgcuccugucugccagccag

SEQ ID NO: 2339089 - RNA, 15 nt, Human
gccgcuccaggggug

SEQ ID NO: 2339090 - RNA, 21 nt, Human
gccggaguccacucccagugc

SEQ ID NO: 2339091 - RNA, 15 nt, Human
gccggaugugcuuuu

SEQ ID NO: 2339092 - RNA, 16 nt, Human
gccggaugugcuuuuc

SEQ ID NO: 2339093 - RNA, 21 nt, Human
gccggcaaaacuuuggcacug

SEQ ID NO: 2339094 - RNA, 11 nt, Human
gccggcaaccc

SEQ ID NO: 2339095 - RNA, 18 nt, Human
gccggcaaccccaguucu

SEQ ID NO: 2339096 - RNA, 16 nt, Human
gccggaguccacuccc

SEQ ID NO: 2339097 - RNA, 19 nt, Human
gccggaguccacucccagu

SEQ ID NO: 2339098 - RNA, 15 nt, Human
gccggagucagugcc

SEQ ID NO: 2339099 - RNA, 16 nt, Human
gccggagucagugcca

SEQ ID NO: 2339100 - RNA, 23 nt, Human
gcccuguggaagggacuaggagc

SEQ ID NO: 2339101 - RNA, 17 nt, Human
gcccuguggaagggacu

SEQ ID NO: 2339102 - RNA, 21 nt, Human
gcccuguggaugagcccucag

SEQ ID NO: 2339103 - RNA, 16 nt, Human
gcccuguggaagggac

SEQ ID NO: 2339104 - RNA, 22 nt, Human
gcccugcuccucccuggcugcc

SEQ ID NO: 2339105 - RNA, 23 nt, Human
gcccugcuccucccuggcugccc

SEQ ID NO: 2339106 - RNA, 17 nt, Human
gcccugcuccucccugg

SEQ ID NO: 2339107 - RNA, 18 nt, Human
gcccugcuccucccuggc

SEQ ID NO: 2339108 - RNA, 19 nt, Human
gcccugcuccucccuggcu

SEQ ID NO: 2339109 - RNA, 21 nt, Human
gcccugcuccucccuggcugc

SEQ ID NO: 2339110 - RNA, 20 nt, Human
gcccugcgggucacaggagg

SEQ ID NO: 2339111 - RNA, 15 nt, Human
gcccugcggccccgu

SEQ ID NO: 2339112 - RNA, 18 nt, Human
gcccugcgguagauggga

SEQ ID NO: 2339113 - RNA, 14 nt, Human
gcccugcuccuccc

SEQ ID NO: 2339114 - RNA, 15 nt, Human
gcccugcuccucccu

SEQ ID NO: 2339115 - RNA, 16 nt, Human
gcccugcuccucccug

SEQ ID NO: 2339116 - RNA, 14 nt, Human
gcccugcccaccug

SEQ ID NO: 2339117 - RNA, 15 nt, Human
gcccugcccaccugg

SEQ ID NO: 2339118 - RNA, 18 nt, Human
gcccugccaucuucccag

SEQ ID NO: 2339119 - RNA, 19 nt, Human
gcccugccaucuucccagc

SEQ ID NO: 2339120 - RNA, 19 nt, Human
gcccugccugagggccccu

SEQ ID NO: 2339121 - RNA, 20 nt, Human
gcccugccugagggccccuc

SEQ ID NO: 2339122 - RNA, 22 nt, Human
gcccugccugagggccccucug

SEQ ID NO: 2339123 - RNA, 23 nt, Human
gcccugccugagggccccucugc

SEQ ID NO: 2339124 - RNA, 21 nt, Human
gcccugugggcccccaaaugg

SEQ ID NO: 2339125 - RNA, 22 nt, Human
gcccuguggaugagcccucaga

SEQ ID NO: 2339126 - RNA, 14 nt, Human
gcccuuaccuuccc

SEQ ID NO: 2339127 - RNA, 23 nt, Human
gcccuuaccugccaggaagccag

SEQ ID NO: 2339128 - RNA, 20 nt, Human
gcccuuaucugugcucagga

SEQ ID NO: 2339129 - RNA, 19 nt, Human
gcccuuaucugugcucagg

SEQ ID NO: 2339130 - RNA, 20 nt, Human
gcccuuauuuucaagaaacu

SEQ ID NO: 2339131 - RNA, 18 nt, Human
gcccuuauuuucaagaaa

SEQ ID NO: 2339132 - RNA, 17 nt, Human
gcccuuauuuucaagaa

SEQ ID NO: 2339133 - RNA, 13 nt, Human
gcccuuaccuucc

SEQ ID NO: 2339134 - RNA, 16 nt, Human
gcccugugggccccca

SEQ ID NO: 2339135 - RNA, 17 nt, Human
gcccugugggcccccaa

SEQ ID NO: 2339136 - RNA, 21 nt, Human
gcccuuaccugccaggaagcc

SEQ ID NO: 2339137 - RNA, 22 nt, Human
gcccuuaccugccaggaagcca

SEQ ID NO: 2339138 - RNA, 16 nt, Human
gcccgucuucagccua

SEQ ID NO: 2339139 - RNA, 15 nt, Human
gcccgucuucagccu

SEQ ID NO: 2339140 - RNA, 14 nt, Human
gcccgucuucagcc

SEQ ID NO: 2339141 - RNA, 15 nt, Human
gcccgucucucuccc

SEQ ID NO: 2339142 - RNA, 16 nt, Human
gcccgucucucuccca

SEQ ID NO: 2339143 - RNA, 14 nt, Human
gcccgucucagugu

SEQ ID NO: 2339144 - RNA, 14 nt, Human
gcccguccugccug

SEQ ID NO: 2339145 - RNA, 13 nt, Human
gcccgucucucuc

SEQ ID NO: 2339146 - RNA, 19 nt, Human
gcccgucucucucccaugg

SEQ ID NO: 2339147 - RNA, 18 nt, Human
gcccgucuucagccuagc

SEQ ID NO: 2339148 - RNA, 17 nt, Human
gcccgucuucagccuag

SEQ ID NO: 2339149 - RNA, 19 nt, Human
gcccgugacagacuccuga

SEQ ID NO: 2339150 - RNA, 17 nt, Human
gcccgucucucucccau

SEQ ID NO: 2339151 - RNA, 13 nt, Human
gcccgugacagac

SEQ ID NO: 2339152 - RNA, 13 nt, Human
gcccccugccccc

SEQ ID NO: 2339153 - RNA, 15 nt, Human
gcccguccugccugu

SEQ ID NO: 2339154 - RNA, 16 nt, Human
gcccguccugccugug

SEQ ID NO: 2339155 - RNA, 17 nt, Human
gcccguccugccugugg

SEQ ID NO: 2339156 - RNA, 18 nt, Human
gcccguccugccuguggc

SEQ ID NO: 2339157 - RNA, 13 nt, Human
gcccgucucagug

SEQ ID NO: 2339158 - RNA, 16 nt, Human
gccccuggcagccccu

SEQ ID NO: 2339159 - RNA, 17 nt, Human
gccccuggcagccccug

SEQ ID NO: 2339160 - RNA, 11 nt, Human
gcccugccacu

SEQ ID NO: 2339161 - RNA, 12 nt, Human
gcccugccacuc

SEQ ID NO: 2339162 - RNA, 13 nt, Human
gcccugccacuca

SEQ ID NO: 2339163 - RNA, 19 nt, Human
gcccugccacucacuaggc

SEQ ID NO: 2339164 - RNA, 20 nt, Human
gcccugccacucacuaggcc

SEQ ID NO: 2339165 - RNA, 21 nt, Human
gcccugccacucacuaggccc

SEQ ID NO: 2339166 - RNA, 18 nt, Human
gcgggagcgguggcccug

SEQ ID NO: 2339167 - RNA, 21 nt, Human
gcgggagcgguggcccugucc

SEQ ID NO: 2339168 - RNA, 13 nt, Human
gcguggacucugc

SEQ ID NO: 2339169 - RNA, 14 nt, Human
gcguggacucugca

SEQ ID NO: 2339170 - RNA, 21 nt, Human
gcgugcucaguucagaaucac

SEQ ID NO: 2339171 - RNA, 18 nt, Human
gcgugcuccagccuggcu

SEQ ID NO: 2339172 - RNA, 19 nt, Human
gcgugcuccagccuggcuc

SEQ ID NO: 2339173 - RNA, 14 nt, Human
gcguggacaggugu

SEQ ID NO: 2339174 - RNA, 19 nt, Human
gcgggaauggcagcugcca

SEQ ID NO: 2339175 - RNA, 14 nt, Human
gcgggacccaggca

SEQ ID NO: 2339176 - RNA, 20 nt, Human
gcgggaccgguacagaaagg

SEQ ID NO: 2339177 - RNA, 19 nt, Human
gcgggaccgguacagaaag

SEQ ID NO: 2339178 - RNA, 14 nt, Human
gcgggaccuguggc

SEQ ID NO: 2339179 - RNA, 15 nt, Human
gcgggaccuguggcu

SEQ ID NO: 2339180 - RNA, 23 nt, Human
gcgggacgagacccuacaggaga

SEQ ID NO: 2339181 - RNA, 21 nt, Human
gcgggacgucccugcccaugu

SEQ ID NO: 2339182 - RNA, 21 nt, Human
gcgggagccaugcgcccccuc

SEQ ID NO: 2339183 - RNA, 14 nt, Human
gcgggaaggagggu

SEQ ID NO: 2339184 - RNA, 13 nt, Human
gcgggaaggaggg

SEQ ID NO: 2339185 - RNA, 14 nt, Human
gcgggaaaagcagc

SEQ ID NO: 2339186 - RNA, 23 nt, Human
gcgggaaaagcagcccuuggcca

SEQ ID NO: 2339187 - RNA, 17 nt, Human
gcgggaaagccagugac

SEQ ID NO: 2339188 - RNA, 22 nt, Human
gcggcugugcagccuguccugg

SEQ ID NO: 2339189 - RNA, 15 nt, Human
gcggcuggcagccca

SEQ ID NO: 2339190 - RNA, 16 nt, Human
gcggcuggacuuggag

SEQ ID NO: 2339191 - RNA, 16 nt, Human
gcuaaggcguggagcu

SEQ ID NO: 2339192 - RNA, 17 nt, Human
gcuaaggcguggagcug

SEQ ID NO: 2339193 - RNA, 18 nt, Human
gcuaaggcguggagcugc

SEQ ID NO: 2339194 - RNA, 22 nt, Human
gcguuagaaugaggaggaagga

SEQ ID NO: 2339195 - RNA, 16 nt, Human
gcguuacuaauuggcc

SEQ ID NO: 2339196 - RNA, 18 nt, Human
gcguuagaaugaggagga

SEQ ID NO: 2339197 - RNA, 22 nt, Human
gcguuauuggucggcagccuuc

SEQ ID NO: 2339198 - RNA, 17 nt, Human
gcguuccaugaugcugg

SEQ ID NO: 2339199 - RNA, 18 nt, Human
gcguuccaugaugcuggg

SEQ ID NO: 2339200 - RNA, 19 nt, Human
gcguggagggcguggaggg

SEQ ID NO: 2339201 - RNA, 16 nt, Human
gcguggagcugccuga

SEQ ID NO: 2339202 - RNA, 18 nt, Human
gcguggagggcguggagg

SEQ ID NO: 2339203 - RNA, 22 nt, Human
gcguuaaaggcucgauuuugua

SEQ ID NO: 2339204 - RNA, 14 nt, Human
gcguguuugcacgu

SEQ ID NO: 2339205 - RNA, 15 nt, Human
gcguguuugcacguu

SEQ ID NO: 2339206 - RNA, 17 nt, Human
gcguggacucugcacau

SEQ ID NO: 2339207 - RNA, 18 nt, Human
gcguggacucugcacaug

SEQ ID NO: 2339208 - RNA, 12 nt, Human
gcguggagcugc

SEQ ID NO: 2339209 - RNA, 15 nt, Human
gcguggagcugccug

SEQ ID NO: 2339210 - RNA, 18 nt, Human
gcggcggagcuggccccg

SEQ ID NO: 2339211 - RNA, 20 nt, Human
gcggcggagcuggccccgcc

SEQ ID NO: 2339212 - RNA, 16 nt, Human
gcggcggagcuggccc

SEQ ID NO: 2339213 - RNA, 20 nt, Human
gcggccagccccggcccugg

SEQ ID NO: 2339214 - RNA, 16 nt, Human
gcggccuuuggcuuca

SEQ ID NO: 2339215 - RNA, 11 nt, Human
gcggccagccc

SEQ ID NO: 2339216 - RNA, 13 nt, Human
gcggccagccccg

SEQ ID NO: 2339217 - RNA, 17 nt, Human
gcggccagccccggccc

SEQ ID NO: 2339218 - RNA, 18 nt, Human
gcggccagccccggcccu

SEQ ID NO: 2339219 - RNA, 19 nt, Human
gcggccagccccggcccug

SEQ ID NO: 2339220 - RNA, 21 nt, Human
gcggccagccccggcccuggg

SEQ ID NO: 2339221 - RNA, 16 nt, Human
gcggcauuaaagccau

SEQ ID NO: 2339222 - RNA, 19 nt, Human
gcggcaggggccuggagau

SEQ ID NO: 2339223 - RNA, 15 nt, Human
gcggcaggggccugg

SEQ ID NO: 2339224 - RNA, 16 nt, Human
gcggcaggggccugga

SEQ ID NO: 2339225 - RNA, 20 nt, Human
gcggcuacucagcagcccuc

SEQ ID NO: 2339226 - RNA, 19 nt, Human
gcggcuacucagcagcccu

SEQ ID NO: 2339227 - RNA, 13 nt, Human
gcggcuacucagc

SEQ ID NO: 2339228 - RNA, 22 nt, Human
gcggcuacucagcagcccuccu

SEQ ID NO: 2339229 - RNA, 21 nt, Human
gcggcuacucagcagcccucc

SEQ ID NO: 2339230 - RNA, 23 nt, Human
gcggcugagucaugaucucccug

SEQ ID NO: 2339231 - RNA, 17 nt, Human
gcggcugcugugugccu

SEQ ID NO: 2339232 - RNA, 22 nt, Human
gcggcugagucaugaucucccu

SEQ ID NO: 2339233 - RNA, 23 nt, Human
gcggcugagagccccagcugaca

SEQ ID NO: 2339234 - RNA, 15 nt, Human
gcggcuggacuugga

SEQ ID NO: 2339235 - RNA, 12 nt, Human
gcggcugagagc

SEQ ID NO: 2339236 - RNA, 16 nt, Human
gcggcugagagcccca

SEQ ID NO: 2339237 - RNA, 18 nt, Human
gcggcugagagccccagc

SEQ ID NO: 2339238 - RNA, 21 nt, Human
gcggcugagagccccagcuga

SEQ ID NO: 2339239 - RNA, 22 nt, Human
gcggcugagagccccagcugac

SEQ ID NO: 2339240 - RNA, 12 nt, Human
gcggcagagagg

SEQ ID NO: 2339241 - RNA, 14 nt, Human
gcggcagcagccau

SEQ ID NO: 2339242 - RNA, 12 nt, Human
gcggcacagccu

SEQ ID NO: 2339243 - RNA, 17 nt, Human
gcggcagcagccaucau

SEQ ID NO: 2339244 - RNA, 13 nt, Human
gcggauggccgga

SEQ ID NO: 2339245 - RNA, 16 nt, Human
gcgcaggcuggcccug

SEQ ID NO: 2339246 - RNA, 15 nt, Human
gcgcaggcuggcccu

SEQ ID NO: 2339247 - RNA, 22 nt, Human
gcgcaagccuguaaucccagcu

SEQ ID NO: 2339248 - RNA, 21 nt, Human
gcgcaagccuguaaucccagc

SEQ ID NO: 2339249 - RNA, 14 nt, Human
gcgcaggcuggccc

SEQ ID NO: 2339250 - RNA, 21 nt, Human
gcgcagcauauucaggaagcu

SEQ ID NO: 2339251 - RNA, 23 nt, Human
gcgcaagccuguaaucccagcua

SEQ ID NO: 2339252 - RNA, 13 nt, Human
gcgcaagccugua

SEQ ID NO: 2339253 - RNA, 12 nt, Human
gcgcaagccugu

SEQ ID NO: 2339254 - RNA, 23 nt, Human
gcgauucuucugcuucagccucc

SEQ ID NO: 2339255 - RNA, 15 nt, Human
gccuugaagccacug

SEQ ID NO: 2339256 - RNA, 22 nt, Human
gccuucuuugcuugccucucug

SEQ ID NO: 2339257 - RNA, 17 nt, Human
gccuugaauauccccuc

SEQ ID NO: 2339258 - RNA, 14 nt, Human
gccuugaagccacu

SEQ ID NO: 2339259 - RNA, 19 nt, Human
gccuugaaccacuucccuc

SEQ ID NO: 2339260 - RNA, 23 nt, Human
gccuugaacuuugaccucugcag

SEQ ID NO: 2339261 - RNA, 16 nt, Human
gccuugaccauucucc

SEQ ID NO: 2339262 - RNA, 21 nt, Human
gccuugaccauucuccaccug

SEQ ID NO: 2339263 - RNA, 22 nt, Human
gccuugaccauucuccaccugc

SEQ ID NO: 2339264 - RNA, 22 nt, Human
gcgauucuucugcuucagccuc

SEQ ID NO: 2339265 - RNA, 12 nt, Human
gccuugccagag

SEQ ID NO: 2339266 - RNA, 21 nt, Human
gccuugcagcacucacacagg

SEQ ID NO: 2339267 - RNA, 23 nt, Human
gccuugcagcacucacacaggac

SEQ ID NO: 2339268 - RNA, 17 nt, Human
gcgauucuucugcuuca

SEQ ID NO: 2339269 - RNA, 21 nt, Human
gccuugaauauccccucccag

SEQ ID NO: 2339270 - RNA, 22 nt, Human
gccuugaauauccccucccagu

SEQ ID NO: 2339271 - RNA, 23 nt, Human
gccuugaccauucuccaccugcc

SEQ ID NO: 2339272 - RNA, 23 nt, Human
gccuucuuauucucacuccacca

SEQ ID NO: 2339273 - RNA, 15 nt, Human
gccuucuucacccag

SEQ ID NO: 2339274 - RNA, 21 nt, Human
gccuucuuauucucacuccac

SEQ ID NO: 2339275 - RNA, 20 nt, Human
gccuucuuauucucacucca

SEQ ID NO: 2339276 - RNA, 17 nt, Human
gccuucuucacccagcu

SEQ ID NO: 2339277 - RNA, 14 nt, Human
gccuucuuccaucc

SEQ ID NO: 2339278 - RNA, 17 nt, Human
gccuucuuccaucccag

SEQ ID NO: 2339279 - RNA, 19 nt, Human
gccuucuuauucucacucc

SEQ ID NO: 2339280 - RNA, 18 nt, Human
gccuucuguccugguguc

SEQ ID NO: 2339281 - RNA, 18 nt, Human
gccuucuuauucucacuc

SEQ ID NO: 2339282 - RNA, 21 nt, Human
gccuucuggauucuuggcccg

SEQ ID NO: 2339283 - RNA, 16 nt, Human
gccuucuguccuggug

SEQ ID NO: 2339284 - RNA, 14 nt, Human
gccuucucuguuca

SEQ ID NO: 2339285 - RNA, 17 nt, Human
gccuucucccccccggg

SEQ ID NO: 2339286 - RNA, 23 nt, Human
gccuucucccccccggggcuggg

SEQ ID NO: 2339287 - RNA, 13 nt, Human
gccuucuccuccc

SEQ ID NO: 2339288 - RNA, 14 nt, Human
gccuucuccucccc

SEQ ID NO: 2339289 - RNA, 16 nt, Human
gccuucucuguucauu

SEQ ID NO: 2339290 - RNA, 19 nt, Human
gccuucugaggacauucca

SEQ ID NO: 2339291 - RNA, 19 nt, Human
gccuucuggauucuuggcc

SEQ ID NO: 2339292 - RNA, 23 nt, Human
gccuucuucggggaacuccugga

SEQ ID NO: 2339293 - RNA, 22 nt, Human
gccuucuucggggaacuccugg

SEQ ID NO: 2339294 - RNA, 20 nt, Human
gccuucuuccaucccaggac

SEQ ID NO: 2339295 - RNA, 22 nt, Human
gccuucuuccaucccaggacac

SEQ ID NO: 2339296 - RNA, 11 nt, Human
gccuucuucuu

SEQ ID NO: 2339297 - RNA, 17 nt, Human
gccuucuucuuuuugcu

SEQ ID NO: 2339298 - RNA, 18 nt, Human
gccuucuucuuuuugcug

SEQ ID NO: 2339299 - RNA, 20 nt, Human
gccuucuucuuuuugcuguu

SEQ ID NO: 2339300 - RNA, 21 nt, Human
gccuucuucuuuuugcuguug

SEQ ID NO: 2339301 - RNA, 15 nt, Human
gccuucuuugcuugc

SEQ ID NO: 2339302 - RNA, 15 nt, Human
gccuucuuuugauua

SEQ ID NO: 2339303 - RNA, 14 nt, Human
gccuugaacuuuga

SEQ ID NO: 2339304 - RNA, 18 nt, Human
gccuugaaccacuucccu

SEQ ID NO: 2339305 - RNA, 22 nt, Human
gccuucuuuugauuauguuuuu

SEQ ID NO: 2339306 - RNA, 18 nt, Human
gccuucuuugcuugccuc

SEQ ID NO: 2339307 - RNA, 19 nt, Human
gccuucuuugcuugccucu

SEQ ID NO: 2339308 - RNA, 15 nt, Human
gccuucucugaagga

SEQ ID NO: 2339309 - RNA, 16 nt, Human
gccuucucugaaggac

SEQ ID NO: 2339310 - RNA, 17 nt, Human
gccuguggccugugucc

SEQ ID NO: 2339311 - RNA, 19 nt, Human
gccuucgucuuucccaugg

SEQ ID NO: 2339312 - RNA, 15 nt, Human
gccuucuaaaggugu

SEQ ID NO: 2339313 - RNA, 17 nt, Human
gccuucucaugauccaa

SEQ ID NO: 2339314 - RNA, 15 nt, Human
gccuguucagcucca

SEQ ID NO: 2339315 - RNA, 14 nt, Human
gccuguucagcucc

SEQ ID NO: 2339316 - RNA, 14 nt, Human
gccuguggccugug

SEQ ID NO: 2339317 - RNA, 16 nt, Human
gccuguggccuguguc

SEQ ID NO: 2339318 - RNA, 16 nt, Human
gccuguucagcuccag

SEQ ID NO: 2339319 - RNA, 17 nt, Human
gccuguucagcuccagc

SEQ ID NO: 2339320 - RNA, 23 nt, Human
gccugugcugcccgucuucagcc

SEQ ID NO: 2339321 - RNA, 16 nt, Human
gccugugcugcccguc

SEQ ID NO: 2339322 - RNA, 24 nt, Human
gccuguggaaucuggagugagggg

SEQ ID NO: 2339323 - RNA, 22 nt, Human
gccuguggcaucuuugccuugg

SEQ ID NO: 2339324 - RNA, 19 nt, Human
gccuguggaaucuggagug

SEQ ID NO: 2339325 - RNA, 19 nt, Human
gccugugccucugggacug

SEQ ID NO: 2339326 - RNA, 15 nt, Human
gccugugcugcccgu

SEQ ID NO: 2339327 - RNA, 14 nt, Human
gccugugcugcccg

SEQ ID NO: 2339328 - RNA, 12 nt, Human
gccugggcaaga

SEQ ID NO: 2339329 - RNA, 20 nt, Human
gccugggcaacacagcgaga

SEQ ID NO: 2339330 - RNA, 20 nt, Human
gccugggcaacagagcaaga

SEQ ID NO: 2339331 - RNA, 19 nt, Human
gccugggcaacagagcaag

SEQ ID NO: 2339332 - RNA, 16 nt, Human
gccugggcaacagagc

SEQ ID NO: 2339333 - RNA, 11 nt, Human
gccugggcaga

SEQ ID NO: 2339334 - RNA, 13 nt, Human
gccuggcuucugg

SEQ ID NO: 2339335 - RNA, 13 nt, Human
gccuggcuucucc

SEQ ID NO: 2339336 - RNA, 16 nt, Human
gccuggcuucuccuuu

SEQ ID NO: 2339337 - RNA, 23 nt, Human
gccugggaucccucauccucaua

SEQ ID NO: 2339338 - RNA, 20 nt, Human
gccuccugcccaguccccca

SEQ ID NO: 2339339 - RNA, 12 nt, Human
gccucuggguca

SEQ ID NO: 2339340 - RNA, 22 nt, Human
gccucugggucagugguccaca

SEQ ID NO: 2339341 - RNA, 13 nt, Human
gccucugggucag

SEQ ID NO: 2339342 - RNA, 17 nt, Human
gccucuggucugggugc

SEQ ID NO: 2339343 - RNA, 20 nt, Human
gccucugucacugcaggcac

SEQ ID NO: 2339344 - RNA, 23 nt, Human
gccucugguuuggggcgaggcag

SEQ ID NO: 2339345 - RNA, 15 nt, Human
gccucuguccccuuc

SEQ ID NO: 2339346 - RNA, 18 nt, Human
gccucuguccccuucucu

SEQ ID NO: 2339347 - RNA, 19 nt, Human
gccucuguccccuucucuc

SEQ ID NO: 2339348 - RNA, 20 nt, Human
gccucuguccccuucucuca

SEQ ID NO: 2339349 - RNA, 21 nt, Human
gccucuguccccuucucucau

SEQ ID NO: 2339350 - RNA, 22 nt, Human
gccucuguccccuucucucauc

SEQ ID NO: 2339351 - RNA, 16 nt, Human
gccuggcuccguccag

SEQ ID NO: 2339352 - RNA, 10 nt, Human
gccuggcucu

SEQ ID NO: 2339353 - RNA, 19 nt, Human
gccuggcucuugugcugga

SEQ ID NO: 2339354 - RNA, 21 nt, Human
gccuggcucuugugcuggaug

SEQ ID NO: 2339355 - RNA, 23 nt, Human
gccuggcuccaaacccucgaggc

SEQ ID NO: 2339356 - RNA, 19 nt, Human
gccuggcucccacaggcag

SEQ ID NO: 2339357 - RNA, 20 nt, Human
gccuggcucccacaggcagc

SEQ ID NO: 2339358 - RNA, 23 nt, Human
gccuggcucccacaggcagcuuu

SEQ ID NO: 2339359 - RNA, 21 nt, Human
gccuggcucccacaggcagcu

SEQ ID NO: 2339360 - RNA, 22 nt, Human
gccuggcucccacaggcagcuu

SEQ ID NO: 2339361 - RNA, 18 nt, Human
gcucaggggcguguggcu

SEQ ID NO: 2339362 - RNA, 20 nt, Human
gcucagggccuggcucaggu

SEQ ID NO: 2339363 - RNA, 17 nt, Human
gcucaggaggcuuggaa

SEQ ID NO: 2339364 - RNA, 16 nt, Human
gcucaggaggcuugga

SEQ ID NO: 2339365 - RNA, 13 nt, Human
gcucaggaguuug

SEQ ID NO: 2339366 - RNA, 18 nt, Human
gcucagggccuggcucag

SEQ ID NO: 2339367 - RNA, 19 nt, Human
gcucagggccuggcucagg

SEQ ID NO: 2339368 - RNA, 15 nt, Human
gcucaggaggcuugg

SEQ ID NO: 2339369 - RNA, 13 nt, Human
gcucaggaggcuu

SEQ ID NO: 2339370 - RNA, 18 nt, Human
gcucagagaugugcaccc

SEQ ID NO: 2339371 - RNA, 23 nt, Human
gcucaggagcccugggaggcucu

SEQ ID NO: 2339372 - RNA, 22 nt, Human
gcucaggagcccugggaggcuc

SEQ ID NO: 2339373 - RNA, 22 nt, Human
gcucacugccaggccagccucc

SEQ ID NO: 2339374 - RNA, 17 nt, Human
gcucacuguggugucug

SEQ ID NO: 2339375 - RNA, 21 nt, Human
gcucacugcuaagaauauuug

SEQ ID NO: 2339376 - RNA, 19 nt, Human
gcucacuguggugucugug

SEQ ID NO: 2339377 - RNA, 18 nt, Human
gcucacuguggugucugu

SEQ ID NO: 2339378 - RNA, 23 nt, Human
gcucacuucugggcuucaucugg

SEQ ID NO: 2339379 - RNA, 15 nt, Human
gcucacuucugggcu

SEQ ID NO: 2339380 - RNA, 23 nt, Human
gcucaaaucuauucagacaagca

SEQ ID NO: 2339381 - RNA, 12 nt, Human
gcucaaccuaac

SEQ ID NO: 2339382 - RNA, 21 nt, Human
gcucaagaagacauggagacu

SEQ ID NO: 2339383 - RNA, 15 nt, Human
gcucaagcagcgacc

SEQ ID NO: 2339384 - RNA, 21 nt, Human
gcucaagcagcgaccgccccc

SEQ ID NO: 2339385 - RNA, 22 nt, Human
gcucaagcagcgaccgcccccu

SEQ ID NO: 2339386 - RNA, 23 nt, Human
gcucaagcagcgaccgcccccuc

SEQ ID NO: 2339387 - RNA, 19 nt, Human
gcucaagcaggaaguucaa

SEQ ID NO: 2339388 - RNA, 23 nt, Human
gcucacugccaggccagccuccg

SEQ ID NO: 2339389 - RNA, 21 nt, Human
gcucagaaggcucuucugacu

SEQ ID NO: 2339390 - RNA, 18 nt, Human
gcucagaaguuucuucuu

SEQ ID NO: 2339391 - RNA, 15 nt, Human
gcucagaauccaagu

SEQ ID NO: 2339392 - RNA, 18 nt, Human
gcucagaauccaagugaa

SEQ ID NO: 2339393 - RNA, 22 nt, Human
gcucagaauccaagugaacacu

SEQ ID NO: 2339394 - RNA, 16 nt, Human
gcucagagcaguguuu

SEQ ID NO: 2339395 - RNA, 21 nt, Human
gcucagaggcgcacugugacc

SEQ ID NO: 2339396 - RNA, 20 nt, Human
gcucagaggcgcacugugac

SEQ ID NO: 2339397 - RNA, 19 nt, Human
gcucagaggcgcacuguga

SEQ ID NO: 2339398 - RNA, 18 nt, Human
gcucagaggcgcacugug

SEQ ID NO: 2339399 - RNA, 18 nt, Human
gcuaagugauccucccac

SEQ ID NO: 2339400 - RNA, 22 nt, Human
gcuaagugauccucccaccuca

SEQ ID NO: 2339401 - RNA, 22 nt, Human
gcuaaggcguggagcugccuga

SEQ ID NO: 2339402 - RNA, 20 nt, Human
gcuaaggcguggagcugccu

SEQ ID NO: 2339403 - RNA, 21 nt, Human
gcuaaggcguggagcugccug

SEQ ID NO: 2339404 - RNA, 13 nt, Human
gcuaagugaaaag

SEQ ID NO: 2339405 - RNA, 17 nt, Human
gcuaaguauuucccagc

SEQ ID NO: 2339406 - RNA, 18 nt, Human
gcuaagugaaaaggucau

SEQ ID NO: 2339407 - RNA, 19 nt, Human
gcuauguuuugacauuuuu

SEQ ID NO: 2339408 - RNA, 14 nt, Human
gcuaguugggcuuc

SEQ ID NO: 2339409 - RNA, 16 nt, Human
gcuaguugggcuuccu

SEQ ID NO: 2339410 - RNA, 14 nt, Human
gcuaggguggcccu

SEQ ID NO: 2339411 - RNA, 18 nt, Human
gcuagggaaacuucccgu

SEQ ID NO: 2339412 - RNA, 14 nt, Human
gcuaggggagcagg

SEQ ID NO: 2339413 - RNA, 14 nt, Human
gcuaggugggccag

SEQ ID NO: 2339414 - RNA, 15 nt, Human
gcuaggguggcccuu

SEQ ID NO: 2339415 - RNA, 19 nt, Human
gcuaggugggccagccccu

SEQ ID NO: 2339416 - RNA, 18 nt, Human
gcuaggugggccagcccc

SEQ ID NO: 2339417 - RNA, 17 nt, Human
gcuaggugggccagccc

SEQ ID NO: 2339418 - RNA, 21 nt, Human
gcuaggugggccagccccucc

SEQ ID NO: 2339419 - RNA, 20 nt, Human
gcuaggugggccagccccuc

SEQ ID NO: 2339420 - RNA, 21 nt, Human
gcucaaaggcacagugaaggc

SEQ ID NO: 2339421 - RNA, 14 nt, Human
gcucaaaucuauuc

SEQ ID NO: 2339422 - RNA, 17 nt, Human
gcucaaaucuauucaga

SEQ ID NO: 2339423 - RNA, 18 nt, Human
gcucaaaucuauucagac

SEQ ID NO: 2339424 - RNA, 20 nt, Human
gcucaaaucuauucagacaa

SEQ ID NO: 2339425 - RNA, 22 nt, Human
gcucaaaucuauucagacaagc

SEQ ID NO: 2339426 - RNA, 16 nt, Human
gcucaaaggcacagug

SEQ ID NO: 2339427 - RNA, 14 nt, Human
gcucaaaggcacag

SEQ ID NO: 2339428 - RNA, 12 nt, Human
gcucaaaggcac

SEQ ID NO: 2339429 - RNA, 21 nt, Human
gcuauuagccaggaucauggu

SEQ ID NO: 2339430 - RNA, 18 nt, Human
gcuauuuccauuccagaa

SEQ ID NO: 2339431 - RNA, 18 nt, Human
gcuauucaguaauaacuc

SEQ ID NO: 2339432 - RNA, 21 nt, Human
gcuauuauuuucacuguagaa

SEQ ID NO: 2339433 - RNA, 18 nt, Human
gcuauuauuuucacugua

SEQ ID NO: 2339434 - RNA, 17 nt, Human
gcuauuauuuucacugu

SEQ ID NO: 2339435 - RNA, 18 nt, Human
gcuauuagccaggaucau

SEQ ID NO: 2339436 - RNA, 19 nt, Human
gcuauuagccaggaucaug

SEQ ID NO: 2339437 - RNA, 23 nt, Human
gcuauuacuaaggaguaaucugu

SEQ ID NO: 2339438 - RNA, 15 nt, Human
gcuauuacugucugg

SEQ ID NO: 2339439 - RNA, 13 nt, Human
gcuauuagccagg

SEQ ID NO: 2339440 - RNA, 17 nt, Human
gcuauuagccaggauca

SEQ ID NO: 2339441 - RNA, 22 nt, Human
gcuaggaccccuccaugugggc

SEQ ID NO: 2339442 - RNA, 17 nt, Human
gcuagggaaacuucccg

SEQ ID NO: 2339443 - RNA, 21 nt, Human
gcuaggcgagugccaggacuc

SEQ ID NO: 2339444 - RNA, 20 nt, Human
gcuaggaccccuccaugugg

SEQ ID NO: 2339445 - RNA, 18 nt, Human
gcuaggaaugaaauccug

SEQ ID NO: 2339446 - RNA, 13 nt, Human
gcuaggaaugaaa

SEQ ID NO: 2339447 - RNA, 12 nt, Human
gcuaggaaugaa

SEQ ID NO: 2339448 - RNA, 21 nt, Human
gcuaggaauuguguuuauaau

SEQ ID NO: 2339449 - RNA, 15 nt, Human
gcuuuugcuggucac

SEQ ID NO: 2339450 - RNA, 18 nt, Human
gcuuuucuguauuuuauu

SEQ ID NO: 2339451 - RNA, 18 nt, Human
gcuuuucugucucugccu

SEQ ID NO: 2339452 - RNA, 19 nt, Human
gcuuuugcuggucacugcc

SEQ ID NO: 2339453 - RNA, 21 nt, Human
gcuuuugcuggucacugccau

SEQ ID NO: 2339454 - RNA, 22 nt, Human
gcuuuugcuggucacugccaug

SEQ ID NO: 2339455 - RNA, 17 nt, Human
gcuuuucugcccuggcu

SEQ ID NO: 2339456 - RNA, 18 nt, Human
gcuuuucugcccuggcug

SEQ ID NO: 2339457 - RNA, 19 nt, Human
gcuuuucugcccuggcugc

SEQ ID NO: 2339458 - RNA, 22 nt, Human
gcuuuucugcccuggcugcugc

SEQ ID NO: 2339459 - RNA, 14 nt, Human
gcuuuucuguauuu

SEQ ID NO: 2339460 - RNA, 17 nt, Human
gcuuuucuuucuaccaa

SEQ ID NO: 2339461 - RNA, 13 nt, Human
gcuuuugaaaucu

SEQ ID NO: 2339462 - RNA, 19 nt, Human
gcuuuucccuaagccaagg

SEQ ID NO: 2339463 - RNA, 18 nt, Human
gcuuuuccccggucccuu

SEQ ID NO: 2339464 - RNA, 16 nt, Human
gcuuuucccaaaagcc

SEQ ID NO: 2339465 - RNA, 20 nt, Human
gcuuuucccuuuuuuuaagu

SEQ ID NO: 2339466 - RNA, 22 nt, Human
gcuuuuccccggucccuugaga

SEQ ID NO: 2339467 - RNA, 22 nt, Human
gcuuuuccuauuuguuuucaug

SEQ ID NO: 2339468 - RNA, 15 nt, Human
gcuuuuccucccuug

SEQ ID NO: 2339469 - RNA, 22 nt, Human
gcuuuuccucaaagggagagag

SEQ ID NO: 2339470 - RNA, 21 nt, Human
gcuuuucccuuuuuuuaagua

SEQ ID NO: 2339471 - RNA, 11 nt, Human
gcuuuuggcaa

SEQ ID NO: 2339472 - RNA, 15 nt, Human
gcuuuuuaauauuga

SEQ ID NO: 2339473 - RNA, 19 nt, Human
gcuuuugugcauuaucuag

SEQ ID NO: 2339474 - RNA, 13 nt, Human
gcuuuugugcauu

SEQ ID NO: 2339475 - RNA, 15 nt, Human
gcuuuuuuuuucucu

SEQ ID NO: 2339476 - RNA, 24 nt, Human
gcuuuuuuuuucucuuucucuccu

SEQ ID NO: 2339477 - RNA, 16 nt, Human
ggaaaaaauaacaaug

SEQ ID NO: 2339478 - RNA, 13 nt, Human
ggaaacagaggcu

SEQ ID NO: 2339479 - RNA, 19 nt, Human
ggaaaaaaaucguccaggg

SEQ ID NO: 2339480 - RNA, 14 nt, Human
ggaaaaaaaugacu

SEQ ID NO: 2339481 - RNA, 20 nt, Human
ggaaacagcuaaugggacac

SEQ ID NO: 2339482 - RNA, 15 nt, Human
ggaaacaggaccaca

SEQ ID NO: 2339483 - RNA, 15 nt, Human
ggaaaaaagagaagu

SEQ ID NO: 2339484 - RNA, 15 nt, Human
ggaaaccacagcugc

SEQ ID NO: 2339485 - RNA, 16 nt, Human
ggaaaccacagcugcu

SEQ ID NO: 2339486 - RNA, 15 nt, Human
ggaaacccagcucug

SEQ ID NO: 2339487 - RNA, 17 nt, Human
ggaaacuggaugagguc

SEQ ID NO: 2339488 - RNA, 17 nt, Human
ggaaacucuuaucucag

SEQ ID NO: 2339489 - RNA, 18 nt, Human
ggaaacuggguuccugca

SEQ ID NO: 2339490 - RNA, 13 nt, Human
ggaaacugccagc

SEQ ID NO: 2339491 - RNA, 21 nt, Human
ggaaacucaccugcuggcccc

SEQ ID NO: 2339492 - RNA, 18 nt, Human
ggaaacuccacaucugcc

SEQ ID NO: 2339493 - RNA, 22 nt, Human
ggaaacucaccugcuggccccu

SEQ ID NO: 2339494 - RNA, 20 nt, Human
ggaaacuccacaucugccuu

SEQ ID NO: 2339495 - RNA, 21 nt, Human
ggaaacuccacaucugccuua

SEQ ID NO: 2339496 - RNA, 21 nt, Human
ggaaacuaggugcauauuuau

SEQ ID NO: 2339497 - RNA, 18 nt, Human
ggaaaccacagcugcugg

SEQ ID NO: 2339498 - RNA, 19 nt, Human
ggaaaccacagcugcugga

SEQ ID NO: 2339499 - RNA, 21 nt, Human
ggaaaccacagcugcuggaga

SEQ ID NO: 2339500 - RNA, 21 nt, Human
ggaaaggaguagaaaaagcag

SEQ ID NO: 2339501 - RNA, 12 nt, Human
ggaaaggaauug

SEQ ID NO: 2339502 - RNA, 15 nt, Human
ggaaaggagaggaaa

SEQ ID NO: 2339503 - RNA, 16 nt, Human
ggaaaggauauuuucu

SEQ ID NO: 2339504 - RNA, 18 nt, Human
ggaaaggcaaaugcccaa

SEQ ID NO: 2339505 - RNA, 20 nt, Human
ggaaaggcaaaugcccaagg

SEQ ID NO: 2339506 - RNA, 18 nt, Human
ggaaaggccagcuggcag

SEQ ID NO: 2339507 - RNA, 15 nt, Human
ggaaaggccagcugg

SEQ ID NO: 2339508 - RNA, 16 nt, Human
ggaaagccucugcugc

SEQ ID NO: 2339509 - RNA, 14 nt, Human
ggaaagccucugcu

SEQ ID NO: 2339510 - RNA, 23 nt, Human
ggaaagcucagcuacugauuuuu

SEQ ID NO: 2339511 - RNA, 18 nt, Human
ggaaagcuccuagcagag

SEQ ID NO: 2339512 - RNA, 24 nt, Human
ggaaaggaagugggacuggcacua

SEQ ID NO: 2339513 - RNA, 13 nt, Human
ggaaagccucugc

SEQ ID NO: 2339514 - RNA, 21 nt, Human
ggaaagccagugacuccagga

SEQ ID NO: 2339515 - RNA, 18 nt, Human
ggaaagccagugacucca

SEQ ID NO: 2339516 - RNA, 19 nt, Human
ggaaagccagugacuccag

SEQ ID NO: 2339517 - RNA, 19 nt, Human
ggaaagcaucaccucaggc

SEQ ID NO: 2339518 - RNA, 18 nt, Human
ggaaagcaucaccucagg

SEQ ID NO: 2339519 - RNA, 18 nt, Human
ggaaagccaccucucccu

SEQ ID NO: 2339520 - RNA, 21 nt, Human
ggaaagcagguggcaucucua

SEQ ID NO: 2339521 - RNA, 20 nt, Human
ggaaagccaccucucccuca

SEQ ID NO: 2339522 - RNA, 23 nt, Human
ggaaagccaccucucccucaaca

SEQ ID NO: 2339523 - RNA, 19 nt, Human
ggaaagcagcucaaaggca

SEQ ID NO: 2339524 - RNA, 15 nt, Human
ggaaagcagcucaaa

SEQ ID NO: 2339525 - RNA, 16 nt, Human
ggaaagcacagguggg

SEQ ID NO: 2339526 - RNA, 17 nt, Human
ggaaagcacaggugggc

SEQ ID NO: 2339527 - RNA, 22 nt, Human
ggaaagcagcucaaaggcacag

SEQ ID NO: 2339528 - RNA, 19 nt, Human
ggaaagcagguggcaucuc

SEQ ID NO: 2339529 - RNA, 11 nt, Human
ggaaagcaggu

SEQ ID NO: 2339530 - RNA, 14 nt, Human
ggaaagcagcucaa

SEQ ID NO: 2339531 - RNA, 18 nt, Human
ggaaagaagagccggagc

SEQ ID NO: 2339532 - RNA, 15 nt, Human
ggaaagaagagccgg

SEQ ID NO: 2339533 - RNA, 22 nt, Human
ggaaagacauccauaaagaagc

SEQ ID NO: 2339534 - RNA, 16 nt, Human
ggaaagaaagaaggaa

SEQ ID NO: 2339535 - RNA, 15 nt, Human
ggaaagaaaguugca

SEQ ID NO: 2339536 - RNA, 17 nt, Human
ggaaacuguugccagag

SEQ ID NO: 2339537 - RNA, 12 nt, Human
ggaaacugaaug

SEQ ID NO: 2339538 - RNA, 18 nt, Human
ggaaacuguugccagaga

SEQ ID NO: 2339539 - RNA, 20 nt, Human
ggaaagacuuuuccaacccu

SEQ ID NO: 2339540 - RNA, 14 nt, Human
ggaaagaggcucug

SEQ ID NO: 2339541 - RNA, 15 nt, Human
ggaaagcaauaaaug

SEQ ID NO: 2339542 - RNA, 19 nt, Human
ggaaagcaaaggagauugg

SEQ ID NO: 2339543 - RNA, 16 nt, Human
ggaaagaguaggaaga

SEQ ID NO: 2339544 - RNA, 17 nt, Human
ggaaagaguaggaagac

SEQ ID NO: 2339545 - RNA, 21 nt, Human
gcuuugcuuaugguaauaaaa

SEQ ID NO: 2339546 - RNA, 18 nt, Human
gcuuugcuuucugcucag

SEQ ID NO: 2339547 - RNA, 19 nt, Human
gcuuugcuuucugcucagc

SEQ ID NO: 2339548 - RNA, 24 nt, Human
gcuuugccuuccacgcugucucca

SEQ ID NO: 2339549 - RNA, 18 nt, Human
gcuuugccuuccacgcug

SEQ ID NO: 2339550 - RNA, 13 nt, Human
gcuuugccuucca

SEQ ID NO: 2339551 - RNA, 22 nt, Human
gcuuugccuuccacgcugucuc

SEQ ID NO: 2339552 - RNA, 12 nt, Human
gcuuugcucugc

SEQ ID NO: 2339553 - RNA, 16 nt, Human
gcuuugcuaccaaagc

SEQ ID NO: 2339554 - RNA, 19 nt, Human
gcuuugcugcugaaggcuc

SEQ ID NO: 2339555 - RNA, 18 nt, Human
gcuuugcugcugaaggcu

SEQ ID NO: 2339556 - RNA, 12 nt, Human
gcuuugcugcug

SEQ ID NO: 2339557 - RNA, 16 nt, Human
gcuuugcugcuacagg

SEQ ID NO: 2339558 - RNA, 13 nt, Human
gcuuugcucugcc

SEQ ID NO: 2339559 - RNA, 12 nt, Human
gcuuugcugcua

SEQ ID NO: 2339560 - RNA, 15 nt, Human
gcuuugcugcuacag

SEQ ID NO: 2339561 - RNA, 12 nt, Human
gcuuugcccagc

SEQ ID NO: 2339562 - RNA, 22 nt, Human
gcuuugcccaacaccagccccu

SEQ ID NO: 2339563 - RNA, 23 nt, Human
gcuuugcccaacaccagccccug

SEQ ID NO: 2339564 - RNA, 20 nt, Human
gcuuugcccaacaccagccc

SEQ ID NO: 2339565 - RNA, 19 nt, Human
gcuuugccagcugcugcug

SEQ ID NO: 2339566 - RNA, 21 nt, Human
gcuuugcauuuuaaaaaugaa

SEQ ID NO: 2339567 - RNA, 14 nt, Human
gcuuugccagcugc

SEQ ID NO: 2339568 - RNA, 15 nt, Human
gcuuugccagcugcu

SEQ ID NO: 2339569 - RNA, 18 nt, Human
gcuuugccagcugcugcu

SEQ ID NO: 2339570 - RNA, 21 nt, Human
gcuuugauuaauccagaauaa

SEQ ID NO: 2339571 - RNA, 20 nt, Human
gcuuugauucauaguaacuu

SEQ ID NO: 2339572 - RNA, 15 nt, Human
gcuuugauucauagu

SEQ ID NO: 2339573 - RNA, 22 nt, Human
gcuuugcauuccuacaaagaug

SEQ ID NO: 2339574 - RNA, 20 nt, Human
gcuuugcauuccuacaaaga

SEQ ID NO: 2339575 - RNA, 20 nt, Human
gcuuugcauguuccacuaac

SEQ ID NO: 2339576 - RNA, 23 nt, Human
gcuuugcauguuccacuaacccc

SEQ ID NO: 2339577 - RNA, 12 nt, Human
gcuuugcaguga

SEQ ID NO: 2339578 - RNA, 17 nt, Human
gcuuugcauguuccacu

SEQ ID NO: 2339579 - RNA, 18 nt, Human
gcuuugcauguuccacua

SEQ ID NO: 2339580 - RNA, 23 nt, Human
gcuuucuacccagcgagcccugg

SEQ ID NO: 2339581 - RNA, 12 nt, Human
gcuuugauucau

SEQ ID NO: 2339582 - RNA, 18 nt, Human
gcuuugauuaauccagaa

SEQ ID NO: 2339583 - RNA, 23 nt, Human
gcuuuccuuuuuuaaaaaugcaa

SEQ ID NO: 2339584 - RNA, 19 nt, Human
gcuuucgucuccagccccu

SEQ ID NO: 2339585 - RNA, 17 nt, Human
gcuuuccuuuuuuaaaa

SEQ ID NO: 2339586 - RNA, 13 nt, Human
gcuuucuacccag

SEQ ID NO: 2339587 - RNA, 16 nt, Human
gcuuucgaacugcuag

SEQ ID NO: 2339588 - RNA, 19 nt, Human
gcuuucuacccagcgagcc

SEQ ID NO: 2339589 - RNA, 22 nt, Human
gcuuucuacccagcgagcccug

SEQ ID NO: 2339590 - RNA, 23 nt, Human
gcuugggcuuccauuugugugug

SEQ ID NO: 2339591 - RNA, 11 nt, Human
gcuuuccugaa

SEQ ID NO: 2339592 - RNA, 22 nt, Human
gcuuggggaccagagcugccac

SEQ ID NO: 2339593 - RNA, 19 nt, Human
gcuuuccugccccaggccu

SEQ ID NO: 2339594 - RNA, 14 nt, Human
gcuuuccugcccca

SEQ ID NO: 2339595 - RNA, 17 nt, Human
gcuuuccugccccaggc

SEQ ID NO: 2339596 - RNA, 22 nt, Human
gcuuuccugaauccaaacuaau

SEQ ID NO: 2339597 - RNA, 12 nt, Human
gcuuuccugaau

SEQ ID NO: 2339598 - RNA, 11 nt, Human
gcuuuccugcc

SEQ ID NO: 2339599 - RNA, 12 nt, Human
gcuuuccugccc

SEQ ID NO: 2339600 - RNA, 17 nt, Human
gcuuggggaccagagcu

SEQ ID NO: 2339601 - RNA, 18 nt, Human
gcuuggggaccagagcug

SEQ ID NO: 2339602 - RNA, 20 nt, Human
gcuuggggaccagagcugcc

SEQ ID NO: 2339603 - RNA, 21 nt, Human
gcuuggggaccagagcugcca

SEQ ID NO: 2339604 - RNA, 16 nt, Human
gcuuaagcagaagcau

SEQ ID NO: 2339605 - RNA, 16 nt, Human
gcuucuucagagacuc

SEQ ID NO: 2339606 - RNA, 20 nt, Human
gcuuaagaaaucuaguauuu

SEQ ID NO: 2339607 - RNA, 15 nt, Human
gcuuaagcagaagca

SEQ ID NO: 2339608 - RNA, 17 nt, Human
gcuuaacuucacauauu

SEQ ID NO: 2339609 - RNA, 22 nt, Human
gcuguuuauggccucagcugcc

SEQ ID NO: 2339610 - RNA, 17 nt, Human
gcuguuuauggccucag

SEQ ID NO: 2339611 - RNA, 23 nt, Human
gcuguuuauggccucagcugccu

SEQ ID NO: 2339612 - RNA, 16 nt, Human
gcuguuuauggccuca

SEQ ID NO: 2339613 - RNA, 15 nt, Human
gcuguuuauggccuc

SEQ ID NO: 2339614 - RNA, 14 nt, Human
gcuguuuauggccu

SEQ ID NO: 2339615 - RNA, 15 nt, Human
gcuguuuacuaggga

SEQ ID NO: 2339616 - RNA, 11 nt, Human
gcuguuuccuu

SEQ ID NO: 2339617 - RNA, 13 nt, Human
gcuguuugaggau

SEQ ID NO: 2339618 - RNA, 13 nt, Human
gcuguuuccauag

SEQ ID NO: 2339619 - RNA, 16 nt, Human
gcuguuuauuuuauau

SEQ ID NO: 2339620 - RNA, 16 nt, Human
gcuuaacuucacauau

SEQ ID NO: 2339621 - RNA, 19 nt, Human
gcuucuucagagacuccug

SEQ ID NO: 2339622 - RNA, 21 nt, Human
gcuucuucagagacuccugca

SEQ ID NO: 2339623 - RNA, 16 nt, Human
gcuugaccgugaggcc

SEQ ID NO: 2339624 - RNA, 23 nt, Human
gcuucuucagagacuccugcagg

SEQ ID NO: 2339625 - RNA, 17 nt, Human
gcuugaccgugaggcca

SEQ ID NO: 2339626 - RNA, 18 nt, Human
gcuugaccgugaggccag

SEQ ID NO: 2339627 - RNA, 19 nt, Human
gcuugaccgugaggccaga

SEQ ID NO: 2339628 - RNA, 23 nt, Human
gcuugggcuucauccuccucaga

SEQ ID NO: 2339629 - RNA, 16 nt, Human
gcuuggggaccagagc

SEQ ID NO: 2339630 - RNA, 19 nt, Human
ggaaaggcucagucucagg

SEQ ID NO: 2339631 - RNA, 18 nt, Human
ggaaaucucaccccaucc

SEQ ID NO: 2339632 - RNA, 12 nt, Human
ggaaaggcucag

SEQ ID NO: 2339633 - RNA, 22 nt, Human
ggaaaggccagcuggcagcaga

SEQ ID NO: 2339634 - RNA, 20 nt, Human
ggaaaggccagcuggcagca

SEQ ID NO: 2339635 - RNA, 16 nt, Human
ggaaauccaggguggu

SEQ ID NO: 2339636 - RNA, 23 nt, Human
ggaaaucaccgaaaacguggcug

SEQ ID NO: 2339637 - RNA, 19 nt, Human
ggaaaucaggguuaguauu

SEQ ID NO: 2339638 - RNA, 21 nt, Human
ggaagccagcaggcucucagg

SEQ ID NO: 2339639 - RNA, 16 nt, Human
ggaagccagcuuuccc

SEQ ID NO: 2339640 - RNA, 20 nt, Human
ggaagccggaggguguuuau

SEQ ID NO: 2339641 - RNA, 18 nt, Human
ggaagccgcuggggccag

SEQ ID NO: 2339642 - RNA, 22 nt, Human
ggaagccagcaggcucucaggc

SEQ ID NO: 2339643 - RNA, 23 nt, Human
ggaagccagcaggcucucaggcc

SEQ ID NO: 2339644 - RNA, 13 nt, Human
ggacacagcucuu

SEQ ID NO: 2339645 - RNA, 12 nt, Human
ggacacacuaau

SEQ ID NO: 2339646 - RNA, 16 nt, Human
ggacacagaugaaaca

SEQ ID NO: 2339647 - RNA, 13 nt, Human
ggacaccaggagu

SEQ ID NO: 2339648 - RNA, 20 nt, Human
ggacaccagccaggcucugu

SEQ ID NO: 2339649 - RNA, 22 nt, Human
ggacaccagccaggcucugugc

SEQ ID NO: 2339650 - RNA, 12 nt, Human
ggacacccugug

SEQ ID NO: 2339651 - RNA, 21 nt, Human
ggacacauucaacccuggaga

SEQ ID NO: 2339652 - RNA, 22 nt, Human
ggacacauucaacccuggagag

SEQ ID NO: 2339653 - RNA, 17 nt, Human
ggacaccacacccagcc

SEQ ID NO: 2339654 - RNA, 18 nt, Human
ggacaccacacccagccu

SEQ ID NO: 2339655 - RNA, 19 nt, Human
ggacaccacacccagccuc

SEQ ID NO: 2339656 - RNA, 20 nt, Human
ggacaccacacccagccuca

SEQ ID NO: 2339657 - RNA, 21 nt, Human
ggacaccacacccagccucag

SEQ ID NO: 2339658 - RNA, 22 nt, Human
ggacaccacacccagccucagu

SEQ ID NO: 2339659 - RNA, 13 nt, Human
ggacaccagccag

SEQ ID NO: 2339660 - RNA, 14 nt, Human
ggacaccagccagg

SEQ ID NO: 2339661 - RNA, 16 nt, Human
ggacaccagccaggcu

SEQ ID NO: 2339662 - RNA, 17 nt, Human
ggacaccagccaggcuc

SEQ ID NO: 2339663 - RNA, 18 nt, Human
ggacaccagccaggcucu

SEQ ID NO: 2339664 - RNA, 19 nt, Human
ggacaccagccaggcucug

SEQ ID NO: 2339665 - RNA, 18 nt, Human
ggaaugaagcuuguguau

SEQ ID NO: 2339666 - RNA, 21 nt, Human
ggaaugaggcuugcugagagg

SEQ ID NO: 2339667 - RNA, 16 nt, Human
ggacaauucaugaacu

SEQ ID NO: 2339668 - RNA, 21 nt, Human
ggaaugaggugggagguggaa

SEQ ID NO: 2339669 - RNA, 21 nt, Human
ggacacacaaggugcaaauca

SEQ ID NO: 2339670 - RNA, 20 nt, Human
ggaaugaggcuugcugagag

SEQ ID NO: 2339671 - RNA, 13 nt, Human
ggacacacaaggu

SEQ ID NO: 2339672 - RNA, 12 nt, Human
ggacacagcucu

SEQ ID NO: 2339673 - RNA, 16 nt, Human
ggaaucaagagcugcc

SEQ ID NO: 2339674 - RNA, 15 nt, Human
ggaauauuugaaucu

SEQ ID NO: 2339675 - RNA, 20 nt, Human
ggaauauuugaaucuugucu

SEQ ID NO: 2339676 - RNA, 22 nt, Human
ggaaucaagaugucagacuggc

SEQ ID NO: 2339677 - RNA, 12 nt, Human
ggaaucaagauu

SEQ ID NO: 2339678 - RNA, 17 nt, Human
ggaaucaagagcugccc

SEQ ID NO: 2339679 - RNA, 19 nt, Human
ggaaucaagagcugcccuc

SEQ ID NO: 2339680 - RNA, 23 nt, Human
ggaaucaagagcugcccuccuug

SEQ ID NO: 2339681 - RNA, 18 nt, Human
ggaaugaagcaaugcuuc

SEQ ID NO: 2339682 - RNA, 15 nt, Human
ggaaucacucuugug

SEQ ID NO: 2339683 - RNA, 12 nt, Human
ggaaugaagcuu

SEQ ID NO: 2339684 - RNA, 15 nt, Human
ggaaugaagcuugug

SEQ ID NO: 2339685 - RNA, 16 nt, Human
ggaaugaagcuugugu

SEQ ID NO: 2339686 - RNA, 19 nt, Human
ggaaugaaugucaguguga

SEQ ID NO: 2339687 - RNA, 23 nt, Human
ggaagcgaugaauuuggagacuc

SEQ ID NO: 2339688 - RNA, 14 nt, Human
ggaagccugcaguc

SEQ ID NO: 2339689 - RNA, 16 nt, Human
ggaagccgugcccugc

SEQ ID NO: 2339690 - RNA, 16 nt, Human
ggaagccggcggccca

SEQ ID NO: 2339691 - RNA, 20 nt, Human
ggaagccggcggcccaagcc

SEQ ID NO: 2339692 - RNA, 20 nt, Human
ggaagccgugcucgccccag

SEQ ID NO: 2339693 - RNA, 16 nt, Human
ggaagcucagggccug

SEQ ID NO: 2339694 - RNA, 17 nt, Human
ggaagcucagggccugg

SEQ ID NO: 2339695 - RNA, 22 nt, Human
ggaagcggagguugcagggagc

SEQ ID NO: 2339696 - RNA, 15 nt, Human
ggaauaauagaagaa

SEQ ID NO: 2339697 - RNA, 22 nt, Human
ggaauaaugggcuuagagcagu

SEQ ID NO: 2339698 - RNA, 21 nt, Human
ggaauaauuauuuauuuaaua

SEQ ID NO: 2339699 - RNA, 13 nt, Human
ggaauaauuauuu

SEQ ID NO: 2339700 - RNA, 15 nt, Human
ggaauacaauguaau

SEQ ID NO: 2339701 - RNA, 15 nt, Human
ggaauaccugucccc

SEQ ID NO: 2339702 - RNA, 20 nt, Human
ggaagcggagguugcaggga

SEQ ID NO: 2339703 - RNA, 20 nt, Human
ggaagcgcgagggccucaaa

SEQ ID NO: 2339704 - RNA, 22 nt, Human
ggaagcucagggccuggcucag

SEQ ID NO: 2339705 - RNA, 21 nt, Human
ggaagcucagggccuggcuca

SEQ ID NO: 2339706 - RNA, 17 nt, Human
ggaauaguauccuccag

SEQ ID NO: 2339707 - RNA, 18 nt, Human
ggaauaguauccuccagg

SEQ ID NO: 2339708 - RNA, 19 nt, Human
ggaauaguauccuccaggu

SEQ ID NO: 2339709 - RNA, 17 nt, Human
ggaauacuuuuuguuau

SEQ ID NO: 2339710 - RNA, 12 nt, Human
ggaauacagugu

SEQ ID NO: 2339711 - RNA, 18 nt, Human
ggaauacuagggagaagg

SEQ ID NO: 2339712 - RNA, 12 nt, Human
ggaauacuuuuu

SEQ ID NO: 2339713 - RNA, 16 nt, Human
ggaauaccuguccccc

SEQ ID NO: 2339714 - RNA, 19 nt, Human
ggaauaccugucccccuga

SEQ ID NO: 2339715 - RNA, 23 nt, Human
ggaauauaaggaaagcaauaaau

SEQ ID NO: 2339716 - RNA, 17 nt, Human
ggaauaguugagcccca

SEQ ID NO: 2339717 - RNA, 20 nt, Human
ggaauaguugagccccaagu

SEQ ID NO: 2339718 - RNA, 20 nt, Human
ggaauaguauccuccagguu

SEQ ID NO: 2339719 - RNA, 21 nt, Human
ggaauaguauccuccagguuu

SEQ ID NO: 2339720 - RNA, 22 nt, Human
ggaauaguauccuccagguuuu

SEQ ID NO: 2339721 - RNA, 16 nt, Human
ggaauaguugagcccc

SEQ ID NO: 2339722 - RNA, 16 nt, Human
ggaauauauaaccagu

SEQ ID NO: 2339723 - RNA, 22 nt, Human
ggaauauuccccuaucucuaga

SEQ ID NO: 2339724 - RNA, 11 nt, Human
ggaauauuuga

SEQ ID NO: 2339725 - RNA, 13 nt, Human
ggaauauuugaau

SEQ ID NO: 2339726 - RNA, 14 nt, Human
ggaauauuugaauc

SEQ ID NO: 2339727 - RNA, 13 nt, Human
ggaauaugagcuu

SEQ ID NO: 2339728 - RNA, 13 nt, Human
ggaauaguuuuuu

SEQ ID NO: 2339729 - RNA, 17 nt, Human
ggaauaugggagaaaua

SEQ ID NO: 2339730 - RNA, 15 nt, Human
ggacacccccucgcu

SEQ ID NO: 2339731 - RNA, 19 nt, Human
ggacaccccuuauccagga

SEQ ID NO: 2339732 - RNA, 20 nt, Human
ggacaccccuuauccaggac

SEQ ID NO: 2339733 - RNA, 15 nt, Human
ggacaccgggccagu

SEQ ID NO: 2339734 - RNA, 13 nt, Human
ggacacccuguga

SEQ ID NO: 2339735 - RNA, 23 nt, Human
ggacacccugugauggggcccug

SEQ ID NO: 2339736 - RNA, 11 nt, Human
ggacaggcccg

SEQ ID NO: 2339737 - RNA, 21 nt, Human
ggacaccccuuauccaggacu

SEQ ID NO: 2339738 - RNA, 23 nt, Human
ggacaggcauguucucugaggac

SEQ ID NO: 2339739 - RNA, 15 nt, Human
ggacaccugcccugc

SEQ ID NO: 2339740 - RNA, 14 nt, Human
ggacaccugcccug

SEQ ID NO: 2339741 - RNA, 22 nt, Human
ggacaggcccggcgcgguggcu

SEQ ID NO: 2339742 - RNA, 13 nt, Human
ggacaggcuggcu

SEQ ID NO: 2339743 - RNA, 17 nt, Human
ggacagggaggugaccc

SEQ ID NO: 2339744 - RNA, 20 nt, Human
ggacaggugugccgacagaa

SEQ ID NO: 2339745 - RNA, 18 nt, Human
ggacaguauuugugggga

SEQ ID NO: 2339746 - RNA, 17 nt, Human
ggacaggggcaggagga

SEQ ID NO: 2339747 - RNA, 20 nt, Human
ggacagggcuggcccagccc

SEQ ID NO: 2339748 - RNA, 21 nt, Human
ggacagggcuggcccagcccu

SEQ ID NO: 2339749 - RNA, 22 nt, Human
ggacagggcuggcccagcccug

SEQ ID NO: 2339750 - RNA, 23 nt, Human
ggacagggcuggcccagcccugc

SEQ ID NO: 2339751 - RNA, 15 nt, Human
ggacagggcauggcc

SEQ ID NO: 2339752 - RNA, 23 nt, Human
ggacaggcuggcuccagaugcag

SEQ ID NO: 2339753 - RNA, 15 nt, Human
ggacaggcuggcucc

SEQ ID NO: 2339754 - RNA, 22 nt, Human
ggacagggcauggccagguggc

SEQ ID NO: 2339755 - RNA, 22 nt, Human
ggacagggaugagcauggagcu

SEQ ID NO: 2339756 - RNA, 15 nt, Human
ggacagggcuggccc

SEQ ID NO: 2339757 - RNA, 16 nt, Human
ggacagggcuggccca

SEQ ID NO: 2339758 - RNA, 18 nt, Human
ggacagggcuggcccagc

SEQ ID NO: 2339759 - RNA, 14 nt, Human
ggacagggucccug

SEQ ID NO: 2339760 - RNA, 19 nt, Human
ggacaguauuuguggggag

SEQ ID NO: 2339761 - RNA, 21 nt, Human
ggacagucaccucauggaauu

SEQ ID NO: 2339762 - RNA, 17 nt, Human
ggacagucaccucaugg

SEQ ID NO: 2339763 - RNA, 18 nt, Human
ggacagucaccucaugga

SEQ ID NO: 2339764 - RNA, 23 nt, Human
ggacagugcuucagccugaggcu

SEQ ID NO: 2339765 - RNA, 22 nt, Human
ggacagugcuucagccugaggc

SEQ ID NO: 2339766 - RNA, 21 nt, Human
ggacagugcuucagccugagg

SEQ ID NO: 2339767 - RNA, 20 nt, Human
ggacagugcuucagccugag

SEQ ID NO: 2339768 - RNA, 19 nt, Human
ggacagugcuucagccuga

SEQ ID NO: 2339769 - RNA, 18 nt, Human
ggacagugcuucagccug

SEQ ID NO: 2339770 - RNA, 16 nt, Human
ggacaguccugggaga

SEQ ID NO: 2339771 - RNA, 15 nt, Human
ggacaguccugggag

SEQ ID NO: 2339772 - RNA, 14 nt, Human
ggacaguccuggga

SEQ ID NO: 2339773 - RNA, 13 nt, Human
ggacaguccuggg

SEQ ID NO: 2339774 - RNA, 17 nt, Human
ggacagugcuucagccu

SEQ ID NO: 2339775 - RNA, 16 nt, Human
ggacagugcuucagcc

SEQ ID NO: 2339776 - RNA, 19 nt, Human
ggacaguccugggagaacc

SEQ ID NO: 2339777 - RNA, 14 nt, Human
ggacagugcuucag

SEQ ID NO: 2339778 - RNA, 22 nt, Human
ggacaguugcuuuucagcaugg

SEQ ID NO: 2339779 - RNA, 18 nt, Human
ggacauagcgaauacaaa

SEQ ID NO: 2339780 - RNA, 15 nt, Human
ggacauagagaggga

SEQ ID NO: 2339781 - RNA, 20 nt, Human
ggacauagagagggagaaga

SEQ ID NO: 2339782 - RNA, 23 nt, Human
ggacauaaugggguccuggccau

SEQ ID NO: 2339783 - RNA, 19 nt, Human
ggacauaaugggguccugg

SEQ ID NO: 2339784 - RNA, 20 nt, Human
ggacauccccccgccaaaag

SEQ ID NO: 2339785 - RNA, 14 nt, Human
ggacaucagcuggu

SEQ ID NO: 2339786 - RNA, 22 nt, Human
ggacauagagagggagaagaag

SEQ ID NO: 2339787 - RNA, 13 nt, Human
ggacauccuccuc

SEQ ID NO: 2339788 - RNA, 14 nt, Human
ggacauauucauuu

SEQ ID NO: 2339789 - RNA, 14 nt, Human
ggacauggacaagg

SEQ ID NO: 2339790 - RNA, 13 nt, Human
ggacauggacaag

SEQ ID NO: 2339791 - RNA, 14 nt, Human
ggacauccucuucu

SEQ ID NO: 2339792 - RNA, 16 nt, Human
ggacauccuccuccca

SEQ ID NO: 2339793 - RNA, 16 nt, Human
ggacaugcgguagcca

SEQ ID NO: 2339794 - RNA, 15 nt, Human
ggacaucucuuugaa

SEQ ID NO: 2339795 - RNA, 16 nt, Human
ggacaugcugaagcca

SEQ ID NO: 2339796 - RNA, 19 nt, Human
ggacaugcugaagccaaag

SEQ ID NO: 2339797 - RNA, 21 nt, Human
ggacaugcgguagccagcaca

SEQ ID NO: 2339798 - RNA, 19 nt, Human
ggacaugcgguagccagca

SEQ ID NO: 2339799 - RNA, 14 nt, Human
gcugcaaggccuuu

SEQ ID NO: 2339800 - RNA, 16 nt, Human
gcugcaaggccuuucu

SEQ ID NO: 2339801 - RNA, 20 nt, Human
gcugcaagugacaucucuuu

SEQ ID NO: 2339802 - RNA, 21 nt, Human
gcugcaagguuuaggcuggug

SEQ ID NO: 2339803 - RNA, 19 nt, Human
gcugcaagguuuaggcugg

SEQ ID NO: 2339804 - RNA, 12 nt, Human
gcugcaagguuu

SEQ ID NO: 2339805 - RNA, 23 nt, Human
gcugcaagguggcuccagcacca

SEQ ID NO: 2339806 - RNA, 19 nt, Human
gcugcaaggccuuucugug

SEQ ID NO: 2339807 - RNA, 22 nt, Human
gcugcaagguggcuccagcacc

SEQ ID NO: 2339808 - RNA, 17 nt, Human
gcugcacagggcagcug

SEQ ID NO: 2339809 - RNA, 18 nt, Human
gcugcacagggcagcugg

SEQ ID NO: 2339810 - RNA, 19 nt, Human
gcugcacagggcagcuggg

SEQ ID NO: 2339811 - RNA, 20 nt, Human
gcugcacagggcagcugggc

SEQ ID NO: 2339812 - RNA, 21 nt, Human
gcugcacagggcagcugggcc

SEQ ID NO: 2339813 - RNA, 23 nt, Human
gcugcacagggcagcugggccca

SEQ ID NO: 2339814 - RNA, 13 nt, Human
gcugcaccaaccc

SEQ ID NO: 2339815 - RNA, 16 nt, Human
gcugcaccaacccagc

SEQ ID NO: 2339816 - RNA, 17 nt, Human
gcugcaccaacccagcc

SEQ ID NO: 2339817 - RNA, 18 nt, Human
gcugcaccaacccagccg

SEQ ID NO: 2339818 - RNA, 19 nt, Human
gcugcaccaacccagccgc

SEQ ID NO: 2339819 - RNA, 21 nt, Human
gcugcaccaacccagccgcug

SEQ ID NO: 2339820 - RNA, 19 nt, Human
gcugcacccucaggcaggu

SEQ ID NO: 2339821 - RNA, 18 nt, Human
gcugcacccucaggcagg

SEQ ID NO: 2339822 - RNA, 13 nt, Human
gcugcaccggcug

SEQ ID NO: 2339823 - RNA, 20 nt, Human
gcugcaccaacccagccgcu

SEQ ID NO: 2339824 - RNA, 22 nt, Human
gcugcagaggggcaggcccugc

SEQ ID NO: 2339825 - RNA, 23 nt, Human
gcugcagaggggcaggcccugca

SEQ ID NO: 2339826 - RNA, 14 nt, Human
gcugcccccggccc

SEQ ID NO: 2339827 - RNA, 18 nt, Human
gcugcccccggcccccug

SEQ ID NO: 2339828 - RNA, 19 nt, Human
gcugcccccggcccccugg

SEQ ID NO: 2339829 - RNA, 20 nt, Human
gcugcccccaccccggggac

SEQ ID NO: 2339830 - RNA, 20 nt, Human
gcugcccccggcccccuggu

SEQ ID NO: 2339831 - RNA, 23 nt, Human
gcugcccccggcccccuggucuc

SEQ ID NO: 2339832 - RNA, 22 nt, Human
gcugccccucaucucucugccc

SEQ ID NO: 2339833 - RNA, 23 nt, Human
gcugcagccaggccacuggcccc

SEQ ID NO: 2339834 - RNA, 12 nt, Human
gcugcagcaugu

SEQ ID NO: 2339835 - RNA, 22 nt, Human
gcugcagcauguugcugaggag

SEQ ID NO: 2339836 - RNA, 15 nt, Human
gcugcccccaccccg

SEQ ID NO: 2339837 - RNA, 17 nt, Human
gcugcagauuugggcug

SEQ ID NO: 2339838 - RNA, 18 nt, Human
gcugcagauuugggcugg

SEQ ID NO: 2339839 - RNA, 21 nt, Human
gcugcagauuugggcuggaac

SEQ ID NO: 2339840 - RNA, 14 nt, Human
gcugcagcagaggc

SEQ ID NO: 2339841 - RNA, 16 nt, Human
gcugcagcagaggcac

SEQ ID NO: 2339842 - RNA, 15 nt, Human
gcugcagccaggcca

SEQ ID NO: 2339843 - RNA, 18 nt, Human
gcugcagcagaggcacug

SEQ ID NO: 2339844 - RNA, 12 nt, Human
gcugcagcagcg

SEQ ID NO: 2339845 - RNA, 20 nt, Human
gcugcagcagcgguggccuc

SEQ ID NO: 2339846 - RNA, 21 nt, Human
gcugcagcagcgguggccucu

SEQ ID NO: 2339847 - RNA, 17 nt, Human
gcugccccuggcucuga

SEQ ID NO: 2339848 - RNA, 13 nt, Human
gcugcccgcuccc

SEQ ID NO: 2339849 - RNA, 12 nt, Human
gcugcccgcucc

SEQ ID NO: 2339850 - RNA, 20 nt, Human
gcugccccuggcagccccug

SEQ ID NO: 2339851 - RNA, 18 nt, Human
gcugccccuggcagcccc

SEQ ID NO: 2339852 - RNA, 19 nt, Human
gcugccccuggcagccccu

SEQ ID NO: 2339853 - RNA, 20 nt, Human
gcugcccgucuucagccuag

SEQ ID NO: 2339854 - RNA, 19 nt, Human
gcugcccgucuucagccua

SEQ ID NO: 2339855 - RNA, 16 nt, Human
gcugcccgucuucagc

SEQ ID NO: 2339856 - RNA, 20 nt, Human
gcugcccggcgcccucuguc

SEQ ID NO: 2339857 - RNA, 23 nt, Human
gcugcccggcgcccucuguccug

SEQ ID NO: 2339858 - RNA, 14 nt, Human
gcugcccgcuccca

SEQ ID NO: 2339859 - RNA, 15 nt, Human
gcugcccgcucccag

SEQ ID NO: 2339860 - RNA, 16 nt, Human
gcugcccgcucccagu

SEQ ID NO: 2339861 - RNA, 19 nt, Human
gcugcccgcucccaguguc

SEQ ID NO: 2339862 - RNA, 20 nt, Human
gcugcccgcucccagugucu

SEQ ID NO: 2339863 - RNA, 17 nt, Human
gcugcccggcgcccucu

SEQ ID NO: 2339864 - RNA, 18 nt, Human
gcugcccggcgcccucug

SEQ ID NO: 2339865 - RNA, 19 nt, Human
gcugcccggcgcccucugu

SEQ ID NO: 2339866 - RNA, 21 nt, Human
gcugcccgucuucagccuagc

SEQ ID NO: 2339867 - RNA, 15 nt, Human
gcugcccuaggcucc

SEQ ID NO: 2339868 - RNA, 15 nt, Human
gcugcccuccauccc

SEQ ID NO: 2339869 - RNA, 16 nt, Human
gcugcccuaggcuccg

SEQ ID NO: 2339870 - RNA, 14 nt, Human
gcugcccuccaucc

SEQ ID NO: 2339871 - RNA, 21 nt, Human
gcugcccuccaucccgacaug

SEQ ID NO: 2339872 - RNA, 19 nt, Human
gcugcccuccaucccgaca

SEQ ID NO: 2339873 - RNA, 12 nt, Human
gcugccucacuu

SEQ ID NO: 2339874 - RNA, 19 nt, Human
gcugccuguaguuaggaaa

SEQ ID NO: 2339875 - RNA, 16 nt, Human
gcugccuguaguuagg

SEQ ID NO: 2339876 - RNA, 15 nt, Human
gcugccuguaguuag

SEQ ID NO: 2339877 - RNA, 13 nt, Human
gcugccuguaguu

SEQ ID NO: 2339878 - RNA, 12 nt, Human
gcugccuguagu

SEQ ID NO: 2339879 - RNA, 22 nt, Human
gcugccugggcuguuggcacuc

SEQ ID NO: 2339880 - RNA, 23 nt, Human
gcugccugggcuguuggcacuca

SEQ ID NO: 2339881 - RNA, 14 nt, Human
gcugccugggcugu

SEQ ID NO: 2339882 - RNA, 16 nt, Human
gcugccugggcuguug

SEQ ID NO: 2339883 - RNA, 18 nt, Human
gcugccugggcuguuggc

SEQ ID NO: 2339884 - RNA, 19 nt, Human
gcugccugggcuguuggca

SEQ ID NO: 2339885 - RNA, 13 nt, Human
gcugccugcccac

SEQ ID NO: 2339886 - RNA, 12 nt, Human
gcugccugggcu

SEQ ID NO: 2339887 - RNA, 13 nt, Human
gcugccugggcug

SEQ ID NO: 2339888 - RNA, 21 nt, Human
gcugccugggaucccucaucc

SEQ ID NO: 2339889 - RNA, 17 nt, Human
gcugccuguucagcucc

SEQ ID NO: 2339890 - RNA, 20 nt, Human
gcugccuguaguuaggaaau

SEQ ID NO: 2339891 - RNA, 13 nt, Human
gcugccugugugg

SEQ ID NO: 2339892 - RNA, 23 nt, Human
gcugcucuugaacuccugaccuc

SEQ ID NO: 2339893 - RNA, 12 nt, Human
gcugccuguuca

SEQ ID NO: 2339894 - RNA, 13 nt, Human
gcugccuguucag

SEQ ID NO: 2339895 - RNA, 16 nt, Human
gcugccucucccauca

SEQ ID NO: 2339896 - RNA, 18 nt, Human
gcugccucucgguggcca

SEQ ID NO: 2339897 - RNA, 21 nt, Human
gcugccucuaccugacacucc

SEQ ID NO: 2339898 - RNA, 13 nt, Human
gcugccucuucug

SEQ ID NO: 2339899 - RNA, 20 nt, Human
gcugccugggaucccucauc

SEQ ID NO: 2339900 - RNA, 20 nt, Human
gcugccuccccaacccugcc

SEQ ID NO: 2339901 - RNA, 19 nt, Human
gcugccuccccaacccugc

SEQ ID NO: 2339902 - RNA, 17 nt, Human
gcugccuccccaacccu

SEQ ID NO: 2339903 - RNA, 15 nt, Human
gcugccuccccaacc

SEQ ID NO: 2339904 - RNA, 23 nt, Human
gcugccuccccaacccugccccu

SEQ ID NO: 2339905 - RNA, 21 nt, Human
gcugccuccccaacccugccc

SEQ ID NO: 2339906 - RNA, 21 nt, Human
gcugccuccccucuccuuccu

SEQ ID NO: 2339907 - RNA, 13 nt, Human
gcugccuccccaa

SEQ ID NO: 2339908 - RNA, 20 nt, Human
gcugccuccacucccacuuc

SEQ ID NO: 2339909 - RNA, 21 nt, Human
gcugccuccacucccacuucc

SEQ ID NO: 2339910 - RNA, 15 nt, Human
gcugccuccacuccc

SEQ ID NO: 2339911 - RNA, 16 nt, Human
gcugccuccacuccca

SEQ ID NO: 2339912 - RNA, 17 nt, Human
gcugccuccacucccac

SEQ ID NO: 2339913 - RNA, 18 nt, Human
gcugccuccacucccacu

SEQ ID NO: 2339914 - RNA, 13 nt, Human
gcugccucaugcu

SEQ ID NO: 2339915 - RNA, 21 nt, Human
gcugccucauuuagagaggaa

SEQ ID NO: 2339916 - RNA, 14 nt, Human
gcugccucauuuag

SEQ ID NO: 2339917 - RNA, 12 nt, Human
gcugccuccacu

SEQ ID NO: 2339918 - RNA, 14 nt, Human
gcugccuccacucc

SEQ ID NO: 2339919 - RNA, 14 nt, Human
gcugaggcaauucu

SEQ ID NO: 2339920 - RNA, 20 nt, Human
gcugaggauuucaagccugc

SEQ ID NO: 2339921 - RNA, 19 nt, Human
gcugaggauuucaagccug

SEQ ID NO: 2339922 - RNA, 18 nt, Human
gcugaggauuucaagccu

SEQ ID NO: 2339923 - RNA, 18 nt, Human
gcugaggagugaggaaua

SEQ ID NO: 2339924 - RNA, 21 nt, Human
gcugaggaggccuccaucuca

SEQ ID NO: 2339925 - RNA, 16 nt, Human
gcugaggagugaggaa

SEQ ID NO: 2339926 - RNA, 12 nt, Human
gcugagcccugg

SEQ ID NO: 2339927 - RNA, 11 nt, Human
gcugagcccug

SEQ ID NO: 2339928 - RNA, 23 nt, Human
gcugagccccugucuagagaggg

SEQ ID NO: 2339929 - RNA, 22 nt, Human
gcugagccccugucuagagagg

SEQ ID NO: 2339930 - RNA, 15 nt, Human
gcugagccccugucu

SEQ ID NO: 2339931 - RNA, 13 nt, Human
gcugagccccugu

SEQ ID NO: 2339932 - RNA, 15 nt, Human
gcugaggcaauucua

SEQ ID NO: 2339933 - RNA, 15 nt, Human
gcugaggcagaagaa

SEQ ID NO: 2339934 - RNA, 13 nt, Human
gcugaggcagaag

SEQ ID NO: 2339935 - RNA, 13 nt, Human
gcugaggcagcag

SEQ ID NO: 2339936 - RNA, 15 nt, Human
gcugaggcaggagga

SEQ ID NO: 2339937 - RNA, 16 nt, Human
gcugaggcagaagaau

SEQ ID NO: 2339938 - RNA, 23 nt, Human
gcugaggcagcagugugaggcca

SEQ ID NO: 2339939 - RNA, 17 nt, Human
gcugaggucucuugagg

SEQ ID NO: 2339940 - RNA, 22 nt, Human
gcugaggccccuucuagguggc

SEQ ID NO: 2339941 - RNA, 14 nt, Human
gcugaggugggagg

SEQ ID NO: 2339942 - RNA, 23 nt, Human
gcugagggugagugggugaauaa

SEQ ID NO: 2339943 - RNA, 21 nt, Human
gcugaggccacacucagcaca

SEQ ID NO: 2339944 - RNA, 19 nt, Human
gcugaggccacacucagca

SEQ ID NO: 2339945 - RNA, 22 nt, Human
gcugaggccggaugcgguggcu

SEQ ID NO: 2339946 - RNA, 17 nt, Human
gcugagcaccaggggau

SEQ ID NO: 2339947 - RNA, 14 nt, Human
gcugagccccuacc

SEQ ID NO: 2339948 - RNA, 17 nt, Human
gcugagccccuacccca

SEQ ID NO: 2339949 - RNA, 20 nt, Human
gcugagccccuaccccacac

SEQ ID NO: 2339950 - RNA, 21 nt, Human
gcugagccccuaccccacacc

SEQ ID NO: 2339951 - RNA, 13 nt, Human
gcugagaggggcu

SEQ ID NO: 2339952 - RNA, 22 nt, Human
gcugagaggcagacuucccuga

SEQ ID NO: 2339953 - RNA, 16 nt, Human
gcugagaggagagaga

SEQ ID NO: 2339954 - RNA, 23 nt, Human
gcugguagagauggaggaggagg

SEQ ID NO: 2339955 - RNA, 21 nt, Human
gcugguagagauggaggagga

SEQ ID NO: 2339956 - RNA, 13 nt, Human
gcugguagcucag

SEQ ID NO: 2339957 - RNA, 14 nt, Human
gcugguagcucagg

SEQ ID NO: 2339958 - RNA, 15 nt, Human
gcugguagcucaggu

SEQ ID NO: 2339959 - RNA, 16 nt, Human
gcugguagcucaggug

SEQ ID NO: 2339960 - RNA, 19 nt, Human
gcugguagcucaggugggc

SEQ ID NO: 2339961 - RNA, 13 nt, Human
gcugguaguuagu

SEQ ID NO: 2339962 - RNA, 19 nt, Human
gcugguaggcauuccagcu

SEQ ID NO: 2339963 - RNA, 19 nt, Human
gcugguaggcuccugccag

SEQ ID NO: 2339964 - RNA, 18 nt, Human
gcugguagagauggagga

SEQ ID NO: 2339965 - RNA, 17 nt, Human
gcugguagagauggagg

SEQ ID NO: 2339966 - RNA, 15 nt, Human
gcugguagagaugga

SEQ ID NO: 2339967 - RNA, 14 nt, Human
gcugguagagaugg

SEQ ID NO: 2339968 - RNA, 23 nt, Human
gcugguaauuuguaucugaagga

SEQ ID NO: 2339969 - RNA, 16 nt, Human
gcugguaacaguucau

SEQ ID NO: 2339970 - RNA, 22 nt, Human
gcugguaacaguucauguuugc

SEQ ID NO: 2339971 - RNA, 14 nt, Human
gcugguaaacuauu

SEQ ID NO: 2339972 - RNA, 15 nt, Human
gcugguaaacuauuu

SEQ ID NO: 2339973 - RNA, 13 nt, Human
gcugguaacaguu

SEQ ID NO: 2339974 - RNA, 17 nt, Human
gcuggguuggugcacag

SEQ ID NO: 2339975 - RNA, 20 nt, Human
gcuggguucuacccaggugc

SEQ ID NO: 2339976 - RNA, 21 nt, Human
gcuggguucuacccaggugcu

SEQ ID NO: 2339977 - RNA, 22 nt, Human
gcugggguggggaccucaggcc

SEQ ID NO: 2339978 - RNA, 23 nt, Human
gcugggguggggaccucaggccu

SEQ ID NO: 2339979 - RNA, 18 nt, Human
gcuggguucuacccaggu

SEQ ID NO: 2339980 - RNA, 17 nt, Human
gcuggguucuacccagg

SEQ ID NO: 2339981 - RNA, 13 nt, Human
gcugggccccagc

SEQ ID NO: 2339982 - RNA, 14 nt, Human
gcugggcccagaag

SEQ ID NO: 2339983 - RNA, 19 nt, Human
gcugggcccaacccugucu

SEQ ID NO: 2339984 - RNA, 20 nt, Human
gcugggcccaacccugucug

SEQ ID NO: 2339985 - RNA, 19 nt, Human
gcugggcaguuuuucugua

SEQ ID NO: 2339986 - RNA, 14 nt, Human
gcugggcagguugg

SEQ ID NO: 2339987 - RNA, 20 nt, Human
gcugggaauaagugccagga

SEQ ID NO: 2339988 - RNA, 19 nt, Human
gcugggaacugcagaccug

SEQ ID NO: 2339989 - RNA, 14 nt, Human
gcugggcaguuuuu

SEQ ID NO: 2339990 - RNA, 19 nt, Human
gcuggcugcccagaccccu

SEQ ID NO: 2339991 - RNA, 16 nt, Human
gcugggaacucaccug

SEQ ID NO: 2339992 - RNA, 18 nt, Human
gcugggaacucaccuggg

SEQ ID NO: 2339993 - RNA, 21 nt, Human
gcugggaacucaccuggggcu

SEQ ID NO: 2339994 - RNA, 23 nt, Human
gcugggaacucaccuggggcugc

SEQ ID NO: 2339995 - RNA, 15 nt, Human
gcugggaacugcaga

SEQ ID NO: 2339996 - RNA, 20 nt, Human
gcuggcuguuggcugggggc

SEQ ID NO: 2339997 - RNA, 23 nt, Human
gcuggcuguuggcugggggccuc

SEQ ID NO: 2339998 - RNA, 14 nt, Human
gcugggccccagcc

SEQ ID NO: 2339999 - RNA, 15 nt, Human
gcugggccccagccc

SEQ ID NO: 2340000 - RNA, 16 nt, Human
gcugggccccagccca

SEQ ID NO: 2340001 - RNA, 17 nt, Human
gcugggccccagcccac

SEQ ID NO: 2340002 - RNA, 19 nt, Human
gcugggccccagcccaccc

SEQ ID NO: 2340003 - RNA, 20 nt, Human
gcugggccccagcccacccu

SEQ ID NO: 2340004 - RNA, 21 nt, Human
gcugggccccagcccacccuc

SEQ ID NO: 2340005 - RNA, 12 nt, Human
gcugggccccug

SEQ ID NO: 2340006 - RNA, 13 nt, Human
gcugggccccugc

SEQ ID NO: 2340007 - RNA, 14 nt, Human
gcugggccccugcc

SEQ ID NO: 2340008 - RNA, 18 nt, Human
gcugggccccugccucuc

SEQ ID NO: 2340009 - RNA, 20 nt, Human
gcugggccccugccucucug

SEQ ID NO: 2340010 - RNA, 24 nt, Human
gcugggccccagcccacccuccug

SEQ ID NO: 2340011 - RNA, 17 nt, Human
gcugggguggggaccuc

SEQ ID NO: 2340012 - RNA, 19 nt, Human
gcugggguggggaccucag

SEQ ID NO: 2340013 - RNA, 14 nt, Human
gcugcucuggaaaa

SEQ ID NO: 2340014 - RNA, 18 nt, Human
gcugcucuggaauuugca

SEQ ID NO: 2340015 - RNA, 13 nt, Human
gcugcugaaacaa

SEQ ID NO: 2340016 - RNA, 12 nt, Human
gcugcugaaggc

SEQ ID NO: 2340017 - RNA, 23 nt, Human
gcugcugaagcugccugcuuuuc

SEQ ID NO: 2340018 - RNA, 15 nt, Human
gcugcugaagaugaa

SEQ ID NO: 2340019 - RNA, 13 nt, Human
gcugcugaagcug

SEQ ID NO: 2340020 - RNA, 16 nt, Human
gcugcugaagcugccu

SEQ ID NO: 2340021 - RNA, 20 nt, Human
gcugcugaagcugccugcuu

SEQ ID NO: 2340022 - RNA, 13 nt, Human
gcuggacuuggag

SEQ ID NO: 2340023 - RNA, 14 nt, Human
gcuggcgugcagug

SEQ ID NO: 2340024 - RNA, 18 nt, Human
gcuggagacuccuaggca

SEQ ID NO: 2340025 - RNA, 20 nt, Human
gcuggagacuccuaggcagg

SEQ ID NO: 2340026 - RNA, 21 nt, Human
gcuggagaccaugcagagcgc

SEQ ID NO: 2340027 - RNA, 22 nt, Human
gcuggagaccaugcagagcgcc

SEQ ID NO: 2340028 - RNA, 18 nt, Human
gcuggagacgggugggcg

SEQ ID NO: 2340029 - RNA, 13 nt, Human
gcuggagacuccu

SEQ ID NO: 2340030 - RNA, 12 nt, Human
gcuggagaagag

SEQ ID NO: 2340031 - RNA, 13 nt, Human
gcuggagaagaga

SEQ ID NO: 2340032 - RNA, 14 nt, Human
gcuggagaagagag

SEQ ID NO: 2340033 - RNA, 15 nt, Human
gcuggagaagagagg

SEQ ID NO: 2340034 - RNA, 16 nt, Human
gcuggagaagagagga

SEQ ID NO: 2340035 - RNA, 17 nt, Human
gcuggagaagagaggag

SEQ ID NO: 2340036 - RNA, 18 nt, Human
gcuggagaagagaggaga

SEQ ID NO: 2340037 - RNA, 20 nt, Human
gcuggagaagagaggagagg

SEQ ID NO: 2340038 - RNA, 21 nt, Human
gcuggagaagagaggagagga

SEQ ID NO: 2340039 - RNA, 12 nt, Human
gcuggagaagcu

SEQ ID NO: 2340040 - RNA, 16 nt, Human
gcuggagaagcucacc

SEQ ID NO: 2340041 - RNA, 15 nt, Human
gcuggagaccaugca

SEQ ID NO: 2340042 - RNA, 17 nt, Human
gcuggagaccaugcaga

SEQ ID NO: 2340043 - RNA, 20 nt, Human
gcuggagaccaugcagagcg

SEQ ID NO: 2340044 - RNA, 15 nt, Human
gcuggcgugcagugg

SEQ ID NO: 2340045 - RNA, 18 nt, Human
gcuggcgugcaguggugc

SEQ ID NO: 2340046 - RNA, 21 nt, Human
gcuggcggcuacucagcagcc

SEQ ID NO: 2340047 - RNA, 14 nt, Human
gcuggcucuucugc

SEQ ID NO: 2340048 - RNA, 16 nt, Human
gcuggcucuucugccc

SEQ ID NO: 2340049 - RNA, 18 nt, Human
gcuggcucuucugcccaa

SEQ ID NO: 2340050 - RNA, 13 nt, Human
gcuggcucuucug

SEQ ID NO: 2340051 - RNA, 16 nt, Human
gcuggcucugagcgcc

SEQ ID NO: 2340052 - RNA, 21 nt, Human
gcuggagacuccuaggcagga

SEQ ID NO: 2340053 - RNA, 13 nt, Human
gcuggcucugagc

SEQ ID NO: 2340054 - RNA, 18 nt, Human
gcuggcuguuggcugggg

SEQ ID NO: 2340055 - RNA, 19 nt, Human
gcuggcuguuggcuggggg

SEQ ID NO: 2340056 - RNA, 14 nt, Human
gcuggcugccuuag

SEQ ID NO: 2340057 - RNA, 20 nt, Human
gcuggcugccuuagaaccuu

SEQ ID NO: 2340058 - RNA, 14 nt, Human
gcuggcugcaguga

SEQ ID NO: 2340059 - RNA, 13 nt, Human
gcuggcugcagug

SEQ ID NO: 2340060 - RNA, 11 nt, Human
gcuggcugccu

SEQ ID NO: 2340061 - RNA, 21 nt, Human
gcugugcgcugacaaccaccg

SEQ ID NO: 2340062 - RNA, 16 nt, Human
gcugugccucugccug

SEQ ID NO: 2340063 - RNA, 14 nt, Human
gcugugccucugcc

SEQ ID NO: 2340064 - RNA, 15 nt, Human
gcugugccucugccu

SEQ ID NO: 2340065 - RNA, 16 nt, Human
gcugugcuaugaauuu

SEQ ID NO: 2340066 - RNA, 15 nt, Human
gcugugcuaugaauu

SEQ ID NO: 2340067 - RNA, 14 nt, Human
gcugugcuaugaau

SEQ ID NO: 2340068 - RNA, 16 nt, Human
gcugugcggaucucug

SEQ ID NO: 2340069 - RNA, 13 nt, Human
gcugugcucugga

SEQ ID NO: 2340070 - RNA, 18 nt, Human
gcugugcucuggacaggc

SEQ ID NO: 2340071 - RNA, 18 nt, Human
gcugugcggaucucugga

SEQ ID NO: 2340072 - RNA, 14 nt, Human
gcugugcugcccug

SEQ ID NO: 2340073 - RNA, 15 nt, Human
gcugugcucuggaca

SEQ ID NO: 2340074 - RNA, 16 nt, Human
gcugugcucuggacag

SEQ ID NO: 2340075 - RNA, 15 nt, Human
gcuguuggcuggggg

SEQ ID NO: 2340076 - RNA, 17 nt, Human
gcugugcugcccugccc

SEQ ID NO: 2340077 - RNA, 15 nt, Human
gcugugcugcccugc

SEQ ID NO: 2340078 - RNA, 16 nt, Human
gcugugcugcccugcc

SEQ ID NO: 2340079 - RNA, 16 nt, Human
gcuguuggcugggggc

SEQ ID NO: 2340080 - RNA, 20 nt, Human
gcuguuggcugggggccuca

SEQ ID NO: 2340081 - RNA, 21 nt, Human
gcuguuuaaauguuuuucuau

SEQ ID NO: 2340082 - RNA, 13 nt, Human
gcuguaggugugc

SEQ ID NO: 2340083 - RNA, 20 nt, Human
gcuguaguagcccuuucugu

SEQ ID NO: 2340084 - RNA, 20 nt, Human
gcuguaguccucauaaaaag

SEQ ID NO: 2340085 - RNA, 21 nt, Human
gcuguaguagcccuuucugug

SEQ ID NO: 2340086 - RNA, 14 nt, Human
gcuguauaaaauca

SEQ ID NO: 2340087 - RNA, 18 nt, Human
gcuguauaaaaucagcca

SEQ ID NO: 2340088 - RNA, 17 nt, Human
gcuguaucccaugagcc

SEQ ID NO: 2340089 - RNA, 19 nt, Human
gcuguaucccaugagccuc

SEQ ID NO: 2340090 - RNA, 22 nt, Human
gcugugaguguaagugugagua

SEQ ID NO: 2340091 - RNA, 18 nt, Human
gcugugaguguaagugug

SEQ ID NO: 2340092 - RNA, 18 nt, Human
gcugugaggcuguccugu

SEQ ID NO: 2340093 - RNA, 12 nt, Human
gcugugaggcug

SEQ ID NO: 2340094 - RNA, 13 nt, Human
gcugugaggcugu

SEQ ID NO: 2340095 - RNA, 17 nt, Human
gcugugagccuuggcug

SEQ ID NO: 2340096 - RNA, 16 nt, Human
gcugugaggccccugg

SEQ ID NO: 2340097 - RNA, 18 nt, Human
gcugugaggccccuggac

SEQ ID NO: 2340098 - RNA, 22 nt, Human
gcugugaggccccuggacaagc

SEQ ID NO: 2340099 - RNA, 14 nt, Human
gcugugaggcuguc

SEQ ID NO: 2340100 - RNA, 15 nt, Human
gcugugaggcugucc

SEQ ID NO: 2340101 - RNA, 16 nt, Human
gcugugaggcuguccu

SEQ ID NO: 2340102 - RNA, 17 nt, Human
gcugugaggcuguccug

SEQ ID NO: 2340103 - RNA, 14 nt, Human
gcugugagccuugg

SEQ ID NO: 2340104 - RNA, 20 nt, Human
gcuguauaaaaucagccaau

SEQ ID NO: 2340105 - RNA, 22 nt, Human
gcuguauaaaaucagccaauua

SEQ ID NO: 2340106 - RNA, 21 nt, Human
gcuguauuuuaaaagaaugau

SEQ ID NO: 2340107 - RNA, 20 nt, Human
gcuguauuuuaaaagaauga

SEQ ID NO: 2340108 - RNA, 18 nt, Human
gcuguauuuuaaaagaau

SEQ ID NO: 2340109 - RNA, 23 nt, Human
ggcaucacagggcagagccggga

SEQ ID NO: 2340110 - RNA, 22 nt, Human
ggcaucacagggcagagccggg

SEQ ID NO: 2340111 - RNA, 23 nt, Human
ggcaucaccuuaggcagggaagu

SEQ ID NO: 2340112 - RNA, 13 nt, Human
ggcaucagcuggc

SEQ ID NO: 2340113 - RNA, 16 nt, Human
ggcaucagcuggcguc

SEQ ID NO: 2340114 - RNA, 18 nt, Human
ggcaucagucccuaugua

SEQ ID NO: 2340115 - RNA, 20 nt, Human
ggcaucaccuuaggcaggga

SEQ ID NO: 2340116 - RNA, 18 nt, Human
ggcaucaccuuaggcagg

SEQ ID NO: 2340117 - RNA, 21 nt, Human
ggcaucacaugcucaaugacu

SEQ ID NO: 2340118 - RNA, 14 nt, Human
ggcaucuccugugc

SEQ ID NO: 2340119 - RNA, 16 nt, Human
ggcaucuccaggaagg

SEQ ID NO: 2340120 - RNA, 11 nt, Human
ggcauuuccua

SEQ ID NO: 2340121 - RNA, 12 nt, Human
ggcaucuccagg

SEQ ID NO: 2340122 - RNA, 13 nt, Human
ggcaucuccagga

SEQ ID NO: 2340123 - RNA, 14 nt, Human
ggcaucuccaggaa

SEQ ID NO: 2340124 - RNA, 15 nt, Human
ggcaucuccaggaag

SEQ ID NO: 2340125 - RNA, 19 nt, Human
ggcauccuucugccuuuuu

SEQ ID NO: 2340126 - RNA, 21 nt, Human
ggcaucuagagcuugaugcca

SEQ ID NO: 2340127 - RNA, 22 nt, Human
ggcaucuagagcuugaugccag

SEQ ID NO: 2340128 - RNA, 14 nt, Human
ggcauuugcugaau

SEQ ID NO: 2340129 - RNA, 23 nt, Human
ggcaucaugcaucuuacugaagg

SEQ ID NO: 2340130 - RNA, 16 nt, Human
ggcauccuucugccuu

SEQ ID NO: 2340131 - RNA, 20 nt, Human
ggcaucgcaauguaagacuc

SEQ ID NO: 2340132 - RNA, 18 nt, Human
ggcaucgcaccauucuga

SEQ ID NO: 2340133 - RNA, 21 nt, Human
ggcaucgcaccauucugacuc

SEQ ID NO: 2340134 - RNA, 18 nt, Human
ggccagacaugccacaag

SEQ ID NO: 2340135 - RNA, 13 nt, Human
ggccaaggagcug

SEQ ID NO: 2340136 - RNA, 17 nt, Human
ggccagagacacaagcc

SEQ ID NO: 2340137 - RNA, 17 nt, Human
ggccaaggacugccgac

SEQ ID NO: 2340138 - RNA, 15 nt, Human
ggccaaggacugccg

SEQ ID NO: 2340139 - RNA, 13 nt, Human
ggccaaggacugc

SEQ ID NO: 2340140 - RNA, 11 nt, Human
ggccaaggacu

SEQ ID NO: 2340141 - RNA, 14 nt, Human
ggccaagcagggag

SEQ ID NO: 2340142 - RNA, 17 nt, Human
ggccagagggagugaca

SEQ ID NO: 2340143 - RNA, 19 nt, Human
ggccagagggagugacaga

SEQ ID NO: 2340144 - RNA, 21 nt, Human
ggccagagagccuggugcugc

SEQ ID NO: 2340145 - RNA, 18 nt, Human
ggccagagagccuggugc

SEQ ID NO: 2340146 - RNA, 19 nt, Human
ggccagaggcccccagccc

SEQ ID NO: 2340147 - RNA, 21 nt, Human
ggccagaggcccccagcccag

SEQ ID NO: 2340148 - RNA, 18 nt, Human
ggccagagacacaagccu

SEQ ID NO: 2340149 - RNA, 23 nt, Human
ggccaacccuucuccucuuguaa

SEQ ID NO: 2340150 - RNA, 19 nt, Human
ggccaaaggaagcacaugc

SEQ ID NO: 2340151 - RNA, 13 nt, Human
ggccaagaggcug

SEQ ID NO: 2340152 - RNA, 15 nt, Human
ggccaagacuuggca

SEQ ID NO: 2340153 - RNA, 23 nt, Human
ggccaagacuuggcaacagaagc

SEQ ID NO: 2340154 - RNA, 21 nt, Human
ggccaacuugagggcccagag

SEQ ID NO: 2340155 - RNA, 22 nt, Human
ggccaacuugagggcccagagc

SEQ ID NO: 2340156 - RNA, 23 nt, Human
ggccaacuugagggcccagagca

SEQ ID NO: 2340157 - RNA, 13 nt, Human
ggccaaaggaagc

SEQ ID NO: 2340158 - RNA, 17 nt, Human
ggcauuuguuugaacug

SEQ ID NO: 2340159 - RNA, 14 nt, Human
ggccaaaggaagca

SEQ ID NO: 2340160 - RNA, 16 nt, Human
ggccaaaggaagcaca

SEQ ID NO: 2340161 - RNA, 13 nt, Human
ggcaggggugggg

SEQ ID NO: 2340162 - RNA, 14 nt, Human
ggcagggguggggg

SEQ ID NO: 2340163 - RNA, 16 nt, Human
ggcaggggugggggug

SEQ ID NO: 2340164 - RNA, 12 nt, Human
ggcaggggcgga

SEQ ID NO: 2340165 - RNA, 14 nt, Human
ggcaggggccugga

SEQ ID NO: 2340166 - RNA, 16 nt, Human
ggcaggggccuggaga

SEQ ID NO: 2340167 - RNA, 17 nt, Human
ggcaggggccuggagau

SEQ ID NO: 2340168 - RNA, 18 nt, Human
ggcagggccaacccuucu

SEQ ID NO: 2340169 - RNA, 15 nt, Human
ggcagggcaucuccu

SEQ ID NO: 2340170 - RNA, 17 nt, Human
ggcagggccagggggug

SEQ ID NO: 2340171 - RNA, 16 nt, Human
ggcagggccccaggca

SEQ ID NO: 2340172 - RNA, 19 nt, Human
ggcagggccuagcugcuac

SEQ ID NO: 2340173 - RNA, 22 nt, Human
ggcagggagcggccggccagcc

SEQ ID NO: 2340174 - RNA, 10 nt, Human
ggcagggagg

SEQ ID NO: 2340175 - RNA, 18 nt, Human
ggcagggagggccugggc

SEQ ID NO: 2340176 - RNA, 17 nt, Human
ggcagggagggccuggg

SEQ ID NO: 2340177 - RNA, 13 nt, Human
ggcagggagggga

SEQ ID NO: 2340178 - RNA, 15 nt, Human
ggcagggauuugagg

SEQ ID NO: 2340179 - RNA, 20 nt, Human
ggcagggagggccugggccc

SEQ ID NO: 2340180 - RNA, 19 nt, Human
ggcagggagggccugggcc

SEQ ID NO: 2340181 - RNA, 23 nt, Human
ggcagggaaggggaggcagccgg

SEQ ID NO: 2340182 - RNA, 14 nt, Human
ggcagggaccacac

SEQ ID NO: 2340183 - RNA, 18 nt, Human
ggcagggaaaggcucuga

SEQ ID NO: 2340184 - RNA, 22 nt, Human
ggcaggcugucuggccaggccu

SEQ ID NO: 2340185 - RNA, 15 nt, Human
ggcaggaugacccug

SEQ ID NO: 2340186 - RNA, 14 nt, Human
ggcaggagggcccu

SEQ ID NO: 2340187 - RNA, 16 nt, Human
ggcaggcacagcacag

SEQ ID NO: 2340188 - RNA, 13 nt, Human
ggcaggcacagca

SEQ ID NO: 2340189 - RNA, 19 nt, Human
ggcaggauggccuggccag

SEQ ID NO: 2340190 - RNA, 15 nt, Human
ggcaggauggccugg

SEQ ID NO: 2340191 - RNA, 16 nt, Human
ggcaggauggccuggc

SEQ ID NO: 2340192 - RNA, 24 nt, Human
ggcaggaggauugcuugagcccag

SEQ ID NO: 2340193 - RNA, 14 nt, Human
ggcagcgccaggcu

SEQ ID NO: 2340194 - RNA, 18 nt, Human
ggcagcgccaagcaaccu

SEQ ID NO: 2340195 - RNA, 23 nt, Human
ggcagcgccaagcaaccuggguc

SEQ ID NO: 2340196 - RNA, 18 nt, Human
ggcaggaggaucacuuga

SEQ ID NO: 2340197 - RNA, 15 nt, Human
ggcagcgccaagcaa

SEQ ID NO: 2340198 - RNA, 20 nt, Human
ggcagccuggacauagagag

SEQ ID NO: 2340199 - RNA, 19 nt, Human
ggcagcauagcaagacaca

SEQ ID NO: 2340200 - RNA, 17 nt, Human
ggcagcauagcaagaca

SEQ ID NO: 2340201 - RNA, 18 nt, Human
ggcagccaaacccaugag

SEQ ID NO: 2340202 - RNA, 16 nt, Human
ggcagccaaacccaug

SEQ ID NO: 2340203 - RNA, 20 nt, Human
ggcagccaaacccaugaggc

SEQ ID NO: 2340204 - RNA, 19 nt, Human
ggcagccaaacccaugagg

SEQ ID NO: 2340205 - RNA, 22 nt, Human
ggcagcagugugaggccagggc

SEQ ID NO: 2340206 - RNA, 14 nt, Human
ggcacugcugugcu

SEQ ID NO: 2340207 - RNA, 16 nt, Human
ggcacugcugugcugu

SEQ ID NO: 2340208 - RNA, 20 nt, Human
ggcacugcuuccagugaggc

SEQ ID NO: 2340209 - RNA, 13 nt, Human
ggcagccaggcca

SEQ ID NO: 2340210 - RNA, 22 nt, Human
ggcagccccauucugccugccc

SEQ ID NO: 2340211 - RNA, 11 nt, Human
ggcagccugga

SEQ ID NO: 2340212 - RNA, 16 nt, Human
ggcagccucuucaaaa

SEQ ID NO: 2340213 - RNA, 16 nt, Human
ggcagccccauucugc

SEQ ID NO: 2340214 - RNA, 20 nt, Human
ggcagccccauucugccugc

SEQ ID NO: 2340215 - RNA, 21 nt, Human
ggcagccccauucugccugcc

SEQ ID NO: 2340216 - RNA, 12 nt, Human
ggcacacgccuc

SEQ ID NO: 2340217 - RNA, 15 nt, Human
ggcacacgccuccca

SEQ ID NO: 2340218 - RNA, 17 nt, Human
ggcacacgccucccacu

SEQ ID NO: 2340219 - RNA, 18 nt, Human
ggcacacgccucccacug

SEQ ID NO: 2340220 - RNA, 19 nt, Human
ggcacacgccucccacugg

SEQ ID NO: 2340221 - RNA, 14 nt, Human
ggcacauggaggag

SEQ ID NO: 2340222 - RNA, 18 nt, Human
ggcacauccuaugcaaua

SEQ ID NO: 2340223 - RNA, 21 nt, Human
ggcacauccuaugcaauauau

SEQ ID NO: 2340224 - RNA, 18 nt, Human
ggcacaucagcacgauuu

SEQ ID NO: 2340225 - RNA, 20 nt, Human
ggcacauuuccccagaccug

SEQ ID NO: 2340226 - RNA, 16 nt, Human
ggcacauuuccccaga

SEQ ID NO: 2340227 - RNA, 19 nt, Human
ggcacaugcugagucuccc

SEQ ID NO: 2340228 - RNA, 18 nt, Human
ggcacauuuaagagacag

SEQ ID NO: 2340229 - RNA, 22 nt, Human
ggcaccacugcacuccagccug

SEQ ID NO: 2340230 - RNA, 16 nt, Human
ggcaccaaagccacca

SEQ ID NO: 2340231 - RNA, 21 nt, Human
ggcacauuuccccagaccuga

SEQ ID NO: 2340232 - RNA, 16 nt, Human
ggcacugcuuccagug

SEQ ID NO: 2340233 - RNA, 12 nt, Human
ggcacugcuggg

SEQ ID NO: 2340234 - RNA, 14 nt, Human
ggcacugcugggug

SEQ ID NO: 2340235 - RNA, 15 nt, Human
ggcacugcugggugg

SEQ ID NO: 2340236 - RNA, 16 nt, Human
ggcacugcuggguggc

SEQ ID NO: 2340237 - RNA, 19 nt, Human
ggcacugcuggguggccca

SEQ ID NO: 2340238 - RNA, 20 nt, Human
ggcacugcuggguggcccau

SEQ ID NO: 2340239 - RNA, 21 nt, Human
ggcacugcuggguggcccauc

SEQ ID NO: 2340240 - RNA, 22 nt, Human
ggcacugcuggguggcccaucc

SEQ ID NO: 2340241 - RNA, 18 nt, Human
ggcacaccgggcacucag

SEQ ID NO: 2340242 - RNA, 13 nt, Human
ggcacacacugug

SEQ ID NO: 2340243 - RNA, 21 nt, Human
ggcacacacugugcuuucuau

SEQ ID NO: 2340244 - RNA, 14 nt, Human
ggauuuuugucuug

SEQ ID NO: 2340245 - RNA, 16 nt, Human
ggauuuuugucuugug

SEQ ID NO: 2340246 - RNA, 15 nt, Human
ggcaaaaaggcagga

SEQ ID NO: 2340247 - RNA, 13 nt, Human
ggauuucucccag

SEQ ID NO: 2340248 - RNA, 13 nt, Human
ggauuugaagcaa

SEQ ID NO: 2340249 - RNA, 21 nt, Human
ggauuugaggagcagcuucag

SEQ ID NO: 2340250 - RNA, 23 nt, Human
ggauuuccugcuuugggaagccg

SEQ ID NO: 2340251 - RNA, 19 nt, Human
ggauuuccagccagggcug

SEQ ID NO: 2340252 - RNA, 14 nt, Human
ggauuucguggguc

SEQ ID NO: 2340253 - RNA, 20 nt, Human
ggauuucaugauuucauuuc

SEQ ID NO: 2340254 - RNA, 14 nt, Human
ggauuuauuuuucc

SEQ ID NO: 2340255 - RNA, 16 nt, Human
ggauuuauaaaugcua

SEQ ID NO: 2340256 - RNA, 18 nt, Human
ggauuuauaaaugcuauu

SEQ ID NO: 2340257 - RNA, 15 nt, Human
ggcaaaaaaauuaaa

SEQ ID NO: 2340258 - RNA, 12 nt, Human
ggcaaaacucua

SEQ ID NO: 2340259 - RNA, 23 nt, Human
ggcaaaaggaucuuuguggccaa

SEQ ID NO: 2340260 - RNA, 18 nt, Human
ggcaaaacuuuggcacug

SEQ ID NO: 2340261 - RNA, 15 nt, Human
ggaguggccacagaa

SEQ ID NO: 2340262 - RNA, 15 nt, Human
ggaguggggcaguag

SEQ ID NO: 2340263 - RNA, 18 nt, Human
ggagugggacagagucug

SEQ ID NO: 2340264 - RNA, 12 nt, Human
ggagugggacag

SEQ ID NO: 2340265 - RNA, 22 nt, Human
ggagugggcccaaugcacuuug

SEQ ID NO: 2340266 - RNA, 16 nt, Human
ggaguggccacagaaa

SEQ ID NO: 2340267 - RNA, 12 nt, Human
ggagugggccca

SEQ ID NO: 2340268 - RNA, 20 nt, Human
ggaguguaugacugcacaug

SEQ ID NO: 2340269 - RNA, 17 nt, Human
ggagugggacagagucu

SEQ ID NO: 2340270 - RNA, 16 nt, Human
ggaguggggcaguaga

SEQ ID NO: 2340271 - RNA, 17 nt, Human
ggaguguguauuguucc

SEQ ID NO: 2340272 - RNA, 16 nt, Human
ggaguguguauuguuc

SEQ ID NO: 2340273 - RNA, 22 nt, Human
ggaguguggcugaggaggccuc

SEQ ID NO: 2340274 - RNA, 22 nt, Human
ggaguguguaauuuaaaauugu

SEQ ID NO: 2340275 - RNA, 11 nt, Human
ggaguguguaa

SEQ ID NO: 2340276 - RNA, 19 nt, Human
ggaguguguauuguuccca

SEQ ID NO: 2340277 - RNA, 18 nt, Human
ggaguguguauuguuccc

SEQ ID NO: 2340278 - RNA, 20 nt, Human
ggaguguuccccuuccacug

SEQ ID NO: 2340279 - RNA, 12 nt, Human
ggaguguucccc

SEQ ID NO: 2340280 - RNA, 15 nt, Human
ggaguuaagaccugg

SEQ ID NO: 2340281 - RNA, 18 nt, Human
ggaguuaagaccuggcag

SEQ ID NO: 2340282 - RNA, 16 nt, Human
ggaguuaagaccuggc

SEQ ID NO: 2340283 - RNA, 21 nt, Human
ggaguuagaggccagccuggc

SEQ ID NO: 2340284 - RNA, 19 nt, Human
ggaguuagaggccagccug

SEQ ID NO: 2340285 - RNA, 18 nt, Human
ggaguuagaggccagccu

SEQ ID NO: 2340286 - RNA, 16 nt, Human
ggaguuagaggccagc

SEQ ID NO: 2340287 - RNA, 15 nt, Human
ggaguuagaggccag

SEQ ID NO: 2340288 - RNA, 22 nt, Human
ggaguuacauuaauguuaauuc

SEQ ID NO: 2340289 - RNA, 23 nt, Human
ggaguuaagaccuggcagcucug

SEQ ID NO: 2340290 - RNA, 12 nt, Human
ggaguucaauga

SEQ ID NO: 2340291 - RNA, 13 nt, Human
ggaguucaaugau

SEQ ID NO: 2340292 - RNA, 12 nt, Human
ggaguuaucuaa

SEQ ID NO: 2340293 - RNA, 24 nt, Human
ggaucucauuggacccuuccaugg

SEQ ID NO: 2340294 - RNA, 17 nt, Human
ggaucucauuggacccu

SEQ ID NO: 2340295 - RNA, 10 nt, Human
ggaucucagg

SEQ ID NO: 2340296 - RNA, 18 nt, Human
ggaucuaccagcauaaau

SEQ ID NO: 2340297 - RNA, 13 nt, Human
ggaucuaccagca

SEQ ID NO: 2340298 - RNA, 12 nt, Human
ggaucuaccagc

SEQ ID NO: 2340299 - RNA, 23 nt, Human
ggaucggaggcuugucagagcug

SEQ ID NO: 2340300 - RNA, 19 nt, Human
ggaucggaggcuugucaga

SEQ ID NO: 2340301 - RNA, 18 nt, Human
ggaguucgagaccagccu

SEQ ID NO: 2340302 - RNA, 14 nt, Human
ggaguuccaugaag

SEQ ID NO: 2340303 - RNA, 15 nt, Human
ggaguuccaugaaga

SEQ ID NO: 2340304 - RNA, 19 nt, Human
ggaguuccaugaagaccac

SEQ ID NO: 2340305 - RNA, 21 nt, Human
ggaucucucaggagcacaggc

SEQ ID NO: 2340306 - RNA, 22 nt, Human
ggaucucucaggagcacaggca

SEQ ID NO: 2340307 - RNA, 21 nt, Human
ggaucuuuggacagaagcagc

SEQ ID NO: 2340308 - RNA, 16 nt, Human
ggaucuugcauuccca

SEQ ID NO: 2340309 - RNA, 14 nt, Human
ggaucuccccacuc

SEQ ID NO: 2340310 - RNA, 16 nt, Human
ggaucucucaggagca

SEQ ID NO: 2340311 - RNA, 13 nt, Human
ggaucucucagga

SEQ ID NO: 2340312 - RNA, 13 nt, Human
ggaucucaggggc

SEQ ID NO: 2340313 - RNA, 13 nt, Human
ggaucuccaagga

SEQ ID NO: 2340314 - RNA, 14 nt, Human
ggaucuccaaggac

SEQ ID NO: 2340315 - RNA, 21 nt, Human
ggaucuccaaggaccagguua

SEQ ID NO: 2340316 - RNA, 18 nt, Human
ggaucucuugagccuggg

SEQ ID NO: 2340317 - RNA, 20 nt, Human
ggaguucaaugaucuagguu

SEQ ID NO: 2340318 - RNA, 20 nt, Human
ggaguucaguggugugaucu

SEQ ID NO: 2340319 - RNA, 14 nt, Human
ggaguucaaugauc

SEQ ID NO: 2340320 - RNA, 15 nt, Human
ggaguucaaugaucu

SEQ ID NO: 2340321 - RNA, 16 nt, Human
ggaguucaaugaucua

SEQ ID NO: 2340322 - RNA, 17 nt, Human
ggaguucaaugaucuag

SEQ ID NO: 2340323 - RNA, 16 nt, Human
ggaguucaucuugaau

SEQ ID NO: 2340324 - RNA, 15 nt, Human
ggauccugagccaga

SEQ ID NO: 2340325 - RNA, 16 nt, Human
ggauccugagccagau

SEQ ID NO: 2340326 - RNA, 18 nt, Human
ggauccugagccagauuu

SEQ ID NO: 2340327 - RNA, 19 nt, Human
ggauccugagccagauuuc

SEQ ID NO: 2340328 - RNA, 20 nt, Human
ggauccugagccagauuuca

SEQ ID NO: 2340329 - RNA, 23 nt, Human
ggauccugagccagauuucacuc

SEQ ID NO: 2340330 - RNA, 15 nt, Human
ggaucuuuguggcca

SEQ ID NO: 2340331 - RNA, 17 nt, Human
ggaucuugcauucccag

SEQ ID NO: 2340332 - RNA, 22 nt, Human
ggaucuugcauucccagugguc

SEQ ID NO: 2340333 - RNA, 22 nt, Human
ggaucuuuggacagaagcagcu

SEQ ID NO: 2340334 - RNA, 14 nt, Human
ggaugaaaaaauaa

SEQ ID NO: 2340335 - RNA, 23 nt, Human
ggaugggggaacucagauccagg

SEQ ID NO: 2340336 - RNA, 20 nt, Human
ggaugggggaaauggugccu

SEQ ID NO: 2340337 - RNA, 22 nt, Human
ggaugggggcuggccucuggcu

SEQ ID NO: 2340338 - RNA, 22 nt, Human
ggaugggggaacucagauccag

SEQ ID NO: 2340339 - RNA, 21 nt, Human
ggaugggggaacucagaucca

SEQ ID NO: 2340340 - RNA, 17 nt, Human
ggaucuuuguggccaag

SEQ ID NO: 2340341 - RNA, 16 nt, Human
ggaucuuuguggccaa

SEQ ID NO: 2340342 - RNA, 18 nt, Human
ggaugaaauaacuccuuc

SEQ ID NO: 2340343 - RNA, 17 nt, Human
ggaugaaauuuucuaga

SEQ ID NO: 2340344 - RNA, 17 nt, Human
ggaugggggaacucaga

SEQ ID NO: 2340345 - RNA, 15 nt, Human
ggaugggggaacuca

SEQ ID NO: 2340346 - RNA, 16 nt, Human
ggaugguccuggggcu

SEQ ID NO: 2340347 - RNA, 14 nt, Human
ggaugguccugggg

SEQ ID NO: 2340348 - RNA, 23 nt, Human
ggaugguacuagggggaagugac

SEQ ID NO: 2340349 - RNA, 22 nt, Human
ggaugguccuggggcucugugc

SEQ ID NO: 2340350 - RNA, 20 nt, Human
ggaugguccuggggcucugu

SEQ ID NO: 2340351 - RNA, 13 nt, Human
ggauggugcccug

SEQ ID NO: 2340352 - RNA, 14 nt, Human
ggauuguaguccca

SEQ ID NO: 2340353 - RNA, 13 nt, Human
ggauuguccccga

SEQ ID NO: 2340354 - RNA, 15 nt, Human
ggauuguuccuguca

SEQ ID NO: 2340355 - RNA, 12 nt, Human
ggauuuaacaga

SEQ ID NO: 2340356 - RNA, 16 nt, Human
ggauuguccccgaccc

SEQ ID NO: 2340357 - RNA, 20 nt, Human
ggauuguccccgacccuugc

SEQ ID NO: 2340358 - RNA, 17 nt, Human
ggauuuaacagaaaugu

SEQ ID NO: 2340359 - RNA, 16 nt, Human
ggauuuaacagaaaug

SEQ ID NO: 2340360 - RNA, 22 nt, Human
ggauuuaacagaaauguacagc

SEQ ID NO: 2340361 - RNA, 21 nt, Human
ggauuuaacagucauuuaaaa

SEQ ID NO: 2340362 - RNA, 16 nt, Human
ggauuuaauuugauau

SEQ ID NO: 2340363 - RNA, 22 nt, Human
ggaggcuugucagagcugggag

SEQ ID NO: 2340364 - RNA, 20 nt, Human
ggaggcuugucagagcuggg

SEQ ID NO: 2340365 - RNA, 19 nt, Human
ggaggcuugucagagcugg

SEQ ID NO: 2340366 - RNA, 18 nt, Human
ggaggcuugucagagcug

SEQ ID NO: 2340367 - RNA, 17 nt, Human
ggaggcuugucagagcu

SEQ ID NO: 2340368 - RNA, 16 nt, Human
ggaggcuugucagagc

SEQ ID NO: 2340369 - RNA, 16 nt, Human
ggaggcuugggaccgc

SEQ ID NO: 2340370 - RNA, 15 nt, Human
ggaggcuuccugcgu

SEQ ID NO: 2340371 - RNA, 15 nt, Human
ggaggcuggcugggg

SEQ ID NO: 2340372 - RNA, 16 nt, Human
ggaggcuggcuggggc

SEQ ID NO: 2340373 - RNA, 13 nt, Human
ggaggcuggcagg

SEQ ID NO: 2340374 - RNA, 22 nt, Human
ggaggcugcccccggcccccug

SEQ ID NO: 2340375 - RNA, 12 nt, Human
ggaggcugcccc

SEQ ID NO: 2340376 - RNA, 13 nt, Human
ggaggcugccccc

SEQ ID NO: 2340377 - RNA, 17 nt, Human
ggaggcugcccccggcc

SEQ ID NO: 2340378 - RNA, 21 nt, Human
ggaggcugcccccggcccccu

SEQ ID NO: 2340379 - RNA, 14 nt, Human
ggagggucaggaag

SEQ ID NO: 2340380 - RNA, 18 nt, Human
ggagggggcuugaagcca

SEQ ID NO: 2340381 - RNA, 21 nt, Human
ggagggggcuugaagccaaag

SEQ ID NO: 2340382 - RNA, 12 nt, Human
ggaggggggagc

SEQ ID NO: 2340383 - RNA, 15 nt, Human
ggaggggggagccau

SEQ ID NO: 2340384 - RNA, 14 nt, Human
ggaggggggaggug

SEQ ID NO: 2340385 - RNA, 16 nt, Human
ggagggggcuugaagc

SEQ ID NO: 2340386 - RNA, 14 nt, Human
ggagggggauccga

SEQ ID NO: 2340387 - RNA, 13 nt, Human
ggaggggggaggu

SEQ ID NO: 2340388 - RNA, 20 nt, Human
ggaggcuaaagcccagagac

SEQ ID NO: 2340389 - RNA, 20 nt, Human
ggaggcggagaguacaguga

SEQ ID NO: 2340390 - RNA, 21 nt, Human
ggaggcucacccccuucucca

SEQ ID NO: 2340391 - RNA, 20 nt, Human
ggaggcggagcuugcaguga

SEQ ID NO: 2340392 - RNA, 20 nt, Human
ggaggcggauguugaaguga

SEQ ID NO: 2340393 - RNA, 19 nt, Human
ggaggcggacguuccagcc

SEQ ID NO: 2340394 - RNA, 22 nt, Human
ggaggcggacguuccagccggc

SEQ ID NO: 2340395 - RNA, 12 nt, Human
ggaggcggagag

SEQ ID NO: 2340396 - RNA, 10 nt, Human
ggaggcugcc

SEQ ID NO: 2340397 - RNA, 15 nt, Human
ggaggcucagguccc

SEQ ID NO: 2340398 - RNA, 15 nt, Human
ggaggcuccagaggg

SEQ ID NO: 2340399 - RNA, 18 nt, Human
ggaggcuccagagggcac

SEQ ID NO: 2340400 - RNA, 16 nt, Human
ggaggcuccagagggc

SEQ ID NO: 2340401 - RNA, 14 nt, Human
ggaggugucaggcu

SEQ ID NO: 2340402 - RNA, 15 nt, Human
ggaggugucaggcug

SEQ ID NO: 2340403 - RNA, 16 nt, Human
ggaggugucaggcugc

SEQ ID NO: 2340404 - RNA, 13 nt, Human
ggagguggcuggg

SEQ ID NO: 2340405 - RNA, 18 nt, Human
ggagguggcuauggccac

SEQ ID NO: 2340406 - RNA, 17 nt, Human
ggagguggggaugagaa

SEQ ID NO: 2340407 - RNA, 16 nt, Human
ggaggugggagcagga

SEQ ID NO: 2340408 - RNA, 19 nt, Human
ggaggugggagcaggagau

SEQ ID NO: 2340409 - RNA, 22 nt, Human
ggaggugggauccuccaggugc

SEQ ID NO: 2340410 - RNA, 23 nt, Human
ggaggugggauccuccaggugca

SEQ ID NO: 2340411 - RNA, 16 nt, Human
ggagggucaggaagga

SEQ ID NO: 2340412 - RNA, 15 nt, Human
ggagggucaggaagg

SEQ ID NO: 2340413 - RNA, 14 nt, Human
ggagggucccaagc

SEQ ID NO: 2340414 - RNA, 20 nt, Human
ggagggucccaagcugggcc

SEQ ID NO: 2340415 - RNA, 15 nt, Human
ggaggguggcaggug

SEQ ID NO: 2340416 - RNA, 21 nt, Human
ggagggucccaagcugggccc

SEQ ID NO: 2340417 - RNA, 21 nt, Human
ggagggugacgggggugaacu

SEQ ID NO: 2340418 - RNA, 17 nt, Human
ggagguggcagcccugu

SEQ ID NO: 2340419 - RNA, 15 nt, Human
ggagguggcagcccu

SEQ ID NO: 2340420 - RNA, 19 nt, Human
ggagggugggagagcccag

SEQ ID NO: 2340421 - RNA, 22 nt, Human
ggagguaaggaauaccuguccc

SEQ ID NO: 2340422 - RNA, 17 nt, Human
ggccucccacagacuca

SEQ ID NO: 2340423 - RNA, 11 nt, Human
ggccucccaca

SEQ ID NO: 2340424 - RNA, 13 nt, Human
ggccucccacagu

SEQ ID NO: 2340425 - RNA, 14 nt, Human
ggccucccacagug

SEQ ID NO: 2340426 - RNA, 15 nt, Human
ggccucccacaguga

SEQ ID NO: 2340427 - RNA, 11 nt, Human
ggccucccacc

SEQ ID NO: 2340428 - RNA, 12 nt, Human
ggccucccaccc

SEQ ID NO: 2340429 - RNA, 13 nt, Human
ggccucccacccg

SEQ ID NO: 2340430 - RNA, 16 nt, Human
ggccucccacagacuc

SEQ ID NO: 2340431 - RNA, 14 nt, Human
ggccucccacagac

SEQ ID NO: 2340432 - RNA, 22 nt, Human
ggccucaguggacuuuccaccc

SEQ ID NO: 2340433 - RNA, 20 nt, Human
ggccucaguggacuuuccac

SEQ ID NO: 2340434 - RNA, 14 nt, Human
ggccucauguggcu

SEQ ID NO: 2340435 - RNA, 23 nt, Human
ggccucccaacucaccccagccc

SEQ ID NO: 2340436 - RNA, 20 nt, Human
ggccucccaacucaccccag

SEQ ID NO: 2340437 - RNA, 22 nt, Human
ggccucccaacucaccccagcc

SEQ ID NO: 2340438 - RNA, 13 nt, Human
ggccucagugcca

SEQ ID NO: 2340439 - RNA, 17 nt, Human
ggccucccaacucaccc

SEQ ID NO: 2340440 - RNA, 18 nt, Human
ggccucccaacucacccc

SEQ ID NO: 2340441 - RNA, 19 nt, Human
ggccucccaacucacccca

SEQ ID NO: 2340442 - RNA, 16 nt, Human
ggccucagcugccuca

SEQ ID NO: 2340443 - RNA, 15 nt, Human
ggccucagcugccuc

SEQ ID NO: 2340444 - RNA, 13 nt, Human
ggccucagcugcc

SEQ ID NO: 2340445 - RNA, 16 nt, Human
ggccgcuagaugggca

SEQ ID NO: 2340446 - RNA, 19 nt, Human
ggccgcuagaugggcaugg

SEQ ID NO: 2340447 - RNA, 13 nt, Human
ggccgcuagaggc

SEQ ID NO: 2340448 - RNA, 14 nt, Human
ggccgcuagaggcc

SEQ ID NO: 2340449 - RNA, 15 nt, Human
ggccgcuagaggccu

SEQ ID NO: 2340450 - RNA, 17 nt, Human
ggccgcuagaggccuga

SEQ ID NO: 2340451 - RNA, 18 nt, Human
ggccgcuagaggccugag

SEQ ID NO: 2340452 - RNA, 19 nt, Human
ggccgcuagaggccugagg

SEQ ID NO: 2340453 - RNA, 20 nt, Human
ggccgcuagaggccugagga

SEQ ID NO: 2340454 - RNA, 21 nt, Human
ggccgcuagaggccugaggau

SEQ ID NO: 2340455 - RNA, 22 nt, Human
ggccucagcugccucacuuccu

SEQ ID NO: 2340456 - RNA, 17 nt, Human
ggccucagcugccucac

SEQ ID NO: 2340457 - RNA, 17 nt, Human
ggccucagguuugccug

SEQ ID NO: 2340458 - RNA, 11 nt, Human
ggccucagucu

SEQ ID NO: 2340459 - RNA, 20 nt, Human
ggccucagucucccuucucc

SEQ ID NO: 2340460 - RNA, 22 nt, Human
ggcccucaccccugcccuggga

SEQ ID NO: 2340461 - RNA, 21 nt, Human
ggcccucaccccugcccuggg

SEQ ID NO: 2340462 - RNA, 20 nt, Human
ggcccucaccccugcccugg

SEQ ID NO: 2340463 - RNA, 18 nt, Human
ggcccucaccccugcccu

SEQ ID NO: 2340464 - RNA, 15 nt, Human
ggcccucaccccugc

SEQ ID NO: 2340465 - RNA, 20 nt, Human
ggcccucaaggccucccaca

SEQ ID NO: 2340466 - RNA, 23 nt, Human
ggcccucaaggccucccacagug

SEQ ID NO: 2340467 - RNA, 16 nt, Human
ggccgcccccugcccc

SEQ ID NO: 2340468 - RNA, 18 nt, Human
ggccgcccccugcccccc

SEQ ID NO: 2340469 - RNA, 19 nt, Human
ggccgcccccugcccccca

SEQ ID NO: 2340470 - RNA, 22 nt, Human
ggccgcccccugccccccagcc

SEQ ID NO: 2340471 - RNA, 12 nt, Human
ggccgccucacc

SEQ ID NO: 2340472 - RNA, 13 nt, Human
ggccgccucaccc

SEQ ID NO: 2340473 - RNA, 14 nt, Human
ggccgccgccucuu

SEQ ID NO: 2340474 - RNA, 14 nt, Human
ggccgccucacccc

SEQ ID NO: 2340475 - RNA, 22 nt, Human
ggccgcgccaaauaaugucucu

SEQ ID NO: 2340476 - RNA, 18 nt, Human
ggccccagccuggcccag

SEQ ID NO: 2340477 - RNA, 13 nt, Human
ggcccgugacaga

SEQ ID NO: 2340478 - RNA, 16 nt, Human
ggccccagccuggccc

SEQ ID NO: 2340479 - RNA, 17 nt, Human
ggccccagccuggccca

SEQ ID NO: 2340480 - RNA, 16 nt, Human
ggcccguugaggauga

SEQ ID NO: 2340481 - RNA, 20 nt, Human
ggcccguugaggaugaggcc

SEQ ID NO: 2340482 - RNA, 22 nt, Human
ggcccguugaggaugaggccgc

SEQ ID NO: 2340483 - RNA, 17 nt, Human
ggcccguugucucccug

SEQ ID NO: 2340484 - RNA, 15 nt, Human
ggcccgucauguucc

SEQ ID NO: 2340485 - RNA, 21 nt, Human
ggccccugccucucugcaggu

SEQ ID NO: 2340486 - RNA, 16 nt, Human
ggcccuaccagcgccc

SEQ ID NO: 2340487 - RNA, 21 nt, Human
ggcccuaccagcgcccgcugg

SEQ ID NO: 2340488 - RNA, 22 nt, Human
ggcccuaccagcgcccgcuggg

SEQ ID NO: 2340489 - RNA, 16 nt, Human
ggcccucaaggccucc

SEQ ID NO: 2340490 - RNA, 18 nt, Human
ggcccucaaggccuccca

SEQ ID NO: 2340491 - RNA, 19 nt, Human
ggcccucaaggccucccac

SEQ ID NO: 2340492 - RNA, 18 nt, Human
ggcccguugucucccugg

SEQ ID NO: 2340493 - RNA, 19 nt, Human
ggcccguugucucccuggc

SEQ ID NO: 2340494 - RNA, 20 nt, Human
ggcccguugucucccuggcc

SEQ ID NO: 2340495 - RNA, 21 nt, Human
ggcccguugucucccuggccc

SEQ ID NO: 2340496 - RNA, 22 nt, Human
ggcccguugucucccuggcccu

SEQ ID NO: 2340497 - RNA, 23 nt, Human
ggcccguugucucccuggcccuc

SEQ ID NO: 2340498 - RNA, 24 nt, Human
ggcccguugucucccuggcccuca

SEQ ID NO: 2340499 - RNA, 13 nt, Human
ggccccugccucu

SEQ ID NO: 2340500 - RNA, 12 nt, Human
ggccccagccug

SEQ ID NO: 2340501 - RNA, 13 nt, Human
ggccccagccugg

SEQ ID NO: 2340502 - RNA, 14 nt, Human
ggccccagccuggc

SEQ ID NO: 2340503 - RNA, 15 nt, Human
ggccccagccuggcc

SEQ ID NO: 2340504 - RNA, 17 nt, Human
ggccccugccucucugc

SEQ ID NO: 2340505 - RNA, 18 nt, Human
ggccccugccucucugca

SEQ ID NO: 2340506 - RNA, 19 nt, Human
ggccccugccucucugcag

SEQ ID NO: 2340507 - RNA, 21 nt, Human
ggccccagcacuaaagcagug

SEQ ID NO: 2340508 - RNA, 11 nt, Human
ggccccagcca

SEQ ID NO: 2340509 - RNA, 16 nt, Human
ggccccagcacuaaag

SEQ ID NO: 2340510 - RNA, 13 nt, Human
ggccccagcacua

SEQ ID NO: 2340511 - RNA, 18 nt, Human
ggccccagcacagcuuga

SEQ ID NO: 2340512 - RNA, 13 nt, Human
ggccccagccucc

SEQ ID NO: 2340513 - RNA, 19 nt, Human
ggccccagcccacccuccu

SEQ ID NO: 2340514 - RNA, 11 nt, Human
ggccccagccu

SEQ ID NO: 2340515 - RNA, 23 nt, Human
ggccccagcccacccuccugucu

SEQ ID NO: 2340516 - RNA, 12 nt, Human
ggccccagccag

SEQ ID NO: 2340517 - RNA, 13 nt, Human
ggccccagccaga

SEQ ID NO: 2340518 - RNA, 21 nt, Human
ggccccagccagaguuccugc

SEQ ID NO: 2340519 - RNA, 12 nt, Human
ggccccagccca

SEQ ID NO: 2340520 - RNA, 13 nt, Human
ggccccagcccac

SEQ ID NO: 2340521 - RNA, 14 nt, Human
ggccccagcccacc

SEQ ID NO: 2340522 - RNA, 15 nt, Human
ggccccagcccaccc

SEQ ID NO: 2340523 - RNA, 16 nt, Human
ggccccagcccacccu

SEQ ID NO: 2340524 - RNA, 18 nt, Human
ggccagauccagccuggg

SEQ ID NO: 2340525 - RNA, 17 nt, Human
ggccagauccagccugg

SEQ ID NO: 2340526 - RNA, 22 nt, Human
ggccagagggagugacagaggc

SEQ ID NO: 2340527 - RNA, 11 nt, Human
ggccagaggcu

SEQ ID NO: 2340528 - RNA, 22 nt, Human
ggccagaggcccccagcccagg

SEQ ID NO: 2340529 - RNA, 15 nt, Human
ggccagaugcaccag

SEQ ID NO: 2340530 - RNA, 16 nt, Human
ggccagaugcaccagc

SEQ ID NO: 2340531 - RNA, 21 nt, Human
ggcgaucgcggcggagcuggc

SEQ ID NO: 2340532 - RNA, 16 nt, Human
ggcgagugccaggacu

SEQ ID NO: 2340533 - RNA, 14 nt, Human
ggcgcaagccugua

SEQ ID NO: 2340534 - RNA, 21 nt, Human
ggcgucuguucccccuucaca

SEQ ID NO: 2340535 - RNA, 16 nt, Human
ggcgugagaccugccc

SEQ ID NO: 2340536 - RNA, 14 nt, Human
ggcgugagaccugc

SEQ ID NO: 2340537 - RNA, 15 nt, Human
ggcgugacucaccca

SEQ ID NO: 2340538 - RNA, 22 nt, Human
ggcgcaagccuguaaucccagc

SEQ ID NO: 2340539 - RNA, 15 nt, Human
ggcgugaggauggga

SEQ ID NO: 2340540 - RNA, 12 nt, Human
ggcgugaucucg

SEQ ID NO: 2340541 - RNA, 18 nt, Human
ggcgugagaccugccccu

SEQ ID NO: 2340542 - RNA, 17 nt, Human
ggcgugagaccugcccc

SEQ ID NO: 2340543 - RNA, 17 nt, Human
ggcgugacucacccaag

SEQ ID NO: 2340544 - RNA, 11 nt, Human
ggcguuucuuu

SEQ ID NO: 2340545 - RNA, 21 nt, Human
ggcuaaacauccaauauuuuc

SEQ ID NO: 2340546 - RNA, 15 nt, Human
ggcuaacuggaagca

SEQ ID NO: 2340547 - RNA, 19 nt, Human
ggcuaagagcuagcgcugc

SEQ ID NO: 2340548 - RNA, 17 nt, Human
ggcuaacuauauuugcu

SEQ ID NO: 2340549 - RNA, 20 nt, Human
ggcuaagcuucacuguaaaa

SEQ ID NO: 2340550 - RNA, 17 nt, Human
ggccuuccccagccucu

SEQ ID NO: 2340551 - RNA, 15 nt, Human
ggccuuccccagccu

SEQ ID NO: 2340552 - RNA, 16 nt, Human
ggccuucggccuccau

SEQ ID NO: 2340553 - RNA, 22 nt, Human
ggccuucggccuccauccugag

SEQ ID NO: 2340554 - RNA, 18 nt, Human
ggccuucggccuccaucc

SEQ ID NO: 2340555 - RNA, 22 nt, Human
ggcgauccaccugucucagccu

SEQ ID NO: 2340556 - RNA, 18 nt, Human
ggcgauccaccugucuca

SEQ ID NO: 2340557 - RNA, 17 nt, Human
ggcgauccaccugucuc

SEQ ID NO: 2340558 - RNA, 20 nt, Human
ggcgaucacaacgugcauug

SEQ ID NO: 2340559 - RNA, 16 nt, Human
ggcgagucacugccuc

SEQ ID NO: 2340560 - RNA, 21 nt, Human
ggcgaggggaggguggcaggu

SEQ ID NO: 2340561 - RNA, 19 nt, Human
ggcgaggcagaggacagau

SEQ ID NO: 2340562 - RNA, 15 nt, Human
ggcgagucacugccu

SEQ ID NO: 2340563 - RNA, 15 nt, Human
ggcgagugccaggac

SEQ ID NO: 2340564 - RNA, 18 nt, Human
ggcgaucacaacgugcau

SEQ ID NO: 2340565 - RNA, 16 nt, Human
ggccuuccccagccuc

SEQ ID NO: 2340566 - RNA, 13 nt, Human
ggccuuccugccc

SEQ ID NO: 2340567 - RNA, 14 nt, Human
ggccuuccugcccu

SEQ ID NO: 2340568 - RNA, 14 nt, Human
ggcgagaggagggg

SEQ ID NO: 2340569 - RNA, 15 nt, Human
ggcgagaggaggggc

SEQ ID NO: 2340570 - RNA, 21 nt, Human
ggcgagcccuguggaugagcc

SEQ ID NO: 2340571 - RNA, 11 nt, Human
ggcgaggcaga

SEQ ID NO: 2340572 - RNA, 12 nt, Human
ggcgaggcagag

SEQ ID NO: 2340573 - RNA, 13 nt, Human
ggcgaggcagagg

SEQ ID NO: 2340574 - RNA, 15 nt, Human
ggcgaggcagaggac

SEQ ID NO: 2340575 - RNA, 18 nt, Human
ggcuagaggccagcccca

SEQ ID NO: 2340576 - RNA, 14 nt, Human
ggcuagaaucugga

SEQ ID NO: 2340577 - RNA, 16 nt, Human
ggcuagaaucuggaga

SEQ ID NO: 2340578 - RNA, 16 nt, Human
ggcuagaggccagccc

SEQ ID NO: 2340579 - RNA, 20 nt, Human
ggcuagaggccagccccacc

SEQ ID NO: 2340580 - RNA, 22 nt, Human
ggcuagaaucuggagagcuaga

SEQ ID NO: 2340581 - RNA, 19 nt, Human
ggcucacuauggugccaau

SEQ ID NO: 2340582 - RNA, 16 nt, Human
ggcuagagguucaaag

SEQ ID NO: 2340583 - RNA, 18 nt, Human
ggcuacugcagcuuuaca

SEQ ID NO: 2340584 - RNA, 23 nt, Human
ggcuacugcagcuuuacaugcaa

SEQ ID NO: 2340585 - RNA, 21 nt, Human
ggcuagaaccaagaagggcua

SEQ ID NO: 2340586 - RNA, 21 nt, Human
ggcuagaaccuagaagggcua

SEQ ID NO: 2340587 - RNA, 16 nt, Human
ggcuagaaccuggaga

SEQ ID NO: 2340588 - RNA, 22 nt, Human
ggcuagaaccuggagagcuaga

SEQ ID NO: 2340589 - RNA, 16 nt, Human
ggcuagaaccuggagg

SEQ ID NO: 2340590 - RNA, 18 nt, Human
ggcuagaaccuggagggc

SEQ ID NO: 2340591 - RNA, 14 nt, Human
ggcuagaaccuggc

SEQ ID NO: 2340592 - RNA, 22 nt, Human
ggcuagaaccuguagagcuaga

SEQ ID NO: 2340593 - RNA, 15 nt, Human
ggcuagaacuggaga

SEQ ID NO: 2340594 - RNA, 18 nt, Human
ggcuagaauauccuacuu

SEQ ID NO: 2340595 - RNA, 13 nt, Human
ggcuagaaucugg

SEQ ID NO: 2340596 - RNA, 21 nt, Human
ggcuacucagcagcccuccuc

SEQ ID NO: 2340597 - RNA, 20 nt, Human
ggcuacucagcagcccuccu

SEQ ID NO: 2340598 - RNA, 18 nt, Human
ggcuacucagcagcccuc

SEQ ID NO: 2340599 - RNA, 17 nt, Human
ggcuacucagcagcccu

SEQ ID NO: 2340600 - RNA, 19 nt, Human
ggcuacucuccucggcccc

SEQ ID NO: 2340601 - RNA, 15 nt, Human
ggcuacugcagcuuu

SEQ ID NO: 2340602 - RNA, 12 nt, Human
ggcuacccuccc

SEQ ID NO: 2340603 - RNA, 19 nt, Human
ggcuacccugagcugaggc

SEQ ID NO: 2340604 - RNA, 15 nt, Human
ggcuacucagcagcc

SEQ ID NO: 2340605 - RNA, 16 nt, Human
ggcuacucagcagccc

SEQ ID NO: 2340606 - RNA, 14 nt, Human
ggcuaccuuuguau

SEQ ID NO: 2340607 - RNA, 16 nt, Human
ggcuaauguacugcau

SEQ ID NO: 2340608 - RNA, 20 nt, Human
ggcuaagugauccucccacc

SEQ ID NO: 2340609 - RNA, 19 nt, Human
ggcuaaggcguggagcugc

SEQ ID NO: 2340610 - RNA, 22 nt, Human
ggcuaaggcguggagcugccug

SEQ ID NO: 2340611 - RNA, 15 nt, Human
ggcuaauuaaauaaa

SEQ ID NO: 2340612 - RNA, 19 nt, Human
ggcuaagaguguccuagga

SEQ ID NO: 2340613 - RNA, 14 nt, Human
ggcuaacuggaagc

SEQ ID NO: 2340614 - RNA, 20 nt, Human
ggcuaagagcuagcgcugcc

SEQ ID NO: 2340615 - RNA, 18 nt, Human
ggcuaauuuuuguuuugu

SEQ ID NO: 2340616 - RNA, 19 nt, Human
ggcuaauucccagagugug

SEQ ID NO: 2340617 - RNA, 23 nt, Human
ggcuaauucccagagugugaaac

SEQ ID NO: 2340618 - RNA, 23 nt, Human
ggcuacaccuuagccugcccucc

SEQ ID NO: 2340619 - RNA, 15 nt, Human
ggcuacacagggaug

SEQ ID NO: 2340620 - RNA, 22 nt, Human
ggcuacaccuuagccugcccuc

SEQ ID NO: 2340621 - RNA, 13 nt, Human
ggcuaauuuuugu

SEQ ID NO: 2340622 - RNA, 23 nt, Human
ggcuacaauuuucucccaggaag

SEQ ID NO: 2340623 - RNA, 12 nt, Human
ggcuacacaggg

SEQ ID NO: 2340624 - RNA, 13 nt, Human
ggcuaccuuugua

SEQ ID NO: 2340625 - RNA, 12 nt, Human
ggccuggcacag

SEQ ID NO: 2340626 - RNA, 22 nt, Human
ggccuggcacagugucugggcu

SEQ ID NO: 2340627 - RNA, 14 nt, Human
ggccuggcagccgu

SEQ ID NO: 2340628 - RNA, 15 nt, Human
ggccuggcagccgug

SEQ ID NO: 2340629 - RNA, 12 nt, Human
ggccuggccaga

SEQ ID NO: 2340630 - RNA, 15 nt, Human
ggccuggccagaugc

SEQ ID NO: 2340631 - RNA, 16 nt, Human
ggccuggccagaugca

SEQ ID NO: 2340632 - RNA, 21 nt, Human
ggccuguuuuagaagguucuc

SEQ ID NO: 2340633 - RNA, 17 nt, Human
ggccuggcacaucagaa

SEQ ID NO: 2340634 - RNA, 14 nt, Human
ggccuggccaccuc

SEQ ID NO: 2340635 - RNA, 16 nt, Human
ggccuggccaccucuc

SEQ ID NO: 2340636 - RNA, 17 nt, Human
ggccuggccaccucucu

SEQ ID NO: 2340637 - RNA, 17 nt, Human
ggccuucagggagugag

SEQ ID NO: 2340638 - RNA, 19 nt, Human
ggccugcugggcucuccac

SEQ ID NO: 2340639 - RNA, 17 nt, Human
ggccugcugggcucucc

SEQ ID NO: 2340640 - RNA, 20 nt, Human
ggccuggagauccuccugca

SEQ ID NO: 2340641 - RNA, 15 nt, Human
ggccuggagcaggcc

SEQ ID NO: 2340642 - RNA, 16 nt, Human
ggccuggagcaggccu

SEQ ID NO: 2340643 - RNA, 19 nt, Human
ggccuggagcaggccuugc

SEQ ID NO: 2340644 - RNA, 21 nt, Human
ggccuggagcaggccuugcgc

SEQ ID NO: 2340645 - RNA, 19 nt, Human
ggccuggaggugggguugg

SEQ ID NO: 2340646 - RNA, 21 nt, Human
ggccuggaucuccccacucua

SEQ ID NO: 2340647 - RNA, 16 nt, Human
ggccuggauucauuuc

SEQ ID NO: 2340648 - RNA, 17 nt, Human
ggccuggauucauuucc

SEQ ID NO: 2340649 - RNA, 19 nt, Human
ggccuggauucauuuccug

SEQ ID NO: 2340650 - RNA, 20 nt, Human
ggccuggauucauuuccugc

SEQ ID NO: 2340651 - RNA, 22 nt, Human
ggccuggauucauuuccugccc

SEQ ID NO: 2340652 - RNA, 18 nt, Human
ggccugccuugaagccac

SEQ ID NO: 2340653 - RNA, 11 nt, Human
ggccugccugu

SEQ ID NO: 2340654 - RNA, 18 nt, Human
ggccugccuccagggcug

SEQ ID NO: 2340655 - RNA, 19 nt, Human
ggccugccuccagggcugg

SEQ ID NO: 2340656 - RNA, 20 nt, Human
ggccugccuccagggcugga

SEQ ID NO: 2340657 - RNA, 18 nt, Human
ggccugcuccagaccuga

SEQ ID NO: 2340658 - RNA, 17 nt, Human
ggccugcucccagcagc

SEQ ID NO: 2340659 - RNA, 18 nt, Human
ggccugcucccagcagcc

SEQ ID NO: 2340660 - RNA, 17 nt, Human
ggccugcuccagaccug

SEQ ID NO: 2340661 - RNA, 16 nt, Human
ggccugcuccagaccu

SEQ ID NO: 2340662 - RNA, 15 nt, Human
ggccugcuccagacc

SEQ ID NO: 2340663 - RNA, 14 nt, Human
ggccugcuccagac

SEQ ID NO: 2340664 - RNA, 13 nt, Human
ggccugcuccaga

SEQ ID NO: 2340665 - RNA, 14 nt, Human
ggccugaugcuccc

SEQ ID NO: 2340666 - RNA, 20 nt, Human
ggccugaugcucccuccccu

SEQ ID NO: 2340667 - RNA, 18 nt, Human
ggccugaugcucccuccc

SEQ ID NO: 2340668 - RNA, 17 nt, Human
ggccugaugcucccucc

SEQ ID NO: 2340669 - RNA, 15 nt, Human
ggccugaugcucccu

SEQ ID NO: 2340670 - RNA, 23 nt, Human
ggccugaugcucccuccccugcc

SEQ ID NO: 2340671 - RNA, 22 nt, Human
ggccugaugcucccuccccugc

SEQ ID NO: 2340672 - RNA, 16 nt, Human
ggccugcaagggagug

SEQ ID NO: 2340673 - RNA, 13 nt, Human
ggccugccagacg

SEQ ID NO: 2340674 - RNA, 16 nt, Human
ggccugcccucaggga

SEQ ID NO: 2340675 - RNA, 17 nt, Human
ggccugcccucagggau

SEQ ID NO: 2340676 - RNA, 13 nt, Human
ggccugcacuaau

SEQ ID NO: 2340677 - RNA, 17 nt, Human
ggccugcaggaccugcc

SEQ ID NO: 2340678 - RNA, 21 nt, Human
ggccugcaggaccugccugua

SEQ ID NO: 2340679 - RNA, 20 nt, Human
ggccugcaggaccugccugu

SEQ ID NO: 2340680 - RNA, 14 nt, Human
ggccugcacaguga

SEQ ID NO: 2340681 - RNA, 17 nt, Human
ggccugcacggugggcc

SEQ ID NO: 2340682 - RNA, 19 nt, Human
ggccugcacggugggccuu

SEQ ID NO: 2340683 - RNA, 21 nt, Human
ggccugcacggugggccuugc

SEQ ID NO: 2340684 - RNA, 21 nt, Human
ggcuggccuaggagauaucug

SEQ ID NO: 2340685 - RNA, 12 nt, Human
ggcuggcccagc

SEQ ID NO: 2340686 - RNA, 19 nt, Human
ggcuggccucuggcucuca

SEQ ID NO: 2340687 - RNA, 20 nt, Human
ggcuggccucccaaaugagc

SEQ ID NO: 2340688 - RNA, 17 nt, Human
ggcuggcccugcccugg

SEQ ID NO: 2340689 - RNA, 22 nt, Human
ggcuggccaguccaggcugccg

SEQ ID NO: 2340690 - RNA, 19 nt, Human
ggcuggccagccccacagc

SEQ ID NO: 2340691 - RNA, 13 nt, Human
ggcuggccuggcc

SEQ ID NO: 2340692 - RNA, 14 nt, Human
ggcuggccuggccc

SEQ ID NO: 2340693 - RNA, 15 nt, Human
ggcuggccuggcccc

SEQ ID NO: 2340694 - RNA, 11 nt, Human
aaaaaaagaaa

SEQ ID NO: 2340695 - RNA, 9 nt, Human
aaaaaaaga

SEQ ID NO: 2340696 - RNA, 10 nt, Human
aaaaaaagaa

SEQ ID NO: 2340697 - RNA, 11 nt, Human
aaaaaaagaca

SEQ ID NO: 2340698 - RNA, 13 nt, Human
aaaaaaagacaag

SEQ ID NO: 2340699 - RNA, 14 nt, Human
aaaaaaagaucugu

SEQ ID NO: 2340700 - RNA, 10 nt, Human
aaaaaaagag

SEQ ID NO: 2340701 - RNA, 23 nt, Human
aaaaagauuuucagaaaauauua

SEQ ID NO: 2340702 - RNA, 15 nt, Human
aaaaaacagaggcca

SEQ ID NO: 2340703 - RNA, 9 nt, Human
aaaaaagaa

SEQ ID NO: 2340704 - RNA, 11 nt, Human
aaaaaaauuug

SEQ ID NO: 2340705 - RNA, 19 nt, Human
aaaaaacucgaggacugua

SEQ ID NO: 2340706 - RNA, 13 nt, Human
aaaaagcagcuac

SEQ ID NO: 2340707 - RNA, 21 nt, Human
aaaaagcagcuaccagguguu

SEQ ID NO: 2340708 - RNA, 13 nt, Human
aaaaagauuuguu

SEQ ID NO: 2340709 - RNA, 13 nt, Human
aaaaagcacaaga

SEQ ID NO: 2340710 - RNA, 14 nt, Human
aaaaagcacaagaa

SEQ ID NO: 2340711 - RNA, 15 nt, Human
aaaaagcacaagaag

SEQ ID NO: 2340712 - RNA, 12 nt, Human
aaaaagcaugua

SEQ ID NO: 2340713 - RNA, 14 nt, Human
aaaaagcauguaca

SEQ ID NO: 2340714 - RNA, 15 nt, Human
aaaaagcauguacag

SEQ ID NO: 2340715 - RNA, 17 nt, Human
aaaaagcauguacagug

SEQ ID NO: 2340716 - RNA, 18 nt, Human
aaaaagcauguacagugu

SEQ ID NO: 2340717 - RNA, 21 nt, Human
aaaaagcauguacaguguucu

SEQ ID NO: 2340718 - RNA, 22 nt, Human
aaaaaacugcugacuguuuucu

SEQ ID NO: 2340719 - RNA, 11 nt, Human
aaaaaaauuua

SEQ ID NO: 2340720 - RNA, 13 nt, Human
aaaaaaaugacua

SEQ ID NO: 2340721 - RNA, 13 nt, Human
aaaaaaaugcuga

SEQ ID NO: 2340722 - RNA, 11 nt, Human
aaaaaaaugcc

SEQ ID NO: 2340723 - RNA, 12 nt, Human
aaaaaaaugacu

SEQ ID NO: 2340724 - RNA, 12 nt, Human
aaaaaaaugaca

SEQ ID NO: 2340725 - RNA, 14 nt, Human
aaaaaaaucugcag

SEQ ID NO: 2340726 - RNA, 12 nt, Human
aaaaaaauaaua

SEQ ID NO: 2340727 - RNA, 13 nt, Human
aaaaaaauacuug

SEQ ID NO: 2340728 - RNA, 11 nt, Human
aaaaaaaguua

SEQ ID NO: 2340729 - RNA, 14 nt, Human
aaaaaaaguauuau

SEQ ID NO: 2340730 - RNA, 12 nt, Human
aaaaaaaguauu

SEQ ID NO: 2340731 - RNA, 14 nt, Human
aaaaaggaggaaga

SEQ ID NO: 2340732 - RNA, 20 nt, Human
aaaaagccugcaauuucaua

SEQ ID NO: 2340733 - RNA, 17 nt, Human
aaaaagccuccagucca

SEQ ID NO: 2340734 - RNA, 20 nt, Human
aaaaagcauguacaguguuc

SEQ ID NO: 2340735 - RNA, 12 nt, Human
aaaaaggcagga

SEQ ID NO: 2340736 - RNA, 21 nt, Human
aaaaaggaugcacagaguugu

SEQ ID NO: 2340737 - RNA, 17 nt, Human
aaaaaguuugccagaag

SEQ ID NO: 2340738 - RNA, 14 nt, Human
aaaaaguuuccaua

SEQ ID NO: 2340739 - RNA, 18 nt, Human
aaaaaguuugccagaagu

SEQ ID NO: 2340740 - RNA, 19 nt, Human
aaaaaguuugguucugugu

SEQ ID NO: 2340741 - RNA, 17 nt, Human
aaaaaguuuacaagugu

SEQ ID NO: 2340742 - RNA, 17 nt, Human
aaaaaggcauuguuuga

SEQ ID NO: 2340743 - RNA, 19 nt, Human
aaaaaggcauauugcuuuu

SEQ ID NO: 2340744 - RNA, 14 nt, Human
aaaaauaaaaaaca

SEQ ID NO: 2340745 - RNA, 13 nt, Human
aaaaaguuuguuu

SEQ ID NO: 2340746 - RNA, 16 nt, Human
aaaaaguuuuaguuuu

SEQ ID NO: 2340747 - RNA, 14 nt, Human
ggcuggguuggagg

SEQ ID NO: 2340748 - RNA, 22 nt, Human
ggcuggguucuacccaggugcu

SEQ ID NO: 2340749 - RNA, 17 nt, Human
ggcugguagcucaggug

SEQ ID NO: 2340750 - RNA, 21 nt, Human
ggcugguagcucaggugggcg

SEQ ID NO: 2340751 - RNA, 19 nt, Human
ggcugguaacaguucaugu

SEQ ID NO: 2340752 - RNA, 15 nt, Human
ggcugguagcucagg

SEQ ID NO: 2340753 - RNA, 16 nt, Human
ggcugguagcucaggu

SEQ ID NO: 2340754 - RNA, 22 nt, Human
aaaaauacuugucaauauuuaa

SEQ ID NO: 2340755 - RNA, 15 nt, Human
aaaaauacuugucaa

SEQ ID NO: 2340756 - RNA, 16 nt, Human
ggcuggguuggcgcac

SEQ ID NO: 2340757 - RNA, 19 nt, Human
ggcuggguuggcgcacccu

SEQ ID NO: 2340758 - RNA, 20 nt, Human
ggcuggguuggcgcacccuc

SEQ ID NO: 2340759 - RNA, 11 nt, Human
aaaaauacugc

SEQ ID NO: 2340760 - RNA, 15 nt, Human
aaaaauacauuuuau

SEQ ID NO: 2340761 - RNA, 10 nt, Human
aaaaauacuu

SEQ ID NO: 2340762 - RNA, 19 nt, Human
aaaaauaaucuauuucuau

SEQ ID NO: 2340763 - RNA, 14 nt, Human
aaaaauacauuuua

SEQ ID NO: 2340764 - RNA, 14 nt, Human
aaaaauacaugcau

SEQ ID NO: 2340765 - RNA, 21 nt, Human
aaaaauaaaaacugacuccuu

SEQ ID NO: 2340766 - RNA, 17 nt, Human
aaaaaguuuuauuuuuc

SEQ ID NO: 2340767 - RNA, 23 nt, Human
aaaaaguuuugcccuuuuuaagg

SEQ ID NO: 2340768 - RNA, 14 nt, Human
aaaaauaaaacauu

SEQ ID NO: 2340769 - RNA, 13 nt, Human
aaaaauacaaaaa

SEQ ID NO: 2340770 - RNA, 13 nt, Human
ggcucacugcagc

SEQ ID NO: 2340771 - RNA, 14 nt, Human
ggcucacugcagcc

SEQ ID NO: 2340772 - RNA, 15 nt, Human
ggcucacugcagccu

SEQ ID NO: 2340773 - RNA, 13 nt, Human
ggcuggccacugc

SEQ ID NO: 2340774 - RNA, 14 nt, Human
ggcuggccacugca

SEQ ID NO: 2340775 - RNA, 17 nt, Human
ggcuggccacugcacag

SEQ ID NO: 2340776 - RNA, 19 nt, Human
ggcuggccacugcacagag

SEQ ID NO: 2340777 - RNA, 21 nt, Human
ggcuggccacugcacagagcu

SEQ ID NO: 2340778 - RNA, 14 nt, Human
ggcuggcagguaug

SEQ ID NO: 2340779 - RNA, 19 nt, Human
ggcugccuccacucccacu

SEQ ID NO: 2340780 - RNA, 12 nt, Human
ggcugccuccac

SEQ ID NO: 2340781 - RNA, 16 nt, Human
ggcugccuccacuccc

SEQ ID NO: 2340782 - RNA, 17 nt, Human
ggcugccuccacuccca

SEQ ID NO: 2340783 - RNA, 16 nt, Human
ggcuggccaguccagg

SEQ ID NO: 2340784 - RNA, 20 nt, Human
ggcuggccagccccacagcc

SEQ ID NO: 2340785 - RNA, 20 nt, Human
ggcuggccaguccaggcugc

SEQ ID NO: 2340786 - RNA, 21 nt, Human
ggcuggccaguccaggcugcc

SEQ ID NO: 2340787 - RNA, 23 nt, Human
ggcuggccacugcacagagcucu

SEQ ID NO: 2340788 - RNA, 11 nt, Human
ggcuggccagc

SEQ ID NO: 2340789 - RNA, 12 nt, Human
ggcuggccagcc

SEQ ID NO: 2340790 - RNA, 13 nt, Human
ggcuggccagccc

SEQ ID NO: 2340791 - RNA, 14 nt, Human
ggcuggccagcccc

SEQ ID NO: 2340792 - RNA, 15 nt, Human
ggcuggccagcccca

SEQ ID NO: 2340793 - RNA, 17 nt, Human
ggcuggccagccccaca

SEQ ID NO: 2340794 - RNA, 18 nt, Human
ggcuggccagccccacag

SEQ ID NO: 2340795 - RNA, 12 nt, Human
ggcugcccuggu

SEQ ID NO: 2340796 - RNA, 19 nt, Human
ggcugcccuggcccugagg

SEQ ID NO: 2340797 - RNA, 20 nt, Human
ggcugcccuggcccugaggu

SEQ ID NO: 2340798 - RNA, 21 nt, Human
ggcugcccuggcccugaggug

SEQ ID NO: 2340799 - RNA, 22 nt, Human
ggcugcccuggcccugaggugu

SEQ ID NO: 2340800 - RNA, 11 nt, Human
ggcugcccuuu

SEQ ID NO: 2340801 - RNA, 10 nt, Human
ggcugcccuu

SEQ ID NO: 2340802 - RNA, 18 nt, Human
ggcugcccuuucugggca

SEQ ID NO: 2340803 - RNA, 14 nt, Human
ggcugcccuuucug

SEQ ID NO: 2340804 - RNA, 21 nt, Human
ggcugccggguucuagucucc

SEQ ID NO: 2340805 - RNA, 16 nt, Human
ggcugccguggggccg

SEQ ID NO: 2340806 - RNA, 23 nt, Human
ggcugccguggggccgccgccuc

SEQ ID NO: 2340807 - RNA, 12 nt, Human
ggcugcccuggc

SEQ ID NO: 2340808 - RNA, 11 nt, Human
ggcugcccugg

SEQ ID NO: 2340809 - RNA, 13 nt, Human
ggcugcccugcca

SEQ ID NO: 2340810 - RNA, 14 nt, Human
ggcugcccuggccc

SEQ ID NO: 2340811 - RNA, 15 nt, Human
ggcugcccuggcccu

SEQ ID NO: 2340812 - RNA, 16 nt, Human
ggcugcccuggcccug

SEQ ID NO: 2340813 - RNA, 17 nt, Human
ggcugcccuggcccuga

SEQ ID NO: 2340814 - RNA, 12 nt, Human
ggcugcccugcc

SEQ ID NO: 2340815 - RNA, 21 nt, Human
ggcugagacugcgggaugguc

SEQ ID NO: 2340816 - RNA, 14 nt, Human
ggcugagaacacug

SEQ ID NO: 2340817 - RNA, 17 nt, Human
ggcugagaacccugcgu

SEQ ID NO: 2340818 - RNA, 15 nt, Human
ggcugagacaggaga

SEQ ID NO: 2340819 - RNA, 18 nt, Human
ggcugagacaggagaauc

SEQ ID NO: 2340820 - RNA, 22 nt, Human
ggcugcccgcucccagugucuu

SEQ ID NO: 2340821 - RNA, 18 nt, Human
ggcugcccgcucccagug

SEQ ID NO: 2340822 - RNA, 21 nt, Human
ggcugcccgcucccagugucu

SEQ ID NO: 2340823 - RNA, 13 nt, Human
ggcugcccgcucc

SEQ ID NO: 2340824 - RNA, 14 nt, Human
ggcugcccgcuccc

SEQ ID NO: 2340825 - RNA, 16 nt, Human
ggcugcccgcucccag

SEQ ID NO: 2340826 - RNA, 17 nt, Human
ggcugcccgcucccagu

SEQ ID NO: 2340827 - RNA, 15 nt, Human
ggcugaccaugcuca

SEQ ID NO: 2340828 - RNA, 16 nt, Human
ggcucuuuccuugcuc

SEQ ID NO: 2340829 - RNA, 17 nt, Human
ggcucuuuccuugcuca

SEQ ID NO: 2340830 - RNA, 22 nt, Human
ggcucuuuggggucagccaggg

SEQ ID NO: 2340831 - RNA, 24 nt, Human
ggcugaaagaacauggacuuguau

SEQ ID NO: 2340832 - RNA, 22 nt, Human
ggcugacccagucccuggggga

SEQ ID NO: 2340833 - RNA, 18 nt, Human
ggcugaccccaaagagcc

SEQ ID NO: 2340834 - RNA, 19 nt, Human
ggcugaccccaaagagccu

SEQ ID NO: 2340835 - RNA, 20 nt, Human
ggcugaccccaaagagccug

SEQ ID NO: 2340836 - RNA, 19 nt, Human
ggcugacccagucccuggg

SEQ ID NO: 2340837 - RNA, 18 nt, Human
ggcugacccagucccugg

SEQ ID NO: 2340838 - RNA, 17 nt, Human
ggcugacccagucccug

SEQ ID NO: 2340839 - RNA, 22 nt, Human
ggcugaccacagcacagccaac

SEQ ID NO: 2340840 - RNA, 21 nt, Human
ggcugaccuugaacuccuggg

SEQ ID NO: 2340841 - RNA, 23 nt, Human
ggcugaccuuccucgcagagagg

SEQ ID NO: 2340842 - RNA, 22 nt, Human
ggcugacggugcagucugggug

SEQ ID NO: 2340843 - RNA, 22 nt, Human
ggcugaccccaaagagccugga

SEQ ID NO: 2340844 - RNA, 20 nt, Human
ggcugaccuuccucgcagag

SEQ ID NO: 2340845 - RNA, 22 nt, Human
ggcugacuagaagggccagucc

SEQ ID NO: 2340846 - RNA, 19 nt, Human
ggcugacuagaagggccag

SEQ ID NO: 2340847 - RNA, 24 nt, Human
ggcugacuagaagggccaguccug

SEQ ID NO: 2340848 - RNA, 22 nt, Human
ggcucgucggggggacagcucc

SEQ ID NO: 2340849 - RNA, 17 nt, Human
ggcucggaggcugcccc

SEQ ID NO: 2340850 - RNA, 23 nt, Human
ggcucgccucaggaaugggcugu

SEQ ID NO: 2340851 - RNA, 22 nt, Human
ggcucgccucaggaaugggcug

SEQ ID NO: 2340852 - RNA, 16 nt, Human
ggcucggaggcugccc

SEQ ID NO: 2340853 - RNA, 21 nt, Human
ggcucccuguaaccucuucag

SEQ ID NO: 2340854 - RNA, 21 nt, Human
ggcucccuucaucuccaggga

SEQ ID NO: 2340855 - RNA, 20 nt, Human
ggcucgauuuuguaucugca

SEQ ID NO: 2340856 - RNA, 22 nt, Human
ggcucgauuuuguaucugcagg

SEQ ID NO: 2340857 - RNA, 16 nt, Human
ggcucgccaugccggg

SEQ ID NO: 2340858 - RNA, 17 nt, Human
ggcucgccaugccgggg

SEQ ID NO: 2340859 - RNA, 18 nt, Human
ggcucguugacuggcugu

SEQ ID NO: 2340860 - RNA, 13 nt, Human
ggcucccuuccca

SEQ ID NO: 2340861 - RNA, 20 nt, Human
ggcucccuguaaccucuuca

SEQ ID NO: 2340862 - RNA, 11 nt, Human
ggcucccugga

SEQ ID NO: 2340863 - RNA, 18 nt, Human
ggcucccugacugggagu

SEQ ID NO: 2340864 - RNA, 17 nt, Human
ggcucccugacugggag

SEQ ID NO: 2340865 - RNA, 14 nt, Human
ggcucuuccaggcu

SEQ ID NO: 2340866 - RNA, 18 nt, Human
ggcucuacaacugagucc

SEQ ID NO: 2340867 - RNA, 15 nt, Human
ggcucuuccaggcug

SEQ ID NO: 2340868 - RNA, 17 nt, Human
ggcucuuccaggcuggg

SEQ ID NO: 2340869 - RNA, 18 nt, Human
ggcucuuccaggcuggga

SEQ ID NO: 2340870 - RNA, 13 nt, Human
ggcucuucugacu

SEQ ID NO: 2340871 - RNA, 19 nt, Human
ggcucuacaacugaguccu

SEQ ID NO: 2340872 - RNA, 23 nt, Human
ggcucuucuccuuucacaaccuu

SEQ ID NO: 2340873 - RNA, 19 nt, Human
ggcucuugaacugagcuug

SEQ ID NO: 2340874 - RNA, 18 nt, Human
ggcucuugaacugagcuu

SEQ ID NO: 2340875 - RNA, 20 nt, Human
ggcucuugaacugagcuugg

SEQ ID NO: 2340876 - RNA, 19 nt, Human
ggcucuugauaccccccuc

SEQ ID NO: 2340877 - RNA, 20 nt, Human
ggcucuugauaccccccucu

SEQ ID NO: 2340878 - RNA, 21 nt, Human
ggcucuugauaccccccucug

SEQ ID NO: 2340879 - RNA, 14 nt, Human
ggcucuucugacua

SEQ ID NO: 2340880 - RNA, 20 nt, Human
ggcucuugugcuggauggag

SEQ ID NO: 2340881 - RNA, 23 nt, Human
ggcucuugugcuggauggagccc

SEQ ID NO: 2340882 - RNA, 13 nt, Human
ggcucuuuccuug

SEQ ID NO: 2340883 - RNA, 14 nt, Human
ggcucuuuccuugc

SEQ ID NO: 2340884 - RNA, 15 nt, Human
ggcucuuuccuugcu

SEQ ID NO: 2340885 - RNA, 17 nt, Human
gguguugacaugugcuu

SEQ ID NO: 2340886 - RNA, 21 nt, Human
gguguugccaaauauguccug

SEQ ID NO: 2340887 - RNA, 22 nt, Human
gguguugccaaauauguccugg

SEQ ID NO: 2340888 - RNA, 23 nt, Human
gguguuccgaaaccaaagaagaa

SEQ ID NO: 2340889 - RNA, 21 nt, Human
gguguuaucaccgugggcucc

SEQ ID NO: 2340890 - RNA, 14 nt, Human
gguguguguagcca

SEQ ID NO: 2340891 - RNA, 18 nt, Human
gguguguggagaugcaga

SEQ ID NO: 2340892 - RNA, 18 nt, Human
gguguguuccaacugccc

SEQ ID NO: 2340893 - RNA, 19 nt, Human
gguguguuccaacugcccc

SEQ ID NO: 2340894 - RNA, 17 nt, Human
gguguggugcaguguga

SEQ ID NO: 2340895 - RNA, 15 nt, Human
gguguggugcagugu

SEQ ID NO: 2340896 - RNA, 23 nt, Human
ggugugucccccucuguccaggc

SEQ ID NO: 2340897 - RNA, 12 nt, Human
ggugugucugcu

SEQ ID NO: 2340898 - RNA, 13 nt, Human
ggugugggggaag

SEQ ID NO: 2340899 - RNA, 11 nt, Human
gguguggggga

SEQ ID NO: 2340900 - RNA, 19 nt, Human
gguguggcccugccaucuu

SEQ ID NO: 2340901 - RNA, 12 nt, Human
gguguggcuccu

SEQ ID NO: 2340902 - RNA, 16 nt, Human
gguguggagccgaggc

SEQ ID NO: 2340903 - RNA, 15 nt, Human
gguguggcccugcca

SEQ ID NO: 2340904 - RNA, 18 nt, Human
gguguggcccugccaucu

SEQ ID NO: 2340905 - RNA, 12 nt, Human
gguguggagaag

SEQ ID NO: 2340906 - RNA, 20 nt, Human
gguggggggaucacaagguc

SEQ ID NO: 2340907 - RNA, 23 nt, Human
gguguggagaagcggcuggcagc

SEQ ID NO: 2340908 - RNA, 14 nt, Human
gguguggagaagcg

SEQ ID NO: 2340909 - RNA, 13 nt, Human
ggugggggccucg

SEQ ID NO: 2340910 - RNA, 18 nt, Human
gguggggggcuucauaca

SEQ ID NO: 2340911 - RNA, 16 nt, Human
gguggggggcuucaua

SEQ ID NO: 2340912 - RNA, 22 nt, Human
gguggggcugcuccuccagggc

SEQ ID NO: 2340913 - RNA, 18 nt, Human
gguggggcugcuccucca

SEQ ID NO: 2340914 - RNA, 17 nt, Human
gguggggcugcuccucc

SEQ ID NO: 2340915 - RNA, 13 nt, Human
gguggggcugcuc

SEQ ID NO: 2340916 - RNA, 17 nt, Human
gguggggcgggaaagcc

SEQ ID NO: 2340917 - RNA, 13 nt, Human
gguggggaauguu

SEQ ID NO: 2340918 - RNA, 20 nt, Human
ggugggcuucccaguggcug

SEQ ID NO: 2340919 - RNA, 14 nt, Human
ggugggcuucccag

SEQ ID NO: 2340920 - RNA, 21 nt, Human
gguuccggaauccuguccuca

SEQ ID NO: 2340921 - RNA, 23 nt, Human
gguuccgcuuggagcagaggggc

SEQ ID NO: 2340922 - RNA, 20 nt, Human
gguucggauuugggguggau

SEQ ID NO: 2340923 - RNA, 23 nt, Human
gguucguggaaagggugcugcuu

SEQ ID NO: 2340924 - RNA, 23 nt, Human
gguucuagucuccuuugcacuga

SEQ ID NO: 2340925 - RNA, 13 nt, Human
gguucuauuugga

SEQ ID NO: 2340926 - RNA, 16 nt, Human
gguucuauuuggaauu

SEQ ID NO: 2340927 - RNA, 13 nt, Human
gguucccccagcc

SEQ ID NO: 2340928 - RNA, 12 nt, Human
gguuccccaccg

SEQ ID NO: 2340929 - RNA, 16 nt, Human
gguucccaagcucaga

SEQ ID NO: 2340930 - RNA, 23 nt, Human
gguucccuuugacgccaucccag

SEQ ID NO: 2340931 - RNA, 15 nt, Human
gguucccccagcccu

SEQ ID NO: 2340932 - RNA, 14 nt, Human
gguucccccagccc

SEQ ID NO: 2340933 - RNA, 15 nt, Human
gguuccgcuuggagc

SEQ ID NO: 2340934 - RNA, 22 nt, Human
gguuccgcuuggagcagagggg

SEQ ID NO: 2340935 - RNA, 21 nt, Human
gguuccgcuuggagcagaggg

SEQ ID NO: 2340936 - RNA, 22 nt, Human
gguucccuuuuuuggcugcuga

SEQ ID NO: 2340937 - RNA, 13 nt, Human
gguguuuauacag

SEQ ID NO: 2340938 - RNA, 15 nt, Human
gguguuguaugccuu

SEQ ID NO: 2340939 - RNA, 17 nt, Human
gguguuguaugccuuua

SEQ ID NO: 2340940 - RNA, 18 nt, Human
gguguuucuagcacuggc

SEQ ID NO: 2340941 - RNA, 21 nt, Human
gguguuucuagcacuggccug

SEQ ID NO: 2340942 - RNA, 22 nt, Human
gguguuucucccucucacuguc

SEQ ID NO: 2340943 - RNA, 23 nt, Human
gguguuucucccucucacugucu

SEQ ID NO: 2340944 - RNA, 19 nt, Human
gguguuuccuggcacugcu

SEQ ID NO: 2340945 - RNA, 17 nt, Human
gguguuuccuggcacug

SEQ ID NO: 2340946 - RNA, 17 nt, Human
gguucccauuugcuccu

SEQ ID NO: 2340947 - RNA, 13 nt, Human
gguuccaugccug

SEQ ID NO: 2340948 - RNA, 14 nt, Human
gguuccaugccuga

SEQ ID NO: 2340949 - RNA, 15 nt, Human
gguuccaugccugag

SEQ ID NO: 2340950 - RNA, 13 nt, Human
gguucccaagcuc

SEQ ID NO: 2340951 - RNA, 16 nt, Human
gguuccaugccugagg

SEQ ID NO: 2340952 - RNA, 18 nt, Human
gguuccaugccugagggu

SEQ ID NO: 2340953 - RNA, 14 nt, Human
gguuccagccugcc

SEQ ID NO: 2340954 - RNA, 17 nt, Human
gguguuuuaaaaaaucu

SEQ ID NO: 2340955 - RNA, 16 nt, Human
gguuccagccugccac

SEQ ID NO: 2340956 - RNA, 15 nt, Human
gguuccagccugcca

SEQ ID NO: 2340957 - RNA, 16 nt, Human
aaagugguauagaaau

SEQ ID NO: 2340958 - RNA, 21 nt, Human
aaaguggguuauucuggaguu

SEQ ID NO: 2340959 - RNA, 17 nt, Human
aaagugguauagaaaug

SEQ ID NO: 2340960 - RNA, 20 nt, Human
aaagugguauagaaaugcug

SEQ ID NO: 2340961 - RNA, 21 nt, Human
aaaguguauuuuuuuacuaau

SEQ ID NO: 2340962 - RNA, 14 nt, Human
aaaguguauuuuuu

SEQ ID NO: 2340963 - RNA, 21 nt, Human
aaaguauccugcuucugauau

SEQ ID NO: 2340964 - RNA, 12 nt, Human
aaaguaugaauc

SEQ ID NO: 2340965 - RNA, 14 nt, Human
aaaguagauuaaga

SEQ ID NO: 2340966 - RNA, 19 nt, Human
aaaguaugguauugaaacu

SEQ ID NO: 2340967 - RNA, 19 nt, Human
aaaguauguaaaguaugua

SEQ ID NO: 2340968 - RNA, 20 nt, Human
aaaguauguaaaguauguaa

SEQ ID NO: 2340969 - RNA, 17 nt, Human
aaagugggcuugauucu

SEQ ID NO: 2340970 - RNA, 17 nt, Human
aaaguauguuagugcaa

SEQ ID NO: 2340971 - RNA, 14 nt, Human
aaaguaaggugcag

SEQ ID NO: 2340972 - RNA, 18 nt, Human
aaaguacacuguuucaaa

SEQ ID NO: 2340973 - RNA, 19 nt, Human
aaaguacacuguuucaaac

SEQ ID NO: 2340974 - RNA, 22 nt, Human
aaaguagaagucuuagauguau

SEQ ID NO: 2340975 - RNA, 20 nt, Human
aaaguagaagucuuagaugu

SEQ ID NO: 2340976 - RNA, 21 nt, Human
aaaguaucccuacuguaauuu

SEQ ID NO: 2340977 - RNA, 14 nt, Human
gguuugggaccccu

SEQ ID NO: 2340978 - RNA, 15 nt, Human
gguuucgagaagcug

SEQ ID NO: 2340979 - RNA, 22 nt, Human
gguuucuaaagcugccagccga

SEQ ID NO: 2340980 - RNA, 19 nt, Human
gguuuccugcccugggagg

SEQ ID NO: 2340981 - RNA, 16 nt, Human
gguuuccugcccuggg

SEQ ID NO: 2340982 - RNA, 16 nt, Human
gguuucuaaagcugcc

SEQ ID NO: 2340983 - RNA, 15 nt, Human
gguuuccugcccugg

SEQ ID NO: 2340984 - RNA, 13 nt, Human
gguuuccugcccu

SEQ ID NO: 2340985 - RNA, 12 nt, Human
gguuuccugccc

SEQ ID NO: 2340986 - RNA, 12 nt, Human
gguuuccaaagg

SEQ ID NO: 2340987 - RNA, 17 nt, Human
gguuucauacucuagau

SEQ ID NO: 2340988 - RNA, 17 nt, Human
gguuucauauuucuuau

SEQ ID NO: 2340989 - RNA, 15 nt, Human
gguuucagaaaugug

SEQ ID NO: 2340990 - RNA, 15 nt, Human
gguuuuauauuuuua

SEQ ID NO: 2340991 - RNA, 17 nt, Human
gguuuuauaaggcugau

SEQ ID NO: 2340992 - RNA, 21 nt, Human
gguuuuaggucucuuccccuc

SEQ ID NO: 2340993 - RNA, 19 nt, Human
gguuuuauuguuuaaaauc

SEQ ID NO: 2340994 - RNA, 19 nt, Human
aaaguaaguaccacucagg

SEQ ID NO: 2340995 - RNA, 19 nt, Human
aaaguaagcccuugaagau

SEQ ID NO: 2340996 - RNA, 20 nt, Human
gguuuuauuuuguaauuauu

SEQ ID NO: 2340997 - RNA, 16 nt, Human
gguuuuauacugaagg

SEQ ID NO: 2340998 - RNA, 12 nt, Human
gguuuuaaugua

SEQ ID NO: 2340999 - RNA, 16 nt, Human
gguuuuaaagugauua

SEQ ID NO: 2341000 - RNA, 17 nt, Human
gguuuuaaguuguuugc

SEQ ID NO: 2341001 - RNA, 19 nt, Human
gguuuguguuugaguuuua

SEQ ID NO: 2341002 - RNA, 22 nt, Human
gguuuguuuagaagaagugugu

SEQ ID NO: 2341003 - RNA, 19 nt, Human
gguuuggggagcagagaca

SEQ ID NO: 2341004 - RNA, 17 nt, Human
gguuucguuucuguaua

SEQ ID NO: 2341005 - RNA, 15 nt, Human
gguuuggucugggac

SEQ ID NO: 2341006 - RNA, 13 nt, Human
gguuuguauauug

SEQ ID NO: 2341007 - RNA, 20 nt, Human
gguuuguaaauuaacuuuua

SEQ ID NO: 2341008 - RNA, 17 nt, Human
aaagguucacuaaagca

SEQ ID NO: 2341009 - RNA, 18 nt, Human
aaagguguugucccuucu

SEQ ID NO: 2341010 - RNA, 14 nt, Human
aaagguguuguccc

SEQ ID NO: 2341011 - RNA, 16 nt, Human
aaaggugucuuccucc

SEQ ID NO: 2341012 - RNA, 18 nt, Human
aaaggugucuuccuccca

SEQ ID NO: 2341013 - RNA, 18 nt, Human
aaagguucaugcaaacuu

SEQ ID NO: 2341014 - RNA, 19 nt, Human
aaagguggacuggaagggg

SEQ ID NO: 2341015 - RNA, 21 nt, Human
aaaggugccugugaggcaggg

SEQ ID NO: 2341016 - RNA, 14 nt, Human
aaaggugauaucca

SEQ ID NO: 2341017 - RNA, 22 nt, Human
aaaggugguauguguguguaug

SEQ ID NO: 2341018 - RNA, 12 nt, Human
aaaggugucuuc

SEQ ID NO: 2341019 - RNA, 18 nt, Human
aaagguggugaggcaaua

SEQ ID NO: 2341020 - RNA, 21 nt, Human
aaaggugguauguguguguau

SEQ ID NO: 2341021 - RNA, 19 nt, Human
aaaggugguaugugugugu

SEQ ID NO: 2341022 - RNA, 17 nt, Human
aaaggugguaugugugu

SEQ ID NO: 2341023 - RNA, 18 nt, Human
aaaggggucccauagagg

SEQ ID NO: 2341024 - RNA, 15 nt, Human
aaaggugaaggaaua

SEQ ID NO: 2341025 - RNA, 16 nt, Human
aaaggugaaggaauau

SEQ ID NO: 2341026 - RNA, 21 nt, Human
aaaggugaaggaauauauggc

SEQ ID NO: 2341027 - RNA, 23 nt, Human
aaaggggucggcugaccaugcuc

SEQ ID NO: 2341028 - RNA, 24 nt, Human
aaaggggucggcugaccaugcuca

SEQ ID NO: 2341029 - RNA, 23 nt, Human
aaaggugaguuugagcugccuuc

SEQ ID NO: 2341030 - RNA, 21 nt, Human
aaaggugaguuugagcugccu

SEQ ID NO: 2341031 - RNA, 22 nt, Human
aaaggugaguuugagcugccuu

SEQ ID NO: 2341032 - RNA, 22 nt, Human
aaaggugaccuugcaacuucau

SEQ ID NO: 2341033 - RNA, 24 nt, Human
aaaggugaaggaauauauggcaga

SEQ ID NO: 2341034 - RNA, 20 nt, Human
aaaggugaguuugagcugcc

SEQ ID NO: 2341035 - RNA, 16 nt, Human
aaagggggucccagug

SEQ ID NO: 2341036 - RNA, 20 nt, Human
aaagggggucccagugggag

SEQ ID NO: 2341037 - RNA, 21 nt, Human
aaagggggucccagugggagg

SEQ ID NO: 2341038 - RNA, 23 nt, Human
aaagggggucccagugggagggg

SEQ ID NO: 2341039 - RNA, 18 nt, Human
aaaggggcagaaaaacuc

SEQ ID NO: 2341040 - RNA, 16 nt, Human
aaaggggagagccugc

SEQ ID NO: 2341041 - RNA, 19 nt, Human
aaaggggagagccugcugg

SEQ ID NO: 2341042 - RNA, 14 nt, Human
aaaggggagagccu

SEQ ID NO: 2341043 - RNA, 20 nt, Human
aaagggcuguuauaaucuuu

SEQ ID NO: 2341044 - RNA, 22 nt, Human
aaagggcuguuauaaucuuuca

SEQ ID NO: 2341045 - RNA, 20 nt, Human
aaagggcagggcaucuccug

SEQ ID NO: 2341046 - RNA, 16 nt, Human
aaagggcucuuuagcc

SEQ ID NO: 2341047 - RNA, 19 nt, Human
aaagggauuacccaagcaa

SEQ ID NO: 2341048 - RNA, 23 nt, Human
aaagggcccacagugacuuuugc

SEQ ID NO: 2341049 - RNA, 20 nt, Human
aaagggcccagagagggugg

SEQ ID NO: 2341050 - RNA, 16 nt, Human
aaagcuguugauggua

SEQ ID NO: 2341051 - RNA, 15 nt, Human
aaagcuuagcaggag

SEQ ID NO: 2341052 - RNA, 13 nt, Human
aaagcuuauuaaa

SEQ ID NO: 2341053 - RNA, 14 nt, Human
aaagguuuuccucu

SEQ ID NO: 2341054 - RNA, 17 nt, Human
aaagguuuuauuuugua

SEQ ID NO: 2341055 - RNA, 16 nt, Human
aaagguuuuauuuugu

SEQ ID NO: 2341056 - RNA, 12 nt, Human
aaaguaaagcua

SEQ ID NO: 2341057 - RNA, 18 nt, Human
aaagguuuuauuuuguaa

SEQ ID NO: 2341058 - RNA, 21 nt, Human
aaaguaaaaacaaagaaauua

SEQ ID NO: 2341059 - RNA, 18 nt, Human
gguggcuggguuggaggg

SEQ ID NO: 2341060 - RNA, 12 nt, Human
gguggcuggguu

SEQ ID NO: 2341061 - RNA, 21 nt, Human
ggugggaaccaugaagacagg

SEQ ID NO: 2341062 - RNA, 22 nt, Human
ggugggaaaugguaugagcuga

SEQ ID NO: 2341063 - RNA, 13 nt, Human
aaaguaaagcuaa

SEQ ID NO: 2341064 - RNA, 23 nt, Human
aaaguaaagcuaaaaugauuuua

SEQ ID NO: 2341065 - RNA, 20 nt, Human
ggugggaggaucucuugagc

SEQ ID NO: 2341066 - RNA, 17 nt, Human
ggugggacacccuguga

SEQ ID NO: 2341067 - RNA, 13 nt, Human
ggugggacacccu

SEQ ID NO: 2341068 - RNA, 16 nt, Human
ggugggacacccugug

SEQ ID NO: 2341069 - RNA, 13 nt, Human
ggugggcugagcc

SEQ ID NO: 2341070 - RNA, 13 nt, Human
ggugggcucugug

SEQ ID NO: 2341071 - RNA, 16 nt, Human
ggugggcucugugcag

SEQ ID NO: 2341072 - RNA, 16 nt, Human
ggugggagcaggagau

SEQ ID NO: 2341073 - RNA, 20 nt, Human
ggugggcggcacagccuucu

SEQ ID NO: 2341074 - RNA, 20 nt, Human
ggugggcgggcagcacagca

SEQ ID NO: 2341075 - RNA, 21 nt, Human
ggugggcguggucacugcugu

SEQ ID NO: 2341076 - RNA, 16 nt, Human
ggugggagagcccagc

SEQ ID NO: 2341077 - RNA, 15 nt, Human
ggugggagagcccag

SEQ ID NO: 2341078 - RNA, 15 nt, Human
ggugggccuugcugg

SEQ ID NO: 2341079 - RNA, 13 nt, Human
ggugggagcagga

SEQ ID NO: 2341080 - RNA, 17 nt, Human
ggugggcugagcccugg

SEQ ID NO: 2341081 - RNA, 15 nt, Human
ggugggcugagcccu

SEQ ID NO: 2341082 - RNA, 18 nt, Human
ggugggcugagcccuggc

SEQ ID NO: 2341083 - RNA, 19 nt, Human
gguggggaccucaggccug

SEQ ID NO: 2341084 - RNA, 20 nt, Human
aaagcugaucugguuugacu

SEQ ID NO: 2341085 - RNA, 22 nt, Human
aaagcugccagccgagauagcc

SEQ ID NO: 2341086 - RNA, 23 nt, Human
aaagcuguggccagcuuguuauu

SEQ ID NO: 2341087 - RNA, 14 nt, Human
aaagcuguguggca

SEQ ID NO: 2341088 - RNA, 12 nt, Human
aaagcugccagc

SEQ ID NO: 2341089 - RNA, 13 nt, Human
aaagcugccagcc

SEQ ID NO: 2341090 - RNA, 14 nt, Human
aaagcuagaaauga

SEQ ID NO: 2341091 - RNA, 13 nt, Human
aaagcuagaaaug

SEQ ID NO: 2341092 - RNA, 13 nt, Human
aaagcagugcaug

SEQ ID NO: 2341093 - RNA, 14 nt, Human
aaagcuaggccugg

SEQ ID NO: 2341094 - RNA, 16 nt, Human
aaagcuaggccuggcc

SEQ ID NO: 2341095 - RNA, 17 nt, Human
aaagcaguaacugacaa

SEQ ID NO: 2341096 - RNA, 22 nt, Human
aaagcaguagaaauaauaugca

SEQ ID NO: 2341097 - RNA, 17 nt, Human
aaagcagguggcaucuc

SEQ ID NO: 2341098 - RNA, 21 nt, Human
aaagcaggggaguaugcaaaa

SEQ ID NO: 2341099 - RNA, 18 nt, Human
aaagcaggggcuacaaga

SEQ ID NO: 2341100 - RNA, 21 nt, Human
aaagcaggggcuacaagaggg

SEQ ID NO: 2341101 - RNA, 22 nt, Human
aaagcaggggcuacaagaggga

SEQ ID NO: 2341102 - RNA, 13 nt, Human
aaagcagaaaaua

SEQ ID NO: 2341103 - RNA, 13 nt, Human
aaagcagcaucug

SEQ ID NO: 2341104 - RNA, 15 nt, Human
aaagcagccacgagg

SEQ ID NO: 2341105 - RNA, 12 nt, Human
aaagcagccacg

SEQ ID NO: 2341106 - RNA, 18 nt, Human
aaagcagcccuuggccag

SEQ ID NO: 2341107 - RNA, 20 nt, Human
aaagcaggggaguaugcaaa

SEQ ID NO: 2341108 - RNA, 12 nt, Human
gguggacccagg

SEQ ID NO: 2341109 - RNA, 13 nt, Human
gguggacacacaa

SEQ ID NO: 2341110 - RNA, 15 nt, Human
gguggacauggcccc

SEQ ID NO: 2341111 - RNA, 18 nt, Human
gguggacaguccugggag

SEQ ID NO: 2341112 - RNA, 17 nt, Human
gguggacaguccuggga

SEQ ID NO: 2341113 - RNA, 16 nt, Human
gguggacaguccuggg

SEQ ID NO: 2341114 - RNA, 15 nt, Human
gguggacaguccugg

SEQ ID NO: 2341115 - RNA, 14 nt, Human
gguggacaguccug

SEQ ID NO: 2341116 - RNA, 15 nt, Human
ggugcugggaggagg

SEQ ID NO: 2341117 - RNA, 16 nt, Human
ggugcuggauauuuuc

SEQ ID NO: 2341118 - RNA, 16 nt, Human
ggugcuggagguggga

SEQ ID NO: 2341119 - RNA, 21 nt, Human
ggugcuggaggugggagcagg

SEQ ID NO: 2341120 - RNA, 21 nt, Human
ggugcugcuucccucugccug

SEQ ID NO: 2341121 - RNA, 20 nt, Human
ggugcugggacugagccagu

SEQ ID NO: 2341122 - RNA, 24 nt, Human
ggugcugggacugagccaguccca

SEQ ID NO: 2341123 - RNA, 22 nt, Human
ggugcuggaggugggagcagga

SEQ ID NO: 2341124 - RNA, 12 nt, Human
ggugcugggacu

SEQ ID NO: 2341125 - RNA, 14 nt, Human
ggugcugggacuga

SEQ ID NO: 2341126 - RNA, 19 nt, Human
ggugcugggacugagccag

SEQ ID NO: 2341127 - RNA, 14 nt, Human
ggugcugcuucccu

SEQ ID NO: 2341128 - RNA, 23 nt, Human
ggugcugcuacccucccugcugu

SEQ ID NO: 2341129 - RNA, 20 nt, Human
ggugcugcuacccucccugc

SEQ ID NO: 2341130 - RNA, 22 nt, Human
ggugcugcuacccucccugcug

SEQ ID NO: 2341131 - RNA, 13 nt, Human
ggugcugcuaccc

SEQ ID NO: 2341132 - RNA, 16 nt, Human
ggugcugcuacccucc

SEQ ID NO: 2341133 - RNA, 17 nt, Human
ggugcugcuacccuccc

SEQ ID NO: 2341134 - RNA, 19 nt, Human
ggugcugcuacccucccug

SEQ ID NO: 2341135 - RNA, 17 nt, Human
ggugcugccucuaccug

SEQ ID NO: 2341136 - RNA, 19 nt, Human
aaacuuuaugcuaagugaa

SEQ ID NO: 2341137 - RNA, 12 nt, Human
aaacuuuaugcu

SEQ ID NO: 2341138 - RNA, 15 nt, Human
gguggcagcccugua

SEQ ID NO: 2341139 - RNA, 18 nt, Human
gguggcagcccuguaggg

SEQ ID NO: 2341140 - RNA, 11 nt, Human
gguggagaagc

SEQ ID NO: 2341141 - RNA, 12 nt, Human
gguggagaagcc

SEQ ID NO: 2341142 - RNA, 23 nt, Human
gguggcaccagcgaagggagugc

SEQ ID NO: 2341143 - RNA, 15 nt, Human
gguggcacugagccc

SEQ ID NO: 2341144 - RNA, 16 nt, Human
gguggcacugagcccc

SEQ ID NO: 2341145 - RNA, 20 nt, Human
gguggcacugagccccccca

SEQ ID NO: 2341146 - RNA, 13 nt, Human
gguggcacugcca

SEQ ID NO: 2341147 - RNA, 22 nt, Human
aaagcagauaccucacccugcu

SEQ ID NO: 2341148 - RNA, 16 nt, Human
gguggcacuuuuucau

SEQ ID NO: 2341149 - RNA, 21 nt, Human
aaagcacuuggacucuugcuc

SEQ ID NO: 2341150 - RNA, 22 nt, Human
aaagcacuuggacucuugcucu

SEQ ID NO: 2341151 - RNA, 16 nt, Human
aaagcagaacagugau

SEQ ID NO: 2341152 - RNA, 20 nt, Human
gguggcaccagcagccugga

SEQ ID NO: 2341153 - RNA, 14 nt, Human
gguggcaccagcag

SEQ ID NO: 2341154 - RNA, 14 nt, Human
gguggacccaggga

SEQ ID NO: 2341155 - RNA, 15 nt, Human
gguggacucgccugu

SEQ ID NO: 2341156 - RNA, 17 nt, Human
gguggacuuagaaagca

SEQ ID NO: 2341157 - RNA, 18 nt, Human
gguggacuuagaaagcag

SEQ ID NO: 2341158 - RNA, 21 nt, Human
gguggagaaagcacugaccug

SEQ ID NO: 2341159 - RNA, 21 nt, Human
gguggacuuagaaagcagggg

SEQ ID NO: 2341160 - RNA, 16 nt, Human
gguggagaaagcacug

SEQ ID NO: 2341161 - RNA, 19 nt, Human
gguggacuuagaaagcagg

SEQ ID NO: 2341162 - RNA, 20 nt, Human
gguggacuuagaaagcaggg

SEQ ID NO: 2341163 - RNA, 23 nt, Human
gguggacuuagaaagcaggggcu

SEQ ID NO: 2341164 - RNA, 13 nt, Human
aaauauugcuggg

SEQ ID NO: 2341165 - RNA, 22 nt, Human
aaauauucuauuuucauuuucu

SEQ ID NO: 2341166 - RNA, 14 nt, Human
aaauauucuauaug

SEQ ID NO: 2341167 - RNA, 18 nt, Human
aaauauucuauaugaauu

SEQ ID NO: 2341168 - RNA, 20 nt, Human
aaauauucuauaugaauuua

SEQ ID NO: 2341169 - RNA, 18 nt, Human
aaauauucuauuuucauu

SEQ ID NO: 2341170 - RNA, 19 nt, Human
aaauauuaagaaagacuau

SEQ ID NO: 2341171 - RNA, 23 nt, Human
aaauauguuuuuuagaucaaaua

SEQ ID NO: 2341172 - RNA, 20 nt, Human
aaauauuccugcauuuguga

SEQ ID NO: 2341173 - RNA, 13 nt, Human
aaauauucuauau

SEQ ID NO: 2341174 - RNA, 23 nt, Human
aaaucagccugcuccagcuguuc

SEQ ID NO: 2341175 - RNA, 20 nt, Human
aaauauuguguugugaaugu

SEQ ID NO: 2341176 - RNA, 21 nt, Human
aaaucagccugcuccagcugu

SEQ ID NO: 2341177 - RNA, 19 nt, Human
aaaucagccugcuccagcu

SEQ ID NO: 2341178 - RNA, 12 nt, Human
aaauaugcaucu

SEQ ID NO: 2341179 - RNA, 23 nt, Human
aaauaugcagugauauggcagaa

SEQ ID NO: 2341180 - RNA, 18 nt, Human
aaauaugcagugauaugg

SEQ ID NO: 2341181 - RNA, 22 nt, Human
aaauaugcagugauauggcaga

SEQ ID NO: 2341182 - RNA, 13 nt, Human
aaauaugccucuc

SEQ ID NO: 2341183 - RNA, 14 nt, Human
aaauaugccucucc

SEQ ID NO: 2341184 - RNA, 20 nt, Human
aaauaugccucuccuuugua

SEQ ID NO: 2341185 - RNA, 21 nt, Human
aaauaugccucuccuuuguau

SEQ ID NO: 2341186 - RNA, 10 nt, Human
aaauaugcaa

SEQ ID NO: 2341187 - RNA, 20 nt, Human
aaauaugauuuuauuugaca

SEQ ID NO: 2341188 - RNA, 14 nt, Human
aaauaugcagugau

SEQ ID NO: 2341189 - RNA, 21 nt, Human
aaauauggaacuuacauuguu

SEQ ID NO: 2341190 - RNA, 16 nt, Human
aaauauggaacuucua

SEQ ID NO: 2341191 - RNA, 18 nt, Human
aaauauggaacuuacauu

SEQ ID NO: 2341192 - RNA, 17 nt, Human
aaauauggaacuuacau

SEQ ID NO: 2341193 - RNA, 17 nt, Human
aaauauggaacuucuaa

SEQ ID NO: 2341194 - RNA, 18 nt, Human
aaauauggaacuucuaau

SEQ ID NO: 2341195 - RNA, 19 nt, Human
aaauauggaacuucuaaua

SEQ ID NO: 2341196 - RNA, 20 nt, Human
aaauauggaacuucuaauau

SEQ ID NO: 2341197 - RNA, 16 nt, Human
aaauauggaacuuaca

SEQ ID NO: 2341198 - RNA, 13 nt, Human
aaauauggaacuu

SEQ ID NO: 2341199 - RNA, 22 nt, Human
aaauaugccucuccuuuguaua

SEQ ID NO: 2341200 - RNA, 23 nt, Human
aaauaugccucuccuuuguauau

SEQ ID NO: 2341201 - RNA, 16 nt, Human
aaauaugccuuuuuga

SEQ ID NO: 2341202 - RNA, 12 nt, Human
aaauauguacaa

SEQ ID NO: 2341203 - RNA, 20 nt, Human
aaauauggacacuuaauacu

SEQ ID NO: 2341204 - RNA, 19 nt, Human
aaauauggcuauaaauaua

SEQ ID NO: 2341205 - RNA, 16 nt, Human
aaauauggacacuuaa

SEQ ID NO: 2341206 - RNA, 15 nt, Human
aaauauggacacuua

SEQ ID NO: 2341207 - RNA, 19 nt, Human
aaauauguugaugaaaaau

SEQ ID NO: 2341208 - RNA, 16 nt, Human
aaauauguugaugaaa

SEQ ID NO: 2341209 - RNA, 19 nt, Human
aaauauguuuuuuagauca

SEQ ID NO: 2341210 - RNA, 21 nt, Human
aaauauguuuuuuagaucaaa

SEQ ID NO: 2341211 - RNA, 20 nt, Human
aaauauguuagcaaagaguu

SEQ ID NO: 2341212 - RNA, 16 nt, Human
aaauauguccuggggu

SEQ ID NO: 2341213 - RNA, 12 nt, Human
aaauaucuguau

SEQ ID NO: 2341214 - RNA, 13 nt, Human
aaauaucuguauu

SEQ ID NO: 2341215 - RNA, 15 nt, Human
aaauaucuguauuua

SEQ ID NO: 2341216 - RNA, 15 nt, Human
aaauaucuugaaagg

SEQ ID NO: 2341217 - RNA, 19 nt, Human
aaauaugauauugcauaug

SEQ ID NO: 2341218 - RNA, 19 nt, Human
aaauaugauuuuauuugac

SEQ ID NO: 2341219 - RNA, 16 nt, Human
aaauaucuuuugaccu

SEQ ID NO: 2341220 - RNA, 12 nt, Human
aaauaugaagcu

SEQ ID NO: 2341221 - RNA, 12 nt, Human
aaauaugaaugc

SEQ ID NO: 2341222 - RNA, 23 nt, Human
aaauaugagugguuauugaaaau

SEQ ID NO: 2341223 - RNA, 17 nt, Human
aaauaugaagaacugag

SEQ ID NO: 2341224 - RNA, 20 nt, Human
aaauaugaagacauaaaccc

SEQ ID NO: 2341225 - RNA, 22 nt, Human
aaauaucuguauuuaauuuuga

SEQ ID NO: 2341226 - RNA, 17 nt, Human
aaauaucuuuugaccug

SEQ ID NO: 2341227 - RNA, 17 nt, Human
aaauaugcaaagcacug

SEQ ID NO: 2341228 - RNA, 16 nt, Human
aaauaugcaaagcacu

SEQ ID NO: 2341229 - RNA, 15 nt, Human
aaauaugcaaagcac

SEQ ID NO: 2341230 - RNA, 13 nt, Human
aaauaugcaaagc

SEQ ID NO: 2341231 - RNA, 23 nt, Human
aaauaucugaaaauguaugugua

SEQ ID NO: 2341232 - RNA, 22 nt, Human
aaauaucugaaaauguaugugu

SEQ ID NO: 2341233 - RNA, 21 nt, Human
aaauaucugaaaauguaugug

SEQ ID NO: 2341234 - RNA, 19 nt, Human
aaauaucugaaaauguaug

SEQ ID NO: 2341235 - RNA, 18 nt, Human
aaauaucugaaaauguau

SEQ ID NO: 2341236 - RNA, 17 nt, Human
aaauaucugaaaaugua

SEQ ID NO: 2341237 - RNA, 14 nt, Human
aaauaucugaaaau

SEQ ID NO: 2341238 - RNA, 12 nt, Human
aaauaucugaaa

SEQ ID NO: 2341239 - RNA, 18 nt, Human
aaauaccucuuagcugag

SEQ ID NO: 2341240 - RNA, 16 nt, Human
aaauauagcuguacaa

SEQ ID NO: 2341241 - RNA, 17 nt, Human
aaauauagcuguacaaa

SEQ ID NO: 2341242 - RNA, 20 nt, Human
aaauauagcuguacaaauau

SEQ ID NO: 2341243 - RNA, 18 nt, Human
aaauauagaucaguuaua

SEQ ID NO: 2341244 - RNA, 18 nt, Human
aaauaccccaucauucau

SEQ ID NO: 2341245 - RNA, 19 nt, Human
aaauaccccaucauucaug

SEQ ID NO: 2341246 - RNA, 15 nt, Human
aaauauaggaacuua

SEQ ID NO: 2341247 - RNA, 21 nt, Human
aaauauagcuguacaaauaua

SEQ ID NO: 2341248 - RNA, 9 nt, Human
aaauauaua

SEQ ID NO: 2341249 - RNA, 21 nt, Human
aaauauauaaaaagaaaagau

SEQ ID NO: 2341250 - RNA, 12 nt, Human
aaauauauaaau

SEQ ID NO: 2341251 - RNA, 14 nt, Human
aaauauauaaauau

SEQ ID NO: 2341252 - RNA, 15 nt, Human
aaauauauaaauaua

SEQ ID NO: 2341253 - RNA, 16 nt, Human
aaauauauaaauauau

SEQ ID NO: 2341254 - RNA, 10 nt, Human
aaauauauau

SEQ ID NO: 2341255 - RNA, 18 nt, Human
aaauauauaaauauauau

SEQ ID NO: 2341256 - RNA, 17 nt, Human
aaauauauaaauauaua

SEQ ID NO: 2341257 - RNA, 14 nt, Human
aaauauauauaaac

SEQ ID NO: 2341258 - RNA, 16 nt, Human
aaauauauauaaaccu

SEQ ID NO: 2341259 - RNA, 14 nt, Human
aaauauauauaaau

SEQ ID NO: 2341260 - RNA, 21 nt, Human
aaauauauauaaauauauaua

SEQ ID NO: 2341261 - RNA, 17 nt, Human
aaauaccagugugguuu

SEQ ID NO: 2341262 - RNA, 21 nt, Human
aaauaccagugaaccaaagag

SEQ ID NO: 2341263 - RNA, 18 nt, Human
aaauaccagugaaccaaa

SEQ ID NO: 2341264 - RNA, 21 nt, Human
aaauaccaugccauuuaaagc

SEQ ID NO: 2341265 - RNA, 21 nt, Human
aaauaccagccaguaaauggg

SEQ ID NO: 2341266 - RNA, 20 nt, Human
aaauaccagccaguaaaugg

SEQ ID NO: 2341267 - RNA, 16 nt, Human
guacacacacauacac

SEQ ID NO: 2341268 - RNA, 19 nt, Human
aaauaccagccaguaaaug

SEQ ID NO: 2341269 - RNA, 14 nt, Human
guacaaucucaaau

SEQ ID NO: 2341270 - RNA, 18 nt, Human
guacaauauuuaaaauuu

SEQ ID NO: 2341271 - RNA, 14 nt, Human
guacaauauuuaaa

SEQ ID NO: 2341272 - RNA, 20 nt, Human
guacaaugacuuuauugcau

SEQ ID NO: 2341273 - RNA, 21 nt, Human
guacaaugacuuuauugcauc

SEQ ID NO: 2341274 - RNA, 12 nt, Human
aaauauauuuaa

SEQ ID NO: 2341275 - RNA, 20 nt, Human
aaauauauuuaagauaauua

SEQ ID NO: 2341276 - RNA, 21 nt, Human
aaauauauuuaagauaauuau

SEQ ID NO: 2341277 - RNA, 14 nt, Human
aaauauauuuaaug

SEQ ID NO: 2341278 - RNA, 23 nt, Human
aaauauauauguguguguauguu

SEQ ID NO: 2341279 - RNA, 23 nt, Human
aaauauaugauuaacuaauuuua

SEQ ID NO: 2341280 - RNA, 18 nt, Human
aaauauaugcuaagucuu

SEQ ID NO: 2341281 - RNA, 14 nt, Human
aaauauauaucaaa

SEQ ID NO: 2341282 - RNA, 17 nt, Human
aaauauauauaaauaua

SEQ ID NO: 2341283 - RNA, 19 nt, Human
aaauauauauaaauauaua

SEQ ID NO: 2341284 - RNA, 20 nt, Human
aaauauauauaaauauauau

SEQ ID NO: 2341285 - RNA, 12 nt, Human
aaauauauauau

SEQ ID NO: 2341286 - RNA, 19 nt, Human
aaauauauauauauauaaa

SEQ ID NO: 2341287 - RNA, 20 nt, Human
aaauauauauauauauaaaa

SEQ ID NO: 2341288 - RNA, 15 nt, Human
aaauauauauauccu

SEQ ID NO: 2341289 - RNA, 22 nt, Human
aaauauauaucuaaauuuagaa

SEQ ID NO: 2341290 - RNA, 22 nt, Human
aaauauauuuaagauaauuaua

SEQ ID NO: 2341291 - RNA, 15 nt, Human
aaauauauuuaauga

SEQ ID NO: 2341292 - RNA, 16 nt, Human
aaauauauuuuaagac

SEQ ID NO: 2341293 - RNA, 22 nt, Human
aaauauauuuuaagacgaaaca

SEQ ID NO: 2341294 - RNA, 18 nt, Human
aaauaucauuuauuuuuu

SEQ ID NO: 2341295 - RNA, 20 nt, Human
aaauaucaguuacucagccc

SEQ ID NO: 2341296 - RNA, 18 nt, Human
aaauaucaguuacucagc

SEQ ID NO: 2341297 - RNA, 15 nt, Human
aaauaucagacuagu

SEQ ID NO: 2341298 - RNA, 22 nt, Human
aaauaucacuugucaauaaaau

SEQ ID NO: 2341299 - RNA, 16 nt, Human
guaaacgcugucccua

SEQ ID NO: 2341300 - RNA, 19 nt, Human
guaaacagauggcacuuug

SEQ ID NO: 2341301 - RNA, 20 nt, Human
guaaacgcugucccuaguaa

SEQ ID NO: 2341302 - RNA, 13 nt, Human
guaaaccuuuuau

SEQ ID NO: 2341303 - RNA, 17 nt, Human
guaaacaaaauuuaguu

SEQ ID NO: 2341304 - RNA, 23 nt, Human
guaaacaaaauuuaguuuuuguu

SEQ ID NO: 2341305 - RNA, 22 nt, Human
guaaacacgccugcaaacgcug

SEQ ID NO: 2341306 - RNA, 15 nt, Human
guaaaauuguauaga

SEQ ID NO: 2341307 - RNA, 21 nt, Human
guaaaauugccauauugcaca

SEQ ID NO: 2341308 - RNA, 19 nt, Human
guaaaauugccauauugca

SEQ ID NO: 2341309 - RNA, 20 nt, Human
guaaaauugccauauugcac

SEQ ID NO: 2341310 - RNA, 16 nt, Human
guaaaauugaaaggca

SEQ ID NO: 2341311 - RNA, 16 nt, Human
guaaaauguugaauaa

SEQ ID NO: 2341312 - RNA, 15 nt, Human
guaaaauguugaaua

SEQ ID NO: 2341313 - RNA, 14 nt, Human
guaaaauugccaua

SEQ ID NO: 2341314 - RNA, 15 nt, Human
guaaaauugccauau

SEQ ID NO: 2341315 - RNA, 16 nt, Human
guaaaauugccauauu

SEQ ID NO: 2341316 - RNA, 18 nt, Human
guaaaauugccauauugc

SEQ ID NO: 2341317 - RNA, 15 nt, Human
aaauaauucuaaagg

SEQ ID NO: 2341318 - RNA, 13 nt, Human
aaauaauucuaaa

SEQ ID NO: 2341319 - RNA, 14 nt, Human
aaauaauucuaaag

SEQ ID NO: 2341320 - RNA, 22 nt, Human
aaaguguauuuuuuuacuaaua

SEQ ID NO: 2341321 - RNA, 15 nt, Human
aaaguguuucuguua

SEQ ID NO: 2341322 - RNA, 21 nt, Human
aaaguguuuauuuuucauauu

SEQ ID NO: 2341323 - RNA, 13 nt, Human
aaaguguuugccu

SEQ ID NO: 2341324 - RNA, 19 nt, Human
aaaguguuggcuaaugaag

SEQ ID NO: 2341325 - RNA, 17 nt, Human
aaaguguuuauuuuuca

SEQ ID NO: 2341326 - RNA, 18 nt, Human
aaaguguuuauuuuucau

SEQ ID NO: 2341327 - RNA, 20 nt, Human
aaaguguuuauuuuucauau

SEQ ID NO: 2341328 - RNA, 16 nt, Human
aaaguguccauugaca

SEQ ID NO: 2341329 - RNA, 17 nt, Human
aaaguuacaaauugcuu

SEQ ID NO: 2341330 - RNA, 14 nt, Human
aaauaaugugaaac

SEQ ID NO: 2341331 - RNA, 22 nt, Human
aaauaaugugaaacuggauuaa

SEQ ID NO: 2341332 - RNA, 16 nt, Human
aaaguuaaacauugaa

SEQ ID NO: 2341333 - RNA, 22 nt, Human
aaaguuaaacauugaaguaaug

SEQ ID NO: 2341334 - RNA, 16 nt, Human
aaaguuaacagauuuu

SEQ ID NO: 2341335 - RNA, 20 nt, Human
guaaauuuccccaacagugu

SEQ ID NO: 2341336 - RNA, 16 nt, Human
guaaaguauguaaaca

SEQ ID NO: 2341337 - RNA, 21 nt, Human
guaaaguauguaaacaggaga

SEQ ID NO: 2341338 - RNA, 22 nt, Human
guaaaguaucaggauacuauau

SEQ ID NO: 2341339 - RNA, 21 nt, Human
guaaauuuccccaacagugug

SEQ ID NO: 2341340 - RNA, 23 nt, Human
guaaauuuccccaacagugugaa

SEQ ID NO: 2341341 - RNA, 18 nt, Human
guaaauuuuguaugaaaa

SEQ ID NO: 2341342 - RNA, 16 nt, Human
guaaagcuagaaauga

SEQ ID NO: 2341343 - RNA, 20 nt, Human
guaaagcuaaaaugauuuua

SEQ ID NO: 2341344 - RNA, 15 nt, Human
guaaagcuagaaaug

SEQ ID NO: 2341345 - RNA, 21 nt, Human
guaaacuauuuaucuguguuu

SEQ ID NO: 2341346 - RNA, 16 nt, Human
guaaacuauuuaucug

SEQ ID NO: 2341347 - RNA, 15 nt, Human
guaaacucaaaacuu

SEQ ID NO: 2341348 - RNA, 21 nt, Human
guaaacucaaaacuuaacaua

SEQ ID NO: 2341349 - RNA, 15 nt, Human
guaaacuauuuaucu

SEQ ID NO: 2341350 - RNA, 22 nt, Human
guaaacuaucuuggugaauuuu

SEQ ID NO: 2341351 - RNA, 12 nt, Human
guaaacuccugu

SEQ ID NO: 2341352 - RNA, 23 nt, Human
guaaacucaaaauauuuguacau

SEQ ID NO: 2341353 - RNA, 16 nt, Human
guaaacucaaaauauu

SEQ ID NO: 2341354 - RNA, 19 nt, Human
guaacaggaaaauuuuaaa

SEQ ID NO: 2341355 - RNA, 22 nt, Human
guaacagaacagcuucagguua

SEQ ID NO: 2341356 - RNA, 12 nt, Human
guaacagacauu

SEQ ID NO: 2341357 - RNA, 13 nt, Human
guaacagacauug

SEQ ID NO: 2341358 - RNA, 14 nt, Human
guaacagacauugu

SEQ ID NO: 2341359 - RNA, 15 nt, Human
guaacagacauuguu

SEQ ID NO: 2341360 - RNA, 16 nt, Human
guaacagacauuguuu

SEQ ID NO: 2341361 - RNA, 12 nt, Human
guaacagcuccu

SEQ ID NO: 2341362 - RNA, 13 nt, Human
guaacagcuccuu

SEQ ID NO: 2341363 - RNA, 16 nt, Human
guaacaagccacccca

SEQ ID NO: 2341364 - RNA, 18 nt, Human
guaacagaacagcuucag

SEQ ID NO: 2341365 - RNA, 21 nt, Human
guaacagaacagcuucagguu

SEQ ID NO: 2341366 - RNA, 16 nt, Human
guaacagcugaggucu

SEQ ID NO: 2341367 - RNA, 23 nt, Human
guaacagcuccuugggaggaagc

SEQ ID NO: 2341368 - RNA, 22 nt, Human
guaacaguucauguuugcuuca

SEQ ID NO: 2341369 - RNA, 20 nt, Human
guaacaggaaaauuuuaaaa

SEQ ID NO: 2341370 - RNA, 16 nt, Human
guaacagcuccuuggg

SEQ ID NO: 2341371 - RNA, 17 nt, Human
guaacagcuccuuggga

SEQ ID NO: 2341372 - RNA, 18 nt, Human
guaacagcuccuugggag

SEQ ID NO: 2341373 - RNA, 21 nt, Human
guaacagcuccuugggaggaa

SEQ ID NO: 2341374 - RNA, 12 nt, Human
guaacauguuua

SEQ ID NO: 2341375 - RNA, 18 nt, Human
guaacauuggguccuggg

SEQ ID NO: 2341376 - RNA, 23 nt, Human
guaacauuggguccugggucuuu

SEQ ID NO: 2341377 - RNA, 11 nt, Human
guaaccagcca

SEQ ID NO: 2341378 - RNA, 23 nt, Human
guaacauguguuaaguauuuuca

SEQ ID NO: 2341379 - RNA, 22 nt, Human
guaacauguuuacuuuucaggg

SEQ ID NO: 2341380 - RNA, 15 nt, Human
guaacaucagggacc

SEQ ID NO: 2341381 - RNA, 11 nt, Human
guaacauccuu

SEQ ID NO: 2341382 - RNA, 13 nt, Human
guaacauccuuuc

SEQ ID NO: 2341383 - RNA, 17 nt, Human
guaacauccuuucuauu

SEQ ID NO: 2341384 - RNA, 18 nt, Human
guaaccucagcucuggga

SEQ ID NO: 2341385 - RNA, 16 nt, Human
guaacgcgucuuccug

SEQ ID NO: 2341386 - RNA, 15 nt, Human
guaacguugcugugg

SEQ ID NO: 2341387 - RNA, 17 nt, Human
guaacgcgucuuccuga

SEQ ID NO: 2341388 - RNA, 14 nt, Human
guaacccugguggu

SEQ ID NO: 2341389 - RNA, 23 nt, Human
guaacccagauuuugcuguauau

SEQ ID NO: 2341390 - RNA, 17 nt, Human
guaacccaacucuccug

SEQ ID NO: 2341391 - RNA, 18 nt, Human
guaacccaacucuccugg

SEQ ID NO: 2341392 - RNA, 12 nt, Human
guaaccagccag

SEQ ID NO: 2341393 - RNA, 13 nt, Human
guaaccagccaga

SEQ ID NO: 2341394 - RNA, 20 nt, Human
guaaccagccagauccucuu

SEQ ID NO: 2341395 - RNA, 21 nt, Human
guaacccuggugguugcuguu

SEQ ID NO: 2341396 - RNA, 12 nt, Human
guaaccucagcu

SEQ ID NO: 2341397 - RNA, 15 nt, Human
guaaccucagcucug

SEQ ID NO: 2341398 - RNA, 17 nt, Human
guaaccucagcucuggg

SEQ ID NO: 2341399 - RNA, 20 nt, Human
guaaccucuucagaggcccu

SEQ ID NO: 2341400 - RNA, 18 nt, Human
guaaccucuucagaggcc

SEQ ID NO: 2341401 - RNA, 23 nt, Human
guaaguugaauggccugccuuga

SEQ ID NO: 2341402 - RNA, 14 nt, Human
guaaguuccuacua

SEQ ID NO: 2341403 - RNA, 21 nt, Human
guaaguuccuacuaggcaaaa

SEQ ID NO: 2341404 - RNA, 21 nt, Human
guaaguuuaaaggauguuggu

SEQ ID NO: 2341405 - RNA, 16 nt, Human
guaaguuucaggugac

SEQ ID NO: 2341406 - RNA, 22 nt, Human
guaaguuucaggugacauguga

SEQ ID NO: 2341407 - RNA, 19 nt, Human
guaaguuuaugucuaaaga

SEQ ID NO: 2341408 - RNA, 13 nt, Human
guaaguuucaggu

SEQ ID NO: 2341409 - RNA, 14 nt, Human
guaaguuucaggug

SEQ ID NO: 2341410 - RNA, 20 nt, Human
guaagugugaguaagagcug

SEQ ID NO: 2341411 - RNA, 17 nt, Human
guaacuaggcucagaga

SEQ ID NO: 2341412 - RNA, 21 nt, Human
guaagugugaguaagagcugg

SEQ ID NO: 2341413 - RNA, 17 nt, Human
guaacguugcuguggga

SEQ ID NO: 2341414 - RNA, 17 nt, Human
guaauaaugugaaucau

SEQ ID NO: 2341415 - RNA, 16 nt, Human
guaauaaugugaauca

SEQ ID NO: 2341416 - RNA, 19 nt, Human
guaauaaugcuaaagaaaa

SEQ ID NO: 2341417 - RNA, 16 nt, Human
guaauaaacuguguuu

SEQ ID NO: 2341418 - RNA, 18 nt, Human
guaauauuuauauauuua

SEQ ID NO: 2341419 - RNA, 18 nt, Human
guaaucaauaaacgauuu

SEQ ID NO: 2341420 - RNA, 20 nt, Human
guaaucaauaaacgauuuaa

SEQ ID NO: 2341421 - RNA, 13 nt, Human
guaaucaauaaac

SEQ ID NO: 2341422 - RNA, 17 nt, Human
guaaucaauaaacgauu

SEQ ID NO: 2341423 - RNA, 19 nt, Human
guaauagagcaaaauugau

SEQ ID NO: 2341424 - RNA, 15 nt, Human
guaauagaaaacuga

SEQ ID NO: 2341425 - RNA, 15 nt, Human
guaauagagcaaaau

SEQ ID NO: 2341426 - RNA, 16 nt, Human
guaauauugacuugua

SEQ ID NO: 2341427 - RNA, 19 nt, Human
guaauagaaaacugaaaau

SEQ ID NO: 2341428 - RNA, 19 nt, Human
guaauauugacuuguauau

SEQ ID NO: 2341429 - RNA, 20 nt, Human
guaauauugacuuguauauu

SEQ ID NO: 2341430 - RNA, 20 nt, Human
guacaaaauccagcuaugaa

SEQ ID NO: 2341431 - RNA, 16 nt, Human
guacaaaauaaacaaa

SEQ ID NO: 2341432 - RNA, 14 nt, Human
guacaaaauaaaca

SEQ ID NO: 2341433 - RNA, 12 nt, Human
guacaaaauaaa

SEQ ID NO: 2341434 - RNA, 20 nt, Human
guacaaaaaaaaaguuuuau

SEQ ID NO: 2341435 - RNA, 16 nt, Human
guaauuuuuuucuuau

SEQ ID NO: 2341436 - RNA, 19 nt, Human
guacaaaaaaaaaguuuua

SEQ ID NO: 2341437 - RNA, 21 nt, Human
guaauuuuuuuaucgucacug

SEQ ID NO: 2341438 - RNA, 20 nt, Human
guacaaauaaagucccaggu

SEQ ID NO: 2341439 - RNA, 13 nt, Human
guacaaauauaag

SEQ ID NO: 2341440 - RNA, 17 nt, Human
guacaaauauaagaaua

SEQ ID NO: 2341441 - RNA, 20 nt, Human
guacaaauauaagaauaaaa

SEQ ID NO: 2341442 - RNA, 23 nt, Human
guacaaauauaagaauaaaaugu

SEQ ID NO: 2341443 - RNA, 22 nt, Human
guacaaccuguucugcuuuccu

SEQ ID NO: 2341444 - RNA, 22 nt, Human
guacaaauauaagaauaaaaug

SEQ ID NO: 2341445 - RNA, 13 nt, Human
guacaauauuuaa

SEQ ID NO: 2341446 - RNA, 12 nt, Human
guacaauauuua

SEQ ID NO: 2341447 - RNA, 22 nt, Human
guacaauaaguguuuuuguauu

SEQ ID NO: 2341448 - RNA, 17 nt, Human
guacaaggcgaucccau

SEQ ID NO: 2341449 - RNA, 23 nt, Human
guaauccuagcacuuugggaggc

SEQ ID NO: 2341450 - RNA, 15 nt, Human
guaaucgaccugccu

SEQ ID NO: 2341451 - RNA, 22 nt, Human
guaauccucaagaaauaaaagg

SEQ ID NO: 2341452 - RNA, 20 nt, Human
guaaucauuucuugggcccu

SEQ ID NO: 2341453 - RNA, 20 nt, Human
guaaucccagcuacuuggga

SEQ ID NO: 2341454 - RNA, 18 nt, Human
guaaucccgccaccuauc

SEQ ID NO: 2341455 - RNA, 16 nt, Human
guaaucccagcuacuu

SEQ ID NO: 2341456 - RNA, 14 nt, Human
guaaucaauguuuc

SEQ ID NO: 2341457 - RNA, 20 nt, Human
guaauuugugauacaaugcu

SEQ ID NO: 2341458 - RNA, 17 nt, Human
guaauuugugauacaau

SEQ ID NO: 2341459 - RNA, 17 nt, Human
guaaucgaccugccucg

SEQ ID NO: 2341460 - RNA, 13 nt, Human
guaauuuguaucu

SEQ ID NO: 2341461 - RNA, 14 nt, Human
guaauuuguaucug

SEQ ID NO: 2341462 - RNA, 15 nt, Human
guaauuuguaucuga

SEQ ID NO: 2341463 - RNA, 21 nt, Human
guaauuuguaucugaaggaga

SEQ ID NO: 2341464 - RNA, 15 nt, Human
guaauuugugauaca

SEQ ID NO: 2341465 - RNA, 22 nt, Human
aaacauuuucacacaauacaau

SEQ ID NO: 2341466 - RNA, 16 nt, Human
aaacauuuucacacaa

SEQ ID NO: 2341467 - RNA, 14 nt, Human
aaacauuuucacac

SEQ ID NO: 2341468 - RNA, 13 nt, Human
aaacauuuucaca

SEQ ID NO: 2341469 - RNA, 19 nt, Human
aaacauuuugucauauaag

SEQ ID NO: 2341470 - RNA, 18 nt, Human
ggguccuucccucucccc

SEQ ID NO: 2341471 - RNA, 16 nt, Human
ggguccuucccucucc

SEQ ID NO: 2341472 - RNA, 20 nt, Human
ggguccuguggcaggcagcg

SEQ ID NO: 2341473 - RNA, 23 nt, Human
ggguccuguggcaggcagcgcca

SEQ ID NO: 2341474 - RNA, 18 nt, Human
ggguccuggcuccugagg

SEQ ID NO: 2341475 - RNA, 18 nt, Human
ggguccuguggcaggcag

SEQ ID NO: 2341476 - RNA, 19 nt, Human
ggguccuguggcaggcagc

SEQ ID NO: 2341477 - RNA, 23 nt, Human
ggguccuucccucuccccaagac

SEQ ID NO: 2341478 - RNA, 15 nt, Human
aaacauuuuaaaugg

SEQ ID NO: 2341479 - RNA, 20 nt, Human
aaacauuuuaaauggacaga

SEQ ID NO: 2341480 - RNA, 21 nt, Human
gggucaugcccuccucuccca

SEQ ID NO: 2341481 - RNA, 12 nt, Human
ggguccaaauaa

SEQ ID NO: 2341482 - RNA, 13 nt, Human
ggguccaaauaaa

SEQ ID NO: 2341483 - RNA, 20 nt, Human
ggguccacccagcaaagagu

SEQ ID NO: 2341484 - RNA, 13 nt, Human
ggguccuggcucc

SEQ ID NO: 2341485 - RNA, 17 nt, Human
ggguccuggccauccca

SEQ ID NO: 2341486 - RNA, 16 nt, Human
ggguccuggccauccc

SEQ ID NO: 2341487 - RNA, 15 nt, Human
ggguccuggccaucc

SEQ ID NO: 2341488 - RNA, 13 nt, Human
ggguccuggccau

SEQ ID NO: 2341489 - RNA, 16 nt, Human
gggucaugcccuccuc

SEQ ID NO: 2341490 - RNA, 14 nt, Human
gggucaugcccucc

SEQ ID NO: 2341491 - RNA, 18 nt, Human
gggucauucauggccugg

SEQ ID NO: 2341492 - RNA, 21 nt, Human
gggucagucuggugggaggac

SEQ ID NO: 2341493 - RNA, 21 nt, Human
gggucaucuguaccucugccu

SEQ ID NO: 2341494 - RNA, 12 nt, Human
gggucaaggaau

SEQ ID NO: 2341495 - RNA, 22 nt, Human
gggucacucuggcagcucagag

SEQ ID NO: 2341496 - RNA, 18 nt, Human
gggucagggaccaaggac

SEQ ID NO: 2341497 - RNA, 12 nt, Human
gggucaggcucc

SEQ ID NO: 2341498 - RNA, 19 nt, Human
gggguccuguggcaggcag

SEQ ID NO: 2341499 - RNA, 14 nt, Human
gggguccuggccau

SEQ ID NO: 2341500 - RNA, 15 nt, Human
gggguccuguggcag

SEQ ID NO: 2341501 - RNA, 13 nt, Human
gggguccuggcca

SEQ ID NO: 2341502 - RNA, 11 nt, Human
gggguccuggc

SEQ ID NO: 2341503 - RNA, 23 nt, Human
gggguccccaucaucccagcugc

SEQ ID NO: 2341504 - RNA, 13 nt, Human
ggggucccagugg

SEQ ID NO: 2341505 - RNA, 19 nt, Human
gggguccuggagcagacca

SEQ ID NO: 2341506 - RNA, 14 nt, Human
gggucacucuggca

SEQ ID NO: 2341507 - RNA, 20 nt, Human
gggucacucuggcagcucag

SEQ ID NO: 2341508 - RNA, 14 nt, Human
aaaccuugccuuuc

SEQ ID NO: 2341509 - RNA, 20 nt, Human
aaaccuuauuuuuucccaaa

SEQ ID NO: 2341510 - RNA, 14 nt, Human
aaaccuugguguag

SEQ ID NO: 2341511 - RNA, 22 nt, Human
aaaccuugguguaguugaacug

SEQ ID NO: 2341512 - RNA, 16 nt, Human
aaaccuuuagggcagc

SEQ ID NO: 2341513 - RNA, 17 nt, Human
aaaccuuuagggcagcu

SEQ ID NO: 2341514 - RNA, 19 nt, Human
aaaccuuuuuuaagauuuu

SEQ ID NO: 2341515 - RNA, 20 nt, Human
aaaccuuuuuuaagauuuuu

SEQ ID NO: 2341516 - RNA, 21 nt, Human
aaaccuuuuuuaagauuuuuc

SEQ ID NO: 2341517 - RNA, 22 nt, Human
aaaccuuuuuuaagauuuuucu

SEQ ID NO: 2341518 - RNA, 23 nt, Human
aaaccuuuuuuaagauuuuucuc

SEQ ID NO: 2341519 - RNA, 19 nt, Human
aaacgagucaauccccuca

SEQ ID NO: 2341520 - RNA, 15 nt, Human
aaacgauuuaauucu

SEQ ID NO: 2341521 - RNA, 16 nt, Human
aaacgauuuaauucuc

SEQ ID NO: 2341522 - RNA, 17 nt, Human
aaacgauuuaauucucu

SEQ ID NO: 2341523 - RNA, 19 nt, Human
aaacgcaaagggcugaaag

SEQ ID NO: 2341524 - RNA, 18 nt, Human
aaacgauuuaauucucuu

SEQ ID NO: 2341525 - RNA, 19 nt, Human
aaacgauuuaauucucuug

SEQ ID NO: 2341526 - RNA, 16 nt, Human
aaaccuuauuguaccu

SEQ ID NO: 2341527 - RNA, 17 nt, Human
aaaccuuauuguaccuc

SEQ ID NO: 2341528 - RNA, 21 nt, Human
aaaccuguuuaaauauuucaa

SEQ ID NO: 2341529 - RNA, 18 nt, Human
aaaccuuauuguaccucu

SEQ ID NO: 2341530 - RNA, 19 nt, Human
aaaccuuauuuuuucccaa

SEQ ID NO: 2341531 - RNA, 17 nt, Human
aaaccuucacuuaggaa

SEQ ID NO: 2341532 - RNA, 18 nt, Human
aaaccugucaaugauaca

SEQ ID NO: 2341533 - RNA, 16 nt, Human
aaaccuguuuaaauau

SEQ ID NO: 2341534 - RNA, 19 nt, Human
aaaccuguuuaaauauuuc

SEQ ID NO: 2341535 - RNA, 22 nt, Human
aaaccugugucucugagaguag

SEQ ID NO: 2341536 - RNA, 19 nt, Human
aaaccugauguuaaaauuc

SEQ ID NO: 2341537 - RNA, 14 nt, Human
aaaccugauguuaa

SEQ ID NO: 2341538 - RNA, 12 nt, Human
aaaccugccugg

SEQ ID NO: 2341539 - RNA, 16 nt, Human
aaaccugccuggguuu

SEQ ID NO: 2341540 - RNA, 12 nt, Human
aaaccugcccug

SEQ ID NO: 2341541 - RNA, 14 nt, Human
aaaccugcccugcc

SEQ ID NO: 2341542 - RNA, 16 nt, Human
aaaccugcccugccug

SEQ ID NO: 2341543 - RNA, 17 nt, Human
aaaccugcccugccuga

SEQ ID NO: 2341544 - RNA, 15 nt, Human
aaaccuggaugucac

SEQ ID NO: 2341545 - RNA, 18 nt, Human
aaaccugggauucaggaa

SEQ ID NO: 2341546 - RNA, 21 nt, Human
aaaccugggauucaggaaugu

SEQ ID NO: 2341547 - RNA, 21 nt, Human
aaacauuuuguggucauuaag

SEQ ID NO: 2341548 - RNA, 18 nt, Human
aaaccaccagaagcccag

SEQ ID NO: 2341549 - RNA, 15 nt, Human
aaaccaccagaagcc

SEQ ID NO: 2341550 - RNA, 12 nt, Human
aaaccagaagca

SEQ ID NO: 2341551 - RNA, 16 nt, Human
aaaccacuagaacucu

SEQ ID NO: 2341552 - RNA, 23 nt, Human
aaaccaccagugcccaaagucug

SEQ ID NO: 2341553 - RNA, 19 nt, Human
aaaccaccagaagcccaga

SEQ ID NO: 2341554 - RNA, 17 nt, Human
ggggcccaugaaagagg

SEQ ID NO: 2341555 - RNA, 22 nt, Human
ggggcccaaggcggccccuccc

SEQ ID NO: 2341556 - RNA, 14 nt, Human
ggggccccagggcu

SEQ ID NO: 2341557 - RNA, 16 nt, Human
ggggccccagucagcc

SEQ ID NO: 2341558 - RNA, 18 nt, Human
ggggccccagucagccuc

SEQ ID NO: 2341559 - RNA, 16 nt, Human
ggggccaugaggccuc

SEQ ID NO: 2341560 - RNA, 19 nt, Human
ggggcccaaggcggccccu

SEQ ID NO: 2341561 - RNA, 23 nt, Human
ggggcccgccuggcagaacugag

SEQ ID NO: 2341562 - RNA, 21 nt, Human
ggggcccgccuggcagaacug

SEQ ID NO: 2341563 - RNA, 15 nt, Human
ggggcccgcuugccu

SEQ ID NO: 2341564 - RNA, 16 nt, Human
ggggcccgccuggcag

SEQ ID NO: 2341565 - RNA, 22 nt, Human
ggggccccuuuuuacuccccuu

SEQ ID NO: 2341566 - RNA, 21 nt, Human
ggggccccuuuuuacuccccu

SEQ ID NO: 2341567 - RNA, 10 nt, Human
ggggccccuu

SEQ ID NO: 2341568 - RNA, 19 nt, Human
ggggccccagucagccucu

SEQ ID NO: 2341569 - RNA, 21 nt, Human
ggggccaugagcuccagaccc

SEQ ID NO: 2341570 - RNA, 20 nt, Human
ggggccaugagcuccagacc

SEQ ID NO: 2341571 - RNA, 16 nt, Human
ggggacagggcuggcc

SEQ ID NO: 2341572 - RNA, 19 nt, Human
ggggacagggcuggcccag

SEQ ID NO: 2341573 - RNA, 22 nt, Human
ggggacagggcuggcccagccc

SEQ ID NO: 2341574 - RNA, 24 nt, Human
ggggacagggcuggcccagcccug

SEQ ID NO: 2341575 - RNA, 14 nt, Human
ggggccaugaggcc

SEQ ID NO: 2341576 - RNA, 22 nt, Human
ggggccaugagcuccagacccc

SEQ ID NO: 2341577 - RNA, 14 nt, Human
ggggaccagagcug

SEQ ID NO: 2341578 - RNA, 12 nt, Human
aaaaugucugua

SEQ ID NO: 2341579 - RNA, 22 nt, Human
aaaaugucaaagagaaaacuua

SEQ ID NO: 2341580 - RNA, 12 nt, Human
ggggaccagagc

SEQ ID NO: 2341581 - RNA, 13 nt, Human
ggggaccagagcu

SEQ ID NO: 2341582 - RNA, 19 nt, Human
aaaauguaaaggagucaaa

SEQ ID NO: 2341583 - RNA, 11 nt, Human
aaaauguaaau

SEQ ID NO: 2341584 - RNA, 20 nt, Human
aaaauguaaauauucuauau

SEQ ID NO: 2341585 - RNA, 18 nt, Human
aaaauguauguguaagua

SEQ ID NO: 2341586 - RNA, 17 nt, Human
gggguccagggagcagg

SEQ ID NO: 2341587 - RNA, 21 nt, Human
ggggucaugcccuccucuccc

SEQ ID NO: 2341588 - RNA, 18 nt, Human
gggguccacccagcaaag

SEQ ID NO: 2341589 - RNA, 19 nt, Human
ggggucaugcccuccucuc

SEQ ID NO: 2341590 - RNA, 18 nt, Human
ggggucaugcccuccucu

SEQ ID NO: 2341591 - RNA, 22 nt, Human
ggggucacucaauucugcagua

SEQ ID NO: 2341592 - RNA, 18 nt, Human
gggguauuuuaggcaggg

SEQ ID NO: 2341593 - RNA, 22 nt, Human
ggggucagggaccaaggacccc

SEQ ID NO: 2341594 - RNA, 15 nt, Human
ggggucaggcuccau

SEQ ID NO: 2341595 - RNA, 19 nt, Human
gggguagcuagaggaacca

SEQ ID NO: 2341596 - RNA, 18 nt, Human
gggguagcuagaggaacc

SEQ ID NO: 2341597 - RNA, 24 nt, Human
ggggguuuuuacuccaguggugaa

SEQ ID NO: 2341598 - RNA, 15 nt, Human
gggguagcagcugga

SEQ ID NO: 2341599 - RNA, 17 nt, Human
gggguaggcagagccuu

SEQ ID NO: 2341600 - RNA, 22 nt, Human
gggguauuuaccacagcagcug

SEQ ID NO: 2341601 - RNA, 21 nt, Human
ggggucacucuggcagcucag

SEQ ID NO: 2341602 - RNA, 13 nt, Human
gggggcuggugcc

SEQ ID NO: 2341603 - RNA, 14 nt, Human
gggggcuggugcca

SEQ ID NO: 2341604 - RNA, 19 nt, Human
gggggcuggugccagccuu

SEQ ID NO: 2341605 - RNA, 21 nt, Human
gggggcuggugccagccuucc

SEQ ID NO: 2341606 - RNA, 22 nt, Human
gggggcuucauacacaugagau

SEQ ID NO: 2341607 - RNA, 23 nt, Human
ggggguggccgcugaguggcagg

SEQ ID NO: 2341608 - RNA, 15 nt, Human
gggggcugggcagag

SEQ ID NO: 2341609 - RNA, 22 nt, Human
gggguaaaauuccuuagcuuag

SEQ ID NO: 2341610 - RNA, 18 nt, Human
ggggguugcggggggagg

SEQ ID NO: 2341611 - RNA, 18 nt, Human
ggggguuuuuacuccagu

SEQ ID NO: 2341612 - RNA, 13 nt, Human
ggggguggccucc

SEQ ID NO: 2341613 - RNA, 17 nt, Human
gggggccaccuccccag

SEQ ID NO: 2341614 - RNA, 15 nt, Human
gggggccaacaccag

SEQ ID NO: 2341615 - RNA, 14 nt, Human
gggggcagggcaug

SEQ ID NO: 2341616 - RNA, 20 nt, Human
gggggcugccuggcccccag

SEQ ID NO: 2341617 - RNA, 12 nt, Human
gggggcuggccu

SEQ ID NO: 2341618 - RNA, 13 nt, Human
gggggcuggccua

SEQ ID NO: 2341619 - RNA, 11 nt, Human
gggggcuggga

SEQ ID NO: 2341620 - RNA, 13 nt, Human
gggggcagagggc

SEQ ID NO: 2341621 - RNA, 12 nt, Human
gggggcagaggg

SEQ ID NO: 2341622 - RNA, 11 nt, Human
gggggcagagg

SEQ ID NO: 2341623 - RNA, 23 nt, Human
gggggcaagaagaucacgcuccc

SEQ ID NO: 2341624 - RNA, 23 nt, Human
gggggcacaugcugagucuccca

SEQ ID NO: 2341625 - RNA, 15 nt, Human
ggggcccugccuccu

SEQ ID NO: 2341626 - RNA, 21 nt, Human
ggggcccguugucucccuggc

SEQ ID NO: 2341627 - RNA, 22 nt, Human
ggggcccguugucucccuggcc

SEQ ID NO: 2341628 - RNA, 23 nt, Human
ggggcccguugucucccuggccc

SEQ ID NO: 2341629 - RNA, 17 nt, Human
gggggaucacagccucu

SEQ ID NO: 2341630 - RNA, 15 nt, Human
ggggcccggccagcc

SEQ ID NO: 2341631 - RNA, 23 nt, Human
ggggcccgcuugccucggcuccu

SEQ ID NO: 2341632 - RNA, 19 nt, Human
ggggcccguugucucccug

SEQ ID NO: 2341633 - RNA, 20 nt, Human
ggggcccguugucucccugg

SEQ ID NO: 2341634 - RNA, 13 nt, Human
ggggcccggccag

SEQ ID NO: 2341635 - RNA, 20 nt, Human
ggggcccgcuugccucggcu

SEQ ID NO: 2341636 - RNA, 21 nt, Human
ggggcccgcuugccucggcuc

SEQ ID NO: 2341637 - RNA, 21 nt, Human
aaacgauuuaauucucuugaa

SEQ ID NO: 2341638 - RNA, 22 nt, Human
aaacgcuaaagagcccuugccu

SEQ ID NO: 2341639 - RNA, 20 nt, Human
aaacgcauggaguguguauu

SEQ ID NO: 2341640 - RNA, 21 nt, Human
aaacguggcugcuucaaggau

SEQ ID NO: 2341641 - RNA, 21 nt, Human
aaacguuuuauuguguuuuua

SEQ ID NO: 2341642 - RNA, 17 nt, Human
aaacguguugccuugaa

SEQ ID NO: 2341643 - RNA, 16 nt, Human
aaacguuuuauugugu

SEQ ID NO: 2341644 - RNA, 20 nt, Human
aaacguggcuuuuagacaga

SEQ ID NO: 2341645 - RNA, 21 nt, Human
aaacuguucccaccugcugga

SEQ ID NO: 2341646 - RNA, 16 nt, Human
aaacuguugccagaga

SEQ ID NO: 2341647 - RNA, 17 nt, Human
aaacuuaacauauuuac

SEQ ID NO: 2341648 - RNA, 22 nt, Human
aaacuguugccagagauggagg

SEQ ID NO: 2341649 - RNA, 20 nt, Human
aaacuguucccaccugcugg

SEQ ID NO: 2341650 - RNA, 19 nt, Human
aaacuguuaauaguucagg

SEQ ID NO: 2341651 - RNA, 16 nt, Human
aaacuaaauagcaugu

SEQ ID NO: 2341652 - RNA, 17 nt, Human
aaacuaaauagcaugua

SEQ ID NO: 2341653 - RNA, 23 nt, Human
aaacuaaauagcauguauugugu

SEQ ID NO: 2341654 - RNA, 13 nt, Human
aaacuaaaucucu

SEQ ID NO: 2341655 - RNA, 17 nt, Human
aaacuaaaucucuaaua

SEQ ID NO: 2341656 - RNA, 18 nt, Human
aaacuaaaucucuaauau

SEQ ID NO: 2341657 - RNA, 23 nt, Human
aaacuuauuuuuuucugauugua

SEQ ID NO: 2341658 - RNA, 11 nt, Human
ggguggccucg

SEQ ID NO: 2341659 - RNA, 18 nt, Human
ggguggcuagucagagag

SEQ ID NO: 2341660 - RNA, 16 nt, Human
ggguggcuagucagag

SEQ ID NO: 2341661 - RNA, 15 nt, Human
gggugggacacccug

SEQ ID NO: 2341662 - RNA, 18 nt, Human
gggugggacacccuguga

SEQ ID NO: 2341663 - RNA, 21 nt, Human
aaacuuagugcggacaaguuu

SEQ ID NO: 2341664 - RNA, 10 nt, Human
aaacuuauuu

SEQ ID NO: 2341665 - RNA, 12 nt, Human
aaacuuauuuga

SEQ ID NO: 2341666 - RNA, 14 nt, Human
aaacuuauuugagu

SEQ ID NO: 2341667 - RNA, 13 nt, Human
aaacuuauuuuuu

SEQ ID NO: 2341668 - RNA, 19 nt, Human
aaacuuauuuuuuucugau

SEQ ID NO: 2341669 - RNA, 20 nt, Human
aaacuuauuuuuuucugauu

SEQ ID NO: 2341670 - RNA, 22 nt, Human
aaacuuauuuuuuucugauugu

SEQ ID NO: 2341671 - RNA, 14 nt, Human
aaacuuacacacaa

SEQ ID NO: 2341672 - RNA, 22 nt, Human
aaacuuagaauaaaauuguaaa

SEQ ID NO: 2341673 - RNA, 17 nt, Human
aaacuuagaauaaaauu

SEQ ID NO: 2341674 - RNA, 18 nt, Human
aaacuuagaauaaaauug

SEQ ID NO: 2341675 - RNA, 19 nt, Human
aaacuuaaucuaaauggaa

SEQ ID NO: 2341676 - RNA, 23 nt, Human
ggguguauuuauuuuccucccca

SEQ ID NO: 2341677 - RNA, 19 nt, Human
ggguguaacaggucuccuc

SEQ ID NO: 2341678 - RNA, 18 nt, Human
ggguguaacaggucuccu

SEQ ID NO: 2341679 - RNA, 19 nt, Human
gggugguggggaggggcgc

SEQ ID NO: 2341680 - RNA, 15 nt, Human
gggugguggugauag

SEQ ID NO: 2341681 - RNA, 12 nt, Human
ggguggugggga

SEQ ID NO: 2341682 - RNA, 18 nt, Human
ggguggugcugggacuga

SEQ ID NO: 2341683 - RNA, 13 nt, Human
gggugguggggag

SEQ ID NO: 2341684 - RNA, 12 nt, Human
ggguggugcugg

SEQ ID NO: 2341685 - RNA, 14 nt, Human
ggguggugcuggga

SEQ ID NO: 2341686 - RNA, 23 nt, Human
ggguuuugccauguuggccaggc

SEQ ID NO: 2341687 - RNA, 12 nt, Human
ggguuuucuuaa

SEQ ID NO: 2341688 - RNA, 18 nt, Human
ggguuuuguauucucuga

SEQ ID NO: 2341689 - RNA, 17 nt, Human
ggguuuuccacccugga

SEQ ID NO: 2341690 - RNA, 16 nt, Human
ggguuuuccacccugg

SEQ ID NO: 2341691 - RNA, 20 nt, Human
ggguuuugccauguuggcca

SEQ ID NO: 2341692 - RNA, 18 nt, Human
gguaaauuuccccaacag

SEQ ID NO: 2341693 - RNA, 20 nt, Human
gguaaauaccaaguauuuau

SEQ ID NO: 2341694 - RNA, 15 nt, Human
gguaaauuaagacau

SEQ ID NO: 2341695 - RNA, 13 nt, Human
gguaaaugaugug

SEQ ID NO: 2341696 - RNA, 22 nt, Human
gguaaaucagacuaugaaguuu

SEQ ID NO: 2341697 - RNA, 13 nt, Human
gguaaauuucugu

SEQ ID NO: 2341698 - RNA, 20 nt, Human
gguaaauuuccccaacagug

SEQ ID NO: 2341699 - RNA, 22 nt, Human
gguaaauuuccccaacagugug

SEQ ID NO: 2341700 - RNA, 14 nt, Human
gguaacagaacagc

SEQ ID NO: 2341701 - RNA, 15 nt, Human
gguaacagaacagcu

SEQ ID NO: 2341702 - RNA, 16 nt, Human
gguaacagaacagcuu

SEQ ID NO: 2341703 - RNA, 18 nt, Human
gguaacagaacagcuuca

SEQ ID NO: 2341704 - RNA, 23 nt, Human
gguaaaagugugagcagugaguu

SEQ ID NO: 2341705 - RNA, 13 nt, Human
gguaaaauacuuc

SEQ ID NO: 2341706 - RNA, 16 nt, Human
gguaaacacgccugca

SEQ ID NO: 2341707 - RNA, 15 nt, Human
gguaaagacuggcuu

SEQ ID NO: 2341708 - RNA, 16 nt, Human
gguaaagacuggcuuu

SEQ ID NO: 2341709 - RNA, 17 nt, Human
gguccagcccuggcuga

SEQ ID NO: 2341710 - RNA, 19 nt, Human
gguccagcccuggcugaag

SEQ ID NO: 2341711 - RNA, 22 nt, Human
ggucauacuaucuacucuccuc

SEQ ID NO: 2341712 - RNA, 23 nt, Human
ggucauagcccagaucagcuccu

SEQ ID NO: 2341713 - RNA, 16 nt, Human
ggucauagcagugcuu

SEQ ID NO: 2341714 - RNA, 21 nt, Human
ggucauacuaucuacucuccu

SEQ ID NO: 2341715 - RNA, 24 nt, Human
ggucaguguccaaagcagggucug

SEQ ID NO: 2341716 - RNA, 19 nt, Human
ggucagugaggcccaggga

SEQ ID NO: 2341717 - RNA, 16 nt, Human
ggucagucugguggga

SEQ ID NO: 2341718 - RNA, 14 nt, Human
ggucagugcaaaua

SEQ ID NO: 2341719 - RNA, 16 nt, Human
gguaucuguucuuuaa

SEQ ID NO: 2341720 - RNA, 16 nt, Human
gguaucuccaggauug

SEQ ID NO: 2341721 - RNA, 23 nt, Human
gguaucuccaggauugaagagca

SEQ ID NO: 2341722 - RNA, 12 nt, Human
gguaucuccagg

SEQ ID NO: 2341723 - RNA, 13 nt, Human
gguaucuccagga

SEQ ID NO: 2341724 - RNA, 14 nt, Human
gguaucuccaggau

SEQ ID NO: 2341725 - RNA, 19 nt, Human
gguaucaggugcugccauc

SEQ ID NO: 2341726 - RNA, 18 nt, Human
gguauccccccaucuugc

SEQ ID NO: 2341727 - RNA, 19 nt, Human
gguaucauuuucugcauuu

SEQ ID NO: 2341728 - RNA, 11 nt, Human
gguccaggaga

SEQ ID NO: 2341729 - RNA, 23 nt, Human
aaacuuccagugcaacacugaag

SEQ ID NO: 2341730 - RNA, 18 nt, Human
gguccagcuugcucuuca

SEQ ID NO: 2341731 - RNA, 17 nt, Human
gguccagcuugcucuuc

SEQ ID NO: 2341732 - RNA, 22 nt, Human
gguccagcucuggaggggaggg

SEQ ID NO: 2341733 - RNA, 11 nt, Human
gguccagcucu

SEQ ID NO: 2341734 - RNA, 12 nt, Human
gguccagcucug

SEQ ID NO: 2341735 - RNA, 20 nt, Human
gguccagcccuggcugaagg

SEQ ID NO: 2341736 - RNA, 21 nt, Human
gguccagcccuggcugaagga

SEQ ID NO: 2341737 - RNA, 22 nt, Human
gguccagcccuggcugaaggac

SEQ ID NO: 2341738 - RNA, 23 nt, Human
gguccagcccuggcugaaggacu

SEQ ID NO: 2341739 - RNA, 13 nt, Human
gguccagcucugg

SEQ ID NO: 2341740 - RNA, 14 nt, Human
gguccagcucugga

SEQ ID NO: 2341741 - RNA, 15 nt, Human
gguccagcucuggag

SEQ ID NO: 2341742 - RNA, 16 nt, Human
gguccagcucuggagg

SEQ ID NO: 2341743 - RNA, 18 nt, Human
aaacuucucugaagggag

SEQ ID NO: 2341744 - RNA, 19 nt, Human
aaacuucucugaagggagg

SEQ ID NO: 2341745 - RNA, 23 nt, Human
aaacuuccaugaggccaaacguu

SEQ ID NO: 2341746 - RNA, 23 nt, Human
aaacuucccgucccauauccugc

SEQ ID NO: 2341747 - RNA, 17 nt, Human
aaacuuccccaucuucu

SEQ ID NO: 2341748 - RNA, 21 nt, Human
aaacuucccuuucugcuugug

SEQ ID NO: 2341749 - RNA, 21 nt, Human
aaacuuuagaguagcaugaga

SEQ ID NO: 2341750 - RNA, 22 nt, Human
aaacuugauguguuaucucuua

SEQ ID NO: 2341751 - RNA, 13 nt, Human
gguauagaaaugc

SEQ ID NO: 2341752 - RNA, 15 nt, Human
gguagguucagccaa

SEQ ID NO: 2341753 - RNA, 13 nt, Human
gguagguggcaca

SEQ ID NO: 2341754 - RNA, 19 nt, Human
gguagguggcacacugggu

SEQ ID NO: 2341755 - RNA, 16 nt, Human
gguagguucagccaag

SEQ ID NO: 2341756 - RNA, 17 nt, Human
gguagguucagccaagg

SEQ ID NO: 2341757 - RNA, 23 nt, Human
gguagggugggccuucagggagu

SEQ ID NO: 2341758 - RNA, 11 nt, Human
gguaggguggg

SEQ ID NO: 2341759 - RNA, 20 nt, Human
gguaggguaagugagagagg

SEQ ID NO: 2341760 - RNA, 15 nt, Human
gguaucaagaaaguc

SEQ ID NO: 2341761 - RNA, 13 nt, Human
gguauauucauuu

SEQ ID NO: 2341762 - RNA, 14 nt, Human
gguaucaggugcug

SEQ ID NO: 2341763 - RNA, 22 nt, Human
gguauaucauuauaacugaagg

SEQ ID NO: 2341764 - RNA, 16 nt, Human
gguauauccaaaagcu

SEQ ID NO: 2341765 - RNA, 20 nt, Human
gguauaaugguugacugggu

SEQ ID NO: 2341766 - RNA, 18 nt, Human
gguagguucagccaaggu

SEQ ID NO: 2341767 - RNA, 19 nt, Human
gguagguucagccaagguu

SEQ ID NO: 2341768 - RNA, 19 nt, Human
gguaaguuguuaagagugg

SEQ ID NO: 2341769 - RNA, 15 nt, Human
gguaggaggaugggc

SEQ ID NO: 2341770 - RNA, 18 nt, Human
gguaggaacugcugggcu

SEQ ID NO: 2341771 - RNA, 19 nt, Human
gguaggagguuuggauggg

SEQ ID NO: 2341772 - RNA, 14 nt, Human
gguaggcagagccu

SEQ ID NO: 2341773 - RNA, 13 nt, Human
gguaaggugccuu

SEQ ID NO: 2341774 - RNA, 20 nt, Human
gguaagcacuuaaugaauga

SEQ ID NO: 2341775 - RNA, 16 nt, Human
gguaggaacugcuggg

SEQ ID NO: 2341776 - RNA, 20 nt, Human
gguaaggaauaccugucccc

SEQ ID NO: 2341777 - RNA, 23 nt, Human
gguaagaagccgggaacagacaa

SEQ ID NO: 2341778 - RNA, 16 nt, Human
gguaacuugcaccucu

SEQ ID NO: 2341779 - RNA, 21 nt, Human
gguaacagaacagcuucaggu

SEQ ID NO: 2341780 - RNA, 21 nt, Human
gggccggccaggugggcgggc

SEQ ID NO: 2341781 - RNA, 14 nt, Human
gggccggccaggug

SEQ ID NO: 2341782 - RNA, 15 nt, Human
gggccggccaggugg

SEQ ID NO: 2341783 - RNA, 15 nt, Human
gggccguaccccacc

SEQ ID NO: 2341784 - RNA, 16 nt, Human
gggccguaccccaccc

SEQ ID NO: 2341785 - RNA, 18 nt, Human
gggccguaccccacccuc

SEQ ID NO: 2341786 - RNA, 17 nt, Human
gggccgccgccucuuuc

SEQ ID NO: 2341787 - RNA, 19 nt, Human
gggccgccgguuugaguga

SEQ ID NO: 2341788 - RNA, 21 nt, Human
gggccgcugccacccaccucc

SEQ ID NO: 2341789 - RNA, 15 nt, Human
gggccgcugccaccc

SEQ ID NO: 2341790 - RNA, 14 nt, Human
gggccgcugccacc

SEQ ID NO: 2341791 - RNA, 13 nt, Human
gggccgcugccac

SEQ ID NO: 2341792 - RNA, 12 nt, Human
gggccgcugcca

SEQ ID NO: 2341793 - RNA, 13 nt, Human
gggcccaaaggcc

SEQ ID NO: 2341794 - RNA, 14 nt, Human
gggcccaacccugu

SEQ ID NO: 2341795 - RNA, 16 nt, Human
gggcccaacccugucu

SEQ ID NO: 2341796 - RNA, 18 nt, Human
gggcccaagacagaugcc

SEQ ID NO: 2341797 - RNA, 18 nt, Human
gggccauucuccacagca

SEQ ID NO: 2341798 - RNA, 16 nt, Human
gggccauucuccacag

SEQ ID NO: 2341799 - RNA, 23 nt, Human
gggccaugcugaggccugggccg

SEQ ID NO: 2341800 - RNA, 21 nt, Human
gggccaugcugaggccugggc

SEQ ID NO: 2341801 - RNA, 23 nt, Human
gggccagaggaacuguccagaga

SEQ ID NO: 2341802 - RNA, 12 nt, Human
gggccagaggcu

SEQ ID NO: 2341803 - RNA, 15 nt, Human
gggccagagccaggg

SEQ ID NO: 2341804 - RNA, 22 nt, Human
gggccagaggaacuguccagag

SEQ ID NO: 2341805 - RNA, 14 nt, Human
gggccagagccagg

SEQ ID NO: 2341806 - RNA, 13 nt, Human
gggccagagccag

SEQ ID NO: 2341807 - RNA, 12 nt, Human
gggccagagcca

SEQ ID NO: 2341808 - RNA, 11 nt, Human
gggccagagcc

SEQ ID NO: 2341809 - RNA, 12 nt, Human
gggccaggagcc

SEQ ID NO: 2341810 - RNA, 17 nt, Human
gggccagauccagccug

SEQ ID NO: 2341811 - RNA, 16 nt, Human
gggccagauccagccu

SEQ ID NO: 2341812 - RNA, 14 nt, Human
gggccagauccagc

SEQ ID NO: 2341813 - RNA, 13 nt, Human
gggccagauccag

SEQ ID NO: 2341814 - RNA, 13 nt, Human
gggccaggagccu

SEQ ID NO: 2341815 - RNA, 14 nt, Human
gggccaggagccuc

SEQ ID NO: 2341816 - RNA, 18 nt, Human
gggccagauccagccugg

SEQ ID NO: 2341817 - RNA, 20 nt, Human
gggccagaguauuggucucc

SEQ ID NO: 2341818 - RNA, 11 nt, Human
gggccaggcag

SEQ ID NO: 2341819 - RNA, 12 nt, Human
gggccaggcagg

SEQ ID NO: 2341820 - RNA, 13 nt, Human
gggccaggcaggu

SEQ ID NO: 2341821 - RNA, 20 nt, Human
gggccaggcaggugccugga

SEQ ID NO: 2341822 - RNA, 23 nt, Human
gggccaggcaggugccuggacau

SEQ ID NO: 2341823 - RNA, 19 nt, Human
gggccaugcugaggccugg

SEQ ID NO: 2341824 - RNA, 20 nt, Human
gggccaugcugaggccuggg

SEQ ID NO: 2341825 - RNA, 13 nt, Human
gggccugcuccag

SEQ ID NO: 2341826 - RNA, 18 nt, Human
gggccugcuccagaccug

SEQ ID NO: 2341827 - RNA, 17 nt, Human
gggccugcuccagaccu

SEQ ID NO: 2341828 - RNA, 15 nt, Human
gggccugcuccagac

SEQ ID NO: 2341829 - RNA, 14 nt, Human
gggccugcuccaga

SEQ ID NO: 2341830 - RNA, 21 nt, Human
gggcggugagaggggaacaga

SEQ ID NO: 2341831 - RNA, 19 nt, Human
gggcgugagaccugccccu

SEQ ID NO: 2341832 - RNA, 18 nt, Human
gggcgugagaccugcccc

SEQ ID NO: 2341833 - RNA, 16 nt, Human
gggcgugacucaccca

SEQ ID NO: 2341834 - RNA, 17 nt, Human
gggcgucuguucccccu

SEQ ID NO: 2341835 - RNA, 13 nt, Human
gggcguggagggc

SEQ ID NO: 2341836 - RNA, 19 nt, Human
gggcguggucacugcuguc

SEQ ID NO: 2341837 - RNA, 21 nt, Human
gggcuacccugagcugaggca

SEQ ID NO: 2341838 - RNA, 20 nt, Human
gggcuacugcagcuuuacau

SEQ ID NO: 2341839 - RNA, 22 nt, Human
gggcuacccugagcugaggcag

SEQ ID NO: 2341840 - RNA, 15 nt, Human
gggccucggagccuc

SEQ ID NO: 2341841 - RNA, 16 nt, Human
gggccucaaggacuug

SEQ ID NO: 2341842 - RNA, 20 nt, Human
gggccucaccgagugggggc

SEQ ID NO: 2341843 - RNA, 20 nt, Human
gggccguaccccacccucag

SEQ ID NO: 2341844 - RNA, 20 nt, Human
gggccucaaaggcccgcucu

SEQ ID NO: 2341845 - RNA, 15 nt, Human
gggccucagugccac

SEQ ID NO: 2341846 - RNA, 13 nt, Human
gggccucagugcc

SEQ ID NO: 2341847 - RNA, 14 nt, Human
gggccucagugcca

SEQ ID NO: 2341848 - RNA, 17 nt, Human
gggccucggagccucau

SEQ ID NO: 2341849 - RNA, 14 nt, Human
gggccucgggaccu

SEQ ID NO: 2341850 - RNA, 16 nt, Human
gggccucgggaccuca

SEQ ID NO: 2341851 - RNA, 23 nt, Human
gggccucugguuuggggcgaggc

SEQ ID NO: 2341852 - RNA, 22 nt, Human
gggccucgguguggagaagcgg

SEQ ID NO: 2341853 - RNA, 18 nt, Human
gggccucuuaugggcugg

SEQ ID NO: 2341854 - RNA, 21 nt, Human
gggccugcaggaccugccugu

SEQ ID NO: 2341855 - RNA, 24 nt, Human
gggccugcaggaccugccuguagc

SEQ ID NO: 2341856 - RNA, 15 nt, Human
aaaaugggacuucuu

SEQ ID NO: 2341857 - RNA, 19 nt, Human
aaaaugggacuucuuuuca

SEQ ID NO: 2341858 - RNA, 21 nt, Human
aaaaugggacuucuuuucaca

SEQ ID NO: 2341859 - RNA, 22 nt, Human
aaaaugggacuucuuuucacau

SEQ ID NO: 2341860 - RNA, 14 nt, Human
aaaauggugccuga

SEQ ID NO: 2341861 - RNA, 18 nt, Human
aaaaugguuuaaaugguc

SEQ ID NO: 2341862 - RNA, 16 nt, Human
aaaaugguuuaaaugg

SEQ ID NO: 2341863 - RNA, 13 nt, Human
gggcugggcagcu

SEQ ID NO: 2341864 - RNA, 14 nt, Human
gggcugggcagcug

SEQ ID NO: 2341865 - RNA, 14 nt, Human
gggcugggcagcua

SEQ ID NO: 2341866 - RNA, 17 nt, Human
gggcuggguucuaccca

SEQ ID NO: 2341867 - RNA, 23 nt, Human
aaaauggccauuugcuuuuucac

SEQ ID NO: 2341868 - RNA, 22 nt, Human
gggcugggugcgaccccaucug

SEQ ID NO: 2341869 - RNA, 19 nt, Human
aaaauggccauuugcuuuu

SEQ ID NO: 2341870 - RNA, 14 nt, Human
gggcugcuccucau

SEQ ID NO: 2341871 - RNA, 11 nt, Human
gggcugcuccu

SEQ ID NO: 2341872 - RNA, 19 nt, Human
gggcugcuccuccagggcc

SEQ ID NO: 2341873 - RNA, 18 nt, Human
gggcugcuccuccagggc

SEQ ID NO: 2341874 - RNA, 16 nt, Human
gggcugcuccuccagg

SEQ ID NO: 2341875 - RNA, 15 nt, Human
gggcugcuccuccag

SEQ ID NO: 2341876 - RNA, 17 nt, Human
gggcugcugaccuccac

SEQ ID NO: 2341877 - RNA, 12 nt, Human
gggcugcuguga

SEQ ID NO: 2341878 - RNA, 12 nt, Human
gggcugggcaga

SEQ ID NO: 2341879 - RNA, 12 nt, Human
gggcugcuuccu

SEQ ID NO: 2341880 - RNA, 17 nt, Human
gggcugcuuccuccugg

SEQ ID NO: 2341881 - RNA, 15 nt, Human
gggcugggcagagga

SEQ ID NO: 2341882 - RNA, 21 nt, Human
gggcugcccuggugcugccac

SEQ ID NO: 2341883 - RNA, 12 nt, Human
gggcucccugac

SEQ ID NO: 2341884 - RNA, 12 nt, Human
gggcugccuggg

SEQ ID NO: 2341885 - RNA, 13 nt, Human
gggcugccugggc

SEQ ID NO: 2341886 - RNA, 14 nt, Human
gggcugccugggcu

SEQ ID NO: 2341887 - RNA, 15 nt, Human
gggcugccugggcug

SEQ ID NO: 2341888 - RNA, 19 nt, Human
gggcugccugggcuguugg

SEQ ID NO: 2341889 - RNA, 21 nt, Human
gggcugccugggcuguuggca

SEQ ID NO: 2341890 - RNA, 20 nt, Human
gggcugcaccggcuggccug

SEQ ID NO: 2341891 - RNA, 21 nt, Human
gggcugcaccggcuggccugg

SEQ ID NO: 2341892 - RNA, 13 nt, Human
gggcucccgcccg

SEQ ID NO: 2341893 - RNA, 20 nt, Human
gggcucagggaccacagcaa

SEQ ID NO: 2341894 - RNA, 17 nt, Human
gggcugcaccggcuggc

SEQ ID NO: 2341895 - RNA, 19 nt, Human
gggcugcaccggcuggccu

SEQ ID NO: 2341896 - RNA, 21 nt, Human
gggcucagcggggacagcucc

SEQ ID NO: 2341897 - RNA, 20 nt, Human
gggcucagccuggugggccu

SEQ ID NO: 2341898 - RNA, 16 nt, Human
gggcucagccuggugg

SEQ ID NO: 2341899 - RNA, 13 nt, Human
gggcucaggaaaa

SEQ ID NO: 2341900 - RNA, 17 nt, Human
gggcucagggaccacag

SEQ ID NO: 2341901 - RNA, 10 nt, Human
gggcuccaga

SEQ ID NO: 2341902 - RNA, 13 nt, Human
gggcuccagacac

SEQ ID NO: 2341903 - RNA, 15 nt, Human
gggcuaguugggcuu

SEQ ID NO: 2341904 - RNA, 20 nt, Human
gggcuaggaaauccagggug

SEQ ID NO: 2341905 - RNA, 14 nt, Human
gggcuagaaccugg

SEQ ID NO: 2341906 - RNA, 15 nt, Human
gggcuagaaccugga

SEQ ID NO: 2341907 - RNA, 17 nt, Human
gggcuagaaccuggaga

SEQ ID NO: 2341908 - RNA, 17 nt, Human
gggcuagaaccuggagg

SEQ ID NO: 2341909 - RNA, 22 nt, Human
gggcucagcaaaagaugcuucu

SEQ ID NO: 2341910 - RNA, 18 nt, Human
gggcuaguugggcuuccu

SEQ ID NO: 2341911 - RNA, 17 nt, Human
gggcucagcggggacag

SEQ ID NO: 2341912 - RNA, 19 nt, Human
gggcucagcggggacagcu

SEQ ID NO: 2341913 - RNA, 13 nt, Human
gggcucagccugg

SEQ ID NO: 2341914 - RNA, 12 nt, Human
gggcucagccug

SEQ ID NO: 2341915 - RNA, 11 nt, Human
gggcucagccu

SEQ ID NO: 2341916 - RNA, 16 nt, Human
gggcuagaaccuggca

SEQ ID NO: 2341917 - RNA, 12 nt, Human
gggcuagaaucu

SEQ ID NO: 2341918 - RNA, 13 nt, Human
aaaauggaaagaa

SEQ ID NO: 2341919 - RNA, 14 nt, Human
aaaauggaaagaau

SEQ ID NO: 2341920 - RNA, 22 nt, Human
aaaaugcuuuuuauuucugcau

SEQ ID NO: 2341921 - RNA, 12 nt, Human
aaaauggaaaga

SEQ ID NO: 2341922 - RNA, 20 nt, Human
aaaauggaagacagcucuua

SEQ ID NO: 2341923 - RNA, 16 nt, Human
gggccagacaugccac

SEQ ID NO: 2341924 - RNA, 22 nt, Human
gggccacuucuggguggggcag

SEQ ID NO: 2341925 - RNA, 17 nt, Human
aaaaugcccuuaaauca

SEQ ID NO: 2341926 - RNA, 17 nt, Human
aaaaugccaagacauga

SEQ ID NO: 2341927 - RNA, 13 nt, Human
aaaaugcuuuuua

SEQ ID NO: 2341928 - RNA, 19 nt, Human
aaaaugcuuuuuauuucug

SEQ ID NO: 2341929 - RNA, 18 nt, Human
aaaaugcuuuuuauuucu

SEQ ID NO: 2341930 - RNA, 23 nt, Human
aaaaugcuguauuagucacagag

SEQ ID NO: 2341931 - RNA, 21 nt, Human
aaaaugcuguauuagucacag

SEQ ID NO: 2341932 - RNA, 18 nt, Human
aaaaugcaacaacaugua

SEQ ID NO: 2341933 - RNA, 14 nt, Human
aaaaugcacauagc

SEQ ID NO: 2341934 - RNA, 14 nt, Human
aaaaugcacguagc

SEQ ID NO: 2341935 - RNA, 22 nt, Human
aaaaugcaaauccuaugugauu

SEQ ID NO: 2341936 - RNA, 20 nt, Human
aaaaugcaaauccuauguga

SEQ ID NO: 2341937 - RNA, 14 nt, Human
aaaaugcauuguau

SEQ ID NO: 2341938 - RNA, 18 nt, Human
aaaaugcagcagggaugc

SEQ ID NO: 2341939 - RNA, 22 nt, Human
aaaaugagacuaugcguuuuua

SEQ ID NO: 2341940 - RNA, 20 nt, Human
aaaaugaccaguaauuguga

SEQ ID NO: 2341941 - RNA, 23 nt, Human
aaaaugagagggcaguguuuccu

SEQ ID NO: 2341942 - RNA, 23 nt, Human
aaaaugauguguacccaaacgug

SEQ ID NO: 2341943 - RNA, 16 nt, Human
aaaaugauguucauuu

SEQ ID NO: 2341944 - RNA, 16 nt, Human
aaaaugauuguaaaau

SEQ ID NO: 2341945 - RNA, 19 nt, Human
aaaaugauuguaaaauagc

SEQ ID NO: 2341946 - RNA, 14 nt, Human
aaaaugauuuuauc

SEQ ID NO: 2341947 - RNA, 20 nt, Human
aaaaugauuguaaaauagcu

SEQ ID NO: 2341948 - RNA, 18 nt, Human
aaaaugcaaauccuaugu

SEQ ID NO: 2341949 - RNA, 14 nt, Human
aaaaugcaaauccu

SEQ ID NO: 2341950 - RNA, 13 nt, Human
aaaauauuuugaa

SEQ ID NO: 2341951 - RNA, 13 nt, Human
aaaaucugaaaau

SEQ ID NO: 2341952 - RNA, 15 nt, Human
aaaaucugcuaggga

SEQ ID NO: 2341953 - RNA, 20 nt, Human
aaaaucugucacguagaacu

SEQ ID NO: 2341954 - RNA, 19 nt, Human
aaaaucugcagaaggaaaa

SEQ ID NO: 2341955 - RNA, 23 nt, Human
aaaaucugaaaaugugaauaaaa

SEQ ID NO: 2341956 - RNA, 21 nt, Human
aaaaugacuaaaaauauuaua

SEQ ID NO: 2341957 - RNA, 18 nt, Human
aaaaugacagauguugaa

SEQ ID NO: 2341958 - RNA, 19 nt, Human
aaaaugaccaguaauugug

SEQ ID NO: 2341959 - RNA, 14 nt, Human
aaaaugacauccca

SEQ ID NO: 2341960 - RNA, 17 nt, Human
aaaaugacagauguuga

SEQ ID NO: 2341961 - RNA, 15 nt, Human
aaaaugacagauguu

SEQ ID NO: 2341962 - RNA, 13 nt, Human
aaaaugacagaug

SEQ ID NO: 2341963 - RNA, 12 nt, Human
aaaaucugucca

SEQ ID NO: 2341964 - RNA, 11 nt, Human
aaaaugagaaa

SEQ ID NO: 2341965 - RNA, 12 nt, Human
aaaaugagaaau

SEQ ID NO: 2341966 - RNA, 11 nt, Human
aaaauaugcau

SEQ ID NO: 2341967 - RNA, 16 nt, Human
aaaauauggaacuucu

SEQ ID NO: 2341968 - RNA, 14 nt, Human
aaaauauuuaaagg

SEQ ID NO: 2341969 - RNA, 15 nt, Human
aaaauauuuguacau

SEQ ID NO: 2341970 - RNA, 20 nt, Human
aaaauauggaacuucuaaua

SEQ ID NO: 2341971 - RNA, 13 nt, Human
aaaauauuuauaa

SEQ ID NO: 2341972 - RNA, 11 nt, Human
aaaauauuuau

SEQ ID NO: 2341973 - RNA, 21 nt, Human
aaaauauuuauaaaacuucuc

SEQ ID NO: 2341974 - RNA, 18 nt, Human
aaaauauuuuauaauuuu

SEQ ID NO: 2341975 - RNA, 12 nt, Human
aaaauauuuuca

SEQ ID NO: 2341976 - RNA, 17 nt, Human
aaaauauuuuauaauuu

SEQ ID NO: 2341977 - RNA, 13 nt, Human
aaaauauuuuaua

SEQ ID NO: 2341978 - RNA, 16 nt, Human
aaaauauuuuccugcc

SEQ ID NO: 2341979 - RNA, 17 nt, Human
aaaaucucaauauuuca

SEQ ID NO: 2341980 - RNA, 12 nt, Human
aaaauauuuuga

SEQ ID NO: 2341981 - RNA, 13 nt, Human
aaaauauuuucau

SEQ ID NO: 2341982 - RNA, 20 nt, Human
aaaauauuuucauacagcau

SEQ ID NO: 2341983 - RNA, 14 nt, Human
aaaauagaagaaua

SEQ ID NO: 2341984 - RNA, 15 nt, Human
aaaauagaagcugua

SEQ ID NO: 2341985 - RNA, 13 nt, Human
aaaauagacacuc

SEQ ID NO: 2341986 - RNA, 15 nt, Human
aaaauauauuuaaug

SEQ ID NO: 2341987 - RNA, 21 nt, Human
aaaauacuugucaauauuuaa

SEQ ID NO: 2341988 - RNA, 9 nt, Human
aaaauacuu

SEQ ID NO: 2341989 - RNA, 18 nt, Human
aaaauaucugaaauguga

SEQ ID NO: 2341990 - RNA, 16 nt, Human
aaaauauauuuaauga

SEQ ID NO: 2341991 - RNA, 13 nt, Human
aaaauaugauauu

SEQ ID NO: 2341992 - RNA, 17 nt, Human
aaaauaucuuuugaccu

SEQ ID NO: 2341993 - RNA, 14 nt, Human
aaaauaucuuuuga

SEQ ID NO: 2341994 - RNA, 22 nt, Human
aaaauaugaccacacuccagcu

SEQ ID NO: 2341995 - RNA, 15 nt, Human
aaaauauuccugcau

SEQ ID NO: 2341996 - RNA, 22 nt, Human
aaaaggagccaauuuaaagaaa

SEQ ID NO: 2341997 - RNA, 13 nt, Human
aaaaggaugcaca

SEQ ID NO: 2341998 - RNA, 16 nt, Human
aaaaggacaccuuuua

SEQ ID NO: 2341999 - RNA, 16 nt, Human
aaaaggacaauuucaa

SEQ ID NO: 2342000 - RNA, 13 nt, Human
ggcugguccaggg

SEQ ID NO: 2342001 - RNA, 23 nt, Human
ggcugguccagggcuagugacuu

SEQ ID NO: 2342002 - RNA, 22 nt, Human
aaaaggaugcacagaguuguua

SEQ ID NO: 2342003 - RNA, 19 nt, Human
aaaaggaugcacagaguug

SEQ ID NO: 2342004 - RNA, 15 nt, Human
aaaaggaugcacaga

SEQ ID NO: 2342005 - RNA, 14 nt, Human
aaaaggaugcacag

SEQ ID NO: 2342006 - RNA, 16 nt, Human
aaaagguuaauaaagu

SEQ ID NO: 2342007 - RNA, 20 nt, Human
aaaaggugccugugaggcag

SEQ ID NO: 2342008 - RNA, 15 nt, Human
aaaagguauuaaauu

SEQ ID NO: 2342009 - RNA, 20 nt, Human
aaaauaacccuuugguuuuu

SEQ ID NO: 2342010 - RNA, 22 nt, Human
aaaaggugccugugaggcaggg

SEQ ID NO: 2342011 - RNA, 19 nt, Human
aaaagguucacuaaagcag

SEQ ID NO: 2342012 - RNA, 17 nt, Human
aaaagguuaauaaagua

SEQ ID NO: 2342013 - RNA, 23 nt, Human
aaaaggaucuuuguggccaagga

SEQ ID NO: 2342014 - RNA, 18 nt, Human
aaaaggauuuuuaucuuu

SEQ ID NO: 2342015 - RNA, 20 nt, Human
aaaaggaucuuuguggccaa

SEQ ID NO: 2342016 - RNA, 19 nt, Human
aaaaggaucuuuguggcca

SEQ ID NO: 2342017 - RNA, 11 nt, Human
aaaaggcagga

SEQ ID NO: 2342018 - RNA, 23 nt, Human
aaaaggccaaaccucuguucagu

SEQ ID NO: 2342019 - RNA, 22 nt, Human
aaaaggccaaaccucuguucag

SEQ ID NO: 2342020 - RNA, 19 nt, Human
aaaaggccaaaccucuguu

SEQ ID NO: 2342021 - RNA, 15 nt, Human
aaaaggccaaaccuc

SEQ ID NO: 2342022 - RNA, 14 nt, Human
aaaaggccaaaccu

SEQ ID NO: 2342023 - RNA, 14 nt, Human
aaaaggcauuguuu

SEQ ID NO: 2342024 - RNA, 16 nt, Human
aaaaggcaaaugugua

SEQ ID NO: 2342025 - RNA, 17 nt, Human
aaaaggcauuguuugag

SEQ ID NO: 2342026 - RNA, 13 nt, Human
aaaauaauucuaa

SEQ ID NO: 2342027 - RNA, 14 nt, Human
aaaauaauucuaaa

SEQ ID NO: 2342028 - RNA, 21 nt, Human
aaaauaaucuauuucuaugag

SEQ ID NO: 2342029 - RNA, 23 nt, Human
aaaauaaucuauuucuaugagaa

SEQ ID NO: 2342030 - RNA, 16 nt, Human
aaaauaauugauuuca

SEQ ID NO: 2342031 - RNA, 22 nt, Human
aaaauaauugauuucaagaccu

SEQ ID NO: 2342032 - RNA, 20 nt, Human
aaaauaauuuuaaacaaagg

SEQ ID NO: 2342033 - RNA, 19 nt, Human
aaaauaauuuuaaacaaag

SEQ ID NO: 2342034 - RNA, 11 nt, Human
aaaauaauuuu

SEQ ID NO: 2342035 - RNA, 13 nt, Human
aaaauaauaauaa

SEQ ID NO: 2342036 - RNA, 22 nt, Human
aaaauaagaaaagauguagauu

SEQ ID NO: 2342037 - RNA, 16 nt, Human
aaaauaagaauagaaa

SEQ ID NO: 2342038 - RNA, 16 nt, Human
aaaauaacuucaagca

SEQ ID NO: 2342039 - RNA, 12 nt, Human
aaaauaagaaaa

SEQ ID NO: 2342040 - RNA, 15 nt, Human
aaaauaagaaaagau

SEQ ID NO: 2342041 - RNA, 14 nt, Human
aaaauaagaaaaga

SEQ ID NO: 2342042 - RNA, 15 nt, Human
aaaauaacuuauauc

SEQ ID NO: 2342043 - RNA, 19 nt, Human
aaaauaaccggauauauac

SEQ ID NO: 2342044 - RNA, 14 nt, Human
aaaauacauuuuau

SEQ ID NO: 2342045 - RNA, 14 nt, Human
aaaauacugccaga

SEQ ID NO: 2342046 - RNA, 15 nt, Human
aaaauacugccagau

SEQ ID NO: 2342047 - RNA, 18 nt, Human
aaaauacugccagaugcu

SEQ ID NO: 2342048 - RNA, 19 nt, Human
aaaauacugccagaugcug

SEQ ID NO: 2342049 - RNA, 20 nt, Human
aaaauacugccagaugcuga

SEQ ID NO: 2342050 - RNA, 13 nt, Human
aaaauaccaagga

SEQ ID NO: 2342051 - RNA, 21 nt, Human
aaaauacaguuugucacauga

SEQ ID NO: 2342052 - RNA, 13 nt, Human
aaaauacauuuua

SEQ ID NO: 2342053 - RNA, 12 nt, Human
aaaauacauuuu

SEQ ID NO: 2342054 - RNA, 17 nt, Human
aaaauacauaagaccau

SEQ ID NO: 2342055 - RNA, 20 nt, Human
aaaauaauuuuuauauuuga

SEQ ID NO: 2342056 - RNA, 14 nt, Human
aaaauacacacuca

SEQ ID NO: 2342057 - RNA, 16 nt, Human
aaaauaauuuuuauau

SEQ ID NO: 2342058 - RNA, 17 nt, Human
aaaauaauuuuuauauu

SEQ ID NO: 2342059 - RNA, 19 nt, Human
cugaagccuuucuuuugga

SEQ ID NO: 2342060 - RNA, 15 nt, Human
cugaagccugcagga

SEQ ID NO: 2342061 - RNA, 13 nt, Human
cugaagccugcag

SEQ ID NO: 2342062 - RNA, 19 nt, Human
cugaaagaacauggacuug

SEQ ID NO: 2342063 - RNA, 13 nt, Human
cugaagccucugg

SEQ ID NO: 2342064 - RNA, 14 nt, Human
cugaagccucuggg

SEQ ID NO: 2342065 - RNA, 15 nt, Human
cugaagccucuggga

SEQ ID NO: 2342066 - RNA, 12 nt, Human
cugaagccucug

SEQ ID NO: 2342067 - RNA, 15 nt, Human
cugaaagacaauaua

SEQ ID NO: 2342068 - RNA, 21 nt, Human
cugaagcuaucguaaaauuaa

SEQ ID NO: 2342069 - RNA, 22 nt, Human
cugaagcuaucguaaaauuaag

SEQ ID NO: 2342070 - RNA, 12 nt, Human
cugaaggagaag

SEQ ID NO: 2342071 - RNA, 23 nt, Human
cugaaggacugugacaggcagca

SEQ ID NO: 2342072 - RNA, 21 nt, Human
cugaaggacugugacaggcag

SEQ ID NO: 2342073 - RNA, 22 nt, Human
cugaaggacugugacaggcagc

SEQ ID NO: 2342074 - RNA, 12 nt, Human
cugaaggacugu

SEQ ID NO: 2342075 - RNA, 13 nt, Human
cugaaggacugug

SEQ ID NO: 2342076 - RNA, 14 nt, Human
cugaaggacuguga

SEQ ID NO: 2342077 - RNA, 15 nt, Human
cugaaggacugugac

SEQ ID NO: 2342078 - RNA, 13 nt, Human
cugaaggagcccc

SEQ ID NO: 2342079 - RNA, 12 nt, Human
cugaaggagccc

SEQ ID NO: 2342080 - RNA, 12 nt, Human
cugaaggagauu

SEQ ID NO: 2342081 - RNA, 16 nt, Human
cugaaggagauuuucc

SEQ ID NO: 2342082 - RNA, 18 nt, Human
cugaaggagauuuuccuu

SEQ ID NO: 2342083 - RNA, 20 nt, Human
cugaaggagauuuuccuucc

SEQ ID NO: 2342084 - RNA, 23 nt, Human
cugaaggacauugcggacagcca

SEQ ID NO: 2342085 - RNA, 23 nt, Human
cugaagccuuugcauuuuggaga

SEQ ID NO: 2342086 - RNA, 20 nt, Human
cugaagcugacgaacuucca

SEQ ID NO: 2342087 - RNA, 12 nt, Human
cugaagcugagg

SEQ ID NO: 2342088 - RNA, 18 nt, Human
cugacaaaaaguuuccau

SEQ ID NO: 2342089 - RNA, 21 nt, Human
cugaaggccuggcccacagca

SEQ ID NO: 2342090 - RNA, 22 nt, Human
cugacaacacucauugaccuga

SEQ ID NO: 2342091 - RNA, 23 nt, Human
cugacaacacucauugaccugag

SEQ ID NO: 2342092 - RNA, 18 nt, Human
cugaaggccccgcccagg

SEQ ID NO: 2342093 - RNA, 21 nt, Human
cugaaggagauuuuccuuccu

SEQ ID NO: 2342094 - RNA, 21 nt, Human
cugaaggagccccauuccugg

SEQ ID NO: 2342095 - RNA, 19 nt, Human
cugaaggccccgcccaggc

SEQ ID NO: 2342096 - RNA, 17 nt, Human
cugaaggcuggguucug

SEQ ID NO: 2342097 - RNA, 13 nt, Human
cugaaggccuggc

SEQ ID NO: 2342098 - RNA, 21 nt, Human
cugaaggccccgcccaggcuu

SEQ ID NO: 2342099 - RNA, 14 nt, Human
cucuuuucucugug

SEQ ID NO: 2342100 - RNA, 21 nt, Human
cucuugauuauccauauugag

SEQ ID NO: 2342101 - RNA, 23 nt, Human
cucuugauaccccccucugucuu

SEQ ID NO: 2342102 - RNA, 16 nt, Human
cucuuuuuggaggugc

SEQ ID NO: 2342103 - RNA, 20 nt, Human
cucuuuuuagggccaggcag

SEQ ID NO: 2342104 - RNA, 22 nt, Human
cucuuuuuagggccaggcaggu

SEQ ID NO: 2342105 - RNA, 11 nt, Human
cucuuuuuaag

SEQ ID NO: 2342106 - RNA, 18 nt, Human
cucuuuucuuuagagcau

SEQ ID NO: 2342107 - RNA, 18 nt, Human
cucuuuuuagggccaggc

SEQ ID NO: 2342108 - RNA, 20 nt, Human
cucuuuugaauccaugcuug

SEQ ID NO: 2342109 - RNA, 13 nt, Human
cucuuuucucuuu

SEQ ID NO: 2342110 - RNA, 21 nt, Human
cucuuuugcuuuauuccagaa

SEQ ID NO: 2342111 - RNA, 13 nt, Human
cucuugaugccug

SEQ ID NO: 2342112 - RNA, 15 nt, Human
cucuugaugccuggc

SEQ ID NO: 2342113 - RNA, 16 nt, Human
cucuugaugccuggcg

SEQ ID NO: 2342114 - RNA, 21 nt, Human
cucuugaugccuggcggggug

SEQ ID NO: 2342115 - RNA, 21 nt, Human
cugaaagaaacaguuaacuuu

SEQ ID NO: 2342116 - RNA, 20 nt, Human
cugaaagaaacaguuaacuu

SEQ ID NO: 2342117 - RNA, 19 nt, Human
cugaaagaaacaguuaacu

SEQ ID NO: 2342118 - RNA, 16 nt, Human
cugaaagaaacaguua

SEQ ID NO: 2342119 - RNA, 15 nt, Human
cugaaagaaacaguu

SEQ ID NO: 2342120 - RNA, 14 nt, Human
cugaaagaaacagu

SEQ ID NO: 2342121 - RNA, 23 nt, Human
cugaaacuuauuuuuuucugauu

SEQ ID NO: 2342122 - RNA, 17 nt, Human
cugaaacuuacacacaa

SEQ ID NO: 2342123 - RNA, 22 nt, Human
cugaaacuuauuuuuuucugau

SEQ ID NO: 2342124 - RNA, 13 nt, Human
cugaaacuucccu

SEQ ID NO: 2342125 - RNA, 14 nt, Human
cugaaacaggagag

SEQ ID NO: 2342126 - RNA, 14 nt, Human
cugaaaccaguguu

SEQ ID NO: 2342127 - RNA, 20 nt, Human
cugaaacaacuuggaaagau

SEQ ID NO: 2342128 - RNA, 16 nt, Human
cugaaacccuggacca

SEQ ID NO: 2342129 - RNA, 13 nt, Human
cugaaacaggaga

SEQ ID NO: 2342130 - RNA, 16 nt, Human
cugaaacaacuuggaa

SEQ ID NO: 2342131 - RNA, 15 nt, Human
cugaaacaacuugga

SEQ ID NO: 2342132 - RNA, 22 nt, Human
cugaaaauugaugggauuuggu

SEQ ID NO: 2342133 - RNA, 17 nt, Human
cucuuuuugggcuccuu

SEQ ID NO: 2342134 - RNA, 21 nt, Human
cucuuuuugggcuccuuuuuc

SEQ ID NO: 2342135 - RNA, 19 nt, Human
cucuuuuuguaccugguga

SEQ ID NO: 2342136 - RNA, 15 nt, Human
cugaaacaacaaaua

SEQ ID NO: 2342137 - RNA, 17 nt, Human
cucuugagccuugaacu

SEQ ID NO: 2342138 - RNA, 16 nt, Human
cucuugagccuugaac

SEQ ID NO: 2342139 - RNA, 18 nt, Human
cucuugagccuugaacuu

SEQ ID NO: 2342140 - RNA, 23 nt, Human
cucuugagccuugaacuuugacc

SEQ ID NO: 2342141 - RNA, 18 nt, Human
cucuccccugcccugcug

SEQ ID NO: 2342142 - RNA, 17 nt, Human
cucuccccugcccugcu

SEQ ID NO: 2342143 - RNA, 16 nt, Human
cucuccccugcccugc

SEQ ID NO: 2342144 - RNA, 15 nt, Human
cucuccccugcccug

SEQ ID NO: 2342145 - RNA, 21 nt, Human
cucuccccuggaacugucucu

SEQ ID NO: 2342146 - RNA, 23 nt, Human
cucuaaagcaauaauggucccau

SEQ ID NO: 2342147 - RNA, 20 nt, Human
cucucaggcaugccugugug

SEQ ID NO: 2342148 - RNA, 19 nt, Human
cucucaggcaugccugugu

SEQ ID NO: 2342149 - RNA, 18 nt, Human
cucucaggcaugccugug

SEQ ID NO: 2342150 - RNA, 21 nt, Human
cucucaggcaugccuguguga

SEQ ID NO: 2342151 - RNA, 21 nt, Human
cucuccccucagagugcaagc

SEQ ID NO: 2342152 - RNA, 17 nt, Human
cucuccccugaccugug

SEQ ID NO: 2342153 - RNA, 15 nt, Human
cucuccccugaccug

SEQ ID NO: 2342154 - RNA, 13 nt, Human
cucugcagcaaua

SEQ ID NO: 2342155 - RNA, 13 nt, Human
cucugcagguccc

SEQ ID NO: 2342156 - RNA, 21 nt, Human
cucugcacuccccugcugggu

SEQ ID NO: 2342157 - RNA, 18 nt, Human
cucugcacuccccugcug

SEQ ID NO: 2342158 - RNA, 23 nt, Human
cucucccggagguugggugggcc

SEQ ID NO: 2342159 - RNA, 17 nt, Human
cucucccgguucuucca

SEQ ID NO: 2342160 - RNA, 20 nt, Human
cucugcacuccccugcuggg

SEQ ID NO: 2342161 - RNA, 13 nt, Human
cucugcuccucuc

SEQ ID NO: 2342162 - RNA, 18 nt, Human
cucugcuccucuccccag

SEQ ID NO: 2342163 - RNA, 20 nt, Human
cucugcuccucuccccagca

SEQ ID NO: 2342164 - RNA, 14 nt, Human
cucugcaggucccu

SEQ ID NO: 2342165 - RNA, 15 nt, Human
cucugcaggucccua

SEQ ID NO: 2342166 - RNA, 16 nt, Human
cucugcaggucccuaa

SEQ ID NO: 2342167 - RNA, 17 nt, Human
cucugcaggucccuaau

SEQ ID NO: 2342168 - RNA, 17 nt, Human
cucugguaauauugacu

SEQ ID NO: 2342169 - RNA, 14 nt, Human
cucugguccauaga

SEQ ID NO: 2342170 - RNA, 14 nt, Human
cucugcugaagguu

SEQ ID NO: 2342171 - RNA, 20 nt, Human
cucuggggucccccaucccc

SEQ ID NO: 2342172 - RNA, 17 nt, Human
cucugggucaguggucc

SEQ ID NO: 2342173 - RNA, 20 nt, Human
cucugggucagugguccaca

SEQ ID NO: 2342174 - RNA, 13 nt, Human
cucugcugacaga

SEQ ID NO: 2342175 - RNA, 13 nt, Human
cucugcucugcgu

SEQ ID NO: 2342176 - RNA, 13 nt, Human
cucugcuccccag

SEQ ID NO: 2342177 - RNA, 14 nt, Human
cucugcugacagac

SEQ ID NO: 2342178 - RNA, 16 nt, Human
cucugcugacagacac

SEQ ID NO: 2342179 - RNA, 23 nt, Human
cucugucagaugggaagacauga

SEQ ID NO: 2342180 - RNA, 18 nt, Human
cucugucacugcaggcac

SEQ ID NO: 2342181 - RNA, 19 nt, Human
cucugucagucacagccac

SEQ ID NO: 2342182 - RNA, 17 nt, Human
cucugucagucacagcc

SEQ ID NO: 2342183 - RNA, 16 nt, Human
cucugucagucacagc

SEQ ID NO: 2342184 - RNA, 14 nt, Human
cucugucagucaca

SEQ ID NO: 2342185 - RNA, 20 nt, Human
cucuguccagggcccugagc

SEQ ID NO: 2342186 - RNA, 14 nt, Human
cucuguccagggcc

SEQ ID NO: 2342187 - RNA, 19 nt, Human
cucuguccaggcacugaga

SEQ ID NO: 2342188 - RNA, 14 nt, Human
cucuguccaggcac

SEQ ID NO: 2342189 - RNA, 13 nt, Human
cucugucagaugg

SEQ ID NO: 2342190 - RNA, 20 nt, Human
cucugucagucacagccacc

SEQ ID NO: 2342191 - RNA, 12 nt, Human
cucuguccaggc

SEQ ID NO: 2342192 - RNA, 22 nt, Human
cucuggucugggugccccgucc

SEQ ID NO: 2342193 - RNA, 20 nt, Human
cucuggucgcuccugcccac

SEQ ID NO: 2342194 - RNA, 17 nt, Human
cucuggucgcuccugcc

SEQ ID NO: 2342195 - RNA, 18 nt, Human
cucuggucgcuccugccc

SEQ ID NO: 2342196 - RNA, 16 nt, Human
cucuggucgcuccugc

SEQ ID NO: 2342197 - RNA, 19 nt, Human
cucuggugacaccagccuu

SEQ ID NO: 2342198 - RNA, 18 nt, Human
cucuggugacaccagccu

SEQ ID NO: 2342199 - RNA, 16 nt, Human
cucuggugacaccagc

SEQ ID NO: 2342200 - RNA, 20 nt, Human
cucuggucuucuuuggguaa

SEQ ID NO: 2342201 - RNA, 20 nt, Human
cucuggugacaccagccuuu

SEQ ID NO: 2342202 - RNA, 21 nt, Human
cucuggugagucuuggcggca

SEQ ID NO: 2342203 - RNA, 22 nt, Human
cucuggugagucuuggcggcag

SEQ ID NO: 2342204 - RNA, 23 nt, Human
cucuggugagucuuggcggcagc

SEQ ID NO: 2342205 - RNA, 14 nt, Human
cucuuauugcccac

SEQ ID NO: 2342206 - RNA, 15 nt, Human
cucuuauugcccacg

SEQ ID NO: 2342207 - RNA, 19 nt, Human
cucuuauugcccacgcugg

SEQ ID NO: 2342208 - RNA, 20 nt, Human
cucuuauugcccacgcugga

SEQ ID NO: 2342209 - RNA, 22 nt, Human
cucuguccagggcccugagcuc

SEQ ID NO: 2342210 - RNA, 21 nt, Human
cucuguccagggcccugagcu

SEQ ID NO: 2342211 - RNA, 14 nt, Human
cucuuagauggauu

SEQ ID NO: 2342212 - RNA, 22 nt, Human
cucuuagaugcaguucugaaga

SEQ ID NO: 2342213 - RNA, 13 nt, Human
cucuuauugccca

SEQ ID NO: 2342214 - RNA, 21 nt, Human
cucuuagcauuuuaauuagau

SEQ ID NO: 2342215 - RNA, 19 nt, Human
cucuuagcagcuuccagau

SEQ ID NO: 2342216 - RNA, 17 nt, Human
cucuuagcagcuuccag

SEQ ID NO: 2342217 - RNA, 18 nt, Human
cucuuagcagcuuccaga

SEQ ID NO: 2342218 - RNA, 11 nt, Human
cucuucagaaa

SEQ ID NO: 2342219 - RNA, 16 nt, Human
cucuucaccccccacu

SEQ ID NO: 2342220 - RNA, 17 nt, Human
cucuucaccccccacuc

SEQ ID NO: 2342221 - RNA, 18 nt, Human
cucuucaccccccacuca

SEQ ID NO: 2342222 - RNA, 14 nt, Human
cucuucaaucucuu

SEQ ID NO: 2342223 - RNA, 19 nt, Human
cucuucagaucucuaacuu

SEQ ID NO: 2342224 - RNA, 18 nt, Human
cucuucagaucucuaacu

SEQ ID NO: 2342225 - RNA, 15 nt, Human
cucuuauuuuacaau

SEQ ID NO: 2342226 - RNA, 12 nt, Human
cucuuauuugcu

SEQ ID NO: 2342227 - RNA, 19 nt, Human
cucuuagcuccccuccaac

SEQ ID NO: 2342228 - RNA, 18 nt, Human
cucuuagcuccccuccaa

SEQ ID NO: 2342229 - RNA, 15 nt, Human
cucuuagcuccccuc

SEQ ID NO: 2342230 - RNA, 17 nt, Human
cucuuagcuccccucca

SEQ ID NO: 2342231 - RNA, 20 nt, Human
cucuucaacugaccagccuc

SEQ ID NO: 2342232 - RNA, 18 nt, Human
cucuucaaggacuuucug

SEQ ID NO: 2342233 - RNA, 17 nt, Human
cucuucaaauuagaaga

SEQ ID NO: 2342234 - RNA, 16 nt, Human
cucuucaacugaccag

SEQ ID NO: 2342235 - RNA, 17 nt, Human
cucuucaacugaccagc

SEQ ID NO: 2342236 - RNA, 16 nt, Human
cucuucaggccucccu

SEQ ID NO: 2342237 - RNA, 15 nt, Human
cucuucaggccuccc

SEQ ID NO: 2342238 - RNA, 14 nt, Human
cucuucaggccucc

SEQ ID NO: 2342239 - RNA, 13 nt, Human
cucuucaggccuc

SEQ ID NO: 2342240 - RNA, 17 nt, Human
cucuucagaggcccucg

SEQ ID NO: 2342241 - RNA, 21 nt, Human
cucuucagaaagugugcuuua

SEQ ID NO: 2342242 - RNA, 13 nt, Human
cucuucagaggcc

SEQ ID NO: 2342243 - RNA, 17 nt, Human
cucuucaggccucccuc

SEQ ID NO: 2342244 - RNA, 23 nt, Human
cucuucaggaagaaaggagucug

SEQ ID NO: 2342245 - RNA, 15 nt, Human
cugaccugucaugcc

SEQ ID NO: 2342246 - RNA, 17 nt, Human
cugaccugucaugcccc

SEQ ID NO: 2342247 - RNA, 18 nt, Human
cugaccugucaugccccc

SEQ ID NO: 2342248 - RNA, 19 nt, Human
cugaccugucaugcccccc

SEQ ID NO: 2342249 - RNA, 20 nt, Human
cugaccugucaugccccccu

SEQ ID NO: 2342250 - RNA, 22 nt, Human
cugaccugucaugccccccuca

SEQ ID NO: 2342251 - RNA, 23 nt, Human
cugagacagcccgggcucugccu

SEQ ID NO: 2342252 - RNA, 21 nt, Human
cugagacucgcgacaaugcaa

SEQ ID NO: 2342253 - RNA, 20 nt, Human
cugagaccugacaagcacug

SEQ ID NO: 2342254 - RNA, 20 nt, Human
cugagaccccuggccuccgg

SEQ ID NO: 2342255 - RNA, 21 nt, Human
cugagaccccuggccuccggc

SEQ ID NO: 2342256 - RNA, 19 nt, Human
cugagaccaguugggagca

SEQ ID NO: 2342257 - RNA, 22 nt, Human
cugagaccaguugggagcacug

SEQ ID NO: 2342258 - RNA, 13 nt, Human
cugagaccccugg

SEQ ID NO: 2342259 - RNA, 15 nt, Human
cugagaccccuggcc

SEQ ID NO: 2342260 - RNA, 16 nt, Human
cugagaccccuggccu

SEQ ID NO: 2342261 - RNA, 17 nt, Human
cugagaccccuggccuc

SEQ ID NO: 2342262 - RNA, 19 nt, Human
cugagaccccuggccuccg

SEQ ID NO: 2342263 - RNA, 14 nt, Human
cugagaccaguugg

SEQ ID NO: 2342264 - RNA, 13 nt, Human
cugagacaggaga

SEQ ID NO: 2342265 - RNA, 15 nt, Human
cugagacaggagaau

SEQ ID NO: 2342266 - RNA, 23 nt, Human
cugagaccaguugggagcacugg

SEQ ID NO: 2342267 - RNA, 13 nt, Human
cugaccugcaggc

SEQ ID NO: 2342268 - RNA, 12 nt, Human
cugaccugcagg

SEQ ID NO: 2342269 - RNA, 14 nt, Human
cugaccugcacugg

SEQ ID NO: 2342270 - RNA, 20 nt, Human
cugaccccaaagagccugga

SEQ ID NO: 2342271 - RNA, 23 nt, Human
cugaccccaaagagccuggagaa

SEQ ID NO: 2342272 - RNA, 21 nt, Human
cugaccccagugguauccugu

SEQ ID NO: 2342273 - RNA, 13 nt, Human
cugaccugaggcu

SEQ ID NO: 2342274 - RNA, 21 nt, Human
cugaccugaggcuccugugcu

SEQ ID NO: 2342275 - RNA, 20 nt, Human
cugaccccaaacaccuucca

SEQ ID NO: 2342276 - RNA, 21 nt, Human
cugaccccaaacaccuuccag

SEQ ID NO: 2342277 - RNA, 22 nt, Human
cugaccccaaacaccuuccagc

SEQ ID NO: 2342278 - RNA, 21 nt, Human
cugacccaugcugcccuguga

SEQ ID NO: 2342279 - RNA, 22 nt, Human
cugacccaugcugcccugugag

SEQ ID NO: 2342280 - RNA, 20 nt, Human
cugagagacccaaggaggaa

SEQ ID NO: 2342281 - RNA, 13 nt, Human
cugagagacuuuu

SEQ ID NO: 2342282 - RNA, 16 nt, Human
cugagagacuuuuaau

SEQ ID NO: 2342283 - RNA, 18 nt, Human
cugagagacuuuuaauca

SEQ ID NO: 2342284 - RNA, 19 nt, Human
cugagagacccaaggagga

SEQ ID NO: 2342285 - RNA, 17 nt, Human
cugagagacccaaggag

SEQ ID NO: 2342286 - RNA, 15 nt, Human
cugagagacccaagg

SEQ ID NO: 2342287 - RNA, 12 nt, Human
cugagagaaaua

SEQ ID NO: 2342288 - RNA, 14 nt, Human
cugagagaaaauaa

SEQ ID NO: 2342289 - RNA, 14 nt, Human
cugagacugcggga

SEQ ID NO: 2342290 - RNA, 21 nt, Human
cugagacuuucagugcacugu

SEQ ID NO: 2342291 - RNA, 17 nt, Human
cugagacucucuuagga

SEQ ID NO: 2342292 - RNA, 21 nt, Human
cugagacucucuuaggagcag

SEQ ID NO: 2342293 - RNA, 22 nt, Human
cugagacucgcgacaaugcaaa

SEQ ID NO: 2342294 - RNA, 24 nt, Human
cugagagaguggcauuggcagcag

SEQ ID NO: 2342295 - RNA, 14 nt, Human
cugagagaguggca

SEQ ID NO: 2342296 - RNA, 13 nt, Human
cugagagccccag

SEQ ID NO: 2342297 - RNA, 14 nt, Human
cugagagccccagc

SEQ ID NO: 2342298 - RNA, 17 nt, Human
cugagagccccagcuga

SEQ ID NO: 2342299 - RNA, 15 nt, Human
cugagagccccagcu

SEQ ID NO: 2342300 - RNA, 16 nt, Human
cugagagccccagcug

SEQ ID NO: 2342301 - RNA, 20 nt, Human
cugagaguauuuaggcagau

SEQ ID NO: 2342302 - RNA, 19 nt, Human
cugagaguauuuaggcaga

SEQ ID NO: 2342303 - RNA, 17 nt, Human
cugagaguagagucacu

SEQ ID NO: 2342304 - RNA, 18 nt, Human
cugagauaccagcgagga

SEQ ID NO: 2342305 - RNA, 12 nt, Human
cugagauaugaa

SEQ ID NO: 2342306 - RNA, 16 nt, Human
cugagauaugaacaua

SEQ ID NO: 2342307 - RNA, 15 nt, Human
cugagauaugaacau

SEQ ID NO: 2342308 - RNA, 14 nt, Human
cugagaguuuaguu

SEQ ID NO: 2342309 - RNA, 15 nt, Human
cugagaguuuaguug

SEQ ID NO: 2342310 - RNA, 13 nt, Human
cugagagucugca

SEQ ID NO: 2342311 - RNA, 21 nt, Human
cugagaggacuuuucuuugug

SEQ ID NO: 2342312 - RNA, 22 nt, Human
cugagaggacuuuucuuugugg

SEQ ID NO: 2342313 - RNA, 17 nt, Human
cugagaggcaggcauag

SEQ ID NO: 2342314 - RNA, 14 nt, Human
cugagaggcaggca

SEQ ID NO: 2342315 - RNA, 15 nt, Human
cugagaggcaggcau

SEQ ID NO: 2342316 - RNA, 12 nt, Human
cugagaggccac

SEQ ID NO: 2342317 - RNA, 12 nt, Human
cugagaggcagg

SEQ ID NO: 2342318 - RNA, 13 nt, Human
cugagaggcaggc

SEQ ID NO: 2342319 - RNA, 20 nt, Human
cugacaaccaccgcucccca

SEQ ID NO: 2342320 - RNA, 21 nt, Human
cugacaaccaccgcuccccag

SEQ ID NO: 2342321 - RNA, 19 nt, Human
cugacaacagacuucugaa

SEQ ID NO: 2342322 - RNA, 18 nt, Human
cugacaacagacuucuga

SEQ ID NO: 2342323 - RNA, 15 nt, Human
cugacaacagacuuc

SEQ ID NO: 2342324 - RNA, 13 nt, Human
cugacaacuugaa

SEQ ID NO: 2342325 - RNA, 18 nt, Human
cugacaaccacuggucug

SEQ ID NO: 2342326 - RNA, 20 nt, Human
cugacaaccacuggucugua

SEQ ID NO: 2342327 - RNA, 22 nt, Human
cugacaaccaccgcuccccagc

SEQ ID NO: 2342328 - RNA, 19 nt, Human
cugaguagcuggauuacag

SEQ ID NO: 2342329 - RNA, 20 nt, Human
cugaguagaaaggccuuuaa

SEQ ID NO: 2342330 - RNA, 12 nt, Human
cugaguagaaag

SEQ ID NO: 2342331 - RNA, 14 nt, Human
cugaguagaaaggc

SEQ ID NO: 2342332 - RNA, 19 nt, Human
cugaguagaaaggccuuua

SEQ ID NO: 2342333 - RNA, 12 nt, Human
cugaggugggag

SEQ ID NO: 2342334 - RNA, 21 nt, Human
cugaguacguugugcauuugg

SEQ ID NO: 2342335 - RNA, 20 nt, Human
cugaguacguugugcauuug

SEQ ID NO: 2342336 - RNA, 19 nt, Human
cugaguacguugugcauuu

SEQ ID NO: 2342337 - RNA, 17 nt, Human
cugaguacguugugcau

SEQ ID NO: 2342338 - RNA, 18 nt, Human
cugaguacguugugcauu

SEQ ID NO: 2342339 - RNA, 22 nt, Human
cugaggacuuaaaauauuccug

SEQ ID NO: 2342340 - RNA, 17 nt, Human
cugaggacagcuguccu

SEQ ID NO: 2342341 - RNA, 17 nt, Human
cugaggacauuccaaga

SEQ ID NO: 2342342 - RNA, 14 nt, Human
cugaggaccagcca

SEQ ID NO: 2342343 - RNA, 14 nt, Human
cugaggacagcugu

SEQ ID NO: 2342344 - RNA, 15 nt, Human
cugaggacagcuguc

SEQ ID NO: 2342345 - RNA, 16 nt, Human
cugaggacagcugucc

SEQ ID NO: 2342346 - RNA, 13 nt, Human
cugaggaggccuc

SEQ ID NO: 2342347 - RNA, 11 nt, Human
cugaggagaaa

SEQ ID NO: 2342348 - RNA, 14 nt, Human
cugaggaggccucc

SEQ ID NO: 2342349 - RNA, 15 nt, Human
cugaggaggccucca

SEQ ID NO: 2342350 - RNA, 16 nt, Human
cugaggaggccuccau

SEQ ID NO: 2342351 - RNA, 19 nt, Human
cugaggaggccuccaucuc

SEQ ID NO: 2342352 - RNA, 21 nt, Human
cugaggucucuugagggagcu

SEQ ID NO: 2342353 - RNA, 19 nt, Human
cugaggucucuugagggag

SEQ ID NO: 2342354 - RNA, 16 nt, Human
cugaggucucuugagg

SEQ ID NO: 2342355 - RNA, 19 nt, Human
cugaggucucgcugaugcu

SEQ ID NO: 2342356 - RNA, 17 nt, Human
cugaggucuagaaauag

SEQ ID NO: 2342357 - RNA, 17 nt, Human
cugaggugaaagggagc

SEQ ID NO: 2342358 - RNA, 13 nt, Human
cugaggucuggcu

SEQ ID NO: 2342359 - RNA, 14 nt, Human
cugaggucuggcug

SEQ ID NO: 2342360 - RNA, 19 nt, Human
cugaggugaaagggagcua

SEQ ID NO: 2342361 - RNA, 16 nt, Human
cugaggucuggcugcu

SEQ ID NO: 2342362 - RNA, 17 nt, Human
cugaggugccuguccca

SEQ ID NO: 2342363 - RNA, 19 nt, Human
cugaggugccugucccacc

SEQ ID NO: 2342364 - RNA, 22 nt, Human
cugaggugccugucccaccccc

SEQ ID NO: 2342365 - RNA, 15 nt, Human
cugaggaaaggccag

SEQ ID NO: 2342366 - RNA, 15 nt, Human
cugagcuuucugcua

SEQ ID NO: 2342367 - RNA, 14 nt, Human
cugagcuuucugcu

SEQ ID NO: 2342368 - RNA, 23 nt, Human
cugagauggaacccuuuuggccc

SEQ ID NO: 2342369 - RNA, 14 nt, Human
cugagaucgugccg

SEQ ID NO: 2342370 - RNA, 16 nt, Human
cugagaucucugcagg

SEQ ID NO: 2342371 - RNA, 18 nt, Human
cugagaucucugcaggaa

SEQ ID NO: 2342372 - RNA, 17 nt, Human
cugagaucucugcagga

SEQ ID NO: 2342373 - RNA, 21 nt, Human
cugagaucaaaacgguuuuac

SEQ ID NO: 2342374 - RNA, 23 nt, Human
cugagauaugaacauauuguuga

SEQ ID NO: 2342375 - RNA, 21 nt, Human
cugagauaugaacauauuguu

SEQ ID NO: 2342376 - RNA, 23 nt, Human
cugaggacacuaaccacgcugga

SEQ ID NO: 2342377 - RNA, 16 nt, Human
cugaggaauuuucuuu

SEQ ID NO: 2342378 - RNA, 13 nt, Human
cugaggacagcug

SEQ ID NO: 2342379 - RNA, 21 nt, Human
cugaggaauccagacccggcu

SEQ ID NO: 2342380 - RNA, 20 nt, Human
cugaggacacuaaccacgcu

SEQ ID NO: 2342381 - RNA, 17 nt, Human
cugaggaauccagaccc

SEQ ID NO: 2342382 - RNA, 20 nt, Human
cugaggaauccagacccggc

SEQ ID NO: 2342383 - RNA, 22 nt, Human
cugaggaaaggccagcuggcag

SEQ ID NO: 2342384 - RNA, 20 nt, Human
cugaggaaaggccagcuggc

SEQ ID NO: 2342385 - RNA, 19 nt, Human
cugaggaaaggccagcugg

SEQ ID NO: 2342386 - RNA, 18 nt, Human
cugaggaaaggccagcug

SEQ ID NO: 2342387 - RNA, 17 nt, Human
cugaggaaaggccagcu

SEQ ID NO: 2342388 - RNA, 16 nt, Human
cugaggaaaggccagc

SEQ ID NO: 2342389 - RNA, 12 nt, Human
cugagcuuugca

SEQ ID NO: 2342390 - RNA, 15 nt, Human
cugagcuuugcaugu

SEQ ID NO: 2342391 - RNA, 14 nt, Human
cugaggaauccaga

SEQ ID NO: 2342392 - RNA, 20 nt, Human
cugaguagcuggauuacagg

SEQ ID NO: 2342393 - RNA, 14 nt, Human
cugaguagcuggga

SEQ ID NO: 2342394 - RNA, 20 nt, Human
cugaguagcugggauuacag

SEQ ID NO: 2342395 - RNA, 15 nt, Human
cugaguagcugggau

SEQ ID NO: 2342396 - RNA, 15 nt, Human
cugagucaccaggaa

SEQ ID NO: 2342397 - RNA, 14 nt, Human
cugagucaccagga

SEQ ID NO: 2342398 - RNA, 20 nt, Human
cugaguauguuaagcucuuu

SEQ ID NO: 2342399 - RNA, 22 nt, Human
cugaguaucuccucgcaagcug

SEQ ID NO: 2342400 - RNA, 21 nt, Human
cugaguaucuccucgcaagcu

SEQ ID NO: 2342401 - RNA, 20 nt, Human
cugagucacccaugaagaca

SEQ ID NO: 2342402 - RNA, 17 nt, Human
cugagucaccaggaaug

SEQ ID NO: 2342403 - RNA, 15 nt, Human
cucauguucugcuuu

SEQ ID NO: 2342404 - RNA, 9 nt, Human
cucaugugu

SEQ ID NO: 2342405 - RNA, 16 nt, Human
cucaugugugcaacag

SEQ ID NO: 2342406 - RNA, 16 nt, Human
cucauguucugcuuuc

SEQ ID NO: 2342407 - RNA, 12 nt, Human
cucauguguaug

SEQ ID NO: 2342408 - RNA, 18 nt, Human
cucaugugugcucuucuu

SEQ ID NO: 2342409 - RNA, 21 nt, Human
cuccaaccugcaaagaucugu

SEQ ID NO: 2342410 - RNA, 14 nt, Human
cuccaaccuggaca

SEQ ID NO: 2342411 - RNA, 19 nt, Human
cucaugugugcucuucuuc

SEQ ID NO: 2342412 - RNA, 18 nt, Human
cuccaaccuggggggcag

SEQ ID NO: 2342413 - RNA, 18 nt, Human
cuccaacuggauuauaaa

SEQ ID NO: 2342414 - RNA, 14 nt, Human
cuccaagaaugcug

SEQ ID NO: 2342415 - RNA, 15 nt, Human
cuccaagaaugcuga

SEQ ID NO: 2342416 - RNA, 16 nt, Human
cuccaagaaugcugaa

SEQ ID NO: 2342417 - RNA, 16 nt, Human
cucaugccucagccuc

SEQ ID NO: 2342418 - RNA, 12 nt, Human
cucaugccucag

SEQ ID NO: 2342419 - RNA, 17 nt, Human
cucaugccccuggcugg

SEQ ID NO: 2342420 - RNA, 16 nt, Human
cucaugccccuggcug

SEQ ID NO: 2342421 - RNA, 23 nt, Human
cucaugcccccuuucagaugucu

SEQ ID NO: 2342422 - RNA, 12 nt, Human
cucaugugaucc

SEQ ID NO: 2342423 - RNA, 14 nt, Human
cucaugugauccuu

SEQ ID NO: 2342424 - RNA, 16 nt, Human
cucaugugauccuuuu

SEQ ID NO: 2342425 - RNA, 12 nt, Human
cucauguggcug

SEQ ID NO: 2342426 - RNA, 13 nt, Human
cucauguggcugg

SEQ ID NO: 2342427 - RNA, 14 nt, Human
cucauguggcugga

SEQ ID NO: 2342428 - RNA, 15 nt, Human
cucauguggcuggaa

SEQ ID NO: 2342429 - RNA, 21 nt, Human
cuccaagaccuucuccuucac

SEQ ID NO: 2342430 - RNA, 15 nt, Human
cuccaagaccuucuc

SEQ ID NO: 2342431 - RNA, 17 nt, Human
cuccaagaaugcugaaa

SEQ ID NO: 2342432 - RNA, 20 nt, Human
cuccaagaaugcugaaacca

SEQ ID NO: 2342433 - RNA, 21 nt, Human
cuccaagaccuguugguucca

SEQ ID NO: 2342434 - RNA, 22 nt, Human
cuccaagaccuucuccuucacc

SEQ ID NO: 2342435 - RNA, 13 nt, Human
cuccaagcaggac

SEQ ID NO: 2342436 - RNA, 14 nt, Human
cuccaagcaggaca

SEQ ID NO: 2342437 - RNA, 22 nt, Human
cuccaagcaggacauggacaag

SEQ ID NO: 2342438 - RNA, 24 nt, Human
cuccaagcaggacauggacaagga

SEQ ID NO: 2342439 - RNA, 13 nt, Human
cuccaagccagcg

SEQ ID NO: 2342440 - RNA, 15 nt, Human
cuccaagccccaucu

SEQ ID NO: 2342441 - RNA, 23 nt, Human
cuccaagcccaguucagcuuggg

SEQ ID NO: 2342442 - RNA, 18 nt, Human
cuccaagcuccaucucca

SEQ ID NO: 2342443 - RNA, 19 nt, Human
cuccaagcuccaucuccac

SEQ ID NO: 2342444 - RNA, 14 nt, Human
cuccaagcuccauc

SEQ ID NO: 2342445 - RNA, 17 nt, Human
cuccaagccccaucuuc

SEQ ID NO: 2342446 - RNA, 18 nt, Human
cuccaagccccaucuucu

SEQ ID NO: 2342447 - RNA, 13 nt, Human
cuccaagcuccca

SEQ ID NO: 2342448 - RNA, 14 nt, Human
cuccaagcucccag

SEQ ID NO: 2342449 - RNA, 15 nt, Human
cuccaagcucccagg

SEQ ID NO: 2342450 - RNA, 16 nt, Human
cuccaagcucccaggc

SEQ ID NO: 2342451 - RNA, 16 nt, Human
cuccacuggauggagg

SEQ ID NO: 2342452 - RNA, 23 nt, Human
cuccacuggccggagucagugcc

SEQ ID NO: 2342453 - RNA, 9 nt, Human
cuccacugu

SEQ ID NO: 2342454 - RNA, 11 nt, Human
cuccacuguca

SEQ ID NO: 2342455 - RNA, 12 nt, Human
cuccacugucac

SEQ ID NO: 2342456 - RNA, 13 nt, Human
cuccacugucaca

SEQ ID NO: 2342457 - RNA, 16 nt, Human
cuccacugucacauug

SEQ ID NO: 2342458 - RNA, 15 nt, Human
cuccacuuggucugu

SEQ ID NO: 2342459 - RNA, 13 nt, Human
cuccacuuggucu

SEQ ID NO: 2342460 - RNA, 22 nt, Human
cuccacuuggucugugagaugc

SEQ ID NO: 2342461 - RNA, 21 nt, Human
cuccacuuggucugugagaug

SEQ ID NO: 2342462 - RNA, 17 nt, Human
cuccacuuggucuguga

SEQ ID NO: 2342463 - RNA, 16 nt, Human
cuccacuuggucugug

SEQ ID NO: 2342464 - RNA, 14 nt, Human
cucaguaaaaugaa

SEQ ID NO: 2342465 - RNA, 20 nt, Human
cucagguuugccugagggcg

SEQ ID NO: 2342466 - RNA, 16 nt, Human
cucaguaaagcacuug

SEQ ID NO: 2342467 - RNA, 19 nt, Human
cucaguaagacgacaagga

SEQ ID NO: 2342468 - RNA, 13 nt, Human
cucagucucagga

SEQ ID NO: 2342469 - RNA, 22 nt, Human
cucaguccuccccucacagccu

SEQ ID NO: 2342470 - RNA, 23 nt, Human
cucaguccuccccucacagccuc

SEQ ID NO: 2342471 - RNA, 23 nt, Human
cucaguacuuuggaggccccuau

SEQ ID NO: 2342472 - RNA, 15 nt, Human
cucagucucaggagc

SEQ ID NO: 2342473 - RNA, 14 nt, Human
cucagucucaggag

SEQ ID NO: 2342474 - RNA, 13 nt, Human
cucagucucccuc

SEQ ID NO: 2342475 - RNA, 21 nt, Human
cucaguacuuuggaggccccu

SEQ ID NO: 2342476 - RNA, 20 nt, Human
cucaguacuuuggaggcccc

SEQ ID NO: 2342477 - RNA, 19 nt, Human
cucaguacuuuggaggccc

SEQ ID NO: 2342478 - RNA, 18 nt, Human
cucaguacuuuggaggcc

SEQ ID NO: 2342479 - RNA, 17 nt, Human
cucaguacuuuggaggc

SEQ ID NO: 2342480 - RNA, 12 nt, Human
cucaguacuuug

SEQ ID NO: 2342481 - RNA, 21 nt, Human
cucaguaaguaucuggaggaa

SEQ ID NO: 2342482 - RNA, 21 nt, Human
cucaguaagacgacaaggaaa

SEQ ID NO: 2342483 - RNA, 20 nt, Human
cucaguaaguaucuggagga

SEQ ID NO: 2342484 - RNA, 12 nt, Human
cucaucugugau

SEQ ID NO: 2342485 - RNA, 19 nt, Human
cucaucugggggaguggaa

SEQ ID NO: 2342486 - RNA, 13 nt, Human
cucaucuuacugu

SEQ ID NO: 2342487 - RNA, 18 nt, Human
cucaucugucccuccggg

SEQ ID NO: 2342488 - RNA, 17 nt, Human
cucaucugucccuccgg

SEQ ID NO: 2342489 - RNA, 15 nt, Human
cucaucugucccucc

SEQ ID NO: 2342490 - RNA, 13 nt, Human
cucaucugucccu

SEQ ID NO: 2342491 - RNA, 14 nt, Human
cucaucugucacca

SEQ ID NO: 2342492 - RNA, 12 nt, Human
cucaucugucac

SEQ ID NO: 2342493 - RNA, 18 nt, Human
cucaucuuagugccugag

SEQ ID NO: 2342494 - RNA, 22 nt, Human
cucaugcaucuccaccugcucc

SEQ ID NO: 2342495 - RNA, 13 nt, Human
cucaugcccaccc

SEQ ID NO: 2342496 - RNA, 16 nt, Human
cucaugcccacccccu

SEQ ID NO: 2342497 - RNA, 17 nt, Human
cucaugcccacccccug

SEQ ID NO: 2342498 - RNA, 19 nt, Human
cucaugcccacccccugcc

SEQ ID NO: 2342499 - RNA, 14 nt, Human
cucaugccccuggc

SEQ ID NO: 2342500 - RNA, 17 nt, Human
cucaugcccccuuucag

SEQ ID NO: 2342501 - RNA, 22 nt, Human
cucaugcccccuuucagauguc

SEQ ID NO: 2342502 - RNA, 20 nt, Human
cucaugcccacccccugccc

SEQ ID NO: 2342503 - RNA, 21 nt, Human
cucaugcccacccccugcccu

SEQ ID NO: 2342504 - RNA, 22 nt, Human
cucaugcccacccccugcccug

SEQ ID NO: 2342505 - RNA, 23 nt, Human
cucaugcccacccccugcccugc

SEQ ID NO: 2342506 - RNA, 16 nt, Human
cucagucucaggagca

SEQ ID NO: 2342507 - RNA, 13 nt, Human
cucagucucccuu

SEQ ID NO: 2342508 - RNA, 17 nt, Human
cucagucucccucccuu

SEQ ID NO: 2342509 - RNA, 16 nt, Human
cucagucucccucccu

SEQ ID NO: 2342510 - RNA, 15 nt, Human
cucagucucccuccc

SEQ ID NO: 2342511 - RNA, 14 nt, Human
cucagucucccuuu

SEQ ID NO: 2342512 - RNA, 18 nt, Human
cucaucugggggagugga

SEQ ID NO: 2342513 - RNA, 14 nt, Human
cucaucugcugguc

SEQ ID NO: 2342514 - RNA, 15 nt, Human
cucaucugcuggucc

SEQ ID NO: 2342515 - RNA, 16 nt, Human
cucaucugcugguccg

SEQ ID NO: 2342516 - RNA, 20 nt, Human
cucaucugcugguccguggg

SEQ ID NO: 2342517 - RNA, 22 nt, Human
cucccacccccuucucugcucc

SEQ ID NO: 2342518 - RNA, 18 nt, Human
cucccacccccuucucug

SEQ ID NO: 2342519 - RNA, 22 nt, Human
cucccacccccaucucucccuc

SEQ ID NO: 2342520 - RNA, 20 nt, Human
cucccacccccaucucuccc

SEQ ID NO: 2342521 - RNA, 19 nt, Human
cucccacccccaucucucc

SEQ ID NO: 2342522 - RNA, 15 nt, Human
cucccacccccaucu

SEQ ID NO: 2342523 - RNA, 23 nt, Human
cucccaccccacccccuucagug

SEQ ID NO: 2342524 - RNA, 22 nt, Human
cucccaccccacccccuucagu

SEQ ID NO: 2342525 - RNA, 19 nt, Human
cucccaccccacccccuuc

SEQ ID NO: 2342526 - RNA, 13 nt, Human
cucccaccccacc

SEQ ID NO: 2342527 - RNA, 12 nt, Human
cucccaccccac

SEQ ID NO: 2342528 - RNA, 13 nt, Human
cucccacccaccg

SEQ ID NO: 2342529 - RNA, 14 nt, Human
cucccacccaccgc

SEQ ID NO: 2342530 - RNA, 17 nt, Human
cucccacccaccgccac

SEQ ID NO: 2342531 - RNA, 19 nt, Human
cucccaccacagcaggugu

SEQ ID NO: 2342532 - RNA, 14 nt, Human
cucccaccaggcua

SEQ ID NO: 2342533 - RNA, 14 nt, Human
cucccaccacagca

SEQ ID NO: 2342534 - RNA, 13 nt, Human
cucccaccacagc

SEQ ID NO: 2342535 - RNA, 21 nt, Human
cuccaggggcugcuuccuccu

SEQ ID NO: 2342536 - RNA, 23 nt, Human
cuccagggccacgugccaggccc

SEQ ID NO: 2342537 - RNA, 19 nt, Human
cuccagggccacgugccag

SEQ ID NO: 2342538 - RNA, 18 nt, Human
cuccagggccacgugcca

SEQ ID NO: 2342539 - RNA, 12 nt, Human
cuccagggcugg

SEQ ID NO: 2342540 - RNA, 13 nt, Human
cuccagggcugga

SEQ ID NO: 2342541 - RNA, 14 nt, Human
cuccagggcuggac

SEQ ID NO: 2342542 - RNA, 15 nt, Human
cuccagggcuggacu

SEQ ID NO: 2342543 - RNA, 16 nt, Human
cuccagggcuggacug

SEQ ID NO: 2342544 - RNA, 21 nt, Human
cuccagggcuggacugaggcc

SEQ ID NO: 2342545 - RNA, 14 nt, Human
cuccaggggcugcu

SEQ ID NO: 2342546 - RNA, 15 nt, Human
cuccaggggcugcuu

SEQ ID NO: 2342547 - RNA, 18 nt, Human
cuccaggggcugcuuccu

SEQ ID NO: 2342548 - RNA, 17 nt, Human
cuccagggcuggacuga

SEQ ID NO: 2342549 - RNA, 18 nt, Human
cuccagggcuggacugag

SEQ ID NO: 2342550 - RNA, 19 nt, Human
cuccagggcuggacugagg

SEQ ID NO: 2342551 - RNA, 20 nt, Human
cuccagggcuggacugaggc

SEQ ID NO: 2342552 - RNA, 21 nt, Human
cuccccauuagagucagccuu

SEQ ID NO: 2342553 - RNA, 21 nt, Human
cuccccauguguccugguucc

SEQ ID NO: 2342554 - RNA, 18 nt, Human
cuccccauguguccuggu

SEQ ID NO: 2342555 - RNA, 20 nt, Human
cuccccauguguccugguuc

SEQ ID NO: 2342556 - RNA, 16 nt, Human
cuccccauuagcuuuc

SEQ ID NO: 2342557 - RNA, 17 nt, Human
cuccccauuucccaucu

SEQ ID NO: 2342558 - RNA, 18 nt, Human
cuccccauuucccaucug

SEQ ID NO: 2342559 - RNA, 19 nt, Human
cuccccauuucccaucugc

SEQ ID NO: 2342560 - RNA, 22 nt, Human
cuccccauuucccaucugcacc

SEQ ID NO: 2342561 - RNA, 20 nt, Human
cuccccauuucccaucugca

SEQ ID NO: 2342562 - RNA, 21 nt, Human
cuccccauuucccaucugcac

SEQ ID NO: 2342563 - RNA, 14 nt, Human
cuccccaugugucc

SEQ ID NO: 2342564 - RNA, 17 nt, Human
cuccccauggagccagc

SEQ ID NO: 2342565 - RNA, 12 nt, Human
cuccccauggag

SEQ ID NO: 2342566 - RNA, 19 nt, Human
cuccccaugauguuuagaa

SEQ ID NO: 2342567 - RNA, 14 nt, Human
cucccacgugggag

SEQ ID NO: 2342568 - RNA, 15 nt, Human
cucccacgugggaga

SEQ ID NO: 2342569 - RNA, 23 nt, Human
cucccacccccuucucugcucca

SEQ ID NO: 2342570 - RNA, 23 nt, Human
cucccaccucccccucccccuuc

SEQ ID NO: 2342571 - RNA, 12 nt, Human
cucccaccucug

SEQ ID NO: 2342572 - RNA, 13 nt, Human
cucccaccucugu

SEQ ID NO: 2342573 - RNA, 14 nt, Human
cucccaccucugug

SEQ ID NO: 2342574 - RNA, 15 nt, Human
cucccaccucuguga

SEQ ID NO: 2342575 - RNA, 17 nt, Human
cucccaccucugugacc

SEQ ID NO: 2342576 - RNA, 18 nt, Human
cucccaccucugugaccu

SEQ ID NO: 2342577 - RNA, 19 nt, Human
cucccaccucugugaccuc

SEQ ID NO: 2342578 - RNA, 20 nt, Human
cucccaccucugugaccuca

SEQ ID NO: 2342579 - RNA, 21 nt, Human
cucccaccucugugaccucag

SEQ ID NO: 2342580 - RNA, 16 nt, Human
cuccagggccacgugc

SEQ ID NO: 2342581 - RNA, 21 nt, Human
cuccacuucuuguuccccacu

SEQ ID NO: 2342582 - RNA, 13 nt, Human
cuccacugucacc

SEQ ID NO: 2342583 - RNA, 18 nt, Human
cuccacugucacccucca

SEQ ID NO: 2342584 - RNA, 23 nt, Human
cuccacuuggucugugagaugcu

SEQ ID NO: 2342585 - RNA, 16 nt, Human
cuccacuuucuagcca

SEQ ID NO: 2342586 - RNA, 19 nt, Human
cuccacuuucuagccagag

SEQ ID NO: 2342587 - RNA, 20 nt, Human
cuccacuuucuagccagagg

SEQ ID NO: 2342588 - RNA, 20 nt, Human
cucguugacuggcugugugu

SEQ ID NO: 2342589 - RNA, 14 nt, Human
cucguuaauuugua

SEQ ID NO: 2342590 - RNA, 21 nt, Human
cucgugguaggacuguagaaa

SEQ ID NO: 2342591 - RNA, 16 nt, Human
cucgugguccccaaca

SEQ ID NO: 2342592 - RNA, 14 nt, Human
cucguguauccugg

SEQ ID NO: 2342593 - RNA, 15 nt, Human
cucguguauccuggg

SEQ ID NO: 2342594 - RNA, 16 nt, Human
cucguguauccugggg

SEQ ID NO: 2342595 - RNA, 17 nt, Human
cucguguauccuggggc

SEQ ID NO: 2342596 - RNA, 18 nt, Human
cucguguauccuggggcu

SEQ ID NO: 2342597 - RNA, 19 nt, Human
cucguguauccuggggcuc

SEQ ID NO: 2342598 - RNA, 20 nt, Human
cucguguauccuggggcucc

SEQ ID NO: 2342599 - RNA, 17 nt, Human
cucgugguaggacugua

SEQ ID NO: 2342600 - RNA, 21 nt, Human
cucuaaagaguuuauuuuaag

SEQ ID NO: 2342601 - RNA, 18 nt, Human
cucuaaagcaauaauggu

SEQ ID NO: 2342602 - RNA, 23 nt, Human
cucguugacuggcuguguguugg

SEQ ID NO: 2342603 - RNA, 21 nt, Human
cucguuuuucuucuuaagacu

SEQ ID NO: 2342604 - RNA, 19 nt, Human
cucguuucaaaaacacagu

SEQ ID NO: 2342605 - RNA, 17 nt, Human
cucuaaaauagccacuu

SEQ ID NO: 2342606 - RNA, 18 nt, Human
cucuaaaagguucaggga

SEQ ID NO: 2342607 - RNA, 16 nt, Human
cucuaaaagguucagg

SEQ ID NO: 2342608 - RNA, 17 nt, Human
cucuaaaagguucaggg

SEQ ID NO: 2342609 - RNA, 13 nt, Human
cucuaaaagaucc

SEQ ID NO: 2342610 - RNA, 20 nt, Human
cucuaaaagauccuuuuuaa

SEQ ID NO: 2342611 - RNA, 22 nt, Human
cucuauauuuagauuguuaaaa

SEQ ID NO: 2342612 - RNA, 11 nt, Human
cucuauauuua

SEQ ID NO: 2342613 - RNA, 15 nt, Human
cucuauagcaccagg

SEQ ID NO: 2342614 - RNA, 15 nt, Human
cucuaucaccaagga

SEQ ID NO: 2342615 - RNA, 13 nt, Human
cucuaucauuaaa

SEQ ID NO: 2342616 - RNA, 15 nt, Human
cucuaucauuaaagu

SEQ ID NO: 2342617 - RNA, 16 nt, Human
cucuaucauuaaaguu

SEQ ID NO: 2342618 - RNA, 18 nt, Human
cucuaucauuaaaguucu

SEQ ID NO: 2342619 - RNA, 14 nt, Human
cucuaucauuuaau

SEQ ID NO: 2342620 - RNA, 15 nt, Human
cucuaucauuuaaua

SEQ ID NO: 2342621 - RNA, 21 nt, Human
cucuaucauuuaauaauauac

SEQ ID NO: 2342622 - RNA, 23 nt, Human
cucuaucauuuaauaauauacuu

SEQ ID NO: 2342623 - RNA, 22 nt, Human
cucucacauguuuagaguugca

SEQ ID NO: 2342624 - RNA, 13 nt, Human
cucucacauuacu

SEQ ID NO: 2342625 - RNA, 14 nt, Human
cucucacauuacug

SEQ ID NO: 2342626 - RNA, 12 nt, Human
cucucaccuccu

SEQ ID NO: 2342627 - RNA, 16 nt, Human
cucucaccuguacucu

SEQ ID NO: 2342628 - RNA, 22 nt, Human
cucucaauuuuugguugaauaa

SEQ ID NO: 2342629 - RNA, 19 nt, Human
cucucaauuuuugguugaa

SEQ ID NO: 2342630 - RNA, 14 nt, Human
cucucaauuuuugg

SEQ ID NO: 2342631 - RNA, 13 nt, Human
cucucaauuuuug

SEQ ID NO: 2342632 - RNA, 14 nt, Human
cucucaggaucaag

SEQ ID NO: 2342633 - RNA, 20 nt, Human
cucucaggagcacaggcagc

SEQ ID NO: 2342634 - RNA, 21 nt, Human
cucucaggagcacaggcagcu

SEQ ID NO: 2342635 - RNA, 16 nt, Human
cucucaggcaugccug

SEQ ID NO: 2342636 - RNA, 17 nt, Human
cucucaggaccaaagcu

SEQ ID NO: 2342637 - RNA, 13 nt, Human
cucucaggagcac

SEQ ID NO: 2342638 - RNA, 15 nt, Human
cucucaggagcacag

SEQ ID NO: 2342639 - RNA, 16 nt, Human
cucucaggagcacagg

SEQ ID NO: 2342640 - RNA, 17 nt, Human
cucucaggagcacaggc

SEQ ID NO: 2342641 - RNA, 18 nt, Human
cucucaggagcacaggca

SEQ ID NO: 2342642 - RNA, 19 nt, Human
cucucaggagcacaggcag

SEQ ID NO: 2342643 - RNA, 17 nt, Human
cucucagcucagcgcca

SEQ ID NO: 2342644 - RNA, 13 nt, Human
cucucagcuccag

SEQ ID NO: 2342645 - RNA, 15 nt, Human
cucucagcuccaggu

SEQ ID NO: 2342646 - RNA, 15 nt, Human
cucucacuaaacuuu

SEQ ID NO: 2342647 - RNA, 12 nt, Human
cucucagcucca

SEQ ID NO: 2342648 - RNA, 21 nt, Human
cucucacuaaacuuuacccaa

SEQ ID NO: 2342649 - RNA, 16 nt, Human
cucucagcucagcgcc

SEQ ID NO: 2342650 - RNA, 15 nt, Human
cucgaacuggcugca

SEQ ID NO: 2342651 - RNA, 13 nt, Human
cucgaacuggcug

SEQ ID NO: 2342652 - RNA, 14 nt, Human
cucgaacuggcugc

SEQ ID NO: 2342653 - RNA, 15 nt, Human
cuccuggguugagcu

SEQ ID NO: 2342654 - RNA, 16 nt, Human
cuccuggguugagcug

SEQ ID NO: 2342655 - RNA, 22 nt, Human
cuccuggguugagcuguugccu

SEQ ID NO: 2342656 - RNA, 21 nt, Human
cuccuggguuuuguauucucu

SEQ ID NO: 2342657 - RNA, 23 nt, Human
cuccuggggguucuuucuuccuc

SEQ ID NO: 2342658 - RNA, 14 nt, Human
cuccuggggguucu

SEQ ID NO: 2342659 - RNA, 18 nt, Human
cuccuggggguucuuucu

SEQ ID NO: 2342660 - RNA, 14 nt, Human
cuccugggcccucu

SEQ ID NO: 2342661 - RNA, 12 nt, Human
cuccugggcccu

SEQ ID NO: 2342662 - RNA, 20 nt, Human
cuccuggggguucuuucuuc

SEQ ID NO: 2342663 - RNA, 22 nt, Human
cuccuggggguucuuucuuccu

SEQ ID NO: 2342664 - RNA, 17 nt, Human
cuccuaaaguagacuuc

SEQ ID NO: 2342665 - RNA, 22 nt, Human
cuccguuagcuccuguggcccc

SEQ ID NO: 2342666 - RNA, 12 nt, Human
cuccguuggcca

SEQ ID NO: 2342667 - RNA, 20 nt, Human
cuccguuggccacuccgaga

SEQ ID NO: 2342668 - RNA, 17 nt, Human
cuccguuagcuccugug

SEQ ID NO: 2342669 - RNA, 18 nt, Human
cuccguuagcuccugugg

SEQ ID NO: 2342670 - RNA, 21 nt, Human
cuccguuagcuccuguggccc

SEQ ID NO: 2342671 - RNA, 19 nt, Human
cuccucucugcccuaaugc

SEQ ID NO: 2342672 - RNA, 16 nt, Human
cuccucugcugcuggc

SEQ ID NO: 2342673 - RNA, 18 nt, Human
cuccucugcugcuggcug

SEQ ID NO: 2342674 - RNA, 15 nt, Human
cuccucucugcccua

SEQ ID NO: 2342675 - RNA, 14 nt, Human
cuccucucugcccu

SEQ ID NO: 2342676 - RNA, 13 nt, Human
cuccucucugccc

SEQ ID NO: 2342677 - RNA, 13 nt, Human
cuccucuccugga

SEQ ID NO: 2342678 - RNA, 14 nt, Human
cuccucuccuggag

SEQ ID NO: 2342679 - RNA, 15 nt, Human
cuccucuccuggagg

SEQ ID NO: 2342680 - RNA, 16 nt, Human
cuccucuccuggagga

SEQ ID NO: 2342681 - RNA, 12 nt, Human
cuccuaagagag

SEQ ID NO: 2342682 - RNA, 20 nt, Human
cuccuacccaccgcccuugc

SEQ ID NO: 2342683 - RNA, 16 nt, Human
cuccuacaccuaacuc

SEQ ID NO: 2342684 - RNA, 12 nt, Human
cuccuacagccc

SEQ ID NO: 2342685 - RNA, 22 nt, Human
cuccugggccccucaucugcuc

SEQ ID NO: 2342686 - RNA, 17 nt, Human
cuccugggaucugcucg

SEQ ID NO: 2342687 - RNA, 15 nt, Human
cuccugggaucugcu

SEQ ID NO: 2342688 - RNA, 16 nt, Human
cuccugggaucugcuc

SEQ ID NO: 2342689 - RNA, 19 nt, Human
cuccuggagccuuugaaua

SEQ ID NO: 2342690 - RNA, 18 nt, Human
cuccuggcccacugcauc

SEQ ID NO: 2342691 - RNA, 16 nt, Human
cuccuggcccacugca

SEQ ID NO: 2342692 - RNA, 12 nt, Human
cuccucucugcc

SEQ ID NO: 2342693 - RNA, 20 nt, Human
cuccucuccuggaggauugc

SEQ ID NO: 2342694 - RNA, 16 nt, Human
cuccucugucugcccu

SEQ ID NO: 2342695 - RNA, 18 nt, Human
cuccucugugaagcauuc

SEQ ID NO: 2342696 - RNA, 12 nt, Human
cuccucugugaa

SEQ ID NO: 2342697 - RNA, 13 nt, Human
cuccucugugacc

SEQ ID NO: 2342698 - RNA, 23 nt, Human
cuccucuuaaaaaauaaaaacug

SEQ ID NO: 2342699 - RNA, 21 nt, Human
cuccucuuaaaaaauaaaaac

SEQ ID NO: 2342700 - RNA, 15 nt, Human
cuccuggacuccugc

SEQ ID NO: 2342701 - RNA, 14 nt, Human
cuccuggacugccu

SEQ ID NO: 2342702 - RNA, 22 nt, Human
cuccuggacugccuugaauauc

SEQ ID NO: 2342703 - RNA, 12 nt, Human
cuccuggagccu

SEQ ID NO: 2342704 - RNA, 10 nt, Human
cuccuggagg

SEQ ID NO: 2342705 - RNA, 20 nt, Human
cuccucuuaaaaaauaaaaa

SEQ ID NO: 2342706 - RNA, 19 nt, Human
cuccucuuaaaaaauaaaa

SEQ ID NO: 2342707 - RNA, 22 nt, Human
cuccucugugaccaaugucuug

SEQ ID NO: 2342708 - RNA, 23 nt, Human
cuccucugugaccaaugucuuga

SEQ ID NO: 2342709 - RNA, 18 nt, Human
cuccucuucaacugacca

SEQ ID NO: 2342710 - RNA, 23 nt, Human
cuccucuucaacugaccagccuc

SEQ ID NO: 2342711 - RNA, 19 nt, Human
cucccccacccccucccca

SEQ ID NO: 2342712 - RNA, 14 nt, Human
cucccccacccccu

SEQ ID NO: 2342713 - RNA, 23 nt, Human
cucccccaacccccaccccacac

SEQ ID NO: 2342714 - RNA, 21 nt, Human
cucccccaacccccaccccac

SEQ ID NO: 2342715 - RNA, 15 nt, Human
cucccccagccccau

SEQ ID NO: 2342716 - RNA, 20 nt, Human
cucccccagccccauccucu

SEQ ID NO: 2342717 - RNA, 11 nt, Human
cucccccaucc

SEQ ID NO: 2342718 - RNA, 12 nt, Human
cucccccauccu

SEQ ID NO: 2342719 - RNA, 15 nt, Human
cucccccauccuccc

SEQ ID NO: 2342720 - RNA, 22 nt, Human
cucccccagccccauccucugu

SEQ ID NO: 2342721 - RNA, 16 nt, Human
cuccccccacugcagg

SEQ ID NO: 2342722 - RNA, 15 nt, Human
cuccccccacugcag

SEQ ID NO: 2342723 - RNA, 13 nt, Human
cucccccccaugc

SEQ ID NO: 2342724 - RNA, 15 nt, Human
cucccccccaugcac

SEQ ID NO: 2342725 - RNA, 14 nt, Human
cuccccccacugca

SEQ ID NO: 2342726 - RNA, 13 nt, Human
cuccccccacugc

SEQ ID NO: 2342727 - RNA, 17 nt, Human
cucccccauccuccccu

SEQ ID NO: 2342728 - RNA, 13 nt, Human
cucccccaucucu

SEQ ID NO: 2342729 - RNA, 11 nt, Human
cucaauauuuu

SEQ ID NO: 2342730 - RNA, 18 nt, Human
cucaauauuccugaauga

SEQ ID NO: 2342731 - RNA, 15 nt, Human
cucaauaugcuuaca

SEQ ID NO: 2342732 - RNA, 16 nt, Human
cucaauauuccugaau

SEQ ID NO: 2342733 - RNA, 15 nt, Human
cucaauaagccuugu

SEQ ID NO: 2342734 - RNA, 14 nt, Human
cucaauaaaguaca

SEQ ID NO: 2342735 - RNA, 16 nt, Human
cucaauaaaugauucu

SEQ ID NO: 2342736 - RNA, 14 nt, Human
cucaauaagccuug

SEQ ID NO: 2342737 - RNA, 14 nt, Human
cucaaacuccugac

SEQ ID NO: 2342738 - RNA, 13 nt, Human
cucaaacuccuga

SEQ ID NO: 2342739 - RNA, 20 nt, Human
cucaaacucuugaccucagg

SEQ ID NO: 2342740 - RNA, 13 nt, Human
cucaaaccuccuc

SEQ ID NO: 2342741 - RNA, 18 nt, Human
cucaaacacugcaggcau

SEQ ID NO: 2342742 - RNA, 14 nt, Human
cucaaaccuccucu

SEQ ID NO: 2342743 - RNA, 15 nt, Human
cucaaaccuccucuu

SEQ ID NO: 2342744 - RNA, 15 nt, Human
cucaaaccuguuuaa

SEQ ID NO: 2342745 - RNA, 15 nt, Human
cucaaacguggcuuu

SEQ ID NO: 2342746 - RNA, 18 nt, Human
cucaaaccuguuuaaaua

SEQ ID NO: 2342747 - RNA, 21 nt, Human
cucaaaccuguuuaaauauuu

SEQ ID NO: 2342748 - RNA, 13 nt, Human
cucaaacguggcu

SEQ ID NO: 2342749 - RNA, 16 nt, Human
cucaaugagcucuucc

SEQ ID NO: 2342750 - RNA, 12 nt, Human
cucaaugagcuc

SEQ ID NO: 2342751 - RNA, 12 nt, Human
cucaaugcucau

SEQ ID NO: 2342752 - RNA, 13 nt, Human
cucaaugcucaua

SEQ ID NO: 2342753 - RNA, 16 nt, Human
cucaaugcagccagac

SEQ ID NO: 2342754 - RNA, 15 nt, Human
cucaaugcucauaac

SEQ ID NO: 2342755 - RNA, 13 nt, Human
cucaauggacugg

SEQ ID NO: 2342756 - RNA, 13 nt, Human
cucaaugcacuga

SEQ ID NO: 2342757 - RNA, 15 nt, Human
cucaaugcacugaca

SEQ ID NO: 2342758 - RNA, 13 nt, Human
cucaauuucuccc

SEQ ID NO: 2342759 - RNA, 15 nt, Human
cucaauuucucccca

SEQ ID NO: 2342760 - RNA, 16 nt, Human
cucaauuucuccccag

SEQ ID NO: 2342761 - RNA, 19 nt, Human
cucaauucuucccuaucuu

SEQ ID NO: 2342762 - RNA, 14 nt, Human
cucaauucuucccu

SEQ ID NO: 2342763 - RNA, 21 nt, Human
cucaauuuuugguugaauaaa

SEQ ID NO: 2342764 - RNA, 12 nt, Human
cucaauuuuugg

SEQ ID NO: 2342765 - RNA, 23 nt, Human
cucaauuuuaucccucaccugua

SEQ ID NO: 2342766 - RNA, 11 nt, Human
cucacaaaaga

SEQ ID NO: 2342767 - RNA, 22 nt, Human
cucacaaaccaugcaaaugcua

SEQ ID NO: 2342768 - RNA, 20 nt, Human
cucaaaagcacccuugacgu

SEQ ID NO: 2342769 - RNA, 13 nt, Human
cucaaaauauuug

SEQ ID NO: 2342770 - RNA, 20 nt, Human
cuauuuuuuauuuuacuuuu

SEQ ID NO: 2342771 - RNA, 16 nt, Human
cucaaaacuuaacaua

SEQ ID NO: 2342772 - RNA, 20 nt, Human
cucaaaacuuaacauauuua

SEQ ID NO: 2342773 - RNA, 16 nt, Human
cucaaaaugacagcca

SEQ ID NO: 2342774 - RNA, 18 nt, Human
cucaaaauauuuguacau

SEQ ID NO: 2342775 - RNA, 17 nt, Human
cucaaacaacacuggug

SEQ ID NO: 2342776 - RNA, 16 nt, Human
cucaaacaacacuggu

SEQ ID NO: 2342777 - RNA, 15 nt, Human
cucaaacacaguuac

SEQ ID NO: 2342778 - RNA, 21 nt, Human
cucaaacacaguuacacuugu

SEQ ID NO: 2342779 - RNA, 12 nt, Human
cucaaacacugc

SEQ ID NO: 2342780 - RNA, 13 nt, Human
cucaaacacugca

SEQ ID NO: 2342781 - RNA, 22 nt, Human
cucaaaccaaaucacugaacuu

SEQ ID NO: 2342782 - RNA, 19 nt, Human
cucaaaccaaaucacugaa

SEQ ID NO: 2342783 - RNA, 18 nt, Human
cucaaaccaaaucacuga

SEQ ID NO: 2342784 - RNA, 14 nt, Human
cucaaacacugcag

SEQ ID NO: 2342785 - RNA, 16 nt, Human
cucaaacacugcaggc

SEQ ID NO: 2342786 - RNA, 20 nt, Human
cuauuuuuuuucuguuauau

SEQ ID NO: 2342787 - RNA, 21 nt, Human
cuauuuuuuuucuguuauaua

SEQ ID NO: 2342788 - RNA, 21 nt, Human
cucaaaaaaaaaaaaaugcac

SEQ ID NO: 2342789 - RNA, 17 nt, Human
cucaaaaaaagaaaaag

SEQ ID NO: 2342790 - RNA, 18 nt, Human
cucaaaagcugggcaggu

SEQ ID NO: 2342791 - RNA, 23 nt, Human
cucaaaauaccaugccauuuaaa

SEQ ID NO: 2342792 - RNA, 15 nt, Human
cuauuuuuguagaag

SEQ ID NO: 2342793 - RNA, 18 nt, Human
cuauuuuuuauuuuacuu

SEQ ID NO: 2342794 - RNA, 22 nt, Human
cuauuuuugucuuauauauauu

SEQ ID NO: 2342795 - RNA, 14 nt, Human
cuauuuuuguagaa

SEQ ID NO: 2342796 - RNA, 13 nt, Human
cuauuuuuguaga

SEQ ID NO: 2342797 - RNA, 12 nt, Human
cuauuuuuguag

SEQ ID NO: 2342798 - RNA, 16 nt, Human
cuauuaagauuuccaa

SEQ ID NO: 2342799 - RNA, 17 nt, Human
cuauuaagauuuccaag

SEQ ID NO: 2342800 - RNA, 23 nt, Human
cuauuaagaggcagaaaauugca

SEQ ID NO: 2342801 - RNA, 21 nt, Human
cuauuaaggugauauauuuaa

SEQ ID NO: 2342802 - RNA, 23 nt, Human
cuauuaaggugauauauuuaaaa

SEQ ID NO: 2342803 - RNA, 19 nt, Human
cuauuaaggugauauauuu

SEQ ID NO: 2342804 - RNA, 23 nt, Human
cuauuaagauuuccaagugccaa

SEQ ID NO: 2342805 - RNA, 18 nt, Human
cuaucucccccagcccca

SEQ ID NO: 2342806 - RNA, 15 nt, Human
cuauuaaaggaauaa

SEQ ID NO: 2342807 - RNA, 16 nt, Human
cuaucucccccagccc

SEQ ID NO: 2342808 - RNA, 17 nt, Human
cuaucucccccagcccc

SEQ ID NO: 2342809 - RNA, 16 nt, Human
cuagcaucucaugagu

SEQ ID NO: 2342810 - RNA, 19 nt, Human
cuagccaccgccuccuaca

SEQ ID NO: 2342811 - RNA, 12 nt, Human
cuagccagagga

SEQ ID NO: 2342812 - RNA, 13 nt, Human
cuagccagaggag

SEQ ID NO: 2342813 - RNA, 15 nt, Human
cuagccagaggagag

SEQ ID NO: 2342814 - RNA, 15 nt, Human
cuagccagacacucu

SEQ ID NO: 2342815 - RNA, 19 nt, Human
cuagccagacacucugcuc

SEQ ID NO: 2342816 - RNA, 22 nt, Human
cuagccagacacucugcucugc

SEQ ID NO: 2342817 - RNA, 23 nt, Human
cuagccagacacucugcucugcc

SEQ ID NO: 2342818 - RNA, 13 nt, Human
cuaguuugauuaa

SEQ ID NO: 2342819 - RNA, 22 nt, Human
cuaguuguuugauucagacagc

SEQ ID NO: 2342820 - RNA, 23 nt, Human
cuaguuguuugauucagacagcu

SEQ ID NO: 2342821 - RNA, 21 nt, Human
cuaguuugauuaaauucuugc

SEQ ID NO: 2342822 - RNA, 13 nt, Human
cuaguuugcauuc

SEQ ID NO: 2342823 - RNA, 22 nt, Human
cuaguuugauuaaauucuugca

SEQ ID NO: 2342824 - RNA, 17 nt, Human
cuaguuuucuccuccca

SEQ ID NO: 2342825 - RNA, 16 nt, Human
cuaguuuucuccuccc

SEQ ID NO: 2342826 - RNA, 23 nt, Human
cuaguuuuaaaaaaauaaaacau

SEQ ID NO: 2342827 - RNA, 19 nt, Human
cuaguuuucaguuuguaua

SEQ ID NO: 2342828 - RNA, 20 nt, Human
cuaguuuucaguuuguauau

SEQ ID NO: 2342829 - RNA, 19 nt, Human
cuaguuuucuccucccagg

SEQ ID NO: 2342830 - RNA, 18 nt, Human
cuaguuuucuccucccag

SEQ ID NO: 2342831 - RNA, 22 nt, Human
cuaguuuucaguuuguauauac

SEQ ID NO: 2342832 - RNA, 17 nt, Human
cuaucuacucuccucau

SEQ ID NO: 2342833 - RNA, 16 nt, Human
cuaucuacucuccuca

SEQ ID NO: 2342834 - RNA, 15 nt, Human
cuaucuacucuccuc

SEQ ID NO: 2342835 - RNA, 16 nt, Human
cuaucuaacccuccca

SEQ ID NO: 2342836 - RNA, 15 nt, Human
cuaucucccccagcc

SEQ ID NO: 2342837 - RNA, 14 nt, Human
cuaucuaaauguug

SEQ ID NO: 2342838 - RNA, 17 nt, Human
cuaucguaaaauuaaga

SEQ ID NO: 2342839 - RNA, 17 nt, Human
cuaucuaacccucccau

SEQ ID NO: 2342840 - RNA, 18 nt, Human
cuaucguaaaauuaagaa

SEQ ID NO: 2342841 - RNA, 22 nt, Human
cuaucauuuuuguacaguuugc

SEQ ID NO: 2342842 - RNA, 13 nt, Human
cuauccacagaga

SEQ ID NO: 2342843 - RNA, 15 nt, Human
cuauccacagagagu

SEQ ID NO: 2342844 - RNA, 17 nt, Human
cuauccacagagagucc

SEQ ID NO: 2342845 - RNA, 19 nt, Human
cuauccacagagaguccca

SEQ ID NO: 2342846 - RNA, 23 nt, Human
cuauccacagagagucccacugc

SEQ ID NO: 2342847 - RNA, 13 nt, Human
cuaucauuuaaua

SEQ ID NO: 2342848 - RNA, 15 nt, Human
cuaucauuuaauaau

SEQ ID NO: 2342849 - RNA, 17 nt, Human
cuaucauuuaauaauau

SEQ ID NO: 2342850 - RNA, 21 nt, Human
cuaucauuuaauaauauacuu

SEQ ID NO: 2342851 - RNA, 15 nt, Human
cuaucauuuuuguac

SEQ ID NO: 2342852 - RNA, 16 nt, Human
cuaucauuuuuguaca

SEQ ID NO: 2342853 - RNA, 17 nt, Human
cuaucauuuuuguacag

SEQ ID NO: 2342854 - RNA, 18 nt, Human
cuaucauuuuuguacagu

SEQ ID NO: 2342855 - RNA, 23 nt, Human
cuaucauuuuuguacaguuugcu

SEQ ID NO: 2342856 - RNA, 18 nt, Human
cuaucaugucaaacguga

SEQ ID NO: 2342857 - RNA, 17 nt, Human
cuaucauuaaaguucua

SEQ ID NO: 2342858 - RNA, 15 nt, Human
cuaucauuaaaguuc

SEQ ID NO: 2342859 - RNA, 16 nt, Human
cuaucauuaaaguucu

SEQ ID NO: 2342860 - RNA, 13 nt, Human
cuaucauuaaagu

SEQ ID NO: 2342861 - RNA, 14 nt, Human
cuaucauuaaaguu

SEQ ID NO: 2342862 - RNA, 16 nt, Human
cuacucauuccccggg

SEQ ID NO: 2342863 - RNA, 23 nt, Human
cuacucaggaggcugaggcagaa

SEQ ID NO: 2342864 - RNA, 16 nt, Human
cuacucaggaggcuga

SEQ ID NO: 2342865 - RNA, 15 nt, Human
cuacucaggaggcug

SEQ ID NO: 2342866 - RNA, 13 nt, Human
cuacucaggaggc

SEQ ID NO: 2342867 - RNA, 22 nt, Human
cuacucagcagcccuccucacc

SEQ ID NO: 2342868 - RNA, 21 nt, Human
cuacucagcagcccuccucac

SEQ ID NO: 2342869 - RNA, 20 nt, Human
cuacucagcagcccuccuca

SEQ ID NO: 2342870 - RNA, 19 nt, Human
cuacucagcagcccuccuc

SEQ ID NO: 2342871 - RNA, 18 nt, Human
cuacucagcagcccuccu

SEQ ID NO: 2342872 - RNA, 17 nt, Human
cuacucagcagcccucc

SEQ ID NO: 2342873 - RNA, 16 nt, Human
cuacucagcagcccuc

SEQ ID NO: 2342874 - RNA, 15 nt, Human
cuacucagcagcccu

SEQ ID NO: 2342875 - RNA, 18 nt, Human
cuagaacaucccugccag

SEQ ID NO: 2342876 - RNA, 17 nt, Human
cuagaaccuagaagggc

SEQ ID NO: 2342877 - RNA, 13 nt, Human
cuagaacucccuu

SEQ ID NO: 2342878 - RNA, 12 nt, Human
cuagaacucccu

SEQ ID NO: 2342879 - RNA, 22 nt, Human
cuagaagauuuugaaauuuuua

SEQ ID NO: 2342880 - RNA, 18 nt, Human
cuagaaccuagaagggcu

SEQ ID NO: 2342881 - RNA, 18 nt, Human
cuagaaccuggaagggcu

SEQ ID NO: 2342882 - RNA, 14 nt, Human
cuagaaccuggaga

SEQ ID NO: 2342883 - RNA, 15 nt, Human
cuagaaccuggagag

SEQ ID NO: 2342884 - RNA, 14 nt, Human
cuagaaccuggagg

SEQ ID NO: 2342885 - RNA, 16 nt, Human
cuagaaccuggagggc

SEQ ID NO: 2342886 - RNA, 18 nt, Human
cuagaaccuggagggcug

SEQ ID NO: 2342887 - RNA, 21 nt, Human
cuagaagaugaauacaaacaa

SEQ ID NO: 2342888 - RNA, 23 nt, Human
cuagaagggccaguccugccugg

SEQ ID NO: 2342889 - RNA, 20 nt, Human
cuagaagggccaguccugcc

SEQ ID NO: 2342890 - RNA, 17 nt, Human
cuagaagugggccagga

SEQ ID NO: 2342891 - RNA, 21 nt, Human
cuagaagggcuagaaccugga

SEQ ID NO: 2342892 - RNA, 22 nt, Human
cuagaagggcuagaaccuggag

SEQ ID NO: 2342893 - RNA, 12 nt, Human
cuagaagccaag

SEQ ID NO: 2342894 - RNA, 13 nt, Human
cuagaagccaagg

SEQ ID NO: 2342895 - RNA, 16 nt, Human
cuagaagccaagggaa

SEQ ID NO: 2342896 - RNA, 20 nt, Human
cuagaagccaagggaaaggg

SEQ ID NO: 2342897 - RNA, 21 nt, Human
cuagaagccaagggaaagggg

SEQ ID NO: 2342898 - RNA, 13 nt, Human
cuagaaggccaca

SEQ ID NO: 2342899 - RNA, 14 nt, Human
cuagaaggccacau

SEQ ID NO: 2342900 - RNA, 19 nt, Human
cuagaaggccacaugucac

SEQ ID NO: 2342901 - RNA, 21 nt, Human
cuagaagugggccaggacagg

SEQ ID NO: 2342902 - RNA, 15 nt, Human
cuagaaguuacugaa

SEQ ID NO: 2342903 - RNA, 20 nt, Human
cuagaagugggccaggacag

SEQ ID NO: 2342904 - RNA, 19 nt, Human
cuagaagugggccaggaca

SEQ ID NO: 2342905 - RNA, 22 nt, Human
cuagaauuuauucaauuccucu

SEQ ID NO: 2342906 - RNA, 23 nt, Human
cuagaauuuauucaauuccucug

SEQ ID NO: 2342907 - RNA, 15 nt, Human
cuagaauuuauucaa

SEQ ID NO: 2342908 - RNA, 14 nt, Human
cuagaauuucuuua

SEQ ID NO: 2342909 - RNA, 16 nt, Human
cuagacaacccugcaa

SEQ ID NO: 2342910 - RNA, 15 nt, Human
cuagacaacccugca

SEQ ID NO: 2342911 - RNA, 13 nt, Human
cuagacaacccug

SEQ ID NO: 2342912 - RNA, 19 nt, Human
cuagaauuuuaagugcuuu

SEQ ID NO: 2342913 - RNA, 21 nt, Human
cuagaauuugauuauuaacau

SEQ ID NO: 2342914 - RNA, 14 nt, Human
cuagcauaucugcc

SEQ ID NO: 2342915 - RNA, 15 nt, Human
cuagcauaucugccu

SEQ ID NO: 2342916 - RNA, 17 nt, Human
cuagcauaucugccuuu

SEQ ID NO: 2342917 - RNA, 18 nt, Human
cuagcauaucugccuuua

SEQ ID NO: 2342918 - RNA, 21 nt, Human
cuagcauaugaguuucauagc

SEQ ID NO: 2342919 - RNA, 13 nt, Human
cuagcaucccuga

SEQ ID NO: 2342920 - RNA, 23 nt, Human
cuagcauacguacacauuuuauu

SEQ ID NO: 2342921 - RNA, 21 nt, Human
cuagcauacguacacauuuua

SEQ ID NO: 2342922 - RNA, 22 nt, Human
cuaauucuuugaccuguuggga

SEQ ID NO: 2342923 - RNA, 21 nt, Human
cuaauucuuugaccuguuggg

SEQ ID NO: 2342924 - RNA, 23 nt, Human
cuaaguuuuuauggcuuuugugc

SEQ ID NO: 2342925 - RNA, 20 nt, Human
cuaaguuauaguauaucugg

SEQ ID NO: 2342926 - RNA, 16 nt, Human
cuaaguuauaguauau

SEQ ID NO: 2342927 - RNA, 21 nt, Human
cuaagugguacuaacuuuccu

SEQ ID NO: 2342928 - RNA, 14 nt, Human
cuaagugugaacug

SEQ ID NO: 2342929 - RNA, 20 nt, Human
cuaaguuuuuauggcuuuug

SEQ ID NO: 2342930 - RNA, 23 nt, Human
cuaagugauccucccaccucagc

SEQ ID NO: 2342931 - RNA, 23 nt, Human
cuaaguaaaaccacagcaguuga

SEQ ID NO: 2342932 - RNA, 22 nt, Human
cuaaguaaaaccacagcaguug

SEQ ID NO: 2342933 - RNA, 22 nt, Human
cgugugugcaagugucugugug

SEQ ID NO: 2342934 - RNA, 21 nt, Human
cguguguggguggauauaaau

SEQ ID NO: 2342935 - RNA, 17 nt, Human
cguguguccaugugugu

SEQ ID NO: 2342936 - RNA, 18 nt, Human
cguguguagaguuaagaa

SEQ ID NO: 2342937 - RNA, 20 nt, Human
cguguggcucacguguguga

SEQ ID NO: 2342938 - RNA, 22 nt, Human
cguguggcaauagugggcccuc

SEQ ID NO: 2342939 - RNA, 19 nt, Human
cguguguacacgggacuga

SEQ ID NO: 2342940 - RNA, 12 nt, Human
cguguguagagu

SEQ ID NO: 2342941 - RNA, 15 nt, Human
cguguguagaguuaa

SEQ ID NO: 2342942 - RNA, 22 nt, Human
cguguguagaguuaagaagcug

SEQ ID NO: 2342943 - RNA, 12 nt, Human
cgugugugugcg

SEQ ID NO: 2342944 - RNA, 22 nt, Human
cguguguggguggauauaaaua

SEQ ID NO: 2342945 - RNA, 23 nt, Human
cguguguggguggauauaaauau

SEQ ID NO: 2342946 - RNA, 11 nt, Human
cgugugugugu

SEQ ID NO: 2342947 - RNA, 20 nt, Human
cuaaguaaaaccacagcagu

SEQ ID NO: 2342948 - RNA, 21 nt, Human
cuaauuuauccugaaauuuca

SEQ ID NO: 2342949 - RNA, 21 nt, Human
cuaauuuaucuugucucuggg

SEQ ID NO: 2342950 - RNA, 23 nt, Human
cuaauuuauccugaaauuucaga

SEQ ID NO: 2342951 - RNA, 17 nt, Human
cuaauuucaaaaugcuu

SEQ ID NO: 2342952 - RNA, 19 nt, Human
cuaauuucaaaaauauaac

SEQ ID NO: 2342953 - RNA, 21 nt, Human
cuaauuucaaaaauauaacuu

SEQ ID NO: 2342954 - RNA, 14 nt, Human
cuaauuuauuuugu

SEQ ID NO: 2342955 - RNA, 22 nt, Human
cuaauuucaaaaugcuuuuuau

SEQ ID NO: 2342956 - RNA, 19 nt, Human
cuaauuucaaaaugcuuuu

SEQ ID NO: 2342957 - RNA, 18 nt, Human
cuaauuucaaaaugcuuu

SEQ ID NO: 2342958 - RNA, 15 nt, Human
cuacaaaaacacagc

SEQ ID NO: 2342959 - RNA, 19 nt, Human
cuacaguccucccaucuca

SEQ ID NO: 2342960 - RNA, 18 nt, Human
cuacaaaaacacagcaag

SEQ ID NO: 2342961 - RNA, 17 nt, Human
cuacaaaaacacagcaa

SEQ ID NO: 2342962 - RNA, 16 nt, Human
cuacaaaaacacagca

SEQ ID NO: 2342963 - RNA, 13 nt, Human
cuacaguguacag

SEQ ID NO: 2342964 - RNA, 21 nt, Human
cuacagugguuuuauacugaa

SEQ ID NO: 2342965 - RNA, 20 nt, Human
cuacaguuggaaauccaucc

SEQ ID NO: 2342966 - RNA, 22 nt, Human
cuacaguugaaaaacagcugag

SEQ ID NO: 2342967 - RNA, 22 nt, Human
cuacaguuguuuuuugaaaaca

SEQ ID NO: 2342968 - RNA, 20 nt, Human
cuacaguuguuuuuugaaaa

SEQ ID NO: 2342969 - RNA, 21 nt, Human
cuacaguuggaaauccaucca

SEQ ID NO: 2342970 - RNA, 22 nt, Human
cuacaguuggaaauccauccag

SEQ ID NO: 2342971 - RNA, 18 nt, Human
cuacauacuauggaauuu

SEQ ID NO: 2342972 - RNA, 21 nt, Human
cuacaguugaaaaacagcuga

SEQ ID NO: 2342973 - RNA, 19 nt, Human
cuacaguugaaaaacagcu

SEQ ID NO: 2342974 - RNA, 20 nt, Human
cuacaguccucccaucucac

SEQ ID NO: 2342975 - RNA, 14 nt, Human
cuaauuucuccucc

SEQ ID NO: 2342976 - RNA, 15 nt, Human
cuaauuucuccuccc

SEQ ID NO: 2342977 - RNA, 14 nt, Human
cuacagugguuuua

SEQ ID NO: 2342978 - RNA, 16 nt, Human
cuacagugguuuuaua

SEQ ID NO: 2342979 - RNA, 23 nt, Human
cuacaugcagcccaugcccaccu

SEQ ID NO: 2342980 - RNA, 21 nt, Human
cuacaugcagcccaugcccac

SEQ ID NO: 2342981 - RNA, 17 nt, Human
cuacaugcagcccaugc

SEQ ID NO: 2342982 - RNA, 15 nt, Human
cuacaugcagcccau

SEQ ID NO: 2342983 - RNA, 14 nt, Human
cuacaugcagccca

SEQ ID NO: 2342984 - RNA, 18 nt, Human
cuacaucuuuuuucacaa

SEQ ID NO: 2342985 - RNA, 22 nt, Human
cuacaugaucuagagccaguua

SEQ ID NO: 2342986 - RNA, 13 nt, Human
cuacaugaaacag

SEQ ID NO: 2342987 - RNA, 16 nt, Human
cuaccuggucucuccu

SEQ ID NO: 2342988 - RNA, 19 nt, Human
cuaccugcucuccaagucu

SEQ ID NO: 2342989 - RNA, 12 nt, Human
cuaccugcucuc

SEQ ID NO: 2342990 - RNA, 19 nt, Human
cuaccugccacucacacag

SEQ ID NO: 2342991 - RNA, 22 nt, Human
cuaccugccacucacacagcca

SEQ ID NO: 2342992 - RNA, 14 nt, Human
cuaccugccacuca

SEQ ID NO: 2342993 - RNA, 15 nt, Human
cuaccugccacucac

SEQ ID NO: 2342994 - RNA, 16 nt, Human
cuaccugccacucaca

SEQ ID NO: 2342995 - RNA, 17 nt, Human
cuacaucgcccuccaca

SEQ ID NO: 2342996 - RNA, 15 nt, Human
cuacaucgcccucca

SEQ ID NO: 2342997 - RNA, 23 nt, Human
cuacauacuuucauccugacucu

SEQ ID NO: 2342998 - RNA, 10 nt, Human
cuacaugaaa

SEQ ID NO: 2342999 - RNA, 16 nt, Human
cuacaucuucugccuu

SEQ ID NO: 2343000 - RNA, 14 nt, Human
cuacaucuucugcc

SEQ ID NO: 2343001 - RNA, 15 nt, Human
cuacaucuucugccu

SEQ ID NO: 2343002 - RNA, 18 nt, Human
cuacaugagguacugaga

SEQ ID NO: 2343003 - RNA, 20 nt, Human
cuacaugagguacugagagu

SEQ ID NO: 2343004 - RNA, 12 nt, Human
cuaccugugccu

SEQ ID NO: 2343005 - RNA, 13 nt, Human
cuaccugugccug

SEQ ID NO: 2343006 - RNA, 15 nt, Human
cuaccugcucuccaa

SEQ ID NO: 2343007 - RNA, 19 nt, Human
cuaccuuaaaauguaaaac

SEQ ID NO: 2343008 - RNA, 21 nt, Human
cuaccuguucagugucccggg

SEQ ID NO: 2343009 - RNA, 22 nt, Human
cuaccuguucagugucccgggc

SEQ ID NO: 2343010 - RNA, 16 nt, Human
cuaccuguucaguguc

SEQ ID NO: 2343011 - RNA, 20 nt, Human
cuaccuguucagugucccgg

SEQ ID NO: 2343012 - RNA, 14 nt, Human
cuacgcucuccuuu

SEQ ID NO: 2343013 - RNA, 14 nt, Human
cuacgccugcaugu

SEQ ID NO: 2343014 - RNA, 15 nt, Human
cuacgccaaucaagg

SEQ ID NO: 2343015 - RNA, 17 nt, Human
cuaccuuuguauucucu

SEQ ID NO: 2343016 - RNA, 21 nt, Human
cuacgcucuccuuucuuucua

SEQ ID NO: 2343017 - RNA, 13 nt, Human
cuacgccugccuc

SEQ ID NO: 2343018 - RNA, 22 nt, Human
cuacgcugaagauggcauccug

SEQ ID NO: 2343019 - RNA, 13 nt, Human
cuacgugugauuu

SEQ ID NO: 2343020 - RNA, 17 nt, Human
cuacguacaugugaggc

SEQ ID NO: 2343021 - RNA, 17 nt, Human
cuacguuaccaggcagg

SEQ ID NO: 2343022 - RNA, 14 nt, Human
cuacgugugauuuu

SEQ ID NO: 2343023 - RNA, 18 nt, Human
cuacgugugauuuuucug

SEQ ID NO: 2343024 - RNA, 16 nt, Human
cuacguuaagggaagg

SEQ ID NO: 2343025 - RNA, 19 nt, Human
cuacguuccuauugucauu

SEQ ID NO: 2343026 - RNA, 21 nt, Human
cuacucagaagccugaggcug

SEQ ID NO: 2343027 - RNA, 19 nt, Human
cuacucagaagccugaggc

SEQ ID NO: 2343028 - RNA, 17 nt, Human
cuacucagaagccugag

SEQ ID NO: 2343029 - RNA, 16 nt, Human
cuacucagaagccuga

SEQ ID NO: 2343030 - RNA, 13 nt, Human
cuacucagaagcc

SEQ ID NO: 2343031 - RNA, 15 nt, Human
cgcaggaagcugcuc

SEQ ID NO: 2343032 - RNA, 13 nt, Human
cgcaggaagcugc

SEQ ID NO: 2343033 - RNA, 24 nt, Human
cgaucacaacgugcauugugcuuc

SEQ ID NO: 2343034 - RNA, 15 nt, Human
cgauccaccugucuc

SEQ ID NO: 2343035 - RNA, 22 nt, Human
cgaucacaacgugcauugugcu

SEQ ID NO: 2343036 - RNA, 23 nt, Human
cgaucacaacgugcauugugcuu

SEQ ID NO: 2343037 - RNA, 22 nt, Human
cgcaggauucuuccucccuccc

SEQ ID NO: 2343038 - RNA, 18 nt, Human
cgcaggcccccaggugcc

SEQ ID NO: 2343039 - RNA, 13 nt, Human
cgcauucccugag

SEQ ID NO: 2343040 - RNA, 23 nt, Human
cgcauggaguguguauuguuccc

SEQ ID NO: 2343041 - RNA, 13 nt, Human
cgcauucucaugg

SEQ ID NO: 2343042 - RNA, 12 nt, Human
cgcauucccuga

SEQ ID NO: 2343043 - RNA, 19 nt, Human
cgcauggucacacacugau

SEQ ID NO: 2343044 - RNA, 14 nt, Human
cgcaugcggcccag

SEQ ID NO: 2343045 - RNA, 16 nt, Human
cgcaugcggcccagga

SEQ ID NO: 2343046 - RNA, 22 nt, Human
cgcauggaguguguauuguucc

SEQ ID NO: 2343047 - RNA, 18 nt, Human
cgcauggaguguguauug

SEQ ID NO: 2343048 - RNA, 16 nt, Human
cgcauggucacacacu

SEQ ID NO: 2343049 - RNA, 15 nt, Human
cgcaugcccucaauc

SEQ ID NO: 2343050 - RNA, 22 nt, Human
cgcaugcccccucgugccaguc

SEQ ID NO: 2343051 - RNA, 20 nt, Human
cgcaugcccccucgugccag

SEQ ID NO: 2343052 - RNA, 21 nt, Human
cgcaugcccccucgugccagu

SEQ ID NO: 2343053 - RNA, 13 nt, Human
cgcaugcccccuc

SEQ ID NO: 2343054 - RNA, 14 nt, Human
cgcaugcccccucg

SEQ ID NO: 2343055 - RNA, 16 nt, Human
cgcaugcccccucgug

SEQ ID NO: 2343056 - RNA, 18 nt, Human
cgcaugcccccucgugcc

SEQ ID NO: 2343057 - RNA, 18 nt, Human
cgcaggcgggaaaagcag

SEQ ID NO: 2343058 - RNA, 13 nt, Human
cgcaggcuggccc

SEQ ID NO: 2343059 - RNA, 14 nt, Human
cgagucacugccuc

SEQ ID NO: 2343060 - RNA, 12 nt, Human
cgagucacugcc

SEQ ID NO: 2343061 - RNA, 20 nt, Human
cgagucaauccccucauuca

SEQ ID NO: 2343062 - RNA, 16 nt, Human
cgagucaauccccuca

SEQ ID NO: 2343063 - RNA, 20 nt, Human
cgagucaaaacucaaaugcu

SEQ ID NO: 2343064 - RNA, 13 nt, Human
cgaguauguguuu

SEQ ID NO: 2343065 - RNA, 21 nt, Human
cgaguauguguuugugugugu

SEQ ID NO: 2343066 - RNA, 18 nt, Human
cgagucacugccucuccc

SEQ ID NO: 2343067 - RNA, 15 nt, Human
cgagucacugccucu

SEQ ID NO: 2343068 - RNA, 22 nt, Human
cgagucacugccucucccuggc

SEQ ID NO: 2343069 - RNA, 19 nt, Human
cgagucauucguucugugg

SEQ ID NO: 2343070 - RNA, 18 nt, Human
cgagucauucguucugug

SEQ ID NO: 2343071 - RNA, 14 nt, Human
cgauagugguggug

SEQ ID NO: 2343072 - RNA, 15 nt, Human
cgaguccaagcuggg

SEQ ID NO: 2343073 - RNA, 14 nt, Human
cgaguccaagcugg

SEQ ID NO: 2343074 - RNA, 13 nt, Human
cgaguccaagcug

SEQ ID NO: 2343075 - RNA, 20 nt, Human
cgagucauucguucugugga

SEQ ID NO: 2343076 - RNA, 18 nt, Human
cgaucacaacgugcauug

SEQ ID NO: 2343077 - RNA, 15 nt, Human
cgauauacucuagau

SEQ ID NO: 2343078 - RNA, 13 nt, Human
cgccucccacugg

SEQ ID NO: 2343079 - RNA, 21 nt, Human
cgccuccauuuuuguuguuau

SEQ ID NO: 2343080 - RNA, 16 nt, Human
cgccuccauccaaggc

SEQ ID NO: 2343081 - RNA, 18 nt, Human
cgccuccauccaaggcca

SEQ ID NO: 2343082 - RNA, 14 nt, Human
cgccucccacuggg

SEQ ID NO: 2343083 - RNA, 19 nt, Human
cgccucuucuucuucagaa

SEQ ID NO: 2343084 - RNA, 13 nt, Human
cgccucugcuggc

SEQ ID NO: 2343085 - RNA, 13 nt, Human
cgccucugcauuc

SEQ ID NO: 2343086 - RNA, 15 nt, Human
cgccucuuucaagca

SEQ ID NO: 2343087 - RNA, 20 nt, Human
cgccugacaaccacuggucu

SEQ ID NO: 2343088 - RNA, 21 nt, Human
cgccugacaaccacuggucug

SEQ ID NO: 2343089 - RNA, 23 nt, Human
cgccugacaaccacuggucugua

SEQ ID NO: 2343090 - RNA, 18 nt, Human
cgccugcaaacgcugccu

SEQ ID NO: 2343091 - RNA, 19 nt, Human
cgccugcaaacgcugccug

SEQ ID NO: 2343092 - RNA, 20 nt, Human
cgccugaggaacccuuacag

SEQ ID NO: 2343093 - RNA, 16 nt, Human
cgccugagcucacucg

SEQ ID NO: 2343094 - RNA, 20 nt, Human
cgccuggcagaacugagcuc

SEQ ID NO: 2343095 - RNA, 12 nt, Human
cgccuggccuga

SEQ ID NO: 2343096 - RNA, 11 nt, Human
cgccuggcaga

SEQ ID NO: 2343097 - RNA, 19 nt, Human
cgccuggcugcagccugcg

SEQ ID NO: 2343098 - RNA, 23 nt, Human
cgccacugcacuccagccugggc

SEQ ID NO: 2343099 - RNA, 22 nt, Human
cgccacugcacuccagccuggg

SEQ ID NO: 2343100 - RNA, 21 nt, Human
cgccacugcacuccagccugg

SEQ ID NO: 2343101 - RNA, 23 nt, Human
cgccacucgcuucccccauagcc

SEQ ID NO: 2343102 - RNA, 20 nt, Human
cgccacugcacuccggccug

SEQ ID NO: 2343103 - RNA, 15 nt, Human
cgccacucgcuuccc

SEQ ID NO: 2343104 - RNA, 21 nt, Human
cgccaacaacuucuccauccu

SEQ ID NO: 2343105 - RNA, 15 nt, Human
cgccacuccugaacc

SEQ ID NO: 2343106 - RNA, 22 nt, Human
cgccacuacacuccagccugag

SEQ ID NO: 2343107 - RNA, 17 nt, Human
cgccaaauaaugucucu

SEQ ID NO: 2343108 - RNA, 14 nt, Human
cgcauucucaugga

SEQ ID NO: 2343109 - RNA, 20 nt, Human
cgcauucucauggagaaguu

SEQ ID NO: 2343110 - RNA, 19 nt, Human
cgccaaauaaugucucugu

SEQ ID NO: 2343111 - RNA, 19 nt, Human
cgccaagcaaccugggucc

SEQ ID NO: 2343112 - RNA, 21 nt, Human
cgccacuacacuccagccuga

SEQ ID NO: 2343113 - RNA, 21 nt, Human
cgccuaguggggucucccucu

SEQ ID NO: 2343114 - RNA, 20 nt, Human
cgccuaguggggucucccuc

SEQ ID NO: 2343115 - RNA, 18 nt, Human
cgccagauggggccucug

SEQ ID NO: 2343116 - RNA, 15 nt, Human
cgccagauggggccu

SEQ ID NO: 2343117 - RNA, 22 nt, Human
cgccucaaugugguugcaaggc

SEQ ID NO: 2343118 - RNA, 17 nt, Human
cgccucaaugugguugc

SEQ ID NO: 2343119 - RNA, 16 nt, Human
cgccuaugaucccagc

SEQ ID NO: 2343120 - RNA, 17 nt, Human
cgccucaggaaugggcu

SEQ ID NO: 2343121 - RNA, 19 nt, Human
cgccucaggaaugggcugu

SEQ ID NO: 2343122 - RNA, 15 nt, Human
cgccucaguaagacg

SEQ ID NO: 2343123 - RNA, 13 nt, Human
cgccuccaggcca

SEQ ID NO: 2343124 - RNA, 14 nt, Human
ccuuuacggacacc

SEQ ID NO: 2343125 - RNA, 19 nt, Human
ccuuuacggacacccccuc

SEQ ID NO: 2343126 - RNA, 13 nt, Human
ccuuuaaugcauc

SEQ ID NO: 2343127 - RNA, 19 nt, Human
ccuuuacacucaggcuuuc

SEQ ID NO: 2343128 - RNA, 21 nt, Human
ccuuuacacauucggcucccu

SEQ ID NO: 2343129 - RNA, 23 nt, Human
ccuuuacacauucggcucccugg

SEQ ID NO: 2343130 - RNA, 15 nt, Human
ccuuuacuugaccuc

SEQ ID NO: 2343131 - RNA, 18 nt, Human
ccuuuacucauagcacuu

SEQ ID NO: 2343132 - RNA, 21 nt, Human
ccuuucaauaggaaaaacuga

SEQ ID NO: 2343133 - RNA, 22 nt, Human
ccuuucacaaaauuuuauuccu

SEQ ID NO: 2343134 - RNA, 21 nt, Human
ccuuucacaaaauuuuauucc

SEQ ID NO: 2343135 - RNA, 17 nt, Human
ccuuucaccccagggcc

SEQ ID NO: 2343136 - RNA, 15 nt, Human
ccuuucacaaccuuc

SEQ ID NO: 2343137 - RNA, 22 nt, Human
ccuuucagaugucuucugccug

SEQ ID NO: 2343138 - RNA, 20 nt, Human
ccuuucagaugucuucugcc

SEQ ID NO: 2343139 - RNA, 21 nt, Human
ccuuucagaugucuucugccu

SEQ ID NO: 2343140 - RNA, 13 nt, Human
ccuuucagauguc

SEQ ID NO: 2343141 - RNA, 14 nt, Human
ccuuucagaugucu

SEQ ID NO: 2343142 - RNA, 17 nt, Human
ccuuucagaugucuucu

SEQ ID NO: 2343143 - RNA, 19 nt, Human
ccuuucagaugucuucugc

SEQ ID NO: 2343144 - RNA, 21 nt, Human
ccuuucaccccagggccugag

SEQ ID NO: 2343145 - RNA, 19 nt, Human
ccuuucaccccagggccug

SEQ ID NO: 2343146 - RNA, 16 nt, Human
ccuuuugcaccccucc

SEQ ID NO: 2343147 - RNA, 14 nt, Human
ccuuuuuacucccc

SEQ ID NO: 2343148 - RNA, 12 nt, Human
ccuuuugcaccc

SEQ ID NO: 2343149 - RNA, 14 nt, Human
ccuuuugcaccccu

SEQ ID NO: 2343150 - RNA, 15 nt, Human
ccuuuugcaccccuc

SEQ ID NO: 2343151 - RNA, 17 nt, Human
ccuuuugagugccuuac

SEQ ID NO: 2343152 - RNA, 15 nt, Human
ccuuuugagugccuu

SEQ ID NO: 2343153 - RNA, 16 nt, Human
ccuuuugaggagcccc

SEQ ID NO: 2343154 - RNA, 21 nt, Human
ccuuuugaggagccccagcua

SEQ ID NO: 2343155 - RNA, 23 nt, Human
ccuuuugaggagccccagcuacc

SEQ ID NO: 2343156 - RNA, 20 nt, Human
ccuuucagggaauuucagga

SEQ ID NO: 2343157 - RNA, 12 nt, Human
ccuuucauauuu

SEQ ID NO: 2343158 - RNA, 14 nt, Human
ccuuucauuuacug

SEQ ID NO: 2343159 - RNA, 16 nt, Human
ccuuucauuuacugug

SEQ ID NO: 2343160 - RNA, 12 nt, Human
ccuuucagggaa

SEQ ID NO: 2343161 - RNA, 15 nt, Human
ccuuucagcugugaa

SEQ ID NO: 2343162 - RNA, 12 nt, Human
ccuuucagcugu

SEQ ID NO: 2343163 - RNA, 16 nt, Human
ccuuuccaaggcuucu

SEQ ID NO: 2343164 - RNA, 22 nt, Human
ccuuucauuuacuguggcuucu

SEQ ID NO: 2343165 - RNA, 18 nt, Human
ccuuucauuuacuguggc

SEQ ID NO: 2343166 - RNA, 19 nt, Human
ccuuucauuuacuguggcu

SEQ ID NO: 2343167 - RNA, 21 nt, Human
ccuugcccagggcucagccug

SEQ ID NO: 2343168 - RNA, 19 nt, Human
ccuugcccggauucuggga

SEQ ID NO: 2343169 - RNA, 18 nt, Human
ccuugcccggauucuggg

SEQ ID NO: 2343170 - RNA, 22 nt, Human
ccuugcccagggcucagccugg

SEQ ID NO: 2343171 - RNA, 22 nt, Human
ccuugcucuccccugcccugcu

SEQ ID NO: 2343172 - RNA, 18 nt, Human
ccuugcccuugcccugac

SEQ ID NO: 2343173 - RNA, 13 nt, Human
ccuugcucucccu

SEQ ID NO: 2343174 - RNA, 14 nt, Human
ccuugcucucccuc

SEQ ID NO: 2343175 - RNA, 15 nt, Human
ccuugcucucccucu

SEQ ID NO: 2343176 - RNA, 17 nt, Human
ccuugcucucccucuuc

SEQ ID NO: 2343177 - RNA, 18 nt, Human
ccuugcucucccucuucu

SEQ ID NO: 2343178 - RNA, 20 nt, Human
ccuugcucuccccugcccug

SEQ ID NO: 2343179 - RNA, 23 nt, Human
ccuugcccugaccucccagcccu

SEQ ID NO: 2343180 - RNA, 15 nt, Human
ccuugcccuugcccu

SEQ ID NO: 2343181 - RNA, 16 nt, Human
ccuugcccuugcccug

SEQ ID NO: 2343182 - RNA, 17 nt, Human
ccuugcccuugcccuga

SEQ ID NO: 2343183 - RNA, 16 nt, Human
ccuugccgucuaccug

SEQ ID NO: 2343184 - RNA, 12 nt, Human
ccuugcccugac

SEQ ID NO: 2343185 - RNA, 13 nt, Human
ccuugcccugacc

SEQ ID NO: 2343186 - RNA, 14 nt, Human
ccuugcccugaccu

SEQ ID NO: 2343187 - RNA, 15 nt, Human
ccuugcccugaccuc

SEQ ID NO: 2343188 - RNA, 16 nt, Human
ccuugcccugaccucc

SEQ ID NO: 2343189 - RNA, 19 nt, Human
ccuugcccugaccucccag

SEQ ID NO: 2343190 - RNA, 22 nt, Human
ccuugcccugaccucccagccc

SEQ ID NO: 2343191 - RNA, 16 nt, Human
ccuugcuguccuaggc

SEQ ID NO: 2343192 - RNA, 17 nt, Human
ccuugcucugcaggcac

SEQ ID NO: 2343193 - RNA, 17 nt, Human
ccuugcuggaaaaccca

SEQ ID NO: 2343194 - RNA, 21 nt, Human
ccuugcugguuuucuggaugg

SEQ ID NO: 2343195 - RNA, 19 nt, Human
ccuugcucucccucuucuc

SEQ ID NO: 2343196 - RNA, 13 nt, Human
ccuugcucugcac

SEQ ID NO: 2343197 - RNA, 22 nt, Human
ccuugcuugcugccuucuggau

SEQ ID NO: 2343198 - RNA, 14 nt, Human
ccuuuaagagaaau

SEQ ID NO: 2343199 - RNA, 18 nt, Human
ccuugcuuaugacaucac

SEQ ID NO: 2343200 - RNA, 22 nt, Human
ccuugcuggacggggacugggg

SEQ ID NO: 2343201 - RNA, 15 nt, Human
cgacagcccccucug

SEQ ID NO: 2343202 - RNA, 16 nt, Human
cgacagagcgagacuu

SEQ ID NO: 2343203 - RNA, 12 nt, Human
cgacagccuggc

SEQ ID NO: 2343204 - RNA, 13 nt, Human
cgacagccuggca

SEQ ID NO: 2343205 - RNA, 22 nt, Human
cgacagagggaagaaaagagcu

SEQ ID NO: 2343206 - RNA, 14 nt, Human
cgacagccuggcac

SEQ ID NO: 2343207 - RNA, 19 nt, Human
cgaccccgucacagccuca

SEQ ID NO: 2343208 - RNA, 19 nt, Human
cgaccccaucugcccagga

SEQ ID NO: 2343209 - RNA, 18 nt, Human
cgaccccaucugcccagg

SEQ ID NO: 2343210 - RNA, 17 nt, Human
cgaauuuuucagaugau

SEQ ID NO: 2343211 - RNA, 15 nt, Human
cgacaaccgaugcuc

SEQ ID NO: 2343212 - RNA, 12 nt, Human
cgacaaugcaaa

SEQ ID NO: 2343213 - RNA, 21 nt, Human
cgacaaccgaugcuccagcca

SEQ ID NO: 2343214 - RNA, 18 nt, Human
cgacaaccgaugcuccag

SEQ ID NO: 2343215 - RNA, 12 nt, Human
cgacaagugcug

SEQ ID NO: 2343216 - RNA, 13 nt, Human
cgacaaugcaaac

SEQ ID NO: 2343217 - RNA, 17 nt, Human
ccuuuuuuaaaaaugca

SEQ ID NO: 2343218 - RNA, 13 nt, Human
ccuuuuuuaagau

SEQ ID NO: 2343219 - RNA, 14 nt, Human
ccuuuuuuaagauu

SEQ ID NO: 2343220 - RNA, 18 nt, Human
ccuuuuuuaagauuuuuc

SEQ ID NO: 2343221 - RNA, 19 nt, Human
ccuuuuuuaagauuuuucu

SEQ ID NO: 2343222 - RNA, 20 nt, Human
ccuuuuuuaagauuuuucuc

SEQ ID NO: 2343223 - RNA, 16 nt, Human
ccuuuuuuaaaaaugc

SEQ ID NO: 2343224 - RNA, 13 nt, Human
ccuuuuuuaaaaa

SEQ ID NO: 2343225 - RNA, 21 nt, Human
ccuuuuuuagaguugauacua

SEQ ID NO: 2343226 - RNA, 16 nt, Human
cgaauuuuaaaagaug

SEQ ID NO: 2343227 - RNA, 21 nt, Human
ccuuuuuuaagauuuuucuca

SEQ ID NO: 2343228 - RNA, 23 nt, Human
ccuuuuuacuccccuugagcuga

SEQ ID NO: 2343229 - RNA, 15 nt, Human
ccuuuuuacuccccu

SEQ ID NO: 2343230 - RNA, 22 nt, Human
ccuuuuucauauguugcucagu

SEQ ID NO: 2343231 - RNA, 21 nt, Human
ccuuuuugguacuuauuacug

SEQ ID NO: 2343232 - RNA, 23 nt, Human
ccuuuuugguacuuauuacugcu

SEQ ID NO: 2343233 - RNA, 13 nt, Human
ccuuuuugaagug

SEQ ID NO: 2343234 - RNA, 22 nt, Human
ccuuuuugaaguguaggcagac
